United States Patent Application Publication US 2005/0221354 A1 - sequence listing, part 2

SEQ ID NO: 8554 - DNA, 6540 bp, control sequence
gggactaccctaaataaggatgaggggcggcggtcagccgccttttttctattacatgtcagcgcggaagcggatttttattttcatcaagcgtaaatccttctccgagcacatcgtgaacatcgcttaccgctacaaaggcatggggatcaatggagttaatcacgcttttcagcatcaccaattcatttttcggcaccacacaataaagtacatctatatcctcttttgtgtaggaaccttgtcctttcaaaatggtgacgccccgttccatttcttcaagaatctttttctgaatcaggtcgtttttcgaagagatgatcgtagcgcctttagcagcgtatccgccttcctgaataaaatcgattaatcttgccgctacaaatacagctaccagcgtatacatcgcttctttataggagagataagtaagcaaagacaaaatgatgacgcaggcatcgaaagcaaacatcgttctgcccatcggaatcccaaaatacttattcactaaacgtgcgatgatatcaacaccgcctgtcgtaccgccgaacttaaaaataatacccagtccggctccgatgaatacgccggcaaataaagcggcgagcgctaagtcgtgctgaaggggcatatggatttcatatcgctgaaagatgctgaggaacaaagacaaggctacagtgccgacaagggtataaacaaacattgtcctgccgagcatgtggaaaagggcataaagcaaaagtgtaatacctgtaaaaccgccctcagccagattgttctgcatattgaaatgaaccaagccaaatgaaaaaattgccgctccgattaaaataaaaaatatgttttttaatctaatttctccaagcatcacacaaaaccccttttccttccattagatagcgtttatattatagtggatgaaaaagaaaacagcaaacgtgcttaaacatttgtcaaacgtatctgaattagctaacatgtaagaggatgataggaggtttcgttcagtgagtgataaaacaatgaaagacatacaggctgaagtagaccgttacataggccaatttaaagaaggatattttagcccgctggccatgatggcgaggctgactgaagaactgggcgagcttgccagagaagtgaatcaccgttatggagaaaaaccaaaaaaagcgactgaagatgataaaagcatggaagaggaaataggcgatgtgctatttgtattggtttgtttagccaactctcttgatatctctttagaggaagctcacgaccgagtcatgcataaatttaatacaagagataaagatcgctggaccagaaaagaagaaggaaagtagaggagatcaagatgtcaaacgaaacaattaaattagtcattgcgggaccgcgtggaagaatggggcaggaagctgttaaattggcagaacgaacaccacattttgaccttgtaggggccatagaccatacatacgatcagcaaaaattatctgatgtgatgcctgttgagtcagatgctttcatttacacagatatccatgcctgttttacagaaacacaaccggatgtcttgattgatttaacaacgcccgaaatcggaaaagtacatacaaaaattgcattagagcacggagtccgtccagttgtcggaacaaccggtttctcagaagctgatttaaaagagctcacatctttaacagaagaaaaagggatcggagccatcatcgcgccaaattttgcgctcggtgcgatactgatgatgaaattttcaaaaatggctgccaactattttgaggatgttgagattattgagcttcatcatgaccagaagcttgacgcaccaagcggaactgcgcttaaaacagcggaaatgatttcagaagtccgtaaagaaaagcagcaaggacatccggatgaaaaagaaattctcccaggagcaagaggagcggagcaaaacggtattcgcttgcacaggcttcagatacgccatgattcttataaccgtgcttctttcatgtcaggcgttaaactgtcagtcgaacaagtcatgaagattgatcagcttgtgtatggtttagaaaatatcattgattagacggggggataaacaatgaaaattgctttgatcgcgcatgacaagaaaaaacaggatatggttcaatttacgactgcctatcgggatattttaaagaatcatgatctatacgcaaccggaaccacagggttgaaaattcatgaggcgacaggtcttcaaattgaacgttttcaatccggccctttagggggagaccagcaaatcggtgcactgatcgctgccaatgcactcgatcttgtcatttttttgcgcgacccgctgaccgcgcagccgcatgaaccggatgtctcggcattaatccgtttatgtgatgtgtattccattccgctcgccacaaatatgggtactgcggaaattcttgtgcgcacacttgatgaaggtgttttcgaattccgtgaccttcttcggggagaagagccgaatgtataatgctgacgttcttgcttttggcgcccacagtgatgatgtcgagatcggaatgggcggcacaatagcgaagtttgtcaaacaggaaaaaaaagtaatgatatgcgatttgacagaagcggaactctcttctaacggtacggtcagtttgcgtaaagaagaagcagctgaagcagcccgcatattaggcgcagataaaagaattcagctaacgcttccagaccgcggcctaataatgagtgatcaggcaattcggtcaattgtcactgtcatcagaatctgtcggccaaaagcggtttttatgccgtataaaaaggatcgccatccggatcacggcaatgcggctgcactggtggaagaagcgatcttttccgccggaatccataaatataaagacgaaaaaagccttccggcgcataaagtcagcaaggtttactattatatgataaatggttttcatcagccggattttgttattgatatctcggatacaatagaggcaaagaaacaaagcctcaacgcctacaaaagccagtttatcccgtcaaaggattccgtttctactcctctgacgaatgggtatattgaaatcgttgaagcgagagaaaagctttacggtaaagaagcgggcgtggagtatgccgaagtttcttttccaaacggatgctgatgcttgatcatgatgtgcttgggggcgaacaatgagaaaactagggaagcagcttgctgaaaagggacatgaaatccatttcatcacatcaagcattccgtttagactgaatacatatcatcccaatattcattttcatgaagttgaggttaatcaatatgctgtttttaagtatcctccgtatgatttgacattggcaagcaaaatcgctgaggtggcggaacgggagaatttagacattatccatgctcactatgctctcccgcatgccgtttgcgcctatcttgcaaaacaaatgctgaaacgcaatatcggcattgttaccactttgcatggcacggatatcacggtgttaggttatgatccgtctctaaaagatctgatccgttttgctattgagtcatcagacagggtgacggccgtctcctcagcgcttgcggctgaaacatacgatttaattaaaccggagaaaaaaattgaaacgatttataactttatagacgagcgcgtgtatctgaagaaaaacacagcggcaattaaagagaaacatggaattttaccagatgaaaaagtcgtcatccatgtgtccaacttcagaaaagttaaacgcgtgcaggatgtcatccgtgtgttccgcaatatcgctggcaaaacgaaagcgaagctgcttttagtcggagacggtccggagaaatcgacagcctgcgagcttatcagaaaatatggcttggaagaccaagtcttaatgcttggaaatcaagaccgtgttgaagatctttattctattagcgatttgaagctgctgctatctgaaaaagaaagctttggccttgtcctgcttgaagcgatggcttgcggagtgccttgtattggaacaaacattggcggtatccctgaggttataaaaaacaatgtgagcggatttttggtggatgtcggtgatgttacggccgcaacagcccgcgcgatgagcattttagaagatgaacagctaagcaatcgttttacaaaggcggcaatagagatgcttgaaaatgaattttcttctaaaaaaattgtcagccagtatgaacagatttatgccgatttagcagaaccggagtgatcacatggaaaaagtttttatcaaagcacttcccgtgctccgcatcttaatcgaagcgggccatcaggcttattttgtcgggggcgcagttcgtgacagctatatgaaacgaacgatcggagatgtcgatatcgcgacagatgcggcacctgatcaagtagaacggctgtttcagcggactgttgatgtaggcaaagatgaatctgattatgttgatttcagaagaccgtcagaagtgcaatttatctcatcattagaagaggatctaaaacgcagagatttaacgatcaatgcgatggccatgacagcggacgggaaggtgcttgattattttggcggcaagaaagatattgatcagaaagtgattcgaaccgttggaaagcctgaggatagatttcaagaggatgcgcttcgtatgctgagagccgtacgctttatgagccagcttggctttacgctttcaccggaaacagaagaagccattgcgaaagaaaaatcactcctctcccatgtttcagtcgaacgaaaaactatagagtttgagaaattgctgcagggaagagcttctcgccaggcgcttcaaacactcattcaaacgagattgtatgaagagcttcctggtttttatcataaacgagaaaacctgatttcaacgagtgagtttccattcttctctttaacatcccgtgaggagctttgggctgctcttttaattaaccttggcatagttttgaaagacgcgccccttttcctgaaagcctggaagctcccgggaaaagtgatcaaggaagccattcacattgccgatacgtttggccagagccttgacgcaatgacaatgtacagagctgggaaaaaagcactgctctcagcggccaaaatatcgcagcttcggcaaaacgaaaaactggatgaaaagaaactgaaggacattcagtacgcttatcaaaacctgccgatcaaaagccttaaggatcttgatatcacgggtaaggacttgcttgcgcttcgaaaccggccggccggaaaatgggtgtcagaagaattacagtggatcgagcaggctgttgtgacagggaagctctccaatcaaaagaaacacatagaggagtggctgaagacatgcggtcaacattaagaaaagaccttattgaattattttctcaggccggcaatgaatttatttccggccaaaaaatcagtgatgctctcggctgttcaagaactgctgtgtggaagcatattgaagagcttcggaaagagggttatgaagtagaagccgttagaagaaaaggatatcggctcatcaaaaaacccggaaaactcagtgaaagcgaaattcgttttggattaaaaacggaagtgatgggccagcatcttatttaccatgacgttctttcaagcacgcaaaaaacggctcatgagctcgcgaataataacgcaccggaaggcacccttgaaggaaacggtgtttggatgagcctgattttgcggcctgacattccgctccaaaaaacaccgcagctgactctgcttgctgcagtagctgttgtgcagggaatagaagaggcagcaggcatccaaacggatattaaatggccaaatgatattttgattaacggaaaaaaaacagtcggtatcctaacggaaatgcaggctgaagaagaccgcgtacgttcagtgatcattgggatcggcattaacgttaaccagcagcctaatgattttccagatgaattgaaggacatcgcgacaagcctcagccaagctgctggggaaaaaattgatcgggccggcgtcatccagcatattttactatgctttgagaaacggtaccgggattatatgacgcacggatttacgccgattaagcttttatgggaaagctatgcgctcggtattggcactaatatgagagccagaacgttaaacggaaccttttacggtaaggcgttaggtatagatgatgaaggcgttctgcttttagaaacgaacgaaggcattaaaaaaatctattctgccgatatcgaattgggctaatgtgttggtacaagcccgttgattttggtatacttccattgggcagtatcgcctgcgaactgcacctattattaaaatagatagacattgcagcagtctgccttgatccaaaaaaggactgggacagagggatgaaactcgccgaactttagaaagtgaagaatccttctcgttgtaacggaaggttttttggcttgc

SEQ ID NO: 8555 - DNA, 6540 bp, control sequence; identical to SEQ ID NO: 8554

SEQ ID NO: 8556 - DNA, 6540 bp, control sequence; identical to SEQ ID NO: 8554

SEQ ID NO: 8557 - DNA, 1612 bp, control sequence
aagcttggcaacaaatgagccgtcttgtcctcatgatactcgttgctttatttcatataaaagggctcgtcatcggatttacagtgctaattatgccatggcaagcatcaaatcccttcagacaccgtacttatggccgctgattccctttaacggaaaggcgctgtggcaggtgcttgtcccgacagcgaaacctggcgcaaaagtaagacccagcatcgttcaccccaaaaatcgcttaaggcagcctaccaattcataatcgcattgaaactgactgaagagtatgataatgtatgtcttaattatgaagggacagtccataaaactgtcctttcatccataagcggagaaagagggaatgacattgttcttacacggcacaagcagacaaaatcaacatggtcatttagaaatcggaggtgtggatgctctctatttagcggagaaatatggtacacctctttacgtatatgatgtggctttaatacgtgagcgtgctaaaagctttaagcaggcgtttatttctgcagggctgaaagcacaggtggcatatgcgagcaaagcattctcatcagtcgcaatgattcagctcgctgaggaagagggactttctttagatgtcgtatccggaggagagctatatacggctgttgcagcaggctttccggcagaacgcatccactttcatggaaacaataagagcagggaagaactgcggatggcgcttgagcaccgcatcggctgcattgtggtggataatttctatgaaatcgcgcttcttgaagacctatgtaaagaaacgggtcactccatcgatgttcttcttcggatcacgcccggagtagaagcgcatacgcatgactacattacaacgggccaggaagattcaaagtttggtttcgatcttcataacggacaaactgaacgggccattgaacaagtattacaatcggaacacattcagctgctgggtgtccattgccatatcggctcgcaaatctttgatacggccggttttgtgttagcagcggaaaaaatcttcaaaaaactagacgaatggagagattcatattcatttgtatccaaggtgctgaatcttggaggaggtttcggtattcgttatacggaagatgatgaaccgcttcatgccactgaatacgttgaaaaaattatcgaagctgtgaaagaaaatgcttcccgttacggttttgacattccggaaatttggatcgaaccgggccgttctctcgtgggagacgcaggcacaactctttatacggttggctctcaaaaagaagtggataagctgtacaatcgtttcatcattcggcgtgcgaattaagaaaggtctcattgcgcctgtaaagcttacgcgtatttctgctccttcaagcacctttagtgcatccagcatatattttggactaaaagagatatttaattcctcaccttcaatttgatccgcaacaattgcttccacaactttaccgatttctggcgaattggaagaaatttcaatggattcagccggttttgcggacagttttacaacgttgttgcgtccctctctagctaaaagagatgcacgatcaatggcctgaaggaattc

SEQ ID NO: 8558 - DNA, 1612 bp, control sequence; identical to SEQ ID NO: 8557

SEQ ID NO: 8559 - DNA, 1612 bp, control sequence; identical to SEQ ID NO: 8557

SEQ ID NO: 8560 - DNA, 3360 bp, control sequence
  misc_feature (2982)..(2982): n is a, c, g, or t
ataatacacacttatacagactcctaaataagaaattaaatgattgggagtgcgaaaatgaaggatgtttcaaaaaatcaagaagaaaatataagcgacacggcattaacaaacgaactgattcatctgcttggccattcccggcatgattggatgaataagctgcagctgattaaaggaaacttaagcttacagaagtatgaccgtgtctttgaaatgattgaagaaatggttatagacgcaaagcacgaatcaaagctctcaaacctgaaaacaccgcatttggcgtttgattttcttacgtttaattggaaaacccattatatgacgcttgaatatgaagttctcggagaaattaaggatttgtcggcttatgatcaaaagctggcgaaactgatgagaaagctgtttcatctgtttgatcaagcagtcagcagagagagtgaaaatcatttaacggtttcgcttcaaacggatcatcctgacagacagctgattctgtaccttgattttcacggcgcctttgccgatccatctgcttttgatgatattcggcagaatggatatgaggacgttgatatcatgcgttttgaaatcacgagtcacgaatgtctgattgaaattgggttggactagcggagtttttaacggtttagaacggaggacattatgtttgtagatcaggtcaaagtatatgtaaaaggcggcgacggcggcaacggtatggttgcgtttcgccgtgaaaaatatgtgccgaaaggcggccctgccggcggtgacggaggaaagggaggagacgtcgtttttgaagtagatgaaggtctccgcaccctgatggattttagatacaaaaaacactttaaagcgattcgcggcgagcatggcatgtccaaaaaccagcacgggcgaaatgctgatgatatggtcattaaagttccgccgggcaccgttgtgacagacgatgatacaaaacaggtcatcgctgatttaacagagcacggacagcgggctgtcattgcaagaggcggaagaggcggaagaggaaatagccgctttgctacaccggctaatcccgcgcctcagctttcagaaaacggcgagccgggaaaagaacgctacattgttcttgaattaaaagtgcttgcagatgtcggacttgtcgggttcccgagtgtgggaaaatctactttgctgtctgttgtctcatctgcaaaaccgaaaattgcggactatcactttacaacgcttgtcccgaatctcggcatggttgaaacggatgacggacgcagctttgtcatggctgatttgccagggctgattgaaggcgcacaccaaggcgtcggactgggccaccagtttttgcgccatattgaacggacgagggttattgttcatgtcattgacatgtcaggcttagaaggccgtgatccatatgatgattatcttacgattaaccaggagctgagcgagtacaatctgcgtctcactgagcgtccgcaaattatcgttgcaaataaaatggacatgccggaggctgcggaaaatctcgaagcctttaaagaaaagctgacggatgattatccggtattcccgatcagtgcggtgacaagagaaggtctgcgtgagcttctgtttgaggttgccaatcagcttgagaacacaccggaattcccgctgtatgacgaggaagagcttacacaaaaccgtgtcatgtacacgatggaaaatgaagaagtgccatttaacattacacgcgatccagacggtgtatttgtgctttcaggagacagccttgagcggttattcaagatgactgatttctcacgtgatgaatcggttaaacggtttgcaagacagatgcgcggaatgggtgttgatgaagcactcagagaacgcggagccaaggatggagatataatcaggcttctggaatttgaatttgaatttattgattaatcaatgttggctgaaaagagagcctggtgccaggctctctattttaaaggggggatgcaaatgaaagaggagacattttatcttgtccgtgaagatgtattgcccgatgcaatgagaaaaacattagaagtcaaaaagctgcttgatcgacaaaaagcagattcagtagcagatgccgttcaaaaggtcgatttaagtagaagtgcgttttataaatacagggatgctgtttttccattctacaccatggtaaaagaacaaattatcacacttttctttcatttggaggataggtcaggtgcgttatctcagcttcttcaggcggtagctgattctggaagcaacgttctttccattcaccagaccattccgcttcaaggcagagcaaatgtgacactgtctatcagtacgtcggcaatggaagaagacattcatacattaatgaataagctcaggaagtttgattttgtagaaaaggttgaaatattaggttcaggtgcataagggagagaaaatcgtcatgaaagtcggttatttaggtccagcagctacatttacacatctagcagtcagttcttgttttcaaaacggcgccgaacatgttgcttaccgcaccattccggagtgtatagatgcagccgttgcaggcgaagttgattttgcttttgttcctttggaaaatgctttagaaggatctgttaatctaacaatagactatttaatacatgaacagcctttgccaatcgtgggtgaaatgacgttgccgattcaccagcacttgctcgtccatccctcaagagagaatgcatggaaagagctcgacaaaatttactcacattcacacgcgattgcgcaatgccataaatttcttcatcgacattttccttccgttccatatgaatacgccaattctaccggggcggcagcaaagtttgtcagtgaccatcccgagctgaatatcggggtcattgccaatgatatggcagcttctacatacgaattaaaaatcgtgaaacgggatatacnggattatagggacaatcatacaagatttattatcctgtctcccgatgaaaacatatcttttgaagtgaattcaaaattgagctctaggcccaaaacgaccttaatggtcatgctgccgcaggatgatcagtccggggcgctgcatagagtgctgtctgcattttcttggagaaatttaaacctgtcaaaaattgagtcacgtccgactaaaaccggattaggccattatttctttattattgatattgagaaagcgtttgatgatgtattgattccaggggccatgcaggagcttgaagcactcggctgcaaagtgaggcttctgggtgcataccagtcttaccaattataaaaaaagcccactagagggcttttttt

SEQ ID NO: 8561 - DNA, 3360 bp, control sequence; identical to SEQ ID NO: 8560
  misc_feature (2982)..(2982): n is a, c, g, or t

SEQ ID NO: 8562 - DNA, 3360 bp, control sequence; identical to SEQ ID NO: 8560
  misc_feature (2982)..(2982): n is a, c, g, or t

SEQ ID NO: 8563 - DNA, 2403 bp, control sequence
gaattcatgtaaaagatgaggttggttcattctcgaaaattacatctgtgttctcagagcggggcgtgacgtttgaaaaaatccttcagctgccaattaaaggccatgatgagttagctgaaatcgtaattgtcacacatcatacatcagaagctgatttcagtgatatcctgcaaaacctaaatgatttggaagtcgttcaagaagtcaaaagcacatatcgtgtagaagggaacggttggagctaatgtggaaaggacttatccatcaatataaagaatttttacctgtaacagatcaaacaccggcgctaactttacatgaaggaaacacacctcttattcacctgccgaagctgtctgagcagctcggaattgagcttcatgtcaaaacggaaggcgtcaatcctacgggatcatttaaagatcgcggaatggttatggctgtggcaaaggcaaaagaagaaggcaatgacacgattatgtgcgcgtcaacaggtaacacttccgctgctgcggcagcatatgcagcccgtgctaacatgaaatgcattgtcatcatcccgaacggaaaaattgcatttggaaaactcgctcaagctgtcatgtacggagccgagattatcgcaattgacggaaactttgacgatgcgcttaaaattgtccgttccatctgtgagaaatcaccgattgcccttgtcaactcagtcaacccttaccgcattgaaggccaaaaaactgctgccttcgaagtgtgcgaacagctgggggaagcgcctgatgttttagcgatcccggtcggaaatgctggaaacatcactgcgtactggaagggcttcaaggaatatcatgagaaaaacggcacaggccttccgaaaatgcgcggctttgaagctgagggtgcggcggcaatcgtgcgcaatgaagtgattgaaaatccggaaacaatagcgacagccattcgtatcggaaacccggcaagctgggacaaagctgtaaaggcagccgaggaatccaatgggaaaattgacgaagtcactgatgatgaaatccttcacgcatatcagctgatcgcccgtgtagaaggcgtgtttgcagaaccaggttcttgcgcgtctatcgcaggagtgctgaaacaggtgaaatccggagaaattccgaaaggcagcaaggtcgtagctgtgttaacaggaaacggactgaaagatccgaacacagcggtcgacatttcagaaatcaagcctgtcacattgccgactgatgaagacagcatccttgaatatgtaaaaggagcggcccgtgtatgaacgaagccgacatgctgttctctgtcactgttcccggaagcacagctaacctaggccccggctttgattcagtcggaatggcgctcagcagatatttgaagctgaccgtctttgaaagcgacaaatggtcttttgaggctgaaacagaaacagtcgccggaattccgggcggtacagataacctgatctaccaagtggctaaacggaccgcagatttgtacggaaaagaaatgcctcctgtccatgtgaaggtgtggagcgacatcccgcttgcacgcggccttggcagcagcgccgcagcgattgtagcggccattgaactggctgatgaattatgcggcttaaagctgtctgaagcggacaagctgcatttagcgagtctagaagaaggacacccggacaatgctggcgcttctctcgtcggcggacttgtgatcggcctgcatgaggatgacgagacccaaatgatccgcgtcccgaatgctgacattgacgtagtcgttgtcattcctttttatgaagtgctgacaagagacgcgagagacgtgcttccgaaggagtttccatatgccgatgccgtaaaagcaagtgctgtcagcaatatcctcattgctgcgatcatgtccaaggattggccgcttgtcgggaaaatcatgaagaaggatatgttccatcagccgtaccgggcgatgcttgtgcctgagctgtcaaaagtagagcacgtcgccgagatgaagggcgcatatggaacggctctcagcggagcaggcccaacgattctcgtcatgaccgaaaaaggaaagggagaagagctaaaagaacagctcgcgcttcatttccctcattgtgaagtagacgctttgaccgttccgaaagagggaagtataatagagcgaaatcctttatatcaagtaaaaagtgtatagatcatgccaagcgttcctcagcgtcagcggagggcgcctttttttgctggagataaaggagttttattagaaacgaatacatgtaaaggaggagatgaatatgaaaagctgataaccgcagacgacatcacagcgattgtctctgtgaccagtcctcaatacgccccagac

SEQ ID NO: 8564 - DNA, 2403 bp, control sequence; identical to SEQ ID NO: 8563

SEQ ID NO: 8565 - DNA, 2403 bp, control sequence; identical to SEQ ID NO: 8563

SEQ ID NO: 8566 - DNA, 2525 bp, control sequence
ctcgagccaacaccgagagagacatacggcgggtgtattgcctacattgggtttgacgggaatatcgactcttgtattacgattcgcacgatgagtgtaaagaacggtgttgcatcgatacaggcaggtgctggcattgttgctgattctgttccggaagccgaatacgaagaaagctgtaataaagccggtgcgctgctgaaaacgattcatattgcagaagacatgtttcatagcaaggaggataaagctgatgaacagatttctacaattgtgcgttgacggaaaaacccttactgccggtgaggctgaaacgctgatgaatatgatgatggcagcggaaatgactccttctgaaatgggggggatattgtcaattcttgctcatcggggggagacgccagaagagcttgcgggttttgtgaaggcaatgcgggcacacgctcttacagtcgatggacttcctgatattgttgatacatgcggaacagggggagacggtatttccacttttaatatctcaacggcctcggcaattgttgcctcggcagctggtgcgaaaatcgctaagcatggcaatcgctctgtctcttctaaaagcggaagcgctgatgttttagaggagctagaggtttctattcaaaccactcccgaaaaggtcaaaagcagcattgaaacaaacaacatgggatttctttttgcgccgctttaccattcgtctatgaaacatgtagcaggtactagaaaagagctaggtttcagaacggtatttaatctgcttgggccgctcagcaatcctttacaggcgaagcgtcaggtgattggggtctattctgttgaaaaagctggactgatggcaagcgcactggagacgtttcagccgaagcacgtcatgtttgtatcaagccgtgacggtttagatgagctttcaattacagcaccgaccgacgtgattgaattaaaggacggagagcgccgggaatataccgtttcacccgaagatttcggtttcacaaatggcagacttgaagatttacaggtgcagtcaccgaaagagagcgcctatctcattcagaatatttttgaaaataaaagcagcagttccgctttatctattacggcttttaatgcgggagctgcgatttacacggcgggaattaccgcctcactgaaggaaggaacggagctggcgttagagacgattacaagcggaggcgctgccgcgcagcttgaacgactaaagcagaaagaggaagagatctatgcttgaaaaaatcatcaaacaaaagaaagaagaagtgaaaacactggttttgccggtagagcagcctttcgagaaacgttcatttaaggaggcgctggcaagcccgaatcggtttatcgggttgattgccgaagtgaagaaagcatcgccgtcaaaagggcttattaaagaggattttgtgcctgtgcagattgcaatagactatgaggctgcgaaggcagatgcgatttccgttttaacagacaccccgttttttcaaggggaaaacagttatttatcagacgtaaagcgtgctgtttcgattcctgtacttagaaaagattttattcttgattctcttcaagtagaggaatcaagaagaatcggagcggatgccatattgttaatcggcgaggtgcttgatcccttacaccttcatgaattatatcttgaagcaggtgaaaaggggatggacgtgttagtggaggttcatgatgcatcaacgctagaacaaatattgaaagtgttcacacccgacattctcggcgtaaataatcgaaacctaaaaacgtttgaaacatctgtaaagcagacagaacaaatcgcatctctcgttccgaaagaatccttgcttgtcagcgaaagcggaatcggttctttagaacatttaacatttgtcaatgaacatggggcgcgagctgtacttatcggtgaatcattgatgagacaaacttctcagcgtaaagcaatccatgctttgtttagggagtgaggttgtgaagaaaccggcattaaaatattgcggtattcggtcactaaaggatttgcagcttgcggcggaatcacaggctgattacctaggatttatttttgctaaaagcaaacgaaaagtatctccggaagatgtgaaaaaatggctgaaccaagttcgtgtcgaaaaacaggttgcaggtgtttttgttaatgaatcaatagagacgatgtcacgtattgccaagagcttgaagctcgacgtcattcagcttcacggtgatgaaaaaccggcggatgctgctgctcttcgcaagctgacaggctgtgaaatatggaaggcgcttcaccatcaagataacacaactcaagaaatagcccgctttaaagataatgttgacggctttgtgattgattcatctgtaaaagggtctagaggcggaactggtgttgcattttcttgggaatgtgtgccggaatatcagcaggcggctattggtaaacgctgttttatcgcaggcggcgtggatcc

SEQ ID NO: 8567 - DNA, 2525 bp, control sequence; identical to SEQ ID NO: 8566

SEQ ID NO: 8568 - DNA, 2525 bp, control sequence; identical to SEQ ID NO: 8566

SEQ ID NO: 8569 - DNA, 1049 bp, control sequence; identical to SEQ ID NO: 8545

SEQ ID NO: 8570 - DNA, 1049 bp, control sequence; identical to SEQ ID NO: 8545

SEQ ID NO: 8571 - DNA, 1049 bp, control sequence; identical to SEQ ID NO: 8545

SEQ ID NO: 8572 - DNA, 748 bp, control sequence; identical to SEQ ID NO: 8548

SEQ ID NO: 8573 - DNA, 748 bp, control sequence; identical to SEQ ID NO: 8548

SEQ ID NO: 8574 - DNA, 652 bp, control sequence; identical to SEQ ID NO: 8550

SEQ ID NO: 8575 - DNA, 652 bp, control sequence; identical to SEQ ID NO: 8550

SEQ ID NO: 8576 - DNA, 1032 bp, control sequence; identical to SEQ ID NO: 8552

SEQ ID NO: 8577 - DNA, 1032 bp, control sequence; identical to SEQ ID NO: 8552

SEQ ID NO: 8578 - DNA, 6540 bp, control sequence; identical to SEQ ID NO: 8554

SEQ ID NO: 8579 - DNA, 6540 bp, control sequence; identical to SEQ ID NO: 8554

SEQ ID NO: 8580 - DNA, 6540 bp, control sequence; identical to SEQ ID NO: 8554

SEQ ID NO: 8581 - DNA, 1612 bp, control sequence; identical to SEQ ID NO: 8557

SEQ ID NO: 8582 - DNA, 1612 bp, control sequence; identical to SEQ ID NO: 8557

SEQ ID NO: 8583 - DNA, 1612 bp, control sequence; identical to SEQ ID NO: 8557

SEQ ID NO: 8584 - DNA, 3360 bp, control sequence; identical to SEQ ID NO: 8560
  misc_feature (2982)..(2982): n is a, c, g, or t

SEQ ID NO: 8585 - DNA, 3360 bp, control sequence; identical to SEQ ID NO: 8560
  misc_feature (2982)..(2982): n is a, c, g, or t

SEQ ID NO: 8586 - DNA, 3360 bp, control sequence; identical to SEQ ID NO: 8560
  misc_feature (2982)..(2982): n is a, c, g, or t

SEQ ID NO: 8587 - DNA, 2400 bp, control sequence
gaattcatgtaaaagatgaggttggttcattctcgaaaattacatctgtgttctcagagcggggcgtgacgtttgaaaaaatccttcagctgccaattaaaggccatgatgagttagctgaaatcgtaattgtcacacatcatacatcagaagctgatttcagtgatatcctgcaaaacctaaatgatttggaagtcgttcaagaagtcaaaagcacatatcgtgtagaagggaacggttggagctaatgtggaaaggacttatccatcaatataaagaatttttacctgtaacagatcaaacaccggcgctaactttacatgaaggaaacacacctcttattcacctgccgaagctgtctgagcagctcggaattgagcttcatgtcaaaacggaaggcgtcaatcctacgggatcatttaaagatcgcggaatggttatggctgtggcaaaggcaaaagaagaaggcaatgacacgattatgtgcgcgtcaacaggtaacacttccgctgctgcggcagcatatgcagcccgtgctaacatgaaatgcattgtcatcatcccgaacggaaaaattgcatttggaaaactcgctcaagctgtcatgtacggagccgagattatcgcaattgacggaaactttgacgatgcgcttaaaattgtccgttccatctgtgagaaatcaccgattgcccttgtcaactcagtcaacccttaccgcattgaaggccaaaaaactgctgccttcgaagtgtgcgaacagctgggggaagcgcctgatgttttagcgatcccggtcggaaatgctggaaacatcactgcgtactggaagggcttcaaggaatatcatgagaaaaacggcacaggccttccgaaaatgcgcggctttgaagctgagggtgcggcggcaatcgtgcgcaatgaagtgattgaaaatccggaaacaatagcgacagccattcgtatcggaaacccggcaagctgggacaaagctgtaaaggcagccgaggaatccaatgggaaaattgacgaagtcactgatgatgaaatccttcacgcatatcagctgatcgcccgtgtagaaggcgtgtttgcagaaccaggttcttgcgcgtctatcgcaggagtgctgaaacaggtgaaatccggagaaattccgaaaggcagcaaggtcgtagctgtgttaacaggaaacggactgaaagatccgaacacagcggtcgacatttcagaaatcaagcctgtcacattgccgactgatgaagacagcatccttgaatatgtaaaaggagcggcccgtgtatgaacgaagccgacatgctgttctctgtcactgttcccggaagcacagctaacctaggccccggctttgattcagtcggaatggcgctcagcagatatttgaagctgaccgtctttgaaagcgacaaatggtcttttgaggctgaaacagaaacagtcgccggaattcgcggtacagataacctgatctaccaagtggctaaacggaccgcagatttgtacggaaaagaaatgcctcctgtccatgtgaaggtgtggagcgacatcccgcttgcacgcggccttggcagcagcgccgcagcgattgtagcggccattgaactggctgatgaattatgcggcttaaagctgtctgaagcggacaagctgcatttagcgagtctagaagaaggacacccggacaatgctggcgcttctctcgtcggcggacttgtgatcggcctgcatgaggatgacgagacccaaatgatccgcgtcccgaatgctgacattgacgtagtcgttgtcattcctttttatgaagtgctgacaagagacgcgagagacgtgcttccgaaggagtttccatatgccgatgccgtaaaagcaagtgctgtcagcaatatcctcattgctgcgatcatgtccaaggattggccgcttgtcgggaaaatcatgaagaaggatatgttccatcagccgtaccgggcgatgcttgtgcctgagctgtcaaaagtagagcacgtcgccgagatgaagggcgcatatggaacggctctcagcggagcaggcccaacgattctcgtcatgaccgaaaaaggaaagggagaagagctaaaagaacagctcgcgcttcatttccctcattgtgaagtagacgctttgaccgttccgaaagagggaagtataatagagcgaaatcctttatatcaagtaaaaagtgtatagatcatgccaagcgttcctcagcgtcagcggagggcgcctttttttgctggagataaaggagttttattagaaacgaatacatgtaaaggaggagatgaatatgaaaagctgataaccgcagacgacatcacagcgattgtctctgtgaccagtcctcaatacgccccagac

SEQ ID NO: 8588 - DNA, 2400 bp, control sequence; identical to SEQ ID NO: 8587

SEQ ID NO: 8589 - DNA, 2400 bp, control sequence; identical to SEQ ID NO: 8587

SEQ ID NO: 8590 - DNA, 1761 bp, control sequence
ttgccgatccgccgcccgtccacacccgccgccagctcaccatggatgatgatatcgccgcgctcgtcgtcgacaacggctccggcatgtgcaaggccggcttcgcgggcgacgatgccccccgggccgtcttcccctccatcgtggggcgccccaggcaccagggcgtgatggtgggcatgggtcagaaggattcctatgtgggcgacgaggcccagagcaagagaggcatcctcaccctgaagtaccccatcgagcacggcatcgtcaccaactgggacgacatggagaaaatctggcaccacaccttctacaatgagctgcgtgtggctcccgaggagcaccccgtgctgctgaccgaggcccccctgaaccccaaggccaaccgcgagaagatgacccagatcatgtttgagaccttcaacaccccagccatgtacgttgctatccaggctgtgctatccctgtacgcctctggccgtaccactggcatcgtgatggactccggtgacggggtcacccacactgtgcccatctacgaggggtatgccctcccccatgccatcctgcgtctggacctggctggccgggacctgactgactacctcatgaagatcctcaccgagcgcggctacagcttcaccaccacggccgagcgggaaatcgtgcgtgacattaaggagaagctgtgctacgtcgccctggacttcgagcaagagatggccacggctgcttccagctcctccctggagaagagctacgagctgcctgacggccaggtcatcaccattggcaatgagcggttccgctgccctgaggcactcttccagccttccttcctgggcatggagtcctgtggcatccacgaaactaccttcaactccatcatgaagtgtgacgtggacatccgcaaagacctgtacgccaacacagtgctgtctggcggcaccaccatgtaccctggcattgccgacaggatgcagaaggagatcactgccctggcacccagcacaatgaagatcaagatcattgctcctcctgagcgcaagtactccgtgtggatcggcggctccatcctggcctcgctgtccaccttccagcagatgtggatcagcaagcaggagtatgacgagtccggcccctccatcgtccaccgcaaatgcttctaggcggactatgacttagttgcgttacaccctttcttgacaaaacctaacttgcgcagaaaacaagatgagattggcatggctttatttgttttttttgttttgttttggttttttttttttttttggcttgactcaggatttaaaaactggaacggtgaaggtgacagcagtcggttggagcgagcatcccccaaagttcacaatgtggccgaggactttgattgcacattgttgtttttttaatagtcattccaaatatgagatgcattgttacaggaagtcccttgccatcctaaaagccaccccacttctctctaaggagaatggcccagtcctctcccaagtccacacaggggaggtgatagcattgctttcgtgtaaattatgtaatgcaaaatttttttaatcttcgccttaatacttttttattttgttttattttgaatgatgagccttcgtgcccccccttccccctttttgtcccccaacttgagatgtatgaaggcttttggtctccctgggagtgggtggaggcagccagggcttacctgtacactgacttgagaccagttgaataaaagtgcacacctta

SEQ ID NO: 8591 - DNA, 1761 bp, control sequence; identical to SEQ ID NO: 8590

SEQ ID NO: 8592 - DNA, 1761 bp, control sequence; identical to SEQ ID NO: 8590

SEQ ID NO: 8593 - DNA, 285 bp, control sequence
ggctgggcgtggtggctcacgcctgtaatcccagcactttgggaggccgaggtgggtggatcacctgaggtcaggagttcaagaccagcctggccaacatggtgaaaccccgtctctactaaaaatacaaaaattagccgggcgtggtggcgcgcgcctgtaatcccagctactcgggaggctgaggcaggagaatcgcttgaacccgggaggtggaggttgcagtgagccgagatcgcgccactgcactccagcctgggcgacagagcgagactccgtctcaga

SEQ ID NO: 8594 - DNA, 1268 bp, control sequence
gttcgacagtcagccgcatcttcttttgcgtcgccagccgagccacatcgctcagacaccatggggaaggtgaaggtcggagtcaacggatttggtcgtattgggcgcctggtcaccagggctgcttttaactctggtaaagtggatattgttgccatcaatgaccccttcattgacctcaactacatggtttacatgttccaatatgattccacccatggcaaattccatggcaccgtcaaggctgagaacgggaagcttgtcatcaatggaaatcccatcaccatcttccaggagcgagatccctccaaaatcaagtggggcgatgctggcgctgagtacgtcgtggagtccactggcgtcttcaccaccatggagaaggctggggctcatttgcaggggggagccaaaagggtcatcatctctgccccctctgctgatgcccccatgttcgtcatgggtgtgaaccatgagaagtatgacaacagcctcaagatcatcagcaatgcctcctgcaccaccaactgcttagcacccctggccaaggtcatccatgacaactttggtatcgtggaaggactcatgaccacagtccatgccatcactgccacccagaagactgtggatggcccctccgggaaactgtggcgtgatggccgcggggctctccagaacatcatccctgcctctactggcgctgccaaggctgtgggcaaggtcatccctgagctgaacgggaagctcactggcatggccttccgtgtccccactgccaacgtgtcagtggtggacctgacctgccgtctagaaaaacctgccaaatatgatgacatcaagaaggtggtgaagcaggcgtcggagggccccctcaagggcatcctgggctacactgagcaccaggtggtctcctctgacttcaacagcgacacccactcctccacctttgacgctggggctggcattgccctcaacgaccactttgtcaagctcatttcctggtatgacaacgaatttggctacagcaacagggtggtggacctcatggcccacatggcctccaaggagtaagacccctggaccaccagccccagcaagagcacaagaggaagagagagaccctcactgctggggagtccctgccacactcagtcccccaccacactgaatctcccctcctcacagttgccatgtagaccccttgaagaggggaggggcctagggagccgcaccttgtcatgtaccatcaataaagtaccctgtgctcaacc

SEQ ID NO: 8595 - DNA, 1268 bp, control sequence; identical to SEQ ID NO: 8594

SEQ ID NO: 8596 - DNA, 1268 bp, control sequence; identical to SEQ ID NO: 8594

SEQ ID NO: 8597 - DNA, 3970 bp, control sequence
attaaacctctcgccgagcccctccgcagactctgcgccggaaagtttcatttgctgtatgccatcctcgagagctgtctaggttaacgttcgcactctgtgtatataacctcgacagtcttggcacctaacgtgctgtgcgtagctgctcctttggttgaatccccaggcccttgttggggcacaaggtggcaggatgtctcagtggtacgaacttcagcagcttgactcaaaattcctggagcaggttcaccagctttatgatgacagttttcccatggaaatcagacagtacctggcacagtggttagaaaagcaagactgggagcacgctgccaatgatgtttcatttgccaccatccgttttcatgacctcctgtcacagctggatgatcaatatagtcgcttttctttggagaataacttcttgctacagcataacataaggaaaagcaagcgtaatcttcaggataattttcaggaagacccaatccagatgtctatgatcatttacagctgtctgaaggaagaaaggaaaattctggaaaacgcccagagatttaatcaggctcagtcggggaatattcagagcacagtgatgttagacaaacagaaagagcttgacagtaaagtcagaaatgtgaaggacaaggttatgtgtatagagcatgaaatcaagagcctggaagatttacaagatgaatatgacttcaaatgcaaaaccttgcagaacagagaacacgagaccaatggtgtggcaaagagtgatcagaaacaagaacagctgttactcaagaagatgtatttaatgcttgacaataagagaaaggaagtagttcacaaaataatagagttgctgaatgtcactgaacttacccagaatgccctgattaatgatgaactagtggagtggaagcggagacagcagagcgcctgtattggggggccgcccaatgcttgcttggatcagctgcagcaagttcggcagcagcttaaaaagttggaggaattggaacagaaatacacctacgaacatgaccctatcacaaaaaacaaacaagtgttatgggaccgcaccttcagtcttttccagcagctcattcagagctcgtttgtggtggaaagacagccctgcatgccaacgcaccctcagaggccgctggtcttgaagacaggggtccagttcactgtgaagttgagactgttggtgaaattgcaagagctgaattataatttgaaagtcaaagtcttatttgataaagatgtgaatgagagaaatacagtaaaaggatttaggaagttcaacattttgggcacgcacacaaaagtgatgaacatggaggagtccaccaatggcagtctggcggctgaatttcggcacctgcaattgaaagaacagaaaaatgctggcaccagaacgaatgagggtcctctcatcgttactgaagagcttcactcccttagttttgaaacccaattgtgccagcctggtttggtaattgacctcgagacgacctctctgcccgttgtggtgatctccaacgtcagccagctcccgagcggttgggcctccatcctttggtacaacatgctggtggcggaacccaggaatctgtccttcttcctgactccaccatgtgcacgatgggctcagctttcagaagtgctgagttggcagttttcttctgtcaccaaaagaggtctcaatgtggaccagctgaacatgttgggagagaagcttcttggtcctaacgccagccccgatggtctcattccgtggacgaggttttgtaaggaaaatataaatgataaaaattttcccttctggctttggattgaaagcatcctagaactcattaaaaaacacctgctccctctctggaatgatgggtgcatcatgggcttcatcagcaaggagcgagagcgtgccctgttgaaggaccagcagccggggaccttcctgctgcggttcagtgagagctcccgggaaggggccatcacattcacatgggtggagcggtcccagaacggaggcgaacctgacttccatgcggttgaaccctacacgaagaaagaactttctgctgttactttccctgacatcattcgcaattacaaagtcatggctgctgagaatattcctgagaatcccctgaagtatctgtatccaaatattgacaaagaccatgcctttggaaagtattactccaggccaaaggaagcaccagagccaatggaacttgatggccctaaaggaactggatatatcaagactgagttgatttctgtgtctgaagttcacccttctagacttcagaccacagacaacctgctccccatgtctcctgaggagtttgacgaggtgtctcggatagtgggctctgtagaattcgacagtatgatgaacacagtatagagcatgaatttttttcatcttctctggcgacagttttccttctcatctgtgattccctcctgctactctgttccttcacatcctgtgtttctagggaaatgaaagaaaggccagcaaattcgctgcaacctgttgatagcaagtgaatttttctctaactcagaaacatcagttactctgaagggcatcatgcatcttactgaaggtaaaattgaaaggcattctctgaagagtgggtttcacaagtgaaaaacatccagatacacccaaagtatcaggacgagaatgagggtcctttgggaaaggagaagttaagcaacatctagcaaatgttatgcataaagtcagtgcccaactgttataggttgttggataaatcagtggttatttagggaactgcttgacgtaggaacggtaaatttctgtgggagaattcttacatgttttctttgctttaagtgtaactggcagttttccattggtttacctgtgaaatagttcaaagccaagtttatatacaattatatcagtcctctttcaaaggtagccatcatggatctggtagggggaaaatgtgtattttattacatctttcacattggctatttaaagacaaagacaaattctgtttcttgagaagagaatattagctttactgtttgttatggcttaatgacactagctaatatcaatagaaggatgtacatttccaaattcacaagttgtgtttgatatccaaagctgaatacattctgctttcatcttggtcacatacaattatttttacagttctcccaagggagttaggctattcacaaccactcattcaaaagttgaaattaaccatagatgtagataaactcagaaatttaattcatgtttcttaaatgggctactttgtcctttttgttattagggtggtatttagtctattagccacaaaattgggaaaggagtagaaaaagcagtaactgacaacttgaataatacaccagagataatatgagaatcagatcatttcaaaactcatttcctatgtaactgcattgagaactgcatatgtttcgctgatatatgtgtttttcacatttgcgaatggttccattctctctcctgtactttttccagacacttttttgagtggatgatgtttcgtgaagtatactgtatttttacctttttccttccttatcactgacacaaaaagtagattaagagatgggtttgacaaggttcttcccttttacatactgctgtctatgtggctgtatcttgtttttccactactgctaccacaactatattatcatgcaaatgctgtattcttctttggtggagataaagatttcttgagttttgttttaaaattaaagctaaagtatctgtattgcattaaatataatatcgacacagtgctttccgtggcactgcatacaatctgaggcctcctctctcagtttttatatagatggcgagaacctaagtttcagttgattttacaattgaaatgactaaaaaacaaagaagacaacattaaaaacaatattgtttcta

SEQ ID NO: 8598 - DNA, 3970 bp, control sequence; identical to SEQ ID NO: 8597

SEQ ID NO: 8599 - DNA, 3970 bp, control sequence; identical to SEQ ID NO: 8597

SEQ ID NO: 8600 - DNA, 3970 bp, control sequence; identical to SEQ ID NO: 8597

SEQ ID NO: 8601 - DNA, 1969 bp, control sequence
  misc_feature (57)..(61): n is a, c, g, or t
ccgtccgtccgtcgtcctcctcgcttgcggggcgccgggcccgtcctcgagcccccnnnnnccgtccggccgcgtcggggcctcgccgcgctctacctacctacctggttgatcctgccagtagcatatgcttgtctcaaagattaagccatgcatgtctaagtacgcacggccggtacagtgaaactgcgaatggctcattaaatcagttatggttcctttggtcgctcgctcctctcctacttggataactgtggtaattctagagctaatacatgccgacgggcgctgacccccttcgcgggggggatgcgtgcatttatcagatcaaaaccaacccggtcagcccctctccggccccggccggggggcgggccgcggcggctttggtgactctagataacctcgggccgatcgcacgccccccgtggcggcgacgacccattcgaacgtctgccctatcaactttcgatggtagtcgccgtgcctaccatggtgaccacgggtgacggggaatcagggttcgattccggagagggagcctgagaaacggctaccacatccaaggaaggcagcaggcgcgcaaattacccactcccgacccggggaggtagtgacgaaaaataacaatacaggactctttcgaggccctgtaattggaatgagtccactttaaatcctttaacgaggatccattggagggcaagtctggtgccagcagccgcggtaattccagctccaatagcgtatattaaagttgctgcagttaaaaagctcgtagttggatcttgggagcgggcgggcggtccgccgcgaggcgagccaccgcccgtccccgccccttgcctctcggcgccccctcgatgctcttagctgagtgtcccgcggggcccgaagcgtttactttgaaaaaattagagtgttcaaagcaggcccgagccgcctggataccgcagctaggaataatggaataggaccgcggttctattttgttggttttcggaactgaggccatgattaagagggacggccgggggcattcgtattgcgccgctagaggtgaaattcttggaccggcgcaagacggaccagagcgaaagcatttgccaagaatgttttcattaatcaagaacgaaagtcggaggttcgaagacgatcagataccgtcgtagttccgaccataaacgatgccgaccggcgatgcggcggcgttattcccatgacccgccgggcagcttccgggaaaccaaagtctttgggttccggggggagtatggttgcaaagctgaaacttaaaggaattgacggaagggcaccaccaggagtggagcctgcggcttaatttgactcaacacgggaaacctcacccggcccggacacggacaggattgacagattgatagctctttctcgattccgtgggtggtggtgcatggccgttcttagttggtggagcgatttgtctggttaattccgataacgaacgagactctggcatgctaactagttacgcgacccccgagcggtcggcgtcccccaacttcttagagggacaagtggcgttcagccacccgagattgagcaataacaggtctgtgatgcccttagatgtccggggctgcacgcgcgctacactgactggctcagcgtgtgcctaccctacgccggcaggcgcgggtaacccgttgaaccccattcgtgatggggatcggggattgcaattattccccatgaacgaggaattcccagtaagtgcgggtcataagcttgcgttgattaagtccctgccctttgtacacaccgcccgtcgctactaccgattggatggtttagtgaggccctcggatcggccccgccggggtcggcccacggcctggcggagcgctgagaagacggtcgaacttgactatctagaggaagtaaaagtcgtaacaaggtttccgtaggtgaacctgcggaaggatcatta

SEQ ID NO: 8602 - DNA, 1969 bp, control sequence; identical to SEQ ID NO: 8601
  misc_feature (57)..(61): n is a, c, g, or t

SEQ ID NO: 8603 - DNA, 1969 bp, control sequence; identical to SEQ ID NO: 8601
  misc_feature (57)..(61): n is a, c, g, or t

SEQ ID NO: 8604 - DNA, 1955 bp, control sequence
gaattcaccaagcgttggattgttcacccactaatagggaacgtgagctgggtttagaccgtcgtgagacaggttagttttaccctactgatgatgtgttgttgccatggtaatcctgctcagtacgagaggaaccgcaggttcagacatttggtgtatgtgcttggctgaggagccaatggggcgaacgtaccatctgtgggattatgactgaacgcctctaagtcagaatcccgcccaggcgaacgatacggcagcgccgcggagcctcggttggcctcggatagccggtcccccgcctgtccccgccggcgggccgcccccccctccagcgccccgcgcgcgcgggagggcgcgtgccccgccgcgcgccgggaccggggtccggtgcggagtgcccttcgtcctgggaaacggggcgcggccggaaaggcggccgccccctcgcccgtcacgcaccgcacgttcgtggggaacctggcgctaaaccattcgtagacgacctgcttctgggtcggggtttcgtacgtagcagagcagctccctcgctgcgatctattgaaagtcagccctcgacacaagggtttgtccgcgcgcgcggcggcgtgcgtgcggggggcccggcggggcgtgcgcgtccggcgccgtccgtccttccgttcgtcttcctccctcccggcctctccgccgaccgcgggcgtggtgggggggtgggggggggacgcgcgaccccggtcggcgcgccccgcttcttcggttcccgcctcctccccgttcaccgcggggcggctcgtccgctccgggccgggacggggtccggggagcgtggtttgggagccgcggaggcggccgcgccgagccgggcccgtgcgcggtccccgtcccgggggttggccgcgcgggccccggtggggccacccggggtcccggccctcgcgcgtccttcctctcgctcctccgcacgggtcgaccagcagaccgcgggtggtgggcggcgggcggcgaggccgcacgggcgtccccgcacccggccgacctccgctcgtgacctctcctcggtcgggctccggggtcgaccgcctgccccgcgggcgtgagactcagccgctgtctcgccgtgtcccgggtcgaccggcgggcttctccaccgagcggcgtgtaggagtgcccgtcgggacgaaccgcaaccggagcgtccccgtctcggtcggcacctccggggtcgaccagctgccgcccgcgagctccggacttagccggcgcctgcacgtgtcccgggtcgaccagcaggcggccgcgacgtgcggcgcaccgacgagagggcgtgcattcccgttcgcgcgcccggaccctccaccggcctgggcccgacggtggagctgggaccacgcggaactccctctcctacatttttttcagccccaccgcgagtttgcgtccgcgggattttaagagggagtcactgctgccgtcagccagtaatgcttcctccttttttgcttttaggttttgctcttgcctttttttttttttttttctttctttctttctttctttctttctttctttctttctttctttctttctcgctctcgcctctcgctctctccctcgctcgttttctttctctttctctttctctctctctctctctctctctctctctgtctctcgctctcgccctctctctctctctcttctctctgtctctctctgtctctctctctctctctctctctctctctctctctctctctctctctctctccctccccctccctccctctctccccttccttggtgccttctcggctcttgacacttagccgctgtctcgccgtgtcccgggtcgaccggcgggccttctccaccgagcggcgtgtaagagtgcccgtcgggacgagccggacccgccgcgtccccgtctcggtcggcactccggggtcgaccagctg

SEQ ID NO: 8605 - DNA, 1955 bp, control sequence; identical to SEQ ID NO: 8604

SEQ ID NO: 8606 - DNA, 1955 bp, control sequence; identical to SEQ ID NO: 8604

SEQ ID NO: 8607 - DNA, 1049 bp, control sequence
atggctcaccgcccacgctggacattgtcgcaagtcacagaattatttgaaaaaccgttgctggatctgctgtttgaagcgcagcaggtgcatcgccagcatttcgatcctcgtcaggtgcaggtcagcacgttgctgtcgattaagaccggagcttgtccggaagattgcaaatactgcccgcaaagctcgcgctacaaaaccgggctggaagccgagcggttgatggaagttgaacaggtgctggagtcggcgcgcaaagcgaaagcggcaggatcgacgcgcttctgtatgggcgcggcgtggaagaatccccacgaacgcgatatgccgtacctggaacaaatggtgcagggggtaaaagcgatggggctggaggcgtgtatgacgctgggcacgttgagtgaatctcaggcgcagcgcctcgcgaacgccgggctggattactacaaccacaacctggacacctcgccggagttttacggcaatatcatcaccacacgcacttatcaggaacgcctcgatacgctggaaaaagtgcgcgatgccgggatcaaagtctgttctggcggcattgtgggcttaggcgaaacggtaaaagatcgcgccggattattgctgcaactggcaaacctgccgacgccgccggaaagcgtgccaatcaacatgctggtgaaggtgaaaggcacgccgcttgccgataacgatgatgtcgatgcctttgattttattcgcaccattgcggtcgcgcggatcatgatgccaacctcttacgtgcgcctttctgccggacgcgagcagatgaacgaacagactcaggcgatgtgctttatggcaggcgcaaactcgattttctacggttgcaaactgctgaccacgccgaatccggaagaagataaagacctgcaactgttccgcaaactggggctaaatccgcagcaaactgccgtgctggcaggggataacgaacaacagcaacgtcttgaacaggcgctgatgaccccggacaccgacgaatattacaacgcggcagcattatgagctggcag

SEQ ID NO: 8608 - DNA, 1049 bp, control sequence; identical to SEQ ID NO: 8607

SEQ ID NO: 8609 - DNA, 1049 bp, control sequence; identical to SEQ ID NO: 8607

SEQ ID NO: 8610 - DNA, 751 bp, control sequence
atggcaacggttaataaacaagccattgcagcggcatttggtcgggcagccgcacactatgagcaacatgcagatctacagcgccagagtgctgacgccttactggcaatgcttccacagcgtaaatacacccacgtactggacgcgggttgtggacctggctggatgagccgccactggcgggaacgtcacgcgcaggtgacggccttagatctctcgccgccaatgcttgttcaggcacgccagaaggatgccgcagaccattatctggcgggagatatcgaatccctgccgttagcgactgcgacgttcgatcttgcatggagcaatctcgcagtgcagtggtgcggtaatttatccacggcactccgcgagctgtatcgggtggtgcgccccaaaggcgtggtcgcgtttaccacgctggtgcagggatcgttacccgaactgcatcaggcgtggcaggcggtggacgagcgtccgcatgctaatcgctttttaccgccagatgaaatcgaacagtcgctgaacggcgtgcattatcaacatcatattcagcccatcacgctgtggtttgatgatgcgctcagtgccatgcgttcgctgaaaggcatcggtgccacgcatcttcatgaagggcgcgacccgcgaatattaacgcgttcgcagttgcagcgattgcaactggcctggccgcaacagcaggggcgatatcctctgacgtatcatctttttttgggagtgattgctcgtg

SEQ ID NO: 8611 - DNA, 751 bp, control sequence; identical to SEQ ID NO: 8610

SEQ ID NO: 8612 - DNA, 661 bp, control sequence
gtgagtaaacgttattttgtcaccggaacggataccgaagtggggaaaactgtcgccagttgtgcacttttacaagccgcaaaggcagcaggctaccggacggcaggttataaaccggtcgcctctggcagcgaaaagaccccggaaggtttacgcaatagcgacgcgctggcgttacagcgcaacagcagcctgcagctggattacgcaacagtaaatccttacaccttcgcagaacccacttcgccgcacatcatcagcgcgcaagagggcagaccgatagaatcattggtaatgagcgccggattacgcgcgcttgaacaacaggctgactgggtgttagtggaaggtgctggcggctggtttacgccgctttctgacactttcacttttgcagattgggtaacacaggaacaactgccggtgatactggtagttggtgtgaaactcggctgtattaatcacgcgatgttgactgcacaggtaatacaacacgccggactgactctggcgggttgggtggcgaacgatgttacgcctccgggaaaacgtcacgctgaatatatgaccacgctcacccgcatgattcccgcgccgctgctgggagagatcccctggcttgcagaaaatccagaaaatgcggcaaccggaaagtacataa

SEQ ID NO: 8613 - DNA, 661 bp, control sequence; identical to SEQ ID NO: 8612

SEQ ID NO: 8614 - DNA, 1032 bp, control sequence
atgtccaatttactgaccgtacaccaaaatttgcctgcattaccggtcgatgcaacgagtgatgaggttcgcaagaacctgatggacatgttcagggatcgccaggcgttttctgagcatacctggaaaatgcttctgtccgtttgccggtcgtgggcggcatggtgcaagttgaataaccggaaatggtttcccgcagaacctgaagatgttcgcgattatcttctatatcttcaggcgcgcggtctggcagtaaaaactatccagcaacatttgggccagctaaacatgcttcatcgtcggtccgggctgccacgaccaagtgacagcaatgctgtttcactggttatgcggcggatccgaaaagaaaacgttgatgccggtgaacgtgcaaaacaggctctagcgttcgaacgcactgatttcgaccaggttcgttcactcatggaaaatagcgatcgctgccaggatatacgtaatctggcatttctggggattgcttataacaccctgttacgtatagccgaaattgccaggatcagggttaaagatatctcacgtactgacggtgggagaatgttaatccatattggcagaacgaaaacgctggttagcaccgcaggtgtagagaaggcacttagcctgggggtaactaaactggtcgagcgatggatttccgtctctggtgtagctgatgatccgaataactacctgttttgccgggtcagaaaaaatggtgttgccgcgccatctgccaccagccagctatcaactcgcgccctggaagggatttttgaagcaactcatcgattgatttacggcgctaaggatgactctggtcagagatacctggcctggtctggacacagtgcccgtgtcggagccgcgcgagatatggcccgcgctggagtttcaataccggagatcatgcaagctggtggctggaccaatgtaaatattgtcatgaactatatccgtaacctggatagtgaaacaggggcaatggtgcgcctgctggaagatgccgattag

SEQ ID NO: 8615 - DNA, 1032 bp, control sequence; identical to SEQ ID NO: 8614

SEQ ID NO: 8616 - DNA, 1840 bp, control sequence
atgtcaaacgaaacaattaaattagtcattgcgggaccgcgtggaagaatggggcaggaagctgttaaattggcagaacgaacaccacattttgaccttgtaggggccatagaccatacatacgatcagcaaaaattatctgatgtgatgcctgttgagtcagatgctttcatttacacagatatccatgcctgttttacagaaacacaaccggatgtcttgattgatttaacaacgcccgaaatcggaaaagtacatacaaaaattgcattagagcacggagtccgtccagttgtcggaacaaccggtttctcagaagctgatttaaaagagctcacatctttaacagaagaaaaagggatcggagccatcatcgcgccaaattttgcgctcggtgcgatactgatgatgaaattttcaaaaatggctgccaactattttgaggatgttgagattattgagcttcatcatgaccagaagcttgacgcaccaagcggaactgcgcttaaaacagcggaaatgatttcagaagtccgtaaagaaaagcagcaaggacatccggatgaaaaagaaattctcccaggagcaagaggagcggagcaaaacggtattcgcttgcacaggcttcagatacgccatgattcttataaccgtgcttctttcatgtcaggcgttaaactgtcagtcgaacaagtcatgaagattgatcagcttgtgtatggtttagaaaatatcattgattagacggggggataaacaatgaaaattgctttgatcgcgcatgacaagaaaaaacaggatatggttcaatttacgactgcctatcgggatattttaaagaatcatgatctatacgcaaccggaaccacagggttgaaaattcatgaggcgacaggtcttcaaattgaacgttttcaatccggccctttagggggagaccagcaaatcggtgcactgatcgctgccaatgcactcgatcttgtcatttttttgcgcgacccgctgaccgcgcagccgcatgaaccggatgtctcggcattaatccgtttatgtgatgtgtattccattccgctcgccacaaatatgggtactgcggaaattcttgtgcgcacacttgatgaaggtgttttcgaattccgtgaccttcttcggggagaagagccgaatgtataatgctgacgttcttgcttttggcgcccacagtgatgatgtcgagatcggaatgggcggcacaatagcgaagtttgtcaaacaggaaaaaaaagtaatgatatgcgatttgacagaagcggaactctcttctaacggtacggtcagtttgcgtaaagaagaagcagctgaagcagcccgcatattaggcgcagataaaagaattcagctaacgcttccagaccgcggcctaataatgagtgatcaggcaattcggtcaattgtcactgtcatcagaatctgtcggccaaaagcggtttttatgccgtataaaaaggatcgccatccggatcacggcaatgcggctgcactggtggaagaagcgatcttttccgccggaatccataaatataaagacgaaaaaagccttccggcgcataaagtcagcaaggtttactattatatgataaatggttttcatcagccggattttgttattgatatctcggatacaatagaggcaaagaaacaaagcctcaacgcctacaaaagccagtttatcccgtcaaaggattccgtttctactcctctgacgaatgggtatattgaaatcgttgaagcgagagaaaagctttacggtaaagaagcgggcgtggagtatgccgaagtttcttttccaaacggatgctga

SEQ ID NO: 8617 - DNA, 1840 bp, control sequence; identical to SEQ ID NO: 8616

SEQ ID NO: 8618 - DNA, 1840 bp, control sequence; identical to SEQ ID NO: 8616

SEQ ID NO: 8619 - DNA, 984 bp, control sequence
atgacattgttcttacacggcacaagcagacaaaatcaacatggtcatttagaaatcggaggtgtggatgctctctatttagcggagaaatatggtacacctctttacgtatatgatgtggctttaatacgtgagcgtgctaaaagctttaagcaggcgtttatttctgcagggctgaaagcacaggtggcatatgcgagcaaagcattctcatcagtcgcaatgattcagctcgctgaggaagagggactttctttagatgtcgtatccggagagagctatatacggctgttgcagcaggctttccggcagaacgcatccactttcatggaaacaataagagcagggaagaactgcggatggcgcttgagcaccgcatcggctgcattgtggtggataatttctatgaaatcgtcgcttcttgaagacctatgtaaagaaacgggtcactccatcgatgttcttcttcggatcacgcccggagtagaagcgcatacgcatgactacattacaacgggccaggaagattcaaagtttggtttcgatcttcataacggacaaactgaacgggccattgaacaagtattacaatcggaacacattcagctgctgggtgtccattgccatatcggctcgcaaatctttgatacggccggttttgtgttagcagcggaaaaaatcttcaaaaaactagacgaatggagagattcatattcatttgtatccaaggtgctgaatcttggaggaggtttcggcattcgttatacggaagatgatgaaccgcttcatgccactgaatacgttgaaaaaattatcgaagctgtgaaagaaaatgcttcccgttacggttttgacattccggaaatttggatcgaaccgggccgttctctcgtgggagacgcaggcacaactctttatacggttggctctcaaaaagaagtggataagctgtacaatcgtttcatcattcggcgtgcgaattaa

SEQ ID NO: 8620 - DNA, 984 bp, control sequence; identical to SEQ ID NO: 8619

SEQ ID NO: 8621 - DNA, 984 bp, control sequence; identical to SEQ ID NO: 8619

SEQ ID NO: 8622 - DNA, 1318 bp, control sequence
atgaaagaggagacattttatcttgtccgtgaagatgtattgcccgatgcaatgagaaaaacattagaagtcaaaaagctgcttgatcgaaaaaaagcagattcagtagcagatgccgttcaaaaggtcgatttaagtagaagtgcgttttataaatacagggatgctgtttttccattctacaccatggtaaaagaacaaattatcacacttttctttcatttggaggataggtcaggtgcgttatctcagcttcttcaggcggtagctgattctggaagcaacgttctttccattcaccagaccattccgcttcaaggcagagcaaatgtgacactgtctatcagtacgtcggcaatggaagaagacattcatacattaatgaataagctcaggaagtttgattttgtagaaaaggttgaaatattaggttcaggtgcataagggagagaaaatcgtcatgaaagtcggttatttaggtccagcagctacatttacacatctagcagtcagttcttgttttcaaaacggcgccgaacatgttgcttaccgcaccattccggagtgtatagatgcagccgttgcaggcgaagttgattttgcttttgttcctttggaaaatgctttagaaggatctgttaatctaacaatagactatttaatacatgaacagcctttgccaatcgtgggtgaaatgacgttgccgattcaccagcacttgctcgtccatccctcaagagagaatgcatggaaagagctcgacaaaatttactcacattcacacgcgattgcgcaatgccataaatttcttcatcgacattttccttccgttccatatgaatacgccaattctaccggggcggcagcaaagtttgtcagtgaccatcccgagctgaatatcggggtcattgccaatgatatggcagcttctacatacgaattaaaaatcgtgaaacgggatatacaggattatagggacaatcatacaagatttgttatcctgtctcccgatgaaaacatatcttttgaagtgaattcaaaattgagctctaggcccaaaacgaccttaatggtcatgctgccgcaggatgatcagtccggggcgctgcatagagtgctgtctgcattttcttggagaaatttaaacctgtcaaaaattgagtcacgtccgactaaaaccggattaggccattatttctttattattgatattgagaaagcgtttgatgatgtattgattccaggggccatgcaggagcttgaagcactcggctgcaaagtgaggcttctgggtgcataccagtcttaccaattataa

SEQ ID NO: 8623 - DNA, 1318 bp, control sequence; identical to SEQ ID NO: 8622

SEQ ID NO: 8624 - DNA, 1318 bp, control sequence; identical to SEQ ID NO: 8622

SEQ ID NO: 8625 - DNA, 1982 bp, control sequence
atgtggaaaggacttatccatcaatataaagaatttttacctgtaacagatcaaacaccggcgctaactttacatgaaggaaacacacctcttattcacctgccgaagctgtctgagcagctcggaattgagcttcatgtcaaaacggaaggcgtcaatcctacgggatcatttaaagatcgcggaatggttatggctgtggcaaaggcaaaagaagaaggcaatgacacgattatgtgcgcgtcaacaggtaacacttccgctgctgcggcagcatatgcagcccgtgctaacatgaaatgcattgtcatcatcccgaacggaaaaattgcatttggaaaactcgctcaagctgtcatgtacggagccgagattatcgcaattgacggaaactttgacgatgcgcttaaaattgtccgttccatctgtgagaaatcaccgattgcccttgtcaactcagtcaacccttaccgcattgaaggccaaaaaactgctgccttcgaagtgtgcgaacagctgggggaagcgcctgatgttttagcgatcccggtcggaaatgctggaaacatcactgcgtactggaagggcttcaaggaatatcatgagaaaaacggcacaggccttccgaaaatgcgcggctttgaagctgagggtgcggcggcaatcgtgcgcaatgaagtgattgaaaatccggaaacaatagcgacagccattcgtatcggaaacccggcaagctgggacaaagctgtaaaggcagccgaggaatccaatgggaaaattgacgaagtcactgatgatgaaatccttcacgcatatcagctgatcgcccgtgtagaaggcgtgtttgcagaaccaggttcttgcgcgtctatcgcaggagtgctgaaacaggtgaaatccggagaaattccgaaaggcagcaaggtcgtagctgtgttaacaggaaacggactgaaagatccgaacacagcggtcgacatttcagaaatcaagcctgtcacattgccgactgatgaagacagcatccttgaatatgtaaaaggagcggcccgtgtatgaacgaagccgacatgctgttctctgtcactgttcccggaagcacagctaacctaggccccggctttgattcagtcggaatggcgctcagcagatatttgaagctgaccgtctttgaaagcgacaaatggtcttttgaggctgaaacagaaacagtcgccggaattcgcggtacagataacctgatctaccaagtggctaaacggaccgcagatttgtacggaaaagaaatgcctcctgtccatgtgaaggtgtggagcgacatcccgcttgcacgcggccttggcagcagcgccgcagcgattgtagcggccattgaactggctgatgaattatgcggcttaaagctgtctgaagcggacaagctgcatttagcgagtctagaagaaggacacccggacaatgctggcgcttctctcgtcggcggacttgtgatcggcctgcatgaggatgacgagacccaaatgatccgcgtcccgaatgctgacattgacgtagtcgttgtcattcctttttatgaagtgctgacaagagacgcgagagacgtgcttccgaaggagtttccatatgccgatgccgtaaaagcaagtgctgtcagcaatatcctcattgctgcgatcatgtccaaggattggccgcttgtcgggaaaatcatgaagaaggatatgttccatcagccgtaccgggcgatgcttgtgcctgagctgtcaaaagtagagcacgtcgccgagatgaagggcgcatatggaacggctctcagcggagcaggcccaacgattctcgtcatgaccgaaaaaggaaagggagaagagctaaaagaacagctcgcgcttcatttccctcattgtgaagtagacgctttgaccgttccgaaagagggaagtataatagagcgaaatcctttatatcaagtaaaaagtgtatag

SEQ ID NO: 8626 - DNA, 1982 bp, control sequence; identical to SEQ ID NO: 8625

SEQ ID NO: 8627 - DNA, 1982 bp, control sequence; identical to SEQ ID NO: 8625

SEQ ID NO: 8628 - DNA, 2525 bp, control sequence; identical to SEQ ID NO: 8566

SEQ ID NO: 8629 - DNA, 2525 bp, control sequence; identical to SEQ ID NO: 8566

SEQ ID NO: 8630 - DNA, 2525 bp, control sequence; identical to SEQ ID NO: 8566

SEQ ID NO: 8631 - DNA, 1969 bp, control sequence; identical to SEQ ID NO: 8601
  misc_feature (57)..(61): n is a, c, g, or t

SEQ ID NO: 8632 - DNA, 1969 bp, control sequence; identical to SEQ ID NO: 8601
  misc_feature (57)..(61): n is a, c, g, or t

SEQ ID NO: 8633 - DNA, 1969 bp, control sequence; identical to SEQ ID NO: 8601
  misc_feature (57)..(61): n is a, c, g, or t

SEQ ID NO: 8634 - DNA, 1761 bp, control sequence; identical to SEQ ID NO: 8590

SEQ ID NO: 8635 - DNA, 1761 bp, control sequence; identical to SEQ ID NO: 8590

SEQ ID NO: 8636 - DNA, 1761 bp, control sequence; identical to SEQ ID NO: 8590

SEQ ID NO: 8637 - DNA, 1268 bp, control sequence; identical to SEQ ID NO: 8594

SEQ ID NO: 8638 - DNA, 1268 bp, control sequence; identical to SEQ ID NO: 8594

SEQ ID NO: 8639 - DNA, 1268 bp, control sequence; identical to SEQ ID NO: 8594

SEQ ID NO: 8640 - DNA, 3953 bp, control sequence
gggttcttacccatttaaagtttgaccaaacactaaggatgctgaagttccgaacagtccatgggggcctgaggctcctgggaatccgccgaacctccaccgcccccgctgcctccccaaatgtccggcgcctggagtataagcccatcaagaaagtcatggtggccaacagaggtgagattgccatccgtgtgttccgggcctgcacggagctgggcatccgcaccgtagccatctactctgagcaggacacgggccagatgcaccggcagaaagcagatgaagcctatctcatcggccgcggcctggcccccgtgcaggcctacctgcacatcccagacatcatcaaggtggccaaggagaacaacgtagatgcagtgcaccctggctacgggttcctctctgagcgagcggacttcgcccaggcctgccaggatgcaggggtccggtttattgggccaagcccagaagtggtccgcaagatgggagacaaggtggaggcccgggccatcgccattgctgcgggtgttcccgttgtccctggcacagatgcccccatcacgtccctgcatgaggcccacgagttctccaacacctacggcttccccatcatcttcaaggcggcctatgggggtggagggcgtggcatgagggtggtgcacagctacgaggagctggaggagaattacacccgggcctactcagaggctctggccgcctttgggaatggggcgctgtttgtggagaagttcatcgagaagccacggcacatcgaggtgcagatcttgggggaccagtatgggaacatcctgcacctgtacgagcgagactgctccatccagcggcggcaccagaaggtggtcgagattgcccccgccgcccacctggacccgcagcttcggactcggctcaccagcgactctgtgaaactcgctaaacaggtgggctacgagaacgcaggcaccgtggagttcctggtggacaggcacggcaagcactacttcatcgaggtcaactcccgcctgcaggtggagcacacggtcacagaggagatcaccgacgtagacctggtccatgctcagatccacgtggctgagggcaggagcctacccgacctgggcctgcggcaggagaacatccgcatcaacgggtgtgccatccagtgccgggtcaccaccgaggaccccgcgcgcagcttccagccggacaccggccgcattgaggtgttccggagcggagagggcatgggcatccgcctggataatgcttccgccttccaaggagccgtcatctcgccccactacgactccctgctggtcaaagtcattgcccacggcaaagaccaccccacggccgccaccaagatgagcagggcccttgcggagttccgcgtccgaggtgtgaagaccaacatcgccttcctgcagaatgtgctcaacaaccagcagttcctggcaggcactgtggacacccagttcatcgacgagaacccagagctgttccagctgcggcctgcacagaaccgggcccaaaagctgttgcactacctcggccatgtcatggtaaacggtccaaccaccccgattcccgtcaaggccagccccagccccacggaccccgttgtccctgcagtgcccataggcccgcccccggctggtttcagagacatcctgctgcgagaggggcctgagggctttgctcgagctgtgcggaaccacccggggctgctgctgatggacacgaccttcagggacgcccaccagtcactgctggccactcgtgtgcgcacccacgatctcaaaaagatcgccccctatgttgcccacaacttcagcaagctcttcagcatggagaactggggaggagccacgtttgacgtcgccatgcgcttcctgtatgagtgcccctggcggcggctgcaggagctccgggagctcatccccaacatccctttccagatgctgctgcggggggccaatgctgtgggctacaccaactacccagacaacgtggtcttcaagttctgtgaagtggccaaagagaatggcatggatgtcttccgtgtgtttgactccctcaactacttgcccaacatgctgctgggcatggaggcggcaggaagtgccggaggcgtggtggaggctgccatctcatacacgggcgacgtggccgaccccagccgcaccaagtactcactgcagtactacatgggcttggccgaagagctggtgcgagctggcacccacatcctgtgcatcaaggacatggccgggctgctgaagcccacggcctgcaccatgctggtcagctccctccgggaccgcttccccgacctcccactgcacatccacacccacgacacgtcaggggcaggcgtggcagccatgctggcctgtgcccaggctggagctgatgtggtggatgtggcagctgattccatgtctgggatgacttcacagcccagcatgggggccctggtggcctgtaccagagggactcccctggacacagaggtgcccatggagcgcgtgtttgactacagtgagtactgggagggggctcggggactgtacgcggccttcgactgcacggccaccatgaagtctggcaactcggacgtgtatgaaaatgagatcccagggggccagtacaccaacctgcacttccaggcccacagcatggggcttggctccaagttcaaggaggtcaagaaggcctatgtggaggccaaccagatgctgggcgatctcatcaaggtgacgccctcctccaagatcgtgggggacctggcccagtttatggtgcagaatggattgagccgggcagaggccgaagctcaggcggaagagctgtcctttccccgctccgtggtggagttcctgcagggctacatcggtgtcccccatggggggttccccgaaccctttcgctctaaggtactgaaggacctgccaagggtggaggggcggcctggagcctccctccctcccctggatctgcaggcactggagaaggagctggtagaccggcatggggaggaggtgacgccggaagatgtgctctcagcagctatgtaccccgatgtgtttgcccacttcaaggacttcactgccacctttggccccctggatagcctgaatactcgcctcttcctgcagggacccaagatcgcagaggagtttgaggtggagctggagcggggcaagacgctgcacatcaaagccctggccgtgagcgacctgaaccgggccggccagaggcaggtcttctttgagctcaatgggcagctgcggtccatcttggtcaaggacacccaggccatgaaggagatgcacttccaccccaaggccctaaaggacgtgaagggccagatcggggcgcccatgcctgggaaggtgatagacatcaaagtggtggcaggggccaaggtggccaagggccagcccctgtgtgtgctcagtgccatgaagatggagactgtggtgacctcacccatggagggtactgtccgcaaggttcatgtgaccaaggacatgacactggaaggtgacgacctcatcctggagatcgagtgatcttgccccagaccggcagcctggccatccccaagccttcaacagaagctgtgctgccacggcaggcccaggccagccagtgcccgaggccaggaaggccgggccgtggaggtcctgtgtccacagctggacaggagagacaccgcctgcggtggttcattcctttcagccatcgtcctttcctccggcggacagctgcttacatgttcatctcttgccaaataagggtcccctcctcactggagactacaagtggtgggtcaggtggtcctaggacccaggggaggtttaggggtcctatctcctgggggaaggggagatcaagatgtcccaggtcctgggaagtttactcaataaagctggctttcccctgccctc

SEQ ID NO: 8641 - DNA, 3953 bp, control sequence; identical to SEQ ID NO: 8640

SEQ ID NO: 8642 - DNA, 3953 bp, control sequence; identical to SEQ ID NO: 8640

SEQ ID NO: 8643 - DNA, 3953 bp, control sequence; identical to SEQ ID NO: 8640

SEQ ID NO: 8644 - DNA, 2826 bp, control sequence
ccggttaggggccgccatcccctcagagcgtcgggatatcgggtggcggctcgggacggaggacgcgctagtgttcttctgtgtggcagttcagaatgatggatcaagctagatcagcattctctaacttgtttggtggagaaccattgtcatatacccggttcagcctggctcggcaagtagatggcgataacagtcatgtggagatgaaacttgctgtagatgaagaagaaaatgctgacaataacacaaaggccaatgtcacaaaaccaaaaaggtgtagtggaagtatctgctatgggactattgctgtgatcgtctttttcttgattggatttatgattggctacttgggctattgtaaaggggtagaaccaaaaactgagtgtgagagactggcaggaaccgagtctccagtgagggaggagccaggagaggacttccctgcagcacgtcgcttatattgggatgacctgaagagaaagttgtcggagaaactggacagcacagacttcaccagcaccatcaagctgctgaatgaaaattcatatgtccctcgtgaggctggatctcaaaaagatgaaaatcttgcgttgtatgttgaaaatcaatttcgtgaatttaaactcagcaaagtctggcgtgatcaacattttgttaagattcaggtcaaagacagcgctcaaaactcggtgatcatagttgataagaacggtagacttgtttacctggtggagaatcctgggggttatgtggcgtatagtaaggctgcaacagttactggtaaactggtccatgctaattttggtactaaaaaagattttgaggatttatacactcctgtgaatggatctatagtgattgtcagagcagggaaaatcacgtttgcagaaaaggttgcaaatgctgaaagcttaaatgcaattggtgtgttgatatacatggaccagactaaatttcccattgttaacgcagaactttcattctttggacatgctcatctggggacaggtgacccttacacacctggattcccttccttcaatcacactcagtttccaccatctcggtcatcaggattgcctaatatacctgtccagacaatctccagagctgctgcagaaaagctgtttgggaatatggaaggagactgtccctctgactggaaaacagactctacatgtaggatggtaacctcagaaagcaagaatgtgaagctcactgtgagcaatgtgctgaaagagataaaaattcttaacatctttggagttattaaaggctttgtagaaccagatcactatgttgtagttggggcccagagagatgcatggggccctggagctgcaaaatccggtgtaggcacagctctcctattgaaacttgcccagatgttctcagatatggtcttaaaagatgggtttcagcccagcagaagcattatctttgccagttggagtgctggagactttggatcggttggtgccactgaatggctagagggatacctttcgtccctgcatttaaaggctttcacttatattaatctggataaagcggttcttggtaccagcaacttcaaggtttctgccagcccactgttgtatacgcttattgagaaaacaatgcaaaatgtgaagcatccggttactgggcaatttctatatcaggacagcaactgggccagcaaagttgagaaactcactttagacaatgctgctttccctttccttgcatattctggaatcccagcagtttctttctgtttttgcgaggacacagattatccttatttgggtaccaccatggacacctataaggaactgattgagaggattcctgagttgaacaaagtggcacgagcagctgcagaggtcgctggtcagttcgtgattaaactaacccatgatgttgaattgaacctggactatgagaggtacaacagccaactgctttcatttgtgagggatctgaaccaatacagagcagacataaaggaaatgggcctgagtttacagtggctgtattctgctcgtggagacttcttccgtgctacttccagactaacaacagatttcgggaatgctgagaaaacagacagatttgtcatgaagaaactcaatgatcgtgtcatgagagtggagtatcacttcctctctccctacgtatctccaaaagagtctcctttccgacatgtcttctggggctccggctctcacacgctgccagctttactggagaacttgaaactgcgtaaacaaaataacggtgcttttaatgaaacgctgttcagaaaccagttggctctagctacttggactattcagggagctgcaaatgccctctctggtgacgtttgggacattgacaatgagttttaaatgtgatacccatagcttccatgagaacagcagggtagtctggtttctagacttgtgctgatcgtgctaaattttcagtaggcctacaaaacctgatgttaaaattccatcccatcatcttggtactactagatgtctttaggcagcagcttttaatacagggtagataacctgtacttcaagttaaagtgaataaccacttaaaaaatgtccatgatggaatattcccctatctctagaattttaagtgctttgtaatgggaactgcctctttcctgttgttgttaatgaaaatgtcagaaaccagttatgtgaatgatctctctgaatcctaagggctggtctctgctgaaggttgtaagtggtcgcttactttgagtgatcctccaacttcatttgatgctaaataggagataccaggttgaaagaccttctccaaatgagatct

SEQ ID NO: 8645 - DNA, 2826 bp, control sequence; identical to SEQ ID NO: 8644

SEQ ID NO: 8646 - DNA, 2826 bp, control sequence; identical to SEQ ID NO: 8644

SEQ ID NO: 8647 - DNA, 25 bp, probe
tatcaactctgtaaactctcgggaa

SEQ ID NO: 8648 - DNA, 25 bp, probe
ttatcaactctgtaaactctcggga

SEQ ID NO: 8649 - DNA, 25 bp, probe
tttatcaactctgtaaactctcggg

SEQ ID NO: 8650 - DNA, 25 bp, probe
atcaactctgtaaactctcgggaaa

SEQ ID NO: 8651 - DNA, 25 bp, probe
agtttcactttgggtagatggatat

SEQ ID NO: 8652 - DNA, 25 bp, probe
atttatcaactctgtaaactctcgg

SEQ ID NO: 8653 - DNA, 25 bp, probe
gtttcactttgggtagatggatata

SEQ ID NO: 8654 - DNA, 25 bp, probe
tcaactctgtaaactctcgggaaag

SEQ ID NO: 8655 - DNA, 25 bp, probe
tcactttgggtagatggatataatc

SEQ ID NO: 8656 - DNA, 25 bp, probe
tttcactttgggtagatggatataa

SEQ ID NO: 8657 - DNA, 25 bp, probe
ttcactttgggtagatggatataat

SEQ ID NO: 8658 - DNA, 25 bp, probe
cacctgtggaataaagatccttctt

SEQ ID NO: 8659 - DNA, 25 bp, probe
acctgtggaataaagatccttctta

SEQ ID NO: 8660 - DNA, 25 bp, probe
cctgtggaataaagatccttcttac

SEQ ID NO: 8661 - DNA, 25 bp, probe
caactctgtaaactctcgggaaagc

SEQ ID NO: 8662 - DNA, 25 bp, probe
aagtttcactttgggtagatggata

SEQ ID NO: 8663 - DNA, 25 bp, probe
ctgtggaataaagatccttcttaca

SEQ ID NO: 8664 - DNA, 25 bp, probe
aattcatgcactagtctccatttct

SEQ ID NO: 8665 - DNA, 25 bp, probe
gaattcatgcactagtctccatttc

SEQ ID NO: 8666 - DNA, 25 bp, probe
tatttatcaactctgtaaactctcg

SEQ ID NO: 8667 - DNA, 25 bp, probe
attcatgcactagtctccatttctg

SEQ ID NO: 8668 - DNA, 25 bp, probe
aactctgtaaactctcgggaaagca

SEQ ID NO: 8669 - DNA, 25 bp, probe
ctgtaaactctcgggaaagcacttg

SEQ ID NO: 8670 - DNA, 25 bp, probe
tctgtaaactctcgggaaagcactt

SEQ ID NO: 8671 - DNA, 25 bp, probe
ccacctgtggaataaagatccttct

SEQ ID NO: 8672 - DNA, 25 bp, probe
ggtagatggatataatcctcccgta

SEQ ID NO: 8673 - DNA, 25 bp, probe
gtaaactctcgggaaagcacttgtg

SEQ ID NO: 8674 - DNA, 25 bp, probe
gatggatataatcctcccgtaaagc

SEQ ID NO: 8675 - DNA, 25 bp, probe
ttgggtagatggatataatcctccc

SEQ ID NO: 8676 - DNA, 25 bp, probe
agatggatataatcctcccgtaaag

SEQ ID NO: 8677 - DNA, 25 bp, probe
tttgggtagatggatataatcctcc

SEQ ID NO: 8678 - DNA, 25 bp, probe
ctctgtaaactctcgggaaagcact

SEQ ID NO: 8679 - DNA, 25 bp, probe
ataatcctcccgtaaagcttcattt

SEQ ID NO: 8680 - DNA, 25 bp, probe
tataatcctcccgtaaagcttcatt

SEQ ID NO: 8681 - DNA, 25 bp, probe
gatataatcctcccgtaaagcttca

SEQ ID NO: 8682 - DNA, 25 bp, probe
gtagatggatataatcctcccgtaa

SEQ ID NO: 8683 - DNA, 25 bp, probe
atataatcctcccgtaaagcttcat

SEQ ID NO: 8684 - DNA, 25 bp, probe
tgtaaactctcgggaaagcacttgt

SEQ ID NO: 8685 - DNA, 25 bp, probe
actttgggtagatggatataatcct

SEQ ID NO: 8686 - DNA, 25 bp, probe
cactttgggtagatggatataatcc

SEQ ID NO: 8687 - DNA, 25 bp, probe
taatcctcccgtaaagcttcatttg

SEQ ID NO: 8688 - DNA, 25 bp, probe
actctgtaaactctcgggaaagcac

SEQ ID NO: 8689 - DNA, 25 bp, probe
gcaagaaaaccactatcaccctttt

SEQ ID NO: 8690 - DNA, 25 bp, probe
atggatataatcctcccgtaaagct

SEQ ID NO: 8691 - DNA, 25 bp, probe
aattctcttgtgactctcagcgtat

SEQ ID NO: 8692 - DNA, 25 bp, probe
attctcttgtgactctcagcgtatg

SEQ ID NO: 8693 - DNA, 25 bp, probe
tataatggatatgttgcgggtattc

SEQ ID NO: 8694 - DNA, 25 bp, probe
ggtattccaaattctcttgtgactc

SEQ ID NO: 8695 - DNA, 25 bp, probe
attccaaattctcttgtgactctca

SEQ ID NO: 8696 - DNA, 25 bp, probe
gatatgttgcgggtattccaaattc

SEQ ID NO: 8697 - DNA, 25 bp, probe
gggtattccaaattctcttgtgact

SEQ ID NO: 8698 - DNA, 25 bp, probe
atatgttgcgggtattccaaattct

SEQ ID NO: 8699 - DNA, 25 bp, probe
ttccaaattctcttgtgactctcag

SEQ ID NO: 8700 - DNA, 25 bp, probe
gtattccaaattctcttgtgactct

SEQ ID NO: 8701 - DNA, 25 bp, probe
acatctcatatggaattgaaccgat

SEQ ID NO: 8702 - DNA, 25 bp, probe
tattccaaattctcttgtgactctc

SEQ ID NO: 8703 - DNA, 25 bp, probe
tatgttgcgggtattccaaattctc

SEQ ID NO: 8704 - DNA, 25 bp, probe
aacatctcatatggaattgaaccga

SEQ ID NO: 8705 - DNA, 25 bp, probe
gatggaggctgtatcaggatttata

SEQ ID NO: 8706 - DNA, 25 bp, probe
atctcatatggaattgaaccgatgg

SEQ ID NO: 8707 - DNA, 25 bp, probe
ctcttgtgactctcagcgtatgttc

SEQ ID NO: 8708 - DNA, 25 bp, probe
tggtttaattcagagtatcaagtca

SEQ ID NO: 8709 - DNA, 25 bp, probe
atggaggctgtatcaggatttatac

SEQ ID NO: 8710 - DNA, 25 bp, probe
gaattgaaccgatggaggctgtatc

SEQ ID NO: 8711 - DNA, 25 bp, probe
cgggtattccaaattctcttgtgac

SEQ ID NO: 8712 - DNA, 25 bp, probe
cttgtgactctcagcgtatgttcag

SEQ ID NO: 8713 - DNA, 25 bp, probe
ctcatatggaattgaaccgatggag

SEQ ID NO: 8714 - DNA, 25 bp, probe
gagtgtcagcagctatagtgaagtt

SEQ ID NO: 8715 - DNA, 25 bp, probe
aaattctcttgtgactctcagcgta

SEQ ID NO: 8716 - DNA, 25 bp, probe
ataatggatatgttgcgggtattcc

SEQ ID NO: 8717 - DNA, 25 bp, probe
tctcatatggaattgaaccgatgga

SEQ ID NO: 8718 - DNA, 25 bp, probe
tctcttgtgactctcagcgtatgtt

SEQ ID NO: 8719 - DNA, 25 bp, probe
ttctcttgtgactctcagcgtatgt

SEQ ID NO: 8720 - DNA, 25 bp, probe
ggtttaattcagagtatcaagtcag

SEQ ID NO: 8721 - DNA, 25 bp, probe
aaacgattccgaaacataatatcaa

SEQ ID NO: 8722 - DNA, 25 bp, probe
ttataatggatatgttgcgggtatt

SEQ ID NO: 8723 - DNA, 25 bp, probe
atatggaattgaaccgatggaggct

SEQ ID NO: 8724 - DNA, 25 bp, probe
tcttgtgactctcagcgtatgttca

SEQ ID NO: 8725 - DNA, 25 bp, probe
cgatggaggctgtatcaggatttat

SEQ ID NO: 8726 - DNA, 25 bp, probe
aacgattccgaaacataatatcaat

SEQ ID NO: 8727 - DNA, 25 bp, probe
aaatttggagtgtcagcagctatag

SEQ ID NO: 8728 - DNA, 25 bp, probe
atgctgacactaatattctcttaga

SEQ ID NO: 8729 - DNA, 25 bp, probe
ggatatgttgcgggtattccaaatt

SEQ ID NO: 8730 - DNA, 25 bp, probe
gttgcgggtattccaaattctcttg

SEQ ID NO: 8731 - DNA, 25 bp, probe
acgattccgaaacataatatcaatt

SEQ ID NO: 8732 - DNA, 25 bp, probe
gcagctatagtgaagtttcaagaag

SEQ ID NO: 8733 - DNA, 25 bp, probe
agcagctatagtgaagtttcaagaa

SEQ ID NO: 8734 - DNA, 25 bp, probe
agctatagtgaagtttcaagaaggg

SEQ ID NO: 8735 - DNA, 25 bp, probe
gtaataggaagaggaagttatgcca

SEQ ID NO: 8736 - DNA, 25 bp, probe
ggtaataggaagaggaagttatgcc

SEQ ID NO: 8737 - DNA, 25 bp, probe
taataggaagaggaagttatgccaa

SEQ ID NO: 8738 - DNA, 25 bp, probe
aagagcttgttaatgatgatgagga

SEQ ID NO: 8739 - DNA, 25 bp, probe
agagcttgttaatgatgatgaggat

SEQ ID NO: 8740 - DNA, 25 bp, probe
gcttgttaatgatgatgaggatatt

SEQ ID NO: 8741 - DNA, 25 bp, probe
aataggaagaggaagttatgccaaa

SEQ ID NO: 8742 - DNA, 25 bp, probe
cgggtaataggaagaggaagttatg

SEQ ID NO: 8743 - DNA, 25 bp, probe
ataggaagaggaagttatgccaaag

SEQ ID NO: 8744 - DNA, 25 bp, probe
gggtaataggaagaggaagttatgc

SEQ ID NO: 8745 - DNA, 25 bp, probe
gagcttgttaatgatgatgaggata

SEQ ID NO: 8746 - DNA, 25 bp, probe
aggaagaggaagttatgccaaagta

SEQ ID NO: 8747 - DNA, 25 bp, probe
taggaagaggaagttatgccaaagt

SEQ ID NO: 8748 - DNA, 25 bp, probe
agcttgttaatgatgatgaggatat

SEQ ID NO: 8749 - DNA, 25 bp, probe
ggaagaggaagttatgccaaagtac

SEQ ID NO: 8750 - DNA, 25 bp, probe
aaagagcttgttaatgatgatgagg

SEQ ID NO: 8751 - DNA, 25 bp, probe
ttgttaatgatgatgaggatattga

SEQ ID NO: 8752 - DNA, 25 bp, probe
tgttaatgatgatgaggatattgat

SEQ ID NO: 8753 - DNA, 25 bp, probe
cttgttaatgatgatgaggatattg

SEQ ID NO: 8754 - DNA, 25 bp, probe
cagatcgtatttatgcaatgaaagt

SEQ ID NO: 8755 - DNA, 25 bp, probe
acagatcgtatttatgcaatgaaag

SEQ ID NO: 8756 - DNA, 25 bp, probe
cgtatttatgcaatgaaagtttgtg

SEQ ID NO: 8757 - DNA, 25 bp, probe
tcgtatttatgcaatgaaagtttgt

SEQ ID NO: 8758 - DNA, 25 bp, probe
aacagatcgtatttatgcaatgaaa

SEQ ID NO: 8759 - DNA, 25 bp, probe
aaacagatcgtatttatgcaatgaa

SEQ ID NO: 8760 - DNA, 25 bp, probe
ccgggtaataggaagaggaagttat

SEQ ID NO: 8761 - DNA, 25 bp, probe
agatcgtatttatgcaatgaaagtt

SEQ ID NO: 8762 - DNA, 25 bp, probe
gaagaggaagttatgccaaagtact

SEQ ID NO: 8763 - DNA, 25 bp, probe
aagaggaagttatgccaaagtactg

SEQ ID NO: 8764 - DNA, 25 bp, probe
gaggaagttatgccaaagtactgtt

SEQ ID NO: 8765 - DNA, 25 bp, probe
aggaagttatgccaaagtactgttg

SEQ ID NO: 8766 - DNA, 25 bp, probe
agaggaagttatgccaaagtactgt

SEQ ID NO: 8767 - DNA, 25 bp, probe
atcgtatttatgcaatgaaagtttg

SEQ ID NO: 8768 - DNA, 25 bp, probe
ttaatgatgatgaggatattgattg

SEQ ID NO: 8769 - DNA, 25 bp, probe
gttaatgatgatgaggatattgatt

SEQ ID NO: 8770 - DNA, 25 bp, probe
gatcgtatttatgcaatgaaagttt

SEQ ID NO: 8771 - DNA, 25 bp, probe
atttatgcaatgaaagtttgtgaaa

SEQ ID NO: 8772 - DNA, 25 bp, probe
gtatttatgcaatgaaagtttgtga

SEQ ID NO: 8773 - DNA, 25 bp, probe
tccgggtaataggaagaggaagtta

SEQ ID NO: 8774 - DNA, 25 bp, probe
aaaagagcttgttaatgatgatgag

SEQ ID NO: 8775 - DNA, 25 bp, probe
tttgatttgctccgggtaataggaa

SEQ ID NO: 8776 - DNA, 25 bp, probe
gattttgatttgctccgggtaatag

SEQ ID NO: 8777 - DNA, 25 bp, probe
tatttatgcaatgaaagtttgtgaa

SEQ ID NO: 8778 - DNA, 25 bp, probe
gtcttcaggattttgatttgctccg

SEQ ID NO: 8779 - DNA, 25 bp, probe
gttcatggaagccatagagtacatc

SEQ ID NO: 8780 - DNA, 25 bp, probe
ggttcatggaagccatagagtacat

SEQ ID NO: 8781 - DNA, 25 bp, probe
ttcatggaagccatagagtacatcg

SEQ ID NO: 8782 - DNA, 25 bp, probe
ctggttcatggaagccatagagtac

SEQ ID NO: 8783 - DNA, 25 bp, probe
atttcgttgctgtcggtggaagata

SEQ ID NO: 8784 - DNA, 25 bp, probe
tggttcatggaagccatagagtaca

SEQ ID NO: 8785 - DNA, 25 bp, probe
ctggcctacctgatgatgaagaaac

SEQ ID NO: 8786 - DNA, 25 bp, probe
tcatggaagccatagagtacatcga

SEQ ID NO: 8787 - DNA, 25 bp, probe
tttcgttgctgtcggtggaagataa

SEQ ID NO: 8788 - DNA, 25 bp, probe
cctggttcatggaagccatagagta

SEQ ID NO: 8789 - DNA, 25 bp, probe
aagataaccacaaggccgacatcag

SEQ ID NO: 8790 - DNA, 25 bp, probe
gaagataaccacaaggccgacatca

SEQ ID NO: 8791 - DNA, 25 bp, probe
cctggcctacctgatgatgaagaaa

SEQ ID NO: 8792 - DNA, 25 bp, probe
catggaagccatagagtacatcgat

SEQ ID NO: 8793 - DNA, 25 bp, probe
ctcctggttcatggaagccatagag

SEQ ID NO: 8794 - DNA, 25 bp, probe
cctacctgatgatgaagaaacgggg

SEQ ID NO: 8795 - DNA, 25 bp, probe
tggcctacctgatgatgaagaaacg

SEQ ID NO: 8796 - DNA, 25 bp, probe
tcctggttcatggaagccatagagt

SEQ ID NO: 8797 - DNA, 25 bp, probe
gccattgtgttaaaggaaaggattt

SEQ ID NO: 8798 - DNA, 25 bp, probe
ttgtgttaaaggaaaggatttaccg

SEQ ID NO: 8799 - DNA, 25 bp, probe
attgtgttaaaggaaaggatttacc

SEQ ID NO: 8800 - DNA, 25 bp, probe
ccattgtgttaaaggaaaggattta

SEQ ID NO: 8801 - DNA, 25 bp, probe
catgtttgaagatgatggcaggaag

SEQ ID NO: 8802 - DNA, 25 bp, probe
cttggagtgctcatgtttgaagatg

SEQ ID NO: 8803 - DNA, 25 bp, probe
atgtttgaagatgatggcaggaagg

SEQ ID NO: 8804 - DNA, 25 bp, probe
ttgaagatgatggcaggaaggtctc

SEQ ID NO: 8805 - DNA, 25 bp, probe
cattgtgttaaaggaaaggatttac

SEQ ID NO: 8806 - DNA, 25 bp, probe
gtttgaagatgatggcaggaaggtc

SEQ ID NO: 8807 - DNA, 25 bp, probe
tgtgttaaaggaaaggatttaccgg

SEQ ID NO: 8808 - DNA, 25 bp, probe
tttgaagatgatggcaggaaggtct

SEQ ID NO: 8809 - DNA, 25 bp, probe
ggccattgtgttaaaggaaaggatt

SEQ ID NO: 8810 - DNA, 25 bp, probe
tcttggagtgctcatgtttgaagat

SEQ ID NO: 8811 - DNA, 25 bp, probe
gagtgctcatgtttgaagatgatgg

SEQ ID NO: 8812 - DNA, 25 bp, probe
ggagtgctcatgtttgaagatgatg

SEQ ID NO: 8813 - DNA, 25 bp, probe
tggagtgctcatgtttgaagatgat

SEQ ID NO: 8814 - DNA, 25 bp, probe
gtgttaaaggaaaggatttaccggc

SEQ ID NO: 8815 - DNA, 25 bp, probe
ttggagtgctcatgtttgaagatga

SEQ ID NO: 8816 - DNA, 25 bp, probe
tgtttgaagatgatggcaggaaggt

SEQ ID NO: 8817 - DNA, 25 bp, probe
tcatgtttgaagatgatggcaggaa

SEQ ID NO: 8818 - DNA, 25 bp, probe
ctcttggagtgctcatgtttgaaga

SEQ ID NO: 8819 - DNA, 25 bp, probe
ttacatgctcctggaaattttaaga

SEQ ID NO: 8820 - DNA, 25 bp, probe
ctcatgtttgaagatgatggcagga

SEQ ID NO: 8821 - DNA, 25 bp, probe
attacatgctcctggaaattttaag

SEQ ID NO: 8822 - DNA, 25 bp, probe
ttaaaggaaaggatttaccggccag

SEQ ID NO: 8823 - DNA, 25 bp, probe
gctcttggagtgctcatgtttgaag

SEQ ID NO: 8824 - DNA, 25 bp, probe
gttaaaggaaaggatttaccggcca

SEQ ID NO: 8825 - DNA, 25 bp, probe
tgttaaaggaaaggatttaccggcc

SEQ ID NO: 8826 - DNA, 25 bp, probe
ctaattacatgctcctggaaatttt

SEQ ID NO: 8827 - DNA, 25 bp, probe
cggccattgtgttaaaggaaaggat

SEQ ID NO: 8828 - DNA, 25 bp, probe
agtgctcatgtttgaagatgatggc

SEQ ID NO: 8829 - DNA, 25 bp, probe
aattacatgctcctggaaattttaa

SEQ ID NO: 8830 - DNA, 25 bp, probe
ggaccaaatggttatttaacctggg

SEQ ID NO: 8831 - DNA, 25 bp, probe
gggaccaaatggttatttaacctgg

SEQ ID NO: 8832 - DNA, 25 bp, probe
tgctcatgtttgaagatgatggcag

SEQ ID NO: 8833 - DNA, 25 bp, probe
gtgctcatgtttgaagatgatggca

SEQ ID NO: 8834 - DNA, 25 bp, probe
gctcatgtttgaagatgatggcagg

SEQ ID NO: 8835 - DNA, 25 bp, probe
taattacatgctcctggaaatttta

SEQ ID NO: 8836 - DNA, 25 bp, probe
cttggggaccaaatggttatttaac

SEQ ID NO: 8837 - DNA, 25 bp, probe
taaaggaaaggatttaccggccagg

SEQ ID NO: 8838 - DNA, 25 bp, probe
ccttggggaccaaatggttatttaa

SEQ ID NO: 8839 - DNA, 25 bp, probe
caggaaaagccaagaattggtttct

SEQ ID NO: 8840 - DNA, 25 bp, probe
ttggggaccaaatggttatttaacc

SEQ ID NO: 8841 - DNA, 25 bp, probe
acttggagaaggattactgtagatg

SEQ ID NO: 8842 - DNA, 25 bp, probe
cttggagaaggattactgtagatgc

SEQ ID NO: 8843 - DNA, 25 bp, probe
aacttggagaaggattactgtagat

SEQ ID NO: 8844 - DNA, 25 bp, probe
cacagacttatggatcgttatggag

SEQ ID NO: 8845 - DNA, 25 bp, probe
aagaacacagacttatggatcgtta

SEQ ID NO: 8846 - DNA, 25 bp, probe
gaacacagacttatggatcgttatg

SEQ ID NO: 8847 - DNA, 25 bp, probe
agaacacagacttatggatcgttat

SEQ ID NO: 8848 - DNA, 25 bp, probe
aacacagacttatggatcgttatgg

SEQ ID NO: 8849 - DNA, 25 bp, probe
gcagtatatggaatcaggaatctta

SEQ ID NO: 8850 - DNA, 25 bp, probe
acacagacttatggatcgttatgga

SEQ ID NO: 8851 - DNA, 25 bp, probe
agacttatggatcgttatggagtac

SEQ ID NO: 8852 - DNA, 25 bp, probe
cagacttatggatcgttatggagta

SEQ ID NO: 8853 - DNA, 25 bp, probe
acagacttatggatcgttatggagt

SEQ ID NO: 8854 - DNA, 25 bp, probe
ggaatcaggaatcttaacttcatgt

SEQ ID NO: 8855 - DNA, 25 bp, probe
tggaatcaggaatcttaacttcatg

SEQ ID NO: 8856 - DNA, 25 bp, probe
atggaatcaggaatcttaacttcat

SEQ ID NO: 8857 - DNA, 25 bp, probe
tcaggaatcttaacttcatgtgagc

SEQ ID NO: 8858 - DNA, 25 bp, probe
taagaacacagacttatggatcgtt

SEQ ID NO: 8859 - DNA, 25 bp, probe
ttaagaacacagacttatggatcgt

SEQ ID NO: 8860 - DNA, 25 bp, probe
tcttaacttcatgtgagctattgga

SEQ ID NO: 8861 - DNA, 25 bp, probe
cttaacttcatgtgagctattggag

SEQ ID NO: 8862 - DNA, 25 bp, probe
aggaatcttaacttcatgtgagcta

SEQ ID NO: 8863 - DNA, 25 bp, probe
atcttaacttcatgtgagctattgg

SEQ ID NO: 8864 - DNA, 25 bp, probe
atcaggaatcttaacttcatgtgag

SEQ ID NO: 8865 - DNA, 25 bp, probe
caggaatcttaacttcatgtgagct

SEQ ID NO: 8866 - DNA, 25 bp, probe
ttaacttcatgtgagctattggagt

SEQ ID NO: 8867 - DNA, 25 bp, probe
tatggaatcaggaatcttaacttca

SEQ ID NO: 8868 - DNA, 25 bp, probe
tgcagtatatggaatcaggaatctt

SEQ ID NO: 8869 - DNA, 25 bp, probe
atgcagtatatggaatcaggaatct

SEQ ID NO: 8870 - DNA, 25 bp, probe
tgtagatgcagtatatggaatcagg

SEQ ID NO: 8871 - DNA, 25 bp, probe
gaatcaggaatcttaacttcatgtg

SEQ ID NO: 8872 - DNA, 25 bp, probe
gtagatgcagtatatggaatcagga

SEQ ID NO: 8873 - DNA, 25 bp, probe
agatgcagtatatggaatcaggaat

SEQ ID NO: 8874 - DNA, 25 bp, probe
aatcagacctccaggagataatcaa

SEQ ID NO: 8875 - DNA, 25 bp, probe
ggaatcttaacttcatgtgagctat

SEQ ID NO: 8876 - DNA, 25 bp, probe
aatcaggaatcttaacttcatgtga

SEQ ID NO: 8877 - DNA, 25 bp, probe
gatgcagtatatggaatcaggaatc

SEQ ID NO: 8878 - DNA, 25 bp, probe
agagaaacttggagaaggattactg

SEQ ID NO: 8879 - DNA, 25 bp, probe
gagaaacttggagaaggattactgt

SEQ ID NO: 8880 - DNA, 25 bp, probe
gaatcagacctccaggagataatca

SEQ ID NO: 8881 - DNA, 25 bp, probe
ttggagaaggattactgtagatgca

SEQ ID NO: 8882 - DNA, 25 bp, probe
gtcttagagaaacttggagaaggat

SEQ ID NO: 8883 - DNA, 25 bp, probe
tagatgcagtatatggaatcaggaa

SEQ ID NO: 8884 - DNA, 25 bp, probe
aaacttggagaaggattactgtaga

SEQ ID NO: 8885 - DNA, 25 bp, probe
taaagagttccacaaagcagattac

SEQ ID NO: 8886 - DNA, 25 bp, probe
cttaaagagttccacaaagcagatt

SEQ ID NO: 8887 - DNA, 25 bp, probe
ttaaagagttccacaaagcagatta

SEQ ID NO: 8888 - DNA, 25 bp, probe
aaagagttccacaaagcagattact

SEQ ID NO: 8889 - DNA, 25 bp, probe
tcttaaagagttccacaaagcagat

SEQ ID NO: 8890 - DNA, 25 bp, probe
ttcttaaagagttccacaaagcaga

SEQ ID NO: 8891 - DNA, 25 bp, probe
gttcttaaagagttccacaaagcag

SEQ ID NO: 8892 - DNA, 25 bp, probe
atgttcttaaagagttccacaaagc

SEQ ID NO: 8893 - DNA, 25 bp, probe
aagagttccacaaagcagattactg

SEQ ID NO: 8894 - DNA, 25 bp, probe
tgttcttaaagagttccacaaagca

SEQ ID NO: 8895 - DNA, 25 bp, probe
cagcttggatgttcttaaagagttc

SEQ ID NO: 8896 - DNA, 25 bp, probe
ggatgttcttaaagagttccacaaa

SEQ ID NO: 8897 - DNA, 25 bp, probe
gatgttcttaaagagttccacaaag

SEQ ID NO: 8898 - DNA, 25 bp, probe
agcttggatgttcttaaagagttcc

SEQ ID NO: 8899 - DNA, 25 bp, probe
ccagcttggatgttcttaaagagtt

SEQ ID NO: 8900 - DNA, 25 bp, probe
gccagcttggatgttcttaaagagt

SEQ ID NO: 8901 - DNA, 25 bp, probe
cttggatgttcttaaagagttccac

SEQ ID NO: 8902 - DNA, 25 bp, probe
ttggatgttcttaaagagttccaca

SEQ ID NO: 8903 - DNA, 25 bp, probe
gcttggatgttcttaaagagttcca

SEQ ID NO: 8904 - DNA, 25 bp, probe
aagatccgggtcatacatccacatc

SEQ ID NO: 8905 - DNA, 25 bp, probe
caagatccgggtcatacatccacat

SEQ ID NO: 8906 - DNA, 25 bp, probe
ggccagcttggatgttcttaaagag

SEQ ID NO: 8907 - DNA, 25 bp, probe
gatccgggtcatacatccacatcag

SEQ ID NO: 8908 - DNA, 25 bp, probe
agatccgggtcatacatccacatca

SEQ ID NO: 8909 - DNA, 25 bp, probe
tagaggaactaagacttcacttgga

SEQ ID NO: 8910 - DNA, 25 bp, probe
agaggaactaagacttcacttggag

SEQ ID NO: 8911 - DNA, 25 bp, probe
ttagaggaactaagacttcacttgg

SEQ ID NO: 8912 - DNA, 25 bp, probe
gatggagcctatcaggaagataatg

SEQ ID NO: 8913 - DNA, 25 bp, probe
agatggagcctatcaggaagataat

SEQ ID NO: 8914 - DNA, 25 bp, probe
atggagcctatcaggaagataatga

SEQ ID NO: 8915 - DNA, 25 bp, probe
aacgaggaatggcactcagataata

SEQ ID NO: 8916 - DNA, 25 bp, probe
ctagtgaatgtgaatatgacagtgt

SEQ ID NO: 8917 - DNA, 25 bp, probe
cagatggagcctatcaggaagataa

SEQ ID NO: 8918 - DNA, 25 bp, probe
cgaggaatggcactcagataatagt

SEQ ID NO: 8919 - DNA, 25 bp, probe
acgaggaatggcactcagataatag

SEQ ID NO: 8920 - DNA, 25 bp, probe
agtgaatgtgaatatgacagtgtct

SEQ ID NO: 8921 - DNA, 25 bp, probe
gaatacagtgaggaggaagagtctg

SEQ ID NO: 8922 - DNA, 25 bp, probe
gtgaatgtgaatatgacagtgtctt

SEQ ID NO: 8923 - DNA, 25 bp, probe
ggaactaagacttcacttggagcaa

SEQ ID NO: 8924 - DNA, 25 bp, probe
gaggaactaagacttcacttggagc

SEQ ID NO: 8925 - DNA, 25 bp, probe
cgaagacactgtatttgaagaaact

SEQ ID NO: 8926 - DNA, 25 bp, probe
ccgaagacactgtatttgaagaaac

SEQ ID NO: 8927 - DNA, 25 bp, probe
tccgaagacactgtatttgaagaaa

SEQ ID NO: 8928 - DNA, 25 bp, probe
agacactgtatttgaagaaactgac

SEQ ID NO: 8929 - DNA, 25 bp, probe
ctgattccgaagacactgtatttga

SEQ ID NO: 8930 - DNA, 25 bp, probe
cgaatacagtgaggaggaagagtct

SEQ ID NO: 8931 - DNA, 25 bp, probe
attccgaagacactgtatttgaaga

SEQ ID NO: 8932 - DNA, 25 bp, probe
gattccgaagacactgtatttgaag

SEQ ID NO: 8933 - DNA, 25 bp, probe
gtaagaacacatttgaacttggctc

SEQ ID NO: 8934 - DNA, 25 bp, probe
tagtgaatgtgaatatgacagtgtc

SEQ ID NO: 8935 - DNA, 25 bp, probe
ttccgaagacactgtatttgaagaa

SEQ ID NO: 8936 - DNA, 25 bp, probe
tgattccgaagacactgtatttgaa

SEQ ID NO: 8937 - DNA, 25 bp, probe
tgaggtttatgagaaagtaaaggct

SEQ ID NO: 8938 - DNA, 25 bp, probe
ttctgattccgaagacactgtattt

SEQ ID NO: 8939 - DNA, 25 bp, probe
acagtgtctttaaccatttagagga

SEQ ID NO: 8940 - DNA, 25 bp, probe
aacacatttgaacttggctcataat

SEQ ID NO: 8941 - DNA, 25 bp, probe
gaacacatttgaacttggctcataa

SEQ ID NO: 8942 - DNA, 25 bp, probe
gaacgaggaatggcactcagataat

SEQ ID NO: 8943 - DNA, 25 bp, probe
ttgaggtttatgagaaagtaaaggc

SEQ ID NO: 8944 - DNA, 25 bp, probe
tctgattccgaagacactgtatttg

SEQ ID NO: 8945 - DNA, 25 bp, probe
tgatgaataatcctcaggacattct

SEQ ID NO: 8946 - DNA, 25 bp, probe
aagacactgtatttgaagaaactga

SEQ ID NO: 8947 - DNA, 25 bp, probe
agaacacatttgaacttggctcata

SEQ ID NO: 8948 - DNA, 25 bp, probe
gtgtctttaaccatttagaggaact

SEQ ID NO: 8949 - DNA, 25 bp, probe
agtgtctttaaccatttagaggaac

SEQ ID NO: 8950 - DNA, 25 bp, probe
cagtgtctttaaccatttagaggaa

SEQ ID NO: 8951 - DNA, 25 bp, probe
acgaatacagtgaggaggaagagtc

SEQ ID NO: 8952 - DNA, 25 bp, probe
gacgaatacagtgaggaggaagagt

SEQ ID NO: 8953 - DNA, 25 bp, probe
ggcgtggatggcatcttataaatat

SEQ ID NO: 8954 - DNA, 25 bp, probe
aggcgtggatggcatcttataaata

SEQ ID NO: 8955 - DNA, 25 bp, probe
caggcgtggatggcatcttataaat

SEQ ID NO: 8956 - DNA, 25 bp, probe
ctggtcactgtagaagatgagcagg

SEQ ID NO: 8957 - DNA, 25 bp, probe
cctggtcactgtagaagatgagcag

SEQ ID NO: 8958 - DNA, 25 bp, probe
tatttgtccacaatgatcaactacg

SEQ ID NO: 8959 - DNA, 25 bp, probe
atttgtccacaatgatcaactacgc

SEQ ID NO: 8960 - DNA, 25 bp, probe
atatttgtccacaatgatcaactac

SEQ ID NO: 8961 - DNA, 25 bp, probe
catatttgtccacaatgatcaacta

SEQ ID NO: 8962 - DNA, 25 bp, probe
catattcattatacatggcttcttt

SEQ ID NO: 8963 - DNA, 25 bp, probe
tttgtccacaatgatcaactacgcc

SEQ ID NO: 8964 - DNA, 25 bp, probe
atgatcaactacgcccacctgtaaa

SEQ ID NO: 8965 - DNA, 25 bp, probe
aatgatcaactacgcccacctgtaa

SEQ ID NO: 8966 - DNA, 25 bp, probe
cattatacatggcttcttttatgaa

SEQ ID NO: 8967 - DNA, 25 bp, probe
ttcattatacatggcttcttttatg

SEQ ID NO: 8968 - DNA, 25 bp, probe
tgatcaactacgcccacctgtaaag

SEQ ID NO: 8969 - DNA, 25 bp, probe
caatgatcaactacgcccacctgta

SEQ ID NO: 8970 - DNA, 25 bp, probe
tcattatacatggcttcttttatga

SEQ ID NO: 8971 - DNA, 25 bp, probe
ttaatgaatcatcggcttggtactg

SEQ ID NO: 8972 - DNA, 25 bp, probe
taatgaatcatcggcttggtactga

SEQ ID NO: 8973 - DNA, 25 bp, probe
aatgaatcatcggcttggtactgaa

SEQ ID NO: 8974 - DNA, 25 bp, probe
tctttaatgaatcatcggcttggta

SEQ ID NO: 8975 - DNA, 25 bp, probe
cttctttaatgaatcatcggcttgg

SEQ ID NO: 8976 - DNA, 25 bp, probe
ctttaatgaatcatcggcttggtac

SEQ ID NO: 8977 - DNA, 25 bp, probe
tttaatgaatcatcggcttggtact

SEQ ID NO: 8978 - DNA, 25 bp, probe
ttctttaatgaatcatcggcttggt

SEQ ID NO: 8979 - DNA, 25 bp, probe
acatggcttctttaatgaatcatcg

SEQ ID NO: 8980 - DNA, 25 bp, probe
gcttctttaatgaatcatcggcttg

SEQ ID NO: 8981 - DNA, 25 bp, probe
catggcttctttaatgaatcatcgg

SEQ ID NO: 8982 - DNA, 25 bp, probe
ggcttctttaatgaatcatcggctt

SEQ ID NO: 8983 - DNA, 25 bp, probe
atggcttctttaatgaatcatcggc

SEQ ID NO: 8984 - DNA, 25 bp, probe
gtactgaaaccctgccattgaattg

SEQ ID NO: 8985 - DNA, 25 bp, probe
tacatggcttctttaatgaatcatc

SEQ ID NO: 8986 - DNA, 25 bp, probe
atgaatcatcggcttggtactgaaa

SEQ ID NO: 8987 - DNA, 25 bp, probe
tggcttctttaatgaatcatcggct

SEQ ID NO: 8988 - DNA, 25 bp, probe
tttacatggcttctttaatgaatca

SEQ ID NO: 8989 - DNA, 25 bp, probe
ttacatggcttctttaatgaatcat

SEQ ID NO: 8990 - DNA, 25 bp, probe
tgaatcatcggcttggtactgaaac

SEQ ID NO: 8991 - DNA, 25 bp, probe
tactgaaaccctgccattgaattgc

SEQ ID NO: 8992 - DNA, 25 bp, probe
tatttgtcaccatgatcaactaccc

SEQ ID NO: 8993 - DNA, 25 bp, probe
atatttgtcaccatgatcaactacc

SEQ ID NO: 8994 - DNA, 25 bp, probe
ggtactgaaaccctgccattgaatt

SEQ ID NO: 8995 - DNA, 25 bp, probe
catatttgtcaccatgatcaactac

SEQ ID NO: 8996 - DNA, 25 bp, probe
tcttttacatggcttctttaatgaa

SEQ ID NO: 8997 - DNA, 25 bp, probe
ttcttttacatggcttctttaatga

SEQ ID NO: 8998 - DNA, 25 bp, probe
gaatcatcggcttggtactgaaacc

SEQ ID NO: 8999 - DNA, 25 bp, probe
tggtactgaaaccctgccattgaat

SEQ ID NO: 9000 - DNA, 25 bp, probe
ttttacatggcttctttaatgaatc

SEQ ID NO: 9001 - DNA, 25 bp, probe
cttttacatggcttctttaatgaat

SEQ ID NO: 9002 - DNA, 25 bp, probe
attcttttacatggcttctttaatg

SEQ ID NO: 9003 - DNA, 25 bp, probe
ttggtactgaaaccctgccattgaa

SEQ ID NO: 9004 - DNA, 25 bp, probe
aaccccatattcttttacatggctt

SEQ ID NO: 9005 - DNA, 25 bp, probe
cccatattcttttacatggcttctt

SEQ ID NO: 9006 - DNA, 25 bp, probe
ccccatattcttttacatggcttct

SEQ ID NO: 9007 - DNA, 25 bp, probe
cttggtactgaaaccctgccattga

SEQ ID NO: 9008 - DNA, 25 bp, probe
accccatattcttttacatggcttc

SEQ ID NO: 9009 - DNA, 25 bp, probe
gaaccccatattcttttacatggct

SEQ ID NO: 9010 - DNA, 25 bp, probe
agaaccccatattcttttacatggc

SEQ ID NO: 9011 - DNA, 25 bp, probe
aatcatcggcttggtactgaaaccc

SEQ ID NO: 9012 - DNA, 25 bp, probe
catattcttttacatggcttcttta

SEQ ID NO: 9013 - DNA, 25 bp, probe
tgaaaccctgccattgaattgcatt

SEQ ID NO: 9014 - DNA, 25 bp, probe
atttgtcaccatgatcaactacccc

SEQ ID NO: 9015 - DNA, 25 bp, probe
ccagccattatatgagacagatact

SEQ ID NO: 9016 - DNA, 25 bp, probe
gccagccattatatgagacagatac

SEQ ID NO: 9017 - DNA, 25 bp, probe
agccagccattatatgagacagata

SEQ ID NO: 9018 - DNA, 25 bp, probe
tagccagccattatatgagacagat

SEQ ID NO: 9019 - DNA, 25 bp, probe
ctctacgctactgccatgataataa

SEQ ID NO: 9020 - DNA, 25 bp, probe
tctacgctactgccatgataataac

SEQ ID NO: 9021 - DNA, 25 bp, probe
ctacgctactgccatgataataaca

SEQ ID NO: 9022 - DNA, 25 bp, probe
gtagccagccattatatgagacaga

SEQ ID NO: 9023 - DNA, 25 bp, probe
acgctactgccatgataataacata

SEQ ID NO: 9024 - DNA, 25 bp, probe
tacgctactgccatgataataacat

SEQ ID NO: 9025 - DNA, 25 bp, probe
cgctactgccatgataataacataa

SEQ ID NO: 9026 - DNA, 25 bp, probe
cagccattatatgagacagatactg

SEQ ID NO: 9027 - DNA, 25 bp, probe
gccattatatgagacagatactgga

SEQ ID NO: 9028 - DNA, 25 bp, probe
agccattatatgagacagatactgg

SEQ ID NO: 9029 - DNA, 25 bp, probe
tgtagccagccattatatgagacag

SEQ ID NO: 9030 - DNA, 25 bp, probe
gctctacgctactgccatgataata

SEQ ID NO: 9031 - DNA, 25 bp, probe
ctgtagccagccattatatgagaca

SEQ ID NO: 9032 - DNA, 25 bp, probe
attatatgagacagatactggaagc

SEQ ID NO: 9033 - DNA, 25 bp, probe
tatgagacagatactggaagctcta

SEQ ID NO: 9034 - DNA, 25 bp, probe
atatgagacagatactggaagctct

SEQ ID NO: 9035 - DNA, 25 bp, probe
tatatgagacagatactggaagctc

SEQ ID NO: 9036 - DNA, 25 bp, probe
atgagacagatactggaagctctac

SEQ ID NO: 9037 - DNA, 25 bp, probe
aagtccagggttaagtacagaagat

SEQ ID NO: 9038 - DNA, 25 bp, probe
ttatatgagacagatactggaagct

SEQ ID NO: 9039 - DNA, 25 bp, probe
agtccagggttaagtacagaagatc

SEQ ID NO: 9040 - DNA, 25 bp, probe
gctactgccatgataataacataat

SEQ ID NO: 9041 - DNA, 25 bp, probe
caagtccagggttaagtacagaaga

SEQ ID NO: 9042 - DNA, 25 bp, probe
ccattatatgagacagatactggaa

SEQ ID NO: 9043 - DNA, 25 bp, probe
tgccatgataataacataattcaca

SEQ ID NO: 9044 - DNA, 25 bp, probe
actgccatgataataacataattca

SEQ ID NO: 9045 - DNA, 25 bp, probe
cattatatgagacagatactggaag

SEQ ID NO: 9046 - DNA, 25 bp, probe
gccatgataataacataattcacag

SEQ ID NO: 9047 - DNA, 25 bp, probe
ctgccatgataataacataattcac

SEQ ID NO: 9048 - DNA, 25 bp, probe
tgagacagatactggaagctctacg

SEQ ID NO: 9049 - DNA, 25 bp, probe
ttaagtacagaagatctaaagcggg

SEQ ID NO: 9050 - DNA, 25 bp, probe
tccagggttaagtacagaagatcta

SEQ ID NO: 9051 - DNA, 25 bp, probe
ccatgataataacataattcacagg

SEQ ID NO: 9052 - DNA, 25 bp, probe
gttaagtacagaagatctaaagcgg

SEQ ID NO: 9053 - DNA, 25 bp, probe
ggttaagtacagaagatctaaagcg

SEQ ID NO: 9054 - DNA, 25 bp, probe
taagtacagaagatctaaagcggga

SEQ ID NO: 9055 - DNA, 25 bp, probe
ccagggttaagtacagaagatctaa

SEQ ID NO: 9056 - DNA, 25 bp, probe
gggttaagtacagaagatctaaagc

SEQ ID NO: 9057 - DNA, 25 bp, probe
gtccagggttaagtacagaagatct

SEQ ID NO: 9058 - DNA, 25 bp, probe
aagtacagaagatctaaagcgggaa

SEQ ID NO: 9059 - DNA, 25 bp, probe
aaagatgacagagtgaaagaaggta

SEQ ID NO: 9060 - DNA, 25 bp, probe
agaaagatgacagagtgaaagaagg

SEQ ID NO: 9061 - DNA, 25 bp, probe
gaaagatgacagagtgaaagaaggt

SEQ ID NO: 9062 - DNA, 25 bp, probe
aagaaagatgacagagtgaaagaag

SEQ ID NO: 9063 - DNA, 25 bp, probe
aaagaaagatgacagagtgaaagaa

SEQ ID NO: 9064 - DNA, 25 bp, probe
gctgatgatctttatggctactttc

SEQ ID NO: 9065 - DNA, 25 bp, probe
tgacagagtgaaagaaggtacattt

SEQ ID NO: 9066 - DNA, 25 bp, probe
aagatgacagagtgaaagaaggtac

SEQ ID NO: 9067 - DNA, 25 bp, probe
tgctgatgatctttatggctacttt

SEQ ID NO: 9068 - DNA, 25 bp, probe
ttgctgatgatctttatggctactt

SEQ ID NO: 9069 - DNA, 25 bp, probe
tttgctgatgatctttatggctact

SEQ ID NO: 9070 - DNA, 25 bp, probe
atgacagagtgaaagaaggtacatt

SEQ ID NO: 9071 - DNA, 25 bp, probe
gatgacagagtgaaagaaggtacat

SEQ ID NO: 9072 - DNA, 25 bp, probe
agatgacagagtgaaagaaggtaca

SEQ ID NO: 9073 - DNA, 25 bp, probe
ctgatgatctttatggctactttct

SEQ ID NO: 9074 - DNA, 25 bp, probe
tacatttctttcgtgttcaaaccac

SEQ ID NO: 9075 - DNA, 25 bp, probe
gaaggtacatttctttcgtgttcaa

SEQ ID NO: 9076 - DNA, 25 bp, probe
aggtacatttctttcgtgttcaaac

SEQ ID NO: 9077 - DNA, 25 bp, probe
aaggtacatttctttcgtgttcaaa

SEQ ID NO: 9078 - DNA, 25 bp, probe
gtacatttctttcgtgttcaaacca

SEQ ID NO: 9079 - DNA, 25 bp, probe
tgatgatctttatggctactttctt

SEQ ID NO: 9080 - DNA, 25 bp, probe
ctatttctgtttcaacattgagagc

SEQ ID NO: 9081 - DNA, 25 bp, probe
tgatctttatggctactttcttaca

SEQ ID NO: 9082 - DNA, 25 bp, probe
atttctgtttcaacattgagagctg

SEQ ID NO: 9083 - DNA, 25 bp, probe
ggtacatttctttcgtgttcaaacc

SEQ ID NO: 9084 - DNA, 25 bp, probe
tatttctgtttcaacattgagagct

SEQ ID NO: 9085 - DNA, 25 bp, probe
gacagagtgaaagaaggtacatttc

SEQ ID NO: 9086 - DNA, 25 bp, probe
acagagtgaaagaaggtacatttct

SEQ ID NO: 9087 - DNA, 25 bp, probe
agaaggtacatttctttcgtgttca

SEQ ID NO: 9088 - DNA, 25 bp, probe
tctgcctctcttgctgaaccaatag

SEQ ID NO: 9089 - DNA, 25 bp, probe
ctgaaccaatagcaaacttcctttt

SEQ ID NO: 9090 - DNA, 25 bp, probe
tttctgtttcaacattgagagctgg

SEQ ID NO: 9091 - DNA, 25 bp, probe
aaaagaaagatgacagagtgaaaga

SEQ ID NO: 9092 - DNA, 25 bp, probe
agaaaagaaagatgacagagtgaaa

SEQ ID NO: 9093 - DNA, 25 bp, probe
aagaaaagaaagatgacagagtgaa

SEQ ID NO: 9094 - DNA, 25 bp, probe
aaagaaaagaaagatgacagagtga

SEQ ID NO: 9095 - DNA, 25 bp, probe
caaagaaaagaaagatgacagagtg

SEQ ID NO: 9096 - DNA, 25 bp, probe
tctatttctgtttcaacattgagag

SEQ ID NO: 9097 - DNA, 25 bp, probe
atgatctttatggctactttcttac

SEQ ID NO: 9098 - DNA, 25 bp, probe
gaaaagaaagatgacagagtgaaag

SEQ ID NO: 9099 - DNA, 25 bp, probe
ttttgctgatgatctttatggctac

SEQ ID NO: 9100 - DNA, 25 bp, probe
ttccttttgctgatgatctttatgg

SEQ ID NO: 9101 - DNA, 25 bp, probe
atctttatggctactttcttacatg

SEQ ID NO: 9102 - DNA, 25 bp, probe
aaacttccttttgctgatgatcttt

SEQ ID NO: 9103 - DNA, 25 bp, probe
ctaccaggagtttgttcaggaagtg

SEQ ID NO: 9104 - DNA, 25 bp, probe
gaggttccctttgtgattaccagat

SEQ ID NO: 9105 - DNA, 25 bp, probe
aggttccctttgtgattaccagatg

SEQ ID NO: 9106 - DNA, 25 bp, probe
ctgaggaggttccctttgtgattac

SEQ ID NO: 9107 - DNA, 25 bp, probe
gttccctttgtgattaccagatgca

SEQ ID NO: 9108 - DNA, 25 bp, probe
caagtgcagagaatgtgaagccttc

SEQ ID NO: 9109 - DNA, 25 bp, probe
cctgaggaggttccctttgtgatta

SEQ ID NO: 9110 - DNA, 25 bp, probe
gctaccaggagtttgttcaggaagt

SEQ ID NO: 9111 - DNA, 25 bp, probe
gagtttgttcaggaagtggacactg

SEQ ID NO: 9112 - DNA, 25 bp, probe
ggttccctttgtgattaccagatgc

SEQ ID NO: 9113 - DNA, 25 bp, probe
ttccctttgtgattaccagatgcac

SEQ ID NO: 9114 - DNA, 25 bp, probe
ggaggttccctttgtgattaccaga

SEQ ID NO: 9115 - DNA, 25 bp, probe
aggaggttccctttgtgattaccag

SEQ ID NO: 9116 - DNA, 25 bp, probe
gaggaggttccctttgtgattacca

SEQ ID NO: 9117 - DNA, 25 bp, probe
tgaggaggttccctttgtgattacc

SEQ ID NO: 9118 - DNA, 25 bp, probe
gtttgttcaggaagtggacactgtc

SEQ ID NO: 9119 - DNA, 25 bp, probe
gagaatgtgaagccttcatggtcag

SEQ ID NO: 9120 - DNA, 25 bp, probe
cagagaatgtgaagccttcatggtc

SEQ ID NO: 9121 - DNA, 25 bp, probe
taccaggagtttgttcaggaagtgg

SEQ ID NO: 9122 - DNA, 25 bp, probe
caggagtttgttcaggaagtggaca

SEQ ID NO: 9123 - DNA, 25 bp, probe
aggagtttgttcaggaagtggacac

SEQ ID NO: 9124 - DNA, 25 bp, probe
agtttgttcaggaagtggacactgt

SEQ ID NO: 9125 - DNA, 25 bp, probe
agagaatgtgaagccttcatggtca

SEQ ID NO: 9126 - DNA, 25 bp, probe
gggacagaatgtgaagagtgctttt

SEQ ID NO: 9127 - DNA, 25 bp, probe
ggagtttgttcaggaagtggacact

SEQ ID NO: 9128 - DNA, 25 bp, probe
gatttccctgaggaggttccctttg

SEQ ID NO: 9129 - DNA, 25 bp, probe
gtgcagagaatgtgaagccttcatg

SEQ ID NO: 9130 - DNA, 25 bp, probe
agatttccctgaggaggttcccttt

SEQ ID NO: 9131 - DNA, 25 bp, probe
agtgcagagaatgtgaagccttcat

SEQ ID NO: 9132 - DNA, 25 bp, probe
cctctttggggttgacttcctacag

SEQ ID NO: 9133 - DNA, 25 bp, probe
aagtgcagagaatgtgaagccttca

SEQ ID NO: 9134 - DNA, 25 bp, probe
ctctttggggttgacttcctacagc

SEQ ID NO: 9135 - DNA, 25 bp, probe
cttcctacagctccccagagatttc

SEQ ID NO: 9136 - DNA, 25 bp, probe
ctttgtgattaccagatgcacagct

SEQ ID NO: 9137 - DNA, 25 bp, probe
acttcctacagctccccagagattt

SEQ ID NO: 9138 - DNA, 25 bp, probe
ctttggggttgacttcctacagctc

SEQ ID NO: 9139 - DNA, 25 bp, probe
ccctttgtgattaccagatgcacag

SEQ ID NO: 9140 - DNA, 25 bp, probe
gacttcctacagctccccagagatt

SEQ ID NO: 9141 - DNA, 25 bp, probe
tccctttgtgattaccagatgcaca

SEQ ID NO: 9142 - DNA, 25 bp, probe
cctttgtgattaccagatgcacagc

SEQ ID NO: 9143 - DNA, 25 bp, probe
gatgtccctctttggggttgacttc

SEQ ID NO: 9144 - DNA, 25 bp, probe
tttgttcaggaagtggacactgtcc

SEQ ID NO: 9145 - DNA, 25 bp, probe
gatactcttatagcctgccttcaat

SEQ ID NO: 9146 - DNA, 25 bp, probe
cttgatactcttatagcctgccttc

SEQ ID NO: 9147 - DNA, 25 bp, probe
tcttgatactcttatagcctgcctt

SEQ ID NO: 9148 - DNA, 25 bp, probe
ttcttgatactcttatagcctgcct

SEQ ID NO: 9149 - DNA, 25 bp, probe
atactcttatagcctgccttcaatt

SEQ ID NO: 9150 - DNA, 25 bp, probe
taacttaggaagccacaatgttctt

SEQ ID NO: 9151 - DNA, 25 bp, probe
ttctgtatgttctattgtgcctagt

SEQ ID NO: 9152 - DNA, 25 bp, probe
ttctaacttaggaagccacaatgtt

SEQ ID NO: 9153 - DNA, 25 bp, probe
ctaacttaggaagccacaatgttct

SEQ ID NO: 9154 - DNA, 25 bp, probe
tctaacttaggaagccacaatgttc

SEQ ID NO: 9155 - DNA, 25 bp, probe
tctgtatgttctattgtgcctagta

SEQ ID NO: 9156 - DNA, 25 bp, probe
tcttgtcaccaaccattcttacttg

SEQ ID NO: 9157 - DNA, 25 bp, probe
gtcttgtcaccaaccattcttactt

SEQ ID NO: 9158 - DNA, 25 bp, probe
tgatactcttatagcctgccttcaa

SEQ ID NO: 9159 - DNA, 25 bp, probe
ttgatactcttatagcctgccttca

SEQ ID NO: 9160 - DNA, 25 bp, probe
ctgtatgttctattgtgcctagtac

SEQ ID NO: 9161 - DNA, 25 bp, probe
ctgtcttgtcaccaaccattcttac

SEQ ID NO: 9162 - DNA, 25 bp, probe
tctgtcttgtcaccaaccattctta

SEQ ID NO: 9163 - DNA, 25 bp, probe
aacttaggaagccacaatgttcttg

SEQ ID NO: 9164 - DNA, 25 bp, probe
ttgcttggtattcattacttcatgt

SEQ ID NO: 9165 - DNA, 25 bp, probe
tgtcttgtcaccaaccattcttact

SEQ ID NO: 9166 - DNA, 25 bp, probe
tcatgtatatcaagcacagcagtaa

SEQ ID NO: 9167 - DNA, 25 bp, probe
ttcatgtatatcaagcacagcagta

SEQ ID NO: 9168 - DNA, 25 bp, probe
tacttcatgtatatcaagcacagca

SEQ ID NO: 9169 - DNA, 25 bp, probe
gttctattgtgcctagtacactgta

SEQ ID NO: 9170 - DNA, 25 bp, probe
atgttctattgtgcctagtacactg

SEQ ID NO: 9171 - DNA, 25 bp, probe
ttacttcatgtatatcaagcacagc

SEQ ID NO: 9172 - DNA, 25 bp, probe
tgcttggtattcattacttcatgta

SEQ ID NO: 9173 - DNA, 25 bp, probe
ttctattgtgcctagtacactgtaa

SEQ ID NO: 9174 - DNA, 25 bp, probe
tatgttctattgtgcctagtacact

SEQ ID NO: 9175 - DNA, 25 bp, probe
gtatgttctattgtgcctagtacac

SEQ ID NO: 9176 - DNA, 25 bp, probe
cttcatgtatatcaagcacagcagt

SEQ ID NO: 9177 - DNA, 25 bp, probe
acttcatgtatatcaagcacagcag

SEQ ID NO: 9178 - DNA, 25 bp, probe
tgatgataagggtgagaaactgaaa

SEQ ID NO: 9179 - DNA, 25 bp, probe
ttgatgataagggtgagaaactgaa

SEQ ID NO: 9180 - DNA, 25 bp, probe
ttcctctttcttcctcctctattct

SEQ ID NO: 9181 - DNA, 25 bp, probe
cttcctctttcttcctcctctattc

SEQ ID NO: 9182 - DNA, 25 bp, probe
tttcttgatactcttatagcctgcc

SEQ ID NO: 9183 - DNA, 25 bp, probe
atttattccttattccctcttggca

SEQ ID NO: 9184 - DNA, 25 bp, probe
ttctgtcttgtcaccaaccattctt

SEQ ID NO: 9185 - DNA, 25 bp, probe
ctacctatcctgaatggtctgtcat

SEQ ID NO: 9186 - DNA, 25 bp, probe
cacagactatttccctcatcctatt

SEQ ID NO: 9187 - DNA, 25 bp, probe
gggaaataacttgagatgatggcta

SEQ ID NO: 9188 - DNA, 25 bp, probe
cctctttcttcctcctctattctct

SEQ ID NO: 9189 - DNA, 25 bp, probe
tatctgttgctgcataatgatcctc

SEQ ID NO: 9190 - DNA, 25 bp, probe
ttatctgttgctgcataatgatcct

SEQ ID NO: 9191 - DNA, 25 bp, probe
gttatctgttgctgcataatgatcc

SEQ ID NO: 9192 - DNA, 25 bp, probe
agttatctgttgctgcataatgatc

SEQ ID NO: 9193 - DNA, 25 bp, probe
aagttcagttcttggtgagttctcc

SEQ ID NO: 9194 - DNA, 25 bp, probe
cagttatctgttgctgcataatgat

SEQ ID NO: 9195 - DNA, 25 bp, probe
taccagttatctgttgctgcataat

SEQ ID NO: 9196 - DNA, 25 bp, probe
aacactgtgactgaagacaataaac

SEQ ID NO: 9197 - DNA, 25 bp, probe
cactgtgactgaagacaataaacat

SEQ ID NO: 9198 - DNA, 25 bp, probe
acactgtgactgaagacaataaaca

SEQ ID NO: 9199 - DNA, 25 bp, probe
gtaccagttatctgttgctgcataa

SEQ ID NO: 9200 - DNA, 25 bp, probe
aaacactgtgactgaagacaataaa

SEQ ID NO: 9201 - DNA, 25 bp, probe
atggttcatggtggattagcagatg

SEQ ID NO: 9202 - DNA, 25 bp, probe
actgtgactgaagacaataaacatt

SEQ ID NO: 9203 - DNA, 25 bp, probe
ccagttatctgttgctgcataatga

SEQ ID NO: 9204 - DNA, 25 bp, probe
accagttatctgttgctgcataatg

SEQ ID NO: 9205 - DNA, 25 bp, probe
gttcatggtggattagcagatggag

SEQ ID NO: 9206 - DNA, 25 bp, probe
tgtaccagttatctgttgctgcata

SEQ ID NO: 9207 - DNA, 25 bp, probe
ctgtgactgaagacaataaacattt

SEQ ID NO: 9208 - DNA, 25 bp, probe
atctgttgctgcataatgatcctcc

SEQ ID NO: 9209 - DNA, 25 bp, probe
aacacaagtttaagatccacacgta

SEQ ID NO: 9210 - DNA, 25 bp, probe
acacaagtttaagatccacacgtac

SEQ ID NO: 9211 - DNA, 25 bp, probe
gttcagttcttggtgagttctccag

SEQ ID NO: 9212 - DNA, 25 bp, probe
acaagtttaagatccacacgtactc

SEQ ID NO: 9213 - DNA, 25 bp, probe
gatgtcacgcatgttcataaagcat

SEQ ID NO: 9214 - DNA, 25 bp, probe
cacaagtttaagatccacacgtact

SEQ ID NO: 9215 - DNA, 25 bp, probe
gaactcatggttcatggtggattag

SEQ ID NO: 9216 - DNA, 25 bp, probe
caagtttaagatccacacgtactcc

SEQ ID NO: 9217 - DNA, 25 bp, probe
ttcagttcttggtgagttctccagt

SEQ ID NO: 9218 - DNA, 25 bp, probe
agttcagttcttggtgagttctcca

SEQ ID NO: 9219 - DNA, 25 bp, probe
caaacacaagtttaagatccacacg

SEQ ID NO: 9220 - DNA, 25 bp, probe
cagcaaacacaagtttaagatccac

SEQ ID NO: 9221 - DNA, 25 bp, probe
aagtttaagatccacacgtactcca

SEQ ID NO: 9222 - DNA, 25 bp, probe
caagttcagttcttggtgagttctc

SEQ ID NO: 9223 - DNA, 25 bp, probe
gcaaacacaagtttaagatccacac

SEQ ID NO: 9224 - DNA, 25 bp, probe
agcaaacacaagtttaagatccaca

SEQ ID NO: 9225 - DNA, 25 bp, probe
ctccttctgttgtttctcttggctc

SEQ ID NO: 9226 - DNA, 25 bp, probe
aggggatgaaatgtgacagtaagta

SEQ ID NO: 9227 - DNA, 25 bp, probe
ttcatggtggattagcagatggagg

SEQ ID NO: 9228 - DNA, 25 bp, probe
agtttaagatccacacgtactccag

SEQ ID NO: 9229 - DNA, 25 bp, probe
ctggctccttctgttgtttctcttg

SEQ ID NO: 9230 - DNA, 25 bp, probe
gtgtaccagttatctgttgctgcat

SEQ ID NO: 9231 - DNA, 25 bp, probe
ctgatgtcacgcatgttcataaagc

SEQ ID NO: 9232 - DNA, 25 bp, probe
gctgatgtcacgcatgttcataaag

SEQ ID NO: 9233 - DNA, 25 bp, probe
tagatggcaaagcccacttagcaaa

SEQ ID NO: 9234 - DNA, 25 bp, probe
ctagatggcaaagcccacttagcaa

SEQ ID NO: 9235 - DNA, 25 bp, probe
ttccccagagactagtgagagtcat

SEQ ID NO: 9236 - DNA, 25 bp, probe
tccccagagactagtgagagtcatc

SEQ ID NO: 9237 - DNA, 25 bp, probe
gatggcaaagcccacttagcaaaag

SEQ ID NO: 9238 - DNA, 25 bp, probe
gttccccagagactagtgagagtca

SEQ ID NO: 9239 - DNA, 25 bp, probe
ggttccccagagactagtgagagtc

SEQ ID NO: 9240 - DNA, 25 bp, probe
gtccataccaagtaatagaggcact

SEQ ID NO: 9241 - DNA, 25 bp, probe
tctgtcagataatgcctaagaatga

SEQ ID NO: 9242 - DNA, 25 bp, probe
tagagcaggtccataccaagtaata

SEQ ID NO: 9243 - DNA, 25 bp, probe
agataatgcctaagaatgaccgctg

SEQ ID NO: 9244 - DNA, 25 bp, probe
cagataatgcctaagaatgaccgct

SEQ ID NO: 9245 - DNA, 25 bp, probe
agcaggtccataccaagtaatagag

SEQ ID NO: 9246 - DNA, 25 bp, probe
gagcaggtccataccaagtaataga

SEQ ID NO: 9247 - DNA, 25 bp, probe
agagcaggtccataccaagtaatag

SEQ ID NO: 9248 - DNA, 25 bp, probe
gtattctgtcagataatgcctaaga

SEQ ID NO: 9249 - DNA, 25 bp, probe
catagtattctgtcagataatgcct

SEQ ID NO: 9250 - DNA, 25 bp, probe
tcatagtattctgtcagataatgcc

SEQ ID NO: 9251 - DNA, 25 bp, probe
ctagagcaggtccataccaagtaat

SEQ ID NO: 9252 - DNA, 25 bp, probe
agtattctgtcagataatgcctaag

SEQ ID NO: 9253 - DNA, 25 bp, probe
tcagataatgcctaagaatgaccgc

SEQ ID NO: 9254 - DNA, 25 bp, probe
caggtccataccaagtaatagaggc

SEQ ID NO: 9255 - DNA, 25 bp, probe
gcaggtccataccaagtaatagagg

SEQ ID NO: 9256 - DNA, 25 bp, probe
gataatgcctaagaatgaccgctgg

SEQ ID NO: 9257 - DNA, 25 bp, probe
ggtccataccaagtaatagaggcac

SEQ ID NO: 9258 - DNA, 25 bp, probe
aggtccataccaagtaatagaggca

SEQ ID NO: 9259 - DNA, 25 bp, probe
tccataccaagtaatagaggcactt

SEQ ID NO: 9260 - DNA, 25 bp, probe
ttctgtcagataatgcctaagaatg

SEQ ID NO: 9261 - DNA, 25 bp, probe
gccctatagtgagtcgtattacaat

SEQ ID NO: 9262 - DNA, 25 bp, probe
tagtattctgtcagataatgcctaa

SEQ ID NO: 9263 - DNA, 25 bp, probe
taatagaggcactttagcttccact

SEQ ID NO: 9264 - DNA, 25 bp, probe
gtaatagaggcactttagcttccac

SEQ ID NO: 9265 - DNA, 25 bp, probe
attcgccctatagtgagtcgtatta

SEQ ID NO: 9266 - DNA, 25 bp, probe
taattcgccctatagtgagtcgtat

SEQ ID NO: 9267 - DNA, 25 bp, probe
tgtcttctgtctttggtattatagt

SEQ ID NO: 9268 - DNA, 25 bp, probe
cctagagcaggtccataccaagtaa

SEQ ID NO: 9269 - DNA, 25 bp, probe
tacatcagaagagagcccttggtaa

SEQ ID NO: 9270 - DNA, 25 bp, probe
atagtattctgtcagataatgccta

SEQ ID NO: 9271 - DNA, 25 bp, probe
ctaattcgccctatagtgagtcgta

SEQ ID NO: 9272 - DNA, 25 bp, probe
aattcgccctatagtgagtcgtatt

SEQ ID NO: 9273 - DNA, 25 bp, probe
agtaatagaggcactttagcttcca

SEQ ID NO: 9274 - DNA, 25 bp, probe
ctttggtattatagttcatcttccc

SEQ ID NO: 9275 - DNA, 25 bp, probe
aatagaggcactttagcttccactt

SEQ ID NO: 9276 - DNA, 25 bp, probe
atcatagtattctgtcagataatgc

SEQ ID NO: 9277 - DNA, 25 bp, probe
cctatagtgagtcgtattacaattc

SEQ ID NO: 9278 - DNA, 25 bp, probe
ggtattatagttcatcttcccattc

SEQ ID NO: 9279 - DNA, 25 bp, probe
cgccctatagtgagtcgtattacaa

SEQ ID NO: 9280 - DNA, 25 bp, probe
atatgtagcatcacaaactcgaacc

SEQ ID NO: 9281 - DNA, 25 bp, probe
gaatgtcttctgtctttggtattat

SEQ ID NO: 9282 - DNA, 25 bp, probe
tattctgtcagataatgcctaagaa

SEQ ID NO: 9283 - DNA, 25 bp, probe
atagaggcactttagcttccacttg

SEQ ID NO: 9284 - DNA, 25 bp, probe
ttgttgttgttgttatgtgtgtgtc

SEQ ID NO: 9285 - DNA, 25 bp, probe
catctctctggaaggaattgctatt

SEQ ID NO: 9286 - DNA, 25 bp, probe
ttgttgttgttatgtgtgtgtcaga

SEQ ID NO: 9287 - DNA, 25 bp, probe
gttgttgttgttatgtgtgtgtcag

SEQ ID NO: 9288 - DNA, 25 bp, probe
acatctctctggaaggaattgctat

SEQ ID NO: 9289 - DNA, 25 bp, probe
aacatctctctggaaggaattgcta

SEQ ID NO: 9290 - DNA, 25 bp, probe
gtgagtacagagtagttgatatgct

SEQ ID NO: 9291 - DNA, 25 bp, probe
agtgagtacagagtagttgatatgc

SEQ ID NO: 9292 - DNA, 25 bp, probe
tgttgttgttatgtgtgtgtcagag

SEQ ID NO: 9293 - DNA, 25 bp, probe
cacagtgagtacagagtagttgata

SEQ ID NO: 9294 - DNA, 25 bp, probe
tgttgttgttgttatgtgtgtgtca

SEQ ID NO: 9295 - DNA, 25 bp, probe
acagagtagttgatatgctatgtca

SEQ ID NO: 9296 - DNA, 25 bp, probe
acagtgagtacagagtagttgatat

SEQ ID NO: 9297 - DNA, 25 bp, probe
tgagtacagagtagttgatatgcta

SEQ ID NO: 9298 - DNA, 25 bp, probe
cagtgagtacagagtagttgatatg

SEQ ID NO: 9299 - DNA, 25 bp, probe
gatgataagaagctggattaggtgt

SEQ ID NO: 9300 - DNA, 25 bp, probe
tgatgataagaagctggattaggtg

SEQ ID NO: 9301 - DNA, 25 bp, probe
gagtagacacatgaacaagaccaac

SEQ ID NO: 9302 - DNA, 25 bp, probe
atgataagaagctggattaggtgtg

SEQ ID NO: 9303 - DNA, 25 bp, probe
catgaacaagaccaacagtgtaatt

SEQ ID NO: 9304 - DNA, 25 bp, probe
atgatgataagaagctggattaggt

SEQ ID NO: 9305 - DNA, 25 bp, probe
gtagacacatgaacaagaccaacag

SEQ ID NO: 9306 - DNA, 25 bp, probe
gcacagtgagtacagagtagttgat

SEQ ID NO: 9307 - DNA, 25 bp, probe
acatgaacaagaccaacagtgtaat

SEQ ID NO: 9308 - DNA, 25 bp, probe
aagctggattaggtgtggagaataa

SEQ ID NO: 9309 - DNA, 25 bp, probe
tagacacatgaacaagaccaacagt

SEQ ID NO: 9310 - DNA, 25 bp, probe
agtagacacatgaacaagaccaaca

SEQ ID NO: 9311 - DNA, 25 bp, probe
gttgttgttatgtgtgtgtcagagc

SEQ ID NO: 9312 - DNA, 25 bp, probe
tttgttgttgttgttatgtgtgtgt

SEQ ID NO: 9313 - DNA, 25 bp, probe
gctggattaggtgtggagaataaat

SEQ ID NO: 9314 - DNA, 25 bp, probe
aatgatgataagaagctggattagg

SEQ ID NO: 9315 - DNA, 25 bp, probe
tgaggtattatttaaggcagacact

SEQ ID NO: 9316 - DNA, 25 bp, probe
gctttcctctttgactaaataacca

SEQ ID NO: 9317 - DNA, 25 bp, probe
tgctttcctctttgactaaataacc

SEQ ID NO: 9318 - DNA, 25 bp, probe
gaccaacagtgtaatttccttcaag

SEQ ID NO: 9319 - DNA, 25 bp, probe
atctctctggaaggaattgctattt

SEQ ID NO: 9320 - DNA, 25 bp, probe
agaccaacagtgtaatttccttcaa

SEQ ID NO: 9321 - DNA, 25 bp, probe
agtacagagtagttgatatgctatg

SEQ ID NO: 9322 - DNA, 25 bp, probe
gaagctggattaggtgtggagaata

SEQ ID NO: 9323 - DNA, 25 bp, probe
ataagaagctggattaggtgtggag

SEQ ID NO: 9324 - DNA, 25 bp, probe
gataagaagctggattaggtgtgga

SEQ ID NO: 9325 - DNA, 25 bp, probe
accaacagtgtaatttccttcaagt

SEQ ID NO: 9326 - DNA, 25 bp, probe
ggagtagacacatgaacaagaccaa

SEQ ID NO: 9327 - DNA, 25 bp, probe
taaacatctctctggaaggaattgc

SEQ ID NO: 9328 - DNA, 25 bp, probe
ataattcaggagatgtgaccattct

SEQ ID NO: 9329 - DNA, 25 bp, probe
catattaatgcctacgatgacagtc

SEQ ID NO: 9330 - DNA, 25 bp, probe
gcctctcctgagatgattacataat

SEQ ID NO: 9331 - DNA, 25 bp, probe
tataattcaggagatgtgaccattc

SEQ ID NO: 9332 - DNA, 25 bp, probe
atgcctctcctgagatgattacata

SEQ ID NO: 9333 - DNA, 25 bp, probe
tgcctctcctgagatgattacataa

SEQ ID NO: 9334 - DNA, 25 bp, probe
tattaatgcctacgatgacagtcaa

SEQ ID NO: 9335 - DNA, 25 bp, probe
atattaatgcctacgatgacagtca

SEQ ID NO: 9336 - DNA, 25 bp, probe
aatgcctctcctgagatgattacat

SEQ ID NO: 9337 - DNA, 25 bp, probe
taccactacctgtccctatttctaa

SEQ ID NO: 9338 - DNA, 25 bp, probe
ttaccactacctgtccctatttcta

SEQ ID NO: 9339 - DNA, 25 bp, probe
tcctctttatttcttcctttgctca

SEQ ID NO: 9340 - DNA, 25 bp, probe
ccttcctctttatttcttcctttgc

SEQ ID NO: 9341 - DNA, 25 bp, probe
gtgtagaaatataaggatgaagccg

SEQ ID NO: 9342 - DNA, 25 bp, probe
cctctttatttcttcctttgctcat

SEQ ID NO: 9343 - DNA, 25 bp, probe
cctttccttcctctttatttcttcc

SEQ ID NO: 9344 - DNA, 25 bp, probe
actcctttccttcctctttatttct

SEQ ID NO: 9345 - DNA, 25 bp, probe
aacttaccactacctgtccctattt

SEQ ID NO: 9346 - DNA, 25 bp, probe
ttcctctttatttcttcctttgctc

SEQ ID NO: 9347 - DNA, 25 bp, probe
cttcctctttatttcttcctttgct

SEQ ID NO: 9348 - DNA, 25 bp, probe
tgtagaaatataaggatgaagccgc

SEQ ID NO: 9349 - DNA, 25 bp, probe
tttccaattctccatatcccagttt

SEQ ID NO: 9350 - DNA, 25 bp, probe
tttcagatttaggaggactcatcag

SEQ ID NO: 9351 - DNA, 25 bp, probe
ctttccaattctccatatcccagtt

SEQ ID NO: 9352 - DNA, 25 bp, probe
cttaccactacctgtccctatttct

SEQ ID NO: 9353 - DNA, 25 bp, probe
aatttccaacttaccactacctgtc

SEQ ID NO: 9354 - DNA, 25 bp, probe
tttcttcctttgctcattatccttt

SEQ ID NO: 9355 - DNA, 25 bp, probe
aattctactcctttccttcctcttt

SEQ ID NO: 9356 - DNA, 25 bp, probe
aaattctactcctttccttcctctt

SEQ ID NO: 9357 - DNA, 25 bp, probe
accactacctgtccctatttctaac

SEQ ID NO: 9358 - DNA, 25 bp, probe
acttaccactacctgtccctatttc

SEQ ID NO: 9359 - DNA, 25 bp, probe
tacacagaatcttaaatgcctctcc

SEQ ID NO: 9360 - DNA, 25 bp, probe
atttcagatttaggaggactcatca

SEQ ID NO: 9361 - DNA, 25 bp, probe
cttccctttccaattctccatatcc

SEQ ID NO: 9362 - DNA, 25 bp, probe
atttcttcctttgctcattatcctt

SEQ ID NO: 9363 - DNA, 25 bp, probe
tccttcctctttatttcttcctttg

SEQ ID NO: 9364 - DNA, 25 bp, probe
caacttaccactacctgtccctatt

SEQ ID NO: 9365 - DNA, 25 bp, probe
tctactcctttccttcctctttatt

SEQ ID NO: 9366 - DNA, 25 bp, probe
ttctactcctttccttcctctttat

SEQ ID NO: 9367 - DNA, 25 bp, probe
attctactcctttccttcctcttta

SEQ ID NO: 9368 - DNA, 25 bp, probe
actaaattctactcctttccttcct

SEQ ID NO: 9369 - DNA, 25 bp, probe
cagatttaggaggactcatcagttt

SEQ ID NO: 9370 - DNA, 25 bp, probe
ggactcatcagtttagggattaaga

SEQ ID NO: 9371 - DNA, 25 bp, probe
aggactcatcagtttagggattaag

SEQ ID NO: 9372 - DNA, 25 bp, probe
gtatggcaagttaagaagcacagag

SEQ ID NO: 9373 - DNA, 25 bp, probe
gcaagaaatggaggaaatgaaagaa

SEQ ID NO: 9374 - DNA, 25 bp, probe
aagcatcagatagaaggtaatgtat

SEQ ID NO: 9375 - DNA, 25 bp, probe
gagcaagaaatggaggaaatgaaag

SEQ ID NO: 9376 - DNA, 25 bp, probe
tatggcaagttaagaagcacagagg

SEQ ID NO: 9377 - DNA, 25 bp, probe
agcatcagatagaaggtaatgtatc

SEQ ID NO: 9378 - DNA, 25 bp, probe
gataaccaaacgaatgtcactgaag

SEQ ID NO: 9379 - DNA, 25 bp, probe
agcaagaaatggaggaaatgaaaga

SEQ ID NO: 9380 - DNA, 25 bp, probe
ataaccaaacgaatgtcactgaaga

SEQ ID NO: 9381 - DNA, 25 bp, probe
tgagcaagaaatggaggaaatgaaa

SEQ ID NO: 9382 - DNA, 25 bp, probe
tgtatggcaagttaagaagcacaga

SEQ ID NO: 9383 - DNA, 25 bp, probe
taaccaaacgaatgtcactgaagag

SEQ ID NO: 9384 - DNA, 25 bp, probe
ctgagcaagaaatggaggaaatgaa

SEQ ID NO: 9385 - DNA, 25 bp, probe
ctagagctggaagaagagaatgacc

SEQ ID NO: 9386 - DNA, 25 bp, probe
cctagagctggaagaagagaatgac

SEQ ID NO: 9387 - DNA, 25 bp, probe
actgtatggcaagttaagaagcaca

SEQ ID NO: 9388 - DNA, 25 bp, probe
atgataaccaaacgaatgtcactga

SEQ ID NO: 9389 - DNA, 25 bp, probe
tgataaccaaacgaatgtcactgaa

SEQ ID NO: 9390 - DNA, 25 bp, probe
aaccctttctaagaagtttcagtct

SEQ ID NO: 9391 - DNA, 25 bp, probe
aatcctagagctggaagaagagaat

SEQ ID NO: 9392 - DNA, 25 bp, probe
caagaaatggaggaaatgaaagaaa

SEQ ID NO: 9393 - DNA, 25 bp, probe
cgagaaacatgataaccaaacgaat

SEQ ID NO: 9394 - DNA, 25 bp, probe
aagagaaacaagaactgtatggcaa

SEQ ID NO: 9395 - DNA, 25 bp, probe
atcctagagctggaagaagagaatg

SEQ ID NO: 9396 - DNA, 25 bp, probe
gaagagggaacacagtctataccag

SEQ ID NO: 9397 - DNA, 25 bp, probe
aaacacttctttcttccaatgccag

SEQ ID NO: 9398 - DNA, 25 bp, probe
gaggcaagagaaacaagaactgtat

SEQ ID NO: 9399 - DNA, 25 bp, probe
aacaagaactgtatggcaagttaag

SEQ ID NO: 9400 - DNA, 25 bp, probe
gagaaacatgataaccaaacgaatg

SEQ ID NO: 9401 - DNA, 25 bp, probe
acaagaactgtatggcaagttaaga

SEQ ID NO: 9402 - DNA, 25 bp, probe
agagaaacaagaactgtatggcaag

SEQ ID NO: 9403 - DNA, 25 bp, probe
aggcaagagaaacaagaactgtatg

SEQ ID NO: 9404 - DNA, 25 bp, probe
caagaactgtatggcaagttaagaa

SEQ ID NO: 9405 - DNA, 25 bp, probe
aagaactgtatggcaagttaagaag

SEQ ID NO: 9406 - DNA, 25 bp, probe
catgataaccaaacgaatgtcactg

SEQ ID NO: 9407 - DNA, 25 bp, probe
gagaaacaagaactgtatggcaagt

SEQ ID NO: 9408 - DNA, 25 bp, probe
caagagaaacaagaactgtatggca

SEQ ID NO: 9409 - DNA, 25 bp, probe
atgaaggaagaacttgaaagggtca

SEQ ID NO: 9410 - DNA, 25 bp, probe
agaactgtatggcaagttaagaagc

SEQ ID NO: 9411 - DNA, 25 bp, probe
ccgagaaacatgataaccaaacgaa

SEQ ID NO: 9412 - DNA, 25 bp, probe
gaggttcaagatttaaagcatcaga

SEQ ID NO: 9413 - DNA, 25 bp, probe
agaggttcaagatttaaagcatcag

SEQ ID NO: 9414 - DNA, 25 bp, probe
tttcattcaatcaaaggattcagca

SEQ ID NO: 9415 - DNA, 25 bp, probe
catgaaggaagaacttgaaagggtc

SEQ ID NO: 9416 - DNA, 25 bp, probe
aacatacctcaatctctctcaagtt

SEQ ID NO: 9417 - DNA, 25 bp, probe
acatacctcaatctctctcaagtta

SEQ ID NO: 9418 - DNA, 25 bp, probe
aaacatacctcaatctctctcaagt

SEQ ID NO: 9419 - DNA, 25 bp, probe
atcccattaccacagaaacagatat

SEQ ID NO: 9420 - DNA, 25 bp, probe
tcccattaccacagaaacagatatg

SEQ ID NO: 9421 - DNA, 25 bp, probe
gaaacatacctcaatctctctcaag

SEQ ID NO: 9422 - DNA, 25 bp, probe
agaaacatacctcaatctctctcaa

SEQ ID NO: 9423 - DNA, 25 bp, probe
aagaaacatacctcaatctctctca

SEQ ID NO: 9424 - DNA, 25 bp, probe
tcaagaaacatacctcaatctctct

SEQ ID NO: 9425 - DNA, 25 bp, probe
tttacatctttcttgctcaggcttc

SEQ ID NO: 9426 - DNA, 25 bp, probe
caagaaacatacctcaatctctctc

SEQ ID NO: 9427 - DNA, 25 bp, probe
gatcccattaccacagaaacagata

SEQ ID NO: 9428 - DNA, 25 bp, probe
gaactatgatcccattaccacagaa

SEQ ID NO: 9429 - DNA, 25 bp, probe
aatcctgaactatgatcccattacc

SEQ ID NO: 9430 - DNA, 25 bp, probe
tatgatcccattaccacagaaacag

SEQ ID NO: 9431 - DNA, 25 bp, probe
ctatgatcccattaccacagaaaca

SEQ ID NO: 9432 - DNA, 25 bp, probe
actatgatcccattaccacagaaac

SEQ ID NO: 9433 - DNA, 25 bp, probe
aactatgatcccattaccacagaaa

SEQ ID NO: 9434 - DNA, 25 bp, probe
agaaatcctgaactatgatcccatt

SEQ ID NO: 9435 - DNA, 25 bp, probe
cccattaccacagaaacagatatgt

SEQ ID NO: 9436 - DNA, 25 bp, probe
atcctgaactatgatcccattacca

SEQ ID NO: 9437 - DNA, 25 bp, probe
atcaagaaacatacctcaatctctc

SEQ ID NO: 9438 - DNA, 25 bp, probe
tgaactatgatcccattaccacaga

SEQ ID NO: 9439 - DNA, 25 bp, probe
tatatgtcgctaactcacacatcac

SEQ ID NO: 9440 - DNA, 25 bp, probe
atatatgtcgctaactcacacatca

SEQ ID NO: 9441 - DNA, 25 bp, probe
aatcaagaaacatacctcaatctct

SEQ ID NO: 9442 - DNA, 25 bp, probe
tgatcccattaccacagaaacagat

SEQ ID NO: 9443 - DNA, 25 bp, probe
tcctgaactatgatcccattaccac

SEQ ID NO: 9444 - DNA, 25 bp, probe
aaatcctgaactatgatcccattac

SEQ ID NO: 9445 - DNA, 25 bp, probe
cagaaatcctgaactatgatcccat

SEQ ID NO: 9446 - DNA, 25 bp, probe
acaccagaatatttagctccagaaa

SEQ ID NO: 9447 - DNA, 25 bp, probe
aacaccagaatatttagctccagaa

SEQ ID NO: 9448 - DNA, 25 bp, probe
gaacaccagaatatttagctccaga

SEQ ID NO: 9449 - DNA, 25 bp, probe
atgatcccattaccacagaaacaga

SEQ ID NO: 9450 - DNA, 25 bp, probe
ctccagaaatcctgaactatgatcc

SEQ ID NO: 9451 - DNA, 25 bp, probe
ctgaactatgatcccattaccacag

SEQ ID NO: 9452 - DNA, 25 bp, probe
cctgaactatgatcccattaccaca

SEQ ID NO: 9453 - DNA, 25 bp, probe
gaaatcctgaactatgatcccatta

SEQ ID NO: 9454 - DNA, 25 bp, probe
gctccagaaatcctgaactatgatc

SEQ ID NO: 9455 - DNA, 25 bp, probe
actgctcaaaccattcgtctgatat

SEQ ID NO: 9456 - DNA, 25 bp, probe
tccagaaatcctgaactatgatccc

SEQ ID NO: 9457 - DNA, 25 bp, probe
aaaccattcgtctgatatctatccc

SEQ ID NO: 9458 - DNA, 25 bp, probe
ttacatctttcttgctcaggcttcc

SEQ ID NO: 9459 - DNA, 25 bp, probe
ccagaaatcctgaactatgatccca

SEQ ID NO: 9460 - DNA, 25 bp, probe
aacatgatggaaataaagcaccttc

SEQ ID NO: 9461 - DNA, 25 bp, probe
aaacatgatggaaataaagcacctt

SEQ ID NO: 9462 - DNA, 25 bp, probe
taaacatgatggaaataaagcacct

SEQ ID NO: 9463 - DNA, 25 bp, probe
caggagtcaataaacatgatggaaa

SEQ ID NO: 9464 - DNA, 25 bp, probe
ataaacatgatggaaataaagcacc

SEQ ID NO: 9465 - DNA, 25 bp, probe
aggagtcaataaacatgatggaaat

SEQ ID NO: 9466 - DNA, 25 bp, probe
ggagtcaataaacatgatggaaata

SEQ ID NO: 9467 - DNA, 25 bp, probe
aggagcagcaataggagattttcta

SEQ ID NO: 9468 - DNA, 25 bp, probe
taaaggatttcctgtctcagctcag

SEQ ID NO: 9469 - DNA, 25 bp, probe
aataaacatgatggaaataaagcac

SEQ ID NO: 9470 - DNA, 25 bp, probe
caataaacatgatggaaataaagca

SEQ ID NO: 9471 - DNA, 25 bp, probe
ggagcagcaataggagattttctat

SEQ ID NO: 9472 - DNA, 25 bp, probe
tcaggagcagcaataggagattttc

SEQ ID NO: 9473 - DNA, 25 bp, probe
tcaataaacatgatggaaataaagc

SEQ ID NO: 9474 - DNA, 25 bp, probe
caggagcagcaataggagattttct

SEQ ID NO: 9475 - DNA, 25 bp, probe
ctcaggagcagcaataggagatttt

SEQ ID NO: 9476 - DNA, 25 bp, probe
acatgatggaaataaagcaccttcc

SEQ ID NO: 9477 - DNA, 25 bp, probe
gagtcaataaacatgatggaaataa

SEQ ID NO: 9478 - DNA, 25 bp, probe
agtcaataaacatgatggaaataaa

SEQ ID NO: 9479 - DNA, 25 bp, probe
gtcaataaacatgatggaaataaag

SEQ ID NO: 9480 - DNA, 25 bp, probe
gctcaggagcagcaataggagattt

SEQ ID NO: 9481 - DNA, 25 bp, probe
aaaggatttcctgtctcagctcagg

SEQ ID NO: 9482 - DNA, 25 bp, probe
tcttcttacgctgtgttaatgtgtt

SEQ ID NO: 9483 - DNA, 25 bp, probe
ttcttcttacgctgtgttaatgtgt

SEQ ID NO: 9484 - DNA, 25 bp, probe
ctattatcaattccagtcttccagg

SEQ ID NO: 9485 - DNA, 25 bp, probe
gcaggctgaatgtctattatcaatt

SEQ ID NO: 9486 - DNA, 25 bp, probe
gtctattatcaattccagtcttcca

SEQ ID NO: 9487 - DNA, 25 bp, probe
tgtctattatcaattccagtcttcc

SEQ ID NO: 9488 - DNA, 25 bp, probe
tctattatcaattccagtcttccag

SEQ ID NO: 9489 - DNA, 25 bp, probe
tatcaattccagtcttccaggattc

SEQ ID NO: 9490 - DNA, 25 bp, probe
ttatcaattccagtcttccaggatt

SEQ ID NO: 9491 - DNA, 25 bp, probe
attatcaattccagtcttccaggat

SEQ ID NO: 9492 - DNA, 25 bp, probe
tattatcaattccagtcttccagga

SEQ ID NO: 9493 - DNA, 25 bp, probe
ggctgaatgtctattatcaattcca

SEQ ID NO: 9494 - DNA, 25 bp, probe
cttacgctgtgttaatgtgtttact

SEQ ID NO: 9495 - DNA, 25 bp, probe
tcttacgctgtgttaatgtgtttac

SEQ ID NO: 9496 - DNA, 25 bp, probe
tttcttcttacgctgtgttaatgtg

SEQ ID NO: 9497 - DNA, 25 bp, probe
ctttcttcttacgctgtgttaatgt

SEQ ID NO: 9498 - DNA, 25 bp, probe
gctgtgttaatgtgtttactttcca

SEQ ID NO: 9499 - DNA, 25 bp, probe
cttcttacgctgtgttaatgtgttt

SEQ ID NO: 9500 - DNA, 25 bp, probe
tctttcttcttacgctgtgttaatg

SEQ ID NO: 9501 - DNA, 25 bp, probe
gtctttcttcttacgctgtgttaat

SEQ ID NO: 9502 - DNA, 25 bp, probe
tacgctgtgttaatgtgtttacttt

SEQ ID NO: 9503 - DNA, 25 bp, probe
ttacgctgtgttaatgtgtttactt

SEQ ID NO: 9504 - DNA, 25 bp, probe
tcaattccagtcttccaggattcat

SEQ ID NO: 9505 - DNA, 25 bp, probe
atcaattccagtcttccaggattca

SEQ ID NO: 9506 - DNA, 25 bp, probe
aggctgaatgtctattatcaattcc

SEQ ID NO: 9507 - DNA, 25 bp, probe
acgctgtgttaatgtgtttactttc

SEQ ID NO: 9508 - DNA, 25 bp, probe
atacaatgtgaaatgaaagccagtg

SEQ ID NO: 9509 - DNA, 25 bp, probe
tgtctttcttcttacgctgtgttaa

SEQ ID NO: 9510 - DNA, 25 bp, probe
ttcttacgctgtgttaatgtgttta

SEQ ID NO: 9511 - DNA, 25 bp, probe
attaatgtgtaggtgaatgcagatt

SEQ ID NO: 9512 - DNA, 25 bp, probe
tatcttggtcctgtgtctttcttct

SEQ ID NO: 9513 - DNA, 25 bp, probe
gtatcttggtcctgtgtctttcttc

SEQ ID NO: 9514 - DNA, 25 bp, probe
cttggtcctgtgtctttcttcttac

SEQ ID NO: 9515 - DNA, 25 bp, probe
catacaatgtgaaatgaaagccagt

SEQ ID NO: 9516 - DNA, 25 bp, probe
tgcaggctgaatgtctattatcaat

SEQ ID NO: 9517 - DNA, 25 bp, probe
gtgtctttcttcttacgctgtgtta

SEQ ID NO: 9518 - DNA, 25 bp, probe
tcttggtcctgtgtctttcttctta

SEQ ID NO: 9519 - DNA, 25 bp, probe
cgctgtgttaatgtgtttactttcc

SEQ ID NO: 9520 - DNA, 25 bp, probe
aatgaatttgctggcttctcgtata

SEQ ID NO: 9521 - DNA, 25 bp, probe
caattccagtcttccaggattcatg

SEQ ID NO: 9522 - DNA, 25 bp, probe
tttactttccatttggcagagagac

SEQ ID NO: 9523 - DNA, 25 bp, probe
gtttactttccatttggcagagaga

SEQ ID NO: 9524 - DNA, 25 bp, probe
atcttggtcctgtgtctttcttctt

SEQ ID NO: 9525 - DNA, 25 bp, probe
tgtttactttccatttggcagagag

SEQ ID NO: 9526 - DNA, 25 bp, probe
aagtacagaaggtaagagatggatt

SEQ ID NO: 9527 - DNA, 25 bp, probe
ttaagtacagaaggtaagagatgga

SEQ ID NO: 9528 - DNA, 25 bp, probe
gttaagtacagaaggtaagagatgg

SEQ ID NO: 9529 - DNA, 25 bp, probe
ggttaagtacagaaggtaagagatg

SEQ ID NO: 9530 - DNA, 25 bp, probe
taagtacagaaggtaagagatggat

SEQ ID NO: 9531 - DNA, 25 bp, probe
aacaacttggagaccaccttaatac

SEQ ID NO: 9532 - DNA, 25 bp, probe
caacttggagaccaccttaatacag

SEQ ID NO: 9533 - DNA, 25 bp, probe
tagccagcatcttagacaaacatag

SEQ ID NO: 9534 - DNA, 25 bp, probe
gtagccagcatcttagacaaacata

SEQ ID NO: 9535 - DNA, 25 bp, probe
acagaaggtaagagatggatttcaa

SEQ ID NO: 9536 - DNA, 25 bp, probe
acaacttggagaccaccttaataca

SEQ ID NO: 9537 - DNA, 25 bp, probe
tacagaaggtaagagatggatttca

SEQ ID NO: 9538 - DNA, 25 bp, probe
cagaaggtaagagatggatttcaaa

SEQ ID NO: 9539 - DNA, 25 bp, probe
agggttaagtacagaaggtaagaga

SEQ ID NO: 9540 - DNA, 25 bp, probe
cagggttaagtacagaaggtaagag

SEQ ID NO: 9541 - DNA, 25 bp, probe
gggttaagtacagaaggtaagagat

SEQ ID NO: 9542 - DNA, 25 bp, probe
agtacagaaggtaagagatggattt

SEQ ID NO: 9543 - DNA, 25 bp, probe
ccagggttaagtacagaaggtaaga

SEQ ID NO: 9544 - DNA, 25 bp, probe
tccagggttaagtacagaaggtaag

SEQ ID NO: 9545 - DNA, 25 bp, probe
gtccagggttaagtacagaaggtaa

SEQ ID NO: 9546 - DNA, 25 bp, probe
gtacagaaggtaagagatggatttc

SEQ ID NO: 9547 - DNA, 25 bp, probe
aacttggagaccaccttaatacagc

SEQ ID NO: 9548 - DNA, 25 bp, probe
agaaggtaagagatggatttcaaat

SEQ ID NO: 9549 - DNA, 25 bp, probe
ttagacaaacatagctggaaacaac

SEQ ID NO: 9550 - DNA, 25 bp, probe
tcttagacaaacatagctggaaaca

SEQ ID NO: 9551 - DNA, 25 bp, probe
tagacaaacatagctggaaacaact

SEQ ID NO: 9552 - DNA, 25 bp, probe
cttagacaaacatagctggaaacaa

SEQ ID NO: 9553 - DNA, 25 bp, probe
agtccagggttaagtacagaaggta

SEQ ID NO: 9554 - DNA, 25 bp, probe
atcttagacaaacatagctggaaac

SEQ ID NO: 9555 - DNA, 25 bp, probe
catcttagacaaacatagctggaaa

SEQ ID NO: 9556 - DNA, 25 bp, probe
aaacaacttggagaccaccttaata

SEQ ID NO: 9557 - DNA, 25 bp, probe
gagaccaccttaatacagctttgag

SEQ ID NO: 9558 - DNA, 25 bp, probe
agacaaacatagctggaaacaactt

SEQ ID NO: 9559 - DNA, 25 bp, probe
gcatcttagacaaacatagctggaa

SEQ ID NO: 9560 - DNA, 25 bp, probe
gaaacaacttggagaccaccttaat

SEQ ID NO: 9561 - DNA, 25 bp, probe
atgtcttcaaattcattgccctgac

SEQ ID NO: 9562 - DNA, 25 bp, probe
cttggagaccaccttaatacagctt

SEQ ID NO: 9563 - DNA, 25 bp, probe
tgtagccagcatcttagacaaacat

SEQ ID NO: 9564 - DNA, 25 bp, probe
gacaaacatagctggaaacaacttg

SEQ ID NO: 9565 - DNA, 25 bp, probe
aaatctaaagcgggaagccagtatc

SEQ ID NO: 9566 - DNA, 25 bp, probe
aaacatagctggaaacaacttggag

SEQ ID NO: 9567 - DNA, 25 bp, probe
gtcttcaaattcattgccctgactc

SEQ ID NO: 9568 - DNA, 25 bp, probe
caaatctaaagcgggaagccagtat

SEQ ID NO: 9569 - DNA, 25 bp, probe
agccagcatcttagacaaacatagc

SEQ ID NO: 9570 - DNA, 25 bp, probe
agatgagaaagggaatgagtgaatg

SEQ ID NO: 9571 - DNA, 25 bp, probe
cagatgagaaagggaatgagtgaat

SEQ ID NO: 9572 - DNA, 25 bp, probe
acaacaccagggagaaatataaacg

SEQ ID NO: 9573 - DNA, 25 bp, probe
tccaactattcaaaggctaaggttt

SEQ ID NO: 9574 - DNA, 25 bp, probe
gatgagaaagggaatgagtgaatgg

SEQ ID NO: 9575 - DNA, 25 bp, probe
gtccaactattcaaaggctaaggtt

SEQ ID NO: 9576 - DNA, 25 bp, probe
ctaccagatgagaaagggaatgagt

SEQ ID NO: 9577 - DNA, 25 bp, probe
tacaacaccagggagaaatataaac

SEQ ID NO: 9578 - DNA, 25 bp, probe
atgagaaagggaatgagtgaatgga

SEQ ID NO: 9579 - DNA, 25 bp, probe
ttgtccaactattcaaaggctaagg

SEQ ID NO: 9580 - DNA, 25 bp, probe
caacaccagggagaaatataaacgg

SEQ ID NO: 9581 - DNA, 25 bp, probe
taccagatgagaaagggaatgagtg

SEQ ID NO: 9582 - DNA, 25 bp, probe
ctacaacaccagggagaaatataaa

SEQ ID NO: 9583 - DNA, 25 bp, probe
tgtccaactattcaaaggctaaggt

SEQ ID NO: 9584 - DNA, 25 bp, probe
gagaaagggaatgagtgaatggagt

SEQ ID NO: 9585 - DNA, 25 bp, probe
tgagaaagggaatgagtgaatggag

SEQ ID NO: 9586 - DNA, 25 bp, probe
ccagatgagaaagggaatgagtgaa

SEQ ID NO: 9587 - DNA, 25 bp, probe
cctacaacaccagggagaaatataa

SEQ ID NO: 9588 - DNA, 25 bp, probe
acctacaacaccagggagaaatata

SEQ ID NO: 9589 - DNA, 25 bp, probe
agaaagggaatgagtgaatggagtg

SEQ ID NO: 9590 - DNA, 25 bp, probe
gaaagggaatgagtgaatggagtga

SEQ ID NO: 9591 - DNA, 25 bp, probe
aacaccagggagaaatataaacggg

SEQ ID NO: 9592 - DNA, 25 bp, probe
aacctacaacaccagggagaaatat

SEQ ID NO: 9593 - DNA, 25 bp, probe
aaagggaatgagtgaatggagtgac

SEQ ID NO: 9594 - DNA, 25 bp, probe
atcctaccagatgagaaagggaatg

SEQ ID NO: 9595 - DNA, 25 bp, probe
gaacctacaacaccagggagaaata

SEQ ID NO: 9596 - DNA, 25 bp, probe
cctaccagatgagaaagggaatgag

SEQ ID NO: 9597 - DNA, 25 bp, probe
accagatgagaaagggaatgagtga

SEQ ID NO: 9598 - DNA, 25 bp, probe
accagggagaaatataaacgggttt

SEQ ID NO: 9599 - DNA, 25 bp, probe
tttgtccaactattcaaaggctaag

SEQ ID NO: 9600 - DNA, 25 bp, probe
tcctaccagatgagaaagggaatga

SEQ ID NO: 9601 - DNA, 25 bp, probe
caacaaaatgaacctacaacaccag

SEQ ID NO: 9602 - DNA, 25 bp, probe
ccaactattcaaaggctaaggtttt

SEQ ID NO: 9603 - DNA, 25 bp, probe
atttgtccaactattcaaaggctaa

SEQ ID NO: 9604 - DNA, 25 bp, probe
gcctggagatggagataaaataaat

SEQ ID NO: 9605 - DNA, 25 bp, probe
atatttgtccaactattcaaaggct

SEQ ID NO: 9606 - DNA, 25 bp, probe
caccagggagaaatataaacgggtt

SEQ ID NO: 9607 - DNA, 25 bp, probe
ccagggagaaatataaacgggtttt

SEQ ID NO: 9608 - DNA, 25 bp, probe
ggagaaatataaacgggttttaggc

SEQ ID NO: 9609 - DNA, 25 bp, probe
tatttgtccaactattcaaaggcta

SEQ ID NO: 9610 - DNA, 25 bp, probe
gggagaaatataaacgggttttagg

SEQ ID NO: 9611 - DNA, 25 bp, probe
acttctctgaaaactaagacacaat

SEQ ID NO: 9612 - DNA, 25 bp, probe
ccaacaaaatgaacctacaacacca

SEQ ID NO: 9613 - DNA, 25 bp, probe
ctacttctctgaaaactaagacaca

SEQ ID NO: 9614 - DNA, 25 bp, probe
cctctgcttgactattattaccaca

SEQ ID NO: 9615 - DNA, 25 bp, probe
tgcttgactattattaccacatacg

SEQ ID NO: 9616 - DNA, 25 bp, probe
gcctctgcttgactattattaccac

SEQ ID NO: 9617 - DNA, 25 bp, probe
gtgcctctgcttgactattattacc

SEQ ID NO: 9618 - DNA, 25 bp, probe
ggtgcctctgcttgactattattac

SEQ ID NO: 9619 - DNA, 25 bp, probe
gcttgactattattaccacatacga

SEQ ID NO: 9620 - DNA, 25 bp, probe
tgcctctgcttgactattattacca

SEQ ID NO: 9621 - DNA, 25 bp, probe
ctctgcttgactattattaccacat

SEQ ID NO: 9622 - DNA, 25 bp, probe
aggtgcctctgcttgactattatta

SEQ ID NO: 9623 - DNA, 25 bp, probe
gtgctctccagtaactaactaacta

SEQ ID NO: 9624 - DNA, 25 bp, probe
aaggtgctctccagtaactaactaa

SEQ ID NO: 9625 - DNA, 25 bp, probe
tgctctccagtaactaactaactaa

SEQ ID NO: 9626 - DNA, 25 bp, probe
gctctccagtaactaactaactaac

SEQ ID NO: 9627 - DNA, 25 bp, probe
ggtgctctccagtaactaactaact

SEQ ID NO: 9628 - DNA, 25 bp, probe
aggtgctctccagtaactaactaac

SEQ ID NO: 9629 - DNA, 25 bp, probe
aaggtgcctctgcttgactattatt

SEQ ID NO: 9630 - DNA, 25 bp, probe
ctgcttgactattattaccacatac

SEQ ID NO: 9631 - DNA, 25 bp, probe
tctgcttgactattattaccacata

SEQ ID NO: 9632 - DNA, 25 bp, probe
aataatttcaaggtgtgtgtgtgtc

SEQ ID NO: 9633 - DNA, 25 bp, probe
taactaactaactgctgaaatgtgg

SEQ ID NO: 9634 - DNA, 25 bp, probe
agtaactaactaactaactgctgaa

SEQ ID NO: 9635 - DNA, 25 bp, probe
taataatttcaaggtgtgtgtgtgt

SEQ ID NO: 9636 - DNA, 25 bp, probe
actaataatttcaaggtgtgtgtgt

SEQ ID NO: 9637 - DNA, 25 bp, probe
ctaataatttcaaggtgtgtgtgtg

SEQ ID NO: 9638 - DNA, 25 bp, probe
aaaggtgctctccagtaactaacta

SEQ ID NO: 9639 - DNA, 25 bp, probe
aactaactaactgctgaaatgtggc

SEQ ID NO: 9640 - DNA, 25 bp, probe
actaactaactaactgctgaaatgt

SEQ ID NO: 9641 - DNA, 25 bp, probe
ctctccagtaactaactaactaact

SEQ ID NO: 9642 - DNA, 25 bp, probe
ctaactaactgctgaaatgtggctc

SEQ ID NO: 9643 - DNA, 25 bp, probe
ctaactaactaactgctgaaatgtg

SEQ ID NO: 9644 - DNA, 25 bp, probe
cttgactattattaccacatacgaa

SEQ ID NO: 9645 - DNA, 25 bp, probe
ataatttcaaggtgtgtgtgtgtcg

SEQ ID NO: 9646 - DNA, 25 bp, probe
aaaggtgcctctgcttgactattat

SEQ ID NO: 9647 - DNA, 25 bp, probe
actaactaactgctgaaatgtggct

SEQ ID NO: 9648 - DNA, 25 bp, probe
gtgccagttgggaacattacttaaa

SEQ ID NO: 9649 - DNA, 25 bp, probe
aactaactaactaactgctgaaatg

SEQ ID NO: 9650 - DNA, 25 bp, probe
tactaataatttcaaggtgtgtgtg

SEQ ID NO: 9651 - DNA, 25 bp, probe
aaatacacatcccagcagagtcttg

SEQ ID NO: 9652 - DNA, 25 bp, probe
taactaactgctgaaatgtggctcc

SEQ ID NO: 9653 - DNA, 25 bp, probe
gtaactaactaactaactgctgaaa

SEQ ID NO: 9654 - DNA, 25 bp, probe
tgtgccagttgggaacattacttaa

SEQ ID NO: 9655 - DNA, 25 bp, probe
tacttaaaatacacatcccagcaga

SEQ ID NO: 9656 - DNA, 25 bp, probe
ttaaaatacacatcccagcagagtc

SEQ ID NO: 9657 - DNA, 25 bp, probe
cttaaaatacacatcccagcagagt

SEQ ID NO: 9658 - DNA, 25 bp, probe
taacaacaatggaagtgacagtgac

SEQ ID NO: 9659 - DNA, 25 bp, probe
gtaacaacaatggaagtgacagtga

SEQ ID NO: 9660 - DNA, 25 bp, probe
actcaaccagtgatgattagaacaa

SEQ ID NO: 9661 - DNA, 25 bp, probe
taacggtaacaacaatggaagtgac

SEQ ID NO: 9662 - DNA, 25 bp, probe
gtaacggtaacaacaatggaagtga

SEQ ID NO: 9663 - DNA, 25 bp, probe
aagtctggtaacggtaacaacaatg

SEQ ID NO: 9664 - DNA, 25 bp, probe
caagtctggtaacggtaacaacaat

SEQ ID NO: 9665 - DNA, 25 bp, probe
gattcagaaccaagacctaactcct

SEQ ID NO: 9666 - DNA, 25 bp, probe
ctggtaacggtaacaacaatggaag

SEQ ID NO: 9667 - DNA, 25 bp, probe
ggtaacaacaatggaagtgacagtg

SEQ ID NO: 9668 - DNA, 25 bp, probe
ggtaacggtaacaacaatggaagtg

SEQ ID NO: 9669 - DNA, 25 bp, probe
tctggtaacggtaacaacaatggaa

SEQ ID NO: 9670 - DNA, 25 bp, probe
tggtaacggtaacaacaatggaagt

SEQ ID NO: 9671 - DNA, 25 bp, probe
attcagaaccaagacctaactcctg

SEQ ID NO: 9672 - DNA, 25 bp, probe
gtctggtaacggtaacaacaatgga

SEQ ID NO: 9673 - DNA, 25 bp, probe
agtctggtaacggtaacaacaatgg

SEQ ID NO: 9674 - DNA, 25 bp, probe
atctgacagcaatgatgagagtgac

SEQ ID NO: 9675 - DNA, 25 bp, probe
atgcctgttaatattcatgttctga

SEQ ID NO: 9676 - DNA, 25 bp, probe
aacaacaatggaagtgacagtgaca

SEQ ID NO: 9677 - DNA, 25 bp, probe
aacggtaacaacaatggaagtgaca

SEQ ID NO: 9678 - DNA, 25 bp, probe
ttggtacatgcctgttaatattcat

SEQ ID NO: 9679 - DNA, 25 bp, probe
tggattcagaaccaagacctaactc

SEQ ID NO: 9680 - DNA, 25 bp, probe
ctcaaccagtgatgattagaacaaa

SEQ ID NO: 9681 - DNA, 25 bp, probe
aacaatggaagtgacagtgacagtg

SEQ ID NO: 9682 - DNA, 25 bp, probe
caacaatggaagtgacagtgacagt

SEQ ID NO: 9683 - DNA, 25 bp, probe
acaacaatggaagtgacagtgacag

SEQ ID NO: 9684 - DNA, 25 bp, probe
tagtgatagcagtgacagcagtgac

SEQ ID NO: 9685 - DNA, 25 bp, probe
cggtaacaacaatggaagtgacagt

SEQ ID NO: 9686 - DNA, 25 bp, probe
acggtaacaacaatggaagtgacag

SEQ ID NO: 9687 - DNA, 25 bp, probe
ggattcagaaccaagacctaactcc

SEQ ID NO: 9688 - DNA, 25 bp, probe
gcaagtctggtaacggtaacaacaa

SEQ ID NO: 9689 - DNA, 25 bp, probe
caatggaagtgacagtgacagtgac

SEQ ID NO: 9690 - DNA, 25 bp, probe
gagcaagtctggtaacggtaacaac

SEQ ID NO: 9691 - DNA, 25 bp, probe
aaatcaaacagttggattcagaacc

SEQ ID NO: 9692 - DNA, 25 bp, probe
gggaatcaaatcaaacagttggatt

SEQ ID NO: 9693 - DNA, 25 bp, probe
caaatcaaacagttggattcagaac

SEQ ID NO: 9694 - DNA, 25 bp, probe
tcaaatcaaacagttggattcagaa

SEQ ID NO: 9695 - DNA, 25 bp, probe
atcaaatcaaacagttggattcaga

SEQ ID NO: 9696 - DNA, 25 bp, probe
tctgacagcaatgatgagagtgaca

SEQ ID NO: 9697 - DNA, 25 bp, probe
aatcaaacagttggattcagaacca

SEQ ID NO: 9698 - DNA, 25 bp, probe
agagcaagtctggtaacggtaacaa

SEQ ID NO: 9699 - DNA, 25 bp, probe
cctttggtacatgcctgttaatatt

SEQ ID NO: 9700 - DNA, 25 bp, probe
ctgacagcaatgatgagagtgacag

SEQ ID NO: 9701 - DNA, 25 bp, probe
aagtgacagtgacagtgacagtgaa

SEQ ID NO: 9702 - DNA, 25 bp, probe
ctctaggagaaggcgaatttggaaa

SEQ ID NO: 9703 - DNA, 25 bp, probe
aaactctaggagaaggcgaatttgg

SEQ ID NO: 9704 - DNA, 25 bp, probe
ccttccctcatttccaacataggag

SEQ ID NO: 9705 - DNA, 25 bp, probe
actctaggagaaggcgaatttggaa

SEQ ID NO: 9706 - DNA, 25 bp, probe
aactctaggagaaggcgaatttgga

SEQ ID NO: 9707 - DNA, 25 bp, probe
ctaggagaaggcgaatttggaaaag

SEQ ID NO: 9708 - DNA, 25 bp, probe
aaaactctaggagaaggcgaatttg

SEQ ID NO: 9709 - DNA, 25 bp, probe
taggagaaggcgaatttggaaaagt

SEQ ID NO: 9710 - DNA, 25 bp, probe
tctaggagaaggcgaatttggaaaa

SEQ ID NO: 9711 - DNA, 25 bp, probe
cccttccctcatttccaacatagga

SEQ ID NO: 9712 - DNA, 25 bp, probe
gaatttggaaaagtggtcaaggcaa

SEQ ID NO: 9713 - DNA, 25 bp, probe
aatttggaaaagtggtcaaggcaac

SEQ ID NO: 9714 - DNA, 25 bp, probe
aggagaaggcgaatttggaaaagtg

SEQ ID NO: 9715 - DNA, 25 bp, probe
agaaggcgaatttggaaaagtggtc

SEQ ID NO: 9716 - DNA, 25 bp, probe
gagaaggcgaatttggaaaagtggt

SEQ ID NO: 9717 - DNA, 25 bp, probe
aaggcgaatttggaaaagtggtcaa

SEQ ID NO: 9718 - DNA, 25 bp, probe
atttccaacataggaggatccaaag

SEQ ID NO: 9719 - DNA, 25 bp, probe
catttccaacataggaggatccaaa

SEQ ID NO: 9720 - DNA, 25 bp, probe
gaaggcgaatttggaaaagtggtca

SEQ ID NO: 9721 - DNA, 25 bp, probe
ctttaagggtcttgccttcttcctc

SEQ ID NO: 9722 - DNA, 25 bp, probe
ctcctttaagggtcttgccttcttc

SEQ ID NO: 9723 - DNA, 25 bp, probe
tcatttccaacataggaggatccaa

SEQ ID NO: 9724 - DNA, 25 bp, probe
aggcgaatttggaaaagtggtcaag

SEQ ID NO: 9725 - DNA, 25 bp, probe
tttccaacataggaggatccaaagt

SEQ ID NO: 9726 - DNA, 25 bp, probe
ctcatttccaacataggaggatcca

SEQ ID NO: 9727 - DNA, 25 bp, probe
gttctctgcacattggaacttgtcc

SEQ ID NO: 9728 - DNA, 25 bp, probe
ggttctctgcacattggaacttgtc

SEQ ID NO: 9729 - DNA, 25 bp, probe
ataggaggatccaaagtgggaattc

SEQ ID NO: 9730 - DNA, 25 bp, probe
ggagaaggcgaatttggaaaagtgg

SEQ ID NO: 9731 - DNA, 25 bp, probe
cataggaggatccaaagtgggaatt

SEQ ID NO: 9732 - DNA, 25 bp, probe
ttccaacataggaggatccaaagtg

SEQ ID NO: 9733 - DNA, 25 bp, probe
cgaatttggaaaagtggtcaaggca

SEQ ID NO: 9734 - DNA, 25 bp, probe
ccctcatttccaacataggaggatc

SEQ ID NO: 9735 - DNA, 25 bp, probe
atttggaaaagtggtcaaggcaacg

SEQ ID NO: 9736 - DNA, 25 bp, probe
cttccctcatttccaacataggagg

SEQ ID NO: 9737 - DNA, 25 bp, probe
tccctcatttccaacataggaggat

SEQ ID NO: 9738 - DNA, 25 bp, probe
ttccctcatttccaacataggagga

SEQ ID NO: 9739 - DNA, 25 bp, probe
ccccttccctcatttccaacatagg

SEQ ID NO: 9740 - DNA, 25 bp, probe
acataggaggatccaaagtgggaat

SEQ ID NO: 9741 - DNA, 25 bp, probe
ctcccctgtcatcctcacacttttc

SEQ ID NO: 9742 - DNA, 25 bp, probe
tttaagggtcttgccttcttcctcc

SEQ ID NO: 9743 - DNA, 25 bp, probe
cctttaagggtcttgccttcttcct

SEQ ID NO: 9744 - DNA, 25 bp, probe
tcctttaagggtcttgccttcttcc

SEQ ID NO: 9745 - DNA, 25 bp, probe
cctcctttaagggtcttgccttctt

SEQ ID NO: 9746 - DNA, 25 bp, probe
cacccacatgtcatcaaattgtatg

SEQ ID NO: 9747 - DNA, 25 bp, probe
ccacccacatgtcatcaaattgtat

SEQ ID NO: 9748 - DNA, 25 bp, probe
acccacatgtcatcaaattgtatgg

SEQ ID NO: 9749 - DNA, 25 bp, probe
accacccacatgtcatcaaattgta

SEQ ID NO: 9750 - DNA, 25 bp, probe
tcaaccacccacatgtcatcaaatt

SEQ ID NO: 9751 - DNA, 25 bp, probe
catacagccctgttctccctctttc

SEQ ID NO: 9752 - DNA, 25 bp, probe
caaccacccacatgtcatcaaattg

SEQ ID NO: 9753 - DNA, 25 bp, probe
atacagccctgttctccctctttct

SEQ ID NO: 9754 - DNA, 25 bp, probe
aaccacccacatgtcatcaaattgt

SEQ ID NO: 9755 - DNA, 25 bp, probe
gtcaaccacccacatgtcatcaaat

SEQ ID NO: 9756 - DNA, 25 bp, probe
atgtcatcaaattgtatggggcctg

SEQ ID NO: 9757 - DNA, 25 bp, probe
catgtcatcaaattgtatggggcct

SEQ ID NO: 9758 - DNA, 25 bp, probe
ccacatgtcatcaaattgtatgggg

SEQ ID NO: 9759 - DNA, 25 bp, probe
cacatgtcatcaaattgtatggggc

SEQ ID NO: 9760 - DNA, 25 bp, probe
acatgtcatcaaattgtatggggcc

SEQ ID NO: 9761 - DNA, 25 bp, probe
ggaaagataccgaagattagtggag

SEQ ID NO: 9762 - DNA, 25 bp, probe
taggaaagataccgaagattagtgg

SEQ ID NO: 9763 - DNA, 25 bp, probe
aggaaagataccgaagattagtgga

SEQ ID NO: 9764 - DNA, 25 bp, probe
gaaagataccgaagattagtggagc

SEQ ID NO: 9765 - DNA, 25 bp, probe
cttgtcccgagatgtttatgaagag

SEQ ID NO: 9766 - DNA, 25 bp, probe
ctaggaaagataccgaagattagtg

SEQ ID NO: 9767 - DNA, 25 bp, probe
ggaagatgaagatttcggatttcgg

SEQ ID NO: 9768 - DNA, 25 bp, probe
ttgtcccgagatgtttatgaagagg

SEQ ID NO: 9769 - DNA, 25 bp, probe
cggaagatgaagatttcggatttcg

SEQ ID NO: 9770 - DNA, 25 bp, probe
gaagatgaagatttcggatttcggc

SEQ ID NO: 9771 - DNA, 25 bp, probe
gcggaagatgaagatttcggatttc

SEQ ID NO: 9772 - DNA, 25 bp, probe
aaagataccgaagattagtggagct

SEQ ID NO: 9773 - DNA, 25 bp, probe
tcccgagatgtttatgaagaggatt

SEQ ID NO: 9774 - DNA, 25 bp, probe
gcttgtcccgagatgtttatgaaga

SEQ ID NO: 9775 - DNA, 25 bp, probe
gatgaagatttcggatttcggcttg

SEQ ID NO: 9776 - DNA, 25 bp, probe
agatgaagatttcggatttcggctt

SEQ ID NO: 9777 - DNA, 25 bp, probe
aagatgaagatttcggatttcggct

SEQ ID NO: 9778 - DNA, 25 bp, probe
gtcccgagatgtttatgaagaggat

SEQ ID NO: 9779 - DNA, 25 bp, probe
atgaagatttcggatttcggcttgt

SEQ ID NO: 9780 - DNA, 25 bp, probe
ggcttgtcccgagatgtttatgaag

SEQ ID NO: 9781 - DNA, 25 bp, probe
ggcggaagatgaagatttcggattt

SEQ ID NO: 9782 - DNA, 25 bp, probe
tgtcccgagatgtttatgaagagga

SEQ ID NO: 9783 - DNA, 25 bp, probe
tgaagatttcggatttcggcttgtc

SEQ ID NO: 9784 - DNA, 25 bp, probe
gataccgaagattagtggagctcta

SEQ ID NO: 9785 - DNA, 25 bp, probe
gcctaggaaagataccgaagattag

SEQ ID NO: 9786 - DNA, 25 bp, probe
agcctaggaaagataccgaagatta

SEQ ID NO: 9787 - DNA, 25 bp, probe
aagataccgaagattagtggagctc

SEQ ID NO: 9788 - DNA, 25 bp, probe
cctaggaaagataccgaagattagt

SEQ ID NO: 9789 - DNA, 25 bp, probe
ataccgaagattagtggagctctaa

SEQ ID NO: 9790 - DNA, 25 bp, probe
aagcctaggaaagataccgaagatt

SEQ ID NO: 9791 - DNA, 25 bp, probe
taccgaagattagtggagctctaag

SEQ ID NO: 9792 - DNA, 25 bp, probe
gaagcctaggaaagataccgaagat

SEQ ID NO: 9793 - DNA, 25 bp, probe
agataccgaagattagtggagctct

SEQ ID NO: 9794 - DNA, 25 bp, probe
gaagatttcggatttcggcttgtcc

SEQ ID NO: 9795 - DNA, 25 bp, probe
ggaagcctaggaaagataccgaaga

SEQ ID NO: 9796 - DNA, 25 bp, probe
gggaagcctaggaaagataccgaag

SEQ ID NO: 9797 - DNA, 25 bp, probe
cttgggaagcctaggaaagataccg

SEQ ID NO: 9798 - DNA, 25 bp, probe
accgaagattagtggagctctaagc

SEQ ID NO: 9799 - DNA, 25 bp, probe
ccttgggaagcctaggaaagatacc

SEQ ID NO: 9800 - DNA, 25 bp, probe
tgggaagcctaggaaagataccgaa

SEQ ID NO: 9801 - DNA, 25 bp, probe
ttgggaagcctaggaaagataccga

SEQ ID NO: 9802 - DNA, 25 bp, probe
tccttgggaagcctaggaaagatac

SEQ ID NO: 9803 - DNA, 25 bp, probe
gtccttgggaagcctaggaaagata

SEQ ID NO: 9804 - DNA, 25 bp, probe
agtccttgggaagcctaggaaagat

SEQ ID NO: 9805 - DNA, 25 bp, probe
tttaccagaagtacgaccctaagga

SEQ ID NO: 9806 - DNA, 25 bp, probe
ttaccagaagtacgaccctaaggac

SEQ ID NO: 9807 - DNA, 25 bp, probe
gagagaagcaatgggcatgttagaa

SEQ ID NO: 9808 - DNA, 25 bp, probe
aagagagaagcaatgggcatgttag

SEQ ID NO: 9809 - DNA, 25 bp, probe
gaagagagaagcaatgggcatgtta

SEQ ID NO: 9810 - DNA, 25 bp, probe
tgagaggaccagccattttacttat

SEQ ID NO: 9811 - DNA, 25 bp, probe
gagaggaccagccattttacttatg

SEQ ID NO: 9812 - DNA, 25 bp, probe
caaagagttttaccagaagtacgac

SEQ ID NO: 9813 - DNA, 25 bp, probe
aaagagttttaccagaagtacgacc

SEQ ID NO: 9814 - DNA, 25 bp, probe
ccaaagagttttaccagaagtacga

SEQ ID NO: 9815 - DNA, 25 bp, probe
ttacttatggaaaacagtgtggcat

SEQ ID NO: 9816 - DNA, 25 bp, probe
gagaagcaatgggcatgttagaact

SEQ ID NO: 9817 - DNA, 25 bp, probe
agagaagcaatgggcatgttagaac

SEQ ID NO: 9818 - DNA, 25 bp, probe
gttttaccagaagtacgaccctaag

SEQ ID NO: 9819 - DNA, 25 bp, probe
aagcctcttttatacatctcttcag

SEQ ID NO: 9820 - DNA, 25 bp, probe
tttacttatggaaaacagtgtggca

SEQ ID NO: 9821 - DNA, 25 bp, probe
agttttaccagaagtacgaccctaa

SEQ ID NO: 9822 - DNA, 25 bp, probe
aagcaatgggcatgttagaactgag

SEQ ID NO: 9823 - DNA, 25 bp, probe
gaagcaatgggcatgttagaactga

SEQ ID NO: 9824 - DNA, 25 bp, probe
agaagcaatgggcatgttagaactg

SEQ ID NO: 9825 - DNA, 25 bp, probe
gagttttaccagaagtacgacccta

SEQ ID NO: 9826 - DNA, 25 bp, probe
agcctcttttatacatctcttcagg

SEQ ID NO: 9827 - DNA, 25 bp, probe
ttatggaaaacagtgtggcatattc

SEQ ID NO: 9828 - DNA, 25 bp, probe
cttatggaaaacagtgtggcatatt

SEQ ID NO: 9829 - DNA, 25 bp, probe
tacttatggaaaacagtgtggcata

SEQ ID NO: 9830 - DNA, 25 bp, probe
ttttacttatggaaaacagtgtggc

SEQ ID NO: 9831 - DNA, 25 bp, probe
tatggaaaacagtgtggcatattct

SEQ ID NO: 9832 - DNA, 25 bp, probe
ttttaccagaagtacgaccctaagg

SEQ ID NO: 9833 - DNA, 25 bp, probe
cctcttttatacatctcttcaggga

SEQ ID NO: 9834 - DNA, 25 bp, probe
gcctcttttatacatctcttcaggg

SEQ ID NO: 9835 - DNA, 25 bp, probe
acttatggaaaacagtgtggcatat

SEQ ID NO: 9836 - DNA, 25 bp, probe
ctcttttatacatctcttcagggaa

SEQ ID NO: 9837 - DNA, 25 bp, probe
atgttagaactgaggtgggctagtg

SEQ ID NO: 9838 - DNA, 25 bp, probe
agagagaagcaatgggcatgttaga

SEQ ID NO: 9839 - DNA, 25 bp, probe
caatgggcatgttagaactgaggtg

SEQ ID NO: 9840 - DNA, 25 bp, probe
gccaaagagttttaccagaagtacg

SEQ ID NO: 9841 - DNA, 25 bp, probe
cgccaaagagttttaccagaagtac

SEQ ID NO: 9842 - DNA, 25 bp, probe
aagagttttaccagaagtacgaccc

SEQ ID NO: 9843 - DNA, 25 bp, probe
atggaaaacagtgtggcatattctg

SEQ ID NO: 9844 - DNA, 25 bp, probe
catgttagaactgaggtgggctagt

SEQ ID NO: 9845 - DNA, 25 bp, probe
ctgagaggaccagccattttactta

SEQ ID NO: 9846 - DNA, 25 bp, probe
ccgccaaagagttttaccagaagta

SEQ ID NO: 9847 - DNA, 25 bp, probe
attttacttatggaaaacagtgtgg

SEQ ID NO: 9848 - DNA, 25 bp, probe
cctggaagaagcctcttttatacat

SEQ ID NO: 9849 - DNA, 25 bp, probe
ctgttgacatcacttgttagaagag

SEQ ID NO: 9850 - DNA, 25 bp, probe
ttgacatcacttgttagaagagcaa

SEQ ID NO: 9851 - DNA, 25 bp, probe
acatcacttgttagaagagcaactc

SEQ ID NO: 9852 - DNA, 25 bp, probe
gacatcacttgttagaagagcaact

SEQ ID NO: 9853 - DNA, 25 bp, probe
ttgctgttgacatcacttgttagaa

SEQ ID NO: 9854 - DNA, 25 bp, probe
tgacatcacttgttagaagagcaac

SEQ ID NO: 9855 - DNA, 25 bp, probe
gttgacatcacttgttagaagagca

SEQ ID NO: 9856 - DNA, 25 bp, probe
tgttgacatcacttgttagaagagc

SEQ ID NO: 9857 - DNA, 25 bp, probe
gctgttgacatcacttgttagaaga

SEQ ID NO: 9858 - DNA, 25 bp, probe
tgctgttgacatcacttgttagaag

SEQ ID NO: 9859 - DNA, 25 bp, probe
gtgaatactgtgccaactttatgtg

SEQ ID NO: 9860 - DNA, 25 bp, probe
gtgtgaatactgtgccaactttatg

SEQ ID NO: 9861 - DNA, 25 bp, probe
aaagaagaatttgctgttgacatca

SEQ ID NO: 9862 - DNA, 25 bp, probe
tgtgaatactgtgccaactttatgt

SEQ ID NO: 9863 - DNA, 25 bp, probe
aagaaagaagaatttgctgttgaca

SEQ ID NO: 9864 - DNA, 25 bp, probe
ggaagaaagaagaatttgctgttga

SEQ ID NO: 9865 - DNA, 25 bp, probe
aggaagaaagaagaatttgctgttg

SEQ ID NO: 9866 - DNA, 25 bp, probe
agaaagaagaatttgctgttgacat

SEQ ID NO: 9867 - DNA, 25 bp, probe
aagaagaatttgctgttgacatcac

SEQ ID NO: 9868 - DNA, 25 bp, probe
aaggaagaaagaagaatttgctgtt

SEQ ID NO: 9869 - DNA, 25 bp, probe
aaaggaagaaagaagaatttgctgt

SEQ ID NO: 9870 - DNA, 25 bp, probe
gaaagaagaatttgctgttgacatc

SEQ ID NO: 9871 - DNA, 25 bp, probe
gaagaaagaagaatttgctgttgac

SEQ ID NO: 9872 - DNA, 25 bp, probe
gaagaatttgctgttgacatcactt

SEQ ID NO: 9873 - DNA, 25 bp, probe
aagaatttgctgttgacatcacttg

SEQ ID NO: 9874 - DNA, 25 bp, probe
agaagaatttgctgttgacatcact

SEQ ID NO: 9875 - DNA, 25 bp, probe
ggtgtgaatactgtgccaactttat

SEQ ID NO: 9876 - DNA, 25 bp, probe
aatgttcaaagcagtgttccaagat

SEQ ID NO: 9877 - DNA, 25 bp, probe
aatttgctgttgacatcacttgtta

SEQ ID NO: 9878 - DNA, 25 bp, probe
atttgctgttgacatcacttgttag

SEQ ID NO: 9879 - DNA, 25 bp, probe
gaatttgctgttgacatcacttgtt

SEQ ID NO: 9880 - DNA, 25 bp, probe
tttgctgttgacatcacttgttaga

SEQ ID NO: 9881 - DNA, 25 bp, probe
atgttcaaagcagtgttccaagatg

SEQ ID NO: 9882 - DNA, 25 bp, probe
gaatgttcaaagcagtgttccaaga

SEQ ID NO: 9883 - DNA, 25 bp, probe
agaatttgctgttgacatcacttgt

SEQ ID NO: 9884 - DNA, 25 bp, probe
tgtatgttagcatcgactctttctt

SEQ ID NO: 9885 - DNA, 25 bp, probe
ttgtatgttagcatcgactctttct

SEQ ID NO: 9886 - DNA, 25 bp, probe
tttgtatgttagcatcgactctttc

SEQ ID NO: 9887 - DNA, 25 bp, probe
aatttcaaggtgcatacattcagag

SEQ ID NO: 9888 - DNA, 25 bp, probe
caatttcaaggtgcatacattcaga

SEQ ID NO: 9889 - DNA, 25 bp, probe
gtatgttagcatcgactctttcttt

SEQ ID NO: 9890 - DNA, 25 bp, probe
acaatttcaaggtgcatacattcag

SEQ ID NO: 9891 - DNA, 25 bp, probe
atcacttgttagaagagcaactctg

SEQ ID NO: 9892 - DNA, 25 bp, probe
catcacttgttagaagagcaactct

SEQ ID NO: 9893 - DNA, 25 bp, probe
tcttagagaaacttggagaagggtc

SEQ ID NO: 9894 - DNA, 25 bp, probe
gtcttagagaaacttggagaagggt

SEQ ID NO: 9895 - DNA, 25 bp, probe
tgtcttagagaaacttggagaaggg

SEQ ID NO: 9896 - DNA, 25 bp, probe
tagagaaacttggagaagggtccta

SEQ ID NO: 9897 - DNA, 25 bp, probe
cttagagaaacttggagaagggtcc

SEQ ID NO: 9898 - DNA, 25 bp, probe
gagaaacttggagaagggtcctatg

SEQ ID NO: 9899 - DNA, 25 bp, probe
agagaaacttggagaagggtcctat

SEQ ID NO: 9900 - DNA, 25 bp, probe
ttagagaaacttggagaagggtcct

SEQ ID NO: 9901 - DNA, 25 bp, probe
agaaacttggagaagggtcctatgg

SEQ ID NO: 9902 - DNA, 25 bp, probe
gaaacttggagaagggtcctatggc

SEQ ID NO: 9903 - DNA, 25 bp, probe
gggtcctatggcagcgtatacaaag

SEQ ID NO: 9904 - DNA, 25 bp, probe
aaggagcctatggagttgtacttaa

SEQ ID NO: 9905 - DNA, 25 bp, probe
gaaggagcctatggagttgtactta

SEQ ID NO: 9906 - DNA, 25 bp, probe
cagacacaaggaaacacatgaaatt

SEQ ID NO: 9907 - DNA, 25 bp, probe
ggagcctatggagttgtacttaaat

SEQ ID NO: 9908 - DNA, 25 bp, probe
gagaatttcttccttcagacggttt

SEQ ID NO: 9909 - DNA, 25 bp, probe
catgaagattcctaacattggtaat

SEQ ID NO: 9910 - DNA, 25 bp, probe
aaccagtgagaatttcttccttcag

SEQ ID NO: 9911 - DNA, 25 bp, probe
agacacaaggaaacacatgaaattg

SEQ ID NO: 9912 - DNA, 25 bp, probe
gagcctatggagttgtacttaaatg

SEQ ID NO: 9913 - DNA, 25 bp, probe
tgaaggagcctatggagttgtactt

SEQ ID NO: 9914 - DNA, 25 bp, probe
caaccagtgagaatttcttccttca

SEQ ID NO: 9915 - DNA, 25 bp, probe
agcctatggagttgtacttaaatgc

SEQ ID NO: 9916 - DNA, 25 bp, probe
aggagcctatggagttgtacttaaa

SEQ ID NO: 9917 - DNA, 25 bp, probe
atgaaattgtggcgatcaagaaatt

SEQ ID NO: 9918 - DNA, 25 bp, probe
aaattgtggcgatcaagaaattcaa

SEQ ID NO: 9919 - DNA, 25 bp, probe
ccagtgagaatttcttccttcagac

SEQ ID NO: 9920 - DNA, 25 bp, probe
caaatatgtgaaagttcccaccaac

SEQ ID NO: 9921 - DNA, 25 bp, probe
ccaaccagtgagaatttcttccttc

SEQ ID NO: 9922 - DNA, 25 bp, probe
cgatcaagaaattcaaggacagtga

SEQ ID NO: 9923 - DNA, 25 bp, probe
catgaaattgtggcgatcaagaaat

SEQ ID NO: 9924 - DNA, 25 bp, probe
acaaatatgtgaaagttcccaccaa

SEQ ID NO: 9925 - DNA, 25 bp, probe
aacaaatatgtgaaagttcccacca

SEQ ID NO: 9926 - DNA, 25 bp, probe
aattgtggcgatcaagaaattcaag

SEQ ID NO: 9927 - DNA, 25 bp, probe
gaaattgtggcgatcaagaaattca

SEQ ID NO: 9928 - DNA, 25 bp, probe
tgaaattgtggcgatcaagaaattc

SEQ ID NO: 9929 - DNA, 25 bp, probe
cagtgagaatttcttccttcagacg

SEQ ID NO: 9930 - DNA, 25 bp, probe
accagtgagaatttcttccttcaga

SEQ ID NO: 9931 - DNA, 25 bp, probe
aaatatgtgaaagttcccaccaacc

SEQ ID NO: 9932 - DNA, 25 bp, probe
accaaccagtgagaatttcttcctt

SEQ ID NO: 9933 - DNA, 25 bp, probe
tgagaatttcttccttcagacggtt

SEQ ID NO: 9934 - DNA, 25 bp, probe
tacttaaatgcagacacaaggaaac

SEQ ID NO: 9935 - DNA, 25 bp, probe
gtacttaaatgcagacacaaggaaa

SEQ ID NO: 9936 - DNA, 25 bp, probe
gtgaaggagcctatggagttgtact

SEQ ID NO: 9937 - DNA, 25 bp, probe
attgtggcgatcaagaaattcaagg

SEQ ID NO: 9938 - DNA, 25 bp, probe
gcagacacaaggaaacacatgaaat

SEQ ID NO: 9939 - DNA, 25 bp, probe
cttaaatgcagacacaaggaaacac

SEQ ID NO: 9940 - DNA, 25 bp, probe
atgaagattcctaacattggtaatg

SEQ ID NO: 9941 - DNA, 25 bp, probe
cctatggagttgtacttaaatgcag

SEQ ID NO: 9942 - DNA, 25 bp, probe
gcgatcaagaaattcaaggacagtg

SEQ ID NO: 9943 - DNA, 25 bp, probe
acttaaatgcagacacaaggaaaca

SEQ ID NO: 9944 - DNA, 25 bp, probe
agtgagaatttcttccttcagacgg

SEQ ID NO: 9945 - DNA, 25 bp, probe
acatgaaattgtggcgatcaagaaa

SEQ ID NO: 9946 - DNA, 25 bp, probe
ttaaatgcagacacaaggaaacaca

SEQ ID NO: 9947 - DNA, 25 bp, probe
taaatgcagacacaaggaaacacat

SEQ ID NO: 9948 - DNA, 25 bp, probe
gagaagatgaaggaagccaaggatg

SEQ ID NO: 9949 - DNA, 25 bp, probe
ctcttcaccaccatttcagtttcag

SEQ ID NO: 9950 - DNA, 25 bp, probe
aaaggagaagatgaaggaagccaag

SEQ ID NO: 9951 - DNA, 25 bp, probe
ggagaagatgaaggaagccaaggat

SEQ ID NO: 9952 - DNA, 25 bp, probe
tcttcaccaccatttcagtttcagg

SEQ ID NO: 9953 - DNA, 25 bp, probe
cctcttcaccaccatttcagtttca

SEQ ID NO: 9954 - DNA, 25 bp, probe
acctcttcaccaccatttcagtttc

SEQ ID NO: 9955 - DNA, 25 bp, probe
aaggagaagatgaaggaagccaagg

SEQ ID NO: 9956 - DNA, 25 bp, probe
cacctcttcaccaccatttcagttt

SEQ ID NO: 9957 - DNA, 25 bp, probe
ccatgtgctatgcctgtaacaagag

SEQ ID NO: 9958 - DNA, 25 bp, probe
catgaccatgtgctatgcctgtaac

SEQ ID NO: 9959 - DNA, 25 bp, probe
taacaagagcatcacagccaaggaa

SEQ ID NO: 9960 - DNA, 25 bp, probe
catttcagtttcaggcatgaccatg

SEQ ID NO: 9961 - DNA, 25 bp, probe
gaccatgtgctatgcctgtaacaag

SEQ ID NO: 9962 - DNA, 25 bp, probe
atttcagtttcaggcatgaccatgt

SEQ ID NO: 9963 - DNA, 25 bp, probe
gactatccacaaccgctgtaaagac

SEQ ID NO: 9964 - DNA, 25 bp, probe
agaagatgaaggaagccaaggatgc

SEQ ID NO: 9965 - DNA, 25 bp, probe
accatgtgctatgcctgtaacaaga

SEQ ID NO: 9966 - DNA, 25 bp, probe
atgaccatgtgctatgcctgtaaca

SEQ ID NO: 9967 - DNA, 25 bp, probe
gtaacaagagcatcacagccaagga

SEQ ID NO: 9968 - DNA, 25 bp, probe
aggagaagatgaaggaagccaagga

SEQ ID NO: 9969 - DNA, 25 bp, probe
aaaaggagaagatgaaggaagccaa

SEQ ID NO: 9970 - DNA, 25 bp, probe
tgactatccacaaccgctgtaaaga

SEQ ID NO: 9971 - DNA, 25 bp, probe
tgaccatgtgctatgcctgtaacaa

SEQ ID NO: 9972 - DNA, 25 bp, probe
gtgactatccacaaccgctgtaaag

SEQ ID NO: 9973 - DNA, 25 bp, probe
gaaaaggagaagatgaaggaagcca

SEQ ID NO: 9974 - DNA, 25 bp, probe
ccatttcagtttcaggcatgaccat

SEQ ID NO: 9975 - DNA, 25 bp, probe
cttcaccaccatttcagtttcaggc

SEQ ID NO: 9976 - DNA, 25 bp, probe
tttcagtttcaggcatgaccatgtg

SEQ ID NO: 9977 - DNA, 25 bp, probe
cgggaaaaggagaagatgaaggaag

SEQ ID NO: 9978 - DNA, 25 bp, probe
catgtgctatgcctgtaacaagagc

SEQ ID NO: 9979 - DNA, 25 bp, probe
ggaaaaggagaagatgaaggaagcc

SEQ ID NO: 9980 - DNA, 25 bp, probe
gggaaaaggagaagatgaaggaagc

SEQ ID NO: 9981 - DNA, 25 bp, probe
ctataccaatgggcacctcttcacc

SEQ ID NO: 9982 - DNA, 25 bp, probe
tcaccaccatttcagtttcaggcat

SEQ ID NO: 9983 - DNA, 25 bp, probe
ttcaccaccatttcagtttcaggca

SEQ ID NO: 9984 - DNA, 25 bp, probe
caccatttcagtttcaggcatgacc

SEQ ID NO: 9985 - DNA, 25 bp, probe
ccaccatttcagtttcaggcatgac

SEQ ID NO: 9986 - DNA, 25 bp, probe
caccaccatttcagtttcaggcatg

SEQ ID NO: 9987 - DNA, 25 bp, probe
tatgcctgtaacaagagcatcacag

SEQ ID NO: 9988 - DNA, 25 bp, probe
ctatgcctgtaacaagagcatcaca

SEQ ID NO: 9989 - DNA, 25 bp, probe
aaactgaaatgcccacatccaggaa

SEQ ID NO: 9990 - DNA, 25 bp, probe
accatttcagtttcaggcatgacca

SEQ ID NO: 9991 - DNA, 25 bp, probe
accaccatttcagtttcaggcatga

SEQ ID NO: 9992 - DNA, 25 bp, probe
gagaagaaagccgaatctatctacc

SEQ ID NO: 9993 - DNA, 25 bp, probe
ggagaagaaagccgaatctatctac

SEQ ID NO: 9994 - DNA, 25 bp, probe
aggagaagaaagccgaatctatcta

SEQ ID NO: 9995 - DNA, 25 bp, probe
caggagaagaaagccgaatctatct

SEQ ID NO: 9996 - DNA, 25 bp, probe
agaagaaagccgaatctatctaccg

SEQ ID NO: 9997 - DNA, 25 bp, probe
gcaggagaagaaagccgaatctatc

SEQ ID NO: 9998 - DNA, 25 bp, probe
gaagaaagccgaatctatctaccgc

SEQ ID NO: 9999 - DNA, 25 bp, probe
gcaggaagcatatggattctgtcat

SEQ ID NO: 10000 - DNA, 25 bp, probe
aagagcctccagtagacgacaagaa

SEQ ID NO: 10001 - DNA, 25 bp, probe
aagaaagccgaatctatctaccgcc

SEQ ID NO: 10002 - DNA, 25 bp, probe
tgcaggaagcatatggattctgtca

SEQ ID NO: 10003 - DNA, 25 bp, probe
caactgcaaactgctggtccataag

SEQ ID NO: 10004 - DNA, 25 bp, probe
atcaactgcaaactgctggtccata

SEQ ID NO: 10005 - DNA, 25 bp, probe
ggcaggagaagaaagccgaatctat

SEQ ID NO: 10006 - DNA, 25 bp, probe
tcaactgcaaactgctggtccataa

SEQ ID NO: 10007 - DNA, 25 bp, probe
cagagcataaagaatctgcgctgag

SEQ ID NO: 10008 - DNA, 25 bp, probe
agcataaagaatctgcgctgaggag

SEQ ID NO: 10009 - DNA, 25 bp, probe
gagcataaagaatctgcgctgagga

SEQ ID NO: 10010 - DNA, 25 bp, probe
agagcataaagaatctgcgctgagg

SEQ ID NO: 10011 - DNA, 25 bp, probe
cacagagcataaagaatctgcgctg

SEQ ID NO: 10012 - DNA, 25 bp, probe
acagagcataaagaatctgcgctga

SEQ ID NO: 10013 - DNA, 25 bp, probe
tttacctggtgtttgagtttatgga

SEQ ID NO: 10014 - DNA, 25 bp, probe
atttacctggtgtttgagtttatgg

SEQ ID NO: 10015 - DNA, 25 bp, probe
ttacctggtgtttgagtttatggac

SEQ ID NO: 10016 - DNA, 25 bp, probe
catttacctggtgtttgagtttatg

SEQ ID NO: 10017 - DNA, 25 bp, probe
gacatttacctggtgtttgagttta

SEQ ID NO: 10018 - DNA, 25 bp, probe
ttgagtttatggacactgacctgaa

SEQ ID NO: 10019 - DNA, 25 bp, probe
tttgagtttatggacactgacctga

SEQ ID NO: 10020 - DNA, 25 bp, probe
gtttgagtttatggacactgacctg

SEQ ID NO: 10021 - DNA, 25 bp, probe
acatttacctggtgtttgagtttat

SEQ ID NO: 10022 - DNA, 25 bp, probe
ggacatttacctggtgtttgagttt

SEQ ID NO: 10023 - DNA, 25 bp, probe
tacctggtgtttgagtttatggaca

SEQ ID NO: 10024 - DNA, 25 bp, probe
tgtttgagtttatggacactgacct

SEQ ID NO: 10025 - DNA, 25 bp, probe
tgagtttatggacactgacctgaac

SEQ ID NO: 10026 - DNA, 25 bp, probe
gagtttatggacactgacctgaacg

SEQ ID NO: 10027 - DNA, 25 bp, probe
gggacatttacctggtgtttgagtt

SEQ ID NO: 10028 - DNA, 25 bp, probe
agggacatttacctggtgtttgagt

SEQ ID NO: 10029 - DNA, 25 bp, probe
cagagaacgacagggacatttacct

SEQ ID NO: 10030 - DNA, 25 bp, probe
agtttatggacactgacctgaacgc

SEQ ID NO: 10031 - DNA, 25 bp, probe
gtgtttgagtttatggacactgacc

SEQ ID NO: 10032 - DNA, 25 bp, probe
ggtgtttgagtttatggacactgac

SEQ ID NO: 10033 - DNA, 25 bp, probe
ctggtgtttgagtttatggacactg

SEQ ID NO: 10034 - DNA, 25 bp, probe
tttatggacactgacctgaacgcag

SEQ ID NO: 10035 - DNA, 25 bp, probe
tggtgtttgagtttatggacactga

SEQ ID NO: 10036 - DNA, 25 bp, probe
cctggtgtttgagtttatggacact

SEQ ID NO: 10037 - DNA, 25 bp, probe
acctggtgtttgagtttatggacac

SEQ ID NO: 10038 - DNA, 25 bp, probe
cagggacatttacctggtgtttgag

SEQ ID NO: 10039 - DNA, 25 bp, probe
gacagggacatttacctggtgtttg

SEQ ID NO: 10040 - DNA, 25 bp, probe
acagggacatttacctggtgtttga

SEQ ID NO: 10041 - DNA, 25 bp, probe
agagaacgacagggacatttacctg

SEQ ID NO: 10042 - DNA, 25 bp, probe
gagaacgacagggacatttacctgg

SEQ ID NO: 10043 - DNA, 25 bp, probe
cgacagggacatttacctggtgttt

SEQ ID NO: 10044 - DNA, 25 bp, probe
ttgaaagaaaggaaagaggtgagtt

SEQ ID NO: 10045 - DNA, 25 bp, probe
aaacttgaaagaaaggaaagaggtg

SEQ ID NO: 10046 - DNA, 25 bp, probe
aacttgaaagaaaggaaagaggtga

SEQ ID NO: 10047 - DNA, 25 bp, probe
caaacttgaaagaaaggaaagaggt

SEQ ID NO: 10048 - DNA, 25 bp, probe
acaaacttgaaagaaaggaaagagg

SEQ ID NO: 10049 - DNA, 25 bp, probe
cttgaaagaaaggaaagaggtgagt

SEQ ID NO: 10050 - DNA, 25 bp, probe
acttgaaagaaaggaaagaggtgag

SEQ ID NO: 10051 - DNA, 25 bp, probe
tgaaagaaaggaaagaggtgagttc

SEQ ID NO: 10052 - DNA, 25 bp, probe
ttaacgacttctggagaatggtctg

SEQ ID NO: 10053 - DNA, 25 bp, probe
aacaaacttgaaagaaaggaaagag

SEQ ID NO: 10054 - DNA, 25 bp, probe
taacaaacttgaaagaaaggaaaga

SEQ ID NO: 10055 - DNA, 25 bp, probe
tcttaccacttccttttcctacttc

SEQ ID NO: 10056 - DNA, 25 bp, probe
gttcttaccacttccttttcctact

SEQ ID NO: 10057 - DNA, 25 bp, probe
tgttcttaccacttccttttcctac

SEQ ID NO: 10058 - DNA, 25 bp, probe
ttcttaccacttccttttcctactt

SEQ ID NO: 10059 - DNA, 25 bp, probe
atgttcttaccacttccttttccta

SEQ ID NO: 10060 - DNA, 25 bp, probe
taacgacttctggagaatggtctgg

SEQ ID NO: 10061 - DNA, 25 bp, probe
cttaccacttccttttcctacttcc

SEQ ID NO: 10062 - DNA, 25 bp, probe
gatgttcttaccacttccttttcct

SEQ ID NO: 10063 - DNA, 25 bp, probe
gttaacgacttctggagaatggtct

SEQ ID NO: 10064 - DNA, 25 bp, probe
ttaacaaacttgaaagaaaggaaag

SEQ ID NO: 10065 - DNA, 25 bp, probe
aacggttaacgacttctggagaatg

SEQ ID NO: 10066 - DNA, 25 bp, probe
ttaccacttccttttcctacttccc

SEQ ID NO: 10067 - DNA, 25 bp, probe
ggttaacgacttctggagaatggtc

SEQ ID NO: 10068 - DNA, 25 bp, probe
taccacttccttttcctacttccct

SEQ ID NO: 10069 - DNA, 25 bp, probe
aaacggttaacgacttctggagaat

SEQ ID NO: 10070 - DNA, 25 bp, probe
ggatgttcttaccacttccttttcc

SEQ ID NO: 10071 - DNA, 25 bp, probe
gggatgttcttaccacttccttttc

SEQ ID NO: 10072 - DNA, 25 bp, probe
cagcattttcttcacgaaacaaatc

SEQ ID NO: 10073 - DNA, 25 bp, probe
tacagcattttcttcacgaaacaaa

SEQ ID NO: 10074 - DNA, 25 bp, probe
ttacagcattttcttcacgaaacaa

SEQ ID NO: 10075 - DNA, 25 bp, probe
cttacagcattttcttcacgaaaca

SEQ ID NO: 10076 - DNA, 25 bp, probe
acagcattttcttcacgaaacaaat

SEQ ID NO: 10077 - DNA, 25 bp, probe
aaacaggaaacggttaacgacttct

SEQ ID NO: 10078 - DNA, 25 bp, probe
caaacaggaaacggttaacgacttc

SEQ ID NO: 10079 - DNA, 25 bp, probe
agcattttcttcacgaaacaaatcc

SEQ ID NO: 10080 - DNA, 25 bp, probe
gaaacggttaacgacttctggagaa

SEQ ID NO: 10081 - DNA, 25 bp, probe
attttcttcacgaaacaaatcccct

SEQ ID NO: 10082 - DNA, 25 bp, probe
cattttcttcacgaaacaaatcccc

SEQ ID NO: 10083 - DNA, 25 bp, probe
ttccttttcctacttccctcccttc

SEQ ID NO: 10084 - DNA, 25 bp, probe
cttccttttcctacttccctccctt

SEQ ID NO: 10085 - DNA, 25 bp, probe
gaaagaaaggaaagaggtgagttcc

SEQ ID NO: 10086 - DNA, 25 bp, probe
gttaacaaacttgaaagaaaggaaa

SEQ ID NO: 10087 - DNA, 25 bp, probe
gcattttcttcacgaaacaaatccc

SEQ ID NO: 10088 - DNA, 25 bp, probe
gaataatgaagagcacaatgagctg

SEQ ID NO: 10089 - DNA, 25 bp, probe
aataatgaagagcacaatgagctga

SEQ ID NO: 10090 - DNA, 25 bp, probe
ataatgaagagcacaatgagctgag

SEQ ID NO: 10091 - DNA, 25 bp, probe
tgcaaataaggagccatatgaaagt

SEQ ID NO: 10092 - DNA, 25 bp, probe
gcaaataaggagccatatgaaagta

SEQ ID NO: 10093 - DNA, 25 bp, probe
aataaggagccatatgaaagtaagg

SEQ ID NO: 10094 - DNA, 25 bp, probe
cattacttactttccactgccgtcc

SEQ ID NO: 10095 - DNA, 25 bp, probe
gataagcccaaaattgaaagtcaga

SEQ ID NO: 10096 - DNA, 25 bp, probe
taaggcattacttactttccactgc

SEQ ID NO: 10097 - DNA, 25 bp, probe
ggataagcccaaaattgaaagtcag

SEQ ID NO: 10098 - DNA, 25 bp, probe
taatgaagagcacaatgagctgagg

SEQ ID NO: 10099 - DNA, 25 bp, probe
ataagcccaaaattgaaagtcagat

SEQ ID NO: 10100 - DNA, 25 bp, probe
taagcccaaaattgaaagtcagatc

SEQ ID NO: 10101 - DNA, 25 bp, probe
caatcccagtggctcaatgtctttc

SEQ ID NO: 10102 - DNA, 25 bp, probe
atggataagcccaaaattgaaagtc

SEQ ID NO: 10103 - DNA, 25 bp, probe
aatggataagcccaaaattgaaagt

SEQ ID NO: 10104 - DNA, 25 bp, probe
caaataaggagccatatgaaagtaa

SEQ ID NO: 10105 - DNA, 25 bp, probe
tggataagcccaaaattgaaagtca

SEQ ID NO: 10106 - DNA, 25 bp, probe
aaataaggagccatatgaaagtaag

SEQ ID NO: 10107 - DNA, 25 bp, probe
attacttactttccactgccgtccc

SEQ ID NO: 10108 - DNA, 25 bp, probe
ttgcaaataaggagccatatgaaag

SEQ ID NO: 10109 - DNA, 25 bp, probe
taatggataagcccaaaattgaaag

SEQ ID NO: 10110 - DNA, 25 bp, probe
tgtataatggataagcccaaaattg

SEQ ID NO: 10111 - DNA, 25 bp, probe
caaacaatcccagtggctcaatgtc

SEQ ID NO: 10112 - DNA, 25 bp, probe
ataatggataagcccaaaattgaaa

SEQ ID NO: 10113 - DNA, 25 bp, probe
gtataatggataagcccaaaattga

SEQ ID NO: 10114 - DNA, 25 bp, probe
acaatcccagtggctcaatgtcttt

SEQ ID NO: 10115 - DNA, 25 bp, probe
aacaatcccagtggctcaatgtctt

SEQ ID NO: 10116 - DNA, 25 bp, probe
aaacaatcccagtggctcaatgtct

SEQ ID NO: 10117 - DNA, 25 bp, probe
gagccatatgaaagtaaggcattac

SEQ ID NO: 10118 - DNA, 25 bp, probe
ataaggagccatatgaaagtaaggc

SEQ ID NO: 10119 - DNA, 25 bp, probe
ggagccatatgaaagtaaggcatta

SEQ ID NO: 10120 - DNA, 25 bp, probe
aagcccaaaattgaaagtcagatct

SEQ ID NO: 10121 - DNA, 25 bp, probe
gtaaggcattacttactttccactg

SEQ ID NO: 10122 - DNA, 25 bp, probe
agccatatgaaagtaaggcattact

SEQ ID NO: 10123 - DNA, 25 bp, probe
atgtataatggataagcccaaaatt

SEQ ID NO: 10124 - DNA, 25 bp, probe
taaggagccatatgaaagtaaggca

SEQ ID NO: 10125 - DNA, 25 bp, probe
gtagtactctgggcgatatttgcaa

SEQ ID NO: 10126 - DNA, 25 bp, probe
tataatggataagcccaaaattgaa

SEQ ID NO: 10127 - DNA, 25 bp, probe
gcattacttactttccactgccgtc

SEQ ID NO: 10128 - DNA, 25 bp, probe
aggagccatatgaaagtaaggcatt

SEQ ID NO: 10129 - DNA, 25 bp, probe
aaggagccatatgaaagtaaggcat

SEQ ID NO: 10130 - DNA, 25 bp, probe
ttatgtataatggataagcccaaaa

SEQ ID NO: 10131 - DNA, 25 bp, probe
gatctgatttgcttacggccttcac

SEQ ID NO: 10132 - DNA, 25 bp, probe
ccttggtacttatggcagaatctat

SEQ ID NO: 10133 - DNA, 25 bp, probe
cttggtacttatggcagaatctatt

SEQ ID NO: 10134 - DNA, 25 bp, probe
aggcgagtgagagtgaataaatatc

SEQ ID NO: 10135 - DNA, 25 bp, probe
aaggcgagtgagagtgaataaatat

SEQ ID NO: 10136 - DNA, 25 bp, probe
gaaggcgagtgagagtgaataaata

SEQ ID NO: 10137 - DNA, 25 bp, probe
ttatggcagaatctatttgggactt

SEQ ID NO: 10138 - DNA, 25 bp, probe
cttatggcagaatctatttgggact

SEQ ID NO: 10139 - DNA, 25 bp, probe
acttatggcagaatctatttgggac

SEQ ID NO: 10140 - DNA, 25 bp, probe
tacttatggcagaatctatttggga

SEQ ID NO: 10141 - DNA, 25 bp, probe
tatggcagaatctatttgggacttc

SEQ ID NO: 10142 - DNA, 25 bp, probe
ggcgagtgagagtgaataaatatca

SEQ ID NO: 10143 - DNA, 25 bp, probe
gtacttatggcagaatctatttggg

SEQ ID NO: 10144 - DNA, 25 bp, probe
ggtacttatggcagaatctatttgg

SEQ ID NO: 10145 - DNA, 25 bp, probe
gcgagtgagagtgaataaatatcaa

SEQ ID NO: 10146 - DNA, 25 bp, probe
ttaaagtgatgaacgctcgtaagac

SEQ ID NO: 10147 - DNA, 25 bp, probe
tggtacttatggcagaatctatttg

SEQ ID NO: 10148 - DNA, 25 bp, probe
tggcagaatctatttgggacttcat

SEQ ID NO: 10149 - DNA, 25 bp, probe
atggcagaatctatttgggacttca

SEQ ID NO: 10150 - DNA, 25 bp, probe
gttaaagtgatgaacgctcgtaaga

SEQ ID NO: 10151 - DNA, 25 bp, probe
tgttaaagtgatgaacgctcgtaag

SEQ ID NO: 10152 - DNA, 25 bp, probe
ctgttaaagtgatgaacgctcgtaa

SEQ ID NO: 10153 - DNA, 25 bp, probe
ttggtacttatggcagaatctattt

SEQ ID NO: 10154 - DNA, 25 bp, probe
ggcagaatctatttgggacttcatg

SEQ ID NO: 10155 - DNA, 25 bp, probe
taaagtgatgaacgctcgtaagacc

SEQ ID NO: 10156 - DNA, 25 bp, probe
cgagtgagagtgaataaatatcaaa

SEQ ID NO: 10157 - DNA, 25 bp, probe
attctcactagataaaaccattggc

SEQ ID NO: 10158 - DNA, 25 bp, probe
catgagaagactggtgcatttacag

SEQ ID NO: 10159 - DNA, 25 bp, probe
gctgttaaagtgatgaacgctcgta

SEQ ID NO: 10160 - DNA, 25 bp, probe
gccttggtacttatggcagaatcta

SEQ ID NO: 10161 - DNA, 25 bp, probe
cagaatctatttgggacttcatgag

SEQ ID NO: 10162 - DNA, 25 bp, probe
gcagaatctatttgggacttcatga

SEQ ID NO: 10163 - DNA, 25 bp, probe
agaatctatttgggacttcatgaga

SEQ ID NO: 10164 - DNA, 25 bp, probe
tcgtaagacccctttacctgaaata

SEQ ID NO: 10165 - DNA, 25 bp, probe
ttcatgagaagactggtgcatttac

SEQ ID NO: 10166 - DNA, 25 bp, probe
gaatctatttgggacttcatgagaa

SEQ ID NO: 10167 - DNA, 25 bp, probe
ggatccaactggaatattctcacta

SEQ ID NO: 10168 - DNA, 25 bp, probe
ctcgtaagacccctttacctgaaat

SEQ ID NO: 10169 - DNA, 25 bp, probe
tcatgagaagactggtgcatttaca

SEQ ID NO: 10170 - DNA, 25 bp, probe
tccaactggaatattctcactagat

SEQ ID NO: 10171 - DNA, 25 bp, probe
atccaactggaatattctcactaga

SEQ ID NO: 10172 - DNA, 25 bp, probe
gatccaactggaatattctcactag

SEQ ID NO: 10173 - DNA, 25 bp, probe
atgagaagactggtgcatttacagc

SEQ ID NO: 10174 - DNA, 25 bp, probe
ccaactggaatattctcactagata

SEQ ID NO: 10175 - DNA, 25 bp, probe
cggatccaactggaatattctcact

SEQ ID NO: 10176 - DNA, 25 bp, probe
ttcttggtctactgtgaactcttac

SEQ ID NO: 10177 - DNA, 25 bp, probe
attcttcttggtctactgtgaactc

SEQ ID NO: 10178 - DNA, 25 bp, probe
gattcttcttggtctactgtgaact

SEQ ID NO: 10179 - DNA, 25 bp, probe
cttcttggtctactgtgaactctta

SEQ ID NO: 10180 - DNA, 25 bp, probe
atgattcttcttggtctactgtgaa

SEQ ID NO: 10181 - DNA, 25 bp, probe
tgattcttcttggtctactgtgaac

SEQ ID NO: 10182 - DNA, 25 bp, probe
tcttcttggtctactgtgaactctt

SEQ ID NO: 10183 - DNA, 25 bp, probe
ttcttcttggtctactgtgaactct

SEQ ID NO: 10184 - DNA, 25 bp, probe
catgattcttcttggtctactgtga

SEQ ID NO: 10185 - DNA, 25 bp, probe
cagacagagaagattacagtatgtg

SEQ ID NO: 10186 - DNA, 25 bp, probe
tcagacagagaagattacagtatgt

SEQ ID NO: 10187 - DNA, 25 bp, probe
ttcagacagagaagattacagtatg

SEQ ID NO: 10188 - DNA, 25 bp, probe
gcatgattcttcttggtctactgtg

SEQ ID NO: 10189 - DNA, 25 bp, probe
ctcttgcatgattcttcttggtcta

SEQ ID NO: 10190 - DNA, 25 bp, probe
cttgcatgattcttcttggtctact

SEQ ID NO: 10191 - DNA, 25 bp, probe
tcttgcatgattcttcttggtctac

SEQ ID NO: 10192 - DNA, 25 bp, probe
ttgtgtctcttgcatgattcttctt

SEQ ID NO: 10193 - DNA, 25 bp, probe
ttgcatgattcttcttggtctactg

SEQ ID NO: 10194 - DNA, 25 bp, probe
tcttggtctactgtgaactcttacc

SEQ ID NO: 10195 - DNA, 25 bp, probe
cttgtgtctcttgcatgattcttct

SEQ ID NO: 10196 - DNA, 25 bp, probe
tgtgtctcttgcatgattcttcttg

SEQ ID NO: 10197 - DNA, 25 bp, probe
tgcatgattcttcttggtctactgt

SEQ ID NO: 10198 - DNA, 25 bp, probe
tctcttgcatgattcttcttggtct

SEQ ID NO: 10199 - DNA, 25 bp, probe
gtctcttgcatgattcttcttggtc

SEQ ID NO: 10200 - DNA, 25 bp, probe
gtgtctcttgcatgattcttcttgg

SEQ ID NO: 10201 - DNA, 25 bp, probe
gtctactgtgaactcttacccttcc

SEQ ID NO: 10202 - DNA, 25 bp, probe
tgtctcttgcatgattcttcttggt

SEQ ID NO: 10203 - DNA, 25 bp, probe
ctttcagacagagaagattacagta

SEQ ID NO: 10204 - DNA, 25 bp, probe
gcttgtgtctcttgcatgattcttc

SEQ ID NO: 10205 - DNA, 25 bp, probe
tttcagacagagaagattacagtat

SEQ ID NO: 10206 - DNA, 25 bp, probe
tctactgtgaactcttacccttccc

SEQ ID NO: 10207 - DNA, 25 bp, probe
ggtctactgtgaactcttacccttc

SEQ ID NO: 10208 - DNA, 25 bp, probe
tctttcagacagagaagattacagt

SEQ ID NO: 10209 - DNA, 25 bp, probe
cttggtctactgtgaactcttaccc

SEQ ID NO: 10210 - DNA, 25 bp, probe
ttctttcagacagagaagattacag

SEQ ID NO: 10211 - DNA, 25 bp, probe
tggtctactgtgaactcttaccctt

SEQ ID NO: 10212 - DNA, 25 bp, probe
ttggtctactgtgaactcttaccct

SEQ ID NO: 10213 - DNA, 25 bp, probe
tttctttcagacagagaagattaca

SEQ ID NO: 10214 - DNA, 25 bp, probe
tgcttgtgtctcttgcatgattctt

SEQ ID NO: 10215 - DNA, 25 bp, probe
ctgcttgtgtctcttgcatgattct

SEQ ID NO: 10216 - DNA, 25 bp, probe
tttgtgttccctgcttgtgtctctt

SEQ ID NO: 10217 - DNA, 25 bp, probe
tcttttctttcagacagagaagatt

SEQ ID NO: 10218 - DNA, 25 bp, probe
ctactgtgaactcttacccttcccc

SEQ ID NO: 10219 - DNA, 25 bp, probe
cctcttttctttcagacagagaaga

SEQ ID NO: 10220 - DNA, 25 bp, probe
gactttctcagaaggtgtttggtat

SEQ ID NO: 10221 - DNA, 25 bp, probe
actttctcagaaggtgtttggtatg

SEQ ID NO: 10222 - DNA, 25 bp, probe
ctttctcagaaggtgtttggtatgg

SEQ ID NO: 10223 - DNA, 25 bp, probe
ggactttctcagaaggtgtttggta

SEQ ID NO: 10224 - DNA, 25 bp, probe
tttctcagaaggtgtttggtatggg

SEQ ID NO: 10225 - DNA, 25 bp, probe
aaagatacccagattccaaggacct

SEQ ID NO: 10226 - DNA, 25 bp, probe
tctcagaaggtgtttggtatgggaa

SEQ ID NO: 10227 - DNA, 25 bp, probe
aagatacccagattccaaggacctc

SEQ ID NO: 10228 - DNA, 25 bp, probe
ctcagaaggtgtttggtatgggaac

SEQ ID NO: 10229 - DNA, 25 bp, probe
tgtttggtatgggaaccttctcttc

SEQ ID NO: 10230 - DNA, 25 bp, probe
gtgtttggtatgggaaccttctctt

SEQ ID NO: 10231 - DNA, 25 bp, probe
ttctcagaaggtgtttggtatggga

SEQ ID NO: 10232 - DNA, 25 bp, probe
ctggactttctcagaaggtgtttgg

SEQ ID NO: 10233 - DNA, 25 bp, probe
aaaagatacccagattccaaggacc

SEQ ID NO: 10234 - DNA, 25 bp, probe
ggagattccaaaggttttcctaaaa

SEQ ID NO: 10235 - DNA, 25 bp, probe
cctggactttctcagaaggtgtttg

SEQ ID NO: 10236 - DNA, 25 bp, probe
gtttggtatgggaaccttctcttcg

SEQ ID NO: 10237 - DNA, 25 bp, probe
tggactttctcagaaggtgtttggt

SEQ ID NO: 10238 - DNA, 25 bp, probe
gatacccagattccaaggacctcac

SEQ ID NO: 10239 - DNA, 25 bp, probe
tcctggactttctcagaaggtgttt

SEQ ID NO: 10240 - DNA, 25 bp, probe
ttcctggactttctcagaaggtgtt

SEQ ID NO: 10241 - DNA, 25 bp, probe
agatacccagattccaaggacctca

SEQ ID NO: 10242 - DNA, 25 bp, probe
tatgggaaccttctcttcgcatgac

SEQ ID NO: 10243 - DNA, 25 bp, probe
gtatgggaaccttctcttcgcatga

SEQ ID NO: 10244 - DNA, 25 bp, probe
ggtgtttggtatgggaaccttctct

SEQ ID NO: 10245 - DNA, 25 bp, probe
atctcttactttgcctccgcagtat

SEQ ID NO: 10246 - DNA, 25 bp, probe
tcagaaggtgtttggtatgggaacc

SEQ ID NO: 10247 - DNA, 25 bp, probe
aatctcttactttgcctccgcagta

SEQ ID NO: 10248 - DNA, 25 bp, probe
cttcctggactttctcagaaggtgt

SEQ ID NO: 10249 - DNA, 25 bp, probe
tttggtatgggaaccttctcttcgc

SEQ ID NO: 10250 - DNA, 25 bp, probe
tgaaaacctatgacaccagcttcct

SEQ ID NO: 10251 - DNA, 25 bp, probe
aaatctcttactttgcctccgcagt

SEQ ID NO: 10252 - DNA, 25 bp, probe
gaaaacctatgacaccagcttcctg

SEQ ID NO: 10253 - DNA, 25 bp, probe
ctgaaaacctatgacaccagcttcc

SEQ ID NO: 10254 - DNA, 25 bp, probe
ctcacgatggtgctgaaaacctatg

SEQ ID NO: 10255 - DNA, 25 bp, probe
cgatggtgctgaaaacctatgacac

SEQ ID NO: 10256 - DNA, 25 bp, probe
cacgatggtgctgaaaacctatgac

SEQ ID NO: 10257 - DNA, 25 bp, probe
tcacgatggtgctgaaaacctatga

SEQ ID NO: 10258 - DNA, 25 bp, probe
aaaatctcttactttgcctccgcag

SEQ ID NO: 10259 - DNA, 25 bp, probe
tgcatcatggagattccaaaggttt

SEQ ID NO: 10260 - DNA, 25 bp, probe
tggagattccaaaggttttcctaaa

SEQ ID NO: 10261 - DNA, 25 bp, probe
atggagattccaaaggttttcctaa

SEQ ID NO: 10262 - DNA, 25 bp, probe
catcatggagattccaaaggttttc

SEQ ID NO: 10263 - DNA, 25 bp, probe
catggagattccaaaggttttccta

SEQ ID NO: 10264 - DNA, 25 bp, probe
ccaaaggtgctaaagagattgatat

SEQ ID NO: 10265 - DNA, 25 bp, probe
gccaaaggtgctaaagagattgata

SEQ ID NO: 10266 - DNA, 25 bp, probe
ttgtgtgtcttctattataactgca

SEQ ID NO: 10267 - DNA, 25 bp, probe
tgtgtgtcttctattataactgcat

SEQ ID NO: 10268 - DNA, 25 bp, probe
gatcgacatggttctcaacaagatg

SEQ ID NO: 10269 - DNA, 25 bp, probe
attgtgtgtcttctattataactgc

SEQ ID NO: 10270 - DNA, 25 bp, probe
tgatcgacatggttctcaacaagat

SEQ ID NO: 10271 - DNA, 25 bp, probe
atctgactttaattgtgtgtcttct

SEQ ID NO: 10272 - DNA, 25 bp, probe
tgatctgactttaattgtgtgtctt

SEQ ID NO: 10273 - DNA, 25 bp, probe
atgatctgactttaattgtgtgtct

SEQ ID NO: 10274 - DNA, 25 bp, probe
ctgatcgacatggttctcaacaaga

SEQ ID NO: 10275 - DNA, 25 bp, probe
tctgactttaattgtgtgtcttcta

SEQ ID NO: 10276 - DNA, 25 bp, probe
catgatctgactttaattgtgtgtc

SEQ ID NO: 10277 - DNA, 25 bp, probe
atcgacatggttctcaacaagatgg

SEQ ID NO: 10278 - DNA, 25 bp, probe
gatctgactttaattgtgtgtcttc

SEQ ID NO: 10279 - DNA, 25 bp, probe
aaggtgctaaagagattgatatcgc

SEQ ID NO: 10280 - DNA, 25 bp, probe
aaaggtgctaaagagattgatatcg

SEQ ID NO: 10281 - DNA, 25 bp, probe
gtgtgtcttctattataactgcata

SEQ ID NO: 10282 - DNA, 25 bp, probe
ctgactttaattgtgtgtcttctat

SEQ ID NO: 10283 - DNA, 25 bp, probe
cctgatcgacatggttctcaacaag

SEQ ID NO: 10284 - DNA, 25 bp, probe
caaaggtgctaaagagattgatatc

SEQ ID NO: 10285 - DNA, 25 bp, probe
tgactttaattgtgtgtcttctatt

SEQ ID NO: 10286 - DNA, 25 bp, probe
tcctgatcgacatggttctcaacaa

SEQ ID NO: 10287 - DNA, 25 bp, probe
gtgtcttctattataactgcatagt

SEQ ID NO: 10288 - DNA, 25 bp, probe
tgtgtcttctattataactgcatag

SEQ ID NO: 10289 - DNA, 25 bp, probe
attataactgcatagtaatagggcc

SEQ ID NO: 10290 - DNA, 25 bp, probe
atttctctccttctgttggcagtga

SEQ ID NO: 10291 - DNA, 25 bp, probe
tcatgatctgactttaattgtgtgt

SEQ ID NO: 10292 - DNA, 25 bp, probe
aattgtgtgtcttctattataactg

SEQ ID NO: 10293 - DNA, 25 bp, probe
ggtgctaaagagattgatatcgcag

SEQ ID NO: 10294 - DNA, 25 bp, probe
gtcctgatcgacatggttctcaaca

SEQ ID NO: 10295 - DNA, 25 bp, probe
aggtgctaaagagattgatatcgca

SEQ ID NO: 10296 - DNA, 25 bp, probe
ctacgtcctgatcgacatggttctc

SEQ ID NO: 10297 - DNA, 25 bp, probe
ctaaagagattgatatcgcagcgac

SEQ ID NO: 10298 - DNA, 25 bp, probe
gtgctaaagagattgatatcgcagc

SEQ ID NO: 10299 - DNA, 25 bp, probe
ggccaaaggtgctaaagagattgat

SEQ ID NO: 10300 - DNA, 25 bp, probe
tttctctccttctgttggcagtgac

SEQ ID NO: 10301 - DNA, 25 bp, probe
taaagagattgatatcgcagcgacc

SEQ ID NO: 10302 - DNA, 25 bp, probe
tacgtcctgatcgacatggttctca

SEQ ID NO: 10303 - DNA, 25 bp, probe
gactttaattgtgtgtcttctatta

SEQ ID NO: 10304 - DNA, 25 bp, probe
tattataactgcatagtaatagggc

SEQ ID NO: 10305 - DNA, 25 bp, probe
gctaaagagattgatatcgcagcga

SEQ ID NO: 10306 - DNA, 25 bp, probe
tgctaaagagattgatatcgcagcg

SEQ ID NO: 10307 - DNA, 25 bp, probe
ccacggatgttgtcaggaatcatga

SEQ ID NO: 10308 - DNA, 25 bp, probe
aaagagattgatatcgcagcgaccc

SEQ ID NO: 10309 - DNA, 25 bp, probe
attcagtagtgttaagtatgtcgcc

SEQ ID NO: 10310 - DNA, 25 bp, probe
cattcagtagtgttaagtatgtcgc

SEQ ID NO: 10311 - DNA, 25 bp, probe
tagtgttaagtatgtcgccattgtt

SEQ ID NO: 10312 - DNA, 25 bp, probe
tgttaagtatgtcgccattgttgta

SEQ ID NO: 10313 - DNA, 25 bp, probe
agtagtgttaagtatgtcgccattg

SEQ ID NO: 10314 - DNA, 25 bp, probe
cagtagtgttaagtatgtcgccatt

SEQ ID NO: 10315 - DNA, 25 bp, probe
gtagtgttaagtatgtcgccattgt

SEQ ID NO: 10316 - DNA, 25 bp, probe
tatcacactcacacagttgactatc

SEQ ID NO: 10317 - DNA, 25 bp, probe
ttatcacactcacacagttgactat

SEQ ID NO: 10318 - DNA, 25 bp, probe
cttatcacactcacacagttgacta

SEQ ID NO: 10319 - DNA, 25 bp, probe
tcagtagtgttaagtatgtcgccat

SEQ ID NO: 10320 - DNA, 25 bp, probe
ttcagtagtgttaagtatgtcgcca

SEQ ID NO: 10321 - DNA, 25 bp, probe
gttaagtatgtcgccattgttgtac

SEQ ID NO: 10322 - DNA, 25 bp, probe
atcacactcacacagttgactatct

SEQ ID NO: 10323 - DNA, 25 bp, probe
agtgttaagtatgtcgccattgttg

SEQ ID NO: 10324 - DNA, 25 bp, probe
tcacacagttgactatctgaatcat

SEQ ID NO: 10325 - DNA, 25 bp, probe
ctcacacagttgactatctgaatca

SEQ ID NO: 10326 - DNA, 25 bp, probe
actcacacagttgactatctgaatc

SEQ ID NO: 10327 - DNA, 25 bp, probe
cactcacacagttgactatctgaat

SEQ ID NO: 10328 - DNA, 25 bp, probe
cacacagttgactatctgaatcatt

SEQ ID NO: 10329 - DNA, 25 bp, probe
gtgttaagtatgtcgccattgttgt

SEQ ID NO: 10330 - DNA, 25 bp, probe
acactcacacagttgactatctgaa

SEQ ID NO: 10331 - DNA, 25 bp, probe
ccttatcacactcacacagttgact

SEQ ID NO: 10332 - DNA, 25 bp, probe
cacactcacacagttgactatctga

SEQ ID NO: 10333 - DNA, 25 bp, probe
tcacactcacacagttgactatctg

SEQ ID NO: 10334 - DNA, 25 bp, probe
acattcagtagtgttaagtatgtcg

SEQ ID NO: 10335 - DNA, 25 bp, probe
acacagttgactatctgaatcattt

SEQ ID NO: 10336 - DNA, 25 bp, probe
gagtagtgggtcgtcttgtttctag

SEQ ID NO: 10337 - DNA, 25 bp, probe
gccttatcacactcacacagttgac

SEQ ID NO: 10338 - DNA, 25 bp, probe
agccttatcacactcacacagttga

SEQ ID NO: 10339 - DNA, 25 bp, probe
cagccttatcacactcacacagttg

SEQ ID NO: 10340 - DNA, 25 bp, probe
ttaagtatgtcgccattgttgtaca

SEQ ID NO: 10341 - DNA, 25 bp, probe
tagtgggtcgtcttgtttctagcaa

SEQ ID NO: 10342 - DNA, 25 bp, probe
agtagtgggtcgtcttgtttctagc

SEQ ID NO: 10343 - DNA, 25 bp, probe
tacattcagtagtgttaagtatgtc

SEQ ID NO: 10344 - DNA, 25 bp, probe
gtagtgggtcgtcttgtttctagca

SEQ ID NO: 10345 - DNA, 25 bp, probe
cacagttgactatctgaatcatttt

SEQ ID NO: 10346 - DNA, 25 bp, probe
agtgggtcgtcttgtttctagcaaa

SEQ ID NO: 10347 - DNA, 25 bp, probe
aagtatacattcagtagtgttaagt

SEQ ID NO: 10348 - DNA, 25 bp, probe
cgagtagtgggtcgtcttgtttcta

SEQ ID NO: 10349 - DNA, 25 bp, probe
atacattcagtagtgttaagtatgt

SEQ ID NO: 10350 - DNA, 25 bp, probe
gtgggtcgtcttgtttctagcaaaa

SEQ ID NO: 10351 - DNA, 25 bp, probe
tgggtcgtcttgtttctagcaaaac

SEQ ID NO: 10352 - DNA, 25 bp, probe
cttgacttttccccatcttcctatt

SEQ ID NO: 10353 - DNA, 25 bp, probe
ttgacttttccccatcttcctatta

SEQ ID NO: 10354 - DNA, 25 bp, probe
tgacttttccccatcttcctattaa

SEQ ID NO: 10355 - DNA, 25 bp, probe
gacttttccccatcttcctattaaa

SEQ ID NO: 10356 - DNA, 25 bp, probe
ccttgacttttccccatcttcctat

SEQ ID NO: 10357 - DNA, 25 bp, probe
taattttcttttccagttaccctgc

SEQ ID NO: 10358 - DNA, 25 bp, probe
tctaattttcttttccagttaccct

SEQ ID NO: 10359 - DNA, 25 bp, probe
ttctaattttcttttccagttaccc

SEQ ID NO: 10360 - DNA, 25 bp, probe
ctaattttcttttccagttaccctg

SEQ ID NO: 10361 - DNA, 25 bp, probe
acttttccccatcttcctattaaaa

SEQ ID NO: 10362 - DNA, 25 bp, probe
accttgacttttccccatcttccta

SEQ ID NO: 10363 - DNA, 25 bp, probe
atcaccttgacttttccccatcttc

SEQ ID NO: 10364 - DNA, 25 bp, probe
aattttcttttccagttaccctgca

SEQ ID NO: 10365 - DNA, 25 bp, probe
tgttttctaattttcttttccagtt

SEQ ID NO: 10366 - DNA, 25 bp, probe
tttctaattttcttttccagttacc

SEQ ID NO: 10367 - DNA, 25 bp, probe
atgttttctaattttcttttccagt

SEQ ID NO: 10368 - DNA, 25 bp, probe
caccttgacttttccccatcttcct

SEQ ID NO: 10369 - DNA, 25 bp, probe
tcaccttgacttttccccatcttcc

SEQ ID NO: 10370 - DNA, 25 bp, probe
aggctgttatatggaatgtctgtaa

SEQ ID NO: 10371 - DNA, 25 bp, probe
aaggctgttatatggaatgtctgta

SEQ ID NO: 10372 - DNA, 25 bp, probe
aaaggctgttatatggaatgtctgt

SEQ ID NO: 10373 - DNA, 25 bp, probe
gaaaggctgttatatggaatgtctg

SEQ ID NO: 10374 - DNA, 25 bp, probe
atggaaaggctgttatatggaatgt

SEQ ID NO: 10375 - DNA, 25 bp, probe
ggaaaggctgttatatggaatgtct

SEQ ID NO: 10376 - DNA, 25 bp, probe
aatggaaaggctgttatatggaatg

SEQ ID NO: 10377 - DNA, 25 bp, probe
caatggaaaggctgttatatggaat

SEQ ID NO: 10378 - DNA, 25 bp, probe
tggaaaggctgttatatggaatgtc

SEQ ID NO: 10379 - DNA, 25 bp, probe
ggctgttatatggaatgtctgtaaa

SEQ ID NO: 10380 - DNA, 25 bp, probe
agtagccataaagatcatcagcaaa

SEQ ID NO: 10381 - DNA, 25 bp, probe
acaatggaaaggctgttatatggaa

SEQ ID NO: 10382 - DNA, 25 bp, probe
gacaatggaaaggctgttatatgga

SEQ ID NO: 10383 - DNA, 25 bp, probe
aattctaatacttgaagtggaccca

SEQ ID NO: 10384 - DNA, 25 bp, probe
aaattctaatacttgaagtggaccc

SEQ ID NO: 10385 - DNA, 25 bp, probe
ggacaatggaaaggctgttatatgg

SEQ ID NO: 10386 - DNA, 25 bp, probe
gggacaatggaaaggctgttatatg

SEQ ID NO: 10387 - DNA, 25 bp, probe
agggacaatggaaaggctgttatat

SEQ ID NO: 10388 - DNA, 25 bp, probe
aaacctaaatcatccttgcatcatc

SEQ ID NO: 10389 - DNA, 25 bp, probe
aacctaaatcatccttgcatcatca

SEQ ID NO: 10390 - DNA, 25 bp, probe
gctgttatatggaatgtctgtaaat

SEQ ID NO: 10391 - DNA, 25 bp, probe
acctaaatcatccttgcatcatcaa

SEQ ID NO: 10392 - DNA, 25 bp, probe
cagggacaatggaaaggctgttata

SEQ ID NO: 10393 - DNA, 25 bp, probe
ctattggttcagcaagagaggcaga

SEQ ID NO: 10394 - DNA, 25 bp, probe
aaaaggaagtttgctattggttcag

SEQ ID NO: 10395 - DNA, 25 bp, probe
ccataaagatcatcagcaaaaggaa

SEQ ID NO: 10396 - DNA, 25 bp, probe
gtagccataaagatcatcagcaaaa

SEQ ID NO: 10397 - DNA, 25 bp, probe
aaagatcatcagcaaaaggaagttt

SEQ ID NO: 10398 - DNA, 25 bp, probe
tagccataaagatcatcagcaaaag

SEQ ID NO: 10399 - DNA, 25 bp, probe
tattggttcagcaagagaggcagac

SEQ ID NO: 10400 - DNA, 25 bp, probe
taaagatcatcagcaaaaggaagtt

SEQ ID NO: 10401 - DNA, 25 bp, probe
aaaggaagtttgctattggttcagc

SEQ ID NO: 10402 - DNA, 25 bp, probe
aatcatccttgcatcatcaagatta

SEQ ID NO: 10403 - DNA, 25 bp, probe
ataaagatcatcagcaaaaggaagt

SEQ ID NO: 10404 - DNA, 25 bp, probe
ttttgaaaacctaaatcatccttgc

SEQ ID NO: 10405 - DNA, 25 bp, probe
cataaagatcatcagcaaaaggaag

SEQ ID NO: 10406 - DNA, 25 bp, probe
taaattctaatacttgaagtggacc

SEQ ID NO: 10407 - DNA, 25 bp, probe
gccataaagatcatcagcaaaagga

SEQ ID NO: 10408 - DNA, 25 bp, probe
agccataaagatcatcagcaaaagg

SEQ ID NO: 10409 - DNA, 25 bp, probe
gaaaacctaaatcatccttgcatca

SEQ ID NO: 10410 - DNA, 25 bp, probe
aaaacctaaatcatccttgcatcat

SEQ ID NO: 10411 - DNA, 25 bp, probe
tgaaaacctaaatcatccttgcatc

SEQ ID NO: 10412 - DNA, 25 bp, probe
tttgaaaacctaaatcatccttgca

SEQ ID NO: 10413 - DNA, 25 bp, probe
ttgaaaacctaaatcatccttgcat

SEQ ID NO: 10414 - DNA, 25 bp, probe
ttgctgtgtactcattgtcttctat

SEQ ID NO: 10415 - DNA, 25 bp, probe
gctgtgtactcattgtcttctatca

SEQ ID NO: 10416 - DNA, 25 bp, probe
tgctgtgtactcattgtcttctatc

SEQ ID NO: 10417 - DNA, 25 bp, probe
cttgctgtgtactcattgtcttcta

SEQ ID NO: 10418 - DNA, 25 bp, probe
tcttgctgtgtactcattgtcttct

SEQ ID NO: 10419 - DNA, 25 bp, probe
gtcttgctgtgtactcattgtcttc

SEQ ID NO: 10420 - DNA, 25 bp, probe
ctgtgtactcattgtcttctatcaa

SEQ ID NO: 10421 - DNA, 25 bp, probe
cttgtcttgctgtgtactcattgtc

SEQ ID NO: 10422 - DNA, 25 bp, probe
tgtcttgctgtgtactcattgtctt

SEQ ID NO: 10423 - DNA, 25 bp, probe
ttgtcttgctgtgtactcattgtct

SEQ ID NO: 10424 - DNA, 25 bp, probe
cgtcattaaatctatggcacatcaa

SEQ ID NO: 10425 - DNA, 25 bp, probe
aaatctatggcacatcaagttaccc

SEQ ID NO: 10426 - DNA, 25 bp, probe
taaatctatggcacatcaagttacc

SEQ ID NO: 10427 - DNA, 25 bp, probe
gtactcattgtcttctatcaatcgg

SEQ ID NO: 10428 - DNA, 25 bp, probe
tcattaaatctatggcacatcaagt

SEQ ID NO: 10429 - DNA, 25 bp, probe
gtcattaaatctatggcacatcaag

SEQ ID NO: 10430 - DNA, 25 bp, probe
aatctatggcacatcaagttaccct

SEQ ID NO: 10431 - DNA, 25 bp, probe
tgtactcattgtcttctatcaatcg

SEQ ID NO: 10432 - DNA, 25 bp, probe
gatctctatggatataattcatgcg

SEQ ID NO: 10433 - DNA, 25 bp, probe
ccttgtcttgctgtgtactcattgt

SEQ ID NO: 10434 - DNA, 25 bp, probe
accttgtcttgctgtgtactcattg

SEQ ID NO: 10435 - DNA, 25 bp, probe
cattaaatctatggcacatcaagtt

SEQ ID NO: 10436 - DNA, 25 bp, probe
atctatggcacatcaagttaccctg

SEQ ID NO: 10437 - DNA, 25 bp, probe
tgtccacaagatttggtaatttcag

SEQ ID NO: 10438 - DNA, 25 bp, probe
gtccacaagatttggtaatttcaga

SEQ ID NO: 10439 - DNA, 25 bp, probe
ccacaagatttggtaatttcagagc

SEQ ID NO: 10440 - DNA, 25 bp, probe
tgtgtactcattgtcttctatcaat

SEQ ID NO: 10441 - DNA, 25 bp, probe
cacaagatttggtaatttcagagct

SEQ ID NO: 10442 - DNA, 25 bp, probe
tccacaagatttggtaatttcagag

SEQ ID NO: 10443 - DNA, 25 bp, probe
atgtccacaagatttggtaatttca

SEQ ID NO: 10444 - DNA, 25 bp, probe
ttaaatctatggcacatcaagttac

SEQ ID NO: 10445 - DNA, 25 bp, probe
ccaatgtacttagacacgtcattaa

SEQ ID NO: 10446 - DNA, 25 bp, probe
cacgtcattaaatctatggcacatc

SEQ ID NO: 10447 - DNA, 25 bp, probe
acgtcattaaatctatggcacatca

SEQ ID NO: 10448 - DNA, 25 bp, probe
ccatgtccacaagatttggtaattt

SEQ ID NO: 10449 - DNA, 25 bp, probe
tactcattgtcttctatcaatcggg

SEQ ID NO: 10450 - DNA, 25 bp, probe
caccttgtcttgctgtgtactcatt

SEQ ID NO: 10451 - DNA, 25 bp, probe
acacgtcattaaatctatggcacat

SEQ ID NO: 10452 - DNA, 25 bp, probe
gatcacgagccattgtcattcaagt

SEQ ID NO: 10453 - DNA, 25 bp, probe
gtgtactcattgtcttctatcaatc

SEQ ID NO: 10454 - DNA, 25 bp, probe
cgcagatctctatggatataattca

SEQ ID NO: 10455 - DNA, 25 bp, probe
catgtccacaagatttggtaatttc

SEQ ID NO: 10456 - DNA, 25 bp, probe
agacacgtcattaaatctatggcac

SEQ ID NO: 10457 - DNA, 25 bp, probe
gacacgtcattaaatctatggcaca

SEQ ID NO: 10458 - DNA, 25 bp, probe
cttatcccaattcaagacccttctg

SEQ ID NO: 10459 - DNA, 25 bp, probe
tatcccaattcaagacccttctgtt

SEQ ID NO: 10460 - DNA, 25 bp, probe
ttatcccaattcaagacccttctgt

SEQ ID NO: 10461 - DNA, 25 bp, probe
cctcatttggctttgtgaattgtca

SEQ ID NO: 10462 - DNA, 25 bp, probe
acctcatttggctttgtgaattgtc

SEQ ID NO: 10463 - DNA, 25 bp, probe
atcccaattcaagacccttctgttc

SEQ ID NO: 10464 - DNA, 25 bp, probe
aattcaagacccttctgttcctgac

SEQ ID NO: 10465 - DNA, 25 bp, probe
caattcaagacccttctgttcctga

SEQ ID NO: 10466 - DNA, 25 bp, probe
ccctgctctcttatcccaattcaag

SEQ ID NO: 10467 - DNA, 25 bp, probe
tccttcatgtttaatggcacctcat

SEQ ID NO: 10468 - DNA, 25 bp, probe
cttcatgtttaatggcacctcattt

SEQ ID NO: 10469 - DNA, 25 bp, probe
ctcttatcccaattcaagacccttc

SEQ ID NO: 10470 - DNA, 25 bp, probe
ttcatgtttaatggcacctcatttg

SEQ ID NO: 10471 - DNA, 25 bp, probe
tcttatcccaattcaagacccttct

SEQ ID NO: 10472 - DNA, 25 bp, probe
tctcttatcccaattcaagaccctt

SEQ ID NO: 10473 - DNA, 25 bp, probe
tctccttcatgtttaatggcacctc

SEQ ID NO: 10474 - DNA, 25 bp, probe
ctgctctcttatcccaattcaagac

SEQ ID NO: 10475 - DNA, 25 bp, probe
ctctcttatcccaattcaagaccct

SEQ ID NO: 10476 - DNA, 25 bp, probe
cacctcatttggctttgtgaattgt

SEQ ID NO: 10477 - DNA, 25 bp, probe
ctccttcatgtttaatggcacctca

SEQ ID NO: 10478 - DNA, 25 bp, probe
gtctccttcatgtttaatggcacct

SEQ ID NO: 10479 - DNA, 25 bp, probe
ccaattcaagacccttctgttcctg

SEQ ID NO: 10480 - DNA, 25 bp, probe
ccttcatgtttaatggcacctcatt

SEQ ID NO: 10481 - DNA, 25 bp, probe
cctgctctcttatcccaattcaaga

SEQ ID NO: 10482 - DNA, 25 bp, probe
tcatgtttaatggcacctcatttgg

SEQ ID NO: 10483 - DNA, 25 bp, probe
ctctttacacccatcccattcacct

SEQ ID NO: 10484 - DNA, 25 bp, probe
tgctctcttatcccaattcaagacc

SEQ ID NO: 10485 - DNA, 25 bp, probe
tttaatggcacctcatttggctttg

SEQ ID NO: 10486 - DNA, 25 bp, probe
gtttaatggcacctcatttggcttt

SEQ ID NO: 10487 - DNA, 25 bp, probe
tctttacacccatcccattcacctg

SEQ ID NO: 10488 - DNA, 25 bp, probe
tttacacccatcccattcacctgag

SEQ ID NO: 10489 - DNA, 25 bp, probe
ctttacacccatcccattcacctga

SEQ ID NO: 10490 - DNA, 25 bp, probe
gctctcttatcccaattcaagaccc

SEQ ID NO: 10491 - DNA, 25 bp, probe
attcaagacccttctgttcctgacc

SEQ ID NO: 10492 - DNA, 25 bp, probe
gcacctcatttggctttgtgaattg

SEQ ID NO: 10493 - DNA, 25 bp, probe
atgtttaatggcacctcatttggct

SEQ ID NO: 10494 - DNA, 25 bp, probe
cgtctccttcatgtttaatggcacc

SEQ ID NO: 10495 - DNA, 25 bp, probe
gtgggcgtctccttcatgtttaatg

SEQ ID NO: 10496 - DNA, 25 bp, probe
cccaattcaagacccttctgttcct

SEQ ID NO: 10497 - DNA, 25 bp, probe
tcccaattcaagacccttctgttcc

SEQ ID NO: 10498 - DNA, 25 bp, probe
ttaatggcacctcatttggctttgt

SEQ ID NO: 10499 - DNA, 25 bp, probe
tgtttaatggcacctcatttggctt

SEQ ID NO: 10500 - DNA, 25 bp, probe
catgtttaatggcacctcatttggc

SEQ ID NO: 10501 - DNA, 25 bp, probe
gaattgtcacctcacctcgggaaat

SEQ ID NO: 10502 - DNA, 25 bp, probe
gcaagactccatatctacagaacat

SEQ ID NO: 10503 - DNA, 25 bp, probe
ggcaagactccatatctacagaaca

SEQ ID NO: 10504 - DNA, 25 bp, probe
caagactccatatctacagaacatt

SEQ ID NO: 10505 - DNA, 25 bp, probe
gtctatcctctccagcatctttatt

SEQ ID NO: 10506 - DNA, 25 bp, probe
tctatcctctccagcatctttattt

SEQ ID NO: 10507 - DNA, 25 bp, probe
ctcagagcagacagaaacattattt

SEQ ID NO: 10508 - DNA, 25 bp, probe
ggtctatcctctccagcatctttat

SEQ ID NO: 10509 - DNA, 25 bp, probe
tctcagagcagacagaaacattatt

SEQ ID NO: 10510 - DNA, 25 bp, probe
atctcagagcagacagaaacattat

SEQ ID NO: 10511 - DNA, 25 bp, probe
aatctcagagcagacagaaacatta

SEQ ID NO: 10512 - DNA, 25 bp, probe
aaatctcagagcagacagaaacatt

SEQ ID NO: 10513 - DNA, 25 bp, probe
tggcaagactccatatctacagaac

SEQ ID NO: 10514 - DNA, 25 bp, probe
acctctgttggtaagtatacatgaa

SEQ ID NO: 10515 - DNA, 25 bp, probe
aacctctgttggtaagtatacatga

SEQ ID NO: 10516 - DNA, 25 bp, probe
tctacagaacatttaaaggttggct

SEQ ID NO: 10517 - DNA, 25 bp, probe
atctacagaacatttaaaggttggc

SEQ ID NO: 10518 - DNA, 25 bp, probe
aagactccatatctacagaacattt

SEQ ID NO: 10519 - DNA, 25 bp, probe
catgaaagtgtataattgggtgcag

SEQ ID NO: 10520 - DNA, 25 bp, probe
atgaaagtgtataattgggtgcagt

SEQ ID NO: 10521 - DNA, 25 bp, probe
ctacagaacatttaaaggttggctg

SEQ ID NO: 10522 - DNA, 25 bp, probe
tgaaagtgtataattgggtgcagtg

SEQ ID NO: 10523 - DNA, 25 bp, probe
tacatgaaagtgtataattgggtgc

SEQ ID NO: 10524 - DNA, 25 bp, probe
tacagaacatttaaaggttggctgg

SEQ ID NO: 10525 - DNA, 25 bp, probe
acatgaaagtgtataattgggtgca

SEQ ID NO: 10526 - DNA, 25 bp, probe
ccctttaaacctctgttggtaagta

SEQ ID NO: 10527 - DNA, 25 bp, probe
tggtctatcctctccagcatcttta

SEQ ID NO: 10528 - DNA, 25 bp, probe
gaaagtgtataattgggtgcagtgg

SEQ ID NO: 10529 - DNA, 25 bp, probe
agactccatatctacagaacattta

SEQ ID NO: 10530 - DNA, 25 bp, probe
tcagagcagacagaaacattatttt

SEQ ID NO: 10531 - DNA, 25 bp, probe
aaaatctcagagcagacagaaacat

SEQ ID NO: 10532 - DNA, 25 bp, probe
atggcaagactccatatctacagaa

SEQ ID NO: 10533 - DNA, 25 bp, probe
ctatcctctccagcatctttatttt

SEQ ID NO: 10534 - DNA, 25 bp, probe
cctttaaacctctgttggtaagtat

SEQ ID NO: 10535 - DNA, 25 bp, probe
cctctgttggtaagtatacatgaaa

SEQ ID NO: 10536 - DNA, 25 bp, probe
tgttggtaagtatacatgaaagtgt

SEQ ID NO: 10537 - DNA, 25 bp, probe
catggcaagactccatatctacaga

SEQ ID NO: 10538 - DNA, 25 bp, probe
gactccatatctacagaacatttaa

SEQ ID NO: 10539 - DNA, 25 bp, probe
tcctctccagcatctttattttatt

SEQ ID NO: 10540 - DNA, 25 bp, probe
atcctctccagcatctttattttat

SEQ ID NO: 10541 - DNA, 25 bp, probe
caaagatctctggtctatcctctcc

SEQ ID NO: 10542 - DNA, 25 bp, probe
aaacctctgttggtaagtatacatg

SEQ ID NO: 10543 - DNA, 25 bp, probe
ctgttggtaagtatacatgaaagtg

SEQ ID NO: 10544 - DNA, 25 bp, probe
tctgttggtaagtatacatgaaagt

SEQ ID NO: 10545 - DNA, 25 bp, probe
tatctacagaacatttaaaggttgg

SEQ ID NO: 10546 - DNA, 25 bp, probe
attgtctagtccttcgttatgttcc

SEQ ID NO: 10547 - DNA, 25 bp, probe
aattgtctagtccttcgttatgttc

SEQ ID NO: 10548 - DNA, 25 bp, probe
tatttgaatgtttatggcacctgac

SEQ ID NO: 10549 - DNA, 25 bp, probe
gaaactgctttgtatctgctttgta

SEQ ID NO: 10550 - DNA, 25 bp, probe
ttatttgaatgtttatggcacctga

SEQ ID NO: 10551 - DNA, 25 bp, probe
ctgttggtgccttcttggtattgta

SEQ ID NO: 10552 - DNA, 25 bp, probe
tactgttggtgccttcttggtattg

SEQ ID NO: 10553 - DNA, 25 bp, probe
aatgtttatggcacctgacttgtaa

SEQ ID NO: 10554 - DNA, 25 bp, probe
ggattatttgaatgtttatggcacc

SEQ ID NO: 10555 - DNA, 25 bp, probe
ctgaaactgctttgtatctgctttg

SEQ ID NO: 10556 - DNA, 25 bp, probe
tctgaaactgctttgtatctgcttt

SEQ ID NO: 10557 - DNA, 25 bp, probe
atttgaatgtttatggcacctgact

SEQ ID NO: 10558 - DNA, 25 bp, probe
ttctgaaactgctttgtatctgctt

SEQ ID NO: 10559 - DNA, 25 bp, probe
gaatgtttatggcacctgacttgta

SEQ ID NO: 10560 - DNA, 25 bp, probe
tttgaatgtttatggcacctgactt

SEQ ID NO: 10561 - DNA, 25 bp, probe
atgtttatggcacctgacttgtaaa

SEQ ID NO: 10562 - DNA, 25 bp, probe
attatttgaatgtttatggcacctg

SEQ ID NO: 10563 - DNA, 25 bp, probe
tggattatttgaatgtttatggcac

SEQ ID NO: 10564 - DNA, 25 bp, probe
tgaaactgctttgtatctgctttgt

SEQ ID NO: 10565 - DNA, 25 bp, probe
aaactgctttgtatctgctttgtac

SEQ ID NO: 10566 - DNA, 25 bp, probe
ctttgtatctgctttgtactgttgg

SEQ ID NO: 10567 - DNA, 25 bp, probe
cgtgaaattgtctagtccttcgtta

SEQ ID NO: 10568 - DNA, 25 bp, probe
gtactgttggtgccttcttggtatt

SEQ ID NO: 10569 - DNA, 25 bp, probe
tttgtatctgctttgtactgttggt

SEQ ID NO: 10570 - DNA, 25 bp, probe
gaaattgtctagtccttcgttatgt

SEQ ID NO: 10571 - DNA, 25 bp, probe
tgaaattgtctagtccttcgttatg

SEQ ID NO: 10572 - DNA, 25 bp, probe
gtgaaattgtctagtccttcgttat

SEQ ID NO: 10573 - DNA, 25 bp, probe
gctttgtatctgctttgtactgttg

SEQ ID NO: 10574 - DNA, 25 bp, probe
aactgctttgtatctgctttgtact

SEQ ID NO: 10575 - DNA, 25 bp, probe
gattatttgaatgtttatggcacct

SEQ ID NO: 10576 - DNA, 25 bp, probe
aaattgtctagtccttcgttatgtt

SEQ ID NO: 10577 - DNA, 25 bp, probe
agaatcattaaattgtgtccctgta

SEQ ID NO: 10578 - DNA, 25 bp, probe
tagaatcattaaattgtgtccctgt

SEQ ID NO: 10579 - DNA, 25 bp, probe
ttgaatgtttatggcacctgacttg

SEQ ID NO: 10580 - DNA, 25 bp, probe
tgctttgtatctgctttgtactgtt

SEQ ID NO: 10581 - DNA, 25 bp, probe
attaaattgtgtccctgtattacca

SEQ ID NO: 10582 - DNA, 25 bp, probe
gttctgaaactgctttgtatctgct

SEQ ID NO: 10583 - DNA, 25 bp, probe
cattaaattgtgtccctgtattacc

SEQ ID NO: 10584 - DNA, 25 bp, probe
ttgtatctgctttgtactgttggtg

SEQ ID NO: 10585 - DNA, 25 bp, probe
ctgctttgtatctgctttgtactgt

SEQ ID NO: 10586 - DNA, 25 bp, probe
actgctttgtatctgctttgtactg

SEQ ID NO: 10587 - DNA, 25 bp, probe
taaattgtgtccctgtattaccaaa

SEQ ID NO: 10588 - DNA, 25 bp, probe
ttaaattgtgtccctgtattaccaa

SEQ ID NO: 10589 - DNA, 25 bp, probe
ccttagaatcattaaattgtgtccc

SEQ ID NO: 10590 - DNA, 25 bp, probe
caaccttttcataggagatgcagct

SEQ ID NO: 10591 - DNA, 25 bp, probe
cccaaccttttcataggagatgcag

SEQ ID NO: 10592 - DNA, 25 bp, probe
ccaaccttttcataggagatgcagc

SEQ ID NO: 10593 - DNA, 25 bp, probe
tttagaactgctgataaagggatcg

SEQ ID NO: 10594 - DNA, 25 bp, probe
ttagaactgctgataaagggatcgt

SEQ ID NO: 10595 - DNA, 25 bp, probe
tagaactgctgataaagggatcgtt

SEQ ID NO: 10596 - DNA, 25 bp, probe
tctctttaatctcacgtagcccttt

SEQ ID NO: 10597 - DNA, 25 bp, probe
aactgctgataaagggatcgttctc

SEQ ID NO: 10598 - DNA, 25 bp, probe
ctctctttaatctcacgtagccctt

SEQ ID NO: 10599 - DNA, 25 bp, probe
ttctctctttaatctcacgtagccc

SEQ ID NO: 10600 - DNA, 25 bp, probe
gcaaaactcaaatctcctgtgaaat

SEQ ID NO: 10601 - DNA, 25 bp, probe
tctctctttaatctcacgtagccct

SEQ ID NO: 10602 - DNA, 25 bp, probe
actgctgataaagggatcgttctca

SEQ ID NO: 10603 - DNA, 25 bp, probe
ctttagaactgctgataaagggatc

SEQ ID NO: 10604 - DNA, 25 bp, probe
gctttagaactgctgataaagggat

SEQ ID NO: 10605 - DNA, 25 bp, probe
ggagatcatcagaaaagcccttact

SEQ ID NO: 10606 - DNA, 25 bp, probe
ggcaaaactcaaatctcctgtgaaa

SEQ ID NO: 10607 - DNA, 25 bp, probe
cttctgtcagggcaaaactcaaatc

SEQ ID NO: 10608 - DNA, 25 bp, probe
gagatcatcagaaaagcccttactg

SEQ ID NO: 10609 - DNA, 25 bp, probe
tggagatcatcagaaaagcccttac

SEQ ID NO: 10610 - DNA, 25 bp, probe
ctctttaatctcacgtagccctttt

SEQ ID NO: 10611 - DNA, 25 bp, probe
ttctgtcagggcaaaactcaaatct

SEQ ID NO: 10612 - DNA, 25 bp, probe
tcttctgtcagggcaaaactcaaat

SEQ ID NO: 10613 - DNA, 25 bp, probe
ttcttctgtcagggcaaaactcaaa

SEQ ID NO: 10614 - DNA, 25 bp, probe
ctggagatcatcagaaaagccctta

SEQ ID NO: 10615 - DNA, 25 bp, probe
tctgtcagggcaaaactcaaatctc

SEQ ID NO: 10616 - DNA, 25 bp, probe
ggctttagaactgctgataaaggga

SEQ ID NO: 10617 - DNA, 25 bp, probe
aggctttagaactgctgataaaggg

SEQ ID NO: 10618 - DNA, 25 bp, probe
gaactgctgataaagggatcgttct

SEQ ID NO: 10619 - DNA, 25 bp, probe
agaactgctgataaagggatcgttc

SEQ ID NO: 10620 - DNA, 25 bp, probe
gttcttctgtcagggcaaaactcaa

SEQ ID NO: 10621 - DNA, 25 bp, probe
gggcaaaactcaaatctcctgtgaa

SEQ ID NO: 10622 - DNA, 25 bp, probe
ctgctgataaagggatcgttctcag

SEQ ID NO: 10623 - DNA, 25 bp, probe
ctgtcagggcaaaactcaaatctcc

SEQ ID NO: 10624 - DNA, 25 bp, probe
gtgttcttctgtcagggcaaaactc

SEQ ID NO: 10625 - DNA, 25 bp, probe
gaatgcaataaatcaaaatatggga

SEQ ID NO: 10626 - DNA, 25 bp, probe
agaatgcaataaatcaaaatatggg

SEQ ID NO: 10627 - DNA, 25 bp, probe
tgcaataaatcaaaatatgggaaaa

SEQ ID NO: 10628 - DNA, 25 bp, probe
tgttcttctgtcagggcaaaactca

SEQ ID NO: 10629 - DNA, 25 bp, probe
atgcaataaatcaaaatatgggaaa

SEQ ID NO: 10630 - DNA, 25 bp, probe
aatgcaataaatcaaaatatgggaa

SEQ ID NO: 10631 - DNA, 25 bp, probe
agggcaaaactcaaatctcctgtga

SEQ ID NO: 10632 - DNA, 25 bp, probe
tgtcagggcaaaactcaaatctcct

SEQ ID NO: 10633 - DNA, 25 bp, probe
tgctgataaagggatcgttctcagg

SEQ ID NO: 10634 - DNA, 25 bp, probe
cagaatgcaataaatcaaaatatgg

SEQ ID NO: 10635 - DNA, 25 bp, probe
tacgtgttcttctgtcagggcaaaa

SEQ ID NO: 10636 - DNA, 25 bp, probe
gctggagatcatcagaaaagccctt

SEQ ID NO: 10637 - DNA, 25 bp, probe
gagaaccatgaggtccatcagtatc

SEQ ID NO: 10638 - DNA, 25 bp, probe
tgagaaccatgaggtccatcagtat

SEQ ID NO: 10639 - DNA, 25 bp, probe
ttgagaaccatgaggtccatcagta

SEQ ID NO: 10640 - DNA, 25 bp, probe
agaaccatgaggtccatcagtatcg

SEQ ID NO: 10641 - DNA, 25 bp, probe
gagtttgagaaccatgaggtccatc

SEQ ID NO: 10642 - DNA, 25 bp, probe
gtttgagaaccatgaggtccatcag

SEQ ID NO: 10643 - DNA, 25 bp, probe
gaaccatgaggtccatcagtatcgg

SEQ ID NO: 10644 - DNA, 25 bp, probe
tttgagaaccatgaggtccatcagt

SEQ ID NO: 10645 - DNA, 25 bp, probe
agtttgagaaccatgaggtccatca

SEQ ID NO: 10646 - DNA, 25 bp, probe
ctccaggagtttgagaaccatgagg

SEQ ID NO: 10647 - DNA, 25 bp, probe
aagtttctgaaatattgcaaacccg

SEQ ID NO: 10648 - DNA, 25 bp, probe
gagacagctccaggagtttgagaac

SEQ ID NO: 10649 - DNA, 25 bp, probe
caggagtttgagaaccatgaggtcc

SEQ ID NO: 10650 - DNA, 25 bp, probe
ccaggagtttgagaaccatgaggtc

SEQ ID NO: 10651 - DNA, 25 bp, probe
gctccaggagtttgagaaccatgag

SEQ ID NO: 10652 - DNA, 25 bp, probe
aggaattctgaagttctgggccttt

SEQ ID NO: 10653 - DNA, 25 bp, probe
aggagtttgagaaccatgaggtcca

SEQ ID NO: 10654 - DNA, 25 bp, probe
tccaggagtttgagaaccatgaggt

SEQ ID NO: 10655 - DNA, 25 bp, probe
aaatattgcaaacccgcagagttta

SEQ ID NO: 10656 - DNA, 25 bp, probe
aatattgcaaacccgcagagtttag

SEQ ID NO: 10657 - DNA, 25 bp, probe
agtttctgaaatattgcaaacccgc

SEQ ID NO: 10658 - DNA, 25 bp, probe
caggaattctgaagttctgggcctt

SEQ ID NO: 10659 - DNA, 25 bp, probe
gaaatattgcaaacccgcagagttt

SEQ ID NO: 10660 - DNA, 25 bp, probe
tttctgaaatattgcaaacccgcag

SEQ ID NO: 10661 - DNA, 25 bp, probe
gtttctgaaatattgcaaacccgca

SEQ ID NO: 10662 - DNA, 25 bp, probe
atattgcaaacccgcagagtttagg

SEQ ID NO: 10663 - DNA, 25 bp, probe
tgaaatattgcaaacccgcagagtt

SEQ ID NO: 10664 - DNA, 25 bp, probe
ctgaaatattgcaaacccgcagagt

SEQ ID NO: 10665 - DNA, 25 bp, probe
ttctgaaatattgcaaacccgcaga

SEQ ID NO: 10666 - DNA, 25 bp, probe
tctgaaatattgcaaacccgcagag

SEQ ID NO: 10667 - DNA, 25 bp, probe
ctccaggaattctgaagttctgggc

SEQ ID NO: 10668 - DNA, 25 bp, probe
gctccaggaattctgaagttctggg

SEQ ID NO: 10669 - DNA, 25 bp, probe
ctggactactaaagtgaactggatg

SEQ ID NO: 10670 - DNA, 25 bp, probe
tggactactaaagtgaactggatgg

SEQ ID NO: 10671 - DNA, 25 bp, probe
gctggactactaaagtgaactggat

SEQ ID NO: 10672 - DNA, 25 bp, probe
gaaagctggactactaaagtgaact

SEQ ID NO: 10673 - DNA, 25 bp, probe
aaagctggactactaaagtgaactg

SEQ ID NO: 10674 - DNA, 25 bp, probe
cacacagttcggaaagactacagat

SEQ ID NO: 10675 - DNA, 25 bp, probe
ggaaagctggactactaaagtgaac

SEQ ID NO: 10676 - DNA, 25 bp, probe
acacagttcggaaagactacagatc

SEQ ID NO: 10677 - DNA, 25 bp, probe
ggactactaaagtgaactggatggc

SEQ ID NO: 10678 - DNA, 25 bp, probe
aagctggactactaaagtgaactgg

SEQ ID NO: 10679 - DNA, 25 bp, probe
gggaaagctggactactaaagtgaa

SEQ ID NO: 10680 - DNA, 25 bp, probe
ctcagggaaagctggactactaaag

SEQ ID NO: 10681 - DNA, 25 bp, probe
agctggactactaaagtgaactgga

SEQ ID NO: 10682 - DNA, 25 bp, probe
agggaaagctggactactaaagtga

SEQ ID NO: 10683 - DNA, 25 bp, probe
cagggaaagctggactactaaagtg

SEQ ID NO: 10684 - DNA, 25 bp, probe
tcagggaaagctggactactaaagt

SEQ ID NO: 10685 - DNA, 25 bp, probe
cacagttcggaaagactacagatct

SEQ ID NO: 10686 - DNA, 25 bp, probe
ccacacagttcggaaagactacaga

SEQ ID NO: 10687 - DNA, 25 bp, probe
cagttcggaaagactacagatctta

SEQ ID NO: 10688 - DNA, 25 bp, probe
agttcggaaagactacagatcttaa

SEQ ID NO: 10689 - DNA, 25 bp, probe
gactactaaagtgaactggatggcc

SEQ ID NO: 10690 - DNA, 25 bp, probe
acagttcggaaagactacagatctt

SEQ ID NO: 10691 - DNA, 25 bp, probe
cccacacagttcggaaagactacag

SEQ ID NO: 10692 - DNA, 25 bp, probe
actactaaagtgaactggatggccc

SEQ ID NO: 10693 - DNA, 25 bp, probe
ctactaaagtgaactggatggccca

SEQ ID NO: 10694 - DNA, 25 bp, probe
tactaaagtgaactggatggcccac

SEQ ID NO: 10695 - DNA, 25 bp, probe
atggatggacaggtgagaacacatt

SEQ ID NO: 10696 - DNA, 25 bp, probe
gagtgatggatggacaggtgagaac

SEQ ID NO: 10697 - DNA, 25 bp, probe
gatggatggacaggtgagaacacat

SEQ ID NO: 10698 - DNA, 25 bp, probe
agtgttttgctccatttcttaattt

SEQ ID NO: 10699 - DNA, 25 bp, probe
tgttttgctccatttcttaatttct

SEQ ID NO: 10700 - DNA, 25 bp, probe
gtgttttgctccatttcttaatttc

SEQ ID NO: 10701 - DNA, 25 bp, probe
ggacaggtgagaacacattttattt

SEQ ID NO: 10702 - DNA, 25 bp, probe
atggacaggtgagaacacattttat

SEQ ID NO: 10703 - DNA, 25 bp, probe
tggacaggtgagaacacattttatt

SEQ ID NO: 10704 - DNA, 25 bp, probe
gatggacaggtgagaacacatttta

SEQ ID NO: 10705 - DNA, 25 bp, probe
ctagtgttttgctccatttcttaat

SEQ ID NO: 10706 - DNA, 25 bp, probe
tctgatgattatatctttcttgtgt

SEQ ID NO: 10707 - DNA, 25 bp, probe
tagtgttttgctccatttcttaatt

SEQ ID NO: 10708 - DNA, 25 bp, probe
cctatgaaaagctccagattctcaa

SEQ ID NO: 10709 - DNA, 25 bp, probe
acaggtgagaacacattttattttc

SEQ ID NO: 10710 - DNA, 25 bp, probe
gacaggtgagaacacattttatttt

SEQ ID NO: 10711 - DNA, 25 bp, probe
ctatgaaaagctccagattctcaaa

SEQ ID NO: 10712 - DNA, 25 bp, probe
tttgctccatttcttaatttcttta

SEQ ID NO: 10713 - DNA, 25 bp, probe
gttttgctccatttcttaatttctt

SEQ ID NO: 10714 - DNA, 25 bp, probe
tccttcttgcattttaagctctatt

SEQ ID NO: 10715 - DNA, 25 bp, probe
ttccttcttgcattttaagctctat

SEQ ID NO: 10716 - DNA, 25 bp, probe
attccttcttgcattttaagctcta

SEQ ID NO: 10717 - DNA, 25 bp, probe
tattccttcttgcattttaagctct

SEQ ID NO: 10718 - DNA, 25 bp, probe
tggatggacaggtgagaacacattt

SEQ ID NO: 10719 - DNA, 25 bp, probe
tgctccatttcttaatttctttatt

SEQ ID NO: 10720 - DNA, 25 bp, probe
ttgctccatttcttaatttctttat

SEQ ID NO: 10721 - DNA, 25 bp, probe
gtgatggatggacaggtgagaacac

SEQ ID NO: 10722 - DNA, 25 bp, probe
ccttcttgcattttaagctctattt

SEQ ID NO: 10723 - DNA, 25 bp, probe
ttattccttcttgcattttaagctc

SEQ ID NO: 10724 - DNA, 25 bp, probe
tttattccttcttgcattttaagct

SEQ ID NO: 10725 - DNA, 25 bp, probe
ttttgctccatttcttaatttcttt

SEQ ID NO: 10726 - DNA, 25 bp, probe
actagtgttttgctccatttcttaa

SEQ ID NO: 10727 - DNA, 25 bp, probe
caggtgagaacacattttattttct

SEQ ID NO: 10728 - DNA, 25 bp, probe
ttctgatgattatatctttcttgtg

SEQ ID NO: 10729 - DNA, 25 bp, probe
gcctatgaaaagctccagattctca

SEQ ID NO: 10730 - DNA, 25 bp, probe
aaaagcctatgaaaagctccagatt

SEQ ID NO: 10731 - DNA, 25 bp, probe
aactagtgttttgctccatttctta

SEQ ID NO: 10732 - DNA, 25 bp, probe
taactagtgttttgctccatttctt

SEQ ID NO: 10733 - DNA, 25 bp, probe
ttaactagtgttttgctccatttct

SEQ ID NO: 10734 - DNA, 25 bp, probe
ggatggacaggtgagaacacatttt

SEQ ID NO: 10735 - DNA, 25 bp, probe
aaagcctatgaaaagctccagattc

SEQ ID NO: 10736 - DNA, 25 bp, probe
tttaactagtgttttgctccatttc

SEQ ID NO: 10737 - DNA, 25 bp, probe
ttttattccttcttgcattttaagc

SEQ ID NO: 10738 - DNA, 25 bp, probe
aagcctatgaaaagctccagattct

SEQ ID NO: 10739 - DNA, 25 bp, probe
gtacctcgttaagatgtagtgactg

SEQ ID NO: 10740 - DNA, 25 bp, probe
tacctcgttaagatgtagtgactgc

SEQ ID NO: 10741 - DNA, 25 bp, probe
ttaagatgtagtgactgcggatgtt

SEQ ID NO: 10742 - DNA, 25 bp, probe
gttaagatgtagtgactgcggatgt

SEQ ID NO: 10743 - DNA, 25 bp, probe
ctaagactttaactcagagcaaggc

SEQ ID NO: 10744 - DNA, 25 bp, probe
atcgggctaagactttaactcagag

SEQ ID NO: 10745 - DNA, 25 bp, probe
aagatgtagtgactgcggatgttta

SEQ ID NO: 10746 - DNA, 25 bp, probe
taagatgtagtgactgcggatgttt

SEQ ID NO: 10747 - DNA, 25 bp, probe
catcgggctaagactttaactcaga

SEQ ID NO: 10748 - DNA, 25 bp, probe
cgttaagatgtagtgactgcggatg

SEQ ID NO: 10749 - DNA, 25 bp, probe
taagactttaactcagagcaaggca

SEQ ID NO: 10750 - DNA, 25 bp, probe
tcgttaagatgtagtgactgcggat

SEQ ID NO: 10751 - DNA, 25 bp, probe
ctgcggatgtttacactgaatgaag

SEQ ID NO: 10752 - DNA, 25 bp, probe
tttgaacagcatgaaactttgtagc

SEQ ID NO: 10753 - DNA, 25 bp, probe
agatgtagtgactgcggatgtttac

SEQ ID NO: 10754 - DNA, 25 bp, probe
gaacagcatgaaactttgtagcatc

SEQ ID NO: 10755 - DNA, 25 bp, probe
aacatacggtttgaacagcatgaaa

SEQ ID NO: 10756 - DNA, 25 bp, probe
tgaacagcatgaaactttgtagcat

SEQ ID NO: 10757 - DNA, 25 bp, probe
actgcggatgtttacactgaatgaa

SEQ ID NO: 10758 - DNA, 25 bp, probe
ctcgttaagatgtagtgactgcgga

SEQ ID NO: 10759 - DNA, 25 bp, probe
aagactttaactcagagcaaggcag

SEQ ID NO: 10760 - DNA, 25 bp, probe
ttgaacagcatgaaactttgtagca

SEQ ID NO: 10761 - DNA, 25 bp, probe
caacatacggtttgaacagcatgaa

SEQ ID NO: 10762 - DNA, 25 bp, probe
acctcgttaagatgtagtgactgcg

SEQ ID NO: 10763 - DNA, 25 bp, probe
gactgcggatgtttacactgaatga

SEQ ID NO: 10764 - DNA, 25 bp, probe
gtttgaacagcatgaaactttgtag

SEQ ID NO: 10765 - DNA, 25 bp, probe
gcatcgggctaagactttaactcag

SEQ ID NO: 10766 - DNA, 25 bp, probe
ggtttgaacagcatgaaactttgta

SEQ ID NO: 10767 - DNA, 25 bp, probe
gctaagactttaactcagagcaagg

SEQ ID NO: 10768 - DNA, 25 bp, probe
ggctaagactttaactcagagcaag

SEQ ID NO: 10769 - DNA, 25 bp, probe
tgactgcggatgtttacactgaatg

SEQ ID NO: 10770 - DNA, 25 bp, probe
aacagcatgaaactttgtagcatcg

SEQ ID NO: 10771 - DNA, 25 bp, probe
gactttaactcagagcaaggcagac

SEQ ID NO: 10772 - DNA, 25 bp, probe
agactttaactcagagcaaggcaga

SEQ ID NO: 10773 - DNA, 25 bp, probe
atacggtttgaacagcatgaaactt

SEQ ID NO: 10774 - DNA, 25 bp, probe
tacggtttgaacagcatgaaacttt

SEQ ID NO: 10775 - DNA, 25 bp, probe
cttctgaagccatccgtagaaagta

SEQ ID NO: 10776 - DNA, 25 bp, probe
actttaactcagagcaaggcagact

SEQ ID NO: 10777 - DNA, 25 bp, probe
ttctgaagccatccgtagaaagtac

SEQ ID NO: 10778 - DNA, 25 bp, probe
aaatgattaatgacaggatggggtt

SEQ ID NO: 10779 - DNA, 25 bp, probe
aaaatgattaatgacaggatggggt

SEQ ID NO: 10780 - DNA, 25 bp, probe
agactggtacctcgttaagatgtag

SEQ ID NO: 10781 - DNA, 25 bp, probe
gggctaagactttaactcagagcaa

SEQ ID NO: 10782 - DNA, 25 bp, probe
aatgattaatgacaggatggggttc

SEQ ID NO: 10783 - DNA, 25 bp, probe
aatctgggattcagaactctgagac

SEQ ID NO: 10784 - DNA, 25 bp, probe
gaatctgggattcagaactctgaga

SEQ ID NO: 10785 - DNA, 25 bp, probe
atctgggattcagaactctgagacg

SEQ ID NO: 10786 - DNA, 25 bp, probe
ggaatctgggattcagaactctgag

SEQ ID NO: 10787 - DNA, 25 bp, probe
tctgggattcagaactctgagacgt

SEQ ID NO: 10788 - DNA, 25 bp, probe
gggaatctgggattcagaactctga

SEQ ID NO: 10789 - DNA, 25 bp, probe
ggggaatctgggattcagaactctg

SEQ ID NO: 10790 - DNA, 25 bp, probe
ttaatgagatggtggactggatgag

SEQ ID NO: 10791 - DNA, 25 bp, probe
gaattaatgagatggtggactggat

SEQ ID NO: 10792 - DNA, 25 bp, probe
aattaatgagatggtggactggatg

SEQ ID NO: 10793 - DNA, 25 bp, probe
attaatgagatggtggactggatga

SEQ ID NO: 10794 - DNA, 25 bp, probe
tggttaaatgctgacacaatagaaa

SEQ ID NO: 10795 - DNA, 25 bp, probe
atggttaaatgctgacacaatagaa

SEQ ID NO: 10796 - DNA, 25 bp, probe
taatgagatggtggactggatgagt

SEQ ID NO: 10797 - DNA, 25 bp, probe
ggtcgtgtatataaagcaaaggaac

SEQ ID NO: 10798 - DNA, 25 bp, probe
atggtcgtgtatataaagcaaagga

SEQ ID NO: 10799 - DNA, 25 bp, probe
tggtcgtgtatataaagcaaaggaa

SEQ ID NO: 10800 - DNA, 25 bp, probe
ctcgaattaatgagatggtggactg

SEQ ID NO: 10801 - DNA, 25 bp, probe
cgaattaatgagatggtggactgga

SEQ ID NO: 10802 - DNA, 25 bp, probe
gtcgtgtatataaagcaaaggaact

SEQ ID NO: 10803 - DNA, 25 bp, probe
tatggtcgtgtatataaagcaaagg

SEQ ID NO: 10804 - DNA, 25 bp, probe
cctatggtcgtgtatataaagcaaa

SEQ ID NO: 10805 - DNA, 25 bp, probe
tcgaattaatgagatggtggactgg

SEQ ID NO: 10806 - DNA, 25 bp, probe
catggttaaatgctgacacaataga

SEQ ID NO: 10807 - DNA, 25 bp, probe
atcctcgaattaatgagatggtgga

SEQ ID NO: 10808 - DNA, 25 bp, probe
cctcgaattaatgagatggtggact

SEQ ID NO: 10809 - DNA, 25 bp, probe
tcgtgtatataaagcaaaggaactt

SEQ ID NO: 10810 - DNA, 25 bp, probe
ctatggtcgtgtatataaagcaaag

SEQ ID NO: 10811 - DNA, 25 bp, probe
tcctcgaattaatgagatggtggac

SEQ ID NO: 10812 - DNA, 25 bp, probe
acctatggtcgtgtatataaagcaa

SEQ ID NO: 10813 - DNA, 25 bp, probe
tacctatggtcgtgtatataaagca

SEQ ID NO: 10814 - DNA, 25 bp, probe
gtacctatggtcgtgtatataaagc

SEQ ID NO: 10815 - DNA, 25 bp, probe
aggacatcctcgaattaatgagatg

SEQ ID NO: 10816 - DNA, 25 bp, probe
gacatcctcgaattaatgagatggt

SEQ ID NO: 10817 - DNA, 25 bp, probe
acatcctcgaattaatgagatggtg

SEQ ID NO: 10818 - DNA, 25 bp, probe
ggacatcctcgaattaatgagatgg

SEQ ID NO: 10819 - DNA, 25 bp, probe
catcctcgaattaatgagatggtgg

SEQ ID NO: 10820 - DNA, 25 bp, probe
ggttaaatgctgacacaatagaaaa

SEQ ID NO: 10821 - DNA, 25 bp, probe
ctggatgagtcaagttctcgtcgtt

SEQ ID NO: 10822 - DNA, 25 bp, probe
aaatgctgacacaatagaaaagtgc

SEQ ID NO: 10823 - DNA, 25 bp, probe
tggatgagtcaagttctcgtcgttg

SEQ ID NO: 10824 - DNA, 25 bp, probe
ttaaatgctgacacaatagaaaagt

SEQ ID NO: 10825 - DNA, 25 bp, probe
gttaaatgctgacacaatagaaaag

SEQ ID NO: 10826 - DNA, 25 bp, probe
taaatgctgacacaatagaaaagtg

SEQ ID NO: 10827 - DNA, 25 bp, probe
tctggtacctatggtcgtgtatata

SEQ ID NO: 10828 - DNA, 25 bp, probe
ctctggtacctatggtcgtgtatat

SEQ ID NO: 10829 - DNA, 25 bp, probe
cacaatagaaaagtgcgaggacatc

SEQ ID NO: 10830 - DNA, 25 bp, probe
tagatcactctgtagcgcatggtta

SEQ ID NO: 10831 - DNA, 25 bp, probe
ctggtacctatggtcgtgtatataa

SEQ ID NO: 10832 - DNA, 25 bp, probe
acaatagaaaagtgcgaggacatcc

SEQ ID NO: 10833 - DNA, 25 bp, probe
aatgctgacacaatagaaaagtgcg

SEQ ID NO: 10834 - DNA, 25 bp, probe
cttcctcttcctcctcttcctcttc

SEQ ID NO: 10835 - DNA, 25 bp, probe
cttcctcttcctcttcctcctcttc

SEQ ID NO: 10836 - DNA, 25 bp, probe
catcctcttcctcttcctcttcctc

SEQ ID NO: 10837 - DNA, 25 bp, probe
tcttcctcttcctcctcttcctctt

SEQ ID NO: 10838 - DNA, 25 bp, probe
tcttcctcttcctcttcctcctctt

SEQ ID NO: 10839 - DNA, 25 bp, probe
ctcttcctcttcctcctcttcctct

SEQ ID NO: 10840 - DNA, 25 bp, probe
ctcttcctcttcctcttcctcctct

SEQ ID NO: 10841 - DNA, 25 bp, probe
gatcactgtgtcacaactgtcatca

SEQ ID NO: 10842 - DNA, 25 bp, probe
atcctcttcctcttcctcttcctcc

SEQ ID NO: 10843 - DNA, 25 bp, probe
atcactgtgtcacaactgtcatcac

SEQ ID NO: 10844 - DNA, 25 bp, probe
ttcctcttcctcctcttcctcttcc

SEQ ID NO: 10845 - DNA, 25 bp, probe
ttcctcttcctcttcctcctcttcc

SEQ ID NO: 10846 - DNA, 25 bp, probe
ggatcactgtgtcacaactgtcatc

SEQ ID NO: 10847 - DNA, 25 bp, probe
ccatcctcttcctcttcctcttcct

SEQ ID NO: 10848 - DNA, 25 bp, probe
aatgatcttgccattccgagtgaag

SEQ ID NO: 10849 - DNA, 25 bp, probe
atcttcccatcgtctgcatgataag

SEQ ID NO: 10850 - DNA, 25 bp, probe
gatcttcccatcgtctgcatgataa

SEQ ID NO: 10851 - DNA, 25 bp, probe
aggatcactgtgtcacaactgtcat

SEQ ID NO: 10852 - DNA, 25 bp, probe
caatgatcttgccattccgagtgaa

SEQ ID NO: 10853 - DNA, 25 bp, probe
ctgtgtcacaactgtcatcactgtc

SEQ ID NO: 10854 - DNA, 25 bp, probe
cctcttcctcttcctcctcttcctc

SEQ ID NO: 10855 - DNA, 25 bp, probe
cctcttcctcttcctcttcctcctc

SEQ ID NO: 10856 - DNA, 25 bp, probe
cactgtgtcacaactgtcatcactg

SEQ ID NO: 10857 - DNA, 25 bp, probe
tcactgtgtcacaactgtcatcact

SEQ ID NO: 10858 - DNA, 25 bp, probe
tcccacagactctgacatcatgtag

SEQ ID NO: 10859 - DNA, 25 bp, probe
atgatcttgccattccgagtgaaga

SEQ ID NO: 10860 - DNA, 25 bp, probe
gtcccacagactctgacatcatgta

SEQ ID NO: 10861 - DNA, 25 bp, probe
ctatctcttccccatcctcttcctc

SEQ ID NO: 10862 - DNA, 25 bp, probe
ctctatctcttccccatcctcttcc

SEQ ID NO: 10863 - DNA, 25 bp, probe
actgtgtcacaactgtcatcactgt

SEQ ID NO: 10864 - DNA, 25 bp, probe
gatgtagcatttctctccagggtcc

SEQ ID NO: 10865 - DNA, 25 bp, probe
ccacagactctgacatcatgtagcc

SEQ ID NO: 10866 - DNA, 25 bp, probe
tgatcttgccattccgagtgaagaa

SEQ ID NO: 10867 - DNA, 25 bp, probe
tatctcttccccatcctcttcctct

SEQ ID NO: 10868 - DNA, 25 bp, probe
tctatctcttccccatcctcttcct

SEQ ID NO: 10869 - DNA, 25 bp, probe
gatcttgccattccgagtgaagaaa

SEQ ID NO: 10870 - DNA, 25 bp, probe
caggatcactgtgtcacaactgtca

SEQ ID NO: 10871 - DNA, 25 bp, probe
gctctatctcttccccatcctcttc

SEQ ID NO: 10872 - DNA, 25 bp, probe
cgatgtagcatttctctccagggtc

SEQ ID NO: 10873 - DNA, 25 bp, probe
cacagactctgacatcatgtagccg

SEQ ID NO: 10874 - DNA, 25 bp, probe
agatcttcccatcgtctgcatgata

SEQ ID NO: 10875 - DNA, 25 bp, probe
tgtgtcacaactgtcatcactgtcc

SEQ ID NO: 10876 - DNA, 25 bp, probe
atgtagcatttctctccagggtcca

SEQ ID NO: 10877 - DNA, 25 bp, probe
ctgttcttgggatagtccttccgtg

SEQ ID NO: 10878 - DNA, 25 bp, probe
tactggagcgaatatgatacggtct

SEQ ID NO: 10879 - DNA, 25 bp, probe
gtactggagcgaatatgatacggtc

SEQ ID NO: 10880 - DNA, 25 bp, probe
ggaagtactggagcgaatatgatac

SEQ ID NO: 10881 - DNA, 25 bp, probe
tggaagtactggagcgaatatgata

SEQ ID NO: 10882 - DNA, 25 bp, probe
gaagtactggagcgaatatgatacg

SEQ ID NO: 10883 - DNA, 25 bp, probe
actggagcgaatatgatacggtctc

SEQ ID NO: 10884 - DNA, 25 bp, probe
ctggaagtactggagcgaatatgat

SEQ ID NO: 10885 - DNA, 25 bp, probe
aagtactggagcgaatatgatacgg

SEQ ID NO: 10886 - DNA, 25 bp, probe
agtactggagcgaatatgatacggt

SEQ ID NO: 10887 - DNA, 25 bp, probe
ccaccagtcaacagcaaaggaatag

SEQ ID NO: 10888 - DNA, 25 bp, probe
caccagtcaacagcaaaggaatagc

SEQ ID NO: 10889 - DNA, 25 bp, probe
accaccagtcaacagcaaaggaata

SEQ ID NO: 10890 - DNA, 25 bp, probe
tcaaggaagaaacagtgaagctctt

SEQ ID NO: 10891 - DNA, 25 bp, probe
aagaaacagtgaagctcttcatctg

SEQ ID NO: 10892 - DNA, 25 bp, probe
cagtcaacagcaaaggaatagcctg

SEQ ID NO: 10893 - DNA, 25 bp, probe
ttcaaggaagaaacagtgaagctct

SEQ ID NO: 10894 - DNA, 25 bp, probe
ctgaacatctcaggtgccatgtaag

SEQ ID NO: 10895 - DNA, 25 bp, probe
ctcttcatctgtgagctggtcatgg

SEQ ID NO: 10896 - DNA, 25 bp, probe
aacagtgaagctcttcatctgtgag

SEQ ID NO: 10897 - DNA, 25 bp, probe
tgaacatctcaggtgccatgtaagg

SEQ ID NO: 10898 - DNA, 25 bp, probe
caacagaacgtccacttcaaggaag

SEQ ID NO: 10899 - DNA, 25 bp, probe
tccacttcaaggaagaaacagtgaa

SEQ ID NO: 10900 - DNA, 25 bp, probe
acagaacgtccacttcaaggaagaa

SEQ ID NO: 10901 - DNA, 25 bp, probe
aacagaacgtccacttcaaggaaga

SEQ ID NO: 10902 - DNA, 25 bp, probe
ttgctggaagtactggagcgaatat

SEQ ID NO: 10903 - DNA, 25 bp, probe
agaacgtccacttcaaggaagaaac

SEQ ID NO: 10904 - DNA, 25 bp, probe
cagaacgtccacttcaaggaagaaa

SEQ ID NO: 10905 - DNA, 25 bp, probe
ccagtcaacagcaaaggaatagcct

SEQ ID NO: 10906 - DNA, 25 bp, probe
gtccacttcaaggaagaaacagtga

SEQ ID NO: 10907 - DNA, 25 bp, probe
aacgtccacttcaaggaagaaacag

SEQ ID NO: 10908 - DNA, 25 bp, probe
gaaacagtgaagctcttcatctgtg

SEQ ID NO: 10909 - DNA, 25 bp, probe
agaaacagtgaagctcttcatctgt

SEQ ID NO: 10910 - DNA, 25 bp, probe
gctggaagtactggagcgaatatga

SEQ ID NO: 10911 - DNA, 25 bp, probe
tacaatttccttgctggaagtactg

SEQ ID NO: 10912 - DNA, 25 bp, probe
gtacaatttccttgctggaagtact

SEQ ID NO: 10913 - DNA, 25 bp, probe
gaacgtccacttcaaggaagaaaca

SEQ ID NO: 10914 - DNA, 25 bp, probe
aaacagtgaagctcttcatctgtga

SEQ ID NO: 10915 - DNA, 25 bp, probe
cttgctggaagtactggagcgaata

SEQ ID NO: 10916 - DNA, 25 bp, probe
tgctggaagtactggagcgaatatg

SEQ ID NO: 10917 - DNA, 25 bp, probe
tgtacaatttccttgctggaagtac

SEQ ID NO: 10918 - DNA, 25 bp, probe
tccttttctggagctgaacatctca

SEQ ID NO: 10919 - DNA, 25 bp, probe
gctgaacatctcaggtgccatgtaa

SEQ ID NO: 10920 - DNA, 25 bp, probe
aatttccttgctggaagtactggag

SEQ ID NO: 10921 - DNA, 25 bp, probe
acgtccacttcaaggaagaaacagt

SEQ ID NO: 10922 - DNA, 25 bp, probe
gatgaatgaatgaatgactgccgtt

SEQ ID NO: 10923 - DNA, 25 bp, probe
ctggatgaatgaatgaatgactgcc

SEQ ID NO: 10924 - DNA, 25 bp, probe
cctggatgaatgaatgaatgactgc

SEQ ID NO: 10925 - DNA, 25 bp, probe
atgaatgaatgaatgactgccgttg

SEQ ID NO: 10926 - DNA, 25 bp, probe
cgttgattcaagacttggagtagaa

SEQ ID NO: 10927 - DNA, 25 bp, probe
caatgactggacaacttagctctaa

SEQ ID NO: 10928 - DNA, 25 bp, probe
ctgaatcagacaatcatgtagcatt

SEQ ID NO: 10929 - DNA, 25 bp, probe
tagaatatcctcctaaatccgttgc

SEQ ID NO: 10930 - DNA, 25 bp, probe
aacaaccctggatgaatgaatgaat

SEQ ID NO: 10931 - DNA, 25 bp, probe
tcaagacttggagtagaatatcctc

SEQ ID NO: 10932 - DNA, 25 bp, probe
aatgactggacaacttagctctaag

SEQ ID NO: 10933 - DNA, 25 bp, probe
aaccctggatgaatgaatgaatgac

SEQ ID NO: 10934 - DNA, 25 bp, probe
caaccctggatgaatgaatgaatga

SEQ ID NO: 10935 - DNA, 25 bp, probe
gtagaatatcctcctaaatccgttg

SEQ ID NO: 10936 - DNA, 25 bp, probe
agtatgcaatgactggacaacttag

SEQ ID NO: 10937 - DNA, 25 bp, probe
gagtatgcaatgactggacaactta

SEQ ID NO: 10938 - DNA, 25 bp, probe
acaaccctggatgaatgaatgaatg

SEQ ID NO: 10939 - DNA, 25 bp, probe
ttcaagacttggagtagaatatcct

SEQ ID NO: 10940 - DNA, 25 bp, probe
atgactggacaacttagctctaaga

SEQ ID NO: 10941 - DNA, 25 bp, probe
agtagaatatcctcctaaatccgtt

SEQ ID NO: 10942 - DNA, 25 bp, probe
gttgattcaagacttggagtagaat

SEQ ID NO: 10943 - DNA, 25 bp, probe
tgaatcagacaatcatgtagcattg

SEQ ID NO: 10944 - DNA, 25 bp, probe
aagttaggcaatgcgttgattcaag

SEQ ID NO: 10945 - DNA, 25 bp, probe
ccctggatgaatgaatgaatgactg

SEQ ID NO: 10946 - DNA, 25 bp, probe
caacaaccctggatgaatgaatgaa

SEQ ID NO: 10947 - DNA, 25 bp, probe
gaatcagacaatcatgtagcattga

SEQ ID NO: 10948 - DNA, 25 bp, probe
accctggatgaatgaatgaatgact

SEQ ID NO: 10949 - DNA, 25 bp, probe
atgcgttgattcaagacttggagta

SEQ ID NO: 10950 - DNA, 25 bp, probe
ctggacaacttagctctaagagtga

SEQ ID NO: 10951 - DNA, 25 bp, probe
gactggacaacttagctctaagagt

SEQ ID NO: 10952 - DNA, 25 bp, probe
tgactggacaacttagctctaagag

SEQ ID NO: 10953 - DNA, 25 bp, probe
tcagacaatcatgtagcattgaatt

SEQ ID NO: 10954 - DNA, 25 bp, probe
aatcagacaatcatgtagcattgaa

SEQ ID NO: 10955 - DNA, 25 bp, probe
tttccctgacgagagtatctgaatc

SEQ ID NO: 10956 - DNA, 25 bp, probe
gagtagaatatcctcctaaatccgt

SEQ ID NO: 10957 - DNA, 25 bp, probe
atcagacaatcatgtagcattgaat

SEQ ID NO: 10958 - DNA, 25 bp, probe
ttgtgaagataaagttaggcaatgc

SEQ ID NO: 10959 - DNA, 25 bp, probe
ataaagttaggcaatgcgttgattc

SEQ ID NO: 10960 - DNA, 25 bp, probe
gataaagttaggcaatgcgttgatt

SEQ ID NO: 10961 - DNA, 25 bp, probe
tgaagataaagttaggcaatgcgtt

SEQ ID NO: 10962 - DNA, 25 bp, probe
tggacaacttagctctaagagtgac

SEQ ID NO: 10963 - DNA, 25 bp, probe
actggacaacttagctctaagagtg

SEQ ID NO: 10964 - DNA, 25 bp, probe
gcaatgactggacaacttagctcta

SEQ ID NO: 10965 - DNA, 25 bp, probe
tatgcaatgactggacaacttagct

SEQ ID NO: 10966 - DNA, 25 bp, probe
gcagagtcatggtaatagtagcaat

SEQ ID NO: 10967 - DNA, 25 bp, probe
cagagtcatggtaatagtagcaatt

SEQ ID NO: 10968 - DNA, 25 bp, probe
ggcagagtcatggtaatagtagcaa

SEQ ID NO: 10969 - DNA, 25 bp, probe
cgtggcagagtcatggtaatagtag

SEQ ID NO: 10970 - DNA, 25 bp, probe
gtggcagagtcatggtaatagtagc

SEQ ID NO: 10971 - DNA, 25 bp, probe
tcgtggcagagtcatggtaatagta

SEQ ID NO: 10972 - DNA, 25 bp, probe
tggcagagtcatggtaatagtagca

SEQ ID NO: 10973 - DNA, 25 bp, probe
gtaacgctatactgtctgctgttcg

SEQ ID NO: 10974 - DNA, 25 bp, probe
gagtcatggtaatagtagcaattgt

SEQ ID NO: 10975 - DNA, 25 bp, probe
cgtaacgctatactgtctgctgttc

SEQ ID NO: 10976 - DNA, 25 bp, probe
agagtcatggtaatagtagcaattg

SEQ ID NO: 10977 - DNA, 25 bp, probe
gaaagtatcctgcatgacgattatg

SEQ ID NO: 10978 - DNA, 25 bp, probe
gattaccaaggctatggatgtgtgg

SEQ ID NO: 10979 - DNA, 25 bp, probe
cgattaccaaggctatggatgtgtg

SEQ ID NO: 10980 - DNA, 25 bp, probe
agtcatggtaatagtagcaattgta

SEQ ID NO: 10981 - DNA, 25 bp, probe
taacgctatactgtctgctgttcgg

SEQ ID NO: 10982 - DNA, 25 bp, probe
ggaaagtatcctgcatgacgattat

SEQ ID NO: 10983 - DNA, 25 bp, probe
ctcgtggcagagtcatggtaatagt

SEQ ID NO: 10984 - DNA, 25 bp, probe
tggaaagtatcctgcatgacgatta

SEQ ID NO: 10985 - DNA, 25 bp, probe
tatataccctcatcaccaagatggc

SEQ ID NO: 10986 - DNA, 25 bp, probe
gtcatggtaatagtagcaattgtat

SEQ ID NO: 10987 - DNA, 25 bp, probe
ctatactgtctgctgttcggtcgag

SEQ ID NO: 10988 - DNA, 25 bp, probe
agcaattgtatataccctcatcacc

SEQ ID NO: 10989 - DNA, 25 bp, probe
gcaattgtatataccctcatcacca

SEQ ID NO: 10990 - DNA, 25 bp, probe
ccgattaccaaggctatggatgtgt

SEQ ID NO: 10991 - DNA, 25 bp, probe
ctggaaagtatcctgcatgacgatt

SEQ ID NO: 10992 - DNA, 25 bp, probe
atttgatgcagagacggagtacttg

SEQ ID NO: 10993 - DNA, 25 bp, probe
ttgtatataccctcatcaccaagat

SEQ ID NO: 10994 - DNA, 25 bp, probe
attgtatataccctcatcaccaaga

SEQ ID NO: 10995 - DNA, 25 bp, probe
catttgatgcagagacggagtactt

SEQ ID NO: 10996 - DNA, 25 bp, probe
gctcgtggcagagtcatggtaatag

SEQ ID NO: 10997 - DNA, 25 bp, probe
caattgtatataccctcatcaccaa

SEQ ID NO: 10998 - DNA, 25 bp, probe
tagcaattgtatataccctcatcac

SEQ ID NO: 10999 - DNA, 25 bp, probe
gtagcaattgtatataccctcatca

SEQ ID NO: 11000 - DNA, 25 bp, probe
aattgtatataccctcatcaccaag

SEQ ID NO: 11001 - DNA, 25 bp, probe
agtagcaattgtatataccctcatc

SEQ ID NO: 11002 - DNA, 25 bp, probe
tatactgtctgctgttcggtcgagt

SEQ ID NO: 11003 - DNA, 25 bp, probe
attaccaaggctatggatgtgtggg

SEQ ID NO: 11004 - DNA, 25 bp, probe
tcatggtaatagtagcaattgtata

SEQ ID NO: 11005 - DNA, 25 bp, probe
gtatataccctcatcaccaagatgg

SEQ ID NO: 11006 - DNA, 25 bp, probe
tgtatataccctcatcaccaagatg

SEQ ID NO: 11007 - DNA, 25 bp, probe
tagtagcaattgtatataccctcat

SEQ ID NO: 11008 - DNA, 25 bp, probe
atagtagcaattgtatataccctca

SEQ ID NO: 11009 - DNA, 25 bp, probe
aagtatcctgcatgacgattatgcc

SEQ ID NO: 11010 - DNA, 25 bp, probe
ctactccacgggcatcatcatgtac

SEQ ID NO: 11011 - DNA, 25 bp, probe
tctactccacgggcatcatcatgta

SEQ ID NO: 11012 - DNA, 25 bp, probe
catctactccacgggcatcatcatg

SEQ ID NO: 11013 - DNA, 25 bp, probe
gatctgaagccccaaaacatcttcc

SEQ ID NO: 11014 - DNA, 25 bp, probe
atctgaagccccaaaacatcttcct

SEQ ID NO: 11015 - DNA, 25 bp, probe
cgatctgaagccccaaaacatcttc

SEQ ID NO: 11016 - DNA, 25 bp, probe
tctgaagccccaaaacatcttcctg

SEQ ID NO: 11017 - DNA, 25 bp, probe
taacacggagatggagaaacttatc

SEQ ID NO: 11018 - DNA, 25 bp, probe
ttaacacggagatggagaaacttat

SEQ ID NO: 11019 - DNA, 25 bp, probe
tttaacacggagatggagaaactta

SEQ ID NO: 11020 - DNA, 25 bp, probe
ctttaacacggagatggagaaactt

SEQ ID NO: 11021 - DNA, 25 bp, probe
cattgatggcactaagaacttcgtg

SEQ ID NO: 11022 - DNA, 25 bp, probe
aacacggagatggagaaacttatcg

SEQ ID NO: 11023 - DNA, 25 bp, probe
gctttaacacggagatggagaaact

SEQ ID NO: 11024 - DNA, 25 bp, probe
ccattgatggcactaagaacttcgt

SEQ ID NO: 11025 - DNA, 25 bp, probe
ccacgatcatcaaatccaccagaaa

SEQ ID NO: 11026 - DNA, 25 bp, probe
tcatcgctttattgacatctggcag

SEQ ID NO: 11027 - DNA, 25 bp, probe
cacgatcatcaaatccaccagaaaa

SEQ ID NO: 11028 - DNA, 25 bp, probe
cgctttaacacggagatggagaaac

SEQ ID NO: 11029 - DNA, 25 bp, probe
cggagatggagaaacttatcgattt

SEQ ID NO: 11030 - DNA, 25 bp, probe
acacggagatggagaaacttatcga

SEQ ID NO: 11031 - DNA, 25 bp, probe
catcgctttattgacatctggcagg

SEQ ID NO: 11032 - DNA, 25 bp, probe
tccacgatcatcaaatccaccagaa

SEQ ID NO: 11033 - DNA, 25 bp, probe
acggagatggagaaacttatcgatt

SEQ ID NO: 11034 - DNA, 25 bp, probe
ctccacgatcatcaaatccaccaga

SEQ ID NO: 11035 - DNA, 25 bp, probe
cacggagatggagaaacttatcgat

SEQ ID NO: 11036 - DNA, 25 bp, probe
gatggagaaacttatcgatttcgtc

SEQ ID NO: 11037 - DNA, 25 bp, probe
agatggagaaacttatcgatttcgt

SEQ ID NO: 11038 - DNA, 25 bp, probe
gagatggagaaacttatcgatttcg

SEQ ID NO: 11039 - DNA, 25 bp, probe
atggagaaacttatcgatttcgtca

SEQ ID NO: 11040 - DNA, 25 bp, probe
ggagatggagaaacttatcgatttc

SEQ ID NO: 11041 - DNA, 25 bp, probe
cccattgatggcactaagaacttcg

SEQ ID NO: 11042 - DNA, 25 bp, probe
tggagaaacttatcgatttcgtcac

SEQ ID NO: 11043 - DNA, 25 bp, probe
aatggggagatggcatgagtattga

SEQ ID NO: 11044 - DNA, 25 bp, probe
ggagaaacttatcgatttcgtcacg

SEQ ID NO: 11045 - DNA, 25 bp, probe
acaatggggagatggcatgagtatt

SEQ ID NO: 11046 - DNA, 25 bp, probe
gagaaacttatcgatttcgtcacgc

SEQ ID NO: 11047 - DNA, 25 bp, probe
atggggagatggcatgagtattgac

SEQ ID NO: 11048 - DNA, 25 bp, probe
gacaatggggagatggcatgagtat

SEQ ID NO: 11049 - DNA, 25 bp, probe
caatggggagatggcatgagtattg

SEQ ID NO: 11050 - DNA, 25 bp, probe
ccccattgatggcactaagaacttc

SEQ ID NO: 11051 - DNA, 25 bp, probe
ctttattgacatctggcaggccatc

SEQ ID NO: 11052 - DNA, 25 bp, probe
gtcatcgctttattgacatctggca

SEQ ID NO: 11053 - DNA, 25 bp, probe
ttattgacatctggcaggccatcaa

SEQ ID NO: 11054 - DNA, 25 bp, probe
accccattgatggcactaagaactt

SEQ ID NO: 11055 - DNA, 25 bp, probe
cggtcatcgctttattgacatctgg

SEQ ID NO: 11056 - DNA, 25 bp, probe
ctcaacgaattggccgtcaagaatg

SEQ ID NO: 11057 - DNA, 25 bp, probe
tttattgacatctggcaggccatca

SEQ ID NO: 11058 - DNA, 25 bp, probe
ggtcatcgctttattgacatctggc

SEQ ID NO: 11059 - DNA, 25 bp, probe
caggccatcaaacctcaacgaattg

SEQ ID NO: 11060 - DNA, 25 bp, probe
gaccccattgatggcactaagaact

SEQ ID NO: 11061 - DNA, 25 bp, probe
gatttctggtcttacatgatggtgg

SEQ ID NO: 11062 - DNA, 25 bp, probe
cgatttctggtcttacatgatggtg

SEQ ID NO: 11063 - DNA, 25 bp, probe
atttctggtcttacatgatggtggc

SEQ ID NO: 11064 - DNA, 25 bp, probe
gcgatttctggtcttacatgatggt

SEQ ID NO: 11065 - DNA, 25 bp, probe
tcttacatgatggtggcagaaggtg

SEQ ID NO: 11066 - DNA, 25 bp, probe
gtcttacatgatggtggcagaaggt

SEQ ID NO: 11067 - DNA, 25 bp, probe
tggtcttacatgatggtggcagaag

SEQ ID NO: 11068 - DNA, 25 bp, probe
ggcgatttctggtcttacatgatgg

SEQ ID NO: 11069 - DNA, 25 bp, probe
cttcggcgatttctggtcttacatg

SEQ ID NO: 11070 - DNA, 25 bp, probe
ctggtcttacatgatggtggcagaa

SEQ ID NO: 11071 - DNA, 25 bp, probe
ttctggtcttacatgatggtggcag

SEQ ID NO: 11072 - DNA, 25 bp, probe
cggcgatttctggtcttacatgatg

SEQ ID NO: 11073 - DNA, 25 bp, probe
tttctggtcttacatgatggtggca

SEQ ID NO: 11074 - DNA, 25 bp, probe
tcggcgatttctggtcttacatgat

SEQ ID NO: 11075 - DNA, 25 bp, probe
ttacatgatggtggcagaaggtgtc

SEQ ID NO: 11076 - DNA, 25 bp, probe
cttacatgatggtggcagaaggtgt

SEQ ID NO: 11077 - DNA, 25 bp, probe
ttcggcgatttctggtcttacatga

SEQ ID NO: 11078 - DNA, 25 bp, probe
attcttgtcctactcttcgctgcac

SEQ ID NO: 11079 - DNA, 25 bp, probe
cattcttgtcctactcttcgctgca

SEQ ID NO: 11080 - DNA, 25 bp, probe
ccttcggcgatttctggtcttacat

SEQ ID NO: 11081 - DNA, 25 bp, probe
gtcgaatggtttccttcatgaccag

SEQ ID NO: 11082 - DNA, 25 bp, probe
tcgaatggtttccttcatgaccagg

SEQ ID NO: 11083 - DNA, 25 bp, probe
ttggaggacaagacatttcaaagaa

SEQ ID NO: 11084 - DNA, 25 bp, probe
gttggaggacaagacatttcaaaga

SEQ ID NO: 11085 - DNA, 25 bp, probe
tgttggaggacaagacatttcaaag

SEQ ID NO: 11086 - DNA, 25 bp, probe
gaggacaagacatttcaaagaaagt

SEQ ID NO: 11087 - DNA, 25 bp, probe
ggaggacaagacatttcaaagaaag

SEQ ID NO: 11088 - DNA, 25 bp, probe
tggaggacaagacatttcaaagaaa

SEQ ID NO: 11089 - DNA, 25 bp, probe
tatgttggaggacaagacatttcaa

SEQ ID NO: 11090 - DNA, 25 bp, probe
ctatgttggaggacaagacatttca

SEQ ID NO: 11091 - DNA, 25 bp, probe
atgttggaggacaagacatttcaaa

SEQ ID NO: 11092 - DNA, 25 bp, probe
cctatgttggaggacaagacatttc

SEQ ID NO: 11093 - DNA, 25 bp, probe
gcctatgttggaggacaagacattt

SEQ ID NO: 11094 - DNA, 25 bp, probe
cctgtacatcggcaacttcaaagat

SEQ ID NO: 11095 - DNA, 25 bp, probe
ctgtacatcggcaacttcaaagatg

SEQ ID NO: 11096 - DNA, 25 bp, probe
ggcctatgttggaggacaagacatt

SEQ ID NO: 11097 - DNA, 25 bp, probe
aacaattgagcaagaacaaggggaa

SEQ ID NO: 11098 - DNA, 25 bp, probe
cggaacaattgagcaagaacaaggg

SEQ ID NO: 11099 - DNA, 25 bp, probe
gaacaattgagcaagaacaagggga

SEQ ID NO: 11100 - DNA, 25 bp, probe
acaattgagcaagaacaaggggaac

SEQ ID NO: 11101 - DNA, 25 bp, probe
tgtacatcggcaacttcaaagatgc

SEQ ID NO: 11102 - DNA, 25 bp, probe
caattgagcaagaacaaggggaacc

SEQ ID NO: 11103 - DNA, 25 bp, probe
ggaacaattgagcaagaacaagggg

SEQ ID NO: 11104 - DNA, 25 bp, probe
caagcctgagaacatattgtgtgtc

SEQ ID NO: 11105 - DNA, 25 bp, probe
aagcctgagaacatattgtgtgtca

SEQ ID NO: 11106 - DNA, 25 bp, probe
tcaagcctgagaacatattgtgtgt

SEQ ID NO: 11107 - DNA, 25 bp, probe
gaggatgtgaagaatgaggtcaaca

SEQ ID NO: 11108 - DNA, 25 bp, probe
atccaactttatgatgcgtttgaga

SEQ ID NO: 11109 - DNA, 25 bp, probe
agacagggcatcaaattaagatcat

SEQ ID NO: 11110 - DNA, 25 bp, probe
gacagggcatcaaattaagatcatt

SEQ ID NO: 11111 - DNA, 25 bp, probe
aattaagatcattgactttgggctg

SEQ ID NO: 11112 - DNA, 25 bp, probe
gagaacatattgtgtgtcagccaga

SEQ ID NO: 11113 - DNA, 25 bp, probe
aaattaagatcattgactttgggct

SEQ ID NO: 11114 - DNA, 25 bp, probe
acagggcatcaaattaagatcattg

SEQ ID NO: 11115 - DNA, 25 bp, probe
cagacagggcatcaaattaagatca

SEQ ID NO: 11116 - DNA, 25 bp, probe
cttgatccaactttatgatgcgttt

SEQ ID NO: 11117 - DNA, 25 bp, probe
aaacttgatccaactttatgatgcg

SEQ ID NO: 11118 - DNA, 25 bp, probe
ggaggatgtgaagaatgaggtcaac

SEQ ID NO: 11119 - DNA, 25 bp, probe
ttgatccaactttatgatgcgtttg

SEQ ID NO: 11120 - DNA, 25 bp, probe
tccaactttatgatgcgtttgagag

SEQ ID NO: 11121 - DNA, 25 bp, probe
gatccaactttatgatgcgtttgag

SEQ ID NO: 11122 - DNA, 25 bp, probe
tgagaacatattgtgtgtcagccag

SEQ ID NO: 11123 - DNA, 25 bp, probe
attaagatcattgactttgggctgg

SEQ ID NO: 11124 - DNA, 25 bp, probe
atgtgaagaatgaggtcaacatcat

SEQ ID NO: 11125 - DNA, 25 bp, probe
agaacatattgtgtgtcagccagac

SEQ ID NO: 11126 - DNA, 25 bp, probe
tgatccaactttatgatgcgtttga

SEQ ID NO: 11127 - DNA, 25 bp, probe
acttgatccaactttatgatgcgtt

SEQ ID NO: 11128 - DNA, 25 bp, probe
aacttgatccaactttatgatgcgt

SEQ ID NO: 11129 - DNA, 25 bp, probe
ccagacagggcatcaaattaagatc

SEQ ID NO: 11130 - DNA, 25 bp, probe
tgtgaagaatgaggtcaacatcatg

SEQ ID NO: 11131 - DNA, 25 bp, probe
agccaagatcatcaaagtgaagaac

SEQ ID NO: 11132 - DNA, 25 bp, probe
cagccaagatcatcaaagtgaagaa

SEQ ID NO: 11133 - DNA, 25 bp, probe
taaacttgatccaactttatgatgc

SEQ ID NO: 11134 - DNA, 25 bp, probe
aggatgtgaagaatgaggtcaacat

SEQ ID NO: 11135 - DNA, 25 bp, probe
cgtaaacttgatccaactttatgat

SEQ ID NO: 11136 - DNA, 25 bp, probe
ccacgtaaacttgatccaactttat

SEQ ID NO: 11137 - DNA, 25 bp, probe
catcaaagtgaagaacgtaaaggac

SEQ ID NO: 11138 - DNA, 25 bp, probe
tcatcaaagtgaagaacgtaaagga

SEQ ID NO: 11139 - DNA, 25 bp, probe
atcatcaaagtgaagaacgtaaagg

SEQ ID NO: 11140 - DNA, 25 bp, probe
caagatcatcaaagtgaagaacgta

SEQ ID NO: 11141 - DNA, 25 bp, probe
ccaactttatgatgcgtttgagagc

SEQ ID NO: 11142 - DNA, 25 bp, probe
tagaagatacaagcctcgggagaag

SEQ ID NO: 11143 - DNA, 25 bp, probe
actgagttggatgtggtcttgttca

SEQ ID NO: 11144 - DNA, 25 bp, probe
cacgtaaacttgatccaactttatg

SEQ ID NO: 11145 - DNA, 25 bp, probe
acgtaaacttgatccaactttatga

SEQ ID NO: 11146 - DNA, 25 bp, probe
atcaaagtgaagaacgtaaaggacc

SEQ ID NO: 11147 - DNA, 25 bp, probe
ctgagttggatgtggtcttgttcac

SEQ ID NO: 11148 - DNA, 25 bp, probe
tcatgtgagaataggcactgacttc

SEQ ID NO: 11149 - DNA, 25 bp, probe
gtgagaataggcactgacttccttc

SEQ ID NO: 11150 - DNA, 25 bp, probe
tgtttgccaagtcatgtgagaatag

SEQ ID NO: 11151 - DNA, 25 bp, probe
ctgtttgccaagtcatgtgagaata

SEQ ID NO: 11152 - DNA, 25 bp, probe
caagtcatgtgagaataggcactga

SEQ ID NO: 11153 - DNA, 25 bp, probe
atttcggtctctaagaaccaatgtt

SEQ ID NO: 11154 - DNA, 25 bp, probe
agatttcggtctctaagaaccaatg

SEQ ID NO: 11155 - DNA, 25 bp, probe
atgtgagaataggcactgacttcct

SEQ ID NO: 11156 - DNA, 25 bp, probe
gatttcggtctctaagaaccaatgt

SEQ ID NO: 11157 - DNA, 25 bp, probe
gtcatatctgcaccgagttccatag

SEQ ID NO: 11158 - DNA, 25 bp, probe
gtttgccaagtcatgtgagaatagg

SEQ ID NO: 11159 - DNA, 25 bp, probe
tgtgagaataggcactgacttcctt

SEQ ID NO: 11160 - DNA, 25 bp, probe
catgtgagaataggcactgacttcc

SEQ ID NO: 11161 - DNA, 25 bp, probe
tgagaataggcactgacttccttcc

SEQ ID NO: 11162 - DNA, 25 bp, probe
ccaagtcatgtgagaataggcactg

SEQ ID NO: 11163 - DNA, 25 bp, probe
tcatatctgcaccgagttccatagg

SEQ ID NO: 11164 - DNA, 25 bp, probe
aaccaatgttctcttttcacgcttt

SEQ ID NO: 11165 - DNA, 25 bp, probe
gagatttcggtctctaagaaccaat

SEQ ID NO: 11166 - DNA, 25 bp, probe
accaatgttctcttttcacgctttc

SEQ ID NO: 11167 - DNA, 25 bp, probe
tttcggtctctaagaaccaatgttc

SEQ ID NO: 11168 - DNA, 25 bp, probe
ctttcagccatgccagagagatttc

SEQ ID NO: 11169 - DNA, 25 bp, probe
gagttagttttcacaatggatgcag

SEQ ID NO: 11170 - DNA, 25 bp, probe
tttccgggttcatgtgagttagttt

SEQ ID NO: 11171 - DNA, 25 bp, probe
agttagttttcacaatggatgcagt

SEQ ID NO: 11172 - DNA, 25 bp, probe
ccaatgttctcttttcacgctttcc

SEQ ID NO: 11173 - DNA, 25 bp, probe
gtcatgtgagaataggcactgactt

SEQ ID NO: 11174 - DNA, 25 bp, probe
aagtcatgtgagaataggcactgac

SEQ ID NO: 11175 - DNA, 25 bp, probe
ggtcatatctgcaccgagttccata

SEQ ID NO: 11176 - DNA, 25 bp, probe
ctttccgggttcatgtgagttagtt

SEQ ID NO: 11177 - DNA, 25 bp, probe
gctgtttgccaagtcatgtgagaat

SEQ ID NO: 11178 - DNA, 25 bp, probe
tgagttagttttcacaatggatgca

SEQ ID NO: 11179 - DNA, 25 bp, probe
caatgttctcttttcacgctttccg

SEQ ID NO: 11180 - DNA, 25 bp, probe
gagaataggcactgacttccttccc

SEQ ID NO: 11181 - DNA, 25 bp, probe
gttagttttcacaatggatgcagtg

SEQ ID NO: 11182 - DNA, 25 bp, probe
catatctgcaccgagttccataggc

SEQ ID NO: 11183 - DNA, 25 bp, probe
tttgctgtttgccaagtcatgtgag

SEQ ID NO: 11184 - DNA, 25 bp, probe
cttctggtagtacttgcagatggtg

SEQ ID NO: 11185 - DNA, 25 bp, probe
gtttgctgtttgccaagtcatgtga

SEQ ID NO: 11186 - DNA, 25 bp, probe
cctttcagccatgccagagagattt

SEQ ID NO: 11187 - DNA, 25 bp, probe
acagtagcccttctggtagtacttg

SEQ ID NO: 11188 - DNA, 25 bp, probe
cacagtagcccttctggtagtactt

SEQ ID NO: 11189 - DNA, 25 bp, probe
ctggtagtacttgcagatggtggac

SEQ ID NO: 11190 - DNA, 25 bp, probe
ataaaatacctgcaagtgatctgct

SEQ ID NO: 11191 - DNA, 25 bp, probe
cataaaatacctgcaagtgatctgc

SEQ ID NO: 11192 - DNA, 25 bp, probe
cttcttaccaactccttcttctacc

SEQ ID NO: 11193 - DNA, 25 bp, probe
ccttcttaccaactccttcttctac

SEQ ID NO: 11194 - DNA, 25 bp, probe
tccttcttaccaactccttcttcta

SEQ ID NO: 11195 - DNA, 25 bp, probe
aactccttcttaccaactccttctt

SEQ ID NO: 11196 - DNA, 25 bp, probe
ctccttcttaccaactccttcttct

SEQ ID NO: 11197 - DNA, 25 bp, probe
actccttcttaccaactccttcttc

SEQ ID NO: 11198 - DNA, 25 bp, probe
gaactccttcttaccaactccttct

SEQ ID NO: 11199 - DNA, 25 bp, probe
acccattcattcattcaacaaacat

SEQ ID NO: 11200 - DNA, 25 bp, probe
ctccttcttctacccattcattcat

SEQ ID NO: 11201 - DNA, 25 bp, probe
aactccttcttctacccattcattc

SEQ ID NO: 11202 - DNA, 25 bp, probe
tccttcttctacccattcattcatt

SEQ ID NO: 11203 - DNA, 25 bp, probe
caactccttcttctacccattcatt

SEQ ID NO: 11204 - DNA, 25 bp, probe
tacccattcattcattcaacaaaca

SEQ ID NO: 11205 - DNA, 25 bp, probe
ccttcttctacccattcattcattc

SEQ ID NO: 11206 - DNA, 25 bp, probe
tggcagaaaggatttaatacaggaa

SEQ ID NO: 11207 - DNA, 25 bp, probe
ttggcagaaaggatttaatacagga

SEQ ID NO: 11208 - DNA, 25 bp, probe
cttctacccattcattcattcaaca

SEQ ID NO: 11209 - DNA, 25 bp, probe
tcttctacccattcattcattcaac

SEQ ID NO: 11210 - DNA, 25 bp, probe
ggcagaaaggatttaatacaggaaa

SEQ ID NO: 11211 - DNA, 25 bp, probe
gcgtataaattagtgttctgtgtca

SEQ ID NO: 11212 - DNA, 25 bp, probe
cttggcagaaaggatttaatacagg

SEQ ID NO: 11213 - DNA, 25 bp, probe
cccattcattcattcaacaaacatt

SEQ ID NO: 11214 - DNA, 25 bp, probe
ttaccaactccttcttctacccatt

SEQ ID NO: 11215 - DNA, 25 bp, probe
ctacccattcattcattcaacaaac

SEQ ID NO: 11216 - DNA, 25 bp, probe
tctacccattcattcattcaacaaa

SEQ ID NO: 11217 - DNA, 25 bp, probe
ttctacccattcattcattcaacaa

SEQ ID NO: 11218 - DNA, 25 bp, probe
actccttcttctacccattcattca

SEQ ID NO: 11219 - DNA, 25 bp, probe
agcgtataaattagtgttctgtgtc

SEQ ID NO: 11220 - DNA, 25 bp, probe
cttcttctacccattcattcattca

SEQ ID NO: 11221 - DNA, 25 bp, probe
taccaactccttcttctacccattc

SEQ ID NO: 11222 - DNA, 25 bp, probe
cttaccaactccttcttctacccat

SEQ ID NO: 11223 - DNA, 25 bp, probe
ttcttaccaactccttcttctaccc

SEQ ID NO: 11224 - DNA, 25 bp, probe
tcttggcagaaaggatttaatacag

SEQ ID NO: 11225 - DNA, 25 bp, probe
ctcttggcagaaaggatttaataca

SEQ ID NO: 11226 - DNA, 25 bp, probe
actcttggcagaaaggatttaatac

SEQ ID NO: 11227 - DNA, 25 bp, probe
ttcttctacccattcattcattcaa

SEQ ID NO: 11228 - DNA, 25 bp, probe
ccaactccttcttctacccattcat

SEQ ID NO: 11229 - DNA, 25 bp, probe
gtactcttggcagaaaggatttaat

SEQ ID NO: 11230 - DNA, 25 bp, probe
tagcgtataaattagtgttctgtgt

SEQ ID NO: 11231 - DNA, 25 bp, probe
ggaactccttcttaccaactccttc

SEQ ID NO: 11232 - DNA, 25 bp, probe
cgtactcttggcagaaaggatttaa

SEQ ID NO: 11233 - DNA, 25 bp, probe
tcttaccaactccttcttctaccca

SEQ ID NO: 11234 - DNA, 25 bp, probe
ccattcattcattcaacaaacattt

SEQ ID NO: 11235 - DNA, 25 bp, probe
cattcaacaaacatttatcgagtgc

SEQ ID NO: 11236 - DNA, 25 bp, probe
gttgagagaacagattcgttggaag

SEQ ID NO: 11237 - DNA, 25 bp, probe
ggttgagagaacagattcgttggaa

SEQ ID NO: 11238 - DNA, 25 bp, probe
tgccacaagttaagatgctactgtt

SEQ ID NO: 11239 - DNA, 25 bp, probe
cggaacactcctcattctattaatt

SEQ ID NO: 11240 - DNA, 25 bp, probe
gaagtttaatgtccgttgtatcaca

SEQ ID NO: 11241 - DNA, 25 bp, probe
ttgagagaacagattcgttggaagc

SEQ ID NO: 11242 - DNA, 25 bp, probe
actcctcattctattaattacacca

SEQ ID NO: 11243 - DNA, 25 bp, probe
cactcctcattctattaattacacc

SEQ ID NO: 11244 - DNA, 25 bp, probe
ggaagtttaatgtccgttgtatcac

SEQ ID NO: 11245 - DNA, 25 bp, probe
aggaagtttaatgtccgttgtatca

SEQ ID NO: 11246 - DNA, 25 bp, probe
gtgccacaagttaagatgctactgt

SEQ ID NO: 11247 - DNA, 25 bp, probe
aaggaagtttaatgtccgttgtatc

SEQ ID NO: 11248 - DNA, 25 bp, probe
gccacaagttaagatgctactgttt

SEQ ID NO: 11249 - DNA, 25 bp, probe
aaaggaagtttaatgtccgttgtat

SEQ ID NO: 11250 - DNA, 25 bp, probe
atggatggtttggaaagggaatgtt

SEQ ID NO: 11251 - DNA, 25 bp, probe
ccggaacactcctcattctattaat

SEQ ID NO: 11252 - DNA, 25 bp, probe
tcctgattggaaatagaagacattt

SEQ ID NO: 11253 - DNA, 25 bp, probe
acactcctcattctattaattacac

SEQ ID NO: 11254 - DNA, 25 bp, probe
gggtaatttgattatgaaagagtga

SEQ ID NO: 11255 - DNA, 25 bp, probe
agggtaatttgattatgaaagagtg

SEQ ID NO: 11256 - DNA, 25 bp, probe
atcctgattggaaatagaagacatt

SEQ ID NO: 11257 - DNA, 25 bp, probe
tgtgccacaagttaagatgctactg

SEQ ID NO: 11258 - DNA, 25 bp, probe
gatggatggtttggaaagggaatgt

SEQ ID NO: 11259 - DNA, 25 bp, probe
tgatggatggtttggaaagggaatg

SEQ ID NO: 11260 - DNA, 25 bp, probe
gtgatggatggtttggaaagggaat

SEQ ID NO: 11261 - DNA, 25 bp, probe
aaaacaccagaactttagccaaaat

SEQ ID NO: 11262 - DNA, 25 bp, probe
ctcctcattctattaattacaccat

SEQ ID NO: 11263 - DNA, 25 bp, probe
ttctattaattacaccattctccca

SEQ ID NO: 11264 - DNA, 25 bp, probe
aacaccagaactttagccaaaataa

SEQ ID NO: 11265 - DNA, 25 bp, probe
aaacaccagaactttagccaaaata

SEQ ID NO: 11266 - DNA, 25 bp, probe
ttcacagaactggtgtcaggaatca

SEQ ID NO: 11267 - DNA, 25 bp, probe
tctattaattacaccattctcccat

SEQ ID NO: 11268 - DNA, 25 bp, probe
gttaaaacaccagaactttagccaa

SEQ ID NO: 11269 - DNA, 25 bp, probe
ttatcctgattggaaatagaagaca

SEQ ID NO: 11270 - DNA, 25 bp, probe
aacagattcgttggaagcttaactt

SEQ ID NO: 11271 - DNA, 25 bp, probe
taaaacaccagaactttagccaaaa

SEQ ID NO: 11272 - DNA, 25 bp, probe
ttaaaacaccagaactttagccaaa

SEQ ID NO: 11273 - DNA, 25 bp, probe
gagaacagattcgttggaagcttaa

SEQ ID NO: 11274 - DNA, 25 bp, probe
gatggtttggaaagggaatgttggt

SEQ ID NO: 11275 - DNA, 25 bp, probe
tggatggtttggaaagggaatgttg

SEQ ID NO: 11276 - DNA, 25 bp, probe
acaccagaactttagccaaaataaa

SEQ ID NO: 11277 - DNA, 25 bp, probe
aatagaagacatttccggttgagag

SEQ ID NO: 11278 - DNA, 25 bp, probe
gaacagattcgttggaagcttaact

SEQ ID NO: 11279 - DNA, 25 bp, probe
agaacagattcgttggaagcttaac

SEQ ID NO: 11280 - DNA, 25 bp, probe
agaagactgtgatcctcatgtactc

SEQ ID NO: 11281 - DNA, 25 bp, probe
gagaagactgtgatcctcatgtact

SEQ ID NO: 11282 - DNA, 25 bp, probe
gaagactgtgatcctcatgtactca

SEQ ID NO: 11283 - DNA, 25 bp, probe
atagaagcagtttgggatttgtagt

SEQ ID NO: 11284 - DNA, 25 bp, probe
tgatagaagcagtttgggatttgta

SEQ ID NO: 11285 - DNA, 25 bp, probe
attgatagaagcagtttgggatttg

SEQ ID NO: 11286 - DNA, 25 bp, probe
cattgatagaagcagtttgggattt

SEQ ID NO: 11287 - DNA, 25 bp, probe
tagaagcagtttgggatttgtagtt

SEQ ID NO: 11288 - DNA, 25 bp, probe
gatagaagcagtttgggatttgtag

SEQ ID NO: 11289 - DNA, 25 bp, probe
ttgatagaagcagtttgggatttgt

SEQ ID NO: 11290 - DNA, 25 bp, probe
aagactgtgatcctcatgtactcag

SEQ ID NO: 11291 - DNA, 25 bp, probe
cgtggataaactaacctctaacaga

SEQ ID NO: 11292 - DNA, 25 bp, probe
ttctttgtaaacagttggatggatt

SEQ ID NO: 11293 - DNA, 25 bp, probe
cattctttgtaaacagttggatgga

SEQ ID NO: 11294 - DNA, 25 bp, probe
attctttgtaaacagttggatggat

SEQ ID NO: 11295 - DNA, 25 bp, probe
gactgtgatcctcatgtactcagag

SEQ ID NO: 11296 - DNA, 25 bp, probe
agaagcagtttgggatttgtagttg

SEQ ID NO: 11297 - DNA, 25 bp, probe
tgataaagaagatgctaccaatgaa

SEQ ID NO: 11298 - DNA, 25 bp, probe
ttgtaaacagttggatggattatga

SEQ ID NO: 11299 - DNA, 25 bp, probe
tctttgtaaacagttggatggatta

SEQ ID NO: 11300 - DNA, 25 bp, probe
caacgagatgagaagactgtgatcc

SEQ ID NO: 11301 - DNA, 25 bp, probe
ccaacgagatgagaagactgtgatc

SEQ ID NO: 11302 - DNA, 25 bp, probe
atgataaagaagatgctaccaatga

SEQ ID NO: 11303 - DNA, 25 bp, probe
agactgtgatcctcatgtactcaga

SEQ ID NO: 11304 - DNA, 25 bp, probe
accaacgagatgagaagactgtgat

SEQ ID NO: 11305 - DNA, 25 bp, probe
aacgagatgagaagactgtgatcct

SEQ ID NO: 11306 - DNA, 25 bp, probe
tgtaaacagttggatggattatgat

SEQ ID NO: 11307 - DNA, 25 bp, probe
agaagatgctaccaatgaaatagaa

SEQ ID NO: 11308 - DNA, 25 bp, probe
aagaagatgctaccaatgaaataga

SEQ ID NO: 11309 - DNA, 25 bp, probe
gccttctacagctattactgaatta

SEQ ID NO: 11310 - DNA, 25 bp, probe
caaagaccatcctcactgactatgt

SEQ ID NO: 11311 - DNA, 25 bp, probe
aaccaacgagatgagaagactgtga

SEQ ID NO: 11312 - DNA, 25 bp, probe
gtggataaactaacctctaacagaa

SEQ ID NO: 11313 - DNA, 25 bp, probe
tcaaagaccatcctcactgactatg

SEQ ID NO: 11314 - DNA, 25 bp, probe
ggatggattatgataaagaagatgc

SEQ ID NO: 11315 - DNA, 25 bp, probe
acagttggatggattatgataaaga

SEQ ID NO: 11316 - DNA, 25 bp, probe
tttgtaaacagttggatggattatg

SEQ ID NO: 11317 - DNA, 25 bp, probe
ggaatatattggccttctacagcta

SEQ ID NO: 11318 - DNA, 25 bp, probe
atattggccttctacagctattact

SEQ ID NO: 11319 - DNA, 25 bp, probe
ctctggaatatattggccttctaca

SEQ ID NO: 11320 - DNA, 25 bp, probe
tctctggaatatattggccttctac

SEQ ID NO: 11321 - DNA, 25 bp, probe
acatatttagagcacttaatggtct

SEQ ID NO: 11322 - DNA, 25 bp, probe
ctttgtaaacagttggatggattat

SEQ ID NO: 11323 - DNA, 25 bp, probe
tagttgcgacttcttcgatagttac

SEQ ID NO: 11324 - DNA, 25 bp, probe
aagttctcagtattgtaacagcaac

SEQ ID NO: 11325 - DNA, 25 bp, probe
ttctcagtattgtaacagcaacttg

SEQ ID NO: 11326 - DNA, 25 bp, probe
gttctcagtattgtaacagcaactt

SEQ ID NO: 11327 - DNA, 25 bp, probe
cagtattgtaacagcaacttgtcaa

SEQ ID NO: 11328 - DNA, 25 bp, probe
ctcagtattgtaacagcaacttgtc

SEQ ID NO: 11329 - DNA, 25 bp, probe
tctcagtattgtaacagcaacttgt

SEQ ID NO: 11330 - DNA, 25 bp, probe
tcagtattgtaacagcaacttgtca

SEQ ID NO: 11331 - DNA, 25 bp, probe
aacaagttagtattaatgcgttggc

SEQ ID NO: 11332 - DNA, 25 bp, probe
taataacatttaccttcagcctccc

SEQ ID NO: 11333 - DNA, 25 bp, probe
ttagggaaagatgtgttgtggtaaa

SEQ ID NO: 11334 - DNA, 25 bp, probe
tttagggaaagatgtgttgtggtaa

SEQ ID NO: 11335 - DNA, 25 bp, probe
gaaatcgtattgtgtggaggaaatg

SEQ ID NO: 11336 - DNA, 25 bp, probe
tgaaatcgtattgtgtggaggaaat

SEQ ID NO: 11337 - DNA, 25 bp, probe
attgaaatcgtattgtgtggaggaa

SEQ ID NO: 11338 - DNA, 25 bp, probe
aaattgaaatcgtattgtgtggagg

SEQ ID NO: 11339 - DNA, 25 bp, probe
ttgaaatcgtattgtgtggaggaaa

SEQ ID NO: 11340 - DNA, 25 bp, probe
tgaaattgaaatcgtattgtgtgga

SEQ ID NO: 11341 - DNA, 25 bp, probe
gcaacttgtcaaacctaagcatatt

SEQ ID NO: 11342 - DNA, 25 bp, probe
aattgaaatcgtattgtgtggagga

SEQ ID NO: 11343 - DNA, 25 bp, probe
gaaattgaaatcgtattgtgtggag

SEQ ID NO: 11344 - DNA, 25 bp, probe
agcaacttgtcaaacctaagcatat

SEQ ID NO: 11345 - DNA, 25 bp, probe
ttgaaattgaaatcgtattgtgtgg

SEQ ID NO: 11346 - DNA, 25 bp, probe
ataataacatttaccttcagcctcc

SEQ ID NO: 11347 - DNA, 25 bp, probe
gaaagttctcagtattgtaacagca

SEQ ID NO: 11348 - DNA, 25 bp, probe
aaatcgtattgtgtggaggaaatgg

SEQ ID NO: 11349 - DNA, 25 bp, probe
ataacatttaccttcagcctcccat

SEQ ID NO: 11350 - DNA, 25 bp, probe
tgaaagttctcagtattgtaacagc

SEQ ID NO: 11351 - DNA, 25 bp, probe
aaagttctcagtattgtaacagcaa

SEQ ID NO: 11352 - DNA, 25 bp, probe
tattgtaacagcaacttgtcaaacc

SEQ ID NO: 11353 - DNA, 25 bp, probe
aataacatttaccttcagcctccca

SEQ ID NO: 11354 - DNA, 25 bp, probe
agttatgtcttaggaaattgtggtt

SEQ ID NO: 11355 - DNA, 25 bp, probe
gtaacagcaacttgtcaaacctaag

SEQ ID NO: 11356 - DNA, 25 bp, probe
gtattgtaacagcaacttgtcaaac

SEQ ID NO: 11357 - DNA, 25 bp, probe
agtattgtaacagcaacttgtcaaa

SEQ ID NO: 11358 - DNA, 25 bp, probe
caacttgtcaaacctaagcatattt

SEQ ID NO: 11359 - DNA, 25 bp, probe
cagcaacttgtcaaacctaagcata

SEQ ID NO: 11360 - DNA, 25 bp, probe
ggaggaaatggcaatcttatgtgtg

SEQ ID NO: 11361 - DNA, 25 bp, probe
gtggaggaaatggcaatcttatgtg

SEQ ID NO: 11362 - DNA, 25 bp, probe
gtgtggaggaaatggcaatcttatg

SEQ ID NO: 11363 - DNA, 25 bp, probe
tgtaacagcaacttgtcaaacctaa

SEQ ID NO: 11364 - DNA, 25 bp, probe
ttgtaacagcaacttgtcaaaccta

SEQ ID NO: 11365 - DNA, 25 bp, probe
agttctcagtattgtaacagcaact

SEQ ID NO: 11366 - DNA, 25 bp, probe
taacatttaccttcagcctcccatc

SEQ ID NO: 11367 - DNA, 25 bp, probe
attgtaacagcaacttgtcaaacct

SEQ ID NO: 11368 - DNA, 25 bp, probe
caccattgagaactccaggattgtc

SEQ ID NO: 11369 - DNA, 25 bp, probe
ctacagccactactacacgaccatc

SEQ ID NO: 11370 - DNA, 25 bp, probe
ccaccattgagaactccaggattgt

SEQ ID NO: 11371 - DNA, 25 bp, probe
actacagccactactacacgaccat

SEQ ID NO: 11372 - DNA, 25 bp, probe
accattgagaactccaggattgtcc

SEQ ID NO: 11373 - DNA, 25 bp, probe
gaagctaaccatgcagaacctcaac

SEQ ID NO: 11374 - DNA, 25 bp, probe
agaagctaaccatgcagaacctcaa

SEQ ID NO: 11375 - DNA, 25 bp, probe
caacgagaagctaaccatgcagaac

SEQ ID NO: 11376 - DNA, 25 bp, probe
gatgacttccgaaccaagtttgaga

SEQ ID NO: 11377 - DNA, 25 bp, probe
agatgacttccgaaccaagtttgag

SEQ ID NO: 11378 - DNA, 25 bp, probe
gagaagctaaccatgcagaacctca

SEQ ID NO: 11379 - DNA, 25 bp, probe
atgacttccgaaccaagtttgagac

SEQ ID NO: 11380 - DNA, 25 bp, probe
cagatgacttccgaaccaagtttga

SEQ ID NO: 11381 - DNA, 25 bp, probe
ccattgagaactccaggattgtcct

SEQ ID NO: 11382 - DNA, 25 bp, probe
gcagatgacttccgaaccaagtttg

SEQ ID NO: 11383 - DNA, 25 bp, probe
tgcagatgacttccgaaccaagttt

SEQ ID NO: 11384 - DNA, 25 bp, probe
gattcttggtgccaccattgagaac

SEQ ID NO: 11385 - DNA, 25 bp, probe
caagattcttggtgccaccattgag

SEQ ID NO: 11386 - DNA, 25 bp, probe
agattcttggtgccaccattgagaa

SEQ ID NO: 11387 - DNA, 25 bp, probe
aagattcttggtgccaccattgaga

SEQ ID NO: 11388 - DNA, 25 bp, probe
gacaagattcttggtgccaccattg

SEQ ID NO: 11389 - DNA, 25 bp, probe
attcttggtgccaccattgagaact

SEQ ID NO: 11390 - DNA, 25 bp, probe
acaagattcttggtgccaccattga

SEQ ID NO: 11391 - DNA, 25 bp, probe
cacttctctctcttacctctcttgc

SEQ ID NO: 11392 - DNA, 25 bp, probe
gcacttctctctcttacctctcttg

SEQ ID NO: 11393 - DNA, 25 bp, probe
atgcttcttctgtgtgtatttcttt

SEQ ID NO: 11394 - DNA, 25 bp, probe
ggcacttctctctcttacctctctt

SEQ ID NO: 11395 - DNA, 25 bp, probe
ttgtagatgtaaccagtagctgatc

SEQ ID NO: 11396 - DNA, 25 bp, probe
catgcttcttctgtgtgtatttctt

SEQ ID NO: 11397 - DNA, 25 bp, probe
acagtttgtagatgtaaccagtagc

SEQ ID NO: 11398 - DNA, 25 bp, probe
cttctctctcttacctctcttgcac

SEQ ID NO: 11399 - DNA, 25 bp, probe
cactttctgtctcctgtctcttctc

SEQ ID NO: 11400 - DNA, 25 bp, probe
gtagatgtaaccagtagctgatctt

SEQ ID NO: 11401 - DNA, 25 bp, probe
tgtagatgtaaccagtagctgatct

SEQ ID NO: 11402 - DNA, 25 bp, probe
tctctctcttacctctcttgcactt

SEQ ID NO: 11403 - DNA, 25 bp, probe
ttctctctcttacctctcttgcact

SEQ ID NO: 11404 - DNA, 25 bp, probe
acttctctctcttacctctcttgca

SEQ ID NO: 11405 - DNA, 25 bp, probe
atgtaaccagtagctgatcttaagg

SEQ ID NO: 11406 - DNA, 25 bp, probe
agatgtaaccagtagctgatcttaa

SEQ ID NO: 11407 - DNA, 25 bp, probe
acatgcttcttctgtgtgtatttct

SEQ ID NO: 11408 - DNA, 25 bp, probe
ggtaacaacagcactttacagtttg

SEQ ID NO: 11409 - DNA, 25 bp, probe
cagtttgtagatgtaaccagtagct

SEQ ID NO: 11410 - DNA, 25 bp, probe
gatgtaaccagtagctgatcttaag

SEQ ID NO: 11411 - DNA, 25 bp, probe
tggtaacaacagcactttacagttt

SEQ ID NO: 11412 - DNA, 25 bp, probe
tagatgtaaccagtagctgatctta

SEQ ID NO: 11413 - DNA, 25 bp, probe
cattgtgacatttcctgttacccag

SEQ ID NO: 11414 - DNA, 25 bp, probe
gttctgtaaagtggctggtaacaac

SEQ ID NO: 11415 - DNA, 25 bp, probe
ctggtaacaacagcactttacagtt

SEQ ID NO: 11416 - DNA, 25 bp, probe
atatttgaccactctggactgttct

SEQ ID NO: 11417 - DNA, 25 bp, probe
aacagcactttacagtttgtagatg

SEQ ID NO: 11418 - DNA, 25 bp, probe
caacagcactttacagtttgtagat

SEQ ID NO: 11419 - DNA, 25 bp, probe
acagcactttacagtttgtagatgt

SEQ ID NO: 11420 - DNA, 25 bp, probe
gtttgtagatgtaaccagtagctga

SEQ ID NO: 11421 - DNA, 25 bp, probe
agtttgtagatgtaaccagtagctg

SEQ ID NO: 11422 - DNA, 25 bp, probe
tttgtagatgtaaccagtagctgat

SEQ ID NO: 11423 - DNA, 25 bp, probe
gactgttctgtaaagtggctggtaa

SEQ ID NO: 11424 - DNA, 25 bp, probe
cagcactttacagtttgtagatgta

SEQ ID NO: 11425 - DNA, 25 bp, probe
ttctgtaaagtggctggtaacaaca

SEQ ID NO: 11426 - DNA, 25 bp, probe
ttgaccactctggactgttctgtaa

SEQ ID NO: 11427 - DNA, 25 bp, probe
tgtaaccagtagctgatcttaaggc

SEQ ID NO: 11428 - DNA, 25 bp, probe
ctgccattgtgacatttcctgttac

SEQ ID NO: 11429 - DNA, 25 bp, probe
tctgccattgtgacatttcctgtta

SEQ ID NO: 11430 - DNA, 25 bp, probe
ctctcttacctctcttgcactttct

SEQ ID NO: 11431 - DNA, 25 bp, probe
tctctcttacctctcttgcactttc

SEQ ID NO: 11432 - DNA, 25 bp, probe
ctctctcttacctctcttgcacttt

SEQ ID NO: 11433 - DNA, 25 bp, probe
actgttctgtaaagtggctggtaac

SEQ ID NO: 11434 - DNA, 25 bp, probe
aatatttgaccactctggactgttc

SEQ ID NO: 11435 - DNA, 25 bp, probe
catgagaatcacttgaatccaggag

SEQ ID NO: 11436 - DNA, 25 bp, probe
atgagaatcacttgaatccaggagg

SEQ ID NO: 11437 - DNA, 25 bp, probe
ctgaggcatgagaatcacttgaatc

SEQ ID NO: 11438 - DNA, 25 bp, probe
ttaacaattcccacaatcacccaac

SEQ ID NO: 11439 - DNA, 25 bp, probe
atgtctggaaatcacagtaaacctc

SEQ ID NO: 11440 - DNA, 25 bp, probe
gcatgagaatcacttgaatccagga

SEQ ID NO: 11441 - DNA, 25 bp, probe
aggcatgagaatcacttgaatccag

SEQ ID NO: 11442 - DNA, 25 bp, probe
gaggcatgagaatcacttgaatcca

SEQ ID NO: 11443 - DNA, 25 bp, probe
tgaggcatgagaatcacttgaatcc

SEQ ID NO: 11444 - DNA, 25 bp, probe
ttcatgtctggaaatcacagtaaac

SEQ ID NO: 11445 - DNA, 25 bp, probe
acacatctgcaatcctagatacttg

SEQ ID NO: 11446 - DNA, 25 bp, probe
cacacatctgcaatcctagatactt

SEQ ID NO: 11447 - DNA, 25 bp, probe
catgtctggaaatcacagtaaacct

SEQ ID NO: 11448 - DNA, 25 bp, probe
tcatgtctggaaatcacagtaaacc

SEQ ID NO: 11449 - DNA, 25 bp, probe
cacatctgcaatcctagatacttgg

SEQ ID NO: 11450 - DNA, 25 bp, probe
gctgaggcatgagaatcacttgaat

SEQ ID NO: 11451 - DNA, 25 bp, probe
taacaattcccacaatcacccaaca

SEQ ID NO: 11452 - DNA, 25 bp, probe
ggcatgagaatcacttgaatccagg

SEQ ID NO: 11453 - DNA, 25 bp, probe
tctggaaatcacagtaaacctcctg

SEQ ID NO: 11454 - DNA, 25 bp, probe
gtctggaaatcacagtaaacctcct

SEQ ID NO: 11455 - DNA, 25 bp, probe
aatcacttgaatccaggaggcagag

SEQ ID NO: 11456 - DNA, 25 bp, probe
gaatcacttgaatccaggaggcaga

SEQ ID NO: 11457 - DNA, 25 bp, probe
agaatcacttgaatccaggaggcag

SEQ ID NO: 11458 - DNA, 25 bp, probe
gagaatcacttgaatccaggaggca

SEQ ID NO: 11459 - DNA, 25 bp, probe
aaagtgtgttattctgctccttaag

SEQ ID NO: 11460 - DNA, 25 bp, probe
aacaattcccacaatcacccaacat

SEQ ID NO: 11461 - DNA, 25 bp, probe
tgtctggaaatcacagtaaacctcc

SEQ ID NO: 11462 - DNA, 25 bp, probe
tttcatgtctggaaatcacagtaaa

SEQ ID NO: 11463 - DNA, 25 bp, probe
taaggttaacaattcccacaatcac

SEQ ID NO: 11464 - DNA, 25 bp, probe
ctaaaagtgtgttattctgctcctt

SEQ ID NO: 11465 - DNA, 25 bp, probe
gctaaaagtgtgttattctgctcct

SEQ ID NO: 11466 - DNA, 25 bp, probe
tgagaatcacttgaatccaggaggc

SEQ ID NO: 11467 - DNA, 25 bp, probe
ttaaggttaacaattcccacaatca

SEQ ID NO: 11468 - DNA, 25 bp, probe
aaaagtgtgttattctgctccttaa

SEQ ID NO: 11469 - DNA, 25 bp, probe
aatcctagatacttgggaggctgag

SEQ ID NO: 11470 - DNA, 25 bp, probe
cttaaggttaacaattcccacaatc

SEQ ID NO: 11471 - DNA, 25 bp, probe
taaaagtgtgttattctgctcctta

SEQ ID NO: 11472 - DNA, 25 bp, probe
gttaacaattcccacaatcacccaa

SEQ ID NO: 11473 - DNA, 25 bp, probe
gcacacatctgcaatcctagatact

SEQ ID NO: 11474 - DNA, 25 bp, probe
caatcctagatacttgggaggctga

SEQ ID NO: 11475 - DNA, 25 bp, probe
atctgcaatcctagatacttgggag

SEQ ID NO: 11476 - DNA, 25 bp, probe
catctgcaatcctagatacttggga

SEQ ID NO: 11477 - DNA, 25 bp, probe
acatctgcaatcctagatacttggg

SEQ ID NO: 11478 - DNA, 25 bp, probe
acaattcccacaatcacccaacatg

SEQ ID NO: 11479 - DNA, 25 bp, probe
atccccttttccttgacttcttaaa

SEQ ID NO: 11480 - DNA, 25 bp, probe
gatccccttttccttgacttcttaa

SEQ ID NO: 11481 - DNA, 25 bp, probe
tttccttgacttcttaaaacagtgt

SEQ ID NO: 11482 - DNA, 25 bp, probe
tgatccccttttccttgacttctta

SEQ ID NO: 11483 - DNA, 25 bp, probe
ccccttttccttgacttcttaaaac

SEQ ID NO: 11484 - DNA, 25 bp, probe
tccccttttccttgacttcttaaaa

SEQ ID NO: 11485 - DNA, 25 bp, probe
cccttttccttgacttcttaaaaca

SEQ ID NO: 11486 - DNA, 25 bp, probe
atgatccccttttccttgacttctt

SEQ ID NO: 11487 - DNA, 25 bp, probe
ttccttgacttcttaaaacagtgtt

SEQ ID NO: 11488 - DNA, 25 bp, probe
catgaaaaggataactgagagcacc

SEQ ID NO: 11489 - DNA, 25 bp, probe
ccttttccttgacttcttaaaacag

SEQ ID NO: 11490 - DNA, 25 bp, probe
gatgatccccttttccttgacttct

SEQ ID NO: 11491 - DNA, 25 bp, probe
atgaaaaggataactgagagcaccg

SEQ ID NO: 11492 - DNA, 25 bp, probe
tgatgatccccttttccttgacttc

SEQ ID NO: 11493 - DNA, 25 bp, probe
ttttccttgacttcttaaaacagtg

SEQ ID NO: 11494 - DNA, 25 bp, probe
cttttccttgacttcttaaaacagt

SEQ ID NO: 11495 - DNA, 25 bp, probe
gtgatgatccccttttccttgactt

SEQ ID NO: 11496 - DNA, 25 bp, probe
gtgtgatgatccccttttccttgac

SEQ ID NO: 11497 - DNA, 25 bp, probe
tcttaaaacagtgtttagagtggga

SEQ ID NO: 11498 - DNA, 25 bp, probe
ggagaaaacgtcatgaaaaggataa

SEQ ID NO: 11499 - DNA, 25 bp, probe
tgtgatgatccccttttccttgact

SEQ ID NO: 11500 - DNA, 25 bp, probe
ttcttaaaacagtgtttagagtggg

SEQ ID NO: 11501 - DNA, 25 bp, probe
ttaaaacagtgtttagagtgggatc

SEQ ID NO: 11502 - DNA, 25 bp, probe
tccttgacttcttaaaacagtgttt

SEQ ID NO: 11503 - DNA, 25 bp, probe
gaaaacgtcatgaaaaggataactg

SEQ ID NO: 11504 - DNA, 25 bp, probe
gggagaaaacgtcatgaaaaggata

SEQ ID NO: 11505 - DNA, 25 bp, probe
cttaaaacagtgtttagagtgggat

SEQ ID NO: 11506 - DNA, 25 bp, probe
agaaaacgtcatgaaaaggataact

SEQ ID NO: 11507 - DNA, 25 bp, probe
gagaaaacgtcatgaaaaggataac

SEQ ID NO: 11508 - DNA, 25 bp, probe
aacgtcatgaaaaggataactgaga

SEQ ID NO: 11509 - DNA, 25 bp, probe
aaacgtcatgaaaaggataactgag

SEQ ID NO: 11510 - DNA, 25 bp, probe
acgtcatgaaaaggataactgagag

SEQ ID NO: 11511 - DNA, 25 bp, probe
tcatgaaaaggataactgagagcac

SEQ ID NO: 11512 - DNA, 25 bp, probe
gtcatgaaaaggataactgagagca

SEQ ID NO: 11513 - DNA, 25 bp, probe
aaaacgtcatgaaaaggataactga

SEQ ID NO: 11514 - DNA, 25 bp, probe
cttcttaaaacagtgtttagagtgg

SEQ ID NO: 11515 - DNA, 25 bp, probe
cgtcatgaaaaggataactgagagc

SEQ ID NO: 11516 - DNA, 25 bp, probe
ccttgacttcttaaaacagtgttta

SEQ ID NO: 11517 - DNA, 25 bp, probe
acttcttaaaacagtgtttagagtg

SEQ ID NO: 11518 - DNA, 25 bp, probe
ggtgtgatgatccccttttccttga

SEQ ID NO: 11519 - DNA, 25 bp, probe
gacttcttaaaacagtgtttagagt

SEQ ID NO: 11520 - DNA, 25 bp, probe
tgacttcttaaaacagtgtttagag

SEQ ID NO: 11521 - DNA, 25 bp, probe
aaacagtgtttagagtgggatcctg

SEQ ID NO: 11522 - DNA, 25 bp, probe
ttgacttcttaaaacagtgtttaga

SEQ ID NO: 11523 - DNA, 25 bp, probe
tgtctatatggagaaagcacattat

SEQ ID NO: 11524 - DNA, 25 bp, probe
aatatgtctatatggagaaagcaca

SEQ ID NO: 11525 - DNA, 25 bp, probe
ttaggtaaataatggtttggtgatc

SEQ ID NO: 11526 - DNA, 25 bp, probe
aaatatgtctatatggagaaagcac

SEQ ID NO: 11527 - DNA, 25 bp, probe
ggagaaagcacattatatttattgg

SEQ ID NO: 11528 - DNA, 25 bp, probe
atggtttggtgatcatacatgagaa

SEQ ID NO: 11529 - DNA, 25 bp, probe
aatggtttggtgatcatacatgaga

SEQ ID NO: 11530 - DNA, 25 bp, probe
tggtttggtgatcatacatgagaaa

SEQ ID NO: 11531 - DNA, 25 bp, probe
gtctatatggagaaagcacattata

SEQ ID NO: 11532 - DNA, 25 bp, probe
ggtttggtgatcatacatgagaaat

SEQ ID NO: 11533 - DNA, 25 bp, probe
tttgatggctaaaatactaccacca

SEQ ID NO: 11534 - DNA, 25 bp, probe
ttttgatggctaaaatactaccacc

SEQ ID NO: 11535 - DNA, 25 bp, probe
atgtctatatggagaaagcacatta

SEQ ID NO: 11536 - DNA, 25 bp, probe
tatgtctatatggagaaagcacatt

SEQ ID NO: 11537 - DNA, 25 bp, probe
taatggtttggtgatcatacatgag

SEQ ID NO: 11538 - DNA, 25 bp, probe
ttgatggctaaaatactaccaccac

SEQ ID NO: 11539 - DNA, 25 bp, probe
aggtaaataatggtttggtgatcat

SEQ ID NO: 11540 - DNA, 25 bp, probe
gagaaagcacattatatttattggt

SEQ ID NO: 11541 - DNA, 25 bp, probe
tggagaaagcacattatatttattg

SEQ ID NO: 11542 - DNA, 25 bp, probe
atatgtctatatggagaaagcacat

SEQ ID NO: 11543 - DNA, 25 bp, probe
gtttggtgatcatacatgagaaatg

SEQ ID NO: 11544 - DNA, 25 bp, probe
taggtaaataatggtttggtgatca

SEQ ID NO: 11545 - DNA, 25 bp, probe
ataatggtttggtgatcatacatga

SEQ ID NO: 11546 - DNA, 25 bp, probe
tgatggctaaaatactaccaccaca

SEQ ID NO: 11547 - DNA, 25 bp, probe
aataatggtttggtgatcatacatg

SEQ ID NO: 11548 - DNA, 25 bp, probe
agaaagcacattatatttattggtt

SEQ ID NO: 11549 - DNA, 25 bp, probe
taaatatgtctatatggagaaagca

SEQ ID NO: 11550 - DNA, 25 bp, probe
gtaaatatgtctatatggagaaagc

SEQ ID NO: 11551 - DNA, 25 bp, probe
ggtaaataatggtttggtgatcata

SEQ ID NO: 11552 - DNA, 25 bp, probe
aaataatggtttggtgatcatacat

SEQ ID NO: 11553 - DNA, 25 bp, probe
tctatatggagaaagcacattatat

SEQ ID NO: 11554 - DNA, 25 bp, probe
tcaagtgtaaatatgtctatatgga

SEQ ID NO: 11555 - DNA, 25 bp, probe
tttggtgatcatacatgagaaatgt

SEQ ID NO: 11556 - DNA, 25 bp, probe
taaataatggtttggtgatcataca

SEQ ID NO: 11557 - DNA, 25 bp, probe
gtaaataatggtttggtgatcatac

SEQ ID NO: 11558 - DNA, 25 bp, probe
tttattggttacttacattcctttt

SEQ ID NO: 11559 - DNA, 25 bp, probe
ggtgatcatacatgagaaatgtaca

SEQ ID NO: 11560 - DNA, 25 bp, probe
tggtgatcatacatgagaaatgtac

SEQ ID NO: 11561 - DNA, 25 bp, probe
atgagaaatgtacacattaaaaggc

SEQ ID NO: 11562 - DNA, 25 bp, probe
tgatcatacatgagaaatgtacaca

SEQ ID NO: 11563 - DNA, 25 bp, probe
ttggtgatcatacatgagaaatgta

SEQ ID NO: 11564 - DNA, 25 bp, probe
gtgatcatacatgagaaatgtacac

SEQ ID NO: 11565 - DNA, 25 bp, probe
gatcatacatgagaaatgtacacat

SEQ ID NO: 11566 - DNA, 25 bp, probe
catgagaaatgtacacattaaaagg

SEQ ID NO: 11567 - DNA, 25 bp, probe
atctgatgtctgaatctgaatggag

SEQ ID NO: 11568 - DNA, 25 bp, probe
gcacaaggaattagtaacaggaact

SEQ ID NO: 11569 - DNA, 25 bp, probe
ctgatgtctgaatctgaatggagga

SEQ ID NO: 11570 - DNA, 25 bp, probe
tctgatgtctgaatctgaatggagg

SEQ ID NO: 11571 - DNA, 25 bp, probe
catctgatgtctgaatctgaatgga

SEQ ID NO: 11572 - DNA, 25 bp, probe
ggcacaaggaattagtaacaggaac

SEQ ID NO: 11573 - DNA, 25 bp, probe
aaggaattagtaacaggaactgagg

SEQ ID NO: 11574 - DNA, 25 bp, probe
acaaggaattagtaacaggaactga

SEQ ID NO: 11575 - DNA, 25 bp, probe
cacaaggaattagtaacaggaactg

SEQ ID NO: 11576 - DNA, 25 bp, probe
caaggaattagtaacaggaactgag

SEQ ID NO: 11577 - DNA, 25 bp, probe
attagtaacaggaactgaggcgata

SEQ ID NO: 11578 - DNA, 25 bp, probe
taacaggaactgaggcgatagaatt

SEQ ID NO: 11579 - DNA, 25 bp, probe
ttagtaacaggaactgaggcgatag

SEQ ID NO: 11580 - DNA, 25 bp, probe
aattagtaacaggaactgaggcgat

SEQ ID NO: 11581 - DNA, 25 bp, probe
aggaattagtaacaggaactgaggc

SEQ ID NO: 11582 - DNA, 25 bp, probe
gtaacaggaactgaggcgatagaat

SEQ ID NO: 11583 - DNA, 25 bp, probe
tagtaacaggaactgaggcgataga

SEQ ID NO: 11584 - DNA, 25 bp, probe
gaattagtaacaggaactgaggcga

SEQ ID NO: 11585 - DNA, 25 bp, probe
aacaggaactgaggcgatagaattg

SEQ ID NO: 11586 - DNA, 25 bp, probe
cccatctgatgtctgaatctgaatg

SEQ ID NO: 11587 - DNA, 25 bp, probe
agtaacaggaactgaggcgatagaa

SEQ ID NO: 11588 - DNA, 25 bp, probe
acccatctgatgtctgaatctgaat

SEQ ID NO: 11589 - DNA, 25 bp, probe
ggaattagtaacaggaactgaggcg

SEQ ID NO: 11590 - DNA, 25 bp, probe
aacccatctgatgtctgaatctgaa

SEQ ID NO: 11591 - DNA, 25 bp, probe
aaacccatctgatgtctgaatctga

SEQ ID NO: 11592 - DNA, 25 bp, probe
tgagggcacaaggaattagtaacag

SEQ ID NO: 11593 - DNA, 25 bp, probe
ctgagggcacaaggaattagtaaca

SEQ ID NO: 11594 - DNA, 25 bp, probe
gtcgcacaaacaaatttactattcg

SEQ ID NO: 11595 - DNA, 25 bp, probe
gcacaaacaaatttactattcggac

SEQ ID NO: 11596 - DNA, 25 bp, probe
cgcacaaacaaatttactattcgga

SEQ ID NO: 11597 - DNA, 25 bp, probe
tcgcacaaacaaatttactattcgg

SEQ ID NO: 11598 - DNA, 25 bp, probe
gggcacaaggaattagtaacaggaa

SEQ ID NO: 11599 - DNA, 25 bp, probe
gaggagtttgagtatcggttagtgc

SEQ ID NO: 11600 - DNA, 25 bp, probe
gagtttgagtatcggttagtgctgg

SEQ ID NO: 11601 - DNA, 25 bp, probe
ggagtttgagtatcggttagtgctg

SEQ ID NO: 11602 - DNA, 25 bp, probe
gagggcacaaggaattagtaacagg

SEQ ID NO: 11603 - DNA, 25 bp, probe
cacaaacaaatttactattcggaca

SEQ ID NO: 11604 - DNA, 25 bp, probe
tcatgtcgcacaaacaaatttacta

SEQ ID NO: 11605 - DNA, 25 bp, probe
gatcatgtcgcacaaacaaatttac

SEQ ID NO: 11606 - DNA, 25 bp, probe
atcatgtcgcacaaacaaatttact

SEQ ID NO: 11607 - DNA, 25 bp, probe
tttactattcggacaaatacgacga

SEQ ID NO: 11608 - DNA, 25 bp, probe
aggagtttgagtatcggttagtgct

SEQ ID NO: 11609 - DNA, 25 bp, probe
atttactattcggacaaatacgacg

SEQ ID NO: 11610 - DNA, 25 bp, probe
ttactattcggacaaatacgacgac

SEQ ID NO: 11611 - DNA, 25 bp, probe
aatgctgttactaatcctgttacga

SEQ ID NO: 11612 - DNA, 25 bp, probe
gaatgctgttactaatcctgttacg

SEQ ID NO: 11613 - DNA, 25 bp, probe
atgctgttactaatcctgttacgag

SEQ ID NO: 11614 - DNA, 25 bp, probe
gctgttactaatcctgttacgagat

SEQ ID NO: 11615 - DNA, 25 bp, probe
tgaatgctgttactaatcctgttac

SEQ ID NO: 11616 - DNA, 25 bp, probe
gtgaatgctgttactaatcctgtta

SEQ ID NO: 11617 - DNA, 25 bp, probe
tgttactaatcctgttacgagatga

SEQ ID NO: 11618 - DNA, 25 bp, probe
tgctgttactaatcctgttacgaga

SEQ ID NO: 11619 - DNA, 25 bp, probe
ctgttactaatcctgttacgagatg

SEQ ID NO: 11620 - DNA, 25 bp, probe
aatgatgatacaagttgaagacaca

SEQ ID NO: 11621 - DNA, 25 bp, probe
tctaactactgttgaatgtctctgt

SEQ ID NO: 11622 - DNA, 25 bp, probe
gttgtggtgtagttggtctgtaatt

SEQ ID NO: 11623 - DNA, 25 bp, probe
atacaagttgaagacacatcactct

SEQ ID NO: 11624 - DNA, 25 bp, probe
agtgaatgctgttactaatcctgtt

SEQ ID NO: 11625 - DNA, 25 bp, probe
gatacaagttgaagacacatcactc

SEQ ID NO: 11626 - DNA, 25 bp, probe
tacaagttgaagacacatcactctg

SEQ ID NO: 11627 - DNA, 25 bp, probe
atgatgatacaagttgaagacacat

SEQ ID NO: 11628 - DNA, 25 bp, probe
ctaactactgttgaatgtctctgtt

SEQ ID NO: 11629 - DNA, 25 bp, probe
actaatcctgttacgagatgaatct

SEQ ID NO: 11630 - DNA, 25 bp, probe
gttactaatcctgttacgagatgaa

SEQ ID NO: 11631 - DNA, 25 bp, probe
caagttgaagacacatcactctgaa

SEQ ID NO: 11632 - DNA, 25 bp, probe
tgtggtgtagttggtctgtaattaa

SEQ ID NO: 11633 - DNA, 25 bp, probe
ttgtggtgtagttggtctgtaatta

SEQ ID NO: 11634 - DNA, 25 bp, probe
ttctaactactgttgaatgtctctg

SEQ ID NO: 11635 - DNA, 25 bp, probe
tggtgtagttggtctgtaattaagt

SEQ ID NO: 11636 - DNA, 25 bp, probe
gtggtgtagttggtctgtaattaag

SEQ ID NO: 11637 - DNA, 25 bp, probe
tgtagttggtctgtaattaagttgc

SEQ ID NO: 11638 - DNA, 25 bp, probe
tcagtgaatgctgttactaatcctg

SEQ ID NO: 11639 - DNA, 25 bp, probe
tgattatcacattctgccattaagg

SEQ ID NO: 11640 - DNA, 25 bp, probe
cagtgaatgctgttactaatcctgt

SEQ ID NO: 11641 - DNA, 25 bp, probe
tactaatcctgttacgagatgaatc

SEQ ID NO: 11642 - DNA, 25 bp, probe
aattccatgattatcacattctgcc

SEQ ID NO: 11643 - DNA, 25 bp, probe
tccatgattatcacattctgccatt

SEQ ID NO: 11644 - DNA, 25 bp, probe
ttccatgattatcacattctgccat

SEQ ID NO: 11645 - DNA, 25 bp, probe
attccatgattatcacattctgcca

SEQ ID NO: 11646 - DNA, 25 bp, probe
ggtgtagttggtctgtaattaagtt

SEQ ID NO: 11647 - DNA, 25 bp, probe
ccatgattatcacattctgccatta

SEQ ID NO: 11648 - DNA, 25 bp, probe
ttcagtgaatgctgttactaatcct

SEQ ID NO: 11649 - DNA, 25 bp, probe
acaagttgaagacacatcactctga

SEQ ID NO: 11650 - DNA, 25 bp, probe
ggttgtggtgtagttggtctgtaat

SEQ ID NO: 11651 - DNA, 25 bp, probe
agctgaactctaggttactactctt

SEQ ID NO: 11652 - DNA, 25 bp, probe
ttactaatcctgttacgagatgaat

SEQ ID NO: 11653 - DNA, 25 bp, probe
actactctttactttgttcacccat

SEQ ID NO: 11654 - DNA, 25 bp, probe
gtagttggtctgtaattaagttgca

SEQ ID NO: 11655 - DNA, 25 bp, probe
ggatgattgctcgattgtttggttt

SEQ ID NO: 11656 - DNA, 25 bp, probe
tttgggatgattgctcgattgtttg

SEQ ID NO: 11657 - DNA, 25 bp, probe
gatgattgctcgattgtttggtttt

SEQ ID NO: 11658 - DNA, 25 bp, probe
ttttgggatgattgctcgattgttt

SEQ ID NO: 11659 - DNA, 25 bp, probe
gggatgattgctcgattgtttggtt

SEQ ID NO: 11660 - DNA, 25 bp, probe
ttgggatgattgctcgattgtttgg

SEQ ID NO: 11661 - DNA, 25 bp, probe
cttttgggatgattgctcgattgtt

SEQ ID NO: 11662 - DNA, 25 bp, probe
taccttttgggatgattgctcgatt

SEQ ID NO: 11663 - DNA, 25 bp, probe
ctaccttttgggatgattgctcgat

SEQ ID NO: 11664 - DNA, 25 bp, probe
acgaagctaccttttgggatgattg

SEQ ID NO: 11665 - DNA, 25 bp, probe
cacgaagctaccttttgggatgatt

SEQ ID NO: 11666 - DNA, 25 bp, probe
tgggatgattgctcgattgtttggt

SEQ ID NO: 11667 - DNA, 25 bp, probe
ccttttgggatgattgctcgattgt

SEQ ID NO: 11668 - DNA, 25 bp, probe
accttttgggatgattgctcgattg

SEQ ID NO: 11669 - DNA, 25 bp, probe
aagctaccttttgggatgattgctc

SEQ ID NO: 11670 - DNA, 25 bp, probe
gaagctaccttttgggatgattgct

SEQ ID NO: 11671 - DNA, 25 bp, probe
cgaagctaccttttgggatgattgc

SEQ ID NO: 11672 - DNA, 25 bp, probe
taccacgaagctaccttttgggatg

SEQ ID NO: 11673 - DNA, 25 bp, probe
gtaccacgaagctaccttttgggat

SEQ ID NO: 11674 - DNA, 25 bp, probe
ccacgaagctaccttttgggatgat

SEQ ID NO: 11675 - DNA, 25 bp, probe
gaaccacccaaatatcatcaagtat

SEQ ID NO: 11676 - DNA, 25 bp, probe
catcaagtatttggactcgtttacc

SEQ ID NO: 11677 - DNA, 25 bp, probe
tgaaccacccaaatatcatcaagta

SEQ ID NO: 11678 - DNA, 25 bp, probe
aactgaaccacccaaatatcatcaa

SEQ ID NO: 11679 - DNA, 25 bp, probe
tcatcaagtatttggactcgtttac

SEQ ID NO: 11680 - DNA, 25 bp, probe
ctgaaccacccaaatatcatcaagt

SEQ ID NO: 11681 - DNA, 25 bp, probe
actgaaccacccaaatatcatcaag

SEQ ID NO: 11682 - DNA, 25 bp, probe
atcaagtatttggactcgtttaccg

SEQ ID NO: 11683 - DNA, 25 bp, probe
caactgaaccacccaaatatcatca

SEQ ID NO: 11684 - DNA, 25 bp, probe
aaccacccaaatatcatcaagtatt

SEQ ID NO: 11685 - DNA, 25 bp, probe
atcatcaagtatttggactcgttta

SEQ ID NO: 11686 - DNA, 25 bp, probe
tatcatcaagtatttggactcgttt

SEQ ID NO: 11687 - DNA, 25 bp, probe
gaagcaactgaaccacccaaatatc

SEQ ID NO: 11688 - DNA, 25 bp, probe
atatcatcaagtatttggactcgtt

SEQ ID NO: 11689 - DNA, 25 bp, probe
aatatcatcaagtatttggactcgt

SEQ ID NO: 11690 - DNA, 25 bp, probe
gcaactgaaccacccaaatatcatc

SEQ ID NO: 11691 - DNA, 25 bp, probe
tgaagcaactgaaccacccaaatat

SEQ ID NO: 11692 - DNA, 25 bp, probe
agcaactgaaccacccaaatatcat

SEQ ID NO: 11693 - DNA, 25 bp, probe
aagcaactgaaccacccaaatatca

SEQ ID NO: 11694 - DNA, 25 bp, probe
ttgaagcaactgaaccacccaaata

SEQ ID NO: 11695 - DNA, 25 bp, probe
accacccaaatatcatcaagtattt

SEQ ID NO: 11696 - DNA, 25 bp, probe
tcaagtatttggactcgtttaccga

SEQ ID NO: 11697 - DNA, 25 bp, probe
aaatatcatcaagtatttggactcg

SEQ ID NO: 11698 - DNA, 25 bp, probe
cttgaagcaactgaaccacccaaat

SEQ ID NO: 11699 - DNA, 25 bp, probe
tcttgaagcaactgaaccacccaaa

SEQ ID NO: 11700 - DNA, 25 bp, probe
ggaagttgtctataatgagccgtta

SEQ ID NO: 11701 - DNA, 25 bp, probe
agttgtctataatgagccgttaagt

SEQ ID NO: 11702 - DNA, 25 bp, probe
tgtctataatgagccgttaagtctt

SEQ ID NO: 11703 - DNA, 25 bp, probe
ttgtctataatgagccgttaagtct

SEQ ID NO: 11704 - DNA, 25 bp, probe
gttgtctataatgagccgttaagtc

SEQ ID NO: 11705 - DNA, 25 bp, probe
agaaggaagttgtctataatgagcc

SEQ ID NO: 11706 - DNA, 25 bp, probe
aagttgtctataatgagccgttaag

SEQ ID NO: 11707 - DNA, 25 bp, probe
gaagttgtctataatgagccgttaa

SEQ ID NO: 11708 - DNA, 25 bp, probe
gaaggaagttgtctataatgagccg

SEQ ID NO: 11709 - DNA, 25 bp, probe
cagaaggaagttgtctataatgagc

SEQ ID NO: 11710 - DNA, 25 bp, probe
aggaagttgtctataatgagccgtt

SEQ ID NO: 11711 - DNA, 25 bp, probe
aaggaagttgtctataatgagccgt

SEQ ID NO: 11712 - DNA, 25 bp, probe
tcagaaggaagttgtctataatgag

SEQ ID NO: 11713 - DNA, 25 bp, probe
ttcagaaggaagttgtctataatga

SEQ ID NO: 11714 - DNA, 25 bp, probe
ggtttgatttcagaaggaagttgtc

SEQ ID NO: 11715 - DNA, 25 bp, probe
caggtttgatttcagaaggaagttg

SEQ ID NO: 11716 - DNA, 25 bp, probe
gtttgatttcagaaggaagttgtct

SEQ ID NO: 11717 - DNA, 25 bp, probe
aggtttgatttcagaaggaagttgt

SEQ ID NO: 11718 - DNA, 25 bp, probe
gtctataatgagccgttaagtcttt

SEQ ID NO: 11719 - DNA, 25 bp, probe
tacccttcaagagatgattcagatg

SEQ ID NO: 11720 - DNA, 25 bp, probe
ctacccttcaagagatgattcagat

SEQ ID NO: 11721 - DNA, 25 bp, probe
ccaggtttgatttcagaaggaagtt

SEQ ID NO: 11722 - DNA, 25 bp, probe
cctacccttcaagagatgattcaga

SEQ ID NO: 11723 - DNA, 25 bp, probe
tttgatttcagaaggaagttgtcta

SEQ ID NO: 11724 - DNA, 25 bp, probe
ttgatttcagaaggaagttgtctat

SEQ ID NO: 11725 - DNA, 25 bp, probe
acccttcaagagatgattcagatgg

SEQ ID NO: 11726 - DNA, 25 bp, probe
ccctacccttcaagagatgattcag

SEQ ID NO: 11727 - DNA, 25 bp, probe
cttcaagagatgattcagatggcgg

SEQ ID NO: 11728 - DNA, 25 bp, probe
ccttcaagagatgattcagatggcg

SEQ ID NO: 11729 - DNA, 25 bp, probe
tgatttcagaaggaagttgtctata

SEQ ID NO: 11730 - DNA, 25 bp, probe
tgagccgttaagtcttttctgataa

SEQ ID NO: 11731 - DNA, 25 bp, probe
atgagccgttaagtcttttctgata

SEQ ID NO: 11732 - DNA, 25 bp, probe
taatgagccgttaagtcttttctga

SEQ ID NO: 11733 - DNA, 25 bp, probe
tttcagaaggaagttgtctataatg

SEQ ID NO: 11734 - DNA, 25 bp, probe
ataatgagccgttaagtcttttctg

SEQ ID NO: 11735 - DNA, 25 bp, probe
aatgagccgttaagtcttttctgat

SEQ ID NO: 11736 - DNA, 25 bp, probe
gagccgttaagtcttttctgataat

SEQ ID NO: 11737 - DNA, 25 bp, probe
cccttcaagagatgattcagatggc

SEQ ID NO: 11738 - DNA, 25 bp, probe
gccaggtttgatttcagaaggaagt

SEQ ID NO: 11739 - DNA, 25 bp, probe
gatttcagaaggaagttgtctataa

SEQ ID NO: 11740 - DNA, 25 bp, probe
tttactgtcaaaattggaggttcgt

SEQ ID NO: 11741 - DNA, 25 bp, probe
ttactgtcaaaattggaggttcgtc

SEQ ID NO: 11742 - DNA, 25 bp, probe
agccgttaagtcttttctgataata

SEQ ID NO: 11743 - DNA, 25 bp, probe
tataatgagccgttaagtcttttct

SEQ ID NO: 11744 - DNA, 25 bp, probe
tggaatgaccagagacatctatgaa

SEQ ID NO: 11745 - DNA, 25 bp, probe
ttggaatgaccagagacatctatga

SEQ ID NO: 11746 - DNA, 25 bp, probe
ccagagacatctatgaaacggatta

SEQ ID NO: 11747 - DNA, 25 bp, probe
ggaatgaccagagacatctatgaaa

SEQ ID NO: 11748 - DNA, 25 bp, probe
gacatctatgaaacggattactacc

SEQ ID NO: 11749 - DNA, 25 bp, probe
aatgaccagagacatctatgaaacg

SEQ ID NO: 11750 - DNA, 25 bp, probe
gaatgaccagagacatctatgaaac

SEQ ID NO: 11751 - DNA, 25 bp, probe
agagacatctatgaaacggattact

SEQ ID NO: 11752 - DNA, 25 bp, probe
cagagacatctatgaaacggattac

SEQ ID NO: 11753 - DNA, 25 bp, probe
accagagacatctatgaaacggatt

SEQ ID NO: 11754 - DNA, 25 bp, probe
tttgtgttgtcagactttggaatga

SEQ ID NO: 11755 - DNA, 25 bp, probe
agacatctatgaaacggattactac

SEQ ID NO: 11756 - DNA, 25 bp, probe
gaccagagacatctatgaaacggat

SEQ ID NO: 11757 - DNA, 25 bp, probe
gagacatctatgaaacggattacta

SEQ ID NO: 11758 - DNA, 25 bp, probe
atgaccagagacatctatgaaacgg

SEQ ID NO: 11759 - DNA, 25 bp, probe
ctttggaatgaccagagacatctat

SEQ ID NO: 11760 - DNA, 25 bp, probe
tttggaatgaccagagacatctatg

SEQ ID NO: 11761 - DNA, 25 bp, probe
actttggaatgaccagagacatcta

SEQ ID NO: 11762 - DNA, 25 bp, probe
tgaccagagacatctatgaaacgga

SEQ ID NO: 11763 - DNA, 25 bp, probe
taggaccaaggctgaaggttaagag

SEQ ID NO: 11764 - DNA, 25 bp, probe
ctaggaccaaggctgaaggttaaga

SEQ ID NO: 11765 - DNA, 25 bp, probe
ggtcttcaccacttcttctgacatg

SEQ ID NO: 11766 - DNA, 25 bp, probe
gactttggaatgaccagagacatct

SEQ ID NO: 11767 - DNA, 25 bp, probe
agactttggaatgaccagagacatc

SEQ ID NO: 11768 - DNA, 25 bp, probe
cttttgtgttgtcagactttggaat

SEQ ID NO: 11769 - DNA, 25 bp, probe
ttttgtgttgtcagactttggaatg

SEQ ID NO: 11770 - DNA, 25 bp, probe
cagactttggaatgaccagagacat

SEQ ID NO: 11771 - DNA, 25 bp, probe
gaaccttttgtgttgtcagactttg

SEQ ID NO: 11772 - DNA, 25 bp, probe
tgaaccttttgtgttgtcagacttt

SEQ ID NO: 11773 - DNA, 25 bp, probe
ccttttgtgttgtcagactttggaa

SEQ ID NO: 11774 - DNA, 25 bp, probe
gtgaaccttttgtgttgtcagactt

SEQ ID NO: 11775 - DNA, 25 bp, probe
tcagactttggaatgaccagagaca

SEQ ID NO: 11776 - DNA, 25 bp, probe
aaccttttgtgttgtcagactttgg

SEQ ID NO: 11777 - DNA, 25 bp, probe
acatctatgaaacggattactaccg

SEQ ID NO: 11778 - DNA, 25 bp, probe
acttcttctgacatgtggtgagttg

SEQ ID NO: 11779 - DNA, 25 bp, probe
gtcttcaccacttcttctgacatgt

SEQ ID NO: 11780 - DNA, 25 bp, probe
accttttgtgttgtcagactttgga

SEQ ID NO: 11781 - DNA, 25 bp, probe
cttcttctgacatgtggtgagttgt

SEQ ID NO: 11782 - DNA, 25 bp, probe
tcttcaccacttcttctgacatgtg

SEQ ID NO: 11783 - DNA, 25 bp, probe
gttaagagcgtgtgaaccttttgtg

SEQ ID NO: 11784 - DNA, 25 bp, probe
ttcttctgacatgtggtgagttgtg

SEQ ID NO: 11785 - DNA, 25 bp, probe
cacttcttctgacatgtggtgagtt

SEQ ID NO: 11786 - DNA, 25 bp, probe
tgtgaaccttttgtgttgtcagact

SEQ ID NO: 11787 - DNA, 25 bp, probe
gtgtgaaccttttgtgttgtcagac

SEQ ID NO: 11788 - DNA, 25 bp, probe
gtccagagagagtgtaagtgtagaa

SEQ ID NO: 11789 - DNA, 25 bp, probe
tgttactactatcaactgtcatcgg

SEQ ID NO: 11790 - DNA, 25 bp, probe
ttactactatcaactgtcatcggca

SEQ ID NO: 11791 - DNA, 25 bp, probe
gttactactatcaactgtcatcggc

SEQ ID NO: 11792 - DNA, 25 bp, probe
ctgtccagagagagtgtaagtgtag

SEQ ID NO: 11793 - DNA, 25 bp, probe
tgtccagagagagtgtaagtgtaga

SEQ ID NO: 11794 - DNA, 25 bp, probe
ttgttactactatcaactgtcatcg

SEQ ID NO: 11795 - DNA, 25 bp, probe
actgtccagagagagtgtaagtgta

SEQ ID NO: 11796 - DNA, 25 bp, probe
tactactatcaactgtcatcggcag

SEQ ID NO: 11797 - DNA, 25 bp, probe
cagagagagtgtaagtgtagaaagg

SEQ ID NO: 11798 - DNA, 25 bp, probe
ccagagagagtgtaagtgtagaaag

SEQ ID NO: 11799 - DNA, 25 bp, probe
gagagtgtaagtgtagaaagggttt

SEQ ID NO: 11800 - DNA, 25 bp, probe
tccagagagagtgtaagtgtagaaa

SEQ ID NO: 11801 - DNA, 25 bp, probe
tgtgtctaaatggcttctttgttac

SEQ ID NO: 11802 - DNA, 25 bp, probe
gtgtgtctaaatggcttctttgtta

SEQ ID NO: 11803 - DNA, 25 bp, probe
gtgtctaaatggcttctttgttact

SEQ ID NO: 11804 - DNA, 25 bp, probe
taagtgtagaaagggtttaaggtgt

SEQ ID NO: 11805 - DNA, 25 bp, probe
tgtaagtgtagaaagggtttaaggt

SEQ ID NO: 11806 - DNA, 25 bp, probe
agagagtgtaagtgtagaaagggtt

SEQ ID NO: 11807 - DNA, 25 bp, probe
agagagagtgtaagtgtagaaaggg

SEQ ID NO: 11808 - DNA, 25 bp, probe
gtaagtgtagaaagggtttaaggtg

SEQ ID NO: 11809 - DNA, 25 bp, probe
gtgtaagtgtagaaagggtttaagg

SEQ ID NO: 11810 - DNA, 25 bp, probe
aagtgtagaaagggtttaaggtgtg

SEQ ID NO: 11811 - DNA, 25 bp, probe
agagtgtaagtgtagaaagggttta

SEQ ID NO: 11812 - DNA, 25 bp, probe
caactgtccagagagagtgtaagtg

SEQ ID NO: 11813 - DNA, 25 bp, probe
gagagagtgtaagtgtagaaagggt

SEQ ID NO: 11814 - DNA, 25 bp, probe
tgtgtgtctaaatggcttctttgtt

SEQ ID NO: 11815 - DNA, 25 bp, probe
gtagaaagggtttaaggtgtgtgag

SEQ ID NO: 11816 - DNA, 25 bp, probe
aactgtccagagagagtgtaagtgt

SEQ ID NO: 11817 - DNA, 25 bp, probe
agtgtaagtgtagaaagggtttaag

SEQ ID NO: 11818 - DNA, 25 bp, probe
gagtgtaagtgtagaaagggtttaa

SEQ ID NO: 11819 - DNA, 25 bp, probe
tggcttctttgttactactatcaac

SEQ ID NO: 11820 - DNA, 25 bp, probe
tgtagaaagggtttaaggtgtgtga

SEQ ID NO: 11821 - DNA, 25 bp, probe
gtgtagaaagggtttaaggtgtgtg

SEQ ID NO: 11822 - DNA, 25 bp, probe
agtgtagaaagggtttaaggtgtgt

SEQ ID NO: 11823 - DNA, 25 bp, probe
tgtctaaatggcttctttgttacta

SEQ ID NO: 11824 - DNA, 25 bp, probe
tatgttacaggtgtgtttgtgtttg

SEQ ID NO: 11825 - DNA, 25 bp, probe
gtatgttacaggtgtgtttgtgttt

SEQ ID NO: 11826 - DNA, 25 bp, probe
acaactgtccagagagagtgtaagt

SEQ ID NO: 11827 - DNA, 25 bp, probe
gtgtgtgtctaaatggcttctttgt

SEQ ID NO: 11828 - DNA, 25 bp, probe
tgtgtgtgtctaaatggcttctttg

SEQ ID NO: 11829 - DNA, 25 bp, probe
gtgtgtgtgtctaaatggcttcttt

SEQ ID NO: 11830 - DNA, 25 bp, probe
ggcttctttgttactactatcaact

SEQ ID NO: 11831 - DNA, 25 bp, probe
aatggcttctttgttactactatca

SEQ ID NO: 11832 - DNA, 25 bp, probe
gaatgactatcttcaagactgcctc

SEQ ID NO: 11833 - DNA, 25 bp, probe
gagaatgactatcttcaagactgcc

SEQ ID NO: 11834 - DNA, 25 bp, probe
ggagaatgactatcttcaagactgc

SEQ ID NO: 11835 - DNA, 25 bp, probe
agaatgactatcttcaagactgcct

SEQ ID NO: 11836 - DNA, 25 bp, probe
aatgactatcttcaagactgcctcg

SEQ ID NO: 11837 - DNA, 25 bp, probe
ttgggagaatgactatcttcaagac

SEQ ID NO: 11838 - DNA, 25 bp, probe
gggagaatgactatcttcaagactg

SEQ ID NO: 11839 - DNA, 25 bp, probe
tgggagaatgactatcttcaagact

SEQ ID NO: 11840 - DNA, 25 bp, probe
gactatcttcaagactgcctcgatg

SEQ ID NO: 11841 - DNA, 25 bp, probe
ggcttgggagaatgactatcttcaa

SEQ ID NO: 11842 - DNA, 25 bp, probe
tgactatcttcaagactgcctcgat

SEQ ID NO: 11843 - DNA, 25 bp, probe
atgactatcttcaagactgcctcga

SEQ ID NO: 11844 - DNA, 25 bp, probe
gggcttgggagaatgactatcttca

SEQ ID NO: 11845 - DNA, 25 bp, probe
cttgggagaatgactatcttcaaga

SEQ ID NO: 11846 - DNA, 25 bp, probe
gcttgggagaatgactatcttcaag

SEQ ID NO: 11847 - DNA, 25 bp, probe
actatcttcaagactgcctcgatgc

SEQ ID NO: 11848 - DNA, 25 bp, probe
tttaacagagaaaagctgaagagga

SEQ ID NO: 11849 - DNA, 25 bp, probe
ttaacagagaaaagctgaagaggag

SEQ ID NO: 11850 - DNA, 25 bp, probe
ttttaacagagaaaagctgaagagg

SEQ ID NO: 11851 - DNA, 25 bp, probe
cgggcttgggagaatgactatcttc

SEQ ID NO: 11852 - DNA, 25 bp, probe
ctatcttcaagactgcctcgatgcc

SEQ ID NO: 11853 - DNA, 25 bp, probe
ccatccagcaagacttcgtgatttt

SEQ ID NO: 11854 - DNA, 25 bp, probe
tcgggcttgggagaatgactatctt

SEQ ID NO: 11855 - DNA, 25 bp, probe
taacagagaaaagctgaagaggagc

SEQ ID NO: 11856 - DNA, 25 bp, probe
cacctttgagctggaggagatgatc

SEQ ID NO: 11857 - DNA, 25 bp, probe
ctttgagctggaggagatgatcctg

SEQ ID NO: 11858 - DNA, 25 bp, probe
aacagagaaaagctgaagaggagcc

SEQ ID NO: 11859 - DNA, 25 bp, probe
cagagaaaagctgaagaggagccag

SEQ ID NO: 11860 - DNA, 25 bp, probe
gatgctaagttggttctccctacag

SEQ ID NO: 11861 - DNA, 25 bp, probe
ctgatgctaagttggttctccctac

SEQ ID NO: 11862 - DNA, 25 bp, probe
tgatgctaagttggttctccctaca

SEQ ID NO: 11863 - DNA, 25 bp, probe
atgctaagttggttctccctacagg

SEQ ID NO: 11864 - DNA, 25 bp, probe
gctgatgctaagttggttctcccta

SEQ ID NO: 11865 - DNA, 25 bp, probe
gtagctgatgctaagttggttctcc

SEQ ID NO: 11866 - DNA, 25 bp, probe
ggtagctgatgctaagttggttctc

SEQ ID NO: 11867 - DNA, 25 bp, probe
aggtagctgatgctaagttggttct

SEQ ID NO: 11868 - DNA, 25 bp, probe
caggtagctgatgctaagttggttc

SEQ ID NO: 11869 - DNA, 25 bp, probe
agatgcctgaaacaagctacctgac

SEQ ID NO: 11870 - DNA, 25 bp, probe
catattctggtgccgctgaaaatcc

SEQ ID NO: 11871 - DNA, 25 bp, probe
cagatgcctgaaacaagctacctga

SEQ ID NO: 11872 - DNA, 25 bp, probe
ccatattctggtgccgctgaaaatc

SEQ ID NO: 11873 - DNA, 25 bp, probe
tagctgatgctaagttggttctccc

SEQ ID NO: 11874 - DNA, 25 bp, probe
gcaggtagctgatgctaagttggtt

SEQ ID NO: 11875 - DNA, 25 bp, probe
atattctggtgccgctgaaaatcca

SEQ ID NO: 11876 - DNA, 25 bp, probe
ggagggtattaaagagacacagaag

SEQ ID NO: 11877 - DNA, 25 bp, probe
gagggtattaaagagacacagaaga

SEQ ID NO: 11878 - DNA, 25 bp, probe
ggtattaaagagacacagaagaagc

SEQ ID NO: 11879 - DNA, 25 bp, probe
tggagggtattaaagagacacagaa

SEQ ID NO: 11880 - DNA, 25 bp, probe
agggtattaaagagacacagaagaa

SEQ ID NO: 11881 - DNA, 25 bp, probe
gggtattaaagagacacagaagaag

SEQ ID NO: 11882 - DNA, 25 bp, probe
ctggagggtattaaagagacacaga

SEQ ID NO: 11883 - DNA, 25 bp, probe
gtattaaagagacacagaagaagct

SEQ ID NO: 11884 - DNA, 25 bp, probe
cctggagggtattaaagagacacag

SEQ ID NO: 11885 - DNA, 25 bp, probe
attaaagagacacagaagaagctgc

SEQ ID NO: 11886 - DNA, 25 bp, probe
tattaaagagacacagaagaagctg

SEQ ID NO: 11887 - DNA, 25 bp, probe
gcctggagggtattaaagagacaca

SEQ ID NO: 11888 - DNA, 25 bp, probe
ttaaagagacacagaagaagctgcc

SEQ ID NO: 11889 - DNA, 25 bp, probe
taaagagacacagaagaagctgcct

SEQ ID NO: 11890 - DNA, 25 bp, probe
ggcctggagggtattaaagagacac

SEQ ID NO: 11891 - DNA, 25 bp, probe
aaagagacacagaagaagctgcctg

SEQ ID NO: 11892 - DNA, 25 bp, probe
tgaagatgaagagaagacgattgaa

SEQ ID NO: 11893 - DNA, 25 bp, probe
ttgaagatgaagagaagacgattga

SEQ ID NO: 11894 - DNA, 25 bp, probe
agagattgaagatgaagagaagacg

SEQ ID NO: 11895 - DNA, 25 bp, probe
aagattacacggatgagaagatgag

SEQ ID NO: 11896 - DNA, 25 bp, probe
gaagattacacggatgagaagatga

SEQ ID NO: 11897 - DNA, 25 bp, probe
ttgaagattacacggatgagaagat

SEQ ID NO: 11898 - DNA, 25 bp, probe
attgaagattacacggatgagaaga

SEQ ID NO: 11899 - DNA, 25 bp, probe
aagatgaagagaagacgattgaaga

SEQ ID NO: 11900 - DNA, 25 bp, probe
gagattgaagatgaagagaagacga

SEQ ID NO: 11901 - DNA, 25 bp, probe
gaacctcaactactgctggatatta

SEQ ID NO: 11902 - DNA, 25 bp, probe
tgaagattacacggatgagaagatg

SEQ ID NO: 11903 - DNA, 25 bp, probe
gattgaagattacacggatgagaag

SEQ ID NO: 11904 - DNA, 25 bp, probe
agatgaagagaagacgattgaagat

SEQ ID NO: 11905 - DNA, 25 bp, probe
agattgaagatgaagagaagacgat

SEQ ID NO: 11906 - DNA, 25 bp, probe
gaagatgaagagaagacgattgaag

SEQ ID NO: 11907 - DNA, 25 bp, probe
agagaagacgattgaagattacacg

SEQ ID NO: 11908 - DNA, 25 bp, probe
attgaagatgaagagaagacgattg

SEQ ID NO: 11909 - DNA, 25 bp, probe
aacctcaactactgctggatattaa

SEQ ID NO: 11910 - DNA, 25 bp, probe
cgattgaagattacacggatgagaa

SEQ ID NO: 11911 - DNA, 25 bp, probe
gaagacgattgaagattacacggat

SEQ ID NO: 11912 - DNA, 25 bp, probe
gatgaagagaagacgattgaagatt

SEQ ID NO: 11913 - DNA, 25 bp, probe
gattgaagatgaagagaagacgatt

SEQ ID NO: 11914 - DNA, 25 bp, probe
aagagaagacgattgaagattacac

SEQ ID NO: 11915 - DNA, 25 bp, probe
aagacgattgaagattacacggatg

SEQ ID NO: 11916 - DNA, 25 bp, probe
gaagagaagacgattgaagattaca

SEQ ID NO: 11917 - DNA, 25 bp, probe
tgaagagaagacgattgaagattac

SEQ ID NO: 11918 - DNA, 25 bp, probe
gagaagacgattgaagattacacgg

SEQ ID NO: 11919 - DNA, 25 bp, probe
gacgattgaagattacacggatgag

SEQ ID NO: 11920 - DNA, 25 bp, probe
aagagattgaagatgaagagaagac

SEQ ID NO: 11921 - DNA, 25 bp, probe
agaagacgattgaagattacacgga

SEQ ID NO: 11922 - DNA, 25 bp, probe
acgattgaagattacacggatgaga

SEQ ID NO: 11923 - DNA, 25 bp, probe
agacgattgaagattacacggatga

SEQ ID NO: 11924 - DNA, 25 bp, probe
gaagagattgaagatgaagagaaga

SEQ ID NO: 11925 - DNA, 25 bp, probe
agaagagattgaagatgaagagaag

SEQ ID NO: 11926 - DNA, 25 bp, probe
tgaacctcaactactgctggatatt

SEQ ID NO: 11927 - DNA, 25 bp, probe
agattacacggatgagaagatgagc

SEQ ID NO: 11928 - DNA, 25 bp, probe
atgaagagaagacgattgaagatta

SEQ ID NO: 11929 - DNA, 25 bp, probe
aagaagagattgaagatgaagagaa

SEQ ID NO: 11930 - DNA, 25 bp, probe
gtgaacctcaactactgctggatat

SEQ ID NO: 11931 - DNA, 25 bp, probe
ataacacccaaatctgacatctaca

SEQ ID NO: 11932 - DNA, 25 bp, probe
gaaataacacccaaatctgacatct

SEQ ID NO: 11933 - DNA, 25 bp, probe
acctcaactactgctggatattaaa

SEQ ID NO: 11934 - DNA, 25 bp, probe
cctcaactactgctggatattaaag

SEQ ID NO: 11935 - DNA, 25 bp, probe
aataacacccaaatctgacatctac

SEQ ID NO: 11936 - DNA, 25 bp, probe
aaatggaactacacaaacatcacag

SEQ ID NO: 11937 - DNA, 25 bp, probe
caaatggaactacacaaacatcaca

SEQ ID NO: 11938 - DNA, 25 bp, probe
aatggaactacacaaacatcacagt

SEQ ID NO: 11939 - DNA, 25 bp, probe
gcaaatggaactacacaaacatcac

SEQ ID NO: 11940 - DNA, 25 bp, probe
gtcttcttacactctctcctgcctt

SEQ ID NO: 11941 - DNA, 25 bp, probe
gtatgtgactggcaaatggaactac

SEQ ID NO: 11942 - DNA, 25 bp, probe
tgtatgtgactggcaaatggaacta

SEQ ID NO: 11943 - DNA, 25 bp, probe
atcatctttcccatgtatgtgactg

SEQ ID NO: 11944 - DNA, 25 bp, probe
catcatctttcccatgtatgtgact

SEQ ID NO: 11945 - DNA, 25 bp, probe
ggcaaatggaactacacaaacatca

SEQ ID NO: 11946 - DNA, 25 bp, probe
tggcaaatggaactacacaaacatc

SEQ ID NO: 11947 - DNA, 25 bp, probe
ctggcaaatggaactacacaaacat

SEQ ID NO: 11948 - DNA, 25 bp, probe
atggaactacacaaacatcacagtg

SEQ ID NO: 11949 - DNA, 25 bp, probe
gactggcaaatggaactacacaaac

SEQ ID NO: 11950 - DNA, 25 bp, probe
atgtatgtgactggcaaatggaact

SEQ ID NO: 11951 - DNA, 25 bp, probe
aacgaggatttgggatactgttctg

SEQ ID NO: 11952 - DNA, 25 bp, probe
tcttcttacactctctcctgccttt

SEQ ID NO: 11953 - DNA, 25 bp, probe
tatgtgactggcaaatggaactaca

SEQ ID NO: 11954 - DNA, 25 bp, probe
gaactacacaaacatcacagtgaac

SEQ ID NO: 11955 - DNA, 25 bp, probe
gttggtaaacatcatctttcccatg

SEQ ID NO: 11956 - DNA, 25 bp, probe
tgactggcaaatggaactacacaaa

SEQ ID NO: 11957 - DNA, 25 bp, probe
gtgaacgaggatttgggatactgtt

SEQ ID NO: 11958 - DNA, 25 bp, probe
aaacatcacagtgaacgaggatttg

SEQ ID NO: 11959 - DNA, 25 bp, probe
caaacatcacagtgaacgaggattt

SEQ ID NO: 11960 - DNA, 25 bp, probe
ggaactacacaaacatcacagtgaa

SEQ ID NO: 11961 - DNA, 25 bp, probe
catgtatgtgactggcaaatggaac

SEQ ID NO: 11962 - DNA, 25 bp, probe
actggcaaatggaactacacaaaca

SEQ ID NO: 11963 - DNA, 25 bp, probe
gttgttatcattccctgatgtgttg

SEQ ID NO: 11964 - DNA, 25 bp, probe
atgttgttatcattccctgatgtgt

SEQ ID NO: 11965 - DNA, 25 bp, probe
aatgttgttatcattccctgatgtg

SEQ ID NO: 11966 - DNA, 25 bp, probe
caatgttgttatcattccctgatgt

SEQ ID NO: 11967 - DNA, 25 bp, probe
ttgttatcattccctgatgtgttgt

SEQ ID NO: 11968 - DNA, 25 bp, probe
tgttgttatcattccctgatgtgtt

SEQ ID NO: 11969 - DNA, 25 bp, probe
gcaatgttgttatcattccctgatg

SEQ ID NO: 11970 - DNA, 25 bp, probe
ttatcattccctgatgtgttgtgtc

SEQ ID NO: 11971 - DNA, 25 bp, probe
tggggttagatattttctcaatgct

SEQ ID NO: 11972 - DNA, 25 bp, probe
aactacacaaacatcacagtgaacg

SEQ ID NO: 11973 - DNA, 25 bp, probe
ggggttagatattttctcaatgctc

SEQ ID NO: 11974 - DNA, 25 bp, probe
cacagtgaacgaggatttgggatac

SEQ ID NO: 11975 - DNA, 25 bp, probe
ctacacaaacatcacagtgaacgag

SEQ ID NO: 11976 - DNA, 25 bp, probe
gatattttctcaatgctcttgggtg

SEQ ID NO: 11977 - DNA, 25 bp, probe
agatattttctcaatgctcttgggt

SEQ ID NO: 11978 - DNA, 25 bp, probe
gcttttggggttagatattttctca

SEQ ID NO: 11979 - DNA, 25 bp, probe
agcacattgataggagcgatctctc

SEQ ID NO: 11980 - DNA, 25 bp, probe
tctcactttcattatactacctggc

SEQ ID NO: 11981 - DNA, 25 bp, probe
agtggtgaaacagaacaatatctca

SEQ ID NO: 11982 - DNA, 25 bp, probe
cgagtggtgaaacagaacaatatct

SEQ ID NO: 11983 - DNA, 25 bp, probe
gagtggtgaaacagaacaatatctc

SEQ ID NO: 11984 - DNA, 25 bp, probe
agaatttggagtcccttgaatcaac

SEQ ID NO: 11985 - DNA, 25 bp, probe
cagaatttggagtcccttgaatcaa

SEQ ID NO: 11986 - DNA, 25 bp, probe
atctcactttcattatactacctgg

SEQ ID NO: 11987 - DNA, 25 bp, probe
atcgagtggtgaaacagaacaatat

SEQ ID NO: 11988 - DNA, 25 bp, probe
aatcgagtggtgaaacagaacaata

SEQ ID NO: 11989 - DNA, 25 bp, probe
tcgagtggtgaaacagaacaatatc

SEQ ID NO: 11990 - DNA, 25 bp, probe
gaatttggagtcccttgaatcaacc

SEQ ID NO: 11991 - DNA, 25 bp, probe
gaaagaatcgagtggtgaaacagaa

SEQ ID NO: 11992 - DNA, 25 bp, probe
aaagaatcgagtggtgaaacagaac

SEQ ID NO: 11993 - DNA, 25 bp, probe
gaatcgagtggtgaaacagaacaat

SEQ ID NO: 11994 - DNA, 25 bp, probe
gagaaagaatcgagtggtgaaacag

SEQ ID NO: 11995 - DNA, 25 bp, probe
agaaagaatcgagtggtgaaacaga

SEQ ID NO: 11996 - DNA, 25 bp, probe
aacagaacaatatctcactttcatt

SEQ ID NO: 11997 - DNA, 25 bp, probe
aaacagaacaatatctcactttcat

SEQ ID NO: 11998 - DNA, 25 bp, probe
agaatcgagtggtgaaacagaacaa

SEQ ID NO: 11999 - DNA, 25 bp, probe
aagaatcgagtggtgaaacagaaca

SEQ ID NO: 12000 - DNA, 25 bp, probe
ctcactttcattatactacctggcc

SEQ ID NO: 12001 - DNA, 25 bp, probe
ccagaatttggagtcccttgaatca

SEQ ID NO: 12002 - DNA, 25 bp, probe
aatttggagtcccttgaatcaacca

SEQ ID NO: 12003 - DNA, 25 bp, probe
gaaacagaacaatatctcactttca

SEQ ID NO: 12004 - DNA, 25 bp, probe
tgaaacagaacaatatctcactttc

SEQ ID NO: 12005 - DNA, 25 bp, probe
ggagaaagaatcgagtggtgaaaca

SEQ ID NO: 12006 - DNA, 25 bp, probe
tggagaaagaatcgagtggtgaaac

SEQ ID NO: 12007 - DNA, 25 bp, probe
gtggagaaagaatcgagtggtgaaa

SEQ ID NO: 12008 - DNA, 25 bp, probe
attgtggagaaagaatcgagtggtg

SEQ ID NO: 12009 - DNA, 25 bp, probe
cattgtggagaaagaatcgagtggt

SEQ ID NO: 12010 - DNA, 25 bp, probe
acagaacaatatctcactttcatta

SEQ ID NO: 12011 - DNA, 25 bp, probe
atttggagtcccttgaatcaaccag

SEQ ID NO: 12012 - DNA, 25 bp, probe
cttcctaacacatgctgccatttct

SEQ ID NO: 12013 - DNA, 25 bp, probe
ttcctaacacatgctgccatttctg

SEQ ID NO: 12014 - DNA, 25 bp, probe
acttcctaacacatgctgccatttc

SEQ ID NO: 12015 - DNA, 25 bp, probe
cacttcctaacacatgctgccattt

SEQ ID NO: 12016 - DNA, 25 bp, probe
tgtggagaaagaatcgagtggtgaa

SEQ ID NO: 12017 - DNA, 25 bp, probe
ttgtggagaaagaatcgagtggtga

SEQ ID NO: 12018 - DNA, 25 bp, probe
tatctcactttcattatactacctg

SEQ ID NO: 12019 - DNA, 25 bp, probe
gccagaatttggagtcccttgaatc

SEQ ID NO: 12020 - DNA, 25 bp, probe
tggtgaaacagaacaatatctcact

SEQ ID NO: 12021 - DNA, 25 bp, probe
gtggtgaaacagaacaatatctcac

SEQ ID NO: 12022 - DNA, 25 bp, probe
ggtgaaacagaacaatatctcactt

SEQ ID NO: 12023 - DNA, 25 bp, probe
gcattgtggagaaagaatcgagtgg

SEQ ID NO: 12024 - DNA, 25 bp, probe
aatatatgccatgaaagtcctaagg

SEQ ID NO: 12025 - DNA, 25 bp, probe
atatgccatgaaagtcctaaggaag

SEQ ID NO: 12026 - DNA, 25 bp, probe
tatatgccatgaaagtcctaaggaa

SEQ ID NO: 12027 - DNA, 25 bp, probe
gaacattctagagtcagtgaagcac

SEQ ID NO: 12028 - DNA, 25 bp, probe
ggaacattctagagtcagtgaagca

SEQ ID NO: 12029 - DNA, 25 bp, probe
atatatgccatgaaagtcctaagga

SEQ ID NO: 12030 - DNA, 25 bp, probe
aaatatatgccatgaaagtcctaag

SEQ ID NO: 12031 - DNA, 25 bp, probe
tatgccatgaaagtcctaaggaagg

SEQ ID NO: 12032 - DNA, 25 bp, probe
aacattctagagtcagtgaagcacc

SEQ ID NO: 12033 - DNA, 25 bp, probe
cggaacattctagagtcagtgaagc

SEQ ID NO: 12034 - DNA, 25 bp, probe
gcggaacattctagagtcagtgaag

SEQ ID NO: 12035 - DNA, 25 bp, probe
agcggaacattctagagtcagtgaa

SEQ ID NO: 12036 - DNA, 25 bp, probe
aaactgaccgacttttggacttttg

SEQ ID NO: 12037 - DNA, 25 bp, probe
gagcggaacattctagagtcagtga

SEQ ID NO: 12038 - DNA, 25 bp, probe
ctagagcctgtgggacactatgaag

SEQ ID NO: 12039 - DNA, 25 bp, probe
tgagcggaacattctagagtcagtg

SEQ ID NO: 12040 - DNA, 25 bp, probe
caaaatatatgccatgaaagtccta

SEQ ID NO: 12041 - DNA, 25 bp, probe
cactatgaagaggtgttccaggtgc

SEQ ID NO: 12042 - DNA, 25 bp, probe
tagagcctgtgggacactatgaaga

SEQ ID NO: 12043 - DNA, 25 bp, probe
ccctttattgtggaactggcctatg

SEQ ID NO: 12044 - DNA, 25 bp, probe
tagagtcagtgaagcacccctttat

SEQ ID NO: 12045 - DNA, 25 bp, probe
gcaaaatatatgccatgaaagtcct

SEQ ID NO: 12046 - DNA, 25 bp, probe
aactgaccgacttttggacttttgg

SEQ ID NO: 12047 - DNA, 25 bp, probe
catgaaagtcctaaggaaggccaaa

SEQ ID NO: 12048 - DNA, 25 bp, probe
aaaatatatgccatgaaagtcctaa

SEQ ID NO: 12049 - DNA, 25 bp, probe
cctttattgtggaactggcctatgc

SEQ ID NO: 12050 - DNA, 25 bp, probe
ctagagtcagtgaagcaccccttta

SEQ ID NO: 12051 - DNA, 25 bp, probe
gagtcagtgaagcacccctttattg

SEQ ID NO: 12052 - DNA, 25 bp, probe
agagtcagtgaagcacccctttatt

SEQ ID NO: 12053 - DNA, 25 bp, probe
ggcaccaacttgggcaaaatatatg

SEQ ID NO: 12054 - DNA, 25 bp, probe
aggcaccaacttgggcaaaatatat

SEQ ID NO: 12055 - DNA, 25 bp, probe
gacactatgaagaggtgttccaggt

SEQ ID NO: 12056 - DNA, 25 bp, probe
gaaagtcctaaggaaggccaaaatt

SEQ ID NO: 12057 - DNA, 25 bp, probe
aaggcaccaacttgggcaaaatata

SEQ ID NO: 12058 - DNA, 25 bp, probe
cctagagcctgtgggacactatgaa

SEQ ID NO: 12059 - DNA, 25 bp, probe
acactatgaagaggtgttccaggtg

SEQ ID NO: 12060 - DNA, 25 bp, probe
aaagtcctaaggaaggccaaaattg

SEQ ID NO: 12061 - DNA, 25 bp, probe
acattctagagtcagtgaagcaccc

SEQ ID NO: 12062 - DNA, 25 bp, probe
gaagcacccctttattgtggaactg

SEQ ID NO: 12063 - DNA, 25 bp, probe
gtcagtgaagcacccctttattgtg

SEQ ID NO: 12064 - DNA, 25 bp, probe
agtcagtgaagcacccctttattgt

SEQ ID NO: 12065 - DNA, 25 bp, probe
ctgagcggaacattctagagtcagt

SEQ ID NO: 12066 - DNA, 25 bp, probe
ggacactatgaagaggtgttccagg

SEQ ID NO: 12067 - DNA, 25 bp, probe
gtgaagcacccctttattgtggaac

SEQ ID NO: 12068 - DNA, 25 bp, probe
ctctgtaggaagtctattaaggctg

SEQ ID NO: 12069 - DNA, 25 bp, probe
tctctgtaggaagtctattaaggct

SEQ ID NO: 12070 - DNA, 25 bp, probe
ctatacattaggaagtggcagttct

SEQ ID NO: 12071 - DNA, 25 bp, probe
atctctgtaggaagtctattaaggc

SEQ ID NO: 12072 - DNA, 25 bp, probe
tatacattaggaagtggcagttctt

SEQ ID NO: 12073 - DNA, 25 bp, probe
ctgtaggaagtctattaaggctgga

SEQ ID NO: 12074 - DNA, 25 bp, probe
tctgtaggaagtctattaaggctgg

SEQ ID NO: 12075 - DNA, 25 bp, probe
ccagccttaatagacttctcttaca

SEQ ID NO: 12076 - DNA, 25 bp, probe
tccagccttaatagacttctcttac

SEQ ID NO: 12077 - DNA, 25 bp, probe
actatacattaggaagtggcagttc

SEQ ID NO: 12078 - DNA, 25 bp, probe
ctactatacattaggaagtggcagt

SEQ ID NO: 12079 - DNA, 25 bp, probe
aatcaatcaggaatgagtcaatcag

SEQ ID NO: 12080 - DNA, 25 bp, probe
tactatacattaggaagtggcagtt

SEQ ID NO: 12081 - DNA, 25 bp, probe
accatctctgtaggaagtctattaa

SEQ ID NO: 12082 - DNA, 25 bp, probe
atcaatcaggaatgagtcaatcagc

SEQ ID NO: 12083 - DNA, 25 bp, probe
gtccagccttaatagacttctctta

SEQ ID NO: 12084 - DNA, 25 bp, probe
ggaccatctctgtaggaagtctatt

SEQ ID NO: 12085 - DNA, 25 bp, probe
tgtccagccttaatagacttctctt

SEQ ID NO: 12086 - DNA, 25 bp, probe
taggaagtctattaaggctggacag

SEQ ID NO: 12087 - DNA, 25 bp, probe
catctctgtaggaagtctattaagg

SEQ ID NO: 12088 - DNA, 25 bp, probe
ccatctctgtaggaagtctattaag

SEQ ID NO: 12089 - DNA, 25 bp, probe
cagccttaatagacttctcttacat

SEQ ID NO: 12090 - DNA, 25 bp, probe
gtaggaagtctattaaggctggaca

SEQ ID NO: 12091 - DNA, 25 bp, probe
tgtaggaagtctattaaggctggac

SEQ ID NO: 12092 - DNA, 25 bp, probe
ctgtccagccttaatagacttctct

SEQ ID NO: 12093 - DNA, 25 bp, probe
gaccatctctgtaggaagtctatta

SEQ ID NO: 12094 - DNA, 25 bp, probe
tggaccatctctgtaggaagtctat

SEQ ID NO: 12095 - DNA, 25 bp, probe
gagagagtataaataaccctggctg

SEQ ID NO: 12096 - DNA, 25 bp, probe
ctgagagagtataaataaccctggc

SEQ ID NO: 12097 - DNA, 25 bp, probe
gctgagagagtataaataaccctgg

SEQ ID NO: 12098 - DNA, 25 bp, probe
ggctgagagagtataaataaccctg

SEQ ID NO: 12099 - DNA, 25 bp, probe
gagagtataaataaccctggctgtc

SEQ ID NO: 12100 - DNA, 25 bp, probe
tgagagagtataaataaccctggct

SEQ ID NO: 12101 - DNA, 25 bp, probe
agagagtataaataaccctggctgt

SEQ ID NO: 12102 - DNA, 25 bp, probe
atacattaggaagtggcagttcttt

SEQ ID NO: 12103 - DNA, 25 bp, probe
tacattaggaagtggcagttcttta

SEQ ID NO: 12104 - DNA, 25 bp, probe
tcaatcagcctttaggtctttagtc

SEQ ID NO: 12105 - DNA, 25 bp, probe
agtcaatcagcctttaggtctttag

SEQ ID NO: 12106 - DNA, 25 bp, probe
gagtcaatcagcctttaggtcttta

SEQ ID NO: 12107 - DNA, 25 bp, probe
gtcaatcagcctttaggtctttagt

SEQ ID NO: 12108 - DNA, 25 bp, probe
agccttaatagacttctcttacatt

SEQ ID NO: 12109 - DNA, 25 bp, probe
acattaggaagtggcagttctttac

SEQ ID NO: 12110 - DNA, 25 bp, probe
aatcaggaatgagtcaatcagcctt

SEQ ID NO: 12111 - DNA, 25 bp, probe
ctggaccatctctgtaggaagtcta

SEQ ID NO: 12112 - DNA, 25 bp, probe
tgtactctataatgtgaactttccc

SEQ ID NO: 12113 - DNA, 25 bp, probe
tcctttgtactctataatgtgaact

SEQ ID NO: 12114 - DNA, 25 bp, probe
ctctataatgtgaactttcccctgt

SEQ ID NO: 12115 - DNA, 25 bp, probe
actctataatgtgaactttcccctg

SEQ ID NO: 12116 - DNA, 25 bp, probe
tgatcctttgtactctataatgtga

SEQ ID NO: 12117 - DNA, 25 bp, probe
tctataatgtgaactttcccctgtt

SEQ ID NO: 12118 - DNA, 25 bp, probe
tactctataatgtgaactttcccct

SEQ ID NO: 12119 - DNA, 25 bp, probe
gccagatctttgtatgtcttaagtg

SEQ ID NO: 12120 - DNA, 25 bp, probe
ttgtactctataatgtgaactttcc

SEQ ID NO: 12121 - DNA, 25 bp, probe
cctttgtactctataatgtgaactt

SEQ ID NO: 12122 - DNA, 25 bp, probe
ggccagatctttgtatgtcttaagt

SEQ ID NO: 12123 - DNA, 25 bp, probe
gtactctataatgtgaactttcccc

SEQ ID NO: 12124 - DNA, 25 bp, probe
atcctttgtactctataatgtgaac

SEQ ID NO: 12125 - DNA, 25 bp, probe
ttgatcctttgtactctataatgtg

SEQ ID NO: 12126 - DNA, 25 bp, probe
ccagatctttgtatgtcttaagtgt

SEQ ID NO: 12127 - DNA, 25 bp, probe
ccctgttccaacacttaaaagaaaa

SEQ ID NO: 12128 - DNA, 25 bp, probe
gatcctttgtactctataatgtgaa

SEQ ID NO: 12129 - DNA, 25 bp, probe
aagtgtttcaaagttataagcattt

SEQ ID NO: 12130 - DNA, 25 bp, probe
tccattttgatcctttgtactctat

SEQ ID NO: 12131 - DNA, 25 bp, probe
atccattttgatcctttgtactcta

SEQ ID NO: 12132 - DNA, 25 bp, probe
cccctgttccaacacttaaaagaaa

SEQ ID NO: 12133 - DNA, 25 bp, probe
tttcccctgttccaacacttaaaag

SEQ ID NO: 12134 - DNA, 25 bp, probe
ctttcccctgttccaacacttaaaa

SEQ ID NO: 12135 - DNA, 25 bp, probe
tgtatgtcttaagtgtttcaaagtt

SEQ ID NO: 12136 - DNA, 25 bp, probe
cctgttccaacacttaaaagaaaat

SEQ ID NO: 12137 - DNA, 25 bp, probe
ttgtatgtcttaagtgtttcaaagt

SEQ ID NO: 12138 - DNA, 25 bp, probe
tttgatcctttgtactctataatgt

SEQ ID NO: 12139 - DNA, 25 bp, probe
tctttgtatgtcttaagtgtttcaa

SEQ ID NO: 12140 - DNA, 25 bp, probe
tcccctgttccaacacttaaaagaa

SEQ ID NO: 12141 - DNA, 25 bp, probe
ttcccctgttccaacacttaaaaga

SEQ ID NO: 12142 - DNA, 25 bp, probe
atctttgtatgtcttaagtgtttca

SEQ ID NO: 12143 - DNA, 25 bp, probe
cagatctttgtatgtcttaagtgtt

SEQ ID NO: 12144 - DNA, 25 bp, probe
actttcccctgttccaacacttaaa

SEQ ID NO: 12145 - DNA, 25 bp, probe
aactttcccctgttccaacacttaa

SEQ ID NO: 12146 - DNA, 25 bp, probe
taagtgtttcaaagttataagcatt

SEQ ID NO: 12147 - DNA, 25 bp, probe
ttaagtgtttcaaagttataagcat

SEQ ID NO: 12148 - DNA, 25 bp, probe
gatctttgtatgtcttaagtgtttc

SEQ ID NO: 12149 - DNA, 25 bp, probe
gatccattttgatcctttgtactct

SEQ ID NO: 12150 - DNA, 25 bp, probe
ctgttccaacacttaaaagaaaatt

SEQ ID NO: 12151 - DNA, 25 bp, probe
tttgtactctataatgtgaactttc

SEQ ID NO: 12152 - DNA, 25 bp, probe
ctttgtactctataatgtgaacttt

SEQ ID NO: 12153 - DNA, 25 bp, probe
ccattttgatcctttgtactctata

SEQ ID NO: 12154 - DNA, 25 bp, probe
agatctttgtatgtcttaagtgttt

SEQ ID NO: 12155 - DNA, 25 bp, probe
tataatgtgaactttcccctgttcc

SEQ ID NO: 12156 - DNA, 25 bp, probe
catggaacagtatgccaataacttg

SEQ ID NO: 12157 - DNA, 25 bp, probe
tttggacagattaagggcttcattc

SEQ ID NO: 12158 - DNA, 25 bp, probe
ctttggacagattaagggcttcatt

SEQ ID NO: 12159 - DNA, 25 bp, probe
gagattgtccagaaggtacgaaatg

SEQ ID NO: 12160 - DNA, 25 bp, probe
agagattgtccagaaggtacgaaat

SEQ ID NO: 12161 - DNA, 25 bp, probe
aagagattgtccagaaggtacgaaa

SEQ ID NO: 12162 - DNA, 25 bp, probe
aaagagattgtccagaaggtacgaa

SEQ ID NO: 12163 - DNA, 25 bp, probe
actttggacagattaagggcttcat

SEQ ID NO: 12164 - DNA, 25 bp, probe
agactttggacagattaagggcttc

SEQ ID NO: 12165 - DNA, 25 bp, probe
gactttggacagattaagggcttca

SEQ ID NO: 12166 - DNA, 25 bp, probe
cagactttggacagattaagggctt

SEQ ID NO: 12167 - DNA, 25 bp, probe
caaagagattgtccagaaggtacga

SEQ ID NO: 12168 - DNA, 25 bp, probe
ttggacagattaagggcttcattcg

SEQ ID NO: 12169 - DNA, 25 bp, probe
caataacttggagaagctggtggag

SEQ ID NO: 12170 - DNA, 25 bp, probe
cccaaagagattgtccagaaggtac

SEQ ID NO: 12171 - DNA, 25 bp, probe
ccaaagagattgtccagaaggtacg

SEQ ID NO: 12172 - DNA, 25 bp, probe
aacagtatgccaataacttggagaa

SEQ ID NO: 12173 - DNA, 25 bp, probe
agattgtccagaaggtacgaaatgg

SEQ ID NO: 12174 - DNA, 25 bp, probe
acagtatgccaataacttggagaag

SEQ ID NO: 12175 - DNA, 25 bp, probe
gaacagtatgccaataacttggaga

SEQ ID NO: 12176 - DNA, 25 bp, probe
ctctaccaaatcctaccccattcag

SEQ ID NO: 12177 - DNA, 25 bp, probe
atggaacagtatgccaataacttgg

SEQ ID NO: 12178 - DNA, 25 bp, probe
attgtccagaaggtacgaaatggtc

SEQ ID NO: 12179 - DNA, 25 bp, probe
gattgtccagaaggtacgaaatggt

SEQ ID NO: 12180 - DNA, 25 bp, probe
aataacttggagaagctggtggagg

SEQ ID NO: 12181 - DNA, 25 bp, probe
ggaacagtatgccaataacttggag

SEQ ID NO: 12182 - DNA, 25 bp, probe
cagtatgccaataacttggagaagc

SEQ ID NO: 12183 - DNA, 25 bp, probe
ctaccaaatcctaccccattcagtg

SEQ ID NO: 12184 - DNA, 25 bp, probe
tctaccaaatcctaccccattcagt

SEQ ID NO: 12185 - DNA, 25 bp, probe
tggaacagtatgccaataacttgga

SEQ ID NO: 12186 - DNA, 25 bp, probe
cgtctatagctttgggatcatcctg

SEQ ID NO: 12187 - DNA, 25 bp, probe
gtatgccaataacttggagaagctg

SEQ ID NO: 12188 - DNA, 25 bp, probe
agtatgccaataacttggagaagct

SEQ ID NO: 12189 - DNA, 25 bp, probe
gtctatagctttgggatcatcctgc

SEQ ID NO: 12190 - DNA, 25 bp, probe
acgtctatagctttgggatcatcct

SEQ ID NO: 12191 - DNA, 25 bp, probe
acccaactgaatgaagagctagttt

SEQ ID NO: 12192 - DNA, 25 bp, probe
tggacagattaagggcttcattcgg

SEQ ID NO: 12193 - DNA, 25 bp, probe
gaagctctgctctaccaaatcctac

SEQ ID NO: 12194 - DNA, 25 bp, probe
tctatagctttgggatcatcctgca

SEQ ID NO: 12195 - DNA, 25 bp, probe
gacccaactgaatgaagagctagtt

SEQ ID NO: 12196 - DNA, 25 bp, probe
ttgtccagaaggtacgaaatggtca

SEQ ID NO: 12197 - DNA, 25 bp, probe
gcatggaacagtatgccaataactt

SEQ ID NO: 12198 - DNA, 25 bp, probe
ataacttggagaagctggtggagga

SEQ ID NO: 12199 - DNA, 25 bp, probe
tgaagctctgctctaccaaatccta

SEQ ID NO: 12200 - DNA, 25 bp, probe
gatatgtccttaggtcctggtctac

SEQ ID NO: 12201 - DNA, 25 bp, probe
agatatgtccttaggtcctggtcta

SEQ ID NO: 12202 - DNA, 25 bp, probe
gtaccagagtgtaacaaccttgatc

SEQ ID NO: 12203 - DNA, 25 bp, probe
cttgtccagatatgtccttaggtcc

SEQ ID NO: 12204 - DNA, 25 bp, probe
ttgtccagatatgtccttaggtcct

SEQ ID NO: 12205 - DNA, 25 bp, probe
atatgtccttaggtcctggtctaca

SEQ ID NO: 12206 - DNA, 25 bp, probe
gtgccttgtccagatatgtccttag

SEQ ID NO: 12207 - DNA, 25 bp, probe
taccagagtgtaacaaccttgatcg

SEQ ID NO: 12208 - DNA, 25 bp, probe
ccttgtccagatatgtccttaggtc

SEQ ID NO: 12209 - DNA, 25 bp, probe
cagatatgtccttaggtcctggtct

SEQ ID NO: 12210 - DNA, 25 bp, probe
ccagagtgtaacaaccttgatcgtt

SEQ ID NO: 12211 - DNA, 25 bp, probe
tgtccagatatgtccttaggtcctg

SEQ ID NO: 12212 - DNA, 25 bp, probe
agagtgtaacaaccttgatcgtttc

SEQ ID NO: 12213 - DNA, 25 bp, probe
cagagtgtaacaaccttgatcgttt

SEQ ID NO: 12214 - DNA, 25 bp, probe
ggtgccttgtccagatatgtcctta

SEQ ID NO: 12215 - DNA, 25 bp, probe
tatgtccttaggtcctggtctacat

SEQ ID NO: 12216 - DNA, 25 bp, probe
cttaggtcctggtctacatgctcaa

SEQ ID NO: 12217 - DNA, 25 bp, probe
accagagtgtaacaaccttgatcgt

SEQ ID NO: 12218 - DNA, 25 bp, probe
gagtgtaacaaccttgatcgtttcg

SEQ ID NO: 12219 - DNA, 25 bp, probe
gccttgtccagatatgtccttaggt

SEQ ID NO: 12220 - DNA, 25 bp, probe
tgccttgtccagatatgtccttagg

SEQ ID NO: 12221 - DNA, 25 bp, probe
ttaggtcctggtctacatgctcaaa

SEQ ID NO: 12222 - DNA, 25 bp, probe
atgtccttaggtcctggtctacatg

SEQ ID NO: 12223 - DNA, 25 bp, probe
agtgtaacaaccttgatcgtttcgg

SEQ ID NO: 12224 - DNA, 25 bp, probe
ctacatgctcaaacaccagggttac

SEQ ID NO: 12225 - DNA, 25 bp, probe
caaacaccagggttaccttgatctc

SEQ ID NO: 12226 - DNA, 25 bp, probe
taggtcctggtctacatgctcaaac

SEQ ID NO: 12227 - DNA, 25 bp, probe
tctacatgctcaaacaccagggtta

SEQ ID NO: 12228 - DNA, 25 bp, probe
tccttaggtcctggtctacatgctc

SEQ ID NO: 12229 - DNA, 25 bp, probe
ccttaggtcctggtctacatgctca

SEQ ID NO: 12230 - DNA, 25 bp, probe
gtccttaggtcctggtctacatgct

SEQ ID NO: 12231 - DNA, 25 bp, probe
ctcaaacaccagggttaccttgatc

SEQ ID NO: 12232 - DNA, 25 bp, probe
aaacaccagggttaccttgatctcc

SEQ ID NO: 12233 - DNA, 25 bp, probe
gtaacaaccttgatcgtttcggctg

SEQ ID NO: 12234 - DNA, 25 bp, probe
tcaaacaccagggttaccttgatct

SEQ ID NO: 12235 - DNA, 25 bp, probe
ggtaccagagtgtaacaaccttgat

SEQ ID NO: 12236 - DNA, 25 bp, probe
tacatgctcaaacaccagggttacc

SEQ ID NO: 12237 - DNA, 25 bp, probe
gtgtaacaaccttgatcgtttcggc

SEQ ID NO: 12238 - DNA, 25 bp, probe
tgtaacaaccttgatcgtttcggct

SEQ ID NO: 12239 - DNA, 25 bp, probe
gtctacatgctcaaacaccagggtt

SEQ ID NO: 12240 - DNA, 25 bp, probe
cagcccaatcaggtcaaagattttg

SEQ ID NO: 12241 - DNA, 25 bp, probe
ccagatatgtccttaggtcctggtc

SEQ ID NO: 12242 - DNA, 25 bp, probe
gtccagatatgtccttaggtcctgg

SEQ ID NO: 12243 - DNA, 25 bp, probe
tccagatatgtccttaggtcctggt

SEQ ID NO: 12244 - DNA, 25 bp, probe
catggccttcctacacacactagag

SEQ ID NO: 12245 - DNA, 25 bp, probe
cgtatggatccctctacaatgtact

SEQ ID NO: 12246 - DNA, 25 bp, probe
gtatggatccctctacaatgtacta

SEQ ID NO: 12247 - DNA, 25 bp, probe
ccgtatggatccctctacaatgtac

SEQ ID NO: 12248 - DNA, 25 bp, probe
aatgcagtgaatgaacacgggaatg

SEQ ID NO: 12249 - DNA, 25 bp, probe
caatgcagtgaatgaacacgggaat

SEQ ID NO: 12250 - DNA, 25 bp, probe
gccgtatggatccctctacaatgta

SEQ ID NO: 12251 - DNA, 25 bp, probe
atcaatgcagtgaatgaacacggga

SEQ ID NO: 12252 - DNA, 25 bp, probe
gatgccgtatggatccctctacaat

SEQ ID NO: 12253 - DNA, 25 bp, probe
atgccgtatggatccctctacaatg

SEQ ID NO: 12254 - DNA, 25 bp, probe
tgccgtatggatccctctacaatgt

SEQ ID NO: 12255 - DNA, 25 bp, probe
taaccagtcactattgatggacatt

SEQ ID NO: 12256 - DNA, 25 bp, probe
ttaaccagtcactattgatggacat

SEQ ID NO: 12257 - DNA, 25 bp, probe
tattgatggacatttgggttgtttc

SEQ ID NO: 12258 - DNA, 25 bp, probe
ctattgatggacatttgggttgttt

SEQ ID NO: 12259 - DNA, 25 bp, probe
tcactattgatggacatttgggttg

SEQ ID NO: 12260 - DNA, 25 bp, probe
actattgatggacatttgggttgtt

SEQ ID NO: 12261 - DNA, 25 bp, probe
ccgatgtgtatttaaccagtcacta

SEQ ID NO: 12262 - DNA, 25 bp, probe
gtcactattgatggacatttgggtt

SEQ ID NO: 12263 - DNA, 25 bp, probe
cactattgatggacatttgggttgt

SEQ ID NO: 12264 - DNA, 25 bp, probe
cagaccgatgtgtatttaaccagtc

SEQ ID NO: 12265 - DNA, 25 bp, probe
ccagaccgatgtgtatttaaccagt

SEQ ID NO: 12266 - DNA, 25 bp, probe
cgatgtgtatttaaccagtcactat

SEQ ID NO: 12267 - DNA, 25 bp, probe
cagtcactattgatggacatttggg

SEQ ID NO: 12268 - DNA, 25 bp, probe
tttaaccagtcactattgatggaca

SEQ ID NO: 12269 - DNA, 25 bp, probe
aaccagtcactattgatggacattt

SEQ ID NO: 12270 - DNA, 25 bp, probe
agaccgatgtgtatttaaccagtca

SEQ ID NO: 12271 - DNA, 25 bp, probe
agtcactattgatggacatttgggt

SEQ ID NO: 12272 - DNA, 25 bp, probe
accagtcactattgatggacatttg

SEQ ID NO: 12273 - DNA, 25 bp, probe
gaccgatgtgtatttaaccagtcac

SEQ ID NO: 12274 - DNA, 25 bp, probe
atttaaccagtcactattgatggac

SEQ ID NO: 12275 - DNA, 25 bp, probe
accgatgtgtatttaaccagtcact

SEQ ID NO: 12276 - DNA, 25 bp, probe
ccagtcactattgatggacatttgg

SEQ ID NO: 12277 - DNA, 25 bp, probe
tgtgtatttaaccagtcactattga

SEQ ID NO: 12278 - DNA, 25 bp, probe
attgatggacatttgggttgtttcc

SEQ ID NO: 12279 - DNA, 25 bp, probe
tgtatttaaccagtcactattgatg

SEQ ID NO: 12280 - DNA, 25 bp, probe
gtatttaaccagtcactattgatgg

SEQ ID NO: 12281 - DNA, 25 bp, probe
gccagaccgatgtgtatttaaccag

SEQ ID NO: 12282 - DNA, 25 bp, probe
cagccagaccgatgtgtatttaacc

SEQ ID NO: 12283 - DNA, 25 bp, probe
atgtgtatttaaccagtcactattg

SEQ ID NO: 12284 - DNA, 25 bp, probe
tatttaaccagtcactattgatgga

SEQ ID NO: 12285 - DNA, 25 bp, probe
gtgtatttaaccagtcactattgat

SEQ ID NO: 12286 - DNA, 25 bp, probe
gatgtgtatttaaccagtcactatt

SEQ ID NO: 12287 - DNA, 25 bp, probe
agccagaccgatgtgtatttaacca

SEQ ID NO: 12288 - DNA, 25 bp, probe
gcagccagaccgatgtgtatttaac

SEQ ID NO: 12289 - DNA, 25 bp, probe
ttgatggacatttgggttgtttccc

SEQ ID NO: 12290 - DNA, 25 bp, probe
tgcagccagaccgatgtgtatttaa

SEQ ID NO: 12291 - DNA, 25 bp, probe
ttgcagccagaccgatgtgtattta

SEQ ID NO: 12292 - DNA, 25 bp, probe
ttgttaccataaataatggcatagt

SEQ ID NO: 12293 - DNA, 25 bp, probe
tgttaccataaataatggcatagta

SEQ ID NO: 12294 - DNA, 25 bp, probe
ttttgttcccttctgtctgctcgaa

SEQ ID NO: 12295 - DNA, 25 bp, probe
tttgttaccataaataatggcatag

SEQ ID NO: 12296 - DNA, 25 bp, probe
tattccattttgcagccagaccgat

SEQ ID NO: 12297 - DNA, 25 bp, probe
attttgcagccagaccgatgtgtat

SEQ ID NO: 12298 - DNA, 25 bp, probe
gttaccataaataatggcatagtaa

SEQ ID NO: 12299 - DNA, 25 bp, probe
aatgttagattcctcttgcctctct

SEQ ID NO: 12300 - DNA, 25 bp, probe
gtgccagatgttaggagaactacta

SEQ ID NO: 12301 - DNA, 25 bp, probe
atgttagattcctcttgcctctctc

SEQ ID NO: 12302 - DNA, 25 bp, probe
tgccagatgttaggagaactactaa

SEQ ID NO: 12303 - DNA, 25 bp, probe
gttagattcctcttgcctctctcag

SEQ ID NO: 12304 - DNA, 25 bp, probe
tagtccgaatgttagattcctcttg

SEQ ID NO: 12305 - DNA, 25 bp, probe
tcttagtccgaatgttagattcctc

SEQ ID NO: 12306 - DNA, 25 bp, probe
cttagtccgaatgttagattcctct

SEQ ID NO: 12307 - DNA, 25 bp, probe
ttagtccgaatgttagattcctctt

SEQ ID NO: 12308 - DNA, 25 bp, probe
ttcttagtccgaatgttagattcct

SEQ ID NO: 12309 - DNA, 25 bp, probe
gaatgttagattcctcttgcctctc

SEQ ID NO: 12310 - DNA, 25 bp, probe
tgaagatttaccataagggactgtg

SEQ ID NO: 12311 - DNA, 25 bp, probe
cttgcctctctcaggagtatcttac

SEQ ID NO: 12312 - DNA, 25 bp, probe
tcttgcctctctcaggagtatctta

SEQ ID NO: 12313 - DNA, 25 bp, probe
ttgaagatttaccataagggactgt

SEQ ID NO: 12314 - DNA, 25 bp, probe
tgttagattcctcttgcctctctca

SEQ ID NO: 12315 - DNA, 25 bp, probe
ttcctgtttcttagtccgaatgtta

SEQ ID NO: 12316 - DNA, 25 bp, probe
tcctgtttcttagtccgaatgttag

SEQ ID NO: 12317 - DNA, 25 bp, probe
cctgtttcttagtccgaatgttaga

SEQ ID NO: 12318 - DNA, 25 bp, probe
tgtgccagatgttaggagaactact

SEQ ID NO: 12319 - DNA, 25 bp, probe
cttcctgtttcttagtccgaatgtt

SEQ ID NO: 12320 - DNA, 25 bp, probe
gaagatttaccataagggactgtgc

SEQ ID NO: 12321 - DNA, 25 bp, probe
attgaagatttaccataagggactg

SEQ ID NO: 12322 - DNA, 25 bp, probe
ctgtttcttagtccgaatgttagat

SEQ ID NO: 12323 - DNA, 25 bp, probe
ctgtgccagatgttaggagaactac

SEQ ID NO: 12324 - DNA, 25 bp, probe
atgttaggagaactactaaagtgcc

SEQ ID NO: 12325 - DNA, 25 bp, probe
gccagatgttaggagaactactaaa

SEQ ID NO: 12326 - DNA, 25 bp, probe
tgtttcttagtccgaatgttagatt

SEQ ID NO: 12327 - DNA, 25 bp, probe
cgaatgttagattcctcttgcctct

SEQ ID NO: 12328 - DNA, 25 bp, probe
actgtgccagatgttaggagaacta

SEQ ID NO: 12329 - DNA, 25 bp, probe
ttgcctctctcaggagtatcttacc

SEQ ID NO: 12330 - DNA, 25 bp, probe
ctcttgcctctctcaggagtatctt

SEQ ID NO: 12331 - DNA, 25 bp, probe
gatgttaggagaactactaaagtgc

SEQ ID NO: 12332 - DNA, 25 bp, probe
tgttaggagaactactaaagtgcct

SEQ ID NO: 12333 - DNA, 25 bp, probe
agtccgaatgttagattcctcttgc

SEQ ID NO: 12334 - DNA, 25 bp, probe
aagatttaccataagggactgtgcc

SEQ ID NO: 12335 - DNA, 25 bp, probe
ttagattcctcttgcctctctcagg

SEQ ID NO: 12336 - DNA, 25 bp, probe
ccagatgttaggagaactactaaag

SEQ ID NO: 12337 - DNA, 25 bp, probe
tattgaagatttaccataagggact

SEQ ID NO: 12338 - DNA, 25 bp, probe
tttcttagtccgaatgttagattcc

SEQ ID NO: 12339 - DNA, 25 bp, probe
ccgaatgttagattcctcttgcctc

SEQ ID NO: 12340 - DNA, 25 bp, probe
tgcctctctcaggagtatcttacct

SEQ ID NO: 12341 - DNA, 25 bp, probe
gcttcctgtttcttagtccgaatgt

SEQ ID NO: 12342 - DNA, 25 bp, probe
agatgttaggagaactactaaagtg

SEQ ID NO: 12343 - DNA, 25 bp, probe
tccacttcttgatatgactgagatt

SEQ ID NO: 12344 - DNA, 25 bp, probe
ttccacttcttgatatgactgagat

SEQ ID NO: 12345 - DNA, 25 bp, probe
tgtttccacttcttgatatgactga

SEQ ID NO: 12346 - DNA, 25 bp, probe
gtttccacttcttgatatgactgag

SEQ ID NO: 12347 - DNA, 25 bp, probe
ttgtttccacttcttgatatgactg

SEQ ID NO: 12348 - DNA, 25 bp, probe
tttccacttcttgatatgactgaga

SEQ ID NO: 12349 - DNA, 25 bp, probe
attgtttccacttcttgatatgact

SEQ ID NO: 12350 - DNA, 25 bp, probe
cattgtttccacttcttgatatgac

SEQ ID NO: 12351 - DNA, 25 bp, probe
acattgtttccacttcttgatatga

SEQ ID NO: 12352 - DNA, 25 bp, probe
ccacttcttgatatgactgagattt

SEQ ID NO: 12353 - DNA, 25 bp, probe
agtacattgtttccacttcttgata

SEQ ID NO: 12354 - DNA, 25 bp, probe
tacattgtttccacttcttgatatg

SEQ ID NO: 12355 - DNA, 25 bp, probe
ttgtgataagtacattgtttccact

SEQ ID NO: 12356 - DNA, 25 bp, probe
gtacattgtttccacttcttgatat

SEQ ID NO: 12357 - DNA, 25 bp, probe
aggaaatttgtagcatcaactagaa

SEQ ID NO: 12358 - DNA, 25 bp, probe
aaggaaatttgtagcatcaactaga

SEQ ID NO: 12359 - DNA, 25 bp, probe
attgtgataagtacattgtttccac

SEQ ID NO: 12360 - DNA, 25 bp, probe
tctagtgataaggaaatttgtagca

SEQ ID NO: 12361 - DNA, 25 bp, probe
gatgaaattgttgatactttaggtg

SEQ ID NO: 12362 - DNA, 25 bp, probe
agatgaaattgttgatactttaggt

SEQ ID NO: 12363 - DNA, 25 bp, probe
aagtacattgtttccacttcttgat

SEQ ID NO: 12364 - DNA, 25 bp, probe
cacttcttgatatgactgagattta

SEQ ID NO: 12365 - DNA, 25 bp, probe
ggaaatttgtagcatcaactagaat

SEQ ID NO: 12366 - DNA, 25 bp, probe
gataaggaaatttgtagcatcaact

SEQ ID NO: 12367 - DNA, 25 bp, probe
gcatcaactagaataatctacattg

SEQ ID NO: 12368 - DNA, 25 bp, probe
tgtgataagtacattgtttccactt

SEQ ID NO: 12369 - DNA, 25 bp, probe
taagtacattgtttccacttcttga

SEQ ID NO: 12370 - DNA, 25 bp, probe
gtgataagtacattgtttccacttc

SEQ ID NO: 12371 - DNA, 25 bp, probe
tgataagtacattgtttccacttct

SEQ ID NO: 12372 - DNA, 25 bp, probe
agcatcaactagaataatctacatt

SEQ ID NO: 12373 - DNA, 25 bp, probe
tctacattgatagcatttattgtga

SEQ ID NO: 12374 - DNA, 25 bp, probe
ctagtgataaggaaatttgtagcat

SEQ ID NO: 12375 - DNA, 25 bp, probe
taaggaaatttgtagcatcaactag

SEQ ID NO: 12376 - DNA, 25 bp, probe
tagtgataaggaaatttgtagcatc

SEQ ID NO: 12377 - DNA, 25 bp, probe
tattgtgataagtacattgtttcca

SEQ ID NO: 12378 - DNA, 25 bp, probe
gtagcatcaactagaataatctaca

SEQ ID NO: 12379 - DNA, 25 bp, probe
tgtagcatcaactagaataatctac

SEQ ID NO: 12380 - DNA, 25 bp, probe
atctagtgataaggaaatttgtagc

SEQ ID NO: 12381 - DNA, 25 bp, probe
agtgataaggaaatttgtagcatca

SEQ ID NO: 12382 - DNA, 25 bp, probe
ataagtacattgtttccacttcttg

SEQ ID NO: 12383 - DNA, 25 bp, probe
gcatttattgtgataagtacattgt

SEQ ID NO: 12384 - DNA, 25 bp, probe
tttgtagcatcaactagaataatct

SEQ ID NO: 12385 - DNA, 25 bp, probe
gataagtacattgtttccacttctt

SEQ ID NO: 12386 - DNA, 25 bp, probe
tgataaggaaatttgtagcatcaac

SEQ ID NO: 12387 - DNA, 25 bp, probe
aagaatggggtcgtcaaagagtttt

SEQ ID NO: 12388 - DNA, 25 bp, probe
gaagaatggggtcgtcaaagagttt

SEQ ID NO: 12389 - DNA, 25 bp, probe
ggaagaatggggtcgtcaaagagtt

SEQ ID NO: 12390 - DNA, 25 bp, probe
ggctgagaagaggaattgtaatgat

SEQ ID NO: 12391 - DNA, 25 bp, probe
aggctgagaagaggaattgtaatga

SEQ ID NO: 12392 - DNA, 25 bp, probe
gctgagaagaggaattgtaatgatc

SEQ ID NO: 12393 - DNA, 25 bp, probe
caggctgagaagaggaattgtaatg

SEQ ID NO: 12394 - DNA, 25 bp, probe
agtgagttctaccaatgtattgtcc

SEQ ID NO: 12395 - DNA, 25 bp, probe
tgagttctaccaatgtattgtccac

SEQ ID NO: 12396 - DNA, 25 bp, probe
gtgagttctaccaatgtattgtcca

SEQ ID NO: 12397 - DNA, 25 bp, probe
caatgtattgtccacagtcagttac

SEQ ID NO: 12398 - DNA, 25 bp, probe
ttctaccaatgtattgtccacagtc

SEQ ID NO: 12399 - DNA, 25 bp, probe
agttctaccaatgtattgtccacag

SEQ ID NO: 12400 - DNA, 25 bp, probe
gagttctaccaatgtattgtccaca

SEQ ID NO: 12401 - DNA, 25 bp, probe
ccaatgtattgtccacagtcagtta

SEQ ID NO: 12402 - DNA, 25 bp, probe
gttctaccaatgtattgtccacagt

SEQ ID NO: 12403 - DNA, 25 bp, probe
gtattgtccacagtcagttacagac

SEQ ID NO: 12404 - DNA, 25 bp, probe
ctaccaatgtattgtccacagtcag

SEQ ID NO: 12405 - DNA, 25 bp, probe
tctaccaatgtattgtccacagtca

SEQ ID NO: 12406 - DNA, 25 bp, probe
acaggctgagaagaggaattgtaat

SEQ ID NO: 12407 - DNA, 25 bp, probe
tagtgagttctaccaatgtattgtc

SEQ ID NO: 12408 - DNA, 25 bp, probe
taccaatgtattgtccacagtcagt

SEQ ID NO: 12409 - DNA, 25 bp, probe
aacaggctgagaagaggaattgtaa

SEQ ID NO: 12410 - DNA, 25 bp, probe
taaacagaccaaacaataaacaggc

SEQ ID NO: 12411 - DNA, 25 bp, probe
gagaaaccataaacagaccaaacaa

SEQ ID NO: 12412 - DNA, 25 bp, probe
taagaagcctgagaaaccataaaca

SEQ ID NO: 12413 - DNA, 25 bp, probe
tattgtccacagtcagttacagacc

SEQ ID NO: 12414 - DNA, 25 bp, probe
agaaaccataaacagaccaaacaat

SEQ ID NO: 12415 - DNA, 25 bp, probe
tgagaaaccataaacagaccaaaca

SEQ ID NO: 12416 - DNA, 25 bp, probe
agagaatttgtaacctgattgtgga

SEQ ID NO: 12417 - DNA, 25 bp, probe
attagtggcagagaatttgtaacct

SEQ ID NO: 12418 - DNA, 25 bp, probe
cattagtggcagagaatttgtaacc

SEQ ID NO: 12419 - DNA, 25 bp, probe
ataagaagcctgagaaaccataaac

SEQ ID NO: 12420 - DNA, 25 bp, probe
aataaacaggctgagaagaggaatt

SEQ ID NO: 12421 - DNA, 25 bp, probe
aatttgtaacctgattgtggaaagc

SEQ ID NO: 12422 - DNA, 25 bp, probe
gagaatttgtaacctgattgtggaa

SEQ ID NO: 12423 - DNA, 25 bp, probe
caaacaataaacaggctgagaagag

SEQ ID NO: 12424 - DNA, 25 bp, probe
aatgtattgtccacagtcagttaca

SEQ ID NO: 12425 - DNA, 25 bp, probe
tcattagtggcagagaatttgtaac

SEQ ID NO: 12426 - DNA, 25 bp, probe
atgtattgtccacagtcagttacag

SEQ ID NO: 12427 - DNA, 25 bp, probe
ataaacaggctgagaagaggaattg

SEQ ID NO: 12428 - DNA, 25 bp, probe
caataaacaggctgagaagaggaat

SEQ ID NO: 12429 - DNA, 25 bp, probe
agaatttgtaacctgattgtggaaa

SEQ ID NO: 12430 - DNA, 25 bp, probe
atttgtaacctgattgtggaaagca

SEQ ID NO: 12431 - DNA, 25 bp, probe
gaatttgtaacctgattgtggaaag

SEQ ID NO: 12432 - DNA, 25 bp, probe
accaatgtattgtccacagtcagtt

SEQ ID NO: 12433 - DNA, 25 bp, probe
caaattccttgttctactctttccc

SEQ ID NO: 12434 - DNA, 25 bp, probe
gaggaagggaaacaggaagtgaaag

SEQ ID NO: 12435 - DNA, 25 bp, probe
agaggaagggaaacaggaagtgaaa

SEQ ID NO: 12436 - DNA, 25 bp, probe
taaattgagtgttcaaagccattgg

SEQ ID NO: 12437 - DNA, 25 bp, probe
ttaaattgagtgttcaaagccattg

SEQ ID NO: 12438 - DNA, 25 bp, probe
gagaggaagggaaacaggaagtgaa

SEQ ID NO: 12439 - DNA, 25 bp, probe
attaaattgagtgttcaaagccatt

SEQ ID NO: 12440 - DNA, 25 bp, probe
aattaaattgagtgttcaaagccat

SEQ ID NO: 12441 - DNA, 25 bp, probe
aggaagggaaacaggaagtgaaagg

SEQ ID NO: 12442 - DNA, 25 bp, probe
aaattgagtgttcaaagccattggg

SEQ ID NO: 12443 - DNA, 25 bp, probe
cagagaggaagggaaacaggaagtg

SEQ ID NO: 12444 - DNA, 25 bp, probe
agagaggaagggaaacaggaagtga

SEQ ID NO: 12445 - DNA, 25 bp, probe
aattgagtgttcaaagccattgggc

SEQ ID NO: 12446 - DNA, 25 bp, probe
attgtgacattgttcttacttgatt

SEQ ID NO: 12447 - DNA, 25 bp, probe
aattgtgacattgttcttacttgat

SEQ ID NO: 12448 - DNA, 25 bp, probe
taaatgcttggcttctgtgtatcta

SEQ ID NO: 12449 - DNA, 25 bp, probe
aataaatgcttggcttctgtgtatc

SEQ ID NO: 12450 - DNA, 25 bp, probe
gataataaatgcttggcttctgtgt

SEQ ID NO: 12451 - DNA, 25 bp, probe
tgataataaatgcttggcttctgtg

SEQ ID NO: 12452 - DNA, 25 bp, probe
ataaatgcttggcttctgtgtatct

SEQ ID NO: 12453 - DNA, 25 bp, probe
aatgcttggcttctgtgtatctagg

SEQ ID NO: 12454 - DNA, 25 bp, probe
ttgataataaatgcttggcttctgt

SEQ ID NO: 12455 - DNA, 25 bp, probe
taataaatgcttggcttctgtgtat

SEQ ID NO: 12456 - DNA, 25 bp, probe
ataataaatgcttggcttctgtgta

SEQ ID NO: 12457 - DNA, 25 bp, probe
ttgtgacattgttcttacttgatta

SEQ ID NO: 12458 - DNA, 25 bp, probe
aaatgcttggcttctgtgtatctag

SEQ ID NO: 12459 - DNA, 25 bp, probe
atgatacagacattggcttgttggt

SEQ ID NO: 12460 - DNA, 25 bp, probe
attgataataaatgcttggcttctg

SEQ ID NO: 12461 - DNA, 25 bp, probe
atggcagtcatagtattaatcagaa

SEQ ID NO: 12462 - DNA, 25 bp, probe
aatggcagtcatagtattaatcaga

SEQ ID NO: 12463 - DNA, 25 bp, probe
tgaaattgttacatgaatggcagtc

SEQ ID NO: 12464 - DNA, 25 bp, probe
tgaatggcagtcatagtattaatca

SEQ ID NO: 12465 - DNA, 25 bp, probe
tgtgacattgttcttacttgattat

SEQ ID NO: 12466 - DNA, 25 bp, probe
tgatacagacattggcttgttggtt

SEQ ID NO: 12467 - DNA, 25 bp, probe
catgatacagacattggcttgttgg

SEQ ID NO: 12468 - DNA, 25 bp, probe
tttagaagtccttcccatgatacag

SEQ ID NO: 12469 - DNA, 25 bp, probe
atgaaattgttacatgaatggcagt

SEQ ID NO: 12470 - DNA, 25 bp, probe
ttagaagtccttcccatgatacaga

SEQ ID NO: 12471 - DNA, 25 bp, probe
gaatggcagtcatagtattaatcag

SEQ ID NO: 12472 - DNA, 25 bp, probe
tgttacatgaatggcagtcatagta

SEQ ID NO: 12473 - DNA, 25 bp, probe
ttgttacatgaatggcagtcatagt

SEQ ID NO: 12474 - DNA, 25 bp, probe
attgttacatgaatggcagtcatag

SEQ ID NO: 12475 - DNA, 25 bp, probe
gaaattgttacatgaatggcagtca

SEQ ID NO: 12476 - DNA, 25 bp, probe
aatgaaattgttacatgaatggcag

SEQ ID NO: 12477 - DNA, 25 bp, probe
aattgttacatgaatggcagtcata

SEQ ID NO: 12478 - DNA, 25 bp, probe
cttggcttctgtgtatctaggtgga

SEQ ID NO: 12479 - DNA, 25 bp, probe
atgcttggcttctgtgtatctaggt

SEQ ID NO: 12480 - DNA, 25 bp, probe
gttacatgaatggcagtcatagtat

SEQ ID NO: 12481 - DNA, 25 bp, probe
aaatgaaattgttacatgaatggca

SEQ ID NO: 12482 - DNA, 25 bp, probe
aattgataataaatgcttggcttct

SEQ ID NO: 12483 - DNA, 25 bp, probe
ccatgatacagacattggcttgttg

SEQ ID NO: 12484 - DNA, 25 bp, probe
ttggcttctgtgtatctaggtggac

SEQ ID NO: 12485 - DNA, 25 bp, probe
gatacagacattggcttgttggttt

SEQ ID NO: 12486 - DNA, 25 bp, probe
tagaagtccttcccatgatacagac

SEQ ID NO: 12487 - DNA, 25 bp, probe
gaaatgaaattgttacatgaatggc

SEQ ID NO: 12488 - DNA, 25 bp, probe
tgtatctaggtggacctcacttgtt

SEQ ID NO: 12489 - DNA, 25 bp, probe
acatgaatggcagtcatagtattaa

SEQ ID NO: 12490 - DNA, 25 bp, probe
ctataaggaagccacacacataacc

SEQ ID NO: 12491 - DNA, 25 bp, probe
acagtggcatattctcatggtacat

SEQ ID NO: 12492 - DNA, 25 bp, probe
aacagtggcatattctcatggtaca

SEQ ID NO: 12493 - DNA, 25 bp, probe
ctagaagggaaacagtggcatattc

SEQ ID NO: 12494 - DNA, 25 bp, probe
gaaacagtggcatattctcatggta

SEQ ID NO: 12495 - DNA, 25 bp, probe
gctataaggaagccacacacataac

SEQ ID NO: 12496 - DNA, 25 bp, probe
aaacagtggcatattctcatggtac

SEQ ID NO: 12497 - DNA, 25 bp, probe
tataaggaagccacacacataaccc

SEQ ID NO: 12498 - DNA, 25 bp, probe
tccttgtttcctacccaactagaag

SEQ ID NO: 12499 - DNA, 25 bp, probe
ctccttgtttcctacccaactagaa

SEQ ID NO: 12500 - DNA, 25 bp, probe
aagggaaacagtggcatattctcat

SEQ ID NO: 12501 - DNA, 25 bp, probe
actagaagggaaacagtggcatatt

SEQ ID NO: 12502 - DNA, 25 bp, probe
aactagaagggaaacagtggcatat

SEQ ID NO: 12503 - DNA, 25 bp, probe
gatagaagctataaggaagccacac

SEQ ID NO: 12504 - DNA, 25 bp, probe
agatagaagctataaggaagccaca

SEQ ID NO: 12505 - DNA, 25 bp, probe
tagatagaagctataaggaagccac

SEQ ID NO: 12506 - DNA, 25 bp, probe
ctagatagaagctataaggaagcca

SEQ ID NO: 12507 - DNA, 25 bp, probe
atagaagctataaggaagccacaca

SEQ ID NO: 12508 - DNA, 25 bp, probe
gaagggaaacagtggcatattctca

SEQ ID NO: 12509 - DNA, 25 bp, probe
agctataaggaagccacacacataa

SEQ ID NO: 12510 - DNA, 25 bp, probe
aagctataaggaagccacacacata

SEQ ID NO: 12511 - DNA, 25 bp, probe
tattctcatggtacatggttgtctg

SEQ ID NO: 12512 - DNA, 25 bp, probe
atattctcatggtacatggttgtct

SEQ ID NO: 12513 - DNA, 25 bp, probe
catattctcatggtacatggttgtc

SEQ ID NO: 12514 - DNA, 25 bp, probe
gtacatggttgtctgaaagccttac

SEQ ID NO: 12515 - DNA, 25 bp, probe
caactagaagggaaacagtggcata

SEQ ID NO: 12516 - DNA, 25 bp, probe
gcatattctcatggtacatggttgt

SEQ ID NO: 12517 - DNA, 25 bp, probe
tagaagctataaggaagccacacac

SEQ ID NO: 12518 - DNA, 25 bp, probe
cagtggcatattctcatggtacatg

SEQ ID NO: 12519 - DNA, 25 bp, probe
atggttgtctgaaagccttacctag

SEQ ID NO: 12520 - DNA, 25 bp, probe
attctcatggtacatggttgtctga

SEQ ID NO: 12521 - DNA, 25 bp, probe
ggcatattctcatggtacatggttg

SEQ ID NO: 12522 - DNA, 25 bp, probe
agggaaacagtggcatattctcatg

SEQ ID NO: 12523 - DNA, 25 bp, probe
tagaagggaaacagtggcatattct

SEQ ID NO: 12524 - DNA, 25 bp, probe
cctccttgtttcctacccaactaga

SEQ ID NO: 12525 - DNA, 25 bp, probe
tcctccttgtttcctacccaactag

SEQ ID NO: 12526 - DNA, 25 bp, probe
ttctcatggtacatggttgtctgaa

SEQ ID NO: 12527 - DNA, 25 bp, probe
tggcatattctcatggtacatggtt

SEQ ID NO: 12528 - DNA, 25 bp, probe
ggaaacagtggcatattctcatggt

SEQ ID NO: 12529 - DNA, 25 bp, probe
gtcctccttgtttcctacccaacta

SEQ ID NO: 12530 - DNA, 25 bp, probe
ggtacatggttgtctgaaagcctta

SEQ ID NO: 12531 - DNA, 25 bp, probe
tctagatagaagctataaggaagcc

SEQ ID NO: 12532 - DNA, 25 bp, probe
gaagctataaggaagccacacacat

SEQ ID NO: 12533 - DNA, 25 bp, probe
ggtctagatagaagctataaggaag

SEQ ID NO: 12534 - DNA, 25 bp, probe
cacaaccttattctccactcaacag

SEQ ID NO: 12535 - DNA, 25 bp, probe
ccatcaactagaagtgcttattact

SEQ ID NO: 12536 - DNA, 25 bp, probe
ccacaaccttattctccactcaaca

SEQ ID NO: 12537 - DNA, 25 bp, probe
agttacaatacagcagtttcctaca

SEQ ID NO: 12538 - DNA, 25 bp, probe
ttccaagttacaatacagcagtttc

SEQ ID NO: 12539 - DNA, 25 bp, probe
ttacaatacagcagtttcctacaga

SEQ ID NO: 12540 - DNA, 25 bp, probe
gttacaatacagcagtttcctacag

SEQ ID NO: 12541 - DNA, 25 bp, probe
tttccaagttacaatacagcagttt

SEQ ID NO: 12542 - DNA, 25 bp, probe
acaaccttattctccactcaacagc

SEQ ID NO: 12543 - DNA, 25 bp, probe
atttgcttatatctgaagggaggtg

SEQ ID NO: 12544 - DNA, 25 bp, probe
tacaatacagcagtttcctacagaa

SEQ ID NO: 12545 - DNA, 25 bp, probe
aagttacaatacagcagtttcctac

SEQ ID NO: 12546 - DNA, 25 bp, probe
caagttacaatacagcagtttccta

SEQ ID NO: 12547 - DNA, 25 bp, probe
ccaagttacaatacagcagtttcct

SEQ ID NO: 12548 - DNA, 25 bp, probe
tccaagttacaatacagcagtttcc

SEQ ID NO: 12549 - DNA, 25 bp, probe
tctttcccttctctttcctcagtag

SEQ ID NO: 12550 - DNA, 25 bp, probe
ctctttcccttctctttcctcagta

SEQ ID NO: 12551 - DNA, 25 bp, probe
ctggatgtttggtctgaaagagtta

SEQ ID NO: 12552 - DNA, 25 bp, probe
tatttgcttatatctgaagggaggt

SEQ ID NO: 12553 - DNA, 25 bp, probe
ggatgtttggtctgaaagagttact

SEQ ID NO: 12554 - DNA, 25 bp, probe
gatgtttggtctgaaagagttactt

SEQ ID NO: 12555 - DNA, 25 bp, probe
tggatgtttggtctgaaagagttac

SEQ ID NO: 12556 - DNA, 25 bp, probe
aatacagcagtttcctacagaacac

SEQ ID NO: 12557 - DNA, 25 bp, probe
caatacagcagtttcctacagaaca

SEQ ID NO: 12558 - DNA, 25 bp, probe
acaatacagcagtttcctacagaac

SEQ ID NO: 12559 - DNA, 25 bp, probe
ggaaagaagtggagagaaaggtttg

SEQ ID NO: 12560 - DNA, 25 bp, probe
aagatttgctcagtcaaggaaattc

SEQ ID NO: 12561 - DNA, 25 bp, probe
gaagatttgctcagtcaaggaaatt

SEQ ID NO: 12562 - DNA, 25 bp, probe
atttgctcagtcaaggaaattcaag

SEQ ID NO: 12563 - DNA, 25 bp, probe
gatttgctcagtcaaggaaattcaa

SEQ ID NO: 12564 - DNA, 25 bp, probe
tttgctcagtcaaggaaattcaagt

SEQ ID NO: 12565 - DNA, 25 bp, probe
agaagatttgctcagtcaaggaaat

SEQ ID NO: 12566 - DNA, 25 bp, probe
cagaagatttgctcagtcaaggaaa

SEQ ID NO: 12567 - DNA, 25 bp, probe
cccatcaactagaagtgcttattac

SEQ ID NO: 12568 - DNA, 25 bp, probe
ctctctttcccttctctttcctcag

SEQ ID NO: 12569 - DNA, 25 bp, probe
agatttgctcagtcaaggaaattca

SEQ ID NO: 12570 - DNA, 25 bp, probe
ttatttgcttatatctgaagggagg

SEQ ID NO: 12571 - DNA, 25 bp, probe
caaccttattctccactcaacagcc

SEQ ID NO: 12572 - DNA, 25 bp, probe
ctcagtcaaggaaattcaagtggtg

SEQ ID NO: 12573 - DNA, 25 bp, probe
tttgcttatatctgaagggaggtgg

SEQ ID NO: 12574 - DNA, 25 bp, probe
gaaagaagtggagagaaaggtttgc

SEQ ID NO: 12575 - DNA, 25 bp, probe
tttgtagaaagggcaagattatttg

SEQ ID NO: 12576 - DNA, 25 bp, probe
ttgctcagtcaaggaaattcaagtg

SEQ ID NO: 12577 - DNA, 25 bp, probe
ggtgagttcagtagctttggtatta

SEQ ID NO: 12578 - DNA, 25 bp, probe
atagaagtgtgatgtgagttgttgt

SEQ ID NO: 12579 - DNA, 25 bp, probe
aatagaagtgtgatgtgagttgttg

SEQ ID NO: 12580 - DNA, 25 bp, probe
gaagtgtgatgtgagttgttgttaa

SEQ ID NO: 12581 - DNA, 25 bp, probe
aagtgtgatgtgagttgttgttaag

SEQ ID NO: 12582 - DNA, 25 bp, probe
agaagtgtgatgtgagttgttgtta

SEQ ID NO: 12583 - DNA, 25 bp, probe
tagaagtgtgatgtgagttgttgtt

SEQ ID NO: 12584 - DNA, 25 bp, probe
gtgtgatgtgagttgttgttaagac

SEQ ID NO: 12585 - DNA, 25 bp, probe
agtgtgatgtgagttgttgttaaga

SEQ ID NO: 12586 - DNA, 25 bp, probe
caatagaagtgtgatgtgagttgtt

SEQ ID NO: 12587 - DNA, 25 bp, probe
gtgatgtgagttgttgttaagacag

SEQ ID NO: 12588 - DNA, 25 bp, probe
tgtgatgtgagttgttgttaagaca

SEQ ID NO: 12589 - DNA, 25 bp, probe
tacaatagaagtgtgatgtgagttg

SEQ ID NO: 12590 - DNA, 25 bp, probe
ctacaatagaagtgtgatgtgagtt

SEQ ID NO: 12591 - DNA, 25 bp, probe
tgatgtgagttgttgttaagacagc

SEQ ID NO: 12592 - DNA, 25 bp, probe
tctacaatagaagtgtgatgtgagt

SEQ ID NO: 12593 - DNA, 25 bp, probe
tttattcccttatctctgctgtctg

SEQ ID NO: 12594 - DNA, 25 bp, probe
gtttattcccttatctctgctgtct

SEQ ID NO: 12595 - DNA, 25 bp, probe
agtttattcccttatctctgctgtc

SEQ ID NO: 12596 - DNA, 25 bp, probe
ataaagtcatctcttctctgccttg

SEQ ID NO: 12597 - DNA, 25 bp, probe
gtgagttgttgttaagacagccatc

SEQ ID NO: 12598 - DNA, 25 bp, probe
gatgtgagttgttgttaagacagcc

SEQ ID NO: 12599 - DNA, 25 bp, probe
atctacaatagaagtgtgatgtgag

SEQ ID NO: 12600 - DNA, 25 bp, probe
tataaagtcatctcttctctgcctt

SEQ ID NO: 12601 - DNA, 25 bp, probe
agttgttgttaagacagccatccat

SEQ ID NO: 12602 - DNA, 25 bp, probe
gagtttattcccttatctctgctgt

SEQ ID NO: 12603 - DNA, 25 bp, probe
tgtgagttgttgttaagacagccat

SEQ ID NO: 12604 - DNA, 25 bp, probe
atgtgagttgttgttaagacagcca

SEQ ID NO: 12605 - DNA, 25 bp, probe
taaagtcatctcttctctgccttga

SEQ ID NO: 12606 - DNA, 25 bp, probe
agactctgttgatgtgataatttga

SEQ ID NO: 12607 - DNA, 25 bp, probe
ttattcccttatctctgctgtctgc

SEQ ID NO: 12608 - DNA, 25 bp, probe
gttgttgttaagacagccatccatg

SEQ ID NO: 12609 - DNA, 25 bp, probe
ttataaagtcatctcttctctgcct

SEQ ID NO: 12610 - DNA, 25 bp, probe
aaagtcatctcttctctgccttgaa

SEQ ID NO: 12611 - DNA, 25 bp, probe
gagttgttgttaagacagccatcca

SEQ ID NO: 12612 - DNA, 25 bp, probe
tgagttgttgttaagacagccatcc

SEQ ID NO: 12613 - DNA, 25 bp, probe
aagactctgttgatgtgataatttg

SEQ ID NO: 12614 - DNA, 25 bp, probe
ttgttgttaagacagccatccatgt

SEQ ID NO: 12615 - DNA, 25 bp, probe
tgttgatgtgataatttgatttgga

SEQ ID NO: 12616 - DNA, 25 bp, probe
tatctacaatagaagtgtgatgtga

SEQ ID NO: 12617 - DNA, 25 bp, probe
ttaagactctgttgatgtgataatt

SEQ ID NO: 12618 - DNA, 25 bp, probe
gactctgttgatgtgataatttgat

SEQ ID NO: 12619 - DNA, 25 bp, probe
acaatagaagtgtgatgtgagttgt

SEQ ID NO: 12620 - DNA, 25 bp, probe
attataaagtcatctcttctctgcc

SEQ ID NO: 12621 - DNA, 25 bp, probe
ctgttgatgtgataatttgatttgg

SEQ ID NO: 12622 - DNA, 25 bp, probe
gaaaccagtttaatgggatacaacc

SEQ ID NO: 12623 - DNA, 25 bp, probe
aaccagtttaatgggatacaaccag

SEQ ID NO: 12624 - DNA, 25 bp, probe
aaaccagtttaatgggatacaacca

SEQ ID NO: 12625 - DNA, 25 bp, probe
tgaaaccagtttaatgggatacaac

SEQ ID NO: 12626 - DNA, 25 bp, probe
cagtttaatgggatacaaccagcat

SEQ ID NO: 12627 - DNA, 25 bp, probe
gtttaatgggatacaaccagcattt

SEQ ID NO: 12628 - DNA, 25 bp, probe
ttgaaaccagtttaatgggatacaa

SEQ ID NO: 12629 - DNA, 25 bp, probe
tttgaaaccagtttaatgggataca

SEQ ID NO: 12630 - DNA, 25 bp, probe
agtttaatgggatacaaccagcatt

SEQ ID NO: 12631 - DNA, 25 bp, probe
ccagtttaatgggatacaaccagca

SEQ ID NO: 12632 - DNA, 25 bp, probe
accagtttaatgggatacaaccagc

SEQ ID NO: 12633 - DNA, 25 bp, probe
tttaatgggatacaaccagcatttt

SEQ ID NO: 12634 - DNA, 25 bp, probe
taatgggatacaaccagcattttaa

SEQ ID NO: 12635 - DNA, 25 bp, probe
ttaatgggatacaaccagcatttta

SEQ ID NO: 12636 - DNA, 25 bp, probe
ttttgaaaccagtttaatgggatac

SEQ ID NO: 12637 - DNA, 25 bp, probe
aatgggatacaaccagcattttaaa

SEQ ID NO: 12638 - DNA, 25 bp, probe
ttattttgaaaccagtttaatggga

SEQ ID NO: 12639 - DNA, 25 bp, probe
attttgaaaccagtttaatgggata

SEQ ID NO: 12640 - DNA, 25 bp, probe
tattttgaaaccagtttaatgggat

SEQ ID NO: 12641 - DNA, 25 bp, probe
tttattttgaaaccagtttaatggg

SEQ ID NO: 12642 - DNA, 25 bp, probe
atgggatacaaccagcattttaaaa

SEQ ID NO: 12643 - DNA, 25 bp, probe
atttattttgaaaccagtttaatgg

SEQ ID NO: 12644 - DNA, 25 bp, probe
agaataatgaagactgaactccaca

SEQ ID NO: 12645 - DNA, 25 bp, probe
gtatatcatctactcagtggcttgg

SEQ ID NO: 12646 - DNA, 25 bp, probe
tgtatatcatctactcagtggcttg

SEQ ID NO: 12647 - DNA, 25 bp, probe
ttgtatatcatctactcagtggctt

SEQ ID NO: 12648 - DNA, 25 bp, probe
tatatcatctactcagtggcttggc

SEQ ID NO: 12649 - DNA, 25 bp, probe
tagaataatgaagactgaactccac

SEQ ID NO: 12650 - DNA, 25 bp, probe
tgacagagagtggatatggtatcta

SEQ ID NO: 12651 - DNA, 25 bp, probe
gtgacagagagtggatatggtatct

SEQ ID NO: 12652 - DNA, 25 bp, probe
acagagagtggatatggtatctagg

SEQ ID NO: 12653 - DNA, 25 bp, probe
agagtggatatggtatctaggcaat

SEQ ID NO: 12654 - DNA, 25 bp, probe
gaataatgaagactgaactccacag

SEQ ID NO: 12655 - DNA, 25 bp, probe
tgtgacagagagtggatatggtatc

SEQ ID NO: 12656 - DNA, 25 bp, probe
gagagtggatatggtatctaggcaa

SEQ ID NO: 12657 - DNA, 25 bp, probe
gacagagagtggatatggtatctag

SEQ ID NO: 12658 - DNA, 25 bp, probe
agtggatatggtatctaggcaatag

SEQ ID NO: 12659 - DNA, 25 bp, probe
gagtggatatggtatctaggcaata

SEQ ID NO: 12660 - DNA, 25 bp, probe
cagagagtggatatggtatctaggc

SEQ ID NO: 12661 - DNA, 25 bp, probe
ttagaataatgaagactgaactcca

SEQ ID NO: 12662 - DNA, 25 bp, probe
agagagtggatatggtatctaggca

SEQ ID NO: 12663 - DNA, 25 bp, probe
gtggatatggtatctaggcaataga

SEQ ID NO: 12664 - DNA, 25 bp, probe
ctgtgacagagagtggatatggtat

SEQ ID NO: 12665 - DNA, 25 bp, probe
tttgtatatcatctactcagtggct

SEQ ID NO: 12666 - DNA, 25 bp, probe
atatcatctactcagtggcttggct

SEQ ID NO: 12667 - DNA, 25 bp, probe
tagaaatgagagaaatcagccagac

SEQ ID NO: 12668 - DNA, 25 bp, probe
ttagaaatgagagaaatcagccaga

SEQ ID NO: 12669 - DNA, 25 bp, probe
agattgctgggtcatttagaataat

SEQ ID NO: 12670 - DNA, 25 bp, probe
aatagattgctgggtcatttagaat

SEQ ID NO: 12671 - DNA, 25 bp, probe
attagaaatgagagaaatcagccag

SEQ ID NO: 12672 - DNA, 25 bp, probe
caatagattgctgggtcatttagaa

SEQ ID NO: 12673 - DNA, 25 bp, probe
ttactccttccttgtccttgtgttt

SEQ ID NO: 12674 - DNA, 25 bp, probe
tttactccttccttgtccttgtgtt

SEQ ID NO: 12675 - DNA, 25 bp, probe
attactgttaccctcagaagtttgg

SEQ ID NO: 12676 - DNA, 25 bp, probe
tgaattactgttaccctcagaagtt

SEQ ID NO: 12677 - DNA, 25 bp, probe
agtggcttggctgaattactgttac

SEQ ID NO: 12678 - DNA, 25 bp, probe
tagattgctgggtcatttagaataa

SEQ ID NO: 12679 - DNA, 25 bp, probe
tactccttccttgtccttgtgtttc

SEQ ID NO: 12680 - DNA, 25 bp, probe
ctttactccttccttgtccttgtgt

SEQ ID NO: 12681 - DNA, 25 bp, probe
aattactgttaccctcagaagtttg

SEQ ID NO: 12682 - DNA, 25 bp, probe
gaaatgagagaaatcagccagacac

SEQ ID NO: 12683 - DNA, 25 bp, probe
agaaatgagagaaatcagccagaca

SEQ ID NO: 12684 - DNA, 25 bp, probe
gaattactgttaccctcagaagttt

SEQ ID NO: 12685 - DNA, 25 bp, probe
atagattgctgggtcatttagaata

SEQ ID NO: 12686 - DNA, 25 bp, probe
aagtgcttcttcatggatctgtgac

SEQ ID NO: 12687 - DNA, 25 bp, probe
gtaacacctttactccttccttgtc

SEQ ID NO: 12688 - DNA, 25 bp, probe
atggatgaatatggttatgaggtgg

SEQ ID NO: 12689 - DNA, 25 bp, probe
tatacatcattctggaactggctca

SEQ ID NO: 12690 - DNA, 25 bp, probe
gcctctgatgactatcttaacaagt

SEQ ID NO: 12691 - DNA, 25 bp, probe
gatgactatcttaacaagttcctgc

SEQ ID NO: 12692 - DNA, 25 bp, probe
atgactatcttaacaagttcctgcc

SEQ ID NO: 12693 - DNA, 25 bp, probe
catggatgaatatggttatgaggtg

SEQ ID NO: 12694 - DNA, 25 bp, probe
tgatgactatcttaacaagttcctg

SEQ ID NO: 12695 - DNA, 25 bp, probe
ctgatgactatcttaacaagttcct

SEQ ID NO: 12696 - DNA, 25 bp, probe
tctgatgactatcttaacaagttcc

SEQ ID NO: 12697 - DNA, 25 bp, probe
cctctgatgactatcttaacaagtt

SEQ ID NO: 12698 - DNA, 25 bp, probe
ccgtgaaatacaggtaatgaaagtc

SEQ ID NO: 12699 - DNA, 25 bp, probe
aaatacaggtaatgaaagtcttgcg

SEQ ID NO: 12700 - DNA, 25 bp, probe
cggtatatgaggctttctacacaaa

SEQ ID NO: 12701 - DNA, 25 bp, probe
cgtgaaatacaggtaatgaaagtct

SEQ ID NO: 12702 - DNA, 25 bp, probe
cccgtgaaatacaggtaatgaaagt

SEQ ID NO: 12703 - DNA, 25 bp, probe
ttatggtggcagtcaagatcatctc

SEQ ID NO: 12704 - DNA, 25 bp, probe
atacatcattctggaactggctcag

SEQ ID NO: 12705 - DNA, 25 bp, probe
gtatacatcattctggaactggctc

SEQ ID NO: 12706 - DNA, 25 bp, probe
aatacaggtaatgaaagtcttgcgg

SEQ ID NO: 12707 - DNA, 25 bp, probe
tcggtatatgaggctttctacacaa

SEQ ID NO: 12708 - DNA, 25 bp, probe
tcgagtatacatcattctggaactg

SEQ ID NO: 12709 - DNA, 25 bp, probe
gaaatacaggtaatgaaagtcttgc

SEQ ID NO: 12710 - DNA, 25 bp, probe
gttatggtggcagtcaagatcatct

SEQ ID NO: 12711 - DNA, 25 bp, probe
cgagtatacatcattctggaactgg

SEQ ID NO: 12712 - DNA, 25 bp, probe
ggacctacttcactttgatacccta

SEQ ID NO: 12713 - DNA, 25 bp, probe
catcccagactcgtgtgactatata

SEQ ID NO: 12714 - DNA, 25 bp, probe
tggatgaatatggttatgaggtggg

SEQ ID NO: 12715 - DNA, 25 bp, probe
gacctacttcactttgataccctag

SEQ ID NO: 12716 - DNA, 25 bp, probe
gagtatacatcattctggaactggc

SEQ ID NO: 12717 - DNA, 25 bp, probe
ctctgatgactatcttaacaagttc

SEQ ID NO: 12718 - DNA, 25 bp, probe
gtcaagatcatctcaaagaagaagg

SEQ ID NO: 12719 - DNA, 25 bp, probe
gtcggtatatgaggctttctacaca

SEQ ID NO: 12720 - DNA, 25 bp, probe
agtatacatcattctggaactggct

SEQ ID NO: 12721 - DNA, 25 bp, probe
tcaagatcatctcaaagaagaaggc

SEQ ID NO: 12722 - DNA, 25 bp, probe
gcagtcaagatcatctcaaagaaga

SEQ ID NO: 12723 - DNA, 25 bp, probe
atgaatatggttatgaggtgggcaa

SEQ ID NO: 12724 - DNA, 25 bp, probe
tacttcactttgataccctagcctt

SEQ ID NO: 12725 - DNA, 25 bp, probe
acaagtacctcatcaacttctatcg

SEQ ID NO: 12726 - DNA, 25 bp, probe
ctagaacctgatcctccagatgcta

SEQ ID NO: 12727 - DNA, 25 bp, probe
tctacacaaagcagaaggttatggt

SEQ ID NO: 12728 - DNA, 25 bp, probe
cagtcaagatcatctcaaagaagaa

SEQ ID NO: 12729 - DNA, 25 bp, probe
gcacaagtacctcatcaacttctat

SEQ ID NO: 12730 - DNA, 25 bp, probe
tcatggatgaatatggttatgaggt

SEQ ID NO: 12731 - DNA, 25 bp, probe
ctacttcactttgataccctagcct

SEQ ID NO: 12732 - DNA, 25 bp, probe
gtgttcaatagtgtgagaatgtagc

SEQ ID NO: 12733 - DNA, 25 bp, probe
actgtgttcaatagtgtgagaatgt

SEQ ID NO: 12734 - DNA, 25 bp, probe
tgtgttcaatagtgtgagaatgtag

SEQ ID NO: 12735 - DNA, 25 bp, probe
ctgtgttcaatagtgtgagaatgta

SEQ ID NO: 12736 - DNA, 25 bp, probe
tgttcaatagtgtgagaatgtagct

SEQ ID NO: 12737 - DNA, 25 bp, probe
gaacgagaagcggaacctctataat

SEQ ID NO: 12738 - DNA, 25 bp, probe
gaagcggaacctctataatgcctac

SEQ ID NO: 12739 - DNA, 25 bp, probe
aacgagaagcggaacctctataatg

SEQ ID NO: 12740 - DNA, 25 bp, probe
agaagcggaacctctataatgccta

SEQ ID NO: 12741 - DNA, 25 bp, probe
aagcggaacctctataatgcctaca

SEQ ID NO: 12742 - DNA, 25 bp, probe
atgaacgagaagcggaacctctata

SEQ ID NO: 12743 - DNA, 25 bp, probe
agcggaacctctataatgcctacag

SEQ ID NO: 12744 - DNA, 25 bp, probe
tgaacgagaagcggaacctctataa

SEQ ID NO: 12745 - DNA, 25 bp, probe
cctttctgcctcatttgctttcaat

SEQ ID NO: 12746 - DNA, 25 bp, probe
tgtacttcttgttggttaaattgtt

SEQ ID NO: 12747 - DNA, 25 bp, probe
ttgtacttcttgttggttaaattgt

SEQ ID NO: 12748 - DNA, 25 bp, probe
tcgagtttgaatatccagaatcttt

SEQ ID NO: 12749 - DNA, 25 bp, probe
gttcaatagtgtgagaatgtagcta

SEQ ID NO: 12750 - DNA, 25 bp, probe
aaatgatgtttcacagcaaactctt

SEQ ID NO: 12751 - DNA, 25 bp, probe
gagaagcggaacctctataatgcct

SEQ ID NO: 12752 - DNA, 25 bp, probe
aatgatgtttcacagcaaactcttc

SEQ ID NO: 12753 - DNA, 25 bp, probe
ctttctgcctcatttgctttcaatg

SEQ ID NO: 12754 - DNA, 25 bp, probe
ttcaatagtgtgagaatgtagctaa

SEQ ID NO: 12755 - DNA, 25 bp, probe
atgttaaaatgtgagtttaccagcc

SEQ ID NO: 12756 - DNA, 25 bp, probe
atagtgtgagaatgtagctaaagcc

SEQ ID NO: 12757 - DNA, 25 bp, probe
gttaaaatgtgagtttaccagccta

SEQ ID NO: 12758 - DNA, 25 bp, probe
tgttaaaatgtgagtttaccagcct

SEQ ID NO: 12759 - DNA, 25 bp, probe
atgccaaatgttaaaatgtgagttt

SEQ ID NO: 12760 - DNA, 25 bp, probe
aatgccaaatgttaaaatgtgagtt

SEQ ID NO: 12761 - DNA, 25 bp, probe
gtacttcttgttggttaaattgttt

SEQ ID NO: 12762 - DNA, 25 bp, probe
tttgtacttcttgttggttaaattg

SEQ ID NO: 12763 - DNA, 25 bp, probe
cactgtgttcaatagtgtgagaatg

SEQ ID NO: 12764 - DNA, 25 bp, probe
tcactgtgttcaatagtgtgagaat

SEQ ID NO: 12765 - DNA, 25 bp, probe
atcactgtgttcaatagtgtgagaa

SEQ ID NO: 12766 - DNA, 25 bp, probe
atgatgtttcacagcaaactcttcc

SEQ ID NO: 12767 - DNA, 25 bp, probe
aatagtgtgagaatgtagctaaagc

SEQ ID NO: 12768 - DNA, 25 bp, probe
acgagaagcggaacctctataatgc

SEQ ID NO: 12769 - DNA, 25 bp, probe
catcactgtgttcaatagtgtgaga

SEQ ID NO: 12770 - DNA, 25 bp, probe
atcgtggagtgttctctcagcttag

SEQ ID NO: 12771 - DNA, 25 bp, probe
taaaatgtgagtttaccagcctagc

SEQ ID NO: 12772 - DNA, 25 bp, probe
ttaaaatgtgagtttaccagcctag

SEQ ID NO: 12773 - DNA, 25 bp, probe
aatgttaaaatgtgagtttaccagc

SEQ ID NO: 12774 - DNA, 25 bp, probe
taatgccaaatgttaaaatgtgagt

SEQ ID NO: 12775 - DNA, 25 bp, probe
catcgtggagtgttctctcagctta

SEQ ID NO: 12776 - DNA, 25 bp, probe
aacaggtcttccagatgtgtaatac

SEQ ID NO: 12777 - DNA, 25 bp, probe
caacaggtcttccagatgtgtaata

SEQ ID NO: 12778 - DNA, 25 bp, probe
acaggtcttccagatgtgtaataca

SEQ ID NO: 12779 - DNA, 25 bp, probe
tctaaatgaaagaatggcagtaggt

SEQ ID NO: 12780 - DNA, 25 bp, probe
cacggaaactaggaagaggaaatta

SEQ ID NO: 12781 - DNA, 25 bp, probe
aaatgaaagaatggcagtaggtatt

SEQ ID NO: 12782 - DNA, 25 bp, probe
acggaaactaggaagaggaaattaa

SEQ ID NO: 12783 - DNA, 25 bp, probe
aatgaaagaatggcagtaggtattt

SEQ ID NO: 12784 - DNA, 25 bp, probe
cggaaactaggaagaggaaattaac

SEQ ID NO: 12785 - DNA, 25 bp, probe
ctaaatgaaagaatggcagtaggta

SEQ ID NO: 12786 - DNA, 25 bp, probe
aattatttgggagactgtcaagagg

SEQ ID NO: 12787 - DNA, 25 bp, probe
tgaaagaatggcagtaggtatttaa

SEQ ID NO: 12788 - DNA, 25 bp, probe
tcatgcccatattcataatgctttg

SEQ ID NO: 12789 - DNA, 25 bp, probe
atgaaagaatggcagtaggtattta

SEQ ID NO: 12790 - DNA, 25 bp, probe
taaatgaaagaatggcagtaggtat

SEQ ID NO: 12791 - DNA, 25 bp, probe
ctcatgcccatattcataatgcttt

SEQ ID NO: 12792 - DNA, 25 bp, probe
attatttgggagactgtcaagaggt

SEQ ID NO: 12793 - DNA, 25 bp, probe
gcaacaggtcttccagatgtgtaat

SEQ ID NO: 12794 - DNA, 25 bp, probe
caggtcttccagatgtgtaatacat

SEQ ID NO: 12795 - DNA, 25 bp, probe
ccctttgctattctcagatgactct

SEQ ID NO: 12796 - DNA, 25 bp, probe
ggaaactaggaagaggaaattaact

SEQ ID NO: 12797 - DNA, 25 bp, probe
aggtcttccagatgtgtaatacatt

SEQ ID NO: 12798 - DNA, 25 bp, probe
acacggaaactaggaagaggaaatt

SEQ ID NO: 12799 - DNA, 25 bp, probe
aacacggaaactaggaagaggaaat

SEQ ID NO: 12800 - DNA, 25 bp, probe
aaacacggaaactaggaagaggaaa

SEQ ID NO: 12801 - DNA, 25 bp, probe
agagaaacacggaaactaggaagag

SEQ ID NO: 12802 - DNA, 25 bp, probe
atttgtacttctgttagttcaccaa

SEQ ID NO: 12803 - DNA, 25 bp, probe
cagagaaacacggaaactaggaaga

SEQ ID NO: 12804 - DNA, 25 bp, probe
tctaaatcagtgtaaatgttgtagc

SEQ ID NO: 12805 - DNA, 25 bp, probe
ttatttgggagactgtcaagaggtg

SEQ ID NO: 12806 - DNA, 25 bp, probe
ttccagatgtgtaatacattactgc

SEQ ID NO: 12807 - DNA, 25 bp, probe
gctcatgcccatattcataatgctt

SEQ ID NO: 12808 - DNA, 25 bp, probe
gaaacacggaaactaggaagaggaa

SEQ ID NO: 12809 - DNA, 25 bp, probe
taattatttgggagactgtcaagag

SEQ ID NO: 12810 - DNA, 25 bp, probe
ggtcttccagatgtgtaatacatta

SEQ ID NO: 12811 - DNA, 25 bp, probe
tatttgtacttctgttagttcacca

SEQ ID NO: 12812 - DNA, 25 bp, probe
gaaagaatggcagtaggtatttaat

SEQ ID NO: 12813 - DNA, 25 bp, probe
ggcagtaggtatttaattatttggg

SEQ ID NO: 12814 - DNA, 25 bp, probe
catgcccatattcataatgctttgg

SEQ ID NO: 12815 - DNA, 25 bp, probe
gagaaacacggaaactaggaagagg

SEQ ID NO: 12816 - DNA, 25 bp, probe
tccagatgtgtaatacattactgca

SEQ ID NO: 12817 - DNA, 25 bp, probe
ttaattatttgggagactgtcaaga

SEQ ID NO: 12818 - DNA, 25 bp, probe
gggaaactttctaaatcagtgtaaa

SEQ ID NO: 12819 - DNA, 25 bp, probe
gccctttgctattctcagatgactc

SEQ ID NO: 12820 - DNA, 25 bp, probe
catacttggacttggtgatagacat

SEQ ID NO: 12821 - DNA, 25 bp, probe
ggttacatacttggacttggtgata

SEQ ID NO: 12822 - DNA, 25 bp, probe
tacatacttggacttggtgatagac

SEQ ID NO: 12823 - DNA, 25 bp, probe
gttacatacttggacttggtgatag

SEQ ID NO: 12824 - DNA, 25 bp, probe
acatacttggacttggtgatagaca

SEQ ID NO: 12825 - DNA, 25 bp, probe
ttacatacttggacttggtgataga

SEQ ID NO: 12826 - DNA, 25 bp, probe
tggttacatacttggacttggtgat

SEQ ID NO: 12827 - DNA, 25 bp, probe
ttggttacatacttggacttggtga

SEQ ID NO: 12828 - DNA, 25 bp, probe
gttggttacatacttggacttggtg

SEQ ID NO: 12829 - DNA, 25 bp, probe
atacttggacttggtgatagacatg

SEQ ID NO: 12830 - DNA, 25 bp, probe
cagttggttacatacttggacttgg

SEQ ID NO: 12831 - DNA, 25 bp, probe
agttggttacatacttggacttggt

SEQ ID NO: 12832 - DNA, 25 bp, probe
ccagttggttacatacttggacttg

SEQ ID NO: 12833 - DNA, 25 bp, probe
agcataaacagttgtcctagaagaa

SEQ ID NO: 12834 - DNA, 25 bp, probe
tttcagcataaacagttgtcctaga

SEQ ID NO: 12835 - DNA, 25 bp, probe
cagcataaacagttgtcctagaaga

SEQ ID NO: 12836 - DNA, 25 bp, probe
tcagcataaacagttgtcctagaag

SEQ ID NO: 12837 - DNA, 25 bp, probe
gaatgttgtttgcctaccaagatat

SEQ ID NO: 12838 - DNA, 25 bp, probe
gcataaacagttgtcctagaagaaa

SEQ ID NO: 12839 - DNA, 25 bp, probe
tgttgtttgcctaccaagatattac

SEQ ID NO: 12840 - DNA, 25 bp, probe
ttcagcataaacagttgtcctagaa

SEQ ID NO: 12841 - DNA, 25 bp, probe
aatgttgtttgcctaccaagatatt

SEQ ID NO: 12842 - DNA, 25 bp, probe
tatcttgataaatgagcagtcagca

SEQ ID NO: 12843 - DNA, 25 bp, probe
tcagtgatttcagattgtttgtttc

SEQ ID NO: 12844 - DNA, 25 bp, probe
ggaatgttgtttgcctaccaagata

SEQ ID NO: 12845 - DNA, 25 bp, probe
atatcttgataaatgagcagtcagc

SEQ ID NO: 12846 - DNA, 25 bp, probe
atcttgataaatgagcagtcagcag

SEQ ID NO: 12847 - DNA, 25 bp, probe
cagtgatttcagattgtttgtttct

SEQ ID NO: 12848 - DNA, 25 bp, probe
gttgtttgcctaccaagatattaca

SEQ ID NO: 12849 - DNA, 25 bp, probe
atgttgtttgcctaccaagatatta

SEQ ID NO: 12850 - DNA, 25 bp, probe
atttggtcatcatggaatgttgttt

SEQ ID NO: 12851 - DNA, 25 bp, probe
gataaatgagcagtcagcagaactt

SEQ ID NO: 12852 - DNA, 25 bp, probe
cttgataaatgagcagtcagcagaa

SEQ ID NO: 12853 - DNA, 25 bp, probe
aacagttgtcctagaagaaacagtt

SEQ ID NO: 12854 - DNA, 25 bp, probe
aaacagttgtcctagaagaaacagt

SEQ ID NO: 12855 - DNA, 25 bp, probe
acagttgtcctagaagaaacagtta

SEQ ID NO: 12856 - DNA, 25 bp, probe
tttggtcatcatggaatgttgtttg

SEQ ID NO: 12857 - DNA, 25 bp, probe
tatttggtcatcatggaatgttgtt

SEQ ID NO: 12858 - DNA, 25 bp, probe
agtggtcttaattgaaattatggct

SEQ ID NO: 12859 - DNA, 25 bp, probe
cagtggtcttaattgaaattatggc

SEQ ID NO: 12860 - DNA, 25 bp, probe
ataaatgagcagtcagcagaacttg

SEQ ID NO: 12861 - DNA, 25 bp, probe
ttgataaatgagcagtcagcagaac

SEQ ID NO: 12862 - DNA, 25 bp, probe
atatttggtcatcatggaatgttgt

SEQ ID NO: 12863 - DNA, 25 bp, probe
cagttgtcctagaagaaacagttaa

SEQ ID NO: 12864 - DNA, 25 bp, probe
aacctcctaacttcactgtattctt

SEQ ID NO: 12865 - DNA, 25 bp, probe
ggtgtcttcagaaggtaagtgatat

SEQ ID NO: 12866 - DNA, 25 bp, probe
aggtgtcttcagaaggtaagtgata

SEQ ID NO: 12867 - DNA, 25 bp, probe
gtgtcttcagaaggtaagtgatatg

SEQ ID NO: 12868 - DNA, 25 bp, probe
tgtcttcagaaggtaagtgatatga

SEQ ID NO: 12869 - DNA, 25 bp, probe
aaggtgtcttcagaaggtaagtgat

SEQ ID NO: 12870 - DNA, 25 bp, probe
tagactcaccagagatattgtggat

SEQ ID NO: 12871 - DNA, 25 bp, probe
ttagactcaccagagatattgtgga

SEQ ID NO: 12872 - DNA, 25 bp, probe
gtcaaacctcctaacttcactgtat

SEQ ID NO: 12873 - DNA, 25 bp, probe
tcaaacctcctaacttcactgtatt

SEQ ID NO: 12874 - DNA, 25 bp, probe
caaacctcctaacttcactgtattc

SEQ ID NO: 12875 - DNA, 25 bp, probe
acctcctaacttcactgtattcttt

SEQ ID NO: 12876 - DNA, 25 bp, probe
aaacctcctaacttcactgtattct

SEQ ID NO: 12877 - DNA, 25 bp, probe
agtgatatgaagtaaaggagggaaa

SEQ ID NO: 12878 - DNA, 25 bp, probe
aagtgatatgaagtaaaggagggaa

SEQ ID NO: 12879 - DNA, 25 bp, probe
agactcaccagagatattgtggatg

SEQ ID NO: 12880 - DNA, 25 bp, probe
aatccttcctactcctgagacagtt

SEQ ID NO: 12881 - DNA, 25 bp, probe
tgtcaaacctcctaacttcactgta

SEQ ID NO: 12882 - DNA, 25 bp, probe
taagtgatatgaagtaaaggaggga

SEQ ID NO: 12883 - DNA, 25 bp, probe
gtaagtgatatgaagtaaaggaggg

SEQ ID NO: 12884 - DNA, 25 bp, probe
ggtaagtgatatgaagtaaaggagg

SEQ ID NO: 12885 - DNA, 25 bp, probe
tgtattctttactttaggtgttgct

SEQ ID NO: 12886 - DNA, 25 bp, probe
gtgatatgaagtaaaggagggaaat

SEQ ID NO: 12887 - DNA, 25 bp, probe
ctgtattctttactttaggtgttgc

SEQ ID NO: 12888 - DNA, 25 bp, probe
atccttcctactcctgagacagttc

SEQ ID NO: 12889 - DNA, 25 bp, probe
ggtttcttgcctttgtaaagttcac

SEQ ID NO: 12890 - DNA, 25 bp, probe
gtggtttcttgcctttgtaaagttc

SEQ ID NO: 12891 - DNA, 25 bp, probe
tcagaaggtaagtgatatgaagtaa

SEQ ID NO: 12892 - DNA, 25 bp, probe
cttgcctttgtaaagttcacattct

SEQ ID NO: 12893 - DNA, 25 bp, probe
tcttgcctttgtaaagttcacattc

SEQ ID NO: 12894 - DNA, 25 bp, probe
ttcttgcctttgtaaagttcacatt

SEQ ID NO: 12895 - DNA, 25 bp, probe
tttcttgcctttgtaaagttcacat

SEQ ID NO: 12896 - DNA, 25 bp, probe
gactcaccagagatattgtggatgg

SEQ ID NO: 12897 - DNA, 25 bp, probe
tggtttcttgcctttgtaaagttca

SEQ ID NO: 12898 - DNA, 25 bp, probe
atgtggtttcttgcctttgtaaagt

SEQ ID NO: 12899 - DNA, 25 bp, probe
cttcctactcctgagacagttcctt

SEQ ID NO: 12900 - DNA, 25 bp, probe
cctcctaacttcactgtattcttta

SEQ ID NO: 12901 - DNA, 25 bp, probe
gtttcttgcctttgtaaagttcaca

SEQ ID NO: 12902 - DNA, 25 bp, probe
tgcctttgtaaagttcacattctaa

SEQ ID NO: 12903 - DNA, 25 bp, probe
ttgcctttgtaaagttcacattcta

SEQ ID NO: 12904 - DNA, 25 bp, probe
tgtggtttcttgcctttgtaaagtt

SEQ ID NO: 12905 - DNA, 25 bp, probe
ctgtcaaacctcctaacttcactgt

SEQ ID NO: 12906 - DNA, 25 bp, probe
gcctttgtaaagttcacattctaac

SEQ ID NO: 12907 - DNA, 25 bp, probe
catgtggtttcttgcctttgtaaag

SEQ ID NO: 12908 - DNA, 25 bp, probe
aacgcaattcttgtaacttgtgtaa

SEQ ID NO: 12909 - DNA, 25 bp, probe
atgagttattcaaggaggagacttc

SEQ ID NO: 12910 - DNA, 25 bp, probe
gagttattcaaggaggagacttctt

SEQ ID NO: 12911 - DNA, 25 bp, probe
caacgcaattcttgtaacttgtgta

SEQ ID NO: 12912 - DNA, 25 bp, probe
tgagttattcaaggaggagacttct

SEQ ID NO: 12913 - DNA, 25 bp, probe
ccatcaaccaagcctgtagtagtaa

SEQ ID NO: 12914 - DNA, 25 bp, probe
agttattcaaggaggagacttctta

SEQ ID NO: 12915 - DNA, 25 bp, probe
tatgagttattcaaggaggagactt

SEQ ID NO: 12916 - DNA, 25 bp, probe
ttatgagttattcaaggaggagact

SEQ ID NO: 12917 - DNA, 25 bp, probe
ttgataatgcctgtattcctgtagg

SEQ ID NO: 12918 - DNA, 25 bp, probe
gttattcaaggaggagacttcttaa

SEQ ID NO: 12919 - DNA, 25 bp, probe
ggatgacttacaatagctctgatga

SEQ ID NO: 12920 - DNA, 25 bp, probe
tggatgacttacaatagctctgatg

SEQ ID NO: 12921 - DNA, 25 bp, probe
ttcattgtacttgataacagcacga

SEQ ID NO: 12922 - DNA, 25 bp, probe
ctcctagaccagttcaaccaattct

SEQ ID NO: 12923 - DNA, 25 bp, probe
tctcctagaccagttcaaccaattc

SEQ ID NO: 12924 - DNA, 25 bp, probe
ctctcctagaccagttcaaccaatt

SEQ ID NO: 12925 - DNA, 25 bp, probe
attgtacttgataacagcacgagtc

SEQ ID NO: 12926 - DNA, 25 bp, probe
tcattgtacttgataacagcacgag

SEQ ID NO: 12927 - DNA, 25 bp, probe
tcctagaccagttcaaccaattcta

SEQ ID NO: 12928 - DNA, 25 bp, probe
acaatagctctgatgaagataccac

SEQ ID NO: 12929 - DNA, 25 bp, probe
cattgtacttgataacagcacgagt

SEQ ID NO: 12930 - DNA, 25 bp, probe
tgacttacaatagctctgatgaaga

SEQ ID NO: 12931 - DNA, 25 bp, probe
caatagctctgatgaagataccacc

SEQ ID NO: 12932 - DNA, 25 bp, probe
ttggatgacttacaatagctctgat

SEQ ID NO: 12933 - DNA, 25 bp, probe
atcaaccaagcctgtagtagtaaag

SEQ ID NO: 12934 - DNA, 25 bp, probe
catcaaccaagcctgtagtagtaaa

SEQ ID NO: 12935 - DNA, 25 bp, probe
gatgacttacaatagctctgatgaa

SEQ ID NO: 12936 - DNA, 25 bp, probe
aaataggacattggcttgattgaaa

SEQ ID NO: 12937 - DNA, 25 bp, probe
tagaccagttcaaccaattctaggt

SEQ ID NO: 12938 - DNA, 25 bp, probe
ttcttgtaacttgtgtaaatagccc

SEQ ID NO: 12939 - DNA, 25 bp, probe
tacaatagctctgatgaagatacca

SEQ ID NO: 12940 - DNA, 25 bp, probe
atgacttacaatagctctgatgaag

SEQ ID NO: 12941 - DNA, 25 bp, probe
atacggtgtttggatattgatgttt

SEQ ID NO: 12942 - DNA, 25 bp, probe
ataatgcctgtattcctgtaggatg

SEQ ID NO: 12943 - DNA, 25 bp, probe
tgcctgtattcctgtaggatgtata

SEQ ID NO: 12944 - DNA, 25 bp, probe
gataatgcctgtattcctgtaggat

SEQ ID NO: 12945 - DNA, 25 bp, probe
gagagagggacataggatagttgac

SEQ ID NO: 12946 - DNA, 25 bp, probe
gcctgtattcctgtaggatgtatat

SEQ ID NO: 12947 - DNA, 25 bp, probe
atgcctgtattcctgtaggatgtat

SEQ ID NO: 12948 - DNA, 25 bp, probe
tgataatgcctgtattcctgtagga

SEQ ID NO: 12949 - DNA, 25 bp, probe
tttgataatgcctgtattcctgtag

SEQ ID NO: 12950 - DNA, 25 bp, probe
acgcaattcttgtaacttgtgtaaa

SEQ ID NO: 12951 - DNA, 25 bp, probe
aatgcctgtattcctgtaggatgta

SEQ ID NO: 12952 - DNA, 25 bp, probe
ctgatctctcctctgggctactttg

SEQ ID NO: 12953 - DNA, 25 bp, probe
aaattcaggctgatctctcctctgg

SEQ ID NO: 12954 - DNA, 25 bp, probe
gaaaattcaggctgatctctcctct

SEQ ID NO: 12955 - DNA, 25 bp, probe
aaaattcaggctgatctctcctctg

SEQ ID NO: 12956 - DNA, 25 bp, probe
tgatctctcctctgggctactttgg

SEQ ID NO: 12957 - DNA, 25 bp, probe
ggaaaattcaggctgatctctcctc

SEQ ID NO: 12958 - DNA, 25 bp, probe
ctggaaaattcaggctgatctctcc

SEQ ID NO: 12959 - DNA, 25 bp, probe
tggaaaattcaggctgatctctcct

SEQ ID NO: 12960 - DNA, 25 bp, probe
cctggaaaattcaggctgatctctc

SEQ ID NO: 12961 - DNA, 25 bp, probe
acctggaaaattcaggctgatctct

SEQ ID NO: 12962 - DNA, 25 bp, probe
cacctggaaaattcaggctgatctc

SEQ ID NO: 12963 - DNA, 25 bp, probe
ggacaactgagaaatctactgcctc

SEQ ID NO: 12964 - DNA, 25 bp, probe
gacaactgagaaatctactgcctcg

SEQ ID NO: 12965 - DNA, 25 bp, probe
ccctacaaccagaagagtgacatct

SEQ ID NO: 12966 - DNA, 25 bp, probe
acactctgtcatcttttaccattga

SEQ ID NO: 12967 - DNA, 25 bp, probe
cctacactctgtcatcttttaccat

SEQ ID NO: 12968 - DNA, 25 bp, probe
cacctacactctgtcatcttttacc

SEQ ID NO: 12969 - DNA, 25 bp, probe
acctacactctgtcatcttttacca

SEQ ID NO: 12970 - DNA, 25 bp, probe
tacactctgtcatcttttaccattg

SEQ ID NO: 12971 - DNA, 25 bp, probe
tcatcttttaccattgacaccttgc

SEQ ID NO: 12972 - DNA, 25 bp, probe
gggacaactgagaaatctactgcct

SEQ ID NO: 12973 - DNA, 25 bp, probe
ctacactctgtcatcttttaccatt

SEQ ID NO: 12974 - DNA, 25 bp, probe
gcacctacactctgtcatcttttac

SEQ ID NO: 12975 - DNA, 25 bp, probe
cctacaaccagaagagtgacatctg

SEQ ID NO: 12976 - DNA, 25 bp, probe
cattgacaccttgcaccatgatctg

SEQ ID NO: 12977 - DNA, 25 bp, probe
attgacaccttgcaccatgatctga

SEQ ID NO: 12978 - DNA, 25 bp, probe
taccattgacaccttgcaccatgat

SEQ ID NO: 12979 - DNA, 25 bp, probe
gcaccatgatctgaaaacacaatga

SEQ ID NO: 12980 - DNA, 25 bp, probe
ttgacaccttgcaccatgatctgaa

SEQ ID NO: 12981 - DNA, 25 bp, probe
caggggacaactgagaaatctactg

SEQ ID NO: 12982 - DNA, 25 bp, probe
ttaccattgacaccttgcaccatga

SEQ ID NO: 12983 - DNA, 25 bp, probe
atcttttaccattgacaccttgcac

SEQ ID NO: 12984 - DNA, 25 bp, probe
catcttttaccattgacaccttgca

SEQ ID NO: 12985 - DNA, 25 bp, probe
gccctacaaccagaagagtgacatc

SEQ ID NO: 12986 - DNA, 25 bp, probe
ttgcaccatgatctgaaaacacaat

SEQ ID NO: 12987 - DNA, 25 bp, probe
tttaccattgacaccttgcaccatg

SEQ ID NO: 12988 - DNA, 25 bp, probe
tgcacctacactctgtcatctttta

SEQ ID NO: 12989 - DNA, 25 bp, probe
caagccctacaaccagaagagtgac

SEQ ID NO: 12990 - DNA, 25 bp, probe
tgcaccatgatctgaaaacacaatg

SEQ ID NO: 12991 - DNA, 25 bp, probe
cttgcaccatgatctgaaaacacaa

SEQ ID NO: 12992 - DNA, 25 bp, probe
acaactgagaaatctactgcctcgc

SEQ ID NO: 12993 - DNA, 25 bp, probe
ccaggggacaactgagaaatctact

SEQ ID NO: 12994 - DNA, 25 bp, probe
ctccaggggacaactgagaaatcta

SEQ ID NO: 12995 - DNA, 25 bp, probe
aggggacaactgagaaatctactgc

SEQ ID NO: 12996 - DNA, 25 bp, probe
cctgcacctacactctgtcatcttt

SEQ ID NO: 12997 - DNA, 25 bp, probe
tccaggggacaactgagaaatctac

SEQ ID NO: 12998 - DNA, 25 bp, probe
ctgcacctacactctgtcatctttt

SEQ ID NO: 12999 - DNA, 25 bp, probe
tgacaccttgcaccatgatctgaaa

SEQ ID NO: 13000 - DNA, 25 bp, probe
ttttaccattgacaccttgcaccat

SEQ ID NO: 13001 - DNA, 25 bp, probe
tcttttaccattgacaccttgcacc

SEQ ID NO: 13002 - DNA, 25 bp, probe
gacaccttgcaccatgatctgaaaa

SEQ ID NO: 13003 - DNA, 25 bp, probe
gtcatcttttaccattgacaccttg

SEQ ID NO: 13004 - DNA, 25 bp, probe
cactctgtcatcttttaccattgac

SEQ ID NO: 13005 - DNA, 25 bp, probe
ccttgcaccatgatctgaaaacaca

SEQ ID NO: 13006 - DNA, 25 bp, probe
accttgcaccatgatctgaaaacac

SEQ ID NO: 13007 - DNA, 25 bp, probe
gagttctacgattcacatggtcaat

SEQ ID NO: 13008 - DNA, 25 bp, probe
ccagaataattgcgactacgaacag

SEQ ID NO: 13009 - DNA, 25 bp, probe
gaccagaataattgcgactacgaac

SEQ ID NO: 13010 - DNA, 25 bp, probe
agttctacgattcacatggtcaatg

SEQ ID NO: 13011 - DNA, 25 bp, probe
gttctacgattcacatggtcaatga

SEQ ID NO: 13012 - DNA, 25 bp, probe
cagaataattgcgactacgaacagc

SEQ ID NO: 13013 - DNA, 25 bp, probe
accagaataattgcgactacgaaca

SEQ ID NO: 13014 - DNA, 25 bp, probe
ggaccagaataattgcgactacgaa

SEQ ID NO: 13015 - DNA, 25 bp, probe
ctaagccacgagttctacgattcac

SEQ ID NO: 13016 - DNA, 25 bp, probe
cgagttctacgattcacatggtcaa

SEQ ID NO: 13017 - DNA, 25 bp, probe
ttctacgattcacatggtcaatgaa

SEQ ID NO: 13018 - DNA, 25 bp, probe
taagccacgagttctacgattcaca

SEQ ID NO: 13019 - DNA, 25 bp, probe
agaataattgcgactacgaacagcg

SEQ ID NO: 13020 - DNA, 25 bp, probe
cacgagttctacgattcacatggtc

SEQ ID NO: 13021 - DNA, 25 bp, probe
tggaccagaataattgcgactacga

SEQ ID NO: 13022 - DNA, 25 bp, probe
acgagttctacgattcacatggtca

SEQ ID NO: 13023 - DNA, 25 bp, probe
aagccacgagttctacgattcacat

SEQ ID NO: 13024 - DNA, 25 bp, probe
ctgtgacttaaccaaacgaacaacg

SEQ ID NO: 13025 - DNA, 25 bp, probe
gaataattgcgactacgaacagcgg

SEQ ID NO: 13026 - DNA, 25 bp, probe
gctgtgacttaaccaaacgaacaac

SEQ ID NO: 13027 - DNA, 25 bp, probe
ctggaccagaataattgcgactacg

SEQ ID NO: 13028 - DNA, 25 bp, probe
tctacgattcacatggtcaatgaaa

SEQ ID NO: 13029 - DNA, 25 bp, probe
tgtgacttaaccaaacgaacaacga

SEQ ID NO: 13030 - DNA, 25 bp, probe
gctggaccagaataattgcgactac

SEQ ID NO: 13031 - DNA, 25 bp, probe
gctaagccacgagttctacgattca

SEQ ID NO: 13032 - DNA, 25 bp, probe
caagctgtgacttaaccaaacgaac

SEQ ID NO: 13033 - DNA, 25 bp, probe
tgacctcaagctgtgacttaaccaa

SEQ ID NO: 13034 - DNA, 25 bp, probe
ttgacctcaagctgtgacttaacca

SEQ ID NO: 13035 - DNA, 25 bp, probe
aatgggaaatagaagtgtgcaagct

SEQ ID NO: 13036 - DNA, 25 bp, probe
caatgggaaatagaagtgtgcaagc

SEQ ID NO: 13037 - DNA, 25 bp, probe
tcactggtgcaatgggaaatagaag

SEQ ID NO: 13038 - DNA, 25 bp, probe
ctcactggtgcaatgggaaatagaa

SEQ ID NO: 13039 - DNA, 25 bp, probe
tcaagctgtgacttaaccaaacgaa

SEQ ID NO: 13040 - DNA, 25 bp, probe
gacctcaagctgtgacttaaccaaa

SEQ ID NO: 13041 - DNA, 25 bp, probe
tttgacctcaagctgtgacttaacc

SEQ ID NO: 13042 - DNA, 25 bp, probe
tgctggaccagaataattgcgacta

SEQ ID NO: 13043 - DNA, 25 bp, probe
atgagcttcttctccaaactctcct

SEQ ID NO: 13044 - DNA, 25 bp, probe
catgagcttcttctccaaactctcc

SEQ ID NO: 13045 - DNA, 25 bp, probe
ctggtgcaatgggaaatagaagtgt

SEQ ID NO: 13046 - DNA, 25 bp, probe
acctcaagctgtgacttaaccaaac

SEQ ID NO: 13047 - DNA, 25 bp, probe
agccacgagttctacgattcacatg

SEQ ID NO: 13048 - DNA, 25 bp, probe
atcagataatgcaaaagatcaggga

SEQ ID NO: 13049 - DNA, 25 bp, probe
tggtgcaatgggaaatagaagtgtg

SEQ ID NO: 13050 - DNA, 25 bp, probe
tcagataatgcaaaagatcagggag

SEQ ID NO: 13051 - DNA, 25 bp, probe
gaatacagcccagttggatcagttt

SEQ ID NO: 13052 - DNA, 25 bp, probe
ccagttggatcagtttgatagaatc

SEQ ID NO: 13053 - DNA, 25 bp, probe
cccagttggatcagtttgatagaat

SEQ ID NO: 13054 - DNA, 25 bp, probe
aatacagcccagttggatcagtttg

SEQ ID NO: 13055 - DNA, 25 bp, probe
cagttggatcagtttgatagaatca

SEQ ID NO: 13056 - DNA, 25 bp, probe
ttctcagaatacagcccagttggat

SEQ ID NO: 13057 - DNA, 25 bp, probe
agaatacagcccagttggatcagtt

SEQ ID NO: 13058 - DNA, 25 bp, probe
gaaagagttcctagccaaagccaag

SEQ ID NO: 13059 - DNA, 25 bp, probe
tctcagaatacagcccagttggatc

SEQ ID NO: 13060 - DNA, 25 bp, probe
tcagaatacagcccagttggatcag

SEQ ID NO: 13061 - DNA, 25 bp, probe
ctcagaatacagcccagttggatca

SEQ ID NO: 13062 - DNA, 25 bp, probe
cttctcagaatacagcccagttgga

SEQ ID NO: 13063 - DNA, 25 bp, probe
gcccagttggatcagtttgatagaa

SEQ ID NO: 13064 - DNA, 25 bp, probe
atacagcccagttggatcagtttga

SEQ ID NO: 13065 - DNA, 25 bp, probe
cctagccaaagccaaggaagatttc

SEQ ID NO: 13066 - DNA, 25 bp, probe
cagaatacagcccagttggatcagt

SEQ ID NO: 13067 - DNA, 25 bp, probe
tgaaagagttcctagccaaagccaa

SEQ ID NO: 13068 - DNA, 25 bp, probe
cagcccagttggatcagtttgatag

SEQ ID NO: 13069 - DNA, 25 bp, probe
agcccagttggatcagtttgataga

SEQ ID NO: 13070 - DNA, 25 bp, probe
ccttctcagaatacagcccagttgg

SEQ ID NO: 13071 - DNA, 25 bp, probe
cccttctcagaatacagcccagttg

SEQ ID NO: 13072 - DNA, 25 bp, probe
gtgaaagagttcctagccaaagcca

SEQ ID NO: 13073 - DNA, 25 bp, probe
agcgtgaaagagttcctagccaaag

SEQ ID NO: 13074 - DNA, 25 bp, probe
gagcgtgaaagagttcctagccaaa

SEQ ID NO: 13075 - DNA, 25 bp, probe
acagcccagttggatcagtttgata

SEQ ID NO: 13076 - DNA, 25 bp, probe
tacagcccagttggatcagtttgat

SEQ ID NO: 13077 - DNA, 25 bp, probe
cagtttgatagaatcaagacccttg

SEQ ID NO: 13078 - DNA, 25 bp, probe
tcagtttgatagaatcaagaccctt

SEQ ID NO: 13079 - DNA, 25 bp, probe
agtttgatagaatcaagacccttgg

SEQ ID NO: 13080 - DNA, 25 bp, probe
atcagtttgatagaatcaagaccct

SEQ ID NO: 13081 - DNA, 25 bp, probe
aaagagttcctagccaaagccaagg

SEQ ID NO: 13082 - DNA, 25 bp, probe
gatcagtttgatagaatcaagaccc

SEQ ID NO: 13083 - DNA, 25 bp, probe
ggatcagtttgatagaatcaagacc

SEQ ID NO: 13084 - DNA, 25 bp, probe
tggatcagtttgatagaatcaagac

SEQ ID NO: 13085 - DNA, 25 bp, probe
agttggatcagtttgatagaatcaa

SEQ ID NO: 13086 - DNA, 25 bp, probe
gttggatcagtttgatagaatcaag

SEQ ID NO: 13087 - DNA, 25 bp, probe
ttggatcagtttgatagaatcaaga

SEQ ID NO: 13088 - DNA, 25 bp, probe
aaatgggagaccccttctcagaata

SEQ ID NO: 13089 - DNA, 25 bp, probe
ctagccaaagccaaggaagatttcc

SEQ ID NO: 13090 - DNA, 25 bp, probe
aatgggagaccccttctcagaatac

SEQ ID NO: 13091 - DNA, 25 bp, probe
tcctagccaaagccaaggaagattt

SEQ ID NO: 13092 - DNA, 25 bp, probe
aaaatgggagaccccttctcagaat

SEQ ID NO: 13093 - DNA, 25 bp, probe
caggagagcgtgaaagagttcctag

SEQ ID NO: 13094 - DNA, 25 bp, probe
atgggagaccccttctcagaataca

SEQ ID NO: 13095 - DNA, 25 bp, probe
tgggagaccccttctcagaatacag

SEQ ID NO: 13096 - DNA, 25 bp, probe
ggttgggattatgctgctgttatat

SEQ ID NO: 13097 - DNA, 25 bp, probe
ggtcttcatccagatgccaaatatg

SEQ ID NO: 13098 - DNA, 25 bp, probe
gggttgggattatgctgctgttata

SEQ ID NO: 13099 - DNA, 25 bp, probe
aggtcttcatccagatgccaaatat

SEQ ID NO: 13100 - DNA, 25 bp, probe
aaggtcttcatccagatgccaaata

SEQ ID NO: 13101 - DNA, 25 bp, probe
gtcttcatccagatgccaaatatgc

SEQ ID NO: 13102 - DNA, 25 bp, probe
ttcatccagatgccaaatatgccaa

SEQ ID NO: 13103 - DNA, 25 bp, probe
gaaggtcttcatccagatgccaaat

SEQ ID NO: 13104 - DNA, 25 bp, probe
agatgccaaatatgccaaggtgaag

SEQ ID NO: 13105 - DNA, 25 bp, probe
tcttcatccagatgccaaatatgcc

SEQ ID NO: 13106 - DNA, 25 bp, probe
cagatgccaaatatgccaaggtgaa

SEQ ID NO: 13107 - DNA, 25 bp, probe
tcatccagatgccaaatatgccaag

SEQ ID NO: 13108 - DNA, 25 bp, probe
cttcatccagatgccaaatatgcca

SEQ ID NO: 13109 - DNA, 25 bp, probe
tgggttgggattatgctgctgttat

SEQ ID NO: 13110 - DNA, 25 bp, probe
caaatatgccaaggtgaagcttatc

SEQ ID NO: 13111 - DNA, 25 bp, probe
agaaggtcttcatccagatgccaaa

SEQ ID NO: 13112 - DNA, 25 bp, probe
atccagatgccaaatatgccaaggt

SEQ ID NO: 13113 - DNA, 25 bp, probe
aaatatgccaaggtgaagcttatcc

SEQ ID NO: 13114 - DNA, 25 bp, probe
catccagatgccaaatatgccaagg

SEQ ID NO: 13115 - DNA, 25 bp, probe
ccaaatatgccaaggtgaagcttat

SEQ ID NO: 13116 - DNA, 25 bp, probe
ctgggttgggattatgctgctgtta

SEQ ID NO: 13117 - DNA, 25 bp, probe
gatgccaaatatgccaaggtgaagc

SEQ ID NO: 13118 - DNA, 25 bp, probe
aatatgccaaggtgaagcttatccc

SEQ ID NO: 13119 - DNA, 25 bp, probe
atatgccaaggtgaagcttatccca

SEQ ID NO: 13120 - DNA, 25 bp, probe
gccaaatatgccaaggtgaagctta

SEQ ID NO: 13121 - DNA, 25 bp, probe
tatgccaaggtgaagcttatcccac

SEQ ID NO: 13122 - DNA, 25 bp, probe
aagtgcttatccaactctgaatctt

SEQ ID NO: 13123 - DNA, 25 bp, probe
caagtgcttatccaactctgaatct

SEQ ID NO: 13124 - DNA, 25 bp, probe
ccaagtgcttatccaactctgaatc

SEQ ID NO: 13125 - DNA, 25 bp, probe
gattccaagtgcttatccaactctg

SEQ ID NO: 13126 - DNA, 25 bp, probe
tccaagtgcttatccaactctgaat

SEQ ID NO: 13127 - DNA, 25 bp, probe
attccaagtgcttatccaactctga

SEQ ID NO: 13128 - DNA, 25 bp, probe
tgattccaagtgcttatccaactct

SEQ ID NO: 13129 - DNA, 25 bp, probe
gtgattccaagtgcttatccaactc

SEQ ID NO: 13130 - DNA, 25 bp, probe
ttccaagtgcttatccaactctgaa

SEQ ID NO: 13131 - DNA, 25 bp, probe
agtgcttatccaactctgaatcttt

SEQ ID NO: 13132 - DNA, 25 bp, probe
cgtgattccaagtgcttatccaact

SEQ ID NO: 13133 - DNA, 25 bp, probe
aaagcatttgtcttaccttcaaccc

SEQ ID NO: 13134 - DNA, 25 bp, probe
atttgtcttaccttcaacccgtgat

SEQ ID NO: 13135 - DNA, 25 bp, probe
tttgtcttaccttcaacccgtgatt

SEQ ID NO: 13136 - DNA, 25 bp, probe
ccgtgattccaagtgcttatccaac

SEQ ID NO: 13137 - DNA, 25 bp, probe
ttgtcttaccttcaacccgtgattc

SEQ ID NO: 13138 - DNA, 25 bp, probe
gtgcttatccaactctgaatctttt

SEQ ID NO: 13139 - DNA, 25 bp, probe
catttgtcttaccttcaacccgtga

SEQ ID NO: 13140 - DNA, 25 bp, probe
aaaagcatttgtcttaccttcaacc

SEQ ID NO: 13141 - DNA, 25 bp, probe
cttaccttcaacccgtgattccaag

SEQ ID NO: 13142 - DNA, 25 bp, probe
aagcatttgtcttaccttcaacccg

SEQ ID NO: 13143 - DNA, 25 bp, probe
ctaggattacaggcatgagctaccg

SEQ ID NO: 13144 - DNA, 25 bp, probe
tcttaccttcaacccgtgattccaa

SEQ ID NO: 13145 - DNA, 25 bp, probe
caacccgtgattccaagtgcttatc

SEQ ID NO: 13146 - DNA, 25 bp, probe
ttaccttcaacccgtgattccaagt

SEQ ID NO: 13147 - DNA, 25 bp, probe
aaagtgctaggattacaggcatgag

SEQ ID NO: 13148 - DNA, 25 bp, probe
taggattacaggcatgagctaccgt

SEQ ID NO: 13149 - DNA, 25 bp, probe
tcaacccgtgattccaagtgcttat

SEQ ID NO: 13150 - DNA, 25 bp, probe
gtcttaccttcaacccgtgattcca

SEQ ID NO: 13151 - DNA, 25 bp, probe
tgtcttaccttcaacccgtgattcc

SEQ ID NO: 13152 - DNA, 25 bp, probe
gcatttgtcttaccttcaacccgtg

SEQ ID NO: 13153 - DNA, 25 bp, probe
agcatttgtcttaccttcaacccgt

SEQ ID NO: 13154 - DNA, 25 bp, probe
tgctaggattacaggcatgagctac

SEQ ID NO: 13155 - DNA, 25 bp, probe
gtgctaggattacaggcatgagcta

SEQ ID NO: 13156 - DNA, 25 bp, probe
ttcaacccgtgattccaagtgctta

SEQ ID NO: 13157 - DNA, 25 bp, probe
taccttcaacccgtgattccaagtg

SEQ ID NO: 13158 - DNA, 25 bp, probe
cccgtgattccaagtgcttatccaa

SEQ ID NO: 13159 - DNA, 25 bp, probe
aacccgtgattccaagtgcttatcc

SEQ ID NO: 13160 - DNA, 25 bp, probe
gctaggattacaggcatgagctacc

SEQ ID NO: 13161 - DNA, 25 bp, probe
aagtgctaggattacaggcatgagc

SEQ ID NO: 13162 - DNA, 25 bp, probe
cgacaaaagtgctaggattacaggc

SEQ ID NO: 13163 - DNA, 25 bp, probe
gcgacaaaagtgctaggattacagg

SEQ ID NO: 13164 - DNA, 25 bp, probe
ggcgacaaaagtgctaggattacag

SEQ ID NO: 13165 - DNA, 25 bp, probe
caggcgacaaaagtgctaggattac

SEQ ID NO: 13166 - DNA, 25 bp, probe
taatacggttatccacagaatcagg

SEQ ID NO: 13167 - DNA, 25 bp, probe
ggtaatacggttatccacagaatca

SEQ ID NO: 13168 - DNA, 25 bp, probe
gtaatacggttatccacagaatcag

SEQ ID NO: 13169 - DNA, 25 bp, probe
cggtaatacggttatccacagaatc

SEQ ID NO: 13170 - DNA, 25 bp, probe
cgtgaacctcagttattgctagata

SEQ ID NO: 13171 - DNA, 25 bp, probe
gtgaacctcagttattgctagatat

SEQ ID NO: 13172 - DNA, 25 bp, probe
gcggtaatacggttatccacagaat

SEQ ID NO: 13173 - DNA, 25 bp, probe
atgaacaccgtgaacctcagttatt

SEQ ID NO: 13174 - DNA, 25 bp, probe
ccgtgaacctcagttattgctagat

SEQ ID NO: 13175 - DNA, 25 bp, probe
tgaacctcagttattgctagatatt

SEQ ID NO: 13176 - DNA, 25 bp, probe
gatgaacaccgtgaacctcagttat

SEQ ID NO: 13177 - DNA, 25 bp, probe
acaaataaagcaatagcatcacaaa

SEQ ID NO: 13178 - DNA, 25 bp, probe
catcaatgtatcttatcatgtctgg

SEQ ID NO: 13179 - DNA, 25 bp, probe
ggagaaataacacccaaatctgata

SEQ ID NO: 13180 - DNA, 25 bp, probe
ggttacaaataaagcaatagcatca

SEQ ID NO: 13181 - DNA, 25 bp, probe
tggttacaaataaagcaatagcatc

SEQ ID NO: 13182 - DNA, 25 bp, probe
ttgtccaaactcatcaatgtatctt

SEQ ID NO: 13183 - DNA, 25 bp, probe
tcaatgtatcttatcatgtctggat

SEQ ID NO: 13184 - DNA, 25 bp, probe
atcaatgtatcttatcatgtctgga

SEQ ID NO: 13185 - DNA, 25 bp, probe
caatgtatcttatcatgtctggatc

SEQ ID NO: 13186 - DNA, 25 bp, probe
tgtccaaactcatcaatgtatctta

SEQ ID NO: 13187 - DNA, 25 bp, probe
aatacggttatccacagaatcaggg

SEQ ID NO: 13188 - DNA, 25 bp, probe
aacacccaaatctgatatttacagc

SEQ ID NO: 13189 - DNA, 25 bp, probe
aatggttacaaataaagcaatagca

SEQ ID NO: 13190 - DNA, 25 bp, probe
tgaacaccgtgaacctcagttattg

SEQ ID NO: 13191 - DNA, 25 bp, probe
tttgtccaaactcatcaatgtatct

SEQ ID NO: 13192 - DNA, 25 bp, probe
aacaacagcttatatggcaccagaa

SEQ ID NO: 13193 - DNA, 25 bp, probe
tacaaataaagcaatagcatcacaa

SEQ ID NO: 13194 - DNA, 25 bp, probe
ttacaaataaagcaatagcatcaca

SEQ ID NO: 13195 - DNA, 25 bp, probe
atggttacaaataaagcaatagcat

SEQ ID NO: 13196 - DNA, 25 bp, probe
gttacaaataaagcaatagcatcac

SEQ ID NO: 13197 - DNA, 25 bp, probe
tggagaaataacacccaaatctgat

SEQ ID NO: 13198 - DNA, 25 bp, probe
accgtgaacctcagttattgctaga

SEQ ID NO: 13199 - DNA, 25 bp, probe
caccgtgaacctcagttattgctag

SEQ ID NO: 13200 - DNA, 25 bp, probe
agcaatagcatcacaaatttcacaa

SEQ ID NO: 13201 - DNA, 25 bp, probe
aagcaatagcatcacaaatttcaca

SEQ ID NO: 13202 - DNA, 25 bp, probe
actcaaaggcggtaatacggttatc

SEQ ID NO: 13203 - DNA, 25 bp, probe
gcaatagcatcacaaatttcacaaa

SEQ ID NO: 13204 - DNA, 25 bp, probe
aaagcaatagcatcacaaatttcac

SEQ ID NO: 13205 - DNA, 25 bp, probe
gaacaacagcttatatggcaccaga

SEQ ID NO: 13206 - DNA, 25 bp, probe
acaacagcttatatggcaccagaag

SEQ ID NO: 13207 - DNA, 25 bp, probe
atgcaattgttgttgttaacttgtt

SEQ ID NO: 13208 - DNA, 25 bp, probe
aatgcaattgttgttgttaacttgt

SEQ ID NO: 13209 - DNA, 25 bp, probe
gtggagaaataacacccaaatctga

SEQ ID NO: 13210 - DNA, 25 bp, probe
aatagtgattagaagacgaccattc

SEQ ID NO: 13211 - DNA, 25 bp, probe
tctctccatgtgctatatgaatgaa

SEQ ID NO: 13212 - DNA, 25 bp, probe
ttctctccatgtgctatatgaatga

SEQ ID NO: 13213 - DNA, 25 bp, probe
tctccatgtgctatatgaatgaaga

SEQ ID NO: 13214 - DNA, 25 bp, probe
ctctccatgtgctatatgaatgaag

SEQ ID NO: 13215 - DNA, 25 bp, probe
tataatgccagtgaatgttgctgaa

SEQ ID NO: 13216 - DNA, 25 bp, probe
catgtgctatatgaatgaagaatgc

SEQ ID NO: 13217 - DNA, 25 bp, probe
ctccatgtgctatatgaatgaagaa

SEQ ID NO: 13218 - DNA, 25 bp, probe
ccatgtgctatatgaatgaagaatg

SEQ ID NO: 13219 - DNA, 25 bp, probe
tccatgtgctatatgaatgaagaat

SEQ ID NO: 13220 - DNA, 25 bp, probe
atgccaaatagtgattagaagacga

SEQ ID NO: 13221 - DNA, 25 bp, probe
ccaaatagtgattagaagacgacca

SEQ ID NO: 13222 - DNA, 25 bp, probe
aatgccaaatagtgattagaagacg

SEQ ID NO: 13223 - DNA, 25 bp, probe
agttcatctcttgtttccttcagtc

SEQ ID NO: 13224 - DNA, 25 bp, probe
ttataatgccagtgaatgttgctga

SEQ ID NO: 13225 - DNA, 25 bp, probe
tgccaaatagtgattagaagacgac

SEQ ID NO: 13226 - DNA, 25 bp, probe
gttcatctcttgtttccttcagtca

SEQ ID NO: 13227 - DNA, 25 bp, probe
aagttcatctcttgtttccttcagt

SEQ ID NO: 13228 - DNA, 25 bp, probe
ttccttcagtcaaagaaagtccatt

SEQ ID NO: 13229 - DNA, 25 bp, probe
atgttgctgaactctttgtatatgc

SEQ ID NO: 13230 - DNA, 25 bp, probe
gtgaatgttgctgaactctttgtat

SEQ ID NO: 13231 - DNA, 25 bp, probe
aaagttcatctcttgtttccttcag

SEQ ID NO: 13232 - DNA, 25 bp, probe
ataatgccagtgaatgttgctgaac

SEQ ID NO: 13233 - DNA, 25 bp, probe
caaatagtgattagaagacgaccat

SEQ ID NO: 13234 - DNA, 25 bp, probe
catctcttgtttccttcagtcaaag

SEQ ID NO: 13235 - DNA, 25 bp, probe
aacctggaaagttcatctcttgttt

SEQ ID NO: 13236 - DNA, 25 bp, probe
tcatctcttgtttccttcagtcaaa

SEQ ID NO: 13237 - DNA, 25 bp, probe
ttcatctcttgtttccttcagtcaa

SEQ ID NO: 13238 - DNA, 25 bp, probe
tagtgattagaagacgaccattctg

SEQ ID NO: 13239 - DNA, 25 bp, probe
gccaaatagtgattagaagacgacc

SEQ ID NO: 13240 - DNA, 25 bp, probe
gggttcaaatgccaaatagtgatta

SEQ ID NO: 13241 - DNA, 25 bp, probe
gtgattagaagacgaccattctgat

SEQ ID NO: 13242 - DNA, 25 bp, probe
cttcagtcaaagaaagtccattgta

SEQ ID NO: 13243 - DNA, 25 bp, probe
gattagaagacgaccattctgatct

SEQ ID NO: 13244 - DNA, 25 bp, probe
attagaagacgaccattctgatctg

SEQ ID NO: 13245 - DNA, 25 bp, probe
tgattagaagacgaccattctgatc

SEQ ID NO: 13246 - DNA, 25 bp, probe
tgaatgttgctgaactctttgtata

SEQ ID NO: 13247 - DNA, 25 bp, probe
tccttcagtcaaagaaagtccattg

SEQ ID NO: 13248 - DNA, 25 bp, probe
agtgaatgttgctgaactctttgta

SEQ ID NO: 13249 - DNA, 25 bp, probe
atagtgattagaagacgaccattct

SEQ ID NO: 13250 - DNA, 25 bp, probe
attgttcctttcacactttcctttg

SEQ ID NO: 13251 - DNA, 25 bp, probe
cattgttcctttcacactttccttt

SEQ ID NO: 13252 - DNA, 25 bp, probe
agtgattagaagacgaccattctga

SEQ ID NO: 13253 - DNA, 25 bp, probe
ccttcagtcaaagaaagtccattgt

SEQ ID NO: 13254 - DNA, 25 bp, probe
ccattctcataagattctctcatca

SEQ ID NO: 13255 - DNA, 25 bp, probe
accattctcataagattctctcatc

SEQ ID NO: 13256 - DNA, 25 bp, probe
gggctgtgtttatttattcattgct

SEQ ID NO: 13257 - DNA, 25 bp, probe
agggctgtgtttatttattcattgc

SEQ ID NO: 13258 - DNA, 25 bp, probe
gtaccattctcataagattctctca

SEQ ID NO: 13259 - DNA, 25 bp, probe
tgtaccattctcataagattctctc

SEQ ID NO: 13260 - DNA, 25 bp, probe
ggctgtgtttatttattcattgctt

SEQ ID NO: 13261 - DNA, 25 bp, probe
cagggctgtgtttatttattcattg

SEQ ID NO: 13262 - DNA, 25 bp, probe
taccattctcataagattctctcat

SEQ ID NO: 13263 - DNA, 25 bp, probe
tcatgtaccattctcataagattct

SEQ ID NO: 13264 - DNA, 25 bp, probe
actcaatcctagaagctgattatca

SEQ ID NO: 13265 - DNA, 25 bp, probe
catccaaattcatgtaccattctca

SEQ ID NO: 13266 - DNA, 25 bp, probe
atgtaccattctcataagattctct

SEQ ID NO: 13267 - DNA, 25 bp, probe
catgtaccattctcataagattctc

SEQ ID NO: 13268 - DNA, 25 bp, probe
cattctcataagattctctcatcaa

SEQ ID NO: 13269 - DNA, 25 bp, probe
atccaaattcatgtaccattctcat

SEQ ID NO: 13270 - DNA, 25 bp, probe
aactcaatcctagaagctgattatc

SEQ ID NO: 13271 - DNA, 25 bp, probe
gctgtgtttatttattcattgcttt

SEQ ID NO: 13272 - DNA, 25 bp, probe
ttcatgtaccattctcataagattc

SEQ ID NO: 13273 - DNA, 25 bp, probe
ctcaatcctagaagctgattatcat

SEQ ID NO: 13274 - DNA, 25 bp, probe
acagggctgtgtttatttattcatt

SEQ ID NO: 13275 - DNA, 25 bp, probe
tccaaattcatgtaccattctcata

SEQ ID NO: 13276 - DNA, 25 bp, probe
tcctagaagctgattatcattactt

SEQ ID NO: 13277 - DNA, 25 bp, probe
tcaatcctagaagctgattatcatt

SEQ ID NO: 13278 - DNA, 25 bp, probe
atcctagaagctgattatcattact

SEQ ID NO: 13279 - DNA, 25 bp, probe
tttctgggaaactcaatcctagaag

SEQ ID NO: 13280 - DNA, 25 bp, probe
ccaaattcatgtaccattctcataa

SEQ ID NO: 13281 - DNA, 25 bp, probe
ggaaactcaatcctagaagctgatt

SEQ ID NO: 13282 - DNA, 25 bp, probe
attcatgtaccattctcataagatt

SEQ ID NO: 13283 - DNA, 25 bp, probe
aattcatgtaccattctcataagat

SEQ ID NO: 13284 - DNA, 25 bp, probe
ttcaaattaaaactctgtaccgcac

SEQ ID NO: 13285 - DNA, 25 bp, probe
tttcaaattaaaactctgtaccgca

SEQ ID NO: 13286 - DNA, 25 bp, probe
agacctctttaatttgtaactgatt

SEQ ID NO: 13287 - DNA, 25 bp, probe
acatccaaattcatgtaccattctc

SEQ ID NO: 13288 - DNA, 25 bp, probe
gaaactcaatcctagaagctgatta

SEQ ID NO: 13289 - DNA, 25 bp, probe
ctttcaaattaaaactctgtaccgc

SEQ ID NO: 13290 - DNA, 25 bp, probe
gggaaactcaatcctagaagctgat

SEQ ID NO: 13291 - DNA, 25 bp, probe
ttctgggaaactcaatcctagaagc

SEQ ID NO: 13292 - DNA, 25 bp, probe
aagacctctttaatttgtaactgat

SEQ ID NO: 13293 - DNA, 25 bp, probe
aaactcaatcctagaagctgattat

SEQ ID NO: 13294 - DNA, 25 bp, probe
cctaacagggctgtgtttatttatt

SEQ ID NO: 13295 - DNA, 25 bp, probe
actttcaaattaaaactctgtaccg

SEQ ID NO: 13296 - DNA, 25 bp, probe
aatcctagaagctgattatcattac

SEQ ID NO: 13297 - DNA, 25 bp, probe
caatcctagaagctgattatcatta

SEQ ID NO: 13298 - DNA, 25 bp, probe
gactgatctctcttctcttcttgaa

SEQ ID NO: 13299 - DNA, 25 bp, probe
agactgatctctcttctcttcttga

SEQ ID NO: 13300 - DNA, 25 bp, probe
cagactgatctctcttctcttcttg

SEQ ID NO: 13301 - DNA, 25 bp, probe
actgatctctcttctcttcttgaat

SEQ ID NO: 13302 - DNA, 25 bp, probe
ccagactgatctctcttctcttctt

SEQ ID NO: 13303 - DNA, 25 bp, probe
cagttagaatgtgtaatgaagatgg

SEQ ID NO: 13304 - DNA, 25 bp, probe
ccagacagttagaatgtgtaatgaa

SEQ ID NO: 13305 - DNA, 25 bp, probe
agttagaatgtgtaatgaagatgga

SEQ ID NO: 13306 - DNA, 25 bp, probe
cagacagttagaatgtgtaatgaag

SEQ ID NO: 13307 - DNA, 25 bp, probe
gttagaatgtgtaatgaagatggaa

SEQ ID NO: 13308 - DNA, 25 bp, probe
gtagatgacaatggatttaaccctg

SEQ ID NO: 13309 - DNA, 25 bp, probe
agacagttagaatgtgtaatgaaga

SEQ ID NO: 13310 - DNA, 25 bp, probe
aaggactgacagaagcatccatatt

SEQ ID NO: 13311 - DNA, 25 bp, probe
caagaaatggtggagataaaggatt

SEQ ID NO: 13312 - DNA, 25 bp, probe
aaatggtggagataaaggattctgt

SEQ ID NO: 13313 - DNA, 25 bp, probe
aatggtggagataaaggattctgtg

SEQ ID NO: 13314 - DNA, 25 bp, probe
gaaatggtggagataaaggattctg

SEQ ID NO: 13315 - DNA, 25 bp, probe
ctgatctctcttctcttcttgaata

SEQ ID NO: 13316 - DNA, 25 bp, probe
aagaaatggtggagataaaggattc

SEQ ID NO: 13317 - DNA, 25 bp, probe
gaaggactgacagaagcatccatat

SEQ ID NO: 13318 - DNA, 25 bp, probe
gaagcgatccattggagatagaatt

SEQ ID NO: 13319 - DNA, 25 bp, probe
aatctatggaaagaacagacaactc

SEQ ID NO: 13320 - DNA, 25 bp, probe
atggtggagataaaggattctgtgt

SEQ ID NO: 13321 - DNA, 25 bp, probe
cccagacagttagaatgtgtaatga

SEQ ID NO: 13322 - DNA, 25 bp, probe
tagatgacaatggatttaaccctgt

SEQ ID NO: 13323 - DNA, 25 bp, probe
actgacagaagcatccatatttgta

SEQ ID NO: 13324 - DNA, 25 bp, probe
cattatgtacggaagcgatccattg

SEQ ID NO: 13325 - DNA, 25 bp, probe
aaatctatggaaagaacagacaact

SEQ ID NO: 13326 - DNA, 25 bp, probe
tgaaatctatggaaagaacagacaa

SEQ ID NO: 13327 - DNA, 25 bp, probe
acagttagaatgtgtaatgaagatg

SEQ ID NO: 13328 - DNA, 25 bp, probe
tttacagtacacatgccagaaatag

SEQ ID NO: 13329 - DNA, 25 bp, probe
tgtggtagatgacaatggatttaac

SEQ ID NO: 13330 - DNA, 25 bp, probe
gtgtggtagatgacaatggatttaa

SEQ ID NO: 13331 - DNA, 25 bp, probe
cgtgtggtagatgacaatggattta

SEQ ID NO: 13332 - DNA, 25 bp, probe
gaaatctatggaaagaacagacaac

SEQ ID NO: 13333 - DNA, 25 bp, probe
atgaaatctatggaaagaacagaca

SEQ ID NO: 13334 - DNA, 25 bp, probe
tatttggaaggactgacagaagcat

SEQ ID NO: 13335 - DNA, 25 bp, probe
agatgacaatggatttaaccctgtg

SEQ ID NO: 13336 - DNA, 25 bp, probe
ttacagtacacatgccagaaatagc

SEQ ID NO: 13337 - DNA, 25 bp, probe
gactgacagaagcatccatatttgt

SEQ ID NO: 13338 - DNA, 25 bp, probe
gtctatttggaaggactgacagaag

SEQ ID NO: 13339 - DNA, 25 bp, probe
acatttacagtacacatgccagaaa

SEQ ID NO: 13340 - DNA, 25 bp, probe
gatgacaatggatttaaccctgtgt

SEQ ID NO: 13341 - DNA, 25 bp, probe
gacagttagaatgtgtaatgaagat

SEQ ID NO: 13342 - DNA, 25 bp, probe
attctactgaaggacatcttggttg

SEQ ID NO: 13343 - DNA, 25 bp, probe
tattctactgaaggacatcttggtt

SEQ ID NO: 13344 - DNA, 25 bp, probe
ttattctactgaaggacatcttggt

SEQ ID NO: 13345 - DNA, 25 bp, probe
attattctactgaaggacatcttgg

SEQ ID NO: 13346 - DNA, 25 bp, probe
ccattattctactgaaggacatctt

SEQ ID NO: 13347 - DNA, 25 bp, probe
tccattattctactgaaggacatct

SEQ ID NO: 13348 - DNA, 25 bp, probe
ctactgaaggacatcttggttgctt

SEQ ID NO: 13349 - DNA, 25 bp, probe
ttctactgaaggacatcttggttgc

SEQ ID NO: 13350 - DNA, 25 bp, probe
cattattctactgaaggacatcttg

SEQ ID NO: 13351 - DNA, 25 bp, probe
atccattattctactgaaggacatc

SEQ ID NO: 13352 - DNA, 25 bp, probe
tctactgaaggacatcttggttgct

SEQ ID NO: 13353 - DNA, 25 bp, probe
cagccagaatggatgtactacactt

SEQ ID NO: 13354 - DNA, 25 bp, probe
tactgaaggacatcttggttgcttt

SEQ ID NO: 13355 - DNA, 25 bp, probe
ttatccattattctactgaaggaca

SEQ ID NO: 13356 - DNA, 25 bp, probe
gccagaatggatgtactacacttta

SEQ ID NO: 13357 - DNA, 25 bp, probe
tatccattattctactgaaggacat

SEQ ID NO: 13358 - DNA, 25 bp, probe
agccagaatggatgtactacacttt

SEQ ID NO: 13359 - DNA, 25 bp, probe
ccagaatggatgtactacactttat

SEQ ID NO: 13360 - DNA, 25 bp, probe
atcttggttgcttttaagttatggc

SEQ ID NO: 13361 - DNA, 25 bp, probe
ggacatcttggttgcttttaagtta

SEQ ID NO: 13362 - DNA, 25 bp, probe
gaaggacatcttggttgcttttaag

SEQ ID NO: 13363 - DNA, 25 bp, probe
aggacatcttggttgcttttaagtt

SEQ ID NO: 13364 - DNA, 25 bp, probe
aaggacatcttggttgcttttaagt

SEQ ID NO: 13365 - DNA, 25 bp, probe
catcttggttgcttttaagttatgg

SEQ ID NO: 13366 - DNA, 25 bp, probe
tgaaggacatcttggttgcttttaa

SEQ ID NO: 13367 - DNA, 25 bp, probe
cagaatggatgtactacactttatc

SEQ ID NO: 13368 - DNA, 25 bp, probe
ctgaaggacatcttggttgctttta

SEQ ID NO: 13369 - DNA, 25 bp, probe
aagttatggcaattatgaataaagc

SEQ ID NO: 13370 - DNA, 25 bp, probe
ccagccagaatggatgtactacact

SEQ ID NO: 13371 - DNA, 25 bp, probe
acatcttggttgcttttaagttatg

SEQ ID NO: 13372 - DNA, 25 bp, probe
agttatggcaattatgaataaagct

SEQ ID NO: 13373 - DNA, 25 bp, probe
gacatcttggttgcttttaagttat

SEQ ID NO: 13374 - DNA, 25 bp, probe
actttatccattattctactgaagg

SEQ ID NO: 13375 - DNA, 25 bp, probe
acactttatccattattctactgaa

SEQ ID NO: 13376 - DNA, 25 bp, probe
actgaaggacatcttggttgctttt

SEQ ID NO: 13377 - DNA, 25 bp, probe
tttatccattattctactgaaggac

SEQ ID NO: 13378 - DNA, 25 bp, probe
agaatggatgtactacactttatcc

SEQ ID NO: 13379 - DNA, 25 bp, probe
gcttttaagttatggcaattatgaa

SEQ ID NO: 13380 - DNA, 25 bp, probe
ctttatccattattctactgaagga

SEQ ID NO: 13381 - DNA, 25 bp, probe
cactttatccattattctactgaag

SEQ ID NO: 13382 - DNA, 25 bp, probe
ggcaattatgaataaagcttctaca

SEQ ID NO: 13383 - DNA, 25 bp, probe
tggcaattatgaataaagcttctac

SEQ ID NO: 13384 - DNA, 25 bp, probe
tacactttatccattattctactga

SEQ ID NO: 13385 - DNA, 25 bp, probe
actacactttatccattattctact

SEQ ID NO: 13386 - DNA, 25 bp, probe
ggctcagcagaatgttattataggt

SEQ ID NO: 13387 - DNA, 25 bp, probe
tggctcagcagaatgttattatagg

SEQ ID NO: 13388 - DNA, 25 bp, probe
gttggctcagcagaatgttattata

SEQ ID NO: 13389 - DNA, 25 bp, probe
tgttggctcagcagaatgttattat

SEQ ID NO: 13390 - DNA, 25 bp, probe
atgttggctcagcagaatgttatta

SEQ ID NO: 13391 - DNA, 25 bp, probe
tcagcagaatgttattataggtagc

SEQ ID NO: 13392 - DNA, 25 bp, probe
ttggctcagcagaatgttattatag

SEQ ID NO: 13393 - DNA, 25 bp, probe
gcttgtgctatatgctaagaatatg

SEQ ID NO: 13394 - DNA, 25 bp, probe
gctcagcagaatgttattataggta

SEQ ID NO: 13395 - DNA, 25 bp, probe
ttcaccatacagacttgacagcata

SEQ ID NO: 13396 - DNA, 25 bp, probe
tgctatatgctaagaatatgttgga

SEQ ID NO: 13397 - DNA, 25 bp, probe
gtgctatatgctaagaatatgttgg

SEQ ID NO: 13398 - DNA, 25 bp, probe
tatggtagaagctcaagatggaatg

SEQ ID NO: 13399 - DNA, 25 bp, probe
ttatggtagaagctcaagatggaat

SEQ ID NO: 13400 - DNA, 25 bp, probe
cttatggtagaagctcaagatggaa

SEQ ID NO: 13401 - DNA, 25 bp, probe
tcaccatacagacttgacagcatag

SEQ ID NO: 13402 - DNA, 25 bp, probe
caccatacagacttgacagcatagt

SEQ ID NO: 13403 - DNA, 25 bp, probe
gtatttaccaagacaaccgtgagta

SEQ ID NO: 13404 - DNA, 25 bp, probe
catgttggctcagcagaatgttatt

SEQ ID NO: 13405 - DNA, 25 bp, probe
gttgtcgtgggtagtaaaggtattt

SEQ ID NO: 13406 - DNA, 25 bp, probe
cagtgaggaagaatgaacaaattga

SEQ ID NO: 13407 - DNA, 25 bp, probe
gcagaatgttattataggtagctca

SEQ ID NO: 13408 - DNA, 25 bp, probe
tgtgctatatgctaagaatatgttg

SEQ ID NO: 13409 - DNA, 25 bp, probe
agtgaggaagaatgaacaaattgaa

SEQ ID NO: 13410 - DNA, 25 bp, probe
ttgtcgtgggtagtaaaggtattta

SEQ ID NO: 13411 - DNA, 25 bp, probe
cttcaccatacagacttgacagcat

SEQ ID NO: 13412 - DNA, 25 bp, probe
tcagtgaggaagaatgaacaaattg

SEQ ID NO: 13413 - DNA, 25 bp, probe
gctatatgctaagaatatgttggaa

SEQ ID NO: 13414 - DNA, 25 bp, probe
cttgtgctatatgctaagaatatgt

SEQ ID NO: 13415 - DNA, 25 bp, probe
aaccgtgagtaaagaaaggcaaatt

SEQ ID NO: 13416 - DNA, 25 bp, probe
atggtagaagctcaagatggaatgg

SEQ ID NO: 13417 - DNA, 25 bp, probe
taccaagacaaccgtgagtaaagaa

SEQ ID NO: 13418 - DNA, 25 bp, probe
gtgaggaagaatgaacaaattgaat

SEQ ID NO: 13419 - DNA, 25 bp, probe
ctcagcagaatgttattataggtag

SEQ ID NO: 13420 - DNA, 25 bp, probe
caagacaaccgtgagtaaagaaagg

SEQ ID NO: 13421 - DNA, 25 bp, probe
ccaagacaaccgtgagtaaagaaag

SEQ ID NO: 13422 - DNA, 25 bp, probe
caaccgtgagtaaagaaaggcaaat

SEQ ID NO: 13423 - DNA, 25 bp, probe
ggttgtcgtgggtagtaaaggtatt

SEQ ID NO: 13424 - DNA, 25 bp, probe
ttgtgctatatgctaagaatatgtt

SEQ ID NO: 13425 - DNA, 25 bp, probe
cagggaacgagctattatttgaatg

SEQ ID NO: 13426 - DNA, 25 bp, probe
tatttaccaagacaaccgtgagtaa

SEQ ID NO: 13427 - DNA, 25 bp, probe
agggaacgagctattatttgaatgt

SEQ ID NO: 13428 - DNA, 25 bp, probe
tgagcttgtgctatatgctaagaat

SEQ ID NO: 13429 - DNA, 25 bp, probe
accaagacaaccgtgagtaaagaaa

SEQ ID NO: 13430 - DNA, 25 bp, probe
ataaacaatcattgacccatgccta

SEQ ID NO: 13431 - DNA, 25 bp, probe
aataaacaatcattgacccatgcct

SEQ ID NO: 13432 - DNA, 25 bp, probe
taaacaatcattgacccatgcctac

SEQ ID NO: 13433 - DNA, 25 bp, probe
caataaacaatcattgacccatgcc

SEQ ID NO: 13434 - DNA, 25 bp, probe
aaacaatcattgacccatgcctact

SEQ ID NO: 13435 - DNA, 25 bp, probe
aacaatcattgacccatgcctactc

SEQ ID NO: 13436 - DNA, 25 bp, probe
gttgcccaataaatttaggagagtc

SEQ ID NO: 13437 - DNA, 25 bp, probe
ctgttgcccaataaatttaggagag

SEQ ID NO: 13438 - DNA, 25 bp, probe
tgttgcccaataaatttaggagagt

SEQ ID NO: 13439 - DNA, 25 bp, probe
cctgttgcccaataaatttaggaga

SEQ ID NO: 13440 - DNA, 25 bp, probe
ttgcccaataaatttaggagagtcc

SEQ ID NO: 13441 - DNA, 25 bp, probe
gcctgttgcccaataaatttaggag

SEQ ID NO: 13442 - DNA, 25 bp, probe
tgcccaataaatttaggagagtccc

SEQ ID NO: 13443 - DNA, 25 bp, probe
acaatcattgacccatgcctactcc

SEQ ID NO: 13444 - DNA, 25 bp, probe
cagcctgttgcccaataaatttagg

SEQ ID NO: 13445 - DNA, 25 bp, probe
agcctgttgcccaataaatttagga

SEQ ID NO: 13446 - DNA, 25 bp, probe
tcaataaacaatcattgacccatgc

SEQ ID NO: 13447 - DNA, 25 bp, probe
ttcaataaacaatcattgacccatg

SEQ ID NO: 13448 - DNA, 25 bp, probe
gcagcctgttgcccaataaatttag

SEQ ID NO: 13449 - DNA, 25 bp, probe
attcaataaacaatcattgacccat

SEQ ID NO: 13450 - DNA, 25 bp, probe
tattcaataaacaatcattgaccca

SEQ ID NO: 13451 - DNA, 25 bp, probe
gcccaataaatttaggagagtcccc

SEQ ID NO: 13452 - DNA, 25 bp, probe
ttattcaataaacaatcattgaccc

SEQ ID NO: 13453 - DNA, 25 bp, probe
gaagatcacttgagatcaggagttc

SEQ ID NO: 13454 - DNA, 25 bp, probe
atcacttgagatcaggagttcgaga

SEQ ID NO: 13455 - DNA, 25 bp, probe
ggaagatcacttgagatcaggagtt

SEQ ID NO: 13456 - DNA, 25 bp, probe
aagatcacttgagatcaggagttcg

SEQ ID NO: 13457 - DNA, 25 bp, probe
caggaagatcacttgagatcaggag

SEQ ID NO: 13458 - DNA, 25 bp, probe
aggaagatcacttgagatcaggagt

SEQ ID NO: 13459 - DNA, 25 bp, probe
catgcctataatcccagctactcag

SEQ ID NO: 13460 - DNA, 25 bp, probe
tcacttgagatcaggagttcgagac

SEQ ID NO: 13461 - DNA, 25 bp, probe
aaataaataaataggccaggcacag

SEQ ID NO: 13462 - DNA, 25 bp, probe
aataaataaataggccaggcacagt

SEQ ID NO: 13463 - DNA, 25 bp, probe
ataaataaataggccaggcacagtg

SEQ ID NO: 13464 - DNA, 25 bp, probe
gatcacttgagatcaggagttcgag

SEQ ID NO: 13465 - DNA, 25 bp, probe
gatcacttgaggtcaggagttggag

SEQ ID NO: 13466 - DNA, 25 bp, probe
aaaatacaaaagttagccaggcatg

SEQ ID NO: 13467 - DNA, 25 bp, probe
cttgagatcaggagttcgagaccag

SEQ ID NO: 13468 - DNA, 25 bp, probe
atcacttgaggtcaggagttggaga

SEQ ID NO: 13469 - DNA, 25 bp, probe
agatcacttgagatcaggagttcga

SEQ ID NO: 13470 - DNA, 25 bp, probe
aggtgaaaccccatctctactaaaa

SEQ ID NO: 13471 - DNA, 25 bp, probe
cacttgagatcaggagttcgagacc

SEQ ID NO: 13472 - DNA, 25 bp, probe
gcaggaagatcacttgagatcagga

SEQ ID NO: 13473 - DNA, 25 bp, probe
aggcaggaagatcacttgagatcag

SEQ ID NO: 13474 - DNA, 25 bp, probe
gaggcaggaagatcacttgagatca

SEQ ID NO: 13475 - DNA, 25 bp, probe
cctataatcccagctactcaggagg

SEQ ID NO: 13476 - DNA, 25 bp, probe
ttgagatcaggagttcgagaccagt

SEQ ID NO: 13477 - DNA, 25 bp, probe
atgcctataatcccagctactcagg

SEQ ID NO: 13478 - DNA, 25 bp, probe
caggtgaaaccccatctctactaaa

SEQ ID NO: 13479 - DNA, 25 bp, probe
gtggatcacttgaggtcaggagttg

SEQ ID NO: 13480 - DNA, 25 bp, probe
acttgagatcaggagttcgagacca

SEQ ID NO: 13481 - DNA, 25 bp, probe
gagatcaggagttcgagaccagtct

SEQ ID NO: 13482 - DNA, 25 bp, probe
ctataatcccagctactcaggaggc

SEQ ID NO: 13483 - DNA, 25 bp, probe
gcctataatcccagctactcaggag

SEQ ID NO: 13484 - DNA, 25 bp, probe
ctgacgcataagacttgcttgaacc

SEQ ID NO: 13485 - DNA, 25 bp, probe
tgagatcaggagttcgagaccagtc

SEQ ID NO: 13486 - DNA, 25 bp, probe
aaatacaaaagttagccaggcatgg

SEQ ID NO: 13487 - DNA, 25 bp, probe
acaggtgaaaccccatctctactaa

SEQ ID NO: 13488 - DNA, 25 bp, probe
aacaggtgaaaccccatctctacta

SEQ ID NO: 13489 - DNA, 25 bp, probe
aaaataaataaataggccaggcaca

SEQ ID NO: 13490 - DNA, 25 bp, probe
ggcaggaagatcacttgagatcagg

SEQ ID NO: 13491 - DNA, 25 bp, probe
taaataaataggccaggcacagtgg

SEQ ID NO: 13492 - DNA, 25 bp, probe
ctcatgcctgtaatcccagcaattt

SEQ ID NO: 13493 - DNA, 25 bp, probe
tgcctataatcccagctactcagga

SEQ ID NO: 13494 - DNA, 25 bp, probe
agatcaggagttcgagaccagtctg

SEQ ID NO: 13495 - DNA, 25 bp, probe
cgaggcaggaagatcacttgagatc

SEQ ID NO: 13496 - DNA, 25 bp, probe
gctgacgcataagacttgcttgaac

SEQ ID NO: 13497 - DNA, 25 bp, probe
tattctggcactcctcttcctgtta

SEQ ID NO: 13498 - DNA, 25 bp, probe
gtctttctgtgatgccttattcttc

SEQ ID NO: 13499 - DNA, 25 bp, probe
tgtctttctgtgatgccttattctt

SEQ ID NO: 13500 - DNA, 25 bp, probe
ctgtctttctgtgatgccttattct

SEQ ID NO: 13501 - DNA, 25 bp, probe
actgtctttctgtgatgccttattc

SEQ ID NO: 13502 - DNA, 25 bp, probe
ttattcttcacaaagcatccctcaa

SEQ ID NO: 13503 - DNA, 25 bp, probe
cttattcttcacaaagcatccctca

SEQ ID NO: 13504 - DNA, 25 bp, probe
tctttctgtgatgccttattcttca

SEQ ID NO: 13505 - DNA, 25 bp, probe
tattcttcacaaagcatccctcaac

SEQ ID NO: 13506 - DNA, 25 bp, probe
ccttattcttcacaaagcatccctc

SEQ ID NO: 13507 - DNA, 25 bp, probe
attctggcactcctcttcctgttaa

SEQ ID NO: 13508 - DNA, 25 bp, probe
ccatgagaattcacttgagaggtat

SEQ ID NO: 13509 - DNA, 25 bp, probe
cactgtctttctgtgatgccttatt

SEQ ID NO: 13510 - DNA, 25 bp, probe
catgagaattcacttgagaggtatt

SEQ ID NO: 13511 - DNA, 25 bp, probe
gtattctggcactcctcttcctgtt

SEQ ID NO: 13512 - DNA, 25 bp, probe
attcttcacaaagcatccctcaaca

SEQ ID NO: 13513 - DNA, 25 bp, probe
accatgagaattcacttgagaggta

SEQ ID NO: 13514 - DNA, 25 bp, probe
gccttattcttcacaaagcatccct

SEQ ID NO: 13515 - DNA, 25 bp, probe
tattttagtcacttgattgttcccc

SEQ ID NO: 13516 - DNA, 25 bp, probe
aaccatgagaattcacttgagaggt

SEQ ID NO: 13517 - DNA, 25 bp, probe
ttctggcactcctcttcctgttaaa

SEQ ID NO: 13518 - DNA, 25 bp, probe
ttcttcacaaagcatccctcaacac

SEQ ID NO: 13519 - DNA, 25 bp, probe
tcacttgagaggtattttagtcact

SEQ ID NO: 13520 - DNA, 25 bp, probe
aaaccatgagaattcacttgagagg

SEQ ID NO: 13521 - DNA, 25 bp, probe
gtattttagtcacttgattgttccc

SEQ ID NO: 13522 - DNA, 25 bp, probe
ggtattttagtcacttgattgttcc

SEQ ID NO: 13523 - DNA, 25 bp, probe
caaacctttcccatcgtccgtattc

SEQ ID NO: 13524 - DNA, 25 bp, probe
acttgagaggtattttagtcacttg

SEQ ID NO: 13525 - DNA, 25 bp, probe
cacttgagaggtattttagtcactt

SEQ ID NO: 13526 - DNA, 25 bp, probe
ttcacttgagaggtattttagtcac

SEQ ID NO: 13527 - DNA, 25 bp, probe
agaggtattttagtcacttgattgt

SEQ ID NO: 13528 - DNA, 25 bp, probe
cttgagaggtattttagtcacttga

SEQ ID NO: 13529 - DNA, 25 bp, probe
aaacctttcccatcgtccgtattct

SEQ ID NO: 13530 - DNA, 25 bp, probe
actcctcttcctgttaaaaccatga

SEQ ID NO: 13531 - DNA, 25 bp, probe
cactcctcttcctgttaaaaccatg

SEQ ID NO: 13532 - DNA, 25 bp, probe
cctcttcctgttaaaaccatgagaa

SEQ ID NO: 13533 - DNA, 25 bp, probe
tcttcctgttaaaaccatgagaatt

SEQ ID NO: 13534 - DNA, 25 bp, probe
gagaggtattttagtcacttgattg

SEQ ID NO: 13535 - DNA, 25 bp, probe
ctcttcctgttaaaaccatgagaat

SEQ ID NO: 13536 - DNA, 25 bp, probe
ctcctcttcctgttaaaaccatgag

SEQ ID NO: 13537 - DNA, 25 bp, probe
atgagaattcacttgagaggtattt

SEQ ID NO: 13538 - DNA, 25 bp, probe
gtgtggtgttgtgcatctgtaatcc

SEQ ID NO: 13539 - DNA, 25 bp, probe
ggtgtggtgttgtgcatctgtaatc

SEQ ID NO: 13540 - DNA, 25 bp, probe
atagtgaaaccccgtctctactaaa

SEQ ID NO: 13541 - DNA, 25 bp, probe
ttgtagaaacagtgttgccatattc

SEQ ID NO: 13542 - DNA, 25 bp, probe
aaacagtgttgccatattctccaaa

SEQ ID NO: 13543 - DNA, 25 bp, probe
tttgtagaaacagtgttgccatatt

SEQ ID NO: 13544 - DNA, 25 bp, probe
atattctccaaactggtctcaaact

SEQ ID NO: 13545 - DNA, 25 bp, probe
catattctccaaactggtctcaaac

SEQ ID NO: 13546 - DNA, 25 bp, probe
tattctccaaactggtctcaaactc

SEQ ID NO: 13547 - DNA, 25 bp, probe
ccatattctccaaactggtctcaaa

SEQ ID NO: 13548 - DNA, 25 bp, probe
gaaacagtgttgccatattctccaa

SEQ ID NO: 13549 - DNA, 25 bp, probe
aacagtgttgccatattctccaaac

SEQ ID NO: 13550 - DNA, 25 bp, probe
aaatgctgggattacagatggatgt

SEQ ID NO: 13551 - DNA, 25 bp, probe
acagtgttgccatattctccaaact

SEQ ID NO: 13552 - DNA, 25 bp, probe
gtagaaacagtgttgccatattctc

SEQ ID NO: 13553 - DNA, 25 bp, probe
tgtagaaacagtgttgccatattct

SEQ ID NO: 13554 - DNA, 25 bp, probe
tactcagtagtcttaggtgggaaga

SEQ ID NO: 13555 - DNA, 25 bp, probe
tagaaacagtgttgccatattctcc

SEQ ID NO: 13556 - DNA, 25 bp, probe
tagtcttaggtgggaagatcacttg

SEQ ID NO: 13557 - DNA, 25 bp, probe
gtagtcttaggtgggaagatcactt

SEQ ID NO: 13558 - DNA, 25 bp, probe
ctcagtagtcttaggtgggaagatc

SEQ ID NO: 13559 - DNA, 25 bp, probe
aatgctgggattacagatggatgtg

SEQ ID NO: 13560 - DNA, 25 bp, probe
ggtcctagctactcagtagtcttag

SEQ ID NO: 13561 - DNA, 25 bp, probe
attctccaaactggtctcaaactcc

SEQ ID NO: 13562 - DNA, 25 bp, probe
actcagtagtcttaggtgggaagat

SEQ ID NO: 13563 - DNA, 25 bp, probe
cagtagtcttaggtgggaagatcac

SEQ ID NO: 13564 - DNA, 25 bp, probe
ctagctactcagtagtcttaggtgg

SEQ ID NO: 13565 - DNA, 25 bp, probe
gccatattctccaaactggtctcaa

SEQ ID NO: 13566 - DNA, 25 bp, probe
ttgccatattctccaaactggtctc

SEQ ID NO: 13567 - DNA, 25 bp, probe
tcttaggtgggaagatcacttgaac

SEQ ID NO: 13568 - DNA, 25 bp, probe
gtcttaggtgggaagatcacttgaa

SEQ ID NO: 13569 - DNA, 25 bp, probe
agtagtcttaggtgggaagatcact

SEQ ID NO: 13570 - DNA, 25 bp, probe
tcagtagtcttaggtgggaagatca

SEQ ID NO: 13571 - DNA, 25 bp, probe
tggtcctagctactcagtagtctta

SEQ ID NO: 13572 - DNA, 25 bp, probe
ctactcagtagtcttaggtgggaag

SEQ ID NO: 13573 - DNA, 25 bp, probe
gtcctagctactcagtagtcttagg

SEQ ID NO: 13574 - DNA, 25 bp, probe
cttaggtgggaagatcacttgaacc

SEQ ID NO: 13575 - DNA, 25 bp, probe
gttgccatattctccaaactggtct

SEQ ID NO: 13576 - DNA, 25 bp, probe
cctagctactcagtagtcttaggtg

SEQ ID NO: 13577 - DNA, 25 bp, probe
tcctagctactcagtagtcttaggt

SEQ ID NO: 13578 - DNA, 25 bp, probe
atgctgggattacagatggatgtga

SEQ ID NO: 13579 - DNA, 25 bp, probe
agaaacagtgttgccatattctcca

SEQ ID NO: 13580 - DNA, 25 bp, probe
caccatgcccagctaattttataat

SEQ ID NO: 13581 - DNA, 25 bp, probe
tgttgccatattctccaaactggtc

SEQ ID NO: 13582 - DNA, 25 bp, probe
agtgttgccatattctccaaactgg

SEQ ID NO: 13583 - DNA, 25 bp, probe
aaaatgctgggattacagatggatg

SEQ ID NO: 13584 - DNA, 25 bp, probe
caaaatgctgggattacagatggat

SEQ ID NO: 13585 - DNA, 25 bp, probe
gaagacggtgttaatgatagccatc

SEQ ID NO: 13586 - DNA, 25 bp, probe
atatgtctatcaacacgcatcttgg

SEQ ID NO: 13587 - DNA, 25 bp, probe
acaccaatgaatatgtagcaatcaa

SEQ ID NO: 13588 - DNA, 25 bp, probe
tatatgtctatcaacacgcatcttg

SEQ ID NO: 13589 - DNA, 25 bp, probe
ttgaagacggtgttaatgatagcca

SEQ ID NO: 13590 - DNA, 25 bp, probe
tgaagacggtgttaatgatagccat

SEQ ID NO: 13591 - DNA, 25 bp, probe
gcaagatatatgtctatcaacacgc

SEQ ID NO: 13592 - DNA, 25 bp, probe
caagatatatgtctatcaacacgca

SEQ ID NO: 13593 - DNA, 25 bp, probe
aagacggtgttaatgatagccatcc

SEQ ID NO: 13594 - DNA, 25 bp, probe
tacacattatagactttggactggc

SEQ ID NO: 13595 - DNA, 25 bp, probe
aatatgtagcaatcaaactggaacc

SEQ ID NO: 13596 - DNA, 25 bp, probe
gatatatgtctatcaacacgcatct

SEQ ID NO: 13597 - DNA, 25 bp, probe
agatatatgtctatcaacacgcatc

SEQ ID NO: 13598 - DNA, 25 bp, probe
ctttgaagacggtgttaatgatagc

SEQ ID NO: 13599 - DNA, 25 bp, probe
gtgaccgaacatttactttgaagac

SEQ ID NO: 13600 - DNA, 25 bp, probe
aactggaactgcaagatatatgtct

SEQ ID NO: 13601 - DNA, 25 bp, probe
actttgaagacggtgttaatgatag

SEQ ID NO: 13602 - DNA, 25 bp, probe
gtagcaatcaaactggaaccaataa

SEQ ID NO: 13603 - DNA, 25 bp, probe
tttactttgaagacggtgttaatga

SEQ ID NO: 13604 - DNA, 25 bp, probe
atatgtagcaatcaaactggaacca

SEQ ID NO: 13605 - DNA, 25 bp, probe
atatatgtctatcaacacgcatctt

SEQ ID NO: 13606 - DNA, 25 bp, probe
aagatatatgtctatcaacacgcat

SEQ ID NO: 13607 - DNA, 25 bp, probe
actggaactgcaagatatatgtcta

SEQ ID NO: 13608 - DNA, 25 bp, probe
tgtagcaatcaaactggaaccaata

SEQ ID NO: 13609 - DNA, 25 bp, probe
tatgtagcaatcaaactggaaccaa

SEQ ID NO: 13610 - DNA, 25 bp, probe
ttactttgaagacggtgttaatgat

SEQ ID NO: 13611 - DNA, 25 bp, probe
caagtgtatttgaaatggttcctcc

SEQ ID NO: 13612 - DNA, 25 bp, probe
tagcaatcaaactggaaccaataaa

SEQ ID NO: 13613 - DNA, 25 bp, probe
taactggaactgcaagatatatgtc

SEQ ID NO: 13614 - DNA, 25 bp, probe
tttgaagacggtgttaatgatagcc

SEQ ID NO: 13615 - DNA, 25 bp, probe
gaatatgtagcaatcaaactggaac

SEQ ID NO: 13616 - DNA, 25 bp, probe
atgtagcaatcaaactggaaccaat

SEQ ID NO: 13617 - DNA, 25 bp, probe
ctcaaagaacctcatttaccgagat

SEQ ID NO: 13618 - DNA, 25 bp, probe
caaggcaataagaaagagcatgtta

SEQ ID NO: 13619 - DNA, 25 bp, probe
actttggaccatgtgggaaatataa

SEQ ID NO: 13620 - DNA, 25 bp, probe
ttactttggaccatgtgggaaatat

SEQ ID NO: 13621 - DNA, 25 bp, probe
attactttggaccatgtgggaaata

SEQ ID NO: 13622 - DNA, 25 bp, probe
tattactttggaccatgtgggaaat

SEQ ID NO: 13623 - DNA, 25 bp, probe
aaagaacctcatttaccgagatgtc

SEQ ID NO: 13624 - DNA, 25 bp, probe
tcaaagaacctcatttaccgagatg

SEQ ID NO: 13625 - DNA, 25 bp, probe
gacggtgttaatgatagccatccag

SEQ ID NO: 13626 - DNA, 25 bp, probe
tgaccgaacatttactttgaagacg

SEQ ID NO: 13627 - DNA, 25 bp, probe
atacacattatagactttggactgg

SEQ ID NO: 13628 - DNA, 25 bp, probe
tgcaagatatatgtctatcaacacg

SEQ ID NO: 13629 - DNA, 25 bp, probe
ttcttatcttaattgcgtcctacac

SEQ ID NO: 13630 - DNA, 25 bp, probe
ccttctgtggtcctaatatcataga

SEQ ID NO: 13631 - DNA, 25 bp, probe
cacgcaatgatacaacttctcttca

SEQ ID NO: 13632 - DNA, 25 bp, probe
ccttgatctatacactgaggaatgc

SEQ ID NO: 13633 - DNA, 25 bp, probe
gcacgcaatgatacaacttctcttc

SEQ ID NO: 13634 - DNA, 25 bp, probe
tctgtggtcctaatatcatagatca

SEQ ID NO: 13635 - DNA, 25 bp, probe
cttgatctatacactgaggaatgca

SEQ ID NO: 13636 - DNA, 25 bp, probe
cccttctgtggtcctaatatcatag

SEQ ID NO: 13637 - DNA, 25 bp, probe
gccatctttcttatcttaattgcgt

SEQ ID NO: 13638 - DNA, 25 bp, probe
cttctgtggtcctaatatcatagat

SEQ ID NO: 13639 - DNA, 25 bp, probe
tgtggtcctaatatcatagatcact

SEQ ID NO: 13640 - DNA, 25 bp, probe
ttatgcacgcaatgatacaacttct

SEQ ID NO: 13641 - DNA, 25 bp, probe
atgaagaaactctggatgaaatggg

SEQ ID NO: 13642 - DNA, 25 bp, probe
ctgtggtcctaatatcatagatcac

SEQ ID NO: 13643 - DNA, 25 bp, probe
tatgcacgcaatgatacaacttctc

SEQ ID NO: 13644 - DNA, 25 bp, probe
ttgatctatacactgaggaatgcag

SEQ ID NO: 13645 - DNA, 25 bp, probe
gatctatacactgaggaatgcagag

SEQ ID NO: 13646 - DNA, 25 bp, probe
catctttcttatcttaattgcgtcc

SEQ ID NO: 13647 - DNA, 25 bp, probe
ccatctttcttatcttaattgcgtc

SEQ ID NO: 13648 - DNA, 25 bp, probe
tgatttgtttcagttgttgacactt

SEQ ID NO: 13649 - DNA, 25 bp, probe
atgtgatttgtttcagttgttgaca

SEQ ID NO: 13650 - DNA, 25 bp, probe
gatttgtttcagttgttgacacttg

SEQ ID NO: 13651 - DNA, 25 bp, probe
ttctgtggtcctaatatcatagatc

SEQ ID NO: 13652 - DNA, 25 bp, probe
tttcttatcttaattgcgtcctaca

SEQ ID NO: 13653 - DNA, 25 bp, probe
atctttcttatcttaattgcgtcct

SEQ ID NO: 13654 - DNA, 25 bp, probe
cacccatgttaaatcccttgatcta

SEQ ID NO: 13655 - DNA, 25 bp, probe
tgatctatacactgaggaatgcaga

SEQ ID NO: 13656 - DNA, 25 bp, probe
acccatgttaaatcccttgatctat

SEQ ID NO: 13657 - DNA, 25 bp, probe
acgcaatgatacaacttctcttcat

SEQ ID NO: 13658 - DNA, 25 bp, probe
catgaagaaactctggatgaaatgg

SEQ ID NO: 13659 - DNA, 25 bp, probe
gaagaaactctggatgaaatgggag

SEQ ID NO: 13660 - DNA, 25 bp, probe
tgaagaaactctggatgaaatggga

SEQ ID NO: 13661 - DNA, 25 bp, probe
tatgtgatttgtttcagttgttgac

SEQ ID NO: 13662 - DNA, 25 bp, probe
gcaatgatacaacttctcttcatgt

SEQ ID NO: 13663 - DNA, 25 bp, probe
cgcaatgatacaacttctcttcatg

SEQ ID NO: 13664 - DNA, 25 bp, probe
atctatacactgaggaatgcagagg

SEQ ID NO: 13665 - DNA, 25 bp, probe
ctttcttatcttaattgcgtcctac

SEQ ID NO: 13666 - DNA, 25 bp, probe
tcttatcttaattgcgtcctacacg

SEQ ID NO: 13667 - DNA, 25 bp, probe
gtgatttgtttcagttgttgacact

SEQ ID NO: 13668 - DNA, 25 bp, probe
atttgtttcagttgttgacacttgc

SEQ ID NO: 13669 - DNA, 25 bp, probe
gtggtcctaatatcatagatcactt

SEQ ID NO: 13670 - DNA, 25 bp, probe
tctttcttatcttaattgcgtccta

SEQ ID NO: 13671 - DNA, 25 bp, probe
catcctatgctccctgaagtcttac

SEQ ID NO: 13672 - DNA, 25 bp, probe
tgtgatttgtttcagttgttgacac

SEQ ID NO: 13673 - DNA, 25 bp, probe
gacttatggcttatacttctgtgga

SEQ ID NO: 13674 - DNA, 25 bp, probe
tggacttatggcttatacttctgtg

SEQ ID NO: 13675 - DNA, 25 bp, probe
gcacactatggacttatggcttata

SEQ ID NO: 13676 - DNA, 25 bp, probe
gccttatgtctatggattctctgtc

SEQ ID NO: 13677 - DNA, 25 bp, probe
ccttatgtctatggattctctgtca

SEQ ID NO: 13678 - DNA, 25 bp, probe
ggacttatggcttatacttctgtgg

SEQ ID NO: 13679 - DNA, 25 bp, probe
atggacttatggcttatacttctgt

SEQ ID NO: 13680 - DNA, 25 bp, probe
gtgccttatgtctatggattctctg

SEQ ID NO: 13681 - DNA, 25 bp, probe
ctgtgccttatgtctatggattctc

SEQ ID NO: 13682 - DNA, 25 bp, probe
ctctgtgccttatgtctatggattc

SEQ ID NO: 13683 - DNA, 25 bp, probe
atggattctctgtcagcctaatatg

SEQ ID NO: 13684 - DNA, 25 bp, probe
ttatgtctatggattctctgtcagc

SEQ ID NO: 13685 - DNA, 25 bp, probe
atctctgtgccttatgtctatggat

SEQ ID NO: 13686 - DNA, 25 bp, probe
tgccttatgtctatggattctctgt

SEQ ID NO: 13687 - DNA, 25 bp, probe
tgtgccttatgtctatggattctct

SEQ ID NO: 13688 - DNA, 25 bp, probe
tctgtgccttatgtctatggattct

SEQ ID NO: 13689 - DNA, 25 bp, probe
tctctgtgccttatgtctatggatt

SEQ ID NO: 13690 - DNA, 25 bp, probe
tctatggattctctgtcagcctaat

SEQ ID NO: 13691 - DNA, 25 bp, probe
acttatggcttatacttctgtggaa

SEQ ID NO: 13692 - DNA, 25 bp, probe
ctcatctctgtgccttatgtctatg

SEQ ID NO: 13693 - DNA, 25 bp, probe
acactatggacttatggcttatact

SEQ ID NO: 13694 - DNA, 25 bp, probe
cacactatggacttatggcttatac

SEQ ID NO: 13695 - DNA, 25 bp, probe
ctatggattctctgtcagcctaata

SEQ ID NO: 13696 - DNA, 25 bp, probe
tatggattctctgtcagcctaatat

SEQ ID NO: 13697 - DNA, 25 bp, probe
gtctatggattctctgtcagcctaa

SEQ ID NO: 13698 - DNA, 25 bp, probe
tatgtctatggattctctgtcagcc

SEQ ID NO: 13699 - DNA, 25 bp, probe
catctctgtgccttatgtctatgga

SEQ ID NO: 13700 - DNA, 25 bp, probe
tcatctctgtgccttatgtctatgg

SEQ ID NO: 13701 - DNA, 25 bp, probe
acaccacagtaattcctatgttgaa

SEQ ID NO: 13702 - DNA, 25 bp, probe
gtcctcatctcctacactctcattg

SEQ ID NO: 13703 - DNA, 25 bp, probe
cttatgtctatggattctctgtcag

SEQ ID NO: 13704 - DNA, 25 bp, probe
tacaccacagtaattcctatgttga

SEQ ID NO: 13705 - DNA, 25 bp, probe
cactatggacttatggcttatactt

SEQ ID NO: 13706 - DNA, 25 bp, probe
gctcatctctgtgccttatgtctat

SEQ ID NO: 13707 - DNA, 25 bp, probe
tatggacttatggcttatacttctg

SEQ ID NO: 13708 - DNA, 25 bp, probe
actatggacttatggcttatacttc

SEQ ID NO: 13709 - DNA, 25 bp, probe
tggattctctgtcagcctaatatgc

SEQ ID NO: 13710 - DNA, 25 bp, probe
tgtctatggattctctgtcagccta

SEQ ID NO: 13711 - DNA, 25 bp, probe
tgttattgctggaattaacttcaca

SEQ ID NO: 13712 - DNA, 25 bp, probe
ctatggacttatggcttatacttct

SEQ ID NO: 13713 - DNA, 25 bp, probe
ccacagtaattcctatgttgaatcc

SEQ ID NO: 13714 - DNA, 25 bp, probe
ttacaccacagtaattcctatgttg

SEQ ID NO: 13715 - DNA, 25 bp, probe
caccacagtaattcctatgttgaat

SEQ ID NO: 13716 - DNA, 25 bp, probe
gcctaatatgcacactatggactta

SEQ ID NO: 13717 - DNA, 25 bp, probe
tcatcaggtcttacattcacatctt

SEQ ID NO: 13718 - DNA, 25 bp, probe
atcatcaggtcttacattcacatct

SEQ ID NO: 13719 - DNA, 25 bp, probe
attcatcaattcttctgtgacatcc

SEQ ID NO: 13720 - DNA, 25 bp, probe
tatcatcaggtcttacattcacatc

SEQ ID NO: 13721 - DNA, 25 bp, probe
ctcaggaatctgtctatcttggatg

SEQ ID NO: 13722 - DNA, 25 bp, probe
cgttattcatcaattcttctgtgac

SEQ ID NO: 13723 - DNA, 25 bp, probe
ttatcatcaggtcttacattcacat

SEQ ID NO: 13724 - DNA, 25 bp, probe
cctcaggaatctgtctatcttggat

SEQ ID NO: 13725 - DNA, 25 bp, probe
gtctatcttggatgcctgctacatt

SEQ ID NO: 13726 - DNA, 25 bp, probe
ggaatctgtctatcttggatgcctg

SEQ ID NO: 13727 - DNA, 25 bp, probe
tcaggaatctgtctatcttggatgc

SEQ ID NO: 13728 - DNA, 25 bp, probe
atctgtctatcttggatgcctgcta

SEQ ID NO: 13729 - DNA, 25 bp, probe
gttattcatcaattcttctgtgaca

SEQ ID NO: 13730 - DNA, 25 bp, probe
catcaggtcttacattcacatcttt

SEQ ID NO: 13731 - DNA, 25 bp, probe
tttggtaactctaatgggaaacatc

SEQ ID NO: 13732 - DNA, 25 bp, probe
tattcatcaattcttctgtgacatc

SEQ ID NO: 13733 - DNA, 25 bp, probe
gcatccttctttatgttgtatttgg

SEQ ID NO: 13734 - DNA, 25 bp, probe
gaatctgtctatcttggatgcctgc

SEQ ID NO: 13735 - DNA, 25 bp, probe
acgttattcatcaattcttctgtga

SEQ ID NO: 13736 - DNA, 25 bp, probe
tgttgtatttggtaactctaatggg

SEQ ID NO: 13737 - DNA, 25 bp, probe
ctatcttggatgcctgctacatttc

SEQ ID NO: 13738 - DNA, 25 bp, probe
tgtttcatctttatcatcaggtctt

SEQ ID NO: 13739 - DNA, 25 bp, probe
ttcatcaattcttctgtgacatccc

SEQ ID NO: 13740 - DNA, 25 bp, probe
atttggtaactctaatgggaaacat

SEQ ID NO: 13741 - DNA, 25 bp, probe
gttgtatttggtaactctaatggga

SEQ ID NO: 13742 - DNA, 25 bp, probe
ttagaaataagcaaataaaggtggc

SEQ ID NO: 13743 - DNA, 25 bp, probe
caggaatctgtctatcttggatgcc

SEQ ID NO: 13744 - DNA, 25 bp, probe
tttatcatcaggtcttacattcaca

SEQ ID NO: 13745 - DNA, 25 bp, probe
tatcttggatgcctgctacatttct

SEQ ID NO: 13746 - DNA, 25 bp, probe
tctatcttggatgcctgctacattt

SEQ ID NO: 13747 - DNA, 25 bp, probe
gctgtttcatctttatcatcaggtc

SEQ ID NO: 13748 - DNA, 25 bp, probe
aatctgtctatcttggatgcctgct

SEQ ID NO: 13749 - DNA, 25 bp, probe
tcctcaggaatctgtctatcttgga

SEQ ID NO: 13750 - DNA, 25 bp, probe
ttgtatttggtaactctaatgggaa

SEQ ID NO: 13751 - DNA, 25 bp, probe
ttattcatcaattcttctgtgacat

SEQ ID NO: 13752 - DNA, 25 bp, probe
tatttggtaactctaatgggaaaca

SEQ ID NO: 13753 - DNA, 25 bp, probe
tgtatttggtaactctaatgggaaa

SEQ ID NO: 13754 - DNA, 25 bp, probe
aggaatctgtctatcttggatgcct

SEQ ID NO: 13755 - DNA, 25 bp, probe
agtcttcctcagttcatgctcttct

SEQ ID NO: 13756 - DNA, 25 bp, probe
cagtcttcctcagttcatgctcttc

SEQ ID NO: 13757 - DNA, 25 bp, probe
gtatttggtaactctaatgggaaac

SEQ ID NO: 13758 - DNA, 25 bp, probe
ggctgtttcatctttatcatcaggt

SEQ ID NO: 13759 - DNA, 25 bp, probe
tctgtctatcttggatgcctgctac

SEQ ID NO: 13760 - DNA, 25 bp, probe
ctactcagtggtcttgtctatgcag

SEQ ID NO: 13761 - DNA, 25 bp, probe
gctgagacggatgataatatggata

SEQ ID NO: 13762 - DNA, 25 bp, probe
tgagacggatgataatatggataca

SEQ ID NO: 13763 - DNA, 25 bp, probe
ctgagacggatgataatatggatac

SEQ ID NO: 13764 - DNA, 25 bp, probe
gagacggatgataatatggatacaa

SEQ ID NO: 13765 - DNA, 25 bp, probe
aacaagctgagacggatgataatat

SEQ ID NO: 13766 - DNA, 25 bp, probe
acaagctgagacggatgataatatg

SEQ ID NO: 13767 - DNA, 25 bp, probe
gaacaagctgagacggatgataata

SEQ ID NO: 13768 - DNA, 25 bp, probe
agctgagacggatgataatatggat

SEQ ID NO: 13769 - DNA, 25 bp, probe
caagctgagacggatgataatatgg

SEQ ID NO: 13770 - DNA, 25 bp, probe
aaggtatgttcttgatgaccagtat

SEQ ID NO: 13771 - DNA, 25 bp, probe
aagctgagacggatgataatatgga

SEQ ID NO: 13772 - DNA, 25 bp, probe
ctcttagaaatgtgctacgatgtct

SEQ ID NO: 13773 - DNA, 25 bp, probe
atctgactttggaatgacaaggtat

SEQ ID NO: 13774 - DNA, 25 bp, probe
tcttagaaatgtgctacgatgtctg

SEQ ID NO: 13775 - DNA, 25 bp, probe
tatctgactttggaatgacaaggta

SEQ ID NO: 13776 - DNA, 25 bp, probe
cttagaaatgtgctacgatgtctgt

SEQ ID NO: 13777 - DNA, 25 bp, probe
tctgactttggaatgacaaggtatg

SEQ ID NO: 13778 - DNA, 25 bp, probe
gtatctgactttggaatgacaaggt

SEQ ID NO: 13779 - DNA, 25 bp, probe
agtatctgactttggaatgacaagg

SEQ ID NO: 13780 - DNA, 25 bp, probe
ttagaaatgtgctacgatgtctgtg

SEQ ID NO: 13781 - DNA, 25 bp, probe
gactttggaatgacaaggtatgttc

SEQ ID NO: 13782 - DNA, 25 bp, probe
actttggaatgacaaggtatgttct

SEQ ID NO: 13783 - DNA, 25 bp, probe
gctcttagaaatgtgctacgatgtc

SEQ ID NO: 13784 - DNA, 25 bp, probe
ctttggaatgacaaggtatgttctt

SEQ ID NO: 13785 - DNA, 25 bp, probe
tgactttggaatgacaaggtatgtt

SEQ ID NO: 13786 - DNA, 25 bp, probe
gatctctgtgtgaaagtatctgact

SEQ ID NO: 13787 - DNA, 25 bp, probe
ctgactttggaatgacaaggtatgt

SEQ ID NO: 13788 - DNA, 25 bp, probe
tagaaatgtgctacgatgtctgtga

SEQ ID NO: 13789 - DNA, 25 bp, probe
gaaatgtgctacgatgtctgtgaag

SEQ ID NO: 13790 - DNA, 25 bp, probe
ggaacaagctgagacggatgataat

SEQ ID NO: 13791 - DNA, 25 bp, probe
agacggatgataatatggatacaaa

SEQ ID NO: 13792 - DNA, 25 bp, probe
aaacaatttgcttctggaaacagga

SEQ ID NO: 13793 - DNA, 25 bp, probe
agaaatgtgctacgatgtctgtgaa

SEQ ID NO: 13794 - DNA, 25 bp, probe
ggaatgacaaggtatgttcttgatg

SEQ ID NO: 13795 - DNA, 25 bp, probe
tggaatgacaaggtatgttcttgat

SEQ ID NO: 13796 - DNA, 25 bp, probe
caaggtatgttcttgatgaccagta

SEQ ID NO: 13797 - DNA, 25 bp, probe
ttggaatgacaaggtatgttcttga

SEQ ID NO: 13798 - DNA, 25 bp, probe
aatgacaaggtatgttcttgatgac

SEQ ID NO: 13799 - DNA, 25 bp, probe
atgacaaggtatgttcttgatgacc

SEQ ID NO: 13800 - DNA, 25 bp, probe
gaatgacaaggtatgttcttgatga

SEQ ID NO: 13801 - DNA, 25 bp, probe
aacaatttgcttctggaaacaggac

SEQ ID NO: 13802 - DNA, 25 bp, probe
aaatgtgctacgatgtctgtgaagg

SEQ ID NO: 13803 - DNA, 25 bp, probe
gacaaggtatgttcttgatgaccag

SEQ ID NO: 13804 - DNA, 25 bp, probe
caatttgcttctggaaacaggacag

SEQ ID NO: 13805 - DNA, 25 bp, probe
cttcccacccacaaatgcttattag

SEQ ID NO: 13806 - DNA, 25 bp, probe
tgatgttgtatataaatgggcttcc

SEQ ID NO: 13807 - DNA, 25 bp, probe
tgtgatgttgtatataaatgggctt

SEQ ID NO: 13808 - DNA, 25 bp, probe
atgtgatgttgtatataaatgggct

SEQ ID NO: 13809 - DNA, 25 bp, probe
gtgatgttgtatataaatgggcttc

SEQ ID NO: 13810 - DNA, 25 bp, probe
aatgtgatgttgtatataaatgggc

SEQ ID NO: 13811 - DNA, 25 bp, probe
acccacaaatgcttattagcctaaa

SEQ ID NO: 13812 - DNA, 25 bp, probe
cacccacaaatgcttattagcctaa

SEQ ID NO: 13813 - DNA, 25 bp, probe
tccagagttatttataccaaatcct

SEQ ID NO: 13814 - DNA, 25 bp, probe
gcttcccacccacaaatgcttatta

SEQ ID NO: 13815 - DNA, 25 bp, probe
attaaattatttctctgcgtcctaa

SEQ ID NO: 13816 - DNA, 25 bp, probe
aattaaattatttctctgcgtccta

SEQ ID NO: 13817 - DNA, 25 bp, probe
gcctgaaagctctagtaattaaatt

SEQ ID NO: 13818 - DNA, 25 bp, probe
tggcctgaaagctctagtaattaaa

SEQ ID NO: 13819 - DNA, 25 bp, probe
gatgttgtatataaatgggcttccc

SEQ ID NO: 13820 - DNA, 25 bp, probe
atggcctgaaagctctagtaattaa

SEQ ID NO: 13821 - DNA, 25 bp, probe
aatggcctgaaagctctagtaatta

SEQ ID NO: 13822 - DNA, 25 bp, probe
aaatggcctgaaagctctagtaatt

SEQ ID NO: 13823 - DNA, 25 bp, probe
ttaaattatttctctgcgtcctaat

SEQ ID NO: 13824 - DNA, 25 bp, probe
gatatgtctataaggtgaagattct

SEQ ID NO: 13825 - DNA, 25 bp, probe
agatatgtctataaggtgaagattc

SEQ ID NO: 13826 - DNA, 25 bp, probe
ggcctgaaagctctagtaattaaat

SEQ ID NO: 13827 - DNA, 25 bp, probe
gtaatttaaggatcggggaccaaaa

SEQ ID NO: 13828 - DNA, 25 bp, probe
ttccagagttatttataccaaatcc

SEQ ID NO: 13829 - DNA, 25 bp, probe
gtaattaaattatttctctgcgtcc

SEQ ID NO: 13830 - DNA, 25 bp, probe
tgtttaaagactaaatgtgttcaca

SEQ ID NO: 13831 - DNA, 25 bp, probe
taattaaattatttctctgcgtcct

SEQ ID NO: 13832 - DNA, 25 bp, probe
tgtaatttaaggatcggggaccaaa

SEQ ID NO: 13833 - DNA, 25 bp, probe
ccacccacaaatgcttattagccta

SEQ ID NO: 13834 - DNA, 25 bp, probe
ttgtaatttaaggatcggggaccaa

SEQ ID NO: 13835 - DNA, 25 bp, probe
atatgtctataaggtgaagattctt

SEQ ID NO: 13836 - DNA, 25 bp, probe
aaatgtgatgttgtatataaatggg

SEQ ID NO: 13837 - DNA, 25 bp, probe
tcttaggtatacaaatgtgatgttg

SEQ ID NO: 13838 - DNA, 25 bp, probe
atgtttaaagactaaatgtgttcac

SEQ ID NO: 13839 - DNA, 25 bp, probe
ccagagttatttataccaaatccta

SEQ ID NO: 13840 - DNA, 25 bp, probe
cccacaaatgcttattagcctaaaa

SEQ ID NO: 13841 - DNA, 25 bp, probe
aatcatgtacttcgcttaagtttct

SEQ ID NO: 13842 - DNA, 25 bp, probe
taaattatttctctgcgtcctaatt

SEQ ID NO: 13843 - DNA, 25 bp, probe
ttcccacccacaaatgcttattagc

SEQ ID NO: 13844 - DNA, 25 bp, probe
agtaattaaattatttctctgcgtc

SEQ ID NO: 13845 - DNA, 25 bp, probe
atgtacttcgcttaagtttctaact

SEQ ID NO: 13846 - DNA, 25 bp, probe
catgtacttcgcttaagtttctaac

SEQ ID NO: 13847 - DNA, 25 bp, probe
tcatgtacttcgcttaagtttctaa

SEQ ID NO: 13848 - DNA, 25 bp, probe
aaatcatgtacttcgcttaagtttc

SEQ ID NO: 13849 - DNA, 25 bp, probe
ctacttcatctcttcctcccacaac

SEQ ID NO: 13850 - DNA, 25 bp, probe
actacttcatctcttcctcccacaa

SEQ ID NO: 13851 - DNA, 25 bp, probe
tacttcatctcttcctcccacaaca

SEQ ID NO: 13852 - DNA, 25 bp, probe
atctcttcctcccacaacacctatc

SEQ ID NO: 13853 - DNA, 25 bp, probe
cactacttcatctcttcctcccaca

SEQ ID NO: 13854 - DNA, 25 bp, probe
gtcatctatcatgccataccctcac

SEQ ID NO: 13855 - DNA, 25 bp, probe
ccacaacacctatctgactgactcc

SEQ ID NO: 13856 - DNA, 25 bp, probe
catctcttcctcccacaacacctat

SEQ ID NO: 13857 - DNA, 25 bp, probe
accacacctggctaatgtttaaatt

SEQ ID NO: 13858 - DNA, 25 bp, probe
ccacacctggctaatgtttaaattt

SEQ ID NO: 13859 - DNA, 25 bp, probe
atctatcatgccataccctcacctc

SEQ ID NO: 13860 - DNA, 25 bp, probe
ttgcccactacttcatctcttcctc

SEQ ID NO: 13861 - DNA, 25 bp, probe
cttgcccactacttcatctcttcct

SEQ ID NO: 13862 - DNA, 25 bp, probe
caccacacctggctaatgtttaaat

SEQ ID NO: 13863 - DNA, 25 bp, probe
ccactacttcatctcttcctcccac

SEQ ID NO: 13864 - DNA, 25 bp, probe
catctatcatgccataccctcacct

SEQ ID NO: 13865 - DNA, 25 bp, probe
tcatctatcatgccataccctcacc

SEQ ID NO: 13866 - DNA, 25 bp, probe
ctcttcctcccacaacacctatctg

SEQ ID NO: 13867 - DNA, 25 bp, probe
tctcttcctcccacaacacctatct

SEQ ID NO: 13868 - DNA, 25 bp, probe
acttcatctcttcctcccacaacac

SEQ ID NO: 13869 - DNA, 25 bp, probe
atggcttcatgatgtacctgttgtc

SEQ ID NO: 13870 - DNA, 25 bp, probe
gatggcttcatgatgtacctgttgt

SEQ ID NO: 13871 - DNA, 25 bp, probe
cttcctcccacaacacctatctgac

SEQ ID NO: 13872 - DNA, 25 bp, probe
cgtcatctatcatgccataccctca

SEQ ID NO: 13873 - DNA, 25 bp, probe
cacaacacctatctgactgactccc

SEQ ID NO: 13874 - DNA, 25 bp, probe
cccacaacacctatctgactgactc

SEQ ID NO: 13875 - DNA, 25 bp, probe
ctcccacaacacctatctgactgac

SEQ ID NO: 13876 - DNA, 25 bp, probe
tcttcctcccacaacacctatctga

SEQ ID NO: 13877 - DNA, 25 bp, probe
tcatctcttcctcccacaacaccta

SEQ ID NO: 13878 - DNA, 25 bp, probe
caacacctatctgactgactcccag

SEQ ID NO: 13879 - DNA, 25 bp, probe
ccttgcccactacttcatctcttcc

SEQ ID NO: 13880 - DNA, 25 bp, probe
cccttgcccactacttcatctcttc

SEQ ID NO: 13881 - DNA, 25 bp, probe
gtttaaattttatgtagagagggcg

SEQ ID NO: 13882 - DNA, 25 bp, probe
acaacacctatctgactgactccca

SEQ ID NO: 13883 - DNA, 25 bp, probe
tcccacaacacctatctgactgact

SEQ ID NO: 13884 - DNA, 25 bp, probe
ttcctcccacaacacctatctgact

SEQ ID NO: 13885 - DNA, 25 bp, probe
ggatggcttcatgatgtacctgttg

SEQ ID NO: 13886 - DNA, 25 bp, probe
gacactggatggcttcatgatgtac

SEQ ID NO: 13887 - DNA, 25 bp, probe
cttcatctcttcctcccacaacacc

SEQ ID NO: 13888 - DNA, 25 bp, probe
cccactacttcatctcttcctccca

SEQ ID NO: 13889 - DNA, 25 bp, probe
ccgtcatctatcatgccataccctc

SEQ ID NO: 13890 - DNA, 25 bp, probe
cacacctggctaatgtttaaatttt

SEQ ID NO: 13891 - DNA, 25 bp, probe
ccaccacacctggctaatgtttaaa

SEQ ID NO: 13892 - DNA, 25 bp, probe
tggatggcttcatgatgtacctgtt

SEQ ID NO: 13893 - DNA, 25 bp, probe
ttactgtgaactattgtctcttgga

SEQ ID NO: 13894 - DNA, 25 bp, probe
gttactgtgaactattgtctcttgg

SEQ ID NO: 13895 - DNA, 25 bp, probe
tactgtgaactattgtctcttggag

SEQ ID NO: 13896 - DNA, 25 bp, probe
gtgaactattgtctcttggaggaag

SEQ ID NO: 13897 - DNA, 25 bp, probe
tgaactattgtctcttggaggaagt

SEQ ID NO: 13898 - DNA, 25 bp, probe
tgtgaactattgtctcttggaggaa

SEQ ID NO: 13899 - DNA, 25 bp, probe
ctgtgaactattgtctcttggagga

SEQ ID NO: 13900 - DNA, 25 bp, probe
actgtgaactattgtctcttggagg

SEQ ID NO: 13901 - DNA, 25 bp, probe
gaactattgtctcttggaggaagtt

SEQ ID NO: 13902 - DNA, 25 bp, probe
tttgtatgtgtagcttgctagtttg

SEQ ID NO: 13903 - DNA, 25 bp, probe
tctttgtatgtgtagcttgctagtt

SEQ ID NO: 13904 - DNA, 25 bp, probe
ttctttgtatgtgtagcttgctagt

SEQ ID NO: 13905 - DNA, 25 bp, probe
ctttgtatgtgtagcttgctagttt

SEQ ID NO: 13906 - DNA, 25 bp, probe
tttctttgtatgtgtagcttgctag

SEQ ID NO: 13907 - DNA, 25 bp, probe
agttactgtgaactattgtctcttg

SEQ ID NO: 13908 - DNA, 25 bp, probe
gcagttactgtgaactattgtctct

SEQ ID NO: 13909 - DNA, 25 bp, probe
cagttactgtgaactattgtctctt

SEQ ID NO: 13910 - DNA, 25 bp, probe
ttgcagttactgtgaactattgtct

SEQ ID NO: 13911 - DNA, 25 bp, probe
tgcagttactgtgaactattgtctc

SEQ ID NO: 13912 - DNA, 25 bp, probe
cttagagggcttttctttgtatgtg

SEQ ID NO: 13913 - DNA, 25 bp, probe
tagagggcttttctttgtatgtgta

SEQ ID NO: 13914 - DNA, 25 bp, probe
ttagagggcttttctttgtatgtgt

SEQ ID NO: 13915 - DNA, 25 bp, probe
aactattgtctcttggaggaagttt

SEQ ID NO: 13916 - DNA, 25 bp, probe
agagggcttttctttgtatgtgtag

SEQ ID NO: 13917 - DNA, 25 bp, probe
actattgtctcttggaggaagtttt

SEQ ID NO: 13918 - DNA, 25 bp, probe
cttttctttgtatgtgtagcttgct

SEQ ID NO: 13919 - DNA, 25 bp, probe
tttgcagttactgtgaactattgtc

SEQ ID NO: 13920 - DNA, 25 bp, probe
ctttgcagttactgtgaactattgt

SEQ ID NO: 13921 - DNA, 25 bp, probe
ttttctttgtatgtgtagcttgcta

SEQ ID NO: 13922 - DNA, 25 bp, probe
aaattgtgagtaagctttgcagtta

SEQ ID NO: 13923 - DNA, 25 bp, probe
gctttgcagttactgtgaactattg

SEQ ID NO: 13924 - DNA, 25 bp, probe
agctttgcagttactgtgaactatt

SEQ ID NO: 13925 - DNA, 25 bp, probe
aattgtgagtaagctttgcagttac

SEQ ID NO: 13926 - DNA, 25 bp, probe
gagggcttttctttgtatgtgtagc

SEQ ID NO: 13927 - DNA, 25 bp, probe
ggcttttctttgtatgtgtagcttg

SEQ ID NO: 13928 - DNA, 25 bp, probe
gcttttctttgtatgtgtagcttgc

SEQ ID NO: 13929 - DNA, 25 bp, probe
gggcttttctttgtatgtgtagctt

SEQ ID NO: 13930 - DNA, 25 bp, probe
taagctttgcagttactgtgaacta

SEQ ID NO: 13931 - DNA, 25 bp, probe
aagctttgcagttactgtgaactat

SEQ ID NO: 13932 - DNA, 25 bp, probe
aaaattgtgagtaagctttgcagtt

SEQ ID NO: 13933 - DNA, 25 bp, probe
catgtggaaagcttgtcttagaggg

SEQ ID NO: 13934 - DNA, 25 bp, probe
agggcttttctttgtatgtgtagct

SEQ ID NO: 13935 - DNA, 25 bp, probe
gtaagctttgcagttactgtgaact

SEQ ID NO: 13936 - DNA, 25 bp, probe
attgtgagtaagctttgcagttact

SEQ ID NO: 13937 - DNA, 25 bp, probe
tgaggatggtcagaataacaacttg

SEQ ID NO: 13938 - DNA, 25 bp, probe
gtgaggatggtcagaataacaactt

SEQ ID NO: 13939 - DNA, 25 bp, probe
aaggtgaggatggtcagaataacaa

SEQ ID NO: 13940 - DNA, 25 bp, probe
aggatggtcagaataacaacttgta

SEQ ID NO: 13941 - DNA, 25 bp, probe
gaggatggtcagaataacaacttgt

SEQ ID NO: 13942 - DNA, 25 bp, probe
ggatggtcagaataacaacttgtaa

SEQ ID NO: 13943 - DNA, 25 bp, probe
ggtgaggatggtcagaataacaact

SEQ ID NO: 13944 - DNA, 25 bp, probe
aggtgaggatggtcagaataacaac

SEQ ID NO: 13945 - DNA, 25 bp, probe
caaggtgaggatggtcagaataaca

SEQ ID NO: 13946 - DNA, 25 bp, probe
acaaggtgaggatggtcagaataac

SEQ ID NO: 13947 - DNA, 25 bp, probe
ctctgtccagaaggagttcataatt

SEQ ID NO: 13948 - DNA, 25 bp, probe
ccagaacttcccgtatatgaatgat

SEQ ID NO: 13949 - DNA, 25 bp, probe
taataaaggcaggctgaattgtgat

SEQ ID NO: 13950 - DNA, 25 bp, probe
tccagaacttcccgtatatgaatga

SEQ ID NO: 13951 - DNA, 25 bp, probe
gtccagaacttcccgtatatgaatg

SEQ ID NO: 13952 - DNA, 25 bp, probe
cacaaggtgaggatggtcagaataa

SEQ ID NO: 13953 - DNA, 25 bp, probe
ctaataaaggcaggctgaattgtga

SEQ ID NO: 13954 - DNA, 25 bp, probe
tgtccagaacttcccgtatatgaat

SEQ ID NO: 13955 - DNA, 25 bp, probe
atgtccagaacttcccgtatatgaa

SEQ ID NO: 13956 - DNA, 25 bp, probe
gatgtccagaacttcccgtatatga

SEQ ID NO: 13957 - DNA, 25 bp, probe
tgatgtccagaacttcccgtatatg

SEQ ID NO: 13958 - DNA, 25 bp, probe
ctactcgaacctaatccagaccaac

SEQ ID NO: 13959 - DNA, 25 bp, probe
cagaacttcccgtatatgaatgata

SEQ ID NO: 13960 - DNA, 25 bp, probe
caggtttcattcctaataaaggcag

SEQ ID NO: 13961 - DNA, 25 bp, probe
aggtttcattcctaataaaggcagg

SEQ ID NO: 13962 - DNA, 25 bp, probe
tccaggtttcattcctaataaaggc

SEQ ID NO: 13963 - DNA, 25 bp, probe
aataaaggcaggctgaattgtgatc

SEQ ID NO: 13964 - DNA, 25 bp, probe
ccaggtttcattcctaataaaggca

SEQ ID NO: 13965 - DNA, 25 bp, probe
gctcattccaggtttcattcctaat

SEQ ID NO: 13966 - DNA, 25 bp, probe
aggaaatgcgattcttctcagacat

SEQ ID NO: 13967 - DNA, 25 bp, probe
ttcctaataaaggcaggctgaattg

SEQ ID NO: 13968 - DNA, 25 bp, probe
tttcattcctaataaaggcaggctg

SEQ ID NO: 13969 - DNA, 25 bp, probe
gtttcattcctaataaaggcaggct

SEQ ID NO: 13970 - DNA, 25 bp, probe
ttccaggtttcattcctaataaagg

SEQ ID NO: 13971 - DNA, 25 bp, probe
attcctaataaaggcaggctgaatt

SEQ ID NO: 13972 - DNA, 25 bp, probe
ctgatgtccagaacttcccgtatat

SEQ ID NO: 13973 - DNA, 25 bp, probe
ctcattccaggtttcattcctaata

SEQ ID NO: 13974 - DNA, 25 bp, probe
cattcctaataaaggcaggctgaat

SEQ ID NO: 13975 - DNA, 25 bp, probe
tctgtccagaaggagttcataattt

SEQ ID NO: 13976 - DNA, 25 bp, probe
agaacttcccgtatatgaatgatat

SEQ ID NO: 13977 - DNA, 25 bp, probe
tcattcctaataaaggcaggctgaa

SEQ ID NO: 13978 - DNA, 25 bp, probe
ttcattcctaataaaggcaggctga

SEQ ID NO: 13979 - DNA, 25 bp, probe
ggaaatgcgattcttctcagacatg

SEQ ID NO: 13980 - DNA, 25 bp, probe
cctaataaaggcaggctgaattgtg

SEQ ID NO: 13981 - DNA, 25 bp, probe
aattaagggagagattgaagtgtgg

SEQ ID NO: 13982 - DNA, 25 bp, probe
aaattaagggagagattgaagtgtg

SEQ ID NO: 13983 - DNA, 25 bp, probe
gaaattaagggagagattgaagtgt

SEQ ID NO: 13984 - DNA, 25 bp, probe
tgaaattaagggagagattgaagtg

SEQ ID NO: 13985 - DNA, 25 bp, probe
tgaaaggaattgaaattaagggaga

SEQ ID NO: 13986 - DNA, 25 bp, probe
ttgaaattaagggagagattgaagt

SEQ ID NO: 13987 - DNA, 25 bp, probe
aaaggaattgaaattaagggagaga

SEQ ID NO: 13988 - DNA, 25 bp, probe
ggaattgaaattaagggagagattg

SEQ ID NO: 13989 - DNA, 25 bp, probe
gaaaggaattgaaattaagggagag

SEQ ID NO: 13990 - DNA, 25 bp, probe
aggaattgaaattaagggagagatt

SEQ ID NO: 13991 - DNA, 25 bp, probe
aaggaattgaaattaagggagagat

SEQ ID NO: 13992 - DNA, 25 bp, probe
attaagggagagattgaagtgtggc

SEQ ID NO: 13993 - DNA, 25 bp, probe
atgaaaggaattgaaattaagggag

SEQ ID NO: 13994 - DNA, 25 bp, probe
tggcaacatcaaatacctggacttt

SEQ ID NO: 13995 - DNA, 25 bp, probe
atggcaacatcaaatacctggactt

SEQ ID NO: 13996 - DNA, 25 bp, probe
gagattgaagtgtggcaccaagatt

SEQ ID NO: 13997 - DNA, 25 bp, probe
gaattgaaattaagggagagattga

SEQ ID NO: 13998 - DNA, 25 bp, probe
aatgaaaggaattgaaattaaggga

SEQ ID NO: 13999 - DNA, 25 bp, probe
attgaaattaagggagagattgaag

SEQ ID NO: 14000 - DNA, 25 bp, probe
aagaacatctcacatggagacctaa

SEQ ID NO: 14001 - DNA, 25 bp, probe
gattgaagtgtggcaccaagattga

SEQ ID NO: 14002 - DNA, 25 bp, probe
agattgaagtgtggcaccaagattg

SEQ ID NO: 14003 - DNA, 25 bp, probe
aattgaaattaagggagagattgaa

SEQ ID NO: 14004 - DNA, 25 bp, probe
aaatgaaaggaattgaaattaaggg

SEQ ID NO: 14005 - DNA, 25 bp, probe
ttaagggagagattgaagtgtggca

SEQ ID NO: 14006 - DNA, 25 bp, probe
cctaaagccacaaaacatcctactg

SEQ ID NO: 14007 - DNA, 25 bp, probe
gacctaaagccacaaaacatcctac

SEQ ID NO: 14008 - DNA, 25 bp, probe
agacctaaagccacaaaacatccta

SEQ ID NO: 14009 - DNA, 25 bp, probe
agagattgaagtgtggcaccaagat

SEQ ID NO: 14010 - DNA, 25 bp, probe
acctaaagccacaaaacatcctact

SEQ ID NO: 14011 - DNA, 25 bp, probe
ggcatcagatgaaaatgaaaggaat

SEQ ID NO: 14012 - DNA, 25 bp, probe
catcaaatacctggactttggcttc

SEQ ID NO: 14013 - DNA, 25 bp, probe
atcaaatacctggactttggcttca

SEQ ID NO: 14014 - DNA, 25 bp, probe
gcatcagatgaaaatgaaaggaatt

SEQ ID NO: 14015 - DNA, 25 bp, probe
gaacatctcacatggagacctaaag

SEQ ID NO: 14016 - DNA, 25 bp, probe
gatgaggatggcaacatcaaatacc

SEQ ID NO: 14017 - DNA, 25 bp, probe
ggatgaggatggcaacatcaaatac

SEQ ID NO: 14018 - DNA, 25 bp, probe
acatcaaatacctggactttggctt

SEQ ID NO: 14019 - DNA, 25 bp, probe
aacatcaaatacctggactttggct

SEQ ID NO: 14020 - DNA, 25 bp, probe
caacatcaaatacctggactttggc

SEQ ID NO: 14021 - DNA, 25 bp, probe
gcaacatcaaatacctggactttgg

SEQ ID NO: 14022 - DNA, 25 bp, probe
ggcaacatcaaatacctggactttg

SEQ ID NO: 14023 - DNA, 25 bp, probe
agaacatctcacatggagacctaaa

SEQ ID NO: 14024 - DNA, 25 bp, probe
gggcatcagatgaaaatgaaaggaa

SEQ ID NO: 14025 - DNA, 25 bp, probe
cttcagagaatgtgatgtgaggttg

SEQ ID NO: 14026 - DNA, 25 bp, probe
cagagaatgtgatgtgaggttggat

SEQ ID NO: 14027 - DNA, 25 bp, probe
agtccttcagagaatgtgatgtgag

SEQ ID NO: 14028 - DNA, 25 bp, probe
gagtccttcagagaatgtgatgtga

SEQ ID NO: 14029 - DNA, 25 bp, probe
tattagccattccgaaatctgtgta

SEQ ID NO: 14030 - DNA, 25 bp, probe
agagaatgtgatgtgaggttggatc

SEQ ID NO: 14031 - DNA, 25 bp, probe
cattccgaaatctgtgtaatcaact

SEQ ID NO: 14032 - DNA, 25 bp, probe
atattagccattccgaaatctgtgt

SEQ ID NO: 14033 - DNA, 25 bp, probe
ccattccgaaatctgtgtaatcaac

SEQ ID NO: 14034 - DNA, 25 bp, probe
ttagccattccgaaatctgtgtaat

SEQ ID NO: 14035 - DNA, 25 bp, probe
attagccattccgaaatctgtgtaa

SEQ ID NO: 14036 - DNA, 25 bp, probe
gatattagccattccgaaatctgtg

SEQ ID NO: 14037 - DNA, 25 bp, probe
ttccgaaatctgtgtaatcaacttc

SEQ ID NO: 14038 - DNA, 25 bp, probe
tagccattccgaaatctgtgtaatc

SEQ ID NO: 14039 - DNA, 25 bp, probe
tccgaaatctgtgtaatcaacttca

SEQ ID NO: 14040 - DNA, 25 bp, probe
attccgaaatctgtgtaatcaactt

SEQ ID NO: 14041 - DNA, 25 bp, probe
ctgctgtcactgtctcattaaatat

SEQ ID NO: 14042 - DNA, 25 bp, probe
gctgctgtcactgtctcattaaata

SEQ ID NO: 14043 - DNA, 25 bp, probe
ttcagagaatgtgatgtgaggttgg

SEQ ID NO: 14044 - DNA, 25 bp, probe
ggagtccttcagagaatgtgatgtg

SEQ ID NO: 14045 - DNA, 25 bp, probe
ccttcagagaatgtgatgtgaggtt

SEQ ID NO: 14046 - DNA, 25 bp, probe
gccattccgaaatctgtgtaatcaa

SEQ ID NO: 14047 - DNA, 25 bp, probe
agttacaaatcactgtgtccataga

SEQ ID NO: 14048 - DNA, 25 bp, probe
attcaagttacaaatcactgtgtcc

SEQ ID NO: 14049 - DNA, 25 bp, probe
tcaagttacaaatcactgtgtccat

SEQ ID NO: 14050 - DNA, 25 bp, probe
caagttacaaatcactgtgtccata

SEQ ID NO: 14051 - DNA, 25 bp, probe
ttcaagttacaaatcactgtgtcca

SEQ ID NO: 14052 - DNA, 25 bp, probe
gttacaaatcactgtgtccatagaa

SEQ ID NO: 14053 - DNA, 25 bp, probe
aagttacaaatcactgtgtccatag

SEQ ID NO: 14054 - DNA, 25 bp, probe
gtccttcagagaatgtgatgtgagg

SEQ ID NO: 14055 - DNA, 25 bp, probe
tgctgtcactgtctcattaaatata

SEQ ID NO: 14056 - DNA, 25 bp, probe
ccgaaatctgtgtaatcaacttcac

SEQ ID NO: 14057 - DNA, 25 bp, probe
tcagagaatgtgatgtgaggttgga

SEQ ID NO: 14058 - DNA, 25 bp, probe
gctgtcactgtctcattaaatatac

SEQ ID NO: 14059 - DNA, 25 bp, probe
ttacaaatcactgtgtccatagaaa

SEQ ID NO: 14060 - DNA, 25 bp, probe
ggatattagccattccgaaatctgt

SEQ ID NO: 14061 - DNA, 25 bp, probe
agccattccgaaatctgtgtaatca

SEQ ID NO: 14062 - DNA, 25 bp, probe
tccttcagagaatgtgatgtgaggt

SEQ ID NO: 14063 - DNA, 25 bp, probe
tggatattagccattccgaaatctg

SEQ ID NO: 14064 - DNA, 25 bp, probe
tgctgctgtcactgtctcattaaat

SEQ ID NO: 14065 - DNA, 25 bp, probe
agaatgtgatgtgaggttggatcaa

SEQ ID NO: 14066 - DNA, 25 bp, probe
atgctgctgtcactgtctcattaaa

SEQ ID NO: 14067 - DNA, 25 bp, probe
aatgctgctgtcactgtctcattaa

SEQ ID NO: 14068 - DNA, 25 bp, probe
tattcaagttacaaatcactgtgtc

SEQ ID NO: 14069 - DNA, 25 bp, probe
aagtctggttaataacgagttctct

SEQ ID NO: 14070 - DNA, 25 bp, probe
ttcaagttaagatcacagacaatgc

SEQ ID NO: 14071 - DNA, 25 bp, probe
tctggttaataacgagttctctagc

SEQ ID NO: 14072 - DNA, 25 bp, probe
ctggttaataacgagttctctagcg

SEQ ID NO: 14073 - DNA, 25 bp, probe
agtctggttaataacgagttctcta

SEQ ID NO: 14074 - DNA, 25 bp, probe
tcaagttaagatcacagacaatgcc

SEQ ID NO: 14075 - DNA, 25 bp, probe
gtctggttaataacgagttctctag

SEQ ID NO: 14076 - DNA, 25 bp, probe
tggctcttgaaagtctggttaataa

SEQ ID NO: 14077 - DNA, 25 bp, probe
atggctcttgaaagtctggttaata

SEQ ID NO: 14078 - DNA, 25 bp, probe
aactgtcctgatgaattatttgctg

SEQ ID NO: 14079 - DNA, 25 bp, probe
tcctgatgaattatttgctgtgatg

SEQ ID NO: 14080 - DNA, 25 bp, probe
gtcctgatgaattatttgctgtgat

SEQ ID NO: 14081 - DNA, 25 bp, probe
cctgatgaattatttgctgtgatgg

SEQ ID NO: 14082 - DNA, 25 bp, probe
ctgtcctgatgaattatttgctgtg

SEQ ID NO: 14083 - DNA, 25 bp, probe
tgtcctgatgaattatttgctgtga

SEQ ID NO: 14084 - DNA, 25 bp, probe
actgtcctgatgaattatttgctgt

SEQ ID NO: 14085 - DNA, 25 bp, probe
gatggctcttgaaagtctggttaat

SEQ ID NO: 14086 - DNA, 25 bp, probe
ctgatgaattatttgctgtgatggc

SEQ ID NO: 14087 - DNA, 25 bp, probe
caactgtcctgatgaattatttgct

SEQ ID NO: 14088 - DNA, 25 bp, probe
gctcttgaaagtctggttaataacg

SEQ ID NO: 14089 - DNA, 25 bp, probe
ggctcttgaaagtctggttaataac

SEQ ID NO: 14090 - DNA, 25 bp, probe
tcaactgtcctgatgaattatttgc

SEQ ID NO: 14091 - DNA, 25 bp, probe
tgaaagtctggttaataacgagttc

SEQ ID NO: 14092 - DNA, 25 bp, probe
cttgaaagtctggttaataacgagt

SEQ ID NO: 14093 - DNA, 25 bp, probe
aaagtctggttaataacgagttctc

SEQ ID NO: 14094 - DNA, 25 bp, probe
gaaagtctggttaataacgagttct

SEQ ID NO: 14095 - DNA, 25 bp, probe
tcttgaaagtctggttaataacgag

SEQ ID NO: 14096 - DNA, 25 bp, probe
ctcttgaaagtctggttaataacga

SEQ ID NO: 14097 - DNA, 25 bp, probe
ttgaaagtctggttaataacgagtt

SEQ ID NO: 14098 - DNA, 25 bp, probe
ccaatcaactgtcctgatgaattat

SEQ ID NO: 14099 - DNA, 25 bp, probe
gccaatcaactgtcctgatgaatta

SEQ ID NO: 14100 - DNA, 25 bp, probe
aagttaagatcacagacaatgccct

SEQ ID NO: 14101 - DNA, 25 bp, probe
caagttaagatcacagacaatgccc

SEQ ID NO: 14102 - DNA, 25 bp, probe
ggatggctcttgaaagtctggttaa

SEQ ID NO: 14103 - DNA, 25 bp, probe
agttaagatcacagacaatgccctc

SEQ ID NO: 14104 - DNA, 25 bp, probe
ttaagatcacagacaatgccctctc

SEQ ID NO: 14105 - DNA, 25 bp, probe
caatcaactgtcctgatgaattatt

SEQ ID NO: 14106 - DNA, 25 bp, probe
gttaagatcacagacaatgccctct

SEQ ID NO: 14107 - DNA, 25 bp, probe
agccaatcaactgtcctgatgaatt

SEQ ID NO: 14108 - DNA, 25 bp, probe
tggatggctcttgaaagtctggtta

SEQ ID NO: 14109 - DNA, 25 bp, probe
cagccaatcaactgtcctgatgaat

SEQ ID NO: 14110 - DNA, 25 bp, probe
cagaagggaagtcatccacaaagac

SEQ ID NO: 14111 - DNA, 25 bp, probe
gatgaattatttgctgtgatggcct

SEQ ID NO: 14112 - DNA, 25 bp, probe
gttgccaggaactgtgtcattgatg

SEQ ID NO: 14113 - DNA, 25 bp, probe
catctggtagctgtagattctggac

SEQ ID NO: 14114 - DNA, 25 bp, probe
gtaagtgccatctggtagctgtaga

SEQ ID NO: 14115 - DNA, 25 bp, probe
tgtaagtgccatctggtagctgtag

SEQ ID NO: 14116 - DNA, 25 bp, probe
taagtgccatctggtagctgtagat

SEQ ID NO: 14117 - DNA, 25 bp, probe
gtgtaagtgccatctggtagctgta

SEQ ID NO: 14118 - DNA, 25 bp, probe
atctggtagctgtagattctggacc

SEQ ID NO: 14119 - DNA, 25 bp, probe
ccatctggtagctgtagattctgga

SEQ ID NO: 14120 - DNA, 25 bp, probe
ggtagcccaatcaggtcaaagattt

SEQ ID NO: 14121 - DNA, 25 bp, probe
gaggtagcccaatcaggtcaaagat

SEQ ID NO: 14122 - DNA, 25 bp, probe
aagtgccatctggtagctgtagatt

SEQ ID NO: 14123 - DNA, 25 bp, probe
ctggtagctgtagattctggacctg

SEQ ID NO: 14124 - DNA, 25 bp, probe
tctggtagctgtagattctggacct

SEQ ID NO: 14125 - DNA, 25 bp, probe
tgccatctggtagctgtagattctg

SEQ ID NO: 14126 - DNA, 25 bp, probe
gtgccatctggtagctgtagattct

SEQ ID NO: 14127 - DNA, 25 bp, probe
agtgccatctggtagctgtagattc

SEQ ID NO: 14128 - DNA, 25 bp, probe
aggtagcccaatcaggtcaaagatt

SEQ ID NO: 14129 - DNA, 25 bp, probe
gtagcccaatcaggtcaaagatttt

SEQ ID NO: 14130 - DNA, 25 bp, probe
gccatctggtagctgtagattctgg

SEQ ID NO: 14131 - DNA, 25 bp, probe
tagcccaatcaggtcaaagattttg

SEQ ID NO: 14132 - DNA, 25 bp, probe
agagtgtaacaaccacgggtgtaag

SEQ ID NO: 14133 - DNA, 25 bp, probe
gagtgtaacaaccacgggtgtaagt

SEQ ID NO: 14134 - DNA, 25 bp, probe
cagagtgtaacaaccacgggtgtaa

SEQ ID NO: 14135 - DNA, 25 bp, probe
agtgtaacaaccacgggtgtaagtg

SEQ ID NO: 14136 - DNA, 25 bp, probe
ctcggtaccagagtgtaacaaccac

SEQ ID NO: 14137 - DNA, 25 bp, probe
atcctcgagacaggacaagatgaag

SEQ ID NO: 14138 - DNA, 25 bp, probe
caacaaaatgaacctgtcattgggg

SEQ ID NO: 14139 - DNA, 25 bp, probe
ccaacaaaatgaacctgtcattggg

SEQ ID NO: 14140 - DNA, 25 bp, probe
catcctcgagacaggacaagatgaa

SEQ ID NO: 14141 - DNA, 25 bp, probe
ttcatcctcgagacaggacaagatg

SEQ ID NO: 14142 - DNA, 25 bp, probe
gccaacaaaatgaacctgtcattgg

SEQ ID NO: 14143 - DNA, 25 bp, probe
tttcatcctcgagacaggacaagat

SEQ ID NO: 14144 - DNA, 25 bp, probe
tcctcgagacaggacaagatgaagt

SEQ ID NO: 14145 - DNA, 25 bp, probe
ctggatcttttcatcctcgagacag

SEQ ID NO: 14146 - DNA, 25 bp, probe
gtctggatcttttcatcctcgagac

SEQ ID NO: 14147 - DNA, 25 bp, probe
tctggatcttttcatcctcgagaca

SEQ ID NO: 14148 - DNA, 25 bp, probe
ggccaacaaaatgaacctgtcattg

SEQ ID NO: 14149 - DNA, 25 bp, probe
aggccaacaaaatgaacctgtcatt

SEQ ID NO: 14150 - DNA, 25 bp, probe
gatcttttcatcctcgagacaggac

SEQ ID NO: 14151 - DNA, 25 bp, probe
ggtctggatcttttcatcctcgaga

SEQ ID NO: 14152 - DNA, 25 bp, probe
cttttcatcctcgagacaggacaag

SEQ ID NO: 14153 - DNA, 25 bp, probe
atcttttcatcctcgagacaggaca

SEQ ID NO: 14154 - DNA, 25 bp, probe
caggccaacaaaatgaacctgtcat

SEQ ID NO: 14155 - DNA, 25 bp, probe
atcacaggccaacaaaatgaacctg

SEQ ID NO: 14156 - DNA, 25 bp, probe
tggatcttttcatcctcgagacagg

SEQ ID NO: 14157 - DNA, 25 bp, probe
ttttcatcctcgagacaggacaaga

SEQ ID NO: 14158 - DNA, 25 bp, probe
tcttttcatcctcgagacaggacaa

SEQ ID NO: 14159 - DNA, 25 bp, probe
ggatcttttcatcctcgagacagga

SEQ ID NO: 14160 - DNA, 25 bp, probe
gggtctggatcttttcatcctcgag

SEQ ID NO: 14161 - DNA, 25 bp, probe
ccagacgaagcctatacaacattaa

SEQ ID NO: 14162 - DNA, 25 bp, probe
taccagaatagtcttccaccagtaa

SEQ ID NO: 14163 - DNA, 25 bp, probe
ttaccagaatagtcttccaccagta

SEQ ID NO: 14164 - DNA, 25 bp, probe
gctggatgctacacggttatatatg

SEQ ID NO: 14165 - DNA, 25 bp, probe
tgctggatgctacacggttatatat

SEQ ID NO: 14166 - DNA, 25 bp, probe
ttgctggatgctacacggttatata

SEQ ID NO: 14167 - DNA, 25 bp, probe
ctggatgctacacggttatatatgt

SEQ ID NO: 14168 - DNA, 25 bp, probe
cagacgaagcctatacaacattaat

SEQ ID NO: 14169 - DNA, 25 bp, probe
gacgaagcctatacaacattaatct

SEQ ID NO: 14170 - DNA, 25 bp, probe
agacgaagcctatacaacattaatc

SEQ ID NO: 14171 - DNA, 25 bp, probe
tggatgctacacggttatatatgtg

SEQ ID NO: 14172 - DNA, 25 bp, probe
cttgctggatgctacacggttatat

SEQ ID NO: 14173 - DNA, 25 bp, probe
ggatgctacacggttatatatgtgg

SEQ ID NO: 14174 - DNA, 25 bp, probe
acgaagcctatacaacattaatctt

SEQ ID NO: 14175 - DNA, 25 bp, probe
atttaccagaatagtcttccaccag

SEQ ID NO: 14176 - DNA, 25 bp, probe
ctatattcccttcaggcacacatat

SEQ ID NO: 14177 - DNA, 25 bp, probe
ttacagatattgctgccagatcaat

SEQ ID NO: 14178 - DNA, 25 bp, probe
accagaatagtcttccaccagtaaa

SEQ ID NO: 14179 - DNA, 25 bp, probe
tttaccagaatagtcttccaccagt

SEQ ID NO: 14180 - DNA, 25 bp, probe
tatttaccagaatagtcttccacca

SEQ ID NO: 14181 - DNA, 25 bp, probe
gctgccagatcaataagaaattaca

SEQ ID NO: 14182 - DNA, 25 bp, probe
tgctgccagatcaataagaaattac

SEQ ID NO: 14183 - DNA, 25 bp, probe
aaaggcatttatattcagagcatct

SEQ ID NO: 14184 - DNA, 25 bp, probe
tgccagatcaataagaaattacagg

SEQ ID NO: 14185 - DNA, 25 bp, probe
cccagacgaagcctatacaacatta

SEQ ID NO: 14186 - DNA, 25 bp, probe
ttgctgccagatcaataagaaatta

SEQ ID NO: 14187 - DNA, 25 bp, probe
ttatttaccagaatagtcttccacc

SEQ ID NO: 14188 - DNA, 25 bp, probe
aggcatttatattcagagcatctag

SEQ ID NO: 14189 - DNA, 25 bp, probe
ttggtatatgcttgcttatcttaat

SEQ ID NO: 14190 - DNA, 25 bp, probe
aacagtacctttaagttgtattggc

SEQ ID NO: 14191 - DNA, 25 bp, probe
aaggcatttatattcagagcatcta

SEQ ID NO: 14192 - DNA, 25 bp, probe
tggtatatgcttgcttatcttaatt

SEQ ID NO: 14193 - DNA, 25 bp, probe
acaatttggtatatgcttgcttatc

SEQ ID NO: 14194 - DNA, 25 bp, probe
tttacagatattgctgccagatcaa

SEQ ID NO: 14195 - DNA, 25 bp, probe
aggcattatttaccagaatagtctt

SEQ ID NO: 14196 - DNA, 25 bp, probe
gcccataacaatttggtatatgctt

SEQ ID NO: 14197 - DNA, 25 bp, probe
caatttggtatatgcttgcttatct

SEQ ID NO: 14198 - DNA, 25 bp, probe
gcattatttaccagaatagtcttcc

SEQ ID NO: 14199 - DNA, 25 bp, probe
ggcattatttaccagaatagtcttc

SEQ ID NO: 14200 - DNA, 25 bp, probe
gtttacagatattgctgccagatca

SEQ ID NO: 14201 - DNA, 25 bp, probe
agcctatacaacattaatctttggg

SEQ ID NO: 14202 - DNA, 25 bp, probe
cctatattcccttcaggcacacata

SEQ ID NO: 14203 - DNA, 25 bp, probe
gatgctacacggttatatatgtggg

SEQ ID NO: 14204 - DNA, 25 bp, probe
ccataacaatttggtatatgcttgc

SEQ ID NO: 14205 - DNA, 25 bp, probe
gcgaaccatatttacctatacggag

SEQ ID NO: 14206 - DNA, 25 bp, probe
ctgtgagaacaagataacgcctaca

SEQ ID NO: 14207 - DNA, 25 bp, probe
gagaacaagataacgcctacaccac

SEQ ID NO: 14208 - DNA, 25 bp, probe
ggcgaaccatatttacctatacgga

SEQ ID NO: 14209 - DNA, 25 bp, probe
ttacctatacggaggctgatgagag

SEQ ID NO: 14210 - DNA, 25 bp, probe
tgtgagaacaagataacgcctacac

SEQ ID NO: 14211 - DNA, 25 bp, probe
gaacaagataacgcctacaccactg

SEQ ID NO: 14212 - DNA, 25 bp, probe
tatttacctatacggaggctgatga

SEQ ID NO: 14213 - DNA, 25 bp, probe
atatttacctatacggaggctgatg

SEQ ID NO: 14214 - DNA, 25 bp, probe
catatttacctatacggaggctgat

SEQ ID NO: 14215 - DNA, 25 bp, probe
cgaaccatatttacctatacggagg

SEQ ID NO: 14216 - DNA, 25 bp, probe
gaaccatatttacctatacggaggc

SEQ ID NO: 14217 - DNA, 25 bp, probe
aaccatatttacctatacggaggct

SEQ ID NO: 14218 - DNA, 25 bp, probe
agaacaagataacgcctacaccact

SEQ ID NO: 14219 - DNA, 25 bp, probe
tgagaacaagataacgcctacacca

SEQ ID NO: 14220 - DNA, 25 bp, probe
ccatatttacctatacggaggctga

SEQ ID NO: 14221 - DNA, 25 bp, probe
caggcgaaccatatttacctatacg

SEQ ID NO: 14222 - DNA, 25 bp, probe
gcaggcgaaccatatttacctatac

SEQ ID NO: 14223 - DNA, 25 bp, probe
atttacctatacggaggctgatgag

SEQ ID NO: 14224 - DNA, 25 bp, probe
accatatttacctatacggaggctg

SEQ ID NO: 14225 - DNA, 25 bp, probe
gtgagaacaagataacgcctacacc

SEQ ID NO: 14226 - DNA, 25 bp, probe
aggcgaaccatatttacctatacgg

SEQ ID NO: 14227 - DNA, 25 bp, probe
gctgtgagaacaagataacgcctac

SEQ ID NO: 14228 - DNA, 25 bp, probe
gtgaccgctgtgagaacaagataac

SEQ ID NO: 14229 - DNA, 25 bp, probe
tttacctatacggaggctgatgaga

SEQ ID NO: 14230 - DNA, 25 bp, probe
tgcaggcgaaccatatttacctata

SEQ ID NO: 14231 - DNA, 25 bp, probe
aacaagataacgcctacaccactgg

SEQ ID NO: 14232 - DNA, 25 bp, probe
ggtgaccgctgtgagaacaagataa

SEQ ID NO: 14233 - DNA, 25 bp, probe
cgctgtgagaacaagataacgccta

SEQ ID NO: 14234 - DNA, 25 bp, probe
tgaccgctgtgagaacaagataacg

SEQ ID NO: 14235 - DNA, 25 bp, probe
tacctatacggaggctgatgagagc

SEQ ID NO: 14236 - DNA, 25 bp, probe
actggtcacatgttccacattgatt

SEQ ID NO: 14237 - DNA, 25 bp, probe
ctggtcacatgttccacattgattt

SEQ ID NO: 14238 - DNA, 25 bp, probe
cactggtcacatgttccacattgat

SEQ ID NO: 14239 - DNA, 25 bp, probe
gtcacatgttccacattgattttgg

SEQ ID NO: 14240 - DNA, 25 bp, probe
ggtcacatgttccacattgattttg

SEQ ID NO: 14241 - DNA, 25 bp, probe
tggtcacatgttccacattgatttt

SEQ ID NO: 14242 - DNA, 25 bp, probe
tcacatgttccacattgattttggc

SEQ ID NO: 14243 - DNA, 25 bp, probe
cacatgttccacattgattttggcc

SEQ ID NO: 14244 - DNA, 25 bp, probe
gaaaccgtgctgaaaatgcagagag

SEQ ID NO: 14245 - DNA, 25 bp, probe
acatgttccacattgattttggccg

SEQ ID NO: 14246 - DNA, 25 bp, probe
gaacatctctgtggcaatcatagaa

SEQ ID NO: 14247 - DNA, 25 bp, probe
aagaacatctctgtggcaatcatag

SEQ ID NO: 14248 - DNA, 25 bp, probe
caagaacatctctgtggcaatcata

SEQ ID NO: 14249 - DNA, 25 bp, probe
agaacatctctgtggcaatcataga

SEQ ID NO: 14250 - DNA, 25 bp, probe
aagatgccactgataccatacgaag

SEQ ID NO: 14251 - DNA, 25 bp, probe
gaagatgccactgataccatacgaa

SEQ ID NO: 14252 - DNA, 25 bp, probe
gatgccactgataccatacgaagag

SEQ ID NO: 14253 - DNA, 25 bp, probe
tctctgtggcaatcatagaaagaaa

SEQ ID NO: 14254 - DNA, 25 bp, probe
atctctgtggcaatcatagaaagaa

SEQ ID NO: 14255 - DNA, 25 bp, probe
ttcaggaatacagtaggtagaaggg

SEQ ID NO: 14256 - DNA, 25 bp, probe
tttcaggaatacagtaggtagaagg

SEQ ID NO: 14257 - DNA, 25 bp, probe
catctctgtggcaatcatagaaaga

SEQ ID NO: 14258 - DNA, 25 bp, probe
aattctcacaggaagatatcatgcc

SEQ ID NO: 14259 - DNA, 25 bp, probe
agatgccactgataccatacgaaga

SEQ ID NO: 14260 - DNA, 25 bp, probe
agaagatgccactgataccatacga

SEQ ID NO: 14261 - DNA, 25 bp, probe
aacatctctgtggcaatcatagaaa

SEQ ID NO: 14262 - DNA, 25 bp, probe
ccagaagatgccactgataccatac

SEQ ID NO: 14263 - DNA, 25 bp, probe
aattactaatgctgaacgccaggaa

SEQ ID NO: 14264 - DNA, 25 bp, probe
acatctctgtggcaatcatagaaag

SEQ ID NO: 14265 - DNA, 25 bp, probe
cagaagatgccactgataccatacg

SEQ ID NO: 14266 - DNA, 25 bp, probe
ttgcccttcaacttgactcattaaa

SEQ ID NO: 14267 - DNA, 25 bp, probe
attactaatgctgaacgccaggaag

SEQ ID NO: 14268 - DNA, 25 bp, probe
cttgcccttcaacttgactcattaa

SEQ ID NO: 14269 - DNA, 25 bp, probe
acatacaaagcctcagtgtcatact

SEQ ID NO: 14270 - DNA, 25 bp, probe
aagtagccagaagatgccactgata

SEQ ID NO: 14271 - DNA, 25 bp, probe
atttcaggaatacagtaggtagaag

SEQ ID NO: 14272 - DNA, 25 bp, probe
cactgataccatacgaagagccact

SEQ ID NO: 14273 - DNA, 25 bp, probe
actgataccatacgaagagccactc

SEQ ID NO: 14274 - DNA, 25 bp, probe
tcaggaatacagtaggtagaagggc

SEQ ID NO: 14275 - DNA, 25 bp, probe
tcttgcccttcaacttgactcatta

SEQ ID NO: 14276 - DNA, 25 bp, probe
ccaagaacatctctgtggcaatcat

SEQ ID NO: 14277 - DNA, 25 bp, probe
aaattctcacaggaagatatcatgc

SEQ ID NO: 14278 - DNA, 25 bp, probe
agtagccagaagatgccactgatac

SEQ ID NO: 14279 - DNA, 25 bp, probe
aaattactaatgctgaacgccagga

SEQ ID NO: 14280 - DNA, 25 bp, probe
ttcttgcccttcaacttgactcatt

SEQ ID NO: 14281 - DNA, 25 bp, probe
agtgtcatactgtatttcaggaata

SEQ ID NO: 14282 - DNA, 25 bp, probe
ctctgtggcaatcatagaaagaaaa

SEQ ID NO: 14283 - DNA, 25 bp, probe
atgccactgataccatacgaagagc

SEQ ID NO: 14284 - DNA, 25 bp, probe
gataccatacgaagagccactcctg

SEQ ID NO: 14285 - DNA, 25 bp, probe
ctgataccatacgaagagccactcc

SEQ ID NO: 14286 - DNA, 25 bp, probe
tttagagcacacaaaacaagagagg

SEQ ID NO: 14287 - DNA, 25 bp, probe
tctgtggcaatcatagaaagaaaat

SEQ ID NO: 14288 - DNA, 25 bp, probe
gccagaagatgccactgataccata

SEQ ID NO: 14289 - DNA, 25 bp, probe
gtgtccttcactgtaactgatgaaa

SEQ ID NO: 14290 - DNA, 25 bp, probe
gacacaatgacaatataatgcttcg

SEQ ID NO: 14291 - DNA, 25 bp, probe
cgacacaatgacaatataatgcttc

SEQ ID NO: 14292 - DNA, 25 bp, probe
acacaatgacaatataatgcttcga

SEQ ID NO: 14293 - DNA, 25 bp, probe
tcgacacaatgacaatataatgctt

SEQ ID NO: 14294 - DNA, 25 bp, probe
caagtggaatatggtgtgacaggat

SEQ ID NO: 14295 - DNA, 25 bp, probe
atcgacacaatgacaatataatgct

SEQ ID NO: 14296 - DNA, 25 bp, probe
gatcgacacaatgacaatataatgc

SEQ ID NO: 14297 - DNA, 25 bp, probe
aagtggaatatggtgtgacaggatc

SEQ ID NO: 14298 - DNA, 25 bp, probe
agaactttatctattcctgtgctgg

SEQ ID NO: 14299 - DNA, 25 bp, probe
gagaactttatctattcctgtgctg

SEQ ID NO: 14300 - DNA, 25 bp, probe
agagaactttatctattcctgtgct

SEQ ID NO: 14301 - DNA, 25 bp, probe
acaatccctctgaagaagaatatga

SEQ ID NO: 14302 - DNA, 25 bp, probe
ggcttcagagaactttatctattcc

SEQ ID NO: 14303 - DNA, 25 bp, probe
gcagagtggctaaggaaatacaatc

SEQ ID NO: 14304 - DNA, 25 bp, probe
gaaatacaatccctctgaagaagaa

SEQ ID NO: 14305 - DNA, 25 bp, probe
ttatctattcctgtgctggatgctg

SEQ ID NO: 14306 - DNA, 25 bp, probe
caatccctctgaagaagaatatgaa

SEQ ID NO: 14307 - DNA, 25 bp, probe
tgatcgacacaatgacaatataatg

SEQ ID NO: 14308 - DNA, 25 bp, probe
cagagaactttatctattcctgtgc

SEQ ID NO: 14309 - DNA, 25 bp, probe
acctctgatatggcatatgtcatta

SEQ ID NO: 14310 - DNA, 25 bp, probe
gcttcagagaactttatctattcct

SEQ ID NO: 14311 - DNA, 25 bp, probe
aggcttcagagaactttatctattc

SEQ ID NO: 14312 - DNA, 25 bp, probe
gacctctgatatggcatatgtcatt

SEQ ID NO: 14313 - DNA, 25 bp, probe
tacaatccctctgaagaagaatatg

SEQ ID NO: 14314 - DNA, 25 bp, probe
aaatacaatccctctgaagaagaat

SEQ ID NO: 14315 - DNA, 25 bp, probe
ggaaatacaatccctctgaagaaga

SEQ ID NO: 14316 - DNA, 25 bp, probe
aggaaatacaatccctctgaagaag

SEQ ID NO: 14317 - DNA, 25 bp, probe
aactttatctattcctgtgctggat

SEQ ID NO: 14318 - DNA, 25 bp, probe
gaactttatctattcctgtgctgga

SEQ ID NO: 14319 - DNA, 25 bp, probe
gctaaggaaatacaatccctctgaa

SEQ ID NO: 14320 - DNA, 25 bp, probe
actttatctattcctgtgctggatg

SEQ ID NO: 14321 - DNA, 25 bp, probe
aaggaaatacaatccctctgaagaa

SEQ ID NO: 14322 - DNA, 25 bp, probe
aaggcttactttggagagacagttt

SEQ ID NO: 14323 - DNA, 25 bp, probe
aaggcttcagagaactttatctatt

SEQ ID NO: 14324 - DNA, 25 bp, probe
aatccctctgaagaagaatatgaaa

SEQ ID NO: 14325 - DNA, 25 bp, probe
cctctgatatggcatatgtcattaa

SEQ ID NO: 14326 - DNA, 25 bp, probe
taaggaaatacaatccctctgaaga

SEQ ID NO: 14327 - DNA, 25 bp, probe
aatccaagtggaatatggtgtgaca

SEQ ID NO: 14328 - DNA, 25 bp, probe
cagagtggctaaggaaatacaatcc

SEQ ID NO: 14329 - DNA, 25 bp, probe
tttatcattaaaggcatggtggagc

SEQ ID NO: 14330 - DNA, 25 bp, probe
ctaaggaaatacaatccctctgaag

SEQ ID NO: 14331 - DNA, 25 bp, probe
ctttatctattcctgtgctggatgc

SEQ ID NO: 14332 - DNA, 25 bp, probe
gtgatcgacacaatgacaatataat

SEQ ID NO: 14333 - DNA, 25 bp, probe
tatctattcctgtgctggatgctgt

SEQ ID NO: 14334 - DNA, 25 bp, probe
catggcaagacctcatctctactaa

SEQ ID NO: 14335 - DNA, 25 bp, probe
atggcaagacctcatctctactaaa

SEQ ID NO: 14336 - DNA, 25 bp, probe
acatggcaagacctcatctctacta

SEQ ID NO: 14337 - DNA, 25 bp, probe
caacatggcaagacctcatctctac

SEQ ID NO: 14338 - DNA, 25 bp, probe
aacatggcaagacctcatctctact

SEQ ID NO: 14339 - DNA, 25 bp, probe
tggcaagacctcatctctactaaaa

SEQ ID NO: 14340 - DNA, 25 bp, probe
gcaacatggcaagacctcatctcta

SEQ ID NO: 14341 - DNA, 25 bp, probe
agagtaaaaccctgacatgtattgc

SEQ ID NO: 14342 - DNA, 25 bp, probe
ggtgacagagtaaaaccctgacatg

SEQ ID NO: 14343 - DNA, 25 bp, probe
acagagtaaaaccctgacatgtatt

SEQ ID NO: 14344 - DNA, 25 bp, probe
gacagagtaaaaccctgacatgtat

SEQ ID NO: 14345 - DNA, 25 bp, probe
cagagtaaaaccctgacatgtattg

SEQ ID NO: 14346 - DNA, 25 bp, probe
gagtaaaaccctgacatgtattgcg

SEQ ID NO: 14347 - DNA, 25 bp, probe
tgacagagtaaaaccctgacatgta

SEQ ID NO: 14348 - DNA, 25 bp, probe
gtgacagagtaaaaccctgacatgt

SEQ ID NO: 14349 - DNA, 25 bp, probe
ctccagcatgggtgacagagtaaaa

SEQ ID NO: 14350 - DNA, 25 bp, probe
agtaaaaccctgacatgtattgcgg

SEQ ID NO: 14351 - DNA, 25 bp, probe
tccagcatgggtgacagagtaaaac

SEQ ID NO: 14352 - DNA, 25 bp, probe
gtaaaaccctgacatgtattgcggg

SEQ ID NO: 14353 - DNA, 25 bp, probe
agtaaggtatgttgccagaagtatt

SEQ ID NO: 14354 - DNA, 25 bp, probe
cagtaaggtatgttgccagaagtat

SEQ ID NO: 14355 - DNA, 25 bp, probe
ccagtaaggtatgttgccagaagta

SEQ ID NO: 14356 - DNA, 25 bp, probe
ttccagtaaggtatgttgccagaag

SEQ ID NO: 14357 - DNA, 25 bp, probe
cactaattgcattggaacttcttga

SEQ ID NO: 14358 - DNA, 25 bp, probe
actaattgcattggaacttcttgat

SEQ ID NO: 14359 - DNA, 25 bp, probe
aattgcattggaacttcttgattca

SEQ ID NO: 14360 - DNA, 25 bp, probe
gtaaggtatgttgccagaagtattt

SEQ ID NO: 14361 - DNA, 25 bp, probe
gtatgttgccagaagtatttccttt

SEQ ID NO: 14362 - DNA, 25 bp, probe
attgcattggaacttcttgattcaa

SEQ ID NO: 14363 - DNA, 25 bp, probe
tatgttgccagaagtatttcctttc

SEQ ID NO: 14364 - DNA, 25 bp, probe
ttgccagaagtatttcctttccttt

SEQ ID NO: 14365 - DNA, 25 bp, probe
ggtatgttgccagaagtatttcctt

SEQ ID NO: 14366 - DNA, 25 bp, probe
aaggtatgttgccagaagtatttcc

SEQ ID NO: 14367 - DNA, 25 bp, probe
cgttattattgcttcaaacacccaa

SEQ ID NO: 14368 - DNA, 25 bp, probe
taaggtatgttgccagaagtatttc

SEQ ID NO: 14369 - DNA, 25 bp, probe
attattgcttcaaacacccaaattg

SEQ ID NO: 14370 - DNA, 25 bp, probe
ctaattgcattggaacttcttgatt

SEQ ID NO: 14371 - DNA, 25 bp, probe
gttgccagaagtatttcctttcctt

SEQ ID NO: 14372 - DNA, 25 bp, probe
caaactggaaatgggttaatcttgc

SEQ ID NO: 14373 - DNA, 25 bp, probe
taattgcattggaacttcttgattc

SEQ ID NO: 14374 - DNA, 25 bp, probe
atgttgccagaagtatttcctttcc

SEQ ID NO: 14375 - DNA, 25 bp, probe
gttattattgcttcaaacacccaaa

SEQ ID NO: 14376 - DNA, 25 bp, probe
caaacacccaaattgtcttcctaaa

SEQ ID NO: 14377 - DNA, 25 bp, probe
ttattgcttcaaacacccaaattgt

SEQ ID NO: 14378 - DNA, 25 bp, probe
tccagtaaggtatgttgccagaagt

SEQ ID NO: 14379 - DNA, 25 bp, probe
tcaaacacccaaattgtcttcctaa

SEQ ID NO: 14380 - DNA, 25 bp, probe
ttcaaacacccaaattgtcttccta

SEQ ID NO: 14381 - DNA, 25 bp, probe
tattgcttcaaacacccaaattgtc

SEQ ID NO: 14382 - DNA, 25 bp, probe
aaactggaaatgggttaatcttgcc

SEQ ID NO: 14383 - DNA, 25 bp, probe
tttccagtaaggtatgttgccagaa

SEQ ID NO: 14384 - DNA, 25 bp, probe
aacttactcattgcttcaccagtgg

SEQ ID NO: 14385 - DNA, 25 bp, probe
aaacttactcattgcttcaccagtg

SEQ ID NO: 14386 - DNA, 25 bp, probe
ccactaattgcattggaacttcttg

SEQ ID NO: 14387 - DNA, 25 bp, probe
tgttgccagaagtatttcctttcct

SEQ ID NO: 14388 - DNA, 25 bp, probe
ttattattgcttcaaacacccaaat

SEQ ID NO: 14389 - DNA, 25 bp, probe
tattattgcttcaaacacccaaatt

SEQ ID NO: 14390 - DNA, 25 bp, probe
cttcaaacacccaaattgtcttcct

SEQ ID NO: 14391 - DNA, 25 bp, probe
ccaaactggaaatgggttaatcttg

SEQ ID NO: 14392 - DNA, 25 bp, probe
attgcttcaaacacccaaattgtct

SEQ ID NO: 14393 - DNA, 25 bp, probe
aggtatgttgccagaagtatttcct

SEQ ID NO: 14394 - DNA, 25 bp, probe
ttgcttcaaacacccaaattgtctt

SEQ ID NO: 14395 - DNA, 25 bp, probe
ttgcattggaacttcttgattcaaa

SEQ ID NO: 14396 - DNA, 25 bp, probe
tgcattggaacttcttgattcaaag

SEQ ID NO: 14397 - DNA, 25 bp, probe
ttagtaggtcggaggaagtggagag

SEQ ID NO: 14398 - DNA, 25 bp, probe
cttagtaggtcggaggaagtggaga

SEQ ID NO: 14399 - DNA, 25 bp, probe
aagtctgacgatgacacctccaatt

SEQ ID NO: 14400 - DNA, 25 bp, probe
gatgacacctccaattttgatgaac

SEQ ID NO: 14401 - DNA, 25 bp, probe
caaagaagaattcgtgggtttcatc

SEQ ID NO: 14402 - DNA, 25 bp, probe
ttgatgaaccaaagaagaattcgtg

SEQ ID NO: 14403 - DNA, 25 bp, probe
ggaggaagtggagaggatgtaacac

SEQ ID NO: 14404 - DNA, 25 bp, probe
atgacacctccaattttgatgaacc

SEQ ID NO: 14405 - DNA, 25 bp, probe
cgatgacacctccaattttgatgaa

SEQ ID NO: 14406 - DNA, 25 bp, probe
aaagaagaattcgtgggtttcatcc

SEQ ID NO: 14407 - DNA, 25 bp, probe
gaggaagtggagaggatgtaacacg

SEQ ID NO: 14408 - DNA, 25 bp, probe
gacacctccaattttgatgaaccaa

SEQ ID NO: 14409 - DNA, 25 bp, probe
caagtctgacgatgacacctccaat

SEQ ID NO: 14410 - DNA, 25 bp, probe
tcggaggaagtggagaggatgtaac

SEQ ID NO: 14411 - DNA, 25 bp, probe
gtcggaggaagtggagaggatgtaa

SEQ ID NO: 14412 - DNA, 25 bp, probe
gacgatgacacctccaattttgatg

SEQ ID NO: 14413 - DNA, 25 bp, probe
aagaagaattcgtgggtttcatcct

SEQ ID NO: 14414 - DNA, 25 bp, probe
acgatgacacctccaattttgatga

SEQ ID NO: 14415 - DNA, 25 bp, probe
tgacgatgacacctccaattttgat

SEQ ID NO: 14416 - DNA, 25 bp, probe
agtctgacgatgacacctccaattt

SEQ ID NO: 14417 - DNA, 25 bp, probe
tgacacctccaattttgatgaacca

SEQ ID NO: 14418 - DNA, 25 bp, probe
agaagaattcgtgggtttcatcctc

SEQ ID NO: 14419 - DNA, 25 bp, probe
tgatgaaccaaagaagaattcgtgg

SEQ ID NO: 14420 - DNA, 25 bp, probe
aagaattcgtgggtttcatcctctc

SEQ ID NO: 14421 - DNA, 25 bp, probe
gaagaattcgtgggtttcatcctct

SEQ ID NO: 14422 - DNA, 25 bp, probe
tttgatgaaccaaagaagaattcgt

SEQ ID NO: 14423 - DNA, 25 bp, probe
ccaaagaagaattcgtgggtttcat

SEQ ID NO: 14424 - DNA, 25 bp, probe
ctgacgatgacacctccaattttga

SEQ ID NO: 14425 - DNA, 25 bp, probe
tctgacgatgacacctccaattttg

SEQ ID NO: 14426 - DNA, 25 bp, probe
cctccaattttgatgaaccaaagaa

SEQ ID NO: 14427 - DNA, 25 bp, probe
gatgaaccaaagaagaattcgtggg

SEQ ID NO: 14428 - DNA, 25 bp, probe
tccaattttgatgaaccaaagaaga

SEQ ID NO: 14429 - DNA, 25 bp, probe
ctccaattttgatgaaccaaagaag

SEQ ID NO: 14430 - DNA, 25 bp, probe
acctccaattttgatgaaccaaaga

SEQ ID NO: 14431 - DNA, 25 bp, probe
cacctccaattttgatgaaccaaag

SEQ ID NO: 14432 - DNA, 25 bp, probe
ccaattttgatgaaccaaagaagaa

SEQ ID NO: 14433 - DNA, 25 bp, probe
acacctccaattttgatgaaccaaa

SEQ ID NO: 14434 - DNA, 25 bp, probe
gtctgacgatgacacctccaatttt

SEQ ID NO: 14435 - DNA, 25 bp, probe
atgaaccaaagaagaattcgtgggt

SEQ ID NO: 14436 - DNA, 25 bp, probe
accaaagaagaattcgtgggtttca

SEQ ID NO: 14437 - DNA, 25 bp, probe
agaattcgtgggtttcatcctctcc

SEQ ID NO: 14438 - DNA, 25 bp, probe
caattttgatgaaccaaagaagaat

SEQ ID NO: 14439 - DNA, 25 bp, probe
ttttgatgaaccaaagaagaattcg

SEQ ID NO: 14440 - DNA, 25 bp, probe
aaccaaagaagaattcgtgggtttc

SEQ ID NO: 14441 - DNA, 25 bp, probe
tgagaccaattacacttcagatgaa

SEQ ID NO: 14442 - DNA, 25 bp, probe
tttaaggttggtgattatgtagggc

SEQ ID NO: 14443 - DNA, 25 bp, probe
cgagcgttatatagcaagtaaagtt

SEQ ID NO: 14444 - DNA, 25 bp, probe
ccgagcgttatatagcaagtaaagt

SEQ ID NO: 14445 - DNA, 25 bp, probe
ttaaggttggtgattatgtagggca

SEQ ID NO: 14446 - DNA, 25 bp, probe
taaggttggtgattatgtagggcag

SEQ ID NO: 14447 - DNA, 25 bp, probe
agcgttatatagcaagtaaagttct

SEQ ID NO: 14448 - DNA, 25 bp, probe
gccgagcgttatatagcaagtaaag

SEQ ID NO: 14449 - DNA, 25 bp, probe
aaacaggtaggaagaatcattgctg

SEQ ID NO: 14450 - DNA, 25 bp, probe
aggtaggaagaatcattgctgcatt

SEQ ID NO: 14451 - DNA, 25 bp, probe
gagcgttatatagcaagtaaagttc

SEQ ID NO: 14452 - DNA, 25 bp, probe
gaaatgtccctgagaccaattacac

SEQ ID NO: 14453 - DNA, 25 bp, probe
aacaggtaggaagaatcattgctgc

SEQ ID NO: 14454 - DNA, 25 bp, probe
aatgtccctgagaccaattacactt

SEQ ID NO: 14455 - DNA, 25 bp, probe
aaatgtccctgagaccaattacact

SEQ ID NO: 14456 - DNA, 25 bp, probe
gcgttatatagcaagtaaagttctt

SEQ ID NO: 14457 - DNA, 25 bp, probe
gtaggaagaatcattgctgcatttc

SEQ ID NO: 14458 - DNA, 25 bp, probe
atgtccctgagaccaattacacttc

SEQ ID NO: 14459 - DNA, 25 bp, probe
ctgagaccaattacacttcagatga

SEQ ID NO: 14460 - DNA, 25 bp, probe
ggtaggaagaatcattgctgcattt

SEQ ID NO: 14461 - DNA, 25 bp, probe
caagtaaagttctttctgccttata

SEQ ID NO: 14462 - DNA, 25 bp, probe
tttctcccaagtgtaaaataccctc

SEQ ID NO: 14463 - DNA, 25 bp, probe
aaaacaggtaggaagaatcattgct

SEQ ID NO: 14464 - DNA, 25 bp, probe
gccctagtagtctttgtcacaacta

SEQ ID NO: 14465 - DNA, 25 bp, probe
agaccaattacacttcagatgaaga

SEQ ID NO: 14466 - DNA, 25 bp, probe
accaattacacttcagatgaagagg

SEQ ID NO: 14467 - DNA, 25 bp, probe
ggaaatgtccctgagaccaattaca

SEQ ID NO: 14468 - DNA, 25 bp, probe
gaccaattacacttcagatgaagag

SEQ ID NO: 14469 - DNA, 25 bp, probe
gagaccaattacacttcagatgaag

SEQ ID NO: 14470 - DNA, 25 bp, probe
cctgagaccaattacacttcagatg

SEQ ID NO: 14471 - DNA, 25 bp, probe
gcaagtaaagttctttctgccttat

SEQ ID NO: 14472 - DNA, 25 bp, probe
atagcaagtaaagttctttctgcct

SEQ ID NO: 14473 - DNA, 25 bp, probe
ttctcccaagtgtaaaataccctca

SEQ ID NO: 14474 - DNA, 25 bp, probe
caggtaggaagaatcattgctgcat

SEQ ID NO: 14475 - DNA, 25 bp, probe
ttttaaggttggtgattatgtaggg

SEQ ID NO: 14476 - DNA, 25 bp, probe
agcaagtaaagttctttctgcctta

SEQ ID NO: 14477 - DNA, 25 bp, probe
tagcaagtaaagttctttctgcctt

SEQ ID NO: 14478 - DNA, 25 bp, probe
tatagcaagtaaagttctttctgcc

SEQ ID NO: 14479 - DNA, 25 bp, probe
atttctcccaagtgtaaaataccct

SEQ ID NO: 14480 - DNA, 25 bp, probe
catttctcccaagtgtaaaataccc

SEQ ID NO: 14481 - DNA, 25 bp, probe
gcatttctcccaagtgtaaaatacc

SEQ ID NO: 14482 - DNA, 25 bp, probe
tgtccctgagaccaattacacttca

SEQ ID NO: 14483 - DNA, 25 bp, probe
taggaagaatcattgctgcatttct

SEQ ID NO: 14484 - DNA, 25 bp, probe
gaatcattgctgcatttctcccaag

SEQ ID NO: 14485 - DNA, 25 bp, probe
ctagtgcatacatagagacgtgaag

SEQ ID NO: 14486 - DNA, 25 bp, probe
ctgacaggcatggtactagatttat

SEQ ID NO: 14487 - DNA, 25 bp, probe
tgacaggcatggtactagatttatt

SEQ ID NO: 14488 - DNA, 25 bp, probe
tagtgcatacatagagacgtgaagc

SEQ ID NO: 14489 - DNA, 25 bp, probe
tctgacaggcatggtactagattta

SEQ ID NO: 14490 - DNA, 25 bp, probe
ttcctttcactcttcttggctcttt

SEQ ID NO: 14491 - DNA, 25 bp, probe
tttcctttcactcttcttggctctt

SEQ ID NO: 14492 - DNA, 25 bp, probe
gacaggcatggtactagatttattt

SEQ ID NO: 14493 - DNA, 25 bp, probe
actagtgcatacatagagacgtgaa

SEQ ID NO: 14494 - DNA, 25 bp, probe
agtcatgtgtttcatttatcccata

SEQ ID NO: 14495 - DNA, 25 bp, probe
tagtcatgtgtttcatttatcccat

SEQ ID NO: 14496 - DNA, 25 bp, probe
atagtcatgtgtttcatttatccca

SEQ ID NO: 14497 - DNA, 25 bp, probe
ctctgacaggcatggtactagattt

SEQ ID NO: 14498 - DNA, 25 bp, probe
tttaggaatttgggatgattcaggc

SEQ ID NO: 14499 - DNA, 25 bp, probe
ttgctaaatagtcatgtgtttcatt

SEQ ID NO: 14500 - DNA, 25 bp, probe
tttgctaaatagtcatgtgtttcat

SEQ ID NO: 14501 - DNA, 25 bp, probe
ttaggaatttgggatgattcaggct

SEQ ID NO: 14502 - DNA, 25 bp, probe
gtcatgtgtttcatttatcccatat

SEQ ID NO: 14503 - DNA, 25 bp, probe
aatagtcatgtgtttcatttatccc

SEQ ID NO: 14504 - DNA, 25 bp, probe
atttattttaggctgctcttttgct

SEQ ID NO: 14505 - DNA, 25 bp, probe
gctctgacaggcatggtactagatt

SEQ ID NO: 14506 - DNA, 25 bp, probe
ccctactttcattttcctttcactc

SEQ ID NO: 14507 - DNA, 25 bp, probe
accctactttcattttcctttcact

SEQ ID NO: 14508 - DNA, 25 bp, probe
gctaccctactttcattttcctttc

SEQ ID NO: 14509 - DNA, 25 bp, probe
ttcattttcctttcactcttcttgg

SEQ ID NO: 14510 - DNA, 25 bp, probe
ctttcaacattttccctttcaccta

SEQ ID NO: 14511 - DNA, 25 bp, probe
gatttattttaggctgctcttttgc

SEQ ID NO: 14512 - DNA, 25 bp, probe
tttattttaggctgctcttttgctg

SEQ ID NO: 14513 - DNA, 25 bp, probe
ttcaacattttccctttcacctaaa

SEQ ID NO: 14514 - DNA, 25 bp, probe
tttcaacattttccctttcacctaa

SEQ ID NO: 14515 - DNA, 25 bp, probe
tttatcccatatatagttcagcctt

SEQ ID NO: 14516 - DNA, 25 bp, probe
ggctaccctactttcattttccttt

SEQ ID NO: 14517 - DNA, 25 bp, probe
gacctttcaacattttccctttcac

SEQ ID NO: 14518 - DNA, 25 bp, probe
taggaatttgggatgattcaggctc

SEQ ID NO: 14519 - DNA, 25 bp, probe
cctactttcattttcctttcactct

SEQ ID NO: 14520 - DNA, 25 bp, probe
taccctactttcattttcctttcac

SEQ ID NO: 14521 - DNA, 25 bp, probe
catttatcccatatatagttcagcc

SEQ ID NO: 14522 - DNA, 25 bp, probe
tgctaaatagtcatgtgtttcattt

SEQ ID NO: 14523 - DNA, 25 bp, probe
atttgctaaatagtcatgtgtttca

SEQ ID NO: 14524 - DNA, 25 bp, probe
actttcattttcctttcactcttct

SEQ ID NO: 14525 - DNA, 25 bp, probe
ctaccctactttcattttcctttca

SEQ ID NO: 14526 - DNA, 25 bp, probe
tattttaggctgctcttttgctgtt

SEQ ID NO: 14527 - DNA, 25 bp, probe
ttattttaggctgctcttttgctgt

SEQ ID NO: 14528 - DNA, 25 bp, probe
attttcctttcactcttcttggctc

SEQ ID NO: 14529 - DNA, 25 bp, probe
atgatgacatcttggattgctagaa

SEQ ID NO: 14530 - DNA, 25 bp, probe
tgatgacatcttggattgctagaag

SEQ ID NO: 14531 - DNA, 25 bp, probe
ccaagatgtatcccagatgtatgag

SEQ ID NO: 14532 - DNA, 25 bp, probe
gattgctagaagagaaggacctgtg

SEQ ID NO: 14533 - DNA, 25 bp, probe
agatgtatcccagatgtatgagaac

SEQ ID NO: 14534 - DNA, 25 bp, probe
caagatgtatcccagatgtatgaga

SEQ ID NO: 14535 - DNA, 25 bp, probe
tagaagagaaggacctgtgaaacta

SEQ ID NO: 14536 - DNA, 25 bp, probe
cttggattgctagaagagaaggacc

SEQ ID NO: 14537 - DNA, 25 bp, probe
aagatgtatcccagatgtatgagaa

SEQ ID NO: 14538 - DNA, 25 bp, probe
attgctagaagagaaggacctgtga

SEQ ID NO: 14539 - DNA, 25 bp, probe
ttggattgctagaagagaaggacct

SEQ ID NO: 14540 - DNA, 25 bp, probe
acatcttggattgctagaagagaag

SEQ ID NO: 14541 - DNA, 25 bp, probe
gacatcttggattgctagaagagaa

SEQ ID NO: 14542 - DNA, 25 bp, probe
atgacatcttggattgctagaagag

SEQ ID NO: 14543 - DNA, 25 bp, probe
catcttggattgctagaagagaagg

SEQ ID NO: 14544 - DNA, 25 bp, probe
atcttggattgctagaagagaagga

SEQ ID NO: 14545 - DNA, 25 bp, probe
gatgacatcttggattgctagaaga

SEQ ID NO: 14546 - DNA, 25 bp, probe
ttgctagaagagaaggacctgtgaa

SEQ ID NO: 14547 - DNA, 25 bp, probe
ctagaagagaaggacctgtgaaact

SEQ ID NO: 14548 - DNA, 25 bp, probe
gatgtatcccagatgtatgagaaca

SEQ ID NO: 14549 - DNA, 25 bp, probe
tgacatcttggattgctagaagaga

SEQ ID NO: 14550 - DNA, 25 bp, probe
gaagagaaggacctgtgaaactact

SEQ ID NO: 14551 - DNA, 25 bp, probe
agaagagaaggacctgtgaaactac

SEQ ID NO: 14552 - DNA, 25 bp, probe
gccaagatgtatcccagatgtatga

SEQ ID NO: 14553 - DNA, 25 bp, probe
agccaagatgtatcccagatgtatg

SEQ ID NO: 14554 - DNA, 25 bp, probe
cagccaagatgtatcccagatgtat

SEQ ID NO: 14555 - DNA, 25 bp, probe
aagagaaggacctgtgaaactactg

SEQ ID NO: 14556 - DNA, 25 bp, probe
tcttggattgctagaagagaaggac

SEQ ID NO: 14557 - DNA, 25 bp, probe
ggattgctagaagagaaggacctgt

SEQ ID NO: 14558 - DNA, 25 bp, probe
tggattgctagaagagaaggacctg

SEQ ID NO: 14559 - DNA, 25 bp, probe
gagaaggacctgtgaaactactgag

SEQ ID NO: 14560 - DNA, 25 bp, probe
gatgatgacatcttggattgctaga

SEQ ID NO: 14561 - DNA, 25 bp, probe
agagaaggacctgtgaaactactga

SEQ ID NO: 14562 - DNA, 25 bp, probe
cagaggatgatgacatcttggattg

SEQ ID NO: 14563 - DNA, 25 bp, probe
ggatgatgacatcttggattgctag

SEQ ID NO: 14564 - DNA, 25 bp, probe
aggatgatgacatcttggattgcta

SEQ ID NO: 14565 - DNA, 25 bp, probe
tccaaagcagactttcttgagatta

SEQ ID NO: 14566 - DNA, 25 bp, probe
ccaaagcagactttcttgagattaa

SEQ ID NO: 14567 - DNA, 25 bp, probe
gctagaagagaaggacctgtgaaac

SEQ ID NO: 14568 - DNA, 25 bp, probe
ctccaaagcagactttcttgagatt

SEQ ID NO: 14569 - DNA, 25 bp, probe
ccagaggatgatgacatcttggatt

SEQ ID NO: 14570 - DNA, 25 bp, probe
tgctagaagagaaggacctgtgaaa

SEQ ID NO: 14571 - DNA, 25 bp, probe
caaagcagactttcttgagattaag

SEQ ID NO: 14572 - DNA, 25 bp, probe
ctaactccacccttcaacccaaatg

SEQ ID NO: 14573 - DNA, 25 bp, probe
tatagacttactgctggacaatctg

SEQ ID NO: 14574 - DNA, 25 bp, probe
gtatagacttactgctggacaatct

SEQ ID NO: 14575 - DNA, 25 bp, probe
agtatagacttactgctggacaatc

SEQ ID NO: 14576 - DNA, 25 bp, probe
aagaagaagaggtgtccttacagag

SEQ ID NO: 14577 - DNA, 25 bp, probe
atagacttactgctggacaatctgc

SEQ ID NO: 14578 - DNA, 25 bp, probe
ataggcaaagaagataatggaggag

SEQ ID NO: 14579 - DNA, 25 bp, probe
gataggcaaagaagataatggagga

SEQ ID NO: 14580 - DNA, 25 bp, probe
agataggcaaagaagataatggagg

SEQ ID NO: 14581 - DNA, 25 bp, probe
aaggcagataggcaaagaagataat

SEQ ID NO: 14582 - DNA, 25 bp, probe
ctaaggcagataggcaaagaagata

SEQ ID NO: 14583 - DNA, 25 bp, probe
caagaagaagaggtgtccttacaga

SEQ ID NO: 14584 - DNA, 25 bp, probe
taaggcagataggcaaagaagataa

SEQ ID NO: 14585 - DNA, 25 bp, probe
gcagataggcaaagaagataatgga

SEQ ID NO: 14586 - DNA, 25 bp, probe
aggcagataggcaaagaagataatg

SEQ ID NO: 14587 - DNA, 25 bp, probe
ttactgaccaactgaagtatagact

SEQ ID NO: 14588 - DNA, 25 bp, probe
cagataggcaaagaagataatggag

SEQ ID NO: 14589 - DNA, 25 bp, probe
caaagaagataatggaggagcaatt

SEQ ID NO: 14590 - DNA, 25 bp, probe
gcaaagaagataatggaggagcaat

SEQ ID NO: 14591 - DNA, 25 bp, probe
ggcagataggcaaagaagataatgg

SEQ ID NO: 14592 - DNA, 25 bp, probe
taggcaaagaagataatggaggagc

SEQ ID NO: 14593 - DNA, 25 bp, probe
cttctaccttcattgtccctctctg

SEQ ID NO: 14594 - DNA, 25 bp, probe
gaagtatagacttactgctggacaa

SEQ ID NO: 14595 - DNA, 25 bp, probe
ctgaagtatagacttactgctggac

SEQ ID NO: 14596 - DNA, 25 bp, probe
aactgaagtatagacttactgctgg

SEQ ID NO: 14597 - DNA, 25 bp, probe
ccaactgaagtatagacttactgct

SEQ ID NO: 14598 - DNA, 25 bp, probe
accaactgaagtatagacttactgc

SEQ ID NO: 14599 - DNA, 25 bp, probe
actgaagtatagacttactgctgga

SEQ ID NO: 14600 - DNA, 25 bp, probe
tgaagtatagacttactgctggaca

SEQ ID NO: 14601 - DNA, 25 bp, probe
aagtatagacttactgctggacaat

SEQ ID NO: 14602 - DNA, 25 bp, probe
agaagaagaggtgtccttacagagg

SEQ ID NO: 14603 - DNA, 25 bp, probe
caactgaagtatagacttactgctg

SEQ ID NO: 14604 - DNA, 25 bp, probe
aagaagataatggaggagcaattgg

SEQ ID NO: 14605 - DNA, 25 bp, probe
gcaagaagaagaggtgtccttacag

SEQ ID NO: 14606 - DNA, 25 bp, probe
tgaccaactgaagtatagacttact

SEQ ID NO: 14607 - DNA, 25 bp, probe
actgaccaactgaagtatagactta

SEQ ID NO: 14608 - DNA, 25 bp, probe
tactgaccaactgaagtatagactt

SEQ ID NO: 14609 - DNA, 25 bp, probe
ttctaccttcattgtccctctctgt

SEQ ID NO: 14610 - DNA, 25 bp, probe
cctctttactgaccaactgaagtat

SEQ ID NO: 14611 - DNA, 25 bp, probe
gaccaactgaagtatagacttactg

SEQ ID NO: 14612 - DNA, 25 bp, probe
ctgaccaactgaagtatagacttac

SEQ ID NO: 14613 - DNA, 25 bp, probe
tttcctgtctttgagattgacctga

SEQ ID NO: 14614 - DNA, 25 bp, probe
gaagataatggaggagcaattggtc

SEQ ID NO: 14615 - DNA, 25 bp, probe
cctcccttcttattcttccttgctg

SEQ ID NO: 14616 - DNA, 25 bp, probe
ctgcctcccttcttattcttccttg

SEQ ID NO: 14617 - DNA, 25 bp, probe
gagattagcccacaaactgaataag

SEQ ID NO: 14618 - DNA, 25 bp, probe
aaggaaggacatgataaggcagatc

SEQ ID NO: 14619 - DNA, 25 bp, probe
cagcaaattatggatgaacctatgg

SEQ ID NO: 14620 - DNA, 25 bp, probe
aatggacagcaaattatggatgaac

SEQ ID NO: 14621 - DNA, 25 bp, probe
caatggacagcaaattatggatgaa

SEQ ID NO: 14622 - DNA, 25 bp, probe
aattatggatgaacctatgggagag

SEQ ID NO: 14623 - DNA, 25 bp, probe
acagcaaattatggatgaacctatg

SEQ ID NO: 14624 - DNA, 25 bp, probe
cgagattagcccacaaactgaataa

SEQ ID NO: 14625 - DNA, 25 bp, probe
gacaatggacagcaaattatggatg

SEQ ID NO: 14626 - DNA, 25 bp, probe
aaattatggatgaacctatgggaga

SEQ ID NO: 14627 - DNA, 25 bp, probe
caaattatggatgaacctatgggag

SEQ ID NO: 14628 - DNA, 25 bp, probe
gacagcaaattatggatgaacctat

SEQ ID NO: 14629 - DNA, 25 bp, probe
ggacagcaaattatggatgaaccta

SEQ ID NO: 14630 - DNA, 25 bp, probe
gcaaattatggatgaacctatggga

SEQ ID NO: 14631 - DNA, 25 bp, probe
agcaaattatggatgaacctatggg

SEQ ID NO: 14632 - DNA, 25 bp, probe
acaatggacagcaaattatggatga

SEQ ID NO: 14633 - DNA, 25 bp, probe
tgacaatggacagcaaattatggat

SEQ ID NO: 14634 - DNA, 25 bp, probe
gattagcccacaaactgaataagtc

SEQ ID NO: 14635 - DNA, 25 bp, probe
agattagcccacaaactgaataagt

SEQ ID NO: 14636 - DNA, 25 bp, probe
attagcccacaaactgaataagtca

SEQ ID NO: 14637 - DNA, 25 bp, probe
tgtatgccatgaaggtattgacgag

SEQ ID NO: 14638 - DNA, 25 bp, probe
ctgtatgccatgaaggtattgacga

SEQ ID NO: 14639 - DNA, 25 bp, probe
gggaaaggtgtacttaggtaagaaa

SEQ ID NO: 14640 - DNA, 25 bp, probe
attgggaaaggtgtacttaggtaag

SEQ ID NO: 14641 - DNA, 25 bp, probe
cttaggtaagaaagtctcaggctct

SEQ ID NO: 14642 - DNA, 25 bp, probe
cattgggaaaggtgtacttaggtaa

SEQ ID NO: 14643 - DNA, 25 bp, probe
atggacagcaaattatggatgaacc

SEQ ID NO: 14644 - DNA, 25 bp, probe
tgggaaaggtgtacttaggtaagaa

SEQ ID NO: 14645 - DNA, 25 bp, probe
ttgggaaaggtgtacttaggtaaga

SEQ ID NO: 14646 - DNA, 25 bp, probe
tcattgggaaaggtgtacttaggta

SEQ ID NO: 14647 - DNA, 25 bp, probe
gatcattgggaaaggtgtacttagg

SEQ ID NO: 14648 - DNA, 25 bp, probe
ggatcattgggaaaggtgtacttag

SEQ ID NO: 14649 - DNA, 25 bp, probe
acgagattagcccacaaactgaata

SEQ ID NO: 14650 - DNA, 25 bp, probe
tatcaaagaagttgctgtcacacat

SEQ ID NO: 14651 - DNA, 25 bp, probe
agtatcaaagaagttgctgtcacac

SEQ ID NO: 14652 - DNA, 25 bp, probe
aagtcagtatcaaagaagttgctgt

SEQ ID NO: 14653 - DNA, 25 bp, probe
ggaaaggtgtacttaggtaagaaag

SEQ ID NO: 14654 - DNA, 25 bp, probe
taaaggaaggacatgataaggcaga

SEQ ID NO: 14655 - DNA, 25 bp, probe
gtaaaggaaggacatgataaggcag

SEQ ID NO: 14656 - DNA, 25 bp, probe
atcattgggaaaggtgtacttaggt

SEQ ID NO: 14657 - DNA, 25 bp, probe
ataagtcagtatcaaagaagttgct

SEQ ID NO: 14658 - DNA, 25 bp, probe
taagtcagtatcaaagaagttgctg

SEQ ID NO: 14659 - DNA, 25 bp, probe
agtcagtatcaaagaagttgctgtc

SEQ ID NO: 14660 - DNA, 25 bp, probe
tcagtatcaaagaagttgctgtcac

SEQ ID NO: 14661 - DNA, 25 bp, probe
gatatgttccagaaggtagagaaga

SEQ ID NO: 14662 - DNA, 25 bp, probe
atatgttccagaaggtagagaagat

SEQ ID NO: 14663 - DNA, 25 bp, probe
tatgttccagaaggtagagaagatc

SEQ ID NO: 14664 - DNA, 25 bp, probe
atgttccagaaggtagagaagatcg

SEQ ID NO: 14665 - DNA, 25 bp, probe
ggatatgttccagaaggtagagaag

SEQ ID NO: 14666 - DNA, 25 bp, probe
aagaagatcagactggatttgtgag

SEQ ID NO: 14667 - DNA, 25 bp, probe
gaagaagatcagactggatttgtga

SEQ ID NO: 14668 - DNA, 25 bp, probe
tgaagaagatcagactggatttgtg

SEQ ID NO: 14669 - DNA, 25 bp, probe
cagaaggtagagaagatcggagagg

SEQ ID NO: 14670 - DNA, 25 bp, probe
ccagaaggtagagaagatcggagag

SEQ ID NO: 14671 - DNA, 25 bp, probe
gaagatcagactggatttgtgagtg

SEQ ID NO: 14672 - DNA, 25 bp, probe
agaagatcagactggatttgtgagt

SEQ ID NO: 14673 - DNA, 25 bp, probe
tgttccagaaggtagagaagatcgg

SEQ ID NO: 14674 - DNA, 25 bp, probe
ttccagaaggtagagaagatcggag

SEQ ID NO: 14675 - DNA, 25 bp, probe
gttccagaaggtagagaagatcgga

SEQ ID NO: 14676 - DNA, 25 bp, probe
tccagaaggtagagaagatcggaga

SEQ ID NO: 14677 - DNA, 25 bp, probe
aagatcagactggatttgtgagtgc

SEQ ID NO: 14678 - DNA, 25 bp, probe
atggatatgttccagaaggtagaga

SEQ ID NO: 14679 - DNA, 25 bp, probe
catggatatgttccagaaggtagag

SEQ ID NO: 14680 - DNA, 25 bp, probe
tggatatgttccagaaggtagagaa

SEQ ID NO: 14681 - DNA, 25 bp, probe
agatcagactggatttgtgagtgct

SEQ ID NO: 14682 - DNA, 25 bp, probe
ctgaagaagatcagactggatttgt

SEQ ID NO: 14683 - DNA, 25 bp, probe
gatcagactggatttgtgagtgctg

SEQ ID NO: 14684 - DNA, 25 bp, probe
agaaggtagagaagatcggagaggg

SEQ ID NO: 14685 - DNA, 25 bp, probe
cctgaagaagatcagactggatttg

SEQ ID NO: 14686 - DNA, 25 bp, probe
ccctgaagaagatcagactggattt

SEQ ID NO: 14687 - DNA, 25 bp, probe
ctctttcctggagtccacgtttaac

SEQ ID NO: 14688 - DNA, 25 bp, probe
tctttcctggagtccacgtttaact

SEQ ID NO: 14689 - DNA, 25 bp, probe
atcagactggatttgtgagtgctgg

SEQ ID NO: 14690 - DNA, 25 bp, probe
gtcattctgtggggttaaggagaag

SEQ ID NO: 14691 - DNA, 25 bp, probe
cctctttcctggagtccacgtttaa

SEQ ID NO: 14692 - DNA, 25 bp, probe
ctggtcattctgtggggttaaggag

SEQ ID NO: 14693 - DNA, 25 bp, probe
ctttcctggagtccacgtttaactc

SEQ ID NO: 14694 - DNA, 25 bp, probe
gccctgaagaagatcagactggatt

SEQ ID NO: 14695 - DNA, 25 bp, probe
tggtcattctgtggggttaaggaga

SEQ ID NO: 14696 - DNA, 25 bp, probe
ggtcattctgtggggttaaggagaa

SEQ ID NO: 14697 - DNA, 25 bp, probe
tcattctgtggggttaaggagaagc

SEQ ID NO: 14698 - DNA, 25 bp, probe
ccatggatatgttccagaaggtaga

SEQ ID NO: 14699 - DNA, 25 bp, probe
gccatggatatgttccagaaggtag

SEQ ID NO: 14700 - DNA, 25 bp, probe
cattctgtggggttaaggagaagcc

SEQ ID NO: 14701 - DNA, 25 bp, probe
ggccatggatatgttccagaaggta

SEQ ID NO: 14702 - DNA, 25 bp, probe
agaagttgagaaaggaaaggagatt

SEQ ID NO: 14703 - DNA, 25 bp, probe
gagaagttgagaaaggaaaggagat

SEQ ID NO: 14704 - DNA, 25 bp, probe
gaagggagaagttgagaaaggaaag

SEQ ID NO: 14705 - DNA, 25 bp, probe
gaagttgagaaaggaaaggagatta

SEQ ID NO: 14706 - DNA, 25 bp, probe
agttgagaaaggaaaggagattatc

SEQ ID NO: 14707 - DNA, 25 bp, probe
tgagaaaggaaaggagattatctgt

SEQ ID NO: 14708 - DNA, 25 bp, probe
ggagaagttgagaaaggaaaggaga

SEQ ID NO: 14709 - DNA, 25 bp, probe
tgaaggaagggagaagttgagaaag

SEQ ID NO: 14710 - DNA, 25 bp, probe
aagttgagaaaggaaaggagattat

SEQ ID NO: 14711 - DNA, 25 bp, probe
aagggagaagttgagaaaggaaagg

SEQ ID NO: 14712 - DNA, 25 bp, probe
ggaagggagaagttgagaaaggaaa

SEQ ID NO: 14713 - DNA, 25 bp, probe
gtgaaggaagggagaagttgagaaa

SEQ ID NO: 14714 - DNA, 25 bp, probe
ttgagaaaggaaaggagattatctg

SEQ ID NO: 14715 - DNA, 25 bp, probe
gttgagaaaggaaaggagattatct

SEQ ID NO: 14716 - DNA, 25 bp, probe
ttatttattaatgcgttcccagtca

SEQ ID NO: 14717 - DNA, 25 bp, probe
caaagtaggtgaaggaagggagaag

SEQ ID NO: 14718 - DNA, 25 bp, probe
cataccaagtctctgtggatgacac

SEQ ID NO: 14719 - DNA, 25 bp, probe
tatttattaatgcgttcccagtcat

SEQ ID NO: 14720 - DNA, 25 bp, probe
gggagaagttgagaaaggaaaggag

SEQ ID NO: 14721 - DNA, 25 bp, probe
gaaggaagggagaagttgagaaagg

SEQ ID NO: 14722 - DNA, 25 bp, probe
aagtaggtgaaggaagggagaagtt

SEQ ID NO: 14723 - DNA, 25 bp, probe
aaagtaggtgaaggaagggagaagt

SEQ ID NO: 14724 - DNA, 25 bp, probe
gagaaaggaaaggagattatctgta

SEQ ID NO: 14725 - DNA, 25 bp, probe
agggagaagttgagaaaggaaagga

SEQ ID NO: 14726 - DNA, 25 bp, probe
aggaagggagaagttgagaaaggaa

SEQ ID NO: 14727 - DNA, 25 bp, probe
aaggaagggagaagttgagaaagga

SEQ ID NO: 14728 - DNA, 25 bp, probe
ctcataccaagtctctgtggatgac

SEQ ID NO: 14729 - DNA, 25 bp, probe
atgctcataccaagtctctgtggat

SEQ ID NO: 14730 - DNA, 25 bp, probe
aaggaaaggagattatctgtaatgt

SEQ ID NO: 14731 - DNA, 25 bp, probe
taggtgaaggaagggagaagttgag

SEQ ID NO: 14732 - DNA, 25 bp, probe
attatttattaatgcgttcccagtc

SEQ ID NO: 14733 - DNA, 25 bp, probe
atataaactgaaatgcaggaggtga

SEQ ID NO: 14734 - DNA, 25 bp, probe
tataaactgaaatgcaggaggtgaa

SEQ ID NO: 14735 - DNA, 25 bp, probe
agaaaggaaaggagattatctgtaa

SEQ ID NO: 14736 - DNA, 25 bp, probe
aatataaactgaaatgcaggaggtg

SEQ ID NO: 14737 - DNA, 25 bp, probe
gtaggtgaaggaagggagaagttga

SEQ ID NO: 14738 - DNA, 25 bp, probe
agtaggtgaaggaagggagaagttg

SEQ ID NO: 14739 - DNA, 25 bp, probe
ataaactgaaatgcaggaggtgaaa

SEQ ID NO: 14740 - DNA, 25 bp, probe
gaatataaactgaaatgcaggaggt

SEQ ID NO: 14741 - DNA, 25 bp, probe
ttattaatgcgttcccagtcatttc

SEQ ID NO: 14742 - DNA, 25 bp, probe
tcataccaagtctctgtggatgaca

SEQ ID NO: 14743 - DNA, 25 bp, probe
tttattaatgcgttcccagtcattt

SEQ ID NO: 14744 - DNA, 25 bp, probe
agaatataaactgaaatgcaggagg

SEQ ID NO: 14745 - DNA, 25 bp, probe
atttattaatgcgttcccagtcatt

SEQ ID NO: 14746 - DNA, 25 bp, probe
cgtccatacttcgattcttatcatg

SEQ ID NO: 14747 - DNA, 25 bp, probe
acgtccatacttcgattcttatcat

SEQ ID NO: 14748 - DNA, 25 bp, probe
tattctttccaggctctttgtatga

SEQ ID NO: 14749 - DNA, 25 bp, probe
gtctattctttccaggctctttgta

SEQ ID NO: 14750 - DNA, 25 bp, probe
cacgtccatacttcgattcttatca

SEQ ID NO: 14751 - DNA, 25 bp, probe
ctattctttccaggctctttgtatg

SEQ ID NO: 14752 - DNA, 25 bp, probe
tctattctttccaggctctttgtat

SEQ ID NO: 14753 - DNA, 25 bp, probe
gcgttgatgtaattgctggattctc

SEQ ID NO: 14754 - DNA, 25 bp, probe
cttacgcttctggtctattctttcc

SEQ ID NO: 14755 - DNA, 25 bp, probe
ccttacgcttctggtctattctttc

SEQ ID NO: 14756 - DNA, 25 bp, probe
ctgcgttgatgtaattgctggattc

SEQ ID NO: 14757 - DNA, 25 bp, probe
gcacgtccatacttcgattcttatc

SEQ ID NO: 14758 - DNA, 25 bp, probe
gttgatgtaattgctggattctccg

SEQ ID NO: 14759 - DNA, 25 bp, probe
cgttgatgtaattgctggattctcc

SEQ ID NO: 14760 - DNA, 25 bp, probe
agcacgtccatacttcgattcttat

SEQ ID NO: 14761 - DNA, 25 bp, probe
attctttccaggctctttgtatgag

SEQ ID NO: 14762 - DNA, 25 bp, probe
tgcgttgatgtaattgctggattct

SEQ ID NO: 14763 - DNA, 25 bp, probe
ttgatgtaattgctggattctccgt

SEQ ID NO: 14764 - DNA, 25 bp, probe
caccttacgcttctggtctattctt

SEQ ID NO: 14765 - DNA, 25 bp, probe
catacttcgattcttatcatggttc

SEQ ID NO: 14766 - DNA, 25 bp, probe
tctttccaggctctttgtatgagaa

SEQ ID NO: 14767 - DNA, 25 bp, probe
ttctttccaggctctttgtatgaga

SEQ ID NO: 14768 - DNA, 25 bp, probe
aagaatatttgccctagaatgccag

SEQ ID NO: 14769 - DNA, 25 bp, probe
gaagaatatttgccctagaatgcca

SEQ ID NO: 14770 - DNA, 25 bp, probe
ggtctattctttccaggctctttgt

SEQ ID NO: 14771 - DNA, 25 bp, probe
tgatgtaattgctggattctccgtc

SEQ ID NO: 14772 - DNA, 25 bp, probe
tacttcgattcttatcatggttcgg

SEQ ID NO: 14773 - DNA, 25 bp, probe
cagcacgtccatacttcgattctta

SEQ ID NO: 14774 - DNA, 25 bp, probe
ggaagaatatttgccctagaatgcc

SEQ ID NO: 14775 - DNA, 25 bp, probe
atacttcgattcttatcatggttcg

SEQ ID NO: 14776 - DNA, 25 bp, probe
ctcaggaagaatatttgccctagaa

SEQ ID NO: 14777 - DNA, 25 bp, probe
caggaagaatatttgccctagaatg

SEQ ID NO: 14778 - DNA, 25 bp, probe
tcaggaagaatatttgccctagaat

SEQ ID NO: 14779 - DNA, 25 bp, probe
aggaagaatatttgccctagaatgc

SEQ ID NO: 14780 - DNA, 25 bp, probe
ttacgcttctggtctattctttcca

SEQ ID NO: 14781 - DNA, 25 bp, probe
accttacgcttctggtctattcttt

SEQ ID NO: 14782 - DNA, 25 bp, probe
ctttccaggctctttgtatgagaaa

SEQ ID NO: 14783 - DNA, 25 bp, probe
gatgtaattgctggattctccgtcc

SEQ ID NO: 14784 - DNA, 25 bp, probe
aatatttgccctagaatgccagcta

SEQ ID NO: 14785 - DNA, 25 bp, probe
cctcaggaagaatatttgccctaga

SEQ ID NO: 14786 - DNA, 25 bp, probe
acctcaggaagaatatttgccctag

SEQ ID NO: 14787 - DNA, 25 bp, probe
cacctcaggaagaatatttgcccta

SEQ ID NO: 14788 - DNA, 25 bp, probe
tggtctattctttccaggctctttg

SEQ ID NO: 14789 - DNA, 25 bp, probe
acctccacctcaggaagaatatttg

SEQ ID NO: 14790 - DNA, 25 bp, probe
gaagatgatgaacagactgagacac

SEQ ID NO: 14791 - DNA, 25 bp, probe
aagatgatgaacagactgagacaca

SEQ ID NO: 14792 - DNA, 25 bp, probe
cgaagatgatgaacagactgagaca

SEQ ID NO: 14793 - DNA, 25 bp, probe
agatgatgaacagactgagacacag

SEQ ID NO: 14794 - DNA, 25 bp, probe
cattgattcattcattccttcattg

SEQ ID NO: 14795 - DNA, 25 bp, probe
tgattcattcattccttcattgatt

SEQ ID NO: 14796 - DNA, 25 bp, probe
ttgattcattcattccttcattgat

SEQ ID NO: 14797 - DNA, 25 bp, probe
attgattcattcattccttcattga

SEQ ID NO: 14798 - DNA, 25 bp, probe
tcattgattcattcattccttcatt

SEQ ID NO: 14799 - DNA, 25 bp, probe
ttcattgattcattcattccttcat

SEQ ID NO: 14800 - DNA, 25 bp, probe
attcattgattcattcattccttca

SEQ ID NO: 14801 - DNA, 25 bp, probe
tcattcattgattcattcattcctt

SEQ ID NO: 14802 - DNA, 25 bp, probe
ttcattcattgattcattcattcct

SEQ ID NO: 14803 - DNA, 25 bp, probe
cattcattgattcattcattccttc

SEQ ID NO: 14804 - DNA, 25 bp, probe
gcgaagatgatgaacagactgagac

SEQ ID NO: 14805 - DNA, 25 bp, probe
cgtcatcatagaggaagggaagtac

SEQ ID NO: 14806 - DNA, 25 bp, probe
gatgatgaacagactgagacacagc

SEQ ID NO: 14807 - DNA, 25 bp, probe
tcattcattccttcattgatttaca

SEQ ID NO: 14808 - DNA, 25 bp, probe
ggcgaagatgatgaacagactgaga

SEQ ID NO: 14809 - DNA, 25 bp, probe
aggcgaagatgatgaacagactgag

SEQ ID NO: 14810 - DNA, 25 bp, probe
gaggcgaagatgatgaacagactga

SEQ ID NO: 14811 - DNA, 25 bp, probe
gcgtcatcatagaggaagggaagta

SEQ ID NO: 14812 - DNA, 25 bp, probe
ctggtgatggagtacatggagaagg

SEQ ID NO: 14813 - DNA, 25 bp, probe
cctggtgatggagtacatggagaag

SEQ ID NO: 14814 - DNA, 25 bp, probe
tttcattcattgattcattcattcc

SEQ ID NO: 14815 - DNA, 25 bp, probe
gtcatcatagaggaagggaagtact

SEQ ID NO: 14816 - DNA, 25 bp, probe
ctgctgttcatgtacttttcattca

SEQ ID NO: 14817 - DNA, 25 bp, probe
gattcattcattccttcattgattt

SEQ ID NO: 14818 - DNA, 25 bp, probe
tgctgttcatgtacttttcattcat

SEQ ID NO: 14819 - DNA, 25 bp, probe
tcatcatagaggaagggaagtactc

SEQ ID NO: 14820 - DNA, 25 bp, probe
gaggaggcgaagatgatgaacagac

SEQ ID NO: 14821 - DNA, 25 bp, probe
gctgctgttcatgtacttttcattc

SEQ ID NO: 14822 - DNA, 25 bp, probe
atgatgaacagactgagacacagcc

SEQ ID NO: 14823 - DNA, 25 bp, probe
cattcattccttcattgatttacat

SEQ ID NO: 14824 - DNA, 25 bp, probe
gctgttcatgtacttttcattcatt

SEQ ID NO: 14825 - DNA, 25 bp, probe
ttcattcattccttcattgatttac

SEQ ID NO: 14826 - DNA, 25 bp, probe
tgctgctgttcatgtacttttcatt

SEQ ID NO: 14827 - DNA, 25 bp, probe
ttgctgctgttcatgtacttttcat

SEQ ID NO: 14828 - DNA, 25 bp, probe
caggagtactgtgaggaagtgagaa

SEQ ID NO: 14829 - DNA, 25 bp, probe
catcatagaggaagggaagtactcc

SEQ ID NO: 14830 - DNA, 25 bp, probe
ttcattccttcattgatttacattt

SEQ ID NO: 14831 - DNA, 25 bp, probe
gagtactgtgaggaagtgagaaacc

SEQ ID NO: 14832 - DNA, 25 bp, probe
ggagtactgtgaggaagtgagaaac

SEQ ID NO: 14833 - DNA, 25 bp, probe
aggagtactgtgaggaagtgagaaa

SEQ ID NO: 14834 - DNA, 25 bp, probe
agaggtaaggataagaggtaatggt

SEQ ID NO: 14835 - DNA, 25 bp, probe
ggagatagaggtaaggataagaggt

SEQ ID NO: 14836 - DNA, 25 bp, probe
aggagatagaggtaaggataagagg

SEQ ID NO: 14837 - DNA, 25 bp, probe
aagaggtaatggtaatgtgagactt

SEQ ID NO: 14838 - DNA, 25 bp, probe
agaggtaatggtaatgtgagactta

SEQ ID NO: 14839 - DNA, 25 bp, probe
taagaggtaatggtaatgtgagact

SEQ ID NO: 14840 - DNA, 25 bp, probe
aggataagaggtaatggtaatgtga

SEQ ID NO: 14841 - DNA, 25 bp, probe
ggataagaggtaatggtaatgtgag

SEQ ID NO: 14842 - DNA, 25 bp, probe
gaggtaaggataagaggtaatggta

SEQ ID NO: 14843 - DNA, 25 bp, probe
tagaggtaaggataagaggtaatgg

SEQ ID NO: 14844 - DNA, 25 bp, probe
aaggataagaggtaatggtaatgtg

SEQ ID NO: 14845 - DNA, 25 bp, probe
aggtaaggataagaggtaatggtaa

SEQ ID NO: 14846 - DNA, 25 bp, probe
ataagaggtaatggtaatgtgagac

SEQ ID NO: 14847 - DNA, 25 bp, probe
gataagaggtaatggtaatgtgaga

SEQ ID NO: 14848 - DNA, 25 bp, probe
gagatagaggtaaggataagaggta

SEQ ID NO: 14849 - DNA, 25 bp, probe
aggtaatggtaatgtgagacttaca

SEQ ID NO: 14850 - DNA, 25 bp, probe
ggtaaggataagaggtaatggtaat

SEQ ID NO: 14851 - DNA, 25 bp, probe
taggagatagaggtaaggataagag

SEQ ID NO: 14852 - DNA, 25 bp, probe
gaggtaatggtaatgtgagacttac

SEQ ID NO: 14853 - DNA, 25 bp, probe
agatagaggtaaggataagaggtaa

SEQ ID NO: 14854 - DNA, 25 bp, probe
ggtaatggtaatgtgagacttacaa

SEQ ID NO: 14855 - DNA, 25 bp, probe
gtgagacttacaatgataaatggct

SEQ ID NO: 14856 - DNA, 25 bp, probe
aatggtaatgtgagacttacaatga

SEQ ID NO: 14857 - DNA, 25 bp, probe
ggagctggcattattgttactgaag

SEQ ID NO: 14858 - DNA, 25 bp, probe
ttaggagatagaggtaaggataaga

SEQ ID NO: 14859 - DNA, 25 bp, probe
atggtaatgtgagacttacaatgat

SEQ ID NO: 14860 - DNA, 25 bp, probe
cgtgctaatggatgttacaggtaaa

SEQ ID NO: 14861 - DNA, 25 bp, probe
ctggcattattgttactgaagctgg

SEQ ID NO: 14862 - DNA, 25 bp, probe
aggagctggcattattgttactgaa

SEQ ID NO: 14863 - DNA, 25 bp, probe
gcgtgctaatggatgttacaggtaa

SEQ ID NO: 14864 - DNA, 25 bp, probe
taaggataagaggtaatggtaatgt

SEQ ID NO: 14865 - DNA, 25 bp, probe
gctttaggagatagaggtaaggata

SEQ ID NO: 14866 - DNA, 25 bp, probe
atagaggtaaggataagaggtaatg

SEQ ID NO: 14867 - DNA, 25 bp, probe
cattattgttactgaagctggtggc

SEQ ID NO: 14868 - DNA, 25 bp, probe
gcattattgttactgaagctggtgg

SEQ ID NO: 14869 - DNA, 25 bp, probe
ggcattattgttactgaagctggtg

SEQ ID NO: 14870 - DNA, 25 bp, probe
tgtgagacttacaatgataaatggc

SEQ ID NO: 14871 - DNA, 25 bp, probe
tggtaatgtgagacttacaatgata

SEQ ID NO: 14872 - DNA, 25 bp, probe
gtaaggataagaggtaatggtaatg

SEQ ID NO: 14873 - DNA, 25 bp, probe
tgagacttacaatgataaatggcta

SEQ ID NO: 14874 - DNA, 25 bp, probe
gatagaggtaaggataagaggtaat

SEQ ID NO: 14875 - DNA, 25 bp, probe
tggcattattgttactgaagctggt

SEQ ID NO: 14876 - DNA, 25 bp, probe
agctttaggagatagaggtaaggat

SEQ ID NO: 14877 - DNA, 25 bp, probe
taatggtaatgtgagacttacaatg

SEQ ID NO: 14878 - DNA, 25 bp, probe
agcagtgattcataatctggtagac

SEQ ID NO: 14879 - DNA, 25 bp, probe
cagcagtgattcataatctggtaga

SEQ ID NO: 14880 - DNA, 25 bp, probe
atattagttatccctcctgcctcat

SEQ ID NO: 14881 - DNA, 25 bp, probe
tatattagttatccctcctgcctca

SEQ ID NO: 14882 - DNA, 25 bp, probe
tctatattagttatccctcctgcct

SEQ ID NO: 14883 - DNA, 25 bp, probe
ctatattagttatccctcctgcctc

SEQ ID NO: 14884 - DNA, 25 bp, probe
gcagtgattcataatctggtagacg

SEQ ID NO: 14885 - DNA, 25 bp, probe
tattagttatccctcctgcctcatc

SEQ ID NO: 14886 - DNA, 25 bp, probe
cctctttccagcagtgattcataat

SEQ ID NO: 14887 - DNA, 25 bp, probe
attcataatctggtagacgtgtgtg

SEQ ID NO: 14888 - DNA, 25 bp, probe
atctatattagttatccctcctgcc

SEQ ID NO: 14889 - DNA, 25 bp, probe
acctctttccagcagtgattcataa

SEQ ID NO: 14890 - DNA, 25 bp, probe
ctcaaagtcatgttgttgctaatct

SEQ ID NO: 14891 - DNA, 25 bp, probe
agtgattcataatctggtagacgtg

SEQ ID NO: 14892 - DNA, 25 bp, probe
cagtgattcataatctggtagacgt

SEQ ID NO: 14893 - DNA, 25 bp, probe
cctcaaagtcatgttgttgctaatc

SEQ ID NO: 14894 - DNA, 25 bp, probe
cttgtgacattatgtagcaaaccaa

SEQ ID NO: 14895 - DNA, 25 bp, probe
gattcataatctggtagacgtgtgt

SEQ ID NO: 14896 - DNA, 25 bp, probe
tgattcataatctggtagacgtgtg

SEQ ID NO: 14897 - DNA, 25 bp, probe
gtgattcataatctggtagacgtgt

SEQ ID NO: 14898 - DNA, 25 bp, probe
ttgtgacattatgtagcaaaccaaa

SEQ ID NO: 14899 - DNA, 25 bp, probe
tcctcaaagtcatgttgttgctaat

SEQ ID NO: 14900 - DNA, 25 bp, probe
atcctcaaagtcatgttgttgctaa

SEQ ID NO: 14901 - DNA, 25 bp, probe
tgtgacattatgtagcaaaccaaat

SEQ ID NO: 14902 - DNA, 25 bp, probe
gacctctttccagcagtgattcata

SEQ ID NO: 14903 - DNA, 25 bp, probe
ttcataatctggtagacgtgtgtgg

SEQ ID NO: 14904 - DNA, 25 bp, probe
tcaaagtcatgttgttgctaatcta

SEQ ID NO: 14905 - DNA, 25 bp, probe
gatcctcaaagtcatgttgttgcta

SEQ ID NO: 14906 - DNA, 25 bp, probe
ctttccagcagtgattcataatctg

SEQ ID NO: 14907 - DNA, 25 bp, probe
tctttccagcagtgattcataatct

SEQ ID NO: 14908 - DNA, 25 bp, probe
ctctttccagcagtgattcataatc

SEQ ID NO: 14909 - DNA, 25 bp, probe
aatctatattagttatccctcctgc

SEQ ID NO: 14910 - DNA, 25 bp, probe
atgcttatagcttgtgacattatgt

SEQ ID NO: 14911 - DNA, 25 bp, probe
cataatctggtagacgtgtgtggag

SEQ ID NO: 14912 - DNA, 25 bp, probe
acagatcctcaaagtcatgttgttg

SEQ ID NO: 14913 - DNA, 25 bp, probe
caaagtcatgttgttgctaatctat

SEQ ID NO: 14914 - DNA, 25 bp, probe
agtcatgttgttgctaatctatatt

SEQ ID NO: 14915 - DNA, 25 bp, probe
aagtcatgttgttgctaatctatat

SEQ ID NO: 14916 - DNA, 25 bp, probe
attagttatccctcctgcctcatcc

SEQ ID NO: 14917 - DNA, 25 bp, probe
tcataatctggtagacgtgtgtgga

SEQ ID NO: 14918 - DNA, 25 bp, probe
gtgacattatgtagcaaaccaaata

SEQ ID NO: 14919 - DNA, 25 bp, probe
tatagcttgtgacattatgtagcaa

SEQ ID NO: 14920 - DNA, 25 bp, probe
ttatagcttgtgacattatgtagca

SEQ ID NO: 14921 - DNA, 25 bp, probe
tgcttatagcttgtgacattatgta

SEQ ID NO: 14922 - DNA, 25 bp, probe
ttagaatactgtgaaggcaatgact

SEQ ID NO: 14923 - DNA, 25 bp, probe
gttagaatactgtgaaggcaatgac

SEQ ID NO: 14924 - DNA, 25 bp, probe
tgttagaatactgtgaaggcaatga

SEQ ID NO: 14925 - DNA, 25 bp, probe
gtgttagaatactgtgaaggcaatg

SEQ ID NO: 14926 - DNA, 25 bp, probe
tagaatactgtgaaggcaatgactt

SEQ ID NO: 14927 - DNA, 25 bp, probe
agtgttagaatactgtgaaggcaat

SEQ ID NO: 14928 - DNA, 25 bp, probe
ttctatctgaagcaacacaagttaa

SEQ ID NO: 14929 - DNA, 25 bp, probe
agaatactgtgaaggcaatgacttg

SEQ ID NO: 14930 - DNA, 25 bp, probe
atctgaagcaacacaagttaatgtc

SEQ ID NO: 14931 - DNA, 25 bp, probe
ctatctgaagcaacacaagttaatg

SEQ ID NO: 14932 - DNA, 25 bp, probe
tctatctgaagcaacacaagttaat

SEQ ID NO: 14933 - DNA, 25 bp, probe
gaagcaacacaagttaatgtcagag

SEQ ID NO: 14934 - DNA, 25 bp, probe
agcaacacaagttaatgtcagagaa

SEQ ID NO: 14935 - DNA, 25 bp, probe
aagcaacacaagttaatgtcagaga

SEQ ID NO: 14936 - DNA, 25 bp, probe
tgaagcaacacaagttaatgtcaga

SEQ ID NO: 14937 - DNA, 25 bp, probe
tctgaagcaacacaagttaatgtca

SEQ ID NO: 14938 - DNA, 25 bp, probe
tatctgaagcaacacaagttaatgt

SEQ ID NO: 14939 - DNA, 25 bp, probe
gaatactgtgaaggcaatgacttgg

SEQ ID NO: 14940 - DNA, 25 bp, probe
atactgtgaaggcaatgacttggat

SEQ ID NO: 14941 - DNA, 25 bp, probe
tactgtgaaggcaatgacttggatt

SEQ ID NO: 14942 - DNA, 25 bp, probe
aatactgtgaaggcaatgacttgga

SEQ ID NO: 14943 - DNA, 25 bp, probe
atgacttggatttctatctgaagca

SEQ ID NO: 14944 - DNA, 25 bp, probe
ggatttctatctgaagcaacacaag

SEQ ID NO: 14945 - DNA, 25 bp, probe
gatttctatctgaagcaacacaagt

SEQ ID NO: 14946 - DNA, 25 bp, probe
tggatttctatctgaagcaacacaa

SEQ ID NO: 14947 - DNA, 25 bp, probe
aatgacttggatttctatctgaagc

SEQ ID NO: 14948 - DNA, 25 bp, probe
cttggatttctatctgaagcaacac

SEQ ID NO: 14949 - DNA, 25 bp, probe
gacttggatttctatctgaagcaac

SEQ ID NO: 14950 - DNA, 25 bp, probe
tgacttggatttctatctgaagcaa

SEQ ID NO: 14951 - DNA, 25 bp, probe
aaggcaatgacttggatttctatct

SEQ ID NO: 14952 - DNA, 25 bp, probe
gaaggcaatgacttggatttctatc

SEQ ID NO: 14953 - DNA, 25 bp, probe
atttctatctgaagcaacacaagtt

SEQ ID NO: 14954 - DNA, 25 bp, probe
acttggatttctatctgaagcaaca

SEQ ID NO: 14955 - DNA, 25 bp, probe
tgaaggcaatgacttggatttctat

SEQ ID NO: 14956 - DNA, 25 bp, probe
gcaatgacttggatttctatctgaa

SEQ ID NO: 14957 - DNA, 25 bp, probe
ttggatttctatctgaagcaacaca

SEQ ID NO: 14958 - DNA, 25 bp, probe
ggcaatgacttggatttctatctga

SEQ ID NO: 14959 - DNA, 25 bp, probe
aggcaatgacttggatttctatctg

SEQ ID NO: 14960 - DNA, 25 bp, probe
tttctatctgaagcaacacaagtta

SEQ ID NO: 14961 - DNA, 25 bp, probe
agaatacacaaagaactggatcacc

SEQ ID NO: 14962 - DNA, 25 bp, probe
gtgaaggcaatgacttggatttcta

SEQ ID NO: 14963 - DNA, 25 bp, probe
gcaacacaagttaatgtcagagaaa

SEQ ID NO: 14964 - DNA, 25 bp, probe
acaagttaatgtcagagaaagaagc

SEQ ID NO: 14965 - DNA, 25 bp, probe
tagaatacacaaagaactggatcac

SEQ ID NO: 14966 - DNA, 25 bp, probe
ctgtctgtcttggtgtttctctctc

SEQ ID NO: 14967 - DNA, 25 bp, probe
catcctgtctgtcttggtgtttctc

SEQ ID NO: 14968 - DNA, 25 bp, probe
tgtctgtcttggtgtttctctctca

SEQ ID NO: 14969 - DNA, 25 bp, probe
atcctgtctgtcttggtgtttctct

SEQ ID NO: 14970 - DNA, 25 bp, probe
gtctgtcttggtgtttctctctcag

SEQ ID NO: 14971 - DNA, 25 bp, probe
cctgtctgtcttggtgtttctctct

SEQ ID NO: 14972 - DNA, 25 bp, probe
tcctgtctgtcttggtgtttctctc

SEQ ID NO: 14973 - DNA, 25 bp, probe
tctgtcttggtgtttctctctcagg

SEQ ID NO: 14974 - DNA, 25 bp, probe
acatcctgtctgtcttggtgtttct

SEQ ID NO: 14975 - DNA, 25 bp, probe
cttttctggacccctgacattcttg

SEQ ID NO: 14976 - DNA, 25 bp, probe
ctgtcttggtgtttctctctcaggg

SEQ ID NO: 14977 - DNA, 25 bp, probe
cattcttgaaggggttctgtgtctg

SEQ ID NO: 14978 - DNA, 25 bp, probe
gaacttttctggacccctgacattc

SEQ ID NO: 14979 - DNA, 25 bp, probe
ttttctggacccctgacattcttga

SEQ ID NO: 14980 - DNA, 25 bp, probe
acttttctggacccctgacattctt

SEQ ID NO: 14981 - DNA, 25 bp, probe
aacttttctggacccctgacattct

SEQ ID NO: 14982 - DNA, 25 bp, probe
tttctggacccctgacattcttgaa

SEQ ID NO: 14983 - DNA, 25 bp, probe
ctgacattcttgaaggggttctgtg

SEQ ID NO: 14984 - DNA, 25 bp, probe
gccattgagaagaaaatgtacctgc

SEQ ID NO: 14985 - DNA, 25 bp, probe
ccattgagaagaaaatgtacctgca

SEQ ID NO: 14986 - DNA, 25 bp, probe
ttctggacccctgacattcttgaag

SEQ ID NO: 14987 - DNA, 25 bp, probe
acattcttgaaggggttctgtgtct

SEQ ID NO: 14988 - DNA, 25 bp, probe
agaggtgactggaacttttctggac

SEQ ID NO: 14989 - DNA, 25 bp, probe
tgacattcttgaaggggttctgtgt

SEQ ID NO: 14990 - DNA, 25 bp, probe
atgagtgggccattgagaagaaaat

SEQ ID NO: 14991 - DNA, 25 bp, probe
ggaacttttctggacccctgacatt

SEQ ID NO: 14992 - DNA, 25 bp, probe
aagtgacatcctgtctgtcttggtg

SEQ ID NO: 14993 - DNA, 25 bp, probe
caagtgacatcctgtctgtcttggt

SEQ ID NO: 14994 - DNA, 25 bp, probe
gacatcctgtctgtcttggtgtttc

SEQ ID NO: 14995 - DNA, 25 bp, probe
gatgagtgggccattgagaagaaaa

SEQ ID NO: 14996 - DNA, 25 bp, probe
gtgacatcctgtctgtcttggtgtt

SEQ ID NO: 14997 - DNA, 25 bp, probe
ggccattgagaagaaaatgtacctg

SEQ ID NO: 14998 - DNA, 25 bp, probe
cctgacattcttgaaggggttctgt

SEQ ID NO: 14999 - DNA, 25 bp, probe
ggatgagtgggccattgagaagaaa

SEQ ID NO: 15000 - DNA, 25 bp, probe
gtgtttctctctcaggggagtttgg

SEQ ID NO: 15001 - DNA, 25 bp, probe
ggtgtttctctctcaggggagtttg

SEQ ID NO: 15002 - DNA, 25 bp, probe
attcttgaaggggttctgtgtctgc

SEQ ID NO: 15003 - DNA, 25 bp, probe
gtgggccattgagaagaaaatgtac

SEQ ID NO: 15004 - DNA, 25 bp, probe
agtgggccattgagaagaaaatgta

SEQ ID NO: 15005 - DNA, 25 bp, probe
tgacatcctgtctgtcttggtgttt

SEQ ID NO: 15006 - DNA, 25 bp, probe
tggtgtttctctctcaggggagttt

SEQ ID NO: 15007 - DNA, 25 bp, probe
ttggtgtttctctctcaggggagtt

SEQ ID NO: 15008 - DNA, 25 bp, probe
gggccattgagaagaaaatgtacct

SEQ ID NO: 15009 - DNA, 25 bp, probe
tgggccattgagaagaaaatgtacc

SEQ ID NO: 15010 - DNA, 25 bp, probe
acaggaaagttcatttcttcacaaa

SEQ ID NO: 15011 - DNA, 25 bp, probe
aacaggaaagttcatttcttcacaa

SEQ ID NO: 15012 - DNA, 25 bp, probe
aaacaggaaagttcatttcttcaca

SEQ ID NO: 15013 - DNA, 25 bp, probe
gaaacaggaaagttcatttcttcac

SEQ ID NO: 15014 - DNA, 25 bp, probe
tttgtagaaacaggaaagttcattt

SEQ ID NO: 15015 - DNA, 25 bp, probe
cattaactatgaagactctagacgt

SEQ ID NO: 15016 - DNA, 25 bp, probe
caggaaagttcatttcttcacaaat

SEQ ID NO: 15017 - DNA, 25 bp, probe
cgtcttactttctccccaacataat

SEQ ID NO: 15018 - DNA, 25 bp, probe
gaaagttcatttcttcacaaattgc

SEQ ID NO: 15019 - DNA, 25 bp, probe
aaagttcatttcttcacaaattgca

SEQ ID NO: 15020 - DNA, 25 bp, probe
cgtttactttgtagaaacaggaaag

SEQ ID NO: 15021 - DNA, 25 bp, probe
tgaagactctagacgtttactttgt

SEQ ID NO: 15022 - DNA, 25 bp, probe
ttgtagaaacaggaaagttcatttc

SEQ ID NO: 15023 - DNA, 25 bp, probe
attaactatgaagactctagacgtt

SEQ ID NO: 15024 - DNA, 25 bp, probe
ggaaagttcatttcttcacaaattg

SEQ ID NO: 15025 - DNA, 25 bp, probe
ctttgtagaaacaggaaagttcatt

SEQ ID NO: 15026 - DNA, 25 bp, probe
gtcttactttctccccaacataatt

SEQ ID NO: 15027 - DNA, 25 bp, probe
aggaaagttcatttcttcacaaatt

SEQ ID NO: 15028 - DNA, 25 bp, probe
actatgaagactctagacgtttact

SEQ ID NO: 15029 - DNA, 25 bp, probe
atgaagactctagacgtttactttg

SEQ ID NO: 15030 - DNA, 25 bp, probe
agacgtttactttgtagaaacagga

SEQ ID NO: 15031 - DNA, 25 bp, probe
gacgtttactttgtagaaacaggaa

SEQ ID NO: 15032 - DNA, 25 bp, probe
aagactctagacgtttactttgtag

SEQ ID NO: 15033 - DNA, 25 bp, probe
gaagactctagacgtttactttgta

SEQ ID NO: 15034 - DNA, 25 bp, probe
acgtttactttgtagaaacaggaaa

SEQ ID NO: 15035 - DNA, 25 bp, probe
tagacgtttactttgtagaaacagg

SEQ ID NO: 15036 - DNA, 25 bp, probe
aactatgaagactctagacgtttac

SEQ ID NO: 15037 - DNA, 25 bp, probe
ctatgaagactctagacgtttactt

SEQ ID NO: 15038 - DNA, 25 bp, probe
tgggtcaacagatgtaagcgtctta

SEQ ID NO: 15039 - DNA, 25 bp, probe
agactctagacgtttactttgtaga

SEQ ID NO: 15040 - DNA, 25 bp, probe
gcgtcttactttctccccaacataa

SEQ ID NO: 15041 - DNA, 25 bp, probe
tcattaactatgaagactctagacg

SEQ ID NO: 15042 - DNA, 25 bp, probe
tatgaagactctagacgtttacttt

SEQ ID NO: 15043 - DNA, 25 bp, probe
gactctagacgtttactttgtagaa

SEQ ID NO: 15044 - DNA, 25 bp, probe
ttaactatgaagactctagacgttt

SEQ ID NO: 15045 - DNA, 25 bp, probe
ctagacgtttactttgtagaaacag

SEQ ID NO: 15046 - DNA, 25 bp, probe
gtcaacagatgtaagcgtcttactt

SEQ ID NO: 15047 - DNA, 25 bp, probe
actctagacgtttactttgtagaaa

SEQ ID NO: 15048 - DNA, 25 bp, probe
tcttactttctccccaacataatta

SEQ ID NO: 15049 - DNA, 25 bp, probe
agcgtcttactttctccccaacata

SEQ ID NO: 15050 - DNA, 25 bp, probe
ctttagcatgtgaaagcctctctgg

SEQ ID NO: 15051 - DNA, 25 bp, probe
catttcttcacaaattgcaaatccg

SEQ ID NO: 15052 - DNA, 25 bp, probe
tctagacgtttactttgtagaaaca

SEQ ID NO: 15053 - DNA, 25 bp, probe
taactatgaagactctagacgttta

SEQ ID NO: 15054 - DNA, 25 bp, probe
ctgtctatgaatgttagtctgttct

SEQ ID NO: 15055 - DNA, 25 bp, probe
tctgtctatgaatgttagtctgttc

SEQ ID NO: 15056 - DNA, 25 bp, probe
agttactccgtaccttactgagatc

SEQ ID NO: 15057 - DNA, 25 bp, probe
tgtctatgaatgttagtctgttctt

SEQ ID NO: 15058 - DNA, 25 bp, probe
atctgtctatgaatgttagtctgtt

SEQ ID NO: 15059 - DNA, 25 bp, probe
aatctgtctatgaatgttagtctgt

SEQ ID NO: 15060 - DNA, 25 bp, probe
gagaagtctgagaactgatggacaa

SEQ ID NO: 15061 - DNA, 25 bp, probe
actgagaagtctgagaactgatgga

SEQ ID NO: 15062 - DNA, 25 bp, probe
ctgagaagtctgagaactgatggac

SEQ ID NO: 15063 - DNA, 25 bp, probe
tgagaagtctgagaactgatggaca

SEQ ID NO: 15064 - DNA, 25 bp, probe
gaagtctgagaactgatggacaaat

SEQ ID NO: 15065 - DNA, 25 bp, probe
aagtctgagaactgatggacaaatg

SEQ ID NO: 15066 - DNA, 25 bp, probe
ttggacagttactccgtaccttact

SEQ ID NO: 15067 - DNA, 25 bp, probe
agaagtctgagaactgatggacaaa

SEQ ID NO: 15068 - DNA, 25 bp, probe
tgctcagaaatctgtctatgaatgt

SEQ ID NO: 15069 - DNA, 25 bp, probe
gtgctcagaaatctgtctatgaatg

SEQ ID NO: 15070 - DNA, 25 bp, probe
agtgctcagaaatctgtctatgaat

SEQ ID NO: 15071 - DNA, 25 bp, probe
aagtgctcagaaatctgtctatgaa

SEQ ID NO: 15072 - DNA, 25 bp, probe
aaagtgctcagaaatctgtctatga

SEQ ID NO: 15073 - DNA, 25 bp, probe
gctcagaaatctgtctatgaatgtt

SEQ ID NO: 15074 - DNA, 25 bp, probe
ttgtctggagtctgcacatagaatc

SEQ ID NO: 15075 - DNA, 25 bp, probe
cttgtctggagtctgcacatagaat

SEQ ID NO: 15076 - DNA, 25 bp, probe
ttactccgtaccttactgagatctg

SEQ ID NO: 15077 - DNA, 25 bp, probe
gttactccgtaccttactgagatct

SEQ ID NO: 15078 - DNA, 25 bp, probe
ttactgagatctggagacaggtatc

SEQ ID NO: 15079 - DNA, 25 bp, probe
cttactgagatctggagacaggtat

SEQ ID NO: 15080 - DNA, 25 bp, probe
agggaaataattcaaccttgtagat

SEQ ID NO: 15081 - DNA, 25 bp, probe
tctgcacatagaatccaaactcatg

SEQ ID NO: 15082 - DNA, 25 bp, probe
gtctgcacatagaatccaaactcat

SEQ ID NO: 15083 - DNA, 25 bp, probe
cctcatgaagccatcttaatgtgtt

SEQ ID NO: 15084 - DNA, 25 bp, probe
gtaccttactgagatctggagacag

SEQ ID NO: 15085 - DNA, 25 bp, probe
gtctatgaatgttagtctgttcttt

SEQ ID NO: 15086 - DNA, 25 bp, probe
gcactctgccattaatctcttcatg

SEQ ID NO: 15087 - DNA, 25 bp, probe
aaatctgtctatgaatgttagtctg

SEQ ID NO: 15088 - DNA, 25 bp, probe
agtggtctctcatctcttttctttt

SEQ ID NO: 15089 - DNA, 25 bp, probe
tgttagtctgttcttttggatagca

SEQ ID NO: 15090 - DNA, 25 bp, probe
taatgtgttttcttgtctggagtct

SEQ ID NO: 15091 - DNA, 25 bp, probe
tttggacagttactccgtaccttac

SEQ ID NO: 15092 - DNA, 25 bp, probe
ggacaaatgcaaagtctttctgaat

SEQ ID NO: 15093 - DNA, 25 bp, probe
ttaatgtgttttcttgtctggagtc

SEQ ID NO: 15094 - DNA, 25 bp, probe
cttaatgtgttttcttgtctggagt

SEQ ID NO: 15095 - DNA, 25 bp, probe
tgagaactgatggacaaatgcaaag

SEQ ID NO: 15096 - DNA, 25 bp, probe
ctgagaactgatggacaaatgcaaa

SEQ ID NO: 15097 - DNA, 25 bp, probe
gttagtctgttcttttggatagcat

SEQ ID NO: 15098 - DNA, 25 bp, probe
agctatggtgtagatggaatggatc

SEQ ID NO: 15099 - DNA, 25 bp, probe
gctatggtgtagatggaatggatct

SEQ ID NO: 15100 - DNA, 25 bp, probe
ttggtttctcttgtaagacatcagt

SEQ ID NO: 15101 - DNA, 25 bp, probe
tggtttctcttgtaagacatcagta

SEQ ID NO: 15102 - DNA, 25 bp, probe
tagctatggtgtagatggaatggat

SEQ ID NO: 15103 - DNA, 25 bp, probe
tttggtttctcttgtaagacatcag

SEQ ID NO: 15104 - DNA, 25 bp, probe
atcctactggtagatggaacagcat

SEQ ID NO: 15105 - DNA, 25 bp, probe
ggtttctcttgtaagacatcagtaa

SEQ ID NO: 15106 - DNA, 25 bp, probe
ctactggtagatggaacagcatgtg

SEQ ID NO: 15107 - DNA, 25 bp, probe
aacatcctactggtagatggaacag

SEQ ID NO: 15108 - DNA, 25 bp, probe
ggtgtagatggaatggatctaactt

SEQ ID NO: 15109 - DNA, 25 bp, probe
atggtgtagatggaatggatctaac

SEQ ID NO: 15110 - DNA, 25 bp, probe
tggtgtagatggaatggatctaact

SEQ ID NO: 15111 - DNA, 25 bp, probe
ctatggtgtagatggaatggatcta

SEQ ID NO: 15112 - DNA, 25 bp, probe
gtgtagatggaatggatctaacttc

SEQ ID NO: 15113 - DNA, 25 bp, probe
tatggtgtagatggaatggatctaa

SEQ ID NO: 15114 - DNA, 25 bp, probe
tagatggaacagcatgtggtgaaat

SEQ ID NO: 15115 - DNA, 25 bp, probe
tgtagatggaatggatctaacttcc

SEQ ID NO: 15116 - DNA, 25 bp, probe
tcctactggtagatggaacagcatg

SEQ ID NO: 15117 - DNA, 25 bp, probe
gtttctcttgtaagacatcagtaaa

SEQ ID NO: 15118 - DNA, 25 bp, probe
cctactggtagatggaacagcatgt

SEQ ID NO: 15119 - DNA, 25 bp, probe
gaaacatcctactggtagatggaac

SEQ ID NO: 15120 - DNA, 25 bp, probe
tactggtagatggaacagcatgtgg

SEQ ID NO: 15121 - DNA, 25 bp, probe
aaacatcctactggtagatggaaca

SEQ ID NO: 15122 - DNA, 25 bp, probe
ccaagattatggatgatgatagcta

SEQ ID NO: 15123 - DNA, 25 bp, probe
ggaaacatcctactggtagatggaa

SEQ ID NO: 15124 - DNA, 25 bp, probe
gtagatggaacagcatgtggtgaaa

SEQ ID NO: 15125 - DNA, 25 bp, probe
gccaggtaattatgaaatttgtcta

SEQ ID NO: 15126 - DNA, 25 bp, probe
ttttggtttctcttgtaagacatca

SEQ ID NO: 15127 - DNA, 25 bp, probe
gtctgtccaagattatggatgatga

SEQ ID NO: 15128 - DNA, 25 bp, probe
atggaacagcatgtggtgaaatcaa

SEQ ID NO: 15129 - DNA, 25 bp, probe
tctgtccaagattatggatgatgat

SEQ ID NO: 15130 - DNA, 25 bp, probe
aacagcatgtggtgaaatcaaaatc

SEQ ID NO: 15131 - DNA, 25 bp, probe
gaacagcatgtggtgaaatcaaaat

SEQ ID NO: 15132 - DNA, 25 bp, probe
gtccaagattatggatgatgatagc

SEQ ID NO: 15133 - DNA, 25 bp, probe
agatggaacagcatgtggtgaaatc

SEQ ID NO: 15134 - DNA, 25 bp, probe
catcctactggtagatggaacagca

SEQ ID NO: 15135 - DNA, 25 bp, probe
acatcctactggtagatggaacagc

SEQ ID NO: 15136 - DNA, 25 bp, probe
ggtctgtccaagattatggatgatg

SEQ ID NO: 15137 - DNA, 25 bp, probe
tggtctgtccaagattatggatgat

SEQ ID NO: 15138 - DNA, 25 bp, probe
tccaagattatggatgatgatagct

SEQ ID NO: 15139 - DNA, 25 bp, probe
tggaacagcatgtggtgaaatcaaa

SEQ ID NO: 15140 - DNA, 25 bp, probe
ttggtctgtccaagattatggatga

SEQ ID NO: 15141 - DNA, 25 bp, probe
gatggaacagcatgtggtgaaatca

SEQ ID NO: 15142 - DNA, 25 bp, probe
ctagagtgaacttccacaccatacc

SEQ ID NO: 15143 - DNA, 25 bp, probe
cgaggaggattctagagtgaacttc

SEQ ID NO: 15144 - DNA, 25 bp, probe
ttctagagtgaacttccacaccata

SEQ ID NO: 15145 - DNA, 25 bp, probe
attctagagtgaacttccacaccat

SEQ ID NO: 15146 - DNA, 25 bp, probe
tctagagtgaacttccacaccatac

SEQ ID NO: 15147 - DNA, 25 bp, probe
acgaggaggattctagagtgaactt

SEQ ID NO: 15148 - DNA, 25 bp, probe
aacgaggaggattctagagtgaact

SEQ ID NO: 15149 - DNA, 25 bp, probe
caacgaggaggattctagagtgaac

SEQ ID NO: 15150 - DNA, 25 bp, probe
gaggattctagagtgaacttccaca

SEQ ID NO: 15151 - DNA, 25 bp, probe
atcaacgaggaggattctagagtga

SEQ ID NO: 15152 - DNA, 25 bp, probe
gaggaggattctagagtgaacttcc

SEQ ID NO: 15153 - DNA, 25 bp, probe
tcaacgaggaggattctagagtgaa

SEQ ID NO: 15154 - DNA, 25 bp, probe
gattctagagtgaacttccacacca

SEQ ID NO: 15155 - DNA, 25 bp, probe
aggattctagagtgaacttccacac

SEQ ID NO: 15156 - DNA, 25 bp, probe
aatcaacgaggaggattctagagtg

SEQ ID NO: 15157 - DNA, 25 bp, probe
ggaggattctagagtgaacttccac

SEQ ID NO: 15158 - DNA, 25 bp, probe
aggaggattctagagtgaacttcca

SEQ ID NO: 15159 - DNA, 25 bp, probe
ggattctagagtgaacttccacacc

SEQ ID NO: 15160 - DNA, 25 bp, probe
ctccttgtttagccatctgtcctca

SEQ ID NO: 15161 - DNA, 25 bp, probe
actcctccttgtttagccatctgtc

SEQ ID NO: 15162 - DNA, 25 bp, probe
tagagtgaacttccacaccataccc

SEQ ID NO: 15163 - DNA, 25 bp, probe
cactcctccttgtttagccatctgt

SEQ ID NO: 15164 - DNA, 25 bp, probe
tccttgtttagccatctgtcctcag

SEQ ID NO: 15165 - DNA, 25 bp, probe
cctccttgtttagccatctgtcctc

SEQ ID NO: 15166 - DNA, 25 bp, probe
ctcctccttgtttagccatctgtcc

SEQ ID NO: 15167 - DNA, 25 bp, probe
ttgtttagccatctgtcctcaggat

SEQ ID NO: 15168 - DNA, 25 bp, probe
cctaagcccactcctccttgtttag

SEQ ID NO: 15169 - DNA, 25 bp, probe
ccactcctccttgtttagccatctg

SEQ ID NO: 15170 - DNA, 25 bp, probe
tcctccttgtttagccatctgtcct

SEQ ID NO: 15171 - DNA, 25 bp, probe
cttgtttagccatctgtcctcagga

SEQ ID NO: 15172 - DNA, 25 bp, probe
ctaagcccactcctccttgtttagc

SEQ ID NO: 15173 - DNA, 25 bp, probe
ccttgtttagccatctgtcctcagg

SEQ ID NO: 15174 - DNA, 25 bp, probe
attccactcttcggagttgcagtta

SEQ ID NO: 15175 - DNA, 25 bp, probe
cacgtatcagggaaattgcaggtct

SEQ ID NO: 15176 - DNA, 25 bp, probe
gaatcaacgaggaggattctagagt

SEQ ID NO: 15177 - DNA, 25 bp, probe
tgaatcaacgaggaggattctagag

SEQ ID NO: 15178 - DNA, 25 bp, probe
ctgaatcaacgaggaggattctaga

SEQ ID NO: 15179 - DNA, 25 bp, probe
gctgaatcaacgaggaggattctag

SEQ ID NO: 15180 - DNA, 25 bp, probe
ttccactcttcggagttgcagttaa

SEQ ID NO: 15181 - DNA, 25 bp, probe
tgtttagccatctgtcctcaggatg

SEQ ID NO: 15182 - DNA, 25 bp, probe
agctgaatcaacgaggaggattcta

SEQ ID NO: 15183 - DNA, 25 bp, probe
acgtatcagggaaattgcaggtctg

SEQ ID NO: 15184 - DNA, 25 bp, probe
gattccactcttcggagttgcagtt

SEQ ID NO: 15185 - DNA, 25 bp, probe
tccactcttcggagttgcagttaac

SEQ ID NO: 15186 - DNA, 25 bp, probe
gcctaatgctaatgagattgttcct

SEQ ID NO: 15187 - DNA, 25 bp, probe
cctaatgctaatgagattgttcctc

SEQ ID NO: 15188 - DNA, 25 bp, probe
aatgcttggtgagaattaacttggc

SEQ ID NO: 15189 - DNA, 25 bp, probe
aaatgcttggtgagaattaacttgg

SEQ ID NO: 15190 - DNA, 25 bp, probe
taaatgcttggtgagaattaacttg

SEQ ID NO: 15191 - DNA, 25 bp, probe
ttcattgcataccggatacagatac

SEQ ID NO: 15192 - DNA, 25 bp, probe
ttaacttggcctaatgctaatgaga

SEQ ID NO: 15193 - DNA, 25 bp, probe
taacttggcctaatgctaatgagat

SEQ ID NO: 15194 - DNA, 25 bp, probe
aacttggcctaatgctaatgagatt

SEQ ID NO: 15195 - DNA, 25 bp, probe
ggtacagtctactagtgaattagcg

SEQ ID NO: 15196 - DNA, 25 bp, probe
gtacagtctactagtgaattagcga

SEQ ID NO: 15197 - DNA, 25 bp, probe
ttggcctaatgctaatgagattgtt

SEQ ID NO: 15198 - DNA, 25 bp, probe
tgagaattaacttggcctaatgcta

SEQ ID NO: 15199 - DNA, 25 bp, probe
cttggtgagaattaacttggcctaa

SEQ ID NO: 15200 - DNA, 25 bp, probe
tggcctaatgctaatgagattgttc

SEQ ID NO: 15201 - DNA, 25 bp, probe
cttggcctaatgctaatgagattgt

SEQ ID NO: 15202 - DNA, 25 bp, probe
acttggcctaatgctaatgagattg

SEQ ID NO: 15203 - DNA, 25 bp, probe
ttggtgagaattaacttggcctaat

SEQ ID NO: 15204 - DNA, 25 bp, probe
attaacttggcctaatgctaatgag

SEQ ID NO: 15205 - DNA, 25 bp, probe
gagaattaacttggcctaatgctaa

SEQ ID NO: 15206 - DNA, 25 bp, probe
tggtgagaattaacttggcctaatg

SEQ ID NO: 15207 - DNA, 25 bp, probe
tagtgaattagcgactttggtcaga

SEQ ID NO: 15208 - DNA, 25 bp, probe
ctagtgaattagcgactttggtcag

SEQ ID NO: 15209 - DNA, 25 bp, probe
gtgaattagcgactttggtcagaaa

SEQ ID NO: 15210 - DNA, 25 bp, probe
aattaacttggcctaatgctaatga

SEQ ID NO: 15211 - DNA, 25 bp, probe
gtgagaattaacttggcctaatgct

SEQ ID NO: 15212 - DNA, 25 bp, probe
ggcctaatgctaatgagattgttcc

SEQ ID NO: 15213 - DNA, 25 bp, probe
gaattaacttggcctaatgctaatg

SEQ ID NO: 15214 - DNA, 25 bp, probe
agaattaacttggcctaatgctaat

SEQ ID NO: 15215 - DNA, 25 bp, probe
tcattgcataccggatacagatacc

SEQ ID NO: 15216 - DNA, 25 bp, probe
ataaatgcttggtgagaattaactt

SEQ ID NO: 15217 - DNA, 25 bp, probe
aataaatgcttggtgagaattaact

SEQ ID NO: 15218 - DNA, 25 bp, probe
tacagtctactagtgaattagcgac

SEQ ID NO: 15219 - DNA, 25 bp, probe
gcctggaaataatgttgagtttcat

SEQ ID NO: 15220 - DNA, 25 bp, probe
aagtaataaatgcttggtgagaatt

SEQ ID NO: 15221 - DNA, 25 bp, probe
agtgaattagcgactttggtcagaa

SEQ ID NO: 15222 - DNA, 25 bp, probe
tggaaataatgttgagtttcattgc

SEQ ID NO: 15223 - DNA, 25 bp, probe
ctaatgagattgttcctcactcctt

SEQ ID NO: 15224 - DNA, 25 bp, probe
aatgctaatgagattgttcctcact

SEQ ID NO: 15225 - DNA, 25 bp, probe
atgctaatgagattgttcctcactc

SEQ ID NO: 15226 - DNA, 25 bp, probe
ggtgagaattaacttggcctaatgc

SEQ ID NO: 15227 - DNA, 25 bp, probe
tgaattagcgactttggtcagaaag

SEQ ID NO: 15228 - DNA, 25 bp, probe
gattgttcctcactccttttctatg

SEQ ID NO: 15229 - DNA, 25 bp, probe
taatgctaatgagattgttcctcac

SEQ ID NO: 15230 - DNA, 25 bp, probe
caagcaggagacttcagagatcaag

SEQ ID NO: 15231 - DNA, 25 bp, probe
ttgagtgacctggacaacttcattt

SEQ ID NO: 15232 - DNA, 25 bp, probe
taggattcctttgagtaagacttca

SEQ ID NO: 15233 - DNA, 25 bp, probe
tctaggattcctttgagtaagactt

SEQ ID NO: 15234 - DNA, 25 bp, probe
ctaggattcctttgagtaagacttc

SEQ ID NO: 15235 - DNA, 25 bp, probe
atctaggattcctttgagtaagact

SEQ ID NO: 15236 - DNA, 25 bp, probe
acattatctcaaaagtctctcctgg

SEQ ID NO: 15237 - DNA, 25 bp, probe
ccaagcaggagacttcagagatcaa

SEQ ID NO: 15238 - DNA, 25 bp, probe
caggagacttcagagatcaagtgtg

SEQ ID NO: 15239 - DNA, 25 bp, probe
gacaacttcattttcttccctaagc

SEQ ID NO: 15240 - DNA, 25 bp, probe
attatctcaaaagtctctcctggct

SEQ ID NO: 15241 - DNA, 25 bp, probe
cattatctcaaaagtctctcctggc

SEQ ID NO: 15242 - DNA, 25 bp, probe
acaacttcattttcttccctaagcc

SEQ ID NO: 15243 - DNA, 25 bp, probe
atcttcaccttggtcctggcattac

SEQ ID NO: 15244 - DNA, 25 bp, probe
catcttcaccttggtcctggcatta

SEQ ID NO: 15245 - DNA, 25 bp, probe
ttatctcaaaagtctctcctggctc

SEQ ID NO: 15246 - DNA, 25 bp, probe
cttcagagatcaagtgtgcagtttg

SEQ ID NO: 15247 - DNA, 25 bp, probe
aagcaggagacttcagagatcaagt

SEQ ID NO: 15248 - DNA, 25 bp, probe
aggattcctttgagtaagacttcaa

SEQ ID NO: 15249 - DNA, 25 bp, probe
aatctaggattcctttgagtaagac

SEQ ID NO: 15250 - DNA, 25 bp, probe
tgacctggacaacttcattttcttc

SEQ ID NO: 15251 - DNA, 25 bp, probe
gtgacctggacaacttcattttctt

SEQ ID NO: 15252 - DNA, 25 bp, probe
tacattatctcaaaagtctctcctg

SEQ ID NO: 15253 - DNA, 25 bp, probe
caacttcattttcttccctaagccc

SEQ ID NO: 15254 - DNA, 25 bp, probe
atctcaaaagtctctcctggctcta

SEQ ID NO: 15255 - DNA, 25 bp, probe
tatctcaaaagtctctcctggctct

SEQ ID NO: 15256 - DNA, 25 bp, probe
ggacaacttcattttcttccctaag

SEQ ID NO: 15257 - DNA, 25 bp, probe
tggacaacttcattttcttccctaa

SEQ ID NO: 15258 - DNA, 25 bp, probe
gagtgacctggacaacttcattttc

SEQ ID NO: 15259 - DNA, 25 bp, probe
ctggacaacttcattttcttcccta

SEQ ID NO: 15260 - DNA, 25 bp, probe
gtacattatctcaaaagtctctcct

SEQ ID NO: 15261 - DNA, 25 bp, probe
agcaggagacttcagagatcaagtg

SEQ ID NO: 15262 - DNA, 25 bp, probe
agtgacctggacaacttcattttct

SEQ ID NO: 15263 - DNA, 25 bp, probe
gacttcagagatcaagtgtgcagtt

SEQ ID NO: 15264 - DNA, 25 bp, probe
tgagtgacctggacaacttcatttt

SEQ ID NO: 15265 - DNA, 25 bp, probe
gagacttcagagatcaagtgtgcag

SEQ ID NO: 15266 - DNA, 25 bp, probe
ctcacttgaggtgctttatgtggtc

SEQ ID NO: 15267 - DNA, 25 bp, probe
atgctcacttgaggtgctttatgtg

SEQ ID NO: 15268 - DNA, 25 bp, probe
catgctcacttgaggtgctttatgt

SEQ ID NO: 15269 - DNA, 25 bp, probe
acatgctcacttgaggtgctttatg

SEQ ID NO: 15270 - DNA, 25 bp, probe
cacatgctcacttgaggtgctttat

SEQ ID NO: 15271 - DNA, 25 bp, probe
gttgagtgacctggacaacttcatt

SEQ ID NO: 15272 - DNA, 25 bp, probe
tccctaagccccagtttcttcatat

SEQ ID NO: 15273 - DNA, 25 bp, probe
attttcttccctaagccccagtttc

SEQ ID NO: 15274 - DNA, 25 bp, probe
agcgggagactaacagaaataataa

SEQ ID NO: 15275 - DNA, 25 bp, probe
aagcgggagactaacagaaataata

SEQ ID NO: 15276 - DNA, 25 bp, probe
gaagcgggagactaacagaaataat

SEQ ID NO: 15277 - DNA, 25 bp, probe
gcgggagactaacagaaataataag

SEQ ID NO: 15278 - DNA, 25 bp, probe
tttgaaactgataaagaggtgtgct

SEQ ID NO: 15279 - DNA, 25 bp, probe
ttgaaactgataaagaggtgtgctt

SEQ ID NO: 15280 - DNA, 25 bp, probe
tttcagtagtgtgattaggcgttaa

SEQ ID NO: 15281 - DNA, 25 bp, probe
gctctgagattaaggctgaaattct

SEQ ID NO: 15282 - DNA, 25 bp, probe
cgggagactaacagaaataataaga

SEQ ID NO: 15283 - DNA, 25 bp, probe
ggaagcgggagactaacagaaataa

SEQ ID NO: 15284 - DNA, 25 bp, probe
ctctgagattaaggctgaaattcta

SEQ ID NO: 15285 - DNA, 25 bp, probe
tctgagattaaggctgaaattctag

SEQ ID NO: 15286 - DNA, 25 bp, probe
cagtagtgtgattaggcgttaactt

SEQ ID NO: 15287 - DNA, 25 bp, probe
ttcagtagtgtgattaggcgttaac

SEQ ID NO: 15288 - DNA, 25 bp, probe
tcagtagtgtgattaggcgttaact

SEQ ID NO: 15289 - DNA, 25 bp, probe
caacgagagattgaaataatgcggg

SEQ ID NO: 15290 - DNA, 25 bp, probe
gaaactgataaagaggtgtgctttg

SEQ ID NO: 15291 - DNA, 25 bp, probe
ctttgaaactgataaagaggtgtgc

SEQ ID NO: 15292 - DNA, 25 bp, probe
gctttgaaactgataaagaggtgtg

SEQ ID NO: 15293 - DNA, 25 bp, probe
aaactgataaagaggtgtgctttga

SEQ ID NO: 15294 - DNA, 25 bp, probe
tgaaactgataaagaggtgtgcttt

SEQ ID NO: 15295 - DNA, 25 bp, probe
ataaagaggtgtgctttgacagttt

SEQ ID NO: 15296 - DNA, 25 bp, probe
tcaaatcagaacacttcttccagaa

SEQ ID NO: 15297 - DNA, 25 bp, probe
tggaagcgggagactaacagaaata

SEQ ID NO: 15298 - DNA, 25 bp, probe
gtcaaatcagaacacttcttccaga

SEQ ID NO: 15299 - DNA, 25 bp, probe
aacactctaaaatctgacttctgga

SEQ ID NO: 15300 - DNA, 25 bp, probe
gataaagaggtgtgctttgacagtt

SEQ ID NO: 15301 - DNA, 25 bp, probe
aactgataaagaggtgtgctttgac

SEQ ID NO: 15302 - DNA, 25 bp, probe
aaacactctaaaatctgacttctgg

SEQ ID NO: 15303 - DNA, 25 bp, probe
ctgataaagaggtgtgctttgacag

SEQ ID NO: 15304 - DNA, 25 bp, probe
gggagactaacagaaataataagag

SEQ ID NO: 15305 - DNA, 25 bp, probe
gacagctttgaaactgataaagagg

SEQ ID NO: 15306 - DNA, 25 bp, probe
cagctttgaaactgataaagaggtg

SEQ ID NO: 15307 - DNA, 25 bp, probe
tgacagctttgaaactgataaagag

SEQ ID NO: 15308 - DNA, 25 bp, probe
ttaacttttcaccttaccactgaca

SEQ ID NO: 15309 - DNA, 25 bp, probe
ttttcagtagtgtgattaggcgtta

SEQ ID NO: 15310 - DNA, 25 bp, probe
ggtcaaatcagaacacttcttccag

SEQ ID NO: 15311 - DNA, 25 bp, probe
ctggtcaaatcagaacacttcttcc

SEQ ID NO: 15312 - DNA, 25 bp, probe
agctttgaaactgataaagaggtgt

SEQ ID NO: 15313 - DNA, 25 bp, probe
acagctttgaaactgataaagaggt

SEQ ID NO: 15314 - DNA, 25 bp, probe
agtagtgtgattaggcgttaacttt

SEQ ID NO: 15315 - DNA, 25 bp, probe
atggaagcgggagactaacagaaat

SEQ ID NO: 15316 - DNA, 25 bp, probe
ttgacagctttgaaactgataaaga

SEQ ID NO: 15317 - DNA, 25 bp, probe
acactctaaaatctgacttctggag

SEQ ID NO: 15318 - DNA, 25 bp, probe
ggttctgttctggatattattaagc

SEQ ID NO: 15319 - DNA, 25 bp, probe
atcctctactacctcactagacatc

SEQ ID NO: 15320 - DNA, 25 bp, probe
ggagatgctggcataacatactatt

SEQ ID NO: 15321 - DNA, 25 bp, probe
ctctactacctcactagacatccaa

SEQ ID NO: 15322 - DNA, 25 bp, probe
aggagatgctggcataacatactat

SEQ ID NO: 15323 - DNA, 25 bp, probe
aaggagatgctggcataacatacta

SEQ ID NO: 15324 - DNA, 25 bp, probe
tatcctctactacctcactagacat

SEQ ID NO: 15325 - DNA, 25 bp, probe
atatcctctactacctcactagaca

SEQ ID NO: 15326 - DNA, 25 bp, probe
gcacagttaagtttatgagaaggtt

SEQ ID NO: 15327 - DNA, 25 bp, probe
tcctctactacctcactagacatcc

SEQ ID NO: 15328 - DNA, 25 bp, probe
ttcaggttctgttctggatattatt

SEQ ID NO: 15329 - DNA, 25 bp, probe
ctactacctcactagacatccaaag

SEQ ID NO: 15330 - DNA, 25 bp, probe
cctctactacctcactagacatcca

SEQ ID NO: 15331 - DNA, 25 bp, probe
gggcagttaaatatcctctactacc

SEQ ID NO: 15332 - DNA, 25 bp, probe
tctgtatttcctcatatttgctgtt

SEQ ID NO: 15333 - DNA, 25 bp, probe
ttctgtatttcctcatatttgctgt

SEQ ID NO: 15334 - DNA, 25 bp, probe
aatatcctctactacctcactagac

SEQ ID NO: 15335 - DNA, 25 bp, probe
ggcagttaaatatcctctactacct

SEQ ID NO: 15336 - DNA, 25 bp, probe
acatactatttgaatatcagccagc

SEQ ID NO: 15337 - DNA, 25 bp, probe
acttctgtatttcctcatatttgct

SEQ ID NO: 15338 - DNA, 25 bp, probe
cttctgtatttcctcatatttgctg

SEQ ID NO: 15339 - DNA, 25 bp, probe
tgctggcataacatactatttgaat

SEQ ID NO: 15340 - DNA, 25 bp, probe
ctgtatttcctcatatttgctgttt

SEQ ID NO: 15341 - DNA, 25 bp, probe
cacagttaagtttatgagaaggttc

SEQ ID NO: 15342 - DNA, 25 bp, probe
tcaggttctgttctggatattatta

SEQ ID NO: 15343 - DNA, 25 bp, probe
agttaagtttatgagaaggttcaca

SEQ ID NO: 15344 - DNA, 25 bp, probe
acagttaagtttatgagaaggttca

SEQ ID NO: 15345 - DNA, 25 bp, probe
aacttctgtatttcctcatatttgc

SEQ ID NO: 15346 - DNA, 25 bp, probe
gcagttaaatatcctctactacctc

SEQ ID NO: 15347 - DNA, 25 bp, probe
tactacctcactagacatccaaagg

SEQ ID NO: 15348 - DNA, 25 bp, probe
tctactacctcactagacatccaaa

SEQ ID NO: 15349 - DNA, 25 bp, probe
cagttaagtttatgagaaggttcac

SEQ ID NO: 15350 - DNA, 25 bp, probe
gatgctggcataacatactatttga

SEQ ID NO: 15351 - DNA, 25 bp, probe
agatgctggcataacatactatttg

SEQ ID NO: 15352 - DNA, 25 bp, probe
gagatgctggcataacatactattt

SEQ ID NO: 15353 - DNA, 25 bp, probe
gctggcataacatactatttgaata

SEQ ID NO: 15354 - DNA, 25 bp, probe
ctgcacagttaagtttatgagaagg

SEQ ID NO: 15355 - DNA, 25 bp, probe
atgctggcataacatactatttgaa

SEQ ID NO: 15356 - DNA, 25 bp, probe
aggttctgttctggatattattaag

SEQ ID NO: 15357 - DNA, 25 bp, probe
tgcacagttaagtttatgagaaggt

SEQ ID NO: 15358 - DNA, 25 bp, probe
actatttgaatatcagccagctact

SEQ ID NO: 15359 - DNA, 25 bp, probe
ctacctcactagacatccaaaggag

SEQ ID NO: 15360 - DNA, 25 bp, probe
catactatttgaatatcagccagct

SEQ ID NO: 15361 - DNA, 25 bp, probe
caggttctgttctggatattattaa

SEQ ID NO: 15362 - DNA, 25 bp, probe
agaatatagagaatgacacctggag

SEQ ID NO: 15363 - DNA, 25 bp, probe
gaatatagagaatgacacctggagg

SEQ ID NO: 15364 - DNA, 25 bp, probe
agaatgacacctggaggagaatata

SEQ ID NO: 15365 - DNA, 25 bp, probe
aatatagagaatgacacctggagga

SEQ ID NO: 15366 - DNA, 25 bp, probe
atgacacctggaggagaatataatg

SEQ ID NO: 15367 - DNA, 25 bp, probe
gaatgacacctggaggagaatataa

SEQ ID NO: 15368 - DNA, 25 bp, probe
atatagagaatgacacctggaggag

SEQ ID NO: 15369 - DNA, 25 bp, probe
gatagagtctgtgttggtcttcatc

SEQ ID NO: 15370 - DNA, 25 bp, probe
aatgacacctggaggagaatataat

SEQ ID NO: 15371 - DNA, 25 bp, probe
gagaatgacacctggaggagaatat

SEQ ID NO: 15372 - DNA, 25 bp, probe
tatagagaatgacacctggaggaga

SEQ ID NO: 15373 - DNA, 25 bp, probe
tcaatcttaggagacagtgagttaa

SEQ ID NO: 15374 - DNA, 25 bp, probe
ttcaatcttaggagacagtgagtta

SEQ ID NO: 15375 - DNA, 25 bp, probe
gtagaatatagagaatgacacctgg

SEQ ID NO: 15376 - DNA, 25 bp, probe
tgatagagtctgtgttggtcttcat

SEQ ID NO: 15377 - DNA, 25 bp, probe
gacacctggaggagaatataatgtt

SEQ ID NO: 15378 - DNA, 25 bp, probe
tagaatatagagaatgacacctgga

SEQ ID NO: 15379 - DNA, 25 bp, probe
tgacacctggaggagaatataatgt

SEQ ID NO: 15380 - DNA, 25 bp, probe
atagagtctgtgttggtcttcatcc

SEQ ID NO: 15381 - DNA, 25 bp, probe
ctgatagagtctgtgttggtcttca

SEQ ID NO: 15382 - DNA, 25 bp, probe
acacctggaggagaatataatgtta

SEQ ID NO: 15383 - DNA, 25 bp, probe
ttgatctgctgatagagtctgtgtt

SEQ ID NO: 15384 - DNA, 25 bp, probe
cacctggaggagaatataatgttaa

SEQ ID NO: 15385 - DNA, 25 bp, probe
agagaatgacacctggaggagaata

SEQ ID NO: 15386 - DNA, 25 bp, probe
tagagaatgacacctggaggagaat

SEQ ID NO: 15387 - DNA, 25 bp, probe
atagagaatgacacctggaggagaa

SEQ ID NO: 15388 - DNA, 25 bp, probe
attacatacatcataagctccagcc

SEQ ID NO: 15389 - DNA, 25 bp, probe
cttgatctgctgatagagtctgtgt

SEQ ID NO: 15390 - DNA, 25 bp, probe
ttacatacatcataagctccagcct

SEQ ID NO: 15391 - DNA, 25 bp, probe
agtagaatatagagaatgacacctg

SEQ ID NO: 15392 - DNA, 25 bp, probe
tgatctgctgatagagtctgtgttg

SEQ ID NO: 15393 - DNA, 25 bp, probe
tacatacatcataagctccagcctt

SEQ ID NO: 15394 - DNA, 25 bp, probe
tattacatacatcataagctccagc

SEQ ID NO: 15395 - DNA, 25 bp, probe
ccttgatctgctgatagagtctgtg

SEQ ID NO: 15396 - DNA, 25 bp, probe
gctgatagagtctgtgttggtcttc

SEQ ID NO: 15397 - DNA, 25 bp, probe
ctttcaatcttaggagacagtgagt

SEQ ID NO: 15398 - DNA, 25 bp, probe
tctttcaatcttaggagacagtgag

SEQ ID NO: 15399 - DNA, 25 bp, probe
tttcaatcttaggagacagtgagtt

SEQ ID NO: 15400 - DNA, 25 bp, probe
ttctttcaatcttaggagacagtga

SEQ ID NO: 15401 - DNA, 25 bp, probe
gatctgctgatagagtctgtgttgg

SEQ ID NO: 15402 - DNA, 25 bp, probe
tttctttcaatcttaggagacagtg

SEQ ID NO: 15403 - DNA, 25 bp, probe
gagggaaataatatgagaaagtggt

SEQ ID NO: 15404 - DNA, 25 bp, probe
atctgctgatagagtctgtgttggt

SEQ ID NO: 15405 - DNA, 25 bp, probe
agagggaaataatatgagaaagtgg

SEQ ID NO: 15406 - DNA, 25 bp, probe
aggtctgaggaactataagccatat

SEQ ID NO: 15407 - DNA, 25 bp, probe
aaggtctgaggaactataagccata

SEQ ID NO: 15408 - DNA, 25 bp, probe
caaggtctgaggaactataagccat

SEQ ID NO: 15409 - DNA, 25 bp, probe
ctacaagtggttggagactagaatc

SEQ ID NO: 15410 - DNA, 25 bp, probe
gaagtcagaagtaaccagaactgtt

SEQ ID NO: 15411 - DNA, 25 bp, probe
cagaagtcagaagtaaccagaactg

SEQ ID NO: 15412 - DNA, 25 bp, probe
cctacaagtggttggagactagaat

SEQ ID NO: 15413 - DNA, 25 bp, probe
agaagtcagaagtaaccagaactgt

SEQ ID NO: 15414 - DNA, 25 bp, probe
atgatgtttactttgttggctgaaa

SEQ ID NO: 15415 - DNA, 25 bp, probe
aatgatgtttactttgttggctgaa

SEQ ID NO: 15416 - DNA, 25 bp, probe
ttgaatgatgtttactttgttggct

SEQ ID NO: 15417 - DNA, 25 bp, probe
gaatgatgtttactttgttggctga

SEQ ID NO: 15418 - DNA, 25 bp, probe
gcagaagtcagaagtaaccagaact

SEQ ID NO: 15419 - DNA, 25 bp, probe
tgaatgatgtttactttgttggctg

SEQ ID NO: 15420 - DNA, 25 bp, probe
tttgaatgatgtttactttgttggc

SEQ ID NO: 15421 - DNA, 25 bp, probe
tacaagtggttggagactagaatcc

SEQ ID NO: 15422 - DNA, 25 bp, probe
tcaaggtctgaggaactataagcca

SEQ ID NO: 15423 - DNA, 25 bp, probe
gtctgaggaactataagccatatgt

SEQ ID NO: 15424 - DNA, 25 bp, probe
ggtctgaggaactataagccatatg

SEQ ID NO: 15425 - DNA, 25 bp, probe
agaagtaaccagaactgtttagagc

SEQ ID NO: 15426 - DNA, 25 bp, probe
tgaggaactataagccatatgtagg

SEQ ID NO: 15427 - DNA, 25 bp, probe
gaggaactataagccatatgtagga

SEQ ID NO: 15428 - DNA, 25 bp, probe
ttgcagaagtcagaagtaaccagaa

SEQ ID NO: 15429 - DNA, 25 bp, probe
aagtcagaagtaaccagaactgttt

SEQ ID NO: 15430 - DNA, 25 bp, probe
gaagtaaccagaactgtttagagcc

SEQ ID NO: 15431 - DNA, 25 bp, probe
agtcagaagtaaccagaactgttta

SEQ ID NO: 15432 - DNA, 25 bp, probe
tcagaagtaaccagaactgtttaga

SEQ ID NO: 15433 - DNA, 25 bp, probe
gtcagaagtaaccagaactgtttag

SEQ ID NO: 15434 - DNA, 25 bp, probe
cagaagtaaccagaactgtttagag

SEQ ID NO: 15435 - DNA, 25 bp, probe
aggaactataagccatatgtaggat

SEQ ID NO: 15436 - DNA, 25 bp, probe
tctgaggaactataagccatatgta

SEQ ID NO: 15437 - DNA, 25 bp, probe
aagtaaccagaactgtttagagcca

SEQ ID NO: 15438 - DNA, 25 bp, probe
ctgaggaactataagccatatgtag

SEQ ID NO: 15439 - DNA, 25 bp, probe
cttgcagaagtcagaagtaaccaga

SEQ ID NO: 15440 - DNA, 25 bp, probe
tgcagaagtcagaagtaaccagaac

SEQ ID NO: 15441 - DNA, 25 bp, probe
ggaactataagccatatgtaggatt

SEQ ID NO: 15442 - DNA, 25 bp, probe
accttattaaaccctagaactcaaa

SEQ ID NO: 15443 - DNA, 25 bp, probe
aaagtatcactggattaagcccttt

SEQ ID NO: 15444 - DNA, 25 bp, probe
agtaaccagaactgtttagagccag

SEQ ID NO: 15445 - DNA, 25 bp, probe
actataagccatatgtaggattacc

SEQ ID NO: 15446 - DNA, 25 bp, probe
tgatgtttactttgttggctgaaaa

SEQ ID NO: 15447 - DNA, 25 bp, probe
ggattaagcccttttctaccatttt

SEQ ID NO: 15448 - DNA, 25 bp, probe
gcccttttctaccattttaatctca

SEQ ID NO: 15449 - DNA, 25 bp, probe
atcactggattaagcccttttctac

SEQ ID NO: 15450 - DNA, 25 bp, probe
ccacctatgtatggtcatggaatac

SEQ ID NO: 15451 - DNA, 25 bp, probe
cacctatgtatggtcatggaatacg

SEQ ID NO: 15452 - DNA, 25 bp, probe
ccatcaagaagatcaacaaacagaa

SEQ ID NO: 15453 - DNA, 25 bp, probe
atcaagaagatcaacaaacagaact

SEQ ID NO: 15454 - DNA, 25 bp, probe
catcaagaagatcaacaaacagaac

SEQ ID NO: 15455 - DNA, 25 bp, probe
tcaagaagatcaacaaacagaactt

SEQ ID NO: 15456 - DNA, 25 bp, probe
ctatgtatggtcatggaatacgtgg

SEQ ID NO: 15457 - DNA, 25 bp, probe
cctatgtatggtcatggaatacgtg

SEQ ID NO: 15458 - DNA, 25 bp, probe
gccacctatgtatggtcatggaata

SEQ ID NO: 15459 - DNA, 25 bp, probe
tatgtatggtcatggaatacgtgga

SEQ ID NO: 15460 - DNA, 25 bp, probe
gccatcaagaagatcaacaaacaga

SEQ ID NO: 15461 - DNA, 25 bp, probe
acctatgtatggtcatggaatacgt

SEQ ID NO: 15462 - DNA, 25 bp, probe
ttgccatcaagaagatcaacaaaca

SEQ ID NO: 15463 - DNA, 25 bp, probe
tgccatcaagaagatcaacaaacag

SEQ ID NO: 15464 - DNA, 25 bp, probe
atgtatggtcatggaatacgtggaa

SEQ ID NO: 15465 - DNA, 25 bp, probe
tgtatggtcatggaatacgtggaag

SEQ ID NO: 15466 - DNA, 25 bp, probe
tatggtcatggaatacgtggaaggt

SEQ ID NO: 15467 - DNA, 25 bp, probe
atggtcatggaatacgtggaaggta

SEQ ID NO: 15468 - DNA, 25 bp, probe
gctttgccatcaagaagatcaacaa

SEQ ID NO: 15469 - DNA, 25 bp, probe
agaacttgatcctgcgtaaccagat

SEQ ID NO: 15470 - DNA, 25 bp, probe
ctttgccatcaagaagatcaacaaa

SEQ ID NO: 15471 - DNA, 25 bp, probe
tttgccatcaagaagatcaacaaac

SEQ ID NO: 15472 - DNA, 25 bp, probe
gtatggtcatggaatacgtggaagg

SEQ ID NO: 15473 - DNA, 25 bp, probe
caaacagaacttgatcctgcgtaac

SEQ ID NO: 15474 - DNA, 25 bp, probe
aagaagatcaacaaacagaacttga

SEQ ID NO: 15475 - DNA, 25 bp, probe
acaaacagaacttgatcctgcgtaa

SEQ ID NO: 15476 - DNA, 25 bp, probe
aacaaacagaacttgatcctgcgta

SEQ ID NO: 15477 - DNA, 25 bp, probe
tggtcatggaatacgtggaaggtac

SEQ ID NO: 15478 - DNA, 25 bp, probe
gaacttgatcctgcgtaaccagatc

SEQ ID NO: 15479 - DNA, 25 bp, probe
aacagaacttgatcctgcgtaacca

SEQ ID NO: 15480 - DNA, 25 bp, probe
caagaagatcaacaaacagaacttg

SEQ ID NO: 15481 - DNA, 25 bp, probe
aaacagaacttgatcctgcgtaacc

SEQ ID NO: 15482 - DNA, 25 bp, probe
cagaacttgatcctgcgtaaccaga

SEQ ID NO: 15483 - DNA, 25 bp, probe
acagaacttgatcctgcgtaaccag

SEQ ID NO: 15484 - DNA, 25 bp, probe
cgccacctatgtatggtcatggaat

SEQ ID NO: 15485 - DNA, 25 bp, probe
cgctttgccatcaagaagatcaaca

SEQ ID NO: 15486 - DNA, 25 bp, probe
caacaaacagaacttgatcctgcgt

SEQ ID NO: 15487 - DNA, 25 bp, probe
aacttgatcctgcgtaaccagatcc

SEQ ID NO: 15488 - DNA, 25 bp, probe
taaccagatccagcaggtctttgtg

SEQ ID NO: 15489 - DNA, 25 bp, probe
gtaaccagatccagcaggtctttgt

SEQ ID NO: 15490 - DNA, 25 bp, probe
tcaacaaacagaacttgatcctgcg

SEQ ID NO: 15491 - DNA, 25 bp, probe
cttgatcctgcgtaaccagatccag

SEQ ID NO: 15492 - DNA, 25 bp, probe
agaagatcaacaaacagaacttgat

SEQ ID NO: 15493 - DNA, 25 bp, probe
atcaacaaacagaacttgatcctgc

SEQ ID NO: 15494 - DNA, 25 bp, probe
aatggttgaattagaatacacagcc

SEQ ID NO: 15495 - DNA, 25 bp, probe
tcagtctggaatggttgaattagaa

SEQ ID NO: 15496 - DNA, 25 bp, probe
ctcagtctggaatggttgaattaga

SEQ ID NO: 15497 - DNA, 25 bp, probe
cagtctggaatggttgaattagaat

SEQ ID NO: 15498 - DNA, 25 bp, probe
gaatggttgaattagaatacacagc

SEQ ID NO: 15499 - DNA, 25 bp, probe
tggaatggttgaattagaatacaca

SEQ ID NO: 15500 - DNA, 25 bp, probe
taacagaatacatgacacaagagca

SEQ ID NO: 15501 - DNA, 25 bp, probe
gtaacagaatacatgacacaagagc

SEQ ID NO: 15502 - DNA, 25 bp, probe
cctcagtctggaatggttgaattag

SEQ ID NO: 15503 - DNA, 25 bp, probe
atacatgacacaagagcattcctaa

SEQ ID NO: 15504 - DNA, 25 bp, probe
aatacatgacacaagagcattccta

SEQ ID NO: 15505 - DNA, 25 bp, probe
acagaatacatgacacaagagcatt

SEQ ID NO: 15506 - DNA, 25 bp, probe
aacagaatacatgacacaagagcat

SEQ ID NO: 15507 - DNA, 25 bp, probe
ggaatggttgaattagaatacacag

SEQ ID NO: 15508 - DNA, 25 bp, probe
ctggaatggttgaattagaatacac

SEQ ID NO: 15509 - DNA, 25 bp, probe
tctggaatggttgaattagaataca

SEQ ID NO: 15510 - DNA, 25 bp, probe
gtctggaatggttgaattagaatac

SEQ ID NO: 15511 - DNA, 25 bp, probe
agtctggaatggttgaattagaata

SEQ ID NO: 15512 - DNA, 25 bp, probe
ttgtatgaacaccttgacttagatt

SEQ ID NO: 15513 - DNA, 25 bp, probe
aattgtatgaacaccttgacttaga

SEQ ID NO: 15514 - DNA, 25 bp, probe
gtcctatagaacagagtcgtaatcc

SEQ ID NO: 15515 - DNA, 25 bp, probe
agagtcctatagaacagagtcgtaa

SEQ ID NO: 15516 - DNA, 25 bp, probe
cagagtcctatagaacagagtcgta

SEQ ID NO: 15517 - DNA, 25 bp, probe
attgtatgaacaccttgacttagat

SEQ ID NO: 15518 - DNA, 25 bp, probe
agtcctatagaacagagtcgtaatc

SEQ ID NO: 15519 - DNA, 25 bp, probe
gagtcctatagaacagagtcgtaat

SEQ ID NO: 15520 - DNA, 25 bp, probe
cagaatacatgacacaagagcattc

SEQ ID NO: 15521 - DNA, 25 bp, probe
acacaagagcattcctaaataaact

SEQ ID NO: 15522 - DNA, 25 bp, probe
tgacacaagagcattcctaaataaa

SEQ ID NO: 15523 - DNA, 25 bp, probe
tctttcctgtccctagtaatcattc

SEQ ID NO: 15524 - DNA, 25 bp, probe
atggttgaattagaatacacagccc

SEQ ID NO: 15525 - DNA, 25 bp, probe
tatagaacagagtcgtaatcccagc

SEQ ID NO: 15526 - DNA, 25 bp, probe
ctttcctgtccctagtaatcattcg

SEQ ID NO: 15527 - DNA, 25 bp, probe
cctgtatctttcctgtccctagtaa

SEQ ID NO: 15528 - DNA, 25 bp, probe
gcctcagtctggaatggttgaatta

SEQ ID NO: 15529 - DNA, 25 bp, probe
gacacaagagcattcctaaataaac

SEQ ID NO: 15530 - DNA, 25 bp, probe
gaatacatgacacaagagcattcct

SEQ ID NO: 15531 - DNA, 25 bp, probe
agaatacatgacacaagagcattcc

SEQ ID NO: 15532 - DNA, 25 bp, probe
ctagtaatcattcgttggaaagagc

SEQ ID NO: 15533 - DNA, 25 bp, probe
ccctagtaatcattcgttggaaaga

SEQ ID NO: 15534 - DNA, 25 bp, probe
gtatctttcctgtccctagtaatca

SEQ ID NO: 15535 - DNA, 25 bp, probe
tgtatctttcctgtccctagtaatc

SEQ ID NO: 15536 - DNA, 25 bp, probe
ctgtatctttcctgtccctagtaat

SEQ ID NO: 15537 - DNA, 25 bp, probe
cctagtaatcattcgttggaaagag

SEQ ID NO: 15538 - DNA, 25 bp, probe
tcaatggcaatcctcatatcttaga

SEQ ID NO: 15539 - DNA, 25 bp, probe
atcaatggcaatcctcatatcttag

SEQ ID NO: 15540 - DNA, 25 bp, probe
ccattcagaagttccatcactagaa

SEQ ID NO: 15541 - DNA, 25 bp, probe
aataatggtgctagactgaattacg

SEQ ID NO: 15542 - DNA, 25 bp, probe
atggcaatcctcatatcttagagaa

SEQ ID NO: 15543 - DNA, 25 bp, probe
aatggcaatcctcatatcttagaga

SEQ ID NO: 15544 - DNA, 25 bp, probe
caatggcaatcctcatatcttagag

SEQ ID NO: 15545 - DNA, 25 bp, probe
ctccattcagaagttccatcactag

SEQ ID NO: 15546 - DNA, 25 bp, probe
tccattcagaagttccatcactaga

SEQ ID NO: 15547 - DNA, 25 bp, probe
tcctgaagcacagaagtctattaac

SEQ ID NO: 15548 - DNA, 25 bp, probe
ttcctgaagcacagaagtctattaa

SEQ ID NO: 15549 - DNA, 25 bp, probe
aatcaatggcaatcctcatatctta

SEQ ID NO: 15550 - DNA, 25 bp, probe
taatcaatggcaatcctcatatctt

SEQ ID NO: 15551 - DNA, 25 bp, probe
cctgaagcacagaagtctattaaca

SEQ ID NO: 15552 - DNA, 25 bp, probe
cctccattcagaagttccatcacta

SEQ ID NO: 15553 - DNA, 25 bp, probe
tgaagcacagaagtctattaacata

SEQ ID NO: 15554 - DNA, 25 bp, probe
ataatcaatggcaatcctcatatct

SEQ ID NO: 15555 - DNA, 25 bp, probe
ctgaagcacagaagtctattaacat

SEQ ID NO: 15556 - DNA, 25 bp, probe
ctcctccattcagaagttccatcac

SEQ ID NO: 15557 - DNA, 25 bp, probe
aataatcaatggcaatcctcatatc

SEQ ID NO: 15558 - DNA, 25 bp, probe
ataatggtgctagactgaattacgt

SEQ ID NO: 15559 - DNA, 25 bp, probe
tctcctccattcagaagttccatca

SEQ ID NO: 15560 - DNA, 25 bp, probe
tggcaatcctcatatcttagagaaa

SEQ ID NO: 15561 - DNA, 25 bp, probe
gaagcacagaagtctattaacatat

SEQ ID NO: 15562 - DNA, 25 bp, probe
ttcagaagttccatcactagaaacg

SEQ ID NO: 15563 - DNA, 25 bp, probe
tcctccattcagaagttccatcact

SEQ ID NO: 15564 - DNA, 25 bp, probe
attcagaagttccatcactagaaac

SEQ ID NO: 15565 - DNA, 25 bp, probe
cattcagaagttccatcactagaaa

SEQ ID NO: 15566 - DNA, 25 bp, probe
aacatttattgactatctaccacca

SEQ ID NO: 15567 - DNA, 25 bp, probe
aacagttctcctccattcagaagtt

SEQ ID NO: 15568 - DNA, 25 bp, probe
cttcctgaagcacagaagtctatta

SEQ ID NO: 15569 - DNA, 25 bp, probe
ctcaaacagttctcctccattcaga

SEQ ID NO: 15570 - DNA, 25 bp, probe
ttctcctccattcagaagttccatc

SEQ ID NO: 15571 - DNA, 25 bp, probe
acatttattgactatctaccaccaa

SEQ ID NO: 15572 - DNA, 25 bp, probe
taataatggtgctagactgaattac

SEQ ID NO: 15573 - DNA, 25 bp, probe
gttctcctccattcagaagttccat

SEQ ID NO: 15574 - DNA, 25 bp, probe
acagttctcctccattcagaagttc

SEQ ID NO: 15575 - DNA, 25 bp, probe
attgactatctaccaccaatacgtt

SEQ ID NO: 15576 - DNA, 25 bp, probe
tctttaataatggtgctagactgaa

SEQ ID NO: 15577 - DNA, 25 bp, probe
accaccaatacgtttaaataatccc

SEQ ID NO: 15578 - DNA, 25 bp, probe
taatggtgctagactgaattacgta

SEQ ID NO: 15579 - DNA, 25 bp, probe
tgactatctaccaccaatacgttta

SEQ ID NO: 15580 - DNA, 25 bp, probe
atctttaataatggtgctagactga

SEQ ID NO: 15581 - DNA, 25 bp, probe
ttgactatctaccaccaatacgttt

SEQ ID NO: 15582 - DNA, 25 bp, probe
aagatgagactatcgctgttgaatc

SEQ ID NO: 15583 - DNA, 25 bp, probe
agttactcacatctaattcatctcg

SEQ ID NO: 15584 - DNA, 25 bp, probe
agactatcgctgttgaatctcagag

SEQ ID NO: 15585 - DNA, 25 bp, probe
aaagatgagactatcgctgttgaat

SEQ ID NO: 15586 - DNA, 25 bp, probe
gactatcgctgttgaatctcagagt

SEQ ID NO: 15587 - DNA, 25 bp, probe
gttactcacatctaattcatctcga

SEQ ID NO: 15588 - DNA, 25 bp, probe
tatcgctgttgaatctcagagtgtc

SEQ ID NO: 15589 - DNA, 25 bp, probe
ctatcgctgttgaatctcagagtgt

SEQ ID NO: 15590 - DNA, 25 bp, probe
actatcgctgttgaatctcagagtg

SEQ ID NO: 15591 - DNA, 25 bp, probe
agatgagactatcgctgttgaatct

SEQ ID NO: 15592 - DNA, 25 bp, probe
caaagatgagactatcgctgttgaa

SEQ ID NO: 15593 - DNA, 25 bp, probe
ttgactggtagggagagaggataaa

SEQ ID NO: 15594 - DNA, 25 bp, probe
tttgactggtagggagagaggataa

SEQ ID NO: 15595 - DNA, 25 bp, probe
ttactcacatctaattcatctcgaa

SEQ ID NO: 15596 - DNA, 25 bp, probe
actcacatctaattcatctcgaatg

SEQ ID NO: 15597 - DNA, 25 bp, probe
aagttactcacatctaattcatctc

SEQ ID NO: 15598 - DNA, 25 bp, probe
gcaaagttactcacatctaattcat

SEQ ID NO: 15599 - DNA, 25 bp, probe
acaaagaaagttggtacaaagtaga

SEQ ID NO: 15600 - DNA, 25 bp, probe
gatccatttctgtgaactcttctgc

SEQ ID NO: 15601 - DNA, 25 bp, probe
taattcatctcgaatgactggctta

SEQ ID NO: 15602 - DNA, 25 bp, probe
aattcatctcgaatgactggcttaa

SEQ ID NO: 15603 - DNA, 25 bp, probe
catctaattcatctcgaatgactgg

SEQ ID NO: 15604 - DNA, 25 bp, probe
atctaattcatctcgaatgactggc

SEQ ID NO: 15605 - DNA, 25 bp, probe
aacaaagaaagttggtacaaagtag

SEQ ID NO: 15606 - DNA, 25 bp, probe
ctaattcatctcgaatgactggctt

SEQ ID NO: 15607 - DNA, 25 bp, probe
tcttctgcaaagttactcacatcta

SEQ ID NO: 15608 - DNA, 25 bp, probe
acatctaattcatctcgaatgactg

SEQ ID NO: 15609 - DNA, 25 bp, probe
cacatctaattcatctcgaatgact

SEQ ID NO: 15610 - DNA, 25 bp, probe
tcacatctaattcatctcgaatgac

SEQ ID NO: 15611 - DNA, 25 bp, probe
ctcttctgcaaagttactcacatct

SEQ ID NO: 15612 - DNA, 25 bp, probe
catttctgtgaactcttctgcaaag

SEQ ID NO: 15613 - DNA, 25 bp, probe
cttctgcaaagttactcacatctaa

SEQ ID NO: 15614 - DNA, 25 bp, probe
caaagaaagttggtacaaagtagaa

SEQ ID NO: 15615 - DNA, 25 bp, probe
tgcaaagttactcacatctaattca

SEQ ID NO: 15616 - DNA, 25 bp, probe
ctcacatctaattcatctcgaatga

SEQ ID NO: 15617 - DNA, 25 bp, probe
tctgcaaagttactcacatctaatt

SEQ ID NO: 15618 - DNA, 25 bp, probe
ttctgcaaagttactcacatctaat

SEQ ID NO: 15619 - DNA, 25 bp, probe
tctaattcatctcgaatgactggct

SEQ ID NO: 15620 - DNA, 25 bp, probe
gaaagttggtacaaagtagaaatca

SEQ ID NO: 15621 - DNA, 25 bp, probe
aaacaaagaaagttggtacaaagta

SEQ ID NO: 15622 - DNA, 25 bp, probe
gatgagactatcgctgttgaatctc

SEQ ID NO: 15623 - DNA, 25 bp, probe
gcggctaaatcatcccaatttattt

SEQ ID NO: 15624 - DNA, 25 bp, probe
actcttctgcaaagttactcacatc

SEQ ID NO: 15625 - DNA, 25 bp, probe
ctgcaaagttactcacatctaattc

SEQ ID NO: 15626 - DNA, 25 bp, probe
ctggttgttgtattgctgttcattg

SEQ ID NO: 15627 - DNA, 25 bp, probe
gtggtagataatacttctgagttgg

SEQ ID NO: 15628 - DNA, 25 bp, probe
ggtggtagataatacttctgagttg

SEQ ID NO: 15629 - DNA, 25 bp, probe
cctggttgttgtattgctgttcatt

SEQ ID NO: 15630 - DNA, 25 bp, probe
aatattcttctgacttaggattggc

SEQ ID NO: 15631 - DNA, 25 bp, probe
ttgttgtattgctgttcattgcgtt

SEQ ID NO: 15632 - DNA, 25 bp, probe
tggttgttgtattgctgttcattgc

SEQ ID NO: 15633 - DNA, 25 bp, probe
aaattaagtttcgtgaagaacctgg

SEQ ID NO: 15634 - DNA, 25 bp, probe
ctaagcaaggatttgaagttgtgaa

SEQ ID NO: 15635 - DNA, 25 bp, probe
tggtagacaacagggtttaataaga

SEQ ID NO: 15636 - DNA, 25 bp, probe
taagcaaggatttgaagttgtgaaa

SEQ ID NO: 15637 - DNA, 25 bp, probe
catttggtagacaacagggtttaat

SEQ ID NO: 15638 - DNA, 25 bp, probe
acatttggtagacaacagggtttaa

SEQ ID NO: 15639 - DNA, 25 bp, probe
agggtggtagataatacttctgagt

SEQ ID NO: 15640 - DNA, 25 bp, probe
aagggtggtagataatacttctgag

SEQ ID NO: 15641 - DNA, 25 bp, probe
gattgagcatttagtcacatttggt

SEQ ID NO: 15642 - DNA, 25 bp, probe
tgagcatttagtcacatttggtaga

SEQ ID NO: 15643 - DNA, 25 bp, probe
agattgagcatttagtcacatttgg

SEQ ID NO: 15644 - DNA, 25 bp, probe
ttgagcatttagtcacatttggtag

SEQ ID NO: 15645 - DNA, 25 bp, probe
aagcaaggatttgaagttgtgaaac

SEQ ID NO: 15646 - DNA, 25 bp, probe
tggtagataatacttctgagttggg

SEQ ID NO: 15647 - DNA, 25 bp, probe
gggtggtagataatacttctgagtt

SEQ ID NO: 15648 - DNA, 25 bp, probe
cacatttggtagacaacagggttta

SEQ ID NO: 15649 - DNA, 25 bp, probe
aattaagtttcgtgaagaacctggt

SEQ ID NO: 15650 - DNA, 25 bp, probe
tgttgtattgctgttcattgcgttg

SEQ ID NO: 15651 - DNA, 25 bp, probe
gttgttgtattgctgttcattgcgt

SEQ ID NO: 15652 - DNA, 25 bp, probe
acctggttgttgtattgctgttcat

SEQ ID NO: 15653 - DNA, 25 bp, probe
attgagcatttagtcacatttggta

SEQ ID NO: 15654 - DNA, 25 bp, probe
ttggtagacaacagggtttaataag

SEQ ID NO: 15655 - DNA, 25 bp, probe
gaagaacctggttgttgtattgctg

SEQ ID NO: 15656 - DNA, 25 bp, probe
cgtgaagaacctggttgttgtattg

SEQ ID NO: 15657 - DNA, 25 bp, probe
ggtattacttaaataggaagggtgg

SEQ ID NO: 15658 - DNA, 25 bp, probe
ttacttaaataggaagggtggtaga

SEQ ID NO: 15659 - DNA, 25 bp, probe
ggtagacaacagggtttaataagat

SEQ ID NO: 15660 - DNA, 25 bp, probe
gcatttagtcacatttggtagacaa

SEQ ID NO: 15661 - DNA, 25 bp, probe
gagcatttagtcacatttggtagac

SEQ ID NO: 15662 - DNA, 25 bp, probe
tcgtgaagaacctggttgttgtatt

SEQ ID NO: 15663 - DNA, 25 bp, probe
ttcgtgaagaacctggttgttgtat

SEQ ID NO: 15664 - DNA, 25 bp, probe
agcatttagtcacatttggtagaca

SEQ ID NO: 15665 - DNA, 25 bp, probe
gcaaggatttgaagttgtgaaacat

SEQ ID NO: 15666 - DNA, 25 bp, probe
aataggaagggtggtagataatact

SEQ ID NO: 15667 - DNA, 25 bp, probe
tttggtagacaacagggtttaataa

SEQ ID NO: 15668 - DNA, 25 bp, probe
acttaaataggaagggtggtagata

SEQ ID NO: 15669 - DNA, 25 bp, probe
tacttaaataggaagggtggtagat

SEQ ID NO: 15670 - DNA, 25 bp, probe
cttctatctaccaatatccttctcc

SEQ ID NO: 15671 - DNA, 25 bp, probe
ccttctatctaccaatatccttctc

SEQ ID NO: 15672 - DNA, 25 bp, probe
tctatctaccaatatccttctccca

SEQ ID NO: 15673 - DNA, 25 bp, probe
agtcccttctatctaccaatatcct

SEQ ID NO: 15674 - DNA, 25 bp, probe
ctatctaccaatatccttctcccag

SEQ ID NO: 15675 - DNA, 25 bp, probe
cccaagtcccttctatctaccaata

SEQ ID NO: 15676 - DNA, 25 bp, probe
gtcccttctatctaccaatatcctt

SEQ ID NO: 15677 - DNA, 25 bp, probe
ccaagtcccttctatctaccaatat

SEQ ID NO: 15678 - DNA, 25 bp, probe
ttctatctaccaatatccttctccc

SEQ ID NO: 15679 - DNA, 25 bp, probe
cccttctatctaccaatatccttct

SEQ ID NO: 15680 - DNA, 25 bp, probe
tcccttctatctaccaatatccttc

SEQ ID NO: 15681 - DNA, 25 bp, probe
aagtcccttctatctaccaatatcc

SEQ ID NO: 15682 - DNA, 25 bp, probe
taggaacacttacccaggtagatat

SEQ ID NO: 15683 - DNA, 25 bp, probe
ctaggaacacttacccaggtagata

SEQ ID NO: 15684 - DNA, 25 bp, probe
caagtcccttctatctaccaatatc

SEQ ID NO: 15685 - DNA, 25 bp, probe
tatctaccaatatccttctcccagg

SEQ ID NO: 15686 - DNA, 25 bp, probe
acccaagtcccttctatctaccaat

SEQ ID NO: 15687 - DNA, 25 bp, probe
aacccaagtcccttctatctaccaa

SEQ ID NO: 15688 - DNA, 25 bp, probe
aggaacacttacccaggtagatatc

SEQ ID NO: 15689 - DNA, 25 bp, probe
caacccaagtcccttctatctacca

SEQ ID NO: 15690 - DNA, 25 bp, probe
gctaggaacacttacccaggtagat

SEQ ID NO: 15691 - DNA, 25 bp, probe
gagctaggaacacttacccaggtag

SEQ ID NO: 15692 - DNA, 25 bp, probe
gcaacccaagtcccttctatctacc

SEQ ID NO: 15693 - DNA, 25 bp, probe
agctaggaacacttacccaggtaga

SEQ ID NO: 15694 - DNA, 25 bp, probe
ctaccaatatccttctcccaggaag

SEQ ID NO: 15695 - DNA, 25 bp, probe
atctaccaatatccttctcccagga

SEQ ID NO: 15696 - DNA, 25 bp, probe
gaacacttacccaggtagatatctc

SEQ ID NO: 15697 - DNA, 25 bp, probe
tctaccaatatccttctcccaggaa

SEQ ID NO: 15698 - DNA, 25 bp, probe
aacacttacccaggtagatatctcc

SEQ ID NO: 15699 - DNA, 25 bp, probe
ggaacacttacccaggtagatatct

SEQ ID NO: 15700 - DNA, 25 bp, probe
cttacccaggtagatatctccgaag

SEQ ID NO: 15701 - DNA, 25 bp, probe
ggagctaggaacacttacccaggta

SEQ ID NO: 15702 - DNA, 25 bp, probe
acttacccaggtagatatctccgaa

SEQ ID NO: 15703 - DNA, 25 bp, probe
ttacccaggtagatatctccgaagg

SEQ ID NO: 15704 - DNA, 25 bp, probe
cacttacccaggtagatatctccga

SEQ ID NO: 15705 - DNA, 25 bp, probe
acacttacccaggtagatatctccg

SEQ ID NO: 15706 - DNA, 25 bp, probe
taccaatatccttctcccaggaagc

SEQ ID NO: 15707 - DNA, 25 bp, probe
tggagccacattctgacttcagatc

SEQ ID NO: 15708 - DNA, 25 bp, probe
ctggagccacattctgacttcagat

SEQ ID NO: 15709 - DNA, 25 bp, probe
aaatcctggggtctttcctcctctt

SEQ ID NO: 15710 - DNA, 25 bp, probe
cattctgacttcagatccccaaatc

SEQ ID NO: 15711 - DNA, 25 bp, probe
acattctgacttcagatccccaaat

SEQ ID NO: 15712 - DNA, 25 bp, probe
tacccaggtagatatctccgaagga

SEQ ID NO: 15713 - DNA, 25 bp, probe
ggagccacattctgacttcagatcc

SEQ ID NO: 15714 - DNA, 25 bp, probe
gaccagatgtccactgagatagaag

SEQ ID NO: 15715 - DNA, 25 bp, probe
agaccagatgtccactgagatagaa

SEQ ID NO: 15716 - DNA, 25 bp, probe
cagaccagatgtccactgagataga

SEQ ID NO: 15717 - DNA, 25 bp, probe
acagaccagatgtccactgagatag

SEQ ID NO: 15718 - DNA, 25 bp, probe
cacagaccagatgtccactgagata

SEQ ID NO: 15719 - DNA, 25 bp, probe
accagatgtccactgagatagaagc

SEQ ID NO: 15720 - DNA, 25 bp, probe
ccagatgtccactgagatagaagcc

SEQ ID NO: 15721 - DNA, 25 bp, probe
cattggtcaggatagaggcaaaatc

SEQ ID NO: 15722 - DNA, 25 bp, probe
caaaatccttcttctccaattcggg

SEQ ID NO: 15723 - DNA, 25 bp, probe
gatgtccactgagatagaagccctg

SEQ ID NO: 15724 - DNA, 25 bp, probe
gatagaggcaaaatccttcttctcc

SEQ ID NO: 15725 - DNA, 25 bp, probe
agatgtccactgagatagaagccct

SEQ ID NO: 15726 - DNA, 25 bp, probe
atagaggcaaaatccttcttctcca

SEQ ID NO: 15727 - DNA, 25 bp, probe
aggcaaaatccttcttctccaattc

SEQ ID NO: 15728 - DNA, 25 bp, probe
gaggcaaaatccttcttctccaatt

SEQ ID NO: 15729 - DNA, 25 bp, probe
gcaaaatccttcttctccaattcgg

SEQ ID NO: 15730 - DNA, 25 bp, probe
ggcaaaatccttcttctccaattcg

SEQ ID NO: 15731 - DNA, 25 bp, probe
tagaggcaaaatccttcttctccaa

SEQ ID NO: 15732 - DNA, 25 bp, probe
cttcatgtagttcttggcctgtgtg

SEQ ID NO: 15733 - DNA, 25 bp, probe
agaggcaaaatccttcttctccaat

SEQ ID NO: 15734 - DNA, 25 bp, probe
aaaatccttcttctccaattcgggg

SEQ ID NO: 15735 - DNA, 25 bp, probe
cagatgtccactgagatagaagccc

SEQ ID NO: 15736 - DNA, 25 bp, probe
gcattggtcaggatagaggcaaaat

SEQ ID NO: 15737 - DNA, 25 bp, probe
gtcaccttcatgatctccttcagct

SEQ ID NO: 15738 - DNA, 25 bp, probe
ccttcatgtagttcttggcctgtgt

SEQ ID NO: 15739 - DNA, 25 bp, probe
ggatagaggcaaaatccttcttctc

SEQ ID NO: 15740 - DNA, 25 bp, probe
ttcatgtagttcttggcctgtgtgg

SEQ ID NO: 15741 - DNA, 25 bp, probe
aaatccttcttctccaattcgggga

SEQ ID NO: 15742 - DNA, 25 bp, probe
ccgtcaccttcatgatctccttcag

SEQ ID NO: 15743 - DNA, 25 bp, probe
attggtcaggatagaggcaaaatcc

SEQ ID NO: 15744 - DNA, 25 bp, probe
tgcattggtcaggatagaggcaaaa

SEQ ID NO: 15745 - DNA, 25 bp, probe
cttgcattggtcaggatagaggcaa

SEQ ID NO: 15746 - DNA, 25 bp, probe
ttgcattggtcaggatagaggcaaa

SEQ ID NO: 15747 - DNA, 25 bp, probe
aatccttcttctccaattcggggag

SEQ ID NO: 15748 - DNA, 25 bp, probe
ttgtgttacatcatctcattaaggc

SEQ ID NO: 15749 - DNA, 25 bp, probe
tgttacatcatctcattaaggccat

SEQ ID NO: 15750 - DNA, 25 bp, probe
tacatcatctcattaaggccattcc

SEQ ID NO: 15751 - DNA, 25 bp, probe
gttacatcatctcattaaggccatt

SEQ ID NO: 15752 - DNA, 25 bp, probe
gtgttacatcatctcattaaggcca

SEQ ID NO: 15753 - DNA, 25 bp, probe
ttacatcatctcattaaggccattc

SEQ ID NO: 15754 - DNA, 25 bp, probe
tgtgttacatcatctcattaaggcc

SEQ ID NO: 15755 - DNA, 25 bp, probe
cattcccactcttttacagaatcgt

SEQ ID NO: 15756 - DNA, 25 bp, probe
atcatctcattaaggccattcccac

SEQ ID NO: 15757 - DNA, 25 bp, probe
catcatctcattaaggccattccca

SEQ ID NO: 15758 - DNA, 25 bp, probe
acatcatctcattaaggccattccc

SEQ ID NO: 15759 - DNA, 25 bp, probe
ccattcccactcttttacagaatcg

SEQ ID NO: 15760 - DNA, 25 bp, probe
ctcattaaggccattcccactcttt

SEQ ID NO: 15761 - DNA, 25 bp, probe
gccattcccactcttttacagaatc

SEQ ID NO: 15762 - DNA, 25 bp, probe
atctcattaaggccattcccactct

SEQ ID NO: 15763 - DNA, 25 bp, probe
catctcattaaggccattcccactc

SEQ ID NO: 15764 - DNA, 25 bp, probe
tctcattaaggccattcccactctt

SEQ ID NO: 15765 - DNA, 25 bp, probe
tcatctcattaaggccattcccact

SEQ ID NO: 15766 - DNA, 25 bp, probe
attaaggccattcccactcttttac

SEQ ID NO: 15767 - DNA, 25 bp, probe
cattaaggccattcccactctttta

SEQ ID NO: 15768 - DNA, 25 bp, probe
ttaaggccattcccactcttttaca

SEQ ID NO: 15769 - DNA, 25 bp, probe
taaggccattcccactcttttacag

SEQ ID NO: 15770 - DNA, 25 bp, probe
tcattaaggccattcccactctttt

SEQ ID NO: 15771 - DNA, 25 bp, probe
ggccattcccactcttttacagaat

SEQ ID NO: 15772 - DNA, 25 bp, probe
aggccattcccactcttttacagaa

SEQ ID NO: 15773 - DNA, 25 bp, probe
aaggccattcccactcttttacaga

SEQ ID NO: 15774 - DNA, 25 bp, probe
atcgctattgtctgtaatgtctgat

SEQ ID NO: 15775 - DNA, 25 bp, probe
tcgctattgtctgtaatgtctgata

SEQ ID NO: 15776 - DNA, 25 bp, probe
cgctattgtctgtaatgtctgataa

SEQ ID NO: 15777 - DNA, 25 bp, probe
catcgctattgtctgtaatgtctga

SEQ ID NO: 15778 - DNA, 25 bp, probe
aagtcattgataagaagagagccaa

SEQ ID NO: 15779 - DNA, 25 bp, probe
ctatatgtgtgtgtgtgtgtgtgtt

SEQ ID NO: 15780 - DNA, 25 bp, probe
atgttgtacctatatgtgtgtgtgt

SEQ ID NO: 15781 - DNA, 25 bp, probe
tacctatatgtgtgtgtgtgtgtgt

SEQ ID NO: 15782 - DNA, 25 bp, probe
ttgtacctatatgtgtgtgtgtgtg

SEQ ID NO: 15783 - DNA, 25 bp, probe
gttgtacctatatgtgtgtgtgtgt

SEQ ID NO: 15784 - DNA, 25 bp, probe
tgttgtacctatatgtgtgtgtgtg

SEQ ID NO: 15785 - DNA, 25 bp, probe
aatgttgtacctatatgtgtgtgtg

SEQ ID NO: 15786 - DNA, 25 bp, probe
gtacctatatgtgtgtgtgtgtgtg

SEQ ID NO: 15787 - DNA, 25 bp, probe
gcatcgctattgtctgtaatgtctg

SEQ ID NO: 15788 - DNA, 25 bp, probe
tgtacctatatgtgtgtgtgtgtgt

SEQ ID NO: 15789 - DNA, 25 bp, probe
gctattgtctgtaatgtctgataac

SEQ ID NO: 15790 - DNA, 25 bp, probe
cctaatgttgtacctatatgtgtgt

SEQ ID NO: 15791 - DNA, 25 bp, probe
tcctaatgttgtacctatatgtgtg

SEQ ID NO: 15792 - DNA, 25 bp, probe
caaggcatcgctattgtctgtaatg

SEQ ID NO: 15793 - DNA, 25 bp, probe
aaggcatcgctattgtctgtaatgt

SEQ ID NO: 15794 - DNA, 25 bp, probe
taatgttgtacctatatgtgtgtgt

SEQ ID NO: 15795 - DNA, 25 bp, probe
aaagtcattgataagaagagagcca

SEQ ID NO: 15796 - DNA, 25 bp, probe
tatatgtgtgtgtgtgtgtgtgttt

SEQ ID NO: 15797 - DNA, 25 bp, probe
cctatatgtgtgtgtgtgtgtgtgt

SEQ ID NO: 15798 - DNA, 25 bp, probe
acctatatgtgtgtgtgtgtgtgtg

SEQ ID NO: 15799 - DNA, 25 bp, probe
ttgtcttccttaataattggacctt

SEQ ID NO: 15800 - DNA, 25 bp, probe
agtcattgataagaagagagccaaa

SEQ ID NO: 15801 - DNA, 25 bp, probe
ctaatgttgtacctatatgtgtgtg

SEQ ID NO: 15802 - DNA, 25 bp, probe
ggcatcgctattgtctgtaatgtct

SEQ ID NO: 15803 - DNA, 25 bp, probe
aggcatcgctattgtctgtaatgtc

SEQ ID NO: 15804 - DNA, 25 bp, probe
attgtcttccttaataattggacct

SEQ ID NO: 15805 - DNA, 25 bp, probe
cattgtcttccttaataattggacc

SEQ ID NO: 15806 - DNA, 25 bp, probe
ttcctaatgttgtacctatatgtgt

SEQ ID NO: 15807 - DNA, 25 bp, probe
tgtgtgtgtgtttgtgtggtatatg

SEQ ID NO: 15808 - DNA, 25 bp, probe
gtgtgtgtgtgtttgtgtggtatat

SEQ ID NO: 15809 - DNA, 25 bp, probe
ccattgtcttccttaataattggac

SEQ ID NO: 15810 - DNA, 25 bp, probe
ccaaggcatcgctattgtctgtaat

SEQ ID NO: 15811 - DNA, 25 bp, probe
atatgtgtgtgtgtgtgtgtgtttg

SEQ ID NO: 15812 - DNA, 25 bp, probe
tgatgcacaagatctatgagaagaa

SEQ ID NO: 15813 - DNA, 25 bp, probe
ctgatgcacaagatctatgagaaga

SEQ ID NO: 15814 - DNA, 25 bp, probe
ttccattgtcttccttaataattgg

SEQ ID NO: 15815 - DNA, 25 bp, probe
gatgcacaagatctatgagaagaag

SEQ ID NO: 15816 - DNA, 25 bp, probe
atgcacaagatctatgagaagaagc

SEQ ID NO: 15817 - DNA, 25 bp, probe
cctgatgcacaagatctatgagaag

SEQ ID NO: 15818 - DNA, 25 bp, probe
tcccacctattaactgttcacaaat

SEQ ID NO: 15819 - DNA, 25 bp, probe
cccacctattaactgttcacaaatt

SEQ ID NO: 15820 - DNA, 25 bp, probe
ctcccacctattaactgttcacaaa

SEQ ID NO: 15821 - DNA, 25 bp, probe
ccacctattaactgttcacaaattc

SEQ ID NO: 15822 - DNA, 25 bp, probe
ttaactgttcacaaattctctgtcc

SEQ ID NO: 15823 - DNA, 25 bp, probe
ttcacaaattctctgtcccttcaaa

SEQ ID NO: 15824 - DNA, 25 bp, probe
taactgttcacaaattctctgtccc

SEQ ID NO: 15825 - DNA, 25 bp, probe
tcacaaattctctgtcccttcaaac

SEQ ID NO: 15826 - DNA, 25 bp, probe
gttcacaaattctctgtcccttcaa

SEQ ID NO: 15827 - DNA, 25 bp, probe
cctcccacctattaactgttcacaa

SEQ ID NO: 15828 - DNA, 25 bp, probe
gacctcccacctattaactgttcac

SEQ ID NO: 15829 - DNA, 25 bp, probe
ctgttcacaaattctctgtcccttc

SEQ ID NO: 15830 - DNA, 25 bp, probe
cacctattaactgttcacaaattct

SEQ ID NO: 15831 - DNA, 25 bp, probe
acctattaactgttcacaaattctc

SEQ ID NO: 15832 - DNA, 25 bp, probe
attaactgttcacaaattctctgtc

SEQ ID NO: 15833 - DNA, 25 bp, probe
tgttcacaaattctctgtcccttca

SEQ ID NO: 15834 - DNA, 25 bp, probe
actgttcacaaattctctgtccctt

SEQ ID NO: 15835 - DNA, 25 bp, probe
aactgttcacaaattctctgtccct

SEQ ID NO: 15836 - DNA, 25 bp, probe
cacaaattctctgtcccttcaaacg

SEQ ID NO: 15837 - DNA, 25 bp, probe
cctattaactgttcacaaattctct

SEQ ID NO: 15838 - DNA, 25 bp, probe
acctcccacctattaactgttcaca

SEQ ID NO: 15839 - DNA, 25 bp, probe
tacatggaacgcatgaactacattc

SEQ ID NO: 15840 - DNA, 25 bp, probe
ctacatggaacgcatgaactacatt

SEQ ID NO: 15841 - DNA, 25 bp, probe
ggacctcccacctattaactgttca

SEQ ID NO: 15842 - DNA, 25 bp, probe
tattaactgttcacaaattctctgt

SEQ ID NO: 15843 - DNA, 25 bp, probe
ctattaactgttcacaaattctctg

SEQ ID NO: 15844 - DNA, 25 bp, probe
catggaacgcatgaactacattcac

SEQ ID NO: 15845 - DNA, 25 bp, probe
cctacatggaacgcatgaactacat

SEQ ID NO: 15846 - DNA, 25 bp, probe
acatggaacgcatgaactacattca

SEQ ID NO: 15847 - DNA, 25 bp, probe
atggaacgcatgaactacattcacc

SEQ ID NO: 15848 - DNA, 25 bp, probe
acaaattctctgtcccttcaaacgc

SEQ ID NO: 15849 - DNA, 25 bp, probe
cggacctcccacctattaactgttc

SEQ ID NO: 15850 - DNA, 25 bp, probe
caaattctctgtcccttcaaacgcc

SEQ ID NO: 15851 - DNA, 25 bp, probe
aaattctctgtcccttcaaacgcct

SEQ ID NO: 15852 - DNA, 25 bp, probe
atcaaggacgatgagtacaacccct

SEQ ID NO: 15853 - DNA, 25 bp, probe
atgagctcccatctctccacactat

SEQ ID NO: 15854 - DNA, 25 bp, probe
catcaaggacgatgagtacaacccc

SEQ ID NO: 15855 - DNA, 25 bp, probe
tgagctcccatctctccacactatg

SEQ ID NO: 15856 - DNA, 25 bp, probe
catgagctcccatctctccacacta

SEQ ID NO: 15857 - DNA, 25 bp, probe
gcagagttgtcatcttggagactaa

SEQ ID NO: 15858 - DNA, 25 bp, probe
atatttgttccctgactctcatcca

SEQ ID NO: 15859 - DNA, 25 bp, probe
agagttgtcatcttggagactaaag

SEQ ID NO: 15860 - DNA, 25 bp, probe
cagagttgtcatcttggagactaaa

SEQ ID NO: 15861 - DNA, 25 bp, probe
tatttgttccctgactctcatccac

SEQ ID NO: 15862 - DNA, 25 bp, probe
aatatttgttccctgactctcatcc

SEQ ID NO: 15863 - DNA, 25 bp, probe
aagaatatttgttccctgactctca

SEQ ID NO: 15864 - DNA, 25 bp, probe
agaatatttgttccctgactctcat

SEQ ID NO: 15865 - DNA, 25 bp, probe
gaatatttgttccctgactctcatc

SEQ ID NO: 15866 - DNA, 25 bp, probe
aaagaatatttgttccctgactctc

SEQ ID NO: 15867 - DNA, 25 bp, probe
gagttgtcatcttggagactaaaga

SEQ ID NO: 15868 - DNA, 25 bp, probe
ggcagagttgtcatcttggagacta

SEQ ID NO: 15869 - DNA, 25 bp, probe
actaaagaatatttgttccctgact

SEQ ID NO: 15870 - DNA, 25 bp, probe
agttgtcatcttggagactaaagaa

SEQ ID NO: 15871 - DNA, 25 bp, probe
gactaaagaatatttgttccctgac

SEQ ID NO: 15872 - DNA, 25 bp, probe
agactaaagaatatttgttccctga

SEQ ID NO: 15873 - DNA, 25 bp, probe
taaagaatatttgttccctgactct

SEQ ID NO: 15874 - DNA, 25 bp, probe
gttgtcatcttggagactaaagaat

SEQ ID NO: 15875 - DNA, 25 bp, probe
tggagactaaagaatatttgttccc

SEQ ID NO: 15876 - DNA, 25 bp, probe
ctaaagaatatttgttccctgactc

SEQ ID NO: 15877 - DNA, 25 bp, probe
gagactaaagaatatttgttccctg

SEQ ID NO: 15878 - DNA, 25 bp, probe
ggagactaaagaatatttgttccct

SEQ ID NO: 15879 - DNA, 25 bp, probe
atttgttccctgactctcatccaca

SEQ ID NO: 15880 - DNA, 25 bp, probe
ttgtcatcttggagactaaagaata

SEQ ID NO: 15881 - DNA, 25 bp, probe
tgtcatcttggagactaaagaatat

SEQ ID NO: 15882 - DNA, 25 bp, probe
ttggagactaaagaatatttgttcc

SEQ ID NO: 15883 - DNA, 25 bp, probe
cttggagactaaagaatatttgttc

SEQ ID NO: 15884 - DNA, 25 bp, probe
tttgttccctgactctcatccacac

SEQ ID NO: 15885 - DNA, 25 bp, probe
gtcatcttggagactaaagaatatt

SEQ ID NO: 15886 - DNA, 25 bp, probe
ctatatgagctgatgcttcggtgct

SEQ ID NO: 15887 - DNA, 25 bp, probe
tcttggagactaaagaatatttgtt

SEQ ID NO: 15888 - DNA, 25 bp, probe
ttgttccctgactctcatccacact

SEQ ID NO: 15889 - DNA, 25 bp, probe
atcttggagactaaagaatatttgt

SEQ ID NO: 15890 - DNA, 25 bp, probe
catcttggagactaaagaatatttg

SEQ ID NO: 15891 - DNA, 25 bp, probe
tcatcttggagactaaagaatattt

SEQ ID NO: 15892 - DNA, 25 bp, probe
cagggcctatatgagctgatgcttc

SEQ ID NO: 15893 - DNA, 25 bp, probe
gattaattcttcctctaccagcctt

SEQ ID NO: 15894 - DNA, 25 bp, probe
ggtctggattattgtcataagaaga

SEQ ID NO: 15895 - DNA, 25 bp, probe
aagtccagagagaaagatgaatgtt

SEQ ID NO: 15896 - DNA, 25 bp, probe
agtccagagagaaagatgaatgtta

SEQ ID NO: 15897 - DNA, 25 bp, probe
taagtccagagagaaagatgaatgt

SEQ ID NO: 15898 - DNA, 25 bp, probe
tgaatatatggaccatgatctgatg

SEQ ID NO: 15899 - DNA, 25 bp, probe
atggagggtctggattattgtcata

SEQ ID NO: 15900 - DNA, 25 bp, probe
tgtgaatttatggaaaggttgtagg

SEQ ID NO: 15901 - DNA, 25 bp, probe
gagggtctggattattgtcataaga

SEQ ID NO: 15902 - DNA, 25 bp, probe
ggagggtctggattattgtcataag

SEQ ID NO: 15903 - DNA, 25 bp, probe
gtgaatttatggaaaggttgtagga

SEQ ID NO: 15904 - DNA, 25 bp, probe
agggtctggattattgtcataagaa

SEQ ID NO: 15905 - DNA, 25 bp, probe
tggagggtctggattattgtcataa

SEQ ID NO: 15906 - DNA, 25 bp, probe
gggtctggattattgtcataagaag

SEQ ID NO: 15907 - DNA, 25 bp, probe
gtccagagagaaagatgaatgttat

SEQ ID NO: 15908 - DNA, 25 bp, probe
atggaaaggttgtaggaataagttt

SEQ ID NO: 15909 - DNA, 25 bp, probe
ttaagtccagagagaaagatgaatg

SEQ ID NO: 15910 - DNA, 25 bp, probe
tgaatttatggaaaggttgtaggaa

SEQ ID NO: 15911 - DNA, 25 bp, probe
ctactggaatcaggcttggttcatt

SEQ ID NO: 15912 - DNA, 25 bp, probe
ggattaattcttcctctaccagcct

SEQ ID NO: 15913 - DNA, 25 bp, probe
ttgaatatatggaccatgatctgat

SEQ ID NO: 15914 - DNA, 25 bp, probe
atgatctgatgggactactggaatc

SEQ ID NO: 15915 - DNA, 25 bp, probe
attaattcttcctctaccagccttt

SEQ ID NO: 15916 - DNA, 25 bp, probe
ctggattattgtcataagaagaact

SEQ ID NO: 15917 - DNA, 25 bp, probe
tctggattattgtcataagaagaac

SEQ ID NO: 15918 - DNA, 25 bp, probe
gtctggattattgtcataagaagaa

SEQ ID NO: 15919 - DNA, 25 bp, probe
tccagagagaaagatgaatgttatt

SEQ ID NO: 15920 - DNA, 25 bp, probe
tatggaaaggttgtaggaataagtt

SEQ ID NO: 15921 - DNA, 25 bp, probe
ttgtgaatttatggaaaggttgtag

SEQ ID NO: 15922 - DNA, 25 bp, probe
catgatctgatgggactactggaat

SEQ ID NO: 15923 - DNA, 25 bp, probe
ttatggaaaggttgtaggaataagt

SEQ ID NO: 15924 - DNA, 25 bp, probe
attaagtccagagagaaagatgaat

SEQ ID NO: 15925 - DNA, 25 bp, probe
tggattattgtcataagaagaactt

SEQ ID NO: 15926 - DNA, 25 bp, probe
gaatttatggaaaggttgtaggaat

SEQ ID NO: 15927 - DNA, 25 bp, probe
aattgtgaatttatggaaaggttgt

SEQ ID NO: 15928 - DNA, 25 bp, probe
catggagggtctggattattgtcat

SEQ ID NO: 15929 - DNA, 25 bp, probe
gtgtttgaatatatggaccatgatc

SEQ ID NO: 15930 - DNA, 25 bp, probe
attgtgaatttatggaaaggttgta

SEQ ID NO: 15931 - DNA, 25 bp, probe
actactggaatcaggcttggttcat

SEQ ID NO: 15932 - DNA, 25 bp, probe
tgtttgaatatatggaccatgatct

SEQ ID NO: 15933 - DNA, 25 bp, probe
tactggaatcaggcttggttcattt

SEQ ID NO: 15934 - DNA, 25 bp, probe
aattattctcattcttaggtgcatt

SEQ ID NO: 15935 - DNA, 25 bp, probe
tattaagtccagagagaaagatgaa

SEQ ID NO: 15936 - DNA, 25 bp, probe
ttattaagtccagagagaaagatga

SEQ ID NO: 15937 - DNA, 25 bp, probe
cttcattcaaatccagtttctcagg

SEQ ID NO: 15938 - DNA, 25 bp, probe
gtcttcattcaaatccagtttctca

SEQ ID NO: 15939 - DNA, 25 bp, probe
tgtcttcattcaaatccagtttctc

SEQ ID NO: 15940 - DNA, 25 bp, probe
ttcattcaaatccagtttctcaggt

SEQ ID NO: 15941 - DNA, 25 bp, probe
tcttcattcaaatccagtttctcag

SEQ ID NO: 15942 - DNA, 25 bp, probe
acagaaagtagaggttggtgaaatt

SEQ ID NO: 15943 - DNA, 25 bp, probe
aacagaaagtagaggttggtgaaat

SEQ ID NO: 15944 - DNA, 25 bp, probe
atgaacccatccactgatatttgtc

SEQ ID NO: 15945 - DNA, 25 bp, probe
tcattcaaatccagtttctcaggtg

SEQ ID NO: 15946 - DNA, 25 bp, probe
aaacttaggctgtggagaaatgatg

SEQ ID NO: 15947 - DNA, 25 bp, probe
taggtgttgtgcgaggaattaatga

SEQ ID NO: 15948 - DNA, 25 bp, probe
gtaggtgttgtgcgaggaattaatg

SEQ ID NO: 15949 - DNA, 25 bp, probe
atgtcttcattcaaatccagtttct

SEQ ID NO: 15950 - DNA, 25 bp, probe
agactggctaaagtaacaaagaact

SEQ ID NO: 15951 - DNA, 25 bp, probe
gagactggctaaagtaacaaagaac

SEQ ID NO: 15952 - DNA, 25 bp, probe
tgagactggctaaagtaacaaagaa

SEQ ID NO: 15953 - DNA, 25 bp, probe
aatttggtgagactggctaaagtaa

SEQ ID NO: 15954 - DNA, 25 bp, probe
ctgtggagaaatgatgctattgctt

SEQ ID NO: 15955 - DNA, 25 bp, probe
gtgagactggctaaagtaacaaaga

SEQ ID NO: 15956 - DNA, 25 bp, probe
atttggtgagactggctaaagtaac

SEQ ID NO: 15957 - DNA, 25 bp, probe
taggctgtggagaaatgatgctatt

SEQ ID NO: 15958 - DNA, 25 bp, probe
ttaggctgtggagaaatgatgctat

SEQ ID NO: 15959 - DNA, 25 bp, probe
tgtggagaaatgatgctattgcttc

SEQ ID NO: 15960 - DNA, 25 bp, probe
cattcaaatccagtttctcaggtga

SEQ ID NO: 15961 - DNA, 25 bp, probe
gactggctaaagtaacaaagaacta

SEQ ID NO: 15962 - DNA, 25 bp, probe
aatgatgctattgcttcatacacat

SEQ ID NO: 15963 - DNA, 25 bp, probe
ggtgagactggctaaagtaacaaag

SEQ ID NO: 15964 - DNA, 25 bp, probe
atgatgctattgcttcatacacatg

SEQ ID NO: 15965 - DNA, 25 bp, probe
tcaagtacactgaagaatgagttca

SEQ ID NO: 15966 - DNA, 25 bp, probe
tgtgcgaggaattaatgaaatagtg

SEQ ID NO: 15967 - DNA, 25 bp, probe
gtggagaaatgatgctattgcttca

SEQ ID NO: 15968 - DNA, 25 bp, probe
gtgcgaggaattaatgaaatagtga

SEQ ID NO: 15969 - DNA, 25 bp, probe
gtgttgtgcgaggaattaatgaaat

SEQ ID NO: 15970 - DNA, 25 bp, probe
actggctaaagtaacaaagaactag

SEQ ID NO: 15971 - DNA, 25 bp, probe
tgttgtgcgaggaattaatgaaata

SEQ ID NO: 15972 - DNA, 25 bp, probe
catgaacccatccactgatatttgt

SEQ ID NO: 15973 - DNA, 25 bp, probe
catgtcttcattcaaatccagtttc

SEQ ID NO: 15974 - DNA, 25 bp, probe
aggtgttgtgcgaggaattaatgaa

SEQ ID NO: 15975 - DNA, 25 bp, probe
cttaggctgtggagaaatgatgcta

SEQ ID NO: 15976 - DNA, 25 bp, probe
tgcgaggaattaatgaaatagtgag

SEQ ID NO: 15977 - DNA, 25 bp, probe
ttgtgcgaggaattaatgaaatagt

SEQ ID NO: 15978 - DNA, 25 bp, probe
ctggctaaagtaacaaagaactaga

SEQ ID NO: 15979 - DNA, 25 bp, probe
gaacccatccactgatatttgtcct

SEQ ID NO: 15980 - DNA, 25 bp, probe
gcgaggaattaatgaaatagtgaga

SEQ ID NO: 15981 - DNA, 25 bp, probe
gttcaaaccaagatttacccaagtc

SEQ ID NO: 15982 - DNA, 25 bp, probe
aaaccaagatttacccaagtccaaa

SEQ ID NO: 15983 - DNA, 25 bp, probe
aaccaagatttacccaagtccaaag

SEQ ID NO: 15984 - DNA, 25 bp, probe
gcataatccctttaacaagcctaaa

SEQ ID NO: 15985 - DNA, 25 bp, probe
ttcaaaccaagatttacccaagtcc

SEQ ID NO: 15986 - DNA, 25 bp, probe
gtgagcagtttaatatgtgaatgac

SEQ ID NO: 15987 - DNA, 25 bp, probe
caaaccaagatttacccaagtccaa

SEQ ID NO: 15988 - DNA, 25 bp, probe
agtgagcagtttaatatgtgaatga

SEQ ID NO: 15989 - DNA, 25 bp, probe
atttacaaggtatgtgaaactggga

SEQ ID NO: 15990 - DNA, 25 bp, probe
gatttacaaggtatgtgaaactggg

SEQ ID NO: 15991 - DNA, 25 bp, probe
tttacaaggtatgtgaaactgggaa

SEQ ID NO: 15992 - DNA, 25 bp, probe
cgatttacaaggtatgtgaaactgg

SEQ ID NO: 15993 - DNA, 25 bp, probe
accaagatttacccaagtccaaaga

SEQ ID NO: 15994 - DNA, 25 bp, probe
actttacccatgatgaaattgaagc

SEQ ID NO: 15995 - DNA, 25 bp, probe
gatttacccaagtccaaagacaatg

SEQ ID NO: 15996 - DNA, 25 bp, probe
agatttacccaagtccaaagacaat

SEQ ID NO: 15997 - DNA, 25 bp, probe
acctactttacccatgatgaaattg

SEQ ID NO: 15998 - DNA, 25 bp, probe
aatttaagttctatgacatgccaca

SEQ ID NO: 15999 - DNA, 25 bp, probe
aagatttacccaagtccaaagacaa

SEQ ID NO: 16000 - DNA, 25 bp, probe
aagtgagcagtttaatatgtgaatg

SEQ ID NO: 16001 - DNA, 25 bp, probe
cctactttacccatgatgaaattga

SEQ ID NO: 16002 - DNA, 25 bp, probe
tcaaaccaagatttacccaagtcca

SEQ ID NO: 16003 - DNA, 25 bp, probe
tgagcagtttaatatgtgaatgaca

SEQ ID NO: 16004 - DNA, 25 bp, probe
caagatttacccaagtccaaagaca

SEQ ID NO: 16005 - DNA, 25 bp, probe
atttaagttctatgacatgccacat

SEQ ID NO: 16006 - DNA, 25 bp, probe
tttacccatgatgaaattgaagctc

SEQ ID NO: 16007 - DNA, 25 bp, probe
ctttacccatgatgaaattgaagct

SEQ ID NO: 16008 - DNA, 25 bp, probe
ccaagatttacccaagtccaaagac

SEQ ID NO: 16009 - DNA, 25 bp, probe
catgatgaaattgaagctcagagaa

SEQ ID NO: 16010 - DNA, 25 bp, probe
gagcagtttaatatgtgaatgacaa

SEQ ID NO: 16011 - DNA, 25 bp, probe
atgatgaaattgaagctcagagaag

SEQ ID NO: 16012 - DNA, 25 bp, probe
ttacccatgatgaaattgaagctca

SEQ ID NO: 16013 - DNA, 25 bp, probe
tgcataatccctttaacaagcctaa

SEQ ID NO: 16014 - DNA, 25 bp, probe
atttacccaagtccaaagacaatgg

SEQ ID NO: 16015 - DNA, 25 bp, probe
atttccttgcataatccctttaaca

SEQ ID NO: 16016 - DNA, 25 bp, probe
ccatgatgaaattgaagctcagaga

SEQ ID NO: 16017 - DNA, 25 bp, probe
tacccatgatgaaattgaagctcag

SEQ ID NO: 16018 - DNA, 25 bp, probe
ggtcgatttacaaggtatgtgaaac

SEQ ID NO: 16019 - DNA, 25 bp, probe
tacctactttacccatgatgaaatt

SEQ ID NO: 16020 - DNA, 25 bp, probe
ttgcataatccctttaacaagccta

SEQ ID NO: 16021 - DNA, 25 bp, probe
tggtcgatttacaaggtatgtgaaa

SEQ ID NO: 16022 - DNA, 25 bp, probe
catttccttgcataatccctttaac

SEQ ID NO: 16023 - DNA, 25 bp, probe
tcgatttacaaggtatgtgaaactg

SEQ ID NO: 16024 - DNA, 25 bp, probe
gtcgatttacaaggtatgtgaaact

SEQ ID NO: 16025 - DNA, 25 bp, probe
tacacttccttaactgcacgatatt

SEQ ID NO: 16026 - DNA, 25 bp, probe
ttacacttccttaactgcacgatat

SEQ ID NO: 16027 - DNA, 25 bp, probe
cacttccttaactgcacgatattca

SEQ ID NO: 16028 - DNA, 25 bp, probe
acacttccttaactgcacgatattc

SEQ ID NO: 16029 - DNA, 25 bp, probe
ctgagattgtgtctgctttagagta

SEQ ID NO: 16030 - DNA, 25 bp, probe
tccttaactgcacgatattcagatt

SEQ ID NO: 16031 - DNA, 25 bp, probe
ttccttaactgcacgatattcagat

SEQ ID NO: 16032 - DNA, 25 bp, probe
tgagattgtgtctgctttagagtac

SEQ ID NO: 16033 - DNA, 25 bp, probe
cttccttaactgcacgatattcaga

SEQ ID NO: 16034 - DNA, 25 bp, probe
acttccttaactgcacgatattcag

SEQ ID NO: 16035 - DNA, 25 bp, probe
tttacacttccttaactgcacgata

SEQ ID NO: 16036 - DNA, 25 bp, probe
gctgagattgtgtctgctttagagt

SEQ ID NO: 16037 - DNA, 25 bp, probe
tatattcgcaaaatcggttcattcg

SEQ ID NO: 16038 - DNA, 25 bp, probe
ccttaactgcacgatattcagattt

SEQ ID NO: 16039 - DNA, 25 bp, probe
ggctgagattgtgtctgctttagag

SEQ ID NO: 16040 - DNA, 25 bp, probe
cttaactgcacgatattcagatttc

SEQ ID NO: 16041 - DNA, 25 bp, probe
gagattgtgtctgctttagagtact

SEQ ID NO: 16042 - DNA, 25 bp, probe
gattgtgtctgctttagagtacttg

SEQ ID NO: 16043 - DNA, 25 bp, probe
agattgtgtctgctttagagtactt

SEQ ID NO: 16044 - DNA, 25 bp, probe
tacaaaataaaacacatgagccagg

SEQ ID NO: 16045 - DNA, 25 bp, probe
tattcagatttcggccttagttatg

SEQ ID NO: 16046 - DNA, 25 bp, probe
attcagatttcggccttagttatgc

SEQ ID NO: 16047 - DNA, 25 bp, probe
gatattcagatttcggccttagtta

SEQ ID NO: 16048 - DNA, 25 bp, probe
attgtgtctgctttagagtacttgc

SEQ ID NO: 16049 - DNA, 25 bp, probe
ttaactgcacgatattcagatttcg

SEQ ID NO: 16050 - DNA, 25 bp, probe
atatattcgcaaaatcggttcattc

SEQ ID NO: 16051 - DNA, 25 bp, probe
ttacaaaataaaacacatgagccag

SEQ ID NO: 16052 - DNA, 25 bp, probe
tcagacttttaaggttagttttcca

SEQ ID NO: 16053 - DNA, 25 bp, probe
taaacctgctccaaaacgaaacaag

SEQ ID NO: 16054 - DNA, 25 bp, probe
gctccaaaacgaaacaagagatttt

SEQ ID NO: 16055 - DNA, 25 bp, probe
atattcagatttcggccttagttat

SEQ ID NO: 16056 - DNA, 25 bp, probe
taactgcacgatattcagatttcgg

SEQ ID NO: 16057 - DNA, 25 bp, probe
tgctccaaaacgaaacaagagattt

SEQ ID NO: 16058 - DNA, 25 bp, probe
gtaaacctgctccaaaacgaaacaa

SEQ ID NO: 16059 - DNA, 25 bp, probe
ctgctccaaaacgaaacaagagatt

SEQ ID NO: 16060 - DNA, 25 bp, probe
cagacttttaaggttagttttccaa

SEQ ID NO: 16061 - DNA, 25 bp, probe
ttttacacttccttaactgcacgat

SEQ ID NO: 16062 - DNA, 25 bp, probe
tttacaaaataaaacacatgagcca

SEQ ID NO: 16063 - DNA, 25 bp, probe
atcagacttttaaggttagttttcc

SEQ ID NO: 16064 - DNA, 25 bp, probe
gagtaaacctgctccaaaacgaaac

SEQ ID NO: 16065 - DNA, 25 bp, probe
agtaaacctgctccaaaacgaaaca

SEQ ID NO: 16066 - DNA, 25 bp, probe
cgatattcagatttcggccttagtt

SEQ ID NO: 16067 - DNA, 25 bp, probe
agacttttaaggttagttttccaaa

SEQ ID NO: 16068 - DNA, 25 bp, probe
acaaaataaaacacatgagccaggc

SEQ ID NO: 16069 - DNA, 25 bp, probe
taaattcttgtgtctgccatagtga

SEQ ID NO: 16070 - DNA, 25 bp, probe
ctaaattcttgtgtctgccatagtg

SEQ ID NO: 16071 - DNA, 25 bp, probe
tctaaattcttgtgtctgccatagt

SEQ ID NO: 16072 - DNA, 25 bp, probe
atctctaaattcttgtgtctgccat

SEQ ID NO: 16073 - DNA, 25 bp, probe
tctctaaattcttgtgtctgccata

SEQ ID NO: 16074 - DNA, 25 bp, probe
aatctctaaattcttgtgtctgcca

SEQ ID NO: 16075 - DNA, 25 bp, probe
aaatctctaaattcttgtgtctgcc

SEQ ID NO: 16076 - DNA, 25 bp, probe
ctctaaattcttgtgtctgccatag

SEQ ID NO: 16077 - DNA, 25 bp, probe
gattctgagggacacatcaagattg

SEQ ID NO: 16078 - DNA, 25 bp, probe
aattcttgtgtctgccatagtgacc

SEQ ID NO: 16079 - DNA, 25 bp, probe
tcttgtgtctgccatagtgacctaa

SEQ ID NO: 16080 - DNA, 25 bp, probe
ttcttgtgtctgccatagtgaccta

SEQ ID NO: 16081 - DNA, 25 bp, probe
aaattcttgtgtctgccatagtgac

SEQ ID NO: 16082 - DNA, 25 bp, probe
taaatctctaaattcttgtgtctgc

SEQ ID NO: 16083 - DNA, 25 bp, probe
cgattctgagggacacatcaagatt

SEQ ID NO: 16084 - DNA, 25 bp, probe
attcttgtgtctgccatagtgacct

SEQ ID NO: 16085 - DNA, 25 bp, probe
cttgtgtctgccatagtgacctaaa

SEQ ID NO: 16086 - DNA, 25 bp, probe
attctgagggacacatcaagattgc

SEQ ID NO: 16087 - DNA, 25 bp, probe
tttcagaagtgctgtctctttgtgt

SEQ ID NO: 16088 - DNA, 25 bp, probe
catagtgacctaaaacttgacaacg

SEQ ID NO: 16089 - DNA, 25 bp, probe
ccatagtgacctaaaacttgacaac

SEQ ID NO: 16090 - DNA, 25 bp, probe
ttcagaagtgctgtctctttgtgtc

SEQ ID NO: 16091 - DNA, 25 bp, probe
gccatagtgacctaaaacttgacaa

SEQ ID NO: 16092 - DNA, 25 bp, probe
ctgccatagtgacctaaaacttgac

SEQ ID NO: 16093 - DNA, 25 bp, probe
tctgccatagtgacctaaaacttga

SEQ ID NO: 16094 - DNA, 25 bp, probe
gaagtgctgtctctttgtgtccttg

SEQ ID NO: 16095 - DNA, 25 bp, probe
ataatgagtggctgttggttggctt

SEQ ID NO: 16096 - DNA, 25 bp, probe
aacttgacaacgtgatgctcgattc

SEQ ID NO: 16097 - DNA, 25 bp, probe
ttttatctccctgccagactgtaag

SEQ ID NO: 16098 - DNA, 25 bp, probe
tcttttcagaagtgctgtctctttg

SEQ ID NO: 16099 - DNA, 25 bp, probe
gtcttttcagaagtgctgtctcttt

SEQ ID NO: 16100 - DNA, 25 bp, probe
agaagtgctgtctctttgtgtcctt

SEQ ID NO: 16101 - DNA, 25 bp, probe
tgccatagtgacctaaaacttgaca

SEQ ID NO: 16102 - DNA, 25 bp, probe
gtctgccatagtgacctaaaacttg

SEQ ID NO: 16103 - DNA, 25 bp, probe
cttttcagaagtgctgtctctttgt

SEQ ID NO: 16104 - DNA, 25 bp, probe
tttatctccctgccagactgtaagc

SEQ ID NO: 16105 - DNA, 25 bp, probe
tgtctgccatagtgacctaaaactt

SEQ ID NO: 16106 - DNA, 25 bp, probe
ttttcagaagtgctgtctctttgtg

SEQ ID NO: 16107 - DNA, 25 bp, probe
gattttggcatgtgtaaggaaaaca

SEQ ID NO: 16108 - DNA, 25 bp, probe
tcgattctgagggacacatcaagat

SEQ ID NO: 16109 - DNA, 25 bp, probe
cttgacaacgtgatgctcgattctg

SEQ ID NO: 16110 - DNA, 25 bp, probe
gaggtcaaaggctggtttctactga

SEQ ID NO: 16111 - DNA, 25 bp, probe
ttgtgtctgccatagtgacctaaaa

SEQ ID NO: 16112 - DNA, 25 bp, probe
atagtgacctaaaacttgacaacgt

SEQ ID NO: 16113 - DNA, 25 bp, probe
catcatccacacacatcaagatatt

SEQ ID NO: 16114 - DNA, 25 bp, probe
gcatcatccacacacatcaagatat

SEQ ID NO: 16115 - DNA, 25 bp, probe
aatatagatgaagcagcaactacaa

SEQ ID NO: 16116 - DNA, 25 bp, probe
tgattcagataccttcaacaactgc

SEQ ID NO: 16117 - DNA, 25 bp, probe
gtatgaatgatcttgcacttactgt

SEQ ID NO: 16118 - DNA, 25 bp, probe
atgtcagtatgaatgatcttgcact

SEQ ID NO: 16119 - DNA, 25 bp, probe
atagatgaagcagcaactacaaatt

SEQ ID NO: 16120 - DNA, 25 bp, probe
tgtcagtatgaatgatcttgcactt

SEQ ID NO: 16121 - DNA, 25 bp, probe
tatgtcagtatgaatgatcttgcac

SEQ ID NO: 16122 - DNA, 25 bp, probe
atcatccacacacatcaagatattt

SEQ ID NO: 16123 - DNA, 25 bp, probe
tcagtatgaatgatcttgcacttac

SEQ ID NO: 16124 - DNA, 25 bp, probe
gtcagtatgaatgatcttgcactta

SEQ ID NO: 16125 - DNA, 25 bp, probe
tatagatgaagcagcaactacaaat

SEQ ID NO: 16126 - DNA, 25 bp, probe
actgtgtaagtaatctaacccttga

SEQ ID NO: 16127 - DNA, 25 bp, probe
atatagatgaagcagcaactacaaa

SEQ ID NO: 16128 - DNA, 25 bp, probe
aaatatagatgaagcagcaactaca

SEQ ID NO: 16129 - DNA, 25 bp, probe
caaatatagatgaagcagcaactac

SEQ ID NO: 16130 - DNA, 25 bp, probe
tgaatgatcttgcacttactgtgta

SEQ ID NO: 16131 - DNA, 25 bp, probe
attcagataccttcaacaactgcaa

SEQ ID NO: 16132 - DNA, 25 bp, probe
tgtgtaagtaatctaacccttgaag

SEQ ID NO: 16133 - DNA, 25 bp, probe
ctgtgtaagtaatctaacccttgaa

SEQ ID NO: 16134 - DNA, 25 bp, probe
atgaatgatcttgcacttactgtgt

SEQ ID NO: 16135 - DNA, 25 bp, probe
cggctttatgtcagtatgaatgatc

SEQ ID NO: 16136 - DNA, 25 bp, probe
tatgaatgatcttgcacttactgtg

SEQ ID NO: 16137 - DNA, 25 bp, probe
ttatgtcagtatgaatgatcttgca

SEQ ID NO: 16138 - DNA, 25 bp, probe
gaatgatcttgcacttactgtgtaa

SEQ ID NO: 16139 - DNA, 25 bp, probe
gattcagataccttcaacaactgca

SEQ ID NO: 16140 - DNA, 25 bp, probe
tgcatcatccacacacatcaagata

SEQ ID NO: 16141 - DNA, 25 bp, probe
ttgattcagataccttcaacaactg

SEQ ID NO: 16142 - DNA, 25 bp, probe
tcaaatatagatgaagcagcaacta

SEQ ID NO: 16143 - DNA, 25 bp, probe
ggctttatgtcagtatgaatgatct

SEQ ID NO: 16144 - DNA, 25 bp, probe
cagataccttcaacaactgcaactt

SEQ ID NO: 16145 - DNA, 25 bp, probe
ttcagataccttcaacaactgcaac

SEQ ID NO: 16146 - DNA, 25 bp, probe
agtatgaatgatcttgcacttactg

SEQ ID NO: 16147 - DNA, 25 bp, probe
cagtatgaatgatcttgcacttact

SEQ ID NO: 16148 - DNA, 25 bp, probe
agatgaagcagcaactacaaattta

SEQ ID NO: 16149 - DNA, 25 bp, probe
tagatgaagcagcaactacaaattt

SEQ ID NO: 16150 - DNA, 25 bp, probe
taagtaatctaacccttgaaggacc

SEQ ID NO: 16151 - DNA, 25 bp, probe
tcagataccttcaacaactgcaact

SEQ ID NO: 16152 - DNA, 25 bp, probe
aagtaatctaacccttgaaggacct

SEQ ID NO: 16153 - DNA, 25 bp, probe
agataccttcaacaactgcaacttt

SEQ ID NO: 16154 - DNA, 25 bp, probe
gatgaagcagcaactacaaatttaa

SEQ ID NO: 16155 - DNA, 25 bp, probe
gtgtaagtaatctaacccttgaagg

SEQ ID NO: 16156 - DNA, 25 bp, probe
ttccatttcaagggtgcagttattt

SEQ ID NO: 16157 - DNA, 25 bp, probe
ctcatctacagtaaggacagtctct

SEQ ID NO: 16158 - DNA, 25 bp, probe
gctcatctacagtaaggacagtctc

SEQ ID NO: 16159 - DNA, 25 bp, probe
tcatctacagtaaggacagtctctg

SEQ ID NO: 16160 - DNA, 25 bp, probe
aggaaggatacaatgaaagaggaag

SEQ ID NO: 16161 - DNA, 25 bp, probe
gaggaaggatacaatgaaagaggaa

SEQ ID NO: 16162 - DNA, 25 bp, probe
agaggaaggatacaatgaaagagga

SEQ ID NO: 16163 - DNA, 25 bp, probe
cagaggaaggatacaatgaaagagg

SEQ ID NO: 16164 - DNA, 25 bp, probe
gaaggatacaatgaaagaggaaggg

SEQ ID NO: 16165 - DNA, 25 bp, probe
ggaaggatacaatgaaagaggaagg

SEQ ID NO: 16166 - DNA, 25 bp, probe
ctacagtaaggacagtctctgcttc

SEQ ID NO: 16167 - DNA, 25 bp, probe
atctacagtaaggacagtctctgct

SEQ ID NO: 16168 - DNA, 25 bp, probe
catctacagtaaggacagtctctgc

SEQ ID NO: 16169 - DNA, 25 bp, probe
gcagaggaaggatacaatgaaagag

SEQ ID NO: 16170 - DNA, 25 bp, probe
ggctcatctacagtaaggacagtct

SEQ ID NO: 16171 - DNA, 25 bp, probe
aggctcatctacagtaaggacagtc

SEQ ID NO: 16172 - DNA, 25 bp, probe
tctacagtaaggacagtctctgctt

SEQ ID NO: 16173 - DNA, 25 bp, probe
gtctctgcttcctctttcatctttg

SEQ ID NO: 16174 - DNA, 25 bp, probe
agtctctgcttcctctttcatcttt

SEQ ID NO: 16175 - DNA, 25 bp, probe
caggctcatctacagtaaggacagt

SEQ ID NO: 16176 - DNA, 25 bp, probe
gagatccaggctcatctacagtaag

SEQ ID NO: 16177 - DNA, 25 bp, probe
ctctgcttcctctttcatctttgac

SEQ ID NO: 16178 - DNA, 25 bp, probe
tctctgcttcctctttcatctttga

SEQ ID NO: 16179 - DNA, 25 bp, probe
ggcagaggaaggatacaatgaaaga

SEQ ID NO: 16180 - DNA, 25 bp, probe
gatccaggctcatctacagtaagga

SEQ ID NO: 16181 - DNA, 25 bp, probe
ccaggctcatctacagtaaggacag

SEQ ID NO: 16182 - DNA, 25 bp, probe
atccaggctcatctacagtaaggac

SEQ ID NO: 16183 - DNA, 25 bp, probe
tacagtaaggacagtctctgcttcc

SEQ ID NO: 16184 - DNA, 25 bp, probe
cagtctctgcttcctctttcatctt

SEQ ID NO: 16185 - DNA, 25 bp, probe
tcctgggaacgagaactactgatag

SEQ ID NO: 16186 - DNA, 25 bp, probe
agatccaggctcatctacagtaagg

SEQ ID NO: 16187 - DNA, 25 bp, probe
attggtatctggaaaaggaaggaag

SEQ ID NO: 16188 - DNA, 25 bp, probe
tctgcttcctctttcatctttgacg

SEQ ID NO: 16189 - DNA, 25 bp, probe
ctcctgggaacgagaactactgata

SEQ ID NO: 16190 - DNA, 25 bp, probe
gattggtatctggaaaaggaaggaa

SEQ ID NO: 16191 - DNA, 25 bp, probe
cggcagaggaaggatacaatgaaag

SEQ ID NO: 16192 - DNA, 25 bp, probe
gacagtctctgcttcctctttcatc

SEQ ID NO: 16193 - DNA, 25 bp, probe
ctgggaacgagaactactgataggg

SEQ ID NO: 16194 - DNA, 25 bp, probe
acagtctctgcttcctctttcatct

SEQ ID NO: 16195 - DNA, 25 bp, probe
aattgagatccaggctcatctacag

SEQ ID NO: 16196 - DNA, 25 bp, probe
aaggatacaatgaaagaggaagggg

SEQ ID NO: 16197 - DNA, 25 bp, probe
ttgggattggtatctggaaaaggaa

SEQ ID NO: 16198 - DNA, 25 bp, probe
ggattggtatctggaaaaggaagga

SEQ ID NO: 16199 - DNA, 25 bp, probe
tgagatccaggctcatctacagtaa

SEQ ID NO: 16200 - DNA, 25 bp, probe
ttgagatccaggctcatctacagta

SEQ ID NO: 16201 - DNA, 25 bp, probe
gacttacatcctcttcagattgctt

SEQ ID NO: 16202 - DNA, 25 bp, probe
tgacttacatcctcttcagattgct

SEQ ID NO: 16203 - DNA, 25 bp, probe
acttacatcctcttcagattgcttt

SEQ ID NO: 16204 - DNA, 25 bp, probe
catcctcttcagattgctttataca

SEQ ID NO: 16205 - DNA, 25 bp, probe
acatcctcttcagattgctttatac

SEQ ID NO: 16206 - DNA, 25 bp, probe
gtgtaaacttggaatcaaactgact

SEQ ID NO: 16207 - DNA, 25 bp, probe
atcaaactgacttacatcctcttca

SEQ ID NO: 16208 - DNA, 25 bp, probe
cttacatcctcttcagattgcttta

SEQ ID NO: 16209 - DNA, 25 bp, probe
acttggaatcaaactgacttacatc

SEQ ID NO: 16210 - DNA, 25 bp, probe
cgtgtaaacttggaatcaaactgac

SEQ ID NO: 16211 - DNA, 25 bp, probe
aaacttggaatcaaactgacttaca

SEQ ID NO: 16212 - DNA, 25 bp, probe
tgtaaacttggaatcaaactgactt

SEQ ID NO: 16213 - DNA, 25 bp, probe
ctttcactgagagttgagtcatctg

SEQ ID NO: 16214 - DNA, 25 bp, probe
aatcaaactgacttacatcctcttc

SEQ ID NO: 16215 - DNA, 25 bp, probe
gaatcaaactgacttacatcctctt

SEQ ID NO: 16216 - DNA, 25 bp, probe
aacttggaatcaaactgacttacat

SEQ ID NO: 16217 - DNA, 25 bp, probe
actttcactgagagttgagtcatct

SEQ ID NO: 16218 - DNA, 25 bp, probe
cactttcactgagagttgagtcatc

SEQ ID NO: 16219 - DNA, 25 bp, probe
gtacattcccactctaattgctaaa

SEQ ID NO: 16220 - DNA, 25 bp, probe
agtccatgttacatcaatcaaatgc

SEQ ID NO: 16221 - DNA, 25 bp, probe
ttacatcctcttcagattgctttat

SEQ ID NO: 16222 - DNA, 25 bp, probe
ttcacttaccagaaagacctgattg

SEQ ID NO: 16223 - DNA, 25 bp, probe
cctcttcagattgctttatacaaac

SEQ ID NO: 16224 - DNA, 25 bp, probe
tcctcttcagattgctttatacaaa

SEQ ID NO: 16225 - DNA, 25 bp, probe
atcctcttcagattgctttatacaa

SEQ ID NO: 16226 - DNA, 25 bp, probe
ttggaatcaaactgacttacatcct

SEQ ID NO: 16227 - DNA, 25 bp, probe
cttggaatcaaactgacttacatcc

SEQ ID NO: 16228 - DNA, 25 bp, probe
ggaatcaaactgacttacatcctct

SEQ ID NO: 16229 - DNA, 25 bp, probe
atcaataagttataaaggcatggct

SEQ ID NO: 16230 - DNA, 25 bp, probe
aggcatcaataagttataaaggcat

SEQ ID NO: 16231 - DNA, 25 bp, probe
tggaatcaaactgacttacatcctc

SEQ ID NO: 16232 - DNA, 25 bp, probe
tcaataagttataaaggcatggctt

SEQ ID NO: 16233 - DNA, 25 bp, probe
catcaataagttataaaggcatggc

SEQ ID NO: 16234 - DNA, 25 bp, probe
gcatcaataagttataaaggcatgg

SEQ ID NO: 16235 - DNA, 25 bp, probe
ggcatcaataagttataaaggcatg

SEQ ID NO: 16236 - DNA, 25 bp, probe
tttcactgagagttgagtcatctgg

SEQ ID NO: 16237 - DNA, 25 bp, probe
ctcttcagattgctttatacaaaca

SEQ ID NO: 16238 - DNA, 25 bp, probe
tacatcctcttcagattgctttata

SEQ ID NO: 16239 - DNA, 25 bp, probe
taggcatcaataagttataaaggca

SEQ ID NO: 16240 - DNA, 25 bp, probe
catgttacatcaatcaaatgcactg

SEQ ID NO: 16241 - DNA, 25 bp, probe
ccatgttacatcaatcaaatgcact

SEQ ID NO: 16242 - DNA, 25 bp, probe
tccatgttacatcaatcaaatgcac

SEQ ID NO: 16243 - DNA, 25 bp, probe
gtccatgttacatcaatcaaatgca

SEQ ID NO: 16244 - DNA, 25 bp, probe
taaacttggaatcaaactgacttac

SEQ ID NO: 16245 - DNA, 25 bp, probe
tgagtgagcattcttagacgagtaa

SEQ ID NO: 16246 - DNA, 25 bp, probe
gtgagtgagcattcttagacgagta

SEQ ID NO: 16247 - DNA, 25 bp, probe
gagtgagcattcttagacgagtaag

SEQ ID NO: 16248 - DNA, 25 bp, probe
cattcttagacgagtaagtgtggac

SEQ ID NO: 16249 - DNA, 25 bp, probe
gagcattcttagacgagtaagtgtg

SEQ ID NO: 16250 - DNA, 25 bp, probe
gtgagcattcttagacgagtaagtg

SEQ ID NO: 16251 - DNA, 25 bp, probe
agtgagcattcttagacgagtaagt

SEQ ID NO: 16252 - DNA, 25 bp, probe
tgagcattcttagacgagtaagtgt

SEQ ID NO: 16253 - DNA, 25 bp, probe
atgtgagtgagcattcttagacgag

SEQ ID NO: 16254 - DNA, 25 bp, probe
attcttagacgagtaagtgtggacg

SEQ ID NO: 16255 - DNA, 25 bp, probe
cttgtgattaaatgtgagtgagcat

SEQ ID NO: 16256 - DNA, 25 bp, probe
gcattcttagacgagtaagtgtgga

SEQ ID NO: 16257 - DNA, 25 bp, probe
agcattcttagacgagtaagtgtgg

SEQ ID NO: 16258 - DNA, 25 bp, probe
atctatgttcccaagagtttgactt

SEQ ID NO: 16259 - DNA, 25 bp, probe
gaagcatctatgttcccaagagttt

SEQ ID NO: 16260 - DNA, 25 bp, probe
tctatgttcccaagagtttgacttc

SEQ ID NO: 16261 - DNA, 25 bp, probe
catctatgttcccaagagtttgact

SEQ ID NO: 16262 - DNA, 25 bp, probe
taatgatctcttcctccctttctct

SEQ ID NO: 16263 - DNA, 25 bp, probe
ccttgtgattaaatgtgagtgagca

SEQ ID NO: 16264 - DNA, 25 bp, probe
tgccttgtgattaaatgtgagtgag

SEQ ID NO: 16265 - DNA, 25 bp, probe
ctgccttgtgattaaatgtgagtga

SEQ ID NO: 16266 - DNA, 25 bp, probe
tatgttcccaagagtttgacttcag

SEQ ID NO: 16267 - DNA, 25 bp, probe
ctatgttcccaagagtttgacttca

SEQ ID NO: 16268 - DNA, 25 bp, probe
ttaatgatctcttcctccctttctc

SEQ ID NO: 16269 - DNA, 25 bp, probe
agtttaatgatctcttcctcccttt

SEQ ID NO: 16270 - DNA, 25 bp, probe
aatgctgccttgtgattaaatgtga

SEQ ID NO: 16271 - DNA, 25 bp, probe
caagtttaatgatctcttcctccct

SEQ ID NO: 16272 - DNA, 25 bp, probe
tttaatgatctcttcctccctttct

SEQ ID NO: 16273 - DNA, 25 bp, probe
gtttaatgatctcttcctccctttc

SEQ ID NO: 16274 - DNA, 25 bp, probe
aagcatctatgttcccaagagtttg

SEQ ID NO: 16275 - DNA, 25 bp, probe
ttagacgagtaagtgtggacgatct

SEQ ID NO: 16276 - DNA, 25 bp, probe
taagggatcttcaagggagtgtaat

SEQ ID NO: 16277 - DNA, 25 bp, probe
atctcttcctccctttctctctctt

SEQ ID NO: 16278 - DNA, 25 bp, probe
aagtttaatgatctcttcctccctt

SEQ ID NO: 16279 - DNA, 25 bp, probe
ttaagggatcttcaagggagtgtaa

SEQ ID NO: 16280 - DNA, 25 bp, probe
tttaagggatcttcaagggagtgta

SEQ ID NO: 16281 - DNA, 25 bp, probe
atgaagcatctatgttcccaagagt

SEQ ID NO: 16282 - DNA, 25 bp, probe
tcttagacgagtaagtgtggacgat

SEQ ID NO: 16283 - DNA, 25 bp, probe
aatgatctcttcctccctttctctc

SEQ ID NO: 16284 - DNA, 25 bp, probe
agggatcttcaagggagtgtaattt

SEQ ID NO: 16285 - DNA, 25 bp, probe
cttagacgagtaagtgtggacgatc

SEQ ID NO: 16286 - DNA, 25 bp, probe
tcaagtttaatgatctcttcctccc

SEQ ID NO: 16287 - DNA, 25 bp, probe
gtcaatgctgccttgtgattaaatg

SEQ ID NO: 16288 - DNA, 25 bp, probe
agtcaatgctgccttgtgattaaat

SEQ ID NO: 16289 - DNA, 25 bp, probe
aggaattgtatggttggttactctt

SEQ ID NO: 16290 - DNA, 25 bp, probe
aaggaattgtatggttggttactct

SEQ ID NO: 16291 - DNA, 25 bp, probe
tgaataaggaattgtatggttggtt

SEQ ID NO: 16292 - DNA, 25 bp, probe
ttgaataaggaattgtatggttggt

SEQ ID NO: 16293 - DNA, 25 bp, probe
taaggaattgtatggttggttactc

SEQ ID NO: 16294 - DNA, 25 bp, probe
gcttgttgaataaggaattgtatgg

SEQ ID NO: 16295 - DNA, 25 bp, probe
gttgaataaggaattgtatggttgg

SEQ ID NO: 16296 - DNA, 25 bp, probe
tgcttgttgaataaggaattgtatg

SEQ ID NO: 16297 - DNA, 25 bp, probe
ataaggaattgtatggttggttact

SEQ ID NO: 16298 - DNA, 25 bp, probe
tgttgaataaggaattgtatggttg

SEQ ID NO: 16299 - DNA, 25 bp, probe
cttgttgaataaggaattgtatggt

SEQ ID NO: 16300 - DNA, 25 bp, probe
ttgcttgttgaataaggaattgtat

SEQ ID NO: 16301 - DNA, 25 bp, probe
gtttggtaggtatttgcttgttgaa

SEQ ID NO: 16302 - DNA, 25 bp, probe
atgtttggtaggtatttgcttgttg

SEQ ID NO: 16303 - DNA, 25 bp, probe
aatgtttggtaggtatttgcttgtt

SEQ ID NO: 16304 - DNA, 25 bp, probe
aagaacaaacatcatcaaagtaggg

SEQ ID NO: 16305 - DNA, 25 bp, probe
aataaggaattgtatggttggttac

SEQ ID NO: 16306 - DNA, 25 bp, probe
tttggtaggtatttgcttgttgaat

SEQ ID NO: 16307 - DNA, 25 bp, probe
ttgtatggttggttactctttacgg

SEQ ID NO: 16308 - DNA, 25 bp, probe
attgtatggttggttactctttacg

SEQ ID NO: 16309 - DNA, 25 bp, probe
tcctaacaagaacaaacatcatcaa

SEQ ID NO: 16310 - DNA, 25 bp, probe
tgtttggtaggtatttgcttgttga

SEQ ID NO: 16311 - DNA, 25 bp, probe
taatgtttggtaggtatttgcttgt

SEQ ID NO: 16312 - DNA, 25 bp, probe
gaataaggaattgtatggttggtta

SEQ ID NO: 16313 - DNA, 25 bp, probe
ttgttgaataaggaattgtatggtt

SEQ ID NO: 16314 - DNA, 25 bp, probe
ggaattgtatggttggttactcttt

SEQ ID NO: 16315 - DNA, 25 bp, probe
gtatggttggttactctttacggtc

SEQ ID NO: 16316 - DNA, 25 bp, probe
caagaacaaacatcatcaaagtagg

SEQ ID NO: 16317 - DNA, 25 bp, probe
tacaactataaggtaggattgggct

SEQ ID NO: 16318 - DNA, 25 bp, probe
gttctcaaacaaaccctacaactat

SEQ ID NO: 16319 - DNA, 25 bp, probe
tatggttggttactctttacggtca

SEQ ID NO: 16320 - DNA, 25 bp, probe
ttcctaacaagaacaaacatcatca

SEQ ID NO: 16321 - DNA, 25 bp, probe
tgctgatggtatataataagccagg

SEQ ID NO: 16322 - DNA, 25 bp, probe
aggtatttgcttgttgaataaggaa

SEQ ID NO: 16323 - DNA, 25 bp, probe
gctgatggtatataataagccagga

SEQ ID NO: 16324 - DNA, 25 bp, probe
tgtatggttggttactctttacggt

SEQ ID NO: 16325 - DNA, 25 bp, probe
cctaacaagaacaaacatcatcaaa

SEQ ID NO: 16326 - DNA, 25 bp, probe
tggtaggtatttgcttgttgaataa

SEQ ID NO: 16327 - DNA, 25 bp, probe
ttggtaggtatttgcttgttgaata

SEQ ID NO: 16328 - DNA, 25 bp, probe
cttcctaacaagaacaaacatcatc

SEQ ID NO: 16329 - DNA, 25 bp, probe
acaagaacaaacatcatcaaagtag

SEQ ID NO: 16330 - DNA, 25 bp, probe
acaactataaggtaggattgggctc

SEQ ID NO: 16331 - DNA, 25 bp, probe
tttacggtcaaagactctaactcat

SEQ ID NO: 16332 - DNA, 25 bp, probe
ataatgtttggtaggtatttgcttg

SEQ ID NO: 16333 - DNA, 25 bp, probe
tcatactcgaactccacctatcatt

SEQ ID NO: 16334 - DNA, 25 bp, probe
catactcgaactccacctatcattc

SEQ ID NO: 16335 - DNA, 25 bp, probe
atactcgaactccacctatcattca

SEQ ID NO: 16336 - DNA, 25 bp, probe
ttcatactcgaactccacctatcat

SEQ ID NO: 16337 - DNA, 25 bp, probe
ttcttcatactcgaactccacctat

SEQ ID NO: 16338 - DNA, 25 bp, probe
cttcaaagcaacaaactcctatcat

SEQ ID NO: 16339 - DNA, 25 bp, probe
ttcttcaaagcaacaaactcctatc

SEQ ID NO: 16340 - DNA, 25 bp, probe
ttcaaagcaacaaactcctatcatt

SEQ ID NO: 16341 - DNA, 25 bp, probe
tcttcatactcgaactccacctatc

SEQ ID NO: 16342 - DNA, 25 bp, probe
tcttcaaagcaacaaactcctatca

SEQ ID NO: 16343 - DNA, 25 bp, probe
attcttcaaagcaacaaactcctat

SEQ ID NO: 16344 - DNA, 25 bp, probe
cttcatactcgaactccacctatca

SEQ ID NO: 16345 - DNA, 25 bp, probe
aattcttcaaagcaacaaactccta

SEQ ID NO: 16346 - DNA, 25 bp, probe
tactcgaactccacctatcattcac

SEQ ID NO: 16347 - DNA, 25 bp, probe
tcaaagcaacaaactcctatcattg

SEQ ID NO: 16348 - DNA, 25 bp, probe
caaagcaacaaactcctatcattga

SEQ ID NO: 16349 - DNA, 25 bp, probe
atttgatattcccatctccagtcat

SEQ ID NO: 16350 - DNA, 25 bp, probe
aatttgatattcccatctccagtca

SEQ ID NO: 16351 - DNA, 25 bp, probe
aaggtcttcagtttcttcatactcg

SEQ ID NO: 16352 - DNA, 25 bp, probe
ccaacttgatctcccatttctttaa

SEQ ID NO: 16353 - DNA, 25 bp, probe
aaaggtcttcagtttcttcatactc

SEQ ID NO: 16354 - DNA, 25 bp, probe
gccaacttgatctcccatttcttta

SEQ ID NO: 16355 - DNA, 25 bp, probe
atattcccatctccagtcatgttag

SEQ ID NO: 16356 - DNA, 25 bp, probe
gatattcccatctccagtcatgtta

SEQ ID NO: 16357 - DNA, 25 bp, probe
aaagcaacaaactcctatcattgat

SEQ ID NO: 16358 - DNA, 25 bp, probe
cccatctccagtcatgttagaattt

SEQ ID NO: 16359 - DNA, 25 bp, probe
tattcccatctccagtcatgttaga

SEQ ID NO: 16360 - DNA, 25 bp, probe
tttgatattcccatctccagtcatg

SEQ ID NO: 16361 - DNA, 25 bp, probe
tcccatctccagtcatgttagaatt

SEQ ID NO: 16362 - DNA, 25 bp, probe
ttcccatctccagtcatgttagaat

SEQ ID NO: 16363 - DNA, 25 bp, probe
attcccatctccagtcatgttagaa

SEQ ID NO: 16364 - DNA, 25 bp, probe
tgatattcccatctccagtcatgtt

SEQ ID NO: 16365 - DNA, 25 bp, probe
ttgatattcccatctccagtcatgt

SEQ ID NO: 16366 - DNA, 25 bp, probe
caacttgatctcccatttctttaag

SEQ ID NO: 16367 - DNA, 25 bp, probe
aagatcaaagttctaagaagctggt

SEQ ID NO: 16368 - DNA, 25 bp, probe
gaagatcaaagttctaagaagctgg

SEQ ID NO: 16369 - DNA, 25 bp, probe
aacttgatctcccatttctttaaga

SEQ ID NO: 16370 - DNA, 25 bp, probe
ccatctccagtcatgttagaattta

SEQ ID NO: 16371 - DNA, 25 bp, probe
agatcaaagttctaagaagctggtg

SEQ ID NO: 16372 - DNA, 25 bp, probe
tttcttcatactcgaactccaccta

SEQ ID NO: 16373 - DNA, 25 bp, probe
taaaggtcttcagtttcttcatact

SEQ ID NO: 16374 - DNA, 25 bp, probe
agtgttactgaatcttagtatgcta

SEQ ID NO: 16375 - DNA, 25 bp, probe
tagtgttactgaatcttagtatgct

SEQ ID NO: 16376 - DNA, 25 bp, probe
gtcttcagtttcttcatactcgaac

SEQ ID NO: 16377 - DNA, 25 bp, probe
ttttccaaaggagaataagagccgg

SEQ ID NO: 16378 - DNA, 25 bp, probe
ttaatcctagtaacagtgccatgag

SEQ ID NO: 16379 - DNA, 25 bp, probe
actggttcttgagcatttaatccta

SEQ ID NO: 16380 - DNA, 25 bp, probe
tactggttcttgagcatttaatcct

SEQ ID NO: 16381 - DNA, 25 bp, probe
ctactggttcttgagcatttaatcc

SEQ ID NO: 16382 - DNA, 25 bp, probe
tggttcttgagcatttaatcctagt

SEQ ID NO: 16383 - DNA, 25 bp, probe
ctggttcttgagcatttaatcctag

SEQ ID NO: 16384 - DNA, 25 bp, probe
taatcctagtaacagtgccatgagg

SEQ ID NO: 16385 - DNA, 25 bp, probe
catttaatcctagtaacagtgccat

SEQ ID NO: 16386 - DNA, 25 bp, probe
tttaatcctagtaacagtgccatga

SEQ ID NO: 16387 - DNA, 25 bp, probe
tgagcatttaatcctagtaacagtg

SEQ ID NO: 16388 - DNA, 25 bp, probe
ggttcttgagcatttaatcctagta

SEQ ID NO: 16389 - DNA, 25 bp, probe
atttaatcctagtaacagtgccatg

SEQ ID NO: 16390 - DNA, 25 bp, probe
ttgagcatttaatcctagtaacagt

SEQ ID NO: 16391 - DNA, 25 bp, probe
tcttgagcatttaatcctagtaaca

SEQ ID NO: 16392 - DNA, 25 bp, probe
catttacatcgtcacggagtacatg

SEQ ID NO: 16393 - DNA, 25 bp, probe
cttgagcatttaatcctagtaacag

SEQ ID NO: 16394 - DNA, 25 bp, probe
atttacatcgtcacggagtacatga

SEQ ID NO: 16395 - DNA, 25 bp, probe
ccatttacatcgtcacggagtacat

SEQ ID NO: 16396 - DNA, 25 bp, probe
gctactggttcttgagcatttaatc

SEQ ID NO: 16397 - DNA, 25 bp, probe
gagcctcatttcctctcatgtctag

SEQ ID NO: 16398 - DNA, 25 bp, probe
tttacatcgtcacggagtacatgag

SEQ ID NO: 16399 - DNA, 25 bp, probe
ggtttcagaggagcccatttacatc

SEQ ID NO: 16400 - DNA, 25 bp, probe
ttcttgagcatttaatcctagtaac

SEQ ID NO: 16401 - DNA, 25 bp, probe
gttcttgagcatttaatcctagtaa

SEQ ID NO: 16402 - DNA, 25 bp, probe
gagcatttaatcctagtaacagtgc

SEQ ID NO: 16403 - DNA, 25 bp, probe
cctcatttcctctcatgtctagaat

SEQ ID NO: 16404 - DNA, 25 bp, probe
gtttcagaggagcccatttacatcg

SEQ ID NO: 16405 - DNA, 25 bp, probe
atgtctagaatgggcatcttcaaag

SEQ ID NO: 16406 - DNA, 25 bp, probe
agcatttaatcctagtaacagtgcc

SEQ ID NO: 16407 - DNA, 25 bp, probe
gcatttaatcctagtaacagtgcca

SEQ ID NO: 16408 - DNA, 25 bp, probe
catgtctagaatgggcatcttcaaa

SEQ ID NO: 16409 - DNA, 25 bp, probe
agctactggttcttgagcatttaat

SEQ ID NO: 16410 - DNA, 25 bp, probe
tcatgtctagaatgggcatcttcaa

SEQ ID NO: 16411 - DNA, 25 bp, probe
cagctactggttcttgagcatttaa

SEQ ID NO: 16412 - DNA, 25 bp, probe
gcctcatttcctctcatgtctagaa

SEQ ID NO: 16413 - DNA, 25 bp, probe
tttcagaggagcccatttacatcgt

SEQ ID NO: 16414 - DNA, 25 bp, probe
tctcatgtctagaatgggcatcttc

SEQ ID NO: 16415 - DNA, 25 bp, probe
ctctcatgtctagaatgggcatctt

SEQ ID NO: 16416 - DNA, 25 bp, probe
gttgtatgctgtggtttcagaggag

SEQ ID NO: 16417 - DNA, 25 bp, probe
ttacatcgtcacggagtacatgagc

SEQ ID NO: 16418 - DNA, 25 bp, probe
ctcatgtctagaatgggcatcttca

SEQ ID NO: 16419 - DNA, 25 bp, probe
atttcctctcatgtctagaatgggc

SEQ ID NO: 16420 - DNA, 25 bp, probe
caacagctactggttcttgagcatt

SEQ ID NO: 16421 - DNA, 25 bp, probe
ttcagaggagcccatttacatcgtc

SEQ ID NO: 16422 - DNA, 25 bp, probe
ccatctctcttgttagttaccttgt

SEQ ID NO: 16423 - DNA, 25 bp, probe
taagatgtcagcgtaagatgattga

SEQ ID NO: 16424 - DNA, 25 bp, probe
agatgtcagcgtaagatgattgaat

SEQ ID NO: 16425 - DNA, 25 bp, probe
aagatgtcagcgtaagatgattgaa

SEQ ID NO: 16426 - DNA, 25 bp, probe
tgtcagcgtaagatgattgaatatc

SEQ ID NO: 16427 - DNA, 25 bp, probe
gatgtcagcgtaagatgattgaata

SEQ ID NO: 16428 - DNA, 25 bp, probe
ataagatgtcagcgtaagatgattg

SEQ ID NO: 16429 - DNA, 25 bp, probe
tacaactgttacttacactgactgg

SEQ ID NO: 16430 - DNA, 25 bp, probe
caactgttacttacactgactggat

SEQ ID NO: 16431 - DNA, 25 bp, probe
ctctcttgttagttaccttgtagac

SEQ ID NO: 16432 - DNA, 25 bp, probe
tctctcttgttagttaccttgtaga

SEQ ID NO: 16433 - DNA, 25 bp, probe
tctcttgttagttaccttgtagact

SEQ ID NO: 16434 - DNA, 25 bp, probe
atgtcagcgtaagatgattgaatat

SEQ ID NO: 16435 - DNA, 25 bp, probe
aataagatgtcagcgtaagatgatt

SEQ ID NO: 16436 - DNA, 25 bp, probe
catctctcttgttagttaccttgta

SEQ ID NO: 16437 - DNA, 25 bp, probe
ttacaactgttacttacactgactg

SEQ ID NO: 16438 - DNA, 25 bp, probe
aactgttacttacactgactggatc

SEQ ID NO: 16439 - DNA, 25 bp, probe
ccaagcatcataggattatagtgaa

SEQ ID NO: 16440 - DNA, 25 bp, probe
acaactgttacttacactgactgga

SEQ ID NO: 16441 - DNA, 25 bp, probe
ttcaagtccaagcatcataggatta

SEQ ID NO: 16442 - DNA, 25 bp, probe
attcaagtccaagcatcataggatt

SEQ ID NO: 16443 - DNA, 25 bp, probe
tcaagtccaagcatcataggattat

SEQ ID NO: 16444 - DNA, 25 bp, probe
ctcttgttagttaccttgtagactt

SEQ ID NO: 16445 - DNA, 25 bp, probe
gattcaagtccaagcatcataggat

SEQ ID NO: 16446 - DNA, 25 bp, probe
atctctcttgttagttaccttgtag

SEQ ID NO: 16447 - DNA, 25 bp, probe
gtccaagcatcataggattatagtg

SEQ ID NO: 16448 - DNA, 25 bp, probe
tccaagcatcataggattatagtga

SEQ ID NO: 16449 - DNA, 25 bp, probe
agtccaagcatcataggattatagt

SEQ ID NO: 16450 - DNA, 25 bp, probe
cccatctctcttgttagttaccttg

SEQ ID NO: 16451 - DNA, 25 bp, probe
tcccatctctcttgttagttacctt

SEQ ID NO: 16452 - DNA, 25 bp, probe
ctcccatctctcttgttagttacct

SEQ ID NO: 16453 - DNA, 25 bp, probe
caagtccaagcatcataggattata

SEQ ID NO: 16454 - DNA, 25 bp, probe
aagtccaagcatcataggattatag

SEQ ID NO: 16455 - DNA, 25 bp, probe
ttagttaccttgtagactttgccat

SEQ ID NO: 16456 - DNA, 25 bp, probe
agttaccttgtagactttgccatag

SEQ ID NO: 16457 - DNA, 25 bp, probe
ggtctctataatttcccaggtgtct

SEQ ID NO: 16458 - DNA, 25 bp, probe
gattgaatatcacaagtctgggtca

SEQ ID NO: 16459 - DNA, 25 bp, probe
gttagttaccttgtagactttgcca

SEQ ID NO: 16460 - DNA, 25 bp, probe
tgttagttaccttgtagactttgcc

SEQ ID NO: 16461 - DNA, 25 bp, probe
tagttaccttgtagactttgccata

SEQ ID NO: 16462 - DNA, 25 bp, probe
ttgttagttaccttgtagactttgc

SEQ ID NO: 16463 - DNA, 25 bp, probe
attgaatatcacaagtctgggtcac

SEQ ID NO: 16464 - DNA, 25 bp, probe
gtaacttacagaaagaccaggtagt

SEQ ID NO: 16465 - DNA, 25 bp, probe
aagtgattcaagtccaagcatcata

SEQ ID NO: 16466 - DNA, 25 bp, probe
aataatgtgtgtgtgtgtgtgtgtg

SEQ ID NO: 16467 - DNA, 25 bp, probe
gtaaataatgtgtgtgtgtgtgtgt

SEQ ID NO: 16468 - DNA, 25 bp, probe
cccttagttatttgattccctgtct

SEQ ID NO: 16469 - DNA, 25 bp, probe
tcccttagttatttgattccctgtc

SEQ ID NO: 16470 - DNA, 25 bp, probe
taaataatgtgtgtgtgtgtgtgtg

SEQ ID NO: 16471 - DNA, 25 bp, probe
tgtaaataatgtgtgtgtgtgtgtg

SEQ ID NO: 16472 - DNA, 25 bp, probe
tagttatttgattccctgtctgtcg

SEQ ID NO: 16473 - DNA, 25 bp, probe
ttcccttagttatttgattccctgt

SEQ ID NO: 16474 - DNA, 25 bp, probe
atgtaaataatgtgtgtgtgtgtgt

SEQ ID NO: 16475 - DNA, 25 bp, probe
gttatttgattccctgtctgtcgta

SEQ ID NO: 16476 - DNA, 25 bp, probe
ccttagttatttgattccctgtctg

SEQ ID NO: 16477 - DNA, 25 bp, probe
tttcccttagttatttgattccctg

SEQ ID NO: 16478 - DNA, 25 bp, probe
aatgtaaataatgtgtgtgtgtgtg

SEQ ID NO: 16479 - DNA, 25 bp, probe
ttagttatttgattccctgtctgtc

SEQ ID NO: 16480 - DNA, 25 bp, probe
cttagttatttgattccctgtctgt

SEQ ID NO: 16481 - DNA, 25 bp, probe
catttccacctactttcccttagtt

SEQ ID NO: 16482 - DNA, 25 bp, probe
tgagttacgactttgatgaggaatt

SEQ ID NO: 16483 - DNA, 25 bp, probe
ctttcccttagttatttgattccct

SEQ ID NO: 16484 - DNA, 25 bp, probe
ctttctgctttcttctcctgttgaa

SEQ ID NO: 16485 - DNA, 25 bp, probe
gtgagttacgactttgatgaggaat

SEQ ID NO: 16486 - DNA, 25 bp, probe
ttatttgattccctgtctgtcgtac

SEQ ID NO: 16487 - DNA, 25 bp, probe
ccacctactttcccttagttatttg

SEQ ID NO: 16488 - DNA, 25 bp, probe
ataatgtgtgtgtgtgtgtgtgtgt

SEQ ID NO: 16489 - DNA, 25 bp, probe
ctcaagtctttctgctttcttctcc

SEQ ID NO: 16490 - DNA, 25 bp, probe
tccacctactttcccttagttattt

SEQ ID NO: 16491 - DNA, 25 bp, probe
ttccacctactttcccttagttatt

SEQ ID NO: 16492 - DNA, 25 bp, probe
tttccacctactttcccttagttat

SEQ ID NO: 16493 - DNA, 25 bp, probe
atttccacctactttcccttagtta

SEQ ID NO: 16494 - DNA, 25 bp, probe
aaataatgtgtgtgtgtgtgtgtgt

SEQ ID NO: 16495 - DNA, 25 bp, probe
tttgctcaagtctttctgctttctt

SEQ ID NO: 16496 - DNA, 25 bp, probe
agttatttgattccctgtctgtcgt

SEQ ID NO: 16497 - DNA, 25 bp, probe
tatttgattccctgtctgtcgtact

SEQ ID NO: 16498 - DNA, 25 bp, probe
actttcccttagttatttgattccc

SEQ ID NO: 16499 - DNA, 25 bp, probe
tctttctgctttcttctcctgttga

SEQ ID NO: 16500 - DNA, 25 bp, probe
gtctttctgctttcttctcctgttg

SEQ ID NO: 16501 - DNA, 25 bp, probe
agtctttctgctttcttctcctgtt

SEQ ID NO: 16502 - DNA, 25 bp, probe
caagtctttctgctttcttctcctg

SEQ ID NO: 16503 - DNA, 25 bp, probe
tcaagtctttctgctttcttctcct

SEQ ID NO: 16504 - DNA, 25 bp, probe
aaatgtaaataatgtgtgtgtgtgt

SEQ ID NO: 16505 - DNA, 25 bp, probe
ttgctcaagtctttctgctttcttc

SEQ ID NO: 16506 - DNA, 25 bp, probe
aagtctttctgctttcttctcctgt

SEQ ID NO: 16507 - DNA, 25 bp, probe
agtgagttacgactttgatgaggaa

SEQ ID NO: 16508 - DNA, 25 bp, probe
tgaaatgtaaataatgtgtgtgtgt

SEQ ID NO: 16509 - DNA, 25 bp, probe
gctcaagtctttctgctttcttctc

SEQ ID NO: 16510 - DNA, 25 bp, probe
acagatgatattagtgcagctagtc

SEQ ID NO: 16511 - DNA, 25 bp, probe
gacagatgatattagtgcagctagt

SEQ ID NO: 16512 - DNA, 25 bp, probe
cagacagatgatattagtgcagcta

SEQ ID NO: 16513 - DNA, 25 bp, probe
agacagatgatattagtgcagctag

SEQ ID NO: 16514 - DNA, 25 bp, probe
tacagtctcttctctcccagttatt

SEQ ID NO: 16515 - DNA, 25 bp, probe
ggacagacagatgatattagtgcag

SEQ ID NO: 16516 - DNA, 25 bp, probe
cagatgatattagtgcagctagtcg

SEQ ID NO: 16517 - DNA, 25 bp, probe
tcttctctcccagttattgcctaat

SEQ ID NO: 16518 - DNA, 25 bp, probe
ttgatgctgataatttgaccgttta

SEQ ID NO: 16519 - DNA, 25 bp, probe
ttctctcccagttattgcctaatac

SEQ ID NO: 16520 - DNA, 25 bp, probe
gacagacagatgatattagtgcagc

SEQ ID NO: 16521 - DNA, 25 bp, probe
cttctctcccagttattgcctaata

SEQ ID NO: 16522 - DNA, 25 bp, probe
atcctatgaactcaatagaacaagt

SEQ ID NO: 16523 - DNA, 25 bp, probe
gaagcaagagaagtgatttgagttg

SEQ ID NO: 16524 - DNA, 25 bp, probe
ctcttctctcccagttattgcctaa

SEQ ID NO: 16525 - DNA, 25 bp, probe
acagtctcttctctcccagttattg

SEQ ID NO: 16526 - DNA, 25 bp, probe
gaaactgaagcaagagaagtgattt

SEQ ID NO: 16527 - DNA, 25 bp, probe
acagacagatgatattagtgcagct

SEQ ID NO: 16528 - DNA, 25 bp, probe
ctctcccagttattgcctaatactt

SEQ ID NO: 16529 - DNA, 25 bp, probe
aaactgaagcaagagaagtgatttg

SEQ ID NO: 16530 - DNA, 25 bp, probe
aagcaagagaagtgatttgagttga

SEQ ID NO: 16531 - DNA, 25 bp, probe
tgaagcaagagaagtgatttgagtt

SEQ ID NO: 16532 - DNA, 25 bp, probe
tctctcccagttattgcctaatact

SEQ ID NO: 16533 - DNA, 25 bp, probe
tgatgctgataatttgaccgtttat

SEQ ID NO: 16534 - DNA, 25 bp, probe
aactgaagcaagagaagtgatttga

SEQ ID NO: 16535 - DNA, 25 bp, probe
agatgatattagtgcagctagtcgg

SEQ ID NO: 16536 - DNA, 25 bp, probe
gtacagtctcttctctcccagttat

SEQ ID NO: 16537 - DNA, 25 bp, probe
ctgaagcaagagaagtgatttgagt

SEQ ID NO: 16538 - DNA, 25 bp, probe
ccacagaaatcaagatgactaccag

SEQ ID NO: 16539 - DNA, 25 bp, probe
cattgcctctactttgtaaagatga

SEQ ID NO: 16540 - DNA, 25 bp, probe
tcattgcctctactttgtaaagatg

SEQ ID NO: 16541 - DNA, 25 bp, probe
actgaagcaagagaagtgatttgag

SEQ ID NO: 16542 - DNA, 25 bp, probe
tctcccagttattgcctaatactta

SEQ ID NO: 16543 - DNA, 25 bp, probe
agcaagagaagtgatttgagttgac

SEQ ID NO: 16544 - DNA, 25 bp, probe
tccacagaaatcaagatgactacca

SEQ ID NO: 16545 - DNA, 25 bp, probe
gcaagagaagtgatttgagttgact

SEQ ID NO: 16546 - DNA, 25 bp, probe
ggaaactgaagcaagagaagtgatt

SEQ ID NO: 16547 - DNA, 25 bp, probe
tgtccacagaaatcaagatgactac

SEQ ID NO: 16548 - DNA, 25 bp, probe
tgtatcctatgaactcaatagaaca

SEQ ID NO: 16549 - DNA, 25 bp, probe
gtgtccacagaaatcaagatgacta

SEQ ID NO: 16550 - DNA, 25 bp, probe
ctactttgtaaagatgaggagtcac

SEQ ID NO: 16551 - DNA, 25 bp, probe
tctactttgtaaagatgaggagtca

SEQ ID NO: 16552 - DNA, 25 bp, probe
actttgtaaagatgaggagtcacag

SEQ ID NO: 16553 - DNA, 25 bp, probe
tctcttctctcccagttattgccta

SEQ ID NO: 16554 - DNA, 25 bp, probe
ggaagttactctcatggttatggtg

SEQ ID NO: 16555 - DNA, 25 bp, probe
gaagttactctcatggttatggtgc

SEQ ID NO: 16556 - DNA, 25 bp, probe
agagttgtggctgtatttaagttca

SEQ ID NO: 16557 - DNA, 25 bp, probe
ttcaagggaaatctgtagaaggatg

SEQ ID NO: 16558 - DNA, 25 bp, probe
gttcaagggaaatctgtagaaggat

SEQ ID NO: 16559 - DNA, 25 bp, probe
aagttcaagggaaatctgtagaagg

SEQ ID NO: 16560 - DNA, 25 bp, probe
caagggaaatctgtagaaggatgtc

SEQ ID NO: 16561 - DNA, 25 bp, probe
tggctgtatttaagttcaagggaaa

SEQ ID NO: 16562 - DNA, 25 bp, probe
tcaagggaaatctgtagaaggatgt

SEQ ID NO: 16563 - DNA, 25 bp, probe
gagttgtggctgtatttaagttcaa

SEQ ID NO: 16564 - DNA, 25 bp, probe
agttgtggctgtatttaagttcaag

SEQ ID NO: 16565 - DNA, 25 bp, probe
gttgtggctgtatttaagttcaagg

SEQ ID NO: 16566 - DNA, 25 bp, probe
gtaatgtccttactccttcagccat

SEQ ID NO: 16567 - DNA, 25 bp, probe
agttcaagggaaatctgtagaagga

SEQ ID NO: 16568 - DNA, 25 bp, probe
tccactttgagtttgcttattgatg

SEQ ID NO: 16569 - DNA, 25 bp, probe
ccactttgagtttgcttattgatgt

SEQ ID NO: 16570 - DNA, 25 bp, probe
tttccactttgagtttgcttattga

SEQ ID NO: 16571 - DNA, 25 bp, probe
gtggctgtatttaagttcaagggaa

SEQ ID NO: 16572 - DNA, 25 bp, probe
ttactctcatggttatggtgccttg

SEQ ID NO: 16573 - DNA, 25 bp, probe
gttactctcatggttatggtgcctt

SEQ ID NO: 16574 - DNA, 25 bp, probe
aagttactctcatggttatggtgcc

SEQ ID NO: 16575 - DNA, 25 bp, probe
tttgagtttgcttattgatgtcaca

SEQ ID NO: 16576 - DNA, 25 bp, probe
actttgagtttgcttattgatgtca

SEQ ID NO: 16577 - DNA, 25 bp, probe
ttccactttgagtttgcttattgat

SEQ ID NO: 16578 - DNA, 25 bp, probe
ctttgagtttgcttattgatgtcac

SEQ ID NO: 16579 - DNA, 25 bp, probe
cactttgagtttgcttattgatgtc

SEQ ID NO: 16580 - DNA, 25 bp, probe
taatgtccttactccttcagccatt

SEQ ID NO: 16581 - DNA, 25 bp, probe
gtctgctttgggaaggtactaataa

SEQ ID NO: 16582 - DNA, 25 bp, probe
atatatcacatgggcagagagaaac

SEQ ID NO: 16583 - DNA, 25 bp, probe
tctgctttgggaaggtactaataat

SEQ ID NO: 16584 - DNA, 25 bp, probe
ggctgtatttaagttcaagggaaat

SEQ ID NO: 16585 - DNA, 25 bp, probe
ttgtggctgtatttaagttcaaggg

SEQ ID NO: 16586 - DNA, 25 bp, probe
ctgctttgggaaggtactaataatc

SEQ ID NO: 16587 - DNA, 25 bp, probe
taagttcaagggaaatctgtagaag

SEQ ID NO: 16588 - DNA, 25 bp, probe
cagagttgtggctgtatttaagttc

SEQ ID NO: 16589 - DNA, 25 bp, probe
atatcacatgggcagagagaaacta

SEQ ID NO: 16590 - DNA, 25 bp, probe
tatatcacatgggcagagagaaact

SEQ ID NO: 16591 - DNA, 25 bp, probe
ggaaggtactaataatcctcttgca

SEQ ID NO: 16592 - DNA, 25 bp, probe
gagtttgcttattgatgtcacatgg

SEQ ID NO: 16593 - DNA, 25 bp, probe
ttgagtttgcttattgatgtcacat

SEQ ID NO: 16594 - DNA, 25 bp, probe
tgtggctgtatttaagttcaaggga

SEQ ID NO: 16595 - DNA, 25 bp, probe
tatcacatgggcagagagaaactaa

SEQ ID NO: 16596 - DNA, 25 bp, probe
tatatatcacatgggcagagagaaa

SEQ ID NO: 16597 - DNA, 25 bp, probe
ttatatatcacatgggcagagagaa

SEQ ID NO: 16598 - DNA, 25 bp, probe
acagaatatggagaacaaggtaaga

SEQ ID NO: 16599 - DNA, 25 bp, probe
aacagaatatggagaacaaggtaag

SEQ ID NO: 16600 - DNA, 25 bp, probe
cagaatatggagaacaaggtaagaa

SEQ ID NO: 16601 - DNA, 25 bp, probe
ggagaacaaggtaagaaaggtcata

SEQ ID NO: 16602 - DNA, 25 bp, probe
tatggagaacaaggtaagaaaggtc

SEQ ID NO: 16603 - DNA, 25 bp, probe
aactgctttctctttcacattcttg

SEQ ID NO: 16604 - DNA, 25 bp, probe
taagaaaggtcatagccaaggtaac

SEQ ID NO: 16605 - DNA, 25 bp, probe
gtaagaaaggtcatagccaaggtaa

SEQ ID NO: 16606 - DNA, 25 bp, probe
agaacaaggtaagaaaggtcatagc

SEQ ID NO: 16607 - DNA, 25 bp, probe
atatggagaacaaggtaagaaaggt

SEQ ID NO: 16608 - DNA, 25 bp, probe
gaactgctttctctttcacattctt

SEQ ID NO: 16609 - DNA, 25 bp, probe
gagaacaaggtaagaaaggtcatag

SEQ ID NO: 16610 - DNA, 25 bp, probe
caaggtaagaaaggtcatagccaag

SEQ ID NO: 16611 - DNA, 25 bp, probe
gaacaaggtaagaaaggtcatagcc

SEQ ID NO: 16612 - DNA, 25 bp, probe
tggagaacaaggtaagaaaggtcat

SEQ ID NO: 16613 - DNA, 25 bp, probe
atggagaacaaggtaagaaaggtca

SEQ ID NO: 16614 - DNA, 25 bp, probe
aatatggagaacaaggtaagaaagg

SEQ ID NO: 16615 - DNA, 25 bp, probe
aagaaaggtcatagccaaggtaact

SEQ ID NO: 16616 - DNA, 25 bp, probe
ggtaagaaaggtcatagccaaggta

SEQ ID NO: 16617 - DNA, 25 bp, probe
acaaggtaagaaaggtcatagccaa

SEQ ID NO: 16618 - DNA, 25 bp, probe
aacaaggtaagaaaggtcatagcca

SEQ ID NO: 16619 - DNA, 25 bp, probe
cactctctgaactgctttctctttc

SEQ ID NO: 16620 - DNA, 25 bp, probe
aaacagaatatggagaacaaggtaa

SEQ ID NO: 16621 - DNA, 25 bp, probe
ctgctttctctttcacattcttgta

SEQ ID NO: 16622 - DNA, 25 bp, probe
tgctttctctttcacattcttgtat

SEQ ID NO: 16623 - DNA, 25 bp, probe
actgctttctctttcacattcttgt

SEQ ID NO: 16624 - DNA, 25 bp, probe
agaaaggtcatagccaaggtaactg

SEQ ID NO: 16625 - DNA, 25 bp, probe
aaggtaagaaaggtcatagccaagg

SEQ ID NO: 16626 - DNA, 25 bp, probe
atcactctctgaactgctttctctt

SEQ ID NO: 16627 - DNA, 25 bp, probe
tcactctctgaactgctttctcttt

SEQ ID NO: 16628 - DNA, 25 bp, probe
agaatatggagaacaaggtaagaaa

SEQ ID NO: 16629 - DNA, 25 bp, probe
gaatatggagaacaaggtaagaaag

SEQ ID NO: 16630 - DNA, 25 bp, probe
gctttctctttcacattcttgtatt

SEQ ID NO: 16631 - DNA, 25 bp, probe
catcactctctgaactgctttctct

SEQ ID NO: 16632 - DNA, 25 bp, probe
acatcactctctgaactgctttctc

SEQ ID NO: 16633 - DNA, 25 bp, probe
gacatcactctctgaactgctttct

SEQ ID NO: 16634 - DNA, 25 bp, probe
tgacatcactctctgaactgctttc

SEQ ID NO: 16635 - DNA, 25 bp, probe
ctgacatcactctctgaactgcttt

SEQ ID NO: 16636 - DNA, 25 bp, probe
aggtaagaaaggtcatagccaaggt

SEQ ID NO: 16637 - DNA, 25 bp, probe
ttgactgccaaatgggttgttagta

SEQ ID NO: 16638 - DNA, 25 bp, probe
tgtggctttctccatcatagaatag

SEQ ID NO: 16639 - DNA, 25 bp, probe
ctgtggctttctccatcatagaata

SEQ ID NO: 16640 - DNA, 25 bp, probe
ggctttctccatcatagaatagcat

SEQ ID NO: 16641 - DNA, 25 bp, probe
aaatagttgcatctgtggctttctc

SEQ ID NO: 16642 - DNA, 25 bp, probe
aacttggaccctttctttaactgag

SEQ ID NO: 16643 - DNA, 25 bp, probe
gaacttggaccctttctttaactga

SEQ ID NO: 16644 - DNA, 25 bp, probe
acttggaccctttctttaactgagc

SEQ ID NO: 16645 - DNA, 25 bp, probe
aagagaacttggaccctttctttaa

SEQ ID NO: 16646 - DNA, 25 bp, probe
gaagagaacttggaccctttcttta

SEQ ID NO: 16647 - DNA, 25 bp, probe
gagaacttggaccctttctttaact

SEQ ID NO: 16648 - DNA, 25 bp, probe
agagaacttggaccctttctttaac

SEQ ID NO: 16649 - DNA, 25 bp, probe
agaacttggaccctttctttaactg

SEQ ID NO: 16650 - DNA, 25 bp, probe
gtcaacatggaagagaacttggacc

SEQ ID NO: 16651 - DNA, 25 bp, probe
cttggaccctttctttaactgagct

SEQ ID NO: 16652 - DNA, 25 bp, probe
cgtcaacatggaagagaacttggac

SEQ ID NO: 16653 - DNA, 25 bp, probe
catggaagagaacttggaccctttc

SEQ ID NO: 16654 - DNA, 25 bp, probe
ggaagagaacttggaccctttcttt

SEQ ID NO: 16655 - DNA, 25 bp, probe
acgtcaacatggaagagaacttgga

SEQ ID NO: 16656 - DNA, 25 bp, probe
acatggaagagaacttggacccttt

SEQ ID NO: 16657 - DNA, 25 bp, probe
aacatggaagagaacttggaccctt

SEQ ID NO: 16658 - DNA, 25 bp, probe
atggaagagaacttggaccctttct

SEQ ID NO: 16659 - DNA, 25 bp, probe
tggaagagaacttggaccctttctt

SEQ ID NO: 16660 - DNA, 25 bp, probe
caacatggaagagaacttggaccct

SEQ ID NO: 16661 - DNA, 25 bp, probe
tcaacatggaagagaacttggaccc

SEQ ID NO: 16662 - DNA, 25 bp, probe
ttggaccctttctttaactgagctc

SEQ ID NO: 16663 - DNA, 25 bp, probe
aaggttatgattcatccagatccag

SEQ ID NO: 16664 - DNA, 25 bp, probe
ggttatgattcatccagatccagag

SEQ ID NO: 16665 - DNA, 25 bp, probe
aggttatgattcatccagatccaga

SEQ ID NO: 16666 - DNA, 25 bp, probe
taaggttatgattcatccagatcca

SEQ ID NO: 16667 - DNA, 25 bp, probe
ttaaggttatgattcatccagatcc

SEQ ID NO: 16668 - DNA, 25 bp, probe
tctctgaataggtcccaaacttaaa

SEQ ID NO: 16669 - DNA, 25 bp, probe
tgaataggtcccaaacttaaatgtg

SEQ ID NO: 16670 - DNA, 25 bp, probe
ctgaataggtcccaaacttaaatgt

SEQ ID NO: 16671 - DNA, 25 bp, probe
ttctctgaataggtcccaaacttaa

SEQ ID NO: 16672 - DNA, 25 bp, probe
tctgaataggtcccaaacttaaatg

SEQ ID NO: 16673 - DNA, 25 bp, probe
agtcatctttgaggtgtaatcttgt

SEQ ID NO: 16674 - DNA, 25 bp, probe
ctctgaataggtcccaaacttaaat

SEQ ID NO: 16675 - DNA, 25 bp, probe
gtcatctttgaggtgtaatcttgtt

SEQ ID NO: 16676 - DNA, 25 bp, probe
aagtcatctttgaggtgtaatcttg

SEQ ID NO: 16677 - DNA, 25 bp, probe
aagccctttattgacatggttctat

SEQ ID NO: 16678 - DNA, 25 bp, probe
agccctttattgacatggttctata

SEQ ID NO: 16679 - DNA, 25 bp, probe
atatgaagccctttattgacatggt

SEQ ID NO: 16680 - DNA, 25 bp, probe
tatgaagccctttattgacatggtt

SEQ ID NO: 16681 - DNA, 25 bp, probe
tcatctttgaggtgtaatcttgttt

SEQ ID NO: 16682 - DNA, 25 bp, probe
gaagccctttattgacatggttcta

SEQ ID NO: 16683 - DNA, 25 bp, probe
gccctttattgacatggttctatat

SEQ ID NO: 16684 - DNA, 25 bp, probe
tatatgaagccctttattgacatgg

SEQ ID NO: 16685 - DNA, 25 bp, probe
ctaagtcatctttgaggtgtaatct

SEQ ID NO: 16686 - DNA, 25 bp, probe
cctaagtcatctttgaggtgtaatc

SEQ ID NO: 16687 - DNA, 25 bp, probe
atgaagccctttattgacatggttc

SEQ ID NO: 16688 - DNA, 25 bp, probe
aggtcccaaacttaaatgtggtatt

SEQ ID NO: 16689 - DNA, 25 bp, probe
aataggtcccaaacttaaatgtggt

SEQ ID NO: 16690 - DNA, 25 bp, probe
gaataggtcccaaacttaaatgtgg

SEQ ID NO: 16691 - DNA, 25 bp, probe
taggtcccaaacttaaatgtggtat

SEQ ID NO: 16692 - DNA, 25 bp, probe
ataggtcccaaacttaaatgtggta

SEQ ID NO: 16693 - DNA, 25 bp, probe
attctctgaataggtcccaaactta

SEQ ID NO: 16694 - DNA, 25 bp, probe
cccaagagtgtgtattactttgtaa

SEQ ID NO: 16695 - DNA, 25 bp, probe
ggtcccaaacttaaatgtggtatta

SEQ ID NO: 16696 - DNA, 25 bp, probe
taagtcatctttgaggtgtaatctt

SEQ ID NO: 16697 - DNA, 25 bp, probe
tgaagccctttattgacatggttct

SEQ ID NO: 16698 - DNA, 25 bp, probe
cccaaacttaaatgtggtattagac

SEQ ID NO: 16699 - DNA, 25 bp, probe
gtcccaaacttaaatgtggtattag

SEQ ID NO: 16700 - DNA, 25 bp, probe
tacagaattatacccatctaccaaa

SEQ ID NO: 16701 - DNA, 25 bp, probe
ttacagaattatacccatctaccaa

SEQ ID NO: 16702 - DNA, 25 bp, probe
tttacagaattatacccatctacca

SEQ ID NO: 16703 - DNA, 25 bp, probe
tttgaccatgtttacattcctttaa

SEQ ID NO: 16704 - DNA, 25 bp, probe
tcccaaacttaaatgtggtattaga

SEQ ID NO: 16705 - DNA, 25 bp, probe
atatatgaagccctttattgacatg

SEQ ID NO: 16706 - DNA, 25 bp, probe
ccccaagagtgtgtattactttgta

SEQ ID NO: 16707 - DNA, 25 bp, probe
atatccaagtatcctcagcacagaa

SEQ ID NO: 16708 - DNA, 25 bp, probe
aatatccaagtatcctcagcacaga

SEQ ID NO: 16709 - DNA, 25 bp, probe
gatgctccagttagtaattcataca

SEQ ID NO: 16710 - DNA, 25 bp, probe
agatgctccagttagtaattcatac

SEQ ID NO: 16711 - DNA, 25 bp, probe
tgctccagttagtaattcatacatt

SEQ ID NO: 16712 - DNA, 25 bp, probe
atgctccagttagtaattcatacat

SEQ ID NO: 16713 - DNA, 25 bp, probe
gagatgctccagttagtaattcata

SEQ ID NO: 16714 - DNA, 25 bp, probe
aacaaatatccaagtatcctcagca

SEQ ID NO: 16715 - DNA, 25 bp, probe
aaatatccaagtatcctcagcacag

SEQ ID NO: 16716 - DNA, 25 bp, probe
tcatacattagaacacccaaactcc

SEQ ID NO: 16717 - DNA, 25 bp, probe
gaacaaatatccaagtatcctcagc

SEQ ID NO: 16718 - DNA, 25 bp, probe
caaatatccaagtatcctcagcaca

SEQ ID NO: 16719 - DNA, 25 bp, probe
acaaatatccaagtatcctcagcac

SEQ ID NO: 16720 - DNA, 25 bp, probe
atacattagaacacccaaactccac

SEQ ID NO: 16721 - DNA, 25 bp, probe
catacattagaacacccaaactcca

SEQ ID NO: 16722 - DNA, 25 bp, probe
tatccaagtatcctcagcacagaaa

SEQ ID NO: 16723 - DNA, 25 bp, probe
ttcatacattagaacacccaaactc

SEQ ID NO: 16724 - DNA, 25 bp, probe
attatcgtttacatcagcctaaccg

SEQ ID NO: 16725 - DNA, 25 bp, probe
aattatcgtttacatcagcctaacc

SEQ ID NO: 16726 - DNA, 25 bp, probe
gcaagaaagacatttagagaacaaa

SEQ ID NO: 16727 - DNA, 25 bp, probe
attcatacattagaacacccaaact

SEQ ID NO: 16728 - DNA, 25 bp, probe
agaacaaatatccaagtatcctcag

SEQ ID NO: 16729 - DNA, 25 bp, probe
atccaagtatcctcagcacagaaag

SEQ ID NO: 16730 - DNA, 25 bp, probe
ttaccacataaacatcactttgtct

SEQ ID NO: 16731 - DNA, 25 bp, probe
tacattagaacacccaaactccacc

SEQ ID NO: 16732 - DNA, 25 bp, probe
aacatcactttgtctatcctcattt

SEQ ID NO: 16733 - DNA, 25 bp, probe
aaacatcactttgtctatcctcatt

SEQ ID NO: 16734 - DNA, 25 bp, probe
accacataaacatcactttgtctat

SEQ ID NO: 16735 - DNA, 25 bp, probe
gctccagttagtaattcatacatta

SEQ ID NO: 16736 - DNA, 25 bp, probe
aattcatacattagaacacccaaac

SEQ ID NO: 16737 - DNA, 25 bp, probe
gagaacaaatatccaagtatcctca

SEQ ID NO: 16738 - DNA, 25 bp, probe
cttcagattcaactgggcacataaa

SEQ ID NO: 16739 - DNA, 25 bp, probe
aaattatcgtttacatcagcctaac

SEQ ID NO: 16740 - DNA, 25 bp, probe
agtaattcatacattagaacaccca

SEQ ID NO: 16741 - DNA, 25 bp, probe
agagaacaaatatccaagtatcctc

SEQ ID NO: 16742 - DNA, 25 bp, probe
cacataaacatcactttgtctatcc

SEQ ID NO: 16743 - DNA, 25 bp, probe
ccacataaacatcactttgtctatc

SEQ ID NO: 16744 - DNA, 25 bp, probe
tttaccacataaacatcactttgtc

SEQ ID NO: 16745 - DNA, 25 bp, probe
tttacatcagcctaaccgcagaaat

SEQ ID NO: 16746 - DNA, 25 bp, probe
acataaacatcactttgtctatcct

SEQ ID NO: 16747 - DNA, 25 bp, probe
taccacataaacatcactttgtcta

SEQ ID NO: 16748 - DNA, 25 bp, probe
acacatgcaagaaagacatttagag

SEQ ID NO: 16749 - DNA, 25 bp, probe
tgcaagaaagacatttagagaacaa

SEQ ID NO: 16750 - DNA, 25 bp, probe
cacatgcaagaaagacatttagaga

SEQ ID NO: 16751 - DNA, 25 bp, probe
agtgaagagtgagataaggagagag

SEQ ID NO: 16752 - DNA, 25 bp, probe
aacagtgaagagtgagataaggaga

SEQ ID NO: 16753 - DNA, 25 bp, probe
cagtgaagagtgagataaggagaga

SEQ ID NO: 16754 - DNA, 25 bp, probe
acagtgaagagtgagataaggagag

SEQ ID NO: 16755 - DNA, 25 bp, probe
gaagagtgagataaggagagaggac

SEQ ID NO: 16756 - DNA, 25 bp, probe
tgaagagtgagataaggagagagga

SEQ ID NO: 16757 - DNA, 25 bp, probe
gtgaagagtgagataaggagagagg

SEQ ID NO: 16758 - DNA, 25 bp, probe
aagagtgagataaggagagaggaca

SEQ ID NO: 16759 - DNA, 25 bp, probe
aaacagtgaagagtgagataaggag

SEQ ID NO: 16760 - DNA, 25 bp, probe
gaaacagtgaagagtgagataagga

SEQ ID NO: 16761 - DNA, 25 bp, probe
aggaaacagtgaagagtgagataag

SEQ ID NO: 16762 - DNA, 25 bp, probe
gtaaggaaacagtgaagagtgagat

SEQ ID NO: 16763 - DNA, 25 bp, probe
aaggaaacagtgaagagtgagataa

SEQ ID NO: 16764 - DNA, 25 bp, probe
ggagagaggacaccaaagaaataag

SEQ ID NO: 16765 - DNA, 25 bp, probe
ggaaacagtgaagagtgagataagg

SEQ ID NO: 16766 - DNA, 25 bp, probe
aggagagaggacaccaaagaaataa

SEQ ID NO: 16767 - DNA, 25 bp, probe
aaggagagaggacaccaaagaaata

SEQ ID NO: 16768 - DNA, 25 bp, probe
taaggagagaggacaccaaagaaat

SEQ ID NO: 16769 - DNA, 25 bp, probe
ataaggagagaggacaccaaagaaa

SEQ ID NO: 16770 - DNA, 25 bp, probe
taaggaaacagtgaagagtgagata

SEQ ID NO: 16771 - DNA, 25 bp, probe
gatagttgattcatgtgcagagagg

SEQ ID NO: 16772 - DNA, 25 bp, probe
ttgatagttgattcatgtgcagaga

SEQ ID NO: 16773 - DNA, 25 bp, probe
attgatagttgattcatgtgcagag

SEQ ID NO: 16774 - DNA, 25 bp, probe
gagagaggacaccaaagaaataagc

SEQ ID NO: 16775 - DNA, 25 bp, probe
tgatagttgattcatgtgcagagag

SEQ ID NO: 16776 - DNA, 25 bp, probe
gataaggagagaggacaccaaagaa

SEQ ID NO: 16777 - DNA, 25 bp, probe
agagtgagataaggagagaggacac

SEQ ID NO: 16778 - DNA, 25 bp, probe
tgggaattgctggtactatttatgt

SEQ ID NO: 16779 - DNA, 25 bp, probe
gagaggacaccaaagaaataagcag

SEQ ID NO: 16780 - DNA, 25 bp, probe
atagttgattcatgtgcagagaggt

SEQ ID NO: 16781 - DNA, 25 bp, probe
tcttgggaattgctggtactattta

SEQ ID NO: 16782 - DNA, 25 bp, probe
ttgggaattgctggtactatttatg

SEQ ID NO: 16783 - DNA, 25 bp, probe
gagataaggagagaggacaccaaag

SEQ ID NO: 16784 - DNA, 25 bp, probe
aatgtaaggaaacagtgaagagtga

SEQ ID NO: 16785 - DNA, 25 bp, probe
tgaatgtaaggaaacagtgaagagt

SEQ ID NO: 16786 - DNA, 25 bp, probe
gtcttgggaattgctggtactattt

SEQ ID NO: 16787 - DNA, 25 bp, probe
gaatgtaaggaaacagtgaagagtg

SEQ ID NO: 16788 - DNA, 25 bp, probe
agagaggacaccaaagaaataagca

SEQ ID NO: 16789 - DNA, 25 bp, probe
atgtaaggaaacagtgaagagtgag

SEQ ID NO: 16790 - DNA, 25 bp, probe
gacatcaatacactgctgctctctg

SEQ ID NO: 16791 - DNA, 25 bp, probe
cttgggaattgctggtactatttat

SEQ ID NO: 16792 - DNA, 25 bp, probe
tattgatagttgattcatgtgcaga

SEQ ID NO: 16793 - DNA, 25 bp, probe
ccaaagaaataagcaggtttaatga

SEQ ID NO: 16794 - DNA, 25 bp, probe
agataaggagagaggacaccaaaga

SEQ ID NO: 16795 - DNA, 25 bp, probe
gaatatggttctcctactaactagc

SEQ ID NO: 16796 - DNA, 25 bp, probe
atggttctcctactaactagcttct

SEQ ID NO: 16797 - DNA, 25 bp, probe
tggttctcctactaactagcttctt

SEQ ID NO: 16798 - DNA, 25 bp, probe
tatggttctcctactaactagcttc

SEQ ID NO: 16799 - DNA, 25 bp, probe
ggttctcctactaactagcttctta

SEQ ID NO: 16800 - DNA, 25 bp, probe
gctaggtcatttggaaactgtaaac

SEQ ID NO: 16801 - DNA, 25 bp, probe
ctaggtcatttggaaactgtaaaca

SEQ ID NO: 16802 - DNA, 25 bp, probe
atatggttctcctactaactagctt

SEQ ID NO: 16803 - DNA, 25 bp, probe
aatatggttctcctactaactagct

SEQ ID NO: 16804 - DNA, 25 bp, probe
tctcctactaactagcttcttatct

SEQ ID NO: 16805 - DNA, 25 bp, probe
cctactaactagcttcttatcttgt

SEQ ID NO: 16806 - DNA, 25 bp, probe
acagaatatggttctcctactaact

SEQ ID NO: 16807 - DNA, 25 bp, probe
aacaccagtcatactctattactaa

SEQ ID NO: 16808 - DNA, 25 bp, probe
agctaggtcatttggaaactgtaaa

SEQ ID NO: 16809 - DNA, 25 bp, probe
tcctactaactagcttcttatcttg

SEQ ID NO: 16810 - DNA, 25 bp, probe
gttctcctactaactagcttcttat

SEQ ID NO: 16811 - DNA, 25 bp, probe
ccagtcatactctattactaaagca

SEQ ID NO: 16812 - DNA, 25 bp, probe
accagtcatactctattactaaagc

SEQ ID NO: 16813 - DNA, 25 bp, probe
ctcctactaactagcttcttatctt

SEQ ID NO: 16814 - DNA, 25 bp, probe
ttctcctactaactagcttcttatc

SEQ ID NO: 16815 - DNA, 25 bp, probe
acgttgaaaggattgcataaagaat

SEQ ID NO: 16816 - DNA, 25 bp, probe
tacacgttgaaaggattgcataaag

SEQ ID NO: 16817 - DNA, 25 bp, probe
gattacacgttgaaaggattgcata

SEQ ID NO: 16818 - DNA, 25 bp, probe
ttacacgttgaaaggattgcataaa

SEQ ID NO: 16819 - DNA, 25 bp, probe
attacacgttgaaaggattgcataa

SEQ ID NO: 16820 - DNA, 25 bp, probe
cacgttgaaaggattgcataaagaa

SEQ ID NO: 16821 - DNA, 25 bp, probe
taggtcatttggaaactgtaaacag

SEQ ID NO: 16822 - DNA, 25 bp, probe
cagatttcttgagcatgaatggcat

SEQ ID NO: 16823 - DNA, 25 bp, probe
cgttgaaaggattgcataaagaatg

SEQ ID NO: 16824 - DNA, 25 bp, probe
actcttatacagaatatggttctcc

SEQ ID NO: 16825 - DNA, 25 bp, probe
aaataatggttcatttcctccactg

SEQ ID NO: 16826 - DNA, 25 bp, probe
ttcttgagcatgaatggcatgtata

SEQ ID NO: 16827 - DNA, 25 bp, probe
acacgttgaaaggattgcataaaga

SEQ ID NO: 16828 - DNA, 25 bp, probe
aataatggttcatttcctccactgg

SEQ ID NO: 16829 - DNA, 25 bp, probe
tcttgagcatgaatggcatgtatag

SEQ ID NO: 16830 - DNA, 25 bp, probe
tacagaatatggttctcctactaac

SEQ ID NO: 16831 - DNA, 25 bp, probe
ctcttatacagaatatggttctcct

SEQ ID NO: 16832 - DNA, 25 bp, probe
ggattacacgttgaaaggattgcat

SEQ ID NO: 16833 - DNA, 25 bp, probe
cagaatatggttctcctactaacta

SEQ ID NO: 16834 - DNA, 25 bp, probe
tagctaggtcatttggaaactgtaa

SEQ ID NO: 16835 - DNA, 25 bp, probe
acaccagtcatactctattactaaa

SEQ ID NO: 16836 - DNA, 25 bp, probe
aaacaccagtcatactctattacta

SEQ ID NO: 16837 - DNA, 25 bp, probe
atagctaggtcatttggaaactgta

SEQ ID NO: 16838 - DNA, 25 bp, probe
gggaaaacaccagtcatactctatt

SEQ ID NO: 16839 - DNA, 25 bp, probe
ctttgagattgaagccctttgtaat

SEQ ID NO: 16840 - DNA, 25 bp, probe
aaactgttcctctcttctcactttg

SEQ ID NO: 16841 - DNA, 25 bp, probe
gaaactgttcctctcttctcacttt

SEQ ID NO: 16842 - DNA, 25 bp, probe
actttgagattgaagccctttgtaa

SEQ ID NO: 16843 - DNA, 25 bp, probe
cactttgagattgaagccctttgta

SEQ ID NO: 16844 - DNA, 25 bp, probe
aactgttcctctcttctcactttga

SEQ ID NO: 16845 - DNA, 25 bp, probe
tgaaactgttcctctcttctcactt

SEQ ID NO: 16846 - DNA, 25 bp, probe
ctggtgaaactgttcctctcttctc

SEQ ID NO: 16847 - DNA, 25 bp, probe
ctctggtgaaactgttcctctcttc

SEQ ID NO: 16848 - DNA, 25 bp, probe
tctggtgaaactgttcctctcttct

SEQ ID NO: 16849 - DNA, 25 bp, probe
tcactttgagattgaagccctttgt

SEQ ID NO: 16850 - DNA, 25 bp, probe
actctggtgaaactgttcctctctt

SEQ ID NO: 16851 - DNA, 25 bp, probe
cagggtaagaaagatcggtgacatc

SEQ ID NO: 16852 - DNA, 25 bp, probe
ttacaccaccagggtaagaaagatc

SEQ ID NO: 16853 - DNA, 25 bp, probe
tggtgaaactgttcctctcttctca

SEQ ID NO: 16854 - DNA, 25 bp, probe
gtaagaaagatcggtgacatctggg

SEQ ID NO: 16855 - DNA, 25 bp, probe
ggtaagaaagatcggtgacatctgg

SEQ ID NO: 16856 - DNA, 25 bp, probe
gggtaagaaagatcggtgacatctg

SEQ ID NO: 16857 - DNA, 25 bp, probe
ccagggtaagaaagatcggtgacat

SEQ ID NO: 16858 - DNA, 25 bp, probe
agggtaagaaagatcggtgacatct

SEQ ID NO: 16859 - DNA, 25 bp, probe
cactctggtgaaactgttcctctct

SEQ ID NO: 16860 - DNA, 25 bp, probe
tacaccaccagggtaagaaagatcg

SEQ ID NO: 16861 - DNA, 25 bp, probe
actgttcctctcttctcactttgag

SEQ ID NO: 16862 - DNA, 25 bp, probe
ctcactttgagattgaagccctttg

SEQ ID NO: 16863 - DNA, 25 bp, probe
gtgaaactgttcctctcttctcact

SEQ ID NO: 16864 - DNA, 25 bp, probe
taagaaagatcggtgacatctgggc

SEQ ID NO: 16865 - DNA, 25 bp, probe
ggtgaaactgttcctctcttctcac

SEQ ID NO: 16866 - DNA, 25 bp, probe
cttacaccaccagggtaagaaagat

SEQ ID NO: 16867 - DNA, 25 bp, probe
aaagatcggtgacatctgggctttc

SEQ ID NO: 16868 - DNA, 25 bp, probe
gaaagatcggtgacatctgggcttt

SEQ ID NO: 16869 - DNA, 25 bp, probe
tcactctggtgaaactgttcctctc

SEQ ID NO: 16870 - DNA, 25 bp, probe
gcttacaccaccagggtaagaaaga

SEQ ID NO: 16871 - DNA, 25 bp, probe
agcttacaccaccagggtaagaaag

SEQ ID NO: 16872 - DNA, 25 bp, probe
cagcttacaccaccagggtaagaaa

SEQ ID NO: 16873 - DNA, 25 bp, probe
gggtccttcggagatatctacctgg

SEQ ID NO: 16874 - DNA, 25 bp, probe
tgtcaataaatgcctcatcaagaac

SEQ ID NO: 16875 - DNA, 25 bp, probe
gtcaataaatgcctcatcaagaacc

SEQ ID NO: 16876 - DNA, 25 bp, probe
agtttgtcaataaatgcctcatcaa

SEQ ID NO: 16877 - DNA, 25 bp, probe
ttgtcaataaatgcctcatcaagaa

SEQ ID NO: 16878 - DNA, 25 bp, probe
tttgtcaataaatgcctcatcaaga

SEQ ID NO: 16879 - DNA, 25 bp, probe
gtttgtcaataaatgcctcatcaag

SEQ ID NO: 16880 - DNA, 25 bp, probe
aataaatgcctcatcaagaacccag

SEQ ID NO: 16881 - DNA, 25 bp, probe
tcaataaatgcctcatcaagaaccc

SEQ ID NO: 16882 - DNA, 25 bp, probe
gagtttgtcaataaatgcctcatca

SEQ ID NO: 16883 - DNA, 25 bp, probe
ggagtttgtcaataaatgcctcatc

SEQ ID NO: 16884 - DNA, 25 bp, probe
caataaatgcctcatcaagaaccca

SEQ ID NO: 16885 - DNA, 25 bp, probe
aggagtttgtcaataaatgcctcat

SEQ ID NO: 16886 - DNA, 25 bp, probe
caggagtttgtcaataaatgcctca

SEQ ID NO: 16887 - DNA, 25 bp, probe
ccaggagtttgtcaataaatgcctc

SEQ ID NO: 16888 - DNA, 25 bp, probe
tccaggagtttgtcaataaatgcct

SEQ ID NO: 16889 - DNA, 25 bp, probe
tacaaaacaaaacagggagagaaaa

SEQ ID NO: 16890 - DNA, 25 bp, probe
ttacaaaacaaaacagggagagaaa

SEQ ID NO: 16891 - DNA, 25 bp, probe
ataaatgcctcatcaagaacccagc

SEQ ID NO: 16892 - DNA, 25 bp, probe
gttacaaaacaaaacagggagagaa

SEQ ID NO: 16893 - DNA, 25 bp, probe
taggttacaaaacaaaacagggaga

SEQ ID NO: 16894 - DNA, 25 bp, probe
ttaggttacaaaacaaaacagggag

SEQ ID NO: 16895 - DNA, 25 bp, probe
cttaggttacaaaacaaaacaggga

SEQ ID NO: 16896 - DNA, 25 bp, probe
ctgcttccttaggttacaaaacaaa

SEQ ID NO: 16897 - DNA, 25 bp, probe
tgcttccttaggttacaaaacaaaa

SEQ ID NO: 16898 - DNA, 25 bp, probe
tctgcttccttaggttacaaaacaa

SEQ ID NO: 16899 - DNA, 25 bp, probe
gaggctctgcttccttaggttacaa

SEQ ID NO: 16900 - DNA, 25 bp, probe
gcttccttaggttacaaaacaaaac

SEQ ID NO: 16901 - DNA, 25 bp, probe
ctctgcttccttaggttacaaaaca

SEQ ID NO: 16902 - DNA, 25 bp, probe
ggttacaaaacaaaacagggagaga

SEQ ID NO: 16903 - DNA, 25 bp, probe
aggttacaaaacaaaacagggagag

SEQ ID NO: 16904 - DNA, 25 bp, probe
ccttaggttacaaaacaaaacaggg

SEQ ID NO: 16905 - DNA, 25 bp, probe
tccttaggttacaaaacaaaacagg

SEQ ID NO: 16906 - DNA, 25 bp, probe
ttccttaggttacaaaacaaaacag

SEQ ID NO: 16907 - DNA, 25 bp, probe
cttccttaggttacaaaacaaaaca

SEQ ID NO: 16908 - DNA, 25 bp, probe
gctctgcttccttaggttacaaaac

SEQ ID NO: 16909 - DNA, 25 bp, probe
aggctctgcttccttaggttacaaa

SEQ ID NO: 16910 - DNA, 25 bp, probe
ctcacaaaccacaccttcatcaagc

SEQ ID NO: 16911 - DNA, 25 bp, probe
gctcacaaaccacaccttcatcaag

SEQ ID NO: 16912 - DNA, 25 bp, probe
ggctctgcttccttaggttacaaaa

SEQ ID NO: 16913 - DNA, 25 bp, probe
agaggctctgcttccttaggttaca

SEQ ID NO: 16914 - DNA, 25 bp, probe
agatgctcacaaaccacaccttcat

SEQ ID NO: 16915 - DNA, 25 bp, probe
atgctcacaaaccacaccttcatca

SEQ ID NO: 16916 - DNA, 25 bp, probe
aagatgctcacaaaccacaccttca

SEQ ID NO: 16917 - DNA, 25 bp, probe
tgctcacaaaccacaccttcatcaa

SEQ ID NO: 16918 - DNA, 25 bp, probe
aaggagatgtaatcagtgtagagaa

SEQ ID NO: 16919 - DNA, 25 bp, probe
caggttctcttgccacatcaatatc

SEQ ID NO: 16920 - DNA, 25 bp, probe
tcaggttctcttgccacatcaatat

SEQ ID NO: 16921 - DNA, 25 bp, probe
tatgaagagcggatgaggatacaga

SEQ ID NO: 16922 - DNA, 25 bp, probe
ttcaggttctcttgccacatcaata

SEQ ID NO: 16923 - DNA, 25 bp, probe
tcagtatgaagagcggatgaggata

SEQ ID NO: 16924 - DNA, 25 bp, probe
aggttctcttgccacatcaatatcc

SEQ ID NO: 16925 - DNA, 25 bp, probe
atgaagagcggatgaggatacagaa

SEQ ID NO: 16926 - DNA, 25 bp, probe
aggagatgtaatcagtgtagagaaa

SEQ ID NO: 16927 - DNA, 25 bp, probe
aaaggagatgtaatcagtgtagaga

SEQ ID NO: 16928 - DNA, 25 bp, probe
gtatgaagagcggatgaggatacag

SEQ ID NO: 16929 - DNA, 25 bp, probe
cagtatgaagagcggatgaggatac

SEQ ID NO: 16930 - DNA, 25 bp, probe
atcaatatcccagatggtaaagact

SEQ ID NO: 16931 - DNA, 25 bp, probe
gacaacattctttatattgccaacc

SEQ ID NO: 16932 - DNA, 25 bp, probe
tctggctgtagacaacattctttat

SEQ ID NO: 16933 - DNA, 25 bp, probe
ttctggctgtagacaacattcttta

SEQ ID NO: 16934 - DNA, 25 bp, probe
agtatgaagagcggatgaggataca

SEQ ID NO: 16935 - DNA, 25 bp, probe
cctaaaggagatgtaatcagtgtag

SEQ ID NO: 16936 - DNA, 25 bp, probe
caatatcccagatggtaaagactga

SEQ ID NO: 16937 - DNA, 25 bp, probe
tcaatatcccagatggtaaagactg

SEQ ID NO: 16938 - DNA, 25 bp, probe
atatcccagatggtaaagactgaag

SEQ ID NO: 16939 - DNA, 25 bp, probe
tgaagagcggatgaggatacagaag

SEQ ID NO: 16940 - DNA, 25 bp, probe
agacaacattctttatattgccaac

SEQ ID NO: 16941 - DNA, 25 bp, probe
aatatcccagatggtaaagactgaa

SEQ ID NO: 16942 - DNA, 25 bp, probe
ctggctgtagacaacattctttata

SEQ ID NO: 16943 - DNA, 25 bp, probe
gttctggctgtagacaacattcttt

SEQ ID NO: 16944 - DNA, 25 bp, probe
tatcccagatggtaaagactgaagg

SEQ ID NO: 16945 - DNA, 25 bp, probe
taaaggagatgtaatcagtgtagag

SEQ ID NO: 16946 - DNA, 25 bp, probe
ctaaaggagatgtaatcagtgtaga

SEQ ID NO: 16947 - DNA, 25 bp, probe
gaaagtttgtaaagcctcttcggtg

SEQ ID NO: 16948 - DNA, 25 bp, probe
ctcttgccacatcaatatcccagat

SEQ ID NO: 16949 - DNA, 25 bp, probe
tggctgtagacaacattctttatat

SEQ ID NO: 16950 - DNA, 25 bp, probe
aagtttgtaaagcctcttcggtgat

SEQ ID NO: 16951 - DNA, 25 bp, probe
agaaagtttgtaaagcctcttcggt

SEQ ID NO: 16952 - DNA, 25 bp, probe
gtagacaacattctttatattgcca

SEQ ID NO: 16953 - DNA, 25 bp, probe
ttctcttgccacatcaatatcccag

SEQ ID NO: 16954 - DNA, 25 bp, probe
aaagtttgtaaagcctcttcggtga

SEQ ID NO: 16955 - DNA, 25 bp, probe
tttgtaaagcctcttcggtgatctt

SEQ ID NO: 16956 - DNA, 25 bp, probe
gttctcttgccacatcaatatccca

SEQ ID NO: 16957 - DNA, 25 bp, probe
gaagagcggatgaggatacagaagg

SEQ ID NO: 16958 - DNA, 25 bp, probe
ttcctaaaggagatgtaatcagtgt

SEQ ID NO: 16959 - DNA, 25 bp, probe
aaagaaagtttgtaaagcctcttcg

SEQ ID NO: 16960 - DNA, 25 bp, probe
tgtagacaacattctttatattgcc

SEQ ID NO: 16961 - DNA, 25 bp, probe
atgtaatcagtgtagagaaaaccgt

SEQ ID NO: 16962 - DNA, 25 bp, probe
aatcaccgaattcatacagatcgtt

SEQ ID NO: 16963 - DNA, 25 bp, probe
ttttactcccctttaccaagcaaat

SEQ ID NO: 16964 - DNA, 25 bp, probe
ccgaatttccaagtattgtgacttt

SEQ ID NO: 16965 - DNA, 25 bp, probe
agaagaacctgcactttgtccatat

SEQ ID NO: 16966 - DNA, 25 bp, probe
cgaatttccaagtattgtgactttg

SEQ ID NO: 16967 - DNA, 25 bp, probe
tttactcccctttaccaagcaaatc

SEQ ID NO: 16968 - DNA, 25 bp, probe
tttccaagtattgtgactttgtttg

SEQ ID NO: 16969 - DNA, 25 bp, probe
cccgaatttccaagtattgtgactt

SEQ ID NO: 16970 - DNA, 25 bp, probe
gaagaacctgcactttgtccatatg

SEQ ID NO: 16971 - DNA, 25 bp, probe
gagaagaacctgcactttgtccata

SEQ ID NO: 16972 - DNA, 25 bp, probe
gaatttccaagtattgtgactttgt

SEQ ID NO: 16973 - DNA, 25 bp, probe
tctttaaaatagtgctgggatgaca

SEQ ID NO: 16974 - DNA, 25 bp, probe
tcataggaccgatgataatacgttt

SEQ ID NO: 16975 - DNA, 25 bp, probe
ttctttaaaatagtgctgggatgac

SEQ ID NO: 16976 - DNA, 25 bp, probe
atttccaagtattgtgactttgttt

SEQ ID NO: 16977 - DNA, 25 bp, probe
aatttccaagtattgtgactttgtt

SEQ ID NO: 16978 - DNA, 25 bp, probe
tttctttaaaatagtgctgggatga

SEQ ID NO: 16979 - DNA, 25 bp, probe
tcaccgaattcatacagatcgttta

SEQ ID NO: 16980 - DNA, 25 bp, probe
aatgttggtgatcataggaccgatg

SEQ ID NO: 16981 - DNA, 25 bp, probe
caccgaattcatacagatcgtttaa

SEQ ID NO: 16982 - DNA, 25 bp, probe
atcaccgaattcatacagatcgttt

SEQ ID NO: 16983 - DNA, 25 bp, probe
aaatcaccgaattcatacagatcgt

SEQ ID NO: 16984 - DNA, 25 bp, probe
ctttaaaatagtgctgggatgacag

SEQ ID NO: 16985 - DNA, 25 bp, probe
gatcataggaccgatgataatacgt

SEQ ID NO: 16986 - DNA, 25 bp, probe
taggaccgatgataatacgttttca

SEQ ID NO: 16987 - DNA, 25 bp, probe
ataggaccgatgataatacgttttc

SEQ ID NO: 16988 - DNA, 25 bp, probe
atcataggaccgatgataatacgtt

SEQ ID NO: 16989 - DNA, 25 bp, probe
cataggaccgatgataatacgtttt

SEQ ID NO: 16990 - DNA, 25 bp, probe
ttactcccctttaccaagcaaatcg

SEQ ID NO: 16991 - DNA, 25 bp, probe
accgaattcatacagatcgtttaaa

SEQ ID NO: 16992 - DNA, 25 bp, probe
tttaaaatagtgctgggatgacagg

SEQ ID NO: 16993 - DNA, 25 bp, probe
ttccaagtattgtgactttgtttgg

SEQ ID NO: 16994 - DNA, 25 bp, probe
ccccgaatttccaagtattgtgact

SEQ ID NO: 16995 - DNA, 25 bp, probe
cacaaaatcaccgaattcatacaga

SEQ ID NO: 16996 - DNA, 25 bp, probe
atccacaaaatcaccgaattcatac

SEQ ID NO: 16997 - DNA, 25 bp, probe
gtatccacaaaatcaccgaattcat

SEQ ID NO: 16998 - DNA, 25 bp, probe
ccacaaaatcaccgaattcatacag

SEQ ID NO: 16999 - DNA, 25 bp, probe
tccacaaaatcaccgaattcataca

SEQ ID NO: 17000 - DNA, 25 bp, probe
acaaaatcaccgaattcatacagat

SEQ ID NO: 17001 - DNA, 25 bp, probe
ccgaattcatacagatcgtttaaat

SEQ ID NO: 17002 - DNA, 25 bp, probe
ttaaaatagtgctgggatgacaggc

SEQ ID NO: 17003 - DNA, 25 bp, probe
tccaagtattgtgactttgtttggg

SEQ ID NO: 17004 - DNA, 25 bp, probe
tatccacaaaatcaccgaattcata

SEQ ID NO: 17005 - DNA, 25 bp, probe
caaaatcaccgaattcatacagatc

SEQ ID NO: 17006 - DNA, 25 bp, probe
gctacacttcatcttccgtatctta

SEQ ID NO: 17007 - DNA, 25 bp, probe
ctacacttcatcttccgtatcttaa

SEQ ID NO: 17008 - DNA, 25 bp, probe
agctacacttcatcttccgtatctt

SEQ ID NO: 17009 - DNA, 25 bp, probe
aatcccaacaaagacatactccaat

SEQ ID NO: 17010 - DNA, 25 bp, probe
aacagctacacttcatcttccgtat

SEQ ID NO: 17011 - DNA, 25 bp, probe
caatcccaacaaagacatactccaa

SEQ ID NO: 17012 - DNA, 25 bp, probe
cagctacacttcatcttccgtatct

SEQ ID NO: 17013 - DNA, 25 bp, probe
atcccaacaaagacatactccaatg

SEQ ID NO: 17014 - DNA, 25 bp, probe
acagctacacttcatcttccgtatc

SEQ ID NO: 17015 - DNA, 25 bp, probe
tcaatcccaacaaagacatactcca

SEQ ID NO: 17016 - DNA, 25 bp, probe
aacaaagacatactccaatgaggtg

SEQ ID NO: 17017 - DNA, 25 bp, probe
caacaaagacatactccaatgaggt

SEQ ID NO: 17018 - DNA, 25 bp, probe
ttcatcttccgtatcttaagtgagg

SEQ ID NO: 17019 - DNA, 25 bp, probe
gaacagctacacttcatcttccgta

SEQ ID NO: 17020 - DNA, 25 bp, probe
tcccaacaaagacatactccaatga

SEQ ID NO: 17021 - DNA, 25 bp, probe
aagtcaatcccaacaaagacatact

SEQ ID NO: 17022 - DNA, 25 bp, probe
caagtcaatcccaacaaagacatac

SEQ ID NO: 17023 - DNA, 25 bp, probe
agtcaatcccaacaaagacatactc

SEQ ID NO: 17024 - DNA, 25 bp, probe
ccaacaaagacatactccaatgagg

SEQ ID NO: 17025 - DNA, 25 bp, probe
cccaacaaagacatactccaatgag

SEQ ID NO: 17026 - DNA, 25 bp, probe
cttcatcttccgtatcttaagtgag

SEQ ID NO: 17027 - DNA, 25 bp, probe
ccaagtcaatcccaacaaagacata

SEQ ID NO: 17028 - DNA, 25 bp, probe
ggactactccactcagattgacatg

SEQ ID NO: 17029 - DNA, 25 bp, probe
ttctagctgtcctttctctgatttc

SEQ ID NO: 17030 - DNA, 25 bp, probe
attctagctgtcctttctctgattt

SEQ ID NO: 17031 - DNA, 25 bp, probe
cattctagctgtcctttctctgatt

SEQ ID NO: 17032 - DNA, 25 bp, probe
gtcaatcccaacaaagacatactcc

SEQ ID NO: 17033 - DNA, 25 bp, probe
tacacttcatcttccgtatcttaag

SEQ ID NO: 17034 - DNA, 25 bp, probe
catcttccgtatcttaagtgaggag

SEQ ID NO: 17035 - DNA, 25 bp, probe
tcatcttccgtatcttaagtgagga

SEQ ID NO: 17036 - DNA, 25 bp, probe
atcttccgtatcttaagtgaggagg

SEQ ID NO: 17037 - DNA, 25 bp, probe
aagacatactccaatgaggtggtga

SEQ ID NO: 17038 - DNA, 25 bp, probe
tcattctagctgtcctttctctgat

SEQ ID NO: 17039 - DNA, 25 bp, probe
tctagctgtcctttctctgatttcc

SEQ ID NO: 17040 - DNA, 25 bp, probe
ctagctgtcctttctctgatttcca

SEQ ID NO: 17041 - DNA, 25 bp, probe
ctcattctagctgtcctttctctga

SEQ ID NO: 17042 - DNA, 25 bp, probe
cggactactccactcagattgacat

SEQ ID NO: 17043 - DNA, 25 bp, probe
cctcattctagctgtcctttctctg

SEQ ID NO: 17044 - DNA, 25 bp, probe
acacttcatcttccgtatcttaagt

SEQ ID NO: 17045 - DNA, 25 bp, probe
acttcatcttccgtatcttaagtga

SEQ ID NO: 17046 - DNA, 25 bp, probe
agaacagctacacttcatcttccgt

SEQ ID NO: 17047 - DNA, 25 bp, probe
tggaagaacagctacacttcatctt

SEQ ID NO: 17048 - DNA, 25 bp, probe
agacatactccaatgaggtggtgac

SEQ ID NO: 17049 - DNA, 25 bp, probe
aaagacatactccaatgaggtggtg

SEQ ID NO: 17050 - DNA, 25 bp, probe
aatagctgctaatctgtcaacctgt

SEQ ID NO: 17051 - DNA, 25 bp, probe
atagctgctaatctgtcaacctgtc

SEQ ID NO: 17052 - DNA, 25 bp, probe
ctgctaatctgtcaacctgtcttgg

SEQ ID NO: 17053 - DNA, 25 bp, probe
aaatagctgctaatctgtcaacctg

SEQ ID NO: 17054 - DNA, 25 bp, probe
tagctgctaatctgtcaacctgtct

SEQ ID NO: 17055 - DNA, 25 bp, probe
gctgctaatctgtcaacctgtcttg

SEQ ID NO: 17056 - DNA, 25 bp, probe
taaatggaagatggtcctgggattc

SEQ ID NO: 17057 - DNA, 25 bp, probe
gtaaatggaagatggtcctgggatt

SEQ ID NO: 17058 - DNA, 25 bp, probe
ctctatctcggagaccaggaagatc

SEQ ID NO: 17059 - DNA, 25 bp, probe
gctaggctgtaaatggaagatggtc

SEQ ID NO: 17060 - DNA, 25 bp, probe
ctaggctgtaaatggaagatggtcc

SEQ ID NO: 17061 - DNA, 25 bp, probe
agctgctaatctgtcaacctgtctt

SEQ ID NO: 17062 - DNA, 25 bp, probe
taggctgtaaatggaagatggtcct

SEQ ID NO: 17063 - DNA, 25 bp, probe
tgtaaatggaagatggtcctgggat

SEQ ID NO: 17064 - DNA, 25 bp, probe
aaaatagctgctaatctgtcaacct

SEQ ID NO: 17065 - DNA, 25 bp, probe
tctatctcggagaccaggaagatcc

SEQ ID NO: 17066 - DNA, 25 bp, probe
cctctatctcggagaccaggaagat

SEQ ID NO: 17067 - DNA, 25 bp, probe
ctgtaaatggaagatggtcctggga

SEQ ID NO: 17068 - DNA, 25 bp, probe
ctaatctgtcaacctgtcttgggca

SEQ ID NO: 17069 - DNA, 25 bp, probe
tgctaatctgtcaacctgtcttggg

SEQ ID NO: 17070 - DNA, 25 bp, probe
aggctgtaaatggaagatggtcctg

SEQ ID NO: 17071 - DNA, 25 bp, probe
taatctgtcaacctgtcttgggcag

SEQ ID NO: 17072 - DNA, 25 bp, probe
aaatggaagatggtcctgggattcg

SEQ ID NO: 17073 - DNA, 25 bp, probe
agctaggctgtaaatggaagatggt

SEQ ID NO: 17074 - DNA, 25 bp, probe
ctatctcggagaccaggaagatcct

SEQ ID NO: 17075 - DNA, 25 bp, probe
taactcaaggctaccaagtgaagat

SEQ ID NO: 17076 - DNA, 25 bp, probe
aactcaaggctaccaagtgaagatt

SEQ ID NO: 17077 - DNA, 25 bp, probe
gtaactcaaggctaccaagtgaaga

SEQ ID NO: 17078 - DNA, 25 bp, probe
ctcaaggctaccaagtgaagatttg

SEQ ID NO: 17079 - DNA, 25 bp, probe
tgattgtgctacagtttctttaaga

SEQ ID NO: 17080 - DNA, 25 bp, probe
actcaaggctaccaagtgaagattt

SEQ ID NO: 17081 - DNA, 25 bp, probe
atgattgtgctacagtttctttaag

SEQ ID NO: 17082 - DNA, 25 bp, probe
catgattgtgctacagtttctttaa

SEQ ID NO: 17083 - DNA, 25 bp, probe
cattgggttatctatgggagcaagg

SEQ ID NO: 17084 - DNA, 25 bp, probe
aagaacatatgctgtcatgattgtg

SEQ ID NO: 17085 - DNA, 25 bp, probe
caagaacatatgctgtcatgattgt

SEQ ID NO: 17086 - DNA, 25 bp, probe
acaagaacatatgctgtcatgattg

SEQ ID NO: 17087 - DNA, 25 bp, probe
attgggttatctatgggagcaagga

SEQ ID NO: 17088 - DNA, 25 bp, probe
ccattccacaatcaggagctaaata

SEQ ID NO: 17089 - DNA, 25 bp, probe
aacatatgctgtcatgattgtgcta

SEQ ID NO: 17090 - DNA, 25 bp, probe
cattccacaatcaggagctaaataa

SEQ ID NO: 17091 - DNA, 25 bp, probe
catatgctgtcatgattgtgctaca

SEQ ID NO: 17092 - DNA, 25 bp, probe
acatatgctgtcatgattgtgctac

SEQ ID NO: 17093 - DNA, 25 bp, probe
tccacaatcaggagctaaataaatt

SEQ ID NO: 17094 - DNA, 25 bp, probe
ttccacaatcaggagctaaataaat

SEQ ID NO: 17095 - DNA, 25 bp, probe
attccacaatcaggagctaaataaa

SEQ ID NO: 17096 - DNA, 25 bp, probe
gcattgggttatctatgggagcaag

SEQ ID NO: 17097 - DNA, 25 bp, probe
ctacagtttctttaagaacaccagc

SEQ ID NO: 17098 - DNA, 25 bp, probe
gctacagtttctttaagaacaccag

SEQ ID NO: 17099 - DNA, 25 bp, probe
gtgctacagtttctttaagaacacc

SEQ ID NO: 17100 - DNA, 25 bp, probe
tgtgctacagtttctttaagaacac

SEQ ID NO: 17101 - DNA, 25 bp, probe
tgctacagtttctttaagaacacca

SEQ ID NO: 17102 - DNA, 25 bp, probe
gaacatatgctgtcatgattgtgct

SEQ ID NO: 17103 - DNA, 25 bp, probe
agaacatatgctgtcatgattgtgc

SEQ ID NO: 17104 - DNA, 25 bp, probe
ttgggttatctatgggagcaaggag

SEQ ID NO: 17105 - DNA, 25 bp, probe
tacagtttctttaagaacaccagct

SEQ ID NO: 17106 - DNA, 25 bp, probe
ccacaatcaggagctaaataaatta

SEQ ID NO: 17107 - DNA, 25 bp, probe
ttgtgctacagtttctttaagaaca

SEQ ID NO: 17108 - DNA, 25 bp, probe
cagtttctttaagaacaccagcttg

SEQ ID NO: 17109 - DNA, 25 bp, probe
acagtttctttaagaacaccagctt

SEQ ID NO: 17110 - DNA, 25 bp, probe
ggttatctatgggagcaaggagtgg

SEQ ID NO: 17111 - DNA, 25 bp, probe
gggttatctatgggagcaaggagtg

SEQ ID NO: 17112 - DNA, 25 bp, probe
attgtgctacagtttctttaagaac

SEQ ID NO: 17113 - DNA, 25 bp, probe
ttcggcattgggttatctatgggag

SEQ ID NO: 17114 - DNA, 25 bp, probe
cttcggcattgggttatctatggga

SEQ ID NO: 17115 - DNA, 25 bp, probe
ttaagaacaccagcttgcaggattt

SEQ ID NO: 17116 - DNA, 25 bp, probe
tttaagaacaccagcttgcaggatt

SEQ ID NO: 17117 - DNA, 25 bp, probe
gtcatgattgtgctacagtttcttt

SEQ ID NO: 17118 - DNA, 25 bp, probe
gattgtgctacagtttctttaagaa

SEQ ID NO: 17119 - DNA, 25 bp, probe
ctgtacttacctgtcttcctcttcc

SEQ ID NO: 17120 - DNA, 25 bp, probe
cctgtacttacctgtcttcctcttc

SEQ ID NO: 17121 - DNA, 25 bp, probe
acctgtacttacctgtcttcctctt

SEQ ID NO: 17122 - DNA, 25 bp, probe
atctgcattcctaacatccactcat

SEQ ID NO: 17123 - DNA, 25 bp, probe
cacctgtacttacctgtcttcctct

SEQ ID NO: 17124 - DNA, 25 bp, probe
ctgcattcctaacatccactcatct

SEQ ID NO: 17125 - DNA, 25 bp, probe
tctgcattcctaacatccactcatc

SEQ ID NO: 17126 - DNA, 25 bp, probe
gatctgcattcctaacatccactca

SEQ ID NO: 17127 - DNA, 25 bp, probe
attcctaacatccactcatctgcac

SEQ ID NO: 17128 - DNA, 25 bp, probe
cattcctaacatccactcatctgca

SEQ ID NO: 17129 - DNA, 25 bp, probe
tgcattcctaacatccactcatctg

SEQ ID NO: 17130 - DNA, 25 bp, probe
tacttacctgtcttcctcttccctg

SEQ ID NO: 17131 - DNA, 25 bp, probe
ctgagtagctgagattacaggcatg

SEQ ID NO: 17132 - DNA, 25 bp, probe
catgcacctgtacttacctgtcttc

SEQ ID NO: 17133 - DNA, 25 bp, probe
cttcatgcacctgtacttacctgtc

SEQ ID NO: 17134 - DNA, 25 bp, probe
gtcttcatgcacctgtacttacctg

SEQ ID NO: 17135 - DNA, 25 bp, probe
ctgtcttcatgcacctgtacttacc

SEQ ID NO: 17136 - DNA, 25 bp, probe
cctgtcttcatgcacctgtacttac

SEQ ID NO: 17137 - DNA, 25 bp, probe
tcctgtcttcatgcacctgtactta

SEQ ID NO: 17138 - DNA, 25 bp, probe
agatctgcattcctaacatccactc

SEQ ID NO: 17139 - DNA, 25 bp, probe
gagatctgcattcctaacatccact

SEQ ID NO: 17140 - DNA, 25 bp, probe
agagatctgcattcctaacatccac

SEQ ID NO: 17141 - DNA, 25 bp, probe
gtacttacctgtcttcctcttccct

SEQ ID NO: 17142 - DNA, 25 bp, probe
tgtacttacctgtcttcctcttccc

SEQ ID NO: 17143 - DNA, 25 bp, probe
tcatgcacctgtacttacctgtctt

SEQ ID NO: 17144 - DNA, 25 bp, probe
ttcatgcacctgtacttacctgtct

SEQ ID NO: 17145 - DNA, 25 bp, probe
tcttcatgcacctgtacttacctgt

SEQ ID NO: 17146 - DNA, 25 bp, probe
tgtcttcatgcacctgtacttacct

SEQ ID NO: 17147 - DNA, 25 bp, probe
cagagatctgcattcctaacatcca

SEQ ID NO: 17148 - DNA, 25 bp, probe
gcacctgtacttacctgtcttcctc

SEQ ID NO: 17149 - DNA, 25 bp, probe
attcctgtcttcatgcacctgtact

SEQ ID NO: 17150 - DNA, 25 bp, probe
cattcctgtcttcatgcacctgtac

SEQ ID NO: 17151 - DNA, 25 bp, probe
cttacctgtcttcctcttccctgtc

SEQ ID NO: 17152 - DNA, 25 bp, probe
ttcctgtcttcatgcacctgtactt

SEQ ID NO: 17153 - DNA, 25 bp, probe
tttgagatggggtttcacttttgtt

SEQ ID NO: 17154 - DNA, 25 bp, probe
ttttgagatggggtttcacttttgt

SEQ ID NO: 17155 - DNA, 25 bp, probe
atgcacctgtacttacctgtcttcc

SEQ ID NO: 17156 - DNA, 25 bp, probe
ccagagatctgcattcctaacatcc

SEQ ID NO: 17157 - DNA, 25 bp, probe
tgagtagctgagattacaggcatgg

SEQ ID NO: 17158 - DNA, 25 bp, probe
tctcaaagctctctctgtgtctctc

SEQ ID NO: 17159 - DNA, 25 bp, probe
gcctcctgagtagctgagattacag

SEQ ID NO: 17160 - DNA, 25 bp, probe
ttcctaacatccactcatctgcacc

SEQ ID NO: 17161 - DNA, 25 bp, probe
ctctctctgtgtctctcctctcagg

SEQ ID NO: 17162 - DNA, 25 bp, probe
ttgagatggggtttcacttttgttg

SEQ ID NO: 17163 - DNA, 25 bp, probe
ctctgactccattcaataccatact

SEQ ID NO: 17164 - DNA, 25 bp, probe
tctgactccattcaataccatactt

SEQ ID NO: 17165 - DNA, 25 bp, probe
gctctgactccattcaataccatac

SEQ ID NO: 17166 - DNA, 25 bp, probe
ggctctgactccattcaataccata

SEQ ID NO: 17167 - DNA, 25 bp, probe
ccatatcagttctggaagatgagta

SEQ ID NO: 17168 - DNA, 25 bp, probe
catatcagttctggaagatgagtat

SEQ ID NO: 17169 - DNA, 25 bp, probe
ctgaggctctgactccattcaatac

SEQ ID NO: 17170 - DNA, 25 bp, probe
atcagttctggaagatgagtattaa

SEQ ID NO: 17171 - DNA, 25 bp, probe
tttcaattccaaactcttaaccagt

SEQ ID NO: 17172 - DNA, 25 bp, probe
tgactccattcaataccatactttg

SEQ ID NO: 17173 - DNA, 25 bp, probe
atatcagttctggaagatgagtatt

SEQ ID NO: 17174 - DNA, 25 bp, probe
actgaggctctgactccattcaata

SEQ ID NO: 17175 - DNA, 25 bp, probe
ctgactccattcaataccatacttt

SEQ ID NO: 17176 - DNA, 25 bp, probe
aggctctgactccattcaataccat

SEQ ID NO: 17177 - DNA, 25 bp, probe
ccttcccactaatggagagaataaa

SEQ ID NO: 17178 - DNA, 25 bp, probe
taccatactttgaattagtggcaga

SEQ ID NO: 17179 - DNA, 25 bp, probe
tatcagttctggaagatgagtatta

SEQ ID NO: 17180 - DNA, 25 bp, probe
accatactttgaattagtggcagag

SEQ ID NO: 17181 - DNA, 25 bp, probe
ataccatactttgaattagtggcag

SEQ ID NO: 17182 - DNA, 25 bp, probe
agttctggaagatgagtattaaagt

SEQ ID NO: 17183 - DNA, 25 bp, probe
cccttcccactaatggagagaataa

SEQ ID NO: 17184 - DNA, 25 bp, probe
ttattcaattccatatcagttctgg

SEQ ID NO: 17185 - DNA, 25 bp, probe
aactgaggctctgactccattcaat

SEQ ID NO: 17186 - DNA, 25 bp, probe
aataccatactttgaattagtggca

SEQ ID NO: 17187 - DNA, 25 bp, probe
tcagttctggaagatgagtattaaa

SEQ ID NO: 17188 - DNA, 25 bp, probe
gaggctctgactccattcaatacca

SEQ ID NO: 17189 - DNA, 25 bp, probe
tgaggctctgactccattcaatacc

SEQ ID NO: 17190 - DNA, 25 bp, probe
cagttctggaagatgagtattaaag

SEQ ID NO: 17191 - DNA, 25 bp, probe
caataccatactttgaattagtggc

SEQ ID NO: 17192 - DNA, 25 bp, probe
cttattcaattccatatcagttctg

SEQ ID NO: 17193 - DNA, 25 bp, probe
ctgatcgctataactgccctttagg

SEQ ID NO: 17194 - DNA, 25 bp, probe
tcccttcccactaatggagagaata

SEQ ID NO: 17195 - DNA, 25 bp, probe
ccatactttgaattagtggcagagc

SEQ ID NO: 17196 - DNA, 25 bp, probe
tcttattcaattccatatcagttct

SEQ ID NO: 17197 - DNA, 25 bp, probe
tgctcattttcaattccaaactctt

SEQ ID NO: 17198 - DNA, 25 bp, probe
ctgctcattttcaattccaaactct

SEQ ID NO: 17199 - DNA, 25 bp, probe
tctgctcattttcaattccaaactc

SEQ ID NO: 17200 - DNA, 25 bp, probe
gtctgctcattttcaattccaaact

SEQ ID NO: 17201 - DNA, 25 bp, probe
gattggtgagctgatcgctataact

SEQ ID NO: 17202 - DNA, 25 bp, probe
ccaaactcttaaccagttctccata

SEQ ID NO: 17203 - DNA, 25 bp, probe
caaactcttaaccagttctccatac

SEQ ID NO: 17204 - DNA, 25 bp, probe
caattccaaactcttaaccagttct

SEQ ID NO: 17205 - DNA, 25 bp, probe
tcaattccaaactcttaaccagttc

SEQ ID NO: 17206 - DNA, 25 bp, probe
aaactcttaaccagttctccatact

SEQ ID NO: 17207 - DNA, 25 bp, probe
catcaacaccacaacaggagtcttc

SEQ ID NO: 17208 - DNA, 25 bp, probe
gacagatccatcaacaccacaacag

SEQ ID NO: 17209 - DNA, 25 bp, probe
cagacagatccatcaacaccacaac

SEQ ID NO: 17210 - DNA, 25 bp, probe
agacagatccatcaacaccacaaca

SEQ ID NO: 17211 - DNA, 25 bp, probe
acagacagatccatcaacaccacaa

SEQ ID NO: 17212 - DNA, 25 bp, probe
aacagacagatccatcaacaccaca

SEQ ID NO: 17213 - DNA, 25 bp, probe
aaacagacagatccatcaacaccac

SEQ ID NO: 17214 - DNA, 25 bp, probe
ccatcaacaccacaacaggagtctt

SEQ ID NO: 17215 - DNA, 25 bp, probe
atcaacaccacaacaggagtcttcg

SEQ ID NO: 17216 - DNA, 25 bp, probe
tgaaatctcagggcactcaaatgtg

SEQ ID NO: 17217 - DNA, 25 bp, probe
agatccatcaacaccacaacaggag

SEQ ID NO: 17218 - DNA, 25 bp, probe
acagatccatcaacaccacaacagg

SEQ ID NO: 17219 - DNA, 25 bp, probe
atccatcaacaccacaacaggagtc

SEQ ID NO: 17220 - DNA, 25 bp, probe
aaaacagacagatccatcaacacca

SEQ ID NO: 17221 - DNA, 25 bp, probe
gatccatcaacaccacaacaggagt

SEQ ID NO: 17222 - DNA, 25 bp, probe
cagatccatcaacaccacaacagga

SEQ ID NO: 17223 - DNA, 25 bp, probe
gaaatctcagggcactcaaatgtgg

SEQ ID NO: 17224 - DNA, 25 bp, probe
ctgaaatctcagggcactcaaatgt

SEQ ID NO: 17225 - DNA, 25 bp, probe
gctgaaatctcagggcactcaaatg

SEQ ID NO: 17226 - DNA, 25 bp, probe
aacaccacaacaggagtcttcgaaa

SEQ ID NO: 17227 - DNA, 25 bp, probe
agctgaaatctcagggcactcaaat

SEQ ID NO: 17228 - DNA, 25 bp, probe
gatgtctacatggtgatggtcaagg

SEQ ID NO: 17229 - DNA, 25 bp, probe
catggtgatggtcaaggtgagttac

SEQ ID NO: 17230 - DNA, 25 bp, probe
atgtctacatggtgatggtcaaggt

SEQ ID NO: 17231 - DNA, 25 bp, probe
acatggtgatggtcaaggtgagtta

SEQ ID NO: 17232 - DNA, 25 bp, probe
tacatggtgatggtcaaggtgagtt

SEQ ID NO: 17233 - DNA, 25 bp, probe
tctacatggtgatggtcaaggtgag

SEQ ID NO: 17234 - DNA, 25 bp, probe
ctacatggtgatggtcaaggtgagt

SEQ ID NO: 17235 - DNA, 25 bp, probe
gtctacatggtgatggtcaaggtga

SEQ ID NO: 17236 - DNA, 25 bp, probe
ctcttgtctactattttgccagtga

SEQ ID NO: 17237 - DNA, 25 bp, probe
tgtctacatggtgatggtcaaggtg

SEQ ID NO: 17238 - DNA, 25 bp, probe
cctcttgtctactattttgccagtg

SEQ ID NO: 17239 - DNA, 25 bp, probe
ttgtctactattttgccagtgacta

SEQ ID NO: 17240 - DNA, 25 bp, probe
cttgtctactattttgccagtgact

SEQ ID NO: 17241 - DNA, 25 bp, probe
tcttgtctactattttgccagtgac

SEQ ID NO: 17242 - DNA, 25 bp, probe
atggtgatggtcaaggtgagttacc

SEQ ID NO: 17243 - DNA, 25 bp, probe
ccctcttgtctactattttgccagt

SEQ ID NO: 17244 - DNA, 25 bp, probe
cccctcttgtctactattttgccag

SEQ ID NO: 17245 - DNA, 25 bp, probe
ggccccagtttcaaatttacctttt

SEQ ID NO: 17246 - DNA, 25 bp, probe
gccccagtttcaaatttaccttttg

SEQ ID NO: 17247 - DNA, 25 bp, probe
tggccccagtttcaaatttaccttt

SEQ ID NO: 17248 - DNA, 25 bp, probe
ggtgatggtcaaggtgagttacctg

SEQ ID NO: 17249 - DNA, 25 bp, probe
ctggccccagtttcaaatttacctt

SEQ ID NO: 17250 - DNA, 25 bp, probe
gatggtcaaggtgagttacctgctg

SEQ ID NO: 17251 - DNA, 25 bp, probe
tggtgatggtcaaggtgagttacct

SEQ ID NO: 17252 - DNA, 25 bp, probe
tttcaaatttaccttttgagagccc

SEQ ID NO: 17253 - DNA, 25 bp, probe
ccccagtttcaaatttaccttttga

SEQ ID NO: 17254 - DNA, 25 bp, probe
gtttcaaatttaccttttgagagcc

SEQ ID NO: 17255 - DNA, 25 bp, probe
cccagtttcaaatttaccttttgag

SEQ ID NO: 17256 - DNA, 25 bp, probe
agtttcaaatttaccttttgagagc

SEQ ID NO: 17257 - DNA, 25 bp, probe
ttcaaatttaccttttgagagcccc

SEQ ID NO: 17258 - DNA, 25 bp, probe
ccagtttcaaatttaccttttgaga

SEQ ID NO: 17259 - DNA, 25 bp, probe
atcactggccccagtttcaaattta

SEQ ID NO: 17260 - DNA, 25 bp, probe
cagtttcaaatttaccttttgagag

SEQ ID NO: 17261 - DNA, 25 bp, probe
tcactggccccagtttcaaatttac

SEQ ID NO: 17262 - DNA, 25 bp, probe
catcactggccccagtttcaaattt

SEQ ID NO: 17263 - DNA, 25 bp, probe
cactggccccagtttcaaatttacc

SEQ ID NO: 17264 - DNA, 25 bp, probe
actggccccagtttcaaatttacct

SEQ ID NO: 17265 - DNA, 25 bp, probe
gatggcaccagaagtaatcagaatg

SEQ ID NO: 17266 - DNA, 25 bp, probe
ttagtctgtatgcttgtgcttctcc

SEQ ID NO: 17267 - DNA, 25 bp, probe
accagaagtaatcagaatgcaagat

SEQ ID NO: 17268 - DNA, 25 bp, probe
accctgagtgagacattaaagtaag

SEQ ID NO: 17269 - DNA, 25 bp, probe
ggatggcaccagaagtaatcagaat

SEQ ID NO: 17270 - DNA, 25 bp, probe
agtgagacattaaagtaaggtagca

SEQ ID NO: 17271 - DNA, 25 bp, probe
caccagaagtaatcagaatgcaaga

SEQ ID NO: 17272 - DNA, 25 bp, probe
gctaccttattcaaacatcaacaac

SEQ ID NO: 17273 - DNA, 25 bp, probe
ttattcaaacatcaacaacagggat

SEQ ID NO: 17274 - DNA, 25 bp, probe
tttagtctgtatgcttgtgcttctc

SEQ ID NO: 17275 - DNA, 25 bp, probe
gagtgagacattaaagtaaggtagc

SEQ ID NO: 17276 - DNA, 25 bp, probe
ccagaagtaatcagaatgcaagata

SEQ ID NO: 17277 - DNA, 25 bp, probe
gagacattaaagtaaggtagcaaca

SEQ ID NO: 17278 - DNA, 25 bp, probe
tgagacattaaagtaaggtagcaac

SEQ ID NO: 17279 - DNA, 25 bp, probe
gtgagacattaaagtaaggtagcaa

SEQ ID NO: 17280 - DNA, 25 bp, probe
acatcaacaacagggatcagataat

SEQ ID NO: 17281 - DNA, 25 bp, probe
aacatcaacaacagggatcagataa

SEQ ID NO: 17282 - DNA, 25 bp, probe
aaacatcaacaacagggatcagata

SEQ ID NO: 17283 - DNA, 25 bp, probe
agacattaaagtaaggtagcaacaa

SEQ ID NO: 17284 - DNA, 25 bp, probe
tattcaaacatcaacaacagggatc

SEQ ID NO: 17285 - DNA, 25 bp, probe
ctttcagtcagatgtgtatgcgttt

SEQ ID NO: 17286 - DNA, 25 bp, probe
catcaacaacagggatcagataatt

SEQ ID NO: 17287 - DNA, 25 bp, probe
attcaaacatcaacaacagggatca

SEQ ID NO: 17288 - DNA, 25 bp, probe
tttcagtcagatgtgtatgcgtttg

SEQ ID NO: 17289 - DNA, 25 bp, probe
ctaccttattcaaacatcaacaaca

SEQ ID NO: 17290 - DNA, 25 bp, probe
cctgagtgagacattaaagtaaggt

SEQ ID NO: 17291 - DNA, 25 bp, probe
caaacatcaacaacagggatcagat

SEQ ID NO: 17292 - DNA, 25 bp, probe
caccctgagtgagacattaaagtaa

SEQ ID NO: 17293 - DNA, 25 bp, probe
gacattaaagtaaggtagcaacaaa

SEQ ID NO: 17294 - DNA, 25 bp, probe
tgagtgagacattaaagtaaggtag

SEQ ID NO: 17295 - DNA, 25 bp, probe
ctgagtgagacattaaagtaaggta

SEQ ID NO: 17296 - DNA, 25 bp, probe
ccctgagtgagacattaaagtaagg

SEQ ID NO: 17297 - DNA, 25 bp, probe
atcaacaacagggatcagataattt

SEQ ID NO: 17298 - DNA, 25 bp, probe
ttcaaacatcaacaacagggatcag

SEQ ID NO: 17299 - DNA, 25 bp, probe
aaacaccctgagtgagacattaaag

SEQ ID NO: 17300 - DNA, 25 bp, probe
gaaacaccctgagtgagacattaaa

SEQ ID NO: 17301 - DNA, 25 bp, probe
ccagctaccttattcaaacatcaac

SEQ ID NO: 17302 - DNA, 25 bp, probe
cgtatagctttcagtcagatgtgta

SEQ ID NO: 17303 - DNA, 25 bp, probe
agtttgaacagttgtctggatctat

SEQ ID NO: 17304 - DNA, 25 bp, probe
cagctaccttattcaaacatcaaca

SEQ ID NO: 17305 - DNA, 25 bp, probe
acaccctgagtgagacattaaagta

SEQ ID NO: 17306 - DNA, 25 bp, probe
gtttgaacagttgtctggatctatt

SEQ ID NO: 17307 - DNA, 25 bp, probe
cagtttgaacagttgtctggatcta

SEQ ID NO: 17308 - DNA, 25 bp, probe
atagctttcagtcagatgtgtatgc

SEQ ID NO: 17309 - DNA, 25 bp, probe
ctcgaacagtattctcctagttacc

SEQ ID NO: 17310 - DNA, 25 bp, probe
tctcgaacagtattctcctagttac

SEQ ID NO: 17311 - DNA, 25 bp, probe
ctctcgaacagtattctcctagtta

SEQ ID NO: 17312 - DNA, 25 bp, probe
cctctcgaacagtattctcctagtt

SEQ ID NO: 17313 - DNA, 25 bp, probe
gaagacttggatcgaattctgactc

SEQ ID NO: 17314 - DNA, 25 bp, probe
tgtctgcctcagtatccacacataa

SEQ ID NO: 17315 - DNA, 25 bp, probe
gaattctgactctcacaaccaatga

SEQ ID NO: 17316 - DNA, 25 bp, probe
catgagtgaatgtgtcttcctgtcc

SEQ ID NO: 17317 - DNA, 25 bp, probe
aagacttggatcgaattctgactct

SEQ ID NO: 17318 - DNA, 25 bp, probe
agcctctcgaacagtattctcctag

SEQ ID NO: 17319 - DNA, 25 bp, probe
caatgaactgtacatgatgatgagg

SEQ ID NO: 17320 - DNA, 25 bp, probe
ccaatgaactgtacatgatgatgag

SEQ ID NO: 17321 - DNA, 25 bp, probe
accaatgaactgtacatgatgatga

SEQ ID NO: 17322 - DNA, 25 bp, probe
caccaatgaactgtacatgatgatg

SEQ ID NO: 17323 - DNA, 25 bp, probe
tcgaacagtattctcctagttaccc

SEQ ID NO: 17324 - DNA, 25 bp, probe
agacttggatcgaattctgactctc

SEQ ID NO: 17325 - DNA, 25 bp, probe
gcctctcgaacagtattctcctagt

SEQ ID NO: 17326 - DNA, 25 bp, probe
cagcctctcgaacagtattctccta

SEQ ID NO: 17327 - DNA, 25 bp, probe
ttggatcgaattctgactctcacaa

SEQ ID NO: 17328 - DNA, 25 bp, probe
ctgtctgcctcagtatccacacata

SEQ ID NO: 17329 - DNA, 25 bp, probe
tctgcctcagtatccacacataaac

SEQ ID NO: 17330 - DNA, 25 bp, probe
gtctgcctcagtatccacacataaa

SEQ ID NO: 17331 - DNA, 25 bp, probe
cgaattctgactctcacaaccaatg

SEQ ID NO: 17332 - DNA, 25 bp, probe
gacttggatcgaattctgactctca

SEQ ID NO: 17333 - DNA, 25 bp, probe
tcgaattctgactctcacaaccaat

SEQ ID NO: 17334 - DNA, 25 bp, probe
atcgaattctgactctcacaaccaa

SEQ ID NO: 17335 - DNA, 25 bp, probe
ctctcacaaccaatgaggaatactt

SEQ ID NO: 17336 - DNA, 25 bp, probe
gcaccaatgaactgtacatgatgat

SEQ ID NO: 17337 - DNA, 25 bp, probe
aacatgagtgaatgtgtcttcctgt

SEQ ID NO: 17338 - DNA, 25 bp, probe
cttggatcgaattctgactctcaca

SEQ ID NO: 17339 - DNA, 25 bp, probe
acttggatcgaattctgactctcac

SEQ ID NO: 17340 - DNA, 25 bp, probe
tctcacaaccaatgaggaatacttg

SEQ ID NO: 17341 - DNA, 25 bp, probe
caatgaggaatacttggatctcacc

SEQ ID NO: 17342 - DNA, 25 bp, probe
ctcagtatccacacataaacggcag

SEQ ID NO: 17343 - DNA, 25 bp, probe
aattctgactctcacaaccaatgag

SEQ ID NO: 17344 - DNA, 25 bp, probe
gactctcacaaccaatgaggaatac

SEQ ID NO: 17345 - DNA, 25 bp, probe
gatcgaattctgactctcacaacca

SEQ ID NO: 17346 - DNA, 25 bp, probe
tggatcgaattctgactctcacaac

SEQ ID NO: 17347 - DNA, 25 bp, probe
actctcacaaccaatgaggaatact

SEQ ID NO: 17348 - DNA, 25 bp, probe
tgactctcacaaccaatgaggaata

SEQ ID NO: 17349 - DNA, 25 bp, probe
ttatgaaccctgtctgcctcagtat

SEQ ID NO: 17350 - DNA, 25 bp, probe
acatgagtgaatgtgtcttcctgtc

SEQ ID NO: 17351 - DNA, 25 bp, probe
aatgtgggagatctttactttaggg

SEQ ID NO: 17352 - DNA, 25 bp, probe
ggtgttaatgtgggagatctttact

SEQ ID NO: 17353 - DNA, 25 bp, probe
gttaccacaccacttacacactctt

SEQ ID NO: 17354 - DNA, 25 bp, probe
cgacatagtgacggaagcaaatata

SEQ ID NO: 17355 - DNA, 25 bp, probe
gacatagtgacggaagcaaatataa

SEQ ID NO: 17356 - DNA, 25 bp, probe
acatagtgacggaagcaaatataaa

SEQ ID NO: 17357 - DNA, 25 bp, probe
tttgattgaactatcccagatggtt

SEQ ID NO: 17358 - DNA, 25 bp, probe
atatatctgaacctcttatgacggt

SEQ ID NO: 17359 - DNA, 25 bp, probe
tgaactatcccagatggttatgttt

SEQ ID NO: 17360 - DNA, 25 bp, probe
ttgaactatcccagatggttatgtt

SEQ ID NO: 17361 - DNA, 25 bp, probe
attgaactatcccagatggttatgt

SEQ ID NO: 17362 - DNA, 25 bp, probe
ttgattgaactatcccagatggtta

SEQ ID NO: 17363 - DNA, 25 bp, probe
ttaaacggttagaaaggatgaaaga

SEQ ID NO: 17364 - DNA, 25 bp, probe
tgattgaactatcccagatggttat

SEQ ID NO: 17365 - DNA, 25 bp, probe
acggttagaaaggatgaaagataaa

SEQ ID NO: 17366 - DNA, 25 bp, probe
gattgaactatcccagatggttatg

SEQ ID NO: 17367 - DNA, 25 bp, probe
ttgttaccacaccacttacacactc

SEQ ID NO: 17368 - DNA, 25 bp, probe
aacggttagaaaggatgaaagataa

SEQ ID NO: 17369 - DNA, 25 bp, probe
aaacggttagaaaggatgaaagata

SEQ ID NO: 17370 - DNA, 25 bp, probe
taaacggttagaaaggatgaaagat

SEQ ID NO: 17371 - DNA, 25 bp, probe
ttaccacaccacttacacactcttt

SEQ ID NO: 17372 - DNA, 25 bp, probe
aatactgttcgacatagtgacggaa

SEQ ID NO: 17373 - DNA, 25 bp, probe
ggactctttgtgataaacactgaaa

SEQ ID NO: 17374 - DNA, 25 bp, probe
atactgttcgacatagtgacggaag

SEQ ID NO: 17375 - DNA, 25 bp, probe
cggactctttgtgataaacactgaa

SEQ ID NO: 17376 - DNA, 25 bp, probe
tgttaccacaccacttacacactct

SEQ ID NO: 17377 - DNA, 25 bp, probe
aaacacttctccctgtattctattt

SEQ ID NO: 17378 - DNA, 25 bp, probe
gtaaatactgttcgacatagtgacg

SEQ ID NO: 17379 - DNA, 25 bp, probe
taaatactgttcgacatagtgacgg

SEQ ID NO: 17380 - DNA, 25 bp, probe
tttgttaccacaccacttacacact

SEQ ID NO: 17381 - DNA, 25 bp, probe
tcgacatagtgacggaagcaaatat

SEQ ID NO: 17382 - DNA, 25 bp, probe
tgtaaatactgttcgacatagtgac

SEQ ID NO: 17383 - DNA, 25 bp, probe
tttaaacggttagaaaggatgaaag

SEQ ID NO: 17384 - DNA, 25 bp, probe
atgacggttttgtaaatactgttcg

SEQ ID NO: 17385 - DNA, 25 bp, probe
aatttgctaatcactacaggaattt

SEQ ID NO: 17386 - DNA, 25 bp, probe
cacacaaaagtcgtttaaggtctaa

SEQ ID NO: 17387 - DNA, 25 bp, probe
ttttacataatgcttacggggacaa

SEQ ID NO: 17388 - DNA, 25 bp, probe
acacacaaaagtcgtttaaggtcta

SEQ ID NO: 17389 - DNA, 25 bp, probe
atcactacaggaattttacaccaga

SEQ ID NO: 17390 - DNA, 25 bp, probe
tcactacaggaattttacaccagac

SEQ ID NO: 17391 - DNA, 25 bp, probe
ttcgacatagtgacggaagcaaata

SEQ ID NO: 17392 - DNA, 25 bp, probe
aaatactgttcgacatagtgacgga

SEQ ID NO: 17393 - DNA, 25 bp, probe
ttttgattgaactatcccagatggt

SEQ ID NO: 17394 - DNA, 25 bp, probe
ttgtaaatactgttcgacatagtga

SEQ ID NO: 17395 - DNA, 25 bp, probe
aatcactacaggaattttacaccag

SEQ ID NO: 17396 - DNA, 25 bp, probe
gttttacataatgcttacggggaca

SEQ ID NO: 17397 - DNA, 25 bp, probe
tgtcccttctctctccagctagatg

SEQ ID NO: 17398 - DNA, 25 bp, probe
ctgtcccttctctctccagctagat

SEQ ID NO: 17399 - DNA, 25 bp, probe
gtgacttagggctaggaacattctg

SEQ ID NO: 17400 - DNA, 25 bp, probe
agtgacttagggctaggaacattct

SEQ ID NO: 17401 - DNA, 25 bp, probe
cagtgacttagggctaggaacattc

SEQ ID NO: 17402 - DNA, 25 bp, probe
atcagtgacttagggctaggaacat

SEQ ID NO: 17403 - DNA, 25 bp, probe
tcagtgacttagggctaggaacatt

SEQ ID NO: 17404 - DNA, 25 bp, probe
catcagtgacttagggctaggaaca

SEQ ID NO: 17405 - DNA, 25 bp, probe
ctaggaacattctgctgtcggaaag

SEQ ID NO: 17406 - DNA, 25 bp, probe
gacttagggctaggaacattctgct

SEQ ID NO: 17407 - DNA, 25 bp, probe
acttagggctaggaacattctgctg

SEQ ID NO: 17408 - DNA, 25 bp, probe
tgacttagggctaggaacattctgc

SEQ ID NO: 17409 - DNA, 25 bp, probe
ttagggctaggaacattctgctgtc

SEQ ID NO: 17410 - DNA, 25 bp, probe
cttagggctaggaacattctgctgt

SEQ ID NO: 17411 - DNA, 25 bp, probe
gcatcagtgacttagggctaggaac

SEQ ID NO: 17412 - DNA, 25 bp, probe
gctaggaacattctgctgtcggaaa

SEQ ID NO: 17413 - DNA, 25 bp, probe
tgcatcagtgacttagggctaggaa

SEQ ID NO: 17414 - DNA, 25 bp, probe
ctgtgcatcagtgacttagggctag

SEQ ID NO: 17415 - DNA, 25 bp, probe
gatcctgtgcatcagtgacttaggg

SEQ ID NO: 17416 - DNA, 25 bp, probe
taggaacattctgctgtcggaaagc

SEQ ID NO: 17417 - DNA, 25 bp, probe
ggacatctacaaagaccccagctac

SEQ ID NO: 17418 - DNA, 25 bp, probe
gacatctacaaagaccccagctacg

SEQ ID NO: 17419 - DNA, 25 bp, probe
ggatcctgtgcatcagtgacttagg

SEQ ID NO: 17420 - DNA, 25 bp, probe
catctacaaagaccccagctacgtc

SEQ ID NO: 17421 - DNA, 25 bp, probe
gatccattcacagagacctagcagc

SEQ ID NO: 17422 - DNA, 25 bp, probe
ggatccattcacagagacctagcag

SEQ ID NO: 17423 - DNA, 25 bp, probe
ttgatgtctcggagaataattgctg

SEQ ID NO: 17424 - DNA, 25 bp, probe
tagcagaaagaatagccaaagaact

SEQ ID NO: 17425 - DNA, 25 bp, probe
atagcattagcagaaagaatagcca

SEQ ID NO: 17426 - DNA, 25 bp, probe
aaagagatggagtttggagttgtat

SEQ ID NO: 17427 - DNA, 25 bp, probe
ataaagagatggagtttggagttgt

SEQ ID NO: 17428 - DNA, 25 bp, probe
tagcattagcagaaagaatagccaa

SEQ ID NO: 17429 - DNA, 25 bp, probe
ttagcagaaagaatagccaaagaac

SEQ ID NO: 17430 - DNA, 25 bp, probe
gataatacctttacaacgagacgac

SEQ ID NO: 17431 - DNA, 25 bp, probe
agataatacctttacaacgagacga

SEQ ID NO: 17432 - DNA, 25 bp, probe
cattagcagaaagaatagccaaaga

SEQ ID NO: 17433 - DNA, 25 bp, probe
taaagagatggagtttggagttgta

SEQ ID NO: 17434 - DNA, 25 bp, probe
ataatacctttacaacgagacgacg

SEQ ID NO: 17435 - DNA, 25 bp, probe
gagataatacctttacaacgagacg

SEQ ID NO: 17436 - DNA, 25 bp, probe
gcattagcagaaagaatagccaaag

SEQ ID NO: 17437 - DNA, 25 bp, probe
aagagatggagtttggagttgtata

SEQ ID NO: 17438 - DNA, 25 bp, probe
agcattagcagaaagaatagccaaa

SEQ ID NO: 17439 - DNA, 25 bp, probe
aataaagagatggagtttggagttg

SEQ ID NO: 17440 - DNA, 25 bp, probe
cggagaataattgctgcaagtaata

SEQ ID NO: 17441 - DNA, 25 bp, probe
caggaagacattaccaaatcactct

SEQ ID NO: 17442 - DNA, 25 bp, probe
agcagaaagaatagccaaagaactt

SEQ ID NO: 17443 - DNA, 25 bp, probe
attagcagaaagaatagccaaagaa

SEQ ID NO: 17444 - DNA, 25 bp, probe
agccaaagaacttgagataatacct

SEQ ID NO: 17445 - DNA, 25 bp, probe
tcggagaataattgctgcaagtaat

SEQ ID NO: 17446 - DNA, 25 bp, probe
cagaaagaatagccaaagaacttga

SEQ ID NO: 17447 - DNA, 25 bp, probe
tatagcattagcagaaagaatagcc

SEQ ID NO: 17448 - DNA, 25 bp, probe
gaaagaatagccaaagaacttgaga

SEQ ID NO: 17449 - DNA, 25 bp, probe
agaaagaatagccaaagaacttgag

SEQ ID NO: 17450 - DNA, 25 bp, probe
taatacctttacaacgagacgacga

SEQ ID NO: 17451 - DNA, 25 bp, probe
gccaaagaacttgagataatacctt

SEQ ID NO: 17452 - DNA, 25 bp, probe
gcagaaagaatagccaaagaacttg

SEQ ID NO: 17453 - DNA, 25 bp, probe
aaataaagagatggagtttggagtt

SEQ ID NO: 17454 - DNA, 25 bp, probe
ctcggagaataattgctgcaagtaa

SEQ ID NO: 17455 - DNA, 25 bp, probe
tttacaacgagacgacgaaagttag

SEQ ID NO: 17456 - DNA, 25 bp, probe
tgagataatacctttacaacgagac

SEQ ID NO: 17457 - DNA, 25 bp, probe
tcgttgtaaataaagagatggagtt

SEQ ID NO: 17458 - DNA, 25 bp, probe
ttcgttgtaaataaagagatggagt

SEQ ID NO: 17459 - DNA, 25 bp, probe
aaagaatagccaaagaacttgagat

SEQ ID NO: 17460 - DNA, 25 bp, probe
gcaggaagacattaccaaatcactc

SEQ ID NO: 17461 - DNA, 25 bp, probe
tagccaaagaacttgagataatacc

SEQ ID NO: 17462 - DNA, 25 bp, probe
atttgatgtctcggagaataattgc

SEQ ID NO: 17463 - DNA, 25 bp, probe
agcaggaagacattaccaaatcact

SEQ ID NO: 17464 - DNA, 25 bp, probe
cagcaggaagacattaccaaatcac

SEQ ID NO: 17465 - DNA, 25 bp, probe
tgtaaataaagagatggagtttgga

SEQ ID NO: 17466 - DNA, 25 bp, probe
tttgatgtctcggagaataattgct

SEQ ID NO: 17467 - DNA, 25 bp, probe
ttggaagttcagaagaatgcttgtg

SEQ ID NO: 17468 - DNA, 25 bp, probe
gtgaagatggaggtgtgtaggttag

SEQ ID NO: 17469 - DNA, 25 bp, probe
agtgaagatggaggtgtgtaggtta

SEQ ID NO: 17470 - DNA, 25 bp, probe
gaagttcagaagaatgcttgtggtg

SEQ ID NO: 17471 - DNA, 25 bp, probe
gatgctctctcaaccttaacaaaca

SEQ ID NO: 17472 - DNA, 25 bp, probe
aaatagcaatgaagaatgttggtgg

SEQ ID NO: 17473 - DNA, 25 bp, probe
agatgctctctcaaccttaacaaac

SEQ ID NO: 17474 - DNA, 25 bp, probe
cttgttacaggagtctttggaatta

SEQ ID NO: 17475 - DNA, 25 bp, probe
tgaagatggaggtgtgtaggttagg

SEQ ID NO: 17476 - DNA, 25 bp, probe
tttggaagttcagaagaatgcttgt

SEQ ID NO: 17477 - DNA, 25 bp, probe
atgctctctcaaccttaacaaacac

SEQ ID NO: 17478 - DNA, 25 bp, probe
gcttgttacaggagtctttggaatt

SEQ ID NO: 17479 - DNA, 25 bp, probe
tgttacaggagtctttggaattatc

SEQ ID NO: 17480 - DNA, 25 bp, probe
aagtgaagatggaggtgtgtaggtt

SEQ ID NO: 17481 - DNA, 25 bp, probe
tcaaccttaacaaacactgtgattg

SEQ ID NO: 17482 - DNA, 25 bp, probe
ctcaaccttaacaaacactgtgatt

SEQ ID NO: 17483 - DNA, 25 bp, probe
tctcaaccttaacaaacactgtgat

SEQ ID NO: 17484 - DNA, 25 bp, probe
ctctctcaaccttaacaaacactgt

SEQ ID NO: 17485 - DNA, 25 bp, probe
ttgttacaggagtctttggaattat

SEQ ID NO: 17486 - DNA, 25 bp, probe
gctctctcaaccttaacaaacactg

SEQ ID NO: 17487 - DNA, 25 bp, probe
ggaagttcagaagaatgcttgtggt

SEQ ID NO: 17488 - DNA, 25 bp, probe
tggaagttcagaagaatgcttgtgg

SEQ ID NO: 17489 - DNA, 25 bp, probe
aatagcaatgaagaatgttggtggg

SEQ ID NO: 17490 - DNA, 25 bp, probe
ctctcaaccttaacaaacactgtga

SEQ ID NO: 17491 - DNA, 25 bp, probe
tctctcaaccttaacaaacactgtg

SEQ ID NO: 17492 - DNA, 25 bp, probe
tgctctctcaaccttaacaaacact

SEQ ID NO: 17493 - DNA, 25 bp, probe
ttacaggagtctttggaattatccc

SEQ ID NO: 17494 - DNA, 25 bp, probe
tacaggagtctttggaattatccct

SEQ ID NO: 17495 - DNA, 25 bp, probe
attatccctcatgtgatgcctgtaa

SEQ ID NO: 17496 - DNA, 25 bp, probe
aattatccctcatgtgatgcctgta

SEQ ID NO: 17497 - DNA, 25 bp, probe
gttacaggagtctttggaattatcc

SEQ ID NO: 17498 - DNA, 25 bp, probe
aggagtctttggaattatccctcat

SEQ ID NO: 17499 - DNA, 25 bp, probe
ttatccctcatgtgatgcctgtaaa

SEQ ID NO: 17500 - DNA, 25 bp, probe
aacaaagtgaagatggaggtgtgta

SEQ ID NO: 17501 - DNA, 25 bp, probe
ctttggaattatccctcatgtgatg

SEQ ID NO: 17502 - DNA, 25 bp, probe
tctttggaattatccctcatgtgat

SEQ ID NO: 17503 - DNA, 25 bp, probe
gagtctttggaattatccctcatgt

SEQ ID NO: 17504 - DNA, 25 bp, probe
gtctttggaattatccctcatgtga

SEQ ID NO: 17505 - DNA, 25 bp, probe
agtctttggaattatccctcatgtg

SEQ ID NO: 17506 - DNA, 25 bp, probe
tctatttgatgcagaagtaagggag

SEQ ID NO: 17507 - DNA, 25 bp, probe
caggagtctttggaattatccctca

SEQ ID NO: 17508 - DNA, 25 bp, probe
acaggagtctttggaattatccctc

SEQ ID NO: 17509 - DNA, 25 bp, probe
ggagtctttggaattatccctcatg

SEQ ID NO: 17510 - DNA, 25 bp, probe
atctatttgatgcagaagtaaggga

SEQ ID NO: 17511 - DNA, 25 bp, probe
gatcatcaccgagttcattgagaat

SEQ ID NO: 17512 - DNA, 25 bp, probe
atcatcaccgagttcattgagaatg

SEQ ID NO: 17513 - DNA, 25 bp, probe
tcatcaccgagttcattgagaatgg

SEQ ID NO: 17514 - DNA, 25 bp, probe
tgatcatcaccgagttcattgagaa

SEQ ID NO: 17515 - DNA, 25 bp, probe
atcaccgagttcattgagaatggct

SEQ ID NO: 17516 - DNA, 25 bp, probe
catcaccgagttcattgagaatggc

SEQ ID NO: 17517 - DNA, 25 bp, probe
aaaacgatgggcagtttcacagttc

SEQ ID NO: 17518 - DNA, 25 bp, probe
caaaacgatgggcagtttcacagtt

SEQ ID NO: 17519 - DNA, 25 bp, probe
gacattagctcccactttcaagaag

SEQ ID NO: 17520 - DNA, 25 bp, probe
tgacattagctcccactttcaagaa

SEQ ID NO: 17521 - DNA, 25 bp, probe
gatctctcccaactttggctttatg

SEQ ID NO: 17522 - DNA, 25 bp, probe
tgatctctcccaactttggctttat

SEQ ID NO: 17523 - DNA, 25 bp, probe
ctgacattagctcccactttcaaga

SEQ ID NO: 17524 - DNA, 25 bp, probe
gtgatctctcccaactttggcttta

SEQ ID NO: 17525 - DNA, 25 bp, probe
gtacctcatgaagaccaagcagttc

SEQ ID NO: 17526 - DNA, 25 bp, probe
tagctcccactttcaagaagcaatt

SEQ ID NO: 17527 - DNA, 25 bp, probe
ttagctcccactttcaagaagcaat

SEQ ID NO: 17528 - DNA, 25 bp, probe
attagctcccactttcaagaagcaa

SEQ ID NO: 17529 - DNA, 25 bp, probe
cccactttcaagaagcaattgattt

SEQ ID NO: 17530 - DNA, 25 bp, probe
cattagctcccactttcaagaagca

SEQ ID NO: 17531 - DNA, 25 bp, probe
acattagctcccactttcaagaagc

SEQ ID NO: 17532 - DNA, 25 bp, probe
tcccactttcaagaagcaattgatt

SEQ ID NO: 17533 - DNA, 25 bp, probe
tacctcatgaagaccaagcagttcc

SEQ ID NO: 17534 - DNA, 25 bp, probe
ctcccactttcaagaagcaattgat

SEQ ID NO: 17535 - DNA, 25 bp, probe
gctgacattagctcccactttcaag

SEQ ID NO: 17536 - DNA, 25 bp, probe
cgtacctcatgaagaccaagcagtt

SEQ ID NO: 17537 - DNA, 25 bp, probe
aattgattttattgactgcgtcagg

SEQ ID NO: 17538 - DNA, 25 bp, probe
gaagcaattgattttattgactgcg

SEQ ID NO: 17539 - DNA, 25 bp, probe
aagcaattgattttattgactgcgt

SEQ ID NO: 17540 - DNA, 25 bp, probe
ccactttcaagaagcaattgatttt

SEQ ID NO: 17541 - DNA, 25 bp, probe
agcaattgattttattgactgcgtc

SEQ ID NO: 17542 - DNA, 25 bp, probe
agaagcaattgattttattgactgc

SEQ ID NO: 17543 - DNA, 25 bp, probe
attgattttattgactgcgtcaggg

SEQ ID NO: 17544 - DNA, 25 bp, probe
agctcccactttcaagaagcaattg

SEQ ID NO: 17545 - DNA, 25 bp, probe
gattttattgactgcgtcagggaag

SEQ ID NO: 17546 - DNA, 25 bp, probe
gctcccactttcaagaagcaattga

SEQ ID NO: 17547 - DNA, 25 bp, probe
tgattttattgactgcgtcagggaa

SEQ ID NO: 17548 - DNA, 25 bp, probe
ttgattttattgactgcgtcaggga

SEQ ID NO: 17549 - DNA, 25 bp, probe
aagaagcaattgattttattgactg

SEQ ID NO: 17550 - DNA, 25 bp, probe
caagaagcaattgattttattgact

SEQ ID NO: 17551 - DNA, 25 bp, probe
caattgattttattgactgcgtcag

SEQ ID NO: 17552 - DNA, 25 bp, probe
tttattgactgcgtcagggaaggag

SEQ ID NO: 17553 - DNA, 25 bp, probe
cactttcaagaagcaattgatttta

SEQ ID NO: 17554 - DNA, 25 bp, probe
gcaattgattttattgactgcgtca

SEQ ID NO: 17555 - DNA, 25 bp, probe
attttattgactgcgtcagggaagg

SEQ ID NO: 17556 - DNA, 25 bp, probe
tcaagaagcaattgattttattgac

SEQ ID NO: 17557 - DNA, 25 bp, probe
ttcaagaagcaattgattttattga

SEQ ID NO: 17558 - DNA, 25 bp, probe
actttcaagaagcaattgattttat

SEQ ID NO: 17559 - DNA, 25 bp, probe
ttttattgactgcgtcagggaagga

SEQ ID NO: 17560 - DNA, 25 bp, probe
tttcaagaagcaattgattttattg

SEQ ID NO: 17561 - DNA, 25 bp, probe
ctttcaagaagcaattgattttatt

SEQ ID NO: 17562 - DNA, 25 bp, probe
tctcactttcaagaagcaatagact

SEQ ID NO: 17563 - DNA, 25 bp, probe
ctcactttcaagaagcaatagactt

SEQ ID NO: 17564 - DNA, 25 bp, probe
ctctcactttcaagaagcaatagac

SEQ ID NO: 17565 - DNA, 25 bp, probe
aagcaatagacttcattgactgtgt

SEQ ID NO: 17566 - DNA, 25 bp, probe
agcaatagacttcattgactgtgtc

SEQ ID NO: 17567 - DNA, 25 bp, probe
gaagcaatagacttcattgactgtg

SEQ ID NO: 17568 - DNA, 25 bp, probe
agaagcaatagacttcattgactgt

SEQ ID NO: 17569 - DNA, 25 bp, probe
tcaagaagcaatagacttcattgac

SEQ ID NO: 17570 - DNA, 25 bp, probe
aagaagcaatagacttcattgactg

SEQ ID NO: 17571 - DNA, 25 bp, probe
caagaagcaatagacttcattgact

SEQ ID NO: 17572 - DNA, 25 bp, probe
gacattagctctcactttcaagaag

SEQ ID NO: 17573 - DNA, 25 bp, probe
tgacattagctctcactttcaagaa

SEQ ID NO: 17574 - DNA, 25 bp, probe
ttcaagaagcaatagacttcattga

SEQ ID NO: 17575 - DNA, 25 bp, probe
ctgacattagctctcactttcaaga

SEQ ID NO: 17576 - DNA, 25 bp, probe
gctctcactttcaagaagcaataga

SEQ ID NO: 17577 - DNA, 25 bp, probe
atagacttcattgactgtgtcagag

SEQ ID NO: 17578 - DNA, 25 bp, probe
tagctctcactttcaagaagcaata

SEQ ID NO: 17579 - DNA, 25 bp, probe
aatagacttcattgactgtgtcaga

SEQ ID NO: 17580 - DNA, 25 bp, probe
caatagacttcattgactgtgtcag

SEQ ID NO: 17581 - DNA, 25 bp, probe
cactttcaagaagcaatagacttca

SEQ ID NO: 17582 - DNA, 25 bp, probe
tcactttcaagaagcaatagacttc

SEQ ID NO: 17583 - DNA, 25 bp, probe
ttagctctcactttcaagaagcaat

SEQ ID NO: 17584 - DNA, 25 bp, probe
attagctctcactttcaagaagcaa

SEQ ID NO: 17585 - DNA, 25 bp, probe
tagacttcattgactgtgtcagaga

SEQ ID NO: 17586 - DNA, 25 bp, probe
agctctcactttcaagaagcaatag

SEQ ID NO: 17587 - DNA, 25 bp, probe
gcaatagacttcattgactgtgtca

SEQ ID NO: 17588 - DNA, 25 bp, probe
actttcaagaagcaatagacttcat

SEQ ID NO: 17589 - DNA, 25 bp, probe
cattagctctcactttcaagaagca

SEQ ID NO: 17590 - DNA, 25 bp, probe
acattagctctcactttcaagaagc

SEQ ID NO: 17591 - DNA, 25 bp, probe
agacttcattgactgtgtcagagaa

SEQ ID NO: 17592 - DNA, 25 bp, probe
tttcaagaagcaatagacttcattg

SEQ ID NO: 17593 - DNA, 25 bp, probe
gctgacattagctctcactttcaag

SEQ ID NO: 17594 - DNA, 25 bp, probe
ctttcaagaagcaatagacttcatt

SEQ ID NO: 17595 - DNA, 25 bp, probe
ctgtgtcagagaaaagaaaggcaag

SEQ ID NO: 17596 - DNA, 25 bp, probe
tgtcagagaaaagaaaggcaaggtc

SEQ ID NO: 17597 - DNA, 25 bp, probe
atggctgacattagctctcactttc

SEQ ID NO: 17598 - DNA, 25 bp, probe
gtgtcagagaaaagaaaggcaaggt

SEQ ID NO: 17599 - DNA, 25 bp, probe
tgtgtcagagaaaagaaaggcaagg

SEQ ID NO: 17600 - DNA, 25 bp, probe
acatggctgacattagctctcactt

SEQ ID NO: 17601 - DNA, 25 bp, probe
actgtgtcagagaaaagaaaggcaa

SEQ ID NO: 17602 - DNA, 25 bp, probe
gacttcattgactgtgtcagagaaa

SEQ ID NO: 17603 - DNA, 25 bp, probe
ggctgacattagctctcactttcaa

SEQ ID NO: 17604 - DNA, 25 bp, probe
catggctgacattagctctcacttt

SEQ ID NO: 17605 - DNA, 25 bp, probe
gtcagagaaaagaaaggcaaggtcc

SEQ ID NO: 17606 - DNA, 25 bp, probe
gaataaagaagaggaaaggtgaagc

SEQ ID NO: 17607 - DNA, 25 bp, probe
agtagattcgtagttagtttagcct

SEQ ID NO: 17608 - DNA, 25 bp, probe
agaataaagaagaggaaaggtgaag

SEQ ID NO: 17609 - DNA, 25 bp, probe
aagtagattcgtagttagtttagcc

SEQ ID NO: 17610 - DNA, 25 bp, probe
aagaataaagaagaggaaaggtgaa

SEQ ID NO: 17611 - DNA, 25 bp, probe
aaagaataaagaagaggaaaggtga

SEQ ID NO: 17612 - DNA, 25 bp, probe
aataaagaagaggaaaggtgaagct

SEQ ID NO: 17613 - DNA, 25 bp, probe
gtagattcgtagttagtttagccta

SEQ ID NO: 17614 - DNA, 25 bp, probe
taaagaagaggaaaggtgaagctat

SEQ ID NO: 17615 - DNA, 25 bp, probe
ataaagaagaggaaaggtgaagcta

SEQ ID NO: 17616 - DNA, 25 bp, probe
aaagaagaggaaaggtgaagctatg

SEQ ID NO: 17617 - DNA, 25 bp, probe
agtgcaaagtagattcgtagttagt

SEQ ID NO: 17618 - DNA, 25 bp, probe
gtgcaaagtagattcgtagttagtt

SEQ ID NO: 17619 - DNA, 25 bp, probe
agaaagtgcaaagtagattcgtagt

SEQ ID NO: 17620 - DNA, 25 bp, probe
gagaaagtgcaaagtagattcgtag

SEQ ID NO: 17621 - DNA, 25 bp, probe
gaaagtgcaaagtagattcgtagtt

SEQ ID NO: 17622 - DNA, 25 bp, probe
attctggagaaagtgcaaagtagat

SEQ ID NO: 17623 - DNA, 25 bp, probe
aagtgcaaagtagattcgtagttag

SEQ ID NO: 17624 - DNA, 25 bp, probe
ttctggagaaagtgcaaagtagatt

SEQ ID NO: 17625 - DNA, 25 bp, probe
aattctggagaaagtgcaaagtaga

SEQ ID NO: 17626 - DNA, 25 bp, probe
gcaaagtagattcgtagttagttta

SEQ ID NO: 17627 - DNA, 25 bp, probe
ggagaaagtgcaaagtagattcgta

SEQ ID NO: 17628 - DNA, 25 bp, probe
tctggagaaagtgcaaagtagattc

SEQ ID NO: 17629 - DNA, 25 bp, probe
tgcaaagtagattcgtagttagttt

SEQ ID NO: 17630 - DNA, 25 bp, probe
aaagtgcaaagtagattcgtagtta

SEQ ID NO: 17631 - DNA, 25 bp, probe
agttagtttagcctacgcttatgaa

SEQ ID NO: 17632 - DNA, 25 bp, probe
tagtttagcctacgcttatgaaacc

SEQ ID NO: 17633 - DNA, 25 bp, probe
ttagtttagcctacgcttatgaaac

SEQ ID NO: 17634 - DNA, 25 bp, probe
gttagtttagcctacgcttatgaaa

SEQ ID NO: 17635 - DNA, 25 bp, probe
aagaagaggaaaggtgaagctatgg

SEQ ID NO: 17636 - DNA, 25 bp, probe
tagttagtttagcctacgcttatga

SEQ ID NO: 17637 - DNA, 25 bp, probe
gtagttagtttagcctacgcttatg

SEQ ID NO: 17638 - DNA, 25 bp, probe
aaagtagattcgtagttagtttagc

SEQ ID NO: 17639 - DNA, 25 bp, probe
ctggagaaagtgcaaagtagattcg

SEQ ID NO: 17640 - DNA, 25 bp, probe
gaattctggagaaagtgcaaagtag

SEQ ID NO: 17641 - DNA, 25 bp, probe
tgaagctatggctctaaatgagaaa

SEQ ID NO: 17642 - DNA, 25 bp, probe
tggagaaagtgcaaagtagattcgt

SEQ ID NO: 17643 - DNA, 25 bp, probe
gtgaagctatggctctaaatgagaa

SEQ ID NO: 17644 - DNA, 25 bp, probe
gctatggctctaaatgagaaaagaa

SEQ ID NO: 17645 - DNA, 25 bp, probe
gaaaggtgaagctatggctctaaat

SEQ ID NO: 17646 - DNA, 25 bp, probe
aaaggtgaagctatggctctaaatg

SEQ ID NO: 17647 - DNA, 25 bp, probe
tagattcgtagttagtttagcctac

SEQ ID NO: 17648 - DNA, 25 bp, probe
aaggtgaagctatggctctaaatga

SEQ ID NO: 17649 - DNA, 25 bp, probe
aaaagaataaagaagaggaaaggtg

SEQ ID NO: 17650 - DNA, 25 bp, probe
gacctcgatagctaggccaagtttg

SEQ ID NO: 17651 - DNA, 25 bp, probe
cagccataactaacaggtgtaattg

SEQ ID NO: 17652 - DNA, 25 bp, probe
cataactaacaggtgtaattggtcc

SEQ ID NO: 17653 - DNA, 25 bp, probe
gcagccataactaacaggtgtaatt

SEQ ID NO: 17654 - DNA, 25 bp, probe
aaggaggtcaagttcatggaataat

SEQ ID NO: 17655 - DNA, 25 bp, probe
ttcatggaataatggagaacacaca

SEQ ID NO: 17656 - DNA, 25 bp, probe
ggtcaagttcatggaataatggaga

SEQ ID NO: 17657 - DNA, 25 bp, probe
aggtcaagttcatggaataatggag

SEQ ID NO: 17658 - DNA, 25 bp, probe
gaggtcaagttcatggaataatgga

SEQ ID NO: 17659 - DNA, 25 bp, probe
aggaggtcaagttcatggaataatg

SEQ ID NO: 17660 - DNA, 25 bp, probe
gaaggaggtcaagttcatggaataa

SEQ ID NO: 17661 - DNA, 25 bp, probe
tcatggaataatggagaacacacag

SEQ ID NO: 17662 - DNA, 25 bp, probe
gtcaagttcatggaataatggagaa

SEQ ID NO: 17663 - DNA, 25 bp, probe
aactaacaggtgtaattggtcctta

SEQ ID NO: 17664 - DNA, 25 bp, probe
taactaacaggtgtaattggtcctt

SEQ ID NO: 17665 - DNA, 25 bp, probe
actaacaggtgtaattggtccttat

SEQ ID NO: 17666 - DNA, 25 bp, probe
ataactaacaggtgtaattggtcct

SEQ ID NO: 17667 - DNA, 25 bp, probe
aacaggtgtaattggtccttattcc

SEQ ID NO: 17668 - DNA, 25 bp, probe
ggaggtcaagttcatggaataatgg

SEQ ID NO: 17669 - DNA, 25 bp, probe
ccataactaacaggtgtaattggtc

SEQ ID NO: 17670 - DNA, 25 bp, probe
taacaggtgtaattggtccttattc

SEQ ID NO: 17671 - DNA, 25 bp, probe
ctaacaggtgtaattggtccttatt

SEQ ID NO: 17672 - DNA, 25 bp, probe
agccataactaacaggtgtaattgg

SEQ ID NO: 17673 - DNA, 25 bp, probe
ttggtccttattcccttattcactg

SEQ ID NO: 17674 - DNA, 25 bp, probe
gccataactaacaggtgtaattggt

SEQ ID NO: 17675 - DNA, 25 bp, probe
gctaaataaaggctgctgttctaag

SEQ ID NO: 17676 - DNA, 25 bp, probe
ggaaggaggtcaagttcatggaata

SEQ ID NO: 17677 - DNA, 25 bp, probe
attggtccttattcccttattcact

SEQ ID NO: 17678 - DNA, 25 bp, probe
aaataaaggctgctgttctaagtca

SEQ ID NO: 17679 - DNA, 25 bp, probe
ggtccttattcccttattcactgag

SEQ ID NO: 17680 - DNA, 25 bp, probe
gtccttattcccttattcactgaga

SEQ ID NO: 17681 - DNA, 25 bp, probe
ggtgtaattggtccttattccctta

SEQ ID NO: 17682 - DNA, 25 bp, probe
taaataaaggctgctgttctaagtc

SEQ ID NO: 17683 - DNA, 25 bp, probe
ctaaataaaggctgctgttctaagt

SEQ ID NO: 17684 - DNA, 25 bp, probe
tccttattcccttattcactgagag

SEQ ID NO: 17685 - DNA, 25 bp, probe
catggaataatggagaacacacagc

SEQ ID NO: 17686 - DNA, 25 bp, probe
ggaacacacatttattgagcacttg

SEQ ID NO: 17687 - DNA, 25 bp, probe
tggtccttattcccttattcactga

SEQ ID NO: 17688 - DNA, 25 bp, probe
aataaaggctgctgttctaagtcac

SEQ ID NO: 17689 - DNA, 25 bp, probe
aattggtccttattcccttattcac

SEQ ID NO: 17690 - DNA, 25 bp, probe
ccttattcccttattcactgagagt

SEQ ID NO: 17691 - DNA, 25 bp, probe
atggaataatggagaacacacagct

SEQ ID NO: 17692 - DNA, 25 bp, probe
gtgtaattggtccttattcccttat

SEQ ID NO: 17693 - DNA, 25 bp, probe
gggaacacacatttattgagcactt

SEQ ID NO: 17694 - DNA, 25 bp, probe
ggcagccataactaacaggtgtaat

SEQ ID NO: 17695 - DNA, 25 bp, probe
gtgataggatctaacttcagagtgc

SEQ ID NO: 17696 - DNA, 25 bp, probe
tgtgataggatctaacttcagagtg

SEQ ID NO: 17697 - DNA, 25 bp, probe
cctgtgataggatctaacttcagag

SEQ ID NO: 17698 - DNA, 25 bp, probe
ctgtgataggatctaacttcagagt

SEQ ID NO: 17699 - DNA, 25 bp, probe
gataggatctaacttcagagtgcag

SEQ ID NO: 17700 - DNA, 25 bp, probe
gatctaacttcagagtgcagtctac

SEQ ID NO: 17701 - DNA, 25 bp, probe
ataggatctaacttcagagtgcagt

SEQ ID NO: 17702 - DNA, 25 bp, probe
tgataggatctaacttcagagtgca

SEQ ID NO: 17703 - DNA, 25 bp, probe
atctaacttcagagtgcagtctaca

SEQ ID NO: 17704 - DNA, 25 bp, probe
ctaacttcagagtgcagtctacaac

SEQ ID NO: 17705 - DNA, 25 bp, probe
tctaacttcagagtgcagtctacaa

SEQ ID NO: 17706 - DNA, 25 bp, probe
ggatctaacttcagagtgcagtcta

SEQ ID NO: 17707 - DNA, 25 bp, probe
taggatctaacttcagagtgcagtc

SEQ ID NO: 17708 - DNA, 25 bp, probe
taacttcagagtgcagtctacaact

SEQ ID NO: 17709 - DNA, 25 bp, probe
ctcgttcttactggcgtcaatcttc

SEQ ID NO: 17710 - DNA, 25 bp, probe
aacttcagagtgcagtctacaactt

SEQ ID NO: 17711 - DNA, 25 bp, probe
aaccgaaactagcagcaaagtaatc

SEQ ID NO: 17712 - DNA, 25 bp, probe
ccctgtgataggatctaacttcaga

SEQ ID NO: 17713 - DNA, 25 bp, probe
cttcagagtgcagtctacaacttca

SEQ ID NO: 17714 - DNA, 25 bp, probe
acttcagagtgcagtctacaacttc

SEQ ID NO: 17715 - DNA, 25 bp, probe
caaccgaaactagcagcaaagtaat

SEQ ID NO: 17716 - DNA, 25 bp, probe
atctttctttgtagtgtcccagcta

SEQ ID NO: 17717 - DNA, 25 bp, probe
ctttctttgtagtgtcccagctaag

SEQ ID NO: 17718 - DNA, 25 bp, probe
tctttctttgtagtgtcccagctaa

SEQ ID NO: 17719 - DNA, 25 bp, probe
tttcccttcatcctcctcgttctta

SEQ ID NO: 17720 - DNA, 25 bp, probe
aggatctaacttcagagtgcagtct

SEQ ID NO: 17721 - DNA, 25 bp, probe
ccttcatcctcctcgttcttactgg

SEQ ID NO: 17722 - DNA, 25 bp, probe
ataaacattttcccttcatcctcct

SEQ ID NO: 17723 - DNA, 25 bp, probe
tgcagtctacaacttcaccaaattt

SEQ ID NO: 17724 - DNA, 25 bp, probe
ttcagagtgcagtctacaacttcac

SEQ ID NO: 17725 - DNA, 25 bp, probe
taaacattttcccttcatcctcctc

SEQ ID NO: 17726 - DNA, 25 bp, probe
gccctgtgataggatctaacttcag

SEQ ID NO: 17727 - DNA, 25 bp, probe
gcctcctataaacattttcccttca

SEQ ID NO: 17728 - DNA, 25 bp, probe
gatctttctttgtagtgtcccagct

SEQ ID NO: 17729 - DNA, 25 bp, probe
ttcccttcatcctcctcgttcttac

SEQ ID NO: 17730 - DNA, 25 bp, probe
tttctttgtagtgtcccagctaagg

SEQ ID NO: 17731 - DNA, 25 bp, probe
tataaacattttcccttcatcctcc

SEQ ID NO: 17732 - DNA, 25 bp, probe
cctataaacattttcccttcatcct

SEQ ID NO: 17733 - DNA, 25 bp, probe
tcctataaacattttcccttcatcc

SEQ ID NO: 17734 - DNA, 25 bp, probe
cctcctataaacattttcccttcat

SEQ ID NO: 17735 - DNA, 25 bp, probe
cttcatcctcctcgttcttactggc

SEQ ID NO: 17736 - DNA, 25 bp, probe
ttcagatctttctttgtagtgtccc

SEQ ID NO: 17737 - DNA, 25 bp, probe
tccttcagatctttctttgtagtgt

SEQ ID NO: 17738 - DNA, 25 bp, probe
accgaaactagcagcaaagtaatcc

SEQ ID NO: 17739 - DNA, 25 bp, probe
gatggactcgttctgtagatgagag

SEQ ID NO: 17740 - DNA, 25 bp, probe
ctgtgatggactcgttctgtagatg

SEQ ID NO: 17741 - DNA, 25 bp, probe
atggactcgttctgtagatgagaga

SEQ ID NO: 17742 - DNA, 25 bp, probe
gatgctcactaaagatttcaaagga

SEQ ID NO: 17743 - DNA, 25 bp, probe
agatgctcactaaagatttcaaagg

SEQ ID NO: 17744 - DNA, 25 bp, probe
ttatgacttgcaggcacaatatcta

SEQ ID NO: 17745 - DNA, 25 bp, probe
tagatgagagaacagaggcacagag

SEQ ID NO: 17746 - DNA, 25 bp, probe
tgatggactcgttctgtagatgaga

SEQ ID NO: 17747 - DNA, 25 bp, probe
gtgatggactcgttctgtagatgag

SEQ ID NO: 17748 - DNA, 25 bp, probe
tatgacttgcaggcacaatatctag

SEQ ID NO: 17749 - DNA, 25 bp, probe
tgtgatggactcgttctgtagatga

SEQ ID NO: 17750 - DNA, 25 bp, probe
actgtgatggactcgttctgtagat

SEQ ID NO: 17751 - DNA, 25 bp, probe
caactgccagaacttggtattgtag

SEQ ID NO: 17752 - DNA, 25 bp, probe
cagatgctcactaaagatttcaaag

SEQ ID NO: 17753 - DNA, 25 bp, probe
gcagatgctcactaaagatttcaaa

SEQ ID NO: 17754 - DNA, 25 bp, probe
tgctcactaaagatttcaaaggaga

SEQ ID NO: 17755 - DNA, 25 bp, probe
gtagatgagagaacagaggcacaga

SEQ ID NO: 17756 - DNA, 25 bp, probe
gacttgcaggcacaatatctagtac

SEQ ID NO: 17757 - DNA, 25 bp, probe
gctcactaaagatttcaaaggagaa

SEQ ID NO: 17758 - DNA, 25 bp, probe
atgctcactaaagatttcaaaggag

SEQ ID NO: 17759 - DNA, 25 bp, probe
aactgtgatggactcgttctgtaga

SEQ ID NO: 17760 - DNA, 25 bp, probe
tgacttgcaggcacaatatctagta

SEQ ID NO: 17761 - DNA, 25 bp, probe
gcatcttattcatagtgtttcccac

SEQ ID NO: 17762 - DNA, 25 bp, probe
ggcagatgctcactaaagatttcaa

SEQ ID NO: 17763 - DNA, 25 bp, probe
catcttattcatagtgtttcccacg

SEQ ID NO: 17764 - DNA, 25 bp, probe
atgacttgcaggcacaatatctagt

SEQ ID NO: 17765 - DNA, 25 bp, probe
ttcaaaggagaaactgtgatggact

SEQ ID NO: 17766 - DNA, 25 bp, probe
aaactgtgatggactcgttctgtag

SEQ ID NO: 17767 - DNA, 25 bp, probe
gaaactgtgatggactcgttctgta

SEQ ID NO: 17768 - DNA, 25 bp, probe
tgcatcttattcatagtgtttccca

SEQ ID NO: 17769 - DNA, 25 bp, probe
gtgcatcttattcatagtgtttccc

SEQ ID NO: 17770 - DNA, 25 bp, probe
tgtagatgagagaacagaggcacag

SEQ ID NO: 17771 - DNA, 25 bp, probe
tgtgcatcttattcatagtgtttcc

SEQ ID NO: 17772 - DNA, 25 bp, probe
tggactcgttctgtagatgagagaa

SEQ ID NO: 17773 - DNA, 25 bp, probe
gggatttgtgcatcttattcatagt

SEQ ID NO: 17774 - DNA, 25 bp, probe
cagggatttgtgcatcttattcata

SEQ ID NO: 17775 - DNA, 25 bp, probe
tcaaaggagaaactgtgatggactc

SEQ ID NO: 17776 - DNA, 25 bp, probe
tggcagatgctcactaaagatttca

SEQ ID NO: 17777 - DNA, 25 bp, probe
gatttcaaaggagaaactgtgatgg

SEQ ID NO: 17778 - DNA, 25 bp, probe
agggatttgtgcatcttattcatag

SEQ ID NO: 17779 - DNA, 25 bp, probe
cacaatatctagtactgcaactgcc

SEQ ID NO: 17780 - DNA, 25 bp, probe
acttgcaggcacaatatctagtact

SEQ ID NO: 17781 - DNA, 25 bp, probe
agatttcaaaggagaaactgtgatg

SEQ ID NO: 17782 - DNA, 25 bp, probe
atttcaaaggagaaactgtgatgga

SEQ ID NO: 17783 - DNA, 25 bp, probe
caagacatcctacaagagaatacga

SEQ ID NO: 17784 - DNA, 25 bp, probe
gcgtccaataacagttcttctaatt

SEQ ID NO: 17785 - DNA, 25 bp, probe
agacatcctacaagagaatacgatt

SEQ ID NO: 17786 - DNA, 25 bp, probe
aagacatcctacaagagaatacgat

SEQ ID NO: 17787 - DNA, 25 bp, probe
ggcgtccaataacagttcttctaat

SEQ ID NO: 17788 - DNA, 25 bp, probe
gcaagacatcctacaagagaatacg

SEQ ID NO: 17789 - DNA, 25 bp, probe
gttcttctaattgagactgactcca

SEQ ID NO: 17790 - DNA, 25 bp, probe
tcttctaattgagactgactccaag

SEQ ID NO: 17791 - DNA, 25 bp, probe
agttcttctaattgagactgactcc

SEQ ID NO: 17792 - DNA, 25 bp, probe
cttctaattgagactgactccaagg

SEQ ID NO: 17793 - DNA, 25 bp, probe
ttcttctaattgagactgactccaa

SEQ ID NO: 17794 - DNA, 25 bp, probe
caaggtgctggtacttattggtatt

SEQ ID NO: 17795 - DNA, 25 bp, probe
acaaggtgctggtacttattggtat

SEQ ID NO: 17796 - DNA, 25 bp, probe
ttctaattgagactgactccaaggc

SEQ ID NO: 17797 - DNA, 25 bp, probe
ggacaaagaatgaggttagaagact

SEQ ID NO: 17798 - DNA, 25 bp, probe
tggacaaagaatgaggttagaagac

SEQ ID NO: 17799 - DNA, 25 bp, probe
aaagtgaaacccgtattagcaagta

SEQ ID NO: 17800 - DNA, 25 bp, probe
taaagtgaaacccgtattagcaagt

SEQ ID NO: 17801 - DNA, 25 bp, probe
cataaagtgaaacccgtattagcaa

SEQ ID NO: 17802 - DNA, 25 bp, probe
gacatcctacaagagaatacgattc

SEQ ID NO: 17803 - DNA, 25 bp, probe
gacaaagaatgaggttagaagactg

SEQ ID NO: 17804 - DNA, 25 bp, probe
ataaagtgaaacccgtattagcaag

SEQ ID NO: 17805 - DNA, 25 bp, probe
ttggacaaagaatgaggttagaaga

SEQ ID NO: 17806 - DNA, 25 bp, probe
atccgaaagtcagtctctacaagta

SEQ ID NO: 17807 - DNA, 25 bp, probe
tatcagtgtctttatggaaggaagc

SEQ ID NO: 17808 - DNA, 25 bp, probe
acaaagaatgaggttagaagactgc

SEQ ID NO: 17809 - DNA, 25 bp, probe
taacatcacaaggtgctggtactta

SEQ ID NO: 17810 - DNA, 25 bp, probe
attggacaaagaatgaggttagaag

SEQ ID NO: 17811 - DNA, 25 bp, probe
caatgttcattccaatcagatgcag

SEQ ID NO: 17812 - DNA, 25 bp, probe
gggctagtccagtgtctatatttaa

SEQ ID NO: 17813 - DNA, 25 bp, probe
tctatcagtgtctttatggaaggaa

SEQ ID NO: 17814 - DNA, 25 bp, probe
ttctatcagtgtctttatggaagga

SEQ ID NO: 17815 - DNA, 25 bp, probe
gtcataaagtgaaacccgtattagc

SEQ ID NO: 17816 - DNA, 25 bp, probe
tcataaagtgaaacccgtattagca

SEQ ID NO: 17817 - DNA, 25 bp, probe
catcacaaggtgctggtacttattg

SEQ ID NO: 17818 - DNA, 25 bp, probe
tcagatgaagaatgtggacttgaaa

SEQ ID NO: 17819 - DNA, 25 bp, probe
ctatcagtgtctttatggaaggaag

SEQ ID NO: 17820 - DNA, 25 bp, probe
tattagcaagtacgtggcaatgttc

SEQ ID NO: 17821 - DNA, 25 bp, probe
ggtgctggtacttattggtatttac

SEQ ID NO: 17822 - DNA, 25 bp, probe
aggtgctggtacttattggtattta

SEQ ID NO: 17823 - DNA, 25 bp, probe
acatcacaaggtgctggtacttatt

SEQ ID NO: 17824 - DNA, 25 bp, probe
aacatcacaaggtgctggtacttat

SEQ ID NO: 17825 - DNA, 25 bp, probe
aaggtgctggtacttattggtattt

SEQ ID NO: 17826 - DNA, 25 bp, probe
gtattagcaagtacgtggcaatgtt

SEQ ID NO: 17827 - DNA, 25 bp, probe
gtagcacactcacttctcttccttg

SEQ ID NO: 17828 - DNA, 25 bp, probe
caatgtagtcagaattagctgcttc

SEQ ID NO: 17829 - DNA, 25 bp, probe
cttcaatgtagtcagaattagctgc

SEQ ID NO: 17830 - DNA, 25 bp, probe
tcaatgtagtcagaattagctgctt

SEQ ID NO: 17831 - DNA, 25 bp, probe
ttcaatgtagtcagaattagctgct

SEQ ID NO: 17832 - DNA, 25 bp, probe
ctgcttcaatgtagtcagaattagc

SEQ ID NO: 17833 - DNA, 25 bp, probe
ttaaattgtgtgtgctctgcttcaa

SEQ ID NO: 17834 - DNA, 25 bp, probe
aatgtagtcagaattagctgcttct

SEQ ID NO: 17835 - DNA, 25 bp, probe
gcttcaatgtagtcagaattagctg

SEQ ID NO: 17836 - DNA, 25 bp, probe
tgcttcaatgtagtcagaattagct

SEQ ID NO: 17837 - DNA, 25 bp, probe
tgtagtcagaattagctgcttctat

SEQ ID NO: 17838 - DNA, 25 bp, probe
atgtagtcagaattagctgcttcta

SEQ ID NO: 17839 - DNA, 25 bp, probe
gtagtcagaattagctgcttctatg

SEQ ID NO: 17840 - DNA, 25 bp, probe
tagcacactcacttctcttccttgg

SEQ ID NO: 17841 - DNA, 25 bp, probe
ggtagcacactcacttctcttcctt

SEQ ID NO: 17842 - DNA, 25 bp, probe
ttgtgtgtgctctgcttcaatgtag

SEQ ID NO: 17843 - DNA, 25 bp, probe
gtgtgtgctctgcttcaatgtagtc

SEQ ID NO: 17844 - DNA, 25 bp, probe
tttaaattgtgtgtgctctgcttca

SEQ ID NO: 17845 - DNA, 25 bp, probe
gtgtgctctgcttcaatgtagtcag

SEQ ID NO: 17846 - DNA, 25 bp, probe
attgtgtgtgctctgcttcaatgta

SEQ ID NO: 17847 - DNA, 25 bp, probe
tgtgtgctctgcttcaatgtagtca

SEQ ID NO: 17848 - DNA, 25 bp, probe
taaattgtgtgtgctctgcttcaat

SEQ ID NO: 17849 - DNA, 25 bp, probe
ctcggtagcacactcacttctcttc

SEQ ID NO: 17850 - DNA, 25 bp, probe
tctgcttcaatgtagtcagaattag

SEQ ID NO: 17851 - DNA, 25 bp, probe
ctctgcttcaatgtagtcagaatta

SEQ ID NO: 17852 - DNA, 25 bp, probe
gctctgcttcaatgtagtcagaatt

SEQ ID NO: 17853 - DNA, 25 bp, probe
tgtgtgtgctctgcttcaatgtagt

SEQ ID NO: 17854 - DNA, 25 bp, probe
tgctctgcttcaatgtagtcagaat

SEQ ID NO: 17855 - DNA, 25 bp, probe
attcacttctaaaacagacacatgg

SEQ ID NO: 17856 - DNA, 25 bp, probe
aattgtgtgtgctctgcttcaatgt

SEQ ID NO: 17857 - DNA, 25 bp, probe
atgcttcttttaaattgtgtgtgct

SEQ ID NO: 17858 - DNA, 25 bp, probe
cttcttttaaattgtgtgtgctctg

SEQ ID NO: 17859 - DNA, 25 bp, probe
gcttcttttaaattgtgtgtgctct

SEQ ID NO: 17860 - DNA, 25 bp, probe
tatgcttcttttaaattgtgtgtgc

SEQ ID NO: 17861 - DNA, 25 bp, probe
ttttaaattgtgtgtgctctgcttc

SEQ ID NO: 17862 - DNA, 25 bp, probe
cttttaaattgtgtgtgctctgctt

SEQ ID NO: 17863 - DNA, 25 bp, probe
ttcttttaaattgtgtgtgctctgc

SEQ ID NO: 17864 - DNA, 25 bp, probe
tgcttcttttaaattgtgtgtgctc

SEQ ID NO: 17865 - DNA, 25 bp, probe
aaattgtgtgtgctctgcttcaatg

SEQ ID NO: 17866 - DNA, 25 bp, probe
tcttttaaattgtgtgtgctctgct

SEQ ID NO: 17867 - DNA, 25 bp, probe
gtgctctgcttcaatgtagtcagaa

SEQ ID NO: 17868 - DNA, 25 bp, probe
tattcacttctaaaacagacacatg

SEQ ID NO: 17869 - DNA, 25 bp, probe
ccttatgcttcttttaaattgtgtg

SEQ ID NO: 17870 - DNA, 25 bp, probe
tccttatgcttcttttaaattgtgt

SEQ ID NO: 17871 - DNA, 25 bp, probe
ttataaaggagaataccacagagct

SEQ ID NO: 17872 - DNA, 25 bp, probe
gattctgctaagggaaaatgaagtc

SEQ ID NO: 17873 - DNA, 25 bp, probe
attctgctaagggaaaatgaagtca

SEQ ID NO: 17874 - DNA, 25 bp, probe
ggattctgctaagggaaaatgaagt

SEQ ID NO: 17875 - DNA, 25 bp, probe
tggattctgctaagggaaaatgaag

SEQ ID NO: 17876 - DNA, 25 bp, probe
gtggattctgctaagggaaaatgaa

SEQ ID NO: 17877 - DNA, 25 bp, probe
ctaagggaaaatgaagtcagcacac

SEQ ID NO: 17878 - DNA, 25 bp, probe
ttctgctaagggaaaatgaagtcag

SEQ ID NO: 17879 - DNA, 25 bp, probe
ctataccgcttgcaggatttgagtt

SEQ ID NO: 17880 - DNA, 25 bp, probe
tttataaaggagaataccacagagc

SEQ ID NO: 17881 - DNA, 25 bp, probe
taagggaaaatgaagtcagcacact

SEQ ID NO: 17882 - DNA, 25 bp, probe
tataccgcttgcaggatttgagttg

SEQ ID NO: 17883 - DNA, 25 bp, probe
cttcggcattgggttatctatgggt

SEQ ID NO: 17884 - DNA, 25 bp, probe
cattgggttatctatgggtgcaagg

SEQ ID NO: 17885 - DNA, 25 bp, probe
attgggttatctatgggtgcaagga

SEQ ID NO: 17886 - DNA, 25 bp, probe
cgtggattctgctaagggaaaatga

SEQ ID NO: 17887 - DNA, 25 bp, probe
ttcggcattgggttatctatgggtg

SEQ ID NO: 17888 - DNA, 25 bp, probe
ggaaaatgaagtcagcacactttat

SEQ ID NO: 17889 - DNA, 25 bp, probe
ttgggttatctatgggtgcaaggag

SEQ ID NO: 17890 - DNA, 25 bp, probe
gggaaaatgaagtcagcacacttta

SEQ ID NO: 17891 - DNA, 25 bp, probe
ccgtggattctgctaagggaaaatg

SEQ ID NO: 17892 - DNA, 25 bp, probe
tataaaggagaataccacagagctc

SEQ ID NO: 17893 - DNA, 25 bp, probe
gaaaatgaagtcagcacactttata

SEQ ID NO: 17894 - DNA, 25 bp, probe
ggttatctatgggtgcaaggagtgg

SEQ ID NO: 17895 - DNA, 25 bp, probe
gggttatctatgggtgcaaggagtg

SEQ ID NO: 17896 - DNA, 25 bp, probe
ataccgcttgcaggatttgagttga

SEQ ID NO: 17897 - DNA, 25 bp, probe
tctgctaagggaaaatgaagtcagc

SEQ ID NO: 17898 - DNA, 25 bp, probe
aaatgaagtcagcacactttataaa

SEQ ID NO: 17899 - DNA, 25 bp, probe
tgggttatctatgggtgcaaggagt

SEQ ID NO: 17900 - DNA, 25 bp, probe
aaaatgaagtcagcacactttataa

SEQ ID NO: 17901 - DNA, 25 bp, probe
agggaaaatgaagtcagcacacttt

SEQ ID NO: 17902 - DNA, 25 bp, probe
aagggaaaatgaagtcagcacactt

SEQ ID NO: 17903 - DNA, 25 bp, probe
cctataccgcttgcaggatttgagt

SEQ ID NO: 17904 - DNA, 25 bp, probe
gcattgggttatctatgggtgcaag

SEQ ID NO: 17905 - DNA, 25 bp, probe
gctaagggaaaatgaagtcagcaca

SEQ ID NO: 17906 - DNA, 25 bp, probe
ggcattgggttatctatgggtgcaa

SEQ ID NO: 17907 - DNA, 25 bp, probe
cccgtggattctgctaagggaaaat

SEQ ID NO: 17908 - DNA, 25 bp, probe
ataaaggagaataccacagagctcc

SEQ ID NO: 17909 - DNA, 25 bp, probe
taaaggagaataccacagagctcca

SEQ ID NO: 17910 - DNA, 25 bp, probe
aaggagaataccacagagctccagt

SEQ ID NO: 17911 - DNA, 25 bp, probe
aaaggagaataccacagagctccag

SEQ ID NO: 17912 - DNA, 25 bp, probe
gcttagttctaaagagactgtttgg

SEQ ID NO: 17913 - DNA, 25 bp, probe
ggcttagttctaaagagactgtttg

SEQ ID NO: 17914 - DNA, 25 bp, probe
gaaacggcttagttctaaagagact

SEQ ID NO: 17915 - DNA, 25 bp, probe
cggcttagttctaaagagactgttt

SEQ ID NO: 17916 - DNA, 25 bp, probe
aaacggcttagttctaaagagactg

SEQ ID NO: 17917 - DNA, 25 bp, probe
acggcttagttctaaagagactgtt

SEQ ID NO: 17918 - DNA, 25 bp, probe
aacggcttagttctaaagagactgt

SEQ ID NO: 17919 - DNA, 25 bp, probe
tattcactgaaagcagaactactgt

SEQ ID NO: 17920 - DNA, 25 bp, probe
cttagttctaaagagactgtttgga

SEQ ID NO: 17921 - DNA, 25 bp, probe
ttattcactgaaagcagaactactg

SEQ ID NO: 17922 - DNA, 25 bp, probe
tagttctaaagagactgtttggaaa

SEQ ID NO: 17923 - DNA, 25 bp, probe
cttattcactgaaagcagaactact

SEQ ID NO: 17924 - DNA, 25 bp, probe
ttagttctaaagagactgtttggaa

SEQ ID NO: 17925 - DNA, 25 bp, probe
attcactgaaagcagaactactgtg

SEQ ID NO: 17926 - DNA, 25 bp, probe
cttggatgactacttccctgagttt

SEQ ID NO: 17927 - DNA, 25 bp, probe
agaaacggcttagttctaaagagac

SEQ ID NO: 17928 - DNA, 25 bp, probe
cagaaacggcttagttctaaagaga

SEQ ID NO: 17929 - DNA, 25 bp, probe
ctctcttcacacctgttctgaatcc

SEQ ID NO: 17930 - DNA, 25 bp, probe
cctctcttcacacctgttctgaatc

SEQ ID NO: 17931 - DNA, 25 bp, probe
tacttccctgagttttgcttattca

SEQ ID NO: 17932 - DNA, 25 bp, probe
actacttccctgagttttgcttatt

SEQ ID NO: 17933 - DNA, 25 bp, probe
ctacttccctgagttttgcttattc

SEQ ID NO: 17934 - DNA, 25 bp, probe
gactacttccctgagttttgcttat

SEQ ID NO: 17935 - DNA, 25 bp, probe
acttggatgactacttccctgagtt

SEQ ID NO: 17936 - DNA, 25 bp, probe
gcagaaacggcttagttctaaagag

SEQ ID NO: 17937 - DNA, 25 bp, probe
gagcagaaacggcttagttctaaag

SEQ ID NO: 17938 - DNA, 25 bp, probe
ctcttcacacctgttctgaatccag

SEQ ID NO: 17939 - DNA, 25 bp, probe
cttccctgagttttgcttattcact

SEQ ID NO: 17940 - DNA, 25 bp, probe
agcagaaacggcttagttctaaaga

SEQ ID NO: 17941 - DNA, 25 bp, probe
agagcagaaacggcttagttctaaa

SEQ ID NO: 17942 - DNA, 25 bp, probe
aagagcagaaacggcttagttctaa

SEQ ID NO: 17943 - DNA, 25 bp, probe
ttccctgagttttgcttattcactg

SEQ ID NO: 17944 - DNA, 25 bp, probe
acttccctgagttttgcttattcac

SEQ ID NO: 17945 - DNA, 25 bp, probe
ccattttcagatcagaagagcagaa

SEQ ID NO: 17946 - DNA, 25 bp, probe
cctgagttttgcttattcactgaaa

SEQ ID NO: 17947 - DNA, 25 bp, probe
agttctaaagagactgtttggaaaa

SEQ ID NO: 17948 - DNA, 25 bp, probe
tctcttcacacctgttctgaatcca

SEQ ID NO: 17949 - DNA, 25 bp, probe
tgactacttccctgagttttgctta

SEQ ID NO: 17950 - DNA, 25 bp, probe
ctgagttttgcttattcactgaaag

SEQ ID NO: 17951 - DNA, 25 bp, probe
catttgcctctcttcacacctgttc

SEQ ID NO: 17952 - DNA, 25 bp, probe
gaagagcagaaacggcttagttcta

SEQ ID NO: 17953 - DNA, 25 bp, probe
ccctgagttttgcttattcactgaa

SEQ ID NO: 17954 - DNA, 25 bp, probe
atttgcctctcttcacacctgttct

SEQ ID NO: 17955 - DNA, 25 bp, probe
cacttggatgactacttccctgagt

SEQ ID NO: 17956 - DNA, 25 bp, probe
ctctcaaatacattgcgaagtctag

SEQ ID NO: 17957 - DNA, 25 bp, probe
gctctcaaatacattgcgaagtcta

SEQ ID NO: 17958 - DNA, 25 bp, probe
tagaatgtcacctgtgtgggtattt

SEQ ID NO: 17959 - DNA, 25 bp, probe
ttagaatgtcacctgtgtgggtatt

SEQ ID NO: 17960 - DNA, 25 bp, probe
aagctctcaaatacattgcgaagtc

SEQ ID NO: 17961 - DNA, 25 bp, probe
gaagctctcaaatacattgcgaagt

SEQ ID NO: 17962 - DNA, 25 bp, probe
cttagaatgtcacctgtgtgggtat

SEQ ID NO: 17963 - DNA, 25 bp, probe
aaatacattgcgaagtctagaaagg

SEQ ID NO: 17964 - DNA, 25 bp, probe
ctagaaaggctaaaacagaggagag

SEQ ID NO: 17965 - DNA, 25 bp, probe
cagagcttagaatgtcacctgtgtg

SEQ ID NO: 17966 - DNA, 25 bp, probe
tctcaaatacattgcgaagtctaga

SEQ ID NO: 17967 - DNA, 25 bp, probe
tagaaaggctaaaacagaggagagg

SEQ ID NO: 17968 - DNA, 25 bp, probe
agctctcaaatacattgcgaagtct

SEQ ID NO: 17969 - DNA, 25 bp, probe
ggaagctctcaaatacattgcgaag

SEQ ID NO: 17970 - DNA, 25 bp, probe
cattgcgaagtctagaaaggctaaa

SEQ ID NO: 17971 - DNA, 25 bp, probe
aatacattgcgaagtctagaaaggc

SEQ ID NO: 17972 - DNA, 25 bp, probe
ctcaaatacattgcgaagtctagaa

SEQ ID NO: 17973 - DNA, 25 bp, probe
tacattgcgaagtctagaaaggcta

SEQ ID NO: 17974 - DNA, 25 bp, probe
tcaaatacattgcgaagtctagaaa

SEQ ID NO: 17975 - DNA, 25 bp, probe
caaatacattgcgaagtctagaaag

SEQ ID NO: 17976 - DNA, 25 bp, probe
atacattgcgaagtctagaaaggct

SEQ ID NO: 17977 - DNA, 25 bp, probe
tggaagctctcaaatacattgcgaa

SEQ ID NO: 17978 - DNA, 25 bp, probe
acattgcgaagtctagaaaggctaa

SEQ ID NO: 17979 - DNA, 25 bp, probe
actacattaattatggggtggaagc

SEQ ID NO: 17980 - DNA, 25 bp, probe
gaaaggctaaaacagaggagaggag

SEQ ID NO: 17981 - DNA, 25 bp, probe
tacattaattatggggtggaagctc

SEQ ID NO: 17982 - DNA, 25 bp, probe
ctacattaattatggggtggaagct

SEQ ID NO: 17983 - DNA, 25 bp, probe
atgtcacctgtgtgggtattttata

SEQ ID NO: 17984 - DNA, 25 bp, probe
aatgtcacctgtgtgggtattttat

SEQ ID NO: 17985 - DNA, 25 bp, probe
aactacattaattatggggtggaag

SEQ ID NO: 17986 - DNA, 25 bp, probe
agaaaggctaaaacagaggagagga

SEQ ID NO: 17987 - DNA, 25 bp, probe
gaatgtcacctgtgtgggtatttta

SEQ ID NO: 17988 - DNA, 25 bp, probe
cattaattatggggtggaagctctc

SEQ ID NO: 17989 - DNA, 25 bp, probe
attatggggtggaagctctcaaata

SEQ ID NO: 17990 - DNA, 25 bp, probe
attaattatggggtggaagctctca

SEQ ID NO: 17991 - DNA, 25 bp, probe
taattatggggtggaagctctcaaa

SEQ ID NO: 17992 - DNA, 25 bp, probe
ttaattatggggtggaagctctcaa

SEQ ID NO: 17993 - DNA, 25 bp, probe
agagcttagaatgtcacctgtgtgg

SEQ ID NO: 17994 - DNA, 25 bp, probe
gtggaagctctcaaatacattgcga

SEQ ID NO: 17995 - DNA, 25 bp, probe
acattaattatggggtggaagctct

SEQ ID NO: 17996 - DNA, 25 bp, probe
tgtcacctgtgtgggtattttataa

SEQ ID NO: 17997 - DNA, 25 bp, probe
ttgacatgttcactgtttaactaca

SEQ ID NO: 17998 - DNA, 25 bp, probe
aattatggggtggaagctctcaaat

SEQ ID NO: 17999 - DNA, 25 bp, probe
ttatggggtggaagctctcaaatac

SEQ ID NO: 18000 - DNA, 25 bp, probe
gccaccttaatctcttctaatctgt

SEQ ID NO: 18001 - DNA, 25 bp, probe
cagaccaaggtatgttaggaagaag

SEQ ID NO: 18002 - DNA, 25 bp, probe
ccagaccaaggtatgttaggaagaa

SEQ ID NO: 18003 - DNA, 25 bp, probe
agaccaaggtatgttaggaagaagc

SEQ ID NO: 18004 - DNA, 25 bp, probe
ccaccttaatctcttctaatctgtg

SEQ ID NO: 18005 - DNA, 25 bp, probe
caccttaatctcttctaatctgtgt

SEQ ID NO: 18006 - DNA, 25 bp, probe
ctctgctcctaactttctatcacta

SEQ ID NO: 18007 - DNA, 25 bp, probe
cttgctctgctcctaactttctatc

SEQ ID NO: 18008 - DNA, 25 bp, probe
tctgctcctaactttctatcactaa

SEQ ID NO: 18009 - DNA, 25 bp, probe
cctctacattgttctctcaaagact

SEQ ID NO: 18010 - DNA, 25 bp, probe
gaccaaggtatgttaggaagaagct

SEQ ID NO: 18011 - DNA, 25 bp, probe
ttgctctgctcctaactttctatca

SEQ ID NO: 18012 - DNA, 25 bp, probe
ccctctacattgttctctcaaagac

SEQ ID NO: 18013 - DNA, 25 bp, probe
gaccctctacattgttctctcaaag

SEQ ID NO: 18014 - DNA, 25 bp, probe
accaaggtatgttaggaagaagctg

SEQ ID NO: 18015 - DNA, 25 bp, probe
gctctgctcctaactttctatcact

SEQ ID NO: 18016 - DNA, 25 bp, probe
accctctacattgttctctcaaaga

SEQ ID NO: 18017 - DNA, 25 bp, probe
agaccctctacattgttctctcaaa

SEQ ID NO: 18018 - DNA, 25 bp, probe
tccagaccaaggtatgttaggaaga

SEQ ID NO: 18019 - DNA, 25 bp, probe
ctctacattgttctctcaaagactt

SEQ ID NO: 18020 - DNA, 25 bp, probe
gctcctaactttctatcactaatca

SEQ ID NO: 18021 - DNA, 25 bp, probe
tgctcctaactttctatcactaatc

SEQ ID NO: 18022 - DNA, 25 bp, probe
ctgctcctaactttctatcactaat

SEQ ID NO: 18023 - DNA, 25 bp, probe
tgctctgctcctaactttctatcac

SEQ ID NO: 18024 - DNA, 25 bp, probe
ccttgctctgctcctaactttctat

SEQ ID NO: 18025 - DNA, 25 bp, probe
ctgcttccagaccaaggtatgttag

SEQ ID NO: 18026 - DNA, 25 bp, probe
agatcaggatgtatttgaacagcat

SEQ ID NO: 18027 - DNA, 25 bp, probe
aaagatcaggatgtatttgaacagc

SEQ ID NO: 18028 - DNA, 25 bp, probe
ggccaccttaatctcttctaatctg

SEQ ID NO: 18029 - DNA, 25 bp, probe
aagatcaggatgtatttgaacagca

SEQ ID NO: 18030 - DNA, 25 bp, probe
ttagtccttgctctgctcctaactt

SEQ ID NO: 18031 - DNA, 25 bp, probe
tagaccctctacattgttctctcaa

SEQ ID NO: 18032 - DNA, 25 bp, probe
ttagaccctctacattgttctctca

SEQ ID NO: 18033 - DNA, 25 bp, probe
tttagaccctctacattgttctctc

SEQ ID NO: 18034 - DNA, 25 bp, probe
tctacattgttctctcaaagacttt

SEQ ID NO: 18035 - DNA, 25 bp, probe
gaagggatgagagagctgtagaatt

SEQ ID NO: 18036 - DNA, 25 bp, probe
tccttgctctgctcctaactttcta

SEQ ID NO: 18037 - DNA, 25 bp, probe
caaggtatgttaggaagaagctggc

SEQ ID NO: 18038 - DNA, 25 bp, probe
aggccaccttaatctcttctaatct

SEQ ID NO: 18039 - DNA, 25 bp, probe
aaggtatgttaggaagaagctggct

SEQ ID NO: 18040 - DNA, 25 bp, probe
tgcttccagaccaaggtatgttagg

SEQ ID NO: 18041 - DNA, 25 bp, probe
taaactcactgtttgctcattggaa

SEQ ID NO: 18042 - DNA, 25 bp, probe
ccaaggtatgttaggaagaagctgg

SEQ ID NO: 18043 - DNA, 25 bp, probe
tagtccttgctctgctcctaacttt

SEQ ID NO: 18044 - DNA, 25 bp, probe
ctgagatggagatgatgaagatgat

SEQ ID NO: 18045 - DNA, 25 bp, probe
gcaggttccgatgttattagatgtt

SEQ ID NO: 18046 - DNA, 25 bp, probe
gtctgagatggagatgatgaagatg

SEQ ID NO: 18047 - DNA, 25 bp, probe
tctgagatggagatgatgaagatga

SEQ ID NO: 18048 - DNA, 25 bp, probe
tgtctgagatggagatgatgaagat

SEQ ID NO: 18049 - DNA, 25 bp, probe
tagacttaacacttcttacgcaatg

SEQ ID NO: 18050 - DNA, 25 bp, probe
gtagacttaacacttcttacgcaat

SEQ ID NO: 18051 - DNA, 25 bp, probe
aggttccgatgttattagatgttac

SEQ ID NO: 18052 - DNA, 25 bp, probe
caggttccgatgttattagatgtta

SEQ ID NO: 18053 - DNA, 25 bp, probe
taacacttcttacgcaatgcttcta

SEQ ID NO: 18054 - DNA, 25 bp, probe
tgagatggagatgatgaagatgatc

SEQ ID NO: 18055 - DNA, 25 bp, probe
gagatggagatgatgaagatgatcg

SEQ ID NO: 18056 - DNA, 25 bp, probe
gttgtagacttaacacttcttacgc

SEQ ID NO: 18057 - DNA, 25 bp, probe
cttaacacttcttacgcaatgcttc

SEQ ID NO: 18058 - DNA, 25 bp, probe
tgtagacttaacacttcttacgcaa

SEQ ID NO: 18059 - DNA, 25 bp, probe
ttgtagacttaacacttcttacgca

SEQ ID NO: 18060 - DNA, 25 bp, probe
gtgtctgagatggagatgatgaaga

SEQ ID NO: 18061 - DNA, 25 bp, probe
ttaacacttcttacgcaatgcttct

SEQ ID NO: 18062 - DNA, 25 bp, probe
acttaacacttcttacgcaatgctt

SEQ ID NO: 18063 - DNA, 25 bp, probe
aacacttcttacgcaatgcttctag

SEQ ID NO: 18064 - DNA, 25 bp, probe
ggttccgatgttattagatgttaca

SEQ ID NO: 18065 - DNA, 25 bp, probe
gacttaacacttcttacgcaatgct

SEQ ID NO: 18066 - DNA, 25 bp, probe
gttggttcgttctgtactgttactg

SEQ ID NO: 18067 - DNA, 25 bp, probe
agatggagatgatgaagatgatcgg

SEQ ID NO: 18068 - DNA, 25 bp, probe
agacttaacacttcttacgcaatgc

SEQ ID NO: 18069 - DNA, 25 bp, probe
ggtgtctgagatggagatgatgaag

SEQ ID NO: 18070 - DNA, 25 bp, probe
agttggttcgttctgtactgttact

SEQ ID NO: 18071 - DNA, 25 bp, probe
tccgatgttattagatgttacaagt

SEQ ID NO: 18072 - DNA, 25 bp, probe
ttggttcgttctgtactgttactgg

SEQ ID NO: 18073 - DNA, 25 bp, probe
tggtgtctgagatggagatgatgaa

SEQ ID NO: 18074 - DNA, 25 bp, probe
ccgatgttattagatgttacaagtt

SEQ ID NO: 18075 - DNA, 25 bp, probe
gttccgatgttattagatgttacaa

SEQ ID NO: 18076 - DNA, 25 bp, probe
tgcaggttccgatgttattagatgt

SEQ ID NO: 18077 - DNA, 25 bp, probe
ctggtgtctgagatggagatgatga

SEQ ID NO: 18078 - DNA, 25 bp, probe
gagatgatgaagatgatcgggaaac

SEQ ID NO: 18079 - DNA, 25 bp, probe
ttccgatgttattagatgttacaag

SEQ ID NO: 18080 - DNA, 25 bp, probe
gatgaagatgatcgggaaacacaaa

SEQ ID NO: 18081 - DNA, 25 bp, probe
gatgatgaagatgatcgggaaacac

SEQ ID NO: 18082 - DNA, 25 bp, probe
agatgatgaagatgatcgggaaaca

SEQ ID NO: 18083 - DNA, 25 bp, probe
cttcttacgcaatgcttctagagtt

SEQ ID NO: 18084 - DNA, 25 bp, probe
ggagatgatgaagatgatcgggaaa

SEQ ID NO: 18085 - DNA, 25 bp, probe
cacttcttacgcaatgcttctagag

SEQ ID NO: 18086 - DNA, 25 bp, probe
atgatgaagatgatcgggaaacaca

SEQ ID NO: 18087 - DNA, 25 bp, probe
gaattcagttggttcgttctgtact

SEQ ID NO: 18088 - DNA, 25 bp, probe
gacagatgagggtgatgacagcaaa

SEQ ID NO: 18089 - DNA, 25 bp, probe
cagatgagggtgatgacagcaaaag

SEQ ID NO: 18090 - DNA, 25 bp, probe
agatgagggtgatgacagcaaaagt

SEQ ID NO: 18091 - DNA, 25 bp, probe
acagatgagggtgatgacagcaaaa

SEQ ID NO: 18092 - DNA, 25 bp, probe
gagacgcacttcttcacaatctatt

SEQ ID NO: 18093 - DNA, 25 bp, probe
tattggacaagttatgcctaatagc

SEQ ID NO: 18094 - DNA, 25 bp, probe
acaatctattggacaagttatgcct

SEQ ID NO: 18095 - DNA, 25 bp, probe
cacaatctattggacaagttatgcc

SEQ ID NO: 18096 - DNA, 25 bp, probe
tcacaatctattggacaagttatgc

SEQ ID NO: 18097 - DNA, 25 bp, probe
cacttcttcacaatctattggacaa

SEQ ID NO: 18098 - DNA, 25 bp, probe
cttcttcacaatctattggacaagt

SEQ ID NO: 18099 - DNA, 25 bp, probe
acttcttcacaatctattggacaag

SEQ ID NO: 18100 - DNA, 25 bp, probe
aatctattggacaagttatgcctaa

SEQ ID NO: 18101 - DNA, 25 bp, probe
agagacgcacttcttcacaatctat

SEQ ID NO: 18102 - DNA, 25 bp, probe
gcacttcttcacaatctattggaca

SEQ ID NO: 18103 - DNA, 25 bp, probe
caatctattggacaagttatgccta

SEQ ID NO: 18104 - DNA, 25 bp, probe
ttcttcacaatctattggacaagtt

SEQ ID NO: 18105 - DNA, 25 bp, probe
agacgcacttcttcacaatctattg

SEQ ID NO: 18106 - DNA, 25 bp, probe
atctattggacaagttatgcctaat

SEQ ID NO: 18107 - DNA, 25 bp, probe
tcttcacaatctattggacaagtta

SEQ ID NO: 18108 - DNA, 25 bp, probe
cgcacttcttcacaatctattggac

SEQ ID NO: 18109 - DNA, 25 bp, probe
gacgcacttcttcacaatctattgg

SEQ ID NO: 18110 - DNA, 25 bp, probe
ggagaagggtatatttaatgagcga

SEQ ID NO: 18111 - DNA, 25 bp, probe
tggagaagggtatatttaatgagcg

SEQ ID NO: 18112 - DNA, 25 bp, probe
ggtatatttaatgagcgaacaggtc

SEQ ID NO: 18113 - DNA, 25 bp, probe
agggtatatttaatgagcgaacagg

SEQ ID NO: 18114 - DNA, 25 bp, probe
tctattggacaagttatgcctaata

SEQ ID NO: 18115 - DNA, 25 bp, probe
gggtatatttaatgagcgaacaggt

SEQ ID NO: 18116 - DNA, 25 bp, probe
aagggtatatttaatgagcgaacag

SEQ ID NO: 18117 - DNA, 25 bp, probe
gaagggtatatttaatgagcgaaca

SEQ ID NO: 18118 - DNA, 25 bp, probe
aaagccaaatggagaagggtatatt

SEQ ID NO: 18119 - DNA, 25 bp, probe
acgcacttcttcacaatctattgga

SEQ ID NO: 18120 - DNA, 25 bp, probe
caaagccaaatggagaagggtatat

SEQ ID NO: 18121 - DNA, 25 bp, probe
agaagggtatatttaatgagcgaac

SEQ ID NO: 18122 - DNA, 25 bp, probe
ttcacaatctattggacaagttatg

SEQ ID NO: 18123 - DNA, 25 bp, probe
atatttaatgagcgaacaggtcaca

SEQ ID NO: 18124 - DNA, 25 bp, probe
gagaagggtatatttaatgagcgaa

SEQ ID NO: 18125 - DNA, 25 bp, probe
tatatttaatgagcgaacaggtcac

SEQ ID NO: 18126 - DNA, 25 bp, probe
gtatatttaatgagcgaacaggtca

SEQ ID NO: 18127 - DNA, 25 bp, probe
tatttaatgagcgaacaggtcacag

SEQ ID NO: 18128 - DNA, 25 bp, probe
atggagaagggtatatttaatgagc

SEQ ID NO: 18129 - DNA, 25 bp, probe
cttcacaatctattggacaagttat

SEQ ID NO: 18130 - DNA, 25 bp, probe
tcaaagccaaatggagaagggtata

SEQ ID NO: 18131 - DNA, 25 bp, probe
aagccaaatggagaagggtatattt

SEQ ID NO: 18132 - DNA, 25 bp, probe
agccaaatggagaagggtatattta

SEQ ID NO: 18133 - DNA, 25 bp, probe
attggacaagttatgcctaatagca

SEQ ID NO: 18134 - DNA, 25 bp, probe
ctattcaaagccaaatggagaaggg

SEQ ID NO: 18135 - DNA, 25 bp, probe
ttggacaagttatgcctaatagcag

SEQ ID NO: 18136 - DNA, 25 bp, probe
cagaatcaactgttgcctctcatac

SEQ ID NO: 18137 - DNA, 25 bp, probe
agaatcaactgttgcctctcatacc

SEQ ID NO: 18138 - DNA, 25 bp, probe
gaatcaactgttgcctctcatacca

SEQ ID NO: 18139 - DNA, 25 bp, probe
aatcaactgttgcctctcataccag

SEQ ID NO: 18140 - DNA, 25 bp, probe
aacagaagacgccaacagaatcaac

SEQ ID NO: 18141 - DNA, 25 bp, probe
ctctcataccaggaagccacatctc

SEQ ID NO: 18142 - DNA, 25 bp, probe
aagaaacagaagacgccaacagaat

SEQ ID NO: 18143 - DNA, 25 bp, probe
aaacagaagacgccaacagaatcaa

SEQ ID NO: 18144 - DNA, 25 bp, probe
agaaacagaagacgccaacagaatc

SEQ ID NO: 18145 - DNA, 25 bp, probe
gaagaaacagaagacgccaacagaa

SEQ ID NO: 18146 - DNA, 25 bp, probe
acagaagacgccaacagaatcaact

SEQ ID NO: 18147 - DNA, 25 bp, probe
gaaacagaagacgccaacagaatca

SEQ ID NO: 18148 - DNA, 25 bp, probe
aactgttgcctctcataccaggaag

SEQ ID NO: 18149 - DNA, 25 bp, probe
cagaagacgccaacagaatcaactg

SEQ ID NO: 18150 - DNA, 25 bp, probe
cacacctgatggaagaaaacaagtc

SEQ ID NO: 18151 - DNA, 25 bp, probe
atcaactgttgcctctcataccagg

SEQ ID NO: 18152 - DNA, 25 bp, probe
acagaatcaactgttgcctctcata

SEQ ID NO: 18153 - DNA, 25 bp, probe
caactgttgcctctcataccaggaa

SEQ ID NO: 18154 - DNA, 25 bp, probe
acctgatggaagaaaacaagtcctc

SEQ ID NO: 18155 - DNA, 25 bp, probe
cacctgatggaagaaaacaagtcct

SEQ ID NO: 18156 - DNA, 25 bp, probe
acacctgatggaagaaaacaagtcc

SEQ ID NO: 18157 - DNA, 25 bp, probe
ccacacctgatggaagaaaacaagt

SEQ ID NO: 18158 - DNA, 25 bp, probe
gatctgattgatgcatttgcagttc

SEQ ID NO: 18159 - DNA, 25 bp, probe
tgatctgattgatgcatttgcagtt

SEQ ID NO: 18160 - DNA, 25 bp, probe
cccacacctgatggaagaaaacaag

SEQ ID NO: 18161 - DNA, 25 bp, probe
ctgatctgattgatgcatttgcagt

SEQ ID NO: 18162 - DNA, 25 bp, probe
atctgattgatgcatttgcagttcc

SEQ ID NO: 18163 - DNA, 25 bp, probe
agaagacgccaacagaatcaactgt

SEQ ID NO: 18164 - DNA, 25 bp, probe
cctgatctgattgatgcatttgcag

SEQ ID NO: 18165 - DNA, 25 bp, probe
ctgattgatgcatttgcagttccag

SEQ ID NO: 18166 - DNA, 25 bp, probe
tctgattgatgcatttgcagttcca

SEQ ID NO: 18167 - DNA, 25 bp, probe
atttgcagttccaggagatgcctac

SEQ ID NO: 18168 - DNA, 25 bp, probe
catttgcagttccaggagatgccta

SEQ ID NO: 18169 - DNA, 25 bp, probe
ccccacacctgatggaagaaaacaa

SEQ ID NO: 18170 - DNA, 25 bp, probe
attgatgcatttgcagttccaggag

SEQ ID NO: 18171 - DNA, 25 bp, probe
gattgatgcatttgcagttccagga

SEQ ID NO: 18172 - DNA, 25 bp, probe
tgattgatgcatttgcagttccagg

SEQ ID NO: 18173 - DNA, 25 bp, probe
gatgcatttgcagttccaggagatg

SEQ ID NO: 18174 - DNA, 25 bp, probe
tgatgcatttgcagttccaggagat

SEQ ID NO: 18175 - DNA, 25 bp, probe
ttgatgcatttgcagttccaggaga

SEQ ID NO: 18176 - DNA, 25 bp, probe
aataatcagcaacattccagtcttg

SEQ ID NO: 18177 - DNA, 25 bp, probe
ataatcagcaacattccagtcttga

SEQ ID NO: 18178 - DNA, 25 bp, probe
taatcagcaacattccagtcttgaa

SEQ ID NO: 18179 - DNA, 25 bp, probe
gtccttgaacttccgaattaatctg

SEQ ID NO: 18180 - DNA, 25 bp, probe
aggctctaggctatctacacactaa

SEQ ID NO: 18181 - DNA, 25 bp, probe
tccttgaacttccgaattaatctgc

SEQ ID NO: 18182 - DNA, 25 bp, probe
agtccttgaacttccgaattaatct

SEQ ID NO: 18183 - DNA, 25 bp, probe
caggctctaggctatctacacacta

SEQ ID NO: 18184 - DNA, 25 bp, probe
atcagcaacattccagtcttgaatt

SEQ ID NO: 18185 - DNA, 25 bp, probe
aatcagcaacattccagtcttgaat

SEQ ID NO: 18186 - DNA, 25 bp, probe
aaataatcagcaacattccagtctt

SEQ ID NO: 18187 - DNA, 25 bp, probe
cactaaagaagaactgctggaatca

SEQ ID NO: 18188 - DNA, 25 bp, probe
acactaaagaagaactgctggaatc

SEQ ID NO: 18189 - DNA, 25 bp, probe
atctacacactaaagaagaactgct

SEQ ID NO: 18190 - DNA, 25 bp, probe
cacactaaagaagaactgctggaat

SEQ ID NO: 18191 - DNA, 25 bp, probe
tctacacactaaagaagaactgctg

SEQ ID NO: 18192 - DNA, 25 bp, probe
gctctaggctatctacacactaaag

SEQ ID NO: 18193 - DNA, 25 bp, probe
ctacacactaaagaagaactgctgg

SEQ ID NO: 18194 - DNA, 25 bp, probe
ccttgaacttccgaattaatctgcc

SEQ ID NO: 18195 - DNA, 25 bp, probe
ggctatctacacactaaagaagaac

SEQ ID NO: 18196 - DNA, 25 bp, probe
aggctatctacacactaaagaagaa

SEQ ID NO: 18197 - DNA, 25 bp, probe
tacacactaaagaagaactgctgga

SEQ ID NO: 18198 - DNA, 25 bp, probe
ggctctaggctatctacacactaaa

SEQ ID NO: 18199 - DNA, 25 bp, probe
tatctacacactaaagaagaactgc

SEQ ID NO: 18200 - DNA, 25 bp, probe
tttaggatacaatggctgtttggtt

SEQ ID NO: 18201 - DNA, 25 bp, probe
taaagaagaactgctggaatcagag

SEQ ID NO: 18202 - DNA, 25 bp, probe
ctaaagaagaactgctggaatcaga

SEQ ID NO: 18203 - DNA, 25 bp, probe
taggctatctacacactaaagaaga

SEQ ID NO: 18204 - DNA, 25 bp, probe
ctctaggctatctacacactaaaga

SEQ ID NO: 18205 - DNA, 25 bp, probe
aagtttactctccgtcttgtgtcat

SEQ ID NO: 18206 - DNA, 25 bp, probe
actaaagaagaactgctggaatcag

SEQ ID NO: 18207 - DNA, 25 bp, probe
gctatctacacactaaagaagaact

SEQ ID NO: 18208 - DNA, 25 bp, probe
ttaggatacaatggctgtttggttc

SEQ ID NO: 18209 - DNA, 25 bp, probe
acacactaaagaagaactgctggaa

SEQ ID NO: 18210 - DNA, 25 bp, probe
tctaggctatctacacactaaagaa

SEQ ID NO: 18211 - DNA, 25 bp, probe
tgtcaacaagtttactctccgtctt

SEQ ID NO: 18212 - DNA, 25 bp, probe
ctaggctatctacacactaaagaag

SEQ ID NO: 18213 - DNA, 25 bp, probe
caacattccagtcttgaatttcctc

SEQ ID NO: 18214 - DNA, 25 bp, probe
aagtccttgaacttccgaattaatc

SEQ ID NO: 18215 - DNA, 25 bp, probe
cagcaacattccagtcttgaatttc

SEQ ID NO: 18216 - DNA, 25 bp, probe
gtctatcttctgcatgaacccatat

SEQ ID NO: 18217 - DNA, 25 bp, probe
aacattccagtcttgaatttcctcc

SEQ ID NO: 18218 - DNA, 25 bp, probe
gtcttgaatttcctccaggctctag

SEQ ID NO: 18219 - DNA, 25 bp, probe
tactctccgtcttgtgtcatgtgtt

SEQ ID NO: 18220 - DNA, 25 bp, probe
agaataacaactttcaaggcttcag

SEQ ID NO: 18221 - DNA, 25 bp, probe
ctcagaaagaaggacaaagacaaca

SEQ ID NO: 18222 - DNA, 25 bp, probe
aagaataacaactttcaaggcttca

SEQ ID NO: 18223 - DNA, 25 bp, probe
aatcatcaggaacaagaagaggttt

SEQ ID NO: 18224 - DNA, 25 bp, probe
aaatcatcaggaacaagaagaggtt

SEQ ID NO: 18225 - DNA, 25 bp, probe
ctctcagaaagaaggacaaagacaa

SEQ ID NO: 18226 - DNA, 25 bp, probe
tcagaaagaaggacaaagacaacac

SEQ ID NO: 18227 - DNA, 25 bp, probe
atcatcaggaacaagaagaggtttc

SEQ ID NO: 18228 - DNA, 25 bp, probe
tctcagaaagaaggacaaagacaac

SEQ ID NO: 18229 - DNA, 25 bp, probe
aataacaactttcaaggcttcagtc

SEQ ID NO: 18230 - DNA, 25 bp, probe
gaataacaactttcaaggcttcagt

SEQ ID NO: 18231 - DNA, 25 bp, probe
caaggcttcagtctgtccatagttc

SEQ ID NO: 18232 - DNA, 25 bp, probe
ataacaactttcaaggcttcagtct

SEQ ID NO: 18233 - DNA, 25 bp, probe
gctatgaagttctggagacaatcgg

SEQ ID NO: 18234 - DNA, 25 bp, probe
catcaggaacaagaagaggtttcac

SEQ ID NO: 18235 - DNA, 25 bp, probe
tcatcaggaacaagaagaggtttca

SEQ ID NO: 18236 - DNA, 25 bp, probe
tcaaggcttcagtctgtccatagtt

SEQ ID NO: 18237 - DNA, 25 bp, probe
ttcaaggcttcagtctgtccatagt

SEQ ID NO: 18238 - DNA, 25 bp, probe
taacaactttcaaggcttcagtctg

SEQ ID NO: 18239 - DNA, 25 bp, probe
ccaagttgcctcatctacaatttga

SEQ ID NO: 18240 - DNA, 25 bp, probe
cgctatgaagttctggagacaatcg

SEQ ID NO: 18241 - DNA, 25 bp, probe
cagaaagaaggacaaagacaacacc

SEQ ID NO: 18242 - DNA, 25 bp, probe
ctacaatgtggtgcatatgaaggac

SEQ ID NO: 18243 - DNA, 25 bp, probe
gaaagaaggacaaagacaacaccta

SEQ ID NO: 18244 - DNA, 25 bp, probe
aaagaaggacaaagacaacacctac

SEQ ID NO: 18245 - DNA, 25 bp, probe
gaaggacaaagacaacacctacaat

SEQ ID NO: 18246 - DNA, 25 bp, probe
tacaatgtggtgcatatgaaggact

SEQ ID NO: 18247 - DNA, 25 bp, probe
aaggacaaagacaacacctacaatg

SEQ ID NO: 18248 - DNA, 25 bp, probe
tttcaaggcttcagtctgtccatag

SEQ ID NO: 18249 - DNA, 25 bp, probe
ctttcaaggcttcagtctgtccata

SEQ ID NO: 18250 - DNA, 25 bp, probe
cccaagttgcctcatctacaatttg

SEQ ID NO: 18251 - DNA, 25 bp, probe
ctcctgggaatcaacttgtatgagt

SEQ ID NO: 18252 - DNA, 25 bp, probe
ctatgaagttctggagacaatcggg

SEQ ID NO: 18253 - DNA, 25 bp, probe
gactttggatcaagctgttatgaac

SEQ ID NO: 18254 - DNA, 25 bp, probe
tgtatgagttgatgaagaataacaa

SEQ ID NO: 18255 - DNA, 25 bp, probe
ttgtatgagttgatgaagaataaca

SEQ ID NO: 18256 - DNA, 25 bp, probe
tgactttggatcaagctgttatgaa

SEQ ID NO: 18257 - DNA, 25 bp, probe
gctctcagaaagaaggacaaagaca

SEQ ID NO: 18258 - DNA, 25 bp, probe
cttgtatgagttgatgaagaataac

SEQ ID NO: 18259 - DNA, 25 bp, probe
acttgtatgagttgatgaagaataa

SEQ ID NO: 18260 - DNA, 25 bp, probe
agaaggacaaagacaacacctacaa

SEQ ID NO: 18261 - DNA, 25 bp, probe
aagaaggacaaagacaacacctaca

SEQ ID NO: 18262 - DNA, 25 bp, probe
gaagctctcagaaagaaggacaaag

SEQ ID NO: 18263 - DNA, 25 bp, probe
tatgaagttctggagacaatcggga

SEQ ID NO: 18264 - DNA, 25 bp, probe
caagaggaagaggcaatggatatac

SEQ ID NO: 18265 - DNA, 25 bp, probe
aagaggaagaggcaatggatatacc

SEQ ID NO: 18266 - DNA, 25 bp, probe
aggagcatggagattatacagacaa

SEQ ID NO: 18267 - DNA, 25 bp, probe
aaggagcatggagattatacagaca

SEQ ID NO: 18268 - DNA, 25 bp, probe
aggaatatgaatgtgtaaaggagca

SEQ ID NO: 18269 - DNA, 25 bp, probe
aaggaatatgaatgtgtaaaggagc

SEQ ID NO: 18270 - DNA, 25 bp, probe
gcttcagaacacaaaggaaagtaaa

SEQ ID NO: 18271 - DNA, 25 bp, probe
ggaatatgaatgtgtaaaggagcat

SEQ ID NO: 18272 - DNA, 25 bp, probe
ccaagaggaagaggcaatggatata

SEQ ID NO: 18273 - DNA, 25 bp, probe
aaagacttgaaacaaatgaggcttc

SEQ ID NO: 18274 - DNA, 25 bp, probe
tggagattatacagacaaagcattt

SEQ ID NO: 18275 - DNA, 25 bp, probe
gaggaagaggcaatggatataccaa

SEQ ID NO: 18276 - DNA, 25 bp, probe
aaaggagcatggagattatacagac

SEQ ID NO: 18277 - DNA, 25 bp, probe
aggatggcatgaagtttaaggaata

SEQ ID NO: 18278 - DNA, 25 bp, probe
ggcttcagaacacaaaggaaagtaa

SEQ ID NO: 18279 - DNA, 25 bp, probe
cagtaccacaatgacatgaaagaaa

SEQ ID NO: 18280 - DNA, 25 bp, probe
ggagcatggagattatacagacaaa

SEQ ID NO: 18281 - DNA, 25 bp, probe
acagtaccacaatgacatgaaagaa

SEQ ID NO: 18282 - DNA, 25 bp, probe
aacagtaccacaatgacatgaaaga

SEQ ID NO: 18283 - DNA, 25 bp, probe
caacagtaccacaatgacatgaaag

SEQ ID NO: 18284 - DNA, 25 bp, probe
atggagattatacagacaaagcatt

SEQ ID NO: 18285 - DNA, 25 bp, probe
gagcatggagattatacagacaaag

SEQ ID NO: 18286 - DNA, 25 bp, probe
tgtgtaaaggagcatggagattata

SEQ ID NO: 18287 - DNA, 25 bp, probe
aatgtgtaaaggagcatggagatta

SEQ ID NO: 18288 - DNA, 25 bp, probe
atatgaatgtgtaaaggagcatgga

SEQ ID NO: 18289 - DNA, 25 bp, probe
atgtgtaaaggagcatggagattat

SEQ ID NO: 18290 - DNA, 25 bp, probe
agcatggagattatacagacaaagc

SEQ ID NO: 18291 - DNA, 25 bp, probe
ggatggcatgaagtttaaggaatat

SEQ ID NO: 18292 - DNA, 25 bp, probe
ctttgaggatggcatgaagtttaag

SEQ ID NO: 18293 - DNA, 25 bp, probe
gtgtaaaggagcatggagattatac

SEQ ID NO: 18294 - DNA, 25 bp, probe
tatgaatgtgtaaaggagcatggag

SEQ ID NO: 18295 - DNA, 25 bp, probe
aatatgaatgtgtaaaggagcatgg

SEQ ID NO: 18296 - DNA, 25 bp, probe
gaggatggcatgaagtttaaggaat

SEQ ID NO: 18297 - DNA, 25 bp, probe
agtaccacaatgacatgaaagaaat

SEQ ID NO: 18298 - DNA, 25 bp, probe
gcatggagattatacagacaaagca

SEQ ID NO: 18299 - DNA, 25 bp, probe
taaaggagcatggagattatacaga

SEQ ID NO: 18300 - DNA, 25 bp, probe
gtaaaggagcatggagattatacag

SEQ ID NO: 18301 - DNA, 25 bp, probe
aatgaaactttgacctttgaggatg

SEQ ID NO: 18302 - DNA, 25 bp, probe
catggagattatacagacaaagcat

SEQ ID NO: 18303 - DNA, 25 bp, probe
gaatgtgtaaaggagcatggagatt

SEQ ID NO: 18304 - DNA, 25 bp, probe
agaggaagaggcaatggatatacca

SEQ ID NO: 18305 - DNA, 25 bp, probe
aacaaatgaggcttcagaacacaaa

SEQ ID NO: 18306 - DNA, 25 bp, probe
aaacaaatgaggcttcagaacacaa

SEQ ID NO: 18307 - DNA, 25 bp, probe
aaatgaaactttgacctttgaggat

SEQ ID NO: 18308 - DNA, 25 bp, probe
ctggtggctcaatctctagtattat

SEQ ID NO: 18309 - DNA, 25 bp, probe
atacttcaaggtgttgcttatctcc

SEQ ID NO: 18310 - DNA, 25 bp, probe
aatacttcaaggtgttgcttatctc

SEQ ID NO: 18311 - DNA, 25 bp, probe
cctggtggctcaatctctagtatta

SEQ ID NO: 18312 - DNA, 25 bp, probe
tatgctcatgccaactggaataata

SEQ ID NO: 18313 - DNA, 25 bp, probe
atgctcatgccaactggaataataa

SEQ ID NO: 18314 - DNA, 25 bp, probe
tacttcaaggtgttgcttatctcca

SEQ ID NO: 18315 - DNA, 25 bp, probe
aataatgttatgctcatgccaactg

SEQ ID NO: 18316 - DNA, 25 bp, probe
tggtggctcaatctctagtattata

SEQ ID NO: 18317 - DNA, 25 bp, probe
ttatgctcatgccaactggaataat

SEQ ID NO: 18318 - DNA, 25 bp, probe
atatctggagcattggttgtactgt

SEQ ID NO: 18319 - DNA, 25 bp, probe
gaagtcatcaatgagtctggctatg

SEQ ID NO: 18320 - DNA, 25 bp, probe
agaagtcatcaatgagtctggctat

SEQ ID NO: 18321 - DNA, 25 bp, probe
acttcaaggtgttgcttatctccat

SEQ ID NO: 18322 - DNA, 25 bp, probe
gttatgctcatgccaactggaataa

SEQ ID NO: 18323 - DNA, 25 bp, probe
ataatgttatgctcatgccaactgg

SEQ ID NO: 18324 - DNA, 25 bp, probe
tcctggtggctcaatctctagtatt

SEQ ID NO: 18325 - DNA, 25 bp, probe
ttcctggtggctcaatctctagtat

SEQ ID NO: 18326 - DNA, 25 bp, probe
cttcaaggtgttgcttatctccatg

SEQ ID NO: 18327 - DNA, 25 bp, probe
tatctggagcattggttgtactgtg

SEQ ID NO: 18328 - DNA, 25 bp, probe
aagtcatcaatgagtctggctatgg

SEQ ID NO: 18329 - DNA, 25 bp, probe
gcctgagatggtgttctgtaaatat

SEQ ID NO: 18330 - DNA, 25 bp, probe
gatatctggagcattggttgtactg

SEQ ID NO: 18331 - DNA, 25 bp, probe
ttcaaggtgttgcttatctccatga

SEQ ID NO: 18332 - DNA, 25 bp, probe
cattgcctgagatggtgttctgtaa

SEQ ID NO: 18333 - DNA, 25 bp, probe
tgttatgctcatgccaactggaata

SEQ ID NO: 18334 - DNA, 25 bp, probe
taatgttatgctcatgccaactgga

SEQ ID NO: 18335 - DNA, 25 bp, probe
ggtggctcaatctctagtattataa

SEQ ID NO: 18336 - DNA, 25 bp, probe
aaatacttcaaggtgttgcttatct

SEQ ID NO: 18337 - DNA, 25 bp, probe
caaatacttcaaggtgttgcttatc

SEQ ID NO: 18338 - DNA, 25 bp, probe
cattggttgtactgtgtttgagatg

SEQ ID NO: 18339 - DNA, 25 bp, probe
tgagatggtgttctgtaaatatacg

SEQ ID NO: 18340 - DNA, 25 bp, probe
ctcatgccaactggaataataaagc

SEQ ID NO: 18341 - DNA, 25 bp, probe
gctcatgccaactggaataataaag

SEQ ID NO: 18342 - DNA, 25 bp, probe
aaggaaataatgttatgctcatgcc

SEQ ID NO: 18343 - DNA, 25 bp, probe
tcaaggtgttgcttatctccatgag

SEQ ID NO: 18344 - DNA, 25 bp, probe
ggaaataatgttatgctcatgccaa

SEQ ID NO: 18345 - DNA, 25 bp, probe
gagatggtgttctgtaaatatacga

SEQ ID NO: 18346 - DNA, 25 bp, probe
tgcctgagatggtgttctgtaaata

SEQ ID NO: 18347 - DNA, 25 bp, probe
acaaatacttcaaggtgttgcttat

SEQ ID NO: 18348 - DNA, 25 bp, probe
tgctcatgccaactggaataataaa

SEQ ID NO: 18349 - DNA, 25 bp, probe
attggttgtactgtgtttgagatgg

SEQ ID NO: 18350 - DNA, 25 bp, probe
atacgaaacaaatacttcaaggtgt

SEQ ID NO: 18351 - DNA, 25 bp, probe
aaataatgttatgctcatgccaact

SEQ ID NO: 18352 - DNA, 25 bp, probe
aaaggtcagagagaagagagagaag

SEQ ID NO: 18353 - DNA, 25 bp, probe
caagttctttgcctccacatttcag

SEQ ID NO: 18354 - DNA, 25 bp, probe
aagttctttgcctccacatttcagt

SEQ ID NO: 18355 - DNA, 25 bp, probe
tcaagttctttgcctccacatttca

SEQ ID NO: 18356 - DNA, 25 bp, probe
aaaaggtcagagagaagagagagaa

SEQ ID NO: 18357 - DNA, 25 bp, probe
agttctttgcctccacatttcagtg

SEQ ID NO: 18358 - DNA, 25 bp, probe
gttctttgcctccacatttcagtgc

SEQ ID NO: 18359 - DNA, 25 bp, probe
ttctttgcctccacatttcagtgct

SEQ ID NO: 18360 - DNA, 25 bp, probe
tcctaaccttctgcaccgactaatg

SEQ ID NO: 18361 - DNA, 25 bp, probe
gtcctaaccttctgcaccgactaat

SEQ ID NO: 18362 - DNA, 25 bp, probe
taaccttctgcaccgactaatgctc

SEQ ID NO: 18363 - DNA, 25 bp, probe
ctaaccttctgcaccgactaatgct

SEQ ID NO: 18364 - DNA, 25 bp, probe
caggaactgtcctaaccttctgcac

SEQ ID NO: 18365 - DNA, 25 bp, probe
ttcgatcacatcatcacaacttatg

SEQ ID NO: 18366 - DNA, 25 bp, probe
ttattcgatcacatcatcacaactt

SEQ ID NO: 18367 - DNA, 25 bp, probe
attcgatcacatcatcacaacttat

SEQ ID NO: 18368 - DNA, 25 bp, probe
cttcactggagaacaactactagcc

SEQ ID NO: 18369 - DNA, 25 bp, probe
agcttcactggagaacaactactag

SEQ ID NO: 18370 - DNA, 25 bp, probe
tattcgatcacatcatcacaactta

SEQ ID NO: 18371 - DNA, 25 bp, probe
atgatgtttataagggcaaaggaga

SEQ ID NO: 18372 - DNA, 25 bp, probe
tgatgtttataagggcaaaggagag

SEQ ID NO: 18373 - DNA, 25 bp, probe
cagcttcactggagaacaactacta

SEQ ID NO: 18374 - DNA, 25 bp, probe
tataagggcaaaggagagcaaacaa

SEQ ID NO: 18375 - DNA, 25 bp, probe
tatgatgtttataagggcaaaggag

SEQ ID NO: 18376 - DNA, 25 bp, probe
gtcccagagatattgtgagctaatc

SEQ ID NO: 18377 - DNA, 25 bp, probe
tttataagggcaaaggagagcaaac

SEQ ID NO: 18378 - DNA, 25 bp, probe
gtttataagggcaaaggagagcaaa

SEQ ID NO: 18379 - DNA, 25 bp, probe
agtcccagagatattgtgagctaat

SEQ ID NO: 18380 - DNA, 25 bp, probe
cagtttattcgatcacatcatcaca

SEQ ID NO: 18381 - DNA, 25 bp, probe
acagtttattcgatcacatcatcac

SEQ ID NO: 18382 - DNA, 25 bp, probe
aagtcccagagatattgtgagctaa

SEQ ID NO: 18383 - DNA, 25 bp, probe
aaagtcccagagatattgtgagcta

SEQ ID NO: 18384 - DNA, 25 bp, probe
gatgtttataagggcaaaggagagc

SEQ ID NO: 18385 - DNA, 25 bp, probe
ccagagatattgtgagctaatcagc

SEQ ID NO: 18386 - DNA, 25 bp, probe
tcgatcacatcatcacaacttatga

SEQ ID NO: 18387 - DNA, 25 bp, probe
tttattcgatcacatcatcacaact

SEQ ID NO: 18388 - DNA, 25 bp, probe
agtttattcgatcacatcatcacaa

SEQ ID NO: 18389 - DNA, 25 bp, probe
cccagagatattgtgagctaatcag

SEQ ID NO: 18390 - DNA, 25 bp, probe
tcccagagatattgtgagctaatca

SEQ ID NO: 18391 - DNA, 25 bp, probe
ttatgatgtttataagggcaaagga

SEQ ID NO: 18392 - DNA, 25 bp, probe
gtttattcgatcacatcatcacaac

SEQ ID NO: 18393 - DNA, 25 bp, probe
gtatgccaattacctggaggaagtg

SEQ ID NO: 18394 - DNA, 25 bp, probe
gtgtatgccaattacctggaggaag

SEQ ID NO: 18395 - DNA, 25 bp, probe
gaagtgtatgccaattacctggagg

SEQ ID NO: 18396 - DNA, 25 bp, probe
ggaagtgtatgccaattacctggag

SEQ ID NO: 18397 - DNA, 25 bp, probe
atgtttataagggcaaaggagagca

SEQ ID NO: 18398 - DNA, 25 bp, probe
caagctggaagtgtatgccaattac

SEQ ID NO: 18399 - DNA, 25 bp, probe
tacagtttattcgatcacatcatca

SEQ ID NO: 18400 - DNA, 25 bp, probe
ttataagggcaaaggagagcaaaca

SEQ ID NO: 18401 - DNA, 25 bp, probe
tgtttataagggcaaaggagagcaa

SEQ ID NO: 18402 - DNA, 25 bp, probe
ctggaagtgtatgccaattacctgg

SEQ ID NO: 18403 - DNA, 25 bp, probe
gtacagtttattcgatcacatcatc

SEQ ID NO: 18404 - DNA, 25 bp, probe
ttcactggagaacaactactagccg

SEQ ID NO: 18405 - DNA, 25 bp, probe
tgtatgccaattacctggaggaagt

SEQ ID NO: 18406 - DNA, 25 bp, probe
agtgtatgccaattacctggaggaa

SEQ ID NO: 18407 - DNA, 25 bp, probe
aagtgtatgccaattacctggagga

SEQ ID NO: 18408 - DNA, 25 bp, probe
gtgttgggatgaatctctggagaaa

SEQ ID NO: 18409 - DNA, 25 bp, probe
attgaagactcaggaagatacacat

SEQ ID NO: 18410 - DNA, 25 bp, probe
aattgaagactcaggaagatacaca

SEQ ID NO: 18411 - DNA, 25 bp, probe
tctcacagtgtccaatattcatcag

SEQ ID NO: 18412 - DNA, 25 bp, probe
gtctcacagtgtccaatattcatca

SEQ ID NO: 18413 - DNA, 25 bp, probe
ttgaagactcaggaagatacacatg

SEQ ID NO: 18414 - DNA, 25 bp, probe
ctcacagtgtccaatattcatcagc

SEQ ID NO: 18415 - DNA, 25 bp, probe
tgtctcacagtgtccaatattcatc

SEQ ID NO: 18416 - DNA, 25 bp, probe
taaccctcacataacatatactgcc

SEQ ID NO: 18417 - DNA, 25 bp, probe
gtctgccaccatgaagattgataac

SEQ ID NO: 18418 - DNA, 25 bp, probe
ggaaataagataactgtggaaaccc

SEQ ID NO: 18419 - DNA, 25 bp, probe
ccatgaatacaacctaacgcatctg

SEQ ID NO: 18420 - DNA, 25 bp, probe
gtccatgaatacaacctaacgcatc

SEQ ID NO: 18421 - DNA, 25 bp, probe
cacagtgtccaatattcatcagcag

SEQ ID NO: 18422 - DNA, 25 bp, probe
tccatgaatacaacctaacgcatct

SEQ ID NO: 18423 - DNA, 25 bp, probe
acagtgtccaatattcatcagcaga

SEQ ID NO: 18424 - DNA, 25 bp, probe
gtccaatattcatcagcagactcaa

SEQ ID NO: 18425 - DNA, 25 bp, probe
tggaaataagataactgtggaaacc

SEQ ID NO: 18426 - DNA, 25 bp, probe
gtgtctcacagtgtccaatattcat

SEQ ID NO: 18427 - DNA, 25 bp, probe
cgatgtccatgaatacaacctaacg

SEQ ID NO: 18428 - DNA, 25 bp, probe
gaaataagataactgtggaaaccct

SEQ ID NO: 18429 - DNA, 25 bp, probe
tcacagtgtccaatattcatcagca

SEQ ID NO: 18430 - DNA, 25 bp, probe
tcgatgtccatgaatacaacctaac

SEQ ID NO: 18431 - DNA, 25 bp, probe
gtcgatgtccatgaatacaacctaa

SEQ ID NO: 18432 - DNA, 25 bp, probe
aaacctcttcaatcccactaaatga

SEQ ID NO: 18433 - DNA, 25 bp, probe
gatgtccatgaatacaacctaacgc

SEQ ID NO: 18434 - DNA, 25 bp, probe
aaccctcacataacatatactgcca

SEQ ID NO: 18435 - DNA, 25 bp, probe
gtgtccaatattcatcagcagactc

SEQ ID NO: 18436 - DNA, 25 bp, probe
catgaatacaacctaacgcatctgc

SEQ ID NO: 18437 - DNA, 25 bp, probe
agtcgatgtccatgaatacaaccta

SEQ ID NO: 18438 - DNA, 25 bp, probe
aacctcttcaatcccactaaatgag

SEQ ID NO: 18439 - DNA, 25 bp, probe
agtgtccaatattcatcagcagact

SEQ ID NO: 18440 - DNA, 25 bp, probe
cagtgtccaatattcatcagcagac

SEQ ID NO: 18441 - DNA, 25 bp, probe
ataaccctcacataacatatactgc

SEQ ID NO: 18442 - DNA, 25 bp, probe
tgtccaatattcatcagcagactca

SEQ ID NO: 18443 - DNA, 25 bp, probe
acatacaaattgaagactcaggaag

SEQ ID NO: 18444 - DNA, 25 bp, probe
aatatacgtcaagcagacagaatcc

SEQ ID NO: 18445 - DNA, 25 bp, probe
aataagataactgtggaaacccttt

SEQ ID NO: 18446 - DNA, 25 bp, probe
aaataagataactgtggaaaccctt

SEQ ID NO: 18447 - DNA, 25 bp, probe
aaattgaagactcaggaagatacac

SEQ ID NO: 18448 - DNA, 25 bp, probe
caaattgaagactcaggaagataca

SEQ ID NO: 18449 - DNA, 25 bp, probe
acaaattgaagactcaggaagatac

SEQ ID NO: 18450 - DNA, 25 bp, probe
catacaaattgaagactcaggaaga

SEQ ID NO: 18451 - DNA, 25 bp, probe
aatcccattccatcttagtgtcctg

SEQ ID NO: 18452 - DNA, 25 bp, probe
tcttagtgtcctggaaagttaattc

SEQ ID NO: 18453 - DNA, 25 bp, probe
ctccacggttgttgactatatactg

SEQ ID NO: 18454 - DNA, 25 bp, probe
agacctcttgacagacctgattaag

SEQ ID NO: 18455 - DNA, 25 bp, probe
aagacctcttgacagacctgattaa

SEQ ID NO: 18456 - DNA, 25 bp, probe
catctctactcgtgaaccaggaatt

SEQ ID NO: 18457 - DNA, 25 bp, probe
ttgaagtaactctggaacatcagga

SEQ ID NO: 18458 - DNA, 25 bp, probe
ttcctaatgaagattcctgaagatt

SEQ ID NO: 18459 - DNA, 25 bp, probe
gaagtaactctggaacatcaggaga

SEQ ID NO: 18460 - DNA, 25 bp, probe
gctccacggttgttgactatatact

SEQ ID NO: 18461 - DNA, 25 bp, probe
tgaagtaactctggaacatcaggag

SEQ ID NO: 18462 - DNA, 25 bp, probe
tccacggttgttgactatatactgc

SEQ ID NO: 18463 - DNA, 25 bp, probe
tagactcaggagaaacgaacataga

SEQ ID NO: 18464 - DNA, 25 bp, probe
gtagactcaggagaaacgaacatag

SEQ ID NO: 18465 - DNA, 25 bp, probe
cttgctttcctaatgaagattcctg

SEQ ID NO: 18466 - DNA, 25 bp, probe
acttgctttcctaatgaagattcct

SEQ ID NO: 18467 - DNA, 25 bp, probe
gctttcctaatgaagattcctgaag

SEQ ID NO: 18468 - DNA, 25 bp, probe
tgctttcctaatgaagattcctgaa

SEQ ID NO: 18469 - DNA, 25 bp, probe
ttgctttcctaatgaagattcctga

SEQ ID NO: 18470 - DNA, 25 bp, probe
cacttgctttcctaatgaagattcc

SEQ ID NO: 18471 - DNA, 25 bp, probe
ccacttgctttcctaatgaagattc

SEQ ID NO: 18472 - DNA, 25 bp, probe
atttccacttgctttcctaatgaag

SEQ ID NO: 18473 - DNA, 25 bp, probe
tccacttgctttcctaatgaagatt

SEQ ID NO: 18474 - DNA, 25 bp, probe
ttccacttgctttcctaatgaagat

SEQ ID NO: 18475 - DNA, 25 bp, probe
tggaactactttatgaacaaggact

SEQ ID NO: 18476 - DNA, 25 bp, probe
acatctctactcgtgaaccaggaat

SEQ ID NO: 18477 - DNA, 25 bp, probe
acggttgttgactatatactgccac

SEQ ID NO: 18478 - DNA, 25 bp, probe
cacggttgttgactatatactgcca

SEQ ID NO: 18479 - DNA, 25 bp, probe
tttccacttgctttcctaatgaaga

SEQ ID NO: 18480 - DNA, 25 bp, probe
tgttgattctgacagcaatcttctg

SEQ ID NO: 18481 - DNA, 25 bp, probe
gtgttgattctgacagcaatcttct

SEQ ID NO: 18482 - DNA, 25 bp, probe
agtgttgattctgacagcaatcttc

SEQ ID NO: 18483 - DNA, 25 bp, probe
tttattgaaagactatcgctccacg

SEQ ID NO: 18484 - DNA, 25 bp, probe
gactcaggagaaacgaacatagatg

SEQ ID NO: 18485 - DNA, 25 bp, probe
agactcaggagaaacgaacatagat

SEQ ID NO: 18486 - DNA, 25 bp, probe
gaacatagatggagccataggactg

SEQ ID NO: 18487 - DNA, 25 bp, probe
gacctcttgacagacctgattaagc

SEQ ID NO: 18488 - DNA, 25 bp, probe
gacctcaagttgtgacagaagagtt

SEQ ID NO: 18489 - DNA, 25 bp, probe
acttgtcagtcacatctgtaacctg

SEQ ID NO: 18490 - DNA, 25 bp, probe
cagtgttgattctgacagcaatctt

SEQ ID NO: 18491 - DNA, 25 bp, probe
atggaactactttatgaacaaggac

SEQ ID NO: 18492 - DNA, 25 bp, probe
ggaactactttatgaacaaggactt

SEQ ID NO: 18493 - DNA, 25 bp, probe
atctctactcgtgaaccaggaattt

SEQ ID NO: 18494 - DNA, 25 bp, probe
acagcatcagaagaatttatcaaga

SEQ ID NO: 18495 - DNA, 25 bp, probe
tatcgctccacggttgttgactata

SEQ ID NO: 18496 - DNA, 25 bp, probe
aacatagatggagccataggactga

SEQ ID NO: 18497 - DNA, 25 bp, probe
gtatccagttcttagtccttagtct

SEQ ID NO: 18498 - DNA, 25 bp, probe
agtatccagttcttagtccttagtc

SEQ ID NO: 18499 - DNA, 25 bp, probe
aagtatccagttcttagtccttagt

SEQ ID NO: 18500 - DNA, 25 bp, probe
tgaagtatccagttcttagtcctta

SEQ ID NO: 18501 - DNA, 25 bp, probe
ctgaagtatccagttcttagtcctt

SEQ ID NO: 18502 - DNA, 25 bp, probe
gaagtatccagttcttagtccttag

SEQ ID NO: 18503 - DNA, 25 bp, probe
cctcagccacagaatttgtaatcat

SEQ ID NO: 18504 - DNA, 25 bp, probe
ctcagccacagaatttgtaatcatg

SEQ ID NO: 18505 - DNA, 25 bp, probe
gccacagaatttgtaatcatggttt

SEQ ID NO: 18506 - DNA, 25 bp, probe
agccacagaatttgtaatcatggtt

SEQ ID NO: 18507 - DNA, 25 bp, probe
aaaccttagaaaacatttgcctcag

SEQ ID NO: 18508 - DNA, 25 bp, probe
tcagccacagaatttgtaatcatgg

SEQ ID NO: 18509 - DNA, 25 bp, probe
taaaccttagaaaacatttgcctca

SEQ ID NO: 18510 - DNA, 25 bp, probe
cagccacagaatttgtaatcatggt

SEQ ID NO: 18511 - DNA, 25 bp, probe
ttgcctcagccacagaatttgtaat

SEQ ID NO: 18512 - DNA, 25 bp, probe
atttgcctcagccacagaatttgta

SEQ ID NO: 18513 - DNA, 25 bp, probe
actgaagtatccagttcttagtcct

SEQ ID NO: 18514 - DNA, 25 bp, probe
tttgcctcagccacagaatttgtaa

SEQ ID NO: 18515 - DNA, 25 bp, probe
tactgaagtatccagttcttagtcc

SEQ ID NO: 18516 - DNA, 25 bp, probe
aacatttgcctcagccacagaattt

SEQ ID NO: 18517 - DNA, 25 bp, probe
aaacatttgcctcagccacagaatt

SEQ ID NO: 18518 - DNA, 25 bp, probe
gcctcagccacagaatttgtaatca

SEQ ID NO: 18519 - DNA, 25 bp, probe
tgcctcagccacagaatttgtaatc

SEQ ID NO: 18520 - DNA, 25 bp, probe
aaccttagaaaacatttgcctcagc

SEQ ID NO: 18521 - DNA, 25 bp, probe
ctaaaccttagaaaacatttgcctc

SEQ ID NO: 18522 - DNA, 25 bp, probe
cttagaaaacatttgcctcagccac

SEQ ID NO: 18523 - DNA, 25 bp, probe
ttactgaagtatccagttcttagtc

SEQ ID NO: 18524 - DNA, 25 bp, probe
agggaaaacagtgatttctaaacct

SEQ ID NO: 18525 - DNA, 25 bp, probe
gggaaaacagtgatttctaaacctt

SEQ ID NO: 18526 - DNA, 25 bp, probe
aagggaaaacagtgatttctaaacc

SEQ ID NO: 18527 - DNA, 25 bp, probe
acatttgcctcagccacagaatttg

SEQ ID NO: 18528 - DNA, 25 bp, probe
ggaaaagggaaaacagtgatttcta

SEQ ID NO: 18529 - DNA, 25 bp, probe
atcatggttttactgaagtatccag

SEQ ID NO: 18530 - DNA, 25 bp, probe
ttagaaaacatttgcctcagccaca

SEQ ID NO: 18531 - DNA, 25 bp, probe
ccacagaatttgtaatcatggtttt

SEQ ID NO: 18532 - DNA, 25 bp, probe
gggaaaagggaaaacagtgatttct

SEQ ID NO: 18533 - DNA, 25 bp, probe
catttgcctcagccacagaatttgt

SEQ ID NO: 18534 - DNA, 25 bp, probe
aatcatggttttactgaagtatcca

SEQ ID NO: 18535 - DNA, 25 bp, probe
aaagggaaaacagtgatttctaaac

SEQ ID NO: 18536 - DNA, 25 bp, probe
gaaaagggaaaacagtgatttctaa

SEQ ID NO: 18537 - DNA, 25 bp, probe
tagaaaacatttgcctcagccacag

SEQ ID NO: 18538 - DNA, 25 bp, probe
ccttagaaaacatttgcctcagcca

SEQ ID NO: 18539 - DNA, 25 bp, probe
accttagaaaacatttgcctcagcc

SEQ ID NO: 18540 - DNA, 25 bp, probe
aaaacatttgcctcagccacagaat

SEQ ID NO: 18541 - DNA, 25 bp, probe
actattccataactccagacatcac

SEQ ID NO: 18542 - DNA, 25 bp, probe
ctattccataactccagacatcact

SEQ ID NO: 18543 - DNA, 25 bp, probe
tactattccataactccagacatca

SEQ ID NO: 18544 - DNA, 25 bp, probe
tattccataactccagacatcactg

SEQ ID NO: 18545 - DNA, 25 bp, probe
cattactattccataactccagaca

SEQ ID NO: 18546 - DNA, 25 bp, probe
acattactattccataactccagac

SEQ ID NO: 18547 - DNA, 25 bp, probe
ttactattccataactccagacatc

SEQ ID NO: 18548 - DNA, 25 bp, probe
attactattccataactccagacat

SEQ ID NO: 18549 - DNA, 25 bp, probe
tacattactattccataactccaga

SEQ ID NO: 18550 - DNA, 25 bp, probe
acatcactggcagaagtaaactttc

SEQ ID NO: 18551 - DNA, 25 bp, probe
gacatcactggcagaagtaaacttt

SEQ ID NO: 18552 - DNA, 25 bp, probe
agacatcactggcagaagtaaactt

SEQ ID NO: 18553 - DNA, 25 bp, probe
ttacattactattccataactccag

SEQ ID NO: 18554 - DNA, 25 bp, probe
cttacattactattccataactcca

SEQ ID NO: 18555 - DNA, 25 bp, probe
acttacattactattccataactcc

SEQ ID NO: 18556 - DNA, 25 bp, probe
catcactggcagaagtaaactttcg

SEQ ID NO: 18557 - DNA, 25 bp, probe
cagacatcactggcagaagtaaact

SEQ ID NO: 18558 - DNA, 25 bp, probe
actggcagaagtaaactttcggaaa

SEQ ID NO: 18559 - DNA, 25 bp, probe
agaagtaaactttcggaaagctatg

SEQ ID NO: 18560 - DNA, 25 bp, probe
cagaagtaaactttcggaaagctat

SEQ ID NO: 18561 - DNA, 25 bp, probe
gaagtaaactttcggaaagctatgc

SEQ ID NO: 18562 - DNA, 25 bp, probe
atcactggcagaagtaaactttcgg

SEQ ID NO: 18563 - DNA, 25 bp, probe
aagtaaactttcggaaagctatgct

SEQ ID NO: 18564 - DNA, 25 bp, probe
cactggcagaagtaaactttcggaa

SEQ ID NO: 18565 - DNA, 25 bp, probe
gcagaagtaaactttcggaaagcta

SEQ ID NO: 18566 - DNA, 25 bp, probe
ctggcagaagtaaactttcggaaag

SEQ ID NO: 18567 - DNA, 25 bp, probe
atctgattggaattttccttgtgtg

SEQ ID NO: 18568 - DNA, 25 bp, probe
catctgattggaattttccttgtgt

SEQ ID NO: 18569 - DNA, 25 bp, probe
tgattggaattttccttgtgtgtag

SEQ ID NO: 18570 - DNA, 25 bp, probe
ctgattggaattttccttgtgtgta

SEQ ID NO: 18571 - DNA, 25 bp, probe
gattggaattttccttgtgtgtagc

SEQ ID NO: 18572 - DNA, 25 bp, probe
tctgattggaattttccttgtgtgt

SEQ ID NO: 18573 - DNA, 25 bp, probe
ccatctgattggaattttccttgtg

SEQ ID NO: 18574 - DNA, 25 bp, probe
tcactggcagaagtaaactttcgga

SEQ ID NO: 18575 - DNA, 25 bp, probe
attggaattttccttgtgtgtagct

SEQ ID NO: 18576 - DNA, 25 bp, probe
gaattttccttgtgtgtagctgctc

SEQ ID NO: 18577 - DNA, 25 bp, probe
ttggaattttccttgtgtgtagctg

SEQ ID NO: 18578 - DNA, 25 bp, probe
attccataactccagacatcactgg

SEQ ID NO: 18579 - DNA, 25 bp, probe
ggcagaagtaaactttcggaaagct

SEQ ID NO: 18580 - DNA, 25 bp, probe
taaactttcggaaagctatgcttct

SEQ ID NO: 18581 - DNA, 25 bp, probe
gtaaactttcggaaagctatgcttc

SEQ ID NO: 18582 - DNA, 25 bp, probe
tggcagaagtaaactttcggaaagc

SEQ ID NO: 18583 - DNA, 25 bp, probe
agtaaactttcggaaagctatgctt

SEQ ID NO: 18584 - DNA, 25 bp, probe
aattttccttgtgtgtagctgctcg

SEQ ID NO: 18585 - DNA, 25 bp, probe
gacattctcggtactaagactacag

SEQ ID NO: 18586 - DNA, 25 bp, probe
acattctcggtactaagactacagc

SEQ ID NO: 18587 - DNA, 25 bp, probe
ttcagaaccatgagatgtacgacta

SEQ ID NO: 18588 - DNA, 25 bp, probe
aaccatgagatgtacgactaccttc

SEQ ID NO: 18589 - DNA, 25 bp, probe
gaaccatgagatgtacgactacctt

SEQ ID NO: 18590 - DNA, 25 bp, probe
tcagaaccatgagatgtacgactac

SEQ ID NO: 18591 - DNA, 25 bp, probe
gaacaatgcgtccaatgacaatatt

SEQ ID NO: 18592 - DNA, 25 bp, probe
cattctcggtactaagactacagct

SEQ ID NO: 18593 - DNA, 25 bp, probe
gagttcagaaccatgagatgtacga

SEQ ID NO: 18594 - DNA, 25 bp, probe
agaaccatgagatgtacgactacct

SEQ ID NO: 18595 - DNA, 25 bp, probe
cagaaccatgagatgtacgactacc

SEQ ID NO: 18596 - DNA, 25 bp, probe
cgaacaatgcgtccaatgacaatat

SEQ ID NO: 18597 - DNA, 25 bp, probe
gttcagaaccatgagatgtacgact

SEQ ID NO: 18598 - DNA, 25 bp, probe
agttcagaaccatgagatgtacgac

SEQ ID NO: 18599 - DNA, 25 bp, probe
accatgagatgtacgactaccttct

SEQ ID NO: 18600 - DNA, 25 bp, probe
cgacattctcggtactaagactaca

SEQ ID NO: 18601 - DNA, 25 bp, probe
cgttagaaatcaagcagatgtaatt

SEQ ID NO: 18602 - DNA, 25 bp, probe
cagaaatccgaatccgactcctaaa

SEQ ID NO: 18603 - DNA, 25 bp, probe
ggagttcagaaccatgagatgtacg

SEQ ID NO: 18604 - DNA, 25 bp, probe
cggagttcagaaccatgagatgtac

SEQ ID NO: 18605 - DNA, 25 bp, probe
tacagaaatccgaatccgactccta

SEQ ID NO: 18606 - DNA, 25 bp, probe
gacgttagaaatcaagcagatgtaa

SEQ ID NO: 18607 - DNA, 25 bp, probe
aacaatgcgtccaatgacaatattt

SEQ ID NO: 18608 - DNA, 25 bp, probe
ggacgttagaaatcaagcagatgta

SEQ ID NO: 18609 - DNA, 25 bp, probe
acgttagaaatcaagcagatgtaat

SEQ ID NO: 18610 - DNA, 25 bp, probe
acagaaatccgaatccgactcctaa

SEQ ID NO: 18611 - DNA, 25 bp, probe
aatccgactcctaaaactaccaatc

SEQ ID NO: 18612 - DNA, 25 bp, probe
gaatccgactcctaaaactaccaat

SEQ ID NO: 18613 - DNA, 25 bp, probe
aatccgaatccgactcctaaaacta

SEQ ID NO: 18614 - DNA, 25 bp, probe
tcgaacaatgcgtccaatgacaata

SEQ ID NO: 18615 - DNA, 25 bp, probe
catgagatgtacgactaccttctcc

SEQ ID NO: 18616 - DNA, 25 bp, probe
ccatgagatgtacgactaccttctc

SEQ ID NO: 18617 - DNA, 25 bp, probe
gaaatccgaatccgactcctaaaac

SEQ ID NO: 18618 - DNA, 25 bp, probe
ctagagagcttaccggacgttagaa

SEQ ID NO: 18619 - DNA, 25 bp, probe
atccgactcctaaaactaccaatcc

SEQ ID NO: 18620 - DNA, 25 bp, probe
agaaatccgaatccgactcctaaaa

SEQ ID NO: 18621 - DNA, 25 bp, probe
atgagatgtacgactaccttctcca

SEQ ID NO: 18622 - DNA, 25 bp, probe
atccgaatccgactcctaaaactac

SEQ ID NO: 18623 - DNA, 25 bp, probe
aaatccgaatccgactcctaaaact

SEQ ID NO: 18624 - DNA, 25 bp, probe
cgaatccgactcctaaaactaccaa

SEQ ID NO: 18625 - DNA, 25 bp, probe
taacactcaattgctagagagcgaa

SEQ ID NO: 18626 - DNA, 25 bp, probe
ttaacactcaattgctagagagcga

SEQ ID NO: 18627 - DNA, 25 bp, probe
gttaacactcaattgctagagagcg

SEQ ID NO: 18628 - DNA, 25 bp, probe
ccgactcctaaaactaccaatcctg

SEQ ID NO: 18629 - DNA, 25 bp, probe
tctctctttccattacatgagttca

SEQ ID NO: 18630 - DNA, 25 bp, probe
gtctctctttccattacatgagttc

SEQ ID NO: 18631 - DNA, 25 bp, probe
tgtctctctttccattacatgagtt

SEQ ID NO: 18632 - DNA, 25 bp, probe
ctagtcatgtctctctttccattac

SEQ ID NO: 18633 - DNA, 25 bp, probe
tagtcatgtctctctttccattaca

SEQ ID NO: 18634 - DNA, 25 bp, probe
ctctctttccattacatgagttcat

SEQ ID NO: 18635 - DNA, 25 bp, probe
tctctttccattacatgagttcata

SEQ ID NO: 18636 - DNA, 25 bp, probe
atgtctctctttccattacatgagt

SEQ ID NO: 18637 - DNA, 25 bp, probe
agtcatgtctctctttccattacat

SEQ ID NO: 18638 - DNA, 25 bp, probe
gatttcatcatctttgagctgctcc

SEQ ID NO: 18639 - DNA, 25 bp, probe
actagtcatgtctctctttccatta

SEQ ID NO: 18640 - DNA, 25 bp, probe
ctctttccattacatgagttcatat

SEQ ID NO: 18641 - DNA, 25 bp, probe
agatttcatcatctttgagctgctc

SEQ ID NO: 18642 - DNA, 25 bp, probe
ttgtgttagtaatttggaaatgaaa

SEQ ID NO: 18643 - DNA, 25 bp, probe
tttgtgttagtaatttggaaatgaa

SEQ ID NO: 18644 - DNA, 25 bp, probe
tctttccattacatgagttcatatt

SEQ ID NO: 18645 - DNA, 25 bp, probe
atttcatcatctttgagctgctccc

SEQ ID NO: 18646 - DNA, 25 bp, probe
ctttccattacatgagttcatattt

SEQ ID NO: 18647 - DNA, 25 bp, probe
tgtgttagtaatttggaaatgaaat

SEQ ID NO: 18648 - DNA, 25 bp, probe
aagatttcatcatctttgagctgct

SEQ ID NO: 18649 - DNA, 25 bp, probe
ttttgtgttagtaatttggaaatga

SEQ ID NO: 18650 - DNA, 25 bp, probe
ttcatcatctttgagctgctcccaa

SEQ ID NO: 18651 - DNA, 25 bp, probe
tttcatcatctttgagctgctccca

SEQ ID NO: 18652 - DNA, 25 bp, probe
tcatcatctttgagctgctcccaag

SEQ ID NO: 18653 - DNA, 25 bp, probe
atcatctttgagctgctcccaagag

SEQ ID NO: 18654 - DNA, 25 bp, probe
tttccattacatgagttcatatttt

SEQ ID NO: 18655 - DNA, 25 bp, probe
catcatctttgagctgctcccaaga

SEQ ID NO: 18656 - DNA, 25 bp, probe
gctcgacatgtgcttgcatttctag

SEQ ID NO: 18657 - DNA, 25 bp, probe
gacatgtgcttgcatttctagcgag

SEQ ID NO: 18658 - DNA, 25 bp, probe
ctcgacatgtgcttgcatttctagc

SEQ ID NO: 18659 - DNA, 25 bp, probe
ataaaaccaaccaaccaaacacaaa

SEQ ID NO: 18660 - DNA, 25 bp, probe
aataaaaccaaccaaccaaacacaa

SEQ ID NO: 18661 - DNA, 25 bp, probe
caataaaaccaaccaaccaaacaca

SEQ ID NO: 18662 - DNA, 25 bp, probe
ccaataaaaccaaccaaccaaacac

SEQ ID NO: 18663 - DNA, 25 bp, probe
ttcatccttcttgtaaccatattgt

SEQ ID NO: 18664 - DNA, 25 bp, probe
acttcatccttcttgtaaccatatt

SEQ ID NO: 18665 - DNA, 25 bp, probe
cttcatccttcttgtaaccatattg

SEQ ID NO: 18666 - DNA, 25 bp, probe
agaagatactagttgaggaggagag

SEQ ID NO: 18667 - DNA, 25 bp, probe
gaagatactagttgaggaggagaga

SEQ ID NO: 18668 - DNA, 25 bp, probe
aagatactagttgaggaggagagac

SEQ ID NO: 18669 - DNA, 25 bp, probe
tgtagaagatactagttgaggagga

SEQ ID NO: 18670 - DNA, 25 bp, probe
tcaggaaagctcaatcagatacaaa

SEQ ID NO: 18671 - DNA, 25 bp, probe
atcaggaaagctcaatcagatacaa

SEQ ID NO: 18672 - DNA, 25 bp, probe
aatcaggaaagctcaatcagataca

SEQ ID NO: 18673 - DNA, 25 bp, probe
gtagaagatactagttgaggaggag

SEQ ID NO: 18674 - DNA, 25 bp, probe
tagaagatactagttgaggaggaga

SEQ ID NO: 18675 - DNA, 25 bp, probe
ttgtagaagatactagttgaggagg

SEQ ID NO: 18676 - DNA, 25 bp, probe
gatactagttgaggaggagagactt

SEQ ID NO: 18677 - DNA, 25 bp, probe
agatactagttgaggaggagagact

SEQ ID NO: 18678 - DNA, 25 bp, probe
aaacgtaagcaaatatcaagcctcc

SEQ ID NO: 18679 - DNA, 25 bp, probe
cgtttgtagaagatactagttgagg

SEQ ID NO: 18680 - DNA, 25 bp, probe
atactagttgaggaggagagacttt

SEQ ID NO: 18681 - DNA, 25 bp, probe
aacgtaagcaaatatcaagcctcca

SEQ ID NO: 18682 - DNA, 25 bp, probe
acgtttgtagaagatactagttgag

SEQ ID NO: 18683 - DNA, 25 bp, probe
caggaaagctcaatcagatacaaaa

SEQ ID NO: 18684 - DNA, 25 bp, probe
aaaacgtaagcaaatatcaagcctc

SEQ ID NO: 18685 - DNA, 25 bp, probe
gaaaacgtaagcaaatatcaagcct

SEQ ID NO: 18686 - DNA, 25 bp, probe
agaaaacgtaagcaaatatcaagcc

SEQ ID NO: 18687 - DNA, 25 bp, probe
gtttgtagaagatactagttgagga

SEQ ID NO: 18688 - DNA, 25 bp, probe
gccaagaaaacgtaagcaaatatca

SEQ ID NO: 18689 - DNA, 25 bp, probe
aagaaaacgtaagcaaatatcaagc

SEQ ID NO: 18690 - DNA, 25 bp, probe
ccaagaaaacgtaagcaaatatcaa

SEQ ID NO: 18691 - DNA, 25 bp, probe
tttgtagaagatactagttgaggag

SEQ ID NO: 18692 - DNA, 25 bp, probe
caagaaaacgtaagcaaatatcaag

SEQ ID NO: 18693 - DNA, 25 bp, probe
agaaagcctgtgtgtgtttgtaaca

SEQ ID NO: 18694 - DNA, 25 bp, probe
tactagttgaggaggagagactttt

SEQ ID NO: 18695 - DNA, 25 bp, probe
aacgtttgtagaagatactagttga

SEQ ID NO: 18696 - DNA, 25 bp, probe
gtttgtaacactcttgtgaccgtgc

SEQ ID NO: 18697 - DNA, 25 bp, probe
aaacaggaaattcgttaaaagtaac

SEQ ID NO: 18698 - DNA, 25 bp, probe
aaaacaggaaattcgttaaaagtaa

SEQ ID NO: 18699 - DNA, 25 bp, probe
tgtttgtaacactcttgtgaccgtg

SEQ ID NO: 18700 - DNA, 25 bp, probe
tgccaagaaaacgtaagcaaatatc

SEQ ID NO: 18701 - DNA, 25 bp, probe
gtgccaagaaaacgtaagcaaatat

SEQ ID NO: 18702 - DNA, 25 bp, probe
taacgtttgtagaagatactagttg

SEQ ID NO: 18703 - DNA, 25 bp, probe
gtaacgtttgtagaagatactagtt

SEQ ID NO: 18704 - DNA, 25 bp, probe
agtaacgtttgtagaagatactagt

SEQ ID NO: 18705 - DNA, 25 bp, probe
cgtgccaagaaaacgtaagcaaata

SEQ ID NO: 18706 - DNA, 25 bp, probe
aagtaacgtttgtagaagatactag

SEQ ID NO: 18707 - DNA, 25 bp, probe
acctcaatagtctcatctcttcaga

SEQ ID NO: 18708 - DNA, 25 bp, probe
gacctcaatagtctcatctcttcag

SEQ ID NO: 18709 - DNA, 25 bp, probe
gtgacctcaatagtctcatctcttc

SEQ ID NO: 18710 - DNA, 25 bp, probe
tgacctcaatagtctcatctcttca

SEQ ID NO: 18711 - DNA, 25 bp, probe
attcgtgacctcaatagtctcatct

SEQ ID NO: 18712 - DNA, 25 bp, probe
cattcgtgacctcaatagtctcatc

SEQ ID NO: 18713 - DNA, 25 bp, probe
tcattcgtgacctcaatagtctcat

SEQ ID NO: 18714 - DNA, 25 bp, probe
ttcattgtcaagtatcgtggtgtca

SEQ ID NO: 18715 - DNA, 25 bp, probe
cgtgacctcaatagtctcatctctt

SEQ ID NO: 18716 - DNA, 25 bp, probe
ttcgtgacctcaatagtctcatctc

SEQ ID NO: 18717 - DNA, 25 bp, probe
tcattgtcaagtatcgtggtgtcag

SEQ ID NO: 18718 - DNA, 25 bp, probe
gatttcattgtcaagtatcgtggtg

SEQ ID NO: 18719 - DNA, 25 bp, probe
atttcattgtcaagtatcgtggtgt

SEQ ID NO: 18720 - DNA, 25 bp, probe
tcgtgacctcaatagtctcatctct

SEQ ID NO: 18721 - DNA, 25 bp, probe
agtgatttcattgtcaagtatcgtg

SEQ ID NO: 18722 - DNA, 25 bp, probe
cagtgatttcattgtcaagtatcgt

SEQ ID NO: 18723 - DNA, 25 bp, probe
gtgatttcattgtcaagtatcgtgg

SEQ ID NO: 18724 - DNA, 25 bp, probe
tttcattgtcaagtatcgtggtgtc

SEQ ID NO: 18725 - DNA, 25 bp, probe
tgatttcattgtcaagtatcgtggt

SEQ ID NO: 18726 - DNA, 25 bp, probe
acagtgatttcattgtcaagtatcg

SEQ ID NO: 18727 - DNA, 25 bp, probe
gcacagtgatttcattgtcaagtat

SEQ ID NO: 18728 - DNA, 25 bp, probe
agcacagtgatttcattgtcaagta

SEQ ID NO: 18729 - DNA, 25 bp, probe
cacagtgatttcattgtcaagtatc

SEQ ID NO: 18730 - DNA, 25 bp, probe
gtcaagtatcgtggtgtcagctatg

SEQ ID NO: 18731 - DNA, 25 bp, probe
cagcacagtgatttcattgtcaagt

SEQ ID NO: 18732 - DNA, 25 bp, probe
acagcacagtgatttcattgtcaag

SEQ ID NO: 18733 - DNA, 25 bp, probe
caccataaagtctcgcatctacagg

SEQ ID NO: 18734 - DNA, 25 bp, probe
cattgtcaagtatcgtggtgtcagc

SEQ ID NO: 18735 - DNA, 25 bp, probe
cctccttctctattcctcgcagatc

SEQ ID NO: 18736 - DNA, 25 bp, probe
tgtcaagtatcgtggtgtcagctat

SEQ ID NO: 18737 - DNA, 25 bp, probe
cctcaatagtctcatctcttcagac

SEQ ID NO: 18738 - DNA, 25 bp, probe
cacagcacagtgatttcattgtcaa

SEQ ID NO: 18739 - DNA, 25 bp, probe
ttgtcaagtatcgtggtgtcagcta

SEQ ID NO: 18740 - DNA, 25 bp, probe
agacacctcaagtacatctcacagc

SEQ ID NO: 18741 - DNA, 25 bp, probe
gcaccataaagtctcgcatctacag

SEQ ID NO: 18742 - DNA, 25 bp, probe
cagcaccataaagtctcgcatctac

SEQ ID NO: 18743 - DNA, 25 bp, probe
ctctgtccctactgattcctccttg

SEQ ID NO: 18744 - DNA, 25 bp, probe
gagagacacctcaagtacatctcac

SEQ ID NO: 18745 - DNA, 25 bp, probe
aaagcacagcacagtgatttcattg

SEQ ID NO: 18746 - DNA, 25 bp, probe
caaagcacagcacagtgatttcatt

SEQ ID NO: 18747 - DNA, 25 bp, probe
gacacctcaagtacatctcacagct

SEQ ID NO: 18748 - DNA, 25 bp, probe
gagacacctcaagtacatctcacag

SEQ ID NO: 18749 - DNA, 25 bp, probe
agcaccataaagtctcgcatctaca

SEQ ID NO: 18750 - DNA, 25 bp, probe
acagcaccataaagtctcgcatcta

SEQ ID NO: 18751 - DNA, 25 bp, probe
cctacttccaagaacagagaaacag

SEQ ID NO: 18752 - DNA, 25 bp, probe
tacttccaagaacagagaaacagtc

SEQ ID NO: 18753 - DNA, 25 bp, probe
ctacttccaagaacagagaaacagt

SEQ ID NO: 18754 - DNA, 25 bp, probe
ccaagaacagagaaacagtccctaa

SEQ ID NO: 18755 - DNA, 25 bp, probe
ccctacttccaagaacagagaaaca

SEQ ID NO: 18756 - DNA, 25 bp, probe
tccaagaacagagaaacagtcccta

SEQ ID NO: 18757 - DNA, 25 bp, probe
acttccaagaacagagaaacagtcc

SEQ ID NO: 18758 - DNA, 25 bp, probe
cttccaagaacagagaaacagtccc

SEQ ID NO: 18759 - DNA, 25 bp, probe
ttccaagaacagagaaacagtccct

SEQ ID NO: 18760 - DNA, 25 bp, probe
cccctacttccaagaacagagaaac

SEQ ID NO: 18761 - DNA, 25 bp, probe
acccctacttccaagaacagagaaa

SEQ ID NO: 18762 - DNA, 25 bp, probe
cacccctacttccaagaacagagaa

SEQ ID NO: 18763 - DNA, 25 bp, probe
gaataagctgtcgttacagtattgc

SEQ ID NO: 18764 - DNA, 25 bp, probe
agaataagctgtcgttacagtattg

SEQ ID NO: 18765 - DNA, 25 bp, probe
aataagctgtcgttacagtattgca

SEQ ID NO: 18766 - DNA, 25 bp, probe
aagaataagctgtcgttacagtatt

SEQ ID NO: 18767 - DNA, 25 bp, probe
tattaaagaataagctgtcgttaca

SEQ ID NO: 18768 - DNA, 25 bp, probe
ttaaagaataagctgtcgttacagt

SEQ ID NO: 18769 - DNA, 25 bp, probe
aaagaataagctgtcgttacagtat

SEQ ID NO: 18770 - DNA, 25 bp, probe
taaagaataagctgtcgttacagta

SEQ ID NO: 18771 - DNA, 25 bp, probe
attaaagaataagctgtcgttacag

SEQ ID NO: 18772 - DNA, 25 bp, probe
ataagctgtcgttacagtattgcaa

SEQ ID NO: 18773 - DNA, 25 bp, probe
ttattaaagaataagctgtcgttac

SEQ ID NO: 18774 - DNA, 25 bp, probe
taagctgtcgttacagtattgcaaa

SEQ ID NO: 18775 - DNA, 25 bp, probe
aagctgtcgttacagtattgcaaaa

SEQ ID NO: 18776 - DNA, 25 bp, probe
taagaacaagagggaggaaagtgaa

SEQ ID NO: 18777 - DNA, 25 bp, probe
ctaagaacaagagggaggaaagtga

SEQ ID NO: 18778 - DNA, 25 bp, probe
acactaagaacaagagggaggaaag

SEQ ID NO: 18779 - DNA, 25 bp, probe
cacactaagaacaagagggaggaaa

SEQ ID NO: 18780 - DNA, 25 bp, probe
aacaagagggaggaaagtgaagaag

SEQ ID NO: 18781 - DNA, 25 bp, probe
gaacaagagggaggaaagtgaagaa

SEQ ID NO: 18782 - DNA, 25 bp, probe
aagaacaagagggaggaaagtgaag

SEQ ID NO: 18783 - DNA, 25 bp, probe
actaagaacaagagggaggaaagtg

SEQ ID NO: 18784 - DNA, 25 bp, probe
cactaagaacaagagggaggaaagt

SEQ ID NO: 18785 - DNA, 25 bp, probe
ggatttctatgacctgtatggaggg

SEQ ID NO: 18786 - DNA, 25 bp, probe
gggatttctatgacctgtatggagg

SEQ ID NO: 18787 - DNA, 25 bp, probe
agaacaagagggaggaaagtgaaga

SEQ ID NO: 18788 - DNA, 25 bp, probe
ggggatttctatgacctgtatggag

SEQ ID NO: 18789 - DNA, 25 bp, probe
aagagggaggaaagtgaagaagcag

SEQ ID NO: 18790 - DNA, 25 bp, probe
gcacactaagaacaagagggaggaa

SEQ ID NO: 18791 - DNA, 25 bp, probe
caagagggaggaaagtgaagaagca

SEQ ID NO: 18792 - DNA, 25 bp, probe
acaagagggaggaaagtgaagaagc

SEQ ID NO: 18793 - DNA, 25 bp, probe
gatttctatgacctgtatggagggg

SEQ ID NO: 18794 - DNA, 25 bp, probe
atttctatgacctgtatggagggga

SEQ ID NO: 18795 - DNA, 25 bp, probe
aggggatttctatgacctgtatgga

SEQ ID NO: 18796 - DNA, 25 bp, probe
gacctggtggagcatttcaagaaga

SEQ ID NO: 18797 - DNA, 25 bp, probe
gaacaaatgcgagtacgggaacatc

SEQ ID NO: 18798 - DNA, 25 bp, probe
tttctatgacctgtatggaggggag

SEQ ID NO: 18799 - DNA, 25 bp, probe
acctggtggagcatttcaagaagac

SEQ ID NO: 18800 - DNA, 25 bp, probe
ctatgacctgtatggaggggagaag

SEQ ID NO: 18801 - DNA, 25 bp, probe
agaactcaggggatttctatgacct

SEQ ID NO: 18802 - DNA, 25 bp, probe
aacaaatgcgagtacgggaacatca

SEQ ID NO: 18803 - DNA, 25 bp, probe
tctatgacctgtatggaggggagaa

SEQ ID NO: 18804 - DNA, 25 bp, probe
ttctatgacctgtatggaggggaga

SEQ ID NO: 18805 - DNA, 25 bp, probe
tctgacagagctggtggagtactac

SEQ ID NO: 18806 - DNA, 25 bp, probe
ctgacagagctggtggagtactaca

SEQ ID NO: 18807 - DNA, 25 bp, probe
gagcatttcaagaagacggggattg

SEQ ID NO: 18808 - DNA, 25 bp, probe
tatgacctgtatggaggggagaagt

SEQ ID NO: 18809 - DNA, 25 bp, probe
gacagagctggtggagtactacact

SEQ ID NO: 18810 - DNA, 25 bp, probe
gacctgtatggaggggagaagtttg

SEQ ID NO: 18811 - DNA, 25 bp, probe
atgacctgtatggaggggagaagtt

SEQ ID NO: 18812 - DNA, 25 bp, probe
ggagcatttcaagaagacggggatt

SEQ ID NO: 18813 - DNA, 25 bp, probe
catttcaagaagacggggattgagg

SEQ ID NO: 18814 - DNA, 25 bp, probe
atttcaagaagacggggattgagga

SEQ ID NO: 18815 - DNA, 25 bp, probe
tgacctgtatggaggggagaagttt

SEQ ID NO: 18816 - DNA, 25 bp, probe
ctctgacagagctggtggagtacta

SEQ ID NO: 18817 - DNA, 25 bp, probe
gcatttcaagaagacggggattgag

SEQ ID NO: 18818 - DNA, 25 bp, probe
tttcaagaagacggggattgaggag

SEQ ID NO: 18819 - DNA, 25 bp, probe
ctcaggggatttctatgacctgtat

SEQ ID NO: 18820 - DNA, 25 bp, probe
cctatttcaaggagaagcccctacg

SEQ ID NO: 18821 - DNA, 25 bp, probe
tatttcaaggagaagcccctacgtc

SEQ ID NO: 18822 - DNA, 25 bp, probe
ctatttcaaggagaagcccctacgt

SEQ ID NO: 18823 - DNA, 25 bp, probe
gtatcagaacatccatccatctacc

SEQ ID NO: 18824 - DNA, 25 bp, probe
tatcagaacatccatccatctacca

SEQ ID NO: 18825 - DNA, 25 bp, probe
acctcctcaactacctaagaagtaa

SEQ ID NO: 18826 - DNA, 25 bp, probe
gacctcctcaactacctaagaagta

SEQ ID NO: 18827 - DNA, 25 bp, probe
atcagaacatccatccatctaccaa

SEQ ID NO: 18828 - DNA, 25 bp, probe
tgtatcagaacatccatccatctac

SEQ ID NO: 18829 - DNA, 25 bp, probe
ggagagccaataatgagacttgttg

SEQ ID NO: 18830 - DNA, 25 bp, probe
ttgaatattgttgctatggtgacct

SEQ ID NO: 18831 - DNA, 25 bp, probe
gtgacctcctcaactacctaagaag

SEQ ID NO: 18832 - DNA, 25 bp, probe
tgaatattgttgctatggtgacctc

SEQ ID NO: 18833 - DNA, 25 bp, probe
atattgttgctatggtgacctcctc

SEQ ID NO: 18834 - DNA, 25 bp, probe
caataatgagacttgttggtgagcc

SEQ ID NO: 18835 - DNA, 25 bp, probe
tgacctcctcaactacctaagaagt

SEQ ID NO: 18836 - DNA, 25 bp, probe
gaatattgttgctatggtgacctcc

SEQ ID NO: 18837 - DNA, 25 bp, probe
aatattgttgctatggtgacctcct

SEQ ID NO: 18838 - DNA, 25 bp, probe
agaagaagaggaggaagatttgaac

SEQ ID NO: 18839 - DNA, 25 bp, probe
cagaagaagaggaggaagatttgaa

SEQ ID NO: 18840 - DNA, 25 bp, probe
cgacgctaacttctataaactgatt

SEQ ID NO: 18841 - DNA, 25 bp, probe
tatgccacagaagggatatactttg

SEQ ID NO: 18842 - DNA, 25 bp, probe
ctatgccacagaagggatatacttt

SEQ ID NO: 18843 - DNA, 25 bp, probe
ctactttccaggcacattcaaattc

SEQ ID NO: 18844 - DNA, 25 bp, probe
tctatgccacagaagggatatactt

SEQ ID NO: 18845 - DNA, 25 bp, probe
tggttcacgagaagttcagttacac

SEQ ID NO: 18846 - DNA, 25 bp, probe
attcacagagaaagaagttagcgag

SEQ ID NO: 18847 - DNA, 25 bp, probe
gattcacagagaaagaagttagcga

SEQ ID NO: 18848 - DNA, 25 bp, probe
agattcacagagaaagaagttagcg

SEQ ID NO: 18849 - DNA, 25 bp, probe
aagattcacagagaaagaagttagc

SEQ ID NO: 18850 - DNA, 25 bp, probe
gaagaagaggaggaagatttgaacg

SEQ ID NO: 18851 - DNA, 25 bp, probe
tttcagttcttaccctactttccag

SEQ ID NO: 18852 - DNA, 25 bp, probe
gaggcagaagaagcatgtatcagaa

SEQ ID NO: 18853 - DNA, 25 bp, probe
atttcagttcttaccctactttcca

SEQ ID NO: 18854 - DNA, 25 bp, probe
tatggtgacctcctcaactacctaa

SEQ ID NO: 18855 - DNA, 25 bp, probe
cctcctcaactacctaagaagtaaa

SEQ ID NO: 18856 - DNA, 25 bp, probe
tcagaacatccatccatctaccaaa

SEQ ID NO: 18857 - DNA, 25 bp, probe
aggcagaagaagcatgtatcagaac

SEQ ID NO: 18858 - DNA, 25 bp, probe
gccacagaagggatatactttgtaa

SEQ ID NO: 18859 - DNA, 25 bp, probe
tactttccaggcacattcaaattcc

SEQ ID NO: 18860 - DNA, 25 bp, probe
ctggttcacgagaagttcagttaca

SEQ ID NO: 18861 - DNA, 25 bp, probe
acgctaacttctataaactgattca

SEQ ID NO: 18862 - DNA, 25 bp, probe
aatttcagttcttaccctactttcc

SEQ ID NO: 18863 - DNA, 25 bp, probe
aaagagagaagtttcacaggacatg

SEQ ID NO: 18864 - DNA, 25 bp, probe
ctatggtgacctcctcaactaccta

SEQ ID NO: 18865 - DNA, 25 bp, probe
gccattactccaaagtgacttctat

SEQ ID NO: 18866 - DNA, 25 bp, probe
gcttatttgaagggatctacacaat

SEQ ID NO: 18867 - DNA, 25 bp, probe
ttatagcccaaactcaactctcaat

SEQ ID NO: 18868 - DNA, 25 bp, probe
tatagcccaaactcaactctcaatc

SEQ ID NO: 18869 - DNA, 25 bp, probe
cccaaactcaactctcaatctattt

SEQ ID NO: 18870 - DNA, 25 bp, probe
gcccaaactcaactctcaatctatt

SEQ ID NO: 18871 - DNA, 25 bp, probe
tagcccaaactcaactctcaatcta

SEQ ID NO: 18872 - DNA, 25 bp, probe
gttatagcccaaactcaactctcaa

SEQ ID NO: 18873 - DNA, 25 bp, probe
ctcaactctcaatctatttgctgga

SEQ ID NO: 18874 - DNA, 25 bp, probe
atctatttgctggagtctaggaatt

SEQ ID NO: 18875 - DNA, 25 bp, probe
aatctatttgctggagtctaggaat

SEQ ID NO: 18876 - DNA, 25 bp, probe
aactcaactctcaatctatttgctg

SEQ ID NO: 18877 - DNA, 25 bp, probe
actcaactctcaatctatttgctgg

SEQ ID NO: 18878 - DNA, 25 bp, probe
agcccaaactcaactctcaatctat

SEQ ID NO: 18879 - DNA, 25 bp, probe
atagcccaaactcaactctcaatct

SEQ ID NO: 18880 - DNA, 25 bp, probe
caatctatttgctggagtctaggaa

SEQ ID NO: 18881 - DNA, 25 bp, probe
ctctcaatctatttgctggagtcta

SEQ ID NO: 18882 - DNA, 25 bp, probe
tcaactctcaatctatttgctggag

SEQ ID NO: 18883 - DNA, 25 bp, probe
aaactcaactctcaatctatttgct

SEQ ID NO: 18884 - DNA, 25 bp, probe
tcaatctatttgctggagtctagga

SEQ ID NO: 18885 - DNA, 25 bp, probe
tcacaccaagactttattgttagga

SEQ ID NO: 18886 - DNA, 25 bp, probe
tctcaatctatttgctggagtctag

SEQ ID NO: 18887 - DNA, 25 bp, probe
ctcaatctatttgctggagtctagg

SEQ ID NO: 18888 - DNA, 25 bp, probe
agactttattgttaggatcatggga

SEQ ID NO: 18889 - DNA, 25 bp, probe
cacaccaagactttattgttaggat

SEQ ID NO: 18890 - DNA, 25 bp, probe
atcacaccaagactttattgttagg

SEQ ID NO: 18891 - DNA, 25 bp, probe
agaatcacaccaagactttattgtt

SEQ ID NO: 18892 - DNA, 25 bp, probe
aagaatcacaccaagactttattgt

SEQ ID NO: 18893 - DNA, 25 bp, probe
gactttattgttaggatcatgggaa

SEQ ID NO: 18894 - DNA, 25 bp, probe
caccaagactttattgttaggatca

SEQ ID NO: 18895 - DNA, 25 bp, probe
aagactttattgttaggatcatggg

SEQ ID NO: 18896 - DNA, 25 bp, probe
acaccaagactttattgttaggatc

SEQ ID NO: 18897 - DNA, 25 bp, probe
actttattgttaggatcatgggaaa

SEQ ID NO: 18898 - DNA, 25 bp, probe
accaagactttattgttaggatcat

SEQ ID NO: 18899 - DNA, 25 bp, probe
ccaaagaatcacaccaagactttat

SEQ ID NO: 18900 - DNA, 25 bp, probe
tattgttaggatcatgggaaattga

SEQ ID NO: 18901 - DNA, 25 bp, probe
aatcacaccaagactttattgttag

SEQ ID NO: 18902 - DNA, 25 bp, probe
gaatcacaccaagactttattgtta

SEQ ID NO: 18903 - DNA, 25 bp, probe
caagactttattgttaggatcatgg

SEQ ID NO: 18904 - DNA, 25 bp, probe
ccaagactttattgttaggatcatg

SEQ ID NO: 18905 - DNA, 25 bp, probe
cccaaagaatcacaccaagacttta

SEQ ID NO: 18906 - DNA, 25 bp, probe
ttattgttaggatcatgggaaattg

SEQ ID NO: 18907 - DNA, 25 bp, probe
ctttattgttaggatcatgggaaat

SEQ ID NO: 18908 - DNA, 25 bp, probe
caaactcaactctcaatctatttgc

SEQ ID NO: 18909 - DNA, 25 bp, probe
aaagaatcacaccaagactttattg

SEQ ID NO: 18910 - DNA, 25 bp, probe
caaagaatcacaccaagactttatt

SEQ ID NO: 18911 - DNA, 25 bp, probe
tggtaagtggataagattacacaga

SEQ ID NO: 18912 - DNA, 25 bp, probe
aatcctaatgcaacaagtcctgaat

SEQ ID NO: 18913 - DNA, 25 bp, probe
acacagattatacagctctaaggat

SEQ ID NO: 18914 - DNA, 25 bp, probe
ttggtaagtggataagattacacag

SEQ ID NO: 18915 - DNA, 25 bp, probe
atcctaatgcaacaagtcctgaatc

SEQ ID NO: 18916 - DNA, 25 bp, probe
tacacagattatacagctctaagga

SEQ ID NO: 18917 - DNA, 25 bp, probe
ggtaagtggataagattacacagat

SEQ ID NO: 18918 - DNA, 25 bp, probe
ttacacagattatacagctctaagg

SEQ ID NO: 18919 - DNA, 25 bp, probe
aagattacacagattatacagctct

SEQ ID NO: 18920 - DNA, 25 bp, probe
cacagattatacagctctaaggata

SEQ ID NO: 18921 - DNA, 25 bp, probe
tcctaatgcaacaagtcctgaatcc

SEQ ID NO: 18922 - DNA, 25 bp, probe
aaatcctaatgcaacaagtcctgaa

SEQ ID NO: 18923 - DNA, 25 bp, probe
gctctaaggataagaaatgcaatgg

SEQ ID NO: 18924 - DNA, 25 bp, probe
acagctctaaggataagaaatgcaa

SEQ ID NO: 18925 - DNA, 25 bp, probe
tacagctctaaggataagaaatgca

SEQ ID NO: 18926 - DNA, 25 bp, probe
atacagctctaaggataagaaatgc

SEQ ID NO: 18927 - DNA, 25 bp, probe
agctctaaggataagaaatgcaatg

SEQ ID NO: 18928 - DNA, 25 bp, probe
cagctctaaggataagaaatgcaat

SEQ ID NO: 18929 - DNA, 25 bp, probe
caaatcctaatgcaacaagtcctga

SEQ ID NO: 18930 - DNA, 25 bp, probe
tttggtaagtggataagattacaca

SEQ ID NO: 18931 - DNA, 25 bp, probe
acagattatacagctctaaggataa

SEQ ID NO: 18932 - DNA, 25 bp, probe
agattacacagattatacagctcta

SEQ ID NO: 18933 - DNA, 25 bp, probe
gtaagtggataagattacacagatt

SEQ ID NO: 18934 - DNA, 25 bp, probe
ctccaaatcctaatgcaacaagtcc

SEQ ID NO: 18935 - DNA, 25 bp, probe
cctccaaatcctaatgcaacaagtc

SEQ ID NO: 18936 - DNA, 25 bp, probe
atttgggcttttggtaagtggataa

SEQ ID NO: 18937 - DNA, 25 bp, probe
aatctgacatttgggcttttggtaa

SEQ ID NO: 18938 - DNA, 25 bp, probe
gggcttttggtaagtggataagatt

SEQ ID NO: 18939 - DNA, 25 bp, probe
ccaaatcctaatgcaacaagtcctg

SEQ ID NO: 18940 - DNA, 25 bp, probe
ggcttttggtaagtggataagatta

SEQ ID NO: 18941 - DNA, 25 bp, probe
tccaaatcctaatgcaacaagtcct

SEQ ID NO: 18942 - DNA, 25 bp, probe
cagattatacagctctaaggataag

SEQ ID NO: 18943 - DNA, 25 bp, probe
tttgggcttttggtaagtggataag

SEQ ID NO: 18944 - DNA, 25 bp, probe
taagattacacagattatacagctc

SEQ ID NO: 18945 - DNA, 25 bp, probe
taatgcaacaagtcctgaatccctt

SEQ ID NO: 18946 - DNA, 25 bp, probe
catttgggcttttggtaagtggata

SEQ ID NO: 18947 - DNA, 25 bp, probe
agattatacagctctaaggataaga

SEQ ID NO: 18948 - DNA, 25 bp, probe
atctgacatttgggcttttggtaag

SEQ ID NO: 18949 - DNA, 25 bp, probe
gccaagaatacgtaagcaaatatca

SEQ ID NO: 18950 - DNA, 25 bp, probe
ctaatgcaacaagtcctgaatccct

SEQ ID NO: 18951 - DNA, 25 bp, probe
aatacgtaagcaaatatcaagcctc

SEQ ID NO: 18952 - DNA, 25 bp, probe
gaatacgtaagcaaatatcaagcct

SEQ ID NO: 18953 - DNA, 25 bp, probe
agaatacgtaagcaaatatcaagcc

SEQ ID NO: 18954 - DNA, 25 bp, probe
attacacagattatacagctctaag

SEQ ID NO: 18955 - DNA, 25 bp, probe
aaccagaacttcgccagtcaactac

SEQ ID NO: 18956 - DNA, 25 bp, probe
caaccagaacttcgccagtcaacta

SEQ ID NO: 18957 - DNA, 25 bp, probe
cacacacacacaaatggaggaaatc

SEQ ID NO: 18958 - DNA, 25 bp, probe
acacacacacacaaatggaggaaat

SEQ ID NO: 18959 - DNA, 25 bp, probe
aatgtctggggaaatctatcttgtc

SEQ ID NO: 18960 - DNA, 25 bp, probe
aaatgtctggggaaatctatcttgt

SEQ ID NO: 18961 - DNA, 25 bp, probe
atgtctggggaaatctatcttgtct

SEQ ID NO: 18962 - DNA, 25 bp, probe
caaatgtctggggaaatctatcttg

SEQ ID NO: 18963 - DNA, 25 bp, probe
gatctttcacatggaaatccaaatg

SEQ ID NO: 18964 - DNA, 25 bp, probe
aatcctgagagcatctcgaatatca

SEQ ID NO: 18965 - DNA, 25 bp, probe
tgtctggggaaatctatcttgtctg

SEQ ID NO: 18966 - DNA, 25 bp, probe
acacaaatggaggaaatcctgagag

SEQ ID NO: 18967 - DNA, 25 bp, probe
ctttcacatggaaatccaaatgtct

SEQ ID NO: 18968 - DNA, 25 bp, probe
tctttcacatggaaatccaaatgtc

SEQ ID NO: 18969 - DNA, 25 bp, probe
tgagagcatctcgaatatcaggatg

SEQ ID NO: 18970 - DNA, 25 bp, probe
tttcacatggaaatccaaatgtctg

SEQ ID NO: 18971 - DNA, 25 bp, probe
atctttcacatggaaatccaaatgt

SEQ ID NO: 18972 - DNA, 25 bp, probe
ctgagagcatctcgaatatcaggat

SEQ ID NO: 18973 - DNA, 25 bp, probe
atcctgagagcatctcgaatatcag

SEQ ID NO: 18974 - DNA, 25 bp, probe
aaatggaggaaatcctgagagcatc

SEQ ID NO: 18975 - DNA, 25 bp, probe
cacacacacacacaaatggaggaaa

SEQ ID NO: 18976 - DNA, 25 bp, probe
cacacaaatggaggaaatcctgaga

SEQ ID NO: 18977 - DNA, 25 bp, probe
caaatggaggaaatcctgagagcat

SEQ ID NO: 18978 - DNA, 25 bp, probe
acacacaaatggaggaaatcctgag

SEQ ID NO: 18979 - DNA, 25 bp, probe
aatccaaatgtctggggaaatctat

SEQ ID NO: 18980 - DNA, 25 bp, probe
aaatccaaatgtctggggaaatcta

SEQ ID NO: 18981 - DNA, 25 bp, probe
atccaaatgtctggggaaatctatc

SEQ ID NO: 18982 - DNA, 25 bp, probe
ttcacatggaaatccaaatgtctgg

SEQ ID NO: 18983 - DNA, 25 bp, probe
ccaaatgtctggggaaatctatctt

SEQ ID NO: 18984 - DNA, 25 bp, probe
acacacacacaaatggaggaaatcc

SEQ ID NO: 18985 - DNA, 25 bp, probe
tccaaatgtctggggaaatctatct

SEQ ID NO: 18986 - DNA, 25 bp, probe
gaaatccaaatgtctggggaaatct

SEQ ID NO: 18987 - DNA, 25 bp, probe
aatggaggaaatcctgagagcatct

SEQ ID NO: 18988 - DNA, 25 bp, probe
cacacacaaatggaggaaatcctga

SEQ ID NO: 18989 - DNA, 25 bp, probe
gtctggggaaatctatcttgtctgc

SEQ ID NO: 18990 - DNA, 25 bp, probe
aaatcctgagagcatctcgaatatc

SEQ ID NO: 18991 - DNA, 25 bp, probe
gaaatcctgagagcatctcgaatat

SEQ ID NO: 18992 - DNA, 25 bp, probe
catctcgaatatcaggatgctgagg

SEQ ID NO: 18993 - DNA, 25 bp, probe
agaattttctgataaatgccaaaca

SEQ ID NO: 18994 - DNA, 25 bp, probe
acacacacaaatggaggaaatcctg

SEQ ID NO: 18995 - DNA, 25 bp, probe
cacacacacaaatggaggaaatcct

SEQ ID NO: 18996 - DNA, 25 bp, probe
cacaaatggaggaaatcctgagagc

SEQ ID NO: 18997 - DNA, 25 bp, probe
acacacacacacacacacacaaatg

SEQ ID NO: 18998 - DNA, 25 bp, probe
cacacacacacacacacacacaaat

SEQ ID NO: 18999 - DNA, 25 bp, probe
ggaaatccaaatgtctggggaaatc

SEQ ID NO: 19000 - DNA, 25 bp, probe
gaattttctgataaatgccaaacat

SEQ ID NO: 19001 - DNA, 25 bp, probe
ataagttgtccaaggcaagaagata

SEQ ID NO: 19002 - DNA, 25 bp, probe
taagttgtccaaggcaagaagatag

SEQ ID NO: 19003 - DNA, 25 bp, probe
aataagttgtccaaggcaagaagat

SEQ ID NO: 19004 - DNA, 25 bp, probe
gttgtccaaggcaagaagatagtaa

SEQ ID NO: 19005 - DNA, 25 bp, probe
cttgaacagttgtgtccagattaag

SEQ ID NO: 19006 - DNA, 25 bp, probe
agttgtccaaggcaagaagatagta

SEQ ID NO: 19007 - DNA, 25 bp, probe
ttgaacagttgtgtccagattaagg

SEQ ID NO: 19008 - DNA, 25 bp, probe
aagttgtccaaggcaagaagatagt

SEQ ID NO: 19009 - DNA, 25 bp, probe
gcttgaacagttgtgtccagattaa

SEQ ID NO: 19010 - DNA, 25 bp, probe
ctcttggtcattatagtatatgcct

SEQ ID NO: 19011 - DNA, 25 bp, probe
actcttggtcattatagtatatgcc

SEQ ID NO: 19012 - DNA, 25 bp, probe
tgtccaaggcaagaagatagtaaat

SEQ ID NO: 19013 - DNA, 25 bp, probe
agagatgtgtcccaatttcaagtat

SEQ ID NO: 19014 - DNA, 25 bp, probe
atagagatgtgtcccaatttcaagt

SEQ ID NO: 19015 - DNA, 25 bp, probe
ggtttgaaatatagagatgtgtccc

SEQ ID NO: 19016 - DNA, 25 bp, probe
cccaaagtgtttacctaatcagtag

SEQ ID NO: 19017 - DNA, 25 bp, probe
tagagatgtgtcccaatttcaagta

SEQ ID NO: 19018 - DNA, 25 bp, probe
gagatgtgtcccaatttcaagtatt

SEQ ID NO: 19019 - DNA, 25 bp, probe
gtccaaggcaagaagatagtaaatt

SEQ ID NO: 19020 - DNA, 25 bp, probe
taggttcacaaactcttggtcatta

SEQ ID NO: 19021 - DNA, 25 bp, probe
ttgtccaaggcaagaagatagtaaa

SEQ ID NO: 19022 - DNA, 25 bp, probe
aggttcacaaactcttggtcattat

SEQ ID NO: 19023 - DNA, 25 bp, probe
agatgtgtcccaatttcaagtattt

SEQ ID NO: 19024 - DNA, 25 bp, probe
gtttgaaatatagagatgtgtccca

SEQ ID NO: 19025 - DNA, 25 bp, probe
tggtttgaaatatagagatgtgtcc

SEQ ID NO: 19026 - DNA, 25 bp, probe
gaaataagttgtccaaggcaagaag

SEQ ID NO: 19027 - DNA, 25 bp, probe
aaataagttgtccaaggcaagaaga

SEQ ID NO: 19028 - DNA, 25 bp, probe
tgcttgaacagttgtgtccagatta

SEQ ID NO: 19029 - DNA, 25 bp, probe
ggttcacaaactcttggtcattata

SEQ ID NO: 19030 - DNA, 25 bp, probe
aatcagtaggttcacaaactcttgg

SEQ ID NO: 19031 - DNA, 25 bp, probe
gtaggttcacaaactcttggtcatt

SEQ ID NO: 19032 - DNA, 25 bp, probe
tatagagatgtgtcccaatttcaag

SEQ ID NO: 19033 - DNA, 25 bp, probe
taatcagtaggttcacaaactcttg

SEQ ID NO: 19034 - DNA, 25 bp, probe
ctaatcagtaggttcacaaactctt

SEQ ID NO: 19035 - DNA, 25 bp, probe
aagtacaagtgtaatatggacagta

SEQ ID NO: 19036 - DNA, 25 bp, probe
taagtacaagtgtaatatggacagt

SEQ ID NO: 19037 - DNA, 25 bp, probe
agtaggttcacaaactcttggtcat

SEQ ID NO: 19038 - DNA, 25 bp, probe
atcagtaggttcacaaactcttggt

SEQ ID NO: 19039 - DNA, 25 bp, probe
ttggacatcgtaaagactagaatag

SEQ ID NO: 19040 - DNA, 25 bp, probe
gttcacaaactcttggtcattatag

SEQ ID NO: 19041 - DNA, 25 bp, probe
ttcacaaactcttggtcattatagt

SEQ ID NO: 19042 - DNA, 25 bp, probe
gataatagctttcccaccctacttt

SEQ ID NO: 19043 - DNA, 25 bp, probe
gttgtgtccagattaagggagataa

SEQ ID NO: 19044 - DNA, 25 bp, probe
acaagtgtaatatggacagtatcta

SEQ ID NO: 19045 - DNA, 25 bp, probe
ttcgcctgactcataatatggttaa

SEQ ID NO: 19046 - DNA, 25 bp, probe
cgcctgactcataatatggttaatg

SEQ ID NO: 19047 - DNA, 25 bp, probe
tcgcctgactcataatatggttaat

SEQ ID NO: 19048 - DNA, 25 bp, probe
gcctgactcataatatggttaatgg

SEQ ID NO: 19049 - DNA, 25 bp, probe
atgtgaagttacaatgaggctgatg

SEQ ID NO: 19050 - DNA, 25 bp, probe
cctgactcataatatggttaatgga

SEQ ID NO: 19051 - DNA, 25 bp, probe
gaagagcatgtgaagttacaatgag

SEQ ID NO: 19052 - DNA, 25 bp, probe
accttatacaagaagctactgatga

SEQ ID NO: 19053 - DNA, 25 bp, probe
catgtgaagttacaatgaggctgat

SEQ ID NO: 19054 - DNA, 25 bp, probe
aagagcatgtgaagttacaatgagg

SEQ ID NO: 19055 - DNA, 25 bp, probe
ttctacatgatcctcttgtggaatg

SEQ ID NO: 19056 - DNA, 25 bp, probe
atgatcctcttgtggaatggagtaa

SEQ ID NO: 19057 - DNA, 25 bp, probe
cgaagagcatgtgaagttacaatga

SEQ ID NO: 19058 - DNA, 25 bp, probe
gcattaccttatacaagaagctact

SEQ ID NO: 19059 - DNA, 25 bp, probe
tttcgcctgactcataatatggtta

SEQ ID NO: 19060 - DNA, 25 bp, probe
atttcgcctgactcataatatggtt

SEQ ID NO: 19061 - DNA, 25 bp, probe
tgcattaccttatacaagaagctac

SEQ ID NO: 19062 - DNA, 25 bp, probe
gtgcattaccttatacaagaagcta

SEQ ID NO: 19063 - DNA, 25 bp, probe
ccttatacaagaagctactgatgaa

SEQ ID NO: 19064 - DNA, 25 bp, probe
tgtgcattaccttatacaagaagct

SEQ ID NO: 19065 - DNA, 25 bp, probe
catttcgcctgactcataatatggt

SEQ ID NO: 19066 - DNA, 25 bp, probe
atgtgcattaccttatacaagaagc

SEQ ID NO: 19067 - DNA, 25 bp, probe
catgatcctcttgtggaatggagta

SEQ ID NO: 19068 - DNA, 25 bp, probe
tacatgatcctcttgtggaatggag

SEQ ID NO: 19069 - DNA, 25 bp, probe
ctacatgatcctcttgtggaatgga

SEQ ID NO: 19070 - DNA, 25 bp, probe
tctacatgatcctcttgtggaatgg

SEQ ID NO: 19071 - DNA, 25 bp, probe
tcgaagagcatgtgaagttacaatg

SEQ ID NO: 19072 - DNA, 25 bp, probe
taccttatacaagaagctactgatg

SEQ ID NO: 19073 - DNA, 25 bp, probe
actcataatatggttaatggaatgg

SEQ ID NO: 19074 - DNA, 25 bp, probe
tatggttaatggaatgggtcctatg

SEQ ID NO: 19075 - DNA, 25 bp, probe
catgtgcattaccttatacaagaag

SEQ ID NO: 19076 - DNA, 25 bp, probe
aatatggttaatggaatgggtccta

SEQ ID NO: 19077 - DNA, 25 bp, probe
taatatggttaatggaatgggtcct

SEQ ID NO: 19078 - DNA, 25 bp, probe
atatggttaatggaatgggtcctat

SEQ ID NO: 19079 - DNA, 25 bp, probe
ctgactcataatatggttaatggaa

SEQ ID NO: 19080 - DNA, 25 bp, probe
tcataatatggttaatggaatgggt

SEQ ID NO: 19081 - DNA, 25 bp, probe
cattaccttatacaagaagctactg

SEQ ID NO: 19082 - DNA, 25 bp, probe
cataatatggttaatggaatgggtc

SEQ ID NO: 19083 - DNA, 25 bp, probe
ttaccttatacaagaagctactgat

SEQ ID NO: 19084 - DNA, 25 bp, probe
attaccttatacaagaagctactga

SEQ ID NO: 19085 - DNA, 25 bp, probe
tgtgaagttacaatgaggctgatgc

SEQ ID NO: 19086 - DNA, 25 bp, probe
tttctacatgatcctcttgtggaat

SEQ ID NO: 19087 - DNA, 25 bp, probe
gatcctcttgtggaatggagtaaac

SEQ ID NO: 19088 - DNA, 25 bp, probe
ataatatggttaatggaatgggtcc

SEQ ID NO: 19089 - DNA, 25 bp, probe
tgtgctgtattaagtgctttatgaa

SEQ ID NO: 19090 - DNA, 25 bp, probe
gtgctgtattaagtgctttatgaac

SEQ ID NO: 19091 - DNA, 25 bp, probe
atgtgctgtattaagtgctttatga

SEQ ID NO: 19092 - DNA, 25 bp, probe
ttaataataataatggtcaggtgcc

SEQ ID NO: 19093 - DNA, 25 bp, probe
ccatgtgctgtattaagtgctttat

SEQ ID NO: 19094 - DNA, 25 bp, probe
taataataataatggtcaggtgcca

SEQ ID NO: 19095 - DNA, 25 bp, probe
tgctttatgaacatttgttaggctg

SEQ ID NO: 19096 - DNA, 25 bp, probe
gtgctttatgaacatttgttaggct

SEQ ID NO: 19097 - DNA, 25 bp, probe
agtgctttatgaacatttgttaggc

SEQ ID NO: 19098 - DNA, 25 bp, probe
tgctgtattaagtgctttatgaaca

SEQ ID NO: 19099 - DNA, 25 bp, probe
ctttatgaacatttgttaggctggc

SEQ ID NO: 19100 - DNA, 25 bp, probe
gctttatgaacatttgttaggctgg

SEQ ID NO: 19101 - DNA, 25 bp, probe
catgtgctgtattaagtgctttatg

SEQ ID NO: 19102 - DNA, 25 bp, probe
aagtgctttatgaacatttgttagg

SEQ ID NO: 19103 - DNA, 25 bp, probe
gccatgtgctgtattaagtgcttta

SEQ ID NO: 19104 - DNA, 25 bp, probe
gctgtattaagtgctttatgaacat

SEQ ID NO: 19105 - DNA, 25 bp, probe
gtgccatgtgctgtattaagtgctt

SEQ ID NO: 19106 - DNA, 25 bp, probe
gtctaccagagtcagagatcagctc

SEQ ID NO: 19107 - DNA, 25 bp, probe
taataataatggtcaggtgccatgt

SEQ ID NO: 19108 - DNA, 25 bp, probe
ataataataatggtcaggtgccatg

SEQ ID NO: 19109 - DNA, 25 bp, probe
gtcaggtgccatgtgctgtattaag

SEQ ID NO: 19110 - DNA, 25 bp, probe
cttcagagatataagctgctttagc

SEQ ID NO: 19111 - DNA, 25 bp, probe
aataataatggtcaggtgccatgtg

SEQ ID NO: 19112 - DNA, 25 bp, probe
tgccatgtgctgtattaagtgcttt

SEQ ID NO: 19113 - DNA, 25 bp, probe
aataataataatggtcaggtgccat

SEQ ID NO: 19114 - DNA, 25 bp, probe
caggtgccatgtgctgtattaagtg

SEQ ID NO: 19115 - DNA, 25 bp, probe
tcaggtgccatgtgctgtattaagt

SEQ ID NO: 19116 - DNA, 25 bp, probe
tttgggtctaccagagtcagagatc

SEQ ID NO: 19117 - DNA, 25 bp, probe
tttatgaacatttgttaggctggcc

SEQ ID NO: 19118 - DNA, 25 bp, probe
taagtgctttatgaacatttgttag

SEQ ID NO: 19119 - DNA, 25 bp, probe
attaagtgctttatgaacatttgtt

SEQ ID NO: 19120 - DNA, 25 bp, probe
tctaccagagtcagagatcagctcc

SEQ ID NO: 19121 - DNA, 25 bp, probe
ggtctaccagagtcagagatcagct

SEQ ID NO: 19122 - DNA, 25 bp, probe
ggtttctactgggttttgggtctac

SEQ ID NO: 19123 - DNA, 25 bp, probe
ctgtattaagtgctttatgaacatt

SEQ ID NO: 19124 - DNA, 25 bp, probe
attaataataataatggtcaggtgc

SEQ ID NO: 19125 - DNA, 25 bp, probe
ctaccagagtcagagatcagctcca

SEQ ID NO: 19126 - DNA, 25 bp, probe
tattaagtgctttatgaacatttgt

SEQ ID NO: 19127 - DNA, 25 bp, probe
gtattaagtgctttatgaacatttg

SEQ ID NO: 19128 - DNA, 25 bp, probe
ctcttgggtttctactgggttttgg

SEQ ID NO: 19129 - DNA, 25 bp, probe
cctcttgggtttctactgggttttg

SEQ ID NO: 19130 - DNA, 25 bp, probe
ttaagtgctttatgaacatttgtta

SEQ ID NO: 19131 - DNA, 25 bp, probe
ttgggtctaccagagtcagagatca

SEQ ID NO: 19132 - DNA, 25 bp, probe
taccagagtcagagatcagctccac

SEQ ID NO: 19133 - DNA, 25 bp, probe
aaagactccaggggactcattactc

SEQ ID NO: 19134 - DNA, 25 bp, probe
gaaagactccaggggactcattact

SEQ ID NO: 19135 - DNA, 25 bp, probe
agaaagactccaggggactcattac

SEQ ID NO: 19136 - DNA, 25 bp, probe
cagaaagactccaggggactcatta

SEQ ID NO: 19137 - DNA, 25 bp, probe
aagactccaggggactcattactct

SEQ ID NO: 19138 - DNA, 25 bp, probe
agactccaggggactcattactctg

SEQ ID NO: 19139 - DNA, 25 bp, probe
gactccaggggactcattactctgt

SEQ ID NO: 19140 - DNA, 25 bp, probe
actccaggggactcattactctgtg

SEQ ID NO: 19141 - DNA, 25 bp, probe
ctacatgtcgccagaaagactccag

SEQ ID NO: 19142 - DNA, 25 bp, probe
gtcctacatgtcgccagaaagactc

SEQ ID NO: 19143 - DNA, 25 bp, probe
atccaagatgaagaatacattgctg

SEQ ID NO: 19144 - DNA, 25 bp, probe
aatgaagaagcagtcacatacagaa

SEQ ID NO: 19145 - DNA, 25 bp, probe
ctaatcatgctctctaccaactacc

SEQ ID NO: 19146 - DNA, 25 bp, probe
caatgaagaagcagtcacatacaga

SEQ ID NO: 19147 - DNA, 25 bp, probe
taatcatgctctctaccaactacca

SEQ ID NO: 19148 - DNA, 25 bp, probe
gctaatcatgctctctaccaactac

SEQ ID NO: 19149 - DNA, 25 bp, probe
tgatccaagatgaagaatacattgc

SEQ ID NO: 19150 - DNA, 25 bp, probe
gatccaagatgaagaatacattgct

SEQ ID NO: 19151 - DNA, 25 bp, probe
aatcatgctctctaccaactaccat

SEQ ID NO: 19152 - DNA, 25 bp, probe
gcaatgaagaagcagtcacatacag

SEQ ID NO: 19153 - DNA, 25 bp, probe
cagcaatgaagaagcagtcacatac

SEQ ID NO: 19154 - DNA, 25 bp, probe
tccaagatgaagaatacattgctgg

SEQ ID NO: 19155 - DNA, 25 bp, probe
ccctattataccttccacccaaatt

SEQ ID NO: 19156 - DNA, 25 bp, probe
accttccacccaaattctttatcat

SEQ ID NO: 19157 - DNA, 25 bp, probe
taccttccacccaaattctttatca

SEQ ID NO: 19158 - DNA, 25 bp, probe
ccttccacccaaattctttatcatt

SEQ ID NO: 19159 - DNA, 25 bp, probe
aagatgaagaatacattgctgggaa

SEQ ID NO: 19160 - DNA, 25 bp, probe
gacaggaccatctctgacattcatt

SEQ ID NO: 19161 - DNA, 25 bp, probe
agcaatgaagaagcagtcacataca

SEQ ID NO: 19162 - DNA, 25 bp, probe
cctattataccttccacccaaattc

SEQ ID NO: 19163 - DNA, 25 bp, probe
agatgaagaatacattgctgggaac

SEQ ID NO: 19164 - DNA, 25 bp, probe
ataccttccacccaaattctttatc

SEQ ID NO: 19165 - DNA, 25 bp, probe
ccacccaaattctttatcattgtct

SEQ ID NO: 19166 - DNA, 25 bp, probe
tccacccaaattctttatcattgtc

SEQ ID NO: 19167 - DNA, 25 bp, probe
atgaagaagcagtcacatacagaaa

SEQ ID NO: 19168 - DNA, 25 bp, probe
tctctaccaactaccatgaggctaa

SEQ ID NO: 19169 - DNA, 25 bp, probe
acaggaccatctctgacattcattg

SEQ ID NO: 19170 - DNA, 25 bp, probe
tgaggtccagatgaaagagaagttt

SEQ ID NO: 19171 - DNA, 25 bp, probe
ggatgatccaagatgaagaatacat

SEQ ID NO: 19172 - DNA, 25 bp, probe
ttccacccaaattctttatcattgt

SEQ ID NO: 19173 - DNA, 25 bp, probe
caagatgaagaatacattgctggga

SEQ ID NO: 19174 - DNA, 25 bp, probe
ggaaacagacatactcattcatttg

SEQ ID NO: 19175 - DNA, 25 bp, probe
aggaaacagacatactcattcattt

SEQ ID NO: 19176 - DNA, 25 bp, probe
attataccttccacccaaattcttt

SEQ ID NO: 19177 - DNA, 25 bp, probe
cttaggaaacagacatactcattca

SEQ ID NO: 19178 - DNA, 25 bp, probe
atgatccaagatgaagaatacattg

SEQ ID NO: 19179 - DNA, 25 bp, probe
cttccacccaaattctttatcattg

SEQ ID NO: 19180 - DNA, 25 bp, probe
gatgatccaagatgaagaatacatt

SEQ ID NO: 19181 - DNA, 25 bp, probe
gatgaagaatacattgctgggaacc

SEQ ID NO: 19182 - DNA, 25 bp, probe
ctctctaccaactaccatgaggcta

SEQ ID NO: 19183 - DNA, 25 bp, probe
ctattataccttccacccaaattct

SEQ ID NO: 19184 - DNA, 25 bp, probe
agacaggaccatctctgacattcat

SEQ ID NO: 19185 - DNA, 25 bp, probe
tcttaggaaacagacatactcattc

SEQ ID NO: 19186 - DNA, 25 bp, probe
gtgaaaggtttggattcctatgaag

SEQ ID NO: 19187 - DNA, 25 bp, probe
cttcaggagaatctacacgcatgat

SEQ ID NO: 19188 - DNA, 25 bp, probe
ttcaggagaatctacacgcatgatg

SEQ ID NO: 19189 - DNA, 25 bp, probe
aggagaatctacacgcatgatggag

SEQ ID NO: 19190 - DNA, 25 bp, probe
caggagaatctacacgcatgatgga

SEQ ID NO: 19191 - DNA, 25 bp, probe
tgcattacaaccaaacagtggatat

SEQ ID NO: 19192 - DNA, 25 bp, probe
tcaggagaatctacacgcatgatgg

SEQ ID NO: 19193 - DNA, 25 bp, probe
ccttcaggagaatctacacgcatga

SEQ ID NO: 19194 - DNA, 25 bp, probe
gcattacaaccaaacagtggatatc

SEQ ID NO: 19195 - DNA, 25 bp, probe
ttacaaccaaacagtggatatctgg

SEQ ID NO: 19196 - DNA, 25 bp, probe
attacaaccaaacagtggatatctg

SEQ ID NO: 19197 - DNA, 25 bp, probe
cattacaaccaaacagtggatatct

SEQ ID NO: 19198 - DNA, 25 bp, probe
aatctacacgcatgatggagctgat

SEQ ID NO: 19199 - DNA, 25 bp, probe
gagaatctacacgcatgatggagct

SEQ ID NO: 19200 - DNA, 25 bp, probe
atctacacgcatgatggagctgatc

SEQ ID NO: 19201 - DNA, 25 bp, probe
gaatctacacgcatgatggagctga

SEQ ID NO: 19202 - DNA, 25 bp, probe
agaatctacacgcatgatggagctg

SEQ ID NO: 19203 - DNA, 25 bp, probe
atgcattacaaccaaacagtggata

SEQ ID NO: 19204 - DNA, 25 bp, probe
gagcacgttcaattcctggtttacc

SEQ ID NO: 19205 - DNA, 25 bp, probe
gatgcattacaaccaaacagtggat

SEQ ID NO: 19206 - DNA, 25 bp, probe
ctcaactggatgcattacaaccaaa

SEQ ID NO: 19207 - DNA, 25 bp, probe
cgagcacgttcaattcctggtttac

SEQ ID NO: 19208 - DNA, 25 bp, probe
aactggatgcattacaaccaaacag

SEQ ID NO: 19209 - DNA, 25 bp, probe
tcaactggatgcattacaaccaaac

SEQ ID NO: 19210 - DNA, 25 bp, probe
acctgagatcatgctcaactggatg

SEQ ID NO: 19211 - DNA, 25 bp, probe
cacctgagatcatgctcaactggat

SEQ ID NO: 19212 - DNA, 25 bp, probe
caactggatgcattacaaccaaaca

SEQ ID NO: 19213 - DNA, 25 bp, probe
atgatggagctgatccagtaacctc

SEQ ID NO: 19214 - DNA, 25 bp, probe
ctggatgcattacaaccaaacagtg

SEQ ID NO: 19215 - DNA, 25 bp, probe
gctcaactggatgcattacaaccaa

SEQ ID NO: 19216 - DNA, 25 bp, probe
catgatggagctgatccagtaacct

SEQ ID NO: 19217 - DNA, 25 bp, probe
tacaaccaaacagtggatatctggt

SEQ ID NO: 19218 - DNA, 25 bp, probe
agcacgttcaattcctggtttacca

SEQ ID NO: 19219 - DNA, 25 bp, probe
ctgagatcatgctcaactggatgca

SEQ ID NO: 19220 - DNA, 25 bp, probe
acaaccaaacagtggatatctggtc

SEQ ID NO: 19221 - DNA, 25 bp, probe
ggatgcattacaaccaaacagtgga

SEQ ID NO: 19222 - DNA, 25 bp, probe
gatcatgctcaactggatgcattac

SEQ ID NO: 19223 - DNA, 25 bp, probe
agatcatgctcaactggatgcatta

SEQ ID NO: 19224 - DNA, 25 bp, probe
tggatgcattacaaccaaacagtgg

SEQ ID NO: 19225 - DNA, 25 bp, probe
atcatgctcaactggatgcattaca

SEQ ID NO: 19226 - DNA, 25 bp, probe
caaccaaacagtggatatctggtcc

SEQ ID NO: 19227 - DNA, 25 bp, probe
catgctcaactggatgcattacaac

SEQ ID NO: 19228 - DNA, 25 bp, probe
acgagcacgttcaattcctggttta

SEQ ID NO: 19229 - DNA, 25 bp, probe
tcatgctcaactggatgcattacaa

SEQ ID NO: 19230 - DNA, 25 bp, probe
gagatcatgctcaactggatgcatt

SEQ ID NO: 19231 - DNA, 25 bp, probe
aaattccctggaacgtctttctttc

SEQ ID NO: 19232 - DNA, 25 bp, probe
caaattccctggaacgtctttcttt

SEQ ID NO: 19233 - DNA, 25 bp, probe
attaatgcagtcagcctctggttct

SEQ ID NO: 19234 - DNA, 25 bp, probe
ttaatgcagtcagcctctggttctt

SEQ ID NO: 19235 - DNA, 25 bp, probe
cacatgagtacctgcaaattccctg

SEQ ID NO: 19236 - DNA, 25 bp, probe
gcaaattccctggaacgtctttctt

SEQ ID NO: 19237 - DNA, 25 bp, probe
atgagtacctgcaaattccctggaa

SEQ ID NO: 19238 - DNA, 25 bp, probe
gttctttgtgccacatgagtacctg

SEQ ID NO: 19239 - DNA, 25 bp, probe
ctggttctttgtgccacatgagtac

SEQ ID NO: 19240 - DNA, 25 bp, probe
tctggttctttgtgccacatgagta

SEQ ID NO: 19241 - DNA, 25 bp, probe
catgagtacctgcaaattccctgga

SEQ ID NO: 19242 - DNA, 25 bp, probe
taatgcagtcagcctctggttcttt

SEQ ID NO: 19243 - DNA, 25 bp, probe
ctgcaaattccctggaacgtctttc

SEQ ID NO: 19244 - DNA, 25 bp, probe
tgagtacctgcaaattccctggaac

SEQ ID NO: 19245 - DNA, 25 bp, probe
acatgagtacctgcaaattccctgg

SEQ ID NO: 19246 - DNA, 25 bp, probe
ccacatgagtacctgcaaattccct

SEQ ID NO: 19247 - DNA, 25 bp, probe
tgcaaattccctggaacgtctttct

SEQ ID NO: 19248 - DNA, 25 bp, probe
aattccctggaacgtctttctttcc

SEQ ID NO: 19249 - DNA, 25 bp, probe
ggttctttgtgccacatgagtacct

SEQ ID NO: 19250 - DNA, 25 bp, probe
cattaatgcagtcagcctctggttc

SEQ ID NO: 19251 - DNA, 25 bp, probe
gtgccacatgagtacctgcaaattc

SEQ ID NO: 19252 - DNA, 25 bp, probe
attccctggaacgtctttctttcct

SEQ ID NO: 19253 - DNA, 25 bp, probe
ttccctggaacgtctttctttcctt

SEQ ID NO: 19254 - DNA, 25 bp, probe
tccctggaacgtctttctttccttc

SEQ ID NO: 19255 - DNA, 25 bp, probe
tttgtcttgccatactttgtctgaa

SEQ ID NO: 19256 - DNA, 25 bp, probe
ttgtcttgccatactttgtctgaaa

SEQ ID NO: 19257 - DNA, 25 bp, probe
ttttgtcttgccatactttgtctga

SEQ ID NO: 19258 - DNA, 25 bp, probe
gttttgtcttgccatactttgtctg

SEQ ID NO: 19259 - DNA, 25 bp, probe
tgtcttgccatactttgtctgaaaa

SEQ ID NO: 19260 - DNA, 25 bp, probe
cattgagagttttgtcttgccatac

SEQ ID NO: 19261 - DNA, 25 bp, probe
tcattgagagttttgtcttgccata

SEQ ID NO: 19262 - DNA, 25 bp, probe
gagagttttgtcttgccatactttg

SEQ ID NO: 19263 - DNA, 25 bp, probe
attgagagttttgtcttgccatact

SEQ ID NO: 19264 - DNA, 25 bp, probe
gagttttgtcttgccatactttgtc

SEQ ID NO: 19265 - DNA, 25 bp, probe
tgagagttttgtcttgccatacttt

SEQ ID NO: 19266 - DNA, 25 bp, probe
ttgagagttttgtcttgccatactt

SEQ ID NO: 19267 - DNA, 25 bp, probe
ttcattgagagttttgtcttgccat

SEQ ID NO: 19268 - DNA, 25 bp, probe
agttttgtcttgccatactttgtct

SEQ ID NO: 19269 - DNA, 25 bp, probe
agagttttgtcttgccatactttgt

SEQ ID NO: 19270 - DNA, 25 bp, probe
cacttcattgagagttttgtcttgc

SEQ ID NO: 19271 - DNA, 25 bp, probe
cttcattgagagttttgtcttgcca

SEQ ID NO: 19272 - DNA, 25 bp, probe
acttcattgagagttttgtcttgcc

SEQ ID NO: 19273 - DNA, 25 bp, probe
tgagagttttgtcaatgtcttttga

SEQ ID NO: 19274 - DNA, 25 bp, probe
ttgagagttttgtcaatgtcttttg

SEQ ID NO: 19275 - DNA, 25 bp, probe
gagagttttgtcaatgtcttttgaa

SEQ ID NO: 19276 - DNA, 25 bp, probe
gggcacttcattgagagttttgtca

SEQ ID NO: 19277 - DNA, 25 bp, probe
agagttttgtcaatgtcttttgaat

SEQ ID NO: 19278 - DNA, 25 bp, probe
ggcacttcattgagagttttgtcaa

SEQ ID NO: 19279 - DNA, 25 bp, probe
gagttttgtcaatgtcttttgaata

SEQ ID NO: 19280 - DNA, 25 bp, probe
caatgtcttttgaatattcccaagc

SEQ ID NO: 19281 - DNA, 25 bp, probe
agttttgtcaatgtcttttgaatat

SEQ ID NO: 19282 - DNA, 25 bp, probe
gcacttcattgagagttttgtcaat

SEQ ID NO: 19283 - DNA, 25 bp, probe
tgtcaatgtcttttgaatattccca

SEQ ID NO: 19284 - DNA, 25 bp, probe
attgagagttttgtcaatgtctttt

SEQ ID NO: 19285 - DNA, 25 bp, probe
gttttgtcaatgtcttttgaatatt

SEQ ID NO: 19286 - DNA, 25 bp, probe
gtcaatgtcttttgaatattcccaa

SEQ ID NO: 19287 - DNA, 25 bp, probe
ttgtcaatgtcttttgaatattccc

SEQ ID NO: 19288 - DNA, 25 bp, probe
tcaatgtcttttgaatattcccaag

SEQ ID NO: 19289 - DNA, 25 bp, probe
tttgtcaatgtcttttgaatattcc

SEQ ID NO: 19290 - DNA, 25 bp, probe
ttttgtcaatgtcttttgaatattc

SEQ ID NO: 19291 - DNA, 25 bp, probe
ccgatcatctcctagaacttcaatg

SEQ ID NO: 19292 - DNA, 25 bp, probe
tattcaaggtgatcgtattcttcca

SEQ ID NO: 19293 - DNA, 25 bp, probe
attcaaggtgatcgtattcttccag

SEQ ID NO: 19294 - DNA, 25 bp, probe
gcagtcattattcaaggtgatcgta

SEQ ID NO: 19295 - DNA, 25 bp, probe
cagtcattattcaaggtgatcgtat

SEQ ID NO: 19296 - DNA, 25 bp, probe
ttattcaaggtgatcgtattcttcc

SEQ ID NO: 19297 - DNA, 25 bp, probe
aaggtgatcgtattcttccagtgaa

SEQ ID NO: 19298 - DNA, 25 bp, probe
aagcagtcattattcaaggtgatcg

SEQ ID NO: 19299 - DNA, 25 bp, probe
ttcaaggtgatcgtattcttccagt

SEQ ID NO: 19300 - DNA, 25 bp, probe
taccctggaagaaatactcataagc

SEQ ID NO: 19301 - DNA, 25 bp, probe
agtcattattcaaggtgatcgtatt

SEQ ID NO: 19302 - DNA, 25 bp, probe
aaacaagactgaaatatgatgaccc

SEQ ID NO: 19303 - DNA, 25 bp, probe
caaggtgatcgtattcttccagtga

SEQ ID NO: 19304 - DNA, 25 bp, probe
ggaagaaatactcataagccacctc

SEQ ID NO: 19305 - DNA, 25 bp, probe
tcattattcaaggtgatcgtattct

SEQ ID NO: 19306 - DNA, 25 bp, probe
gtcattattcaaggtgatcgtattc

SEQ ID NO: 19307 - DNA, 25 bp, probe
gatatttcaacggcaaagaatctgt

SEQ ID NO: 19308 - DNA, 25 bp, probe
gaagaaatactcataagccacctct

SEQ ID NO: 19309 - DNA, 25 bp, probe
caacggcaaagaatctgttattact

SEQ ID NO: 19310 - DNA, 25 bp, probe
tcaacggcaaagaatctgttattac

SEQ ID NO: 19311 - DNA, 25 bp, probe
tttcaacggcaaagaatctgttatt

SEQ ID NO: 19312 - DNA, 25 bp, probe
atttcaacggcaaagaatctgttat

SEQ ID NO: 19313 - DNA, 25 bp, probe
atatttcaacggcaaagaatctgtt

SEQ ID NO: 19314 - DNA, 25 bp, probe
aagaaatactcataagccacctctg

SEQ ID NO: 19315 - DNA, 25 bp, probe
cggcaaagaatctgttattactagc

SEQ ID NO: 19316 - DNA, 25 bp, probe
tcaaggtgatcgtattcttccagtg

SEQ ID NO: 19317 - DNA, 25 bp, probe
agcagtcattattcaaggtgatcgt

SEQ ID NO: 19318 - DNA, 25 bp, probe
ttcaacggcaaagaatctgttatta

SEQ ID NO: 19319 - DNA, 25 bp, probe
tatttcaacggcaaagaatctgtta

SEQ ID NO: 19320 - DNA, 25 bp, probe
ggcaaagaatctgttattactagca

SEQ ID NO: 19321 - DNA, 25 bp, probe
tgatatttcaacggcaaagaatctg

SEQ ID NO: 19322 - DNA, 25 bp, probe
gaaagcagtcattattcaaggtgat

SEQ ID NO: 19323 - DNA, 25 bp, probe
acggcaaagaatctgttattactag

SEQ ID NO: 19324 - DNA, 25 bp, probe
agaaatactcataagccacctctgt

SEQ ID NO: 19325 - DNA, 25 bp, probe
tactagcaaattctacagaagagca

SEQ ID NO: 19326 - DNA, 25 bp, probe
actagcaaattctacagaagagcag

SEQ ID NO: 19327 - DNA, 25 bp, probe
aacggcaaagaatctgttattacta

SEQ ID NO: 19328 - DNA, 25 bp, probe
taccgaaatactcataagccacctc

SEQ ID NO: 19329 - DNA, 25 bp, probe
cgatcatctcctagaacttcaatga

SEQ ID NO: 19330 - DNA, 25 bp, probe
cattattcaaggtgatcgtattctt

SEQ ID NO: 19331 - DNA, 25 bp, probe
accctggaagaaatactcataagcc

SEQ ID NO: 19332 - DNA, 25 bp, probe
aaagcagtcattattcaaggtgatc

SEQ ID NO: 19333 - DNA, 25 bp, probe
ttactagcaaattctacagaagagc

SEQ ID NO: 19334 - DNA, 25 bp, probe
ttaccctggaagaaatactcataag

SEQ ID NO: 19335 - DNA, 25 bp, probe
aagagcgaagaatccatcacaatct

SEQ ID NO: 19336 - DNA, 25 bp, probe
agtttgttagccgaaatagaagaga

SEQ ID NO: 19337 - DNA, 25 bp, probe
gttagaagcagaaataaaggtgagc

SEQ ID NO: 19338 - DNA, 25 bp, probe
cgagttagaagcagaaataaaggtg

SEQ ID NO: 19339 - DNA, 25 bp, probe
tagccgagttagaagcagaaataaa

SEQ ID NO: 19340 - DNA, 25 bp, probe
ttagccgagttagaagcagaaataa

SEQ ID NO: 19341 - DNA, 25 bp, probe
attagccgagttagaagcagaaata

SEQ ID NO: 19342 - DNA, 25 bp, probe
gagtttgttagccgaaatagaagag

SEQ ID NO: 19343 - DNA, 25 bp, probe
ttagaagcagaaataaaggtgagca

SEQ ID NO: 19344 - DNA, 25 bp, probe
tagaagcagaaataaaggtgagcag

SEQ ID NO: 19345 - DNA, 25 bp, probe
ccgagttagaagcagaaataaaggt

SEQ ID NO: 19346 - DNA, 25 bp, probe
gtttgttagccgaaatagaagagat

SEQ ID NO: 19347 - DNA, 25 bp, probe
gccgaaatagaagagatagaatacg

SEQ ID NO: 19348 - DNA, 25 bp, probe
aattagccgagttagaagcagaaat

SEQ ID NO: 19349 - DNA, 25 bp, probe
tgttagccgaaatagaagagataga

SEQ ID NO: 19350 - DNA, 25 bp, probe
agccgagttagaagcagaaataaag

SEQ ID NO: 19351 - DNA, 25 bp, probe
cgaattagccgagttagaagcagaa

SEQ ID NO: 19352 - DNA, 25 bp, probe
agttagaagcagaaataaaggtgag

SEQ ID NO: 19353 - DNA, 25 bp, probe
gagttagaagcagaaataaaggtga

SEQ ID NO: 19354 - DNA, 25 bp, probe
cgagtttgttagccgaaatagaaga

SEQ ID NO: 19355 - DNA, 25 bp, probe
gaattagccgagttagaagcagaaa

SEQ ID NO: 19356 - DNA, 25 bp, probe
aaagagcgaagaatccatcacaatc

SEQ ID NO: 19357 - DNA, 25 bp, probe
ttgttagccgaaatagaagagatag

SEQ ID NO: 19358 - DNA, 25 bp, probe
caaagagcgaagaatccatcacaat

SEQ ID NO: 19359 - DNA, 25 bp, probe
atggctaaagtggatgaatacatga

SEQ ID NO: 19360 - DNA, 25 bp, probe
gttagccgaaatagaagagatagaa

SEQ ID NO: 19361 - DNA, 25 bp, probe
ccgagtttgttagccgaaatagaag

SEQ ID NO: 19362 - DNA, 25 bp, probe
gccgagttagaagcagaaataaagg

SEQ ID NO: 19363 - DNA, 25 bp, probe
tggctaaagtggatgaatacatgaa

SEQ ID NO: 19364 - DNA, 25 bp, probe
ggctaaagtggatgaatacatgaaa

SEQ ID NO: 19365 - DNA, 25 bp, probe
agccgaaatagaagagatagaatac

SEQ ID NO: 19366 - DNA, 25 bp, probe
tttgttagccgaaatagaagagata

SEQ ID NO: 19367 - DNA, 25 bp, probe
taaccgaattagccgagttagaagc

SEQ ID NO: 19368 - DNA, 25 bp, probe
ggatgaatacatgaaagagaaaggt

SEQ ID NO: 19369 - DNA, 25 bp, probe
tggatgaatacatgaaagagaaagg

SEQ ID NO: 19370 - DNA, 25 bp, probe
ccgaaatagaagagatagaatacga

SEQ ID NO: 19371 - DNA, 25 bp, probe
gctaaagtggatgaatacatgaaag

SEQ ID NO: 19372 - DNA, 25 bp, probe
agtggatgaatacatgaaagagaaa

SEQ ID NO: 19373 - DNA, 25 bp, probe
aagtggatgaatacatgaaagagaa

SEQ ID NO: 19374 - DNA, 25 bp, probe
aaagtggatgaatacatgaaagaga

SEQ ID NO: 19375 - DNA, 25 bp, probe
agagcgaagaatccatcacaatctt

SEQ ID NO: 19376 - DNA, 25 bp, probe
gtggatgaatacatgaaagagaaag

SEQ ID NO: 19377 - DNA, 25 bp, probe
cacacaaccattcaggctttacaag

SEQ ID NO: 19378 - DNA, 25 bp, probe
ttagccgaaatagaagagatagaat

SEQ ID NO: 19379 - DNA, 25 bp, probe
tacctcttatcacagtaaccaactc

SEQ ID NO: 19380 - DNA, 25 bp, probe
cctcttatcacagtaaccaactcta

SEQ ID NO: 19381 - DNA, 25 bp, probe
agtacctcttatcacagtaaccaac

SEQ ID NO: 19382 - DNA, 25 bp, probe
acctcttatcacagtaaccaactct

SEQ ID NO: 19383 - DNA, 25 bp, probe
aactattgtcattgttacattggca

SEQ ID NO: 19384 - DNA, 25 bp, probe
actattgtcattgttacattggcat

SEQ ID NO: 19385 - DNA, 25 bp, probe
aagtacctcttatcacagtaaccaa

SEQ ID NO: 19386 - DNA, 25 bp, probe
gtacctcttatcacagtaaccaact

SEQ ID NO: 19387 - DNA, 25 bp, probe
aagtgtagtgtgtagtctatgacca

SEQ ID NO: 19388 - DNA, 25 bp, probe
agtgtagtgtgtagtctatgaccac

SEQ ID NO: 19389 - DNA, 25 bp, probe
ctcttatcacagtaaccaactctaa

SEQ ID NO: 19390 - DNA, 25 bp, probe
ccatcaattcttgtgccaatccatt

SEQ ID NO: 19391 - DNA, 25 bp, probe
tctatgccctatctggattctactt

SEQ ID NO: 19392 - DNA, 25 bp, probe
ccagtagaaagtgtagtgtgtagtc

SEQ ID NO: 19393 - DNA, 25 bp, probe
atctatgccctatctggattctact

SEQ ID NO: 19394 - DNA, 25 bp, probe
accagtagaaagtgtagtgtgtagt

SEQ ID NO: 19395 - DNA, 25 bp, probe
taccagtagaaagtgtagtgtgtag

SEQ ID NO: 19396 - DNA, 25 bp, probe
aatccaccttgaagttgtccacatt

SEQ ID NO: 19397 - DNA, 25 bp, probe
ctattgtcattgttacattggcata

SEQ ID NO: 19398 - DNA, 25 bp, probe
ttggcataaatactgaagttgagag

SEQ ID NO: 19399 - DNA, 25 bp, probe
acattggcataaatactgaagttga

SEQ ID NO: 19400 - DNA, 25 bp, probe
atcaaataagccttctcaatccacc

SEQ ID NO: 19401 - DNA, 25 bp, probe
tgcaatattcactaagacattccaa

SEQ ID NO: 19402 - DNA, 25 bp, probe
cagtagaaagtgtagtgtgtagtct

SEQ ID NO: 19403 - DNA, 25 bp, probe
ctatgccctatctggattctactta

SEQ ID NO: 19404 - DNA, 25 bp, probe
tggcataaatactgaagttgagagt

SEQ ID NO: 19405 - DNA, 25 bp, probe
ggcataaatactgaagttgagagtg

SEQ ID NO: 19406 - DNA, 25 bp, probe
caaataagccttctcaatccacctt

SEQ ID NO: 19407 - DNA, 25 bp, probe
atcaattcttgtgccaatccatttc

SEQ ID NO: 19408 - DNA, 25 bp, probe
tatctatgccctatctggattctac

SEQ ID NO: 19409 - DNA, 25 bp, probe
tttatctatgccctatctggattct

SEQ ID NO: 19410 - DNA, 25 bp, probe
actggatcaaataagccttctcaat

SEQ ID NO: 19411 - DNA, 25 bp, probe
ttcttgtgccaatccatttctgtat

SEQ ID NO: 19412 - DNA, 25 bp, probe
attcttgtgccaatccatttctgta

SEQ ID NO: 19413 - DNA, 25 bp, probe
attggcataaatactgaagttgaga

SEQ ID NO: 19414 - DNA, 25 bp, probe
cattggcataaatactgaagttgag

SEQ ID NO: 19415 - DNA, 25 bp, probe
atgcaatattcactaagacattcca

SEQ ID NO: 19416 - DNA, 25 bp, probe
catcaattcttgtgccaatccattt

SEQ ID NO: 19417 - DNA, 25 bp, probe
gatcaaataagccttctcaatccac

SEQ ID NO: 19418 - DNA, 25 bp, probe
attaggcaagagacctctaccagta

SEQ ID NO: 19419 - DNA, 25 bp, probe
gtacattaggcaagagacctctacc

SEQ ID NO: 19420 - DNA, 25 bp, probe
ctggatcaaataagccttctcaatc

SEQ ID NO: 19421 - DNA, 25 bp, probe
tattgtcattgttacattggcataa

SEQ ID NO: 19422 - DNA, 25 bp, probe
agaaagtgtagtgtgtagtctatga

SEQ ID NO: 19423 - DNA, 25 bp, probe
ctaataagttggttatcagtggtgg

SEQ ID NO: 19424 - DNA, 25 bp, probe
actaataagttggttatcagtggtg

SEQ ID NO: 19425 - DNA, 25 bp, probe
cagaagaggttcatggcaatataat

SEQ ID NO: 19426 - DNA, 25 bp, probe
gcagaagaggttcatggcaatataa

SEQ ID NO: 19427 - DNA, 25 bp, probe
gaggttcatggcaatataatagtca

SEQ ID NO: 19428 - DNA, 25 bp, probe
agaggttcatggcaatataatagtc

SEQ ID NO: 19429 - DNA, 25 bp, probe
agaatcaatctgaattagtcctgtt

SEQ ID NO: 19430 - DNA, 25 bp, probe
aggttcatggcaatataatagtcaa

SEQ ID NO: 19431 - DNA, 25 bp, probe
aagaggttcatggcaatataatagt

SEQ ID NO: 19432 - DNA, 25 bp, probe
taataagttggttatcagtggtggg

SEQ ID NO: 19433 - DNA, 25 bp, probe
ggttggctcaagtctttattaacaa

SEQ ID NO: 19434 - DNA, 25 bp, probe
tgaactaaatcagtggcattctcta

SEQ ID NO: 19435 - DNA, 25 bp, probe
atgaactaaatcagtggcattctct

SEQ ID NO: 19436 - DNA, 25 bp, probe
agaagaggttcatggcaatataata

SEQ ID NO: 19437 - DNA, 25 bp, probe
gaattaccaacagcctgtgaagatc

SEQ ID NO: 19438 - DNA, 25 bp, probe
gaagaggttcatggcaatataatag

SEQ ID NO: 19439 - DNA, 25 bp, probe
ggcagaagaggttcatggcaatata

SEQ ID NO: 19440 - DNA, 25 bp, probe
gggttggctcaagtctttattaaca

SEQ ID NO: 19441 - DNA, 25 bp, probe
ggttcatggcaatataatagtcaat

SEQ ID NO: 19442 - DNA, 25 bp, probe
tgcattgacagtgttgaattaccaa

SEQ ID NO: 19443 - DNA, 25 bp, probe
gaactaaatcagtggcattctctag

SEQ ID NO: 19444 - DNA, 25 bp, probe
taagttggttatcagtggtgggttt

SEQ ID NO: 19445 - DNA, 25 bp, probe
gtacaatgaactaaatcagtggcat

SEQ ID NO: 19446 - DNA, 25 bp, probe
ataagttggttatcagtggtgggtt

SEQ ID NO: 19447 - DNA, 25 bp, probe
aataagttggttatcagtggtgggt

SEQ ID NO: 19448 - DNA, 25 bp, probe
gttggctcaagtctttattaacaaa

SEQ ID NO: 19449 - DNA, 25 bp, probe
ttaacacaggcagaagaggttcatg

SEQ ID NO: 19450 - DNA, 25 bp, probe
aattaccaacagcctgtgaagatca

SEQ ID NO: 19451 - DNA, 25 bp, probe
tgaattaccaacagcctgtgaagat

SEQ ID NO: 19452 - DNA, 25 bp, probe
gagccttatgggaagtagccttaaa

SEQ ID NO: 19453 - DNA, 25 bp, probe
ttcctgtttcccgaaataaggtatt

SEQ ID NO: 19454 - DNA, 25 bp, probe
attcctgtttcccgaaataaggtat

SEQ ID NO: 19455 - DNA, 25 bp, probe
gaaatccaagcaatacacaggaaat

SEQ ID NO: 19456 - DNA, 25 bp, probe
ttgaattaccaacagcctgtgaaga

SEQ ID NO: 19457 - DNA, 25 bp, probe
aaatccaagcaatacacaggaaatt

SEQ ID NO: 19458 - DNA, 25 bp, probe
aacaatattcctaagtagcaatggg

SEQ ID NO: 19459 - DNA, 25 bp, probe
tattcctgtttcccgaaataaggta

SEQ ID NO: 19460 - DNA, 25 bp, probe
tttaacacaggcagaagaggttcat

SEQ ID NO: 19461 - DNA, 25 bp, probe
tggcaatataatagtcaatgaactt

SEQ ID NO: 19462 - DNA, 25 bp, probe
tgaaatccaagcaatacacaggaaa

SEQ ID NO: 19463 - DNA, 25 bp, probe
ttgaaatccaagcaatacacaggaa

SEQ ID NO: 19464 - DNA, 25 bp, probe
tttgaaatccaagcaatacacagga

SEQ ID NO: 19465 - DNA, 25 bp, probe
attaccaacagcctgtgaagatcag

SEQ ID NO: 19466 - DNA, 25 bp, probe
atggcaatataatagtcaatgaact

SEQ ID NO: 19467 - DNA, 25 bp, probe
catcaagaaggttcactacaacggt

SEQ ID NO: 19468 - DNA, 25 bp, probe
ctgcatcaagaaggttcactacaac

SEQ ID NO: 19469 - DNA, 25 bp, probe
atcaagaaggttcactacaacggtg

SEQ ID NO: 19470 - DNA, 25 bp, probe
gcatcaagaaggttcactacaacgg

SEQ ID NO: 19471 - DNA, 25 bp, probe
gctgcatcaagaaggttcactacaa

SEQ ID NO: 19472 - DNA, 25 bp, probe
tattgacagatccttgcggcaatta

SEQ ID NO: 19473 - DNA, 25 bp, probe
tgcatcaagaaggttcactacaacg

SEQ ID NO: 19474 - DNA, 25 bp, probe
gacagatccttgcggcaattaactt

SEQ ID NO: 19475 - DNA, 25 bp, probe
ttgacagatccttgcggcaattaac

SEQ ID NO: 19476 - DNA, 25 bp, probe
attgacagatccttgcggcaattaa

SEQ ID NO: 19477 - DNA, 25 bp, probe
ctattgacagatccttgcggcaatt

SEQ ID NO: 19478 - DNA, 25 bp, probe
acagatccttgcggcaattaacttt

SEQ ID NO: 19479 - DNA, 25 bp, probe
tgacagatccttgcggcaattaact

SEQ ID NO: 19480 - DNA, 25 bp, probe
gagcagaggaagaagaccatcttgg

SEQ ID NO: 19481 - DNA, 25 bp, probe
ggagcagaggaagaagaccatcttg

SEQ ID NO: 19482 - DNA, 25 bp, probe
ctctattgacagatccttgcggcaa

SEQ ID NO: 19483 - DNA, 25 bp, probe
tctattgacagatccttgcggcaat

SEQ ID NO: 19484 - DNA, 25 bp, probe
cagaggaagaagaccatcttggcac

SEQ ID NO: 19485 - DNA, 25 bp, probe
aggatgacttcatggagattaagag

SEQ ID NO: 19486 - DNA, 25 bp, probe
aaggatgacttcatggagattaaga

SEQ ID NO: 19487 - DNA, 25 bp, probe
caaggatgacttcatggagattaag

SEQ ID NO: 19488 - DNA, 25 bp, probe
ggatgacttcatggagattaagagt

SEQ ID NO: 19489 - DNA, 25 bp, probe
aaggtcctatacaagtcagttaagg

SEQ ID NO: 19490 - DNA, 25 bp, probe
ccaaggatgacttcatggagattaa

SEQ ID NO: 19491 - DNA, 25 bp, probe
cctatacaagtcagttaaggaagtt

SEQ ID NO: 19492 - DNA, 25 bp, probe
tgaaaggtcctatacaagtcagtta

SEQ ID NO: 19493 - DNA, 25 bp, probe
aaaggtcctatacaagtcagttaag

SEQ ID NO: 19494 - DNA, 25 bp, probe
gaaaggtcctatacaagtcagttaa

SEQ ID NO: 19495 - DNA, 25 bp, probe
gccaaggatgacttcatggagatta

SEQ ID NO: 19496 - DNA, 25 bp, probe
agagtcatgtttcttctccttaatt

SEQ ID NO: 19497 - DNA, 25 bp, probe
cttcatggagattaagagtcatgtt

SEQ ID NO: 19498 - DNA, 25 bp, probe
gatgacttcatggagattaagagtc

SEQ ID NO: 19499 - DNA, 25 bp, probe
tggagattaagagtcatgtttcttc

SEQ ID NO: 19500 - DNA, 25 bp, probe
aggtcctatacaagtcagttaagga

SEQ ID NO: 19501 - DNA, 25 bp, probe
ggtcctatacaagtcagttaaggaa

SEQ ID NO: 19502 - DNA, 25 bp, probe
gattaagagtcatgtttcttctcct

SEQ ID NO: 19503 - DNA, 25 bp, probe
agattaagagtcatgtttcttctcc

SEQ ID NO: 19504 - DNA, 25 bp, probe
ggagattaagagtcatgtttcttct

SEQ ID NO: 19505 - DNA, 25 bp, probe
tcctatacaagtcagttaaggaagt

SEQ ID NO: 19506 - DNA, 25 bp, probe
aagagtcatgtttcttctccttaat

SEQ ID NO: 19507 - DNA, 25 bp, probe
attaagagtcatgtttcttctcctt

SEQ ID NO: 19508 - DNA, 25 bp, probe
atggagattaagagtcatgtttctt

SEQ ID NO: 19509 - DNA, 25 bp, probe
gtcctatacaagtcagttaaggaag

SEQ ID NO: 19510 - DNA, 25 bp, probe
tgtttcttctccttaattaactggg

SEQ ID NO: 19511 - DNA, 25 bp, probe
gagtcatgtttcttctccttaatta

SEQ ID NO: 19512 - DNA, 25 bp, probe
taagagtcatgtttcttctccttaa

SEQ ID NO: 19513 - DNA, 25 bp, probe
ttaagagtcatgtttcttctcctta

SEQ ID NO: 19514 - DNA, 25 bp, probe
ctgaaaggtcctatacaagtcagtt

SEQ ID NO: 19515 - DNA, 25 bp, probe
catggagattaagagtcatgtttct

SEQ ID NO: 19516 - DNA, 25 bp, probe
tcatggagattaagagtcatgtttc

SEQ ID NO: 19517 - DNA, 25 bp, probe
ttcatggagattaagagtcatgttt

SEQ ID NO: 19518 - DNA, 25 bp, probe
cctgaaaggtcctatacaagtcagt

SEQ ID NO: 19519 - DNA, 25 bp, probe
gtttcttctccttaattaactggga

SEQ ID NO: 19520 - DNA, 25 bp, probe
ccctgaaaggtcctatacaagtcag

SEQ ID NO: 19521 - DNA, 25 bp, probe
aagtcccctgaaaggtcctatacaa

SEQ ID NO: 19522 - DNA, 25 bp, probe
gagattaagagtcatgtttcttctc

SEQ ID NO: 19523 - DNA, 25 bp, probe
tcccctgaaaggtcctatacaagtc

SEQ ID NO: 19524 - DNA, 25 bp, probe
agtcccctgaaaggtcctatacaag

SEQ ID NO: 19525 - DNA, 25 bp, probe
gaagtcccctgaaaggtcctataca

SEQ ID NO: 19526 - DNA, 25 bp, probe
atgtttcttctccttaattaactgg

SEQ ID NO: 19527 - DNA, 25 bp, probe
tttcttctccttaattaactgggat

SEQ ID NO: 19528 - DNA, 25 bp, probe
cccctgaaaggtcctatacaagtca

SEQ ID NO: 19529 - DNA, 25 bp, probe
agtatgatgttgctgttaagatgat

SEQ ID NO: 19530 - DNA, 25 bp, probe
cagtatgatgttgctgttaagatga

SEQ ID NO: 19531 - DNA, 25 bp, probe
gtatgatgttgctgttaagatgatc

SEQ ID NO: 19532 - DNA, 25 bp, probe
tatggagtgtgttaaaggattaccc

SEQ ID NO: 19533 - DNA, 25 bp, probe
ctatggagtgtgttaaaggattacc

SEQ ID NO: 19534 - DNA, 25 bp, probe
ctggttaaattctatggagtgtgtt

SEQ ID NO: 19535 - DNA, 25 bp, probe
gctggttaaattctatggagtgtgt

SEQ ID NO: 19536 - DNA, 25 bp, probe
cagactatatgaaactcagccatcc

SEQ ID NO: 19537 - DNA, 25 bp, probe
ccagactatatgaaactcagccatc

SEQ ID NO: 19538 - DNA, 25 bp, probe
ctatatgaaactcagccatcccaag

SEQ ID NO: 19539 - DNA, 25 bp, probe
tctatggagtgtgttaaaggattac

SEQ ID NO: 19540 - DNA, 25 bp, probe
aaattctatggagtgtgttaaagga

SEQ ID NO: 19541 - DNA, 25 bp, probe
actatatgaaactcagccatcccaa

SEQ ID NO: 19542 - DNA, 25 bp, probe
attctatggagtgtgttaaaggatt

SEQ ID NO: 19543 - DNA, 25 bp, probe
agactatatgaaactcagccatccc

SEQ ID NO: 19544 - DNA, 25 bp, probe
aattctatggagtgtgttaaaggat

SEQ ID NO: 19545 - DNA, 25 bp, probe
tggttaaattctatggagtgtgtta

SEQ ID NO: 19546 - DNA, 25 bp, probe
gcagtatgatgttgctgttaagatg

SEQ ID NO: 19547 - DNA, 25 bp, probe
aagctggttaaattctatggagtgt

SEQ ID NO: 19548 - DNA, 25 bp, probe
caagctggttaaattctatggagtg

SEQ ID NO: 19549 - DNA, 25 bp, probe
gactatatgaaactcagccatccca

SEQ ID NO: 19550 - DNA, 25 bp, probe
cccagactatatgaaactcagccat

SEQ ID NO: 19551 - DNA, 25 bp, probe
agctggttaaattctatggagtgtg

SEQ ID NO: 19552 - DNA, 25 bp, probe
ggcagtatgatgttgctgttaagat

SEQ ID NO: 19553 - DNA, 25 bp, probe
ttctatggagtgtgttaaaggatta

SEQ ID NO: 19554 - DNA, 25 bp, probe
gatgttgctgttaagatgatcaagg

SEQ ID NO: 19555 - DNA, 25 bp, probe
tatatgaaactcagccatcccaagc

SEQ ID NO: 19556 - DNA, 25 bp, probe
atgttgctgttaagatgatcaagga

SEQ ID NO: 19557 - DNA, 25 bp, probe
tgttgctgttaagatgatcaaggag

SEQ ID NO: 19558 - DNA, 25 bp, probe
taaattctatggagtgtgttaaagg

SEQ ID NO: 19559 - DNA, 25 bp, probe
ggttaaattctatggagtgtgttaa

SEQ ID NO: 19560 - DNA, 25 bp, probe
gagtgtgttaaaggattaccccata

SEQ ID NO: 19561 - DNA, 25 bp, probe
catcccaagctggttaaattctatg

SEQ ID NO: 19562 - DNA, 25 bp, probe
gttgctgttaagatgatcaaggagg

SEQ ID NO: 19563 - DNA, 25 bp, probe
agtgtgttaaaggattaccccatat

SEQ ID NO: 19564 - DNA, 25 bp, probe
aatgcttgcttttctgaattacctg

SEQ ID NO: 19565 - DNA, 25 bp, probe
ccaagctggttaaattctatggagt

SEQ ID NO: 19566 - DNA, 25 bp, probe
atcccaagctggttaaattctatgg

SEQ ID NO: 19567 - DNA, 25 bp, probe
ccatcccaagctggttaaattctat

SEQ ID NO: 19568 - DNA, 25 bp, probe
caatgcttgcttttctgaattacct

SEQ ID NO: 19569 - DNA, 25 bp, probe
cccaagctggttaaattctatggag

SEQ ID NO: 19570 - DNA, 25 bp, probe
tcccaagctggttaaattctatgga

SEQ ID NO: 19571 - DNA, 25 bp, probe
gggctccatgtcagaagatgaattt

SEQ ID NO: 19572 - DNA, 25 bp, probe
tgtgttaaaggattaccccatatac

SEQ ID NO: 19573 - DNA, 25 bp, probe
gtccagaaccatgagatgtatgata

SEQ ID NO: 19574 - DNA, 25 bp, probe
tccagaaccatgagatgtatgatat

SEQ ID NO: 19575 - DNA, 25 bp, probe
gcctggtgaactgtatgaaataatg

SEQ ID NO: 19576 - DNA, 25 bp, probe
tgcctggtgaactgtatgaaataat

SEQ ID NO: 19577 - DNA, 25 bp, probe
cctggtgaactgtatgaaataatgt

SEQ ID NO: 19578 - DNA, 25 bp, probe
ctgcctggtgaactgtatgaaataa

SEQ ID NO: 19579 - DNA, 25 bp, probe
ccagaaccatgagatgtatgatatc

SEQ ID NO: 19580 - DNA, 25 bp, probe
actgcctggtgaactgtatgaaata

SEQ ID NO: 19581 - DNA, 25 bp, probe
ggtccagaaccatgagatgtatgat

SEQ ID NO: 19582 - DNA, 25 bp, probe
aagactgcctggtgaactgtatgaa

SEQ ID NO: 19583 - DNA, 25 bp, probe
gactgcctggtgaactgtatgaaat

SEQ ID NO: 19584 - DNA, 25 bp, probe
ctggtgaactgtatgaaataatgta

SEQ ID NO: 19585 - DNA, 25 bp, probe
gaagactgcctggtgaactgtatga

SEQ ID NO: 19586 - DNA, 25 bp, probe
tggtgaactgtatgaaataatgtac

SEQ ID NO: 19587 - DNA, 25 bp, probe
ggtgaactgtatgaaataatgtact

SEQ ID NO: 19588 - DNA, 25 bp, probe
cagaaccatgagatgtatgatatct

SEQ ID NO: 19589 - DNA, 25 bp, probe
agactgcctggtgaactgtatgaaa

SEQ ID NO: 19590 - DNA, 25 bp, probe
aaccatgagatgtatgatatcttct

SEQ ID NO: 19591 - DNA, 25 bp, probe
agaaccatgagatgtatgatatctt

SEQ ID NO: 19592 - DNA, 25 bp, probe
gaaccatgagatgtatgatatcttc

SEQ ID NO: 19593 - DNA, 25 bp, probe
ccatgagatgtatgatatcttctcc

SEQ ID NO: 19594 - DNA, 25 bp, probe
gatgtatgatatcttctccatggcc

SEQ ID NO: 19595 - DNA, 25 bp, probe
gtgaactgtatgaaataatgtactc

SEQ ID NO: 19596 - DNA, 25 bp, probe
tgagatgtatgatatcttctccatg

SEQ ID NO: 19597 - DNA, 25 bp, probe
catgagatgtatgatatcttctcca

SEQ ID NO: 19598 - DNA, 25 bp, probe
accatgagatgtatgatatcttctc

SEQ ID NO: 19599 - DNA, 25 bp, probe
agatgtatgatatcttctccatggc

SEQ ID NO: 19600 - DNA, 25 bp, probe
atgagatgtatgatatcttctccat

SEQ ID NO: 19601 - DNA, 25 bp, probe
ttagaccgccccaccttttcatatt

SEQ ID NO: 19602 - DNA, 25 bp, probe
cttagaccgccccaccttttcatat

SEQ ID NO: 19603 - DNA, 25 bp, probe
tagaccgccccaccttttcatattg

SEQ ID NO: 19604 - DNA, 25 bp, probe
gagatgtatgatatcttctccatgg

SEQ ID NO: 19605 - DNA, 25 bp, probe
tttgactctgttgttttctctcgta

SEQ ID NO: 19606 - DNA, 25 bp, probe
gatttgactctgttgttttctctcg

SEQ ID NO: 19607 - DNA, 25 bp, probe
ttgactctgttgttttctctcgtag

SEQ ID NO: 19608 - DNA, 25 bp, probe
atttgactctgttgttttctctcgt

SEQ ID NO: 19609 - DNA, 25 bp, probe
ctctgttgttttctctcgtagttcc

SEQ ID NO: 19610 - DNA, 25 bp, probe
agatttgactctgttgttttctctc

SEQ ID NO: 19611 - DNA, 25 bp, probe
actctgttgttttctctcgtagttc

SEQ ID NO: 19612 - DNA, 25 bp, probe
gactctgttgttttctctcgtagtt

SEQ ID NO: 19613 - DNA, 25 bp, probe
gttgttttctctcgtagttcccaaa

SEQ ID NO: 19614 - DNA, 25 bp, probe
tttctctcgtagttcccaaactcat

SEQ ID NO: 19615 - DNA, 25 bp, probe
gtagatttgactctgttgttttctc

SEQ ID NO: 19616 - DNA, 25 bp, probe
tgactctgttgttttctctcgtagt

SEQ ID NO: 19617 - DNA, 25 bp, probe
tagatttgactctgttgttttctct

SEQ ID NO: 19618 - DNA, 25 bp, probe
tctgttgttttctctcgtagttccc

SEQ ID NO: 19619 - DNA, 25 bp, probe
tgttgttttctctcgtagttcccaa

SEQ ID NO: 19620 - DNA, 25 bp, probe
ctgttgttttctctcgtagttccca

SEQ ID NO: 19621 - DNA, 25 bp, probe
ttctctcgtagttcccaaactcatg

SEQ ID NO: 19622 - DNA, 25 bp, probe
ttgttttctctcgtagttcccaaac

SEQ ID NO: 19623 - DNA, 25 bp, probe
tagttcccaaactcatggaagtctg

SEQ ID NO: 19624 - DNA, 25 bp, probe
gtagttcccaaactcatggaagtct

SEQ ID NO: 19625 - DNA, 25 bp, probe
gttttctctcgtagttcccaaactc

SEQ ID NO: 19626 - DNA, 25 bp, probe
ttcccaaactcatggaagtctgttt

SEQ ID NO: 19627 - DNA, 25 bp, probe
ttttctctcgtagttcccaaactca

SEQ ID NO: 19628 - DNA, 25 bp, probe
ctctcgtagttcccaaactcatgga

SEQ ID NO: 19629 - DNA, 25 bp, probe
tctctcgtagttcccaaactcatgg

SEQ ID NO: 19630 - DNA, 25 bp, probe
tgttttctctcgtagttcccaaact

SEQ ID NO: 19631 - DNA, 25 bp, probe
tcccaaactcatggaagtctgtttt

SEQ ID NO: 19632 - DNA, 25 bp, probe
gttcccaaactcatggaagtctgtt

SEQ ID NO: 19633 - DNA, 25 bp, probe
ctcgtagttcccaaactcatggaag

SEQ ID NO: 19634 - DNA, 25 bp, probe
cgtagttcccaaactcatggaagtc

SEQ ID NO: 19635 - DNA, 25 bp, probe
tctcgtagttcccaaactcatggaa

SEQ ID NO: 19636 - DNA, 25 bp, probe
tcgtagttcccaaactcatggaagt

SEQ ID NO: 19637 - DNA, 25 bp, probe
agttcccaaactcatggaagtctgt

SEQ ID NO: 19638 - DNA, 25 bp, probe
gaggacttcacaatcaagctgatag

SEQ ID NO: 19639 - DNA, 25 bp, probe
catcaaggatgagaacatcgtgatc

SEQ ID NO: 19640 - DNA, 25 bp, probe
aggacttcacaatcaagctgatagt

SEQ ID NO: 19641 - DNA, 25 bp, probe
acatcaaggatgagaacatcgtgat

SEQ ID NO: 19642 - DNA, 25 bp, probe
gacatcaaggatgagaacatcgtga

SEQ ID NO: 19643 - DNA, 25 bp, probe
atcaaggatgagaacatcgtgatcg

SEQ ID NO: 19644 - DNA, 25 bp, probe
cgaggacttcacaatcaagctgata

SEQ ID NO: 19645 - DNA, 25 bp, probe
tgacatcaaggatgagaacatcgtg

SEQ ID NO: 19646 - DNA, 25 bp, probe
gtgacatcaaggatgagaacatcgt

SEQ ID NO: 19647 - DNA, 25 bp, probe
ccgtgacatcaaggatgagaacatc

SEQ ID NO: 19648 - DNA, 25 bp, probe
cgtgacatcaaggatgagaacatcg

SEQ ID NO: 19649 - DNA, 25 bp, probe
accgtgacatcaaggatgagaacat

SEQ ID NO: 19650 - DNA, 25 bp, probe
caccgtgacatcaaggatgagaaca

SEQ ID NO: 19651 - DNA, 25 bp, probe
ccgaggacttcacaatcaagctgat

SEQ ID NO: 19652 - DNA, 25 bp, probe
tcaaggatgagaacatcgtgatcgc

SEQ ID NO: 19653 - DNA, 25 bp, probe
catcatccaccgtgacatcaaggat

SEQ ID NO: 19654 - DNA, 25 bp, probe
tttgttccagtttattttaaatgca

SEQ ID NO: 19655 - DNA, 25 bp, probe
ttttgttccagtttattttaaatgc

SEQ ID NO: 19656 - DNA, 25 bp, probe
atacctgcgcttgaaggacatcatc

SEQ ID NO: 19657 - DNA, 25 bp, probe
gatacctgcgcttgaaggacatcat

SEQ ID NO: 19658 - DNA, 25 bp, probe
ttgttccagtttattttaaatgcat

SEQ ID NO: 19659 - DNA, 25 bp, probe
tgttccagtttattttaaatgcata

SEQ ID NO: 19660 - DNA, 25 bp, probe
atgcatattttagttgattgctttt

SEQ ID NO: 19661 - DNA, 25 bp, probe
aatgcatattttagttgattgcttt

SEQ ID NO: 19662 - DNA, 25 bp, probe
aaatgcatattttagttgattgctt

SEQ ID NO: 19663 - DNA, 25 bp, probe
taaatgcatattttagttgattgct

SEQ ID NO: 19664 - DNA, 25 bp, probe
ttaaatgcatattttagttgattgc

SEQ ID NO: 19665 - DNA, 25 bp, probe
aagatgattcgcaagcctgatactc

SEQ ID NO: 19666 - DNA, 25 bp, probe
gactacatctactgatgctagacac

SEQ ID NO: 19667 - DNA, 25 bp, probe
actacatctactgatgctagacact

SEQ ID NO: 19668 - DNA, 25 bp, probe
caagatgattcgcaagcctgatact

SEQ ID NO: 19669 - DNA, 25 bp, probe
gacaagatgattcgcaagcctgata

SEQ ID NO: 19670 - DNA, 25 bp, probe
gatgattcgcaagcctgatactctc

SEQ ID NO: 19671 - DNA, 25 bp, probe
acaagatgattcgcaagcctgatac

SEQ ID NO: 19672 - DNA, 25 bp, probe
tagagtgctaccaggacaacttctc

SEQ ID NO: 19673 - DNA, 25 bp, probe
ctagagtgctaccaggacaacttct

SEQ ID NO: 19674 - DNA, 25 bp, probe
tacatctactgatgctagacacttg

SEQ ID NO: 19675 - DNA, 25 bp, probe
agatgattcgcaagcctgatactct

SEQ ID NO: 19676 - DNA, 25 bp, probe
ctacatctactgatgctagacactt

SEQ ID NO: 19677 - DNA, 25 bp, probe
ctggactacatctactgatgctaga

SEQ ID NO: 19678 - DNA, 25 bp, probe
ggactacatctactgatgctagaca

SEQ ID NO: 19679 - DNA, 25 bp, probe
tggactacatctactgatgctagac

SEQ ID NO: 19680 - DNA, 25 bp, probe
actagagtgctaccaggacaacttc

SEQ ID NO: 19681 - DNA, 25 bp, probe
gactagagtgctaccaggacaactt

SEQ ID NO: 19682 - DNA, 25 bp, probe
atgaacgagcaggaggtactaaatg

SEQ ID NO: 19683 - DNA, 25 bp, probe
cctggactacatctactgatgctag

SEQ ID NO: 19684 - DNA, 25 bp, probe
caggaggtactaaatgcaatagagc

SEQ ID NO: 19685 - DNA, 25 bp, probe
gtagctgcatttgacaagatgattc

SEQ ID NO: 19686 - DNA, 25 bp, probe
catgaacgagcaggaggtactaaat

SEQ ID NO: 19687 - DNA, 25 bp, probe
acatctactgatgctagacacttgg

SEQ ID NO: 19688 - DNA, 25 bp, probe
gacatgaacgagcaggaggtactaa

SEQ ID NO: 19689 - DNA, 25 bp, probe
atgattcgcaagcctgatactctcc

SEQ ID NO: 19690 - DNA, 25 bp, probe
ggtagctgcatttgacaagatgatt

SEQ ID NO: 19691 - DNA, 25 bp, probe
tagctgcatttgacaagatgattcg

SEQ ID NO: 19692 - DNA, 25 bp, probe
catttgacaagatgattcgcaagcc

SEQ ID NO: 19693 - DNA, 25 bp, probe
atttgacaagatgattcgcaagcct

SEQ ID NO: 19694 - DNA, 25 bp, probe
acatgaacgagcaggaggtactaaa

SEQ ID NO: 19695 - DNA, 25 bp, probe
catctactgatgctagacacttggc

SEQ ID NO: 19696 - DNA, 25 bp, probe
tgacaagatgattcgcaagcctgat

SEQ ID NO: 19697 - DNA, 25 bp, probe
tggtagctgcatttgacaagatgat

SEQ ID NO: 19698 - DNA, 25 bp, probe
atctactgatgctagacacttggca

SEQ ID NO: 19699 - DNA, 25 bp, probe
cattggactagagtgctaccaggac

SEQ ID NO: 19700 - DNA, 25 bp, probe
tactgatgctagacacttggcagaa

SEQ ID NO: 19701 - DNA, 25 bp, probe
tttggtctttccaccttcagtgatg

SEQ ID NO: 19702 - DNA, 25 bp, probe
gtttggtctttccaccttcagtgat

SEQ ID NO: 19703 - DNA, 25 bp, probe
gcatttgacaagatgattcgcaagc

SEQ ID NO: 19704 - DNA, 25 bp, probe
ctaaatgcaatagagcaagagttcc

SEQ ID NO: 19705 - DNA, 25 bp, probe
aggtactaaatgcaatagagcaaga

SEQ ID NO: 19706 - DNA, 25 bp, probe
aagtttggtctttccaccttcagtg

SEQ ID NO: 19707 - DNA, 25 bp, probe
caagtttggtctttccaccttcagt

SEQ ID NO: 19708 - DNA, 25 bp, probe
ggtactaaatgcaatagagcaagag

SEQ ID NO: 19709 - DNA, 25 bp, probe
aagagtatgattgtggttcaaggat

SEQ ID NO: 19710 - DNA, 25 bp, probe
agagtatgattgtggttcaaggata

SEQ ID NO: 19711 - DNA, 25 bp, probe
gagtatgattgtggttcaaggataa

SEQ ID NO: 19712 - DNA, 25 bp, probe
gaggacaatcagtatgtggtacaac

SEQ ID NO: 19713 - DNA, 25 bp, probe
aggacaatcagtatgtggtacaact

SEQ ID NO: 19714 - DNA, 25 bp, probe
atggaggacaatcagtatgtggtac

SEQ ID NO: 19715 - DNA, 25 bp, probe
ggaggacaatcagtatgtggtacaa

SEQ ID NO: 19716 - DNA, 25 bp, probe
aaagagtatgattgtggttcaagga

SEQ ID NO: 19717 - DNA, 25 bp, probe
taaagagtatgattgtggttcaagg

SEQ ID NO: 19718 - DNA, 25 bp, probe
agtatgattgtggttcaaggataaa

SEQ ID NO: 19719 - DNA, 25 bp, probe
tggaggacaatcagtatgtggtaca

SEQ ID NO: 19720 - DNA, 25 bp, probe
gtatgtggtacaactgaaggctgtg

SEQ ID NO: 19721 - DNA, 25 bp, probe
agtatgtggtacaactgaaggctgt

SEQ ID NO: 19722 - DNA, 25 bp, probe
ataaagagtatgattgtggttcaag

SEQ ID NO: 19723 - DNA, 25 bp, probe
tatgtggtacaactgaaggctgtgt

SEQ ID NO: 19724 - DNA, 25 bp, probe
ggacaatcagtatgtggtacaactg

SEQ ID NO: 19725 - DNA, 25 bp, probe
cttctgccatgccaacaacattgta

SEQ ID NO: 19726 - DNA, 25 bp, probe
ttctgccatgccaacaacattgtac

SEQ ID NO: 19727 - DNA, 25 bp, probe
atgtggtacaactgaaggctgtgtt

SEQ ID NO: 19728 - DNA, 25 bp, probe
ctttgagttcatgctgtcggatctg

SEQ ID NO: 19729 - DNA, 25 bp, probe
gtatgattgtggttcaaggataaaa

SEQ ID NO: 19730 - DNA, 25 bp, probe
cagtatgtggtacaactgaaggctg

SEQ ID NO: 19731 - DNA, 25 bp, probe
aacattgtacatcgggacctgaaac

SEQ ID NO: 19732 - DNA, 25 bp, probe
caacattgtacatcgggacctgaaa

SEQ ID NO: 19733 - DNA, 25 bp, probe
cttaccttctgtgtgcttcacatca

SEQ ID NO: 19734 - DNA, 25 bp, probe
cctttgagttcatgctgtcggatct

SEQ ID NO: 19735 - DNA, 25 bp, probe
ttaccttctgtgtgcttcacatcac

SEQ ID NO: 19736 - DNA, 25 bp, probe
tttgagttcatgctgtcggatctgg

SEQ ID NO: 19737 - DNA, 25 bp, probe
ccttaccttctgtgtgcttcacatc

SEQ ID NO: 19738 - DNA, 25 bp, probe
tgccatgccaacaacattgtacatc

SEQ ID NO: 19739 - DNA, 25 bp, probe
ctgccatgccaacaacattgtacat

SEQ ID NO: 19740 - DNA, 25 bp, probe
cttctgtgtgcttcacatcactgag

SEQ ID NO: 19741 - DNA, 25 bp, probe
taccttctgtgtgcttcacatcact

SEQ ID NO: 19742 - DNA, 25 bp, probe
ccatgccaacaacattgtacatcgg

SEQ ID NO: 19743 - DNA, 25 bp, probe
caacaacattgtacatcgggacctg

SEQ ID NO: 19744 - DNA, 25 bp, probe
acaacattgtacatcgggacctgaa

SEQ ID NO: 19745 - DNA, 25 bp, probe
aacaacattgtacatcgggacctga

SEQ ID NO: 19746 - DNA, 25 bp, probe
attgtacatcgggacctgaaacctg

SEQ ID NO: 19747 - DNA, 25 bp, probe
cattgtacatcgggacctgaaacct

SEQ ID NO: 19748 - DNA, 25 bp, probe
ctttgtgctggcctttgagttcatg

SEQ ID NO: 19749 - DNA, 25 bp, probe
acattgtacatcgggacctgaaacc

SEQ ID NO: 19750 - DNA, 25 bp, probe
catgccaacaacattgtacatcggg

SEQ ID NO: 19751 - DNA, 25 bp, probe
ccttctgtgtgcttcacatcactga

SEQ ID NO: 19752 - DNA, 25 bp, probe
ccaacaacattgtacatcgggacct

SEQ ID NO: 19753 - DNA, 25 bp, probe
atgccaacaacattgtacatcggga

SEQ ID NO: 19754 - DNA, 25 bp, probe
gatcttgaccaatggctaagtgaag

SEQ ID NO: 19755 - DNA, 25 bp, probe
aaagacattatgacaccgccaaatt

SEQ ID NO: 19756 - DNA, 25 bp, probe
gaaagacattatgacaccgccaaat

SEQ ID NO: 19757 - DNA, 25 bp, probe
tttgtgctgaaagacattatgacac

SEQ ID NO: 19758 - DNA, 25 bp, probe
tcttgaccaatggctaagtgaagat

SEQ ID NO: 19759 - DNA, 25 bp, probe
atcttgaccaatggctaagtgaaga

SEQ ID NO: 19760 - DNA, 25 bp, probe
acagctagaacttatcaaacccttt

SEQ ID NO: 19761 - DNA, 25 bp, probe
cacagctagaacttatcaaaccctt

SEQ ID NO: 19762 - DNA, 25 bp, probe
gacattatgacaccgccaaatttaa

SEQ ID NO: 19763 - DNA, 25 bp, probe
agacattatgacaccgccaaattta

SEQ ID NO: 19764 - DNA, 25 bp, probe
acattatgacaccgccaaatttaat

SEQ ID NO: 19765 - DNA, 25 bp, probe
ataacccaccacagctagaacttat

SEQ ID NO: 19766 - DNA, 25 bp, probe
ttgtgctgaaagacattatgacacc

SEQ ID NO: 19767 - DNA, 25 bp, probe
caccacagctagaacttatcaaacc

SEQ ID NO: 19768 - DNA, 25 bp, probe
ccaccacagctagaacttatcaaac

SEQ ID NO: 19769 - DNA, 25 bp, probe
tttgggtaaatacacaagaaatcga

SEQ ID NO: 19770 - DNA, 25 bp, probe
ctttgtgctgaaagacattatgaca

SEQ ID NO: 19771 - DNA, 25 bp, probe
taacccaccacagctagaacttatc

SEQ ID NO: 19772 - DNA, 25 bp, probe
cattatgacaccgccaaatttaatt

SEQ ID NO: 19773 - DNA, 25 bp, probe
agatcttgaccaatggctaagtgaa

SEQ ID NO: 19774 - DNA, 25 bp, probe
attatgacaccgccaaatttaattg

SEQ ID NO: 19775 - DNA, 25 bp, probe
cataacccaccacagctagaactta

SEQ ID NO: 19776 - DNA, 25 bp, probe
ttatgacaccgccaaatttaattgc

SEQ ID NO: 19777 - DNA, 25 bp, probe
aagacattatgacaccgccaaattt

SEQ ID NO: 19778 - DNA, 25 bp, probe
gtcagaggcgctatgtgtattatta

SEQ ID NO: 19779 - DNA, 25 bp, probe
tgaaagacattatgacaccgccaaa

SEQ ID NO: 19780 - DNA, 25 bp, probe
tcagaggcgctatgtgtattattat

SEQ ID NO: 19781 - DNA, 25 bp, probe
ccacagctagaacttatcaaaccct

SEQ ID NO: 19782 - DNA, 25 bp, probe
atatccttttgaagaccataaccca

SEQ ID NO: 19783 - DNA, 25 bp, probe
accacagctagaacttatcaaaccc

SEQ ID NO: 19784 - DNA, 25 bp, probe
cccaccacagctagaacttatcaaa

SEQ ID NO: 19785 - DNA, 25 bp, probe
tatccttttgaagaccataacccac

SEQ ID NO: 19786 - DNA, 25 bp, probe
ctgaaagacattatgacaccgccaa

SEQ ID NO: 19787 - DNA, 25 bp, probe
tatgacaccgccaaatttaattgca

SEQ ID NO: 19788 - DNA, 25 bp, probe
gcacaatatccttttgaagaccata

SEQ ID NO: 19789 - DNA, 25 bp, probe
agtcagaggcgctatgtgtattatt

SEQ ID NO: 19790 - DNA, 25 bp, probe
aatatccttttgaagaccataaccc

SEQ ID NO: 19791 - DNA, 25 bp, probe
cagaggcgctatgtgtattattata

SEQ ID NO: 19792 - DNA, 25 bp, probe
tcacttttgggtaaatacacaagaa

SEQ ID NO: 19793 - DNA, 25 bp, probe
ttcacttttgggtaaatacacaaga

SEQ ID NO: 19794 - DNA, 25 bp, probe
tgtttcacttttgggtaaatacaca

SEQ ID NO: 19795 - DNA, 25 bp, probe
gtttcacttttgggtaaatacacaa

SEQ ID NO: 19796 - DNA, 25 bp, probe
ttttgggtaaatacacaagaaatcg

SEQ ID NO: 19797 - DNA, 25 bp, probe
cagtcagaggcgctatgtgtattat

SEQ ID NO: 19798 - DNA, 25 bp, probe
gcttgctttgaacctaccagttaaa

SEQ ID NO: 19799 - DNA, 25 bp, probe
cttgagtttcattagcatggacctg

SEQ ID NO: 19800 - DNA, 25 bp, probe
gaccttgagtttcattagcatggac

SEQ ID NO: 19801 - DNA, 25 bp, probe
tgcttgctttgaacctaccagttaa

SEQ ID NO: 19802 - DNA, 25 bp, probe
acagaagttgccttgggattcattt

SEQ ID NO: 19803 - DNA, 25 bp, probe
aacagaagttgccttgggattcatt

SEQ ID NO: 19804 - DNA, 25 bp, probe
aaacagaagttgccttgggattcat

SEQ ID NO: 19805 - DNA, 25 bp, probe
acctaccagttaaaatctcctcaaa

SEQ ID NO: 19806 - DNA, 25 bp, probe
gaagttgccttgggattcattttaa

SEQ ID NO: 19807 - DNA, 25 bp, probe
aagttgccttgggattcattttaat

SEQ ID NO: 19808 - DNA, 25 bp, probe
gaacctaccagttaaaatctcctca

SEQ ID NO: 19809 - DNA, 25 bp, probe
tgaacctaccagttaaaatctcctc

SEQ ID NO: 19810 - DNA, 25 bp, probe
cttgctttgaacctaccagttaaaa

SEQ ID NO: 19811 - DNA, 25 bp, probe
tgctttgaacctaccagttaaaatc

SEQ ID NO: 19812 - DNA, 25 bp, probe
agaagttgccttgggattcatttta

SEQ ID NO: 19813 - DNA, 25 bp, probe
ccttgagtttcattagcatggacct

SEQ ID NO: 19814 - DNA, 25 bp, probe
ggaccttgagtttcattagcatgga

SEQ ID NO: 19815 - DNA, 25 bp, probe
aacctaccagttaaaatctcctcaa

SEQ ID NO: 19816 - DNA, 25 bp, probe
ttgaacctaccagttaaaatctcct

SEQ ID NO: 19817 - DNA, 25 bp, probe
gctttgaacctaccagttaaaatct

SEQ ID NO: 19818 - DNA, 25 bp, probe
accagttaaaatctcctcaaaatgt

SEQ ID NO: 19819 - DNA, 25 bp, probe
ttgctttgaacctaccagttaaaat

SEQ ID NO: 19820 - DNA, 25 bp, probe
cctaccagttaaaatctcctcaaaa

SEQ ID NO: 19821 - DNA, 25 bp, probe
tttgaacctaccagttaaaatctcc

SEQ ID NO: 19822 - DNA, 25 bp, probe
agttgccttgggattcattttaatg

SEQ ID NO: 19823 - DNA, 25 bp, probe
gttgccttgggattcattttaatgt

SEQ ID NO: 19824 - DNA, 25 bp, probe
tgccttgggattcattttaatgtaa

SEQ ID NO: 19825 - DNA, 25 bp, probe
ttgccttgggattcattttaatgta

SEQ ID NO: 19826 - DNA, 25 bp, probe
accttgagtttcattagcatggacc

SEQ ID NO: 19827 - DNA, 25 bp, probe
ctgcttgctttgaacctaccagtta

SEQ ID NO: 19828 - DNA, 25 bp, probe
ccttgggattcattttaatgtaagc

SEQ ID NO: 19829 - DNA, 25 bp, probe
gccttgggattcattttaatgtaag

SEQ ID NO: 19830 - DNA, 25 bp, probe
ccagttaaaatctcctcaaaatgtt

SEQ ID NO: 19831 - DNA, 25 bp, probe
ctttgaacctaccagttaaaatctc

SEQ ID NO: 19832 - DNA, 25 bp, probe
cagaagttgccttgggattcatttt

SEQ ID NO: 19833 - DNA, 25 bp, probe
gggaccttgagtttcattagcatgg

SEQ ID NO: 19834 - DNA, 25 bp, probe
taccagttaaaatctcctcaaaatg

SEQ ID NO: 19835 - DNA, 25 bp, probe
ccccaggacctgtaagtaataaaat

SEQ ID NO: 19836 - DNA, 25 bp, probe
ctaccagttaaaatctcctcaaaat

SEQ ID NO: 19837 - DNA, 25 bp, probe
cccaggacctgtaagtaataaaatc

SEQ ID NO: 19838 - DNA, 25 bp, probe
cttgggattcattttaatgtaagct

SEQ ID NO: 19839 - DNA, 25 bp, probe
aatctcctcaaaatgtttggatacc

SEQ ID NO: 19840 - DNA, 25 bp, probe
aaaacagaagttgccttgggattca

SEQ ID NO: 19841 - DNA, 25 bp, probe
atctcctcaaaatgtttggataccg

SEQ ID NO: 19842 - DNA, 25 bp, probe
cttacctcctgatacctgcttactt

SEQ ID NO: 19843 - DNA, 25 bp, probe
ctgtaaggagtagaactgttaaggc

SEQ ID NO: 19844 - DNA, 25 bp, probe
gtaaggagtagaactgttaaggcac

SEQ ID NO: 19845 - DNA, 25 bp, probe
tgtaaggagtagaactgttaaggca

SEQ ID NO: 19846 - DNA, 25 bp, probe
taaggagtagaactgttaaggcaca

SEQ ID NO: 19847 - DNA, 25 bp, probe
cctgtaaggagtagaactgttaagg

SEQ ID NO: 19848 - DNA, 25 bp, probe
gcctgtaaggagtagaactgttaag

SEQ ID NO: 19849 - DNA, 25 bp, probe
tgcctgtaaggagtagaactgttaa

SEQ ID NO: 19850 - DNA, 25 bp, probe
ctgcctgtaaggagtagaactgtta

SEQ ID NO: 19851 - DNA, 25 bp, probe
gtagaactgttaaggcacactgttg

SEQ ID NO: 19852 - DNA, 25 bp, probe
agtagaactgttaaggcacactgtt

SEQ ID NO: 19853 - DNA, 25 bp, probe
ttacctcctgatacctgcttacttt

SEQ ID NO: 19854 - DNA, 25 bp, probe
gggtttaatgtggaattgaagtctg

SEQ ID NO: 19855 - DNA, 25 bp, probe
agggtttaatgtggaattgaagtct

SEQ ID NO: 19856 - DNA, 25 bp, probe
cagggtttaatgtggaattgaagtc

SEQ ID NO: 19857 - DNA, 25 bp, probe
ttactgcctgtaaggagtagaactg

SEQ ID NO: 19858 - DNA, 25 bp, probe
gagtagaactgttaaggcacactgt

SEQ ID NO: 19859 - DNA, 25 bp, probe
aaggagtagaactgttaaggcacac

SEQ ID NO: 19860 - DNA, 25 bp, probe
ggtttaatgtggaattgaagtctgc

SEQ ID NO: 19861 - DNA, 25 bp, probe
accgctagtcttatttcctttctac

SEQ ID NO: 19862 - DNA, 25 bp, probe
ctgatacctgcttactttctggaag

SEQ ID NO: 19863 - DNA, 25 bp, probe
tacctcctgatacctgcttactttc

SEQ ID NO: 19864 - DNA, 25 bp, probe
aaaccgctagtcttatttcctttct

SEQ ID NO: 19865 - DNA, 25 bp, probe
aaccgctagtcttatttcctttcta

SEQ ID NO: 19866 - DNA, 25 bp, probe
gcttacctcctgatacctgcttact

SEQ ID NO: 19867 - DNA, 25 bp, probe
tggaagtagtgggcaagtaagattt

SEQ ID NO: 19868 - DNA, 25 bp, probe
ccgctagtcttatttcctttctact

SEQ ID NO: 19869 - DNA, 25 bp, probe
cctgatacctgcttactttctggaa

SEQ ID NO: 19870 - DNA, 25 bp, probe
gatttggctcttggtttctggaatt

SEQ ID NO: 19871 - DNA, 25 bp, probe
gaagtagtgggcaagtaagatttgg

SEQ ID NO: 19872 - DNA, 25 bp, probe
ggaagtagtgggcaagtaagatttg

SEQ ID NO: 19873 - DNA, 25 bp, probe
ggagtagaactgttaaggcacactg

SEQ ID NO: 19874 - DNA, 25 bp, probe
tactgcctgtaaggagtagaactgt

SEQ ID NO: 19875 - DNA, 25 bp, probe
ctggaagtagtgggcaagtaagatt

SEQ ID NO: 19876 - DNA, 25 bp, probe
gccattgaaaccgctagtcttattt

SEQ ID NO: 19877 - DNA, 25 bp, probe
aggagtagaactgttaaggcacact

SEQ ID NO: 19878 - DNA, 25 bp, probe
aaatatcaggctcccagggtttaat

SEQ ID NO: 19879 - DNA, 25 bp, probe
ctcctgatacctgcttactttctgg

SEQ ID NO: 19880 - DNA, 25 bp, probe
cctcctgatacctgcttactttctg

SEQ ID NO: 19881 - DNA, 25 bp, probe
cgctagtcttatttcctttctactt

SEQ ID NO: 19882 - DNA, 25 bp, probe
tttctggaagtagtgggcaagtaag

SEQ ID NO: 19883 - DNA, 25 bp, probe
ctttctggaagtagtgggcaagtaa

SEQ ID NO: 19884 - DNA, 25 bp, probe
acctcctgatacctgcttactttct

SEQ ID NO: 19885 - DNA, 25 bp, probe
actgcctgtaaggagtagaactgtt

SEQ ID NO: 19886 - DNA, 25 bp, probe
atagaagcagagaatagaacagtgg

SEQ ID NO: 19887 - DNA, 25 bp, probe
tagaagcagagaatagaacagtggt

SEQ ID NO: 19888 - DNA, 25 bp, probe
catagaagcagagaatagaacagtg

SEQ ID NO: 19889 - DNA, 25 bp, probe
tcatagaagcagagaatagaacagt

SEQ ID NO: 19890 - DNA, 25 bp, probe
ggaagagtggatgttatcattgaga

SEQ ID NO: 19891 - DNA, 25 bp, probe
gaagagtggatgttatcattgagaa

SEQ ID NO: 19892 - DNA, 25 bp, probe
accatatacatatacacaaggaagc

SEQ ID NO: 19893 - DNA, 25 bp, probe
agaagcagagaatagaacagtggtt

SEQ ID NO: 19894 - DNA, 25 bp, probe
actcatagaagcagagaatagaaca

SEQ ID NO: 19895 - DNA, 25 bp, probe
tgaagtgtcatcaaggatatagaga

SEQ ID NO: 19896 - DNA, 25 bp, probe
atccagcaatctcacttctgtatat

SEQ ID NO: 19897 - DNA, 25 bp, probe
ctcatagaagcagagaatagaacag

SEQ ID NO: 19898 - DNA, 25 bp, probe
tatatgatccagcaatctcacttct

SEQ ID NO: 19899 - DNA, 25 bp, probe
ctatatgatccagcaatctcacttc

SEQ ID NO: 19900 - DNA, 25 bp, probe
gaagtgtcatcaaggatatagagaa

SEQ ID NO: 19901 - DNA, 25 bp, probe
gatccagcaatctcacttctgtata

SEQ ID NO: 19902 - DNA, 25 bp, probe
aactcatagaagcagagaatagaac

SEQ ID NO: 19903 - DNA, 25 bp, probe
atatgatccagcaatctcacttctg

SEQ ID NO: 19904 - DNA, 25 bp, probe
cctctcatgttaagtgttcttacca

SEQ ID NO: 19905 - DNA, 25 bp, probe
acctctcatgttaagtgttcttacc

SEQ ID NO: 19906 - DNA, 25 bp, probe
tattaccttgattgtggtgatggtt

SEQ ID NO: 19907 - DNA, 25 bp, probe
ttattaccttgattgtggtgatggt

SEQ ID NO: 19908 - DNA, 25 bp, probe
tccagcaatctcacttctgtatata

SEQ ID NO: 19909 - DNA, 25 bp, probe
tgtatagcagagttcgtataatgaa

SEQ ID NO: 19910 - DNA, 25 bp, probe
gaaatgaggaaatagggagttgtct

SEQ ID NO: 19911 - DNA, 25 bp, probe
agaaatgaggaaatagggagttgtc

SEQ ID NO: 19912 - DNA, 25 bp, probe
gagaaatgaggaaatagggagttgt

SEQ ID NO: 19913 - DNA, 25 bp, probe
gaggaagggagaaatgaggaaatag

SEQ ID NO: 19914 - DNA, 25 bp, probe
aatgagcaagtaacagaaagacaaa

SEQ ID NO: 19915 - DNA, 25 bp, probe
aaatgagcaagtaacagaaagacaa

SEQ ID NO: 19916 - DNA, 25 bp, probe
tgatccagcaatctcacttctgtat

SEQ ID NO: 19917 - DNA, 25 bp, probe
atgatccagcaatctcacttctgta

SEQ ID NO: 19918 - DNA, 25 bp, probe
tatgatccagcaatctcacttctgt

SEQ ID NO: 19919 - DNA, 25 bp, probe
ttgatggacctctgaatctctttag

SEQ ID NO: 19920 - DNA, 25 bp, probe
cttcctggtcttatcatggacaatt

SEQ ID NO: 19921 - DNA, 25 bp, probe
ggagaaatgaggaaatagggagttg

SEQ ID NO: 19922 - DNA, 25 bp, probe
atgagcaagtaacagaaagacaaat

SEQ ID NO: 19923 - DNA, 25 bp, probe
tttgatggacctctgaatctcttta

SEQ ID NO: 19924 - DNA, 25 bp, probe
ggaaatagggagttgtctaattggt

SEQ ID NO: 19925 - DNA, 25 bp, probe
aggaaatagggagttgtctaattgg

SEQ ID NO: 19926 - DNA, 25 bp, probe
ctgtatagcagagttcgtataatga

SEQ ID NO: 19927 - DNA, 25 bp, probe
aatgaggaaatagggagttgtctaa

SEQ ID NO: 19928 - DNA, 25 bp, probe
aaatgaggaaatagggagttgtcta

SEQ ID NO: 19929 - DNA, 25 bp, probe
gtttgatggacctctgaatctcttt

SEQ ID NO: 19930 - DNA, 25 bp, probe
gttgaatgttctcttgatagtgctg

SEQ ID NO: 19931 - DNA, 25 bp, probe
ctggttgaatgttctcttgatagtg

SEQ ID NO: 19932 - DNA, 25 bp, probe
cctggttgaatgttctcttgatagt

SEQ ID NO: 19933 - DNA, 25 bp, probe
ttgaatgttctcttgatagtgctgg

SEQ ID NO: 19934 - DNA, 25 bp, probe
ggttgaatgttctcttgatagtgct

SEQ ID NO: 19935 - DNA, 25 bp, probe
tggttgaatgttctcttgatagtgc

SEQ ID NO: 19936 - DNA, 25 bp, probe
gaatgttctcttgatagtgctggac

SEQ ID NO: 19937 - DNA, 25 bp, probe
tgaatgttctcttgatagtgctgga

SEQ ID NO: 19938 - DNA, 25 bp, probe
aatcagtagatacttgaacgagtcc

SEQ ID NO: 19939 - DNA, 25 bp, probe
tgaatcagtagatacttgaacgagt

SEQ ID NO: 19940 - DNA, 25 bp, probe
actgtgcttggacttagaagaagaa

SEQ ID NO: 19941 - DNA, 25 bp, probe
gaatcagtagatacttgaacgagtc

SEQ ID NO: 19942 - DNA, 25 bp, probe
catatagagacagaacctggacctc

SEQ ID NO: 19943 - DNA, 25 bp, probe
aatgttctcttgatagtgctggacc

SEQ ID NO: 19944 - DNA, 25 bp, probe
cctgaatcagtagatacttgaacga

SEQ ID NO: 19945 - DNA, 25 bp, probe
ctgcctgaatcagtagatacttgaa

SEQ ID NO: 19946 - DNA, 25 bp, probe
atatagagacagaacctggacctca

SEQ ID NO: 19947 - DNA, 25 bp, probe
tgcctgaatcagtagatacttgaac

SEQ ID NO: 19948 - DNA, 25 bp, probe
cactgtgcttggacttagaagaaga

SEQ ID NO: 19949 - DNA, 25 bp, probe
ctgaatcagtagatacttgaacgag

SEQ ID NO: 19950 - DNA, 25 bp, probe
gcctgaatcagtagatacttgaacg

SEQ ID NO: 19951 - DNA, 25 bp, probe
cctgccctttgcgttatattgtata

SEQ ID NO: 19952 - DNA, 25 bp, probe
ccctggttgaatgttctcttgatag

SEQ ID NO: 19953 - DNA, 25 bp, probe
gtacatacacatatgcagacacatg

SEQ ID NO: 19954 - DNA, 25 bp, probe
ctgtgcttggacttagaagaagaaa

SEQ ID NO: 19955 - DNA, 25 bp, probe
cctgcctgaatcagtagatacttga

SEQ ID NO: 19956 - DNA, 25 bp, probe
tatagagacagaacctggacctcac

SEQ ID NO: 19957 - DNA, 25 bp, probe
acttgtaggtgtttaagaattggtt

SEQ ID NO: 19958 - DNA, 25 bp, probe
aacttgtaggtgtttaagaattggt

SEQ ID NO: 19959 - DNA, 25 bp, probe
tttgtcaatcacccaagcactttat

SEQ ID NO: 19960 - DNA, 25 bp, probe
gatttcctgccctttgcgttatatt

SEQ ID NO: 19961 - DNA, 25 bp, probe
cttgatggctttattctcaccttgt

SEQ ID NO: 19962 - DNA, 25 bp, probe
ggaaataaacctttggaattgttga

SEQ ID NO: 19963 - DNA, 25 bp, probe
atttcctgccctttgcgttatattg

SEQ ID NO: 19964 - DNA, 25 bp, probe
atcagtagatacttgaacgagtccc

SEQ ID NO: 19965 - DNA, 25 bp, probe
ctgccctttgcgttatattgtataa

SEQ ID NO: 19966 - DNA, 25 bp, probe
ctttgtcaatcacccaagcacttta

SEQ ID NO: 19967 - DNA, 25 bp, probe
tcctgccctttgcgttatattgtat

SEQ ID NO: 19968 - DNA, 25 bp, probe
atacttgaaatattgccactgtgct

SEQ ID NO: 19969 - DNA, 25 bp, probe
ttgtcaatcacccaagcactttatg

SEQ ID NO: 19970 - DNA, 25 bp, probe
cttgtaggtgtttaagaattggttt

SEQ ID NO: 19971 - DNA, 25 bp, probe
ccttgatggctttattctcaccttg

SEQ ID NO: 19972 - DNA, 25 bp, probe
aatacttgaaatattgccactgtgc

SEQ ID NO: 19973 - DNA, 25 bp, probe
gcatatagagacagaacctggacct

SEQ ID NO: 19974 - DNA, 25 bp, probe
gagaataatgcgtgagtgttggtat

SEQ ID NO: 19975 - DNA, 25 bp, probe
agaataatgcgtgagtgttggtatg

SEQ ID NO: 19976 - DNA, 25 bp, probe
tgcttgatgatacaatgaatgtgaa

SEQ ID NO: 19977 - DNA, 25 bp, probe
atgcttgatgatacaatgaatgtga

SEQ ID NO: 19978 - DNA, 25 bp, probe
ttattatgacatggtgccttcagat

SEQ ID NO: 19979 - DNA, 25 bp, probe
tattatgacatggtgccttcagatc

SEQ ID NO: 19980 - DNA, 25 bp, probe
cttattatgacatggtgccttcaga

SEQ ID NO: 19981 - DNA, 25 bp, probe
aatgcttgatgatacaatgaatgtg

SEQ ID NO: 19982 - DNA, 25 bp, probe
actatcgacatacctcagaatccta

SEQ ID NO: 19983 - DNA, 25 bp, probe
aacactatcgacatacctcagaatc

SEQ ID NO: 19984 - DNA, 25 bp, probe
gaacactatcgacatacctcagaat

SEQ ID NO: 19985 - DNA, 25 bp, probe
gcttgatgatacaatgaatgtgaat

SEQ ID NO: 19986 - DNA, 25 bp, probe
atactgaacactatcgacatacctc

SEQ ID NO: 19987 - DNA, 25 bp, probe
tgacatctattctgttggtctggtt

SEQ ID NO: 19988 - DNA, 25 bp, probe
aattgccttattatgacatggtgcc

SEQ ID NO: 19989 - DNA, 25 bp, probe
aatactgaacactatcgacatacct

SEQ ID NO: 19990 - DNA, 25 bp, probe
caatactgaacactatcgacatacc

SEQ ID NO: 19991 - DNA, 25 bp, probe
ctatcgacatacctcagaatcctaa

SEQ ID NO: 19992 - DNA, 25 bp, probe
ccttattatgacatggtgccttcag

SEQ ID NO: 19993 - DNA, 25 bp, probe
cactatcgacatacctcagaatcct

SEQ ID NO: 19994 - DNA, 25 bp, probe
gaataatgcgtgagtgttggtatgc

SEQ ID NO: 19995 - DNA, 25 bp, probe
ggagaataatgcgtgagtgttggta

SEQ ID NO: 19996 - DNA, 25 bp, probe
tctattctgttggtctggtttactg

SEQ ID NO: 19997 - DNA, 25 bp, probe
gacatacctcagaatcctaaagtgg

SEQ ID NO: 19998 - DNA, 25 bp, probe
cgatagaggaaatgagaaaggttgt

SEQ ID NO: 19999 - DNA, 25 bp, probe
atctattctgttggtctggtttact

SEQ ID NO: 20000 - DNA, 25 bp, probe
catctattctgttggtctggtttac

SEQ ID NO: 20001 - DNA, 25 bp, probe
ctgacatctattctgttggtctggt

SEQ ID NO: 20002 - DNA, 25 bp, probe
acactatcgacatacctcagaatcc

SEQ ID NO: 20003 - DNA, 25 bp, probe
cgacatacctcagaatcctaaagtg

SEQ ID NO: 20004 - DNA, 25 bp, probe
agaggaaatgagaaaggttgtttgt

SEQ ID NO: 20005 - DNA, 25 bp, probe
tactgaacactatcgacatacctca

SEQ ID NO: 20006 - DNA, 25 bp, probe
gaggaaatgagaaaggttgtttgtg

SEQ ID NO: 20007 - DNA, 25 bp, probe
tagaggaaatgagaaaggttgtttg

SEQ ID NO: 20008 - DNA, 25 bp, probe
ggaaatgagaaaggttgtttgtgac

SEQ ID NO: 20009 - DNA, 25 bp, probe
aggaaatgagaaaggttgtttgtga

SEQ ID NO: 20010 - DNA, 25 bp, probe
tatatggctcctgaaatgcttgatg

SEQ ID NO: 20011 - DNA, 25 bp, probe
gtatatggctcctgaaatgcttgat

SEQ ID NO: 20012 - DNA, 25 bp, probe
ctattctgttggtctggtttactgg

SEQ ID NO: 20013 - DNA, 25 bp, probe
tgaacactatcgacatacctcagaa

SEQ ID NO: 20014 - DNA, 25 bp, probe
gatagaggaaatgagaaaggttgtt

SEQ ID NO: 20015 - DNA, 25 bp, probe
gttggtctggtttactgggaaatag

SEQ ID NO: 20016 - DNA, 25 bp, probe
attgccttattatgacatggtgcct

SEQ ID NO: 20017 - DNA, 25 bp, probe
cctgaaatgcttgatgatacaatga

SEQ ID NO: 20018 - DNA, 25 bp, probe
agtttgctcatctacaggctaaata

SEQ ID NO: 20019 - DNA, 25 bp, probe
attgtcacctaaatggcatagttca

SEQ ID NO: 20020 - DNA, 25 bp, probe
gagtccataaatctgaatcaaagca

SEQ ID NO: 20021 - DNA, 25 bp, probe
tgctcatctacaggctaaatataca

SEQ ID NO: 20022 - DNA, 25 bp, probe
gtttgctcatctacaggctaaatat

SEQ ID NO: 20023 - DNA, 25 bp, probe
ggagtccataaatctgaatcaaagc

SEQ ID NO: 20024 - DNA, 25 bp, probe
gaatacaacctgctaagtttccaag

SEQ ID NO: 20025 - DNA, 25 bp, probe
cagtttgctcatctacaggctaaat

SEQ ID NO: 20026 - DNA, 25 bp, probe
agaatacaacctgctaagtttccaa

SEQ ID NO: 20027 - DNA, 25 bp, probe
aagaatacaacctgctaagtttcca

SEQ ID NO: 20028 - DNA, 25 bp, probe
aaagaatacaacctgctaagtttcc

SEQ ID NO: 20029 - DNA, 25 bp, probe
ttgtcacctaaatggcatagttcac

SEQ ID NO: 20030 - DNA, 25 bp, probe
ttgctcatctacaggctaaatatac

SEQ ID NO: 20031 - DNA, 25 bp, probe
gtcacctaaatggcatagttcacag

SEQ ID NO: 20032 - DNA, 25 bp, probe
tccaagcagtaaactacctaccaaa

SEQ ID NO: 20033 - DNA, 25 bp, probe
ttccaagcagtaaactacctaccaa

SEQ ID NO: 20034 - DNA, 25 bp, probe
tttccaagcagtaaactacctacca

SEQ ID NO: 20035 - DNA, 25 bp, probe
cttccattctgcccttgtatctttg

SEQ ID NO: 20036 - DNA, 25 bp, probe
gctcatctacaggctaaatatacat

SEQ ID NO: 20037 - DNA, 25 bp, probe
ttgcctttcccaacttgtttctaaa

SEQ ID NO: 20038 - DNA, 25 bp, probe
gtccataaatctgaatcaaagcagt

SEQ ID NO: 20039 - DNA, 25 bp, probe
agtccataaatctgaatcaaagcag

SEQ ID NO: 20040 - DNA, 25 bp, probe
cttgcctttcccaacttgtttctaa

SEQ ID NO: 20041 - DNA, 25 bp, probe
tccataaatctgaatcaaagcagtt

SEQ ID NO: 20042 - DNA, 25 bp, probe
agaatactaaagaatacaacctgct

SEQ ID NO: 20043 - DNA, 25 bp, probe
actaaagaatacaacctgctaagtt

SEQ ID NO: 20044 - DNA, 25 bp, probe
tttgctcatctacaggctaaatata

SEQ ID NO: 20045 - DNA, 25 bp, probe
ccataaatctgaatcaaagcagttt

SEQ ID NO: 20046 - DNA, 25 bp, probe
ccttccattctgcccttgtatcttt

SEQ ID NO: 20047 - DNA, 25 bp, probe
gggaagaatactaaagaatacaacc

SEQ ID NO: 20048 - DNA, 25 bp, probe
ccagtttgctcatctacaggctaaa

SEQ ID NO: 20049 - DNA, 25 bp, probe
ctcttccagtttgctcatctacagg

SEQ ID NO: 20050 - DNA, 25 bp, probe
cctcttccagtttgctcatctacag

SEQ ID NO: 20051 - DNA, 25 bp, probe
ccttgtatctttgcagtcattgtat

SEQ ID NO: 20052 - DNA, 25 bp, probe
tgtcacctaaatggcatagttcaca

SEQ ID NO: 20053 - DNA, 25 bp, probe
aagaatactaaagaatacaacctgc

SEQ ID NO: 20054 - DNA, 25 bp, probe
taaagaatacaacctgctaagtttc

SEQ ID NO: 20055 - DNA, 25 bp, probe
ctaaagaatacaacctgctaagttt

SEQ ID NO: 20056 - DNA, 25 bp, probe
cccttgtatctttgcagtcattgta

SEQ ID NO: 20057 - DNA, 25 bp, probe
agaaagtgttaatcattgtcaccta

SEQ ID NO: 20058 - DNA, 25 bp, probe
tagaaagtgttaatcattgtcacct

SEQ ID NO: 20059 - DNA, 25 bp, probe
cattgtcacctaaatggcatagttc

SEQ ID NO: 20060 - DNA, 25 bp, probe
gttaatcattgtcacctaaatggca

SEQ ID NO: 20061 - DNA, 25 bp, probe
tgttaatcattgtcacctaaatggc

SEQ ID NO: 20062 - DNA, 25 bp, probe
attcaaatgcttcaggtaaatgttg

SEQ ID NO: 20063 - DNA, 25 bp, probe
aattcaaatgcttcaggtaaatgtt

SEQ ID NO: 20064 - DNA, 25 bp, probe
catcatgaacacggctctagataag

SEQ ID NO: 20065 - DNA, 25 bp, probe
gagaataacatgcaagctgaggtga

SEQ ID NO: 20066 - DNA, 25 bp, probe
agaataacatgcaagctgaggtgac

SEQ ID NO: 20067 - DNA, 25 bp, probe
gacaggtaaactaaaacagcacttt

SEQ ID NO: 20068 - DNA, 25 bp, probe
tcatcatgaacacggctctagataa

SEQ ID NO: 20069 - DNA, 25 bp, probe
tgaggtgacaggtaaactaaaacag

SEQ ID NO: 20070 - DNA, 25 bp, probe
tgacaggtaaactaaaacagcactt

SEQ ID NO: 20071 - DNA, 25 bp, probe
atcatgaacacggctctagataagg

SEQ ID NO: 20072 - DNA, 25 bp, probe
gaataacatgcaagctgaggtgaca

SEQ ID NO: 20073 - DNA, 25 bp, probe
catgaacacggctctagataaggag

SEQ ID NO: 20074 - DNA, 25 bp, probe
aagctgaggtgacaggtaaactaaa

SEQ ID NO: 20075 - DNA, 25 bp, probe
tcaaatgcttcaggtaaatgttgaa

SEQ ID NO: 20076 - DNA, 25 bp, probe
ttcaaatgcttcaggtaaatgttga

SEQ ID NO: 20077 - DNA, 25 bp, probe
gtcatcatgaacacggctctagata

SEQ ID NO: 20078 - DNA, 25 bp, probe
acaggtaaactaaaacagcacttta

SEQ ID NO: 20079 - DNA, 25 bp, probe
gaggtgacaggtaaactaaaacagc

SEQ ID NO: 20080 - DNA, 25 bp, probe
gaattcaaatgcttcaggtaaatgt

SEQ ID NO: 20081 - DNA, 25 bp, probe
caggtaaatgttgaagctcggtgta

SEQ ID NO: 20082 - DNA, 25 bp, probe
caagctgaggtgacaggtaaactaa

SEQ ID NO: 20083 - DNA, 25 bp, probe
ggagaataacatgcaagctgaggtg

SEQ ID NO: 20084 - DNA, 25 bp, probe
aggagaataacatgcaagctgaggt

SEQ ID NO: 20085 - DNA, 25 bp, probe
aggtaaatgttgaagctcggtgtac

SEQ ID NO: 20086 - DNA, 25 bp, probe
ctagataaggaggggcagattttct

SEQ ID NO: 20087 - DNA, 25 bp, probe
tcatgaacacggctctagataagga

SEQ ID NO: 20088 - DNA, 25 bp, probe
aataacatgcaagctgaggtgacag

SEQ ID NO: 20089 - DNA, 25 bp, probe
ctgaggtgacaggtaaactaaaaca

SEQ ID NO: 20090 - DNA, 25 bp, probe
caggagaataacatgcaagctgagg

SEQ ID NO: 20091 - DNA, 25 bp, probe
ccaggagaataacatgcaagctgag

SEQ ID NO: 20092 - DNA, 25 bp, probe
aggtgacaggtaaactaaaacagca

SEQ ID NO: 20093 - DNA, 25 bp, probe
caggtaaactaaaacagcactttaa

SEQ ID NO: 20094 - DNA, 25 bp, probe
atgaacacggctctagataaggagg

SEQ ID NO: 20095 - DNA, 25 bp, probe
gtgacaggtaaactaaaacagcact

SEQ ID NO: 20096 - DNA, 25 bp, probe
gctgaggtgacaggtaaactaaaac

SEQ ID NO: 20097 - DNA, 25 bp, probe
atgatgcctcccaggagaataacat

SEQ ID NO: 20098 - DNA, 25 bp, probe
ggtgacaggtaaactaaaacagcac

SEQ ID NO: 20099 - DNA, 25 bp, probe
aggtaaactaaaacagcactttaat

SEQ ID NO: 20100 - DNA, 25 bp, probe
agatgatgcctcccaggagaataac

SEQ ID NO: 20101 - DNA, 25 bp, probe
cagatgatgcctcccaggagaataa

SEQ ID NO: 20102 - DNA, 25 bp, probe
agctgaggtgacaggtaaactaaaa

SEQ ID NO: 20103 - DNA, 25 bp, probe
gatgatgcctcccaggagaataaca

SEQ ID NO: 20104 - DNA, 25 bp, probe
actaaaacagcactttaataatgcg

SEQ ID NO: 20105 - DNA, 25 bp, probe
tctagataaggaggggcagattttc

SEQ ID NO: 20106 - DNA, 25 bp, probe
ccttaccaaagtcctacaggaagag

SEQ ID NO: 20107 - DNA, 25 bp, probe
ttgaggtccttaccaaagtcctaca

SEQ ID NO: 20108 - DNA, 25 bp, probe
tttgaggtccttaccaaagtcctac

SEQ ID NO: 20109 - DNA, 25 bp, probe
cttaccaaagtcctacaggaagagc

SEQ ID NO: 20110 - DNA, 25 bp, probe
tgaggtccttaccaaagtcctacag

SEQ ID NO: 20111 - DNA, 25 bp, probe
gaggtccttaccaaagtcctacagg

SEQ ID NO: 20112 - DNA, 25 bp, probe
ttaccaaagtcctacaggaagagcc

SEQ ID NO: 20113 - DNA, 25 bp, probe
gtccttaccaaagtcctacaggaag

SEQ ID NO: 20114 - DNA, 25 bp, probe
tccttaccaaagtcctacaggaaga

SEQ ID NO: 20115 - DNA, 25 bp, probe
ggtccttaccaaagtcctacaggaa

SEQ ID NO: 20116 - DNA, 25 bp, probe
aggtccttaccaaagtcctacagga

SEQ ID NO: 20117 - DNA, 25 bp, probe
gacggactttgaggtccttaccaaa

SEQ ID NO: 20118 - DNA, 25 bp, probe
caagacggactttgaggtccttacc

SEQ ID NO: 20119 - DNA, 25 bp, probe
agacggactttgaggtccttaccaa

SEQ ID NO: 20120 - DNA, 25 bp, probe
aagacggactttgaggtccttacca

SEQ ID NO: 20121 - DNA, 25 bp, probe
cccacaaataaaccagagaaagatg

SEQ ID NO: 20122 - DNA, 25 bp, probe
ccacaaataaaccagagaaagatgc

SEQ ID NO: 20123 - DNA, 25 bp, probe
ggatagaacgcaaacaacttgatta

SEQ ID NO: 20124 - DNA, 25 bp, probe
acgcaaacaacttgattatttagga

SEQ ID NO: 20125 - DNA, 25 bp, probe
aacgcaaacaacttgattatttagg

SEQ ID NO: 20126 - DNA, 25 bp, probe
cgcaaacaacttgattatttaggaa

SEQ ID NO: 20127 - DNA, 25 bp, probe
tggatagaacgcaaacaacttgatt

SEQ ID NO: 20128 - DNA, 25 bp, probe
gatagaacgcaaacaacttgattat

SEQ ID NO: 20129 - DNA, 25 bp, probe
agaacgcaaacaacttgattattta

SEQ ID NO: 20130 - DNA, 25 bp, probe
tagaacgcaaacaacttgattattt

SEQ ID NO: 20131 - DNA, 25 bp, probe
gaacgcaaacaacttgattatttag

SEQ ID NO: 20132 - DNA, 25 bp, probe
gtggatagaacgcaaacaacttgat

SEQ ID NO: 20133 - DNA, 25 bp, probe
atagaacgcaaacaacttgattatt

SEQ ID NO: 20134 - DNA, 25 bp, probe
cacaaataaaccagagaaagatgca

SEQ ID NO: 20135 - DNA, 25 bp, probe
ataaaccagagaaagatgcaagaca

SEQ ID NO: 20136 - DNA, 25 bp, probe
aataaaccagagaaagatgcaagac

SEQ ID NO: 20137 - DNA, 25 bp, probe
acaaataaaccagagaaagatgcaa

SEQ ID NO: 20138 - DNA, 25 bp, probe
taaaccagagaaagatgcaagacat

SEQ ID NO: 20139 - DNA, 25 bp, probe
aaataaaccagagaaagatgcaaga

SEQ ID NO: 20140 - DNA, 25 bp, probe
caaataaaccagagaaagatgcaag

SEQ ID NO: 20141 - DNA, 25 bp, probe
agtggatagaacgcaaacaacttga

SEQ ID NO: 20142 - DNA, 25 bp, probe
aaaccagagaaagatgcaagacatg

SEQ ID NO: 20143 - DNA, 25 bp, probe
gtgatgtaaaagcagcaaatctact

SEQ ID NO: 20144 - DNA, 25 bp, probe
ggtgatgtaaaagcagcaaatctac

SEQ ID NO: 20145 - DNA, 25 bp, probe
ccccacaaataaaccagagaaagat

SEQ ID NO: 20146 - DNA, 25 bp, probe
tggtgatgtaaaagcagcaaatcta

SEQ ID NO: 20147 - DNA, 25 bp, probe
tgatgtaaaagcagcaaatctactt

SEQ ID NO: 20148 - DNA, 25 bp, probe
aaaagtggaatatcaagaaaatggc

SEQ ID NO: 20149 - DNA, 25 bp, probe
ttccccacaaataaaccagagaaag

SEQ ID NO: 20150 - DNA, 25 bp, probe
ctttccccacaaataaaccagagaa

SEQ ID NO: 20151 - DNA, 25 bp, probe
gcaaacaacttgattatttaggaat

SEQ ID NO: 20152 - DNA, 25 bp, probe
atggtgatgtaaaagcagcaaatct

SEQ ID NO: 20153 - DNA, 25 bp, probe
tccccacaaataaaccagagaaaga

SEQ ID NO: 20154 - DNA, 25 bp, probe
aaatccagaccaggtttatcttgca

SEQ ID NO: 20155 - DNA, 25 bp, probe
ctctgttttatggatctggtctgac

SEQ ID NO: 20156 - DNA, 25 bp, probe
tctgttttatggatctggtctgact

SEQ ID NO: 20157 - DNA, 25 bp, probe
gaccaggtttatcttgcagattatg

SEQ ID NO: 20158 - DNA, 25 bp, probe
agaccaggtttatcttgcagattat

SEQ ID NO: 20159 - DNA, 25 bp, probe
cagaccaggtttatcttgcagatta

SEQ ID NO: 20160 - DNA, 25 bp, probe
aaagtggatagaacgcaaacaactt

SEQ ID NO: 20161 - DNA, 25 bp, probe
ggagtaggtgaaatagcccaatttt

SEQ ID NO: 20162 - DNA, 25 bp, probe
aaaatccagaccaggtttatcttgc

SEQ ID NO: 20163 - DNA, 25 bp, probe
aaaagtggatagaacgcaaacaact

SEQ ID NO: 20164 - DNA, 25 bp, probe
aatccagaccaggtttatcttgcag

SEQ ID NO: 20165 - DNA, 25 bp, probe
aacacacagagatgattactacact

SEQ ID NO: 20166 - DNA, 25 bp, probe
cacacagagatgattactacactga

SEQ ID NO: 20167 - DNA, 25 bp, probe
acacacagagatgattactacactg

SEQ ID NO: 20168 - DNA, 25 bp, probe
acacagagatgattactacactgaa

SEQ ID NO: 20169 - DNA, 25 bp, probe
atgttcttggttggtgaaggagatt

SEQ ID NO: 20170 - DNA, 25 bp, probe
aagatggtaatcagccacaacataa

SEQ ID NO: 20171 - DNA, 25 bp, probe
aacatcaatggattctcgacttcaa

SEQ ID NO: 20172 - DNA, 25 bp, probe
agatggtaatcagccacaacataac

SEQ ID NO: 20173 - DNA, 25 bp, probe
caagatggtaatcagccacaacata

SEQ ID NO: 20174 - DNA, 25 bp, probe
ggaaagaagccagaagttaagaaag

SEQ ID NO: 20175 - DNA, 25 bp, probe
gaagttaagaaagtggagaagaagc

SEQ ID NO: 20176 - DNA, 25 bp, probe
aaagaagccagaagttaagaaagtg

SEQ ID NO: 20177 - DNA, 25 bp, probe
aggaaagaagccagaagttaagaaa

SEQ ID NO: 20178 - DNA, 25 bp, probe
aaggaaagaagccagaagttaagaa

SEQ ID NO: 20179 - DNA, 25 bp, probe
gtgctgaataaatctcttgctgaac

SEQ ID NO: 20180 - DNA, 25 bp, probe
agtgctgaataaatctcttgctgaa

SEQ ID NO: 20181 - DNA, 25 bp, probe
gaaagaagccagaagttaagaaagt

SEQ ID NO: 20182 - DNA, 25 bp, probe
gaaggaaagaagccagaagttaaga

SEQ ID NO: 20183 - DNA, 25 bp, probe
tgctgaataaatctcttgctgaaca

SEQ ID NO: 20184 - DNA, 25 bp, probe
ggcgattcaaagttagtcaggtaat

SEQ ID NO: 20185 - DNA, 25 bp, probe
aaatacggcgattcaaagttagtca

SEQ ID NO: 20186 - DNA, 25 bp, probe
aagtgctgaataaatctcttgctga

SEQ ID NO: 20187 - DNA, 25 bp, probe
tgataatcttgatgtgaacagatgc

SEQ ID NO: 20188 - DNA, 25 bp, probe
aaacacacagagatgattactacac

SEQ ID NO: 20189 - DNA, 25 bp, probe
gctgaataaatctcttgctgaacaa

SEQ ID NO: 20190 - DNA, 25 bp, probe
tgttcttggttggtgaaggagattc

SEQ ID NO: 20191 - DNA, 25 bp, probe
aagttaagaaagtggagaagaagcg

SEQ ID NO: 20192 - DNA, 25 bp, probe
aatacggcgattcaaagttagtcag

SEQ ID NO: 20193 - DNA, 25 bp, probe
gaaacacacagagatgattactaca

SEQ ID NO: 20194 - DNA, 25 bp, probe
cagaagttaagaaagtggagaagaa

SEQ ID NO: 20195 - DNA, 25 bp, probe
aagaagcgagaaacatcaatggatt

SEQ ID NO: 20196 - DNA, 25 bp, probe
tcagaaacacacagagatgattact

SEQ ID NO: 20197 - DNA, 25 bp, probe
agaaacacacagagatgattactac

SEQ ID NO: 20198 - DNA, 25 bp, probe
cagaaacacacagagatgattacta

SEQ ID NO: 20199 - DNA, 25 bp, probe
tagagaaggaacaaacagggtcaaa

SEQ ID NO: 20200 - DNA, 25 bp, probe
aacttgcttcacttcaggtcacaat

SEQ ID NO: 20201 - DNA, 25 bp, probe
taagaaagtggagaagaagcgagaa

SEQ ID NO: 20202 - DNA, 25 bp, probe
gttaagaaagtggagaagaagcgag

SEQ ID NO: 20203 - DNA, 25 bp, probe
agaagttaagaaagtggagaagaag

SEQ ID NO: 20204 - DNA, 25 bp, probe
gaagaagcgagaaacatcaatggat

SEQ ID NO: 20205 - DNA, 25 bp, probe
gtgaagagagagagactgaaatatc

SEQ ID NO: 20206 - DNA, 25 bp, probe
ggatctgatgctcaagatggtaatc

SEQ ID NO: 20207 - DNA, 25 bp, probe
ctcagaaacacacagagatgattac

SEQ ID NO: 20208 - DNA, 25 bp, probe
ttaagaaagtggagaagaagcgaga

SEQ ID NO: 20209 - DNA, 25 bp, probe
aaaggaggaagaagaagaggaagtg

SEQ ID NO: 20210 - DNA, 25 bp, probe
aaggaggaagaagaagaggaagtgg

SEQ ID NO: 20211 - DNA, 25 bp, probe
ggaagaagaagaggaagtggaggag

SEQ ID NO: 20212 - DNA, 25 bp, probe
gaggaagaagaagaggaagtggagg

SEQ ID NO: 20213 - DNA, 25 bp, probe
ggaggaagaagaagaggaagtggag

SEQ ID NO: 20214 - DNA, 25 bp, probe
aggaagaagaagaggaagtggagga

SEQ ID NO: 20215 - DNA, 25 bp, probe
aggaggaagaagaagaggaagtgga

SEQ ID NO: 20216 - DNA, 25 bp, probe
gaagaagaagaggaagtggaggagc

SEQ ID NO: 20217 - DNA, 25 bp, probe
gaaaaggaggaagaagaagaggaag

SEQ ID NO: 20218 - DNA, 25 bp, probe
ctcacaccctatcctacacgactag

SEQ ID NO: 20219 - DNA, 25 bp, probe
aaaaggaggaagaagaagaggaagt

SEQ ID NO: 20220 - DNA, 25 bp, probe
ggaaaaggaggaagaagaagaggaa

SEQ ID NO: 20221 - DNA, 25 bp, probe
caaaacaaaagaccagagaagcact

SEQ ID NO: 20222 - DNA, 25 bp, probe
aaaacaaaagaccagagaagcactc

SEQ ID NO: 20223 - DNA, 25 bp, probe
cctccaaaacaaaagaccagagaag

SEQ ID NO: 20224 - DNA, 25 bp, probe
ctgttgtgcctctgtctctgagatc

SEQ ID NO: 20225 - DNA, 25 bp, probe
cctcacaccctatcctacacgacta

SEQ ID NO: 20226 - DNA, 25 bp, probe
gaaggaaaacgaggaggaagaagag

SEQ ID NO: 20227 - DNA, 25 bp, probe
gagaaggaaaacgaggaggaagaag

SEQ ID NO: 20228 - DNA, 25 bp, probe
ctacacgactaggaacttgcacagt

SEQ ID NO: 20229 - DNA, 25 bp, probe
ccaaaacaaaagaccagagaagcac

SEQ ID NO: 20230 - DNA, 25 bp, probe
ctctgtctctgagatctttggactc

SEQ ID NO: 20231 - DNA, 25 bp, probe
tccaaaacaaaagaccagagaagca

SEQ ID NO: 20232 - DNA, 25 bp, probe
ctccaaaacaaaagaccagagaagc

SEQ ID NO: 20233 - DNA, 25 bp, probe
ctgtctctgagatctttggactctg

SEQ ID NO: 20234 - DNA, 25 bp, probe
tctgtctctgagatctttggactct

SEQ ID NO: 20235 - DNA, 25 bp, probe
agaaggaaaacgaggaggaagaaga

SEQ ID NO: 20236 - DNA, 25 bp, probe
ccctccaaaacaaaagaccagagaa

SEQ ID NO: 20237 - DNA, 25 bp, probe
gttgtgcctctgtctctgagatctt

SEQ ID NO: 20238 - DNA, 25 bp, probe
aaaaggaggaggagaaggaaaacga

SEQ ID NO: 20239 - DNA, 25 bp, probe
gatctttggactctgcccaggatag

SEQ ID NO: 20240 - DNA, 25 bp, probe
cctctgtctctgagatctttggact

SEQ ID NO: 20241 - DNA, 25 bp, probe
aaggaaaacgaggaggaagaagagg

SEQ ID NO: 20242 - DNA, 25 bp, probe
ggagaaggaaaacgaggaggaagaa

SEQ ID NO: 20243 - DNA, 25 bp, probe
aaaggaggaggagaaggaaaacgag

SEQ ID NO: 20244 - DNA, 25 bp, probe
ttgtgcctctgtctctgagatcttt

SEQ ID NO: 20245 - DNA, 25 bp, probe
gagtgtgggagctaatgggaatcag

SEQ ID NO: 20246 - DNA, 25 bp, probe
cagagtgtgggagctaatgggaatc

SEQ ID NO: 20247 - DNA, 25 bp, probe
atagcctcacaccctatcctacacg

SEQ ID NO: 20248 - DNA, 25 bp, probe
cagaaaaggaggggaaggaggaaaa

SEQ ID NO: 20249 - DNA, 25 bp, probe
caaatctccatccccacagcaaaag

SEQ ID NO: 20250 - DNA, 25 bp, probe
gaggagaaggaaaacgaggaggaag

SEQ ID NO: 20251 - DNA, 25 bp, probe
tgtctctgagatctttggactctgc

SEQ ID NO: 20252 - DNA, 25 bp, probe
agagtgtgggagctaatgggaatca

SEQ ID NO: 20253 - DNA, 25 bp, probe
cgatgtagttatagtggctgctaat

SEQ ID NO: 20254 - DNA, 25 bp, probe
tggatggtcacgatgtagttatagt

SEQ ID NO: 20255 - DNA, 25 bp, probe
acgatgtagttatagtggctgctaa

SEQ ID NO: 20256 - DNA, 25 bp, probe
gtatggatgaactacttcttgtgcc

SEQ ID NO: 20257 - DNA, 25 bp, probe
gatgtagttatagtggctgctaatt

SEQ ID NO: 20258 - DNA, 25 bp, probe
gatggtcacgatgtagttatagtgg

SEQ ID NO: 20259 - DNA, 25 bp, probe
ggatggtcacgatgtagttatagtg

SEQ ID NO: 20260 - DNA, 25 bp, probe
gtggatggtcacgatgtagttatag

SEQ ID NO: 20261 - DNA, 25 bp, probe
ccagtatggatgaactacttcttgt

SEQ ID NO: 20262 - DNA, 25 bp, probe
accagtatggatgaactacttcttg

SEQ ID NO: 20263 - DNA, 25 bp, probe
gaccagtatggatgaactacttctt

SEQ ID NO: 20264 - DNA, 25 bp, probe
agaccagtatggatgaactacttct

SEQ ID NO: 20265 - DNA, 25 bp, probe
cagaccagtatggatgaactacttc

SEQ ID NO: 20266 - DNA, 25 bp, probe
agtatggatgaactacttcttgtgc

SEQ ID NO: 20267 - DNA, 25 bp, probe
tactccaggaagagatacagcagat

SEQ ID NO: 20268 - DNA, 25 bp, probe
cagtatggatgaactacttcttgtg

SEQ ID NO: 20269 - DNA, 25 bp, probe
tatggatgaactacttcttgtgccg

SEQ ID NO: 20270 - DNA, 25 bp, probe
gattcctgatgaagtgaagctgatt

SEQ ID NO: 20271 - DNA, 25 bp, probe
ggtggatggtcacgatgtagttata

SEQ ID NO: 20272 - DNA, 25 bp, probe
attcctgatgaagtgaagctgattg

SEQ ID NO: 20273 - DNA, 25 bp, probe
ttactccaggaagagatacagcaga

SEQ ID NO: 20274 - DNA, 25 bp, probe
acattgacatttaagttggcttctg

SEQ ID NO: 20275 - DNA, 25 bp, probe
ccagaaaggaacttaatgacatacg

SEQ ID NO: 20276 - DNA, 25 bp, probe
cacgatgtagttatagtggctgcta

SEQ ID NO: 20277 - DNA, 25 bp, probe
ccagaccagtatggatgaactactt

SEQ ID NO: 20278 - DNA, 25 bp, probe
aacattgacatttaagttggcttct

SEQ ID NO: 20279 - DNA, 25 bp, probe
agattcctgatgaagtgaagctgat

SEQ ID NO: 20280 - DNA, 25 bp, probe
cattgacatttaagttggcttctgg

SEQ ID NO: 20281 - DNA, 25 bp, probe
atggtcacgatgtagttatagtggc

SEQ ID NO: 20282 - DNA, 25 bp, probe
cagaaaggaacttaatgacatacga

SEQ ID NO: 20283 - DNA, 25 bp, probe
aaacattgacatttaagttggcttc

SEQ ID NO: 20284 - DNA, 25 bp, probe
aggaacttaatgacatacgatttga

SEQ ID NO: 20285 - DNA, 25 bp, probe
gatgaactacttcttgtgccgtgaa

SEQ ID NO: 20286 - DNA, 25 bp, probe
ggaacttaatgacatacgatttgag

SEQ ID NO: 20287 - DNA, 25 bp, probe
gagattcctgatgaagtgaagctga

SEQ ID NO: 20288 - DNA, 25 bp, probe
agaagattgtagatgatcccaaagc

SEQ ID NO: 20289 - DNA, 25 bp, probe
tagtggctgctaatttacagaagat

SEQ ID NO: 20290 - DNA, 25 bp, probe
atagtggctgctaatttacagaaga

SEQ ID NO: 20291 - DNA, 25 bp, probe
atgtagttatagtggctgctaattt

SEQ ID NO: 20292 - DNA, 25 bp, probe
gtggctgctaatttacagaagattg

SEQ ID NO: 20293 - DNA, 25 bp, probe
agtggctgctaatttacagaagatt

SEQ ID NO: 20294 - DNA, 25 bp, probe
ggtcacgatgtagttatagtggctg

SEQ ID NO: 20295 - DNA, 25 bp, probe
ttgagattaagaaactccagaaagg

SEQ ID NO: 20296 - DNA, 25 bp, probe
cagaagattgtagatgatcccaaag

SEQ ID NO: 20297 - DNA, 25 bp, probe
tggaagatgtgtacgaactcatgta

SEQ ID NO: 20298 - DNA, 25 bp, probe
gtgtggaagatgtgtacgaactcat

SEQ ID NO: 20299 - DNA, 25 bp, probe
gtggaagatgtgtacgaactcatgt

SEQ ID NO: 20300 - DNA, 25 bp, probe
tgtggaagatgtgtacgaactcatg

SEQ ID NO: 20301 - DNA, 25 bp, probe
ctgtgtggaagatgtgtacgaactc

SEQ ID NO: 20302 - DNA, 25 bp, probe
gtaatctcccatccagcctcataac

SEQ ID NO: 20303 - DNA, 25 bp, probe
tttgcgggtggagttagagaatatg

SEQ ID NO: 20304 - DNA, 25 bp, probe
gtttgcgggtggagttagagaatat

SEQ ID NO: 20305 - DNA, 25 bp, probe
gactgtgtggaagatgtgtacgaac

SEQ ID NO: 20306 - DNA, 25 bp, probe
ggaagatgtgtacgaactcatgtac

SEQ ID NO: 20307 - DNA, 25 bp, probe
agactgtgtggaagatgtgtacgaa

SEQ ID NO: 20308 - DNA, 25 bp, probe
tgtaatctcccatccagcctcataa

SEQ ID NO: 20309 - DNA, 25 bp, probe
actgtgtggaagatgtgtacgaact

SEQ ID NO: 20310 - DNA, 25 bp, probe
tgtgtggaagatgtgtacgaactca

SEQ ID NO: 20311 - DNA, 25 bp, probe
taatctcccatccagcctcataacc

SEQ ID NO: 20312 - DNA, 25 bp, probe
gtgtaatctcccatccagcctcata

SEQ ID NO: 20313 - DNA, 25 bp, probe
cagactgtgtggaagatgtgtacga

SEQ ID NO: 20314 - DNA, 25 bp, probe
tacgaactcatgtacaactgttgga

SEQ ID NO: 20315 - DNA, 25 bp, probe
atctacgactatttaatcggcggaa

SEQ ID NO: 20316 - DNA, 25 bp, probe
tgtttgcgggtggagttagagaata

SEQ ID NO: 20317 - DNA, 25 bp, probe
ctacgactatttaatcggcggaaac

SEQ ID NO: 20318 - DNA, 25 bp, probe
tctacgactatttaatcggcggaaa

SEQ ID NO: 20319 - DNA, 25 bp, probe
cgccgagatctacgactatttaatc

SEQ ID NO: 20320 - DNA, 25 bp, probe
gatctacgactatttaatcggcgga

SEQ ID NO: 20321 - DNA, 25 bp, probe
acgccgagatctacgactatttaat

SEQ ID NO: 20322 - DNA, 25 bp, probe
aacgccgagatctacgactatttaa

SEQ ID NO: 20323 - DNA, 25 bp, probe
gggtggagttagagaatatgctggg

SEQ ID NO: 20324 - DNA, 25 bp, probe
gaacgccgagatctacgactattta

SEQ ID NO: 20325 - DNA, 25 bp, probe
tacgactatttaatcggcggaaacc

SEQ ID NO: 20326 - DNA, 25 bp, probe
acgaactcatgtacaactgttggac

SEQ ID NO: 20327 - DNA, 25 bp, probe
cgggtggagttagagaatatgctgg

SEQ ID NO: 20328 - DNA, 25 bp, probe
gagaacgccgagatctacgactatt

SEQ ID NO: 20329 - DNA, 25 bp, probe
gtacgaactcatgtacaactgttgg

SEQ ID NO: 20330 - DNA, 25 bp, probe
ttgcgggtggagttagagaatatgc

SEQ ID NO: 20331 - DNA, 25 bp, probe
tgcagactgtgtggaagatgtgtac

SEQ ID NO: 20332 - DNA, 25 bp, probe
ctgtttgcgggtggagttagagaat

SEQ ID NO: 20333 - DNA, 25 bp, probe
gagatctacgactatttaatcggcg

SEQ ID NO: 20334 - DNA, 25 bp, probe
cgagatctacgactatttaatcggc

SEQ ID NO: 20335 - DNA, 25 bp, probe
gccgagatctacgactatttaatcg

SEQ ID NO: 20336 - DNA, 25 bp, probe
ggtggagttagagaatatgctgggc

SEQ ID NO: 20337 - DNA, 25 bp, probe
aaccatgtgggagatcattactcgg

SEQ ID NO: 20338 - DNA, 25 bp, probe
gaactcatgtacaactgttggaccg

SEQ ID NO: 20339 - DNA, 25 bp, probe
cgaactcatgtacaactgttggacc

SEQ ID NO: 20340 - DNA, 25 bp, probe
gagttagagaatatgctgggccaac

SEQ ID NO: 20341 - DNA, 25 bp, probe
tgtcattctgatcttttccacccag

SEQ ID NO: 20342 - DNA, 25 bp, probe
tacccagcttttgttccctttagtg

SEQ ID NO: 20343 - DNA, 25 bp, probe
gtacccagcttttgttccctttagt

SEQ ID NO: 20344 - DNA, 25 bp, probe
gtcattctgatcttttccacccagg

SEQ ID NO: 20345 - DNA, 25 bp, probe
cccagcttttgttccctttagtgag

SEQ ID NO: 20346 - DNA, 25 bp, probe
ttctgatcttttccacccagggtat

SEQ ID NO: 20347 - DNA, 25 bp, probe
attctgatcttttccacccagggta

SEQ ID NO: 20348 - DNA, 25 bp, probe
tttagtgagggttaatttgcgcgtc

SEQ ID NO: 20349 - DNA, 25 bp, probe
ctttagtgagggttaatttgcgcgt

SEQ ID NO: 20350 - DNA, 25 bp, probe
ccagcttttgttccctttagtgagg

SEQ ID NO: 20351 - DNA, 25 bp, probe
acccagcttttgttccctttagtga

SEQ ID NO: 20352 - DNA, 25 bp, probe
tcattctgatcttttccacccaggg

SEQ ID NO: 20353 - DNA, 25 bp, probe
tctgatcttttccacccagggtatc

SEQ ID NO: 20354 - DNA, 25 bp, probe
tgatcttttccacccagggtatcag

SEQ ID NO: 20355 - DNA, 25 bp, probe
ctgatcttttccacccagggtatca

SEQ ID NO: 20356 - DNA, 25 bp, probe
cctttagtgagggttaatttgcgcg

SEQ ID NO: 20357 - DNA, 25 bp, probe
cattctgatcttttccacccagggt

SEQ ID NO: 20358 - DNA, 25 bp, probe
ggtacccagcttttgttccctttag

SEQ ID NO: 20359 - DNA, 25 bp, probe
gatcttttccacccagggtatcagc

SEQ ID NO: 20360 - DNA, 25 bp, probe
cggtacccagcttttgttcccttta

SEQ ID NO: 20361 - DNA, 25 bp, probe
atggtgatggtcaagtgtgagttac

SEQ ID NO: 20362 - DNA, 25 bp, probe
gatgtctacatggtgatggtcaagt

SEQ ID NO: 20363 - DNA, 25 bp, probe
atgtctacatggtgatggtcaagtg

SEQ ID NO: 20364 - DNA, 25 bp, probe
catggtgatggtcaagtgtgagtta

SEQ ID NO: 20365 - DNA, 25 bp, probe
cacttcatgcccatgtctactattt

SEQ ID NO: 20366 - DNA, 25 bp, probe
ttgtgttagatcaggttctgccttc

SEQ ID NO: 20367 - DNA, 25 bp, probe
tcacttcatgcccatgtctactatt

SEQ ID NO: 20368 - DNA, 25 bp, probe
ttcacttcatgcccatgtctactat

SEQ ID NO: 20369 - DNA, 25 bp, probe
ctacatggtgatggtcaagtgtgag

SEQ ID NO: 20370 - DNA, 25 bp, probe
cttcacttcatgcccatgtctacta

SEQ ID NO: 20371 - DNA, 25 bp, probe
gtgatggtcaagtgtgagttacctg

SEQ ID NO: 20372 - DNA, 25 bp, probe
gtctacatggtgatggtcaagtgtg

SEQ ID NO: 20373 - DNA, 25 bp, probe
tctacatggtgatggtcaagtgtga

SEQ ID NO: 20374 - DNA, 25 bp, probe
tacatggtgatggtcaagtgtgagt

SEQ ID NO: 20375 - DNA, 25 bp, probe
tgtctacatggtgatggtcaagtgt

SEQ ID NO: 20376 - DNA, 25 bp, probe
tttgtgttagatcaggttctgcctt

SEQ ID NO: 20377 - DNA, 25 bp, probe
cttcatgcccatgtctactattttg

SEQ ID NO: 20378 - DNA, 25 bp, probe
acttcatgcccatgtctactatttt

SEQ ID NO: 20379 - DNA, 25 bp, probe
atgtctactattttgccagtgacta

SEQ ID NO: 20380 - DNA, 25 bp, probe
ggtgatggtcaagtgtgagttacct

SEQ ID NO: 20381 - DNA, 25 bp, probe
tgtgttagatcaggttctgccttcc

SEQ ID NO: 20382 - DNA, 25 bp, probe
acatggtgatggtcaagtgtgagtt

SEQ ID NO: 20383 - DNA, 25 bp, probe
ttcatgcccatgtctactattttgc

SEQ ID NO: 20384 - DNA, 25 bp, probe
catgtctactattttgccagtgact

SEQ ID NO: 20385 - DNA, 25 bp, probe
gatggtcaagtgtgagttacctgct

SEQ ID NO: 20386 - DNA, 25 bp, probe
tggtgatggtcaagtgtgagttacc

SEQ ID NO: 20387 - DNA, 25 bp, probe
ttagatcaggttctgccttcccttc

SEQ ID NO: 20388 - DNA, 25 bp, probe
ccatgtctactattttgccagtgac

SEQ ID NO: 20389 - DNA, 25 bp, probe
atggtcaagtgtgagttacctgctg

SEQ ID NO: 20390 - DNA, 25 bp, probe
tgatggtcaagtgtgagttacctgc

SEQ ID NO: 20391 - DNA, 25 bp, probe
ccttcacttcatgcccatgtctact

SEQ ID NO: 20392 - DNA, 25 bp, probe
gttagatcaggttctgccttccctt

SEQ ID NO: 20393 - DNA, 25 bp, probe
cccatgtctactattttgccagtga

SEQ ID NO: 20394 - DNA, 25 bp, probe
ttttgtgttagatcaggttctgcct

SEQ ID NO: 20395 - DNA, 25 bp, probe
ggtcaagtgtgagttacctgctgag

SEQ ID NO: 20396 - DNA, 25 bp, probe
atgcccatgtctactattttgccag

SEQ ID NO: 20397 - DNA, 25 bp, probe
tcatgcccatgtctactattttgcc

SEQ ID NO: 20398 - DNA, 25 bp, probe
catgcccatgtctactattttgcca

SEQ ID NO: 20399 - DNA, 25 bp, probe
tagatcaggttctgccttcccttca

SEQ ID NO: 20400 - DNA, 25 bp, probe
gtgttagatcaggttctgccttccc

SEQ ID NO: 20401 - DNA, 25 bp, probe
tgttagatcaggttctgccttccct

SEQ ID NO: 20402 - DNA, 25 bp, probe
gcccatgtctactattttgccagtg

SEQ ID NO: 20403 - DNA, 25 bp, probe
tgcccatgtctactattttgccagt

SEQ ID NO: 20404 - DNA, 25 bp, probe
ctgaagcctgagaagtaagtgagaa

SEQ ID NO: 20405 - DNA, 25 bp, probe
atctgaagcctgagaagtaagtgag

SEQ ID NO: 20406 - DNA, 25 bp, probe
ttcttactaggtcatgttcacggag

SEQ ID NO: 20407 - DNA, 25 bp, probe
gatctgaagcctgagaagtaagtga

SEQ ID NO: 20408 - DNA, 25 bp, probe
tctgaagcctgagaagtaagtgaga

SEQ ID NO: 20409 - DNA, 25 bp, probe
tgaagcctgagaagtaagtgagaaa

SEQ ID NO: 20410 - DNA, 25 bp, probe
gccactgctagatatttatttccta

SEQ ID NO: 20411 - DNA, 25 bp, probe
tttcttactaggtcatgttcacgga

SEQ ID NO: 20412 - DNA, 25 bp, probe
ttactaggtcatgttcacggaggag

SEQ ID NO: 20413 - DNA, 25 bp, probe
cttactaggtcatgttcacggagga

SEQ ID NO: 20414 - DNA, 25 bp, probe
tcttactaggtcatgttcacggagg

SEQ ID NO: 20415 - DNA, 25 bp, probe
agagatctgaagcctgagaagtaag

SEQ ID NO: 20416 - DNA, 25 bp, probe
gagatctgaagcctgagaagtaagt

SEQ ID NO: 20417 - DNA, 25 bp, probe
agatctgaagcctgagaagtaagtg

SEQ ID NO: 20418 - DNA, 25 bp, probe
agccactgctagatatttatttcct

SEQ ID NO: 20419 - DNA, 25 bp, probe
cagagatctgaagcctgagaagtaa

SEQ ID NO: 20420 - DNA, 25 bp, probe
cacggaggaggatgtcaagttctac

SEQ ID NO: 20421 - DNA, 25 bp, probe
taaaacacaccagccataaaacaag

SEQ ID NO: 20422 - DNA, 25 bp, probe
ttaaaacacaccagccataaaacaa

SEQ ID NO: 20423 - DNA, 25 bp, probe
gaagcctgagaagtaagtgagaaaa

SEQ ID NO: 20424 - DNA, 25 bp, probe
acaccagccataaaacaagttaaac

SEQ ID NO: 20425 - DNA, 25 bp, probe
cacaccagccataaaacaagttaaa

SEQ ID NO: 20426 - DNA, 25 bp, probe
gaggaggatgtcaagttctacctgg

SEQ ID NO: 20427 - DNA, 25 bp, probe
ggaggaggatgtcaagttctacctg

SEQ ID NO: 20428 - DNA, 25 bp, probe
tcacggaggaggatgtcaagttcta

SEQ ID NO: 20429 - DNA, 25 bp, probe
ctacagagatctgaagcctgagaag

SEQ ID NO: 20430 - DNA, 25 bp, probe
acacaccagccataaaacaagttaa

SEQ ID NO: 20431 - DNA, 25 bp, probe
tctacagagatctgaagcctgagaa

SEQ ID NO: 20432 - DNA, 25 bp, probe
caccagccataaaacaagttaaacg

SEQ ID NO: 20433 - DNA, 25 bp, probe
aacacaccagccataaaacaagtta

SEQ ID NO: 20434 - DNA, 25 bp, probe
atcatctacagagatctgaagcctg

SEQ ID NO: 20435 - DNA, 25 bp, probe
acagagatctgaagcctgagaagta

SEQ ID NO: 20436 - DNA, 25 bp, probe
tacagagatctgaagcctgagaagt

SEQ ID NO: 20437 - DNA, 25 bp, probe
ggatgtcaagttctacctggctgag

SEQ ID NO: 20438 - DNA, 25 bp, probe
atgttggtagccactgctagatatt

SEQ ID NO: 20439 - DNA, 25 bp, probe
ttttcttactaggtcatgttcacgg

SEQ ID NO: 20440 - DNA, 25 bp, probe
aaaacacaccagccataaaacaagt

SEQ ID NO: 20441 - DNA, 25 bp, probe
ccactgctagatatttatttcctaa

SEQ ID NO: 20442 - DNA, 25 bp, probe
atctacagagatctgaagcctgaga

SEQ ID NO: 20443 - DNA, 25 bp, probe
catctacagagatctgaagcctgag

SEQ ID NO: 20444 - DNA, 25 bp, probe
aaacacaccagccataaaacaagtt

SEQ ID NO: 20445 - DNA, 25 bp, probe
gatcatctacagagatctgaagcct

SEQ ID NO: 20446 - DNA, 25 bp, probe
catgttggtagccactgctagatat

SEQ ID NO: 20447 - DNA, 25 bp, probe
gttcacggaggaggatgtcaagttc

SEQ ID NO: 20448 - DNA, 25 bp, probe
caccatcaccatcaccattaaggat

SEQ ID NO: 20449 - DNA, 25 bp, probe
accatcaccatcaccattaaggatc

SEQ ID NO: 20450 - DNA, 25 bp, probe
aaaggagtgaaggagattgacatcg

SEQ ID NO: 20451 - DNA, 25 bp, probe
cagcaccatcaccatcaccattaag

SEQ ID NO: 20452 - DNA, 25 bp, probe
aaaaggagtgaaggagattgacatc

SEQ ID NO: 20453 - DNA, 25 bp, probe
aaggagtgaaggagattgacatcgc

SEQ ID NO: 20454 - DNA, 25 bp, probe
caaaaggagtgaaggagattgacat

SEQ ID NO: 20455 - DNA, 25 bp, probe
gcaccatcaccatcaccattaagga

SEQ ID NO: 20456 - DNA, 25 bp, probe
agcaccatcaccatcaccattaagg

SEQ ID NO: 20457 - DNA, 25 bp, probe
ccagcaccatcaccatcaccattaa

SEQ ID NO: 20458 - DNA, 25 bp, probe
gcaaaaggagtgaaggagattgaca

SEQ ID NO: 20459 - DNA, 25 bp, probe
atggcaaaaggagtgaaggagattg

SEQ ID NO: 20460 - DNA, 25 bp, probe
ccatcaccatcaccattaaggatcc

SEQ ID NO: 20461 - DNA, 25 bp, probe
catggcaaaaggagtgaaggagatt

SEQ ID NO: 20462 - DNA, 25 bp, probe
ggcaaaaggagtgaaggagattgac

SEQ ID NO: 20463 - DNA, 25 bp, probe
tggcaaaaggagtgaaggagattga

SEQ ID NO: 20464 - DNA, 25 bp, probe
agtatagaatctggtgcttcctgac

SEQ ID NO: 20465 - DNA, 25 bp, probe
cagtatagaatctggtgcttcctga

SEQ ID NO: 20466 - DNA, 25 bp, probe
tagatatgaataatcagcctgtgtt

SEQ ID NO: 20467 - DNA, 25 bp, probe
gaaattagagaatacagtgggagga

SEQ ID NO: 20468 - DNA, 25 bp, probe
agaaattagagaatacagtgggagg

SEQ ID NO: 20469 - DNA, 25 bp, probe
attagagaatacagtgggaggattt

SEQ ID NO: 20470 - DNA, 25 bp, probe
tgaatcagtggcaacattaaagttt

SEQ ID NO: 20471 - DNA, 25 bp, probe
ctctagtgtaatgtttgctgggata

SEQ ID NO: 20472 - DNA, 25 bp, probe
atagatatgaataatcagcctgtgt

SEQ ID NO: 20473 - DNA, 25 bp, probe
tctagtgtaatgtttgctgggataa

SEQ ID NO: 20474 - DNA, 25 bp, probe
ttgaatcagtggcaacattaaagtt

SEQ ID NO: 20475 - DNA, 25 bp, probe
attgaatcagtggcaacattaaagt

SEQ ID NO: 20476 - DNA, 25 bp, probe
aattagagaatacagtgggaggatt

SEQ ID NO: 20477 - DNA, 25 bp, probe
aaattagagaatacagtgggaggat

SEQ ID NO: 20478 - DNA, 25 bp, probe
agtgtaatgtttgctgggataataa

SEQ ID NO: 20479 - DNA, 25 bp, probe
tttctctagtgtaatgtttgctggg

SEQ ID NO: 20480 - DNA, 25 bp, probe
ctagtgtaatgtttgctgggataat

SEQ ID NO: 20481 - DNA, 25 bp, probe
tctctagtgtaatgtttgctgggat

SEQ ID NO: 20482 - DNA, 25 bp, probe
aattgaatcagtggcaacattaaag

SEQ ID NO: 20483 - DNA, 25 bp, probe
ttctctagtgtaatgtttgctggga

SEQ ID NO: 20484 - DNA, 25 bp, probe
cctattgctgaaatgtaacagacac

SEQ ID NO: 20485 - DNA, 25 bp, probe
attgctgaaatgtaacagacactac

SEQ ID NO: 20486 - DNA, 25 bp, probe
gtgtaatgtttgctgggataataaa

SEQ ID NO: 20487 - DNA, 25 bp, probe
ctattgctgaaatgtaacagacact

SEQ ID NO: 20488 - DNA, 25 bp, probe
aaattgaatcagtggcaacattaaa

SEQ ID NO: 20489 - DNA, 25 bp, probe
gtatagaatctggtgcttcctgacc

SEQ ID NO: 20490 - DNA, 25 bp, probe
tagtgtaatgtttgctgggataata

SEQ ID NO: 20491 - DNA, 25 bp, probe
ccctattgctgaaatgtaacagaca

SEQ ID NO: 20492 - DNA, 25 bp, probe
agatatgaataatcagcctgtgttt

SEQ ID NO: 20493 - DNA, 25 bp, probe
ttgtttcgcataattctgaatgtaa

SEQ ID NO: 20494 - DNA, 25 bp, probe
aattgtttcgcataattctgaatgt

SEQ ID NO: 20495 - DNA, 25 bp, probe
ttcgcataattctgaatgtaataga

SEQ ID NO: 20496 - DNA, 25 bp, probe
tgctgtctttattatacttaccctt

SEQ ID NO: 20497 - DNA, 25 bp, probe
ttgctgtctttattatacttaccct

SEQ ID NO: 20498 - DNA, 25 bp, probe
aatagatatgaataatcagcctgtg

SEQ ID NO: 20499 - DNA, 25 bp, probe
tgtttcgcataattctgaatgtaat

SEQ ID NO: 20500 - DNA, 25 bp, probe
attgtttcgcataattctgaatgta

SEQ ID NO: 20501 - DNA, 25 bp, probe
cttgctgtctttattatacttaccc

SEQ ID NO: 20502 - DNA, 25 bp, probe
tattgctgaaatgtaacagacacta

SEQ ID NO: 20503 - DNA, 25 bp, probe
tggaaggcactacacagtttacttt

SEQ ID NO: 20504 - DNA, 25 bp, probe
cgccttaatatatccctttgtggaa

SEQ ID NO: 20505 - DNA, 25 bp, probe
tagaaattagagaatacagtgggag

SEQ ID NO: 20506 - DNA, 25 bp, probe
gccttaatatatccctttgtggaag

SEQ ID NO: 20507 - DNA, 25 bp, probe
tcgcataattctgaatgtaatagat

SEQ ID NO: 20508 - DNA, 25 bp, probe
ttttgagtcggagtcttgctctgtc

SEQ ID NO: 20509 - DNA, 25 bp, probe
cagtgtcagaatgattactacctca

SEQ ID NO: 20510 - DNA, 25 bp, probe
agtgtcagaatgattactacctcag

SEQ ID NO: 20511 - DNA, 25 bp, probe
ccagtgtcagaatgattactacctc

SEQ ID NO: 20512 - DNA, 25 bp, probe
tgtcagaatgattactacctcagga

SEQ ID NO: 20513 - DNA, 25 bp, probe
gtgtcagaatgattactacctcagg

SEQ ID NO: 20514 - DNA, 25 bp, probe
aatggcttatcttacactggatcac

SEQ ID NO: 20515 - DNA, 25 bp, probe
caatggcttatcttacactggatca

SEQ ID NO: 20516 - DNA, 25 bp, probe
gaatgattactacctcaggaccaac

SEQ ID NO: 20517 - DNA, 25 bp, probe
agaatgattactacctcaggaccaa

SEQ ID NO: 20518 - DNA, 25 bp, probe
cacagataccaatggatcagataac

SEQ ID NO: 20519 - DNA, 25 bp, probe
acagataccaatggatcagataact

SEQ ID NO: 20520 - DNA, 25 bp, probe
tcagaatgattactacctcaggacc

SEQ ID NO: 20521 - DNA, 25 bp, probe
gatcaccaactacagcaagaactag

SEQ ID NO: 20522 - DNA, 25 bp, probe
gtcagaatgattactacctcaggac

SEQ ID NO: 20523 - DNA, 25 bp, probe
cagaatgattactacctcaggacca

SEQ ID NO: 20524 - DNA, 25 bp, probe
cagataccaatggatcagataactc

SEQ ID NO: 20525 - DNA, 25 bp, probe
cctgatgattccacagataccaatg

SEQ ID NO: 20526 - DNA, 25 bp, probe
aatgattactacctcaggaccaacc

SEQ ID NO: 20527 - DNA, 25 bp, probe
atggcttatcttacactggatcacc

SEQ ID NO: 20528 - DNA, 25 bp, probe
ggatcaccaactacagcaagaacta

SEQ ID NO: 20529 - DNA, 25 bp, probe
agataccaatggatcagataactcc

SEQ ID NO: 20530 - DNA, 25 bp, probe
cttatcttacactggatcaccaact

SEQ ID NO: 20531 - DNA, 25 bp, probe
ccacagataccaatggatcagataa

SEQ ID NO: 20532 - DNA, 25 bp, probe
tatcttacactggatcaccaactac

SEQ ID NO: 20533 - DNA, 25 bp, probe
ctgatgattccacagataccaatgg

SEQ ID NO: 20534 - DNA, 25 bp, probe
atcttacactggatcaccaactaca

SEQ ID NO: 20535 - DNA, 25 bp, probe
ttatcttacactggatcaccaacta

SEQ ID NO: 20536 - DNA, 25 bp, probe
ccaatggcttatcttacactggatc

SEQ ID NO: 20537 - DNA, 25 bp, probe
gcttatcttacactggatcaccaac

SEQ ID NO: 20538 - DNA, 25 bp, probe
gtcccagtgtcagaatgattactac

SEQ ID NO: 20539 - DNA, 25 bp, probe
agtcccagtgtcagaatgattacta

SEQ ID NO: 20540 - DNA, 25 bp, probe
atgattactacctcaggaccaacct

SEQ ID NO: 20541 - DNA, 25 bp, probe
tcttacactggatcaccaactacag

SEQ ID NO: 20542 - DNA, 25 bp, probe
catcccaatggcttatcttacactg

SEQ ID NO: 20543 - DNA, 25 bp, probe
cccagtgtcagaatgattactacct

SEQ ID NO: 20544 - DNA, 25 bp, probe
tcccagtgtcagaatgattactacc

SEQ ID NO: 20545 - DNA, 25 bp, probe
ggcttatcttacactggatcaccaa

SEQ ID NO: 20546 - DNA, 25 bp, probe
attactacctcaggaccaacctcag

SEQ ID NO: 20547 - DNA, 25 bp, probe
gattactacctcaggaccaacctca

SEQ ID NO: 20548 - DNA, 25 bp, probe
tgattactacctcaggaccaacctc

SEQ ID NO: 20549 - DNA, 25 bp, probe
cagtcccagtgtcagaatgattact

SEQ ID NO: 20550 - DNA, 25 bp, probe
ccctgatgattccacagataccaat

SEQ ID NO: 20551 - DNA, 25 bp, probe
cttacactggatcaccaactacagc

SEQ ID NO: 20552 - DNA, 25 bp, probe
ccagtcccagtgtcagaatgattac

SEQ ID NO: 20553 - DNA, 25 bp, probe
ttgagacctattctgaccaaactat

SEQ ID NO: 20554 - DNA, 25 bp, probe
tgagacctattctgaccaaactata

SEQ ID NO: 20555 - DNA, 25 bp, probe
gagacctattctgaccaaactatat

SEQ ID NO: 20556 - DNA, 25 bp, probe
taaagaaaagggagtggatatgaca

SEQ ID NO: 20557 - DNA, 25 bp, probe
tttgagacctattctgaccaaacta

SEQ ID NO: 20558 - DNA, 25 bp, probe
ataaagaaaagggagtggatatgac

SEQ ID NO: 20559 - DNA, 25 bp, probe
ctgctggtttgagacctattctgac

SEQ ID NO: 20560 - DNA, 25 bp, probe
agacctattctgaccaaactatata

SEQ ID NO: 20561 - DNA, 25 bp, probe
actgctggtttgagacctattctga

SEQ ID NO: 20562 - DNA, 25 bp, probe
tataaagaaaagggagtggatatga

SEQ ID NO: 20563 - DNA, 25 bp, probe
gacctattctgaccaaactatataa

SEQ ID NO: 20564 - DNA, 25 bp, probe
aactatataaagaaaagggagtgga

SEQ ID NO: 20565 - DNA, 25 bp, probe
tgaccaaactatataaagaaaaggg

SEQ ID NO: 20566 - DNA, 25 bp, probe
tgctggtttgagacctattctgacc

SEQ ID NO: 20567 - DNA, 25 bp, probe
actatataaagaaaagggagtggat

SEQ ID NO: 20568 - DNA, 25 bp, probe
acctattctgaccaaactatataaa

SEQ ID NO: 20569 - DNA, 25 bp, probe
accaaactatataaagaaaagggag

SEQ ID NO: 20570 - DNA, 25 bp, probe
gaccaaactatataaagaaaaggga

SEQ ID NO: 20571 - DNA, 25 bp, probe
atataaagaaaagggagtggatatg

SEQ ID NO: 20572 - DNA, 25 bp, probe
aaactatataaagaaaagggagtgg

SEQ ID NO: 20573 - DNA, 25 bp, probe
ccaaactatataaagaaaagggagt

SEQ ID NO: 20574 - DNA, 25 bp, probe
tggtttgagacctattctgaccaaa

SEQ ID NO: 20575 - DNA, 25 bp, probe
ctgaccaaactatataaagaaaagg

SEQ ID NO: 20576 - DNA, 25 bp, probe
ctggtttgagacctattctgaccaa

SEQ ID NO: 20577 - DNA, 25 bp, probe
caaactatataaagaaaagggagtg

SEQ ID NO: 20578 - DNA, 25 bp, probe
ctatataaagaaaagggagtggata

SEQ ID NO: 20579 - DNA, 25 bp, probe
gctggtttgagacctattctgacca

SEQ ID NO: 20580 - DNA, 25 bp, probe
cctacattccagccacatatcacaa

SEQ ID NO: 20581 - DNA, 25 bp, probe
aacggactgatttagaagagaacaa

SEQ ID NO: 20582 - DNA, 25 bp, probe
acggactgatttagaagagaacaag

SEQ ID NO: 20583 - DNA, 25 bp, probe
ggactgatttagaagagaacaagca

SEQ ID NO: 20584 - DNA, 25 bp, probe
caacggactgatttagaagagaaca

SEQ ID NO: 20585 - DNA, 25 bp, probe
gactgatttagaagagaacaagcat

SEQ ID NO: 20586 - DNA, 25 bp, probe
ctacattccagccacatatcacaaa

SEQ ID NO: 20587 - DNA, 25 bp, probe
tacattccagccacatatcacaaac

SEQ ID NO: 20588 - DNA, 25 bp, probe
ccaacggactgatttagaagagaac

SEQ ID NO: 20589 - DNA, 25 bp, probe
accaacggactgatttagaagagaa

SEQ ID NO: 20590 - DNA, 25 bp, probe
cggactgatttagaagagaacaagc

SEQ ID NO: 20591 - DNA, 25 bp, probe
actgatttagaagagaacaagcatg

SEQ ID NO: 20592 - DNA, 25 bp, probe
gaccaacggactgatttagaagaga

SEQ ID NO: 20593 - DNA, 25 bp, probe
ggaccaacggactgatttagaagag

SEQ ID NO: 20594 - DNA, 25 bp, probe
acatatcacaaacgactacggtctg

SEQ ID NO: 20595 - DNA, 25 bp, probe
cacatatcacaaacgactacggtct

SEQ ID NO: 20596 - DNA, 25 bp, probe
gtggaccaacggactgatttagaag

SEQ ID NO: 20597 - DNA, 25 bp, probe
tggaccaacggactgatttagaaga

SEQ ID NO: 20598 - DNA, 25 bp, probe
attccagccacatatcacaaacgac

SEQ ID NO: 20599 - DNA, 25 bp, probe
cattccagccacatatcacaaacga

SEQ ID NO: 20600 - DNA, 25 bp, probe
ctccctacattccagccacatatca

SEQ ID NO: 20601 - DNA, 25 bp, probe
ccagccacatatcacaaacgactac

SEQ ID NO: 20602 - DNA, 25 bp, probe
tccagccacatatcacaaacgacta

SEQ ID NO: 20603 - DNA, 25 bp, probe
catatcacaaacgactacggtctgg

SEQ ID NO: 20604 - DNA, 25 bp, probe
acattccagccacatatcacaaacg

SEQ ID NO: 20605 - DNA, 25 bp, probe
tccctacattccagccacatatcac

SEQ ID NO: 20606 - DNA, 25 bp, probe
atatcacaaacgactacggtctgga

SEQ ID NO: 20607 - DNA, 25 bp, probe
cagccacatatcacaaacgactacg

SEQ ID NO: 20608 - DNA, 25 bp, probe
ccacatatcacaaacgactacggtc

SEQ ID NO: 20609 - DNA, 25 bp, probe
ccctacattccagccacatatcaca

SEQ ID NO: 20610 - DNA, 25 bp, probe
ttccagccacatatcacaaacgact

SEQ ID NO: 20611 - DNA, 25 bp, probe
tatcacaaacgactacggtctggac

SEQ ID NO: 20612 - DNA, 25 bp, probe
ggtggaccaacggactgatttagaa

SEQ ID NO: 20613 - DNA, 25 bp, probe
aaacgactacggtctggacaacttt

SEQ ID NO: 20614 - DNA, 25 bp, probe
agccacatatcacaaacgactacgg

SEQ ID NO: 20615 - DNA, 25 bp, probe
aacgactacggtctggacaactttg

SEQ ID NO: 20616 - DNA, 25 bp, probe
caaacgactacggtctggacaactt

SEQ ID NO: 20617 - DNA, 25 bp, probe
caggtggaccaacggactgatttag

SEQ ID NO: 20618 - DNA, 25 bp, probe
gctccctacattccagccacatatc

SEQ ID NO: 20619 - DNA, 25 bp, probe
gaggactcaattcgaacccgaaatc

SEQ ID NO: 20620 - DNA, 25 bp, probe
gactcaattcgaacccgaaatcctg

SEQ ID NO: 20621 - DNA, 25 bp, probe
ggactcaattcgaacccgaaatcct

SEQ ID NO: 20622 - DNA, 25 bp, probe
aggactcaattcgaacccgaaatcc

SEQ ID NO: 20623 - DNA, 25 bp, probe
taatgcttcaagtcactaatcacct

SEQ ID NO: 20624 - DNA, 25 bp, probe
ttaatgcttcaagtcactaatcacc

SEQ ID NO: 20625 - DNA, 25 bp, probe
aatgcttcaagtcactaatcacctg

SEQ ID NO: 20626 - DNA, 25 bp, probe
atcttgttgaatccagtccaggtaa

SEQ ID NO: 20627 - DNA, 25 bp, probe
tgttgaatccagtccaggtaactaa

SEQ ID NO: 20628 - DNA, 25 bp, probe
ttgttgaatccagtccaggtaacta

SEQ ID NO: 20629 - DNA, 25 bp, probe
atgcttcaagtcactaatcacctga

SEQ ID NO: 20630 - DNA, 25 bp, probe
gcttcaagtcactaatcacctgatc

SEQ ID NO: 20631 - DNA, 25 bp, probe
gatcttgttgaatccagtccaggta

SEQ ID NO: 20632 - DNA, 25 bp, probe
aactctcgtagtggaactaatatgg

SEQ ID NO: 20633 - DNA, 25 bp, probe
ccaactctcgtagtggaactaatat

SEQ ID NO: 20634 - DNA, 25 bp, probe
tcttgttgaatccagtccaggtaac

SEQ ID NO: 20635 - DNA, 25 bp, probe
tgcttcaagtcactaatcacctgat

SEQ ID NO: 20636 - DNA, 25 bp, probe
cttgttgaatccagtccaggtaact

SEQ ID NO: 20637 - DNA, 25 bp, probe
caactctcgtagtggaactaatatg

SEQ ID NO: 20638 - DNA, 25 bp, probe
gaatccagtccaggtaactaaagaa

SEQ ID NO: 20639 - DNA, 25 bp, probe
ttgaatccagtccaggtaactaaag

SEQ ID NO: 20640 - DNA, 25 bp, probe
gttgaatccagtccaggtaactaaa

SEQ ID NO: 20641 - DNA, 25 bp, probe
aatccagtccaggtaactaaagaaa

SEQ ID NO: 20642 - DNA, 25 bp, probe
gccaactctcgtagtggaactaata

SEQ ID NO: 20643 - DNA, 25 bp, probe
tgaatccagtccaggtaactaaaga

SEQ ID NO: 20644 - DNA, 25 bp, probe
attaatgcttcaagtcactaatcac

SEQ ID NO: 20645 - DNA, 25 bp, probe
tgggagaatttaggatcttgttgaa

SEQ ID NO: 20646 - DNA, 25 bp, probe
ttgggagaatttaggatcttgttga

SEQ ID NO: 20647 - DNA, 25 bp, probe
gttgggagaatttaggatcttgttg

SEQ ID NO: 20648 - DNA, 25 bp, probe
tgttgggagaatttaggatcttgtt

SEQ ID NO: 20649 - DNA, 25 bp, probe
ctgttgggagaatttaggatcttgt

SEQ ID NO: 20650 - DNA, 25 bp, probe
gggagaatttaggatcttgttgaat

SEQ ID NO: 20651 - DNA, 25 bp, probe
aatatgtggataaacaggcactctt

SEQ ID NO: 20652 - DNA, 25 bp, probe
aaatatgtggataaacaggcactct

SEQ ID NO: 20653 - DNA, 25 bp, probe
gaactaatatgggagaagggctgtt

SEQ ID NO: 20654 - DNA, 25 bp, probe
atatgtggataaacaggcactcttg

SEQ ID NO: 20655 - DNA, 25 bp, probe
gctgttgggagaatttaggatcttg

SEQ ID NO: 20656 - DNA, 25 bp, probe
taaatatgtggataaacaggcactc

SEQ ID NO: 20657 - DNA, 25 bp, probe
aactaatatgggagaagggctgttg

SEQ ID NO: 20658 - DNA, 25 bp, probe
gtagtggaactaatatgggagaagg

SEQ ID NO: 20659 - DNA, 25 bp, probe
cgtagtggaactaatatgggagaag

SEQ ID NO: 20660 - DNA, 25 bp, probe
tcgtagtggaactaatatgggagaa

SEQ ID NO: 20661 - DNA, 25 bp, probe
ttaaatatgtggataaacaggcact

SEQ ID NO: 20662 - DNA, 25 bp, probe
tagtggaactaatatgggagaaggg

SEQ ID NO: 20663 - DNA, 25 bp, probe
ctcgtagtggaactaatatgggaga

SEQ ID NO: 20664 - DNA, 25 bp, probe
tctcgtagtggaactaatatgggag

SEQ ID NO: 20665 - DNA, 25 bp, probe
ctctcgtagtggaactaatatggga

SEQ ID NO: 20666 - DNA, 25 bp, probe
actctcgtagtggaactaatatggg

SEQ ID NO: 20667 - DNA, 25 bp, probe
aacatacatggcacctgaagtcatc

SEQ ID NO: 20668 - DNA, 25 bp, probe
caacatacatggcacctgaagtcat

SEQ ID NO: 20669 - DNA, 25 bp, probe
tttcactagcgtacatctaaggaaa

SEQ ID NO: 20670 - DNA, 25 bp, probe
catctaaggaaaaccgtaaacacag

SEQ ID NO: 20671 - DNA, 25 bp, probe
acatctaaggaaaaccgtaaacaca

SEQ ID NO: 20672 - DNA, 25 bp, probe
gtaaacacagagctgccctttattc

SEQ ID NO: 20673 - DNA, 25 bp, probe
tacatctaaggaaaaccgtaaacac

SEQ ID NO: 20674 - DNA, 25 bp, probe
atctaaggaaaaccgtaaacacaga

SEQ ID NO: 20675 - DNA, 25 bp, probe
acatacatggcacctgaagtcatca

SEQ ID NO: 20676 - DNA, 25 bp, probe
tctaaggaaaaccgtaaacacagag

SEQ ID NO: 20677 - DNA, 25 bp, probe
cgtacatctaaggaaaaccgtaaac

SEQ ID NO: 20678 - DNA, 25 bp, probe
tcactagcgtacatctaaggaaaac

SEQ ID NO: 20679 - DNA, 25 bp, probe
ttcactagcgtacatctaaggaaaa

SEQ ID NO: 20680 - DNA, 25 bp, probe
ttttcactagcgtacatctaaggaa

SEQ ID NO: 20681 - DNA, 25 bp, probe
gtacatctaaggaaaaccgtaaaca

SEQ ID NO: 20682 - DNA, 25 bp, probe
cactagcgtacatctaaggaaaacc

SEQ ID NO: 20683 - DNA, 25 bp, probe
tagcgtacatctaaggaaaaccgta

SEQ ID NO: 20684 - DNA, 25 bp, probe
ctaaggaaaaccgtaaacacagagc

SEQ ID NO: 20685 - DNA, 25 bp, probe
gcgtacatctaaggaaaaccgtaaa

SEQ ID NO: 20686 - DNA, 25 bp, probe
taaacacagagctgccctttattcc

SEQ ID NO: 20687 - DNA, 25 bp, probe
agcgtacatctaaggaaaaccgtaa

SEQ ID NO: 20688 - DNA, 25 bp, probe
ctagcgtacatctaaggaaaaccgt

SEQ ID NO: 20689 - DNA, 25 bp, probe
actagcgtacatctaaggaaaaccg

SEQ ID NO: 20690 - DNA, 25 bp, probe
cgtaaacacagagctgccctttatt

SEQ ID NO: 20691 - DNA, 25 bp, probe
taaggaaaaccgtaaacacagagct

SEQ ID NO: 20692 - DNA, 25 bp, probe
aaacacagagctgccctttattcct

SEQ ID NO: 20693 - DNA, 25 bp, probe
aagtcatcactcgtgcccaaagaaa

SEQ ID NO: 20694 - DNA, 25 bp, probe
aaggaaaaccgtaaacacagagctg

SEQ ID NO: 20695 - DNA, 25 bp, probe
aacacagagctgccctttattcctc

SEQ ID NO: 20696 - DNA, 25 bp, probe
ccgtaaacacagagctgccctttat

SEQ ID NO: 20697 - DNA, 25 bp, probe
gaaagaacattcctttggggtgtgg

SEQ ID NO: 20698 - DNA, 25 bp, probe
tggcctaggaagttttccagatttt

SEQ ID NO: 20699 - DNA, 25 bp, probe
gtggcctaggaagttttccagattt

SEQ ID NO: 20700 - DNA, 25 bp, probe
tgtggcctaggaagttttccagatt

SEQ ID NO: 20701 - DNA, 25 bp, probe
gtgtggcctaggaagttttccagat

SEQ ID NO: 20702 - DNA, 25 bp, probe
tgtaacaggtcttattggaattgct

SEQ ID NO: 20703 - DNA, 25 bp, probe
atgtaacaggtcttattggaattgc

SEQ ID NO: 20704 - DNA, 25 bp, probe
gtaacaggtcttattggaattgctt

SEQ ID NO: 20705 - DNA, 25 bp, probe
acaggtcttattggaattgcttatg

SEQ ID NO: 20706 - DNA, 25 bp, probe
caggtcttattggaattgcttatga

SEQ ID NO: 20707 - DNA, 25 bp, probe
aacaggtcttattggaattgcttat

SEQ ID NO: 20708 - DNA, 25 bp, probe
aggtcttattggaattgcttatgaa

SEQ ID NO: 20709 - DNA, 25 bp, probe
tagcaggagttattaaccagccata

SEQ ID NO: 20710 - DNA, 25 bp, probe
taacaggtcttattggaattgctta

SEQ ID NO: 20711 - DNA, 25 bp, probe
gtcttattggaattgcttatgaagg

SEQ ID NO: 20712 - DNA, 25 bp, probe
ggtcttattggaattgcttatgaag

SEQ ID NO: 20713 - DNA, 25 bp, probe
agcaggagttattaaccagccatat

SEQ ID NO: 20714 - DNA, 25 bp, probe
atagcaggagttattaaccagccat

SEQ ID NO: 20715 - DNA, 25 bp, probe
tcttattggaattgcttatgaagga

SEQ ID NO: 20716 - DNA, 25 bp, probe
aagccatagcaggagttattaacca

SEQ ID NO: 20717 - DNA, 25 bp, probe
aatgtaacaggtcttattggaattg

SEQ ID NO: 20718 - DNA, 25 bp, probe
agccatagcaggagttattaaccag

SEQ ID NO: 20719 - DNA, 25 bp, probe
cttattggaattgcttatgaaggaa

SEQ ID NO: 20720 - DNA, 25 bp, probe
catagcaggagttattaaccagcca

SEQ ID NO: 20721 - DNA, 25 bp, probe
tgacaatgtaacaggtcttattgga

SEQ ID NO: 20722 - DNA, 25 bp, probe
ttgacaatgtaacaggtcttattgg

SEQ ID NO: 20723 - DNA, 25 bp, probe
gacaatgtaacaggtcttattggaa

SEQ ID NO: 20724 - DNA, 25 bp, probe
ccatagcaggagttattaaccagcc

SEQ ID NO: 20725 - DNA, 25 bp, probe
aaagccatagcaggagttattaacc

SEQ ID NO: 20726 - DNA, 25 bp, probe
acaatgtaacaggtcttattggaat

SEQ ID NO: 20727 - DNA, 25 bp, probe
cttgacaatgtaacaggtcttattg

SEQ ID NO: 20728 - DNA, 25 bp, probe
gccatagcaggagttattaaccagc

SEQ ID NO: 20729 - DNA, 25 bp, probe
caatgtaacaggtcttattggaatt

SEQ ID NO: 20730 - DNA, 25 bp, probe
ttattggaattgcttatgaaggaaa

SEQ ID NO: 20731 - DNA, 25 bp, probe
ggaaaagccatagcaggagttatta

SEQ ID NO: 20732 - DNA, 25 bp, probe
gaaaagccatagcaggagttattaa

SEQ ID NO: 20733 - DNA, 25 bp, probe
aaaagccatagcaggagttattaac

SEQ ID NO: 20734 - DNA, 25 bp, probe
aggaaaagccatagcaggagttatt

SEQ ID NO: 20735 - DNA, 25 bp, probe
aaggaaaagccatagcaggagttat

SEQ ID NO: 20736 - DNA, 25 bp, probe
attggaattgcttatgaaggaaaag

SEQ ID NO: 20737 - DNA, 25 bp, probe
gaaggaaaagccatagcaggagtta

SEQ ID NO: 20738 - DNA, 25 bp, probe
cttatgaaggaaaagccatagcagg

SEQ ID NO: 20739 - DNA, 25 bp, probe
ttatgaaggaaaagccatagcagga

SEQ ID NO: 20740 - DNA, 25 bp, probe
tattggaattgcttatgaaggaaaa

SEQ ID NO: 20741 - DNA, 25 bp, probe
tatgaaggaaaagccatagcaggag

SEQ ID NO: 20742 - DNA, 25 bp, probe
atgaaggaaaagccatagcaggagt

SEQ ID NO: 20743 - DNA, 25 bp, probe
tgaaggaaaagccatagcaggagtt

SEQ ID NO: 20744 - DNA, 25 bp, probe
attgcttatgaaggaaaagccatag

SEQ ID NO: 20745 - DNA, 25 bp, probe
gaattgcttatgaaggaaaagccat

SEQ ID NO: 20746 - DNA, 25 bp, probe
gagtaacacctcattacaccgaagc

SEQ ID NO: 20747 - DNA, 25 bp, probe
taacacctcattacaccgaagcctg

SEQ ID NO: 20748 - DNA, 25 bp, probe
aaatagaccaacgctaaagcctgtg

SEQ ID NO: 20749 - DNA, 25 bp, probe
tgagtaacacctcattacaccgaag

SEQ ID NO: 20750 - DNA, 25 bp, probe
ctgagtaacacctcattacaccgaa

SEQ ID NO: 20751 - DNA, 25 bp, probe
ggtctgagtaacacctcattacacc

SEQ ID NO: 20752 - DNA, 25 bp, probe
ctaggttcacggtctgagtaacacc

SEQ ID NO: 20753 - DNA, 25 bp, probe
gtaacacctcattacaccgaagcct

SEQ ID NO: 20754 - DNA, 25 bp, probe
agtaacacctcattacaccgaagcc

SEQ ID NO: 20755 - DNA, 25 bp, probe
tctgagtaacacctcattacaccga

SEQ ID NO: 20756 - DNA, 25 bp, probe
gtctgagtaacacctcattacaccg

SEQ ID NO: 20757 - DNA, 25 bp, probe
cggtctgagtaacacctcattacac

SEQ ID NO: 20758 - DNA, 25 bp, probe
cacggtctgagtaacacctcattac

SEQ ID NO: 20759 - DNA, 25 bp, probe
tcacggtctgagtaacacctcatta

SEQ ID NO: 20760 - DNA, 25 bp, probe
gaggatcacttgagcacaggagttc

SEQ ID NO: 20761 - DNA, 25 bp, probe
acggtctgagtaacacctcattaca

SEQ ID NO: 20762 - DNA, 25 bp, probe
aaaatagaccaacgctaaagcctgt

SEQ ID NO: 20763 - DNA, 25 bp, probe
ttcacggtctgagtaacacctcatt

SEQ ID NO: 20764 - DNA, 25 bp, probe
cttgtacggagtctttcccagaagg

SEQ ID NO: 20765 - DNA, 25 bp, probe
gttcacggtctgagtaacacctcat

SEQ ID NO: 20766 - DNA, 25 bp, probe
cctaggttcacggtctgagtaacac

SEQ ID NO: 20767 - DNA, 25 bp, probe
gcttgtacggagtctttcccagaag

SEQ ID NO: 20768 - DNA, 25 bp, probe
taggttcacggtctgagtaacacct

SEQ ID NO: 20769 - DNA, 25 bp, probe
gatgtgtggagttatggtgtgtgat

SEQ ID NO: 20770 - DNA, 25 bp, probe
atgtgtggagttatggtgtgtgatg

SEQ ID NO: 20771 - DNA, 25 bp, probe
cagagtgatgtgtggagttatggtg

SEQ ID NO: 20772 - DNA, 25 bp, probe
gagtgatgtgtggagttatggtgtg

SEQ ID NO: 20773 - DNA, 25 bp, probe
agagtgatgtgtggagttatggtgt

SEQ ID NO: 20774 - DNA, 25 bp, probe
gacattgacgagacagagtaccatg

SEQ ID NO: 20775 - DNA, 25 bp, probe
tgatgtgtggagttatggtgtgtga

SEQ ID NO: 20776 - DNA, 25 bp, probe
gtgatgtgtggagttatggtgtgtg

SEQ ID NO: 20777 - DNA, 25 bp, probe
agtgatgtgtggagttatggtgtgt

SEQ ID NO: 20778 - DNA, 25 bp, probe
caccagagtgatgtgtggagttatg

SEQ ID NO: 20779 - DNA, 25 bp, probe
ggacattgacgagacagagtaccat

SEQ ID NO: 20780 - DNA, 25 bp, probe
tgtgtggagttatggtgtgtgatgg

SEQ ID NO: 20781 - DNA, 25 bp, probe
aagagtcccaaccatgtcaaaatta

SEQ ID NO: 20782 - DNA, 25 bp, probe
ccagagtgatgtgtggagttatggt

SEQ ID NO: 20783 - DNA, 25 bp, probe
accagagtgatgtgtggagttatgg

SEQ ID NO: 20784 - DNA, 25 bp, probe
agagtcccaaccatgtcaaaattac

SEQ ID NO: 20785 - DNA, 25 bp, probe
acattgacgagacagagtaccatgc

SEQ ID NO: 20786 - DNA, 25 bp, probe
ctggacattgacgagacagagtacc

SEQ ID NO: 20787 - DNA, 25 bp, probe
aaccatgtcaaaattacagacttcg

SEQ ID NO: 20788 - DNA, 25 bp, probe
ccaaccatgtcaaaattacagactt

SEQ ID NO: 20789 - DNA, 25 bp, probe
caagagtcccaaccatgtcaaaatt

SEQ ID NO: 20790 - DNA, 25 bp, probe
attgacgagacagagtaccatgcag

SEQ ID NO: 20791 - DNA, 25 bp, probe
caaggttaggtgaaggaccaaggag

SEQ ID NO: 20792 - DNA, 25 bp, probe
caaccatgtcaaaattacagacttc

SEQ ID NO: 20793 - DNA, 25 bp, probe
gtcccaaccatgtcaaaattacaga

SEQ ID NO: 20794 - DNA, 25 bp, probe
agtcccaaccatgtcaaaattacag

SEQ ID NO: 20795 - DNA, 25 bp, probe
gagtcccaaccatgtcaaaattaca

SEQ ID NO: 20796 - DNA, 25 bp, probe
cccaaccatgtcaaaattacagact

SEQ ID NO: 20797 - DNA, 25 bp, probe
tcccaaccatgtcaaaattacagac

SEQ ID NO: 20798 - DNA, 25 bp, probe
accatgtcaaaattacagacttcgg

SEQ ID NO: 20799 - DNA, 25 bp, probe
tcaagagtcccaaccatgtcaaaat

SEQ ID NO: 20800 - DNA, 25 bp, probe
cattgacgagacagagtaccatgca

SEQ ID NO: 20801 - DNA, 25 bp, probe
gctggacattgacgagacagagtac

SEQ ID NO: 20802 - DNA, 25 bp, probe
ccatgtcaaaattacagacttcggg

SEQ ID NO: 20803 - DNA, 25 bp, probe
atgtcaaaattacagacttcgggct

SEQ ID NO: 20804 - DNA, 25 bp, probe
gacgagacagagtaccatgcagatg

SEQ ID NO: 20805 - DNA, 25 bp, probe
tggacattgacgagacagagtacca

SEQ ID NO: 20806 - DNA, 25 bp, probe
catgtcaaaattacagacttcgggc

SEQ ID NO: 20807 - DNA, 25 bp, probe
tgacgagacagagtaccatgcagat

SEQ ID NO: 20808 - DNA, 25 bp, probe
gtcaagagtcccaaccatgtcaaaa

SEQ ID NO: 20809 - DNA, 25 bp, probe
tgtcaaaattacagacttcgggctg

SEQ ID NO: 20810 - DNA, 25 bp, probe
gtcaaaattacagacttcgggctgg

SEQ ID NO: 20811 - DNA, 25 bp, probe
ggtcaagagtcccaaccatgtcaaa

SEQ ID NO: 20812 - DNA, 25 bp, probe
cacagttggaggacttcctcttctg

SEQ ID NO: 20813 - DNA, 25 bp, probe
gttagtggcatctatattggacagg

SEQ ID NO: 20814 - DNA, 25 bp, probe
ggttagtggcatctatattggacag

SEQ ID NO: 20815 - DNA, 25 bp, probe
gtggttagtggcatctatattggac

SEQ ID NO: 20816 - DNA, 25 bp, probe
tggttagtggcatctatattggaca

SEQ ID NO: 20817 - DNA, 25 bp, probe
gaagaatgaacatcagaagacacag

SEQ ID NO: 20818 - DNA, 25 bp, probe
tgaagaatgaacatcagaagacaca

SEQ ID NO: 20819 - DNA, 25 bp, probe
atgctgttattccttacctagagaa

SEQ ID NO: 20820 - DNA, 25 bp, probe
aagaatgaacatcagaagacacagc

SEQ ID NO: 20821 - DNA, 25 bp, probe
tatgctgttattccttacctagaga

SEQ ID NO: 20822 - DNA, 25 bp, probe
cgtggttagtggcatctatattgga

SEQ ID NO: 20823 - DNA, 25 bp, probe
gtcagattggtgaagaattggtgag

SEQ ID NO: 20824 - DNA, 25 bp, probe
ggtgtgtacttagctcagatacttg

SEQ ID NO: 20825 - DNA, 25 bp, probe
ctgtcagattggtgaagaattggtg

SEQ ID NO: 20826 - DNA, 25 bp, probe
tggtgtgtacttagctcagatactt

SEQ ID NO: 20827 - DNA, 25 bp, probe
ttatgctgttattccttacctagag

SEQ ID NO: 20828 - DNA, 25 bp, probe
gtgtgtacttagctcagatacttga

SEQ ID NO: 20829 - DNA, 25 bp, probe
tgtcagattggtgaagaattggtga

SEQ ID NO: 20830 - DNA, 25 bp, probe
cctttgatgagacagtgatagtgat

SEQ ID NO: 20831 - DNA, 25 bp, probe
ccctttatgctgttattccttacct

SEQ ID NO: 20832 - DNA, 25 bp, probe
tccctttatgctgttattccttacc

SEQ ID NO: 20833 - DNA, 25 bp, probe
gatgagacagtgatagtgatttggt

SEQ ID NO: 20834 - DNA, 25 bp, probe
tgatgagacagtgatagtgatttgg

SEQ ID NO: 20835 - DNA, 25 bp, probe
gtacttagctcagatacttgattgc

SEQ ID NO: 20836 - DNA, 25 bp, probe
ctaacagtttcaataccagcaagtc

SEQ ID NO: 20837 - DNA, 25 bp, probe
tgagacagtgatagtgatttggtaa

SEQ ID NO: 20838 - DNA, 25 bp, probe
aacagtttcaataccagcaagtcta

SEQ ID NO: 20839 - DNA, 25 bp, probe
taacagtttcaataccagcaagtct

SEQ ID NO: 20840 - DNA, 25 bp, probe
atgagacagtgatagtgatttggta

SEQ ID NO: 20841 - DNA, 25 bp, probe
tctcaagttgttaagtttcctctgg

SEQ ID NO: 20842 - DNA, 25 bp, probe
tgtgtacttagctcagatacttgat

SEQ ID NO: 20843 - DNA, 25 bp, probe
tcctttgatgagacagtgatagtga

SEQ ID NO: 20844 - DNA, 25 bp, probe
ttctcaagttgttaagtttcctctg

SEQ ID NO: 20845 - DNA, 25 bp, probe
gttctcaagttgttaagtttcctct

SEQ ID NO: 20846 - DNA, 25 bp, probe
ttgatgagacagtgatagtgatttg

SEQ ID NO: 20847 - DNA, 25 bp, probe
ttccctttatgctgttattccttac

SEQ ID NO: 20848 - DNA, 25 bp, probe
tacttagctcagatacttgattgca

SEQ ID NO: 20849 - DNA, 25 bp, probe
tcagattggtgaagaattggtgagg

SEQ ID NO: 20850 - DNA, 25 bp, probe
gagacagtgatagtgatttggtaaa

SEQ ID NO: 20851 - DNA, 25 bp, probe
ctttgatgagacagtgatagtgatt

SEQ ID NO: 20852 - DNA, 25 bp, probe
acagtttcaataccagcaagtctag

SEQ ID NO: 20853 - DNA, 25 bp, probe
actaacagtttcaataccagcaagt

SEQ ID NO: 20854 - DNA, 25 bp, probe
ttagtggcatctatattggacaggg

SEQ ID NO: 20855 - DNA, 25 bp, probe
tgctgttattccttacctagagaaa

SEQ ID NO: 20856 - DNA, 25 bp, probe
tccagaaggagctagagagtatatt

SEQ ID NO: 20857 - DNA, 25 bp, probe
taacgaccacaagactatcaaggag

SEQ ID NO: 20858 - DNA, 25 bp, probe
ctaacgaccacaagactatcaagga

SEQ ID NO: 20859 - DNA, 25 bp, probe
agatgaagagtgaagtgaaccagtc

SEQ ID NO: 20860 - DNA, 25 bp, probe
gaccacaagactatcaaggagactg

SEQ ID NO: 20861 - DNA, 25 bp, probe
cagatgaagagtgaagtgaaccagt

SEQ ID NO: 20862 - DNA, 25 bp, probe
acagatgaagagtgaagtgaaccag

SEQ ID NO: 20863 - DNA, 25 bp, probe
ttatataccaagcagatcactgtcg

SEQ ID NO: 20864 - DNA, 25 bp, probe
gttatataccaagcagatcactgtc

SEQ ID NO: 20865 - DNA, 25 bp, probe
gtcatcaggttatataccaagcaga

SEQ ID NO: 20866 - DNA, 25 bp, probe
cttggcatgagtatgaacacaactt

SEQ ID NO: 20867 - DNA, 25 bp, probe
ggttatataccaagcagatcactgt

SEQ ID NO: 20868 - DNA, 25 bp, probe
aggttatataccaagcagatcactg

SEQ ID NO: 20869 - DNA, 25 bp, probe
caggttatataccaagcagatcact

SEQ ID NO: 20870 - DNA, 25 bp, probe
tcaggttatataccaagcagatcac

SEQ ID NO: 20871 - DNA, 25 bp, probe
atttaagtggcaaagaggaaacaaa

SEQ ID NO: 20872 - DNA, 25 bp, probe
catttaagtggcaaagaggaaacaa

SEQ ID NO: 20873 - DNA, 25 bp, probe
tcatcaggttatataccaagcagat

SEQ ID NO: 20874 - DNA, 25 bp, probe
aaattggagaaggacagtatggaaa

SEQ ID NO: 20875 - DNA, 25 bp, probe
atcaggttatataccaagcagatca

SEQ ID NO: 20876 - DNA, 25 bp, probe
gacatttaagtggcaaagaggaaac

SEQ ID NO: 20877 - DNA, 25 bp, probe
cgtcatcaggttatataccaagcag

SEQ ID NO: 20878 - DNA, 25 bp, probe
gatgaagagtgaagtgaaccagtcc

SEQ ID NO: 20879 - DNA, 25 bp, probe
catcaggttatataccaagcagatc

SEQ ID NO: 20880 - DNA, 25 bp, probe
gccaatatcttccttacgtcatctg

SEQ ID NO: 20881 - DNA, 25 bp, probe
tgacatttaagtggcaaagaggaaa

SEQ ID NO: 20882 - DNA, 25 bp, probe
aacgaccacaagactatcaaggaga

SEQ ID NO: 20883 - DNA, 25 bp, probe
gcctaacgaccacaagactatcaag

SEQ ID NO: 20884 - DNA, 25 bp, probe
acgttaagtgccattactactgtac

SEQ ID NO: 20885 - DNA, 25 bp, probe
acatttaagtggcaaagaggaaaca

SEQ ID NO: 20886 - DNA, 25 bp, probe
tgccaatatcttccttacgtcatct

SEQ ID NO: 20887 - DNA, 25 bp, probe
gtgccaatatcttccttacgtcatc

SEQ ID NO: 20888 - DNA, 25 bp, probe
agacatcaaaggtgccaatatcttc

SEQ ID NO: 20889 - DNA, 25 bp, probe
gagacatcaaaggtgccaatatctt

SEQ ID NO: 20890 - DNA, 25 bp, probe
cgagagatgaggagaaagaatatca

SEQ ID NO: 20891 - DNA, 25 bp, probe
aggagcacgtcatcaggttatatac

SEQ ID NO: 20892 - DNA, 25 bp, probe
caggagcacgtcatcaggttatata

SEQ ID NO: 20893 - DNA, 25 bp, probe
gtgacatttaagtggcaaagaggaa

SEQ ID NO: 20894 - DNA, 25 bp, probe
aaggtgacatttaagtggcaaagag

SEQ ID NO: 20895 - DNA, 25 bp, probe
gaaggtgacatttaagtggcaaaga

SEQ ID NO: 20896 - DNA, 25 bp, probe
tatataccaagcagatcactgtcgc

SEQ ID NO: 20897 - DNA, 25 bp, probe
ccttacgtcatctggactaatcaag

SEQ ID NO: 20898 - DNA, 25 bp, probe
ttggactgaggaaggtgacatttaa

SEQ ID NO: 20899 - DNA, 25 bp, probe
agcctaacgaccacaagactatcaa

SEQ ID NO: 20900 - DNA, 25 bp, probe
ttcagcctaacgaccacaagactat

SEQ ID NO: 20901 - DNA, 25 bp, probe
cctcaattactccaacatagacaga

SEQ ID NO: 20902 - DNA, 25 bp, probe
tcctcaattactccaacatagacag

SEQ ID NO: 20903 - DNA, 25 bp, probe
tactccaacatagacagagagaaca

SEQ ID NO: 20904 - DNA, 25 bp, probe
ttactccaacatagacagagagaac

SEQ ID NO: 20905 - DNA, 25 bp, probe
actccaacatagacagagagaacaa

SEQ ID NO: 20906 - DNA, 25 bp, probe
tcaattactccaacatagacagaga

SEQ ID NO: 20907 - DNA, 25 bp, probe
gtcctcaattactccaacatagaca

SEQ ID NO: 20908 - DNA, 25 bp, probe
attactccaacatagacagagagaa

SEQ ID NO: 20909 - DNA, 25 bp, probe
aattactccaacatagacagagaga

SEQ ID NO: 20910 - DNA, 25 bp, probe
caattactccaacatagacagagag

SEQ ID NO: 20911 - DNA, 25 bp, probe
ctcaattactccaacatagacagag

SEQ ID NO: 20912 - DNA, 25 bp, probe
cgtcctcaattactccaacatagac

SEQ ID NO: 20913 - DNA, 25 bp, probe
cgaattacataatgacgaatctgaa

SEQ ID NO: 20914 - DNA, 25 bp, probe
acttgttattgtgctctcgaattac

SEQ ID NO: 20915 - DNA, 25 bp, probe
aacttgttattgtgctctcgaatta

SEQ ID NO: 20916 - DNA, 25 bp, probe
agaacgatgatagtaattgagaaga

SEQ ID NO: 20917 - DNA, 25 bp, probe
tacgtcctcaattactccaacatag

SEQ ID NO: 20918 - DNA, 25 bp, probe
gtacgtcctcaattactccaacata

SEQ ID NO: 20919 - DNA, 25 bp, probe
tccaacatagacagagagaacaaat

SEQ ID NO: 20920 - DNA, 25 bp, probe
tgctccttctcctaatttcttgatt

SEQ ID NO: 20921 - DNA, 25 bp, probe
aatgctccttctcctaatttcttga

SEQ ID NO: 20922 - DNA, 25 bp, probe
atgctccttctcctaatttcttgat

SEQ ID NO: 20923 - DNA, 25 bp, probe
aattggacggatgattacagtttct

SEQ ID NO: 20924 - DNA, 25 bp, probe
gattaatgtcacgtcagaatgttgc

SEQ ID NO: 20925 - DNA, 25 bp, probe
acgtcctcaattactccaacataga

SEQ ID NO: 20926 - DNA, 25 bp, probe
cttgttattgtgctctcgaattaca

SEQ ID NO: 20927 - DNA, 25 bp, probe
attaatgtcacgtcagaatgttgct

SEQ ID NO: 20928 - DNA, 25 bp, probe
ttgtgctctcgaattacataatgac

SEQ ID NO: 20929 - DNA, 25 bp, probe
tatttcctatgcgaatttctcccaa

SEQ ID NO: 20930 - DNA, 25 bp, probe
tgattaatgtcacgtcagaatgttg

SEQ ID NO: 20931 - DNA, 25 bp, probe
cttgattaatgtcacgtcagaatgt

SEQ ID NO: 20932 - DNA, 25 bp, probe
ccaacatagacagagagaacaaatt

SEQ ID NO: 20933 - DNA, 25 bp, probe
tcttgattaatgtcacgtcagaatg

SEQ ID NO: 20934 - DNA, 25 bp, probe
ttaatgtcacgtcagaatgttgctt

SEQ ID NO: 20935 - DNA, 25 bp, probe
ttgttattgtgctctcgaattacat

SEQ ID NO: 20936 - DNA, 25 bp, probe
ttgattaatgtcacgtcagaatgtt

SEQ ID NO: 20937 - DNA, 25 bp, probe
atttcctatgcgaatttctcccaat

SEQ ID NO: 20938 - DNA, 25 bp, probe
gtatttcctatgcgaatttctccca

SEQ ID NO: 20939 - DNA, 25 bp, probe
tctccaaatgctccttctcctaatt

SEQ ID NO: 20940 - DNA, 25 bp, probe
ttgacggtatttcctatgcgaattt

SEQ ID NO: 20941 - DNA, 25 bp, probe
tttgacggtatttcctatgcgaatt

SEQ ID NO: 20942 - DNA, 25 bp, probe
ctccaacatagacagagagaacaaa

SEQ ID NO: 20943 - DNA, 25 bp, probe
tgtgctctcgaattacataatgacg

SEQ ID NO: 20944 - DNA, 25 bp, probe
attgtgctctcgaattacataatga

SEQ ID NO: 20945 - DNA, 25 bp, probe
aagatccaccgagatatcaaagctg

SEQ ID NO: 20946 - DNA, 25 bp, probe
caagatccaccgagatatcaaagct

SEQ ID NO: 20947 - DNA, 25 bp, probe
cgcaagatccaccgagatatcaaag

SEQ ID NO: 20948 - DNA, 25 bp, probe
gcaagatccaccgagatatcaaagc

SEQ ID NO: 20949 - DNA, 25 bp, probe
agatccaccgagatatcaaagctgc

SEQ ID NO: 20950 - DNA, 25 bp, probe
attatctgcactcagagcgcaagat

SEQ ID NO: 20951 - DNA, 25 bp, probe
ttatctgcactcagagcgcaagatc

SEQ ID NO: 20952 - DNA, 25 bp, probe
gattatctgcactcagagcgcaaga

SEQ ID NO: 20953 - DNA, 25 bp, probe
tggcaatacaacacatcaattaaca

SEQ ID NO: 20954 - DNA, 25 bp, probe
gtggaatctgaattgttgtgtgaag

SEQ ID NO: 20955 - DNA, 25 bp, probe
tagcatcatcagtcagaatcaggat

SEQ ID NO: 20956 - DNA, 25 bp, probe
agtggaatctgaattgttgtgtgaa

SEQ ID NO: 20957 - DNA, 25 bp, probe
ttgaagaggcagttaggattaggtt

SEQ ID NO: 20958 - DNA, 25 bp, probe
ggcaatacaacacatcaattaacat

SEQ ID NO: 20959 - DNA, 25 bp, probe
gaagaatgactgtaagcctctgatg

SEQ ID NO: 20960 - DNA, 25 bp, probe
ctgtcatctcattgaagaactgaat

SEQ ID NO: 20961 - DNA, 25 bp, probe
atggcaatacaacacatcaattaac

SEQ ID NO: 20962 - DNA, 25 bp, probe
tggaatctgaattgttgtgtgaagg

SEQ ID NO: 20963 - DNA, 25 bp, probe
gctgtcatctcattgaagaactgaa

SEQ ID NO: 20964 - DNA, 25 bp, probe
tccagattgacttcttgaaggtatg

SEQ ID NO: 20965 - DNA, 25 bp, probe
ctctgatgcctgacagtatattctc

SEQ ID NO: 20966 - DNA, 25 bp, probe
gagaacaaccttcaactcttaccag

SEQ ID NO: 20967 - DNA, 25 bp, probe
tgatgcctgacagtatattctccac

SEQ ID NO: 20968 - DNA, 25 bp, probe
ctagcatcatcagtcagaatcagga

SEQ ID NO: 20969 - DNA, 25 bp, probe
aacacctagcatcatcagtcagaat

SEQ ID NO: 20970 - DNA, 25 bp, probe
tgaataatattgagcaggtaggtgg

SEQ ID NO: 20971 - DNA, 25 bp, probe
gacagtatattctccacctgactct

SEQ ID NO: 20972 - DNA, 25 bp, probe
acctagcatcatcagtcagaatcag

SEQ ID NO: 20973 - DNA, 25 bp, probe
acagtatattctccacctgactctg

SEQ ID NO: 20974 - DNA, 25 bp, probe
tgacagtatattctccacctgactc

SEQ ID NO: 20975 - DNA, 25 bp, probe
ctgacagtatattctccacctgact

SEQ ID NO: 20976 - DNA, 25 bp, probe
ggaagaatgactgtaagcctctgat

SEQ ID NO: 20977 - DNA, 25 bp, probe
cacctagcatcatcagtcagaatca

SEQ ID NO: 20978 - DNA, 25 bp, probe
acacctagcatcatcagtcagaatc

SEQ ID NO: 20979 - DNA, 25 bp, probe
tctgatgcctgacagtatattctcc

SEQ ID NO: 20980 - DNA, 25 bp, probe
cctctgatgcctgacagtatattct

SEQ ID NO: 20981 - DNA, 25 bp, probe
tgtcatctcattgaagaactgaata

SEQ ID NO: 20982 - DNA, 25 bp, probe
gtccagattgacttcttgaaggtat

SEQ ID NO: 20983 - DNA, 25 bp, probe
ccagattgacttcttgaaggtatgc

SEQ ID NO: 20984 - DNA, 25 bp, probe
ataaggactgaagtacctgtcacta

SEQ ID NO: 20985 - DNA, 25 bp, probe
tataaggactgaagtacctgtcact

SEQ ID NO: 20986 - DNA, 25 bp, probe
gtataaggactgaagtacctgtcac

SEQ ID NO: 20987 - DNA, 25 bp, probe
agtataaggactgaagtacctgtca

SEQ ID NO: 20988 - DNA, 25 bp, probe
taaggactgaagtacctgtcactaa

SEQ ID NO: 20989 - DNA, 25 bp, probe
gagtataaggactgaagtacctgtc

SEQ ID NO: 20990 - DNA, 25 bp, probe
ctgatgcctgacagtatattctcca

SEQ ID NO: 20991 - DNA, 25 bp, probe
ggtgacttcttagtaaccagagtta

SEQ ID NO: 20992 - DNA, 25 bp, probe
cagtggaatctgaattgttgtgtga

SEQ ID NO: 20993 - DNA, 25 bp, probe
gatgcctgacagtatattctccacc

SEQ ID NO: 20994 - DNA, 25 bp, probe
ggagtataaggactgaagtacctgt

SEQ ID NO: 20995 - DNA, 25 bp, probe
tcatgtccagattgacttcttgaag

SEQ ID NO: 20996 - DNA, 25 bp, probe
ctcatgtccagattgacttcttgaa

SEQ ID NO: 20997 - DNA, 25 bp, probe
tatgaatggataggcttagtgctac

SEQ ID NO: 20998 - DNA, 25 bp, probe
ttatgaatggataggcttagtgcta

SEQ ID NO: 20999 - DNA, 25 bp, probe
acaggacttaggattactcattaga

SEQ ID NO: 21000 - DNA, 25 bp, probe
tctacaggacttaggattactcatt

SEQ ID NO: 21001 - DNA, 25 bp, probe
gagtcacaggctagatattataggt

SEQ ID NO: 21002 - DNA, 25 bp, probe
aagtaagagtcacaggctagatatt

SEQ ID NO: 21003 - DNA, 25 bp, probe
atgaatggataggcttagtgctact

SEQ ID NO: 21004 - DNA, 25 bp, probe
agagtcacaggctagatattatagg

SEQ ID NO: 21005 - DNA, 25 bp, probe
tacacagtcttatgttgcttaaccg

SEQ ID NO: 21006 - DNA, 25 bp, probe
agcctgttatagatagacaagaact

SEQ ID NO: 21007 - DNA, 25 bp, probe
gtacacagtcttatgttgcttaacc

SEQ ID NO: 21008 - DNA, 25 bp, probe
ggtacacagtcttatgttgcttaac

SEQ ID NO: 21009 - DNA, 25 bp, probe
aggtacacagtcttatgttgcttaa

SEQ ID NO: 21010 - DNA, 25 bp, probe
gcctgttatagatagacaagaactc

SEQ ID NO: 21011 - DNA, 25 bp, probe
gtaggtacacagtcttatgttgctt

SEQ ID NO: 21012 - DNA, 25 bp, probe
agtaagagtcacaggctagatatta

SEQ ID NO: 21013 - DNA, 25 bp, probe
gtctacaggacttaggattactcat

SEQ ID NO: 21014 - DNA, 25 bp, probe
atgtaggtacacagtcttatgttgc

SEQ ID NO: 21015 - DNA, 25 bp, probe
taggtacacagtcttatgttgctta

SEQ ID NO: 21016 - DNA, 25 bp, probe
gtcacaggctagatattataggtgt

SEQ ID NO: 21017 - DNA, 25 bp, probe
ctcatgtaggtacacagtcttatgt

SEQ ID NO: 21018 - DNA, 25 bp, probe
agtcacaggctagatattataggtg

SEQ ID NO: 21019 - DNA, 25 bp, probe
cttaggattactcattagattgtgc

SEQ ID NO: 21020 - DNA, 25 bp, probe
catgtaggtacacagtcttatgttg

SEQ ID NO: 21021 - DNA, 25 bp, probe
tcatgtaggtacacagtcttatgtt

SEQ ID NO: 21022 - DNA, 25 bp, probe
gaatggataggcttagtgctactac

SEQ ID NO: 21023 - DNA, 25 bp, probe
aagcctgttatagatagacaagaac

SEQ ID NO: 21024 - DNA, 25 bp, probe
tgaatggataggcttagtgctacta

SEQ ID NO: 21025 - DNA, 25 bp, probe
tgtaggtacacagtcttatgttgct

SEQ ID NO: 21026 - DNA, 25 bp, probe
acaggctagatattataggtgttct

SEQ ID NO: 21027 - DNA, 25 bp, probe
cctcatgtaggtacacagtcttatg

SEQ ID NO: 21028 - DNA, 25 bp, probe
agatagacaagaactcaatcaatgt

SEQ ID NO: 21029 - DNA, 25 bp, probe
atggataggcttagtgctactacaa

SEQ ID NO: 21030 - DNA, 25 bp, probe
aatggataggcttagtgctactaca

SEQ ID NO: 21031 - DNA, 25 bp, probe
tcttctgtccattctcatctttcaa

SEQ ID NO: 21032 - DNA, 25 bp, probe
ttcttctgtccattctcatctttca

SEQ ID NO: 21033 - DNA, 25 bp, probe
tttatgaatggataggcttagtgct

SEQ ID NO: 21034 - DNA, 25 bp, probe
tcacaggctagatattataggtgtt

SEQ ID NO: 21035 - DNA, 25 bp, probe
ttctttcttggtttcctccttgata

SEQ ID NO: 21036 - DNA, 25 bp, probe
gggataaatggcacaatagtttcaa

SEQ ID NO: 21037 - DNA, 25 bp, probe
agggataaatggcacaatagtttca

SEQ ID NO: 21038 - DNA, 25 bp, probe
tcctgtaaaccgatttcttgtaaac

SEQ ID NO: 21039 - DNA, 25 bp, probe
taaatggcacaatagtttcaaaggc

SEQ ID NO: 21040 - DNA, 25 bp, probe
tctttcttggtttcctccttgatat

SEQ ID NO: 21041 - DNA, 25 bp, probe
gcaaggtgtagtatgtccagtaata

SEQ ID NO: 21042 - DNA, 25 bp, probe
ccttgaagttatgtgaagtgtctag

SEQ ID NO: 21043 - DNA, 25 bp, probe
gccacagataataggagtcaactat

SEQ ID NO: 21044 - DNA, 25 bp, probe
ggcaaggtgtagtatgtccagtaat

SEQ ID NO: 21045 - DNA, 25 bp, probe
gaactataatcacagacactatggt

SEQ ID NO: 21046 - DNA, 25 bp, probe
agaactataatcacagacactatgg

SEQ ID NO: 21047 - DNA, 25 bp, probe
tgccacagtagcgtaacaataagaa

SEQ ID NO: 21048 - DNA, 25 bp, probe
cttgccacagtagcgtaacaataag

SEQ ID NO: 21049 - DNA, 25 bp, probe
cgttaagaactataatcacagacac

SEQ ID NO: 21050 - DNA, 25 bp, probe
tcgttaagaactataatcacagaca

SEQ ID NO: 21051 - DNA, 25 bp, probe
caaggtgtagtatgtccagtaatac

SEQ ID NO: 21052 - DNA, 25 bp, probe
aactataatcacagacactatggtt

SEQ ID NO: 21053 - DNA, 25 bp, probe
ttgccacagtagcgtaacaataaga

SEQ ID NO: 21054 - DNA, 25 bp, probe
catctcaggcaaggtgtagtatgtc

SEQ ID NO: 21055 - DNA, 25 bp, probe
ccacagtagcgtaacaataagaaat

SEQ ID NO: 21056 - DNA, 25 bp, probe
aggcaaggtgtagtatgtccagtaa

SEQ ID NO: 21057 - DNA, 25 bp, probe
gatatgatgtccgctctgatgtctg

SEQ ID NO: 21058 - DNA, 25 bp, probe
cccttgaagttatgtgaagtgtcta

SEQ ID NO: 21059 - DNA, 25 bp, probe
tttcccttgaagttatgtgaagtgt

SEQ ID NO: 21060 - DNA, 25 bp, probe
atttcccttgaagttatgtgaagtg

SEQ ID NO: 21061 - DNA, 25 bp, probe
tatgtttatgctgattcaaccttgc

SEQ ID NO: 21062 - DNA, 25 bp, probe
aggagtcaactattatctgcaactg

SEQ ID NO: 21063 - DNA, 25 bp, probe
ttcccttgaagttatgtgaagtgtc

SEQ ID NO: 21064 - DNA, 25 bp, probe
taggagtcaactattatctgcaact

SEQ ID NO: 21065 - DNA, 25 bp, probe
gccacagtagcgtaacaataagaaa

SEQ ID NO: 21066 - DNA, 25 bp, probe
gtatgtttatgctgattcaaccttg

SEQ ID NO: 21067 - DNA, 25 bp, probe
tcccttgaagttatgtgaagtgtct

SEQ ID NO: 21068 - DNA, 25 bp, probe
tcagacttgattatttcccttgaag

SEQ ID NO: 21069 - DNA, 25 bp, probe
ttcgttaagaactataatcacagac

SEQ ID NO: 21070 - DNA, 25 bp, probe
tgaagttatgtgaagtgtctagagc

SEQ ID NO: 21071 - DNA, 25 bp, probe
ggagtcaactattatctgcaactgc

SEQ ID NO: 21072 - DNA, 25 bp, probe
caggcaaggtgtagtatgtccagta

SEQ ID NO: 21073 - DNA, 25 bp, probe
atctcaggcaaggtgtagtatgtcc

SEQ ID NO: 21074 - DNA, 25 bp, probe
tatttcccttgaagttatgtgaagt

SEQ ID NO: 21075 - DNA, 25 bp, probe
gaagttatgtgaagtgtctagagcc

SEQ ID NO: 21076 - DNA, 25 bp, probe
cacagtagcgtaacaataagaaatt

SEQ ID NO: 21077 - DNA, 25 bp, probe
ccttgccacagtagcgtaacaataa

SEQ ID NO: 21078 - DNA, 25 bp, probe
attggtatgtttatgctgattcaac

SEQ ID NO: 21079 - DNA, 25 bp, probe
cattggtatgtttatgctgattcaa

SEQ ID NO: 21080 - DNA, 25 bp, probe
ataggagtcaactattatctgcaac

SEQ ID NO: 21081 - DNA, 25 bp, probe
cacaagtgaatgagctgaaagtaat

SEQ ID NO: 21082 - DNA, 25 bp, probe
actataatcacagacactatggttt

SEQ ID NO: 21083 - DNA, 25 bp, probe
acaagtgaatgagctgaaagtaatt

SEQ ID NO: 21084 - DNA, 25 bp, probe
gttaagaactataatcacagacact

SEQ ID NO: 21085 - DNA, 25 bp, probe
gaatctgaggttatgtctgatgtga

SEQ ID NO: 21086 - DNA, 25 bp, probe
agaatctgaggttatgtctgatgtg

SEQ ID NO: 21087 - DNA, 25 bp, probe
aatctgaggttatgtctgatgtgac

SEQ ID NO: 21088 - DNA, 25 bp, probe
atctgaggttatgtctgatgtgacc

SEQ ID NO: 21089 - DNA, 25 bp, probe
gcactgctattaaagtatttccaac

SEQ ID NO: 21090 - DNA, 25 bp, probe
ttcttcagctcagcagatggatatc

SEQ ID NO: 21091 - DNA, 25 bp, probe
ccctggaaatcattataccacagaa

SEQ ID NO: 21092 - DNA, 25 bp, probe
gaagatccttgaaatgtggaaagac

SEQ ID NO: 21093 - DNA, 25 bp, probe
agaagatccttgaaatgtggaaaga

SEQ ID NO: 21094 - DNA, 25 bp, probe
aagaagatccttgaaatgtggaaag

SEQ ID NO: 21095 - DNA, 25 bp, probe
aagatccttgaaatgtggaaagaca

SEQ ID NO: 21096 - DNA, 25 bp, probe
ctgtggaagcaaatgaacaactctt

SEQ ID NO: 21097 - DNA, 25 bp, probe
actgctattaaagtatttccaacac

SEQ ID NO: 21098 - DNA, 25 bp, probe
cactgctattaaagtatttccaaca

SEQ ID NO: 21099 - DNA, 25 bp, probe
atcataagccagtgacagttgacct

SEQ ID NO: 21100 - DNA, 25 bp, probe
gatcataagccagtgacagttgacc

SEQ ID NO: 21101 - DNA, 25 bp, probe
cctggaaatcattataccacagaat

SEQ ID NO: 21102 - DNA, 25 bp, probe
cgatgcagaatctgaggttatgtct

SEQ ID NO: 21103 - DNA, 25 bp, probe
tcgatgcagaatctgaggttatgtc

SEQ ID NO: 21104 - DNA, 25 bp, probe
ctgctattaaagtatttccaacact

SEQ ID NO: 21105 - DNA, 25 bp, probe
ctctgtggaagcaaatgaacaactc

SEQ ID NO: 21106 - DNA, 25 bp, probe
ctctctgtggaagcaaatgaacaac

SEQ ID NO: 21107 - DNA, 25 bp, probe
tgaacaactcttcaagaagatcctt

SEQ ID NO: 21108 - DNA, 25 bp, probe
atgaacaactcttcaagaagatcct

SEQ ID NO: 21109 - DNA, 25 bp, probe
cttcagctcagcagatggatatcac

SEQ ID NO: 21110 - DNA, 25 bp, probe
gctccaaagcaattatgatgtctaa

SEQ ID NO: 21111 - DNA, 25 bp, probe
tttcttcagctcagcagatggatat

SEQ ID NO: 21112 - DNA, 25 bp, probe
gtgacaagctgttctttacctctac

SEQ ID NO: 21113 - DNA, 25 bp, probe
aatgaacaactcttcaagaagatcc

SEQ ID NO: 21114 - DNA, 25 bp, probe
cagaatctgaggttatgtctgatgt

SEQ ID NO: 21115 - DNA, 25 bp, probe
tgtggaaagacataccatcttctat

SEQ ID NO: 21116 - DNA, 25 bp, probe
tctgtggaagcaaatgaacaactct

SEQ ID NO: 21117 - DNA, 25 bp, probe
tctctgtggaagcaaatgaacaact

SEQ ID NO: 21118 - DNA, 25 bp, probe
tcttcagctcagcagatggatatca

SEQ ID NO: 21119 - DNA, 25 bp, probe
attttacctgattgcttgggaattg

SEQ ID NO: 21120 - DNA, 25 bp, probe
cattttacctgattgcttgggaatt

SEQ ID NO: 21121 - DNA, 25 bp, probe
gcagaatctgaggttatgtctgatg

SEQ ID NO: 21122 - DNA, 25 bp, probe
aatgtggaaagacataccatcttct

SEQ ID NO: 21123 - DNA, 25 bp, probe
tgaaatgtggaaagacataccatct

SEQ ID NO: 21124 - DNA, 25 bp, probe
aagcaaatgaacaactcttcaagaa

SEQ ID NO: 21125 - DNA, 25 bp, probe
agatccttgaaatgtggaaagacat

SEQ ID NO: 21126 - DNA, 25 bp, probe
ttgaaatgtggaaagacataccatc

SEQ ID NO: 21127 - DNA, 25 bp, probe
cttgaaatgtggaaagacataccat

SEQ ID NO: 21128 - DNA, 25 bp, probe
agcaaatgaacaactcttcaagaag

SEQ ID NO: 21129 - DNA, 25 bp, probe
gggttcagtttagttcttggtatct

SEQ ID NO: 21130 - DNA, 25 bp, probe
cactactccgagaagttacgagaac

SEQ ID NO: 21131 - DNA, 25 bp, probe
ggttcagtttagttcttggtatctt

SEQ ID NO: 21132 - DNA, 25 bp, probe
cgggttcagtttagttcttggtatc

SEQ ID NO: 21133 - DNA, 25 bp, probe
gttcagtttagttcttggtatcttt

SEQ ID NO: 21134 - DNA, 25 bp, probe
gcactactccgagaagttacgagaa

SEQ ID NO: 21135 - DNA, 25 bp, probe
ctactccgagaagttacgagaactg

SEQ ID NO: 21136 - DNA, 25 bp, probe
actactccgagaagttacgagaact

SEQ ID NO: 21137 - DNA, 25 bp, probe
gagcactactccgagaagttacgag

SEQ ID NO: 21138 - DNA, 25 bp, probe
agcactactccgagaagttacgaga

SEQ ID NO: 21139 - DNA, 25 bp, probe
tactccgagaagttacgagaactgg

SEQ ID NO: 21140 - DNA, 25 bp, probe
ggtatcttttcaatcaagctgtgtg

SEQ ID NO: 21141 - DNA, 25 bp, probe
agtaccgggttcagtttagttcttg

SEQ ID NO: 21142 - DNA, 25 bp, probe
ttggtatcttttcaatcaagctgtg

SEQ ID NO: 21143 - DNA, 25 bp, probe
tggtatcttttcaatcaagctgtgt

SEQ ID NO: 21144 - DNA, 25 bp, probe
agaagttacgagaactggtcagcat

SEQ ID NO: 21145 - DNA, 25 bp, probe
ccgggttcagtttagttcttggtat

SEQ ID NO: 21146 - DNA, 25 bp, probe
gaagttacgagaactggtcagcatg

SEQ ID NO: 21147 - DNA, 25 bp, probe
cagtttagttcttggtatcttttca

SEQ ID NO: 21148 - DNA, 25 bp, probe
tcagtttagttcttggtatcttttc

SEQ ID NO: 21149 - DNA, 25 bp, probe
aagttacgagaactggtcagcatgt

SEQ ID NO: 21150 - DNA, 25 bp, probe
gagaagttacgagaactggtcagca

SEQ ID NO: 21151 - DNA, 25 bp, probe
ttcagtttagttcttggtatctttt

SEQ ID NO: 21152 - DNA, 25 bp, probe
gtaccgggttcagtttagttcttgg

SEQ ID NO: 21153 - DNA, 25 bp, probe
ctccgagaagttacgagaactggtc

SEQ ID NO: 21154 - DNA, 25 bp, probe
agtttagttcttggtatcttttcaa

SEQ ID NO: 21155 - DNA, 25 bp, probe
tagttcttggtatcttttcaatcaa

SEQ ID NO: 21156 - DNA, 25 bp, probe
ttagttcttggtatcttttcaatca

SEQ ID NO: 21157 - DNA, 25 bp, probe
ccgagaagttacgagaactggtcag

SEQ ID NO: 21158 - DNA, 25 bp, probe
agttacgagaactggtcagcatgtg

SEQ ID NO: 21159 - DNA, 25 bp, probe
gttcttggtatcttttcaatcaagc

SEQ ID NO: 21160 - DNA, 25 bp, probe
tccgagaagttacgagaactggtca

SEQ ID NO: 21161 - DNA, 25 bp, probe
actccgagaagttacgagaactggt

SEQ ID NO: 21162 - DNA, 25 bp, probe
gacctggtagcctagaacagctaag

SEQ ID NO: 21163 - DNA, 25 bp, probe
accgggttcagtttagttcttggta

SEQ ID NO: 21164 - DNA, 25 bp, probe
taccgggttcagtttagttcttggt

SEQ ID NO: 21165 - DNA, 25 bp, probe
cttggtatcttttcaatcaagctgt

SEQ ID NO: 21166 - DNA, 25 bp, probe
gtttagttcttggtatcttttcaat

SEQ ID NO: 21167 - DNA, 25 bp, probe
tcttggtatcttttcaatcaagctg

SEQ ID NO: 21168 - DNA, 25 bp, probe
ttcttggtatcttttcaatcaagct

SEQ ID NO: 21169 - DNA, 25 bp, probe
agacctggtagcctagaacagctaa

SEQ ID NO: 21170 - DNA, 25 bp, probe
tttagttcttggtatcttttcaatc

SEQ ID NO: 21171 - DNA, 25 bp, probe
agttcttggtatcttttcaatcaag

SEQ ID NO: 21172 - DNA, 25 bp, probe
gagacctggtagcctagaacagcta

SEQ ID NO: 21173 - DNA, 25 bp, probe
gatccaggcactatgttctctgaag

SEQ ID NO: 21174 - DNA, 25 bp, probe
atccaggcactatgttctctgaaga

SEQ ID NO: 21175 - DNA, 25 bp, probe
cactggtgtgaatattgtgccaatt

SEQ ID NO: 21176 - DNA, 25 bp, probe
tccaggcactatgttctctgaagaa

SEQ ID NO: 21177 - DNA, 25 bp, probe
gaatattgtgccaatttcatgtggg

SEQ ID NO: 21178 - DNA, 25 bp, probe
ctggtgtgaatattgtgccaatttc

SEQ ID NO: 21179 - DNA, 25 bp, probe
acactggtgtgaatattgtgccaat

SEQ ID NO: 21180 - DNA, 25 bp, probe
actggtgtgaatattgtgccaattt

SEQ ID NO: 21181 - DNA, 25 bp, probe
gtgaatattgtgccaatttcatgtg

SEQ ID NO: 21182 - DNA, 25 bp, probe
tgtgaatattgtgccaatttcatgt

SEQ ID NO: 21183 - DNA, 25 bp, probe
gtgtgaatattgtgccaatttcatg

SEQ ID NO: 21184 - DNA, 25 bp, probe
tgaatattgtgccaatttcatgtgg

SEQ ID NO: 21185 - DNA, 25 bp, probe
ggtgtgaatattgtgccaatttcat

SEQ ID NO: 21186 - DNA, 25 bp, probe
gaactgtggctggaaaatgagaaaa

SEQ ID NO: 21187 - DNA, 25 bp, probe
tggtgtgaatattgtgccaatttca

SEQ ID NO: 21188 - DNA, 25 bp, probe
agaactgtggctggaaaatgagaaa

SEQ ID NO: 21189 - DNA, 25 bp, probe
aagaactgtggctggaaaatgagaa

SEQ ID NO: 21190 - DNA, 25 bp, probe
gaagaactgtggctggaaaatgaga

SEQ ID NO: 21191 - DNA, 25 bp, probe
ctctgaagaactgtggctggaaaat

SEQ ID NO: 21192 - DNA, 25 bp, probe
tgaagaactgtggctggaaaatgag

SEQ ID NO: 21193 - DNA, 25 bp, probe
ctgaagaactgtggctggaaaatga

SEQ ID NO: 21194 - DNA, 25 bp, probe
tctgaagaactgtggctggaaaatg

SEQ ID NO: 21195 - DNA, 25 bp, probe
gtgctcagactgtggattgaacgta

SEQ ID NO: 21196 - DNA, 25 bp, probe
ttctctgaagaactgtggctggaaa

SEQ ID NO: 21197 - DNA, 25 bp, probe
aatattgtgccaatttcatgtgggg

SEQ ID NO: 21198 - DNA, 25 bp, probe
tctctgaagaactgtggctggaaaa

SEQ ID NO: 21199 - DNA, 25 bp, probe
ggatccaggcactatgttctctgaa

SEQ ID NO: 21200 - DNA, 25 bp, probe
cacactggtgtgaatattgtgccaa

SEQ ID NO: 21201 - DNA, 25 bp, probe
tcagaactacaattacaaccagcat

SEQ ID NO: 21202 - DNA, 25 bp, probe
atcagaactacaattacaaccagca

SEQ ID NO: 21203 - DNA, 25 bp, probe
gatcagaactacaattacaaccagc

SEQ ID NO: 21204 - DNA, 25 bp, probe
cgatcagaactacaattacaaccag

SEQ ID NO: 21205 - DNA, 25 bp, probe
ccgatcagaactacaattacaacca

SEQ ID NO: 21206 - DNA, 25 bp, probe
gagccgatcagaactacaattacaa

SEQ ID NO: 21207 - DNA, 25 bp, probe
cagaactacaattacaaccagcatg

SEQ ID NO: 21208 - DNA, 25 bp, probe
agccgatcagaactacaattacaac

SEQ ID NO: 21209 - DNA, 25 bp, probe
cagagccgatcagaactacaattac

SEQ ID NO: 21210 - DNA, 25 bp, probe
agagccgatcagaactacaattaca

SEQ ID NO: 21211 - DNA, 25 bp, probe
gccgatcagaactacaattacaacc

SEQ ID NO: 21212 - DNA, 25 bp, probe
gatttcaaacagaacactcctttcc

SEQ ID NO: 21213 - DNA, 25 bp, probe
atttcaaacagaacactcctttcct

SEQ ID NO: 21214 - DNA, 25 bp, probe
gcagagccgatcagaactacaatta

SEQ ID NO: 21215 - DNA, 25 bp, probe
tttcaaacagaacactcctttcctc

SEQ ID NO: 21216 - DNA, 25 bp, probe
aaacagaacactcctttcctcaact

SEQ ID NO: 21217 - DNA, 25 bp, probe
caaacagaacactcctttcctcaac

SEQ ID NO: 21218 - DNA, 25 bp, probe
tcaaacagaacactcctttcctcaa

SEQ ID NO: 21219 - DNA, 25 bp, probe
ttcaaacagaacactcctttcctca

SEQ ID NO: 21220 - DNA, 25 bp, probe
aactggaaagcaattattgagggtg

SEQ ID NO: 21221 - DNA, 25 bp, probe
caactggaaagcaattattgagggt

SEQ ID NO: 21222 - DNA, 25 bp, probe
ggatttcaaacagaacactcctttc

SEQ ID NO: 21223 - DNA, 25 bp, probe
catctttctgtacctcctccctttg

SEQ ID NO: 21224 - DNA, 25 bp, probe
cttgtctctccttgtttcttcccac

SEQ ID NO: 21225 - DNA, 25 bp, probe
tgggaggatttcaaacagaacactc

SEQ ID NO: 21226 - DNA, 25 bp, probe
tcacatacaccagcatctttctgta

SEQ ID NO: 21227 - DNA, 25 bp, probe
aacagaacactcctttcctcaactg

SEQ ID NO: 21228 - DNA, 25 bp, probe
ttgtctctccttgtttcttcccact

SEQ ID NO: 21229 - DNA, 25 bp, probe
cacatacaccagcatctttctgtac

SEQ ID NO: 21230 - DNA, 25 bp, probe
ctgggaggatttcaaacagaacact

SEQ ID NO: 21231 - DNA, 25 bp, probe
atcaactgggatgccataaacaaga

SEQ ID NO: 21232 - DNA, 25 bp, probe
tcctcaactggaaagcaattattga

SEQ ID NO: 21233 - DNA, 25 bp, probe
tgaagttttggtaggcaatttcttg

SEQ ID NO: 21234 - DNA, 25 bp, probe
gtgaagttttggtaggcaatttctt

SEQ ID NO: 21235 - DNA, 25 bp, probe
gtcacatacaccagcatctttctgt

SEQ ID NO: 21236 - DNA, 25 bp, probe
caactgggatgccataaacaagaac

SEQ ID NO: 21237 - DNA, 25 bp, probe
tcaactgggatgccataaacaagaa

SEQ ID NO: 21238 - DNA, 25 bp, probe
ctcgtcacatacaccagcatctttc

SEQ ID NO: 21239 - DNA, 25 bp, probe
cttcctacttttgagtttctctgtg

SEQ ID NO: 21240 - DNA, 25 bp, probe
atacaccagcatctttctgtacctc

SEQ ID NO: 21241 - DNA, 25 bp, probe
cctacttttgagtttctctgtggaa

SEQ ID NO: 21242 - DNA, 25 bp, probe
ttcctacttttgagtttctctgtgg

SEQ ID NO: 21243 - DNA, 25 bp, probe
atctttctgtacctcctccctttgg

SEQ ID NO: 21244 - DNA, 25 bp, probe
gcttcctacttttgagtttctctgt

SEQ ID NO: 21245 - DNA, 25 bp, probe
gaaggtgcctatggagaagttcaac

SEQ ID NO: 21246 - DNA, 25 bp, probe
agaaggtgcctatggagaagttcaa

SEQ ID NO: 21247 - DNA, 25 bp, probe
tcaacttgctgtaaatagagtaact

SEQ ID NO: 21248 - DNA, 25 bp, probe
tatggagaagttcaacttgctgtaa

SEQ ID NO: 21249 - DNA, 25 bp, probe
agttcaacttgctgtaaatagagta

SEQ ID NO: 21250 - DNA, 25 bp, probe
ctatggagaagttcaacttgctgta

SEQ ID NO: 21251 - DNA, 25 bp, probe
ttcaacttgctgtaaatagagtaac

SEQ ID NO: 21252 - DNA, 25 bp, probe
gttcaacttgctgtaaatagagtaa

SEQ ID NO: 21253 - DNA, 25 bp, probe
aaggtgcctatggagaagttcaact

SEQ ID NO: 21254 - DNA, 25 bp, probe
ccgtagactgtcccgaaaatattaa

SEQ ID NO: 21255 - DNA, 25 bp, probe
cctatggagaagttcaacttgctgt

SEQ ID NO: 21256 - DNA, 25 bp, probe
cgtagactgtcccgaaaatattaag

SEQ ID NO: 21257 - DNA, 25 bp, probe
ggagaagttcaacttgctgtaaata

SEQ ID NO: 21258 - DNA, 25 bp, probe
tggagaagttcaacttgctgtaaat

SEQ ID NO: 21259 - DNA, 25 bp, probe
atggagaagttcaacttgctgtaaa

SEQ ID NO: 21260 - DNA, 25 bp, probe
aagttcaacttgctgtaaatagagt

SEQ ID NO: 21261 - DNA, 25 bp, probe
agaagttcaacttgctgtaaataga

SEQ ID NO: 21262 - DNA, 25 bp, probe
gaagttcaacttgctgtaaatagag

SEQ ID NO: 21263 - DNA, 25 bp, probe
gagaagttcaacttgctgtaaatag

SEQ ID NO: 21264 - DNA, 25 bp, probe
gtagactgtcccgaaaatattaagt

SEQ ID NO: 21265 - DNA, 25 bp, probe
ggtgcctatggagaagttcaacttg

SEQ ID NO: 21266 - DNA, 25 bp, probe
gccgtagactgtcccgaaaatatta

SEQ ID NO: 21267 - DNA, 25 bp, probe
aggtgcctatggagaagttcaactt

SEQ ID NO: 21268 - DNA, 25 bp, probe
gcctatggagaagttcaacttgctg

SEQ ID NO: 21269 - DNA, 25 bp, probe
gtgcctatggagaagttcaacttgc

SEQ ID NO: 21270 - DNA, 25 bp, probe
tgcctatggagaagttcaacttgct

SEQ ID NO: 21271 - DNA, 25 bp, probe
tagactgtcccgaaaatattaagta

SEQ ID NO: 21272 - DNA, 25 bp, probe
tgccgtagactgtcccgaaaatatt

SEQ ID NO: 21273 - DNA, 25 bp, probe
gtgccgtagactgtcccgaaaatat

SEQ ID NO: 21274 - DNA, 25 bp, probe
gcatggtattggaataactcacagg

SEQ ID NO: 21275 - DNA, 25 bp, probe
atctgcatggtattggaataactca

SEQ ID NO: 21276 - DNA, 25 bp, probe
ggtattggaataactcacagggata

SEQ ID NO: 21277 - DNA, 25 bp, probe
cttggcaacagtatttcggtataat

SEQ ID NO: 21278 - DNA, 25 bp, probe
tctgcatggtattggaataactcac

SEQ ID NO: 21279 - DNA, 25 bp, probe
tgcatggtattggaataactcacag

SEQ ID NO: 21280 - DNA, 25 bp, probe
ctgcatggtattggaataactcaca

SEQ ID NO: 21281 - DNA, 25 bp, probe
atcttctgttggatgaaagggataa

SEQ ID NO: 21282 - DNA, 25 bp, probe
aatcttctgttggatgaaagggata

SEQ ID NO: 21283 - DNA, 25 bp, probe
aaatcttctgttggatgaaagggat

SEQ ID NO: 21284 - DNA, 25 bp, probe
tcttctgttggatgaaagggataac

SEQ ID NO: 21285 - DNA, 25 bp, probe
tggtattggaataactcacagggat

SEQ ID NO: 21286 - DNA, 25 bp, probe
atggtattggaataactcacaggga

SEQ ID NO: 21287 - DNA, 25 bp, probe
tatctgcatggtattggaataactc

SEQ ID NO: 21288 - DNA, 25 bp, probe
gcttggcaacagtatttcggtataa

SEQ ID NO: 21289 - DNA, 25 bp, probe
tggcaacagtatttcggtataataa

SEQ ID NO: 21290 - DNA, 25 bp, probe
ttggcaacagtatttcggtataata

SEQ ID NO: 21291 - DNA, 25 bp, probe
catggtattggaataactcacaggg

SEQ ID NO: 21292 - DNA, 25 bp, probe
gtattggaataactcacagggatat

SEQ ID NO: 21293 - DNA, 25 bp, probe
ttatctgcatggtattggaataact

SEQ ID NO: 21294 - DNA, 25 bp, probe
gttggatgaaagggataacctcaaa

SEQ ID NO: 21295 - DNA, 25 bp, probe
aataactcacagggatattaaacca

SEQ ID NO: 21296 - DNA, 25 bp, probe
tggtttatctgcatggtattggaat

SEQ ID NO: 21297 - DNA, 25 bp, probe
tggaataactcacagggatattaaa

SEQ ID NO: 21298 - DNA, 25 bp, probe
ttggaataactcacagggatattaa

SEQ ID NO: 21299 - DNA, 25 bp, probe
tgttggatgaaagggataacctcaa

SEQ ID NO: 21300 - DNA, 25 bp, probe
ggcaacagtatttcggtataataat

SEQ ID NO: 21301 - DNA, 25 bp, probe
ggtttatctgcatggtattggaata

SEQ ID NO: 21302 - DNA, 25 bp, probe
tctgttggatgaaagggataacctc

SEQ ID NO: 21303 - DNA, 25 bp, probe
attggaataactcacagggatatta

SEQ ID NO: 21304 - DNA, 25 bp, probe
tattggaataactcacagggatatt

SEQ ID NO: 21305 - DNA, 25 bp, probe
gaataactcacagggatattaaacc

SEQ ID NO: 21306 - DNA, 25 bp, probe
ggaataactcacagggatattaaac

SEQ ID NO: 21307 - DNA, 25 bp, probe
gtggtttatctgcatggtattggaa

SEQ ID NO: 21308 - DNA, 25 bp, probe
ctgttggatgaaagggataacctca

SEQ ID NO: 21309 - DNA, 25 bp, probe
ggcttggcaacagtatttcggtata

SEQ ID NO: 21310 - DNA, 25 bp, probe
gactttggcttggcaacagtatttc

SEQ ID NO: 21311 - DNA, 25 bp, probe
gggataacctcaaaatctcagactt

SEQ ID NO: 21312 - DNA, 25 bp, probe
aaaatcttctgttggatgaaaggga

SEQ ID NO: 21313 - DNA, 25 bp, probe
tatattcttccatcaactcatggca

SEQ ID NO: 21314 - DNA, 25 bp, probe
ggataacctcaaaatctcagacttt

SEQ ID NO: 21315 - DNA, 25 bp, probe
atattcttccatcaactcatggcag

SEQ ID NO: 21316 - DNA, 25 bp, probe
agactttggcttggcaacagtattt

SEQ ID NO: 21317 - DNA, 25 bp, probe
gcaacagtatttcggtataataatc

SEQ ID NO: 21318 - DNA, 25 bp, probe
ttgaacaagatgtgtggtactttac

SEQ ID NO: 21319 - DNA, 25 bp, probe
gttgaacaagatgtgtggtacttta

SEQ ID NO: 21320 - DNA, 25 bp, probe
tgttgaacaagatgtgtggtacttt

SEQ ID NO: 21321 - DNA, 25 bp, probe
gaagagaagagatttcatgcagaac

SEQ ID NO: 21322 - DNA, 25 bp, probe
aagagaagagatttcatgcagaacc

SEQ ID NO: 21323 - DNA, 25 bp, probe
gaagagatttcatgcagaaccagtt

SEQ ID NO: 21324 - DNA, 25 bp, probe
aagagatttcatgcagaaccagttg

SEQ ID NO: 21325 - DNA, 25 bp, probe
gagaagagatttcatgcagaaccag

SEQ ID NO: 21326 - DNA, 25 bp, probe
gagatttcatgcagaaccagttgat

SEQ ID NO: 21327 - DNA, 25 bp, probe
agagaagagatttcatgcagaacca

SEQ ID NO: 21328 - DNA, 25 bp, probe
ttgttgaacaagatgtgtggtactt

SEQ ID NO: 21329 - DNA, 25 bp, probe
agatttcatgcagaaccagttgatg

SEQ ID NO: 21330 - DNA, 25 bp, probe
agaagagatttcatgcagaaccagt

SEQ ID NO: 21331 - DNA, 25 bp, probe
gatttcatgcagaaccagttgatgt

SEQ ID NO: 21332 - DNA, 25 bp, probe
agagatttcatgcagaaccagttga

SEQ ID NO: 21333 - DNA, 25 bp, probe
tgaacaagatgtgtggtactttacc

SEQ ID NO: 21334 - DNA, 25 bp, probe
tgaagagaagagatttcatgcagaa

SEQ ID NO: 21335 - DNA, 25 bp, probe
ttctgaagagaagagatttcatgca

SEQ ID NO: 21336 - DNA, 25 bp, probe
ctgaagagaagagatttcatgcaga

SEQ ID NO: 21337 - DNA, 25 bp, probe
tctgaagagaagagatttcatgcag

SEQ ID NO: 21338 - DNA, 25 bp, probe
tttgttgaacaagatgtgtggtact

SEQ ID NO: 21339 - DNA, 25 bp, probe
gtttgttgaacaagatgtgtggtac

SEQ ID NO: 21340 - DNA, 25 bp, probe
cgtttgttgaacaagatgtgtggta

SEQ ID NO: 21341 - DNA, 25 bp, probe
taatcgtgagcgtttgttgaacaag

SEQ ID NO: 21342 - DNA, 25 bp, probe
gagcgtttgttgaacaagatgtgtg

SEQ ID NO: 21343 - DNA, 25 bp, probe
gtgagcgtttgttgaacaagatgtg

SEQ ID NO: 21344 - DNA, 25 bp, probe
atcgtgagcgtttgttgaacaagat

SEQ ID NO: 21345 - DNA, 25 bp, probe
tgagcgtttgttgaacaagatgtgt

SEQ ID NO: 21346 - DNA, 25 bp, probe
aatcgtgagcgtttgttgaacaaga

SEQ ID NO: 21347 - DNA, 25 bp, probe
tcgtgagcgtttgttgaacaagatg

SEQ ID NO: 21348 - DNA, 25 bp, probe
agcgtttgttgaacaagatgtgtgg

SEQ ID NO: 21349 - DNA, 25 bp, probe
cgtgagcgtttgttgaacaagatgt

SEQ ID NO: 21350 - DNA, 25 bp, probe
gcgtttgttgaacaagatgtgtggt

SEQ ID NO: 21351 - DNA, 25 bp, probe
gcatatattaggctcacacagtaca

SEQ ID NO: 21352 - DNA, 25 bp, probe
tatattaggctcacacagtacatgg

SEQ ID NO: 21353 - DNA, 25 bp, probe
tattaggctcacacagtacatggat

SEQ ID NO: 21354 - DNA, 25 bp, probe
atattaggctcacacagtacatgga

SEQ ID NO: 21355 - DNA, 25 bp, probe
catatattaggctcacacagtacat

SEQ ID NO: 21356 - DNA, 25 bp, probe
atatattaggctcacacagtacatg

SEQ ID NO: 21357 - DNA, 25 bp, probe
aaagcaataaaccaatccacactat

SEQ ID NO: 21358 - DNA, 25 bp, probe
ggtaatttagtggaagggatggatt

SEQ ID NO: 21359 - DNA, 25 bp, probe
attaggctcacacagtacatggatg

SEQ ID NO: 21360 - DNA, 25 bp, probe
tccacactattattctaaaccctca

SEQ ID NO: 21361 - DNA, 25 bp, probe
tttgggtaatttagtggaagggatg

SEQ ID NO: 21362 - DNA, 25 bp, probe
ctttgggtaatttagtggaagggat

SEQ ID NO: 21363 - DNA, 25 bp, probe
aagcaataaaccaatccacactatt

SEQ ID NO: 21364 - DNA, 25 bp, probe
gtaatttagtggaagggatggattt

SEQ ID NO: 21365 - DNA, 25 bp, probe
tacattgtttacacttcaactacgg

SEQ ID NO: 21366 - DNA, 25 bp, probe
agcatatattaggctcacacagtac

SEQ ID NO: 21367 - DNA, 25 bp, probe
gcatagcatatattaggctcacaca

SEQ ID NO: 21368 - DNA, 25 bp, probe
acacaaacttaaattactgttggca

SEQ ID NO: 21369 - DNA, 25 bp, probe
agcaataaaccaatccacactatta

SEQ ID NO: 21370 - DNA, 25 bp, probe
cacacaaacttaaattactgttggc

SEQ ID NO: 21371 - DNA, 25 bp, probe
atagcatatattaggctcacacagt

SEQ ID NO: 21372 - DNA, 25 bp, probe
ccacactattattctaaaccctcat

SEQ ID NO: 21373 - DNA, 25 bp, probe
cacttctgcattctctgttctcaag

SEQ ID NO: 21374 - DNA, 25 bp, probe
catagcatatattaggctcacacag

SEQ ID NO: 21375 - DNA, 25 bp, probe
gggtaatttagtggaagggatggat

SEQ ID NO: 21376 - DNA, 25 bp, probe
acattgtttacacttcaactacggg

SEQ ID NO: 21377 - DNA, 25 bp, probe
accaacagtacccatcaactaaatt

SEQ ID NO: 21378 - DNA, 25 bp, probe
cacaaacttaaattactgttggcaa

SEQ ID NO: 21379 - DNA, 25 bp, probe
atccacactattattctaaaccctc

SEQ ID NO: 21380 - DNA, 25 bp, probe
tagcatatattaggctcacacagta

SEQ ID NO: 21381 - DNA, 25 bp, probe
atggaaagtggcagaatgttcattt

SEQ ID NO: 21382 - DNA, 25 bp, probe
caccaacagtacccatcaactaaat

SEQ ID NO: 21383 - DNA, 25 bp, probe
ttgggtaatttagtggaagggatgg

SEQ ID NO: 21384 - DNA, 25 bp, probe
gggatgttccacacaaacttaaatt

SEQ ID NO: 21385 - DNA, 25 bp, probe
caatccacactattattctaaaccc

SEQ ID NO: 21386 - DNA, 25 bp, probe
ccaatccacactattattctaaacc

SEQ ID NO: 21387 - DNA, 25 bp, probe
acaaacttaaattactgttggcaaa

SEQ ID NO: 21388 - DNA, 25 bp, probe
tccttcctatacattgtttacactt

SEQ ID NO: 21389 - DNA, 25 bp, probe
ttccttcctatacattgtttacact

SEQ ID NO: 21390 - DNA, 25 bp, probe
gatggaaagtggcagaatgttcatt

SEQ ID NO: 21391 - DNA, 25 bp, probe
gcaataaaccaatccacactattat

SEQ ID NO: 21392 - DNA, 25 bp, probe
tccacacaaacttaaattactgttg

SEQ ID NO: 21393 - DNA, 25 bp, probe
gttccacacaaacttaaattactgt

SEQ ID NO: 21394 - DNA, 25 bp, probe
tgttccacacaaacttaaattactg

SEQ ID NO: 21395 - DNA, 25 bp, probe
atctatgagaacatgacgctggtag

SEQ ID NO: 21396 - DNA, 25 bp, probe
gatctatgagaacatgacgctggta

SEQ ID NO: 21397 - DNA, 25 bp, probe
ctatgagaacatgacgctggtagag

SEQ ID NO: 21398 - DNA, 25 bp, probe
atgatctatgagaacatgacgctgg

SEQ ID NO: 21399 - DNA, 25 bp, probe
tctatgagaacatgacgctggtaga

SEQ ID NO: 21400 - DNA, 25 bp, probe
tatgagaacatgacgctggtagagg

SEQ ID NO: 21401 - DNA, 25 bp, probe
tgatctatgagaacatgacgctggt

SEQ ID NO: 21402 - DNA, 25 bp, probe
ttcataggagatgcgatggactcac

SEQ ID NO: 21403 - DNA, 25 bp, probe
catgatctatgagaacatgacgctg

SEQ ID NO: 21404 - DNA, 25 bp, probe
tttcataggagatgcgatggactca

SEQ ID NO: 21405 - DNA, 25 bp, probe
cataggagatgcgatggactcactg

SEQ ID NO: 21406 - DNA, 25 bp, probe
tcataggagatgcgatggactcact

SEQ ID NO: 21407 - DNA, 25 bp, probe
cttttcataggagatgcgatggact

SEQ ID NO: 21408 - DNA, 25 bp, probe
ttttcataggagatgcgatggactc

SEQ ID NO: 21409 - DNA, 25 bp, probe
caaccttttcataggagatgcgatg

SEQ ID NO: 21410 - DNA, 25 bp, probe
aaccttttcataggagatgcgatgg

SEQ ID NO: 21411 - DNA, 25 bp, probe
ccaaccttttcataggagatgcgat

SEQ ID NO: 21412 - DNA, 25 bp, probe
gtcctggccttcctcatgatctatg

SEQ ID NO: 21413 - DNA, 25 bp, probe
ccttttcataggagatgcgatggac

SEQ ID NO: 21414 - DNA, 25 bp, probe
tgtcctggccttcctcatgatctat

SEQ ID NO: 21415 - DNA, 25 bp, probe
accttttcataggagatgcgatgga

SEQ ID NO: 21416 - DNA, 25 bp, probe
ttgtcctggccttcctcatgatcta

SEQ ID NO: 21417 - DNA, 25 bp, probe
tcctggccttcctcatgatctatga

SEQ ID NO: 21418 - DNA, 25 bp, probe
cccaaccttttcataggagatgcga

SEQ ID NO: 21419 - DNA, 25 bp, probe
ttgaagagttctgtggaagtctatg

SEQ ID NO: 21420 - DNA, 25 bp, probe
aatgatccagaagttgagaagaagc

SEQ ID NO: 21421 - DNA, 25 bp, probe
acaatgatccagaagttgagaagaa

SEQ ID NO: 21422 - DNA, 25 bp, probe
caatgatccagaagttgagaagaag

SEQ ID NO: 21423 - DNA, 25 bp, probe
ttcacaatgatccagaagttgagaa

SEQ ID NO: 21424 - DNA, 25 bp, probe
cacaatgatccagaagttgagaaga

SEQ ID NO: 21425 - DNA, 25 bp, probe
agagtcttcaagatcctgagaactt

SEQ ID NO: 21426 - DNA, 25 bp, probe
tcacaatgatccagaagttgagaag

SEQ ID NO: 21427 - DNA, 25 bp, probe
gtcaatgtgaatcctaccaacacta

SEQ ID NO: 21428 - DNA, 25 bp, probe
tcaatgtgaatcctaccaacactag

SEQ ID NO: 21429 - DNA, 25 bp, probe
atgatccagaagttgagaagaagca

SEQ ID NO: 21430 - DNA, 25 bp, probe
tgaagagttctgtggaagtctatgc

SEQ ID NO: 21431 - DNA, 25 bp, probe
aaggtctatcctcttatcaaccgaa

SEQ ID NO: 21432 - DNA, 25 bp, probe
aaacacaaatcttcctcctccttta

SEQ ID NO: 21433 - DNA, 25 bp, probe
aggtctatcctcttatcaaccgaag

SEQ ID NO: 21434 - DNA, 25 bp, probe
gaaggtctatcctcttatcaaccga

SEQ ID NO: 21435 - DNA, 25 bp, probe
cagagtcttcaagatcctgagaact

SEQ ID NO: 21436 - DNA, 25 bp, probe
cgtgtctactatttgtcctggttaa

SEQ ID NO: 21437 - DNA, 25 bp, probe
aacacaaatcttcctcctcctttac

SEQ ID NO: 21438 - DNA, 25 bp, probe
aggtttaactctgagattctgtgtg

SEQ ID NO: 21439 - DNA, 25 bp, probe
tgatccagaagttgagaagaagcag

SEQ ID NO: 21440 - DNA, 25 bp, probe
cttatcaaccgaagacgatttcaac

SEQ ID NO: 21441 - DNA, 25 bp, probe
ctttgaagagttctgtggaagtcta

SEQ ID NO: 21442 - DNA, 25 bp, probe
cggagattcgtaaatacaagaagag

SEQ ID NO: 21443 - DNA, 25 bp, probe
tttgaagagttctgtggaagtctat

SEQ ID NO: 21444 - DNA, 25 bp, probe
cccagattactacagatttctccat

SEQ ID NO: 21445 - DNA, 25 bp, probe
gtgtctactatttgtcctggttaag

SEQ ID NO: 21446 - DNA, 25 bp, probe
tttaactctgagattctgtgtgctg

SEQ ID NO: 21447 - DNA, 25 bp, probe
gtttaactctgagattctgtgtgct

SEQ ID NO: 21448 - DNA, 25 bp, probe
aatcttcctcctcctttacaccttt

SEQ ID NO: 21449 - DNA, 25 bp, probe
aatttctggtgattgctttgaagag

SEQ ID NO: 21450 - DNA, 25 bp, probe
ttaactctgagattctgtgtgctgc

SEQ ID NO: 21451 - DNA, 25 bp, probe
aaatcttcctcctcctttacacctt

SEQ ID NO: 21452 - DNA, 25 bp, probe
cacaaatcttcctcctcctttacac

SEQ ID NO: 21453 - DNA, 25 bp, probe
tatcaaccgaagacgatttcaacaa

SEQ ID NO: 21454 - DNA, 25 bp, probe
ttatcaaccgaagacgatttcaaca

SEQ ID NO: 21455 - DNA, 25 bp, probe
ggagattcgtaaatacaagaagagg

SEQ ID NO: 21456 - DNA, 25 bp, probe
gaaacacaaatcttcctcctccttt

SEQ ID NO: 21457 - DNA, 25 bp, probe
acacaaatcttcctcctcctttaca

SEQ ID NO: 21458 - DNA, 25 bp, probe
atttctggtgattgctttgaagagt

SEQ ID NO: 21459 - DNA, 25 bp, probe
tgtctactatttgtcctggttaaga

SEQ ID NO: 21460 - DNA, 25 bp, probe
gaggtttaactctgagattctgtgt

SEQ ID NO: 21461 - DNA, 25 bp, probe
tttctggtgattgctttgaagagtt

SEQ ID NO: 21462 - DNA, 25 bp, probe
gaagagttctgtggaagtctatgcg

SEQ ID NO: 21463 - DNA, 25 bp, probe
ctggagtcttctgacagtgccaata

SEQ ID NO: 21464 - DNA, 25 bp, probe
tggagtcttctgacagtgccaatac

SEQ ID NO: 21465 - DNA, 25 bp, probe
ttgctaatgattccagaaacacgat

SEQ ID NO: 21466 - DNA, 25 bp, probe
tttgctaatgattccagaaacacga

SEQ ID NO: 21467 - DNA, 25 bp, probe
atgattccagaaacacgatctacat

SEQ ID NO: 21468 - DNA, 25 bp, probe
aatgattccagaaacacgatctaca

SEQ ID NO: 21469 - DNA, 25 bp, probe
gatctacatcacctgccatctgaag

SEQ ID NO: 21470 - DNA, 25 bp, probe
gattccagaaacacgatctacatca

SEQ ID NO: 21471 - DNA, 25 bp, probe
tgattccagaaacacgatctacatc

SEQ ID NO: 21472 - DNA, 25 bp, probe
attccagaaacacgatctacatcac

SEQ ID NO: 21473 - DNA, 25 bp, probe
tgctaatgattccagaaacacgatc

SEQ ID NO: 21474 - DNA, 25 bp, probe
gctaatgattccagaaacacgatct

SEQ ID NO: 21475 - DNA, 25 bp, probe
taatgattccagaaacacgatctac

SEQ ID NO: 21476 - DNA, 25 bp, probe
ctaatgattccagaaacacgatcta

SEQ ID NO: 21477 - DNA, 25 bp, probe
tgttatctgtcgttgctgtcacaag

SEQ ID NO: 21478 - DNA, 25 bp, probe
ctgttatctgtcgttgctgtcacaa

SEQ ID NO: 21479 - DNA, 25 bp, probe
ttccagaaacacgatctacatcacc

SEQ ID NO: 21480 - DNA, 25 bp, probe
ttttgctaatgattccagaaacacg

SEQ ID NO: 21481 - DNA, 25 bp, probe
atctacatcacctgccatctgaagg

SEQ ID NO: 21482 - DNA, 25 bp, probe
gttatctgtcgttgctgtcacaagg

SEQ ID NO: 21483 - DNA, 25 bp, probe
attttgctaatgattccagaaacac

SEQ ID NO: 21484 - DNA, 25 bp, probe
cgatctacatcacctgccatctgaa

SEQ ID NO: 21485 - DNA, 25 bp, probe
tccagaaacacgatctacatcacct

SEQ ID NO: 21486 - DNA, 25 bp, probe
ccagaaacacgatctacatcacctg

SEQ ID NO: 21487 - DNA, 25 bp, probe
aacacgatctacatcacctgccatc

SEQ ID NO: 21488 - DNA, 25 bp, probe
aggtgactgatgatgctctggtgta

SEQ ID NO: 21489 - DNA, 25 bp, probe
tgcttcccaataaaaggagaaacat

SEQ ID NO: 21490 - DNA, 25 bp, probe
cccaataaaaggagaaacatgaaaa

SEQ ID NO: 21491 - DNA, 25 bp, probe
ggtgactgatgatgctctggtgtac

SEQ ID NO: 21492 - DNA, 25 bp, probe
acagatgaagcagatgtcacagtgg

SEQ ID NO: 21493 - DNA, 25 bp, probe
tctgcttcccaataaaaggagaaac

SEQ ID NO: 21494 - DNA, 25 bp, probe
gtctgcttcccaataaaaggagaaa

SEQ ID NO: 21495 - DNA, 25 bp, probe
ctgcttcccaataaaaggagaaaca

SEQ ID NO: 21496 - DNA, 25 bp, probe
cacgatctacatcacctgccatctg

SEQ ID NO: 21497 - DNA, 25 bp, probe
gcttcccaataaaaggagaaacatg

SEQ ID NO: 21498 - DNA, 25 bp, probe
cagaaacacgatctacatcacctgc

SEQ ID NO: 21499 - DNA, 25 bp, probe
cttcccaataaaaggagaaacatga

SEQ ID NO: 21500 - DNA, 25 bp, probe
gttccattttgctaatgattccaga

SEQ ID NO: 21501 - DNA, 25 bp, probe
tgttccattttgctaatgattccag

SEQ ID NO: 21502 - DNA, 25 bp, probe
gtgttccattttgctaatgattcca

SEQ ID NO: 21503 - DNA, 25 bp, probe
tgtgttccattttgctaatgattcc

SEQ ID NO: 21504 - DNA, 25 bp, probe
ggatgtgttccattttgctaatgat

SEQ ID NO: 21505 - DNA, 25 bp, probe
aaacacgatctacatcacctgccat

SEQ ID NO: 21506 - DNA, 25 bp, probe
tcccaataaaaggagaaacatgaaa

SEQ ID NO: 21507 - DNA, 25 bp, probe
ttcccaataaaaggagaaacatgaa

SEQ ID NO: 21508 - DNA, 25 bp, probe
ccattttgctaatgattccagaaac

SEQ ID NO: 21509 - DNA, 25 bp, probe
ccatgactccagacactatgattaa

SEQ ID NO: 21510 - DNA, 25 bp, probe
tgactccagacactatgattaaact

SEQ ID NO: 21511 - DNA, 25 bp, probe
taaactatctagggaagaaggcttg

SEQ ID NO: 21512 - DNA, 25 bp, probe
atgactccagacactatgattaaac

SEQ ID NO: 21513 - DNA, 25 bp, probe
ttaaactatctagggaagaaggctt

SEQ ID NO: 21514 - DNA, 25 bp, probe
attaaactatctagggaagaaggct

SEQ ID NO: 21515 - DNA, 25 bp, probe
gatattgttcagaattcctcatgct

SEQ ID NO: 21516 - DNA, 25 bp, probe
gattaaactatctagggaagaaggc

SEQ ID NO: 21517 - DNA, 25 bp, probe
taccatcaaactgaagcatgaattg

SEQ ID NO: 21518 - DNA, 25 bp, probe
gttaccatcaaactgaagcatgaat

SEQ ID NO: 21519 - DNA, 25 bp, probe
aaactatctagggaagaaggcttgg

SEQ ID NO: 21520 - DNA, 25 bp, probe
ttaccatcaaactgaagcatgaatt

SEQ ID NO: 21521 - DNA, 25 bp, probe
cccatgactccagacactatgatta

SEQ ID NO: 21522 - DNA, 25 bp, probe
gactccagacactatgattaaacta

SEQ ID NO: 21523 - DNA, 25 bp, probe
atgttaccatcaaactgaagcatga

SEQ ID NO: 21524 - DNA, 25 bp, probe
tgttaccatcaaactgaagcatgaa

SEQ ID NO: 21525 - DNA, 25 bp, probe
catgactccagacactatgattaaa

SEQ ID NO: 21526 - DNA, 25 bp, probe
tttccagactgaatgggatattgtt

SEQ ID NO: 21527 - DNA, 25 bp, probe
atttccagactgaatgggatattgt

SEQ ID NO: 21528 - DNA, 25 bp, probe
tgaatttccagactgaatgggatat

SEQ ID NO: 21529 - DNA, 25 bp, probe
atgaatttccagactgaatgggata

SEQ ID NO: 21530 - DNA, 25 bp, probe
ttccagactgaatgggatattgttc

SEQ ID NO: 21531 - DNA, 25 bp, probe
attgttcagaattcctcatgctgta

SEQ ID NO: 21532 - DNA, 25 bp, probe
tattgttcagaattcctcatgctgt

SEQ ID NO: 21533 - DNA, 25 bp, probe
atattgttcagaattcctcatgctg

SEQ ID NO: 21534 - DNA, 25 bp, probe
aatttccagactgaatgggatattg

SEQ ID NO: 21535 - DNA, 25 bp, probe
ttgttcagaattcctcatgctgtaa

SEQ ID NO: 21536 - DNA, 25 bp, probe
atcggcacgaggattattcaagaat

SEQ ID NO: 21537 - DNA, 25 bp, probe
gaatttccagactgaatgggatatt

SEQ ID NO: 21538 - DNA, 25 bp, probe
ggatattgttcagaattcctcatgc

SEQ ID NO: 21539 - DNA, 25 bp, probe
tgttcagaattcctcatgctgtaac

SEQ ID NO: 21540 - DNA, 25 bp, probe
tcggcacgaggattattcaagaatt

SEQ ID NO: 21541 - DNA, 25 bp, probe
aatcggcacgaggattattcaagaa

SEQ ID NO: 21542 - DNA, 25 bp, probe
aagaatcggcacgaggattattcaa

SEQ ID NO: 21543 - DNA, 25 bp, probe
cggcacgaggattattcaagaattc

SEQ ID NO: 21544 - DNA, 25 bp, probe
actccagacactatgattaaactat

SEQ ID NO: 21545 - DNA, 25 bp, probe
aattctaccaaatatctggctgggt

SEQ ID NO: 21546 - DNA, 25 bp, probe
tgattaaactatctagggaagaagg

SEQ ID NO: 21547 - DNA, 25 bp, probe
catgaatttccagactgaatgggat

SEQ ID NO: 21548 - DNA, 25 bp, probe
gttcagaattcctcatgctgtaacc

SEQ ID NO: 21549 - DNA, 25 bp, probe
gaatcggcacgaggattattcaaga

SEQ ID NO: 21550 - DNA, 25 bp, probe
agaatcggcacgaggattattcaag

SEQ ID NO: 21551 - DNA, 25 bp, probe
ctccagacactatgattaaactatc

SEQ ID NO: 21552 - DNA, 25 bp, probe
tccagacactatgattaaactatct

SEQ ID NO: 21553 - DNA, 25 bp, probe
attctattgtgatctaaagcagaca

SEQ ID NO: 21554 - DNA, 25 bp, probe
aattctattgtgatctaaagcagac

SEQ ID NO: 21555 - DNA, 25 bp, probe
aaattctattgtgatctaaagcaga

SEQ ID NO: 21556 - DNA, 25 bp, probe
tctattgtgatctaaagcagacaaa

SEQ ID NO: 21557 - DNA, 25 bp, probe
ttctattgtgatctaaagcagacaa

SEQ ID NO: 21558 - DNA, 25 bp, probe
aaaattctattgtgatctaaagcag

SEQ ID NO: 21559 - DNA, 25 bp, probe
ctattgtgatctaaagcagacaaaa

SEQ ID NO: 21560 - DNA, 25 bp, probe
gatttgatttgtatccactgtcacc

SEQ ID NO: 21561 - DNA, 25 bp, probe
cgatttgatttgtatccactgtcac

SEQ ID NO: 21562 - DNA, 25 bp, probe
atttgatttgtatccactgtcacca

SEQ ID NO: 21563 - DNA, 25 bp, probe
ccgatttgatttgtatccactgtca

SEQ ID NO: 21564 - DNA, 25 bp, probe
tttgatttgtatccactgtcaccag

SEQ ID NO: 21565 - DNA, 25 bp, probe
gccgatttgatttgtatccactgtc

SEQ ID NO: 21566 - DNA, 25 bp, probe
aggttgataccagcttcagtctcta

SEQ ID NO: 21567 - DNA, 25 bp, probe
aaggttgataccagcttcagtctct

SEQ ID NO: 21568 - DNA, 25 bp, probe
ttgatttgtatccactgtcaccagc

SEQ ID NO: 21569 - DNA, 25 bp, probe
cgccgatttgatttgtatccactgt

SEQ ID NO: 21570 - DNA, 25 bp, probe
gaaggttgataccagcttcagtctc

SEQ ID NO: 21571 - DNA, 25 bp, probe
gatttgtatccactgtcaccagcac

SEQ ID NO: 21572 - DNA, 25 bp, probe
atttgtatccactgtcaccagcact

SEQ ID NO: 21573 - DNA, 25 bp, probe
tgatttgtatccactgtcaccagca

SEQ ID NO: 21574 - DNA, 25 bp, probe
ggaaggttgataccagcttcagtct

SEQ ID NO: 21575 - DNA, 25 bp, probe
ttagggaaggttgataccagcttca

SEQ ID NO: 21576 - DNA, 25 bp, probe
tttgtatccactgtcaccagcactg

SEQ ID NO: 21577 - DNA, 25 bp, probe
tagggaaggttgataccagcttcag

SEQ ID NO: 21578 - DNA, 25 bp, probe
ggatgatttccgagggagacattcg

SEQ ID NO: 21579 - DNA, 25 bp, probe
gggaaggttgataccagcttcagtc

SEQ ID NO: 21580 - DNA, 25 bp, probe
gcgccgatttgatttgtatccactg

SEQ ID NO: 21581 - DNA, 25 bp, probe
ctcacttaggactttctggatccgg

SEQ ID NO: 21582 - DNA, 25 bp, probe
gctcacttaggactttctggatccg

SEQ ID NO: 21583 - DNA, 25 bp, probe
ggtcgtctcgttccaagatctgtag

SEQ ID NO: 21584 - DNA, 25 bp, probe
aggtcgtctcgttccaagatctgta

SEQ ID NO: 21585 - DNA, 25 bp, probe
gtcgtctcgttccaagatctgtagc

SEQ ID NO: 21586 - DNA, 25 bp, probe
catgaatgagtacatccccgaaaag

SEQ ID NO: 21587 - DNA, 25 bp, probe
ctttctgctgcccatgaatgagtac

SEQ ID NO: 21588 - DNA, 25 bp, probe
ttctgctgcccatgaatgagtacat

SEQ ID NO: 21589 - DNA, 25 bp, probe
ccatgaatgagtacatccccgaaaa

SEQ ID NO: 21590 - DNA, 25 bp, probe
tttctgctgcccatgaatgagtaca

SEQ ID NO: 21591 - DNA, 25 bp, probe
atgaatgagtacatccccgaaaagc

SEQ ID NO: 21592 - DNA, 25 bp, probe
tctgctgcccatgaatgagtacatc

SEQ ID NO: 21593 - DNA, 25 bp, probe
cctttctgctgcccatgaatgagta

SEQ ID NO: 21594 - DNA, 25 bp, probe
cccatgaatgagtacatccccgaaa

SEQ ID NO: 21595 - DNA, 25 bp, probe
tcagatcatccagaagttcctcaag

SEQ ID NO: 21596 - DNA, 25 bp, probe
ctcagatcatccagaagttcctcaa

SEQ ID NO: 21597 - DNA, 25 bp, probe
cagatcatccagaagttcctcaagg

SEQ ID NO: 21598 - DNA, 25 bp, probe
tcctcagatcatccagaagttcctc

SEQ ID NO: 21599 - DNA, 25 bp, probe
cctcagatcatccagaagttcctca

SEQ ID NO: 21600 - DNA, 25 bp, probe
caagggccaggactttatctaatac

SEQ ID NO: 21601 - DNA, 25 bp, probe
tcaagggccaggactttatctaata

SEQ ID NO: 21602 - DNA, 25 bp, probe
agatcatccagaagttcctcaaggg

SEQ ID NO: 21603 - DNA, 25 bp, probe
ctcaagggccaggactttatctaat

SEQ ID NO: 21604 - DNA, 25 bp, probe
ctggttacctacgaaggctccaatc

SEQ ID NO: 21605 - DNA, 25 bp, probe
ccatttcctgagaccacagagagag

SEQ ID NO: 21606 - DNA, 25 bp, probe
catttcctgagaccacagagagagg

SEQ ID NO: 21607 - DNA, 25 bp, probe
gatcatccagaagttcctcaagggc

SEQ ID NO: 21608 - DNA, 25 bp, probe
atgtcttgtacatgtgtagcctgtg

SEQ ID NO: 21609 - DNA, 25 bp, probe
cctcaagggccaggactttatctaa

SEQ ID NO: 21610 - DNA, 25 bp, probe
atttcctgagaccacagagagaggg

SEQ ID NO: 21611 - DNA, 25 bp, probe
aggcttcatccccttcaattttgtg

SEQ ID NO: 21612 - DNA, 25 bp, probe
tcttgtacatgtgtagcctgtgcat

SEQ ID NO: 21613 - DNA, 25 bp, probe
ggcttcatccccttcaattttgtgg

SEQ ID NO: 21614 - DNA, 25 bp, probe
tggactctgcacatgtcttgtacat

SEQ ID NO: 21615 - DNA, 25 bp, probe
gtggactctgcacatgtcttgtaca

SEQ ID NO: 21616 - DNA, 25 bp, probe
gtcttgtacatgtgtagcctgtgca

SEQ ID NO: 21617 - DNA, 25 bp, probe
tgtcttgtacatgtgtagcctgtgc

SEQ ID NO: 21618 - DNA, 25 bp, probe
gcttcatccccttcaattttgtggc

SEQ ID NO: 21619 - DNA, 25 bp, probe
cttgtacatgtgtagcctgtgcatg

SEQ ID NO: 21620 - DNA, 25 bp, probe
aaggcttcatccccttcaattttgt

SEQ ID NO: 21621 - DNA, 25 bp, probe
cttcatccccttcaattttgtggcc

SEQ ID NO: 21622 - DNA, 25 bp, probe
tcctcaagggccaggactttatcta

SEQ ID NO: 21623 - DNA, 25 bp, probe
gttcctcaagggccaggactttatc

SEQ ID NO: 21624 - DNA, 25 bp, probe
ttcctcaagggccaggactttatct

SEQ ID NO: 21625 - DNA, 25 bp, probe
aacactctttctcagcagtatcgta

SEQ ID NO: 21626 - DNA, 25 bp, probe
acactctttctcagcagtatcgtag

SEQ ID NO: 21627 - DNA, 25 bp, probe
ctttctcagcagtatcgtagccttc

SEQ ID NO: 21628 - DNA, 25 bp, probe
gaacactctttctcagcagtatcgt

SEQ ID NO: 21629 - DNA, 25 bp, probe
tgaacactctttctcagcagtatcg

SEQ ID NO: 21630 - DNA, 25 bp, probe
tctttctcagcagtatcgtagcctt

SEQ ID NO: 21631 - DNA, 25 bp, probe
cactctttctcagcagtatcgtagc

SEQ ID NO: 21632 - DNA, 25 bp, probe
ctctttctcagcagtatcgtagcct

SEQ ID NO: 21633 - DNA, 25 bp, probe
ccagatgctgctagagaaactgaac

SEQ ID NO: 21634 - DNA, 25 bp, probe
actctttctcagcagtatcgtagcc

SEQ ID NO: 21635 - DNA, 25 bp, probe
cagatgctgctagagaaactgaacg

SEQ ID NO: 21636 - DNA, 25 bp, probe
tttctcagcagtatcgtagccttcg

SEQ ID NO: 21637 - DNA, 25 bp, probe
ctgaacactctttctcagcagtatc

SEQ ID NO: 21638 - DNA, 25 bp, probe
tctgaacactctttctcagcagtat

SEQ ID NO: 21639 - DNA, 25 bp, probe
agatgctgctagagaaactgaacgg

SEQ ID NO: 21640 - DNA, 25 bp, probe
ctctgaacactctttctcagcagta

SEQ ID NO: 21641 - DNA, 25 bp, probe
cccagatgctgctagagaaactgaa

SEQ ID NO: 21642 - DNA, 25 bp, probe
cagcaccctctgaacactctttctc

SEQ ID NO: 21643 - DNA, 25 bp, probe
cataagtggcaggattttcggaagc

SEQ ID NO: 21644 - DNA, 25 bp, probe
gcataagtggcaggattttcggaag

SEQ ID NO: 21645 - DNA, 25 bp, probe
cctctgaacactctttctcagcagt

SEQ ID NO: 21646 - DNA, 25 bp, probe
ataagtggcaggattttcggaagct

SEQ ID NO: 21647 - DNA, 25 bp, probe
ccctctgaacactctttctcagcag

SEQ ID NO: 21648 - DNA, 25 bp, probe
caccctctgaacactctttctcagc

SEQ ID NO: 21649 - DNA, 25 bp, probe
gcaccctctgaacactctttctcag

SEQ ID NO: 21650 - DNA, 25 bp, probe
acctctgtgctttggtaataaattg

SEQ ID NO: 21651 - DNA, 25 bp, probe
cacctctgtgctttggtaataaatt

SEQ ID NO: 21652 - DNA, 25 bp, probe
acacctctgtgctttggtaataaat

SEQ ID NO: 21653 - DNA, 25 bp, probe
gacacctctgtgctttggtaataaa

SEQ ID NO: 21654 - DNA, 25 bp, probe
tgacacctctgtgctttggtaataa

SEQ ID NO: 21655 - DNA, 25 bp, probe
ttgacacctctgtgctttggtaata

SEQ ID NO: 21656 - DNA, 25 bp, probe
aaaatgaagtaatgtgactcaaggc

SEQ ID NO: 21657 - DNA, 25 bp, probe
aaatgaagtaatgtgactcaaggcc

SEQ ID NO: 21658 - DNA, 25 bp, probe
cttgacacctctgtgctttggtaat

SEQ ID NO: 21659 - DNA, 25 bp, probe
ccttgacacctctgtgctttggtaa

SEQ ID NO: 21660 - DNA, 25 bp, probe
cagttacctagttccttcattccaa

SEQ ID NO: 21661 - DNA, 25 bp, probe
aagcagttacctagttccttcattc

SEQ ID NO: 21662 - DNA, 25 bp, probe
agttacctagttccttcattccaac

SEQ ID NO: 21663 - DNA, 25 bp, probe
ttacctagttccttcattccaacga

SEQ ID NO: 21664 - DNA, 25 bp, probe
gttacctagttccttcattccaacg

SEQ ID NO: 21665 - DNA, 25 bp, probe
cttgttgaagcagttacctagttcc

SEQ ID NO: 21666 - DNA, 25 bp, probe
ccttgttgaagcagttacctagttc

SEQ ID NO: 21667 - DNA, 25 bp, probe
tgttgaagcagttacctagttcctt

SEQ ID NO: 21668 - DNA, 25 bp, probe
ttgttgaagcagttacctagttcct

SEQ ID NO: 21669 - DNA, 25 bp, probe
tccttgttgaagcagttacctagtt

SEQ ID NO: 21670 - DNA, 25 bp, probe
agcagttacctagttccttcattcc

SEQ ID NO: 21671 - DNA, 25 bp, probe
gcagttacctagttccttcattcca

SEQ ID NO: 21672 - DNA, 25 bp, probe
ttgagagataaggtagagctgagac

SEQ ID NO: 21673 - DNA, 25 bp, probe
gttgagagataaggtagagctgaga

SEQ ID NO: 21674 - DNA, 25 bp, probe
tacctagttccttcattccaacgac

SEQ ID NO: 21675 - DNA, 25 bp, probe
tgttgagagataaggtagagctgag

SEQ ID NO: 21676 - DNA, 25 bp, probe
ctgttgagagataaggtagagctga

SEQ ID NO: 21677 - DNA, 25 bp, probe
tagttccttcattccaacgactgag

SEQ ID NO: 21678 - DNA, 25 bp, probe
gtccttgttgaagcagttacctagt

SEQ ID NO: 21679 - DNA, 25 bp, probe
tctgttgagagataaggtagagctg

SEQ ID NO: 21680 - DNA, 25 bp, probe
ataccagcaactttgatgactatga

SEQ ID NO: 21681 - DNA, 25 bp, probe
taccagcaactttgatgactatgaa

SEQ ID NO: 21682 - DNA, 25 bp, probe
gataccagcaactttgatgactatg

SEQ ID NO: 21683 - DNA, 25 bp, probe
agataccagcaactttgatgactat

SEQ ID NO: 21684 - DNA, 25 bp, probe
gagataccagcaactttgatgacta

SEQ ID NO: 21685 - DNA, 25 bp, probe
cattcataccaaagtttagaggctc

SEQ ID NO: 21686 - DNA, 25 bp, probe
ccattcataccaaagtttagaggct

SEQ ID NO: 21687 - DNA, 25 bp, probe
tccattcataccaaagtttagaggc

SEQ ID NO: 21688 - DNA, 25 bp, probe
ctagttccttcattccaacgactga

SEQ ID NO: 21689 - DNA, 25 bp, probe
cagcaactttgatgactatgaagaa

SEQ ID NO: 21690 - DNA, 25 bp, probe
gcaactttgatgactatgaagaaga

SEQ ID NO: 21691 - DNA, 25 bp, probe
actatgaagaagaagatatccgtgt

SEQ ID NO: 21692 - DNA, 25 bp, probe
agcaactttgatgactatgaagaag

SEQ ID NO: 21693 - DNA, 25 bp, probe
atgaagaagaagatatccgtgtctc

SEQ ID NO: 21694 - DNA, 25 bp, probe
ccagcaactttgatgactatgaaga

SEQ ID NO: 21695 - DNA, 25 bp, probe
tgactatgaagaagaagatatccgt

SEQ ID NO: 21696 - DNA, 25 bp, probe
gaagaagaagatatccgtgtctcta

SEQ ID NO: 21697 - DNA, 25 bp, probe
tgaagaagaagatatccgtgtctct

SEQ ID NO: 21698 - DNA, 25 bp, probe
ctatgaagaagaagatatccgtgtc

SEQ ID NO: 21699 - DNA, 25 bp, probe
gactatgaagaagaagatatccgtg

SEQ ID NO: 21700 - DNA, 25 bp, probe
accagcaactttgatgactatgaag

SEQ ID NO: 21701 - DNA, 25 bp, probe
gctccattcataccaaagtttagag

SEQ ID NO: 21702 - DNA, 25 bp, probe
tatgaagaagaagatatccgtgtct

SEQ ID NO: 21703 - DNA, 25 bp, probe
aagaagaagatatccgtgtctctat

SEQ ID NO: 21704 - DNA, 25 bp, probe
cttctgctctaattcgtgctatctt

SEQ ID NO: 21705 - DNA, 25 bp, probe
ttcttctgctctaattcgtgctatc

SEQ ID NO: 21706 - DNA, 25 bp, probe
ttccaacagccaacagtaataagaa

SEQ ID NO: 21707 - DNA, 25 bp, probe
agttaagtgtcaagcaacctctatt

SEQ ID NO: 21708 - DNA, 25 bp, probe
cagttaagtgtcaagcaacctctat

SEQ ID NO: 21709 - DNA, 25 bp, probe
tcttctgctctaattcgtgctatct

SEQ ID NO: 21710 - DNA, 25 bp, probe
attggagactagcacatgaactatt

SEQ ID NO: 21711 - DNA, 25 bp, probe
gatctagcacactccaatacttgaa

SEQ ID NO: 21712 - DNA, 25 bp, probe
ttggagactagcacatgaactattc

SEQ ID NO: 21713 - DNA, 25 bp, probe
cattggagactagcacatgaactat

SEQ ID NO: 21714 - DNA, 25 bp, probe
ttcttaatcaggttatgcctctctg

SEQ ID NO: 21715 - DNA, 25 bp, probe
tgttgattgaccaggcatagttctt

SEQ ID NO: 21716 - DNA, 25 bp, probe
tatatagaagctgagacaaggaggt

SEQ ID NO: 21717 - DNA, 25 bp, probe
atatatagaagctgagacaaggagg

SEQ ID NO: 21718 - DNA, 25 bp, probe
atatagaagctgagacaaggaggtg

SEQ ID NO: 21719 - DNA, 25 bp, probe
ttgattgaccaggcatagttcttta

SEQ ID NO: 21720 - DNA, 25 bp, probe
ccaacagccaacagtaataagaaat

SEQ ID NO: 21721 - DNA, 25 bp, probe
aatcagttacagaggactaattgtt

SEQ ID NO: 21722 - DNA, 25 bp, probe
gccagtaaacatcttccacaaatat

SEQ ID NO: 21723 - DNA, 25 bp, probe
atatttagtcttggctgcttccttt

SEQ ID NO: 21724 - DNA, 25 bp, probe
tgccagtaaacatcttccacaaata

SEQ ID NO: 21725 - DNA, 25 bp, probe
attgaccaggcatagttctttagat

SEQ ID NO: 21726 - DNA, 25 bp, probe
gattgaccaggcatagttctttaga

SEQ ID NO: 21727 - DNA, 25 bp, probe
tgattgaccaggcatagttctttag

SEQ ID NO: 21728 - DNA, 25 bp, probe
tccaacagccaacagtaataagaaa

SEQ ID NO: 21729 - DNA, 25 bp, probe
tttccaacagccaacagtaataaga

SEQ ID NO: 21730 - DNA, 25 bp, probe
tgaccaggcatagttctttagatag

SEQ ID NO: 21731 - DNA, 25 bp, probe
tacatatttagtcttggctgcttcc

SEQ ID NO: 21732 - DNA, 25 bp, probe
ccattggagactagcacatgaacta

SEQ ID NO: 21733 - DNA, 25 bp, probe
cagccatcagatttagtagaaggtg

SEQ ID NO: 21734 - DNA, 25 bp, probe
ttcagccatcagatttagtagaagg

SEQ ID NO: 21735 - DNA, 25 bp, probe
ttctgctctaattcgtgctatcttt

SEQ ID NO: 21736 - DNA, 25 bp, probe
tttcttctgctctaattcgtgctat

SEQ ID NO: 21737 - DNA, 25 bp, probe
atttcttctgctctaattcgtgcta

SEQ ID NO: 21738 - DNA, 25 bp, probe
ttgaccaggcatagttctttagata

SEQ ID NO: 21739 - DNA, 25 bp, probe
ctttccaacagccaacagtaataag

SEQ ID NO: 21740 - DNA, 25 bp, probe
caacagccaacagtaataagaaatg

SEQ ID NO: 21741 - DNA, 25 bp, probe
tcagccatcagatttagtagaaggt

SEQ ID NO: 21742 - DNA, 25 bp, probe
gttcagccatcagatttagtagaag

SEQ ID NO: 21743 - DNA, 25 bp, probe
cgttcagccatcagatttagtagaa

SEQ ID NO: 21744 - DNA, 25 bp, probe
catatttagtcttggctgcttcctt

SEQ ID NO: 21745 - DNA, 25 bp, probe
tggtcattcagattctttgtcttca

SEQ ID NO: 21746 - DNA, 25 bp, probe
accaggcatagttctttagatagac

SEQ ID NO: 21747 - DNA, 25 bp, probe
ctccatttcttctgctctaattcgt

SEQ ID NO: 21748 - DNA, 25 bp, probe
gatatgtcattagatccaagtgctg

SEQ ID NO: 21749 - DNA, 25 bp, probe
agatatgtcattagatccaagtgct

SEQ ID NO: 21750 - DNA, 25 bp, probe
ctaatgacacttgaccttgttgaac

SEQ ID NO: 21751 - DNA, 25 bp, probe
tgtcattagatccaagtgctgatta

SEQ ID NO: 21752 - DNA, 25 bp, probe
atgtcattagatccaagtgctgatt

SEQ ID NO: 21753 - DNA, 25 bp, probe
tatgtcattagatccaagtgctgat

SEQ ID NO: 21754 - DNA, 25 bp, probe
atatgtcattagatccaagtgctga

SEQ ID NO: 21755 - DNA, 25 bp, probe
aagatatgtcattagatccaagtgc

SEQ ID NO: 21756 - DNA, 25 bp, probe
cctaatgacacttgaccttgttgaa

SEQ ID NO: 21757 - DNA, 25 bp, probe
gtcattagatccaagtgctgattaa

SEQ ID NO: 21758 - DNA, 25 bp, probe
ctcctaatgacacttgaccttgttg

SEQ ID NO: 21759 - DNA, 25 bp, probe
taatgacacttgaccttgttgaaca

SEQ ID NO: 21760 - DNA, 25 bp, probe
tcctaatgacacttgaccttgttga

SEQ ID NO: 21761 - DNA, 25 bp, probe
tctctgtttccatctttaagttccc

SEQ ID NO: 21762 - DNA, 25 bp, probe
ctctgtttccatctttaagttccca

SEQ ID NO: 21763 - DNA, 25 bp, probe
ccctatgtattctctgtttccatct

SEQ ID NO: 21764 - DNA, 25 bp, probe
tccctatgtattctctgtttccatc

SEQ ID NO: 21765 - DNA, 25 bp, probe
ctccctatgtattctctgtttccat

SEQ ID NO: 21766 - DNA, 25 bp, probe
tgttattattattgtggatactggc

SEQ ID NO: 21767 - DNA, 25 bp, probe
tgctgttgtcactgttattattatt

SEQ ID NO: 21768 - DNA, 25 bp, probe
ttgctgttgtcactgttattattat

SEQ ID NO: 21769 - DNA, 25 bp, probe
attgctgttgtcactgttattatta

SEQ ID NO: 21770 - DNA, 25 bp, probe
tattgctgttgtcactgttattatt

SEQ ID NO: 21771 - DNA, 25 bp, probe
ttattgctgttgtcactgttattat

SEQ ID NO: 21772 - DNA, 25 bp, probe
attattgctgttgtcactgttatta

SEQ ID NO: 21773 - DNA, 25 bp, probe
tattattgctgttgtcactgttatt

SEQ ID NO: 21774 - DNA, 25 bp, probe
ttattattgctgttgtcactgttat

SEQ ID NO: 21775 - DNA, 25 bp, probe
attattattgctgttgtcactgtta

SEQ ID NO: 21776 - DNA, 25 bp, probe
tattattattgctgttgtcactgtt

SEQ ID NO: 21777 - DNA, 25 bp, probe
ccatctttaagttcccagaccaata

SEQ ID NO: 21778 - DNA, 25 bp, probe
ttctctgtttccatctttaagttcc

SEQ ID NO: 21779 - DNA, 25 bp, probe
gctgttgtcactgttattattattg

SEQ ID NO: 21780 - DNA, 25 bp, probe
cccaaggatttgattgtttgtgaat

SEQ ID NO: 21781 - DNA, 25 bp, probe
tcccagaccaatatacattaagagt

SEQ ID NO: 21782 - DNA, 25 bp, probe
tgtttccatctttaagttcccagac

SEQ ID NO: 21783 - DNA, 25 bp, probe
ttgttctgtgctcctaatgacactt

SEQ ID NO: 21784 - DNA, 25 bp, probe
atattattattgctgttgtcactgt

SEQ ID NO: 21785 - DNA, 25 bp, probe
gtttgaactaagtgaatgtatctgc

SEQ ID NO: 21786 - DNA, 25 bp, probe
ccaaggatttgattgtttgtgaatt

SEQ ID NO: 21787 - DNA, 25 bp, probe
attcggttgttctgtgctcctaatg

SEQ ID NO: 21788 - DNA, 25 bp, probe
cattcggttgttctgtgctcctaat

SEQ ID NO: 21789 - DNA, 25 bp, probe
ctttaagttcccagaccaatataca

SEQ ID NO: 21790 - DNA, 25 bp, probe
gctccctatgtattctctgtttcca

SEQ ID NO: 21791 - DNA, 25 bp, probe
caggtacttctctgtgcattataga

SEQ ID NO: 21792 - DNA, 25 bp, probe
attactcttccatattccttctgcc

SEQ ID NO: 21793 - DNA, 25 bp, probe
tactcttccatattccttctgccta

SEQ ID NO: 21794 - DNA, 25 bp, probe
actcttccatattccttctgcctat

SEQ ID NO: 21795 - DNA, 25 bp, probe
ctcttccatattccttctgcctata

SEQ ID NO: 21796 - DNA, 25 bp, probe
ttactcttccatattccttctgcct

SEQ ID NO: 21797 - DNA, 25 bp, probe
tcttccatattccttctgcctatat

SEQ ID NO: 21798 - DNA, 25 bp, probe
taccttactattcctgacaagactt

SEQ ID NO: 21799 - DNA, 25 bp, probe
gtaccttactattcctgacaagact

SEQ ID NO: 21800 - DNA, 25 bp, probe
tattactcttccatattccttctgc

SEQ ID NO: 21801 - DNA, 25 bp, probe
accttactattcctgacaagacttg

SEQ ID NO: 21802 - DNA, 25 bp, probe
cttccatattccttctgcctatatt

SEQ ID NO: 21803 - DNA, 25 bp, probe
ccttactattcctgacaagacttgg

SEQ ID NO: 21804 - DNA, 25 bp, probe
tgtaccttactattcctgacaagac

SEQ ID NO: 21805 - DNA, 25 bp, probe
actgtaccttactattcctgacaag

SEQ ID NO: 21806 - DNA, 25 bp, probe
ctgtaccttactattcctgacaaga

SEQ ID NO: 21807 - DNA, 25 bp, probe
tactgtaccttactattcctgacaa

SEQ ID NO: 21808 - DNA, 25 bp, probe
ttactgtaccttactattcctgaca

SEQ ID NO: 21809 - DNA, 25 bp, probe
gtgtaaacctgttaataatgagccc

SEQ ID NO: 21810 - DNA, 25 bp, probe
ttcatccctttgtgtaaacctgtta

SEQ ID NO: 21811 - DNA, 25 bp, probe
cttactattcctgacaagacttgga

SEQ ID NO: 21812 - DNA, 25 bp, probe
tgtaaacctgttaataatgagccca

SEQ ID NO: 21813 - DNA, 25 bp, probe
tcatccctttgtgtaaacctgttaa

SEQ ID NO: 21814 - DNA, 25 bp, probe
catccctttgtgtaaacctgttaat

SEQ ID NO: 21815 - DNA, 25 bp, probe
tgtgtaaacctgttaataatgagcc

SEQ ID NO: 21816 - DNA, 25 bp, probe
gctgctgtttagagaaattgtgaaa

SEQ ID NO: 21817 - DNA, 25 bp, probe
tttcatccctttgtgtaaacctgtt

SEQ ID NO: 21818 - DNA, 25 bp, probe
ttaagattctgctgctgtttagaga

SEQ ID NO: 21819 - DNA, 25 bp, probe
gtaaagtttaacacggtttgacagt

SEQ ID NO: 21820 - DNA, 25 bp, probe
aaagtttaacacggtttgacagtaa

SEQ ID NO: 21821 - DNA, 25 bp, probe
tttaagattctgctgctgtttagag

SEQ ID NO: 21822 - DNA, 25 bp, probe
gtaaacctgttaataatgagcccat

SEQ ID NO: 21823 - DNA, 25 bp, probe
aagtttaacacggtttgacagtaaa

SEQ ID NO: 21824 - DNA, 25 bp, probe
agtttaacacggtttgacagtaaat

SEQ ID NO: 21825 - DNA, 25 bp, probe
cctgttaataatgagcccatcacta

SEQ ID NO: 21826 - DNA, 25 bp, probe
taaacctgttaataatgagcccatc

SEQ ID NO: 21827 - DNA, 25 bp, probe
taatgagcccatcactaatatccag

SEQ ID NO: 21828 - DNA, 25 bp, probe
aaacctgttaataatgagcccatca

SEQ ID NO: 21829 - DNA, 25 bp, probe
taaagtttaacacggtttgacagta

SEQ ID NO: 21830 - DNA, 25 bp, probe
tgctgctgtttagagaaattgtgaa

SEQ ID NO: 21831 - DNA, 25 bp, probe
ataatgagcccatcactaatatcca

SEQ ID NO: 21832 - DNA, 25 bp, probe
aacacggtttgacagtaaataaatg

SEQ ID NO: 21833 - DNA, 25 bp, probe
tccctttgtgtaaacctgttaataa

SEQ ID NO: 21834 - DNA, 25 bp, probe
aacctgttaataatgagcccatcac

SEQ ID NO: 21835 - DNA, 25 bp, probe
tgtaaagtttaacacggtttgacag

SEQ ID NO: 21836 - DNA, 25 bp, probe
tctccatcctgactcttgaacttac

SEQ ID NO: 21837 - DNA, 25 bp, probe
ctccatcctgactcttgaacttacc

SEQ ID NO: 21838 - DNA, 25 bp, probe
gccagctctctacacctctatatat

SEQ ID NO: 21839 - DNA, 25 bp, probe
gtctccatcctgactcttgaactta

SEQ ID NO: 21840 - DNA, 25 bp, probe
ccagctctctacacctctatatatt

SEQ ID NO: 21841 - DNA, 25 bp, probe
ccaccagggtatgtaaatatctctt

SEQ ID NO: 21842 - DNA, 25 bp, probe
tgactcttgaacttacccacaataa

SEQ ID NO: 21843 - DNA, 25 bp, probe
ctgactcttgaacttacccacaata

SEQ ID NO: 21844 - DNA, 25 bp, probe
gactcttgaacttacccacaataag

SEQ ID NO: 21845 - DNA, 25 bp, probe
caccagggtatgtaaatatctcttt

SEQ ID NO: 21846 - DNA, 25 bp, probe
cctgactcttgaacttacccacaat

SEQ ID NO: 21847 - DNA, 25 bp, probe
catcctgactcttgaacttacccac

SEQ ID NO: 21848 - DNA, 25 bp, probe
tatatagccgagctgttcttccttc

SEQ ID NO: 21849 - DNA, 25 bp, probe
atcctgactcttgaacttacccaca

SEQ ID NO: 21850 - DNA, 25 bp, probe
ggccagctctctacacctctatata

SEQ ID NO: 21851 - DNA, 25 bp, probe
ggtctccatcctgactcttgaactt

SEQ ID NO: 21852 - DNA, 25 bp, probe
actcttgaacttacccacaataaga

SEQ ID NO: 21853 - DNA, 25 bp, probe
tccatcctgactcttgaacttaccc

SEQ ID NO: 21854 - DNA, 25 bp, probe
ctcttgaacttacccacaataagaa

SEQ ID NO: 21855 - DNA, 25 bp, probe
cagctctctacacctctatatatta

SEQ ID NO: 21856 - DNA, 25 bp, probe
tcctgactcttgaacttacccacaa

SEQ ID NO: 21857 - DNA, 25 bp, probe
acccacaataagaataaattctgcc

SEQ ID NO: 21858 - DNA, 25 bp, probe
cccacaataagaataaattctgcct

SEQ ID NO: 21859 - DNA, 25 bp, probe
tcttgaacttacccacaataagaat

SEQ ID NO: 21860 - DNA, 25 bp, probe
ccatcctgactcttgaacttaccca

SEQ ID NO: 21861 - DNA, 25 bp, probe
ctatggaagtcggaaacatggtcag

SEQ ID NO: 21862 - DNA, 25 bp, probe
cccaccagggtatgtaaatatctct

SEQ ID NO: 21863 - DNA, 25 bp, probe
cttgaacttacccacaataagaata

SEQ ID NO: 21864 - DNA, 25 bp, probe
aaaatggtcttcaaagcacataaaa

SEQ ID NO: 21865 - DNA, 25 bp, probe
tatggaagtcggaaacatggtcaga

SEQ ID NO: 21866 - DNA, 25 bp, probe
ccacaataagaataaattctgcctc

SEQ ID NO: 21867 - DNA, 25 bp, probe
ttactatatagccgagctgttcttc

SEQ ID NO: 21868 - DNA, 25 bp, probe
attactatatagccgagctgttctt

SEQ ID NO: 21869 - DNA, 25 bp, probe
tgaacttacccacaataagaataaa

SEQ ID NO: 21870 - DNA, 25 bp, probe
ttgaacttacccacaataagaataa

SEQ ID NO: 21871 - DNA, 25 bp, probe
tactatatagccgagctgttcttcc

SEQ ID NO: 21872 - DNA, 25 bp, probe
tattactatatagccgagctgttct

SEQ ID NO: 21873 - DNA, 25 bp, probe
cacaataagaataaattctgcctca

SEQ ID NO: 21874 - DNA, 25 bp, probe
gcccaccagggtatgtaaatatctc

SEQ ID NO: 21875 - DNA, 25 bp, probe
ctatatagccgagctgttcttcctt

SEQ ID NO: 21876 - DNA, 25 bp, probe
accagggtatgtaaatatctctttt

SEQ ID NO: 21877 - DNA, 25 bp, probe
agctctctacacctctatatattat

SEQ ID NO: 21878 - DNA, 25 bp, probe
gtggtctccatcctgactcttgaac

SEQ ID NO: 21879 - DNA, 25 bp, probe
gaagtcggaaacatggtcagaacac

SEQ ID NO: 21880 - DNA, 25 bp, probe
caattcaaggttatctggaagttca

SEQ ID NO: 21881 - DNA, 25 bp, probe
gttcaattcaaggttatctggaagt

SEQ ID NO: 21882 - DNA, 25 bp, probe
tgttcaattcaaggttatctggaag

SEQ ID NO: 21883 - DNA, 25 bp, probe
tcaattcaaggttatctggaagttc

SEQ ID NO: 21884 - DNA, 25 bp, probe
ttcaattcaaggttatctggaagtt

SEQ ID NO: 21885 - DNA, 25 bp, probe
atgttcaattcaaggttatctggaa

SEQ ID NO: 21886 - DNA, 25 bp, probe
ggttaatccatgttcaattcaaggt

SEQ ID NO: 21887 - DNA, 25 bp, probe
catgttcaattcaaggttatctgga

SEQ ID NO: 21888 - DNA, 25 bp, probe
tccatgttcaattcaaggttatctg

SEQ ID NO: 21889 - DNA, 25 bp, probe
attcaaggttatctggaagttcagt

SEQ ID NO: 21890 - DNA, 25 bp, probe
caaggttatctggaagttcagtctt

SEQ ID NO: 21891 - DNA, 25 bp, probe
ttcaaggttatctggaagttcagtc

SEQ ID NO: 21892 - DNA, 25 bp, probe
aattcaaggttatctggaagttcag

SEQ ID NO: 21893 - DNA, 25 bp, probe
tcaaggttatctggaagttcagtct

SEQ ID NO: 21894 - DNA, 25 bp, probe
aatgatgttaagtggtgtgtgcttg

SEQ ID NO: 21895 - DNA, 25 bp, probe
atccatgttcaattcaaggttatct

SEQ ID NO: 21896 - DNA, 25 bp, probe
gttaatccatgttcaattcaaggtt

SEQ ID NO: 21897 - DNA, 25 bp, probe
ggcgataatgtgtgtctcctgtatt

SEQ ID NO: 21898 - DNA, 25 bp, probe
caatgcaatcacaggaattacactt

SEQ ID NO: 21899 - DNA, 25 bp, probe
cgataatgtgtgtctcctgtatttg

SEQ ID NO: 21900 - DNA, 25 bp, probe
tacaacacagaagacatcaaagact

SEQ ID NO: 21901 - DNA, 25 bp, probe
ctacaacacagaagacatcaaagac

SEQ ID NO: 21902 - DNA, 25 bp, probe
gacatcaaagactgggaagatagat

SEQ ID NO: 21903 - DNA, 25 bp, probe
aagacatcaaagactgggaagatag

SEQ ID NO: 21904 - DNA, 25 bp, probe
gaagacatcaaagactgggaagata

SEQ ID NO: 21905 - DNA, 25 bp, probe
aatccatgttcaattcaaggttatc

SEQ ID NO: 21906 - DNA, 25 bp, probe
taatgtgtgtctcctgtatttgttg

SEQ ID NO: 21907 - DNA, 25 bp, probe
acatcaaagactgggaagatagatt

SEQ ID NO: 21908 - DNA, 25 bp, probe
agacatcaaagactgggaagataga

SEQ ID NO: 21909 - DNA, 25 bp, probe
ttgacttctgctttcttgggttaat

SEQ ID NO: 21910 - DNA, 25 bp, probe
ccatgttcaattcaaggttatctgg

SEQ ID NO: 21911 - DNA, 25 bp, probe
gataatgtgtgtctcctgtatttgt

SEQ ID NO: 21912 - DNA, 25 bp, probe
tctacaacacagaagacatcaaaga

SEQ ID NO: 21913 - DNA, 25 bp, probe
tttgacttctgctttcttgggttaa

SEQ ID NO: 21914 - DNA, 25 bp, probe
gcgataatgtgtgtctcctgtattt

SEQ ID NO: 21915 - DNA, 25 bp, probe
tgacttctgctttcttgggttaatc

SEQ ID NO: 21916 - DNA, 25 bp, probe
aatgtgtgtctcctgtatttgttgg

SEQ ID NO: 21917 - DNA, 25 bp, probe
catcaaagactgggaagatagattt

SEQ ID NO: 21918 - DNA, 25 bp, probe
agaagacatcaaagactgggaagat

SEQ ID NO: 21919 - DNA, 25 bp, probe
ataatgtgtgtctcctgtatttgtt

SEQ ID NO: 21920 - DNA, 25 bp, probe
catttctggtaagagcctgaagttt

SEQ ID NO: 21921 - DNA, 25 bp, probe
ttaaatgctgagaatgatccctact

SEQ ID NO: 21922 - DNA, 25 bp, probe
atgatgttaagtggtgtgtgcttgt

SEQ ID NO: 21923 - DNA, 25 bp, probe
gggttaatccatgttcaattcaagg

SEQ ID NO: 21924 - DNA, 25 bp, probe
cttctacaactggtacttcctcatc

SEQ ID NO: 21925 - DNA, 25 bp, probe
tcttctacaactggtacttcctcat

SEQ ID NO: 21926 - DNA, 25 bp, probe
ttcttctacaactggtacttcctca

SEQ ID NO: 21927 - DNA, 25 bp, probe
ttctacaactggtacttcctcatca

SEQ ID NO: 21928 - DNA, 25 bp, probe
gttcttctacaactggtacttcctc

SEQ ID NO: 21929 - DNA, 25 bp, probe
tctacaactggtacttcctcatcac

SEQ ID NO: 21930 - DNA, 25 bp, probe
acttgatgttcctgggatgtttaat

SEQ ID NO: 21931 - DNA, 25 bp, probe
cctgggatgtttaatcaagagagac

SEQ ID NO: 21932 - DNA, 25 bp, probe
atgttcctgggatgtttaatcaaga

SEQ ID NO: 21933 - DNA, 25 bp, probe
gatgttcctgggatgtttaatcaag

SEQ ID NO: 21934 - DNA, 25 bp, probe
cttgatgttcctgggatgtttaatc

SEQ ID NO: 21935 - DNA, 25 bp, probe
ttcctgggatgtttaatcaagagag

SEQ ID NO: 21936 - DNA, 25 bp, probe
caccttctttaacctcagcatctac

SEQ ID NO: 21937 - DNA, 25 bp, probe
tcaccttctttaacctcagcatcta

SEQ ID NO: 21938 - DNA, 25 bp, probe
ctacaactggtacttcctcatcacg

SEQ ID NO: 21939 - DNA, 25 bp, probe
gttcctgggatgtttaatcaagaga

SEQ ID NO: 21940 - DNA, 25 bp, probe
tgttcctgggatgtttaatcaagag

SEQ ID NO: 21941 - DNA, 25 bp, probe
tcctgggatgtttaatcaagagaga

SEQ ID NO: 21942 - DNA, 25 bp, probe
ccttctttaacctcagcatctacct

SEQ ID NO: 21943 - DNA, 25 bp, probe
ctgggatgtttaatcaagagagaca

SEQ ID NO: 21944 - DNA, 25 bp, probe
accttctttaacctcagcatctacc

SEQ ID NO: 21945 - DNA, 25 bp, probe
cttctttaacctcagcatctacctg

SEQ ID NO: 21946 - DNA, 25 bp, probe
ctgctatgccgagttcttctacaac

SEQ ID NO: 21947 - DNA, 25 bp, probe
gagttcttctacaactggtacttcc

SEQ ID NO: 21948 - DNA, 25 bp, probe
agttcttctacaactggtacttcct

SEQ ID NO: 21949 - DNA, 25 bp, probe
cgagttcttctacaactggtacttc

SEQ ID NO: 21950 - DNA, 25 bp, probe
gtcaccttctttaacctcagcatct

SEQ ID NO: 21951 - DNA, 25 bp, probe
actgctatgccgagttcttctacaa

SEQ ID NO: 21952 - DNA, 25 bp, probe
tacaactggtacttcctcatcacgg

SEQ ID NO: 21953 - DNA, 25 bp, probe
ccgagttcttctacaactggtactt

SEQ ID NO: 21954 - DNA, 25 bp, probe
tgatgttcctgggatgtttaatcaa

SEQ ID NO: 21955 - DNA, 25 bp, probe
ttgatgttcctgggatgtttaatca

SEQ ID NO: 21956 - DNA, 25 bp, probe
ttaacctcagcatctacctgaacat

SEQ ID NO: 21957 - DNA, 25 bp, probe
cttcctcagcgtcaccttctttaac

SEQ ID NO: 21958 - DNA, 25 bp, probe
cactgctatgccgagttcttctaca

SEQ ID NO: 21959 - DNA, 25 bp, probe
ctatgccgagttcttctacaactgg

SEQ ID NO: 21960 - DNA, 25 bp, probe
cgtcaccttctttaacctcagcatc

SEQ ID NO: 21961 - DNA, 25 bp, probe
catgtctgtgaacttgatgttcctg

SEQ ID NO: 21962 - DNA, 25 bp, probe
taacctcagcatctacctgaacatc

SEQ ID NO: 21963 - DNA, 25 bp, probe
atgccgagttcttctacaactggta

SEQ ID NO: 21964 - DNA, 25 bp, probe
tatgccgagttcttctacaactggt

SEQ ID NO: 21965 - DNA, 25 bp, probe
gctatgccgagttcttctacaactg

SEQ ID NO: 21966 - DNA, 25 bp, probe
cagcatctacctgaacatccagagg

SEQ ID NO: 21967 - DNA, 25 bp, probe
atgtctgtgaacttgatgttcctgg

SEQ ID NO: 21968 - DNA, 25 bp, probe
cttatctatgtggtcattgatctcc

SEQ ID NO: 21969 - DNA, 25 bp, probe
ccttatctatgtggtcattgatctc

SEQ ID NO: 21970 - DNA, 25 bp, probe
accttatctatgtggtcattgatct

SEQ ID NO: 21971 - DNA, 25 bp, probe
taactgccattgaaattgtctccat

SEQ ID NO: 21972 - DNA, 25 bp, probe
taccagaacaaatgtatgaggaatg

SEQ ID NO: 21973 - DNA, 25 bp, probe
ctatgtggtcattgatctccctatc

SEQ ID NO: 21974 - DNA, 25 bp, probe
tctatgtggtcattgatctccctat

SEQ ID NO: 21975 - DNA, 25 bp, probe
atctatgtggtcattgatctcccta

SEQ ID NO: 21976 - DNA, 25 bp, probe
tatctatgtggtcattgatctccct

SEQ ID NO: 21977 - DNA, 25 bp, probe
ttatctatgtggtcattgatctccc

SEQ ID NO: 21978 - DNA, 25 bp, probe
tttaccagaacaaatgtatgaggaa

SEQ ID NO: 21979 - DNA, 25 bp, probe
gtaactgccattgaaattgtctcca

SEQ ID NO: 21980 - DNA, 25 bp, probe
ttaccagaacaaatgtatgaggaat

SEQ ID NO: 21981 - DNA, 25 bp, probe
gctcaggatcatttaccagaacaaa

SEQ ID NO: 21982 - DNA, 25 bp, probe
aactgccattgaaattgtctccatc

SEQ ID NO: 21983 - DNA, 25 bp, probe
gtatttaaggtacagagcagttgcc

SEQ ID NO: 21984 - DNA, 25 bp, probe
ggtaactgccattgaaattgtctcc

SEQ ID NO: 21985 - DNA, 25 bp, probe
ctcaggatcatttaccagaacaaat

SEQ ID NO: 21986 - DNA, 25 bp, probe
gctttcaaatacattaacactgtga

SEQ ID NO: 21987 - DNA, 25 bp, probe
ctgccattgaaattgtctccatctg

SEQ ID NO: 21988 - DNA, 25 bp, probe
atttaccagaacaaatgtatgagga

SEQ ID NO: 21989 - DNA, 25 bp, probe
cttgcccttggagaccttatctatg

SEQ ID NO: 21990 - DNA, 25 bp, probe
tttggtaactgccattgaaattgtc

SEQ ID NO: 21991 - DNA, 25 bp, probe
ctttggtaactgccattgaaattgt

SEQ ID NO: 21992 - DNA, 25 bp, probe
tgctcaggatcatttaccagaacaa

SEQ ID NO: 21993 - DNA, 25 bp, probe
tcttgcccttggagaccttatctat

SEQ ID NO: 21994 - DNA, 25 bp, probe
accagaacaaatgtatgaggaatgg

SEQ ID NO: 21995 - DNA, 25 bp, probe
actgccattgaaattgtctccatct

SEQ ID NO: 21996 - DNA, 25 bp, probe
ttggtaactgccattgaaattgtct

SEQ ID NO: 21997 - DNA, 25 bp, probe
cctttggtaactgccattgaaattg

SEQ ID NO: 21998 - DNA, 25 bp, probe
tcctttggtaactgccattgaaatt

SEQ ID NO: 21999 - DNA, 25 bp, probe
ttcctttggtaactgccattgaaat

SEQ ID NO: 22000 - DNA, 25 bp, probe
attcctttggtaactgccattgaaa

SEQ ID NO: 22001 - DNA, 25 bp, probe
catcaacccactaatttggtcctac

SEQ ID NO: 22002 - DNA, 25 bp, probe
caactctgctcaggatcatttacca

SEQ ID NO: 22003 - DNA, 25 bp, probe
tcatcaacccactaatttggtccta

SEQ ID NO: 22004 - DNA, 25 bp, probe
tatttaaggtacagagcagttgcct

SEQ ID NO: 22005 - DNA, 25 bp, probe
tggtaactgccattgaaattgtctc

SEQ ID NO: 22006 - DNA, 25 bp, probe
gattcctttggtaactgccattgaa

SEQ ID NO: 22007 - DNA, 25 bp, probe
ttgcccttggagaccttatctatgt

SEQ ID NO: 22008 - DNA, 25 bp, probe
cattgaaattgtctccatctggatc

SEQ ID NO: 22009 - DNA, 25 bp, probe
tgtatttaaggtacagagcagttgc

SEQ ID NO: 22010 - DNA, 25 bp, probe
atgtatttaaggtacagagcagttg

SEQ ID NO: 22011 - DNA, 25 bp, probe
caatgtatttaaggtacagagcagt

SEQ ID NO: 22012 - DNA, 25 bp, probe
ggatagaaagagtggtagagcagag

SEQ ID NO: 22013 - DNA, 25 bp, probe
aggatagaaagagtggtagagcaga

SEQ ID NO: 22014 - DNA, 25 bp, probe
caggatagaaagagtggtagagcag

SEQ ID NO: 22015 - DNA, 25 bp, probe
gatagaaagagtggtagagcagagc

SEQ ID NO: 22016 - DNA, 25 bp, probe
atagaaagagtggtagagcagagcc

SEQ ID NO: 22017 - DNA, 25 bp, probe
gcaggatagaaagagtggtagagca

SEQ ID NO: 22018 - DNA, 25 bp, probe
tagaaagagtggtagagcagagcct

SEQ ID NO: 22019 - DNA, 25 bp, probe
gattttcatcgagattgcctacaag

SEQ ID NO: 22020 - DNA, 25 bp, probe
tgattttcatcgagattgcctacaa

SEQ ID NO: 22021 - DNA, 25 bp, probe
ctgattttcatcgagattgcctaca

SEQ ID NO: 22022 - DNA, 25 bp, probe
tgcaggatagaaagagtggtagagc

SEQ ID NO: 22023 - DNA, 25 bp, probe
tcttcctgattttcatcgagattgc

SEQ ID NO: 22024 - DNA, 25 bp, probe
ctgcgacccttacttttgagaacat

SEQ ID NO: 22025 - DNA, 25 bp, probe
attttcatcgagattgcctacaagc

SEQ ID NO: 22026 - DNA, 25 bp, probe
cctgattttcatcgagattgcctac

SEQ ID NO: 22027 - DNA, 25 bp, probe
tcctgattttcatcgagattgccta

SEQ ID NO: 22028 - DNA, 25 bp, probe
cttcctgattttcatcgagattgcc

SEQ ID NO: 22029 - DNA, 25 bp, probe
ggatcttcctgattttcatcgagat

SEQ ID NO: 22030 - DNA, 25 bp, probe
atcttcctgattttcatcgagattg

SEQ ID NO: 22031 - DNA, 25 bp, probe
ttcctgattttcatcgagattgcct

SEQ ID NO: 22032 - DNA, 25 bp, probe
gatcttcctgattttcatcgagatt

SEQ ID NO: 22033 - DNA, 25 bp, probe
cacatttagggctatcacctccacc

SEQ ID NO: 22034 - DNA, 25 bp, probe
ccacatttagggctatcacctccac

SEQ ID NO: 22035 - DNA, 25 bp, probe
gggatcttcctgattttcatcgaga

SEQ ID NO: 22036 - DNA, 25 bp, probe
tgcgacccttacttttgagaacatg

SEQ ID NO: 22037 - DNA, 25 bp, probe
cgacccttacttttgagaacatggc

SEQ ID NO: 22038 - DNA, 25 bp, probe
gcgacccttacttttgagaacatgg

SEQ ID NO: 22039 - DNA, 25 bp, probe
cgggatcttcctgattttcatcgag

SEQ ID NO: 22040 - DNA, 25 bp, probe
ttttcatcgagattgcctacaagcg

SEQ ID NO: 22041 - DNA, 25 bp, probe
cctgcgacccttacttttgagaaca

SEQ ID NO: 22042 - DNA, 25 bp, probe
gacccttacttttgagaacatggcc

SEQ ID NO: 22043 - DNA, 25 bp, probe
ccgggatcttcctgattttcatcga

SEQ ID NO: 22044 - DNA, 25 bp, probe
cacgcagtaccatcccactgatatc

SEQ ID NO: 22045 - DNA, 25 bp, probe
ctgaactcactgtgtattctcttgg

SEQ ID NO: 22046 - DNA, 25 bp, probe
cctgaactcactgtgtattctcttg

SEQ ID NO: 22047 - DNA, 25 bp, probe
tgaactcactgtgtattctcttgga

SEQ ID NO: 22048 - DNA, 25 bp, probe
gaactcactgtgtattctcttggag

SEQ ID NO: 22049 - DNA, 25 bp, probe
aactcactgtgtattctcttggagc

SEQ ID NO: 22050 - DNA, 25 bp, probe
gtacataaccagcaagctctcagat

SEQ ID NO: 22051 - DNA, 25 bp, probe
tacataaccagcaagctctcagatg

SEQ ID NO: 22052 - DNA, 25 bp, probe
ccctgaactcactgtgtattctctt

SEQ ID NO: 22053 - DNA, 25 bp, probe
cactgtgtattctcttggagccttg

SEQ ID NO: 22054 - DNA, 25 bp, probe
tcactgtgtattctcttggagcctt

SEQ ID NO: 22055 - DNA, 25 bp, probe
ctcactgtgtattctcttggagcct

SEQ ID NO: 22056 - DNA, 25 bp, probe
actcactgtgtattctcttggagcc

SEQ ID NO: 22057 - DNA, 25 bp, probe
actgtgtattctcttggagccttgg

SEQ ID NO: 22058 - DNA, 25 bp, probe
ggacgccatctgctactactacatg

SEQ ID NO: 22059 - DNA, 25 bp, probe
gccctgaactcactgtgtattctct

SEQ ID NO: 22060 - DNA, 25 bp, probe
agccctgaactcactgtgtattctc

SEQ ID NO: 22061 - DNA, 25 bp, probe
tgtacataaccagcaagctctcaga

SEQ ID NO: 22062 - DNA, 25 bp, probe
ctgtacataaccagcaagctctcag

SEQ ID NO: 22063 - DNA, 25 bp, probe
atcagccctgaactcactgtgtatt

SEQ ID NO: 22064 - DNA, 25 bp, probe
cagccctgaactcactgtgtattct

SEQ ID NO: 22065 - DNA, 25 bp, probe
tggacgccatctgctactactacat

SEQ ID NO: 22066 - DNA, 25 bp, probe
gatcagccctgaactcactgtgtat

SEQ ID NO: 22067 - DNA, 25 bp, probe
tcagccctgaactcactgtgtattc

SEQ ID NO: 22068 - DNA, 25 bp, probe
ctgtgtattctcttggagccttggg

SEQ ID NO: 22069 - DNA, 25 bp, probe
gtgtattctcttggagccttgggtg

SEQ ID NO: 22070 - DNA, 25 bp, probe
cctgtacataaccagcaagctctca

SEQ ID NO: 22071 - DNA, 25 bp, probe
cacaatttcaactccatgcggttcc

SEQ ID NO: 22072 - DNA, 25 bp, probe
gacgccatctgctactactacatgg

SEQ ID NO: 22073 - DNA, 25 bp, probe
ccctgtacataaccagcaagctctc

SEQ ID NO: 22074 - DNA, 25 bp, probe
agttgcttagatccagtcatgtatt

SEQ ID NO: 22075 - DNA, 25 bp, probe
aatagttgcttagatccagtcatgt

SEQ ID NO: 22076 - DNA, 25 bp, probe
ttcaatagttgcttagatccagtca

SEQ ID NO: 22077 - DNA, 25 bp, probe
tcaatagttgcttagatccagtcat

SEQ ID NO: 22078 - DNA, 25 bp, probe
tagttgcttagatccagtcatgtat

SEQ ID NO: 22079 - DNA, 25 bp, probe
atagttgcttagatccagtcatgta

SEQ ID NO: 22080 - DNA, 25 bp, probe
caatagttgcttagatccagtcatg

SEQ ID NO: 22081 - DNA, 25 bp, probe
cgattcatctacatttcttcacagc

SEQ ID NO: 22082 - DNA, 25 bp, probe
gctggttctctcatctttcaatagt

SEQ ID NO: 22083 - DNA, 25 bp, probe
tgctggttctctcatctttcaatag

SEQ ID NO: 22084 - DNA, 25 bp, probe
atgctggttctctcatctttcaata

SEQ ID NO: 22085 - DNA, 25 bp, probe
gctaaatgtatcatcttgctactgg

SEQ ID NO: 22086 - DNA, 25 bp, probe
gctctgcttgtatttgtgatatttc

SEQ ID NO: 22087 - DNA, 25 bp, probe
ttgctactggaaagaaattgttcac

SEQ ID NO: 22088 - DNA, 25 bp, probe
cttgctactggaaagaaattgttca

SEQ ID NO: 22089 - DNA, 25 bp, probe
ggttctctcatctttcaatagttgc

SEQ ID NO: 22090 - DNA, 25 bp, probe
aatgtatcatcttgctactggaaag

SEQ ID NO: 22091 - DNA, 25 bp, probe
ctggttctctcatctttcaatagtt

SEQ ID NO: 22092 - DNA, 25 bp, probe
gttctctcatctttcaatagttgct

SEQ ID NO: 22093 - DNA, 25 bp, probe
tgctactggaaagaaattgttcaca

SEQ ID NO: 22094 - DNA, 25 bp, probe
tggttctctcatctttcaatagttg

SEQ ID NO: 22095 - DNA, 25 bp, probe
aaatgtatcatcttgctactggaaa

SEQ ID NO: 22096 - DNA, 25 bp, probe
gcttagatccagtcatgtatttcct

SEQ ID NO: 22097 - DNA, 25 bp, probe
tgcttagatccagtcatgtatttcc

SEQ ID NO: 22098 - DNA, 25 bp, probe
aggaaacaaagttctagcatttaca

SEQ ID NO: 22099 - DNA, 25 bp, probe
aatatgccactacagctcgtaactc

SEQ ID NO: 22100 - DNA, 25 bp, probe
ttctctcatctttcaatagttgctt

SEQ ID NO: 22101 - DNA, 25 bp, probe
ctaaatgtatcatcttgctactgga

SEQ ID NO: 22102 - DNA, 25 bp, probe
gttgcttagatccagtcatgtattt

SEQ ID NO: 22103 - DNA, 25 bp, probe
atgtatttcctgatgtccagtaaca

SEQ ID NO: 22104 - DNA, 25 bp, probe
gctactggaaagaaattgttcacaa

SEQ ID NO: 22105 - DNA, 25 bp, probe
ttgcttagatccagtcatgtatttc

SEQ ID NO: 22106 - DNA, 25 bp, probe
tttcatttgcttaactgtaaaccat

SEQ ID NO: 22107 - DNA, 25 bp, probe
atttcatttgcttaactgtaaacca

SEQ ID NO: 22108 - DNA, 25 bp, probe
tttcaatagttgcttagatccagtc

SEQ ID NO: 22109 - DNA, 25 bp, probe
gctcgtaactcctttattgtactta

SEQ ID NO: 22110 - DNA, 25 bp, probe
ctttcaatagttgcttagatccagt

SEQ ID NO: 22111 - DNA, 25 bp, probe
ggaaacaaagttctagcatttacaa

SEQ ID NO: 22112 - DNA, 25 bp, probe
tcaaggtgaaccaagtaggagtgaa

SEQ ID NO: 22113 - DNA, 25 bp, probe
taaatgtatcatcttgctactggaa

SEQ ID NO: 22114 - DNA, 25 bp, probe
catgctggttctctcatctttcaat

SEQ ID NO: 22115 - DNA, 25 bp, probe
aaagcacttcagaatttaaaccagg

SEQ ID NO: 22116 - DNA, 25 bp, probe
tctttcaatagttgcttagatccag

SEQ ID NO: 22117 - DNA, 25 bp, probe
agctcgtaactcctttattgtactt

SEQ ID NO: 22118 - DNA, 25 bp, probe
atgtcacagagttggagtcattgtt

SEQ ID NO: 22119 - DNA, 25 bp, probe
gatgtcacagagttggagtcattgt

SEQ ID NO: 22120 - DNA, 25 bp, probe
ggatgtcacagagttggagtcattg

SEQ ID NO: 22121 - DNA, 25 bp, probe
tgtcacagagttggagtcattgttg

SEQ ID NO: 22122 - DNA, 25 bp, probe
gtcacagagttggagtcattgttgg

SEQ ID NO: 22123 - DNA, 25 bp, probe
gggatgtcacagagttggagtcatt

SEQ ID NO: 22124 - DNA, 25 bp, probe
tcacagagttggagtcattgttggg

SEQ ID NO: 22125 - DNA, 25 bp, probe
gttgatgtggcctgaaagcacttag

SEQ ID NO: 22126 - DNA, 25 bp, probe
cctcttaccttgactggcttctaaa

SEQ ID NO: 22127 - DNA, 25 bp, probe
tctgactttcctggttcaagcaatt

SEQ ID NO: 22128 - DNA, 25 bp, probe
ttgagatagagtcttgctctgtcac

SEQ ID NO: 22129 - DNA, 25 bp, probe
tttggagaggaggagtttctgtcat

SEQ ID NO: 22130 - DNA, 25 bp, probe
ctcttaccttgactggcttctaaaa

SEQ ID NO: 22131 - DNA, 25 bp, probe
tcttaccttgactggcttctaaaac

SEQ ID NO: 22132 - DNA, 25 bp, probe
ctctgactttcctggttcaagcaat

SEQ ID NO: 22133 - DNA, 25 bp, probe
ttggagaggaggagtttctgtcatc

SEQ ID NO: 22134 - DNA, 25 bp, probe
ttctttatcttctggtccccgttta

SEQ ID NO: 22135 - DNA, 25 bp, probe
cttaccttgactggcttctaaaacc

SEQ ID NO: 22136 - DNA, 25 bp, probe
ctttatcttctggtccccgtttaac

SEQ ID NO: 22137 - DNA, 25 bp, probe
tctttatcttctggtccccgtttaa

SEQ ID NO: 22138 - DNA, 25 bp, probe
tgtggtagagacagctacttactcc

SEQ ID NO: 22139 - DNA, 25 bp, probe
tttctttatcttctggtccccgttt

SEQ ID NO: 22140 - DNA, 25 bp, probe
gtttggagaggaggagtttctgtca

SEQ ID NO: 22141 - DNA, 25 bp, probe
gtgatgctcaaggaaatctaccacc

SEQ ID NO: 22142 - DNA, 25 bp, probe
tttgagatagagtcttgctctgtca

SEQ ID NO: 22143 - DNA, 25 bp, probe
ctttctttatcttctggtccccgtt

SEQ ID NO: 22144 - DNA, 25 bp, probe
ttaccttgactggcttctaaaaccc

SEQ ID NO: 22145 - DNA, 25 bp, probe
ggtgatgctcaaggaaatctaccac

SEQ ID NO: 22146 - DNA, 25 bp, probe
ctgtggtagagacagctacttactc

SEQ ID NO: 22147 - DNA, 25 bp, probe
ctctgtggtagagacagctacttac

SEQ ID NO: 22148 - DNA, 25 bp, probe
ttcttagtttgcttgtggcctctta

SEQ ID NO: 22149 - DNA, 25 bp, probe
agatagagtcttgctctgtcaccag

SEQ ID NO: 22150 - DNA, 25 bp, probe
gagatagagtcttgctctgtcacca

SEQ ID NO: 22151 - DNA, 25 bp, probe
tgagatagagtcttgctctgtcacc

SEQ ID NO: 22152 - DNA, 25 bp, probe
tctgtggtagagacagctacttact

SEQ ID NO: 22153 - DNA, 25 bp, probe
ctcatctaaagctctgtggtagaga

SEQ ID NO: 22154 - DNA, 25 bp, probe
ccctcatctaaagctctgtggtaga

SEQ ID NO: 22155 - DNA, 25 bp, probe
tcatctaaagctctgtggtagagac

SEQ ID NO: 22156 - DNA, 25 bp, probe
tacttactccccagtgtccattctt

SEQ ID NO: 22157 - DNA, 25 bp, probe
tgatgctcaaggaaatctaccaccc

SEQ ID NO: 22158 - DNA, 25 bp, probe
ggcagagatttccaagaaaagtttt

SEQ ID NO: 22159 - DNA, 25 bp, probe
catctaaagctctgtggtagagaca

SEQ ID NO: 22160 - DNA, 25 bp, probe
gacgggtgatgctcaaggaaatcta

SEQ ID NO: 22161 - DNA, 25 bp, probe
tcttagtttgcttgtggcctcttac

SEQ ID NO: 22162 - DNA, 25 bp, probe
tggcagagatttccaagaaaagttt

SEQ ID NO: 22163 - DNA, 25 bp, probe
cctcatctaaagctctgtggtagag

SEQ ID NO: 22164 - DNA, 25 bp, probe
taccttgactggcttctaaaaccct

SEQ ID NO: 22165 - DNA, 25 bp, probe
ctacttactccccagtgtccattct

SEQ ID NO: 22166 - DNA, 25 bp, probe
acgggtgatgctcaaggaaatctac

SEQ ID NO: 22167 - DNA, 25 bp, probe
ctgcctcttctttcaggaagtcttc

SEQ ID NO: 22168 - DNA, 25 bp, probe
cgtttggagaggaggagtttctgtc

SEQ ID NO: 22169 - DNA, 25 bp, probe
gatagagtcttgctctgtcaccagg

SEQ ID NO: 22170 - DNA, 25 bp, probe
ctatcatcagagcatgtcacagatc

SEQ ID NO: 22171 - DNA, 25 bp, probe
tctatcatcagagcatgtcacagat

SEQ ID NO: 22172 - DNA, 25 bp, probe
atctatcatcagagcatgtcacaga

SEQ ID NO: 22173 - DNA, 25 bp, probe
tgtgtaataggaacctgtgaattgt

SEQ ID NO: 22174 - DNA, 25 bp, probe
ctgtgtaataggaacctgtgaattg

SEQ ID NO: 22175 - DNA, 25 bp, probe
ggtctcagtgtcagtgataatgaat

SEQ ID NO: 22176 - DNA, 25 bp, probe
acctgtgaattgtactggatgatta

SEQ ID NO: 22177 - DNA, 25 bp, probe
aacctgtgaattgtactggatgatt

SEQ ID NO: 22178 - DNA, 25 bp, probe
gtctcagtgtcagtgataatgaatc

SEQ ID NO: 22179 - DNA, 25 bp, probe
aataggaacctgtgaattgtactgg

SEQ ID NO: 22180 - DNA, 25 bp, probe
tctcagtgtcagtgataatgaatct

SEQ ID NO: 22181 - DNA, 25 bp, probe
tgtggtgattctcctcatagttatt

SEQ ID NO: 22182 - DNA, 25 bp, probe
ttgtggtgattctcctcatagttat

SEQ ID NO: 22183 - DNA, 25 bp, probe
gaacctgtgaattgtactggatgat

SEQ ID NO: 22184 - DNA, 25 bp, probe
gtgtaataggaacctgtgaattgta

SEQ ID NO: 22185 - DNA, 25 bp, probe
taggaacctgtgaattgtactggat

SEQ ID NO: 22186 - DNA, 25 bp, probe
ataggaacctgtgaattgtactgga

SEQ ID NO: 22187 - DNA, 25 bp, probe
cctgtgaattgtactggatgattaa

SEQ ID NO: 22188 - DNA, 25 bp, probe
aattactgattgtatgtgacctgaa

SEQ ID NO: 22189 - DNA, 25 bp, probe
tgtcagtgataatgaatctggtcaa

SEQ ID NO: 22190 - DNA, 25 bp, probe
tggtctcagtgtcagtgataatgaa

SEQ ID NO: 22191 - DNA, 25 bp, probe
tcagtgataatgaatctggtcaagg

SEQ ID NO: 22192 - DNA, 25 bp, probe
agtgtcagtgataatgaatctggtc

SEQ ID NO: 22193 - DNA, 25 bp, probe
tcagtgtcagtgataatgaatctgg

SEQ ID NO: 22194 - DNA, 25 bp, probe
aaggaatctatcatcagagcatgtc

SEQ ID NO: 22195 - DNA, 25 bp, probe
gtcagtgataatgaatctggtcaag

SEQ ID NO: 22196 - DNA, 25 bp, probe
gtgtcagtgataatgaatctggtca

SEQ ID NO: 22197 - DNA, 25 bp, probe
cagtgtcagtgataatgaatctggt

SEQ ID NO: 22198 - DNA, 25 bp, probe
aatctatcatcagagcatgtcacag

SEQ ID NO: 22199 - DNA, 25 bp, probe
gaatctatcatcagagcatgtcaca

SEQ ID NO: 22200 - DNA, 25 bp, probe
ctcagtgtcagtgataatgaatctg

SEQ ID NO: 22201 - DNA, 25 bp, probe
tgtaataggaacctgtgaattgtac

SEQ ID NO: 22202 - DNA, 25 bp, probe
cctgtgtaataggaacctgtgaatt

SEQ ID NO: 22203 - DNA, 25 bp, probe
taataggaacctgtgaattgtactg

SEQ ID NO: 22204 - DNA, 25 bp, probe
gtaataggaacctgtgaattgtact

SEQ ID NO: 22205 - DNA, 25 bp, probe
ggaatctatcatcagagcatgtcac

SEQ ID NO: 22206 - DNA, 25 bp, probe
aggaatctatcatcagagcatgtca

SEQ ID NO: 22207 - DNA, 25 bp, probe
gatctatggactcattcatggtgac

SEQ ID NO: 22208 - DNA, 25 bp, probe
aatcatcctatatggctaacattgt

SEQ ID NO: 22209 - DNA, 25 bp, probe
agtgataatgaatctggtcaaggca

SEQ ID NO: 22210 - DNA, 25 bp, probe
tgatgaatgatgagcacacagagag

SEQ ID NO: 22211 - DNA, 25 bp, probe
acctgtgtaataggaacctgtgaat

SEQ ID NO: 22212 - DNA, 25 bp, probe
gtgataatgaatctggtcaaggcag

SEQ ID NO: 22213 - DNA, 25 bp, probe
cagtgataatgaatctggtcaaggc

SEQ ID NO: 22214 - DNA, 25 bp, probe
gtgtctctgtgactctcatttcttt

SEQ ID NO: 22215 - DNA, 25 bp, probe
ctttgtgtctctgtgactctcattt

SEQ ID NO: 22216 - DNA, 25 bp, probe
tttgtgtctctgtgactctcatttc

SEQ ID NO: 22217 - DNA, 25 bp, probe
tgtgtctctgtgactctcatttctt

SEQ ID NO: 22218 - DNA, 25 bp, probe
ttgtgtctctgtgactctcatttct

SEQ ID NO: 22219 - DNA, 25 bp, probe
tctttgtgtctctgtgactctcatt

SEQ ID NO: 22220 - DNA, 25 bp, probe
gtctttgtgtctctgtgactctcat

SEQ ID NO: 22221 - DNA, 25 bp, probe
ttgtctttgtgtctctgtgactctc

SEQ ID NO: 22222 - DNA, 25 bp, probe
cttgtctttgtgtctctgtgactct

SEQ ID NO: 22223 - DNA, 25 bp, probe
acttgtctttgtgtctctgtgactc

SEQ ID NO: 22224 - DNA, 25 bp, probe
atgcttgagtctctctgtctccaac

SEQ ID NO: 22225 - DNA, 25 bp, probe
cacttgtctttgtgtctctgtgact

SEQ ID NO: 22226 - DNA, 25 bp, probe
ctgtcacttgtctttgtgtctctgt

SEQ ID NO: 22227 - DNA, 25 bp, probe
catgcttgagtctctctgtctccaa

SEQ ID NO: 22228 - DNA, 25 bp, probe
tgtcacttgtctttgtgtctctgtg

SEQ ID NO: 22229 - DNA, 25 bp, probe
aatctcatgcttgagtctctctgtc

SEQ ID NO: 22230 - DNA, 25 bp, probe
tcaatctcatgcttgagtctctctg

SEQ ID NO: 22231 - DNA, 25 bp, probe
gtgatcttcctctccttgggatttg

SEQ ID NO: 22232 - DNA, 25 bp, probe
tgtctttgtgtctctgtgactctca

SEQ ID NO: 22233 - DNA, 25 bp, probe
tgtctctgtgactctcatttctttt

SEQ ID NO: 22234 - DNA, 25 bp, probe
cttgagtctctctgtctccaactgc

SEQ ID NO: 22235 - DNA, 25 bp, probe
gcttgagtctctctgtctccaactg

SEQ ID NO: 22236 - DNA, 25 bp, probe
ctatctgaaccctggtctctgtgtc

SEQ ID NO: 22237 - DNA, 25 bp, probe
caatctcatgcttgagtctctctgt

SEQ ID NO: 22238 - DNA, 25 bp, probe
cctgtcacttgtctttgtgtctctg

SEQ ID NO: 22239 - DNA, 25 bp, probe
tgtgatcttcctctccttgggattt

SEQ ID NO: 22240 - DNA, 25 bp, probe
ctctcctatctgaaccctggtctct

SEQ ID NO: 22241 - DNA, 25 bp, probe
atctcatgcttgagtctctctgtct

SEQ ID NO: 22242 - DNA, 25 bp, probe
tgcttgagtctctctgtctccaact

SEQ ID NO: 22243 - DNA, 25 bp, probe
tctcctatctgaaccctggtctctg

SEQ ID NO: 22244 - DNA, 25 bp, probe
tcatgcttgagtctctctgtctcca

SEQ ID NO: 22245 - DNA, 25 bp, probe
ctgtgatcttcctctccttgggatt

SEQ ID NO: 22246 - DNA, 25 bp, probe
ctctgtgtgggattccttgtctctc

SEQ ID NO: 22247 - DNA, 25 bp, probe
tgatcttcctctccttgggatttgg

SEQ ID NO: 22248 - DNA, 25 bp, probe
cttagggcttatcacaccgttctcc

SEQ ID NO: 22249 - DNA, 25 bp, probe
ctgtgtgggattccttgtctctctg

SEQ ID NO: 22250 - DNA, 25 bp, probe
gtctctgtgtgggattccttgtctc

SEQ ID NO: 22251 - DNA, 25 bp, probe
tctcatgcttgagtctctctgtctc

SEQ ID NO: 22252 - DNA, 25 bp, probe
ctcctatctgaaccctggtctctgt

SEQ ID NO: 22253 - DNA, 25 bp, probe
gtctgtccccatctctcaatctcat

SEQ ID NO: 22254 - DNA, 25 bp, probe
ccttagggcttatcacaccgttctc

SEQ ID NO: 22255 - DNA, 25 bp, probe
tctgtgtgggattccttgtctctct

SEQ ID NO: 22256 - DNA, 25 bp, probe
tctctgtgtgggattccttgtctct

SEQ ID NO: 22257 - DNA, 25 bp, probe
ctgtctctgtgtgggattccttgtc

SEQ ID NO: 22258 - DNA, 25 bp, probe
tccactttgatttccagacctcatc

SEQ ID NO: 22259 - DNA, 25 bp, probe
atgaggtgtccactttgatttccag

SEQ ID NO: 22260 - DNA, 25 bp, probe
gtccactttgatttccagacctcat

SEQ ID NO: 22261 - DNA, 25 bp, probe
ctttgatttccagacctcatcccac

SEQ ID NO: 22262 - DNA, 25 bp, probe
cactttgatttccagacctcatccc

SEQ ID NO: 22263 - DNA, 25 bp, probe
ccactttgatttccagacctcatcc

SEQ ID NO: 22264 - DNA, 25 bp, probe
catgaggtgtccactttgatttcca

SEQ ID NO: 22265 - DNA, 25 bp, probe
tttgatttccagacctcatcccact

SEQ ID NO: 22266 - DNA, 25 bp, probe
actttgatttccagacctcatccca

SEQ ID NO: 22267 - DNA, 25 bp, probe
tgaggtgtccactttgatttccaga

SEQ ID NO: 22268 - DNA, 25 bp, probe
ccacttatcacaccccatcctaaaa

SEQ ID NO: 22269 - DNA, 25 bp, probe
gtgtccactttgatttccagacctc

SEQ ID NO: 22270 - DNA, 25 bp, probe
gaggtgtccactttgatttccagac

SEQ ID NO: 22271 - DNA, 25 bp, probe
ccatgaggtgtccactttgatttcc

SEQ ID NO: 22272 - DNA, 25 bp, probe
cccatgaggtgtccactttgatttc

SEQ ID NO: 22273 - DNA, 25 bp, probe
tgtccactttgatttccagacctca

SEQ ID NO: 22274 - DNA, 25 bp, probe
tccacttatcacaccccatcctaaa

SEQ ID NO: 22275 - DNA, 25 bp, probe
ttccacttatcacaccccatcctaa

SEQ ID NO: 22276 - DNA, 25 bp, probe
cttccacttatcacaccccatccta

SEQ ID NO: 22277 - DNA, 25 bp, probe
ttgatttccagacctcatcccactg

SEQ ID NO: 22278 - DNA, 25 bp, probe
gatttccagacctcatcccactgtg

SEQ ID NO: 22279 - DNA, 25 bp, probe
ggtgtccactttgatttccagacct

SEQ ID NO: 22280 - DNA, 25 bp, probe
aggtgtccactttgatttccagacc

SEQ ID NO: 22281 - DNA, 25 bp, probe
ccccatgaggtgtccactttgattt

SEQ ID NO: 22282 - DNA, 25 bp, probe
caatgtcatccatcacttcttctgt

SEQ ID NO: 22283 - DNA, 25 bp, probe
ctccaatgtcatccatcacttcttc

SEQ ID NO: 22284 - DNA, 25 bp, probe
gcatctatacttacctgagacctag

SEQ ID NO: 22285 - DNA, 25 bp, probe
ccaatgtcatccatcacttcttctg

SEQ ID NO: 22286 - DNA, 25 bp, probe
tatacttacctgagacctagttcca

SEQ ID NO: 22287 - DNA, 25 bp, probe
tccaatgtcatccatcacttcttct

SEQ ID NO: 22288 - DNA, 25 bp, probe
actccaatgtcatccatcacttctt

SEQ ID NO: 22289 - DNA, 25 bp, probe
ctatacttacctgagacctagttcc

SEQ ID NO: 22290 - DNA, 25 bp, probe
atacttacctgagacctagttccag

SEQ ID NO: 22291 - DNA, 25 bp, probe
aatgtcatccatcacttcttctgtg

SEQ ID NO: 22292 - DNA, 25 bp, probe
tctatacttacctgagacctagttc

SEQ ID NO: 22293 - DNA, 25 bp, probe
catctatacttacctgagacctagt

SEQ ID NO: 22294 - DNA, 25 bp, probe
ccataattctgttctatgccacctg

SEQ ID NO: 22295 - DNA, 25 bp, probe
cacaatcctgaaagaaagcataagt

SEQ ID NO: 22296 - DNA, 25 bp, probe
acacaatcctgaaagaaagcataag

SEQ ID NO: 22297 - DNA, 25 bp, probe
gacacaatcctgaaagaaagcataa

SEQ ID NO: 22298 - DNA, 25 bp, probe
tgacacaatcctgaaagaaagcata

SEQ ID NO: 22299 - DNA, 25 bp, probe
ttgtcatcctctcctcctactccta

SEQ ID NO: 22300 - DNA, 25 bp, probe
tgcatctatacttacctgagaccta

SEQ ID NO: 22301 - DNA, 25 bp, probe
acaatcctgaaagaaagcataagtt

SEQ ID NO: 22302 - DNA, 25 bp, probe
ctactcctacgttctcttctccatt

SEQ ID NO: 22303 - DNA, 25 bp, probe
cataattctgttctatgccacctgc

SEQ ID NO: 22304 - DNA, 25 bp, probe
cagccataattctgttctatgccac

SEQ ID NO: 22305 - DNA, 25 bp, probe
ctgcatctatacttacctgagacct

SEQ ID NO: 22306 - DNA, 25 bp, probe
gactccaatgtcatccatcacttct

SEQ ID NO: 22307 - DNA, 25 bp, probe
acctgcatctatacttacctgagac

SEQ ID NO: 22308 - DNA, 25 bp, probe
cacctgcatctatacttacctgaga

SEQ ID NO: 22309 - DNA, 25 bp, probe
atctatacttacctgagacctagtt

SEQ ID NO: 22310 - DNA, 25 bp, probe
caatcctgaaagaaagcataagttc

SEQ ID NO: 22311 - DNA, 25 bp, probe
ctgacacaatcctgaaagaaagcat

SEQ ID NO: 22312 - DNA, 25 bp, probe
gctgcttcctacagatgtacttctt

SEQ ID NO: 22313 - DNA, 25 bp, probe
cctgcatctatacttacctgagacc

SEQ ID NO: 22314 - DNA, 25 bp, probe
ccacctgcatctatacttacctgag

SEQ ID NO: 22315 - DNA, 25 bp, probe
tgcttcctacagatgtacttcttta

SEQ ID NO: 22316 - DNA, 25 bp, probe
tacttacctgagacctagttccagc

SEQ ID NO: 22317 - DNA, 25 bp, probe
tgtcatcctctcctcctactcctac

SEQ ID NO: 22318 - DNA, 25 bp, probe
ctctcacctgacagccataattctg

SEQ ID NO: 22319 - DNA, 25 bp, probe
gccataattctgttctatgccacct

SEQ ID NO: 22320 - DNA, 25 bp, probe
agccataattctgttctatgccacc

SEQ ID NO: 22321 - DNA, 25 bp, probe
ctgcttcctacagatgtacttcttt

SEQ ID NO: 22322 - DNA, 25 bp, probe
cctactcctacgttctcttctccat

SEQ ID NO: 22323 - DNA, 25 bp, probe
gcttcctacagatgtacttctttat

SEQ ID NO: 22324 - DNA, 25 bp, probe
cctctcacctgacagccataattct

SEQ ID NO: 22325 - DNA, 25 bp, probe
cttacctgagacctagttccagcta

SEQ ID NO: 22326 - DNA, 25 bp, probe
gttattgtcggtatcggagttctta

SEQ ID NO: 22327 - DNA, 25 bp, probe
ttattgtcggtatcggagttcttat

SEQ ID NO: 22328 - DNA, 25 bp, probe
tattgtcggtatcggagttcttata

SEQ ID NO: 22329 - DNA, 25 bp, probe
attgtcggtatcggagttcttatac

SEQ ID NO: 22330 - DNA, 25 bp, probe
tgtcggtatcggagttcttatacta

SEQ ID NO: 22331 - DNA, 25 bp, probe
ttgtcggtatcggagttcttatact

SEQ ID NO: 22332 - DNA, 25 bp, probe
ggttattgtcggtatcggagttctt

SEQ ID NO: 22333 - DNA, 25 bp, probe
gtcggtatcggagttcttatactat

SEQ ID NO: 22334 - DNA, 25 bp, probe
tcggtatcggagttcttatactatt

SEQ ID NO: 22335 - DNA, 25 bp, probe
cggagttcttatactattagttcgt

SEQ ID NO: 22336 - DNA, 25 bp, probe
tcggagttcttatactattagttcg

SEQ ID NO: 22337 - DNA, 25 bp, probe
ctggttattgtcggtatcggagttc

SEQ ID NO: 22338 - DNA, 25 bp, probe
gttgttgtgcttgtcctggttattg

SEQ ID NO: 22339 - DNA, 25 bp, probe
cttgtcctggttattgtcggtatcg

SEQ ID NO: 22340 - DNA, 25 bp, probe
tggttattgtcggtatcggagttct

SEQ ID NO: 22341 - DNA, 25 bp, probe
ttgttgtgcttgtcctggttattgt

SEQ ID NO: 22342 - DNA, 25 bp, probe
atactttggtgatgagcagcagata

SEQ ID NO: 22343 - DNA, 25 bp, probe
tccagacagacaatgtttaagagaa

SEQ ID NO: 22344 - DNA, 25 bp, probe
atccagacagacaatgtttaagaga

SEQ ID NO: 22345 - DNA, 25 bp, probe
gcttgtcctggttattgtcggtatc

SEQ ID NO: 22346 - DNA, 25 bp, probe
gttctttatccagacagacaatgtt

SEQ ID NO: 22347 - DNA, 25 bp, probe
tactttggtgatgagcagcagataa

SEQ ID NO: 22348 - DNA, 25 bp, probe
ccagacagacaatgtttaagagaaa

SEQ ID NO: 22349 - DNA, 25 bp, probe
aattcacaccctctatcataaacat

SEQ ID NO: 22350 - DNA, 25 bp, probe
cgttctttatccagacagacaatgt

SEQ ID NO: 22351 - DNA, 25 bp, probe
gtatcaagttgaagcaagttcagag

SEQ ID NO: 22352 - DNA, 25 bp, probe
atgtatcaagttgaagcaagttcag

SEQ ID NO: 22353 - DNA, 25 bp, probe
tgtatcaagttgaagcaagttcaga

SEQ ID NO: 22354 - DNA, 25 bp, probe
aatgtatcaagttgaagcaagttca

SEQ ID NO: 22355 - DNA, 25 bp, probe
tgttgtgcttgtcctggttattgtc

SEQ ID NO: 22356 - DNA, 25 bp, probe
ttctttatccagacagacaatgttt

SEQ ID NO: 22357 - DNA, 25 bp, probe
cggtatcggagttcttatactatta

SEQ ID NO: 22358 - DNA, 25 bp, probe
aaatgtatcaagttgaagcaagttc

SEQ ID NO: 22359 - DNA, 25 bp, probe
tatccagacagacaatgtttaagag

SEQ ID NO: 22360 - DNA, 25 bp, probe
tatcaagttgaagcaagttcagagc

SEQ ID NO: 22361 - DNA, 25 bp, probe
ggttgttgtgcttgtcctggttatt

SEQ ID NO: 22362 - DNA, 25 bp, probe
aaacctgcaagtaaagattcaagag

SEQ ID NO: 22363 - DNA, 25 bp, probe
attcacaccctctatcataaacata

SEQ ID NO: 22364 - DNA, 25 bp, probe
ttatccagacagacaatgtttaaga

SEQ ID NO: 22365 - DNA, 25 bp, probe
tctttatccagacagacaatgttta

SEQ ID NO: 22366 - DNA, 25 bp, probe
cgtctttacaaccttacctagatat

SEQ ID NO: 22367 - DNA, 25 bp, probe
ttcacaccctctatcataaacatat

SEQ ID NO: 22368 - DNA, 25 bp, probe
tgcttgtcctggttattgtcggtat

SEQ ID NO: 22369 - DNA, 25 bp, probe
gatactttggtgatgagcagcagat

SEQ ID NO: 22370 - DNA, 25 bp, probe
caaggatgaaagaatgtcaagccat

SEQ ID NO: 22371 - DNA, 25 bp, probe
gatgaaagaatgtcaagccatgatg

SEQ ID NO: 22372 - DNA, 25 bp, probe
ggatgaaagaatgtcaagccatgat

SEQ ID NO: 22373 - DNA, 25 bp, probe
aaggatgaaagaatgtcaagccatg

SEQ ID NO: 22374 - DNA, 25 bp, probe
ctcccaaggatgaaagaatgtcaag

SEQ ID NO: 22375 - DNA, 25 bp, probe
atctcccaaggatgaaagaatgtca

SEQ ID NO: 22376 - DNA, 25 bp, probe
gatctcccaaggatgaaagaatgtc

SEQ ID NO: 22377 - DNA, 25 bp, probe
ttagaggatctcccaaggatgaaag

SEQ ID NO: 22378 - DNA, 25 bp, probe
cttagaggatctcccaaggatgaaa

SEQ ID NO: 22379 - DNA, 25 bp, probe
tctcccaaggatgaaagaatgtcaa

SEQ ID NO: 22380 - DNA, 25 bp, probe
gaggatctcccaaggatgaaagaat

SEQ ID NO: 22381 - DNA, 25 bp, probe
tagaggatctcccaaggatgaaaga

SEQ ID NO: 22382 - DNA, 25 bp, probe
aggatgaaagaatgtcaagccatga

SEQ ID NO: 22383 - DNA, 25 bp, probe
atctctggctcaccatgtaacatct

SEQ ID NO: 22384 - DNA, 25 bp, probe
catctctggctcaccatgtaacatc

SEQ ID NO: 22385 - DNA, 25 bp, probe
aggatctcccaaggatgaaagaatg

SEQ ID NO: 22386 - DNA, 25 bp, probe
aaagaatgtcaagccatgatggaaa

SEQ ID NO: 22387 - DNA, 25 bp, probe
ggatctcccaaggatgaaagaatgt

SEQ ID NO: 22388 - DNA, 25 bp, probe
gaaagaatgtcaagccatgatggaa

SEQ ID NO: 22389 - DNA, 25 bp, probe
atgaaagaatgtcaagccatgatgg

SEQ ID NO: 22390 - DNA, 25 bp, probe
ccaaggatgaaagaatgtcaagcca

SEQ ID NO: 22391 - DNA, 25 bp, probe
agaggatctcccaaggatgaaagaa

SEQ ID NO: 22392 - DNA, 25 bp, probe
tcccaaggatgaaagaatgtcaagc

SEQ ID NO: 22393 - DNA, 25 bp, probe
tgaaagaatgtcaagccatgatgga

SEQ ID NO: 22394 - DNA, 25 bp, probe
tctctggctcaccatgtaacatctg

SEQ ID NO: 22395 - DNA, 25 bp, probe
gcttagaggatctcccaaggatgaa

SEQ ID NO: 22396 - DNA, 25 bp, probe
cccaaggatgaaagaatgtcaagcc

SEQ ID NO: 22397 - DNA, 25 bp, probe
tcaccatgtaacatctggcttggag

SEQ ID NO: 22398 - DNA, 25 bp, probe
ctcaccatgtaacatctggcttgga

SEQ ID NO: 22399 - DNA, 25 bp, probe
gaatgtcaagccatgatggaaaatg

SEQ ID NO: 22400 - DNA, 25 bp, probe
agaatgtcaagccatgatggaaaat

SEQ ID NO: 22401 - DNA, 25 bp, probe
aagaatgtcaagccatgatggaaaa

SEQ ID NO: 22402 - DNA, 25 bp, probe
ctctggctcaccatgtaacatctgg

SEQ ID NO: 22403 - DNA, 25 bp, probe
gcatctctggctcaccatgtaacat

SEQ ID NO: 22404 - DNA, 25 bp, probe
catgcacaaactcttcctggagatg

SEQ ID NO: 22405 - DNA, 25 bp, probe
cagcttagaggatctcccaaggatg

SEQ ID NO: 22406 - DNA, 25 bp, probe
catgtaacatctggcttggagcaag

SEQ ID NO: 22407 - DNA, 25 bp, probe
gcatgtgcatttcctaactcccttg

SEQ ID NO: 22408 - DNA, 25 bp, probe
aagcatctctggctcaccatgtaac

SEQ ID NO: 22409 - DNA, 25 bp, probe
agcttagaggatctcccaaggatga

SEQ ID NO: 22410 - DNA, 25 bp, probe
agcatgtgcatttcctaactccctt

SEQ ID NO: 22411 - DNA, 25 bp, probe
aatgtcaagccatgatggaaaatgc

SEQ ID NO: 22412 - DNA, 25 bp, probe
atgtaacatctggcttggagcaagt

SEQ ID NO: 22413 - DNA, 25 bp, probe
caaactcttcctggagatgctggag

SEQ ID NO: 22414 - DNA, 25 bp, probe
gcacatgagatatagatccgtagaa

SEQ ID NO: 22415 - DNA, 25 bp, probe
gatgagattacacctacagtgactc

SEQ ID NO: 22416 - DNA, 25 bp, probe
atgagattacacctacagtgactct

SEQ ID NO: 22417 - DNA, 25 bp, probe
catggtggttaggaatgtgatactg

SEQ ID NO: 22418 - DNA, 25 bp, probe
aaggatgagattacacctacagtga

SEQ ID NO: 22419 - DNA, 25 bp, probe
gagtagtcacatatataagcactgc

SEQ ID NO: 22420 - DNA, 25 bp, probe
gatatagatccgtagaattgtcagg

SEQ ID NO: 22421 - DNA, 25 bp, probe
agattacacctacagtgactctgag

SEQ ID NO: 22422 - DNA, 25 bp, probe
gagattacacctacagtgactctga

SEQ ID NO: 22423 - DNA, 25 bp, probe
caattacgaacaataatgaaggaca

SEQ ID NO: 22424 - DNA, 25 bp, probe
acaattacgaacaataatgaaggac

SEQ ID NO: 22425 - DNA, 25 bp, probe
tgagattacacctacagtgactctg

SEQ ID NO: 22426 - DNA, 25 bp, probe
ggatgagattacacctacagtgact

SEQ ID NO: 22427 - DNA, 25 bp, probe
aggatgagattacacctacagtgac

SEQ ID NO: 22428 - DNA, 25 bp, probe
atggtggttaggaatgtgatactgc

SEQ ID NO: 22429 - DNA, 25 bp, probe
atagatccgtagaattgtcaggagt

SEQ ID NO: 22430 - DNA, 25 bp, probe
attacacctacagtgactctgagta

SEQ ID NO: 22431 - DNA, 25 bp, probe
ctgcacatgagatatagatccgtag

SEQ ID NO: 22432 - DNA, 25 bp, probe
taagcactgcacatgagatatagat

SEQ ID NO: 22433 - DNA, 25 bp, probe
ataagcactgcacatgagatataga

SEQ ID NO: 22434 - DNA, 25 bp, probe
tgcacatgagatatagatccgtaga

SEQ ID NO: 22435 - DNA, 25 bp, probe
aagcactgcacatgagatatagatc

SEQ ID NO: 22436 - DNA, 25 bp, probe
tatagatccgtagaattgtcaggag

SEQ ID NO: 22437 - DNA, 25 bp, probe
actgcacatgagatatagatccgta

SEQ ID NO: 22438 - DNA, 25 bp, probe
acatatataagcactgcacatgaga

SEQ ID NO: 22439 - DNA, 25 bp, probe
cacatatataagcactgcacatgag

SEQ ID NO: 22440 - DNA, 25 bp, probe
gtcacatatataagcactgcacatg

SEQ ID NO: 22441 - DNA, 25 bp, probe
actgacacaaaggatgagattacac

SEQ ID NO: 22442 - DNA, 25 bp, probe
cactgacacaaaggatgagattaca

SEQ ID NO: 22443 - DNA, 25 bp, probe
acgaacaataatgaaggacaaatga

SEQ ID NO: 22444 - DNA, 25 bp, probe
ggtcccaaacatcaatttcttaaca

SEQ ID NO: 22445 - DNA, 25 bp, probe
aattacgaacaataatgaaggacaa

SEQ ID NO: 22446 - DNA, 25 bp, probe
aacaattacgaacaataatgaagga

SEQ ID NO: 22447 - DNA, 25 bp, probe
tagatccgtagaattgtcaggagtg

SEQ ID NO: 22448 - DNA, 25 bp, probe
tggtcccaaacatcaatttcttaac

SEQ ID NO: 22449 - DNA, 25 bp, probe
ctggtcccaaacatcaatttcttaa

SEQ ID NO: 22450 - DNA, 25 bp, probe
tctggtcccaaacatcaatttctta

SEQ ID NO: 22451 - DNA, 25 bp, probe
tcacatatataagcactgcacatga

SEQ ID NO: 22452 - DNA, 25 bp, probe
agtcacatatataagcactgcacat

SEQ ID NO: 22453 - DNA, 25 bp, probe
tgagtagtcacatatataagcactg

SEQ ID NO: 22454 - DNA, 25 bp, probe
gattacacctacagtgactctgagt

SEQ ID NO: 22455 - DNA, 25 bp, probe
catatataagcactgcacatgagat

SEQ ID NO: 22456 - DNA, 25 bp, probe
tagtcacatatataagcactgcaca

SEQ ID NO: 22457 - DNA, 25 bp, probe
gtagtcacatatataagcactgcac

SEQ ID NO: 22458 - DNA, 25 bp, probe
atgaggtagattcttccagagagac

SEQ ID NO: 22459 - DNA, 25 bp, probe
aatccaactctgtccttcttaacaa

SEQ ID NO: 22460 - DNA, 25 bp, probe
tgaggtagattcttccagagagact

SEQ ID NO: 22461 - DNA, 25 bp, probe
atccaactctgtccttcttaacaac

SEQ ID NO: 22462 - DNA, 25 bp, probe
caatccaactctgtccttcttaaca

SEQ ID NO: 22463 - DNA, 25 bp, probe
acaatccaactctgtccttcttaac

SEQ ID NO: 22464 - DNA, 25 bp, probe
catgaggtagattcttccagagaga

SEQ ID NO: 22465 - DNA, 25 bp, probe
caactctgtccttcttaacaacctg

SEQ ID NO: 22466 - DNA, 25 bp, probe
gaggtagattcttccagagagactg

SEQ ID NO: 22467 - DNA, 25 bp, probe
attgtttgcttactttatgctcctg

SEQ ID NO: 22468 - DNA, 25 bp, probe
actggctttattgtttgcttacttt

SEQ ID NO: 22469 - DNA, 25 bp, probe
accaaagagataaatgaccgaagag

SEQ ID NO: 22470 - DNA, 25 bp, probe
caccaaagagataaatgaccgaaga

SEQ ID NO: 22471 - DNA, 25 bp, probe
tactggctttattgtttgcttactt

SEQ ID NO: 22472 - DNA, 25 bp, probe
ttactggctttattgtttgcttact

SEQ ID NO: 22473 - DNA, 25 bp, probe
aactctgtccttcttaacaacctgg

SEQ ID NO: 22474 - DNA, 25 bp, probe
ccaactctgtccttcttaacaacct

SEQ ID NO: 22475 - DNA, 25 bp, probe
tccaactctgtccttcttaacaacc

SEQ ID NO: 22476 - DNA, 25 bp, probe
acaccaaagagataaatgaccgaag

SEQ ID NO: 22477 - DNA, 25 bp, probe
tgtatgtgtgtgaaggatcaggaag

SEQ ID NO: 22478 - DNA, 25 bp, probe
cacaccaaagagataaatgaccgaa

SEQ ID NO: 22479 - DNA, 25 bp, probe
tattgtttgcttactttatgctcct

SEQ ID NO: 22480 - DNA, 25 bp, probe
tttactggctttattgtttgcttac

SEQ ID NO: 22481 - DNA, 25 bp, probe
ctgtatgtgtgtgaaggatcaggaa

SEQ ID NO: 22482 - DNA, 25 bp, probe
caaagagataaatgaccgaagagcc

SEQ ID NO: 22483 - DNA, 25 bp, probe
ccaaagagataaatgaccgaagagc

SEQ ID NO: 22484 - DNA, 25 bp, probe
ctggctttattgtttgcttacttta

SEQ ID NO: 22485 - DNA, 25 bp, probe
ttattgtttgcttactttatgctcc

SEQ ID NO: 22486 - DNA, 25 bp, probe
gctttattgtttgcttactttatgc

SEQ ID NO: 22487 - DNA, 25 bp, probe
tcagcacaccaaagagataaatgac

SEQ ID NO: 22488 - DNA, 25 bp, probe
gtcagcacaccaaagagataaatga

SEQ ID NO: 22489 - DNA, 25 bp, probe
ctttgttgtctgcttcacctacttc

SEQ ID NO: 22490 - DNA, 25 bp, probe
cagcacaccaaagagataaatgacc

SEQ ID NO: 22491 - DNA, 25 bp, probe
atcaaatgtaatctgacagtggttt

SEQ ID NO: 22492 - DNA, 25 bp, probe
aatcaaatgtaatctgacagtggtt

SEQ ID NO: 22493 - DNA, 25 bp, probe
aaatcaaatgtaatctgacagtggt

SEQ ID NO: 22494 - DNA, 25 bp, probe
ttgtttgcttactttatgctcctgc

SEQ ID NO: 22495 - DNA, 25 bp, probe
tggctttattgtttgcttactttat

SEQ ID NO: 22496 - DNA, 25 bp, probe
tgtgtaatatacagcctctccaacg

SEQ ID NO: 22497 - DNA, 25 bp, probe
cgtcagcacaccaaagagataaatg

SEQ ID NO: 22498 - DNA, 25 bp, probe
caacctggcttgcagtaagtaatag

SEQ ID NO: 22499 - DNA, 25 bp, probe
ggctttattgtttgcttactttatg

SEQ ID NO: 22500 - DNA, 25 bp, probe
acctggcttgcagtaagtaatagtt

SEQ ID NO: 22501 - DNA, 25 bp, probe
aacctggcttgcagtaagtaatagt

SEQ ID NO: 22502 - DNA, 25 bp, probe
ctattgtgttagtgaagaggaggac

SEQ ID NO: 22503 - DNA, 25 bp, probe
gatgagtagccaaggaagtaagaac

SEQ ID NO: 22504 - DNA, 25 bp, probe
ttcttgaggaatgatggatgagtag

SEQ ID NO: 22505 - DNA, 25 bp, probe
atgccaggtagatagtagaggagat

SEQ ID NO: 22506 - DNA, 25 bp, probe
gtagccaaggaagtaagaacacatc

SEQ ID NO: 22507 - DNA, 25 bp, probe
atgagtagccaaggaagtaagaaca

SEQ ID NO: 22508 - DNA, 25 bp, probe
tgccaggtagatagtagaggagatt

SEQ ID NO: 22509 - DNA, 25 bp, probe
tattgtgttagtgaagaggaggact

SEQ ID NO: 22510 - DNA, 25 bp, probe
tagccaaggaagtaagaacacatca

SEQ ID NO: 22511 - DNA, 25 bp, probe
agtagccaaggaagtaagaacacat

SEQ ID NO: 22512 - DNA, 25 bp, probe
tataatgtgccactggagagtattc

SEQ ID NO: 22513 - DNA, 25 bp, probe
ctataatgtgccactggagagtatt

SEQ ID NO: 22514 - DNA, 25 bp, probe
gctattgtgttagtgaagaggagga

SEQ ID NO: 22515 - DNA, 25 bp, probe
ggatgagtagccaaggaagtaagaa

SEQ ID NO: 22516 - DNA, 25 bp, probe
tcttgaggaatgatggatgagtagc

SEQ ID NO: 22517 - DNA, 25 bp, probe
agtgaagaggaggactatattgtct

SEQ ID NO: 22518 - DNA, 25 bp, probe
acatcatgccaggtagatagtagag

SEQ ID NO: 22519 - DNA, 25 bp, probe
agccaaggaagtaagaacacatcat

SEQ ID NO: 22520 - DNA, 25 bp, probe
aacacatcatgccaggtagatagta

SEQ ID NO: 22521 - DNA, 25 bp, probe
gagtagccaaggaagtaagaacaca

SEQ ID NO: 22522 - DNA, 25 bp, probe
tgagtagccaaggaagtaagaacac

SEQ ID NO: 22523 - DNA, 25 bp, probe
cacatcatgccaggtagatagtaga

SEQ ID NO: 22524 - DNA, 25 bp, probe
taatgtgccactggagagtattcat

SEQ ID NO: 22525 - DNA, 25 bp, probe
ataatgtgccactggagagtattca

SEQ ID NO: 22526 - DNA, 25 bp, probe
acacatcatgccaggtagatagtag

SEQ ID NO: 22527 - DNA, 25 bp, probe
catcatgccaggtagatagtagagg

SEQ ID NO: 22528 - DNA, 25 bp, probe
aagaacacatcatgccaggtagata

SEQ ID NO: 22529 - DNA, 25 bp, probe
taagaacacatcatgccaggtagat

SEQ ID NO: 22530 - DNA, 25 bp, probe
gtgaagaggaggactatattgtcta

SEQ ID NO: 22531 - DNA, 25 bp, probe
atcatgccaggtagatagtagagga

SEQ ID NO: 22532 - DNA, 25 bp, probe
ggctattgtgttagtgaagaggagg

SEQ ID NO: 22533 - DNA, 25 bp, probe
gctataatgtgccactggagagtat

SEQ ID NO: 22534 - DNA, 25 bp, probe
tgtgttagtgaagaggaggactata

SEQ ID NO: 22535 - DNA, 25 bp, probe
ctctgattcttgaggaatgatggat

SEQ ID NO: 22536 - DNA, 25 bp, probe
aagtaagaacacatcatgccaggta

SEQ ID NO: 22537 - DNA, 25 bp, probe
gattcttgaggaatgatggatgagt

SEQ ID NO: 22538 - DNA, 25 bp, probe
tgattcttgaggaatgatggatgag

SEQ ID NO: 22539 - DNA, 25 bp, probe
ctgattcttgaggaatgatggatga

SEQ ID NO: 22540 - DNA, 25 bp, probe
tctgattcttgaggaatgatggatg

SEQ ID NO: 22541 - DNA, 25 bp, probe
ttgtgttagtgaagaggaggactat

SEQ ID NO: 22542 - DNA, 25 bp, probe
attgtgttagtgaagaggaggacta

SEQ ID NO: 22543 - DNA, 25 bp, probe
agaacacatcatgccaggtagatag

SEQ ID NO: 22544 - DNA, 25 bp, probe
cttgaggaatgatggatgagtagcc

SEQ ID NO: 22545 - DNA, 25 bp, probe
attcttgaggaatgatggatgagta

SEQ ID NO: 22546 - DNA, 25 bp, probe
gtgttgtcattctgtaggtctcata

SEQ ID NO: 22547 - DNA, 25 bp, probe
taggtctcatacggtcagtcattat

SEQ ID NO: 22548 - DNA, 25 bp, probe
atatgaccgttatgttgctatctgt

SEQ ID NO: 22549 - DNA, 25 bp, probe
tggaatatgaccgttatgttgctat

SEQ ID NO: 22550 - DNA, 25 bp, probe
atggaatatgaccgttatgttgcta

SEQ ID NO: 22551 - DNA, 25 bp, probe
tgttgtcattctgtaggtctcatac

SEQ ID NO: 22552 - DNA, 25 bp, probe
ggaatatgaccgttatgttgctatc

SEQ ID NO: 22553 - DNA, 25 bp, probe
gagattctgctgttcattattggag

SEQ ID NO: 22554 - DNA, 25 bp, probe
tgctgttcattattggaggagttaa

SEQ ID NO: 22555 - DNA, 25 bp, probe
ctgctgttcattattggaggagtta

SEQ ID NO: 22556 - DNA, 25 bp, probe
attctgctgttcattattggaggag

SEQ ID NO: 22557 - DNA, 25 bp, probe
gattctgctgttcattattggagga

SEQ ID NO: 22558 - DNA, 25 bp, probe
ttaataccttagcaactacactggc

SEQ ID NO: 22559 - DNA, 25 bp, probe
agattctgctgttcattattggagg

SEQ ID NO: 22560 - DNA, 25 bp, probe
aatatgaccgttatgttgctatctg

SEQ ID NO: 22561 - DNA, 25 bp, probe
aggtctcatacggtcagtcattatt

SEQ ID NO: 22562 - DNA, 25 bp, probe
gttgtcattctgtaggtctcatacg

SEQ ID NO: 22563 - DNA, 25 bp, probe
gaatatgaccgttatgttgctatct

SEQ ID NO: 22564 - DNA, 25 bp, probe
gtaggtctcatacggtcagtcatta

SEQ ID NO: 22565 - DNA, 25 bp, probe
agtgttgtcattctgtaggtctcat

SEQ ID NO: 22566 - DNA, 25 bp, probe
gttaataccttagcaactacactgg

SEQ ID NO: 22567 - DNA, 25 bp, probe
gctgttcattattggaggagttaat

SEQ ID NO: 22568 - DNA, 25 bp, probe
tgagattctgctgttcattattgga

SEQ ID NO: 22569 - DNA, 25 bp, probe
tctgctgttcattattggaggagtt

SEQ ID NO: 22570 - DNA, 25 bp, probe
ttctgctgttcattattggaggagt

SEQ ID NO: 22571 - DNA, 25 bp, probe
ttgtcattctgtaggtctcatacgg

SEQ ID NO: 22572 - DNA, 25 bp, probe
tatgaccgttatgttgctatctgtc

SEQ ID NO: 22573 - DNA, 25 bp, probe
gtcattctgtaggtctcatacggtc

SEQ ID NO: 22574 - DNA, 25 bp, probe
ttggaggagttaataccttagcaac

SEQ ID NO: 22575 - DNA, 25 bp, probe
attggaggagttaataccttagcaa

SEQ ID NO: 22576 - DNA, 25 bp, probe
ctctagtatccttggtattcattcc

SEQ ID NO: 22577 - DNA, 25 bp, probe
taataccttagcaactacactggcg

SEQ ID NO: 22578 - DNA, 25 bp, probe
aaggtgtcttctgtgttctacatca

SEQ ID NO: 22579 - DNA, 25 bp, probe
cacatcaatgagattctgctgttca

SEQ ID NO: 22580 - DNA, 25 bp, probe
tacactggcggtccttatctcttat

SEQ ID NO: 22581 - DNA, 25 bp, probe
catggaatatgaccgttatgttgct

SEQ ID NO: 22582 - DNA, 25 bp, probe
tcattctgtaggtctcatacggtca

SEQ ID NO: 22583 - DNA, 25 bp, probe
tattggaggagttaataccttagca

SEQ ID NO: 22584 - DNA, 25 bp, probe
gtatccttggtattcattccactga

SEQ ID NO: 22585 - DNA, 25 bp, probe
agtatccttggtattcattccactg

SEQ ID NO: 22586 - DNA, 25 bp, probe
tatccttggtattcattccactgag

SEQ ID NO: 22587 - DNA, 25 bp, probe
tgtaggtctcatacggtcagtcatt

SEQ ID NO: 22588 - DNA, 25 bp, probe
tgtcattctgtaggtctcatacggt

SEQ ID NO: 22589 - DNA, 25 bp, probe
atgtcagtgttgtcattctgtaggt

SEQ ID NO: 22590 - DNA, 25 bp, probe
taatctcttatactcgtgtgctctt

SEQ ID NO: 22591 - DNA, 25 bp, probe
tcataatctcttatactcgtgtgct

SEQ ID NO: 22592 - DNA, 25 bp, probe
cataatctcttatactcgtgtgctc

SEQ ID NO: 22593 - DNA, 25 bp, probe
ataatctcttatactcgtgtgctct

SEQ ID NO: 22594 - DNA, 25 bp, probe
cattgtactacggaactctgatctt

SEQ ID NO: 22595 - DNA, 25 bp, probe
attgtactacggaactctgatcttc

SEQ ID NO: 22596 - DNA, 25 bp, probe
atcataatctcttatactcgtgtgc

SEQ ID NO: 22597 - DNA, 25 bp, probe
ctcattgtactacggaactctgatc

SEQ ID NO: 22598 - DNA, 25 bp, probe
ttctgtctcattgtactacggaact

SEQ ID NO: 22599 - DNA, 25 bp, probe
aatggtccatctattaacgcactaa

SEQ ID NO: 22600 - DNA, 25 bp, probe
tgtactacggaactctgatcttcat

SEQ ID NO: 22601 - DNA, 25 bp, probe
tcattgtactacggaactctgatct

SEQ ID NO: 22602 - DNA, 25 bp, probe
tctcattgtactacggaactctgat

SEQ ID NO: 22603 - DNA, 25 bp, probe
atggtccatctattaacgcactaat

SEQ ID NO: 22604 - DNA, 25 bp, probe
ctgtctcattgtactacggaactct

SEQ ID NO: 22605 - DNA, 25 bp, probe
tctgtctcattgtactacggaactc

SEQ ID NO: 22606 - DNA, 25 bp, probe
tacggaactctgatcttcatgtatg

SEQ ID NO: 22607 - DNA, 25 bp, probe
ctacggaactctgatcttcatgtat

SEQ ID NO: 22608 - DNA, 25 bp, probe
caatggtccatctattaacgcacta

SEQ ID NO: 22609 - DNA, 25 bp, probe
ttgtactacggaactctgatcttca

SEQ ID NO: 22610 - DNA, 25 bp, probe
gtactacggaactctgatcttcatg

SEQ ID NO: 22611 - DNA, 25 bp, probe
actacggaactctgatcttcatgta

SEQ ID NO: 22612 - DNA, 25 bp, probe
tactacggaactctgatcttcatgt

SEQ ID NO: 22613 - DNA, 25 bp, probe
tgtctcattgtactacggaactctg

SEQ ID NO: 22614 - DNA, 25 bp, probe
tggtccatctattaacgcactaata

SEQ ID NO: 22615 - DNA, 25 bp, probe
cggaactctgatcttcatgtatgtg

SEQ ID NO: 22616 - DNA, 25 bp, probe
gtctcattgtactacggaactctga

SEQ ID NO: 22617 - DNA, 25 bp, probe
ggtccatctattaacgcactaataa

SEQ ID NO: 22618 - DNA, 25 bp, probe
ggaactctgatcttcatgtatgtgc

SEQ ID NO: 22619 - DNA, 25 bp, probe
acggaactctgatcttcatgtatgt

SEQ ID NO: 22620 - DNA, 25 bp, probe
aatctcttatactcgtgtgctcttt

SEQ ID NO: 22621 - DNA, 25 bp, probe
atactcgtgtgctctttgatattct

SEQ ID NO: 22622 - DNA, 25 bp, probe
tttactattgcgactaactttctgc

SEQ ID NO: 22623 - DNA, 25 bp, probe
ctcttatactcgtgtgctctttgat

SEQ ID NO: 22624 - DNA, 25 bp, probe
atctcttatactcgtgtgctctttg

SEQ ID NO: 22625 - DNA, 25 bp, probe
tatgtaatcccttgctttatccagt

SEQ ID NO: 22626 - DNA, 25 bp, probe
tcttatactcgtgtgctctttgata

SEQ ID NO: 22627 - DNA, 25 bp, probe
gaactctgatcttcatgtatgtgcg

SEQ ID NO: 22628 - DNA, 25 bp, probe
tactcgtgtgctctttgatattctg

SEQ ID NO: 22629 - DNA, 25 bp, probe
cgctcagttgctaagtatttcatat

SEQ ID NO: 22630 - DNA, 25 bp, probe
taatcccttgctttatccagtgatg

SEQ ID NO: 22631 - DNA, 25 bp, probe
gtaatcccttgctttatccagtgat

SEQ ID NO: 22632 - DNA, 25 bp, probe
atgtaatcccttgctttatccagtg

SEQ ID NO: 22633 - DNA, 25 bp, probe
ttcatgcaatggtccatctattaac

SEQ ID NO: 22634 - DNA, 25 bp, probe
taccttattagttctctgctgttgg

SEQ ID NO: 22635 - DNA, 25 bp, probe
agaacagatggttatacttatggct

SEQ ID NO: 22636 - DNA, 25 bp, probe
gtgtaccttattagttctctgctgt

SEQ ID NO: 22637 - DNA, 25 bp, probe
tgtgtaccttattagttctctgctg

SEQ ID NO: 22638 - DNA, 25 bp, probe
gtgtgtaccttattagttctctgct

SEQ ID NO: 22639 - DNA, 25 bp, probe
ttgtgtgattctgtcctacttgtac

SEQ ID NO: 22640 - DNA, 25 bp, probe
tgtaccttattagttctctgctgtt

SEQ ID NO: 22641 - DNA, 25 bp, probe
gtaccttattagttctctgctgttg

SEQ ID NO: 22642 - DNA, 25 bp, probe
gaacagatggttatacttatggctg

SEQ ID NO: 22643 - DNA, 25 bp, probe
tagaacagatggttatacttatggc

SEQ ID NO: 22644 - DNA, 25 bp, probe
atcattgttccaccacttagcttag

SEQ ID NO: 22645 - DNA, 25 bp, probe
gatcattgttccaccacttagctta

SEQ ID NO: 22646 - DNA, 25 bp, probe
ttcagttcttactacttctgtcgca

SEQ ID NO: 22647 - DNA, 25 bp, probe
tttgtgtgattctgtcctacttgta

SEQ ID NO: 22648 - DNA, 25 bp, probe
ggtgtgtaccttattagttctctgc

SEQ ID NO: 22649 - DNA, 25 bp, probe
atcttcatctatatcaagccctctg

SEQ ID NO: 22650 - DNA, 25 bp, probe
catcttcatctatatcaagccctct

SEQ ID NO: 22651 - DNA, 25 bp, probe
cagatggttatacttatggctgtat

SEQ ID NO: 22652 - DNA, 25 bp, probe
gtttgtgtgattctgtcctacttgt

SEQ ID NO: 22653 - DNA, 25 bp, probe
tcagttcttactacttctgtcgcac

SEQ ID NO: 22654 - DNA, 25 bp, probe
gcatcttcatctatatcaagccctc

SEQ ID NO: 22655 - DNA, 25 bp, probe
aagctgcatcttcatctatatcaag

SEQ ID NO: 22656 - DNA, 25 bp, probe
cttattagttctctgctgttgggtg

SEQ ID NO: 22657 - DNA, 25 bp, probe
gccataaataaaggagtttcagttc

SEQ ID NO: 22658 - DNA, 25 bp, probe
agtttgtgtgattctgtcctacttg

SEQ ID NO: 22659 - DNA, 25 bp, probe
gctcagatacatgggtaatagaaca

SEQ ID NO: 22660 - DNA, 25 bp, probe
tgctcagatacatgggtaatagaac

SEQ ID NO: 22661 - DNA, 25 bp, probe
aggagtttcagttcttactacttct

SEQ ID NO: 22662 - DNA, 25 bp, probe
tcttcatctatatcaagccctctgc

SEQ ID NO: 22663 - DNA, 25 bp, probe
tcattgttccaccacttagcttagg

SEQ ID NO: 22664 - DNA, 25 bp, probe
gtttcagttcttactacttctgtcg

SEQ ID NO: 22665 - DNA, 25 bp, probe
agatggttatacttatggctgtatt

SEQ ID NO: 22666 - DNA, 25 bp, probe
tttcagttcttactacttctgtcgc

SEQ ID NO: 22667 - DNA, 25 bp, probe
ccttattagttctctgctgttgggt

SEQ ID NO: 22668 - DNA, 25 bp, probe
accttattagttctctgctgttggg

SEQ ID NO: 22669 - DNA, 25 bp, probe
atgctcagatacatgggtaatagaa

SEQ ID NO: 22670 - DNA, 25 bp, probe
cagtttgtgtgattctgtcctactt

SEQ ID NO: 22671 - DNA, 25 bp, probe
acatgggtaatagaacagatggtta

SEQ ID NO: 22672 - DNA, 25 bp, probe
tacatgggtaatagaacagatggtt

SEQ ID NO: 22673 - DNA, 25 bp, probe
atacatgggtaatagaacagatggt

SEQ ID NO: 22674 - DNA, 25 bp, probe
ggagtttcagttcttactacttctg

SEQ ID NO: 22675 - DNA, 25 bp, probe
aaggagtttcagttcttactacttc

SEQ ID NO: 22676 - DNA, 25 bp, probe
tggttatacttatggctgtatttgc

SEQ ID NO: 22677 - DNA, 25 bp, probe
tcagatacatgggtaatagaacaga

SEQ ID NO: 22678 - DNA, 25 bp, probe
atacatggctcctagaagtaattgg

SEQ ID NO: 22679 - DNA, 25 bp, probe
tcagatacatggctcctagaagtaa

SEQ ID NO: 22680 - DNA, 25 bp, probe
cagatacatggctcctagaagtaat

SEQ ID NO: 22681 - DNA, 25 bp, probe
ttcagatacatggctcctagaagta

SEQ ID NO: 22682 - DNA, 25 bp, probe
tacatggctcctagaagtaattggt

SEQ ID NO: 22683 - DNA, 25 bp, probe
gatacatggctcctagaagtaattg

SEQ ID NO: 22684 - DNA, 25 bp, probe
agatacatggctcctagaagtaatt

SEQ ID NO: 22685 - DNA, 25 bp, probe
tattcatgtatgctaatccatctgc

SEQ ID NO: 22686 - DNA, 25 bp, probe
acatggctcctagaagtaattggtt

SEQ ID NO: 22687 - DNA, 25 bp, probe
cacttgttcttctcacatgattgtc

SEQ ID NO: 22688 - DNA, 25 bp, probe
acttgttcttctcacatgattgtca

SEQ ID NO: 22689 - DNA, 25 bp, probe
gttcagatacatggctcctagaagt

SEQ ID NO: 22690 - DNA, 25 bp, probe
ctccacttgttcttctcacatgatt

SEQ ID NO: 22691 - DNA, 25 bp, probe
atggaagctgtatattcatgtatgc

SEQ ID NO: 22692 - DNA, 25 bp, probe
tccacttgttcttctcacatgattg

SEQ ID NO: 22693 - DNA, 25 bp, probe
ttgttcagatacatggctcctagaa

SEQ ID NO: 22694 - DNA, 25 bp, probe
tttactttgctttggttactttgct

SEQ ID NO: 22695 - DNA, 25 bp, probe
agctattctcaatacatctgttgcc

SEQ ID NO: 22696 - DNA, 25 bp, probe
ctttggttactttgctgttcacttt

SEQ ID NO: 22697 - DNA, 25 bp, probe
ttactttgctttggttactttgctg

SEQ ID NO: 22698 - DNA, 25 bp, probe
ccacttgttcttctcacatgattgt

SEQ ID NO: 22699 - DNA, 25 bp, probe
tttggttactttgctgttcactttg

SEQ ID NO: 22700 - DNA, 25 bp, probe
tctccacttgttcttctcacatgat

SEQ ID NO: 22701 - DNA, 25 bp, probe
tgttcagatacatggctcctagaag

SEQ ID NO: 22702 - DNA, 25 bp, probe
cttgttcagatacatggctcctaga

SEQ ID NO: 22703 - DNA, 25 bp, probe
tcttgttcagatacatggctcctag

SEQ ID NO: 22704 - DNA, 25 bp, probe
ttctccacttgttcttctcacatga

SEQ ID NO: 22705 - DNA, 25 bp, probe
gctgtatattcatgtatgctaatcc

SEQ ID NO: 22706 - DNA, 25 bp, probe
tactttgctttggttactttgctgt

SEQ ID NO: 22707 - DNA, 25 bp, probe
ctttgctttggttactttgctgttc

SEQ ID NO: 22708 - DNA, 25 bp, probe
atcttgttcagatacatggctccta

SEQ ID NO: 22709 - DNA, 25 bp, probe
catggctcctagaagtaattggttt

SEQ ID NO: 22710 - DNA, 25 bp, probe
ctttctccacttgttcttctcacat

SEQ ID NO: 22711 - DNA, 25 bp, probe
tcttatggaagctgtatattcatgt

SEQ ID NO: 22712 - DNA, 25 bp, probe
cttgttcttctcacatgattgtcat

SEQ ID NO: 22713 - DNA, 25 bp, probe
actttgctttggttactttgctgtt

SEQ ID NO: 22714 - DNA, 25 bp, probe
ttgttcttctcacatgattgtcatt

SEQ ID NO: 22715 - DNA, 25 bp, probe
ttggttactttgctgttcactttgg

SEQ ID NO: 22716 - DNA, 25 bp, probe
tttgctttggttactttgctgttca

SEQ ID NO: 22717 - DNA, 25 bp, probe
gctattctcaatacatctgttgccc

SEQ ID NO: 22718 - DNA, 25 bp, probe
tggaagctgtatattcatgtatgct

SEQ ID NO: 22719 - DNA, 25 bp, probe
gctttggttactttgctgttcactt

SEQ ID NO: 22720 - DNA, 25 bp, probe
tttctccacttgttcttctcacatg

SEQ ID NO: 22721 - DNA, 25 bp, probe
tagctattctcaatacatctgttgc

SEQ ID NO: 22722 - DNA, 25 bp, probe
aatcacctctaatactcatccacat

SEQ ID NO: 22723 - DNA, 25 bp, probe
taatcacctctaatactcatccaca

SEQ ID NO: 22724 - DNA, 25 bp, probe
attacagagaacagcagcatcattg

SEQ ID NO: 22725 - DNA, 25 bp, probe
cattacagagaacagcagcatcatt

SEQ ID NO: 22726 - DNA, 25 bp, probe
cttagcaactgccttatcaattaca

SEQ ID NO: 22727 - DNA, 25 bp, probe
acttagcaactgccttatcaattac

SEQ ID NO: 22728 - DNA, 25 bp, probe
tgtgtaatgtggatggagacaatta

SEQ ID NO: 22729 - DNA, 25 bp, probe
atgtgtaatgtggatggagacaatt

SEQ ID NO: 22730 - DNA, 25 bp, probe
aacaagttggctagaagatacatgg

SEQ ID NO: 22731 - DNA, 25 bp, probe
tagaagatacatggagaggaatggt

SEQ ID NO: 22732 - DNA, 25 bp, probe
ctagaagatacatggagaggaatgg

SEQ ID NO: 22733 - DNA, 25 bp, probe
gctagaagatacatggagaggaatg

SEQ ID NO: 22734 - DNA, 25 bp, probe
caagttggctagaagatacatggag

SEQ ID NO: 22735 - DNA, 25 bp, probe
atcacctctaatactcatccacatg

SEQ ID NO: 22736 - DNA, 25 bp, probe
ttacttagcaactgccttatcaatt

SEQ ID NO: 22737 - DNA, 25 bp, probe
tctctaatgttgattgttagccgat

SEQ ID NO: 22738 - DNA, 25 bp, probe
ttctctaatgttgattgttagccga

SEQ ID NO: 22739 - DNA, 25 bp, probe
aagttggctagaagatacatggaga

SEQ ID NO: 22740 - DNA, 25 bp, probe
ctctaatgttgattgttagccgatt

SEQ ID NO: 22741 - DNA, 25 bp, probe
ggctagaagatacatggagaggaat

SEQ ID NO: 22742 - DNA, 25 bp, probe
gtgtaatgtggatggagacaattat

SEQ ID NO: 22743 - DNA, 25 bp, probe
aatggtgtggtcaacagttaatgaa

SEQ ID NO: 22744 - DNA, 25 bp, probe
atattgtcatgtcagttcttgccag

SEQ ID NO: 22745 - DNA, 25 bp, probe
agttggctagaagatacatggagag

SEQ ID NO: 22746 - DNA, 25 bp, probe
acaagttggctagaagatacatgga

SEQ ID NO: 22747 - DNA, 25 bp, probe
gaatggtgtggtcaacagttaatga

SEQ ID NO: 22748 - DNA, 25 bp, probe
caactgccttatcaattacaggatt

SEQ ID NO: 22749 - DNA, 25 bp, probe
attatgtgacttgtagcttcctctg

SEQ ID NO: 22750 - DNA, 25 bp, probe
aattatgtgacttgtagcttcctct

SEQ ID NO: 22751 - DNA, 25 bp, probe
ttaatcacctctaatactcatccac

SEQ ID NO: 22752 - DNA, 25 bp, probe
ttagcaactgccttatcaattacag

SEQ ID NO: 22753 - DNA, 25 bp, probe
tacttagcaactgccttatcaatta

SEQ ID NO: 22754 - DNA, 25 bp, probe
catattgtcatgtcagttcttgcca

SEQ ID NO: 22755 - DNA, 25 bp, probe
agaagatacatggagaggaatggtg

SEQ ID NO: 22756 - DNA, 25 bp, probe
tagcaactgccttatcaattacagg

SEQ ID NO: 22757 - DNA, 25 bp, probe
catgtgtaatgtggatggagacaat

SEQ ID NO: 22758 - DNA, 25 bp, probe
atgttgattgttagccgatttgtaa

SEQ ID NO: 22759 - DNA, 25 bp, probe
aatgttgattgttagccgatttgta

SEQ ID NO: 22760 - DNA, 25 bp, probe
taatgttgattgttagccgatttgt

SEQ ID NO: 22761 - DNA, 25 bp, probe
aggttgacaagtgaagtttctctaa

SEQ ID NO: 22762 - DNA, 25 bp, probe
aaggttgacaagtgaagtttctcta

SEQ ID NO: 22763 - DNA, 25 bp, probe
ctatttggagggtctttaacattgc

SEQ ID NO: 22764 - DNA, 25 bp, probe
tggctagaagatacatggagaggaa

SEQ ID NO: 22765 - DNA, 25 bp, probe
ttggctagaagatacatggagagga

SEQ ID NO: 22766 - DNA, 25 bp, probe
tccttacccaaactgttcaagaaat

SEQ ID NO: 22767 - DNA, 25 bp, probe
ttccttacccaaactgttcaagaaa

SEQ ID NO: 22768 - DNA, 25 bp, probe
ccttacccaaactgttcaagaaata

SEQ ID NO: 22769 - DNA, 25 bp, probe
cttccttacccaaactgttcaagaa

SEQ ID NO: 22770 - DNA, 25 bp, probe
cttacccaaactgttcaagaaataa

SEQ ID NO: 22771 - DNA, 25 bp, probe
ctccttccttacccaaactgttcaa

SEQ ID NO: 22772 - DNA, 25 bp, probe
ctctccttccttacccaaactgttc

SEQ ID NO: 22773 - DNA, 25 bp, probe
ccttccttacccaaactgttcaaga

SEQ ID NO: 22774 - DNA, 25 bp, probe
tccttccttacccaaactgttcaag

SEQ ID NO: 22775 - DNA, 25 bp, probe
acccaaactgttcaagaaataataa

SEQ ID NO: 22776 - DNA, 25 bp, probe
ttacccaaactgttcaagaaataat

SEQ ID NO: 22777 - DNA, 25 bp, probe
ctgaaatgaaggtgagggtgagaag

SEQ ID NO: 22778 - DNA, 25 bp, probe
tctccttccttacccaaactgttca

SEQ ID NO: 22779 - DNA, 25 bp, probe
aaatgaaggtgagggtgagaaggaa

SEQ ID NO: 22780 - DNA, 25 bp, probe
actgaaatgaaggtgagggtgagaa

SEQ ID NO: 22781 - DNA, 25 bp, probe
tacccaaactgttcaagaaataata

SEQ ID NO: 22782 - DNA, 25 bp, probe
cctctccttccttacccaaactgtt

SEQ ID NO: 22783 - DNA, 25 bp, probe
aatgaaggtgagggtgagaaggaag

SEQ ID NO: 22784 - DNA, 25 bp, probe
gaaatgaaggtgagggtgagaagga

SEQ ID NO: 22785 - DNA, 25 bp, probe
gactgaaatgaaggtgagggtgaga

SEQ ID NO: 22786 - DNA, 25 bp, probe
tgaaatgaaggtgagggtgagaagg

SEQ ID NO: 22787 - DNA, 25 bp, probe
gaaggaagctggaaatggagttgag

SEQ ID NO: 22788 - DNA, 25 bp, probe
gagaaggaagctggaaatggagttg

SEQ ID NO: 22789 - DNA, 25 bp, probe
agaaggaagctggaaatggagttga

SEQ ID NO: 22790 - DNA, 25 bp, probe
tgagaaggaagctggaaatggagtt

SEQ ID NO: 22791 - DNA, 25 bp, probe
ggactgaaatgaaggtgagggtgag

SEQ ID NO: 22792 - DNA, 25 bp, probe
gtgagaaggaagctggaaatggagt

SEQ ID NO: 22793 - DNA, 25 bp, probe
ggtgagaaggaagctggaaatggag

SEQ ID NO: 22794 - DNA, 25 bp, probe
gagggtgagaaggaagctggaaatg

SEQ ID NO: 22795 - DNA, 25 bp, probe
caacgcacaggaaaaggtagcttac

SEQ ID NO: 22796 - DNA, 25 bp, probe
catccctttccagttaaggaccgag

SEQ ID NO: 22797 - DNA, 25 bp, probe
tcatccctttccagttaaggaccga

SEQ ID NO: 22798 - DNA, 25 bp, probe
acttctctcagcactcttacttatt

SEQ ID NO: 22799 - DNA, 25 bp, probe
aacttctctcagcactcttacttat

SEQ ID NO: 22800 - DNA, 25 bp, probe
taacttctctcagcactcttactta

SEQ ID NO: 22801 - DNA, 25 bp, probe
attggttgaacagtaacttctctca

SEQ ID NO: 22802 - DNA, 25 bp, probe
ttggttgaacagtaacttctctcag

SEQ ID NO: 22803 - DNA, 25 bp, probe
acagtaacttctctcagcactctta

SEQ ID NO: 22804 - DNA, 25 bp, probe
tattggttgaacagtaacttctctc

SEQ ID NO: 22805 - DNA, 25 bp, probe
aacagtaacttctctcagcactctt

SEQ ID NO: 22806 - DNA, 25 bp, probe
ttattggttgaacagtaacttctct

SEQ ID NO: 22807 - DNA, 25 bp, probe
ttgaacagtaacttctctcagcact

SEQ ID NO: 22808 - DNA, 25 bp, probe
gttgaacagtaacttctctcagcac

SEQ ID NO: 22809 - DNA, 25 bp, probe
gtaacttctctcagcactcttactt

SEQ ID NO: 22810 - DNA, 25 bp, probe
gaacagtaacttctctcagcactct

SEQ ID NO: 22811 - DNA, 25 bp, probe
cagtaacttctctcagcactcttac

SEQ ID NO: 22812 - DNA, 25 bp, probe
tgaacagtaacttctctcagcactc

SEQ ID NO: 22813 - DNA, 25 bp, probe
attattggttgaacagtaacttctc

SEQ ID NO: 22814 - DNA, 25 bp, probe
tctcagcactcttacttatttctct

SEQ ID NO: 22815 - DNA, 25 bp, probe
tctctcagcactcttacttatttct

SEQ ID NO: 22816 - DNA, 25 bp, probe
ctctcagcactcttacttatttctc

SEQ ID NO: 22817 - DNA, 25 bp, probe
ggttgaacagtaacttctctcagca

SEQ ID NO: 22818 - DNA, 25 bp, probe
tggttgaacagtaacttctctcagc

SEQ ID NO: 22819 - DNA, 25 bp, probe
ttctctcagcactcttacttatttc

SEQ ID NO: 22820 - DNA, 25 bp, probe
cttctctcagcactcttacttattt

SEQ ID NO: 22821 - DNA, 25 bp, probe
gatcctttagttcattgtccaccat

SEQ ID NO: 22822 - DNA, 25 bp, probe
agcactcttacttatttctctgttt

SEQ ID NO: 22823 - DNA, 25 bp, probe
aattattggttgaacagtaacttct

SEQ ID NO: 22824 - DNA, 25 bp, probe
tcagcactcttacttatttctctgt

SEQ ID NO: 22825 - DNA, 25 bp, probe
gcaaatgatgagacagaatgtattg

SEQ ID NO: 22826 - DNA, 25 bp, probe
atcctttagttcattgtccaccatg

SEQ ID NO: 22827 - DNA, 25 bp, probe
ctcagcactcttacttatttctctg

SEQ ID NO: 22828 - DNA, 25 bp, probe
cagcactcttacttatttctctgtt

SEQ ID NO: 22829 - DNA, 25 bp, probe
atgatttcatagcccagtatgtgtg

SEQ ID NO: 22830 - DNA, 25 bp, probe
catgatttcatagcccagtatgtgt

SEQ ID NO: 22831 - DNA, 25 bp, probe
caaatgatgagacagaatgtattgt

SEQ ID NO: 22832 - DNA, 25 bp, probe
cattgtccaccatgatttcatagcc

SEQ ID NO: 22833 - DNA, 25 bp, probe
ctgatattctgcaaatgatgagaca

SEQ ID NO: 22834 - DNA, 25 bp, probe
actgatattctgcaaatgatgagac

SEQ ID NO: 22835 - DNA, 25 bp, probe
ccatgatttcatagcccagtatgtg

SEQ ID NO: 22836 - DNA, 25 bp, probe
caccatgatttcatagcccagtatg

SEQ ID NO: 22837 - DNA, 25 bp, probe
ccaccatgatttcatagcccagtat

SEQ ID NO: 22838 - DNA, 25 bp, probe
aactgatattctgcaaatgatgaga

SEQ ID NO: 22839 - DNA, 25 bp, probe
accatgatttcatagcccagtatgt

SEQ ID NO: 22840 - DNA, 25 bp, probe
aatgatgagacagaatgtattgtat

SEQ ID NO: 22841 - DNA, 25 bp, probe
acttatttctctgttttctggctga

SEQ ID NO: 22842 - DNA, 25 bp, probe
agcctaatcttcttcactgtgtatt

SEQ ID NO: 22843 - DNA, 25 bp, probe
tagtagcagcctaatcttcttcact

SEQ ID NO: 22844 - DNA, 25 bp, probe
ttagtagcagcctaatcttcttcac

SEQ ID NO: 22845 - DNA, 25 bp, probe
cagcctaatcttcttcactgtgtat

SEQ ID NO: 22846 - DNA, 25 bp, probe
tgactcagactgatctattgaatgt

SEQ ID NO: 22847 - DNA, 25 bp, probe
tgtgactcagactgatctattgaat

SEQ ID NO: 22848 - DNA, 25 bp, probe
atgtgactcagactgatctattgaa

SEQ ID NO: 22849 - DNA, 25 bp, probe
aatgtgactcagactgatctattga

SEQ ID NO: 22850 - DNA, 25 bp, probe
gtgactcagactgatctattgaatg

SEQ ID NO: 22851 - DNA, 25 bp, probe
actcagactgatctattgaatgtca

SEQ ID NO: 22852 - DNA, 25 bp, probe
gactcagactgatctattgaatgtc

SEQ ID NO: 22853 - DNA, 25 bp, probe
agtagcagcctaatcttcttcactg

SEQ ID NO: 22854 - DNA, 25 bp, probe
atcctcaatcctgttatgggtgtat

SEQ ID NO: 22855 - DNA, 25 bp, probe
tcttatttcaacatcctcaatcctg

SEQ ID NO: 22856 - DNA, 25 bp, probe
gtagcagcctaatcttcttcactgt

SEQ ID NO: 22857 - DNA, 25 bp, probe
gcctaatcttcttcactgtgtattt

SEQ ID NO: 22858 - DNA, 25 bp, probe
tagcagcctaatcttcttcactgtg

SEQ ID NO: 22859 - DNA, 25 bp, probe
gaaccttcttatttcaacatcctca

SEQ ID NO: 22860 - DNA, 25 bp, probe
aaccttcttatttcaacatcctcaa

SEQ ID NO: 22861 - DNA, 25 bp, probe
accttcttatttcaacatcctcaat

SEQ ID NO: 22862 - DNA, 25 bp, probe
gcagcctaatcttcttcactgtgta

SEQ ID NO: 22863 - DNA, 25 bp, probe
ctcaatcctgttatgggtgtatgac

SEQ ID NO: 22864 - DNA, 25 bp, probe
tcctcaatcctgttatgggtgtatg

SEQ ID NO: 22865 - DNA, 25 bp, probe
ttcttatttcaacatcctcaatcct

SEQ ID NO: 22866 - DNA, 25 bp, probe
cactgggacaaattagttctgatta

SEQ ID NO: 22867 - DNA, 25 bp, probe
ccactgggacaaattagttctgatt

SEQ ID NO: 22868 - DNA, 25 bp, probe
ctcatcatcagggagtgaaattatc

SEQ ID NO: 22869 - DNA, 25 bp, probe
cttcttatttcaacatcctcaatcc

SEQ ID NO: 22870 - DNA, 25 bp, probe
ccttcttatttcaacatcctcaatc

SEQ ID NO: 22871 - DNA, 25 bp, probe
catcctcaatcctgttatgggtgta

SEQ ID NO: 22872 - DNA, 25 bp, probe
gcatctctccaagaatctcctcaga

SEQ ID NO: 22873 - DNA, 25 bp, probe
agcatctctccaagaatctcctcag

SEQ ID NO: 22874 - DNA, 25 bp, probe
cttatttcaacatcctcaatcctgt

SEQ ID NO: 22875 - DNA, 25 bp, probe
tttagtagcagcctaatcttcttca

SEQ ID NO: 22876 - DNA, 25 bp, probe
ggtcatgtatcctatgaaccttctt

SEQ ID NO: 22877 - DNA, 25 bp, probe
gttgctttgtggtcatgtatcctat

SEQ ID NO: 22878 - DNA, 25 bp, probe
tttcagaaatcagaagcaatcccag

SEQ ID NO: 22879 - DNA, 25 bp, probe
cctcatcatcagggagtgaaattat

SEQ ID NO: 22880 - DNA, 25 bp, probe
tggtcatgtatcctatgaaccttct

SEQ ID NO: 22881 - DNA, 25 bp, probe
gtggtcatgtatcctatgaaccttc

SEQ ID NO: 22882 - DNA, 25 bp, probe
gatgccttccttgtcagagttatgc

SEQ ID NO: 22883 - DNA, 25 bp, probe
ttgctttgtggtcatgtatcctatg

SEQ ID NO: 22884 - DNA, 25 bp, probe
cctcaatcctgttatgggtgtatga

SEQ ID NO: 22885 - DNA, 25 bp, probe
tttcaaatgtgactcagactgatct

SEQ ID NO: 22886 - DNA, 25 bp, probe
aactgaggcatctaaggactatgta

SEQ ID NO: 22887 - DNA, 25 bp, probe
tcttcagttcaatgttcaccataga

SEQ ID NO: 22888 - DNA, 25 bp, probe
ttcttcagttcaatgttcaccatag

SEQ ID NO: 22889 - DNA, 25 bp, probe
cttcagttcaatgttcaccatagat

SEQ ID NO: 22890 - DNA, 25 bp, probe
actgaggcatctaaggactatgtag

SEQ ID NO: 22891 - DNA, 25 bp, probe
ttcagttcaatgttcaccatagatt

SEQ ID NO: 22892 - DNA, 25 bp, probe
tgaggcatctaaggactatgtagtt

SEQ ID NO: 22893 - DNA, 25 bp, probe
ctgaggcatctaaggactatgtagt

SEQ ID NO: 22894 - DNA, 25 bp, probe
tagtttcttcagttcaatgttcacc

SEQ ID NO: 22895 - DNA, 25 bp, probe
gtttcttcagttcaatgttcaccat

SEQ ID NO: 22896 - DNA, 25 bp, probe
agtttcttcagttcaatgttcacca

SEQ ID NO: 22897 - DNA, 25 bp, probe
tgaaactgaggcatctaaggactat

SEQ ID NO: 22898 - DNA, 25 bp, probe
gaaactgaggcatctaaggactatg

SEQ ID NO: 22899 - DNA, 25 bp, probe
tgtagtttcttcagttcaatgttca

SEQ ID NO: 22900 - DNA, 25 bp, probe
tcagttcaatgttcaccatagattg

SEQ ID NO: 22901 - DNA, 25 bp, probe
gtagtttcttcagttcaatgttcac

SEQ ID NO: 22902 - DNA, 25 bp, probe
tttcttcagttcaatgttcaccata

SEQ ID NO: 22903 - DNA, 25 bp, probe
ctgaaactgaggcatctaaggacta

SEQ ID NO: 22904 - DNA, 25 bp, probe
aaactgaggcatctaaggactatgt

SEQ ID NO: 22905 - DNA, 25 bp, probe
gttcaccatagattgacatttcaga

SEQ ID NO: 22906 - DNA, 25 bp, probe
ggcatctaaggactatgtagtttct

SEQ ID NO: 22907 - DNA, 25 bp, probe
aggcatctaaggactatgtagtttc

SEQ ID NO: 22908 - DNA, 25 bp, probe
gaggcatctaaggactatgtagttt

SEQ ID NO: 22909 - DNA, 25 bp, probe
ctagaaccttgttgcctgtgtctat

SEQ ID NO: 22910 - DNA, 25 bp, probe
tgttcaccatagattgacatttcag

SEQ ID NO: 22911 - DNA, 25 bp, probe
aggactatgtagtttcttcagttca

SEQ ID NO: 22912 - DNA, 25 bp, probe
attggtacaaatccgctctgataaa

SEQ ID NO: 22913 - DNA, 25 bp, probe
tagaaccttgttgcctgtgtctatg

SEQ ID NO: 22914 - DNA, 25 bp, probe
atgtagtttcttcagttcaatgttc

SEQ ID NO: 22915 - DNA, 25 bp, probe
cttctgaaactgaggcatctaagga

SEQ ID NO: 22916 - DNA, 25 bp, probe
ttctgaaactgaggcatctaaggac

SEQ ID NO: 22917 - DNA, 25 bp, probe
cattggtacaaatccgctctgataa

SEQ ID NO: 22918 - DNA, 25 bp, probe
ttcaccatagattgacatttcagat

SEQ ID NO: 22919 - DNA, 25 bp, probe
ggactatgtagtttcttcagttcaa

SEQ ID NO: 22920 - DNA, 25 bp, probe
aaggactatgtagtttcttcagttc

SEQ ID NO: 22921 - DNA, 25 bp, probe
gcatctaaggactatgtagtttctt

SEQ ID NO: 22922 - DNA, 25 bp, probe
cactctcgttccattggtacaaatc

SEQ ID NO: 22923 - DNA, 25 bp, probe
tcaccatagattgacatttcagata

SEQ ID NO: 22924 - DNA, 25 bp, probe
ctatgtagtttcttcagttcaatgt

SEQ ID NO: 22925 - DNA, 25 bp, probe
tctgaaactgaggcatctaaggact

SEQ ID NO: 22926 - DNA, 25 bp, probe
ctaaggactatgtagtttcttcagt

SEQ ID NO: 22927 - DNA, 25 bp, probe
atcctgagcatctagaaccttgttg

SEQ ID NO: 22928 - DNA, 25 bp, probe
catcctgagcatctagaaccttgtt

SEQ ID NO: 22929 - DNA, 25 bp, probe
tatagttaaattgttcaagtagccc

SEQ ID NO: 22930 - DNA, 25 bp, probe
tcaaggagcaatgtcagtatatagt

SEQ ID NO: 22931 - DNA, 25 bp, probe
ggaactcaccaacattattcatagt

SEQ ID NO: 22932 - DNA, 25 bp, probe
acataattctggcaatgagagtatt

SEQ ID NO: 22933 - DNA, 25 bp, probe
aacataattctggcaatgagagtat

SEQ ID NO: 22934 - DNA, 25 bp, probe
acaaccttgatgataaccagtggaa

SEQ ID NO: 22935 - DNA, 25 bp, probe
aggagcaatgtcagtatatagtaga

SEQ ID NO: 22936 - DNA, 25 bp, probe
atcaaggagcaatgtcagtatatag

SEQ ID NO: 22937 - DNA, 25 bp, probe
gatcaaggagcaatgtcagtatata

SEQ ID NO: 22938 - DNA, 25 bp, probe
caaggagcaatgtcagtatatagta

SEQ ID NO: 22939 - DNA, 25 bp, probe
tggaactcaccaacattattcatag

SEQ ID NO: 22940 - DNA, 25 bp, probe
ggagcaatgtcagtatatagtagaa

SEQ ID NO: 22941 - DNA, 25 bp, probe
aaggagcaatgtcagtatatagtag

SEQ ID NO: 22942 - DNA, 25 bp, probe
aaccttgatgataaccagtggaaat

SEQ ID NO: 22943 - DNA, 25 bp, probe
tgatgataaccagtggaaatgtaac

SEQ ID NO: 22944 - DNA, 25 bp, probe
atggaactcaccaacattattcata

SEQ ID NO: 22945 - DNA, 25 bp, probe
aatggaactcaccaacattattcat

SEQ ID NO: 22946 - DNA, 25 bp, probe
ccttgatgataaccagtggaaatgt

SEQ ID NO: 22947 - DNA, 25 bp, probe
accttgatgataaccagtggaaatg

SEQ ID NO: 22948 - DNA, 25 bp, probe
cttgatgataaccagtggaaatgta

SEQ ID NO: 22949 - DNA, 25 bp, probe
caaccttgatgataaccagtggaaa

SEQ ID NO: 22950 - DNA, 25 bp, probe
ttgatgataaccagtggaaatgtaa

SEQ ID NO: 22951 - DNA, 25 bp, probe
aaacataattctggcaatgagagta

SEQ ID NO: 22952 - DNA, 25 bp, probe
gtcacatatttgtttagttctggga

SEQ ID NO: 22953 - DNA, 25 bp, probe
agtcacatatttgtttagttctggg

SEQ ID NO: 22954 - DNA, 25 bp, probe
gatgataaccagtggaaatgtaact

SEQ ID NO: 22955 - DNA, 25 bp, probe
cacaaccttgatgataaccagtgga

SEQ ID NO: 22956 - DNA, 25 bp, probe
gcctattataaatccctgtatcgtg

SEQ ID NO: 22957 - DNA, 25 bp, probe
agcctattataaatccctgtatcgt

SEQ ID NO: 22958 - DNA, 25 bp, probe
tcacatatttgtttagttctgggaa

SEQ ID NO: 22959 - DNA, 25 bp, probe
gtggaaatgtaactaactgaaatga

SEQ ID NO: 22960 - DNA, 25 bp, probe
catgcacaaccttgatgataaccag

SEQ ID NO: 22961 - DNA, 25 bp, probe
tataaatccctgtatcgtggacctt

SEQ ID NO: 22962 - DNA, 25 bp, probe
cctattataaatccctgtatcgtgg

SEQ ID NO: 22963 - DNA, 25 bp, probe
atgcacaaccttgatgataaccagt

SEQ ID NO: 22964 - DNA, 25 bp, probe
ataaccagtggaaatgtaactaact

SEQ ID NO: 22965 - DNA, 25 bp, probe
tgataaccagtggaaatgtaactaa

SEQ ID NO: 22966 - DNA, 25 bp, probe
tattcaatgatcaaggagcaatgtc

SEQ ID NO: 22967 - DNA, 25 bp, probe
ataaatccctgtatcgtggaccttt

SEQ ID NO: 22968 - DNA, 25 bp, probe
ccctgggattctgaatataacatat

SEQ ID NO: 22969 - DNA, 25 bp, probe
tgttatagcttaaatggaactcacc

SEQ ID NO: 22970 - DNA, 25 bp, probe
atttgtttagttctgggaaattgtt

SEQ ID NO: 22971 - DNA, 25 bp, probe
agtggaaatgtaactaactgaaatg

SEQ ID NO: 22972 - DNA, 25 bp, probe
gataaccagtggaaatgtaactaac

SEQ ID NO: 22973 - DNA, 25 bp, probe
atgataaccagtggaaatgtaacta

SEQ ID NO: 22974 - DNA, 25 bp, probe
attatctataacctactgtctcgcc

SEQ ID NO: 22975 - DNA, 25 bp, probe
ttatctataacctactgtctcgccg

SEQ ID NO: 22976 - DNA, 25 bp, probe
cattatctataacctactgtctcgc

SEQ ID NO: 22977 - DNA, 25 bp, probe
tctctagtgaacagatgtcaagaac

SEQ ID NO: 22978 - DNA, 25 bp, probe
ctctctagtgaacagatgtcaagaa

SEQ ID NO: 22979 - DNA, 25 bp, probe
tctagtgaacagatgtcaagaacaa

SEQ ID NO: 22980 - DNA, 25 bp, probe
ctctagtgaacagatgtcaagaaca

SEQ ID NO: 22981 - DNA, 25 bp, probe
ccattatctataacctactgtctcg

SEQ ID NO: 22982 - DNA, 25 bp, probe
cctctctagtgaacagatgtcaaga

SEQ ID NO: 22983 - DNA, 25 bp, probe
tcatcagtgtcctctactacctcat

SEQ ID NO: 22984 - DNA, 25 bp, probe
ttggtcttagtgtttgctatctgtt

SEQ ID NO: 22985 - DNA, 25 bp, probe
ttgtcttggtcttagtgtttgctat

SEQ ID NO: 22986 - DNA, 25 bp, probe
catcagtgtcctctactacctcatg

SEQ ID NO: 22987 - DNA, 25 bp, probe
tcttggtcttagtgtttgctatctg

SEQ ID NO: 22988 - DNA, 25 bp, probe
gtcttggtcttagtgtttgctatct

SEQ ID NO: 22989 - DNA, 25 bp, probe
ctgtttgtcttggtcttagtgtttg

SEQ ID NO: 22990 - DNA, 25 bp, probe
gcactcagactaaagaaagacaaat

SEQ ID NO: 22991 - DNA, 25 bp, probe
tttgtcttggtcttagtgtttgcta

SEQ ID NO: 22992 - DNA, 25 bp, probe
tactacctcatggcactcagactaa

SEQ ID NO: 22993 - DNA, 25 bp, probe
cttggtcttagtgtttgctatctgt

SEQ ID NO: 22994 - DNA, 25 bp, probe
tgtcttggtcttagtgtttgctatc

SEQ ID NO: 22995 - DNA, 25 bp, probe
gtcatcagtgtcctctactacctca

SEQ ID NO: 22996 - DNA, 25 bp, probe
tgtcatcagtgtcctctactacctc

SEQ ID NO: 22997 - DNA, 25 bp, probe
tggtcttagtgtttgctatctgttg

SEQ ID NO: 22998 - DNA, 25 bp, probe
ggcactcagactaaagaaagacaaa

SEQ ID NO: 22999 - DNA, 25 bp, probe
atgtggtgtcaggtgtcttcttcta

SEQ ID NO: 23000 - DNA, 25 bp, probe
ctactacctcatggcactcagacta

SEQ ID NO: 23001 - DNA, 25 bp, probe
gtcttagtgtttgctatctgttggg

SEQ ID NO: 23002 - DNA, 25 bp, probe
ggtcttagtgtttgctatctgttgg

SEQ ID NO: 23003 - DNA, 25 bp, probe
ctgtcatcagtgtcctctactacct

SEQ ID NO: 23004 - DNA, 25 bp, probe
tatctataacctactgtctcgccgc

SEQ ID NO: 23005 - DNA, 25 bp, probe
gtttgtcttggtcttagtgtttgct

SEQ ID NO: 23006 - DNA, 25 bp, probe
gctgtttgtcttggtcttagtgttt

SEQ ID NO: 23007 - DNA, 25 bp, probe
atggcactcagactaaagaaagaca

SEQ ID NO: 23008 - DNA, 25 bp, probe
gtgaacagatgtcaagaacaaacta

SEQ ID NO: 23009 - DNA, 25 bp, probe
tagtgaacagatgtcaagaacaaac

SEQ ID NO: 23010 - DNA, 25 bp, probe
agtgaacagatgtcaagaacaaact

SEQ ID NO: 23011 - DNA, 25 bp, probe
atcagtgtcctctactacctcatgg

SEQ ID NO: 23012 - DNA, 25 bp, probe
tgtttgtcttggtcttagtgtttgc

SEQ ID NO: 23013 - DNA, 25 bp, probe
gatgctgtttgtcttggtcttagtg

SEQ ID NO: 23014 - DNA, 25 bp, probe
cactcagactaaagaaagacaaatc

SEQ ID NO: 23015 - DNA, 25 bp, probe
tggcactcagactaaagaaagacaa

SEQ ID NO: 23016 - DNA, 25 bp, probe
gatgtcaagaacaaactatcaaagc

SEQ ID NO: 23017 - DNA, 25 bp, probe
gttccacattgaccgactcttcttc

SEQ ID NO: 23018 - DNA, 25 bp, probe
tcatcatcttattcacctcaacctc

SEQ ID NO: 23019 - DNA, 25 bp, probe
ttcatcatcttattcacctcaacct

SEQ ID NO: 23020 - DNA, 25 bp, probe
atcttattcacctcaacctcgctat

SEQ ID NO: 23021 - DNA, 25 bp, probe
catcatcttattcacctcaacctcg

SEQ ID NO: 23022 - DNA, 25 bp, probe
tcttattcacctcaacctcgctatg

SEQ ID NO: 23023 - DNA, 25 bp, probe
catcttattcacctcaacctcgcta

SEQ ID NO: 23024 - DNA, 25 bp, probe
agtagtacagaacttgccatctaat

SEQ ID NO: 23025 - DNA, 25 bp, probe
gtagtacagaacttgccatctaatt

SEQ ID NO: 23026 - DNA, 25 bp, probe
atcatcttattcacctcaacctcgc

SEQ ID NO: 23027 - DNA, 25 bp, probe
ctgtttcttactctgtcattaccca

SEQ ID NO: 23028 - DNA, 25 bp, probe
actgtttcttactctgtcattaccc

SEQ ID NO: 23029 - DNA, 25 bp, probe
tttcatcatcttattcacctcaacc

SEQ ID NO: 23030 - DNA, 25 bp, probe
cttattcacctcaacctcgctatgg

SEQ ID NO: 23031 - DNA, 25 bp, probe
tatctttgtggtcatctactgggtt

SEQ ID NO: 23032 - DNA, 25 bp, probe
agtgagtatctttgtggtcatctac

SEQ ID NO: 23033 - DNA, 25 bp, probe
acagaacttgccatctaatttaact

SEQ ID NO: 23034 - DNA, 25 bp, probe
gtatctttgtggtcatctactgggt

SEQ ID NO: 23035 - DNA, 25 bp, probe
aggataatgctgctttcaagtacat

SEQ ID NO: 23036 - DNA, 25 bp, probe
ctagtgagtatctttgtggtcatct

SEQ ID NO: 23037 - DNA, 25 bp, probe
cctagtgagtatctttgtggtcatc

SEQ ID NO: 23038 - DNA, 25 bp, probe
ggtcatctactgggttgatttcatc

SEQ ID NO: 23039 - DNA, 25 bp, probe
aaggataatgctgctttcaagtaca

SEQ ID NO: 23040 - DNA, 25 bp, probe
ataaggataatgctgctttcaagta

SEQ ID NO: 23041 - DNA, 25 bp, probe
tataaggataatgctgctttcaagt

SEQ ID NO: 23042 - DNA, 25 bp, probe
tcctagtgagtatctttgtggtcat

SEQ ID NO: 23043 - DNA, 25 bp, probe
ccatcctgctcctagtgagtatctt

SEQ ID NO: 23044 - DNA, 25 bp, probe
taaggataatgctgctttcaagtac

SEQ ID NO: 23045 - DNA, 25 bp, probe
tgtttcttactctgtcattacccag

SEQ ID NO: 23046 - DNA, 25 bp, probe
ggataatgctgctttcaagtacatg

SEQ ID NO: 23047 - DNA, 25 bp, probe
tcatcttattcacctcaacctcgct

SEQ ID NO: 23048 - DNA, 25 bp, probe
tagtgagtatctttgtggtcatcta

SEQ ID NO: 23049 - DNA, 25 bp, probe
gactgtttcttactctgtcattacc

SEQ ID NO: 23050 - DNA, 25 bp, probe
aagtagtacagaacttgccatctaa

SEQ ID NO: 23051 - DNA, 25 bp, probe
ttaagtagtacagaacttgccatct

SEQ ID NO: 23052 - DNA, 25 bp, probe
tggtcatctactgggttgatttcat

SEQ ID NO: 23053 - DNA, 25 bp, probe
ctcctagtgagtatctttgtggtca

SEQ ID NO: 23054 - DNA, 25 bp, probe
gataatgctgctttcaagtacatgc

SEQ ID NO: 23055 - DNA, 25 bp, probe
atcctgctcctagtgagtatctttg

SEQ ID NO: 23056 - DNA, 25 bp, probe
catcctgctcctagtgagtatcttt

SEQ ID NO: 23057 - DNA, 25 bp, probe
atctttgtggtcatctactgggttg

SEQ ID NO: 23058 - DNA, 25 bp, probe
taagtagtacagaacttgccatcta

SEQ ID NO: 23059 - DNA, 25 bp, probe
cagaacttgccatctaatttaactt

SEQ ID NO: 23060 - DNA, 25 bp, probe
ttgtggtcatctactgggttgattt

SEQ ID NO: 23061 - DNA, 25 bp, probe
tttgtggtcatctactgggttgatt

SEQ ID NO: 23062 - DNA, 25 bp, probe
taagtggactatggtcgtcttaatg

SEQ ID NO: 23063 - DNA, 25 bp, probe
accttacacttgaagtcattctgaa

SEQ ID NO: 23064 - DNA, 25 bp, probe
taccttacacttgaagtcattctga

SEQ ID NO: 23065 - DNA, 25 bp, probe
gaaggtgttggctgtgagtctaata

SEQ ID NO: 23066 - DNA, 25 bp, probe
ataagtggactatggtcgtcttaat

SEQ ID NO: 23067 - DNA, 25 bp, probe
cataagtggactatggtcgtcttaa

SEQ ID NO: 23068 - DNA, 25 bp, probe
gactatggtcgtcttaatggtgaag

SEQ ID NO: 23069 - DNA, 25 bp, probe
tcataagtggactatggtcgtctta

SEQ ID NO: 23070 - DNA, 25 bp, probe
aaggtgttggctgtgagtctaatac

SEQ ID NO: 23071 - DNA, 25 bp, probe
ataccttacacttgaagtcattctg

SEQ ID NO: 23072 - DNA, 25 bp, probe
gaagaataccttacacttgaagtca

SEQ ID NO: 23073 - DNA, 25 bp, probe
agaagaataccttacacttgaagtc

SEQ ID NO: 23074 - DNA, 25 bp, probe
ggactatggtcgtcttaatggtgaa

SEQ ID NO: 23075 - DNA, 25 bp, probe
aagtggactatggtcgtcttaatgg

SEQ ID NO: 23076 - DNA, 25 bp, probe
gtcataagtggactatggtcgtctt

SEQ ID NO: 23077 - DNA, 25 bp, probe
aataccttacacttgaagtcattct

SEQ ID NO: 23078 - DNA, 25 bp, probe
agaataccttacacttgaagtcatt

SEQ ID NO: 23079 - DNA, 25 bp, probe
aagaataccttacacttgaagtcat

SEQ ID NO: 23080 - DNA, 25 bp, probe
tagtgtcataagtggactatggtcg

SEQ ID NO: 23081 - DNA, 25 bp, probe
atttctgtttaattcttgccaacca

SEQ ID NO: 23082 - DNA, 25 bp, probe
gtagaagaataccttacacttgaag

SEQ ID NO: 23083 - DNA, 25 bp, probe
ctatggtcgtcttaatggtgaagag

SEQ ID NO: 23084 - DNA, 25 bp, probe
actatggtcgtcttaatggtgaaga

SEQ ID NO: 23085 - DNA, 25 bp, probe
tttctgtttaattcttgccaaccag

SEQ ID NO: 23086 - DNA, 25 bp, probe
tgtcataagtggactatggtcgtct

SEQ ID NO: 23087 - DNA, 25 bp, probe
gtgtcataagtggactatggtcgtc

SEQ ID NO: 23088 - DNA, 25 bp, probe
aatttctgtttaattcttgccaacc

SEQ ID NO: 23089 - DNA, 25 bp, probe
gcatgtagaagaataccttacactt

SEQ ID NO: 23090 - DNA, 25 bp, probe
gtggactatggtcgtcttaatggtg

SEQ ID NO: 23091 - DNA, 25 bp, probe
ccttacacttgaagtcattctgaaa

SEQ ID NO: 23092 - DNA, 25 bp, probe
tagaagaataccttacacttgaagt

SEQ ID NO: 23093 - DNA, 25 bp, probe
tatggtcgtcttaatggtgaagagg

SEQ ID NO: 23094 - DNA, 25 bp, probe
tggactatggtcgtcttaatggtga

SEQ ID NO: 23095 - DNA, 25 bp, probe
agtggactatggtcgtcttaatggt

SEQ ID NO: 23096 - DNA, 25 bp, probe
gaataccttacacttgaagtcattc

SEQ ID NO: 23097 - DNA, 25 bp, probe
agtgtcataagtggactatggtcgt

SEQ ID NO: 23098 - DNA, 25 bp, probe
aaatactgtgactcaaagaggtcca

SEQ ID NO: 23099 - DNA, 25 bp, probe
tgcatgtagaagaataccttacact

SEQ ID NO: 23100 - DNA, 25 bp, probe
agtgaaagatgcaatgtgtgaattt

SEQ ID NO: 23101 - DNA, 25 bp, probe
aagtgaaagatgcaatgtgtgaatt

SEQ ID NO: 23102 - DNA, 25 bp, probe
aatactgtgactcaaagaggtccag

SEQ ID NO: 23103 - DNA, 25 bp, probe
tgtagaagaataccttacacttgaa

SEQ ID NO: 23104 - DNA, 25 bp, probe
ttctgtttaattcttgccaaccagg

SEQ ID NO: 23105 - DNA, 25 bp, probe
cttaatggtgaagagggatcatatt

SEQ ID NO: 23106 - DNA, 25 bp, probe
atccaagtatgtctcctgtgtagta

SEQ ID NO: 23107 - DNA, 25 bp, probe
tatccaagtatgtctcctgtgtagt

SEQ ID NO: 23108 - DNA, 25 bp, probe
ttatccaagtatgtctcctgtgtag

SEQ ID NO: 23109 - DNA, 25 bp, probe
cattatccaagtatgtctcctgtgt

SEQ ID NO: 23110 - DNA, 25 bp, probe
attatccaagtatgtctcctgtgta

SEQ ID NO: 23111 - DNA, 25 bp, probe
tccaagtatgtctcctgtgtagtac

SEQ ID NO: 23112 - DNA, 25 bp, probe
ttcactgtgacattatccaagtatg

SEQ ID NO: 23113 - DNA, 25 bp, probe
ccatatcaagctacagaatgtcagt

SEQ ID NO: 23114 - DNA, 25 bp, probe
tgcttcaatttgtccttcagtagtt

SEQ ID NO: 23115 - DNA, 25 bp, probe
cttcaatttgtccttcagtagttgg

SEQ ID NO: 23116 - DNA, 25 bp, probe
gcttcaatttgtccttcagtagttg

SEQ ID NO: 23117 - DNA, 25 bp, probe
gtgcttcaatttgtccttcagtagt

SEQ ID NO: 23118 - DNA, 25 bp, probe
tgtgcttcaatttgtccttcagtag

SEQ ID NO: 23119 - DNA, 25 bp, probe
gtgtgcttcaatttgtccttcagta

SEQ ID NO: 23120 - DNA, 25 bp, probe
catatcaagctacagaatgtcagta

SEQ ID NO: 23121 - DNA, 25 bp, probe
acattatccaagtatgtctcctgtg

SEQ ID NO: 23122 - DNA, 25 bp, probe
tttgggaatgactttaagtgtaagg

SEQ ID NO: 23123 - DNA, 25 bp, probe
attcttccaacacgacccatatcaa

SEQ ID NO: 23124 - DNA, 25 bp, probe
ttcaatttgtccttcagtagttggc

SEQ ID NO: 23125 - DNA, 25 bp, probe
tatgtctcctgtgtagtacttatgc

SEQ ID NO: 23126 - DNA, 25 bp, probe
ttatctctgtgcattcttccaacac

SEQ ID NO: 23127 - DNA, 25 bp, probe
atgtctcctgtgtagtacttatgct

SEQ ID NO: 23128 - DNA, 25 bp, probe
ttgggaatgactttaagtgtaaggc

SEQ ID NO: 23129 - DNA, 25 bp, probe
atatcaagctacagaatgtcagtaa

SEQ ID NO: 23130 - DNA, 25 bp, probe
gtgtagtacttatgctgctctcaag

SEQ ID NO: 23131 - DNA, 25 bp, probe
tcactgtgacattatccaagtatgt

SEQ ID NO: 23132 - DNA, 25 bp, probe
tgtgtagtacttatgctgctctcaa

SEQ ID NO: 23133 - DNA, 25 bp, probe
tgtctcctgtgtagtacttatgctg

SEQ ID NO: 23134 - DNA, 25 bp, probe
ctttatctctgtgcattcttccaac

SEQ ID NO: 23135 - DNA, 25 bp, probe
tctttatctctgtgcattcttccaa

SEQ ID NO: 23136 - DNA, 25 bp, probe
atctttatctctgtgcattcttcca

SEQ ID NO: 23137 - DNA, 25 bp, probe
ccaatctttatctctgtgcattctt

SEQ ID NO: 23138 - DNA, 25 bp, probe
cattcttccaacacgacccatatca

SEQ ID NO: 23139 - DNA, 25 bp, probe
aatctttatctctgtgcattcttcc

SEQ ID NO: 23140 - DNA, 25 bp, probe
ctgtgtagtacttatgctgctctca

SEQ ID NO: 23141 - DNA, 25 bp, probe
ttcttccaacacgacccatatcaag

SEQ ID NO: 23142 - DNA, 25 bp, probe
tgggaatgactttaagtgtaaggca

SEQ ID NO: 23143 - DNA, 25 bp, probe
tgtagtacttatgctgctctcaagg

SEQ ID NO: 23144 - DNA, 25 bp, probe
gtatgtctcctgtgtagtacttatg

SEQ ID NO: 23145 - DNA, 25 bp, probe
tttcactgtgacattatccaagtat

SEQ ID NO: 23146 - DNA, 25 bp, probe
gccaatctttatctctgtgcattct

SEQ ID NO: 23147 - DNA, 25 bp, probe
cccatatcaagctacagaatgtcag

SEQ ID NO: 23148 - DNA, 25 bp, probe
gggaatgactttaagtgtaaggcac

SEQ ID NO: 23149 - DNA, 25 bp, probe
gacccatatcaagctacagaatgtc

SEQ ID NO: 23150 - DNA, 25 bp, probe
cgtaatgttcatctccttgtcctat

SEQ ID NO: 23151 - DNA, 25 bp, probe
caatgtggtatatggtcttactgcc

SEQ ID NO: 23152 - DNA, 25 bp, probe
ccttaacactacacttctccttatc

SEQ ID NO: 23153 - DNA, 25 bp, probe
gtaatgttcatctccttgtcctatt

SEQ ID NO: 23154 - DNA, 25 bp, probe
cttaacactacacttctccttatct

SEQ ID NO: 23155 - DNA, 25 bp, probe
ctattgtgtccaccaggatgtaatg

SEQ ID NO: 23156 - DNA, 25 bp, probe
tattgtgtccaccaggatgtaatga

SEQ ID NO: 23157 - DNA, 25 bp, probe
acacttctccttatctttattggct

SEQ ID NO: 23158 - DNA, 25 bp, probe
ccaatgtggtatatggtcttactgc

SEQ ID NO: 23159 - DNA, 25 bp, probe
gcagtgctcaacaatacagtaacag

SEQ ID NO: 23160 - DNA, 25 bp, probe
cccttaacactacacttctccttat

SEQ ID NO: 23161 - DNA, 25 bp, probe
acccttaacactacacttctcctta

SEQ ID NO: 23162 - DNA, 25 bp, probe
tcctgtcatcaatcccatcatctat

SEQ ID NO: 23163 - DNA, 25 bp, probe
ttaacactacacttctccttatctt

SEQ ID NO: 23164 - DNA, 25 bp, probe
acgtaatgttcatctccttgtccta

SEQ ID NO: 23165 - DNA, 25 bp, probe
aatgtggtatatggtcttactgcca

SEQ ID NO: 23166 - DNA, 25 bp, probe
acttctccttatctttattggcttg

SEQ ID NO: 23167 - DNA, 25 bp, probe
cacttctccttatctttattggctt

SEQ ID NO: 23168 - DNA, 25 bp, probe
cctgtcatcaatcccatcatctatg

SEQ ID NO: 23169 - DNA, 25 bp, probe
tctggctggaatagtaaactaaagt

SEQ ID NO: 23170 - DNA, 25 bp, probe
caacaatacagtaacagcccagatt

SEQ ID NO: 23171 - DNA, 25 bp, probe
tctctggctggaatagtaaactaaa

SEQ ID NO: 23172 - DNA, 25 bp, probe
cttctccttatctttattggcttga

SEQ ID NO: 23173 - DNA, 25 bp, probe
ctcctgtcatcaatcccatcatcta

SEQ ID NO: 23174 - DNA, 25 bp, probe
cctattgtgtccaccaggatgtaat

SEQ ID NO: 23175 - DNA, 25 bp, probe
attgtgtccaccaggatgtaatgaa

SEQ ID NO: 23176 - DNA, 25 bp, probe
ctctggctggaatagtaaactaaag

SEQ ID NO: 23177 - DNA, 25 bp, probe
tacacttctccttatctttattggc

SEQ ID NO: 23178 - DNA, 25 bp, probe
atgtatgtagtggcaatgtttggaa

SEQ ID NO: 23179 - DNA, 25 bp, probe
ttctctggctggaatagtaaactaa

SEQ ID NO: 23180 - DNA, 25 bp, probe
tttctctggctggaatagtaaacta

SEQ ID NO: 23181 - DNA, 25 bp, probe
gacccttaacactacacttctcctt

SEQ ID NO: 23182 - DNA, 25 bp, probe
tgtatgtagtggcaatgtttggaaa

SEQ ID NO: 23183 - DNA, 25 bp, probe
ttctggtttgattcccgagagatta

SEQ ID NO: 23184 - DNA, 25 bp, probe
gtcttacccagatgttctttattca

SEQ ID NO: 23185 - DNA, 25 bp, probe
tgtcttacccagatgttctttattc

SEQ ID NO: 23186 - DNA, 25 bp, probe
tcaacaatacagtaacagcccagat

SEQ ID NO: 23187 - DNA, 25 bp, probe
tactcgccttctatgtgccacttat

SEQ ID NO: 23188 - DNA, 25 bp, probe
cctgtcttacccagatgttctttat

SEQ ID NO: 23189 - DNA, 25 bp, probe
gtatgtagtggcaatgtttggaaac

SEQ ID NO: 23190 - DNA, 25 bp, probe
ttctccttatctttattggcttgat

SEQ ID NO: 23191 - DNA, 25 bp, probe
tctggtttgattcccgagagattag

SEQ ID NO: 23192 - DNA, 25 bp, probe
tatgtagtggcaatgtttggaaact

SEQ ID NO: 23193 - DNA, 25 bp, probe
atgttctttattcatgccctctcag

SEQ ID NO: 23194 - DNA, 25 bp, probe
gatattgttctggaggaagtaggag

SEQ ID NO: 23195 - DNA, 25 bp, probe
atggatattgttctggaggaagtag

SEQ ID NO: 23196 - DNA, 25 bp, probe
tgattatggatattgttctggagga

SEQ ID NO: 23197 - DNA, 25 bp, probe
ttatggatattgttctggaggaagt

SEQ ID NO: 23198 - DNA, 25 bp, probe
ggatattgttctggaggaagtagga

SEQ ID NO: 23199 - DNA, 25 bp, probe
tggatattgttctggaggaagtagg

SEQ ID NO: 23200 - DNA, 25 bp, probe
atgattatggatattgttctggagg

SEQ ID NO: 23201 - DNA, 25 bp, probe
atattgttctggaggaagtaggagc

SEQ ID NO: 23202 - DNA, 25 bp, probe
tatggatattgttctggaggaagta

SEQ ID NO: 23203 - DNA, 25 bp, probe
attatctcagatcatggtcggattc

SEQ ID NO: 23204 - DNA, 25 bp, probe
cttattatctcagatcatggtcgga

SEQ ID NO: 23205 - DNA, 25 bp, probe
attatggatattgttctggaggaag

SEQ ID NO: 23206 - DNA, 25 bp, probe
gattatggatattgttctggaggaa

SEQ ID NO: 23207 - DNA, 25 bp, probe
tcttattatctcagatcatggtcgg

SEQ ID NO: 23208 - DNA, 25 bp, probe
tattatctcagatcatggtcggatt

SEQ ID NO: 23209 - DNA, 25 bp, probe
ttattatctcagatcatggtcggat

SEQ ID NO: 23210 - DNA, 25 bp, probe
cagaggtatgttacagtccacagat

SEQ ID NO: 23211 - DNA, 25 bp, probe
agtgtatataagactcagaatccgt

SEQ ID NO: 23212 - DNA, 25 bp, probe
gcagtgtatataagactcagaatcc

SEQ ID NO: 23213 - DNA, 25 bp, probe
ttatctcagatcatggtcggattcc

SEQ ID NO: 23214 - DNA, 25 bp, probe
cagtgtatataagactcagaatccg

SEQ ID NO: 23215 - DNA, 25 bp, probe
agaggtatgttacagtccacagatc

SEQ ID NO: 23216 - DNA, 25 bp, probe
gaacagcataaatagcacaaagaca

SEQ ID NO: 23217 - DNA, 25 bp, probe
acagcataaatagcacaaagacaaa

SEQ ID NO: 23218 - DNA, 25 bp, probe
aacagcataaatagcacaaagacaa

SEQ ID NO: 23219 - DNA, 25 bp, probe
ccgatttatgtggattgtcttcttt

SEQ ID NO: 23220 - DNA, 25 bp, probe
gtgtatataagactcagaatccgtc

SEQ ID NO: 23221 - DNA, 25 bp, probe
tattgttctggaggaagtaggagca

SEQ ID NO: 23222 - DNA, 25 bp, probe
agcacaaagacaaatgattatggat

SEQ ID NO: 23223 - DNA, 25 bp, probe
ggaacagcataaatagcacaaagac

SEQ ID NO: 23224 - DNA, 25 bp, probe
caatggagaagttaagaggcaaatt

SEQ ID NO: 23225 - DNA, 25 bp, probe
ttcctaagctggtcagatagttctc

SEQ ID NO: 23226 - DNA, 25 bp, probe
tggaacagcataaatagcacaaaga

SEQ ID NO: 23227 - DNA, 25 bp, probe
ctctaaaggaatcccacaaacaatg

SEQ ID NO: 23228 - DNA, 25 bp, probe
tctctaaaggaatcccacaaacaat

SEQ ID NO: 23229 - DNA, 25 bp, probe
tactctctaaaggaatcccacaaac

SEQ ID NO: 23230 - DNA, 25 bp, probe
tcagatagttctccgatttatgtgg

SEQ ID NO: 23231 - DNA, 25 bp, probe
ggtcagatagttctccgatttatgt

SEQ ID NO: 23232 - DNA, 25 bp, probe
tggtcagatagttctccgatttatg

SEQ ID NO: 23233 - DNA, 25 bp, probe
cctctaataagttggaacaatgcaa

SEQ ID NO: 23234 - DNA, 25 bp, probe
atgctcacaaatacatcaggtcttt

SEQ ID NO: 23235 - DNA, 25 bp, probe
ccacattcattacatattgtcttgt

SEQ ID NO: 23236 - DNA, 25 bp, probe
gggaatttctttcttctctaccact

SEQ ID NO: 23237 - DNA, 25 bp, probe
tatctcagatcatggtcggattcct

SEQ ID NO: 23238 - DNA, 25 bp, probe
cctgatggatggaaagaaatgtatt

SEQ ID NO: 23239 - DNA, 25 bp, probe
gcctgatggatggaaagaaatgtat

SEQ ID NO: 23240 - DNA, 25 bp, probe
gggcagaataggtagtatttaagca

SEQ ID NO: 23241 - DNA, 25 bp, probe
ggcagaataggtagtatttaagcaa

SEQ ID NO: 23242 - DNA, 25 bp, probe
cttattccagatgctgagagtgacc

SEQ ID NO: 23243 - DNA, 25 bp, probe
ccttattccagatgctgagagtgac

SEQ ID NO: 23244 - DNA, 25 bp, probe
tgcctgatggatggaaagaaatgta

SEQ ID NO: 23245 - DNA, 25 bp, probe
ctgatggatggaaagaaatgtattt

SEQ ID NO: 23246 - DNA, 25 bp, probe
ttattccagatgctgagagtgacca

SEQ ID NO: 23247 - DNA, 25 bp, probe
gttgcctgatggatggaaagaaatg

SEQ ID NO: 23248 - DNA, 25 bp, probe
ttgcctgatggatggaaagaaatgt

SEQ ID NO: 23249 - DNA, 25 bp, probe
tgttgcctgatggatggaaagaaat

SEQ ID NO: 23250 - DNA, 25 bp, probe
atgttgcctgatggatggaaagaaa

SEQ ID NO: 23251 - DNA, 25 bp, probe
gcagaataggtagtatttaagcaaa

SEQ ID NO: 23252 - DNA, 25 bp, probe
tattccagatgctgagagtgaccag

SEQ ID NO: 23253 - DNA, 25 bp, probe
tttctgactgagatgttgcctgatg

SEQ ID NO: 23254 - DNA, 25 bp, probe
ctgactgagatgttgcctgatggat

SEQ ID NO: 23255 - DNA, 25 bp, probe
gatgttgcctgatggatggaaagaa

SEQ ID NO: 23256 - DNA, 25 bp, probe
aaaatgaacgaaaacaggtgacttt

SEQ ID NO: 23257 - DNA, 25 bp, probe
aaatgaacgaaaacaggtgactttg

SEQ ID NO: 23258 - DNA, 25 bp, probe
ctgagatgttgcctgatggatggaa

SEQ ID NO: 23259 - DNA, 25 bp, probe
tgactgagatgttgcctgatggatg

SEQ ID NO: 23260 - DNA, 25 bp, probe
tccaagcaaatcatccccattaaaa

SEQ ID NO: 23261 - DNA, 25 bp, probe
ggggcagaataggtagtatttaagc

SEQ ID NO: 23262 - DNA, 25 bp, probe
gagatgttgcctgatggatggaaag

SEQ ID NO: 23263 - DNA, 25 bp, probe
ttctgactgagatgttgcctgatgg

SEQ ID NO: 23264 - DNA, 25 bp, probe
gtccaagcaaatcatccccattaaa

SEQ ID NO: 23265 - DNA, 25 bp, probe
agacccttattccagatgctgagag

SEQ ID NO: 23266 - DNA, 25 bp, probe
agatgttgcctgatggatggaaaga

SEQ ID NO: 23267 - DNA, 25 bp, probe
gctttgttgtgtttgatcagaattt

SEQ ID NO: 23268 - DNA, 25 bp, probe
gaacgaaaacaggtgactttggaaa

SEQ ID NO: 23269 - DNA, 25 bp, probe
ggctttgttgtgtttgatcagaatt

SEQ ID NO: 23270 - DNA, 25 bp, probe
cccttattccagatgctgagagtga

SEQ ID NO: 23271 - DNA, 25 bp, probe
gacccttattccagatgctgagagt

SEQ ID NO: 23272 - DNA, 25 bp, probe
cagacccttattccagatgctgaga

SEQ ID NO: 23273 - DNA, 25 bp, probe
aagtccaagcaaatcatccccatta

SEQ ID NO: 23274 - DNA, 25 bp, probe
taagtccaagcaaatcatccccatt

SEQ ID NO: 23275 - DNA, 25 bp, probe
aatgaacgaaaacaggtgactttgg

SEQ ID NO: 23276 - DNA, 25 bp, probe
agtccaagcaaatcatccccattaa

SEQ ID NO: 23277 - DNA, 25 bp, probe
ttaagtccaagcaaatcatccccat

SEQ ID NO: 23278 - DNA, 25 bp, probe
tgagatgttgcctgatggatggaaa

SEQ ID NO: 23279 - DNA, 25 bp, probe
gcttgtggctttgttgtgtttgatc

SEQ ID NO: 23280 - DNA, 25 bp, probe
ttttctgactgagatgttgcctgat

SEQ ID NO: 23281 - DNA, 25 bp, probe
tggctttgttgtgtttgatcagaat

SEQ ID NO: 23282 - DNA, 25 bp, probe
tcttcactacattattccacctact

SEQ ID NO: 23283 - DNA, 25 bp, probe
ttcttcactacattattccacctac

SEQ ID NO: 23284 - DNA, 25 bp, probe
cttcactacattattccacctactt

SEQ ID NO: 23285 - DNA, 25 bp, probe
acctggatctattatgttatgtgtc

SEQ ID NO: 23286 - DNA, 25 bp, probe
aagaacaggcaagattaattagtga

SEQ ID NO: 23287 - DNA, 25 bp, probe
gaacaggcaagattaattagtgatg

SEQ ID NO: 23288 - DNA, 25 bp, probe
cctggatctattatgttatgtgtct

SEQ ID NO: 23289 - DNA, 25 bp, probe
actttgaatgatgtgttgatttggt

SEQ ID NO: 23290 - DNA, 25 bp, probe
agaacaggcaagattaattagtgat

SEQ ID NO: 23291 - DNA, 25 bp, probe
taatatgctggtgccctttctttat

SEQ ID NO: 23292 - DNA, 25 bp, probe
tatcgctaaagaacaggcaagatta

SEQ ID NO: 23293 - DNA, 25 bp, probe
tgaatgatgtgttgatttggtttgg

SEQ ID NO: 23294 - DNA, 25 bp, probe
ttgaatgatgtgttgatttggtttg

SEQ ID NO: 23295 - DNA, 25 bp, probe
ctaatatgctggtgccctttcttta

SEQ ID NO: 23296 - DNA, 25 bp, probe
actgaagatgatgctgtttggtaaa

SEQ ID NO: 23297 - DNA, 25 bp, probe
ttatcgctaaagaacaggcaagatt

SEQ ID NO: 23298 - DNA, 25 bp, probe
ctttgaatgatgtgttgatttggtt

SEQ ID NO: 23299 - DNA, 25 bp, probe
acctactttgaatgatgtgttgatt

SEQ ID NO: 23300 - DNA, 25 bp, probe
atcgctaaagaacaggcaagattaa

SEQ ID NO: 23301 - DNA, 25 bp, probe
atttggtttggctacttgaactcta

SEQ ID NO: 23302 - DNA, 25 bp, probe
gtttggctacttgaactctacattt

SEQ ID NO: 23303 - DNA, 25 bp, probe
atgatgtgttgatttggtttggcta

SEQ ID NO: 23304 - DNA, 25 bp, probe
tttgaatgatgtgttgatttggttt

SEQ ID NO: 23305 - DNA, 25 bp, probe
aatatgctggtgccctttctttatc

SEQ ID NO: 23306 - DNA, 25 bp, probe
cactgaagatgatgctgtttggtaa

SEQ ID NO: 23307 - DNA, 25 bp, probe
ggtttggctacttgaactctacatt

SEQ ID NO: 23308 - DNA, 25 bp, probe
tgttgatttggtttggctacttgaa

SEQ ID NO: 23309 - DNA, 25 bp, probe
cttatcgctaaagaacaggcaagat

SEQ ID NO: 23310 - DNA, 25 bp, probe
atgtgttgatttggtttggctactt

SEQ ID NO: 23311 - DNA, 25 bp, probe
tttggtttggctacttgaactctac

SEQ ID NO: 23312 - DNA, 25 bp, probe
tactttgaatgatgtgttgatttgg

SEQ ID NO: 23313 - DNA, 25 bp, probe
cactacattattccacctactttga

SEQ ID NO: 23314 - DNA, 25 bp, probe
tcactacattattccacctactttg

SEQ ID NO: 23315 - DNA, 25 bp, probe
ttgatttggtttggctacttgaact

SEQ ID NO: 23316 - DNA, 25 bp, probe
gttgatttggtttggctacttgaac

SEQ ID NO: 23317 - DNA, 25 bp, probe
gatttggtttggctacttgaactct

SEQ ID NO: 23318 - DNA, 25 bp, probe
tttggctacttgaactctacattta

SEQ ID NO: 23319 - DNA, 25 bp, probe
gaatgatgtgttgatttggtttggc

SEQ ID NO: 23320 - DNA, 25 bp, probe
ttggctacttgaactctacatttaa

SEQ ID NO: 23321 - DNA, 25 bp, probe
cctactttgaatgatgtgttgattt

SEQ ID NO: 23322 - DNA, 25 bp, probe
tgtgtgatgatcttcattagttgga

SEQ ID NO: 23323 - DNA, 25 bp, probe
atgatcttcattagttggagtgtcc

SEQ ID NO: 23324 - DNA, 25 bp, probe
tgatgatcttcattagttggagtgt

SEQ ID NO: 23325 - DNA, 25 bp, probe
tgtgatgatcttcattagttggagt

SEQ ID NO: 23326 - DNA, 25 bp, probe
actaattcctcaattccttcttcgt

SEQ ID NO: 23327 - DNA, 25 bp, probe
agcaactactaattcctcaattcct

SEQ ID NO: 23328 - DNA, 25 bp, probe
acagcaatgtatctatcaacagaga

SEQ ID NO: 23329 - DNA, 25 bp, probe
gagcaactactaattcctcaattcc

SEQ ID NO: 23330 - DNA, 25 bp, probe
ttggataggtcagaggatcagtaac

SEQ ID NO: 23331 - DNA, 25 bp, probe
gttggataggtcagaggatcagtaa

SEQ ID NO: 23332 - DNA, 25 bp, probe
taattcctcaattccttcttcgttg

SEQ ID NO: 23333 - DNA, 25 bp, probe
acaggttagagcaactactaattcc

SEQ ID NO: 23334 - DNA, 25 bp, probe
ctaattcctcaattccttcttcgtt

SEQ ID NO: 23335 - DNA, 25 bp, probe
gcaactactaattcctcaattcctt

SEQ ID NO: 23336 - DNA, 25 bp, probe
ggttagagcaactactaattcctca

SEQ ID NO: 23337 - DNA, 25 bp, probe
acacaggttagagcaactactaatt

SEQ ID NO: 23338 - DNA, 25 bp, probe
ctacacaggttagagcaactactaa

SEQ ID NO: 23339 - DNA, 25 bp, probe
aacagcaatgtatctatcaacagag

SEQ ID NO: 23340 - DNA, 25 bp, probe
ggataggtcagaggatcagtaacag

SEQ ID NO: 23341 - DNA, 25 bp, probe
cacaggttagagcaactactaattc

SEQ ID NO: 23342 - DNA, 25 bp, probe
caggttagagcaactactaattcct

SEQ ID NO: 23343 - DNA, 25 bp, probe
aggttagagcaactactaattcctc

SEQ ID NO: 23344 - DNA, 25 bp, probe
gaggatcagtaacagcaatgtatct

SEQ ID NO: 23345 - DNA, 25 bp, probe
agaggatcagtaacagcaatgtatc

SEQ ID NO: 23346 - DNA, 25 bp, probe
agagcaactactaattcctcaattc

SEQ ID NO: 23347 - DNA, 25 bp, probe
tacacaggttagagcaactactaat

SEQ ID NO: 23348 - DNA, 25 bp, probe
cagaggatcagtaacagcaatgtat

SEQ ID NO: 23349 - DNA, 25 bp, probe
aattcctcaattccttcttcgttgg

SEQ ID NO: 23350 - DNA, 25 bp, probe
tactaattcctcaattccttcttcg

SEQ ID NO: 23351 - DNA, 25 bp, probe
cctacacaggttagagcaactacta

SEQ ID NO: 23352 - DNA, 25 bp, probe
aggatcagtaacagcaatgtatcta

SEQ ID NO: 23353 - DNA, 25 bp, probe
tggataggtcagaggatcagtaaca

SEQ ID NO: 23354 - DNA, 25 bp, probe
tcagaggatcagtaacagcaatgta

SEQ ID NO: 23355 - DNA, 25 bp, probe
gataggtcagaggatcagtaacagc

SEQ ID NO: 23356 - DNA, 25 bp, probe
agtaacagcaatgtatctatcaaca

SEQ ID NO: 23357 - DNA, 25 bp, probe
gttagagcaactactaattcctcaa

SEQ ID NO: 23358 - DNA, 25 bp, probe
gtaacagcaatgtatctatcaacag

SEQ ID NO: 23359 - DNA, 25 bp, probe
cagtaacagcaatgtatctatcaac

SEQ ID NO: 23360 - DNA, 25 bp, probe
taacagcaatgtatctatcaacaga

SEQ ID NO: 23361 - DNA, 25 bp, probe
tcagtaacagcaatgtatctatcaa

SEQ ID NO: 23362 - DNA, 25 bp, probe
ggatcagtaacagcaatgtatctat

SEQ ID NO: 23363 - DNA, 25 bp, probe
ataggtcagaggatcagtaacagca

SEQ ID NO: 23364 - DNA, 25 bp, probe
ggttggataggtcagaggatcagta

SEQ ID NO: 23365 - DNA, 25 bp, probe
atcagtaacagcaatgtatctatca

SEQ ID NO: 23366 - DNA, 25 bp, probe
ctcctacacaggttagagcaactac

SEQ ID NO: 23367 - DNA, 25 bp, probe
ttgtttgaagtgaaggatagcaatc

SEQ ID NO: 23368 - DNA, 25 bp, probe
gttgtttgaagtgaaggatagcaat

SEQ ID NO: 23369 - DNA, 25 bp, probe
aacttggttggataggtcagaggat

SEQ ID NO: 23370 - DNA, 25 bp, probe
ctatcctaccaagttcaccgtatct

SEQ ID NO: 23371 - DNA, 25 bp, probe
tctatcctaccaagttcaccgtatc

SEQ ID NO: 23372 - DNA, 25 bp, probe
tatcctaccaagttcaccgtatctg

SEQ ID NO: 23373 - DNA, 25 bp, probe
gtctatcctaccaagttcaccgtat

SEQ ID NO: 23374 - DNA, 25 bp, probe
cagaatcatcctcagagagttacaa

SEQ ID NO: 23375 - DNA, 25 bp, probe
gacagaatcatcctcagagagttac

SEQ ID NO: 23376 - DNA, 25 bp, probe
agacagaatcatcctcagagagtta

SEQ ID NO: 23377 - DNA, 25 bp, probe
tagcaagacagaatcatcctcagag

SEQ ID NO: 23378 - DNA, 25 bp, probe
gtagcaagacagaatcatcctcaga

SEQ ID NO: 23379 - DNA, 25 bp, probe
acagaatcatcctcagagagttaca

SEQ ID NO: 23380 - DNA, 25 bp, probe
aagacagaatcatcctcagagagtt

SEQ ID NO: 23381 - DNA, 25 bp, probe
atactggtagcaagacagaatcatc

SEQ ID NO: 23382 - DNA, 25 bp, probe
aatactggtagcaagacagaatcat

SEQ ID NO: 23383 - DNA, 25 bp, probe
ttgctgttggtgtgcttattataac

SEQ ID NO: 23384 - DNA, 25 bp, probe
gctgttggtgtgcttattataactc

SEQ ID NO: 23385 - DNA, 25 bp, probe
caagacagaatcatcctcagagagt

SEQ ID NO: 23386 - DNA, 25 bp, probe
tgctgttggtgtgcttattataact

SEQ ID NO: 23387 - DNA, 25 bp, probe
tgttggtgtgcttattataactcag

SEQ ID NO: 23388 - DNA, 25 bp, probe
ctgttggtgtgcttattataactca

SEQ ID NO: 23389 - DNA, 25 bp, probe
ggtagcaagacagaatcatcctcag

SEQ ID NO: 23390 - DNA, 25 bp, probe
tactggtagcaagacagaatcatcc

SEQ ID NO: 23391 - DNA, 25 bp, probe
gcctgtatttatgagatttgctgtt

SEQ ID NO: 23392 - DNA, 25 bp, probe
atttatgagatttgctgttggtgtg

SEQ ID NO: 23393 - DNA, 25 bp, probe
ctgcctgtatttatgagatttgctg

SEQ ID NO: 23394 - DNA, 25 bp, probe
gatttgctgttggtgtgcttattat

SEQ ID NO: 23395 - DNA, 25 bp, probe
tgttactcttctctctttcacttgt

SEQ ID NO: 23396 - DNA, 25 bp, probe
tgcctgtatttatgagatttgctgt

SEQ ID NO: 23397 - DNA, 25 bp, probe
tatttatgagatttgctgttggtgt

SEQ ID NO: 23398 - DNA, 25 bp, probe
tgtatttatgagatttgctgttggt

SEQ ID NO: 23399 - DNA, 25 bp, probe
ggaattatctgatgccctaaactgt

SEQ ID NO: 23400 - DNA, 25 bp, probe
cctgcctgtatttatgagatttgct

SEQ ID NO: 23401 - DNA, 25 bp, probe
cacagtggtagcatttatgatttca

SEQ ID NO: 23402 - DNA, 25 bp, probe
atcctaccaagttcaccgtatctgt

SEQ ID NO: 23403 - DNA, 25 bp, probe
gttactcttctctctttcacttgtg

SEQ ID NO: 23404 - DNA, 25 bp, probe
agatttgctgttggtgtgcttatta

SEQ ID NO: 23405 - DNA, 25 bp, probe
gtatttatgagatttgctgttggtg

SEQ ID NO: 23406 - DNA, 25 bp, probe
ggttaccatatagcattgattcatt

SEQ ID NO: 23407 - DNA, 25 bp, probe
ttactcttctctctttcacttgtgc

SEQ ID NO: 23408 - DNA, 25 bp, probe
ttgttactcttctctctttcacttg

SEQ ID NO: 23409 - DNA, 25 bp, probe
agcaagacagaatcatcctcagaga

SEQ ID NO: 23410 - DNA, 25 bp, probe
gatttcaatcctccatttcaagcag

SEQ ID NO: 23411 - DNA, 25 bp, probe
ctgtatttatgagatttgctgttgg

SEQ ID NO: 23412 - DNA, 25 bp, probe
cctgtatttatgagatttgctgttg

SEQ ID NO: 23413 - DNA, 25 bp, probe
gcaagacagaatcatcctcagagag

SEQ ID NO: 23414 - DNA, 25 bp, probe
aaggctagttcatcaaccattagtt

SEQ ID NO: 23415 - DNA, 25 bp, probe
aggaattagtaagtgctctcaactg

SEQ ID NO: 23416 - DNA, 25 bp, probe
gaggaattagtaagtgctctcaact

SEQ ID NO: 23417 - DNA, 25 bp, probe
ggaggaattagtaagtgctctcaac

SEQ ID NO: 23418 - DNA, 25 bp, probe
tggaggaattagtaagtgctctcaa

SEQ ID NO: 23419 - DNA, 25 bp, probe
ttgctgttggagtgcttattataac

SEQ ID NO: 23420 - DNA, 25 bp, probe
ctggaggaattagtaagtgctctca

SEQ ID NO: 23421 - DNA, 25 bp, probe
ggaattagtaagtgctctcaactgc

SEQ ID NO: 23422 - DNA, 25 bp, probe
attagtaagtgctctcaactgcgta

SEQ ID NO: 23423 - DNA, 25 bp, probe
tgctgttggagtgcttattataact

SEQ ID NO: 23424 - DNA, 25 bp, probe
aagtagaatcatcctcagagagtta

SEQ ID NO: 23425 - DNA, 25 bp, probe
gaattagtaagtgctctcaactgcg

SEQ ID NO: 23426 - DNA, 25 bp, probe
agtagaatcatcctcagagagttat

SEQ ID NO: 23427 - DNA, 25 bp, probe
ttagtaagtgctctcaactgcgtag

SEQ ID NO: 23428 - DNA, 25 bp, probe
gtagcaaagtagaatcatcctcaga

SEQ ID NO: 23429 - DNA, 25 bp, probe
agtagcaaagtagaatcatcctcag

SEQ ID NO: 23430 - DNA, 25 bp, probe
ttctacacaggtgtcaatgatgatg

SEQ ID NO: 23431 - DNA, 25 bp, probe
gttctacacaggtgtcaatgatgat

SEQ ID NO: 23432 - DNA, 25 bp, probe
tagcaaagtagaatcatcctcagag

SEQ ID NO: 23433 - DNA, 25 bp, probe
tgttattcttcatacctacccttgt

SEQ ID NO: 23434 - DNA, 25 bp, probe
aatttgctgttggagtgcttattat

SEQ ID NO: 23435 - DNA, 25 bp, probe
aattagtaagtgctctcaactgcgt

SEQ ID NO: 23436 - DNA, 25 bp, probe
tagtagcaaagtagaatcatcctca

SEQ ID NO: 23437 - DNA, 25 bp, probe
agcaaagtagaatcatcctcagaga

SEQ ID NO: 23438 - DNA, 25 bp, probe
ctgttattcttcatacctacccttg

SEQ ID NO: 23439 - DNA, 25 bp, probe
tctgttattcttcatacctaccctt

SEQ ID NO: 23440 - DNA, 25 bp, probe
ttctgttattcttcatacctaccct

SEQ ID NO: 23441 - DNA, 25 bp, probe
gtggctgtcaaattattgtaagtca

SEQ ID NO: 23442 - DNA, 25 bp, probe
caaattattgtaagtcaaggctggg

SEQ ID NO: 23443 - DNA, 25 bp, probe
ggtggctgtcaaattattgtaagtc

SEQ ID NO: 23444 - DNA, 25 bp, probe
tcaaattattgtaagtcaaggctgg

SEQ ID NO: 23445 - DNA, 25 bp, probe
aaattattgtaagtcaaggctgggt

SEQ ID NO: 23446 - DNA, 25 bp, probe
aggtggctgtcaaattattgtaagt

SEQ ID NO: 23447 - DNA, 25 bp, probe
gctggaggaattagtaagtgctctc

SEQ ID NO: 23448 - DNA, 25 bp, probe
ttcatggttaccgtatacagttgat

SEQ ID NO: 23449 - DNA, 25 bp, probe
gtaggtggctgtcaaattattgtaa

SEQ ID NO: 23450 - DNA, 25 bp, probe
aggctagttcatcaaccattagttt

SEQ ID NO: 23451 - DNA, 25 bp, probe
aaaggctagttcatcaaccattagt

SEQ ID NO: 23452 - DNA, 25 bp, probe
cacggtactagcatttgttatttca

SEQ ID NO: 23453 - DNA, 25 bp, probe
gtcacggtactagcatttgttattt

SEQ ID NO: 23454 - DNA, 25 bp, probe
tggctgtcaaattattgtaagtcaa

SEQ ID NO: 23455 - DNA, 25 bp, probe
tcacggtactagcatttgttatttc

SEQ ID NO: 23456 - DNA, 25 bp, probe
gttattcttcatacctacccttgtt

SEQ ID NO: 23457 - DNA, 25 bp, probe
taggtggctgtcaaattattgtaag

SEQ ID NO: 23458 - DNA, 25 bp, probe
aataatggctatcaagtggagatgt

SEQ ID NO: 23459 - DNA, 25 bp, probe
ataatggctatcaagtggagatgtg

SEQ ID NO: 23460 - DNA, 25 bp, probe
gaataatggctatcaagtggagatg

SEQ ID NO: 23461 - DNA, 25 bp, probe
taatgctgaggctattgctgaataa

SEQ ID NO: 23462 - DNA, 25 bp, probe
ttattacagttccttggatgaagca

SEQ ID NO: 23463 - DNA, 25 bp, probe
aggctattgctgaataatggctatc

SEQ ID NO: 23464 - DNA, 25 bp, probe
gaggctattgctgaataatggctat

SEQ ID NO: 23465 - DNA, 25 bp, probe
aatgctgaggctattgctgaataat

SEQ ID NO: 23466 - DNA, 25 bp, probe
ctgaataatggctatcaagtggaga

SEQ ID NO: 23467 - DNA, 25 bp, probe
gtaatgctgaggctattgctgaata

SEQ ID NO: 23468 - DNA, 25 bp, probe
attgctgaataatggctatcaagtg

SEQ ID NO: 23469 - DNA, 25 bp, probe
gctattgctgaataatggctatcaa

SEQ ID NO: 23470 - DNA, 25 bp, probe
tgaataatggctatcaagtggagat

SEQ ID NO: 23471 - DNA, 25 bp, probe
tattacagttccttggatgaagcac

SEQ ID NO: 23472 - DNA, 25 bp, probe
gagaatccttgttcattgaagcatt

SEQ ID NO: 23473 - DNA, 25 bp, probe
ggctattgctgaataatggctatca

SEQ ID NO: 23474 - DNA, 25 bp, probe
tagagaatccttgttcattgaagca

SEQ ID NO: 23475 - DNA, 25 bp, probe
ctagagaatccttgttcattgaagc

SEQ ID NO: 23476 - DNA, 25 bp, probe
atgctgaggctattgctgaataatg

SEQ ID NO: 23477 - DNA, 25 bp, probe
agagaatccttgttcattgaagcat

SEQ ID NO: 23478 - DNA, 25 bp, probe
ttgctgaataatggctatcaagtgg

SEQ ID NO: 23479 - DNA, 25 bp, probe
gctgaataatggctatcaagtggag

SEQ ID NO: 23480 - DNA, 25 bp, probe
tattgctgaataatggctatcaagt

SEQ ID NO: 23481 - DNA, 25 bp, probe
tgaggctattgctgaataatggcta

SEQ ID NO: 23482 - DNA, 25 bp, probe
actagagaatccttgttcattgaag

SEQ ID NO: 23483 - DNA, 25 bp, probe
ggcagagttactcgtgtactaatag

SEQ ID NO: 23484 - DNA, 25 bp, probe
gcagagttactcgtgtactaataga

SEQ ID NO: 23485 - DNA, 25 bp, probe
tgctgaataatggctatcaagtgga

SEQ ID NO: 23486 - DNA, 25 bp, probe
aggcagagttactcgtgtactaata

SEQ ID NO: 23487 - DNA, 25 bp, probe
taggcagagttactcgtgtactaat

SEQ ID NO: 23488 - DNA, 25 bp, probe
ctattgctgaataatggctatcaag

SEQ ID NO: 23489 - DNA, 25 bp, probe
taatggctatcaagtggagatgtgc

SEQ ID NO: 23490 - DNA, 25 bp, probe
attacagttccttggatgaagcact

SEQ ID NO: 23491 - DNA, 25 bp, probe
gtaggcagagttactcgtgtactaa

SEQ ID NO: 23492 - DNA, 25 bp, probe
atggattatgttcctctgtgtgcta

SEQ ID NO: 23493 - DNA, 25 bp, probe
ttacagttccttggatgaagcactt

SEQ ID NO: 23494 - DNA, 25 bp, probe
ccaggatggacatcttgtgtaataa

SEQ ID NO: 23495 - DNA, 25 bp, probe
gaaattcatttgtgtggtcagagat

SEQ ID NO: 23496 - DNA, 25 bp, probe
atctttggaaattcatttgtgtggt

SEQ ID NO: 23497 - DNA, 25 bp, probe
tctttggaaattcatttgtgtggtc

SEQ ID NO: 23498 - DNA, 25 bp, probe
catctttggaaattcatttgtgtgg

SEQ ID NO: 23499 - DNA, 25 bp, probe
tggattatgttcctctgtgtgctaa

SEQ ID NO: 23500 - DNA, 25 bp, probe
tcattcaatatgctctaaacgacga

SEQ ID NO: 23501 - DNA, 25 bp, probe
gtgtcattcaatatgctctaaacga

SEQ ID NO: 23502 - DNA, 25 bp, probe
ttcatcttcctcaacctggtgatta

SEQ ID NO: 23503 - DNA, 25 bp, probe
atcttcctcaacctggtgattactg

SEQ ID NO: 23504 - DNA, 25 bp, probe
catcttcctcaacctggtgattact

SEQ ID NO: 23505 - DNA, 25 bp, probe
tcatcttcctcaacctggtgattac

SEQ ID NO: 23506 - DNA, 25 bp, probe
agaacatcttcaccaccatcttcac

SEQ ID NO: 23507 - DNA, 25 bp, probe
cagaacatcttcaccaccatcttca

SEQ ID NO: 23508 - DNA, 25 bp, probe
cttcatcttcctcaacctggtgatt

SEQ ID NO: 23509 - DNA, 25 bp, probe
gtacttcatcttcctcaacctggtg

SEQ ID NO: 23510 - DNA, 25 bp, probe
ggtacatcattcccatcctcataat

SEQ ID NO: 23511 - DNA, 25 bp, probe
cttcctcaacctggtgattactgtc

SEQ ID NO: 23512 - DNA, 25 bp, probe
tacttcatcttcctcaacctggtga

SEQ ID NO: 23513 - DNA, 25 bp, probe
cccatcctcataatttacatcatca

SEQ ID NO: 23514 - DNA, 25 bp, probe
tcccatcctcataatttacatcatc

SEQ ID NO: 23515 - DNA, 25 bp, probe
ccagaacatcttcaccaccatcttc

SEQ ID NO: 23516 - DNA, 25 bp, probe
cttccagaacatcttcaccaccatc

SEQ ID NO: 23517 - DNA, 25 bp, probe
tcttcctcaacctggtgattactgt

SEQ ID NO: 23518 - DNA, 25 bp, probe
atcatcatccagtacttcatcttcc

SEQ ID NO: 23519 - DNA, 25 bp, probe
gtacatcattcccatcctcataatt

SEQ ID NO: 23520 - DNA, 25 bp, probe
catcatccagtacttcatcttcctc

SEQ ID NO: 23521 - DNA, 25 bp, probe
acatcatcatccagtacttcatctt

SEQ ID NO: 23522 - DNA, 25 bp, probe
gaacatcttcaccaccatcttcacc

SEQ ID NO: 23523 - DNA, 25 bp, probe
atcatccagtacttcatcttcctca

SEQ ID NO: 23524 - DNA, 25 bp, probe
tcatcatccagtacttcatcttcct

SEQ ID NO: 23525 - DNA, 25 bp, probe
catccagtacttcatcttcctcaac

SEQ ID NO: 23526 - DNA, 25 bp, probe
tcatccagtacttcatcttcctcaa

SEQ ID NO: 23527 - DNA, 25 bp, probe
catcatcatccagtacttcatcttc

SEQ ID NO: 23528 - DNA, 25 bp, probe
ttcccatcctcataatttacatcat

SEQ ID NO: 23529 - DNA, 25 bp, probe
attcccatcctcataatttacatca

SEQ ID NO: 23530 - DNA, 25 bp, probe
tcattcccatcctcataatttacat

SEQ ID NO: 23531 - DNA, 25 bp, probe
atcattcccatcctcataatttaca

SEQ ID NO: 23532 - DNA, 25 bp, probe
acatcattcccatcctcataattta

SEQ ID NO: 23533 - DNA, 25 bp, probe
tacatcattcccatcctcataattt

SEQ ID NO: 23534 - DNA, 25 bp, probe
tccagaacatcttcaccaccatctt

SEQ ID NO: 23535 - DNA, 25 bp, probe
ttccagaacatcttcaccaccatct

SEQ ID NO: 23536 - DNA, 25 bp, probe
cattcccatcctcataatttacatc

SEQ ID NO: 23537 - DNA, 25 bp, probe
catcattcccatcctcataatttac

SEQ ID NO: 23538 - DNA, 25 bp, probe
tacatcatcatccagtacttcatct

SEQ ID NO: 23539 - DNA, 25 bp, probe
acttcatcttcctcaacctggtgat

SEQ ID NO: 23540 - DNA, 25 bp, probe
tcctcataatttacatcatcatcca

SEQ ID NO: 23541 - DNA, 25 bp, probe
cctcataatttacatcatcatccag

SEQ ID NO: 23542 - DNA, 25 bp, probe
atccagtacttcatcttcctcaacc

SEQ ID NO: 23543 - DNA, 25 bp, probe
ttacatcatcatccagtacttcatc

SEQ ID NO: 23544 - DNA, 25 bp, probe
gattactgtcctggtggatagcttc

SEQ ID NO: 23545 - DNA, 25 bp, probe
tggtgattactgtcctggtggatag

SEQ ID NO: 23546 - DNA, 25 bp, probe
cttccatatcactcgctccttctac

SEQ ID NO: 23547 - DNA, 25 bp, probe
tatgacatgaccagccaagagaatt

SEQ ID NO: 23548 - DNA, 25 bp, probe
gtatgacatgaccagccaagagaat

SEQ ID NO: 23549 - DNA, 25 bp, probe
atatcactcgctccttctacctcac

SEQ ID NO: 23550 - DNA, 25 bp, probe
catatcactcgctccttctacctca

SEQ ID NO: 23551 - DNA, 25 bp, probe
ccttccatatcactcgctccttcta

SEQ ID NO: 23552 - DNA, 25 bp, probe
ttccatatcactcgctccttctacc

SEQ ID NO: 23553 - DNA, 25 bp, probe
ctacggcatagttctgacattgtct

SEQ ID NO: 23554 - DNA, 25 bp, probe
ccatatcactcgctccttctacctc

SEQ ID NO: 23555 - DNA, 25 bp, probe
tacggcatagttctgacattgtctg

SEQ ID NO: 23556 - DNA, 25 bp, probe
cttctacctcaccatctgctttctg

SEQ ID NO: 23557 - DNA, 25 bp, probe
aacccagtcctgtactttctttcaa

SEQ ID NO: 23558 - DNA, 25 bp, probe
atagttctgacattgtctggctttc

SEQ ID NO: 23559 - DNA, 25 bp, probe
tccatatcactcgctccttctacct

SEQ ID NO: 23560 - DNA, 25 bp, probe
catagttctgacattgtctggcttt

SEQ ID NO: 23561 - DNA, 25 bp, probe
acccagtcctgtactttctttcaag

SEQ ID NO: 23562 - DNA, 25 bp, probe
tcaacccagtcctgtactttctttc

SEQ ID NO: 23563 - DNA, 25 bp, probe
ctcaacccagtcctgtactttcttt

SEQ ID NO: 23564 - DNA, 25 bp, probe
cctacggcatagttctgacattgtc

SEQ ID NO: 23565 - DNA, 25 bp, probe
ttctgacattgtctggctttctttc

SEQ ID NO: 23566 - DNA, 25 bp, probe
atgacatgaccagccaagagaattt

SEQ ID NO: 23567 - DNA, 25 bp, probe
gcatagttctgacattgtctggctt

SEQ ID NO: 23568 - DNA, 25 bp, probe
caacccagtcctgtactttctttca

SEQ ID NO: 23569 - DNA, 25 bp, probe
gttctgacattgtctggctttcttt

SEQ ID NO: 23570 - DNA, 25 bp, probe
tagttctgacattgtctggctttct

SEQ ID NO: 23571 - DNA, 25 bp, probe
gctttctttccctccttggtcattt

SEQ ID NO: 23572 - DNA, 25 bp, probe
aaatagagtcaggctcctccagaaa

SEQ ID NO: 23573 - DNA, 25 bp, probe
ctttctttccctccttggtcatttt

SEQ ID NO: 23574 - DNA, 25 bp, probe
tttctttccctccttggtcattttg

SEQ ID NO: 23575 - DNA, 25 bp, probe
ccttctacctcaccatctgctttct

SEQ ID NO: 23576 - DNA, 25 bp, probe
tccttctacctcaccatctgctttc

SEQ ID NO: 23577 - DNA, 25 bp, probe
ctccttctacctcaccatctgcttt

SEQ ID NO: 23578 - DNA, 25 bp, probe
ttggtgtgctattcactgatggtca

SEQ ID NO: 23579 - DNA, 25 bp, probe
ctcaccatctgctttctgctttctc

SEQ ID NO: 23580 - DNA, 25 bp, probe
agttctgacattgtctggctttctt

SEQ ID NO: 23581 - DNA, 25 bp, probe
ccagtcctgtactttctttcaaggg

SEQ ID NO: 23582 - DNA, 25 bp, probe
cccagtcctgtactttctttcaagg

SEQ ID NO: 23583 - DNA, 25 bp, probe
cttggtcattttggtgtgctattca

SEQ ID NO: 23584 - DNA, 25 bp, probe
tatcactcgctccttctacctcacc

SEQ ID NO: 23585 - DNA, 25 bp, probe
tttggtgtgctattcactgatggtc

SEQ ID NO: 23586 - DNA, 25 bp, probe
aatagagtcaggctcctccagaaac

SEQ ID NO: 23587 - DNA, 25 bp, probe
tacctcaccatctgctttctgcttt

SEQ ID NO: 23588 - DNA, 25 bp, probe
cattttggtgtgctattcactgatg

SEQ ID NO: 23589 - DNA, 25 bp, probe
attgtctggctttctttccctcctt

SEQ ID NO: 23590 - DNA, 25 bp, probe
ggcataatcattccagttaccgtat

SEQ ID NO: 23591 - DNA, 25 bp, probe
catagaggctacagaaggagaagag

SEQ ID NO: 23592 - DNA, 25 bp, probe
gcataatcattccagttaccgtata

SEQ ID NO: 23593 - DNA, 25 bp, probe
atagaggctacagaaggagaagaga

SEQ ID NO: 23594 - DNA, 25 bp, probe
tactactcagtcatagaggctacag

SEQ ID NO: 23595 - DNA, 25 bp, probe
tcatagaggctacagaaggagaaga

SEQ ID NO: 23596 - DNA, 25 bp, probe
gtcatagaggctacagaaggagaag

SEQ ID NO: 23597 - DNA, 25 bp, probe
atactactcagtcatagaggctaca

SEQ ID NO: 23598 - DNA, 25 bp, probe
tactcagtcatagaggctacagaag

SEQ ID NO: 23599 - DNA, 25 bp, probe
ctactcagtcatagaggctacagaa

SEQ ID NO: 23600 - DNA, 25 bp, probe
agtcatagaggctacagaaggagaa

SEQ ID NO: 23601 - DNA, 25 bp, probe
tagaggctacagaaggagaagagag

SEQ ID NO: 23602 - DNA, 25 bp, probe
actactcagtcatagaggctacaga

SEQ ID NO: 23603 - DNA, 25 bp, probe
cagtcatagaggctacagaaggaga

SEQ ID NO: 23604 - DNA, 25 bp, probe
tcagtcatagaggctacagaaggag

SEQ ID NO: 23605 - DNA, 25 bp, probe
tatactactcagtcatagaggctac

SEQ ID NO: 23606 - DNA, 25 bp, probe
ctacagaaggagaagagagcctatg

SEQ ID NO: 23607 - DNA, 25 bp, probe
accaaagagataactgtcagcaatt

SEQ ID NO: 23608 - DNA, 25 bp, probe
ctcagtcatagaggctacagaagga

SEQ ID NO: 23609 - DNA, 25 bp, probe
ggtcatccagattctactaatagtt

SEQ ID NO: 23610 - DNA, 25 bp, probe
tggtcatccagattctactaatagt

SEQ ID NO: 23611 - DNA, 25 bp, probe
aataagaacctgtacgtccattatg

SEQ ID NO: 23612 - DNA, 25 bp, probe
caccaaagagataactgtcagcaat

SEQ ID NO: 23613 - DNA, 25 bp, probe
ttccagttaccgtatactactcagt

SEQ ID NO: 23614 - DNA, 25 bp, probe
actcagtcatagaggctacagaagg

SEQ ID NO: 23615 - DNA, 25 bp, probe
tccagttaccgtatactactcagtc

SEQ ID NO: 23616 - DNA, 25 bp, probe
cattccagttaccgtatactactca

SEQ ID NO: 23617 - DNA, 25 bp, probe
accgtatactactcagtcatagagg

SEQ ID NO: 23618 - DNA, 25 bp, probe
cagttaccgtatactactcagtcat

SEQ ID NO: 23619 - DNA, 25 bp, probe
attccagttaccgtatactactcag

SEQ ID NO: 23620 - DNA, 25 bp, probe
tcattccagttaccgtatactactc

SEQ ID NO: 23621 - DNA, 25 bp, probe
tggagaaagatttgacttacagttc

SEQ ID NO: 23622 - DNA, 25 bp, probe
cgtatactactcagtcatagaggct

SEQ ID NO: 23623 - DNA, 25 bp, probe
ccagttaccgtatactactcagtca

SEQ ID NO: 23624 - DNA, 25 bp, probe
tgttctacaccaaagagataactgt

SEQ ID NO: 23625 - DNA, 25 bp, probe
tctacaccaaagagataactgtcag

SEQ ID NO: 23626 - DNA, 25 bp, probe
ttctacaccaaagagataactgtca

SEQ ID NO: 23627 - DNA, 25 bp, probe
tctttacaaagtctaattcagcaca

SEQ ID NO: 23628 - DNA, 25 bp, probe
gttctacaccaaagagataactgtc

SEQ ID NO: 23629 - DNA, 25 bp, probe
tctactaatagtttgcttccttcct

SEQ ID NO: 23630 - DNA, 25 bp, probe
atcattccagttaccgtatactact

SEQ ID NO: 23631 - DNA, 25 bp, probe
atggagaaagatttgacttacagtt

SEQ ID NO: 23632 - DNA, 25 bp, probe
ccgtatactactcagtcatagaggc

SEQ ID NO: 23633 - DNA, 25 bp, probe
ctacaccaaagagataactgtcagc

SEQ ID NO: 23634 - DNA, 25 bp, probe
ctacatgcacaagaccattaagaag

SEQ ID NO: 23635 - DNA, 25 bp, probe
gcacaagaccattaagaaggaaatc

SEQ ID NO: 23636 - DNA, 25 bp, probe
acaagaccattaagaaggaaatcca

SEQ ID NO: 23637 - DNA, 25 bp, probe
cacaagaccattaagaaggaaatcc

SEQ ID NO: 23638 - DNA, 25 bp, probe
aagaccattaagaaggaaatccagg

SEQ ID NO: 23639 - DNA, 25 bp, probe
caagaccattaagaaggaaatccag

SEQ ID NO: 23640 - DNA, 25 bp, probe
ccattaagaaggaaatccaggacat

SEQ ID NO: 23641 - DNA, 25 bp, probe
tacatgcacaagaccattaagaagg

SEQ ID NO: 23642 - DNA, 25 bp, probe
gaccattaagaaggaaatccaggac

SEQ ID NO: 23643 - DNA, 25 bp, probe
agaccattaagaaggaaatccagga

SEQ ID NO: 23644 - DNA, 25 bp, probe
catgcacaagaccattaagaaggaa

SEQ ID NO: 23645 - DNA, 25 bp, probe
gctacatgcacaagaccattaagaa

SEQ ID NO: 23646 - DNA, 25 bp, probe
accattaagaaggaaatccaggaca

SEQ ID NO: 23647 - DNA, 25 bp, probe
gtttggtgaagacgacatcaatttc

SEQ ID NO: 23648 - DNA, 25 bp, probe
cattaagaaggaaatccaggacatg

SEQ ID NO: 23649 - DNA, 25 bp, probe
agtttggtgaagacgacatcaattt

SEQ ID NO: 23650 - DNA, 25 bp, probe
attaagaaggaaatccaggacatgc

SEQ ID NO: 23651 - DNA, 25 bp, probe
aagattgtcccttcctacgattctg

SEQ ID NO: 23652 - DNA, 25 bp, probe
gagtttggtgaagacgacatcaatt

SEQ ID NO: 23653 - DNA, 25 bp, probe
caagattgtcccttcctacgattct

SEQ ID NO: 23654 - DNA, 25 bp, probe
gaagacgacatcaatttcagtgagg

SEQ ID NO: 23655 - DNA, 25 bp, probe
acatgcacaagaccattaagaagga

SEQ ID NO: 23656 - DNA, 25 bp, probe
agacgacatcaatttcagtgaggat

SEQ ID NO: 23657 - DNA, 25 bp, probe
gaagatgacatggagtttggtgaag

SEQ ID NO: 23658 - DNA, 25 bp, probe
ttaagaaggaaatccaggacatgct

SEQ ID NO: 23659 - DNA, 25 bp, probe
aagacgacatcaatttcagtgagga

SEQ ID NO: 23660 - DNA, 25 bp, probe
aagatgacatggagtttggtgaaga

SEQ ID NO: 23661 - DNA, 25 bp, probe
aatccaggacatgctgaagaagttc

SEQ ID NO: 23662 - DNA, 25 bp, probe
caaagctgctaaagtgatcttcatc

SEQ ID NO: 23663 - DNA, 25 bp, probe
tgcacaagaccattaagaaggaaat

SEQ ID NO: 23664 - DNA, 25 bp, probe
cattgacttgggtgaagatgacatg

SEQ ID NO: 23665 - DNA, 25 bp, probe
tgaagatgacatggagtttggtgaa

SEQ ID NO: 23666 - DNA, 25 bp, probe
tcccttcctacgattctgctacttt

SEQ ID NO: 23667 - DNA, 25 bp, probe
attgtcccttcctacgattctgcta

SEQ ID NO: 23668 - DNA, 25 bp, probe
atgcacaagaccattaagaaggaaa

SEQ ID NO: 23669 - DNA, 25 bp, probe
caaagttgaggagaacagcatgaag

SEQ ID NO: 23670 - DNA, 25 bp, probe
ggctacatgcacaagaccattaaga

SEQ ID NO: 23671 - DNA, 25 bp, probe
agatgacatggagtttggtgaagac

SEQ ID NO: 23672 - DNA, 25 bp, probe
cataatcatctggcttttcttcctg

SEQ ID NO: 23673 - DNA, 25 bp, probe
ctacgattctgctacttttccttga

SEQ ID NO: 23674 - DNA, 25 bp, probe
ctatgtctatggctacatgcacaag

SEQ ID NO: 23675 - DNA, 25 bp, probe
atcattttctcctatgtgctatccc

SEQ ID NO: 23676 - DNA, 25 bp, probe
tcatcatcattttctcctatgtgct

SEQ ID NO: 23677 - DNA, 25 bp, probe
gtgaagatgacatggagtttggtga

SEQ ID NO: 23678 - DNA, 25 bp, probe
aagaccactctcagatacatcactg

SEQ ID NO: 23679 - DNA, 25 bp, probe
ctatatggcaatggcagttccttct

SEQ ID NO: 23680 - DNA, 25 bp, probe
aaagaccactctcagatacatcact

SEQ ID NO: 23681 - DNA, 25 bp, probe
caaagaccactctcagatacatcac

SEQ ID NO: 23682 - DNA, 25 bp, probe
gatttatttcagagtgagcatcagc

SEQ ID NO: 23683 - DNA, 25 bp, probe
gtaaatacgaccaaagaccactctc

SEQ ID NO: 23684 - DNA, 25 bp, probe
taaatacgaccaaagaccactctca

SEQ ID NO: 23685 - DNA, 25 bp, probe
ttagtaactgtcccttccttaacgg

SEQ ID NO: 23686 - DNA, 25 bp, probe
agatttatttcagagtgagcatcag

SEQ ID NO: 23687 - DNA, 25 bp, probe
cctatatggcaatggcagttccttc

SEQ ID NO: 23688 - DNA, 25 bp, probe
atcgggaggctgaattagtgttatt

SEQ ID NO: 23689 - DNA, 25 bp, probe
ccaaagaccactctcagatacatca

SEQ ID NO: 23690 - DNA, 25 bp, probe
accaaagaccactctcagatacatc

SEQ ID NO: 23691 - DNA, 25 bp, probe
gaccaaagaccactctcagatacat

SEQ ID NO: 23692 - DNA, 25 bp, probe
aagatttatttcagagtgagcatca

SEQ ID NO: 23693 - DNA, 25 bp, probe
tatatggcaatggcagttccttctg

SEQ ID NO: 23694 - DNA, 25 bp, probe
atttatttcagagtgagcatcagcg

SEQ ID NO: 23695 - DNA, 25 bp, probe
tgttattcagggttagtaactgtcc

SEQ ID NO: 23696 - DNA, 25 bp, probe
gaagatttatttcagagtgagcatc

SEQ ID NO: 23697 - DNA, 25 bp, probe
ggttagtaactgtcccttccttaac

SEQ ID NO: 23698 - DNA, 25 bp, probe
agtgttattcagggttagtaactgt

SEQ ID NO: 23699 - DNA, 25 bp, probe
gttagtaactgtcccttccttaacg

SEQ ID NO: 23700 - DNA, 25 bp, probe
gtgttattcagggttagtaactgtc

SEQ ID NO: 23701 - DNA, 25 bp, probe
tacgaccaaagaccactctcagata

SEQ ID NO: 23702 - DNA, 25 bp, probe
tgtggacttcaagaaatgtggactt

SEQ ID NO: 23703 - DNA, 25 bp, probe
tagtaactgtcccttccttaacggt

SEQ ID NO: 23704 - DNA, 25 bp, probe
gatcgggaggctgaattagtgttat

SEQ ID NO: 23705 - DNA, 25 bp, probe
cagatacatcactgattgctggctt

SEQ ID NO: 23706 - DNA, 25 bp, probe
aaatacgaccaaagaccactctcag

SEQ ID NO: 23707 - DNA, 25 bp, probe
agtgcaattatgaaggcgtaaatac

SEQ ID NO: 23708 - DNA, 25 bp, probe
cagtgcaattatgaaggcgtaaata

SEQ ID NO: 23709 - DNA, 25 bp, probe
tttatttcagagtgagcatcagcga

SEQ ID NO: 23710 - DNA, 25 bp, probe
ctgtggacttcaagaaatgtggact

SEQ ID NO: 23711 - DNA, 25 bp, probe
gatacatcactgattgctggctttg

SEQ ID NO: 23712 - DNA, 25 bp, probe
agatacatcactgattgctggcttt

SEQ ID NO: 23713 - DNA, 25 bp, probe
ttaacggtggtggtcctgatagttc

SEQ ID NO: 23714 - DNA, 25 bp, probe
cttaacggtggtggtcctgatagtt

SEQ ID NO: 23715 - DNA, 25 bp, probe
cttcctgtggacttcaagaaatgtg

SEQ ID NO: 23716 - DNA, 25 bp, probe
atacgaccaaagaccactctcagat

SEQ ID NO: 23717 - DNA, 25 bp, probe
tagtgttattcagggttagtaactg

SEQ ID NO: 23718 - DNA, 25 bp, probe
aatacgaccaaagaccactctcaga

SEQ ID NO: 23719 - DNA, 25 bp, probe
ccactctcagatacatcactgattg

SEQ ID NO: 23720 - DNA, 25 bp, probe
ctctcagatacatcactgattgctg

SEQ ID NO: 23721 - DNA, 25 bp, probe
accactctcagatacatcactgatt

SEQ ID NO: 23722 - DNA, 25 bp, probe
ccaatcttagagactctccctatcc

SEQ ID NO: 23723 - DNA, 25 bp, probe
cccaatcttagagactctccctatc

SEQ ID NO: 23724 - DNA, 25 bp, probe
caatcttagagactctccctatccg

SEQ ID NO: 23725 - DNA, 25 bp, probe
ggagtgagaatgaggacatttacta

SEQ ID NO: 23726 - DNA, 25 bp, probe
gaggagtgagaatgaggacatttac

SEQ ID NO: 23727 - DNA, 25 bp, probe
aggagtgagaatgaggacatttact

SEQ ID NO: 23728 - DNA, 25 bp, probe
gattctgctgtttagagaaattggg

SEQ ID NO: 23729 - DNA, 25 bp, probe
attctgctgtttagagaaattggga

SEQ ID NO: 23730 - DNA, 25 bp, probe
agattctgctgtttagagaaattgg

SEQ ID NO: 23731 - DNA, 25 bp, probe
cctgacatggaagaagacctctctc

SEQ ID NO: 23732 - DNA, 25 bp, probe
ggaggagtgagaatgaggacattta

SEQ ID NO: 23733 - DNA, 25 bp, probe
gcccaatcttagagactctccctat

SEQ ID NO: 23734 - DNA, 25 bp, probe
gagtgagaatgaggacatttactat

SEQ ID NO: 23735 - DNA, 25 bp, probe
caggaggagtgagaatgaggacatt

SEQ ID NO: 23736 - DNA, 25 bp, probe
atttgttcaaagaaaagagatgcca

SEQ ID NO: 23737 - DNA, 25 bp, probe
tttgttcaaagaaaagagatgccag

SEQ ID NO: 23738 - DNA, 25 bp, probe
ctgacatggaagaagacctctctcc

SEQ ID NO: 23739 - DNA, 25 bp, probe
aagattctgctgtttagagaaattg

SEQ ID NO: 23740 - DNA, 25 bp, probe
cagaggctgaagatcacctacagtc

SEQ ID NO: 23741 - DNA, 25 bp, probe
ccaggtattttaagattctgctgtt

SEQ ID NO: 23742 - DNA, 25 bp, probe
gccaggtattttaagattctgctgt

SEQ ID NO: 23743 - DNA, 25 bp, probe
tatttgttcaaagaaaagagatgcc

SEQ ID NO: 23744 - DNA, 25 bp, probe
aggaggagtgagaatgaggacattt

SEQ ID NO: 23745 - DNA, 25 bp, probe
ttgttcaaagaaaagagatgccagc

SEQ ID NO: 23746 - DNA, 25 bp, probe
ccaggaggagtgagaatgaggacat

SEQ ID NO: 23747 - DNA, 25 bp, probe
atcagcttcagatgtgctaccagat

SEQ ID NO: 23748 - DNA, 25 bp, probe
aatcttagagactctccctatccgg

SEQ ID NO: 23749 - DNA, 25 bp, probe
tgcccaatcttagagactctcccta

SEQ ID NO: 23750 - DNA, 25 bp, probe
agtgagaatgaggacatttactata

SEQ ID NO: 23751 - DNA, 25 bp, probe
caggtattttaagattctgctgttt

SEQ ID NO: 23752 - DNA, 25 bp, probe
cccaacagagactctctttatacaa

SEQ ID NO: 23753 - DNA, 25 bp, probe
aacagagactctctttatacaagca

SEQ ID NO: 23754 - DNA, 25 bp, probe
tttaagattctgctgtttagagaaa

SEQ ID NO: 23755 - DNA, 25 bp, probe
acagagactctctttatacaagcat

SEQ ID NO: 23756 - DNA, 25 bp, probe
caacagagactctctttatacaagc

SEQ ID NO: 23757 - DNA, 25 bp, probe
cagagactctctttatacaagcatg

SEQ ID NO: 23758 - DNA, 25 bp, probe
ccaacagagactctctttatacaag

SEQ ID NO: 23759 - DNA, 25 bp, probe
taagattctgctgtttagagaaatt

SEQ ID NO: 23760 - DNA, 25 bp, probe
ttaagattctgctgtttagagaaat

SEQ ID NO: 23761 - DNA, 25 bp, probe
catgcccaatcttagagactctccc

SEQ ID NO: 23762 - DNA, 25 bp, probe
agcttcagatgtgctaccagatcag

SEQ ID NO: 23763 - DNA, 25 bp, probe
tcagcttcagatgtgctaccagatc

SEQ ID NO: 23764 - DNA, 25 bp, probe
atgcccaatcttagagactctccct

SEQ ID NO: 23765 - DNA, 25 bp, probe
gtgagaatgaggacatttactataa

SEQ ID NO: 23766 - DNA, 25 bp, probe
taatatggagatcggaatgaaggtg

SEQ ID NO: 23767 - DNA, 25 bp, probe
ctaatatggagatcggaatgaaggt

SEQ ID NO: 23768 - DNA, 25 bp, probe
tctaatatggagatcggaatgaagg

SEQ ID NO: 23769 - DNA, 25 bp, probe
aatatggagatcggaatgaaggtgg

SEQ ID NO: 23770 - DNA, 25 bp, probe
ctctaatatggagatcggaatgaag

SEQ ID NO: 23771 - DNA, 25 bp, probe
atggatctctctacaatgtactaca

SEQ ID NO: 23772 - DNA, 25 bp, probe
ctacacacactagagcctctcatac

SEQ ID NO: 23773 - DNA, 25 bp, probe
gaagaagcctgaagacactaacaga

SEQ ID NO: 23774 - DNA, 25 bp, probe
agaagaagcctgaagacactaacag

SEQ ID NO: 23775 - DNA, 25 bp, probe
aagaagcctgaagacactaacagac

SEQ ID NO: 23776 - DNA, 25 bp, probe
cagaagaagcctgaagacactaaca

SEQ ID NO: 23777 - DNA, 25 bp, probe
cctttgctgacctctctaatatgga

SEQ ID NO: 23778 - DNA, 25 bp, probe
tctacacacactagagcctctcata

SEQ ID NO: 23779 - DNA, 25 bp, probe
ctttgctgacctctctaatatggag

SEQ ID NO: 23780 - DNA, 25 bp, probe
ctaaatagccgtagtgtaatgatcg

SEQ ID NO: 23781 - DNA, 25 bp, probe
agatttgtatgaatgaagatcctgc

SEQ ID NO: 23782 - DNA, 25 bp, probe
ccttatcacacactggatgccatat

SEQ ID NO: 23783 - DNA, 25 bp, probe
tacacacactagagcctctcatacc

SEQ ID NO: 23784 - DNA, 25 bp, probe
ttctacacacactagagcctctcat

SEQ ID NO: 23785 - DNA, 25 bp, probe
tatggatctctctacaatgtactac

SEQ ID NO: 23786 - DNA, 25 bp, probe
ccctttgctgacctctctaatatgg

SEQ ID NO: 23787 - DNA, 25 bp, probe
aaagcgatccaagtttgacatgatt

SEQ ID NO: 23788 - DNA, 25 bp, probe
taaatagccgtagtgtaatgatcga

SEQ ID NO: 23789 - DNA, 25 bp, probe
caagtttgacatgattgtgcctatc

SEQ ID NO: 23790 - DNA, 25 bp, probe
tctctacaatgtactacatgaaggc

SEQ ID NO: 23791 - DNA, 25 bp, probe
gatttgtatgaatgaagatcctgca

SEQ ID NO: 23792 - DNA, 25 bp, probe
tcatacctcgacatgcactaaatag

SEQ ID NO: 23793 - DNA, 25 bp, probe
ctcatacctcgacatgcactaaata

SEQ ID NO: 23794 - DNA, 25 bp, probe
gccctttgctgacctctctaatatg

SEQ ID NO: 23795 - DNA, 25 bp, probe
gcagaagaagcctgaagacactaac

SEQ ID NO: 23796 - DNA, 25 bp, probe
gatgaagacatgactgctcgaatca

SEQ ID NO: 23797 - DNA, 25 bp, probe
gtttgacatgattgtgcctatcctt

SEQ ID NO: 23798 - DNA, 25 bp, probe
aagtttgacatgattgtgcctatcc

SEQ ID NO: 23799 - DNA, 25 bp, probe
cctctctaatatggagatcggaatg

SEQ ID NO: 23800 - DNA, 25 bp, probe
acctctctaatatggagatcggaat

SEQ ID NO: 23801 - DNA, 25 bp, probe
ttgtatgaatgaagatcctgcaaag

SEQ ID NO: 23802 - DNA, 25 bp, probe
ttgctgacctctctaatatggagat

SEQ ID NO: 23803 - DNA, 25 bp, probe
aatagccgtagtgtaatgatcgatg

SEQ ID NO: 23804 - DNA, 25 bp, probe
ccaagtttgacatgattgtgcctat

SEQ ID NO: 23805 - DNA, 25 bp, probe
gacctctctaatatggagatcggaa

SEQ ID NO: 23806 - DNA, 25 bp, probe
gtaatgatcgatgaagacatgactg

SEQ ID NO: 23807 - DNA, 25 bp, probe
tgctgacctctctaatatggagatc

SEQ ID NO: 23808 - DNA, 25 bp, probe
ctctctacaatgtactacatgaagg

SEQ ID NO: 23809 - DNA, 25 bp, probe
tggatctctctacaatgtactacat

SEQ ID NO: 23810 - DNA, 25 bp, probe
tattaccgcatctatgtcacagcta

SEQ ID NO: 23811 - DNA, 25 bp, probe
ctaagggagttcattgatttggttg

SEQ ID NO: 23812 - DNA, 25 bp, probe
attaccgcatctatgtcacagctaa

SEQ ID NO: 23813 - DNA, 25 bp, probe
gggagttcattgatttggttgattt

SEQ ID NO: 23814 - DNA, 25 bp, probe
taagggagttcattgatttggttga

SEQ ID NO: 23815 - DNA, 25 bp, probe
actaagggagttcattgatttggtt

SEQ ID NO: 23816 - DNA, 25 bp, probe
tactaagggagttcattgatttggt

SEQ ID NO: 23817 - DNA, 25 bp, probe
cctattaccgcatctatgtcacagc

SEQ ID NO: 23818 - DNA, 25 bp, probe
gcctattaccgcatctatgtcacag

SEQ ID NO: 23819 - DNA, 25 bp, probe
ggttgatttgtattactcagaaggg

SEQ ID NO: 23820 - DNA, 25 bp, probe
ggagttcattgatttggttgatttg

SEQ ID NO: 23821 - DNA, 25 bp, probe
agggagttcattgatttggttgatt

SEQ ID NO: 23822 - DNA, 25 bp, probe
aagggagttcattgatttggttgat

SEQ ID NO: 23823 - DNA, 25 bp, probe
ctattaccgcatctatgtcacagct

SEQ ID NO: 23824 - DNA, 25 bp, probe
tggttgatttgtattactcagaagg

SEQ ID NO: 23825 - DNA, 25 bp, probe
gagttcattgatttggttgatttgt

SEQ ID NO: 23826 - DNA, 25 bp, probe
ttaccgcatctatgtcacagctaag

SEQ ID NO: 23827 - DNA, 25 bp, probe
atactaagggagttcattgatttgg

SEQ ID NO: 23828 - DNA, 25 bp, probe
agttcattgatttggttgatttgta

SEQ ID NO: 23829 - DNA, 25 bp, probe
ttggttgatttgtattactcagaag

SEQ ID NO: 23830 - DNA, 25 bp, probe
ttatccctgaaacctgcatagagtt

SEQ ID NO: 23831 - DNA, 25 bp, probe
atctatgtcacagctaaggagcatg

SEQ ID NO: 23832 - DNA, 25 bp, probe
catctatgtcacagctaaggagcat

SEQ ID NO: 23833 - DNA, 25 bp, probe
gttttctgtttccaaaggggttatc

SEQ ID NO: 23834 - DNA, 25 bp, probe
agttttctgtttccaaaggggttat

SEQ ID NO: 23835 - DNA, 25 bp, probe
tttggttgatttgtattactcagaa

SEQ ID NO: 23836 - DNA, 25 bp, probe
tgatttggttgatttgtattactca

SEQ ID NO: 23837 - DNA, 25 bp, probe
gttcattgatttggttgatttgtat

SEQ ID NO: 23838 - DNA, 25 bp, probe
gttatccctgaaacctgcatagagt

SEQ ID NO: 23839 - DNA, 25 bp, probe
ttttctgtttccaaaggggttatcc

SEQ ID NO: 23840 - DNA, 25 bp, probe
atttggttgatttgtattactcaga

SEQ ID NO: 23841 - DNA, 25 bp, probe
taccgcatctatgtcacagctaagg

SEQ ID NO: 23842 - DNA, 25 bp, probe
ttgatttgtattactcagaaggggt

SEQ ID NO: 23843 - DNA, 25 bp, probe
gttgatttgtattactcagaagggg

SEQ ID NO: 23844 - DNA, 25 bp, probe
tgatttgtattactcagaaggggta

SEQ ID NO: 23845 - DNA, 25 bp, probe
gatttggttgatttgtattactcag

SEQ ID NO: 23846 - DNA, 25 bp, probe
tatactaagggagttcattgatttg

SEQ ID NO: 23847 - DNA, 25 bp, probe
ttgatttggttgatttgtattactc

SEQ ID NO: 23848 - DNA, 25 bp, probe
ccacacatgtactaaggtgagtata

SEQ ID NO: 23849 - DNA, 25 bp, probe
tccacacatgtactaaggtgagtat

SEQ ID NO: 23850 - DNA, 25 bp, probe
atccacacatgtactaaggtgagta

SEQ ID NO: 23851 - DNA, 25 bp, probe
taatgctccagttttctgtttccaa

SEQ ID NO: 23852 - DNA, 25 bp, probe
ccatcagatccagatgttacaacgg

SEQ ID NO: 23853 - DNA, 25 bp, probe
ttcattgatttggttgatttgtatt

SEQ ID NO: 23854 - DNA, 25 bp, probe
gatatagactgctaaggtgagatgg

SEQ ID NO: 23855 - DNA, 25 bp, probe
tgatatagactgctaaggtgagatg

SEQ ID NO: 23856 - DNA, 25 bp, probe
ttgcttgatatagactgctaaggtg

SEQ ID NO: 23857 - DNA, 25 bp, probe
gcttgatatagactgctaaggtgag

SEQ ID NO: 23858 - DNA, 25 bp, probe
caagagaccacataatatctgcctt

SEQ ID NO: 23859 - DNA, 25 bp, probe
ttcaagagaccacataatatctgcc

SEQ ID NO: 23860 - DNA, 25 bp, probe
gttcaagagaccacataatatctgc

SEQ ID NO: 23861 - DNA, 25 bp, probe
cttgatatagactgctaaggtgaga

SEQ ID NO: 23862 - DNA, 25 bp, probe
tgcttgatatagactgctaaggtga

SEQ ID NO: 23863 - DNA, 25 bp, probe
ttgatatagactgctaaggtgagat

SEQ ID NO: 23864 - DNA, 25 bp, probe
tcaagagaccacataatatctgcct

SEQ ID NO: 23865 - DNA, 25 bp, probe
tacactacctaccatctccatcctc

SEQ ID NO: 23866 - DNA, 25 bp, probe
ctacactacctaccatctccatcct

SEQ ID NO: 23867 - DNA, 25 bp, probe
ttacagcaactcaattctaccactg

SEQ ID NO: 23868 - DNA, 25 bp, probe
gctggctgaattaggttagagtctt

SEQ ID NO: 23869 - DNA, 25 bp, probe
agagcctgatagtgtatatgttagg

SEQ ID NO: 23870 - DNA, 25 bp, probe
aagagcctgatagtgtatatgttag

SEQ ID NO: 23871 - DNA, 25 bp, probe
ggttcaagagaccacataatatctg

SEQ ID NO: 23872 - DNA, 25 bp, probe
ccctttgcttgatatagactgctaa

SEQ ID NO: 23873 - DNA, 25 bp, probe
ctgtccgtataagctcaatgagtat

SEQ ID NO: 23874 - DNA, 25 bp, probe
tgtccgtataagctcaatgagtatt

SEQ ID NO: 23875 - DNA, 25 bp, probe
aagagtgtttaaggatttagggtgg

SEQ ID NO: 23876 - DNA, 25 bp, probe
cctacactacctaccatctccatcc

SEQ ID NO: 23877 - DNA, 25 bp, probe
ccaggtatttacagcaactcaattc

SEQ ID NO: 23878 - DNA, 25 bp, probe
ctggctgaattaggttagagtcttt

SEQ ID NO: 23879 - DNA, 25 bp, probe
tttacagcaactcaattctaccact

SEQ ID NO: 23880 - DNA, 25 bp, probe
atttacagcaactcaattctaccac

SEQ ID NO: 23881 - DNA, 25 bp, probe
atatagactgctaaggtgagatggg

SEQ ID NO: 23882 - DNA, 25 bp, probe
tttgcttgatatagactgctaaggt

SEQ ID NO: 23883 - DNA, 25 bp, probe
caggtatttacagcaactcaattct

SEQ ID NO: 23884 - DNA, 25 bp, probe
ctgctggctgaattaggttagagtc

SEQ ID NO: 23885 - DNA, 25 bp, probe
gcttgatggttaagacaggtttatt

SEQ ID NO: 23886 - DNA, 25 bp, probe
ctttgcttgatatagactgctaagg

SEQ ID NO: 23887 - DNA, 25 bp, probe
cctttgcttgatatagactgctaag

SEQ ID NO: 23888 - DNA, 25 bp, probe
aagagaccacataatatctgccttt

SEQ ID NO: 23889 - DNA, 25 bp, probe
gatttagggtgggagagtttcttag

SEQ ID NO: 23890 - DNA, 25 bp, probe
ttaaggatttagggtgggagagttt

SEQ ID NO: 23891 - DNA, 25 bp, probe
tttaaggatttagggtgggagagtt

SEQ ID NO: 23892 - DNA, 25 bp, probe
atttagggtgggagagtttcttaga

SEQ ID NO: 23893 - DNA, 25 bp, probe
gagggaaaggaatgtgcttattaag

SEQ ID NO: 23894 - DNA, 25 bp, probe
ggagggaaaggaatgtgcttattaa

SEQ ID NO: 23895 - DNA, 25 bp, probe
cactacctaccatctccatcctctg

SEQ ID NO: 23896 - DNA, 25 bp, probe
taaggatttagggtgggagagtttc

SEQ ID NO: 23897 - DNA, 25 bp, probe
agggaaaggaatgtgcttattaagg

SEQ ID NO: 23898 - DNA, 25 bp, probe
agtcagtgtaaaccacttagatagt

SEQ ID NO: 23899 - DNA, 25 bp, probe
gtgtaaaccacttagatagtagttt

SEQ ID NO: 23900 - DNA, 25 bp, probe
aagtcagtgtaaaccacttagatag

SEQ ID NO: 23901 - DNA, 25 bp, probe
cagtgtaaaccacttagatagtagt

SEQ ID NO: 23902 - DNA, 25 bp, probe
gtcagtgtaaaccacttagatagta

SEQ ID NO: 23903 - DNA, 25 bp, probe
tcagtgtaaaccacttagatagtag

SEQ ID NO: 23904 - DNA, 25 bp, probe
agtgtaaaccacttagatagtagtt

SEQ ID NO: 23905 - DNA, 25 bp, probe
gtggatcatctgaggtcgggaattc

SEQ ID NO: 23906 - DNA, 25 bp, probe
tgtaaaccacttagatagtagtttt

SEQ ID NO: 23907 - DNA, 25 bp, probe
gatacaacaaggtcagagagaagag

SEQ ID NO: 23908 - DNA, 25 bp, probe
gagatacaacaaggtcagagagaag

SEQ ID NO: 23909 - DNA, 25 bp, probe
atacaacaaggtcagagagaagaga

SEQ ID NO: 23910 - DNA, 25 bp, probe
agatacaacaaggtcagagagaaga

SEQ ID NO: 23911 - DNA, 25 bp, probe
tacaacaaggtcagagagaagagag

SEQ ID NO: 23912 - DNA, 25 bp, probe
ggagatacaacaaggtcagagagaa

SEQ ID NO: 23913 - DNA, 25 bp, probe
caaggtcagagagaagagagagaag

SEQ ID NO: 23914 - DNA, 25 bp, probe
caacaaggtcagagagaagagagag

SEQ ID NO: 23915 - DNA, 25 bp, probe
acaaggtcagagagaagagagagaa

SEQ ID NO: 23916 - DNA, 25 bp, probe
aacaaggtcagagagaagagagaga

SEQ ID NO: 23917 - DNA, 25 bp, probe
aggagatacaacaaggtcagagaga

SEQ ID NO: 23918 - DNA, 25 bp, probe
caggagatacaacaaggtcagagag

SEQ ID NO: 23919 - DNA, 25 bp, probe
acaacaaggtcagagagaagagaga

SEQ ID NO: 23920 - DNA, 25 bp, probe
ccaggagatacaacaaggtcagaga

SEQ ID NO: 23921 - DNA, 25 bp, probe
gccaggagatacaacaaggtcagag

SEQ ID NO: 23922 - DNA, 25 bp, probe
gagccaggagatacaacaaggtcag

SEQ ID NO: 23923 - DNA, 25 bp, probe
cagtcagcctggagaggatatgatg

SEQ ID NO: 23924 - DNA, 25 bp, probe
agccaggagatacaacaaggtcaga

SEQ ID NO: 23925 - DNA, 25 bp, probe
cttggagccaggagatacaacaagg

SEQ ID NO: 23926 - DNA, 25 bp, probe
ccagtcagcctggagaggatatgat

SEQ ID NO: 23927 - DNA, 25 bp, probe
ctaatgaagaagtggtctgtgactc

SEQ ID NO: 23928 - DNA, 25 bp, probe
taatgaagaagtggtctgtgactca

SEQ ID NO: 23929 - DNA, 25 bp, probe
ttggtgaagaagctaatgaagaagt

SEQ ID NO: 23930 - DNA, 25 bp, probe
tgaagaagctaatgaagaagtggtc

SEQ ID NO: 23931 - DNA, 25 bp, probe
cttggtgaagaagctaatgaagaag

SEQ ID NO: 23932 - DNA, 25 bp, probe
gtgaagaagctaatgaagaagtggt

SEQ ID NO: 23933 - DNA, 25 bp, probe
tggtgaagaagctaatgaagaagtg

SEQ ID NO: 23934 - DNA, 25 bp, probe
gaagaagctaatgaagaagtggtct

SEQ ID NO: 23935 - DNA, 25 bp, probe
aagaagctaatgaagaagtggtctg

SEQ ID NO: 23936 - DNA, 25 bp, probe
ccttggtgaagaagctaatgaagaa

SEQ ID NO: 23937 - DNA, 25 bp, probe
gcactcaaacagaataaataggctt

SEQ ID NO: 23938 - DNA, 25 bp, probe
gatctccttggtgaagaagctaatg

SEQ ID NO: 23939 - DNA, 25 bp, probe
ggtgaagaagctaatgaagaagtgg

SEQ ID NO: 23940 - DNA, 25 bp, probe
ctccttggtgaagaagctaatgaag

SEQ ID NO: 23941 - DNA, 25 bp, probe
tttgtggttctggatgaaatctttg

SEQ ID NO: 23942 - DNA, 25 bp, probe
gtttgtggttctggatgaaatcttt

SEQ ID NO: 23943 - DNA, 25 bp, probe
atattgacatatctgaggagggagg

SEQ ID NO: 23944 - DNA, 25 bp, probe
atctccttggtgaagaagctaatga

SEQ ID NO: 23945 - DNA, 25 bp, probe
ttacaagttcttactccatcataca

SEQ ID NO: 23946 - DNA, 25 bp, probe
gcaacatttcggtgagaactttatt

SEQ ID NO: 23947 - DNA, 25 bp, probe
tccttggtgaagaagctaatgaaga

SEQ ID NO: 23948 - DNA, 25 bp, probe
gaagctaatgaagaagtggtctgtg

SEQ ID NO: 23949 - DNA, 25 bp, probe
agaagctaatgaagaagtggtctgt

SEQ ID NO: 23950 - DNA, 25 bp, probe
tctccttggtgaagaagctaatgaa

SEQ ID NO: 23951 - DNA, 25 bp, probe
ggcactcaaacagaataaataggct

SEQ ID NO: 23952 - DNA, 25 bp, probe
aactaatcctcttcttggagaccac

SEQ ID NO: 23953 - DNA, 25 bp, probe
caatacgactactcccaattcacag

SEQ ID NO: 23954 - DNA, 25 bp, probe
aatgaagaagtggtctgtgactcag

SEQ ID NO: 23955 - DNA, 25 bp, probe
acaagttcttactccatcatacata

SEQ ID NO: 23956 - DNA, 25 bp, probe
tacaagttcttactccatcatacat

SEQ ID NO: 23957 - DNA, 25 bp, probe
agtttatcctttgagattcagcaga

SEQ ID NO: 23958 - DNA, 25 bp, probe
cagtttatcctttgagattcagcag

SEQ ID NO: 23959 - DNA, 25 bp, probe
ctaatcctcttcttggagaccactc

SEQ ID NO: 23960 - DNA, 25 bp, probe
catttcggtgagaactttattgtca

SEQ ID NO: 23961 - DNA, 25 bp, probe
ttatcctttgagattcagcagaaga

SEQ ID NO: 23962 - DNA, 25 bp, probe
tcccagtttatcctttgagattcag

SEQ ID NO: 23963 - DNA, 25 bp, probe
tattgacatatctgaggagggagga

SEQ ID NO: 23964 - DNA, 25 bp, probe
tttcggtgagaactttattgtcaga

SEQ ID NO: 23965 - DNA, 25 bp, probe
atttcggtgagaactttattgtcag

SEQ ID NO: 23966 - DNA, 25 bp, probe
caacatttcggtgagaactttattg

SEQ ID NO: 23967 - DNA, 25 bp, probe
atcccagtttatcctttgagattca

SEQ ID NO: 23968 - DNA, 25 bp, probe
tatcctttgagattcagcagaagat

SEQ ID NO: 23969 - DNA, 25 bp, probe
tggcactcaaacagaataaataggc

SEQ ID NO: 23970 - DNA, 25 bp, probe
gctaatgaagaagtggtctgtgact

SEQ ID NO: 23971 - DNA, 25 bp, probe
gaaaatcggggagaaggtcggattt

SEQ ID NO: 23972 - DNA, 25 bp, probe
gcattgaattggaggaaggaataac

SEQ ID NO: 23973 - DNA, 25 bp, probe
agcattgaattggaggaaggaataa

SEQ ID NO: 23974 - DNA, 25 bp, probe
gcttcattgccagaacacattatat

SEQ ID NO: 23975 - DNA, 25 bp, probe
cattgaattggaggaaggaataaca

SEQ ID NO: 23976 - DNA, 25 bp, probe
cagcattgaattggaggaaggaata

SEQ ID NO: 23977 - DNA, 25 bp, probe
ttgccagaacacattatatacagga

SEQ ID NO: 23978 - DNA, 25 bp, probe
tgccagaacacattatatacaggat

SEQ ID NO: 23979 - DNA, 25 bp, probe
attgaattggaggaaggaataacat

SEQ ID NO: 23980 - DNA, 25 bp, probe
gccagaacacattatatacaggatg

SEQ ID NO: 23981 - DNA, 25 bp, probe
attgccagaacacattatatacagg

SEQ ID NO: 23982 - DNA, 25 bp, probe
tcattgccagaacacattatataca

SEQ ID NO: 23983 - DNA, 25 bp, probe
ttgaattggaggaaggaataacata

SEQ ID NO: 23984 - DNA, 25 bp, probe
cattgccagaacacattatatacag

SEQ ID NO: 23985 - DNA, 25 bp, probe
tgaattggaggaaggaataacatat

SEQ ID NO: 23986 - DNA, 25 bp, probe
tctaacaggtatcattcctatccat

SEQ ID NO: 23987 - DNA, 25 bp, probe
atctaacaggtatcattcctatcca

SEQ ID NO: 23988 - DNA, 25 bp, probe
actgtgattgaagaagtccttgagg

SEQ ID NO: 23989 - DNA, 25 bp, probe
catctaacaggtatcattcctatcc

SEQ ID NO: 23990 - DNA, 25 bp, probe
taccatttattacatcgttcatccg

SEQ ID NO: 23991 - DNA, 25 bp, probe
tatatacaggatgtcagagctacca

SEQ ID NO: 23992 - DNA, 25 bp, probe
ttctcagtgaagttcaagttctgga

SEQ ID NO: 23993 - DNA, 25 bp, probe
ttcattgccagaacacattatatac

SEQ ID NO: 23994 - DNA, 25 bp, probe
atatacaggatgtcagagctaccag

SEQ ID NO: 23995 - DNA, 25 bp, probe
ttatatacaggatgtcagagctacc

SEQ ID NO: 23996 - DNA, 25 bp, probe
ctaacaggtatcattcctatccatg

SEQ ID NO: 23997 - DNA, 25 bp, probe
cttgaggaaagtggctattacaatt

SEQ ID NO: 23998 - DNA, 25 bp, probe
tggaggaaggaataacatatgaaca

SEQ ID NO: 23999 - DNA, 25 bp, probe
agcagattaccatttattacatcgt

SEQ ID NO: 24000 - DNA, 25 bp, probe
tcacagcagattaccatttattaca

SEQ ID NO: 24001 - DNA, 25 bp, probe
cttcattgccagaacacattatata

SEQ ID NO: 24002 - DNA, 25 bp, probe
ccttgaggaaagtggctattacaat

SEQ ID NO: 24003 - DNA, 25 bp, probe
ggaggaaggaataacatatgaacag

SEQ ID NO: 24004 - DNA, 25 bp, probe
ttgaggaaagtggctattacaattt

SEQ ID NO: 24005 - DNA, 25 bp, probe
cagcagattaccatttattacatcg

SEQ ID NO: 24006 - DNA, 25 bp, probe
ctcagtgaagttcaagttctggact

SEQ ID NO: 24007 - DNA, 25 bp, probe
tctcagtgaagttcaagttctggac

SEQ ID NO: 24008 - DNA, 25 bp, probe
acatctaacaggtatcattcctatc

SEQ ID NO: 24009 - DNA, 25 bp, probe
ggaataacatatgaacagatgcaga

SEQ ID NO: 24010 - DNA, 25 bp, probe
aggaataacatatgaacagatgcag

SEQ ID NO: 24011 - DNA, 25 bp, probe
ttggaggaaggaataacatatgaac

SEQ ID NO: 24012 - DNA, 25 bp, probe
tgtgattgaagaagtccttgaggaa

SEQ ID NO: 24013 - DNA, 25 bp, probe
tatacaggatgtcagagctaccagt

SEQ ID NO: 24014 - DNA, 25 bp, probe
aaggaataacatatgaacagatgca

SEQ ID NO: 24015 - DNA, 25 bp, probe
gcagattaccatttattacatcgtt

SEQ ID NO: 24016 - DNA, 25 bp, probe
aacattgacaacatgaccatggaag

SEQ ID NO: 24017 - DNA, 25 bp, probe
caacattgacaacatgaccatggaa

SEQ ID NO: 24018 - DNA, 25 bp, probe
gcccaacattgacaacatgaccatg

SEQ ID NO: 24019 - DNA, 25 bp, probe
attgacaacatgaccatggaagctg

SEQ ID NO: 24020 - DNA, 25 bp, probe
cattgacaacatgaccatggaagct

SEQ ID NO: 24021 - DNA, 25 bp, probe
acattgacaacatgaccatggaagc

SEQ ID NO: 24022 - DNA, 25 bp, probe
ccaacattgacaacatgaccatgga

SEQ ID NO: 24023 - DNA, 25 bp, probe
ttgacaacatgaccatggaagctga

SEQ ID NO: 24024 - DNA, 25 bp, probe
acaacatgaccatggaagctgagag

SEQ ID NO: 24025 - DNA, 25 bp, probe
gacaacatgaccatggaagctgaga

SEQ ID NO: 24026 - DNA, 25 bp, probe
tgacaacatgaccatggaagctgag

SEQ ID NO: 24027 - DNA, 25 bp, probe
cccaacattgacaacatgaccatgg

SEQ ID NO: 24028 - DNA, 25 bp, probe
tagtcatgttcttggttctgtcttc

SEQ ID NO: 24029 - DNA, 25 bp, probe
ctagtcatgttcttggttctgtctt

SEQ ID NO: 24030 - DNA, 25 bp, probe
ttgtatgctagtcatgttcttggtt

SEQ ID NO: 24031 - DNA, 25 bp, probe
tatgctagtcatgttcttggttctg

SEQ ID NO: 24032 - DNA, 25 bp, probe
gtatgctagtcatgttcttggttct

SEQ ID NO: 24033 - DNA, 25 bp, probe
tgtatgctagtcatgttcttggttc

SEQ ID NO: 24034 - DNA, 25 bp, probe
tcatgttcttggttctgtcttcctt

SEQ ID NO: 24035 - DNA, 25 bp, probe
tctaccttcagcaagtgtttatgta

SEQ ID NO: 24036 - DNA, 25 bp, probe
taattgctgtggatactgtaaaggg

SEQ ID NO: 24037 - DNA, 25 bp, probe
atgctagtcatgttcttggttctgt

SEQ ID NO: 24038 - DNA, 25 bp, probe
tctttctaccagagtttcccattag

SEQ ID NO: 24039 - DNA, 25 bp, probe
tctatttaagaatgcgtgggagaaa

SEQ ID NO: 24040 - DNA, 25 bp, probe
ttaattgctgtggatactgtaaagg

SEQ ID NO: 24041 - DNA, 25 bp, probe
ctttctaccagagtttcccattagg

SEQ ID NO: 24042 - DNA, 25 bp, probe
accttcagcaagtgtttatgtattt

SEQ ID NO: 24043 - DNA, 25 bp, probe
tagaccatttagagcccaatttgtg

SEQ ID NO: 24044 - DNA, 25 bp, probe
gatactagaccatttagagcccaat

SEQ ID NO: 24045 - DNA, 25 bp, probe
ctgtggatactgtaaagggtgttta

SEQ ID NO: 24046 - DNA, 25 bp, probe
gctagtcatgttcttggttctgtct

SEQ ID NO: 24047 - DNA, 25 bp, probe
gtctaccttcagcaagtgtttatgt

SEQ ID NO: 24048 - DNA, 25 bp, probe
tactagaccatttagagcccaattt

SEQ ID NO: 24049 - DNA, 25 bp, probe
tgtggatactgtaaagggtgtttat

SEQ ID NO: 24050 - DNA, 25 bp, probe
ctcagttcatcaacctctttctacc

SEQ ID NO: 24051 - DNA, 25 bp, probe
cctcagttcatcaacctctttctac

SEQ ID NO: 24052 - DNA, 25 bp, probe
ctaccttcagcaagtgtttatgtat

SEQ ID NO: 24053 - DNA, 25 bp, probe
tgatactagaccatttagagcccaa

SEQ ID NO: 24054 - DNA, 25 bp, probe
ctagaccatttagagcccaatttgt

SEQ ID NO: 24055 - DNA, 25 bp, probe
actagaccatttagagcccaatttg

SEQ ID NO: 24056 - DNA, 25 bp, probe
atactagaccatttagagcccaatt

SEQ ID NO: 24057 - DNA, 25 bp, probe
gtcatgttcttggttctgtcttcct

SEQ ID NO: 24058 - DNA, 25 bp, probe
agtcatgttcttggttctgtcttcc

SEQ ID NO: 24059 - DNA, 25 bp, probe
agttcatcaacctctttctaccaga

SEQ ID NO: 24060 - DNA, 25 bp, probe
cagttcatcaacctctttctaccag

SEQ ID NO: 24061 - DNA, 25 bp, probe
ctgatactagaccatttagagccca

SEQ ID NO: 24062 - DNA, 25 bp, probe
actgatactagaccatttagagccc

SEQ ID NO: 24063 - DNA, 25 bp, probe
tactgatactagaccatttagagcc

SEQ ID NO: 24064 - DNA, 25 bp, probe
tgctagtcatgttcttggttctgtc

SEQ ID NO: 24065 - DNA, 25 bp, probe
tcagttcatcaacctctttctacca

SEQ ID NO: 24066 - DNA, 25 bp, probe
ataatatctgcatcttgtaagcctt

SEQ ID NO: 24067 - DNA, 25 bp, probe
taccttcagcaagtgtttatgtatt

SEQ ID NO: 24068 - DNA, 25 bp, probe
ggatactgtaaagggtgtttatcgt

SEQ ID NO: 24069 - DNA, 25 bp, probe
tggatactgtaaagggtgtttatcg

SEQ ID NO: 24070 - DNA, 25 bp, probe
tactgtaaagggtgtttatcgtaac

SEQ ID NO: 24071 - DNA, 25 bp, probe
ctatttaagaatgcgtgggagaaat

SEQ ID NO: 24072 - DNA, 25 bp, probe
atggaacacctatggatcaacactg

SEQ ID NO: 24073 - DNA, 25 bp, probe
gcttcataaacctatttctgactgc

SEQ ID NO: 24074 - DNA, 25 bp, probe
catggaacacctatggatcaacact

SEQ ID NO: 24075 - DNA, 25 bp, probe
tcatggaacacctatggatcaacac

SEQ ID NO: 24076 - DNA, 25 bp, probe
gtcatggaacacctatggatcaaca

SEQ ID NO: 24077 - DNA, 25 bp, probe
ggaagctgatactgtgtgaacaatt

SEQ ID NO: 24078 - DNA, 25 bp, probe
gaccacatccagtccttgttagaac

SEQ ID NO: 24079 - DNA, 25 bp, probe
aggaagctgatactgtgtgaacaat

SEQ ID NO: 24080 - DNA, 25 bp, probe
agaccacatccagtccttgttagaa

SEQ ID NO: 24081 - DNA, 25 bp, probe
tccagagagcttcataaacctattt

SEQ ID NO: 24082 - DNA, 25 bp, probe
ttccagagagcttcataaacctatt

SEQ ID NO: 24083 - DNA, 25 bp, probe
tttccagagagcttcataaacctat

SEQ ID NO: 24084 - DNA, 25 bp, probe
atttccagagagcttcataaaccta

SEQ ID NO: 24085 - DNA, 25 bp, probe
ttcatttccagagagcttcataaac

SEQ ID NO: 24086 - DNA, 25 bp, probe
tcattctttacaccacagtaaccag

SEQ ID NO: 24087 - DNA, 25 bp, probe
agtcattctttacaccacagtaacc

SEQ ID NO: 24088 - DNA, 25 bp, probe
ccagagagcttcataaacctatttc

SEQ ID NO: 24089 - DNA, 25 bp, probe
catttccagagagcttcataaacct

SEQ ID NO: 24090 - DNA, 25 bp, probe
tcatttccagagagcttcataaacc

SEQ ID NO: 24091 - DNA, 25 bp, probe
aagtcattctttacaccacagtaac

SEQ ID NO: 24092 - DNA, 25 bp, probe
gtcattctttacaccacagtaacca

SEQ ID NO: 24093 - DNA, 25 bp, probe
tttcatttccagagagcttcataaa

SEQ ID NO: 24094 - DNA, 25 bp, probe
ctgaggaagctgatactgtgtgaac

SEQ ID NO: 24095 - DNA, 25 bp, probe
cgtcatggaacacctatggatcaac

SEQ ID NO: 24096 - DNA, 25 bp, probe
gaggaagctgatactgtgtgaacaa

SEQ ID NO: 24097 - DNA, 25 bp, probe
cattctttacaccacagtaaccagg

SEQ ID NO: 24098 - DNA, 25 bp, probe
gaagctgatactgtgtgaacaattg

SEQ ID NO: 24099 - DNA, 25 bp, probe
agcttcataaacctatttctgactg

SEQ ID NO: 24100 - DNA, 25 bp, probe
agagagcttcataaacctatttctg

SEQ ID NO: 24101 - DNA, 25 bp, probe
cagagagcttcataaacctatttct

SEQ ID NO: 24102 - DNA, 25 bp, probe
gagcttcataaacctatttctgact

SEQ ID NO: 24103 - DNA, 25 bp, probe
agagcttcataaacctatttctgac

SEQ ID NO: 24104 - DNA, 25 bp, probe
gaacacctatggatcaacactggtc

SEQ ID NO: 24105 - DNA, 25 bp, probe
gaaagtcattctttacaccacagta

SEQ ID NO: 24106 - DNA, 25 bp, probe
cacctgaaagaaactcttatgcttt

SEQ ID NO: 24107 - DNA, 25 bp, probe
atcacctgaaagaaactcttatgct

SEQ ID NO: 24108 - DNA, 25 bp, probe
catcacctgaaagaaactcttatgc

SEQ ID NO: 24109 - DNA, 25 bp, probe
cagaccacatccagtccttgttaga

SEQ ID NO: 24110 - DNA, 25 bp, probe
attctttacaccacagtaaccaggt

SEQ ID NO: 24111 - DNA, 25 bp, probe
tcacctgaaagaaactcttatgctt

SEQ ID NO: 24112 - DNA, 25 bp, probe
ccatcacctgaaagaaactcttatg

SEQ ID NO: 24113 - DNA, 25 bp, probe
cttcataaacctatttctgactgca

SEQ ID NO: 24114 - DNA, 25 bp, probe
gagagcttcataaacctatttctga

SEQ ID NO: 24115 - DNA, 25 bp, probe
cccatcacctgaaagaaactcttat

SEQ ID NO: 24116 - DNA, 25 bp, probe
gggctttcacttctactctatttca

SEQ ID NO: 24117 - DNA, 25 bp, probe
tgggctttcacttctactctatttc

SEQ ID NO: 24118 - DNA, 25 bp, probe
ggctttcacttctactctatttcag

SEQ ID NO: 24119 - DNA, 25 bp, probe
tctatttcagttcctctttcccgat

SEQ ID NO: 24120 - DNA, 25 bp, probe
tactctatttcagttcctctttccc

SEQ ID NO: 24121 - DNA, 25 bp, probe
ctctatttcagttcctctttcccga

SEQ ID NO: 24122 - DNA, 25 bp, probe
ctatttcagttcctctttcccgatc

SEQ ID NO: 24123 - DNA, 25 bp, probe
tcattgttaaggcagcagaaacttt

SEQ ID NO: 24124 - DNA, 25 bp, probe
tatttcagttcctctttcccgatct

SEQ ID NO: 24125 - DNA, 25 bp, probe
tcacttctactctatttcagttcct

SEQ ID NO: 24126 - DNA, 25 bp, probe
gctttcacttctactctatttcagt

SEQ ID NO: 24127 - DNA, 25 bp, probe
cattgttaaggcagcagaaactttc

SEQ ID NO: 24128 - DNA, 25 bp, probe
ctactctatttcagttcctctttcc

SEQ ID NO: 24129 - DNA, 25 bp, probe
acttctactctatttcagttcctct

SEQ ID NO: 24130 - DNA, 25 bp, probe
cacttctactctatttcagttcctc

SEQ ID NO: 24131 - DNA, 25 bp, probe
gtgggctttcacttctactctattt

SEQ ID NO: 24132 - DNA, 25 bp, probe
ctcattgttaaggcagcagaaactt

SEQ ID NO: 24133 - DNA, 25 bp, probe
actctatttcagttcctctttcccg

SEQ ID NO: 24134 - DNA, 25 bp, probe
ttcacttctactctatttcagttcc

SEQ ID NO: 24135 - DNA, 25 bp, probe
cttcctcattgttaaggcagcagaa

SEQ ID NO: 24136 - DNA, 25 bp, probe
tctactctatttcagttcctctttc

SEQ ID NO: 24137 - DNA, 25 bp, probe
cttctactctatttcagttcctctt

SEQ ID NO: 24138 - DNA, 25 bp, probe
attgttaaggcagcagaaactttcg

SEQ ID NO: 24139 - DNA, 25 bp, probe
ggtgggctttcacttctactctatt

SEQ ID NO: 24140 - DNA, 25 bp, probe
ctggagagcttcctcattgttaagg

SEQ ID NO: 24141 - DNA, 25 bp, probe
ttctactctatttcagttcctcttt

SEQ ID NO: 24142 - DNA, 25 bp, probe
tggcaaataaacgagatggataaaa

SEQ ID NO: 24143 - DNA, 25 bp, probe
ggttttaggataaggggtcatcaat

SEQ ID NO: 24144 - DNA, 25 bp, probe
gttttaggataaggggtcatcaatg

SEQ ID NO: 24145 - DNA, 25 bp, probe
aggtgggctttcacttctactctat

SEQ ID NO: 24146 - DNA, 25 bp, probe
ttttaggataaggggtcatcaatgc

SEQ ID NO: 24147 - DNA, 25 bp, probe
tttcgctggatggttttaggataag

SEQ ID NO: 24148 - DNA, 25 bp, probe
ctttcgctggatggttttaggataa

SEQ ID NO: 24149 - DNA, 25 bp, probe
atttcagttcctctttcccgatctg

SEQ ID NO: 24150 - DNA, 25 bp, probe
tggttttaggataaggggtcatcaa

SEQ ID NO: 24151 - DNA, 25 bp, probe
atggttttaggataaggggtcatca

SEQ ID NO: 24152 - DNA, 25 bp, probe
ttcctcattgttaaggcagcagaaa

SEQ ID NO: 24153 - DNA, 25 bp, probe
gagagcttcctcattgttaaggcag

SEQ ID NO: 24154 - DNA, 25 bp, probe
tttaggataaggggtcatcaatgct

SEQ ID NO: 24155 - DNA, 25 bp, probe
tttcacttctactctatttcagttc

SEQ ID NO: 24156 - DNA, 25 bp, probe
ctttcacttctactctatttcagtt

SEQ ID NO: 24157 - DNA, 25 bp, probe
actttcgctggatggttttaggata

SEQ ID NO: 24158 - DNA, 25 bp, probe
ggatggttttaggataaggggtcat

SEQ ID NO: 24159 - DNA, 25 bp, probe
ttaggataaggggtcatcaatgctg

SEQ ID NO: 24160 - DNA, 25 bp, probe
ggatgctaagaagagtgttgctata

SEQ ID NO: 24161 - DNA, 25 bp, probe
gctacaacttaactggcattacaat

SEQ ID NO: 24162 - DNA, 25 bp, probe
ataatgatgctacaacttaactggc

SEQ ID NO: 24163 - DNA, 25 bp, probe
aattgaactcatctaactagcctcc

SEQ ID NO: 24164 - DNA, 25 bp, probe
gatgctaagaagagtgttgctataa

SEQ ID NO: 24165 - DNA, 25 bp, probe
accactattctatattctgacagca

SEQ ID NO: 24166 - DNA, 25 bp, probe
acaacttaactggcattacaatact

SEQ ID NO: 24167 - DNA, 25 bp, probe
actcatctaactagcctccagaata

SEQ ID NO: 24168 - DNA, 25 bp, probe
attgaactcatctaactagcctcca

SEQ ID NO: 24169 - DNA, 25 bp, probe
tggatgctaagaagagtgttgctat

SEQ ID NO: 24170 - DNA, 25 bp, probe
aactcatctaactagcctccagaat

SEQ ID NO: 24171 - DNA, 25 bp, probe
catctaactagcctccagaataaga

SEQ ID NO: 24172 - DNA, 25 bp, probe
tcatctaactagcctccagaataag

SEQ ID NO: 24173 - DNA, 25 bp, probe
ctcatctaactagcctccagaataa

SEQ ID NO: 24174 - DNA, 25 bp, probe
ttgaactcatctaactagcctccag

SEQ ID NO: 24175 - DNA, 25 bp, probe
aaccactattctatattctgacagc

SEQ ID NO: 24176 - DNA, 25 bp, probe
gaactcatctaactagcctccagaa

SEQ ID NO: 24177 - DNA, 25 bp, probe
cataatgatgctacaacttaactgg

SEQ ID NO: 24178 - DNA, 25 bp, probe
atctaactagcctccagaataagaa

SEQ ID NO: 24179 - DNA, 25 bp, probe
ccactattctatattctgacagcat

SEQ ID NO: 24180 - DNA, 25 bp, probe
attggtgtcataatgatgctacaac

SEQ ID NO: 24181 - DNA, 25 bp, probe
tgattggtgtcataatgatgctaca

SEQ ID NO: 24182 - DNA, 25 bp, probe
atatctaatattgcctgcctgtctg

SEQ ID NO: 24183 - DNA, 25 bp, probe
tggtgtcataatgatgctacaactt

SEQ ID NO: 24184 - DNA, 25 bp, probe
ttggtgtcataatgatgctacaact

SEQ ID NO: 24185 - DNA, 25 bp, probe
gattggtgtcataatgatgctacaa

SEQ ID NO: 24186 - DNA, 25 bp, probe
gtagttctcactgtggatgctaaga

SEQ ID NO: 24187 - DNA, 25 bp, probe
tgtgtactggtatagcattgtggtt

SEQ ID NO: 24188 - DNA, 25 bp, probe
gtggatgctaagaagagtgttgcta

SEQ ID NO: 24189 - DNA, 25 bp, probe
ggtgtcataatgatgctacaactta

SEQ ID NO: 24190 - DNA, 25 bp, probe
atctaatattgcctgcctgtctgta

SEQ ID NO: 24191 - DNA, 25 bp, probe
tatctaatattgcctgcctgtctgt

SEQ ID NO: 24192 - DNA, 25 bp, probe
tacaacttaactggcattacaatac

SEQ ID NO: 24193 - DNA, 25 bp, probe
tgaactcatctaactagcctccaga

SEQ ID NO: 24194 - DNA, 25 bp, probe
ctggctttctgttggctatttatac

SEQ ID NO: 24195 - DNA, 25 bp, probe
cccgctatatcagtttcagtatctt

SEQ ID NO: 24196 - DNA, 25 bp, probe
agtattgaatcctttgtgtctgctt

SEQ ID NO: 24197 - DNA, 25 bp, probe
ggctttctgttggctatttatacct

SEQ ID NO: 24198 - DNA, 25 bp, probe
cctggctttctgttggctatttata

SEQ ID NO: 24199 - DNA, 25 bp, probe
tgtgtctgcttccttcactcaatat

SEQ ID NO: 24200 - DNA, 25 bp, probe
gtgtgtactggtatagcattgtggt

SEQ ID NO: 24201 - DNA, 25 bp, probe
acccgctatatcagtttcagtatct

SEQ ID NO: 24202 - DNA, 25 bp, probe
caacttaactggcattacaatacta

SEQ ID NO: 24203 - DNA, 25 bp, probe
ctacaacttaactggcattacaata

SEQ ID NO: 24204 - DNA, 25 bp, probe
ggaagagtctgaggatgatagtgaa

SEQ ID NO: 24205 - DNA, 25 bp, probe
acaattcagactctcttatccttgg

SEQ ID NO: 24206 - DNA, 25 bp, probe
gctaaggaaggacatacaagtacaa

SEQ ID NO: 24207 - DNA, 25 bp, probe
acttctgatgagattgtcaacattg

SEQ ID NO: 24208 - DNA, 25 bp, probe
cacttctgatgagattgtcaacatt

SEQ ID NO: 24209 - DNA, 25 bp, probe
gatgagattgtcaacattgcctaac

SEQ ID NO: 24210 - DNA, 25 bp, probe
tgatgagattgtcaacattgcctaa

SEQ ID NO: 24211 - DNA, 25 bp, probe
cttctgatgagattgtcaacattgc

SEQ ID NO: 24212 - DNA, 25 bp, probe
ctggaagagtctgaggatgatagtg

SEQ ID NO: 24213 - DNA, 25 bp, probe
aggaaggacatacaagtacaattca

SEQ ID NO: 24214 - DNA, 25 bp, probe
ccacttctgatgagattgtcaacat

SEQ ID NO: 24215 - DNA, 25 bp, probe
gactgaaggattctgaagacatcac

SEQ ID NO: 24216 - DNA, 25 bp, probe
ggaaggacatacaagtacaattcag

SEQ ID NO: 24217 - DNA, 25 bp, probe
ctgatgagattgtcaacattgccta

SEQ ID NO: 24218 - DNA, 25 bp, probe
tggaagagtctgaggatgatagtga

SEQ ID NO: 24219 - DNA, 25 bp, probe
gattgtcaacattgcctaacagatg

SEQ ID NO: 24220 - DNA, 25 bp, probe
agattgtcaacattgcctaacagat

SEQ ID NO: 24221 - DNA, 25 bp, probe
aaggacatacaagtacaattcagac

SEQ ID NO: 24222 - DNA, 25 bp, probe
atgagattgtcaacattgcctaaca

SEQ ID NO: 24223 - DNA, 25 bp, probe
aggacatacaagtacaattcagact

SEQ ID NO: 24224 - DNA, 25 bp, probe
aaggaaggacatacaagtacaattc

SEQ ID NO: 24225 - DNA, 25 bp, probe
ggacatacaagtacaattcagactc

SEQ ID NO: 24226 - DNA, 25 bp, probe
gagattgtcaacattgcctaacaga

SEQ ID NO: 24227 - DNA, 25 bp, probe
gaaggacatacaagtacaattcaga

SEQ ID NO: 24228 - DNA, 25 bp, probe
caccacttctgatgagattgtcaac

SEQ ID NO: 24229 - DNA, 25 bp, probe
tgagattgtcaacattgcctaacag

SEQ ID NO: 24230 - DNA, 25 bp, probe
ttctgatgagattgtcaacattgcc

SEQ ID NO: 24231 - DNA, 25 bp, probe
actggaagagtctgaggatgatagt

SEQ ID NO: 24232 - DNA, 25 bp, probe
gttgtatatctgaggtgtaccagtg

SEQ ID NO: 24233 - DNA, 25 bp, probe
agttgtatatctgaggtgtaccagt

SEQ ID NO: 24234 - DNA, 25 bp, probe
aagttgtatatctgaggtgtaccag

SEQ ID NO: 24235 - DNA, 25 bp, probe
ggactgaaggattctgaagacatca

SEQ ID NO: 24236 - DNA, 25 bp, probe
cagctaaggaaggacatacaagtac

SEQ ID NO: 24237 - DNA, 25 bp, probe
tagcaccacttctgatgagattgtc

SEQ ID NO: 24238 - DNA, 25 bp, probe
ctaaggaaggacatacaagtacaat

SEQ ID NO: 24239 - DNA, 25 bp, probe
agctaaggaaggacatacaagtaca

SEQ ID NO: 24240 - DNA, 25 bp, probe
accacttctgatgagattgtcaaca

SEQ ID NO: 24241 - DNA, 25 bp, probe
tacaattcagactctcttatccttg

SEQ ID NO: 24242 - DNA, 25 bp, probe
agtacaattcagactctcttatcct

SEQ ID NO: 24243 - DNA, 25 bp, probe
acatacaagtacaattcagactctc

SEQ ID NO: 24244 - DNA, 25 bp, probe
gacatacaagtacaattcagactct

SEQ ID NO: 24245 - DNA, 25 bp, probe
atccgattcttggtctctgaacttg

SEQ ID NO: 24246 - DNA, 25 bp, probe
catccgattcttggtctctgaactt

SEQ ID NO: 24247 - DNA, 25 bp, probe
gtagcaccacttctgatgagattgt

SEQ ID NO: 24248 - DNA, 25 bp, probe
cggaagagtgtatgaagattgaatg

SEQ ID NO: 24249 - DNA, 25 bp, probe
gagatgaggctaaggcaagaatatg

SEQ ID NO: 24250 - DNA, 25 bp, probe
agagatgaggctaaggcaagaatat

SEQ ID NO: 24251 - DNA, 25 bp, probe
ggaagagtgtatgaagattgaatgt

SEQ ID NO: 24252 - DNA, 25 bp, probe
agtgtatgaagattgaatgtgatgt

SEQ ID NO: 24253 - DNA, 25 bp, probe
aagagtgtatgaagattgaatgtga

SEQ ID NO: 24254 - DNA, 25 bp, probe
gagtgtatgaagattgaatgtgatg

SEQ ID NO: 24255 - DNA, 25 bp, probe
cagagatgaggctaaggcaagaata

SEQ ID NO: 24256 - DNA, 25 bp, probe
agagtgtatgaagattgaatgtgat

SEQ ID NO: 24257 - DNA, 25 bp, probe
gaagagtgtatgaagattgaatgtg

SEQ ID NO: 24258 - DNA, 25 bp, probe
gttacagaatgtcactcttaccgtc

SEQ ID NO: 24259 - DNA, 25 bp, probe
tacagaatgtcactcttaccgtcat

SEQ ID NO: 24260 - DNA, 25 bp, probe
ttacagaatgtcactcttaccgtca

SEQ ID NO: 24261 - DNA, 25 bp, probe
taggttacagaatgtcactcttacc

SEQ ID NO: 24262 - DNA, 25 bp, probe
aatgtcactcttaccgtcatgtctt

SEQ ID NO: 24263 - DNA, 25 bp, probe
gtgtatgaagattgaatgtgatgta

SEQ ID NO: 24264 - DNA, 25 bp, probe
acacacttacattataggttacaga

SEQ ID NO: 24265 - DNA, 25 bp, probe
gttcaagtttcctaccagcaaatag

SEQ ID NO: 24266 - DNA, 25 bp, probe
tgttcaagtttcctaccagcaaata

SEQ ID NO: 24267 - DNA, 25 bp, probe
ataggttacagaatgtcactcttac

SEQ ID NO: 24268 - DNA, 25 bp, probe
gaatgtcactcttaccgtcatgtct

SEQ ID NO: 24269 - DNA, 25 bp, probe
agaatgtcactcttaccgtcatgtc

SEQ ID NO: 24270 - DNA, 25 bp, probe
cctggcatatactaaacgctaaata

SEQ ID NO: 24271 - DNA, 25 bp, probe
ttcaagtttcctaccagcaaatagc

SEQ ID NO: 24272 - DNA, 25 bp, probe
atgtcactcttaccgtcatgtcttg

SEQ ID NO: 24273 - DNA, 25 bp, probe
aggttacagaatgtcactcttaccg

SEQ ID NO: 24274 - DNA, 25 bp, probe
tttacaaagccctaaaggaaagttt

SEQ ID NO: 24275 - DNA, 25 bp, probe
gtcaagactgagaaaggaatgaaat

SEQ ID NO: 24276 - DNA, 25 bp, probe
gaatggtcaagactgagaaaggaat

SEQ ID NO: 24277 - DNA, 25 bp, probe
aagacagcttaagtggcagaataat

SEQ ID NO: 24278 - DNA, 25 bp, probe
tcaagactgagaaaggaatgaaatc

SEQ ID NO: 24279 - DNA, 25 bp, probe
cagaatgtcactcttaccgtcatgt

SEQ ID NO: 24280 - DNA, 25 bp, probe
agacagcttaagtggcagaataatg

SEQ ID NO: 24281 - DNA, 25 bp, probe
ggtcaagactgagaaaggaatgaaa

SEQ ID NO: 24282 - DNA, 25 bp, probe
ttataggttacagaatgtcactctt

SEQ ID NO: 24283 - DNA, 25 bp, probe
aatggtcaagactgagaaaggaatg

SEQ ID NO: 24284 - DNA, 25 bp, probe
gaagacagcttaagtggcagaataa

SEQ ID NO: 24285 - DNA, 25 bp, probe
ggttacagaatgtcactcttaccgt

SEQ ID NO: 24286 - DNA, 25 bp, probe
taagggaatggtcaagactgagaaa

SEQ ID NO: 24287 - DNA, 25 bp, probe
gctaaataaatacatgctaactgcg

SEQ ID NO: 24288 - DNA, 25 bp, probe
cgctaaataaatacatgctaactgc

SEQ ID NO: 24289 - DNA, 25 bp, probe
attataggttacagaatgtcactct

SEQ ID NO: 24290 - DNA, 25 bp, probe
ttaccggaagagtgtatgaagattg

SEQ ID NO: 24291 - DNA, 25 bp, probe
taagtggcagaataatgctagaaca

SEQ ID NO: 24292 - DNA, 25 bp, probe
ccagatgatgatgttgatgaagatg

SEQ ID NO: 24293 - DNA, 25 bp, probe
tccagatgatgatgttgatgaagat

SEQ ID NO: 24294 - DNA, 25 bp, probe
atatctgtctgctcatagtgtcagt

SEQ ID NO: 24295 - DNA, 25 bp, probe
cagatgatgatgttgatgaagatgc

SEQ ID NO: 24296 - DNA, 25 bp, probe
ttccagatgatgatgttgatgaaga

SEQ ID NO: 24297 - DNA, 25 bp, probe
atgacttaatagaagagcggaacaa

SEQ ID NO: 24298 - DNA, 25 bp, probe
aatgacttaatagaagagcggaaca

SEQ ID NO: 24299 - DNA, 25 bp, probe
tgaatgacttaatagaagagcggaa

SEQ ID NO: 24300 - DNA, 25 bp, probe
ctgaatgacttaatagaagagcgga

SEQ ID NO: 24301 - DNA, 25 bp, probe
gaatgacttaatagaagagcggaac

SEQ ID NO: 24302 - DNA, 25 bp, probe
tcttccagatgatgatgttgatgaa

SEQ ID NO: 24303 - DNA, 25 bp, probe
tctgaatgacttaatagaagagcgg

SEQ ID NO: 24304 - DNA, 25 bp, probe
tatctgtctgctcatagtgtcagtc

SEQ ID NO: 24305 - DNA, 25 bp, probe
aatctgtgatgtaggagtctctctg

SEQ ID NO: 24306 - DNA, 25 bp, probe
cgaactgtgtatcagaagagactaa

SEQ ID NO: 24307 - DNA, 25 bp, probe
actgtgtatcagaagagactaactg

SEQ ID NO: 24308 - DNA, 25 bp, probe
aatatgactgtgactgatcctgagg

SEQ ID NO: 24309 - DNA, 25 bp, probe
aactgtgtatcagaagagactaact

SEQ ID NO: 24310 - DNA, 25 bp, probe
gaactgtgtatcagaagagactaac

SEQ ID NO: 24311 - DNA, 25 bp, probe
aagagactaactgatgaagctaaga

SEQ ID NO: 24312 - DNA, 25 bp, probe
agaagagactaactgatgaagctaa

SEQ ID NO: 24313 - DNA, 25 bp, probe
agagactaactgatgaagctaagat

SEQ ID NO: 24314 - DNA, 25 bp, probe
gaagagactaactgatgaagctaag

SEQ ID NO: 24315 - DNA, 25 bp, probe
gatatctgtctgctcatagtgtcag

SEQ ID NO: 24316 - DNA, 25 bp, probe
cttgcctctctacacttagcttcta

SEQ ID NO: 24317 - DNA, 25 bp, probe
actctgtgggaaatgatgactttat

SEQ ID NO: 24318 - DNA, 25 bp, probe
ttactctgtgggaaatgatgacttt

SEQ ID NO: 24319 - DNA, 25 bp, probe
tagtctgtgccttgctatggagtat

SEQ ID NO: 24320 - DNA, 25 bp, probe
agatgatgatgttgatgaagatgca

SEQ ID NO: 24321 - DNA, 25 bp, probe
tctgtgggaaatgatgactttatgt

SEQ ID NO: 24322 - DNA, 25 bp, probe
ctctgtgggaaatgatgactttatg

SEQ ID NO: 24323 - DNA, 25 bp, probe
cttactctgtgggaaatgatgactt

SEQ ID NO: 24324 - DNA, 25 bp, probe
taatagaagagcggaacaaagacag

SEQ ID NO: 24325 - DNA, 25 bp, probe
tactctgtgggaaatgatgacttta

SEQ ID NO: 24326 - DNA, 25 bp, probe
ttaatagaagagcggaacaaagaca

SEQ ID NO: 24327 - DNA, 25 bp, probe
gatattcttgcttctttagtgggtt

SEQ ID NO: 24328 - DNA, 25 bp, probe
ttgatgagagtgacttcgatgatga

SEQ ID NO: 24329 - DNA, 25 bp, probe
acttaatagaagagcggaacaaaga

SEQ ID NO: 24330 - DNA, 25 bp, probe
aaagcattaacttgtatgggaactg

SEQ ID NO: 24331 - DNA, 25 bp, probe
gatgatgatgttgatgaagatgcaa

SEQ ID NO: 24332 - DNA, 25 bp, probe
atcttccagatgatgatgttgatga

SEQ ID NO: 24333 - DNA, 25 bp, probe
gtcaatcttccagatgatgatgttg

SEQ ID NO: 24334 - DNA, 25 bp, probe
cttaatagaagagcggaacaaagac

SEQ ID NO: 24335 - DNA, 25 bp, probe
gacttaatagaagagcggaacaaag

SEQ ID NO: 24336 - DNA, 25 bp, probe
cattgagacgtatgaacaggagaag

SEQ ID NO: 24337 - DNA, 25 bp, probe
attgagacgtatgaacaggagaagg

SEQ ID NO: 24338 - DNA, 25 bp, probe
ccattgagacgtatgaacaggagaa

SEQ ID NO: 24339 - DNA, 25 bp, probe
atccattgagacgtatgaacaggag

SEQ ID NO: 24340 - DNA, 25 bp, probe
gatccattgagacgtatgaacagga

SEQ ID NO: 24341 - DNA, 25 bp, probe
aacagatcgaccaatttgtgaagat

SEQ ID NO: 24342 - DNA, 25 bp, probe
gaacagatcgaccaatttgtgaaga

SEQ ID NO: 24343 - DNA, 25 bp, probe
tccattgagacgtatgaacaggaga

SEQ ID NO: 24344 - DNA, 25 bp, probe
ggaacagatcgaccaatttgtgaag

SEQ ID NO: 24345 - DNA, 25 bp, probe
ttgagacgtatgaacaggagaaggc

SEQ ID NO: 24346 - DNA, 25 bp, probe
acagatcgaccaatttgtgaagatc

SEQ ID NO: 24347 - DNA, 25 bp, probe
aggatccattgagacgtatgaacag

SEQ ID NO: 24348 - DNA, 25 bp, probe
caggatccattgagacgtatgaaca

SEQ ID NO: 24349 - DNA, 25 bp, probe
cagatcgaccaatttgtgaagatcg

SEQ ID NO: 24350 - DNA, 25 bp, probe
gatcgaccaatttgtgaagatcgtg

SEQ ID NO: 24351 - DNA, 25 bp, probe
agatcgaccaatttgtgaagatcgt

SEQ ID NO: 24352 - DNA, 25 bp, probe
cggaacagatcgaccaatttgtgaa

SEQ ID NO: 24353 - DNA, 25 bp, probe
ggatccattgagacgtatgaacagg

SEQ ID NO: 24354 - DNA, 25 bp, probe
ccaggatccattgagacgtatgaac

SEQ ID NO: 24355 - DNA, 25 bp, probe
accaggatccattgagacgtatgaa

SEQ ID NO: 24356 - DNA, 25 bp, probe
gaccaatttgtgaagatcgtggacg

SEQ ID NO: 24357 - DNA, 25 bp, probe
atcgaccaatttgtgaagatcgtgg

SEQ ID NO: 24358 - DNA, 25 bp, probe
gaccaggatccattgagacgtatga

SEQ ID NO: 24359 - DNA, 25 bp, probe
cgaccaatttgtgaagatcgtggac

SEQ ID NO: 24360 - DNA, 25 bp, probe
gtcttccagttctaccagcgaacaa

SEQ ID NO: 24361 - DNA, 25 bp, probe
caatttgtgaagatcgtggacgagg

SEQ ID NO: 24362 - DNA, 25 bp, probe
ccaatttgtgaagatcgtggacgag

SEQ ID NO: 24363 - DNA, 25 bp, probe
tcttccagttctaccagcgaacaaa

SEQ ID NO: 24364 - DNA, 25 bp, probe
tcgaccaatttgtgaagatcgtgga

SEQ ID NO: 24365 - DNA, 25 bp, probe
ttccagttctaccagcgaacaaaat

SEQ ID NO: 24366 - DNA, 25 bp, probe
accaatttgtgaagatcgtggacga

SEQ ID NO: 24367 - DNA, 25 bp, probe
cgaccaggatccattgagacgtatg

SEQ ID NO: 24368 - DNA, 25 bp, probe
gtatgaacaggagaaggccgtcttc

SEQ ID NO: 24369 - DNA, 25 bp, probe
cttccagttctaccagcgaacaaaa

SEQ ID NO: 24370 - DNA, 25 bp, probe
ccagttctaccagcgaacaaaatga

SEQ ID NO: 24371 - DNA, 25 bp, probe
tccagttctaccagcgaacaaaatg

SEQ ID NO: 24372 - DNA, 25 bp, probe
ggcaaattctgttagcaatgtagta

SEQ ID NO: 24373 - DNA, 25 bp, probe
ttacaaatcatcctactccctgaag

SEQ ID NO: 24374 - DNA, 25 bp, probe
cttacaaatcatcctactccctgaa

SEQ ID NO: 24375 - DNA, 25 bp, probe
tacaaatcatcctactccctgaaga

SEQ ID NO: 24376 - DNA, 25 bp, probe
gcaaattctgttagcaatgtagtac

SEQ ID NO: 24377 - DNA, 25 bp, probe
gggcaaattctgttagcaatgtagt

SEQ ID NO: 24378 - DNA, 25 bp, probe
tgggcaaattctgttagcaatgtag

SEQ ID NO: 24379 - DNA, 25 bp, probe
ttgggcaaattctgttagcaatgta

SEQ ID NO: 24380 - DNA, 25 bp, probe
acaaatcatcctactccctgaagag

SEQ ID NO: 24381 - DNA, 25 bp, probe
gcttacaaatcatcctactccctga

SEQ ID NO: 24382 - DNA, 25 bp, probe
gtttgggcaaattctgttagcaatg

SEQ ID NO: 24383 - DNA, 25 bp, probe
tttgggcaaattctgttagcaatgt

SEQ ID NO: 24384 - DNA, 25 bp, probe
tgtttgggcaaattctgttagcaat

SEQ ID NO: 24385 - DNA, 25 bp, probe
atgtttgggcaaattctgttagcaa

SEQ ID NO: 24386 - DNA, 25 bp, probe
agcttacaaatcatcctactccctg

SEQ ID NO: 24387 - DNA, 25 bp, probe
caaatcatcctactccctgaagagc

SEQ ID NO: 24388 - DNA, 25 bp, probe
ggactttggctttagcatgacattc

SEQ ID NO: 24389 - DNA, 25 bp, probe
catgtttgggcaaattctgttagca

SEQ ID NO: 24390 - DNA, 25 bp, probe
gactttggctttagcatgacattcg

SEQ ID NO: 24391 - DNA, 25 bp, probe
tggactttggctttagcatgacatt

SEQ ID NO: 24392 - DNA, 25 bp, probe
aaatcgtggactttggctttagcat

SEQ ID NO: 24393 - DNA, 25 bp, probe
accatgtttgggcaaattctgttag

SEQ ID NO: 24394 - DNA, 25 bp, probe
gaccatgtttgggcaaattctgtta

SEQ ID NO: 24395 - DNA, 25 bp, probe
gttagcaatgtagtactgcctctat

SEQ ID NO: 24396 - DNA, 25 bp, probe
aattctgttagcaatgtagtactgc

SEQ ID NO: 24397 - DNA, 25 bp, probe
attctgttagcaatgtagtactgcc

SEQ ID NO: 24398 - DNA, 25 bp, probe
tgttagcaatgtagtactgcctcta

SEQ ID NO: 24399 - DNA, 25 bp, probe
gtggactttggctttagcatgacat

SEQ ID NO: 24400 - DNA, 25 bp, probe
tagcaatgtagtactgcctctataa

SEQ ID NO: 24401 - DNA, 25 bp, probe
ttagcaatgtagtactgcctctata

SEQ ID NO: 24402 - DNA, 25 bp, probe
aaatcatcctactccctgaagagcg

SEQ ID NO: 24403 - DNA, 25 bp, probe
ttctgttagcaatgtagtactgcct

SEQ ID NO: 24404 - DNA, 25 bp, probe
actttggctttagcatgacattcgg

SEQ ID NO: 24405 - DNA, 25 bp, probe
aatcgtggactttggctttagcatg

SEQ ID NO: 24406 - DNA, 25 bp, probe
ctgttagcaatgtagtactgcctct

SEQ ID NO: 24407 - DNA, 25 bp, probe
tctgttagcaatgtagtactgcctc

SEQ ID NO: 24408 - DNA, 25 bp, probe
aagcttacaaatcatcctactccct

SEQ ID NO: 24409 - DNA, 25 bp, probe
aaattctgttagcaatgtagtactg

SEQ ID NO: 24410 - DNA, 25 bp, probe
caaattctgttagcaatgtagtact

SEQ ID NO: 24411 - DNA, 25 bp, probe
ccatgtttgggcaaattctgttagc

SEQ ID NO: 24412 - DNA, 25 bp, probe
agaccatgtttgggcaaattctgtt

SEQ ID NO: 24413 - DNA, 25 bp, probe
tactccctgaagagcgcaatataaa

SEQ ID NO: 24414 - DNA, 25 bp, probe
agcaatgtagtactgcctctataaa

SEQ ID NO: 24415 - DNA, 25 bp, probe
ctactccctgaagagcgcaatataa

SEQ ID NO: 24416 - DNA, 25 bp, probe
ttaccgttcacattggagatattca

SEQ ID NO: 24417 - DNA, 25 bp, probe
ccgttcacattggagatattcagta

SEQ ID NO: 24418 - DNA, 25 bp, probe
taccgttcacattggagatattcag

SEQ ID NO: 24419 - DNA, 25 bp, probe
cttaccgttcacattggagatattc

SEQ ID NO: 24420 - DNA, 25 bp, probe
ccttaccgttcacattggagatatt

SEQ ID NO: 24421 - DNA, 25 bp, probe
cgttcacattggagatattcagtat

SEQ ID NO: 24422 - DNA, 25 bp, probe
accttaccgttcacattggagatat

SEQ ID NO: 24423 - DNA, 25 bp, probe
tggagatattcagtattgagcaact

SEQ ID NO: 24424 - DNA, 25 bp, probe
attgagcaactctatcagaagatgg

SEQ ID NO: 24425 - DNA, 25 bp, probe
tcagtattgagcaactctatcagaa

SEQ ID NO: 24426 - DNA, 25 bp, probe
ttcagtattgagcaactctatcaga

SEQ ID NO: 24427 - DNA, 25 bp, probe
ttggagatattcagtattgagcaac

SEQ ID NO: 24428 - DNA, 25 bp, probe
ggagatattcagtattgagcaactc

SEQ ID NO: 24429 - DNA, 25 bp, probe
atggaatggtacacaaggattatgc

SEQ ID NO: 24430 - DNA, 25 bp, probe
agtattgagcaactctatcagaaga

SEQ ID NO: 24431 - DNA, 25 bp, probe
cagtattgagcaactctatcagaag

SEQ ID NO: 24432 - DNA, 25 bp, probe
cattggagatattcagtattgagca

SEQ ID NO: 24433 - DNA, 25 bp, probe
acattggagatattcagtattgagc

SEQ ID NO: 24434 - DNA, 25 bp, probe
accgttcacattggagatattcagt

SEQ ID NO: 24435 - DNA, 25 bp, probe
catggaatggtacacaaggattatg

SEQ ID NO: 24436 - DNA, 25 bp, probe
ttgagcaactctatcagaagatggt

SEQ ID NO: 24437 - DNA, 25 bp, probe
attcagtattgagcaactctatcag

SEQ ID NO: 24438 - DNA, 25 bp, probe
caccttaccgttcacattggagata

SEQ ID NO: 24439 - DNA, 25 bp, probe
gcatggaatggtacacaaggattat

SEQ ID NO: 24440 - DNA, 25 bp, probe
attggagatattcagtattgagcaa

SEQ ID NO: 24441 - DNA, 25 bp, probe
gagcaactctatcagaagatggtga

SEQ ID NO: 24442 - DNA, 25 bp, probe
tattgagcaactctatcagaagatg

SEQ ID NO: 24443 - DNA, 25 bp, probe
gtattgagcaactctatcagaagat

SEQ ID NO: 24444 - DNA, 25 bp, probe
gagatattcagtattgagcaactct

SEQ ID NO: 24445 - DNA, 25 bp, probe
tgagcaactctatcagaagatggtg

SEQ ID NO: 24446 - DNA, 25 bp, probe
gacattaatactgagaagttggagg

SEQ ID NO: 24447 - DNA, 25 bp, probe
aatgtcctacctgaaatctcctttg

SEQ ID NO: 24448 - DNA, 25 bp, probe
caatgtcctacctgaaatctccttt

SEQ ID NO: 24449 - DNA, 25 bp, probe
tcacattggagatattcagtattga

SEQ ID NO: 24450 - DNA, 25 bp, probe
aattgtcaaataccctaatgcttcc

SEQ ID NO: 24451 - DNA, 25 bp, probe
cacattggagatattcagtattgag

SEQ ID NO: 24452 - DNA, 25 bp, probe
atctcctttggtaatttactgtggt

SEQ ID NO: 24453 - DNA, 25 bp, probe
attgtcaaataccctaatgcttccc

SEQ ID NO: 24454 - DNA, 25 bp, probe
cctttggtaatttactgtggtctct

SEQ ID NO: 24455 - DNA, 25 bp, probe
tcctttggtaatttactgtggtctc

SEQ ID NO: 24456 - DNA, 25 bp, probe
ctcctttggtaatttactgtggtct

SEQ ID NO: 24457 - DNA, 25 bp, probe
tctcctttggtaatttactgtggtc

SEQ ID NO: 24458 - DNA, 25 bp, probe
tgacattaatactgagaagttggag

SEQ ID NO: 24459 - DNA, 25 bp, probe
ttcacattggagatattcagtattg

SEQ ID NO: 24460 - DNA, 25 bp, probe
aagattagtgagaagaagatgtcca

SEQ ID NO: 24461 - DNA, 25 bp, probe
tgaaccaccaatatgactacacatt

SEQ ID NO: 24462 - DNA, 25 bp, probe
ctgaaccaccaatatgactacacat

SEQ ID NO: 24463 - DNA, 25 bp, probe
caacacataccgtacagagaagata

SEQ ID NO: 24464 - DNA, 25 bp, probe
aacacataccgtacagagaagataa

SEQ ID NO: 24465 - DNA, 25 bp, probe
gcgtcactgtaataagttgttcctt

SEQ ID NO: 24466 - DNA, 25 bp, probe
cctgaaccaccaatatgactacaca

SEQ ID NO: 24467 - DNA, 25 bp, probe
agattagtgagaagaagatgtccac

SEQ ID NO: 24468 - DNA, 25 bp, probe
cgtcactgtaataagttgttcctta

SEQ ID NO: 24469 - DNA, 25 bp, probe
gattagtgagaagaagatgtccacc

SEQ ID NO: 24470 - DNA, 25 bp, probe
gagatgacatggaatccttaggcta

SEQ ID NO: 24471 - DNA, 25 bp, probe
aattcgccatgtacttgaactactg

SEQ ID NO: 24472 - DNA, 25 bp, probe
agatgacatggaatccttaggctac

SEQ ID NO: 24473 - DNA, 25 bp, probe
atttgattggacgatgttaaagcag

SEQ ID NO: 24474 - DNA, 25 bp, probe
gattggacgatgttaaagcagaaag

SEQ ID NO: 24475 - DNA, 25 bp, probe
tatgactacacatttgattggacga

SEQ ID NO: 24476 - DNA, 25 bp, probe
attcgccatgtacttgaactactgt

SEQ ID NO: 24477 - DNA, 25 bp, probe
atgactacacatttgattggacgat

SEQ ID NO: 24478 - DNA, 25 bp, probe
gaaccaccaatatgactacacattt

SEQ ID NO: 24479 - DNA, 25 bp, probe
catttgattggacgatgttaaagca

SEQ ID NO: 24480 - DNA, 25 bp, probe
atatgactacacatttgattggacg

SEQ ID NO: 24481 - DNA, 25 bp, probe
gcaacacataccgtacagagaagat

SEQ ID NO: 24482 - DNA, 25 bp, probe
accaccaatatgactacacatttga

SEQ ID NO: 24483 - DNA, 25 bp, probe
tgattggacgatgttaaagcagaaa

SEQ ID NO: 24484 - DNA, 25 bp, probe
ttgattggacgatgttaaagcagaa

SEQ ID NO: 24485 - DNA, 25 bp, probe
tttgattggacgatgttaaagcaga

SEQ ID NO: 24486 - DNA, 25 bp, probe
aaccaccaatatgactacacatttg

SEQ ID NO: 24487 - DNA, 25 bp, probe
ccaccaatatgactacacatttgat

SEQ ID NO: 24488 - DNA, 25 bp, probe
ataccgtacagagaagataaacacc

SEQ ID NO: 24489 - DNA, 25 bp, probe
tgactacacatttgattggacgatg

SEQ ID NO: 24490 - DNA, 25 bp, probe
aaagattagtgagaagaagatgtcc

SEQ ID NO: 24491 - DNA, 25 bp, probe
acagagaagataaacacctcattgg

SEQ ID NO: 24492 - DNA, 25 bp, probe
taccgtacagagaagataaacacct

SEQ ID NO: 24493 - DNA, 25 bp, probe
acataccgtacagagaagataaaca

SEQ ID NO: 24494 - DNA, 25 bp, probe
acacataccgtacagagaagataaa

SEQ ID NO: 24495 - DNA, 25 bp, probe
cataccgtacagagaagataaacac

SEQ ID NO: 24496 - DNA, 25 bp, probe
cacataccgtacagagaagataaac

SEQ ID NO: 24497 - DNA, 25 bp, probe
ggcgtcactgtaataagttgttcct

SEQ ID NO: 24498 - DNA, 25 bp, probe
gatgacatggaatccttaggctacg

SEQ ID NO: 24499 - DNA, 25 bp, probe
ttcgccatgtacttgaactactgtc

SEQ ID NO: 24500 - DNA, 25 bp, probe
gaagataaacacctcattggcactg

SEQ ID NO: 24501 - DNA, 25 bp, probe
agaagataaacacctcattggcact

SEQ ID NO: 24502 - DNA, 25 bp, probe
cgtacagagaagataaacacctcat

SEQ ID NO: 24503 - DNA, 25 bp, probe
ctttgaggaagtcccagattacatg

SEQ ID NO: 24504 - DNA, 25 bp, probe
ctgttagaggcagttacttgtgtaa

SEQ ID NO: 24505 - DNA, 25 bp, probe
gaattacatggttcaagcaggagac

SEQ ID NO: 24506 - DNA, 25 bp, probe
cagaggaattacatggttcaagcag

SEQ ID NO: 24507 - DNA, 25 bp, probe
aactttaatgagaacccagaggaat

SEQ ID NO: 24508 - DNA, 25 bp, probe
actttaatgagaacccagaggaatt

SEQ ID NO: 24509 - DNA, 25 bp, probe
caactttaatgagaacccagaggaa

SEQ ID NO: 24510 - DNA, 25 bp, probe
gttgtttcattgtcatagatgccat

SEQ ID NO: 24511 - DNA, 25 bp, probe
actggttgtttcattgtcatagatg

SEQ ID NO: 24512 - DNA, 25 bp, probe
ctggttgtttcattgtcatagatgc

SEQ ID NO: 24513 - DNA, 25 bp, probe
tatctctgtccatgatgcactgtta

SEQ ID NO: 24514 - DNA, 25 bp, probe
cttgtgtaaataccaaagttccagc

SEQ ID NO: 24515 - DNA, 25 bp, probe
ttaatgagaacccagaggaattaca

SEQ ID NO: 24516 - DNA, 25 bp, probe
taatgagaacccagaggaattacat

SEQ ID NO: 24517 - DNA, 25 bp, probe
ggaattacatggttcaagcaggaga

SEQ ID NO: 24518 - DNA, 25 bp, probe
aggaattacatggttcaagcaggag

SEQ ID NO: 24519 - DNA, 25 bp, probe
gaggaattacatggttcaagcagga

SEQ ID NO: 24520 - DNA, 25 bp, probe
agaggaattacatggttcaagcagg

SEQ ID NO: 24521 - DNA, 25 bp, probe
cattgtcatagatgccatgttggaa

SEQ ID NO: 24522 - DNA, 25 bp, probe
ttcattgtcatagatgccatgttgg

SEQ ID NO: 24523 - DNA, 25 bp, probe
tttaatgagaacccagaggaattac

SEQ ID NO: 24524 - DNA, 25 bp, probe
tttcattgtcatagatgccatgttg

SEQ ID NO: 24525 - DNA, 25 bp, probe
gtttcattgtcatagatgccatgtt

SEQ ID NO: 24526 - DNA, 25 bp, probe
ttgtttcattgtcatagatgccatg

SEQ ID NO: 24527 - DNA, 25 bp, probe
ggttgtttcattgtcatagatgcca

SEQ ID NO: 24528 - DNA, 25 bp, probe
tggttgtttcattgtcatagatgcc

SEQ ID NO: 24529 - DNA, 25 bp, probe
aatgagaacccagaggaattacatg

SEQ ID NO: 24530 - DNA, 25 bp, probe
gaccagtgtatctctgtccatgatg

SEQ ID NO: 24531 - DNA, 25 bp, probe
gactggttgtttcattgtcatagat

SEQ ID NO: 24532 - DNA, 25 bp, probe
ctttaatgagaacccagaggaatta

SEQ ID NO: 24533 - DNA, 25 bp, probe
tgtttcattgtcatagatgccatgt

SEQ ID NO: 24534 - DNA, 25 bp, probe
agaccagtgtatctctgtccatgat

SEQ ID NO: 24535 - DNA, 25 bp, probe
atgttggaaagaatcaagcatgaaa

SEQ ID NO: 24536 - DNA, 25 bp, probe
ggactggttgtttcattgtcataga

SEQ ID NO: 24537 - DNA, 25 bp, probe
tggactggttgtttcattgtcatag

SEQ ID NO: 24538 - DNA, 25 bp, probe
ctggactggttgtttcattgtcata

SEQ ID NO: 24539 - DNA, 25 bp, probe
atctctgtccatgatgcactgttag

SEQ ID NO: 24540 - DNA, 25 bp, probe
ccagctagaaacttgtatgcctata

SEQ ID NO: 24541 - DNA, 25 bp, probe
tgtgtaaataccaaagttccagcta

SEQ ID NO: 24542 - DNA, 25 bp, probe
tgttagaggcagttacttgtgtaaa

SEQ ID NO: 24543 - DNA, 25 bp, probe
tgtaaataccaaagttccagctaga

SEQ ID NO: 24544 - DNA, 25 bp, probe
gtgtaaataccaaagttccagctag

SEQ ID NO: 24545 - DNA, 25 bp, probe
ggcagttacttgtgtaaataccaaa

SEQ ID NO: 24546 - DNA, 25 bp, probe
aggcagttacttgtgtaaataccaa

SEQ ID NO: 24547 - DNA, 25 bp, probe
agaggcagttacttgtgtaaatacc

SEQ ID NO: 24548 - DNA, 25 bp, probe
gatcacatcaccatccacctcctag

SEQ ID NO: 24549 - DNA, 25 bp, probe
ctcaagaaaacgctggagaacttct

SEQ ID NO: 24550 - DNA, 25 bp, probe
tcaagaaaacgctggagaacttctg

SEQ ID NO: 24551 - DNA, 25 bp, probe
tgatcacatcaccatccacctccta

SEQ ID NO: 24552 - DNA, 25 bp, probe
tctcaagaaaacgctggagaacttc

SEQ ID NO: 24553 - DNA, 25 bp, probe
ctctcaagaaaacgctggagaactt

SEQ ID NO: 24554 - DNA, 25 bp, probe
caagaaaacgctggagaacttctgg

SEQ ID NO: 24555 - DNA, 25 bp, probe
catgatcacatcaccatccacctcc

SEQ ID NO: 24556 - DNA, 25 bp, probe
ccatgatcacatcaccatccacctc

SEQ ID NO: 24557 - DNA, 25 bp, probe
atgatcacatcaccatccacctcct

SEQ ID NO: 24558 - DNA, 25 bp, probe
cctctcaagaaaacgctggagaact

SEQ ID NO: 24559 - DNA, 25 bp, probe
ctaatcagatgtgtgaatggtcctg

SEQ ID NO: 24560 - DNA, 25 bp, probe
taatcagatgtgtgaatggtcctgt

SEQ ID NO: 24561 - DNA, 25 bp, probe
ctgctaatcagatgtgtgaatggtc

SEQ ID NO: 24562 - DNA, 25 bp, probe
gctaatcagatgtgtgaatggtcct

SEQ ID NO: 24563 - DNA, 25 bp, probe
tgctaatcagatgtgtgaatggtcc

SEQ ID NO: 24564 - DNA, 25 bp, probe
aatcagatgtgtgaatggtcctgtg

SEQ ID NO: 24565 - DNA, 25 bp, probe
actctgctaatcagatgtgtgaatg

SEQ ID NO: 24566 - DNA, 25 bp, probe
cactctgctaatcagatgtgtgaat

SEQ ID NO: 24567 - DNA, 25 bp, probe
ctctgctaatcagatgtgtgaatgg

SEQ ID NO: 24568 - DNA, 25 bp, probe
ctcgaaagccctatacttagcgttt

SEQ ID NO: 24569 - DNA, 25 bp, probe
tctgctaatcagatgtgtgaatggt

SEQ ID NO: 24570 - DNA, 25 bp, probe
aagctctcatggatgatgtggtgaa

SEQ ID NO: 24571 - DNA, 25 bp, probe
atcagatgtgtgaatggtcctgtgg

SEQ ID NO: 24572 - DNA, 25 bp, probe
catgtgtgttctcaattccccttac

SEQ ID NO: 24573 - DNA, 25 bp, probe
ctctcatggatgatgtggtgaaagc

SEQ ID NO: 24574 - DNA, 25 bp, probe
gctctcatggatgatgtggtgaaag

SEQ ID NO: 24575 - DNA, 25 bp, probe
gcactctgctaatcagatgtgtgaa

SEQ ID NO: 24576 - DNA, 25 bp, probe
gaaccaaagctctcatggatgatgt

SEQ ID NO: 24577 - DNA, 25 bp, probe
atgtgtgttctcaattccccttacg

SEQ ID NO: 24578 - DNA, 25 bp, probe
caagaatatgctaggctgcactctg

SEQ ID NO: 24579 - DNA, 25 bp, probe
aaccaaagctctcatggatgatgtg

SEQ ID NO: 24580 - DNA, 25 bp, probe
agctctcatggatgatgtggtgaaa

SEQ ID NO: 24581 - DNA, 25 bp, probe
aaagctctcatggatgatgtggtga

SEQ ID NO: 24582 - DNA, 25 bp, probe
caaagctctcatggatgatgtggtg

SEQ ID NO: 24583 - DNA, 25 bp, probe
tcgaaagccctatacttagcgtttt

SEQ ID NO: 24584 - DNA, 25 bp, probe
atatgctaggctgcactctgctaat

SEQ ID NO: 24585 - DNA, 25 bp, probe
cacaagaatatgctaggctgcactc

SEQ ID NO: 24586 - DNA, 25 bp, probe
aatatgctaggctgcactctgctaa

SEQ ID NO: 24587 - DNA, 25 bp, probe
acaagaatatgctaggctgcactct

SEQ ID NO: 24588 - DNA, 25 bp, probe
gcatgtgtgttctcaattcccctta

SEQ ID NO: 24589 - DNA, 25 bp, probe
tatgctaggctgcactctgctaatc

SEQ ID NO: 24590 - DNA, 25 bp, probe
gaatatgctaggctgcactctgcta

SEQ ID NO: 24591 - DNA, 25 bp, probe
tctcatggatgatgtggtgaaagcc

SEQ ID NO: 24592 - DNA, 25 bp, probe
ctgcactctgctaatcagatgtgtg

SEQ ID NO: 24593 - DNA, 25 bp, probe
ctaggctgcactctgctaatcagat

SEQ ID NO: 24594 - DNA, 25 bp, probe
tgcactctgctaatcagatgtgtga

SEQ ID NO: 24595 - DNA, 25 bp, probe
taggctgcactctgctaatcagatg

SEQ ID NO: 24596 - DNA, 25 bp, probe
ctcatggatgatgtggtgaaagcca

SEQ ID NO: 24597 - DNA, 25 bp, probe
aagaatatgctaggctgcactctgc

SEQ ID NO: 24598 - DNA, 25 bp, probe
tgtgtgttctcaattccccttacgg

SEQ ID NO: 24599 - DNA, 25 bp, probe
ctacgcgcatgtgtgttctcaattc

SEQ ID NO: 24600 - DNA, 25 bp, probe
ccaaagctctcatggatgatgtggt

SEQ ID NO: 24601 - DNA, 25 bp, probe
accaaagctctcatggatgatgtgg

SEQ ID NO: 24602 - DNA, 25 bp, probe
gctcgaaagccctatacttagcgtt

SEQ ID NO: 24603 - DNA, 25 bp, probe
caacttatgacactactcttctgga

SEQ ID NO: 24604 - DNA, 25 bp, probe
agcaacttatgacactactcttctg

SEQ ID NO: 24605 - DNA, 25 bp, probe
aagcaacttatgacactactcttct

SEQ ID NO: 24606 - DNA, 25 bp, probe
ctcttgagacttattcgctactacg

SEQ ID NO: 24607 - DNA, 25 bp, probe
gcaacttatgacactactcttctgg

SEQ ID NO: 24608 - DNA, 25 bp, probe
acttatgacactactcttctggaga

SEQ ID NO: 24609 - DNA, 25 bp, probe
aacttatgacactactcttctggag

SEQ ID NO: 24610 - DNA, 25 bp, probe
ctcattgttgtactgctgttcattg

SEQ ID NO: 24611 - DNA, 25 bp, probe
gatctcttgagacttattcgctact

SEQ ID NO: 24612 - DNA, 25 bp, probe
tctcttgagacttattcgctactac

SEQ ID NO: 24613 - DNA, 25 bp, probe
cttatgacactactcttctggagaa

SEQ ID NO: 24614 - DNA, 25 bp, probe
aagactccagtggtcatagatacaa

SEQ ID NO: 24615 - DNA, 25 bp, probe
cctcattgttgtactgctgttcatt

SEQ ID NO: 24616 - DNA, 25 bp, probe
atctcttgagacttattcgctacta

SEQ ID NO: 24617 - DNA, 25 bp, probe
gactccagtggtcatagatacaact

SEQ ID NO: 24618 - DNA, 25 bp, probe
agactccagtggtcatagatacaac

SEQ ID NO: 24619 - DNA, 25 bp, probe
tcattgttgtactgctgttcattgc

SEQ ID NO: 24620 - DNA, 25 bp, probe
acctcattgttgtactgctgttcat

SEQ ID NO: 24621 - DNA, 25 bp, probe
aaagcaacttatgacactactcttc

SEQ ID NO: 24622 - DNA, 25 bp, probe
tattcgctactacgagaacagtatg

SEQ ID NO: 24623 - DNA, 25 bp, probe
cttattcgctactacgagaacagta

SEQ ID NO: 24624 - DNA, 25 bp, probe
agaacctcattgttgtactgctgtt

SEQ ID NO: 24625 - DNA, 25 bp, probe
aagaacctcattgttgtactgctgt

SEQ ID NO: 24626 - DNA, 25 bp, probe
gagacttattcgctactacgagaac

SEQ ID NO: 24627 - DNA, 25 bp, probe
cttgagacttattcgctactacgag

SEQ ID NO: 24628 - DNA, 25 bp, probe
gtaaagcaacttatgacactactct

SEQ ID NO: 24629 - DNA, 25 bp, probe
ttattcgctactacgagaacagtat

SEQ ID NO: 24630 - DNA, 25 bp, probe
gacttattcgctactacgagaacag

SEQ ID NO: 24631 - DNA, 25 bp, probe
tgagacttattcgctactacgagaa

SEQ ID NO: 24632 - DNA, 25 bp, probe
ttgagacttattcgctactacgaga

SEQ ID NO: 24633 - DNA, 25 bp, probe
tcttgagacttattcgctactacga

SEQ ID NO: 24634 - DNA, 25 bp, probe
agacttattcgctactacgagaaca

SEQ ID NO: 24635 - DNA, 25 bp, probe
aacctcattgttgtactgctgttca

SEQ ID NO: 24636 - DNA, 25 bp, probe
taaagaacctcattgttgtactgct

SEQ ID NO: 24637 - DNA, 25 bp, probe
ataaagaacctcattgttgtactgc

SEQ ID NO: 24638 - DNA, 25 bp, probe
aagatgatgatgcagtacaattcgc

SEQ ID NO: 24639 - DNA, 25 bp, probe
acttattcgctactacgagaacagt

SEQ ID NO: 24640 - DNA, 25 bp, probe
tgggagtacaattcaagatgagatt

SEQ ID NO: 24641 - DNA, 25 bp, probe
gtttcataaagaacctcattgttgt

SEQ ID NO: 24642 - DNA, 25 bp, probe
atgggagtacaattcaagatgagat

SEQ ID NO: 24643 - DNA, 25 bp, probe
tatgacactactcttctggagaaag

SEQ ID NO: 24644 - DNA, 25 bp, probe
caaagactccagtggtcatagatac

SEQ ID NO: 24645 - DNA, 25 bp, probe
tcaaagactccagtggtcatagata

SEQ ID NO: 24646 - DNA, 25 bp, probe
tgtaaagcaacttatgacactactc

SEQ ID NO: 24647 - DNA, 25 bp, probe
ctgtatgagacctatcagagcagcc

SEQ ID NO: 24648 - DNA, 25 bp, probe
agctgtatgagacctatcagagcag

SEQ ID NO: 24649 - DNA, 25 bp, probe
ctggactcttctggcagctagttag

SEQ ID NO: 24650 - DNA, 25 bp, probe
ggactcttctggcagctagttagtg

SEQ ID NO: 24651 - DNA, 25 bp, probe
tggactcttctggcagctagttagt

SEQ ID NO: 24652 - DNA, 25 bp, probe
gactcttctggcagctagttagtgc

SEQ ID NO: 24653 - DNA, 25 bp, probe
tttcttattgctgtggaacctcttt

SEQ ID NO: 24654 - DNA, 25 bp, probe
aagcaatgacaagcactttactttc

SEQ ID NO: 24655 - DNA, 25 bp, probe
gaagcaatgacaagcactttacttt

SEQ ID NO: 24656 - DNA, 25 bp, probe
aaggaaggtaaagtgagaggtttag

SEQ ID NO: 24657 - DNA, 25 bp, probe
caaggaaggtaaagtgagaggttta

SEQ ID NO: 24658 - DNA, 25 bp, probe
gaaggtaaagtgagaggtttaggtc

SEQ ID NO: 24659 - DNA, 25 bp, probe
tttgttcaaggaaggtaaagtgaga

SEQ ID NO: 24660 - DNA, 25 bp, probe
ctttgaagcaatgacaagcacttta

SEQ ID NO: 24661 - DNA, 25 bp, probe
ctcctgttcgctcataaagaagttt

SEQ ID NO: 24662 - DNA, 25 bp, probe
ttgttcaaggaaggtaaagtgagag

SEQ ID NO: 24663 - DNA, 25 bp, probe
tgccaaatgattagttgatgtatgt

SEQ ID NO: 24664 - DNA, 25 bp, probe
tgtatgccaaatgattagttgatgt

SEQ ID NO: 24665 - DNA, 25 bp, probe
tttgaagcaatgacaagcactttac

SEQ ID NO: 24666 - DNA, 25 bp, probe
gtaaagtgagaggtttaggtcagtg

SEQ ID NO: 24667 - DNA, 25 bp, probe
gtttcctctttgaagcaatgacaag

SEQ ID NO: 24668 - DNA, 25 bp, probe
taaagtgagaggtttaggtcagtgt

SEQ ID NO: 24669 - DNA, 25 bp, probe
aaggtaaagtgagaggtttaggtca

SEQ ID NO: 24670 - DNA, 25 bp, probe
tgaagcaatgacaagcactttactt

SEQ ID NO: 24671 - DNA, 25 bp, probe
aaccattgtgtgtttcctctttgaa

SEQ ID NO: 24672 - DNA, 25 bp, probe
caaagtctcctgttcgctcataaag

SEQ ID NO: 24673 - DNA, 25 bp, probe
aggaaggtaaagtgagaggtttagg

SEQ ID NO: 24674 - DNA, 25 bp, probe
caaagattgacccagttacttgagg

SEQ ID NO: 24675 - DNA, 25 bp, probe
ccaaagattgacccagttacttgag

SEQ ID NO: 24676 - DNA, 25 bp, probe
accattgtgtgtttcctctttgaag

SEQ ID NO: 24677 - DNA, 25 bp, probe
caatgacaagcactttactttcacg

SEQ ID NO: 24678 - DNA, 25 bp, probe
aggtaaagtgagaggtttaggtcag

SEQ ID NO: 24679 - DNA, 25 bp, probe
ttgaagcaatgacaagcactttact

SEQ ID NO: 24680 - DNA, 25 bp, probe
ggaaggtaaagtgagaggtttaggt

SEQ ID NO: 24681 - DNA, 25 bp, probe
gttaaacagaggcattgagaaaggg

SEQ ID NO: 24682 - DNA, 25 bp, probe
tcaaggaaggtaaagtgagaggttt

SEQ ID NO: 24683 - DNA, 25 bp, probe
ttcaaggaaggtaaagtgagaggtt

SEQ ID NO: 24684 - DNA, 25 bp, probe
tgtaatacagacggcaatgcaatag

SEQ ID NO: 24685 - DNA, 25 bp, probe
gcaatgacaagcactttactttcac

SEQ ID NO: 24686 - DNA, 25 bp, probe
agcaatgacaagcactttactttca

SEQ ID NO: 24687 - DNA, 25 bp, probe
ggtaaagtgagaggtttaggtcagt

SEQ ID NO: 24688 - DNA, 25 bp, probe
gccaaatgattagttgatgtatgtt

SEQ ID NO: 24689 - DNA, 25 bp, probe
ttgtgtgtttcctctttgaagcaat

SEQ ID NO: 24690 - DNA, 25 bp, probe
attgtgtgtttcctctttgaagcaa

SEQ ID NO: 24691 - DNA, 25 bp, probe
tctcctgttcgctcataaagaagtt

SEQ ID NO: 24692 - DNA, 25 bp, probe
aagtctcctgttcgctcataaagaa

SEQ ID NO: 24693 - DNA, 25 bp, probe
aaagtctcctgttcgctcataaaga

SEQ ID NO: 24694 - DNA, 25 bp, probe
aagtgagaggtttaggtcagtgttt

SEQ ID NO: 24695 - DNA, 25 bp, probe
aaagtgagaggtttaggtcagtgtt

SEQ ID NO: 24696 - DNA, 25 bp, probe
gagaaatgtatgccaaatgattagt

SEQ ID NO: 24697 - DNA, 25 bp, probe
aaagaaagaaagaggtcacaggctc

SEQ ID NO: 24698 - DNA, 25 bp, probe
actggaggaagagacttaaggctac

SEQ ID NO: 24699 - DNA, 25 bp, probe
cactggaggaagagacttaaggcta

SEQ ID NO: 24700 - DNA, 25 bp, probe
ataaaagaaagaaagaggtcacagg

SEQ ID NO: 24701 - DNA, 25 bp, probe
ccttctgggaaatgtagtcttttga

SEQ ID NO: 24702 - DNA, 25 bp, probe
cttctgggaaatgtagtcttttgaa

SEQ ID NO: 24703 - DNA, 25 bp, probe
taaaagaaagaaagaggtcacaggc

SEQ ID NO: 24704 - DNA, 25 bp, probe
ttctgggaaatgtagtcttttgaaa

SEQ ID NO: 24705 - DNA, 25 bp, probe
tctgggaaatgtagtcttttgaaag

SEQ ID NO: 24706 - DNA, 25 bp, probe
gccttctgggaaatgtagtcttttg

SEQ ID NO: 24707 - DNA, 25 bp, probe
aaaagaaagaaagaggtcacaggct

SEQ ID NO: 24708 - DNA, 25 bp, probe
aataaaagaaagaaagaggtcacag

SEQ ID NO: 24709 - DNA, 25 bp, probe
aagaaagaaagaggtcacaggctca

SEQ ID NO: 24710 - DNA, 25 bp, probe
cggaagttatttattttagcgtaga

SEQ ID NO: 24711 - DNA, 25 bp, probe
ctggaggaagagacttaaggctacg

SEQ ID NO: 24712 - DNA, 25 bp, probe
agaaagaaagaggtcacaggctcag

SEQ ID NO: 24713 - DNA, 25 bp, probe
aaataaaagaaagaaagaggtcaca

SEQ ID NO: 24714 - DNA, 25 bp, probe
gtccactggaggaagagacttaagg

SEQ ID NO: 24715 - DNA, 25 bp, probe
tttagcgtagaagactacttttccc

SEQ ID NO: 24716 - DNA, 25 bp, probe
aaagtgccctcgatcagtttcctaa

SEQ ID NO: 24717 - DNA, 25 bp, probe
ttttagcgtagaagactacttttcc

SEQ ID NO: 24718 - DNA, 25 bp, probe
cgtccactggaggaagagacttaag

SEQ ID NO: 24719 - DNA, 25 bp, probe
gacccggaagttatttattttagcg

SEQ ID NO: 24720 - DNA, 25 bp, probe
ccatattttgacccggaagttattt

SEQ ID NO: 24721 - DNA, 25 bp, probe
tgacccggaagttatttattttagc

SEQ ID NO: 24722 - DNA, 25 bp, probe
aagtgccctcgatcagtttcctaag

SEQ ID NO: 24723 - DNA, 25 bp, probe
cccggaagttatttattttagcgta

SEQ ID NO: 24724 - DNA, 25 bp, probe
acccggaagttatttattttagcgt

SEQ ID NO: 24725 - DNA, 25 bp, probe
aattcaacgtccactggaggaagag

SEQ ID NO: 24726 - DNA, 25 bp, probe
cccatattttgacccggaagttatt

SEQ ID NO: 24727 - DNA, 25 bp, probe
tagtcttttgaaagaagcctggaat

SEQ ID NO: 24728 - DNA, 25 bp, probe
aatgtagtcttttgaaagaagcctg

SEQ ID NO: 24729 - DNA, 25 bp, probe
ctgggaaatgtagtcttttgaaaga

SEQ ID NO: 24730 - DNA, 25 bp, probe
aaatgtagtcttttgaaagaagcct

SEQ ID NO: 24731 - DNA, 25 bp, probe
ttagcgtagaagactacttttcccg

SEQ ID NO: 24732 - DNA, 25 bp, probe
agtcttttgaaagaagcctggaatt

SEQ ID NO: 24733 - DNA, 25 bp, probe
acgtccactggaggaagagacttaa

SEQ ID NO: 24734 - DNA, 25 bp, probe
aacgtccactggaggaagagactta

SEQ ID NO: 24735 - DNA, 25 bp, probe
gaaatgtagtcttttgaaagaagcc

SEQ ID NO: 24736 - DNA, 25 bp, probe
ggaaatgtagtcttttgaaagaagc

SEQ ID NO: 24737 - DNA, 25 bp, probe
cgtcagttttgtgttaaataaaaga

SEQ ID NO: 24738 - DNA, 25 bp, probe
gtagtcttttgaaagaagcctggaa

SEQ ID NO: 24739 - DNA, 25 bp, probe
atgtagtcttttgaaagaagcctgg

SEQ ID NO: 24740 - DNA, 25 bp, probe
tgggaaatgtagtcttttgaaagaa

SEQ ID NO: 24741 - DNA, 25 bp, probe
tcagtgatcctattcagcagatatt

SEQ ID NO: 24742 - DNA, 25 bp, probe
atcagtgatcctattcagcagatat

SEQ ID NO: 24743 - DNA, 25 bp, probe
taatctatatcacacagcttcctcc

SEQ ID NO: 24744 - DNA, 25 bp, probe
aatctatatcacacagcttcctcca

SEQ ID NO: 24745 - DNA, 25 bp, probe
aacgaaatcctgtcagatgataact

SEQ ID NO: 24746 - DNA, 25 bp, probe
tgtaacgaaatcctgtcagatgata

SEQ ID NO: 24747 - DNA, 25 bp, probe
cagtgatcctattcagcagatatta

SEQ ID NO: 24748 - DNA, 25 bp, probe
cctattcagcagatattaattcagc

SEQ ID NO: 24749 - DNA, 25 bp, probe
taacgaaatcctgtcagatgataac

SEQ ID NO: 24750 - DNA, 25 bp, probe
gtaacgaaatcctgtcagatgataa

SEQ ID NO: 24751 - DNA, 25 bp, probe
ataatctatatcacacagcttcctc

SEQ ID NO: 24752 - DNA, 25 bp, probe
ctgtaacgaaatcctgtcagatgat

SEQ ID NO: 24753 - DNA, 25 bp, probe
agtgatcctattcagcagatattaa

SEQ ID NO: 24754 - DNA, 25 bp, probe
aataatctatatcacacagcttcct

SEQ ID NO: 24755 - DNA, 25 bp, probe
cctgtaacgaaatcctgtcagatga

SEQ ID NO: 24756 - DNA, 25 bp, probe
gatcagtgatcctattcagcagata

SEQ ID NO: 24757 - DNA, 25 bp, probe
agatcagtgatcctattcagcagat

SEQ ID NO: 24758 - DNA, 25 bp, probe
tcctattcagcagatattaattcag

SEQ ID NO: 24759 - DNA, 25 bp, probe
gtgatcctattcagcagatattaat

SEQ ID NO: 24760 - DNA, 25 bp, probe
cagatcagtgatcctattcagcaga

SEQ ID NO: 24761 - DNA, 25 bp, probe
tcagatcagtgatcctattcagcag

SEQ ID NO: 24762 - DNA, 25 bp, probe
aacgaagacgcacacaaaggtattt

SEQ ID NO: 24763 - DNA, 25 bp, probe
gtcagatcagtgatcctattcagca

SEQ ID NO: 24764 - DNA, 25 bp, probe
gaacgaagacgcacacaaaggtatt

SEQ ID NO: 24765 - DNA, 25 bp, probe
ctattcagcagatattaattcagct

SEQ ID NO: 24766 - DNA, 25 bp, probe
atcctattcagcagatattaattca

SEQ ID NO: 24767 - DNA, 25 bp, probe
aaataatctatatcacacagcttcc

SEQ ID NO: 24768 - DNA, 25 bp, probe
gaacaggatcaagaccaagaccagg

SEQ ID NO: 24769 - DNA, 25 bp, probe
gcctgtaacgaaatcctgtcagatg

SEQ ID NO: 24770 - DNA, 25 bp, probe
cgtcagatcagtgatcctattcagc

SEQ ID NO: 24771 - DNA, 25 bp, probe
gcgtcagatcagtgatcctattcag

SEQ ID NO: 24772 - DNA, 25 bp, probe
tgatcctattcagcagatattaatt

SEQ ID NO: 24773 - DNA, 25 bp, probe
gtgcgtcagatcagtgatcctattc

SEQ ID NO: 24774 - DNA, 25 bp, probe
gatcctattcagcagatattaattc

SEQ ID NO: 24775 - DNA, 25 bp, probe
tgcgtcagatcagtgatcctattca

SEQ ID NO: 24776 - DNA, 25 bp, probe
agtgcgtcagatcagtgatcctatt

SEQ ID NO: 24777 - DNA, 25 bp, probe
aagtgcgtcagatcagtgatcctat

SEQ ID NO: 24778 - DNA, 25 bp, probe
cacaaaataatctatatcacacagc

SEQ ID NO: 24779 - DNA, 25 bp, probe
gcacaaaataatctatatcacacag

SEQ ID NO: 24780 - DNA, 25 bp, probe
gctgcacaaaataatctatatcaca

SEQ ID NO: 24781 - DNA, 25 bp, probe
acgaagacgcacacaaaggtatttt

SEQ ID NO: 24782 - DNA, 25 bp, probe
agctgcacaaaataatctatatcac

SEQ ID NO: 24783 - DNA, 25 bp, probe
gaggaaagtgcgtcagatcagtgat

SEQ ID NO: 24784 - DNA, 25 bp, probe
tgcacaaaataatctatatcacaca

SEQ ID NO: 24785 - DNA, 25 bp, probe
tatgaaagactaaggatgctgttgc

SEQ ID NO: 24786 - DNA, 25 bp, probe
atatgaaagactaaggatgctgttg

SEQ ID NO: 24787 - DNA, 25 bp, probe
gatgactgggatacctggatgtaaa

SEQ ID NO: 24788 - DNA, 25 bp, probe
aatatgaaagactaaggatgctgtt

SEQ ID NO: 24789 - DNA, 25 bp, probe
aaatatgaaagactaaggatgctgt

SEQ ID NO: 24790 - DNA, 25 bp, probe
attatacacatttccagttccatgc

SEQ ID NO: 24791 - DNA, 25 bp, probe
gatgatgatgaagtttgcggagaag

SEQ ID NO: 24792 - DNA, 25 bp, probe
gcctcaataccttgtttaggatttc

SEQ ID NO: 24793 - DNA, 25 bp, probe
agatgactgggatacctggatgtaa

SEQ ID NO: 24794 - DNA, 25 bp, probe
taccttgtttaggatttcttcaccc

SEQ ID NO: 24795 - DNA, 25 bp, probe
cttgtttaggatttcttcacccttt

SEQ ID NO: 24796 - DNA, 25 bp, probe
ccttgtttaggatttcttcaccctt

SEQ ID NO: 24797 - DNA, 25 bp, probe
gaaatggtacagatgactgggatac

SEQ ID NO: 24798 - DNA, 25 bp, probe
ataccttgtttaggatttcttcacc

SEQ ID NO: 24799 - DNA, 25 bp, probe
cctcaataccttgtttaggatttct

SEQ ID NO: 24800 - DNA, 25 bp, probe
tgatgatgatgaagtttgcggagaa

SEQ ID NO: 24801 - DNA, 25 bp, probe
accttgtttaggatttcttcaccct

SEQ ID NO: 24802 - DNA, 25 bp, probe
ggaaatggtacagatgactgggata

SEQ ID NO: 24803 - DNA, 25 bp, probe
tatacacatttccagttccatgcaa

SEQ ID NO: 24804 - DNA, 25 bp, probe
ttatacacatttccagttccatgca

SEQ ID NO: 24805 - DNA, 25 bp, probe
ctgatgatgatgaagtttgcggaga

SEQ ID NO: 24806 - DNA, 25 bp, probe
aattatacacatttccagttccatg

SEQ ID NO: 24807 - DNA, 25 bp, probe
atgaaagactaaggatgctgttgcc

SEQ ID NO: 24808 - DNA, 25 bp, probe
atgatgatgaagtttgcggagaagg

SEQ ID NO: 24809 - DNA, 25 bp, probe
taaatatgaaagactaaggatgctg

SEQ ID NO: 24810 - DNA, 25 bp, probe
gactgggatacctggatgtaaaata

SEQ ID NO: 24811 - DNA, 25 bp, probe
cagatgactgggatacctggatgta

SEQ ID NO: 24812 - DNA, 25 bp, probe
tacagatgactgggatacctggatg

SEQ ID NO: 24813 - DNA, 25 bp, probe
gtcctccctgttttcttctgtaatt

SEQ ID NO: 24814 - DNA, 25 bp, probe
aataccttgtttaggatttcttcac

SEQ ID NO: 24815 - DNA, 25 bp, probe
caataccttgtttaggatttcttca

SEQ ID NO: 24816 - DNA, 25 bp, probe
taagtcctccctgttttcttctgta

SEQ ID NO: 24817 - DNA, 25 bp, probe
actgggatacctggatgtaaaatat

SEQ ID NO: 24818 - DNA, 25 bp, probe
atacacatttccagttccatgcaac

SEQ ID NO: 24819 - DNA, 25 bp, probe
gtaattatacacatttccagttcca

SEQ ID NO: 24820 - DNA, 25 bp, probe
tgactgggatacctggatgtaaaat

SEQ ID NO: 24821 - DNA, 25 bp, probe
atgactgggatacctggatgtaaaa

SEQ ID NO: 24822 - DNA, 25 bp, probe
agtcctccctgttttcttctgtaat

SEQ ID NO: 24823 - DNA, 25 bp, probe
ttcttcacccttttgtcaaattgtt

SEQ ID NO: 24824 - DNA, 25 bp, probe
tttcttcacccttttgtcaaattgt

SEQ ID NO: 24825 - DNA, 25 bp, probe
tcttcacccttttgtcaaattgtta

SEQ ID NO: 24826 - DNA, 25 bp, probe
gtacagatgactgggatacctggat

SEQ ID NO: 24827 - DNA, 25 bp, probe
tcaataccttgtttaggatttcttc

SEQ ID NO: 24828 - DNA, 25 bp, probe
ctcaataccttgtttaggatttctt

SEQ ID NO: 24829 - DNA, 25 bp, probe
aagatagcattacaccagagagaag

SEQ ID NO: 24830 - DNA, 25 bp, probe
gaagatagcattacaccagagagaa

SEQ ID NO: 24831 - DNA, 25 bp, probe
tactgaagatgaacaagaagagaca

SEQ ID NO: 24832 - DNA, 25 bp, probe
actgaagatgaacaagaagagacat

SEQ ID NO: 24833 - DNA, 25 bp, probe
atagcattacaccagagagaaggaa

SEQ ID NO: 24834 - DNA, 25 bp, probe
agatagcattacaccagagagaagg

SEQ ID NO: 24835 - DNA, 25 bp, probe
cctgtctagtatctcctatgaacca

SEQ ID NO: 24836 - DNA, 25 bp, probe
acctgtctagtatctcctatgaacc

SEQ ID NO: 24837 - DNA, 25 bp, probe
gatagcattacaccagagagaagga

SEQ ID NO: 24838 - DNA, 25 bp, probe
ggaagatagcattacaccagagaga

SEQ ID NO: 24839 - DNA, 25 bp, probe
tagtatctcctatgaaccagacagc

SEQ ID NO: 24840 - DNA, 25 bp, probe
gacctgtctagtatctcctatgaac

SEQ ID NO: 24841 - DNA, 25 bp, probe
tctagtatctcctatgaaccagaca

SEQ ID NO: 24842 - DNA, 25 bp, probe
tgtctagtatctcctatgaaccaga

SEQ ID NO: 24843 - DNA, 25 bp, probe
gtactgaagatgaacaagaagagac

SEQ ID NO: 24844 - DNA, 25 bp, probe
ctagtatctcctatgaaccagacag

SEQ ID NO: 24845 - DNA, 25 bp, probe
gattggaattggatcatagacggac

SEQ ID NO: 24846 - DNA, 25 bp, probe
attcaagacctgtctagtatctcct

SEQ ID NO: 24847 - DNA, 25 bp, probe
acggatattcaagacctgtctagta

SEQ ID NO: 24848 - DNA, 25 bp, probe
attggaattggatcatagacggact

SEQ ID NO: 24849 - DNA, 25 bp, probe
ttcaagacctgtctagtatctccta

SEQ ID NO: 24850 - DNA, 25 bp, probe
agacctgtctagtatctcctatgaa

SEQ ID NO: 24851 - DNA, 25 bp, probe
aagacctgtctagtatctcctatga

SEQ ID NO: 24852 - DNA, 25 bp, probe
caagacctgtctagtatctcctatg

SEQ ID NO: 24853 - DNA, 25 bp, probe
tcaagacctgtctagtatctcctat

SEQ ID NO: 24854 - DNA, 25 bp, probe
cggatattcaagacctgtctagtat

SEQ ID NO: 24855 - DNA, 25 bp, probe
ctgtctagtatctcctatgaaccag

SEQ ID NO: 24856 - DNA, 25 bp, probe
ttgtcagactgattggaattggatc

SEQ ID NO: 24857 - DNA, 25 bp, probe
cttgtcagactgattggaattggat

SEQ ID NO: 24858 - DNA, 25 bp, probe
tattcaagacctgtctagtatctcc

SEQ ID NO: 24859 - DNA, 25 bp, probe
ttggaattggatcatagacggactc

SEQ ID NO: 24860 - DNA, 25 bp, probe
ggattctctccttacttcctctgaa

SEQ ID NO: 24861 - DNA, 25 bp, probe
aactggattctctccttacttcctc

SEQ ID NO: 24862 - DNA, 25 bp, probe
tgacttgtcagactgattggaattg

SEQ ID NO: 24863 - DNA, 25 bp, probe
gtgacttgtcagactgattggaatt

SEQ ID NO: 24864 - DNA, 25 bp, probe
cagttccagttctgtaagtctcact

SEQ ID NO: 24865 - DNA, 25 bp, probe
attacaccagagagaaggaaatcag

SEQ ID NO: 24866 - DNA, 25 bp, probe
cattacaccagagagaaggaaatca

SEQ ID NO: 24867 - DNA, 25 bp, probe
tcacatttcaggttaagacagagtt

SEQ ID NO: 24868 - DNA, 25 bp, probe
atcacatttcaggttaagacagagt

SEQ ID NO: 24869 - DNA, 25 bp, probe
caaaggaactgaaagagaaagacat

SEQ ID NO: 24870 - DNA, 25 bp, probe
aagagaaagacatatcattgacgga

SEQ ID NO: 24871 - DNA, 25 bp, probe
gaacaagaagagacatcaaaggagt

SEQ ID NO: 24872 - DNA, 25 bp, probe
ttacaccagagagaaggaaatcaga

SEQ ID NO: 24873 - DNA, 25 bp, probe
caggttaccatatacttcagtgaca

SEQ ID NO: 24874 - DNA, 25 bp, probe
ccaggttaccatatacttcagtgac

SEQ ID NO: 24875 - DNA, 25 bp, probe
gaccaggttaccatatacttcagtg

SEQ ID NO: 24876 - DNA, 25 bp, probe
accaggttaccatatacttcagtga

SEQ ID NO: 24877 - DNA, 25 bp, probe
aggttaccatatacttcagtgacat

SEQ ID NO: 24878 - DNA, 25 bp, probe
ttgaccaggttaccatatacttcag

SEQ ID NO: 24879 - DNA, 25 bp, probe
taccatatacttcagtgacattgtg

SEQ ID NO: 24880 - DNA, 25 bp, probe
tgaccaggttaccatatacttcagt

SEQ ID NO: 24881 - DNA, 25 bp, probe
ggttaccatatacttcagtgacatt

SEQ ID NO: 24882 - DNA, 25 bp, probe
agatcaataacatggctctggatat

SEQ ID NO: 24883 - DNA, 25 bp, probe
gagatcaataacatggctctggata

SEQ ID NO: 24884 - DNA, 25 bp, probe
ttaccatatacttcagtgacattgt

SEQ ID NO: 24885 - DNA, 25 bp, probe
gttaccatatacttcagtgacattg

SEQ ID NO: 24886 - DNA, 25 bp, probe
accatatacttcagtgacattgtgg

SEQ ID NO: 24887 - DNA, 25 bp, probe
tatacttcagtgacattgtgggttt

SEQ ID NO: 24888 - DNA, 25 bp, probe
atatacttcagtgacattgtgggtt

SEQ ID NO: 24889 - DNA, 25 bp, probe
catatacttcagtgacattgtgggt

SEQ ID NO: 24890 - DNA, 25 bp, probe
gatcaataacatggctctggatatc

SEQ ID NO: 24891 - DNA, 25 bp, probe
atacttcagtgacattgtgggtttc

SEQ ID NO: 24892 - DNA, 25 bp, probe
tttgaccaggttaccatatacttca

SEQ ID NO: 24893 - DNA, 25 bp, probe
cgagatcaataacatggctctggat

SEQ ID NO: 24894 - DNA, 25 bp, probe
ccttgatgaaagctaccaaattgat

SEQ ID NO: 24895 - DNA, 25 bp, probe
tacttcagtgacattgtgggtttca

SEQ ID NO: 24896 - DNA, 25 bp, probe
aacgatctctacatgctgtttgatg

SEQ ID NO: 24897 - DNA, 25 bp, probe
caacgatctctacatgctgtttgat

SEQ ID NO: 24898 - DNA, 25 bp, probe
ccatatacttcagtgacattgtggg

SEQ ID NO: 24899 - DNA, 25 bp, probe
cttgctcaacgatctctacatgctg

SEQ ID NO: 24900 - DNA, 25 bp, probe
gatctctacatgctgtttgatgctg

SEQ ID NO: 24901 - DNA, 25 bp, probe
ctcaacgatctctacatgctgtttg

SEQ ID NO: 24902 - DNA, 25 bp, probe
agatactgctcagccttgatgaaag

SEQ ID NO: 24903 - DNA, 25 bp, probe
gccttgatgaaagctaccaaattga

SEQ ID NO: 24904 - DNA, 25 bp, probe
ctctacatgctgtttgatgctgttc

SEQ ID NO: 24905 - DNA, 25 bp, probe
atctctacatgctgtttgatgctgt

SEQ ID NO: 24906 - DNA, 25 bp, probe
cttgatgaaagctaccaaattgata

SEQ ID NO: 24907 - DNA, 25 bp, probe
ctacatgctgtttgatgctgttctg

SEQ ID NO: 24908 - DNA, 25 bp, probe
cagatactgctcagccttgatgaaa

SEQ ID NO: 24909 - DNA, 25 bp, probe
tctacatgctgtttgatgctgttct

SEQ ID NO: 24910 - DNA, 25 bp, probe
tctctacatgctgtttgatgctgtt

SEQ ID NO: 24911 - DNA, 25 bp, probe
ttttgaccaggttaccatatacttc

SEQ ID NO: 24912 - DNA, 25 bp, probe
ccgagatcaataacatggctctgga

SEQ ID NO: 24913 - DNA, 25 bp, probe
tgatgaaagctaccaaattgatatc

SEQ ID NO: 24914 - DNA, 25 bp, probe
attgtgggtttcaccatcatctcag

SEQ ID NO: 24915 - DNA, 25 bp, probe
ccagatactgctcagccttgatgaa

SEQ ID NO: 24916 - DNA, 25 bp, probe
ttgatgaaagctaccaaattgatat

SEQ ID NO: 24917 - DNA, 25 bp, probe
tcagagattacacagttaggatgct

SEQ ID NO: 24918 - DNA, 25 bp, probe
ctcagagattacacagttaggatgc

SEQ ID NO: 24919 - DNA, 25 bp, probe
gaagcctcagagattacacagttag

SEQ ID NO: 24920 - DNA, 25 bp, probe
acagttacagtctaattgtcttgga

SEQ ID NO: 24921 - DNA, 25 bp, probe
ggaagcctcagagattacacagtta

SEQ ID NO: 24922 - DNA, 25 bp, probe
aacagttacagtctaattgtcttgg

SEQ ID NO: 24923 - DNA, 25 bp, probe
cagttacagtctaattgtcttggac

SEQ ID NO: 24924 - DNA, 25 bp, probe
cctcagagattacacagttaggatg

SEQ ID NO: 24925 - DNA, 25 bp, probe
gagattacacagttaggatgctgac

SEQ ID NO: 24926 - DNA, 25 bp, probe
agagattacacagttaggatgctga

SEQ ID NO: 24927 - DNA, 25 bp, probe
cagagattacacagttaggatgctg

SEQ ID NO: 24928 - DNA, 25 bp, probe
gattacacagttaggatgctgacac

SEQ ID NO: 24929 - DNA, 25 bp, probe
agattacacagttaggatgctgaca

SEQ ID NO: 24930 - DNA, 25 bp, probe
aagacttctgagctataacttgtgg

SEQ ID NO: 24931 - DNA, 25 bp, probe
gcctcagagattacacagttaggat

SEQ ID NO: 24932 - DNA, 25 bp, probe
attacacagttaggatgctgacaca

SEQ ID NO: 24933 - DNA, 25 bp, probe
gaacagttacagtctaattgtcttg

SEQ ID NO: 24934 - DNA, 25 bp, probe
agaacagttacagtctaattgtctt

SEQ ID NO: 24935 - DNA, 25 bp, probe
tatattgggttcacattctggagtt

SEQ ID NO: 24936 - DNA, 25 bp, probe
aagcctcagagattacacagttagg

SEQ ID NO: 24937 - DNA, 25 bp, probe
ctacatctcacactaacaggcaaat

SEQ ID NO: 24938 - DNA, 25 bp, probe
ggttcacattctggagttctcttta

SEQ ID NO: 24939 - DNA, 25 bp, probe
atattgggttcacattctggagttc

SEQ ID NO: 24940 - DNA, 25 bp, probe
tacatctcacactaacaggcaaatt

SEQ ID NO: 24941 - DNA, 25 bp, probe
ctttaaggctcccaacaatgctata

SEQ ID NO: 24942 - DNA, 25 bp, probe
ataatgctccctacatctcacacta

SEQ ID NO: 24943 - DNA, 25 bp, probe
tagaatccataatgctccctacatc

SEQ ID NO: 24944 - DNA, 25 bp, probe
gaatccataatgctccctacatctc

SEQ ID NO: 24945 - DNA, 25 bp, probe
taatgctccctacatctcacactaa

SEQ ID NO: 24946 - DNA, 25 bp, probe
tttaaggctcccaacaatgctatac

SEQ ID NO: 24947 - DNA, 25 bp, probe
agaatccataatgctccctacatct

SEQ ID NO: 24948 - DNA, 25 bp, probe
gttcacattctggagttctctttat

SEQ ID NO: 24949 - DNA, 25 bp, probe
aatccataatgctccctacatctca

SEQ ID NO: 24950 - DNA, 25 bp, probe
gcaatgatttaagcaccttcactaa

SEQ ID NO: 24951 - DNA, 25 bp, probe
ctcacactaacaggcaaattcagat

SEQ ID NO: 24952 - DNA, 25 bp, probe
atctcacactaacaggcaaattcag

SEQ ID NO: 24953 - DNA, 25 bp, probe
tattgggttcacattctggagttct

SEQ ID NO: 24954 - DNA, 25 bp, probe
ctagaatccataatgctccctacat

SEQ ID NO: 24955 - DNA, 25 bp, probe
ttacacagttaggatgctgacacag

SEQ ID NO: 24956 - DNA, 25 bp, probe
tgatttaagcaccttcactaaagtc

SEQ ID NO: 24957 - DNA, 25 bp, probe
gatttaagcaccttcactaaagtct

SEQ ID NO: 24958 - DNA, 25 bp, probe
cagttaggatgctgacacagtctag

SEQ ID NO: 24959 - DNA, 25 bp, probe
tcacactaacaggcaaattcagatg

SEQ ID NO: 24960 - DNA, 25 bp, probe
catctcacactaacaggcaaattca

SEQ ID NO: 24961 - DNA, 25 bp, probe
catcatcaacctctcggtagtagat

SEQ ID NO: 24962 - DNA, 25 bp, probe
ttcatcatcaacctctcggtagtag

SEQ ID NO: 24963 - DNA, 25 bp, probe
cttcatcatcaacctctcggtagta

SEQ ID NO: 24964 - DNA, 25 bp, probe
atcatcaacctctcggtagtagatc

SEQ ID NO: 24965 - DNA, 25 bp, probe
gacatcttcatcatcaacctctcgg

SEQ ID NO: 24966 - DNA, 25 bp, probe
ccgacatcttcatcatcaacctctc

SEQ ID NO: 24967 - DNA, 25 bp, probe
caatagtcagttcaccagcacctac

SEQ ID NO: 24968 - DNA, 25 bp, probe
atcttcatcatcaacctctcggtag

SEQ ID NO: 24969 - DNA, 25 bp, probe
atagtcagttcaccagcacctacat

SEQ ID NO: 24970 - DNA, 25 bp, probe
catcttcatcatcaacctctcggta

SEQ ID NO: 24971 - DNA, 25 bp, probe
tcatcatcaacctctcggtagtaga

SEQ ID NO: 24972 - DNA, 25 bp, probe
aatagtcagttcaccagcacctaca

SEQ ID NO: 24973 - DNA, 25 bp, probe
tagtcagttcaccagcacctacatc

SEQ ID NO: 24974 - DNA, 25 bp, probe
tcttcatcatcaacctctcggtagt

SEQ ID NO: 24975 - DNA, 25 bp, probe
aagggtactgactgggtttgtttaa

SEQ ID NO: 24976 - DNA, 25 bp, probe
gaagggtactgactgggtttgttta

SEQ ID NO: 24977 - DNA, 25 bp, probe
ccaatagtcagttcaccagcaccta

SEQ ID NO: 24978 - DNA, 25 bp, probe
gggtactgactgggtttgtttaaag

SEQ ID NO: 24979 - DNA, 25 bp, probe
ggtactgactgggtttgtttaaagt

SEQ ID NO: 24980 - DNA, 25 bp, probe
agggtactgactgggtttgtttaaa

SEQ ID NO: 24981 - DNA, 25 bp, probe
acatcttcatcatcaacctctcggt

SEQ ID NO: 24982 - DNA, 25 bp, probe
tcaaatgtcttcttcccaaggcaag

SEQ ID NO: 24983 - DNA, 25 bp, probe
ctcaaatgtcttcttcccaaggcaa

SEQ ID NO: 24984 - DNA, 25 bp, probe
catcaacctctcggtagtagatctc

SEQ ID NO: 24985 - DNA, 25 bp, probe
ctctcaaatgtcttcttcccaaggc

SEQ ID NO: 24986 - DNA, 25 bp, probe
gctctcaaatgtcttcttcccaagg

SEQ ID NO: 24987 - DNA, 25 bp, probe
cgacatcttcatcatcaacctctcg

SEQ ID NO: 24988 - DNA, 25 bp, probe
aaaataaagcaccttctccctaaaa

SEQ ID NO: 24989 - DNA, 25 bp, probe
tcatcaacctctcggtagtagatct

SEQ ID NO: 24990 - DNA, 25 bp, probe
agctctcaaatgtcttcttcccaag

SEQ ID NO: 24991 - DNA, 25 bp, probe
catggatgccaatagtcagttcacc

SEQ ID NO: 24992 - DNA, 25 bp, probe
atggatgccaatagtcagttcacca

SEQ ID NO: 24993 - DNA, 25 bp, probe
gtagtagatctcctctttctcctgg

SEQ ID NO: 24994 - DNA, 25 bp, probe
ggtagtagatctcctctttctcctg

SEQ ID NO: 24995 - DNA, 25 bp, probe
ctcggtagtagatctcctctttctc

SEQ ID NO: 24996 - DNA, 25 bp, probe
ctctcggtagtagatctcctctttc

SEQ ID NO: 24997 - DNA, 25 bp, probe
tctcggtagtagatctcctctttct

SEQ ID NO: 24998 - DNA, 25 bp, probe
atcaacctctcggtagtagatctcc

SEQ ID NO: 24999 - DNA, 25 bp, probe
cagacactgacctctactggttcac

SEQ ID NO: 25000 - DNA, 25 bp, probe
cccgacatcttcatcatcaacctct

SEQ ID NO: 25001 - DNA, 25 bp, probe
tagtagatctcctctttctcctggg

SEQ ID NO: 25002 - DNA, 25 bp, probe
tctcaaatgtcttcttcccaaggca

SEQ ID NO: 25003 - DNA, 25 bp, probe
cggtagtagatctcctctttctcct

SEQ ID NO: 25004 - DNA, 25 bp, probe
tcggtagtagatctcctctttctcc

SEQ ID NO: 25005 - DNA, 25 bp, probe
tttagacttcacttgtggtttgttg

SEQ ID NO: 25006 - DNA, 25 bp, probe
ctttagacttcacttgtggtttgtt

SEQ ID NO: 25007 - DNA, 25 bp, probe
tctttagacttcacttgtggtttgt

SEQ ID NO: 25008 - DNA, 25 bp, probe
atctttagacttcacttgtggtttg

SEQ ID NO: 25009 - DNA, 25 bp, probe
actgtaccaccttaaccatttgaaa

SEQ ID NO: 25010 - DNA, 25 bp, probe
aactgtaccaccttaaccatttgaa

SEQ ID NO: 25011 - DNA, 25 bp, probe
aaactgtaccaccttaaccatttga

SEQ ID NO: 25012 - DNA, 25 bp, probe
ctgtaccaccttaaccatttgaaag

SEQ ID NO: 25013 - DNA, 25 bp, probe
taaactgtaccaccttaaccatttg

SEQ ID NO: 25014 - DNA, 25 bp, probe
tgtaccaccttaaccatttgaaagt

SEQ ID NO: 25015 - DNA, 25 bp, probe
cataaactgtaccaccttaaccatt

SEQ ID NO: 25016 - DNA, 25 bp, probe
gtaccaccttaaccatttgaaagta

SEQ ID NO: 25017 - DNA, 25 bp, probe
tatctttagacttcacttgtggttt

SEQ ID NO: 25018 - DNA, 25 bp, probe
ttatctttagacttcacttgtggtt

SEQ ID NO: 25019 - DNA, 25 bp, probe
tttatctttagacttcacttgtggt

SEQ ID NO: 25020 - DNA, 25 bp, probe
accaccttaaccatttgaaagtata

SEQ ID NO: 25021 - DNA, 25 bp, probe
taccaccttaaccatttgaaagtat

SEQ ID NO: 25022 - DNA, 25 bp, probe
aacataaactgtaccaccttaacca

SEQ ID NO: 25023 - DNA, 25 bp, probe
acataaactgtaccaccttaaccat

SEQ ID NO: 25024 - DNA, 25 bp, probe
ttagacttcacttgtggtttgttgc

SEQ ID NO: 25025 - DNA, 25 bp, probe
ataaactgtaccaccttaaccattt

SEQ ID NO: 25026 - DNA, 25 bp, probe
aagcacataacataaactgtaccac

SEQ ID NO: 25027 - DNA, 25 bp, probe
cacataacataaactgtaccacctt

SEQ ID NO: 25028 - DNA, 25 bp, probe
gcacataacataaactgtaccacct

SEQ ID NO: 25029 - DNA, 25 bp, probe
agcacataacataaactgtaccacc

SEQ ID NO: 25030 - DNA, 25 bp, probe
aaagcacataacataaactgtacca

SEQ ID NO: 25031 - DNA, 25 bp, probe
taacataaactgtaccaccttaacc

SEQ ID NO: 25032 - DNA, 25 bp, probe
tgaaagtatatatcccagactgtct

SEQ ID NO: 25033 - DNA, 25 bp, probe
ccaccttaaccatttgaaagtatat

SEQ ID NO: 25034 - DNA, 25 bp, probe
ttgaaagtatatatcccagactgtc

SEQ ID NO: 25035 - DNA, 25 bp, probe
accatttgaaagtatatatcccaga

SEQ ID NO: 25036 - DNA, 25 bp, probe
ctcgtgatgtatgttgcagatcatt

SEQ ID NO: 25037 - DNA, 25 bp, probe
acataacataaactgtaccacctta

SEQ ID NO: 25038 - DNA, 25 bp, probe
ccatttgaaagtatatatcccagac

SEQ ID NO: 25039 - DNA, 25 bp, probe
gaaagtatatatcccagactgtctt

SEQ ID NO: 25040 - DNA, 25 bp, probe
tttgaaagtatatatcccagactgt

SEQ ID NO: 25041 - DNA, 25 bp, probe
tagacttcacttgtggtttgttgcc

SEQ ID NO: 25042 - DNA, 25 bp, probe
aaccatttgaaagtatatatcccag

SEQ ID NO: 25043 - DNA, 25 bp, probe
tttgacatggacgtttgtgatgatc

SEQ ID NO: 25044 - DNA, 25 bp, probe
ctttgacatggacgtttgtgatgat

SEQ ID NO: 25045 - DNA, 25 bp, probe
ttgttgccacagtacaagtttattt

SEQ ID NO: 25046 - DNA, 25 bp, probe
tttgttgccacagtacaagtttatt

SEQ ID NO: 25047 - DNA, 25 bp, probe
ataacataaactgtaccaccttaac

SEQ ID NO: 25048 - DNA, 25 bp, probe
cataacataaactgtaccaccttaa

SEQ ID NO: 25049 - DNA, 25 bp, probe
atgccctggtttccctatctgtaaa

SEQ ID NO: 25050 - DNA, 25 bp, probe
atcagttgaggtcaggagtttgaga

SEQ ID NO: 25051 - DNA, 25 bp, probe
gatcagttgaggtcaggagtttgag

SEQ ID NO: 25052 - DNA, 25 bp, probe
cctggtttccctatctgtaaaatgg

SEQ ID NO: 25053 - DNA, 25 bp, probe
ccctggtttccctatctgtaaaatg

SEQ ID NO: 25054 - DNA, 25 bp, probe
tttagaaataaaagcacaaggcagg

SEQ ID NO: 25055 - DNA, 25 bp, probe
gtttagaaataaaagcacaaggcag

SEQ ID NO: 25056 - DNA, 25 bp, probe
ttagaaataaaagcacaaggcaggg

SEQ ID NO: 25057 - DNA, 25 bp, probe
tgtttagaaataaaagcacaaggca

SEQ ID NO: 25058 - DNA, 25 bp, probe
gatgccctggtttccctatctgtaa

SEQ ID NO: 25059 - DNA, 25 bp, probe
gtgtttagaaataaaagcacaaggc

SEQ ID NO: 25060 - DNA, 25 bp, probe
gaggatcagttgaggtcaggagttt

SEQ ID NO: 25061 - DNA, 25 bp, probe
gccctggtttccctatctgtaaaat

SEQ ID NO: 25062 - DNA, 25 bp, probe
caacatggcaaaatcttgtctcttt

SEQ ID NO: 25063 - DNA, 25 bp, probe
aggatcagttgaggtcaggagtttg

SEQ ID NO: 25064 - DNA, 25 bp, probe
aacatggcaaaatcttgtctctttt

SEQ ID NO: 25065 - DNA, 25 bp, probe
gtcaccatcgagatcaatcctcctc

SEQ ID NO: 25066 - DNA, 25 bp, probe
tcagttgaggtcaggagtttgagac

SEQ ID NO: 25067 - DNA, 25 bp, probe
ggatcagttgaggtcaggagtttga

SEQ ID NO: 25068 - DNA, 25 bp, probe
ctggagaacagtggcaccatcatag

SEQ ID NO: 25069 - DNA, 25 bp, probe
tgatgccctggtttccctatctgta

SEQ ID NO: 25070 - DNA, 25 bp, probe
ctatgcagttgctcttccttgtttt

SEQ ID NO: 25071 - DNA, 25 bp, probe
gctatgcagttgctcttccttgttt

SEQ ID NO: 25072 - DNA, 25 bp, probe
tgccctggtttccctatctgtaaaa

SEQ ID NO: 25073 - DNA, 25 bp, probe
gcaacatggcaaaatcttgtctctt

SEQ ID NO: 25074 - DNA, 25 bp, probe
tagaaataaaagcacaaggcagggc

SEQ ID NO: 25075 - DNA, 25 bp, probe
ctggtttccctatctgtaaaatggg

SEQ ID NO: 25076 - DNA, 25 bp, probe
ctatctgtaaaatggggccaatgac

SEQ ID NO: 25077 - DNA, 25 bp, probe
cctccccttgagagtcatcagaaaa

SEQ ID NO: 25078 - DNA, 25 bp, probe
tggtttccctatctgtaaaatgggg

SEQ ID NO: 25079 - DNA, 25 bp, probe
ggaaaatgtgtttagaaataaaagc

SEQ ID NO: 25080 - DNA, 25 bp, probe
agctatgcagttgctcttccttgtt

SEQ ID NO: 25081 - DNA, 25 bp, probe
cctatctgtaaaatggggccaatga

SEQ ID NO: 25082 - DNA, 25 bp, probe
atcctccccttgagagtcatcagaa

SEQ ID NO: 25083 - DNA, 25 bp, probe
tatctgtaaaatggggccaatgaca

SEQ ID NO: 25084 - DNA, 25 bp, probe
tcctccccttgagagtcatcagaaa

SEQ ID NO: 25085 - DNA, 25 bp, probe
gaaaatgtgtttagaaataaaagca

SEQ ID NO: 25086 - DNA, 25 bp, probe
ggtttccctatctgtaaaatggggc

SEQ ID NO: 25087 - DNA, 25 bp, probe
ggcaacatggcaaaatcttgtctct

SEQ ID NO: 25088 - DNA, 25 bp, probe
aaaatgtgtttagaaataaaagcac

SEQ ID NO: 25089 - DNA, 25 bp, probe
cactgggtcaccatcgagatcaatc

SEQ ID NO: 25090 - DNA, 25 bp, probe
gaaataaaagcacaaggcagggcag

SEQ ID NO: 25091 - DNA, 25 bp, probe
catcctccccttgagagtcatcaga

SEQ ID NO: 25092 - DNA, 25 bp, probe
gtaaaatggggccaatgacacctac

SEQ ID NO: 25093 - DNA, 25 bp, probe
tcgttatcgttattgtactgtcact

SEQ ID NO: 25094 - DNA, 25 bp, probe
aatgccttcgttatcgttattgtac

SEQ ID NO: 25095 - DNA, 25 bp, probe
ccttcgttatcgttattgtactgtc

SEQ ID NO: 25096 - DNA, 25 bp, probe
atgccttcgttatcgttattgtact

SEQ ID NO: 25097 - DNA, 25 bp, probe
ggtcaatgccttcgttatcgttatt

SEQ ID NO: 25098 - DNA, 25 bp, probe
cgttatcgttattgtactgtcactt

SEQ ID NO: 25099 - DNA, 25 bp, probe
ttcgttatcgttattgtactgtcac

SEQ ID NO: 25100 - DNA, 25 bp, probe
cttcgttatcgttattgtactgtca

SEQ ID NO: 25101 - DNA, 25 bp, probe
gccttcgttatcgttattgtactgt

SEQ ID NO: 25102 - DNA, 25 bp, probe
tgccttcgttatcgttattgtactg

SEQ ID NO: 25103 - DNA, 25 bp, probe
atcatgtcagccttcagaagagaat

SEQ ID NO: 25104 - DNA, 25 bp, probe
ccagtatcccagtcatttcttcaaa

SEQ ID NO: 25105 - DNA, 25 bp, probe
acctcaagtgaccaaatgctattaa

SEQ ID NO: 25106 - DNA, 25 bp, probe
gacaagagcaagaaggacatcagtt

SEQ ID NO: 25107 - DNA, 25 bp, probe
atagtgtccagccttgtatatttct

SEQ ID NO: 25108 - DNA, 25 bp, probe
tttgtttactgaaagagagaaaggg

SEQ ID NO: 25109 - DNA, 25 bp, probe
gatagtgtccagccttgtatatttc

SEQ ID NO: 25110 - DNA, 25 bp, probe
caatgccttcgttatcgttattgta

SEQ ID NO: 25111 - DNA, 25 bp, probe
tcatgtcagccttcagaagagaatc

SEQ ID NO: 25112 - DNA, 25 bp, probe
gatcatgtcagccttcagaagagaa

SEQ ID NO: 25113 - DNA, 25 bp, probe
ttatctggatctctgtggttccttc

SEQ ID NO: 25114 - DNA, 25 bp, probe
tgaggtagtagtcaaggatcaggag

SEQ ID NO: 25115 - DNA, 25 bp, probe
gtcaatgccttcgttatcgttattg

SEQ ID NO: 25116 - DNA, 25 bp, probe
tccagtatcccagtcatttcttcaa

SEQ ID NO: 25117 - DNA, 25 bp, probe
tcactttgttcttgaggtagtagtc

SEQ ID NO: 25118 - DNA, 25 bp, probe
cactttgttcttgaggtagtagtca

SEQ ID NO: 25119 - DNA, 25 bp, probe
gtcactttgttcttgaggtagtagt

SEQ ID NO: 25120 - DNA, 25 bp, probe
tgtcactttgttcttgaggtagtag

SEQ ID NO: 25121 - DNA, 25 bp, probe
ctgtcactttgttcttgaggtagta

SEQ ID NO: 25122 - DNA, 25 bp, probe
tactgtcactttgttcttgaggtag

SEQ ID NO: 25123 - DNA, 25 bp, probe
tcaatgccttcgttatcgttattgt

SEQ ID NO: 25124 - DNA, 25 bp, probe
cgttattgtactgtcactttgttct

SEQ ID NO: 25125 - DNA, 25 bp, probe
tcgttattgtactgtcactttgttc

SEQ ID NO: 25126 - DNA, 25 bp, probe
aggtcaatgccttcgttatcgttat

SEQ ID NO: 25127 - DNA, 25 bp, probe
gaggtagtagtcaaggatcaggagg

SEQ ID NO: 25128 - DNA, 25 bp, probe
ggatttatctggatctctgtggttc

SEQ ID NO: 25129 - DNA, 25 bp, probe
atcgttattgtactgtcactttgtt

SEQ ID NO: 25130 - DNA, 25 bp, probe
gtccagtatcccagtcatttcttca

SEQ ID NO: 25131 - DNA, 25 bp, probe
acaagagcaagaaggacatcagttg

SEQ ID NO: 25132 - DNA, 25 bp, probe
tatctggatctctgtggttccttct

SEQ ID NO: 25133 - DNA, 25 bp, probe
tccagccttgtatatttctgaagag

SEQ ID NO: 25134 - DNA, 25 bp, probe
tagtgtccagccttgtatatttctg

SEQ ID NO: 25135 - DNA, 25 bp, probe
gtccagccttgtatatttctgaaga

SEQ ID NO: 25136 - DNA, 25 bp, probe
gtactgtcactttgttcttgaggta

SEQ ID NO: 25137 - DNA, 25 bp, probe
tcgttatatgatgtgtgtaatgtgt

SEQ ID NO: 25138 - DNA, 25 bp, probe
aagacgatcaatagttcaaggctac

SEQ ID NO: 25139 - DNA, 25 bp, probe
caagacgatcaatagttcaaggcta

SEQ ID NO: 25140 - DNA, 25 bp, probe
gagtacctacaagtgttgaatatgg

SEQ ID NO: 25141 - DNA, 25 bp, probe
actattgagtacctacaagtgttga

SEQ ID NO: 25142 - DNA, 25 bp, probe
gaggcaagacgatcaatagttcaag

SEQ ID NO: 25143 - DNA, 25 bp, probe
tgagtacctacaagtgttgaatatg

SEQ ID NO: 25144 - DNA, 25 bp, probe
ctattgagtacctacaagtgttgaa

SEQ ID NO: 25145 - DNA, 25 bp, probe
agacgatcaatagttcaaggctacc

SEQ ID NO: 25146 - DNA, 25 bp, probe
ttcacttatgttggatatgatagca

SEQ ID NO: 25147 - DNA, 25 bp, probe
atcgttatatgatgtgtgtaatgtg

SEQ ID NO: 25148 - DNA, 25 bp, probe
ggatggtgaaagtaacagaagaatg

SEQ ID NO: 25149 - DNA, 25 bp, probe
aggatggtgaaagtaacagaagaat

SEQ ID NO: 25150 - DNA, 25 bp, probe
gaccctgagagattatactttcgtt

SEQ ID NO: 25151 - DNA, 25 bp, probe
tcacttatgttggatatgatagcat

SEQ ID NO: 25152 - DNA, 25 bp, probe
tcatttcttccagtataaccacacc

SEQ ID NO: 25153 - DNA, 25 bp, probe
accctgagagattatactttcgttt

SEQ ID NO: 25154 - DNA, 25 bp, probe
ctcattgtggaggtcctagaagatg

SEQ ID NO: 25155 - DNA, 25 bp, probe
caggatggtgaaagtaacagaagaa

SEQ ID NO: 25156 - DNA, 25 bp, probe
gaggattaagggttgagatatttgc

SEQ ID NO: 25157 - DNA, 25 bp, probe
cgttatatgatgtgtgtaatgtgta

SEQ ID NO: 25158 - DNA, 25 bp, probe
tagttatgagtgcatgtgtgttgat

SEQ ID NO: 25159 - DNA, 25 bp, probe
tgtgtgttgatttacctgtgaattt

SEQ ID NO: 25160 - DNA, 25 bp, probe
ctgaagaggattaagggttgagata

SEQ ID NO: 25161 - DNA, 25 bp, probe
gttctgaagaggattaagggttgag

SEQ ID NO: 25162 - DNA, 25 bp, probe
atgtgtgttgatttacctgtgaatt

SEQ ID NO: 25163 - DNA, 25 bp, probe
ttcatttcttccagtataaccacac

SEQ ID NO: 25164 - DNA, 25 bp, probe
gaggaccctgagagattatactttc

SEQ ID NO: 25165 - DNA, 25 bp, probe
cattgtggaggtcctagaagatgtg

SEQ ID NO: 25166 - DNA, 25 bp, probe
tcattgtggaggtcctagaagatgt

SEQ ID NO: 25167 - DNA, 25 bp, probe
ttgtagttatgagtgcatgtgtgtt

SEQ ID NO: 25168 - DNA, 25 bp, probe
ttgagtacctacaagtgttgaatat

SEQ ID NO: 25169 - DNA, 25 bp, probe
attgagtacctacaagtgttgaata

SEQ ID NO: 25170 - DNA, 25 bp, probe
tattgagtacctacaagtgttgaat

SEQ ID NO: 25171 - DNA, 25 bp, probe
gattggaggaccctgagagattata

SEQ ID NO: 25172 - DNA, 25 bp, probe
ctcatcaaaggaagaaagacagtca

SEQ ID NO: 25173 - DNA, 25 bp, probe
ctagtgggttctgaagaggattaag

SEQ ID NO: 25174 - DNA, 25 bp, probe
ggaggaccctgagagattatacttt

SEQ ID NO: 25175 - DNA, 25 bp, probe
attggaggaccctgagagattatac

SEQ ID NO: 25176 - DNA, 25 bp, probe
catcaaaggaagaaagacagtcact

SEQ ID NO: 25177 - DNA, 25 bp, probe
tcatcaaaggaagaaagacagtcac

SEQ ID NO: 25178 - DNA, 25 bp, probe
catttcttccagtataaccacaccc

SEQ ID NO: 25179 - DNA, 25 bp, probe
tctgaagaggattaagggttgagat

SEQ ID NO: 25180 - DNA, 25 bp, probe
tagtgggttctgaagaggattaagg

SEQ ID NO: 25181 - DNA, 25 bp, probe
gcaaataaacgagatggataaaggt

SEQ ID NO: 25182 - DNA, 25 bp, probe
ggcaaataaacgagatggataaagg

SEQ ID NO: 25183 - DNA, 25 bp, probe
tggcaaataaacgagatggataaag

SEQ ID NO: 25184 - DNA, 25 bp, probe
taaaggacctggtagagatacttca

SEQ ID NO: 25185 - DNA, 25 bp, probe
ctaaaggacctggtagagatacttc

SEQ ID NO: 25186 - DNA, 25 bp, probe
ataaacgagatggataaaggtgaaa

SEQ ID NO: 25187 - DNA, 25 bp, probe
aataaacgagatggataaaggtgaa

SEQ ID NO: 25188 - DNA, 25 bp, probe
aaataaacgagatggataaaggtga

SEQ ID NO: 25189 - DNA, 25 bp, probe
caaataaacgagatggataaaggtg

SEQ ID NO: 25190 - DNA, 25 bp, probe
gctaaaggacctggtagagatactt

SEQ ID NO: 25191 - DNA, 25 bp, probe
aaaggacctggtagagatacttcag

SEQ ID NO: 25192 - DNA, 25 bp, probe
agctaaaggacctggtagagatact

SEQ ID NO: 25193 - DNA, 25 bp, probe
cagctaaaggacctggtagagatac

SEQ ID NO: 25194 - DNA, 25 bp, probe
tggtagagatacttcaggacccttc

SEQ ID NO: 25195 - DNA, 25 bp, probe
ctggtagagatacttcaggaccctt

SEQ ID NO: 25196 - DNA, 25 bp, probe
taaacgagatggataaaggtgaaaa

SEQ ID NO: 25197 - DNA, 25 bp, probe
gtagagatacttcaggacccttcgc

SEQ ID NO: 25198 - DNA, 25 bp, probe
ggtagagatacttcaggacccttcg

SEQ ID NO: 25199 - DNA, 25 bp, probe
gcagctaaaggacctggtagagata

SEQ ID NO: 25200 - DNA, 25 bp, probe
tagagatacttcaggacccttcgcc

SEQ ID NO: 25201 - DNA, 25 bp, probe
aaggacctggtagagatacttcagg

SEQ ID NO: 25202 - DNA, 25 bp, probe
agattcctccgatccctctcacttg

SEQ ID NO: 25203 - DNA, 25 bp, probe
cagattcctccgatccctctcactt

SEQ ID NO: 25204 - DNA, 25 bp, probe
agcagctaaaggacctggtagagat

SEQ ID NO: 25205 - DNA, 25 bp, probe
gacctggtagagatacttcaggacc

SEQ ID NO: 25206 - DNA, 25 bp, probe
ggacctggtagagatacttcaggac

SEQ ID NO: 25207 - DNA, 25 bp, probe
aggacctggtagagatacttcagga

SEQ ID NO: 25208 - DNA, 25 bp, probe
gagcagctaaaggacctggtagaga

SEQ ID NO: 25209 - DNA, 25 bp, probe
agagcagctaaaggacctggtagag

SEQ ID NO: 25210 - DNA, 25 bp, probe
gagagcagctaaaggacctggtaga

SEQ ID NO: 25211 - DNA, 25 bp, probe
ctggtcttcacagaaggaagtgagc

SEQ ID NO: 25212 - DNA, 25 bp, probe
gctggtcttcacagaaggaagtgag

SEQ ID NO: 25213 - DNA, 25 bp, probe
cctggtagagatacttcaggaccct

SEQ ID NO: 25214 - DNA, 25 bp, probe
acctggtagagatacttcaggaccc

SEQ ID NO: 25215 - DNA, 25 bp, probe
gtgtcactaattctccatcttcctg

SEQ ID NO: 25216 - DNA, 25 bp, probe
tgtcaggactaataattcatgccaa

SEQ ID NO: 25217 - DNA, 25 bp, probe
ctgtcaggactaataattcatgcca

SEQ ID NO: 25218 - DNA, 25 bp, probe
gtcaggactaataattcatgccaat

SEQ ID NO: 25219 - DNA, 25 bp, probe
ctacagtagtcacttctgctagagt

SEQ ID NO: 25220 - DNA, 25 bp, probe
tcagtgtcactaattctccatcttc

SEQ ID NO: 25221 - DNA, 25 bp, probe
gttcagtgtcactaattctccatct

SEQ ID NO: 25222 - DNA, 25 bp, probe
ttcagtgtcactaattctccatctt

SEQ ID NO: 25223 - DNA, 25 bp, probe
tgttcagtgtcactaattctccatc

SEQ ID NO: 25224 - DNA, 25 bp, probe
gctgtcaggactaataattcatgcc

SEQ ID NO: 25225 - DNA, 25 bp, probe
agctgtcaggactaataattcatgc

SEQ ID NO: 25226 - DNA, 25 bp, probe
agtgtcactaattctccatcttcct

SEQ ID NO: 25227 - DNA, 25 bp, probe
cagtgtcactaattctccatcttcc

SEQ ID NO: 25228 - DNA, 25 bp, probe
gtaatgagtaaatgaatgggtgtgg

SEQ ID NO: 25229 - DNA, 25 bp, probe
tgtaatgagtaaatgaatgggtgtg

SEQ ID NO: 25230 - DNA, 25 bp, probe
tcaggactaataattcatgccaatt

SEQ ID NO: 25231 - DNA, 25 bp, probe
atatgtaaatgagtcaggtatggct

SEQ ID NO: 25232 - DNA, 25 bp, probe
gtgttcagtgtcactaattctccat

SEQ ID NO: 25233 - DNA, 25 bp, probe
caggaaatgaaggcacaaagaaatc

SEQ ID NO: 25234 - DNA, 25 bp, probe
tgtgtgttcagtgtcactaattctc

SEQ ID NO: 25235 - DNA, 25 bp, probe
ctgtgtgttcagtgtcactaattct

SEQ ID NO: 25236 - DNA, 25 bp, probe
atgtaaatgagtcaggtatggctag

SEQ ID NO: 25237 - DNA, 25 bp, probe
taatgagtaaatgaatgggtgtggc

SEQ ID NO: 25238 - DNA, 25 bp, probe
tatgtaaatgagtcaggtatggcta

SEQ ID NO: 25239 - DNA, 25 bp, probe
tgtcactaattctccatcttcctgg

SEQ ID NO: 25240 - DNA, 25 bp, probe
aatatgtaaatgagtcaggtatggc

SEQ ID NO: 25241 - DNA, 25 bp, probe
atgtaatgagtaaatgaatgggtgt

SEQ ID NO: 25242 - DNA, 25 bp, probe
atgaaggcacaaagaaatcaaagtt

SEQ ID NO: 25243 - DNA, 25 bp, probe
aatgaaggcacaaagaaatcaaagt

SEQ ID NO: 25244 - DNA, 25 bp, probe
ctagagtgaaagcagccttacatat

SEQ ID NO: 25245 - DNA, 25 bp, probe
taaatgagtcaggtatggctaggtt

SEQ ID NO: 25246 - DNA, 25 bp, probe
gtcaggtatggctaggttccaataa

SEQ ID NO: 25247 - DNA, 25 bp, probe
tgaaggcacaaagaaatcaaagttc

SEQ ID NO: 25248 - DNA, 25 bp, probe
ggaaatgaaggcacaaagaaatcaa

SEQ ID NO: 25249 - DNA, 25 bp, probe
ccttgaagtaggtacagttatatcc

SEQ ID NO: 25250 - DNA, 25 bp, probe
gagtaaatgaatgggtgtggctatg

SEQ ID NO: 25251 - DNA, 25 bp, probe
aaatgaaggcacaaagaaatcaaag

SEQ ID NO: 25252 - DNA, 25 bp, probe
gaaatgaaggcacaaagaaatcaaa

SEQ ID NO: 25253 - DNA, 25 bp, probe
gtgtgttcagtgtcactaattctcc

SEQ ID NO: 25254 - DNA, 25 bp, probe
taattctccatcttcctggcagatt

SEQ ID NO: 25255 - DNA, 25 bp, probe
tgtgttcagtgtcactaattctcca

SEQ ID NO: 25256 - DNA, 25 bp, probe
aaatcaaagttcttcctaaaggtca

SEQ ID NO: 25257 - DNA, 25 bp, probe
aggaaatgaaggcacaaagaaatca

SEQ ID NO: 25258 - DNA, 25 bp, probe
tcaggaaatgaaggcacaaagaaat

SEQ ID NO: 25259 - DNA, 25 bp, probe
tacttgtaattgttgtctgaagcct

SEQ ID NO: 25260 - DNA, 25 bp, probe
ttagtgagatgtgaaggagactgat

SEQ ID NO: 25261 - DNA, 25 bp, probe
agcagtgtacttgtaattgttgtct

SEQ ID NO: 25262 - DNA, 25 bp, probe
aagcagtgtacttgtaattgttgtc

SEQ ID NO: 25263 - DNA, 25 bp, probe
gaagcagtgtacttgtaattgttgt

SEQ ID NO: 25264 - DNA, 25 bp, probe
tgtacttgtaattgttgtctgaagc

SEQ ID NO: 25265 - DNA, 25 bp, probe
agaagcagtgtacttgtaattgttg

SEQ ID NO: 25266 - DNA, 25 bp, probe
gtacttgtaattgttgtctgaagcc

SEQ ID NO: 25267 - DNA, 25 bp, probe
ttgtaattgttgtctgaagcctgtc

SEQ ID NO: 25268 - DNA, 25 bp, probe
tgtgattccttgtgtgctaacatat

SEQ ID NO: 25269 - DNA, 25 bp, probe
tagtgagatgtgaaggagactgatg

SEQ ID NO: 25270 - DNA, 25 bp, probe
cttgtaattgttgtctgaagcctgt

SEQ ID NO: 25271 - DNA, 25 bp, probe
acttgtaattgttgtctgaagcctg

SEQ ID NO: 25272 - DNA, 25 bp, probe
agtgtacttgtaattgttgtctgaa

SEQ ID NO: 25273 - DNA, 25 bp, probe
gtgattccttgtgtgctaacatata

SEQ ID NO: 25274 - DNA, 25 bp, probe
ctgtgattccttgtgtgctaacata

SEQ ID NO: 25275 - DNA, 25 bp, probe
ctagaagcagtgtacttgtaattgt

SEQ ID NO: 25276 - DNA, 25 bp, probe
catctgtgattccttgtgtgctaac

SEQ ID NO: 25277 - DNA, 25 bp, probe
taattgttgtctgaagcctgtctga

SEQ ID NO: 25278 - DNA, 25 bp, probe
gtaattgttgtctgaagcctgtctg

SEQ ID NO: 25279 - DNA, 25 bp, probe
gtacttgaactagacgcttaatgcc

SEQ ID NO: 25280 - DNA, 25 bp, probe
gtgtacttgtaattgttgtctgaag

SEQ ID NO: 25281 - DNA, 25 bp, probe
tagaagcagtgtacttgtaattgtt

SEQ ID NO: 25282 - DNA, 25 bp, probe
actagaagcagtgtacttgtaattg

SEQ ID NO: 25283 - DNA, 25 bp, probe
tgtaattgttgtctgaagcctgtct

SEQ ID NO: 25284 - DNA, 25 bp, probe
gcagtgtacttgtaattgttgtctg

SEQ ID NO: 25285 - DNA, 25 bp, probe
tgattccttgtgtgctaacatataa

SEQ ID NO: 25286 - DNA, 25 bp, probe
cagtgtacttgtaattgttgtctga

SEQ ID NO: 25287 - DNA, 25 bp, probe
gtgagatgtgaaggagactgatgac

SEQ ID NO: 25288 - DNA, 25 bp, probe
gttgttgttgttattgaagtttggg

SEQ ID NO: 25289 - DNA, 25 bp, probe
ataaatgaagggtatgatgggtgac

SEQ ID NO: 25290 - DNA, 25 bp, probe
ccacaactctaacaaacaaaccatt

SEQ ID NO: 25291 - DNA, 25 bp, probe
ccacactgctgctatatttcttact

SEQ ID NO: 25292 - DNA, 25 bp, probe
gtaattcctgtttagcgattgtcaa

SEQ ID NO: 25293 - DNA, 25 bp, probe
ttgtaattcctgtttagcgattgtc

SEQ ID NO: 25294 - DNA, 25 bp, probe
tgttgttgttgttattgaagtttgg

SEQ ID NO: 25295 - DNA, 25 bp, probe
ccaatttagtgagatgtgaaggaga

SEQ ID NO: 25296 - DNA, 25 bp, probe
taattcctgtttagcgattgtcaag

SEQ ID NO: 25297 - DNA, 25 bp, probe
tttgtaattcctgtttagcgattgt

SEQ ID NO: 25298 - DNA, 25 bp, probe
caatttagtgagatgtgaaggagac

SEQ ID NO: 25299 - DNA, 25 bp, probe
aagaacagttactttggcatcattc

SEQ ID NO: 25300 - DNA, 25 bp, probe
ttgttgttgttattgaagtttgggc

SEQ ID NO: 25301 - DNA, 25 bp, probe
tgtaattcctgtttagcgattgtca

SEQ ID NO: 25302 - DNA, 25 bp, probe
ttaaacttggttggagaaacttgtg

SEQ ID NO: 25303 - DNA, 25 bp, probe
aagtgctgtcttactaagtcttgtt

SEQ ID NO: 25304 - DNA, 25 bp, probe
tgactggtatattcattcagaagcg

SEQ ID NO: 25305 - DNA, 25 bp, probe
agtaactgactggtatattcattca

SEQ ID NO: 25306 - DNA, 25 bp, probe
agtgctgtcttactaagtcttgttt

SEQ ID NO: 25307 - DNA, 25 bp, probe
aaagtgctgtcttactaagtcttgt

SEQ ID NO: 25308 - DNA, 25 bp, probe
gtgctgtcttactaagtcttgttta

SEQ ID NO: 25309 - DNA, 25 bp, probe
gccataagtcagttgagtatttgat

SEQ ID NO: 25310 - DNA, 25 bp, probe
cgccataagtcagttgagtatttga

SEQ ID NO: 25311 - DNA, 25 bp, probe
taagcaccagggacaataaggattt

SEQ ID NO: 25312 - DNA, 25 bp, probe
gtcagttgagtatttgatccctaga

SEQ ID NO: 25313 - DNA, 25 bp, probe
agtcagttgagtatttgatccctag

SEQ ID NO: 25314 - DNA, 25 bp, probe
taaagtgctgtcttactaagtcttg

SEQ ID NO: 25315 - DNA, 25 bp, probe
aagtcagttgagtatttgatcccta

SEQ ID NO: 25316 - DNA, 25 bp, probe
taagtcagttgagtatttgatccct

SEQ ID NO: 25317 - DNA, 25 bp, probe
atttgatccctagataagaacatgc

SEQ ID NO: 25318 - DNA, 25 bp, probe
tcagttgagtatttgatccctagat

SEQ ID NO: 25319 - DNA, 25 bp, probe
tgctgtcttactaagtcttgtttat

SEQ ID NO: 25320 - DNA, 25 bp, probe
gtaagcaccagggacaataaggatt

SEQ ID NO: 25321 - DNA, 25 bp, probe
tatgagtgtgagtactaggaaggat

SEQ ID NO: 25322 - DNA, 25 bp, probe
gtatgagtgtgagtactaggaagga

SEQ ID NO: 25323 - DNA, 25 bp, probe
ttaaagtgctgtcttactaagtctt

SEQ ID NO: 25324 - DNA, 25 bp, probe
ataagtcagttgagtatttgatccc

SEQ ID NO: 25325 - DNA, 25 bp, probe
aaatgacacgttaatatccctagca

SEQ ID NO: 25326 - DNA, 25 bp, probe
caaatgacacgttaatatccctagc

SEQ ID NO: 25327 - DNA, 25 bp, probe
gcaaatgacacgttaatatccctag

SEQ ID NO: 25328 - DNA, 25 bp, probe
agcaaatgacacgttaatatcccta

SEQ ID NO: 25329 - DNA, 25 bp, probe
tagcaaatgacacgttaatatccct

SEQ ID NO: 25330 - DNA, 25 bp, probe
cctagataagaacatgcaaatcagc

SEQ ID NO: 25331 - DNA, 25 bp, probe
aatgacacgttaatatccctagcag

SEQ ID NO: 25332 - DNA, 25 bp, probe
ttagcaaatgacacgttaatatccc

SEQ ID NO: 25333 - DNA, 25 bp, probe
tccctagataagaacatgcaaatca

SEQ ID NO: 25334 - DNA, 25 bp, probe
tgatccctagataagaacatgcaaa

SEQ ID NO: 25335 - DNA, 25 bp, probe
tttgatccctagataagaacatgca

SEQ ID NO: 25336 - DNA, 25 bp, probe
ccctagataagaacatgcaaatcag

SEQ ID NO: 25337 - DNA, 25 bp, probe
atgacacgttaatatccctagcaga

SEQ ID NO: 25338 - DNA, 25 bp, probe
ttgatccctagataagaacatgcaa

SEQ ID NO: 25339 - DNA, 25 bp, probe
gttagcaaatgacacgttaatatcc

SEQ ID NO: 25340 - DNA, 25 bp, probe
atccctagataagaacatgcaaatc

SEQ ID NO: 25341 - DNA, 25 bp, probe
gatccctagataagaacatgcaaat

SEQ ID NO: 25342 - DNA, 25 bp, probe
cagttgagtatttgatccctagata

SEQ ID NO: 25343 - DNA, 25 bp, probe
gctgtcttactaagtcttgtttatt

SEQ ID NO: 25344 - DNA, 25 bp, probe
cataagtcagttgagtatttgatcc

SEQ ID NO: 25345 - DNA, 25 bp, probe
ccataagtcagttgagtatttgatc

SEQ ID NO: 25346 - DNA, 25 bp, probe
tgacacgttaatatccctagcagag

SEQ ID NO: 25347 - DNA, 25 bp, probe
aagagaacaaggtgctgaagataga

SEQ ID NO: 25348 - DNA, 25 bp, probe
caagagaacaaggtgctgaagatag

SEQ ID NO: 25349 - DNA, 25 bp, probe
agagaacaaggtgctgaagatagag

SEQ ID NO: 25350 - DNA, 25 bp, probe
tgaagatagagctggagacctacaa

SEQ ID NO: 25351 - DNA, 25 bp, probe
ctgaagatagagctggagacctaca

SEQ ID NO: 25352 - DNA, 25 bp, probe
gaagatagagctggagacctacaaa

SEQ ID NO: 25353 - DNA, 25 bp, probe
aactctaggagaaggcgaattggaa

SEQ ID NO: 25354 - DNA, 25 bp, probe
aagatagagctggagacctacaaac

SEQ ID NO: 25355 - DNA, 25 bp, probe
gatagagctggagacctacaaactg

SEQ ID NO: 25356 - DNA, 25 bp, probe
agatagagctggagacctacaaact

SEQ ID NO: 25357 - DNA, 25 bp, probe
atagagctggagacctacaaactga

SEQ ID NO: 25358 - DNA, 25 bp, probe
gagaacaaggtgctgaagatagagc

SEQ ID NO: 25359 - DNA, 25 bp, probe
ctctaggagaaggcgaattggaaag

SEQ ID NO: 25360 - DNA, 25 bp, probe
tagagctggagacctacaaactgaa

SEQ ID NO: 25361 - DNA, 25 bp, probe
ctaggagaaggcgaattggaaagtg

SEQ ID NO: 25362 - DNA, 25 bp, probe
gcaagagaacaaggtgctgaagata

SEQ ID NO: 25363 - DNA, 25 bp, probe
tctaggagaaggcgaattggaaagt

SEQ ID NO: 25364 - DNA, 25 bp, probe
actctaggagaaggcgaattggaaa

SEQ ID NO: 25365 - DNA, 25 bp, probe
aaactctaggagaaggcgaattgga

SEQ ID NO: 25366 - DNA, 25 bp, probe
gaacaaggtgctgaagatagagctg

SEQ ID NO: 25367 - DNA, 25 bp, probe
agaacaaggtgctgaagatagagct

SEQ ID NO: 25368 - DNA, 25 bp, probe
agagctggagacctacaaactgaag

SEQ ID NO: 25369 - DNA, 25 bp, probe
ggagacctacaaactgaagtgcaag

SEQ ID NO: 25370 - DNA, 25 bp, probe
gctgaagatagagctggagacctac

SEQ ID NO: 25371 - DNA, 25 bp, probe
taggagaaggcgaattggaaagtgg

SEQ ID NO: 25372 - DNA, 25 bp, probe
gagctggagacctacaaactgaagt

SEQ ID NO: 25373 - DNA, 25 bp, probe
tgctgaagatagagctggagaccta

SEQ ID NO: 25374 - DNA, 25 bp, probe
gaaggcgaattggaaagtggtcaag

SEQ ID NO: 25375 - DNA, 25 bp, probe
aaaactctaggagaaggcgaattgg

SEQ ID NO: 25376 - DNA, 25 bp, probe
agctggagacctacaaactgaagtg

SEQ ID NO: 25377 - DNA, 25 bp, probe
tggagacctacaaactgaagtgcaa

SEQ ID NO: 25378 - DNA, 25 bp, probe
gagacctacaaactgaagtgcaagg

SEQ ID NO: 25379 - DNA, 25 bp, probe
agaaggcgaattggaaagtggtcaa

SEQ ID NO: 25380 - DNA, 25 bp, probe
gaattggaaagtggtcaaggcaacg

SEQ ID NO: 25381 - DNA, 25 bp, probe
cgaattggaaagtggtcaaggcaac

SEQ ID NO: 25382 - DNA, 25 bp, probe
aacaaggtgctgaagatagagctgg

SEQ ID NO: 25383 - DNA, 25 bp, probe
ctggagacctacaaactgaagtgca

SEQ ID NO: 25384 - DNA, 25 bp, probe
caaggtgctgaagatagagctggag

SEQ ID NO: 25385 - DNA, 25 bp, probe
aaggtgctgaagatagagctggaga

SEQ ID NO: 25386 - DNA, 25 bp, probe
catcgaggatccaaagtgggaattc

SEQ ID NO: 25387 - DNA, 25 bp, probe
ccatcgaggatccaaagtgggaatt

SEQ ID NO: 25388 - DNA, 25 bp, probe
tgtgtaaagagaatatctgggatgg

SEQ ID NO: 25389 - DNA, 25 bp, probe
gtgtaaagagaatatctgggatggg

SEQ ID NO: 25390 - DNA, 25 bp, probe
atcatttaccgtgacctgaaagttg

SEQ ID NO: 25391 - DNA, 25 bp, probe
catcatttaccgtgacctgaaagtt

SEQ ID NO: 25392 - DNA, 25 bp, probe
gcatgtgtaaagagaatatctggga

SEQ ID NO: 25393 - DNA, 25 bp, probe
tggcatgtgtaaagagaatatctgg

SEQ ID NO: 25394 - DNA, 25 bp, probe
atgtgtaaagagaatatctgggatg

SEQ ID NO: 25395 - DNA, 25 bp, probe
ttggcatgtgtaaagagaatatctg

SEQ ID NO: 25396 - DNA, 25 bp, probe
catttaccgtgacctgaaagttgac

SEQ ID NO: 25397 - DNA, 25 bp, probe
ggcatgtgtaaagagaatatctggg

SEQ ID NO: 25398 - DNA, 25 bp, probe
tttggcatgtgtaaagagaatatct

SEQ ID NO: 25399 - DNA, 25 bp, probe
atttaccgtgacctgaaagttgaca

SEQ ID NO: 25400 - DNA, 25 bp, probe
catgtgtaaagagaatatctgggat

SEQ ID NO: 25401 - DNA, 25 bp, probe
tcatttaccgtgacctgaaagttga

SEQ ID NO: 25402 - DNA, 25 bp, probe
tttaccgtgacctgaaagttgacaa

SEQ ID NO: 25403 - DNA, 25 bp, probe
gactttggcatgtgtaaagagaata

SEQ ID NO: 25404 - DNA, 25 bp, probe
tgactttggcatgtgtaaagagaat

SEQ ID NO: 25405 - DNA, 25 bp, probe
actttggcatgtgtaaagagaatat

SEQ ID NO: 25406 - DNA, 25 bp, probe
ctgactttggcatgtgtaaagagaa

SEQ ID NO: 25407 - DNA, 25 bp, probe
ctttggcatgtgtaaagagaatatc

SEQ ID NO: 25408 - DNA, 25 bp, probe
taaagagaatatctgggatggggtg

SEQ ID NO: 25409 - DNA, 25 bp, probe
gtaaagagaatatctgggatggggt

SEQ ID NO: 25410 - DNA, 25 bp, probe
tgtaaagagaatatctgggatgggg

SEQ ID NO: 25411 - DNA, 25 bp, probe
gcatcatttaccgtgacctgaaagt

SEQ ID NO: 25412 - DNA, 25 bp, probe
ttaccgtgacctgaaagttgacaac

SEQ ID NO: 25413 - DNA, 25 bp, probe
aagttgacaacgtgatgctggattc

SEQ ID NO: 25414 - DNA, 25 bp, probe
aatcgctgactttggcatgtgtaaa

SEQ ID NO: 25415 - DNA, 25 bp, probe
aaatcgctgactttggcatgtgtaa

SEQ ID NO: 25416 - DNA, 25 bp, probe
gattgccatcggtcttttcttcttg

SEQ ID NO: 25417 - DNA, 25 bp, probe
ggcatcatttaccgtgacctgaaag

SEQ ID NO: 25418 - DNA, 25 bp, probe
aaagagaatatctgggatggggtga

SEQ ID NO: 25419 - DNA, 25 bp, probe
agattgccatcggtcttttcttctt

SEQ ID NO: 25420 - DNA, 25 bp, probe
aaagttgacaacgtgatgctggatt

SEQ ID NO: 25421 - DNA, 25 bp, probe
tgacctgaaagttgacaacgtgatg

SEQ ID NO: 25422 - DNA, 25 bp, probe
gtgacctgaaagttgacaacgtgat

SEQ ID NO: 25423 - DNA, 25 bp, probe
gagattgccatcggtcttttcttct

SEQ ID NO: 25424 - DNA, 25 bp, probe
agagattgccatcggtcttttcttc

SEQ ID NO: 25425 - DNA, 25 bp, probe
gctgactttggcatgtgtaaagaga

SEQ ID NO: 25426 - DNA, 25 bp, probe
aagagaatatctgggatggggtgac

SEQ ID NO: 25427 - DNA, 25 bp, probe
cagagattgccatcggtcttttctt

SEQ ID NO: 25428 - DNA, 25 bp, probe
gagaatatctgggatggggtgacaa

SEQ ID NO: 25429 - DNA, 25 bp, probe
gaaagttgacaacgtgatgctggat

SEQ ID NO: 25430 - DNA, 25 bp, probe
atcgctgactttggcatgtgtaaag

SEQ ID NO: 25431 - DNA, 25 bp, probe
agaatatctgggatggggtgacaac

SEQ ID NO: 25432 - DNA, 25 bp, probe
ttgtgatctacttgaagtcctgaag

SEQ ID NO: 25433 - DNA, 25 bp, probe
tgttctgacaccttcattaataacg

SEQ ID NO: 25434 - DNA, 25 bp, probe
ctctcagtggtcaccttgttctatg

SEQ ID NO: 25435 - DNA, 25 bp, probe
gcctgttctgacaccttcattaata

SEQ ID NO: 25436 - DNA, 25 bp, probe
cctgttctgacaccttcattaataa

SEQ ID NO: 25437 - DNA, 25 bp, probe
cacaccatcttctaggacaagtctg

SEQ ID NO: 25438 - DNA, 25 bp, probe
tgtgatctacttgaagtcctgaagc

SEQ ID NO: 25439 - DNA, 25 bp, probe
gttctgacaccttcattaataacgt

SEQ ID NO: 25440 - DNA, 25 bp, probe
tgatctacttgaagtcctgaagctc

SEQ ID NO: 25441 - DNA, 25 bp, probe
ctgttctgacaccttcattaataac

SEQ ID NO: 25442 - DNA, 25 bp, probe
gtgatctacttgaagtcctgaagct

SEQ ID NO: 25443 - DNA, 25 bp, probe
ttctgacaccttcattaataacgtg

SEQ ID NO: 25444 - DNA, 25 bp, probe
tttgtgatctacttgaagtcctgaa

SEQ ID NO: 25445 - DNA, 25 bp, probe
tctgacaccttcattaataacgtgg

SEQ ID NO: 25446 - DNA, 25 bp, probe
cctctcagtggtcaccttgttctat

SEQ ID NO: 25447 - DNA, 25 bp, probe
ccacaccatcttctaggacaagtct

SEQ ID NO: 25448 - DNA, 25 bp, probe
ctgacaccttcattaataacgtggt

SEQ ID NO: 25449 - DNA, 25 bp, probe
gatctacttgaagtcctgaagctcg

SEQ ID NO: 25450 - DNA, 25 bp, probe
accttcattaataacgtggtgatat

SEQ ID NO: 25451 - DNA, 25 bp, probe
taataacgtggtgatatactttgca

SEQ ID NO: 25452 - DNA, 25 bp, probe
cgcctgttctgacaccttcattaat

SEQ ID NO: 25453 - DNA, 25 bp, probe
acaccatcttctaggacaagtctgg

SEQ ID NO: 25454 - DNA, 25 bp, probe
tcgcctgttctgacaccttcattaa

SEQ ID NO: 25455 - DNA, 25 bp, probe
ttaataacgtggtgatatactttgc

SEQ ID NO: 25456 - DNA, 25 bp, probe
ccttcattaataacgtggtgatata

SEQ ID NO: 25457 - DNA, 25 bp, probe
catcttctaggacaagtctggtggc

SEQ ID NO: 25458 - DNA, 25 bp, probe
ccatcttctaggacaagtctggtgg

SEQ ID NO: 25459 - DNA, 25 bp, probe
ttttgtgatctacttgaagtcctga

SEQ ID NO: 25460 - DNA, 25 bp, probe
ctcgcctgttctgacaccttcatta

SEQ ID NO: 25461 - DNA, 25 bp, probe
ccttcatctacagcctgaggaacac

SEQ ID NO: 25462 - DNA, 25 bp, probe
gccacaccatcttctaggacaagtc

SEQ ID NO: 25463 - DNA, 25 bp, probe
cagccacaccatcttctaggacaag

SEQ ID NO: 25464 - DNA, 25 bp, probe
cttcatctacagcctgaggaacacg

SEQ ID NO: 25465 - DNA, 25 bp, probe
atctacttgaagtcctgaagctcgc

SEQ ID NO: 25466 - DNA, 25 bp, probe
tgttttctctatactgaggatttcc

SEQ ID NO: 25467 - DNA, 25 bp, probe
tcattaataacgtggtgatatactt

SEQ ID NO: 25468 - DNA, 25 bp, probe
ttcattaataacgtggtgatatact

SEQ ID NO: 25469 - DNA, 25 bp, probe
ctcagtggtcaccttgttctatggc

SEQ ID NO: 25470 - DNA, 25 bp, probe
cttcattaataacgtggtgatatac

SEQ ID NO: 25471 - DNA, 25 bp, probe
acctctcagtggtcaccttgttcta

SEQ ID NO: 25472 - DNA, 25 bp, probe
cctgcactatacggtcatcatgaac

SEQ ID NO: 25473 - DNA, 25 bp, probe
gagactcctcagtagggcaacattt

SEQ ID NO: 25474 - DNA, 25 bp, probe
ataacgtggtgatatactttgcaac

SEQ ID NO: 25475 - DNA, 25 bp, probe
taacgtggtgatatactttgcaact

SEQ ID NO: 25476 - DNA, 25 bp, probe
atatggtatagcatcggagactacg

SEQ ID NO: 25477 - DNA, 25 bp, probe
attacctagaatatggagcagcagt

SEQ ID NO: 25478 - DNA, 25 bp, probe
cattacctagaatatggagcagcag

SEQ ID NO: 25479 - DNA, 25 bp, probe
taccttatgacatcatcaatgcctt

SEQ ID NO: 25480 - DNA, 25 bp, probe
ttaccttatgacatcatcaatgcct

SEQ ID NO: 25481 - DNA, 25 bp, probe
tcattgatgaagtcactaacaccat

SEQ ID NO: 25482 - DNA, 25 bp, probe
gaggtcattgatgaagtcactaaca

SEQ ID NO: 25483 - DNA, 25 bp, probe
ttacctagaatatggagcagcagtc

SEQ ID NO: 25484 - DNA, 25 bp, probe
aggtcattgatgaagtcactaacac

SEQ ID NO: 25485 - DNA, 25 bp, probe
gtcattgatgaagtcactaacacca

SEQ ID NO: 25486 - DNA, 25 bp, probe
tacgaggtcattgatgaagtcacta

SEQ ID NO: 25487 - DNA, 25 bp, probe
gactccatatcgctacaataccagt

SEQ ID NO: 25488 - DNA, 25 bp, probe
actccatatcgctacaataccagtg

SEQ ID NO: 25489 - DNA, 25 bp, probe
cgaggtcattgatgaagtcactaac

SEQ ID NO: 25490 - DNA, 25 bp, probe
ggactccatatcgctacaataccag

SEQ ID NO: 25491 - DNA, 25 bp, probe
taccatgacaagccttacaaccata

SEQ ID NO: 25492 - DNA, 25 bp, probe
acgaggtcattgatgaagtcactaa

SEQ ID NO: 25493 - DNA, 25 bp, probe
ggaatcagcagtctcttcagttctt

SEQ ID NO: 25494 - DNA, 25 bp, probe
aatcagcagtctcttcagttcttta

SEQ ID NO: 25495 - DNA, 25 bp, probe
atctgctgtcttgtttaccttatga

SEQ ID NO: 25496 - DNA, 25 bp, probe
atgacaagccttacaaccataggat

SEQ ID NO: 25497 - DNA, 25 bp, probe
tcactaacaccatccaaatagacag

SEQ ID NO: 25498 - DNA, 25 bp, probe
atcagcagtctcttcagttctttaa

SEQ ID NO: 25499 - DNA, 25 bp, probe
attcattgtacgtgtcctctctcta

SEQ ID NO: 25500 - DNA, 25 bp, probe
tgaagtcactaacaccatccaaata

SEQ ID NO: 25501 - DNA, 25 bp, probe
aagtcactaacaccatccaaataga

SEQ ID NO: 25502 - DNA, 25 bp, probe
ctacgaggtcattgatgaagtcact

SEQ ID NO: 25503 - DNA, 25 bp, probe
tgacaagccttacaaccataggatt

SEQ ID NO: 25504 - DNA, 25 bp, probe
gaagtcactaacaccatccaaatag

SEQ ID NO: 25505 - DNA, 25 bp, probe
atgaagtcactaacaccatccaaat

SEQ ID NO: 25506 - DNA, 25 bp, probe
gagactacgaggtcattgatgaagt

SEQ ID NO: 25507 - DNA, 25 bp, probe
actacgaggtcattgatgaagtcac

SEQ ID NO: 25508 - DNA, 25 bp, probe
ggaaactggaccattacctagaata

SEQ ID NO: 25509 - DNA, 25 bp, probe
ctccatatcgctacaataccagtgc

SEQ ID NO: 25510 - DNA, 25 bp, probe
ctaacaccatccaaatagacagttg

SEQ ID NO: 25511 - DNA, 25 bp, probe
gaatcagcagtctcttcagttcttt

SEQ ID NO: 25512 - DNA, 25 bp, probe
ttaccatgacaagccttacaaccat

SEQ ID NO: 25513 - DNA, 25 bp, probe
actaacaccatccaaatagacagtt

SEQ ID NO: 25514 - DNA, 25 bp, probe
cattgtacgtgtcctctctctactt

SEQ ID NO: 25515 - DNA, 25 bp, probe
ttcattgtacgtgtcctctctctac

SEQ ID NO: 25516 - DNA, 25 bp, probe
cactaacaccatccaaatagacagt

SEQ ID NO: 25517 - DNA, 25 bp, probe
ggtcattgatgaagtcactaacacc

SEQ ID NO: 25518 - DNA, 25 bp, probe
gatctgctgtcttgtttaccttatg

SEQ ID NO: 25519 - DNA, 25 bp, probe
catatggtatagcatcggagactac

SEQ ID NO: 25520 - DNA, 25 bp, probe
gagatcagcatcatcaacatcaaag

SEQ ID NO: 25521 - DNA, 25 bp, probe
gcatcatcaacatcaaagggaacat

SEQ ID NO: 25522 - DNA, 25 bp, probe
gatgatctacagaccaagtttgctc

SEQ ID NO: 25523 - DNA, 25 bp, probe
catcatcaacatcaaagggaacatg

SEQ ID NO: 25524 - DNA, 25 bp, probe
agatcagcatcatcaacatcaaagg

SEQ ID NO: 25525 - DNA, 25 bp, probe
ggagatcagcatcatcaacatcaaa

SEQ ID NO: 25526 - DNA, 25 bp, probe
gatgatggtatcacacagtatgctg

SEQ ID NO: 25527 - DNA, 25 bp, probe
agatgatggtatcacacagtatgct

SEQ ID NO: 25528 - DNA, 25 bp, probe
cagatgatggtatcacacagtatgc

SEQ ID NO: 25529 - DNA, 25 bp, probe
gcagatgatggtatcacacagtatg

SEQ ID NO: 25530 - DNA, 25 bp, probe
agtatccacaagcacagaccatcat

SEQ ID NO: 25531 - DNA, 25 bp, probe
atcagcatcatcaacatcaaaggga

SEQ ID NO: 25532 - DNA, 25 bp, probe
cagcatcatcaacatcaaagggaac

SEQ ID NO: 25533 - DNA, 25 bp, probe
tcagcatcatcaacatcaaagggaa

SEQ ID NO: 25534 - DNA, 25 bp, probe
gatcagcatcatcaacatcaaaggg

SEQ ID NO: 25535 - DNA, 25 bp, probe
ggcagatgatggtatcacacagtat

SEQ ID NO: 25536 - DNA, 25 bp, probe
agcatcatcaacatcaaagggaaca

SEQ ID NO: 25537 - DNA, 25 bp, probe
gtatccacaagcacagaccatcatg

SEQ ID NO: 25538 - DNA, 25 bp, probe
ggatgatctacagaccaagtttgct

SEQ ID NO: 25539 - DNA, 25 bp, probe
ctggatgatctacagaccaagtttg

SEQ ID NO: 25540 - DNA, 25 bp, probe
atgatctacagaccaagtttgctcg

SEQ ID NO: 25541 - DNA, 25 bp, probe
ttaagattgcttaccgcattgaacg

SEQ ID NO: 25542 - DNA, 25 bp, probe
gagtatccacaagcacagaccatca

SEQ ID NO: 25543 - DNA, 25 bp, probe
gttattcagacctattctgcctgag

SEQ ID NO: 25544 - DNA, 25 bp, probe
gggagatcagcatcatcaacatcaa

SEQ ID NO: 25545 - DNA, 25 bp, probe
catcaagagcctaggttattcagac

SEQ ID NO: 25546 - DNA, 25 bp, probe
aatgaacaagttggacgtgaatgct

SEQ ID NO: 25547 - DNA, 25 bp, probe
acatcaagagcctaggttattcaga

SEQ ID NO: 25548 - DNA, 25 bp, probe
aacatcaagagcctaggttattcag

SEQ ID NO: 25549 - DNA, 25 bp, probe
caacatcaagagcctaggttattca

SEQ ID NO: 25550 - DNA, 25 bp, probe
cttaagattgcttaccgcattgaac

SEQ ID NO: 25551 - DNA, 25 bp, probe
agctggatgatctacagaccaagtt

SEQ ID NO: 25552 - DNA, 25 bp, probe
ggttattcagacctattctgcctga

SEQ ID NO: 25553 - DNA, 25 bp, probe
acttaagattgcttaccgcattgaa

SEQ ID NO: 25554 - DNA, 25 bp, probe
ccaacatcaagagcctaggttattc

SEQ ID NO: 25555 - DNA, 25 bp, probe
gctggatgatctacagaccaagttt

SEQ ID NO: 25556 - DNA, 25 bp, probe
tggcagatgatggtatcacacagta

SEQ ID NO: 25557 - DNA, 25 bp, probe
gatcctgctgaaaatgaacaagttg

SEQ ID NO: 25558 - DNA, 25 bp, probe
agatcctgctgaaaatgaacaagtt

SEQ ID NO: 25559 - DNA, 25 bp, probe
ttattcagacctattctgcctgagc

SEQ ID NO: 25560 - DNA, 25 bp, probe
gagatcctgctgaaaatgaacaagt

SEQ ID NO: 25561 - DNA, 25 bp, probe
tgagatcctgctgaaaatgaacaag

SEQ ID NO: 25562 - DNA, 25 bp, probe
cacttaagattgcttaccgcattga

SEQ ID NO: 25563 - DNA, 25 bp, probe
tggatgatctacagaccaagtttgc

SEQ ID NO: 25564 - DNA, 25 bp, probe
ctggactatggctatggaggtgatt

SEQ ID NO: 25565 - DNA, 25 bp, probe
tggactatggctatggaggtgattt

SEQ ID NO: 25566 - DNA, 25 bp, probe
gactatggctatggaggtgattttg

SEQ ID NO: 25567 - DNA, 25 bp, probe
ctatggctatggaggtgattttgtg

SEQ ID NO: 25568 - DNA, 25 bp, probe
actatggctatggaggtgattttgt

SEQ ID NO: 25569 - DNA, 25 bp, probe
ggactatggctatggaggtgatttt

SEQ ID NO: 25570 - DNA, 25 bp, probe
tatggctatggaggtgattttgtgg

SEQ ID NO: 25571 - DNA, 25 bp, probe
cctggactatggctatggaggtgat

SEQ ID NO: 25572 - DNA, 25 bp, probe
tgattttgtggccctagataggatg

SEQ ID NO: 25573 - DNA, 25 bp, probe
gtgattttgtggccctagataggat

SEQ ID NO: 25574 - DNA, 25 bp, probe
gaggtgattttgtggccctagatag

SEQ ID NO: 25575 - DNA, 25 bp, probe
gattttgtggccctagataggatgg

SEQ ID NO: 25576 - DNA, 25 bp, probe
ggtgattttgtggccctagatagga

SEQ ID NO: 25577 - DNA, 25 bp, probe
aggtgattttgtggccctagatagg

SEQ ID NO: 25578 - DNA, 25 bp, probe
ggaggtgattttgtggccctagata

SEQ ID NO: 25579 - DNA, 25 bp, probe
tatggaggtgattttgtggccctag

SEQ ID NO: 25580 - DNA, 25 bp, probe
ctatggaggtgattttgtggcccta

SEQ ID NO: 25581 - DNA, 25 bp, probe
attttgtggccctagataggatggc

SEQ ID NO: 25582 - DNA, 25 bp, probe
cactctctgaaacttctttgctaat

SEQ ID NO: 25583 - DNA, 25 bp, probe
ccactctctgaaacttctttgctaa

SEQ ID NO: 25584 - DNA, 25 bp, probe
actctctgaaacttctttgctaata

SEQ ID NO: 25585 - DNA, 25 bp, probe
cccactctctgaaacttctttgcta

SEQ ID NO: 25586 - DNA, 25 bp, probe
ctctctgaaacttctttgctaataa

SEQ ID NO: 25587 - DNA, 25 bp, probe
tctctgaaacttctttgctaataaa

SEQ ID NO: 25588 - DNA, 25 bp, probe
atccacccactctctgaaacttctt

SEQ ID NO: 25589 - DNA, 25 bp, probe
ccacccactctctgaaacttctttg

SEQ ID NO: 25590 - DNA, 25 bp, probe
aatccatcatgaagaagagagacgg

SEQ ID NO: 25591 - DNA, 25 bp, probe
tccacccactctctgaaacttcttt

SEQ ID NO: 25592 - DNA, 25 bp, probe
gaagagaaaggcaatttcagttggg

SEQ ID NO: 25593 - DNA, 25 bp, probe
gagaatgcggtgacaatggagagaa

SEQ ID NO: 25594 - DNA, 25 bp, probe
cacccactctctgaaacttctttgc

SEQ ID NO: 25595 - DNA, 25 bp, probe
caaatccatcatgaagaagagagac

SEQ ID NO: 25596 - DNA, 25 bp, probe
aaatccatcatgaagaagagagacg

SEQ ID NO: 25597 - DNA, 25 bp, probe
acccactctctgaaacttctttgct

SEQ ID NO: 25598 - DNA, 25 bp, probe
gatccacccactctctgaaacttct

SEQ ID NO: 25599 - DNA, 25 bp, probe
cgaagagaaaggcaatttcagttgg

SEQ ID NO: 25600 - DNA, 25 bp, probe
ccgaagagaaaggcaatttcagttg

SEQ ID NO: 25601 - DNA, 25 bp, probe
agaatgcggtgacaatggagagaac

SEQ ID NO: 25602 - DNA, 25 bp, probe
atcctcaaatccatcatgaagaaga

SEQ ID NO: 25603 - DNA, 25 bp, probe
catcctcaaatccatcatgaagaag

SEQ ID NO: 25604 - DNA, 25 bp, probe
tcaaatccatcatgaagaagagaga

SEQ ID NO: 25605 - DNA, 25 bp, probe
tgatccacccactctctgaaacttc

SEQ ID NO: 25606 - DNA, 25 bp, probe
ctgatccacccactctctgaaactt

SEQ ID NO: 25607 - DNA, 25 bp, probe
cctcaaatccatcatgaagaagaga

SEQ ID NO: 25608 - DNA, 25 bp, probe
tcctcaaatccatcatgaagaagag

SEQ ID NO: 25609 - DNA, 25 bp, probe
ctcaaatccatcatgaagaagagag

SEQ ID NO: 25610 - DNA, 25 bp, probe
gcatcctcaaatccatcatgaagaa

SEQ ID NO: 25611 - DNA, 25 bp, probe
acttctttgctaataaaacattcct

SEQ ID NO: 25612 - DNA, 25 bp, probe
aacttctttgctaataaaacattcc

SEQ ID NO: 25613 - DNA, 25 bp, probe
ctgaaacttctttgctaataaaaca

SEQ ID NO: 25614 - DNA, 25 bp, probe
ctcttctgcatgggtgatgtcaatg

SEQ ID NO: 25615 - DNA, 25 bp, probe
tctttgctaataaaacattcctact

SEQ ID NO: 25616 - DNA, 25 bp, probe
atccatcatgaagaagagagacggc

SEQ ID NO: 25617 - DNA, 25 bp, probe
tctgaaacttctttgctaataaaac

SEQ ID NO: 25618 - DNA, 25 bp, probe
ggcatcctcaaatccatcatgaaga

SEQ ID NO: 25619 - DNA, 25 bp, probe
actcttctgcatgggtgatgtcaat

SEQ ID NO: 25620 - DNA, 25 bp, probe
ctctgaaacttctttgctaataaaa

SEQ ID NO: 25621 - DNA, 25 bp, probe
ttctttgctaataaaacattcctac

SEQ ID NO: 25622 - DNA, 25 bp, probe
atcatgaagaagagagacggcacac

SEQ ID NO: 25623 - DNA, 25 bp, probe
catcatgaagaagagagacggcaca

SEQ ID NO: 25624 - DNA, 25 bp, probe
tgaaacttctttgctaataaaacat

SEQ ID NO: 25625 - DNA, 25 bp, probe
cttctttgctaataaaacattccta

SEQ ID NO: 25626 - DNA, 25 bp, probe
gacttcgttaatatcatagcgtaca

SEQ ID NO: 25627 - DNA, 25 bp, probe
acttcgttaatatcatagcgtacaa

SEQ ID NO: 25628 - DNA, 25 bp, probe
tgacttcgttaatatcatagcgtac

SEQ ID NO: 25629 - DNA, 25 bp, probe
ttcgttaatatcatagcgtacaatg

SEQ ID NO: 25630 - DNA, 25 bp, probe
cttcgttaatatcatagcgtacaat

SEQ ID NO: 25631 - DNA, 25 bp, probe
tttcacttacctcattgggagagaa

SEQ ID NO: 25632 - DNA, 25 bp, probe
ttcacttacctcattgggagagaag

SEQ ID NO: 25633 - DNA, 25 bp, probe
aatgacttcgttaatatcatagcgt

SEQ ID NO: 25634 - DNA, 25 bp, probe
cgttaatatcatagcgtacaatgac

SEQ ID NO: 25635 - DNA, 25 bp, probe
gaatgacttcgttaatatcatagcg

SEQ ID NO: 25636 - DNA, 25 bp, probe
tacaatgactacgtccattacatcg

SEQ ID NO: 25637 - DNA, 25 bp, probe
gtacaatgactacgtccattacatc

SEQ ID NO: 25638 - DNA, 25 bp, probe
tcgttaatatcatagcgtacaatga

SEQ ID NO: 25639 - DNA, 25 bp, probe
cttacctcattgggagagaagtgtc

SEQ ID NO: 25640 - DNA, 25 bp, probe
atgacttcgttaatatcatagcgta

SEQ ID NO: 25641 - DNA, 25 bp, probe
gagacaatcgagagcatttcaaact

SEQ ID NO: 25642 - DNA, 25 bp, probe
caatgactacgtccattacatcgag

SEQ ID NO: 25643 - DNA, 25 bp, probe
agacaatcgagagcatttcaaactg

SEQ ID NO: 25644 - DNA, 25 bp, probe
tacctcattgggagagaagtgtctt

SEQ ID NO: 25645 - DNA, 25 bp, probe
ttacctcattgggagagaagtgtct

SEQ ID NO: 25646 - DNA, 25 bp, probe
acaatgactacgtccattacatcga

SEQ ID NO: 25647 - DNA, 25 bp, probe
agaatgacttcgttaatatcatagc

SEQ ID NO: 25648 - DNA, 25 bp, probe
ggggagaatgacttcgttaatatca

SEQ ID NO: 25649 - DNA, 25 bp, probe
gttaatatcatagcgtacaatgact

SEQ ID NO: 25650 - DNA, 25 bp, probe
gggagaatgacttcgttaatatcat

SEQ ID NO: 25651 - DNA, 25 bp, probe
acctcattgggagagaagtgtcttt

SEQ ID NO: 25652 - DNA, 25 bp, probe
aatgactacgtccattacatcgagc

SEQ ID NO: 25653 - DNA, 25 bp, probe
catgcaacaacaaaggctactacac

SEQ ID NO: 25654 - DNA, 25 bp, probe
ttttcacttacctcattgggagaga

SEQ ID NO: 25655 - DNA, 25 bp, probe
gttttcacttacctcattgggagag

SEQ ID NO: 25656 - DNA, 25 bp, probe
gagttttcacttacctcattgggag

SEQ ID NO: 25657 - DNA, 25 bp, probe
aatatcatagcgtacaatgactacg

SEQ ID NO: 25658 - DNA, 25 bp, probe
ctcattgggagagaagtgtcttttg

SEQ ID NO: 25659 - DNA, 25 bp, probe
agttttcacttacctcattgggaga

SEQ ID NO: 25660 - DNA, 25 bp, probe
gtccgagttttcacttacctcattg

SEQ ID NO: 25661 - DNA, 25 bp, probe
tatcatagcgtacaatgactacgtc

SEQ ID NO: 25662 - DNA, 25 bp, probe
ggagaatgacttcgttaatatcata

SEQ ID NO: 25663 - DNA, 25 bp, probe
tatgaaggggctgaggatgactatt

SEQ ID NO: 25664 - DNA, 25 bp, probe
atatcatagcgtacaatgactacgt

SEQ ID NO: 25665 - DNA, 25 bp, probe
ttccagatcctgaagcagttccaag

SEQ ID NO: 25666 - DNA, 25 bp, probe
caacaaaggctactacacgcagatc

SEQ ID NO: 25667 - DNA, 25 bp, probe
actgtaaggtccgagttttcactta

SEQ ID NO: 25668 - DNA, 25 bp, probe
cgtacaatgactacgtccattacat

SEQ ID NO: 25669 - DNA, 25 bp, probe
taatatcatagcgtacaatgactac

SEQ ID NO: 25670 - DNA, 25 bp, probe
cgaatgtaaggtctgtaactatgga

SEQ ID NO: 25671 - DNA, 25 bp, probe
ccgaatgtaaggtctgtaactatgg

SEQ ID NO: 25672 - DNA, 25 bp, probe
taactatggacttaccttcactcaa

SEQ ID NO: 25673 - DNA, 25 bp, probe
tagtgttggcagtaatgttgatcta

SEQ ID NO: 25674 - DNA, 25 bp, probe
ttagtgttggcagtaatgttgatct

SEQ ID NO: 25675 - DNA, 25 bp, probe
agtgttggcagtaatgttgatctag

SEQ ID NO: 25676 - DNA, 25 bp, probe
atgtaaggtctgtaactatggactt

SEQ ID NO: 25677 - DNA, 25 bp, probe
aatgtaaggtctgtaactatggact

SEQ ID NO: 25678 - DNA, 25 bp, probe
gaatgtaaggtctgtaactatggac

SEQ ID NO: 25679 - DNA, 25 bp, probe
gtaactatggacttaccttcactca

SEQ ID NO: 25680 - DNA, 25 bp, probe
tgtaactatggacttaccttcactc

SEQ ID NO: 25681 - DNA, 25 bp, probe
ctgtaactatggacttaccttcact

SEQ ID NO: 25682 - DNA, 25 bp, probe
tgtaaggtctgtaactatggactta

SEQ ID NO: 25683 - DNA, 25 bp, probe
gaataagttggctaaagggttgaaa

SEQ ID NO: 25684 - DNA, 25 bp, probe
agaataagttggctaaagggttgaa

SEQ ID NO: 25685 - DNA, 25 bp, probe
aactatggacttaccttcactcaaa

SEQ ID NO: 25686 - DNA, 25 bp, probe
aagctggattgtagaacttctctct

SEQ ID NO: 25687 - DNA, 25 bp, probe
gagaataagttggctaaagggttga

SEQ ID NO: 25688 - DNA, 25 bp, probe
cccgaatgtaaggtctgtaactatg

SEQ ID NO: 25689 - DNA, 25 bp, probe
cagaaggttaatgggattgaaatgt

SEQ ID NO: 25690 - DNA, 25 bp, probe
caagctggattgtagaacttctctc

SEQ ID NO: 25691 - DNA, 25 bp, probe
agaaggttaatgggattgaaatgtc

SEQ ID NO: 25692 - DNA, 25 bp, probe
tttggagaataagttggctaaaggg

SEQ ID NO: 25693 - DNA, 25 bp, probe
aaagggttgaaactgagtcttgata

SEQ ID NO: 25694 - DNA, 25 bp, probe
taaagggttgaaactgagtcttgat

SEQ ID NO: 25695 - DNA, 25 bp, probe
agctggattgtagaacttctctctc

SEQ ID NO: 25696 - DNA, 25 bp, probe
aataagttggctaaagggttgaaac

SEQ ID NO: 25697 - DNA, 25 bp, probe
tactcttgggacagaaatctctttg

SEQ ID NO: 25698 - DNA, 25 bp, probe
ctaaagggttgaaactgagtcttga

SEQ ID NO: 25699 - DNA, 25 bp, probe
atactcttgggacagaaatctcttt

SEQ ID NO: 25700 - DNA, 25 bp, probe
aatactcttgggacagaaatctctt

SEQ ID NO: 25701 - DNA, 25 bp, probe
aagggttgaaactgagtcttgatac

SEQ ID NO: 25702 - DNA, 25 bp, probe
gaaatgtcaataaaccttgcttgga

SEQ ID NO: 25703 - DNA, 25 bp, probe
caatactcttgggacagaaatctct

SEQ ID NO: 25704 - DNA, 25 bp, probe
acaatactcttgggacagaaatctc

SEQ ID NO: 25705 - DNA, 25 bp, probe
gacaatactcttgggacagaaatct

SEQ ID NO: 25706 - DNA, 25 bp, probe
cagacaatactcttgggacagaaat

SEQ ID NO: 25707 - DNA, 25 bp, probe
gccaaatccaaattgtcacagaata

SEQ ID NO: 25708 - DNA, 25 bp, probe
aacggaacacagacaatactcttgg

SEQ ID NO: 25709 - DNA, 25 bp, probe
gttgaaactgagtcttgataccata

SEQ ID NO: 25710 - DNA, 25 bp, probe
tgaaatgtcaataaaccttgcttgg

SEQ ID NO: 25711 - DNA, 25 bp, probe
gaaggttaatgggattgaaatgtca

SEQ ID NO: 25712 - DNA, 25 bp, probe
ggaggttctatctaccagaaggtta

SEQ ID NO: 25713 - DNA, 25 bp, probe
tttagtgttggcagtaatgttgatc

SEQ ID NO: 25714 - DNA, 25 bp, probe
gaagccacagacaagacataggtag

SEQ ID NO: 25715 - DNA, 25 bp, probe
agacaagacataggtagccgtagtt

SEQ ID NO: 25716 - DNA, 25 bp, probe
agaagccacagacaagacataggta

SEQ ID NO: 25717 - DNA, 25 bp, probe
gacaagacataggtagccgtagttg

SEQ ID NO: 25718 - DNA, 25 bp, probe
cagacaagacataggtagccgtagt

SEQ ID NO: 25719 - DNA, 25 bp, probe
acagacaagacataggtagccgtag

SEQ ID NO: 25720 - DNA, 25 bp, probe
aagacataggtagccgtagttggac

SEQ ID NO: 25721 - DNA, 25 bp, probe
cacagacaagacataggtagccgta

SEQ ID NO: 25722 - DNA, 25 bp, probe
caagacataggtagccgtagttgga

SEQ ID NO: 25723 - DNA, 25 bp, probe
acaagacataggtagccgtagttgg

SEQ ID NO: 25724 - DNA, 25 bp, probe
aagccacagacaagacataggtagc

SEQ ID NO: 25725 - DNA, 25 bp, probe
cagaagccacagacaagacataggt

SEQ ID NO: 25726 - DNA, 25 bp, probe
cataggtagccgtagttggactgac

SEQ ID NO: 25727 - DNA, 25 bp, probe
gacataggtagccgtagttggactg

SEQ ID NO: 25728 - DNA, 25 bp, probe
agacataggtagccgtagttggact

SEQ ID NO: 25729 - DNA, 25 bp, probe
acataggtagccgtagttggactga

SEQ ID NO: 25730 - DNA, 25 bp, probe
ccagaagccacagacaagacatagg

SEQ ID NO: 25731 - DNA, 25 bp, probe
cccagaagccacagacaagacatag

SEQ ID NO: 25732 - DNA, 25 bp, probe
cctcagttcccctagctgtaaaaca

SEQ ID NO: 25733 - DNA, 25 bp, probe
ctcagttcccctagctgtaaaacag

SEQ ID NO: 25734 - DNA, 25 bp, probe
gcctcagttcccctagctgtaaaac

SEQ ID NO: 25735 - DNA, 25 bp, probe
ttttaagtgcaatacttggcccacc

SEQ ID NO: 25736 - DNA, 25 bp, probe
tcagttcccctagctgtaaaacagg

SEQ ID NO: 25737 - DNA, 25 bp, probe
ccctagcattaattgaaagtggaat

SEQ ID NO: 25738 - DNA, 25 bp, probe
gccctagcattaattgaaagtggaa

SEQ ID NO: 25739 - DNA, 25 bp, probe
aagatgcagtacggtttattagaga

SEQ ID NO: 25740 - DNA, 25 bp, probe
agatgcagtacggtttattagagat

SEQ ID NO: 25741 - DNA, 25 bp, probe
gaagatgcagtacggtttattagag

SEQ ID NO: 25742 - DNA, 25 bp, probe
cgaagatgcagtacggtttattaga

SEQ ID NO: 25743 - DNA, 25 bp, probe
acgaagatgcagtacggtttattag

SEQ ID NO: 25744 - DNA, 25 bp, probe
aacgaagatgcagtacggtttatta

SEQ ID NO: 25745 - DNA, 25 bp, probe
aaatatcattctcaaatgcggcttc

SEQ ID NO: 25746 - DNA, 25 bp, probe
gaaatatcattctcaaatgcggctt

SEQ ID NO: 25747 - DNA, 25 bp, probe
gatgcagtacggtttattagagata

SEQ ID NO: 25748 - DNA, 25 bp, probe
agaaatatcattctcaaatgcggct

SEQ ID NO: 25749 - DNA, 25 bp, probe
ctgaattttaatgaccaacgggaaa

SEQ ID NO: 25750 - DNA, 25 bp, probe
caagcaacttttgtatttggagaaa

SEQ ID NO: 25751 - DNA, 25 bp, probe
gcaagcaacttttgtatttggagaa

SEQ ID NO: 25752 - DNA, 25 bp, probe
cctagcattaattgaaagtggaatg

SEQ ID NO: 25753 - DNA, 25 bp, probe
aatatcattctcaaatgcggcttcg

SEQ ID NO: 25754 - DNA, 25 bp, probe
atgcagtacggtttattagagataa

SEQ ID NO: 25755 - DNA, 25 bp, probe
ttgttgccctagcattaattgaaag

SEQ ID NO: 25756 - DNA, 25 bp, probe
cttgttgccctagcattaattgaaa

SEQ ID NO: 25757 - DNA, 25 bp, probe
taacagcaagcaacttttgtatttg

SEQ ID NO: 25758 - DNA, 25 bp, probe
cttttaacagcaagcaacttttgta

SEQ ID NO: 25759 - DNA, 25 bp, probe
agcaagcaacttttgtatttggaga

SEQ ID NO: 25760 - DNA, 25 bp, probe
cagcaagcaacttttgtatttggag

SEQ ID NO: 25761 - DNA, 25 bp, probe
gttgccctagcattaattgaaagtg

SEQ ID NO: 25762 - DNA, 25 bp, probe
tgaattttaatgaccaacgggaaaa

SEQ ID NO: 25763 - DNA, 25 bp, probe
tgttgccctagcattaattgaaagt

SEQ ID NO: 25764 - DNA, 25 bp, probe
agcattaattgaaagtggaatgaaa

SEQ ID NO: 25765 - DNA, 25 bp, probe
aacagcaagcaacttttgtatttgg

SEQ ID NO: 25766 - DNA, 25 bp, probe
ttaacagcaagcaacttttgtattt

SEQ ID NO: 25767 - DNA, 25 bp, probe
tttaacagcaagcaacttttgtatt

SEQ ID NO: 25768 - DNA, 25 bp, probe
ttttaacagcaagcaacttttgtat

SEQ ID NO: 25769 - DNA, 25 bp, probe
gctgaattttaatgaccaacgggaa

SEQ ID NO: 25770 - DNA, 25 bp, probe
aaacgaagatgcagtacggtttatt

SEQ ID NO: 25771 - DNA, 25 bp, probe
ctagcattaattgaaagtggaatga

SEQ ID NO: 25772 - DNA, 25 bp, probe
ttgccctagcattaattgaaagtgg

SEQ ID NO: 25773 - DNA, 25 bp, probe
aagcaacttttgtatttggagaaat

SEQ ID NO: 25774 - DNA, 25 bp, probe
cccaagctgaattttaatgaccaac

SEQ ID NO: 25775 - DNA, 25 bp, probe
caagctgaattttaatgaccaacgg

SEQ ID NO: 25776 - DNA, 25 bp, probe
ccaagctgaattttaatgaccaacg

SEQ ID NO: 25777 - DNA, 25 bp, probe
acagcaagcaacttttgtatttgga

SEQ ID NO: 25778 - DNA, 25 bp, probe
tagcattaattgaaagtggaatgaa

SEQ ID NO: 25779 - DNA, 25 bp, probe
gcttgttgccctagcattaattgaa

SEQ ID NO: 25780 - DNA, 25 bp, probe
tgcagtacggtttattagagataaa

SEQ ID NO: 25781 - DNA, 25 bp, probe
ttaatgagcgtgctgataatggatc

SEQ ID NO: 25782 - DNA, 25 bp, probe
tattaatgagcgtgctgataatgga

SEQ ID NO: 25783 - DNA, 25 bp, probe
atattaatgagcgtgctgataatgg

SEQ ID NO: 25784 - DNA, 25 bp, probe
attaatgagcgtgctgataatggat

SEQ ID NO: 25785 - DNA, 25 bp, probe
aattagtggaagatggagtaatcaa

SEQ ID NO: 25786 - DNA, 25 bp, probe
attagtggaagatggagtaatcaat

SEQ ID NO: 25787 - DNA, 25 bp, probe
ccaaggatgatttatgtctgagtga

SEQ ID NO: 25788 - DNA, 25 bp, probe
gtaatcaatattaatgagcgtgctg

SEQ ID NO: 25789 - DNA, 25 bp, probe
tcaatattaatgagcgtgctgataa

SEQ ID NO: 25790 - DNA, 25 bp, probe
taatcaatattaatgagcgtgctga

SEQ ID NO: 25791 - DNA, 25 bp, probe
agtaatcaatattaatgagcgtgct

SEQ ID NO: 25792 - DNA, 25 bp, probe
gagtaatcaatattaatgagcgtgc

SEQ ID NO: 25793 - DNA, 25 bp, probe
atgccaaggatgatttatgtctgag

SEQ ID NO: 25794 - DNA, 25 bp, probe
gatgccaaggatgatttatgtctga

SEQ ID NO: 25795 - DNA, 25 bp, probe
ctgatgccaaggatgatttatgtct

SEQ ID NO: 25796 - DNA, 25 bp, probe
tgatgccaaggatgatttatgtctg

SEQ ID NO: 25797 - DNA, 25 bp, probe
actgatgccaaggatgatttatgtc

SEQ ID NO: 25798 - DNA, 25 bp, probe
ttagtggaagatggagtaatcaata

SEQ ID NO: 25799 - DNA, 25 bp, probe
aatattaatgagcgtgctgataatg

SEQ ID NO: 25800 - DNA, 25 bp, probe
caatattaatgagcgtgctgataat

SEQ ID NO: 25801 - DNA, 25 bp, probe
tggagtaatcaatattaatgagcgt

SEQ ID NO: 25802 - DNA, 25 bp, probe
cactgatgccaaggatgatttatgt

SEQ ID NO: 25803 - DNA, 25 bp, probe
ggagtaatcaatattaatgagcgtg

SEQ ID NO: 25804 - DNA, 25 bp, probe
gccaaggatgatttatgtctgagtg

SEQ ID NO: 25805 - DNA, 25 bp, probe
agtggaagatggagtaatcaatatt

SEQ ID NO: 25806 - DNA, 25 bp, probe
tagtggaagatggagtaatcaatat

SEQ ID NO: 25807 - DNA, 25 bp, probe
tgctgataatggatcaactcctatg

SEQ ID NO: 25808 - DNA, 25 bp, probe
gtgctgataatggatcaactcctat

SEQ ID NO: 25809 - DNA, 25 bp, probe
tgccaaggatgatttatgtctgagt

SEQ ID NO: 25810 - DNA, 25 bp, probe
tgatttatgtctgagtgacttggat

SEQ ID NO: 25811 - DNA, 25 bp, probe
atgatttatgtctgagtgacttgga

SEQ ID NO: 25812 - DNA, 25 bp, probe
gatgatttatgtctgagtgacttgg

SEQ ID NO: 25813 - DNA, 25 bp, probe
ggatgatttatgtctgagtgacttg

SEQ ID NO: 25814 - DNA, 25 bp, probe
aggatgatttatgtctgagtgactt

SEQ ID NO: 25815 - DNA, 25 bp, probe
aaggatgatttatgtctgagtgact

SEQ ID NO: 25816 - DNA, 25 bp, probe
caaggatgatttatgtctgagtgac

SEQ ID NO: 25817 - DNA, 25 bp, probe
gctgataatggatcaactcctatgc

SEQ ID NO: 25818 - DNA, 25 bp, probe
aatcaatattaatgagcgtgctgat

SEQ ID NO: 25819 - DNA, 25 bp, probe
aagaaattagtggaagatggagtaa

SEQ ID NO: 25820 - DNA, 25 bp, probe
ttaagaaattagtggaagatggagt

SEQ ID NO: 25821 - DNA, 25 bp, probe
ttataagacatggtgttgagggaag

SEQ ID NO: 25822 - DNA, 25 bp, probe
tttataagacatggtgttgagggaa

SEQ ID NO: 25823 - DNA, 25 bp, probe
aaattagtggaagatggagtaatca

SEQ ID NO: 25824 - DNA, 25 bp, probe
atggagtaatcaatattaatgagcg

SEQ ID NO: 25825 - DNA, 25 bp, probe
acaatacactaggcactgagattac

SEQ ID NO: 25826 - DNA, 25 bp, probe
gacaatacactaggcactgagatta

SEQ ID NO: 25827 - DNA, 25 bp, probe
aatggaacactgacaatacactagg

SEQ ID NO: 25828 - DNA, 25 bp, probe
caatacactaggcactgagattacc

SEQ ID NO: 25829 - DNA, 25 bp, probe
atacactaggcactgagattaccat

SEQ ID NO: 25830 - DNA, 25 bp, probe
aatacactaggcactgagattacca

SEQ ID NO: 25831 - DNA, 25 bp, probe
aatagcagccaagtatcagatcaac

SEQ ID NO: 25832 - DNA, 25 bp, probe
gaagaataacacacatggactgaag

SEQ ID NO: 25833 - DNA, 25 bp, probe
tgaagaataacacacatggactgaa

SEQ ID NO: 25834 - DNA, 25 bp, probe
ggcactgagattaccatgaagaata

SEQ ID NO: 25835 - DNA, 25 bp, probe
tgacaatacactaggcactgagatt

SEQ ID NO: 25836 - DNA, 25 bp, probe
atgaagaataacacacatggactga

SEQ ID NO: 25837 - DNA, 25 bp, probe
gcactgagattaccatgaagaataa

SEQ ID NO: 25838 - DNA, 25 bp, probe
taggcactgagattaccatgaagaa

SEQ ID NO: 25839 - DNA, 25 bp, probe
ctgacaatacactaggcactgagat

SEQ ID NO: 25840 - DNA, 25 bp, probe
aagaataacacacatggactgaagc

SEQ ID NO: 25841 - DNA, 25 bp, probe
ctaggcactgagattaccatgaaga

SEQ ID NO: 25842 - DNA, 25 bp, probe
tacactaggcactgagattaccatg

SEQ ID NO: 25843 - DNA, 25 bp, probe
aggcactgagattaccatgaagaat

SEQ ID NO: 25844 - DNA, 25 bp, probe
agattaccatgaagaataacacaca

SEQ ID NO: 25845 - DNA, 25 bp, probe
actaggcactgagattaccatgaag

SEQ ID NO: 25846 - DNA, 25 bp, probe
gaagttgagagcactgtgaatcttg

SEQ ID NO: 25847 - DNA, 25 bp, probe
tgagattaccatgaagaataacaca

SEQ ID NO: 25848 - DNA, 25 bp, probe
cactaggcactgagattaccatgaa

SEQ ID NO: 25849 - DNA, 25 bp, probe
gaacactgacaatacactaggcact

SEQ ID NO: 25850 - DNA, 25 bp, probe
atggaacactgacaatacactaggc

SEQ ID NO: 25851 - DNA, 25 bp, probe
gagaaatggaacactgacaatacac

SEQ ID NO: 25852 - DNA, 25 bp, probe
agagaaatggaacactgacaataca

SEQ ID NO: 25853 - DNA, 25 bp, probe
agaaatggaacactgacaatacact

SEQ ID NO: 25854 - DNA, 25 bp, probe
gagattaccatgaagaataacacac

SEQ ID NO: 25855 - DNA, 25 bp, probe
atagcagccaagtatcagatcaacc

SEQ ID NO: 25856 - DNA, 25 bp, probe
actgagattaccatgaagaataaca

SEQ ID NO: 25857 - DNA, 25 bp, probe
aacactgacaatacactaggcactg

SEQ ID NO: 25858 - DNA, 25 bp, probe
gaaatggaacactgacaatacacta

SEQ ID NO: 25859 - DNA, 25 bp, probe
ctgagattaccatgaagaataacac

SEQ ID NO: 25860 - DNA, 25 bp, probe
cactgagattaccatgaagaataac

SEQ ID NO: 25861 - DNA, 25 bp, probe
actgacaatacactaggcactgaga

SEQ ID NO: 25862 - DNA, 25 bp, probe
cactgacaatacactaggcactgag

SEQ ID NO: 25863 - DNA, 25 bp, probe
ttgaaatagcagccaagtatcagat

SEQ ID NO: 25864 - DNA, 25 bp, probe
ctttgaaatagcagccaagtatcag

SEQ ID NO: 25865 - DNA, 25 bp, probe
tttgaaatagcagccaagtatcaga

SEQ ID NO: 25866 - DNA, 25 bp, probe
gaataacacacatggactgaagctg

SEQ ID NO: 25867 - DNA, 25 bp, probe
aaatggaacactgacaatacactag

SEQ ID NO: 25868 - DNA, 25 bp, probe
aaatagcagccaagtatcagatcaa

SEQ ID NO: 25869 - DNA, 25 bp, probe
gaagactctcatactccatcatcag

SEQ ID NO: 25870 - DNA, 25 bp, probe
atatcatcgttggaatggagattgt

SEQ ID NO: 25871 - DNA, 25 bp, probe
ctaacttcttcctgttcttctccat

SEQ ID NO: 25872 - DNA, 25 bp, probe
taacttcttcctgttcttctccatt

SEQ ID NO: 25873 - DNA, 25 bp, probe
tatcatcgttggaatggagattgtg

SEQ ID NO: 25874 - DNA, 25 bp, probe
tatatcatcgttggaatggagattg

SEQ ID NO: 25875 - DNA, 25 bp, probe
aagactctcatactccatcatcagc

SEQ ID NO: 25876 - DNA, 25 bp, probe
gactctcatactccatcatcagcaa

SEQ ID NO: 25877 - DNA, 25 bp, probe
cctaacttcttcctgttcttctcca

SEQ ID NO: 25878 - DNA, 25 bp, probe
actctcatactccatcatcagcaac

SEQ ID NO: 25879 - DNA, 25 bp, probe
ttatatcatcgttggaatggagatt

SEQ ID NO: 25880 - DNA, 25 bp, probe
agactctcatactccatcatcagca

SEQ ID NO: 25881 - DNA, 25 bp, probe
catcgttggaatggagattgtgttc

SEQ ID NO: 25882 - DNA, 25 bp, probe
atcatcgttggaatggagattgtgt

SEQ ID NO: 25883 - DNA, 25 bp, probe
ggaagactctcatactccatcatca

SEQ ID NO: 25884 - DNA, 25 bp, probe
ctctcatactccatcatcagcaacc

SEQ ID NO: 25885 - DNA, 25 bp, probe
acttcttcctgttcttctccattta

SEQ ID NO: 25886 - DNA, 25 bp, probe
tcgttggaatggagattgtgttcat

SEQ ID NO: 25887 - DNA, 25 bp, probe
atcgttggaatggagattgtgttca

SEQ ID NO: 25888 - DNA, 25 bp, probe
tcatcgttggaatggagattgtgtt

SEQ ID NO: 25889 - DNA, 25 bp, probe
cttctatttctgctttgtcacactc

SEQ ID NO: 25890 - DNA, 25 bp, probe
ttctatttctgctttgtcacactca

SEQ ID NO: 25891 - DNA, 25 bp, probe
tctcatactccatcatcagcaacct

SEQ ID NO: 25892 - DNA, 25 bp, probe
aacttcttcctgttcttctccattt

SEQ ID NO: 25893 - DNA, 25 bp, probe
gaatgccttctatttctgctttgtc

SEQ ID NO: 25894 - DNA, 25 bp, probe
aatgccttctatttctgctttgtca

SEQ ID NO: 25895 - DNA, 25 bp, probe
gattgtgttcattgctttcaagttg

SEQ ID NO: 25896 - DNA, 25 bp, probe
agattgtgttcattgctttcaagtt

SEQ ID NO: 25897 - DNA, 25 bp, probe
gttggaatggagattgtgttcattg

SEQ ID NO: 25898 - DNA, 25 bp, probe
gagattgtgttcattgctttcaagt

SEQ ID NO: 25899 - DNA, 25 bp, probe
ccttctatttctgctttgtcacact

SEQ ID NO: 25900 - DNA, 25 bp, probe
cttcttcctgttcttctccatttat

SEQ ID NO: 25901 - DNA, 25 bp, probe
tctatttctgctttgtcacactcac

SEQ ID NO: 25902 - DNA, 25 bp, probe
atggagattgtgttcattgctttca

SEQ ID NO: 25903 - DNA, 25 bp, probe
ggagattgtgttcattgctttcaag

SEQ ID NO: 25904 - DNA, 25 bp, probe
attgtgttcattgctttcaagttgg

SEQ ID NO: 25905 - DNA, 25 bp, probe
aaacaggctgattgacatatacaaa

SEQ ID NO: 25906 - DNA, 25 bp, probe
atgccttctatttctgctttgtcac

SEQ ID NO: 25907 - DNA, 25 bp, probe
accctaacttcttcctgttcttctc

SEQ ID NO: 25908 - DNA, 25 bp, probe
tggagattgtgttcattgctttcaa

SEQ ID NO: 25909 - DNA, 25 bp, probe
tgttcttctccatttatatcatcgt

SEQ ID NO: 25910 - DNA, 25 bp, probe
ctcatactccatcatcagcaacctg

SEQ ID NO: 25911 - DNA, 25 bp, probe
caccctaacttcttcctgttcttct

SEQ ID NO: 25912 - DNA, 25 bp, probe
ggaatggagattgtgttcattgctt

SEQ ID NO: 25913 - DNA, 25 bp, probe
tacagatgaccagattagagccatt

SEQ ID NO: 25914 - DNA, 25 bp, probe
ttacagatgaccagattagagccat

SEQ ID NO: 25915 - DNA, 25 bp, probe
ttactctgacattcaagcaagatca

SEQ ID NO: 25916 - DNA, 25 bp, probe
agatgaccagattagagccattgag

SEQ ID NO: 25917 - DNA, 25 bp, probe
tactctgacattcaagcaagatcac

SEQ ID NO: 25918 - DNA, 25 bp, probe
cagatgaccagattagagccattga

SEQ ID NO: 25919 - DNA, 25 bp, probe
acagatgaccagattagagccattg

SEQ ID NO: 25920 - DNA, 25 bp, probe
actttacagatgaccagattagagc

SEQ ID NO: 25921 - DNA, 25 bp, probe
gatgaccagattagagccattgagg

SEQ ID NO: 25922 - DNA, 25 bp, probe
tcattaaagcagagagatactacgc

SEQ ID NO: 25923 - DNA, 25 bp, probe
ctttacagatgaccagattagagcc

SEQ ID NO: 25924 - DNA, 25 bp, probe
ggaactttacagatgaccagattag

SEQ ID NO: 25925 - DNA, 25 bp, probe
tttacagatgaccagattagagcca

SEQ ID NO: 25926 - DNA, 25 bp, probe
attaaagcagagagatactacgcct

SEQ ID NO: 25927 - DNA, 25 bp, probe
cattaaagcagagagatactacgcc

SEQ ID NO: 25928 - DNA, 25 bp, probe
ctctgacattcaagcaagatcacag

SEQ ID NO: 25929 - DNA, 25 bp, probe
atgaccagattagagccattgagga

SEQ ID NO: 25930 - DNA, 25 bp, probe
actctgacattcaagcaagatcaca

SEQ ID NO: 25931 - DNA, 25 bp, probe
gacattcaagcaagatcacagtctg

SEQ ID NO: 25932 - DNA, 25 bp, probe
ctgacattcaagcaagatcacagtc

SEQ ID NO: 25933 - DNA, 25 bp, probe
ctttactctgacattcaagcaagat

SEQ ID NO: 25934 - DNA, 25 bp, probe
attcaagcaagatcacagtctggag

SEQ ID NO: 25935 - DNA, 25 bp, probe
aactttacagatgaccagattagag

SEQ ID NO: 25936 - DNA, 25 bp, probe
gaactttacagatgaccagattaga

SEQ ID NO: 25937 - DNA, 25 bp, probe
tgacattcaagcaagatcacagtct

SEQ ID NO: 25938 - DNA, 25 bp, probe
tctgacattcaagcaagatcacagt

SEQ ID NO: 25939 - DNA, 25 bp, probe
tgaccagattagagccattgaggag

SEQ ID NO: 25940 - DNA, 25 bp, probe
ctcattaaagcagagagatactacg

SEQ ID NO: 25941 - DNA, 25 bp, probe
tttactctgacattcaagcaagatc

SEQ ID NO: 25942 - DNA, 25 bp, probe
cattcaagcaagatcacagtctgga

SEQ ID NO: 25943 - DNA, 25 bp, probe
aacaggctttactctgacattcaag

SEQ ID NO: 25944 - DNA, 25 bp, probe
acattcaagcaagatcacagtctgg

SEQ ID NO: 25945 - DNA, 25 bp, probe
caacaggctttactctgacattcaa

SEQ ID NO: 25946 - DNA, 25 bp, probe
tggaactttacagatgaccagatta

SEQ ID NO: 25947 - DNA, 25 bp, probe
gtggaactttacagatgaccagatt

SEQ ID NO: 25948 - DNA, 25 bp, probe
agagagatactacgcctggagagag

SEQ ID NO: 25949 - DNA, 25 bp, probe
ttaaagcagagagatactacgcctg

SEQ ID NO: 25950 - DNA, 25 bp, probe
ttcaagcaagatcacagtctggaga

SEQ ID NO: 25951 - DNA, 25 bp, probe
tcaacaggctttactctgacattca

SEQ ID NO: 25952 - DNA, 25 bp, probe
agattagagccattgaggagcagtg

SEQ ID NO: 25953 - DNA, 25 bp, probe
cagattagagccattgaggagcagt

SEQ ID NO: 25954 - DNA, 25 bp, probe
gctcattaaagcagagagatactac

SEQ ID NO: 25955 - DNA, 25 bp, probe
aagactcgtcatttcaaaagcaaaa

SEQ ID NO: 25956 - DNA, 25 bp, probe
aaagactcgtcatttcaaaagcaaa

SEQ ID NO: 25957 - DNA, 25 bp, probe
aaatggtgacttggaaatgatgaaa

SEQ ID NO: 25958 - DNA, 25 bp, probe
catcaactttgtggataacgggaaa

SEQ ID NO: 25959 - DNA, 25 bp, probe
taatattgaagtttggtgaagagca

SEQ ID NO: 25960 - DNA, 25 bp, probe
tttcctattcatcaggctgtacttt

SEQ ID NO: 25961 - DNA, 25 bp, probe
ttcctattcatcaggctgtactttc

SEQ ID NO: 25962 - DNA, 25 bp, probe
ctattcatcaggctgtactttcagg

SEQ ID NO: 25963 - DNA, 25 bp, probe
cctattcatcaggctgtactttcag

SEQ ID NO: 25964 - DNA, 25 bp, probe
tattcatcaggctgtactttcaggt

SEQ ID NO: 25965 - DNA, 25 bp, probe
tcctattcatcaggctgtactttca

SEQ ID NO: 25966 - DNA, 25 bp, probe
atattgaagtttggtgaagagcacg

SEQ ID NO: 25967 - DNA, 25 bp, probe
aatattgaagtttggtgaagagcac

SEQ ID NO: 25968 - DNA, 25 bp, probe
gctaagccatgcaaatcaaatacat

SEQ ID NO: 25969 - DNA, 25 bp, probe
gagctaagccatgcaaatcaaatac

SEQ ID NO: 25970 - DNA, 25 bp, probe
ctgtactttcaggttccaaagaatg

SEQ ID NO: 25971 - DNA, 25 bp, probe
agctaagccatgcaaatcaaataca

SEQ ID NO: 25972 - DNA, 25 bp, probe
ctaagccatgcaaatcaaatacatt

SEQ ID NO: 25973 - DNA, 25 bp, probe
acatcaactttgtggataacgggaa

SEQ ID NO: 25974 - DNA, 25 bp, probe
attcatcaggctgtactttcaggtt

SEQ ID NO: 25975 - DNA, 25 bp, probe
ataatattgaagtttggtgaagagc

SEQ ID NO: 25976 - DNA, 25 bp, probe
ggtgacttggaaatgatgaaaatgt

SEQ ID NO: 25977 - DNA, 25 bp, probe
tggtgacttggaaatgatgaaaatg

SEQ ID NO: 25978 - DNA, 25 bp, probe
aatggtgacttggaaatgatgaaaa

SEQ ID NO: 25979 - DNA, 25 bp, probe
aaaatggtgacttggaaatgatgaa

SEQ ID NO: 25980 - DNA, 25 bp, probe
atcaactttgtggataacgggaaag

SEQ ID NO: 25981 - DNA, 25 bp, probe
ggagctaagccatgcaaatcaaata

SEQ ID NO: 25982 - DNA, 25 bp, probe
gtgacttggaaatgatgaaaatgtg

SEQ ID NO: 25983 - DNA, 25 bp, probe
atggtgacttggaaatgatgaaaat

SEQ ID NO: 25984 - DNA, 25 bp, probe
tgacttggaaatgatgaaaatgtgc

SEQ ID NO: 25985 - DNA, 25 bp, probe
gctgtactttcaggttccaaagaat

SEQ ID NO: 25986 - DNA, 25 bp, probe
gcatggaaataatattgaagtttgg

SEQ ID NO: 25987 - DNA, 25 bp, probe
tgtactttcaggttccaaagaatgc

SEQ ID NO: 25988 - DNA, 25 bp, probe
caaaatggtgacttggaaatgatga

SEQ ID NO: 25989 - DNA, 25 bp, probe
cttggaaatgatgaaaatgtgcctg

SEQ ID NO: 25990 - DNA, 25 bp, probe
gacttggaaatgatgaaaatgtgcc

SEQ ID NO: 25991 - DNA, 25 bp, probe
ttcatcaggctgtactttcaggttc

SEQ ID NO: 25992 - DNA, 25 bp, probe
gcatgaacaatgaggtgatgaagct

SEQ ID NO: 25993 - DNA, 25 bp, probe
taagccatgcaaatcaaatacattt

SEQ ID NO: 25994 - DNA, 25 bp, probe
acttggaaatgatgaaaatgtgcct

SEQ ID NO: 25995 - DNA, 25 bp, probe
catgaacaatgaggtgatgaagctt

SEQ ID NO: 25996 - DNA, 25 bp, probe
tacagcagacagtgtcacatcaact

SEQ ID NO: 25997 - DNA, 25 bp, probe
gtacagcagacagtgtcacatcaac

SEQ ID NO: 25998 - DNA, 25 bp, probe
tggaaataatattgaagtttggtga

SEQ ID NO: 25999 - DNA, 25 bp, probe
gcaaaatggtgacttggaaatgatg

SEQ ID NO: 26000 - DNA, 25 bp, probe
atgttttcctattcatcaggctgta

SEQ ID NO: 26001 - DNA, 25 bp, probe
cagagttttgtggttgagaaagaac

SEQ ID NO: 26002 - DNA, 25 bp, probe
agaaagaaccaccaaagatctcaaa

SEQ ID NO: 26003 - DNA, 25 bp, probe
gttgagaaagaaccaccaaagatct

SEQ ID NO: 26004 - DNA, 25 bp, probe
atctcaaataaaattgttgtgtggt

SEQ ID NO: 26005 - DNA, 25 bp, probe
gcaatttaacaccagagttttgtgg

SEQ ID NO: 26006 - DNA, 25 bp, probe
ccagagttttgtggttgagaaagaa

SEQ ID NO: 26007 - DNA, 25 bp, probe
gatctcaaataaaattgttgtgtgg

SEQ ID NO: 26008 - DNA, 25 bp, probe
tgcaatttaacaccagagttttgtg

SEQ ID NO: 26009 - DNA, 25 bp, probe
catcacaaggtgctggcacttattg

SEQ ID NO: 26010 - DNA, 25 bp, probe
ggttgagaaagaaccaccaaagatc

SEQ ID NO: 26011 - DNA, 25 bp, probe
gagaaagaaccaccaaagatctcaa

SEQ ID NO: 26012 - DNA, 25 bp, probe
ttgagaaagaaccaccaaagatctc

SEQ ID NO: 26013 - DNA, 25 bp, probe
gaaccaccaaagatctcaaataaaa

SEQ ID NO: 26014 - DNA, 25 bp, probe
acatcacaaggtgctggcacttatt

SEQ ID NO: 26015 - DNA, 25 bp, probe
accaccaaagatctcaaataaaatt

SEQ ID NO: 26016 - DNA, 25 bp, probe
aaccaccaaagatctcaaataaaat

SEQ ID NO: 26017 - DNA, 25 bp, probe
ccaccaaagatctcaaataaaattg

SEQ ID NO: 26018 - DNA, 25 bp, probe
ttgcaatttaacaccagagttttgt

SEQ ID NO: 26019 - DNA, 25 bp, probe
agagttttgtggttgagaaagaacc

SEQ ID NO: 26020 - DNA, 25 bp, probe
agatctcaaataaaattgttgtgtg

SEQ ID NO: 26021 - DNA, 25 bp, probe
caccaaagatctcaaataaaattgt

SEQ ID NO: 26022 - DNA, 25 bp, probe
atttaacaccagagttttgtggttg

SEQ ID NO: 26023 - DNA, 25 bp, probe
aatttaacaccagagttttgtggtt

SEQ ID NO: 26024 - DNA, 25 bp, probe
caatttaacaccagagttttgtggt

SEQ ID NO: 26025 - DNA, 25 bp, probe
tttaacaccagagttttgtggttga

SEQ ID NO: 26026 - DNA, 25 bp, probe
ttaacaccagagttttgtggttgag

SEQ ID NO: 26027 - DNA, 25 bp, probe
aagatctcaaataaaattgttgtgt

SEQ ID NO: 26028 - DNA, 25 bp, probe
accaaagatctcaaataaaattgtt

SEQ ID NO: 26029 - DNA, 25 bp, probe
taacaccagagttttgtggttgaga

SEQ ID NO: 26030 - DNA, 25 bp, probe
ccaaagatctcaaataaaattgttg

SEQ ID NO: 26031 - DNA, 25 bp, probe
accagagttttgtggttgagaaaga

SEQ ID NO: 26032 - DNA, 25 bp, probe
caccagagttttgtggttgagaaag

SEQ ID NO: 26033 - DNA, 25 bp, probe
acaccagagttttgtggttgagaaa

SEQ ID NO: 26034 - DNA, 25 bp, probe
aacaccagagttttgtggttgagaa

SEQ ID NO: 26035 - DNA, 25 bp, probe
aaagatctcaaataaaattgttgtg

SEQ ID NO: 26036 - DNA, 25 bp, probe
caaagatctcaaataaaattgttgt

SEQ ID NO: 26037 - DNA, 25 bp, probe
gcaagtcaagtagaacagttaatca

SEQ ID NO: 26038 - DNA, 25 bp, probe
tatgacttactggatgatggtggtg

SEQ ID NO: 26039 - DNA, 25 bp, probe
gtatgacttactggatgatggtggt

SEQ ID NO: 26040 - DNA, 25 bp, probe
aagtcaagtagaacagttaatcagt

SEQ ID NO: 26041 - DNA, 25 bp, probe
aatgtgactgatgagtatgacttac

SEQ ID NO: 26042 - DNA, 25 bp, probe
caagtcaagtagaacagttaatcag

SEQ ID NO: 26043 - DNA, 25 bp, probe
tgtgactgatgagtatgacttactg

SEQ ID NO: 26044 - DNA, 25 bp, probe
atgagtatgacttactggatgatgg

SEQ ID NO: 26045 - DNA, 25 bp, probe
actgatgagtatgacttactggatg

SEQ ID NO: 26046 - DNA, 25 bp, probe
gagtatgacttactggatgatggtg

SEQ ID NO: 26047 - DNA, 25 bp, probe
tgactgatgagtatgacttactgga

SEQ ID NO: 26048 - DNA, 25 bp, probe
gtgactgatgagtatgacttactgg

SEQ ID NO: 26049 - DNA, 25 bp, probe
ctgatgagtatgacttactggatga

SEQ ID NO: 26050 - DNA, 25 bp, probe
gactgatgagtatgacttactggat

SEQ ID NO: 26051 - DNA, 25 bp, probe
tgagtatgacttactggatgatggt

SEQ ID NO: 26052 - DNA, 25 bp, probe
caagtagaacagttaatcagtatgg

SEQ ID NO: 26053 - DNA, 25 bp, probe
atgtgactgatgagtatgacttact

SEQ ID NO: 26054 - DNA, 25 bp, probe
tgattacagacatagtgaaaccagt

SEQ ID NO: 26055 - DNA, 25 bp, probe
aatggatgcttgcctttctgatata

SEQ ID NO: 26056 - DNA, 25 bp, probe
tgcaagtcaagtagaacagttaatc

SEQ ID NO: 26057 - DNA, 25 bp, probe
tagaacagttaatcagtatgggagc

SEQ ID NO: 26058 - DNA, 25 bp, probe
agtcaagtagaacagttaatcagta

SEQ ID NO: 26059 - DNA, 25 bp, probe
gattacagacatagtgaaaccagtg

SEQ ID NO: 26060 - DNA, 25 bp, probe
tgatgagtatgacttactggatgat

SEQ ID NO: 26061 - DNA, 25 bp, probe
gacttactggatgatggtggtgatg

SEQ ID NO: 26062 - DNA, 25 bp, probe
tgctacactggaatttggaaatcta

SEQ ID NO: 26063 - DNA, 25 bp, probe
tttgctcaggtctttcatctcattt

SEQ ID NO: 26064 - DNA, 25 bp, probe
tgttagtgttgattacagacatagt

SEQ ID NO: 26065 - DNA, 25 bp, probe
gatgagtatgacttactggatgatg

SEQ ID NO: 26066 - DNA, 25 bp, probe
ccaatgtccatagtaaagcatcaaa

SEQ ID NO: 26067 - DNA, 25 bp, probe
ttaataaaggaaatggatgcttgcc

SEQ ID NO: 26068 - DNA, 25 bp, probe
aactgttctaaatgtgactgatgag

SEQ ID NO: 26069 - DNA, 25 bp, probe
aaatggatgcttgcctttctgatat

SEQ ID NO: 26070 - DNA, 25 bp, probe
aagatgtgaattgccttgaaccatg

SEQ ID NO: 26071 - DNA, 25 bp, probe
attacagacatagtgaaaccagtgc

SEQ ID NO: 26072 - DNA, 25 bp, probe
aaagttctctggttcaaacaaatgg

SEQ ID NO: 26073 - DNA, 25 bp, probe
ttgattacagacatagtgaaaccag

SEQ ID NO: 26074 - DNA, 25 bp, probe
gttaataaaggaaatggatgcttgc

SEQ ID NO: 26075 - DNA, 25 bp, probe
agtatgacttactggatgatggtgg

SEQ ID NO: 26076 - DNA, 25 bp, probe
gctacactggaatttggaaatctag

SEQ ID NO: 26077 - DNA, 25 bp, probe
ctttgctcaggtctttcatctcatt

SEQ ID NO: 26078 - DNA, 25 bp, probe
gaaagttctctggttcaaacaaatg

SEQ ID NO: 26079 - DNA, 25 bp, probe
gttctctggttcaaacaaatggaag

SEQ ID NO: 26080 - DNA, 25 bp, probe
tagtgttgattacagacatagtgaa

SEQ ID NO: 26081 - DNA, 25 bp, probe
ctccttctctctggacatcaagcac

SEQ ID NO: 26082 - DNA, 25 bp, probe
cttcgcctatgtgctcaattactac

SEQ ID NO: 26083 - DNA, 25 bp, probe
tcttcgcctatgtgctcaattacta

SEQ ID NO: 26084 - DNA, 25 bp, probe
ttcgcctatgtgctcaattactacc

SEQ ID NO: 26085 - DNA, 25 bp, probe
gtcttcgcctatgtgctcaattact

SEQ ID NO: 26086 - DNA, 25 bp, probe
cgtcttcgcctatgtgctcaattac

SEQ ID NO: 26087 - DNA, 25 bp, probe
gttggtacacatagcttctccagac

SEQ ID NO: 26088 - DNA, 25 bp, probe
tcgcctatgtgctcaattactaccg

SEQ ID NO: 26089 - DNA, 25 bp, probe
ttggtacacatagcttctccagacc

SEQ ID NO: 26090 - DNA, 25 bp, probe
gtacacatagcttctccagacccac

SEQ ID NO: 26091 - DNA, 25 bp, probe
gcctatgtgctcaattactaccgca

SEQ ID NO: 26092 - DNA, 25 bp, probe
tggagacctcaacatagtagatgat

SEQ ID NO: 26093 - DNA, 25 bp, probe
taatgaggagaaggcgtcagatatt

SEQ ID NO: 26094 - DNA, 25 bp, probe
gtggagacctcaacatagtagatga

SEQ ID NO: 26095 - DNA, 25 bp, probe
ggagacctcaacatagtagatgatc

SEQ ID NO: 26096 - DNA, 25 bp, probe
gtaatgaggagaaggcgtcagatat

SEQ ID NO: 26097 - DNA, 25 bp, probe
cttcagagaccaatgagtatgttaa

SEQ ID NO: 26098 - DNA, 25 bp, probe
ctacaaggaggtggtgtctcttatc

SEQ ID NO: 26099 - DNA, 25 bp, probe
tttattgaggaaatgctgctgaaag

SEQ ID NO: 26100 - DNA, 25 bp, probe
caaacacttcttatcatctggagga

SEQ ID NO: 26101 - DNA, 25 bp, probe
tcaaacacttcttatcatctggagg

SEQ ID NO: 26102 - DNA, 25 bp, probe
aatgaggagaaggcgtcagatattg

SEQ ID NO: 26103 - DNA, 25 bp, probe
gtcaaacacttcttatcatctggag

SEQ ID NO: 26104 - DNA, 25 bp, probe
gtttattgaggaaatgctgctgaaa

SEQ ID NO: 26105 - DNA, 25 bp, probe
gatattgctgcctctgagtttattg

SEQ ID NO: 26106 - DNA, 25 bp, probe
atattgctgcctctgagtttattga

SEQ ID NO: 26107 - DNA, 25 bp, probe
aacacttcttatcatctggaggaaa

SEQ ID NO: 26108 - DNA, 25 bp, probe
aaacacttcttatcatctggaggaa

SEQ ID NO: 26109 - DNA, 25 bp, probe
tcttatcatctggaggaaatgtcaa

SEQ ID NO: 26110 - DNA, 25 bp, probe
ttcttatcatctggaggaaatgtca

SEQ ID NO: 26111 - DNA, 25 bp, probe
acttcttatcatctggaggaaatgt

SEQ ID NO: 26112 - DNA, 25 bp, probe
acacttcttatcatctggaggaaat

SEQ ID NO: 26113 - DNA, 25 bp, probe
aaatctggtgaaacttctcctgatg

SEQ ID NO: 26114 - DNA, 25 bp, probe
caaatctggtgaaacttctcctgat

SEQ ID NO: 26115 - DNA, 25 bp, probe
agtttattgaggaaatgctgctgaa

SEQ ID NO: 26116 - DNA, 25 bp, probe
atctggaggaaatgtcaatgagaaa

SEQ ID NO: 26117 - DNA, 25 bp, probe
cacttcttatcatctggaggaaatg

SEQ ID NO: 26118 - DNA, 25 bp, probe
agatattgctgcctctgagtttatt

SEQ ID NO: 26119 - DNA, 25 bp, probe
ctcgtgaactgtaatgaggagaagg

SEQ ID NO: 26120 - DNA, 25 bp, probe
cttcttatcatctggaggaaatgtc

SEQ ID NO: 26121 - DNA, 25 bp, probe
catctggaggaaatgtcaatgagaa

SEQ ID NO: 26122 - DNA, 25 bp, probe
ttatcatctggaggaaatgtcaatg

SEQ ID NO: 26123 - DNA, 25 bp, probe
tgtaatgaggagaaggcgtcagata

SEQ ID NO: 26124 - DNA, 25 bp, probe
gagtttattgaggaaatgctgctga

SEQ ID NO: 26125 - DNA, 25 bp, probe
ctgagtttattgaggaaatgctgct

SEQ ID NO: 26126 - DNA, 25 bp, probe
tctgagtttattgaggaaatgctgc

SEQ ID NO: 26127 - DNA, 25 bp, probe
ggtggagacctcaacatagtagatg

SEQ ID NO: 26128 - DNA, 25 bp, probe
ctctgagtttattgaggaaatgctg

SEQ ID NO: 26129 - DNA, 25 bp, probe
cttatcatctggaggaaatgtcaat

SEQ ID NO: 26130 - DNA, 25 bp, probe
tgagtttattgaggaaatgctgctg

SEQ ID NO: 26131 - DNA, 25 bp, probe
gacaaatctggtgaaacttctcctg

SEQ ID NO: 26132 - DNA, 25 bp, probe
tgtcaaacacttcttatcatctgga

SEQ ID NO: 26133 - DNA, 25 bp, probe
tattgctgcctctgagtttattgag

SEQ ID NO: 26134 - DNA, 25 bp, probe
tggtggagacctcaacatagtagat

SEQ ID NO: 26135 - DNA, 25 bp, probe
atggtggagacctcaacatagtaga

SEQ ID NO: 26136 - DNA, 25 bp, probe
ggtcatcatcattacattatgctgc

SEQ ID NO: 26137 - DNA, 25 bp, probe
aggtcatcatcattacattatgctg

SEQ ID NO: 26138 - DNA, 25 bp, probe
taacaacaggactagcagagactta

SEQ ID NO: 26139 - DNA, 25 bp, probe
atggatgatgtaggtcagactctat

SEQ ID NO: 26140 - DNA, 25 bp, probe
tggatgatgtaggtcagactctatt

SEQ ID NO: 26141 - DNA, 25 bp, probe
ttatggatgatgtaggtcagactct

SEQ ID NO: 26142 - DNA, 25 bp, probe
ctattcttcagtctccaggtgattg

SEQ ID NO: 26143 - DNA, 25 bp, probe
gaacttaacaacaggactagcagag

SEQ ID NO: 26144 - DNA, 25 bp, probe
tatggatgatgtaggtcagactcta

SEQ ID NO: 26145 - DNA, 25 bp, probe
aagtgctccagacaatgtattagag

SEQ ID NO: 26146 - DNA, 25 bp, probe
ctccagacaatgtattagaggtgac

SEQ ID NO: 26147 - DNA, 25 bp, probe
ttaacaacaggactagcagagactt

SEQ ID NO: 26148 - DNA, 25 bp, probe
aacttaacaacaggactagcagaga

SEQ ID NO: 26149 - DNA, 25 bp, probe
gtgacagtggacatctagttcataa

SEQ ID NO: 26150 - DNA, 25 bp, probe
aaggtcatcatcattacattatgct

SEQ ID NO: 26151 - DNA, 25 bp, probe
ttgaacttaacaacaggactagcag

SEQ ID NO: 26152 - DNA, 25 bp, probe
ccagacaatgtattagaggtgacag

SEQ ID NO: 26153 - DNA, 25 bp, probe
tgaacttaacaacaggactagcaga

SEQ ID NO: 26154 - DNA, 25 bp, probe
tccagacaatgtattagaggtgaca

SEQ ID NO: 26155 - DNA, 25 bp, probe
ggatgatgtaggtcagactctatta

SEQ ID NO: 26156 - DNA, 25 bp, probe
aacaacaggactagcagagacttag

SEQ ID NO: 26157 - DNA, 25 bp, probe
cttaacaacaggactagcagagact

SEQ ID NO: 26158 - DNA, 25 bp, probe
cagacaatgtattagaggtgacagc

SEQ ID NO: 26159 - DNA, 25 bp, probe
acttaacaacaggactagcagagac

SEQ ID NO: 26160 - DNA, 25 bp, probe
aattgtgtgcttaccttcattcgtg

SEQ ID NO: 26161 - DNA, 25 bp, probe
ctatggctgtggtatcaagactctg

SEQ ID NO: 26162 - DNA, 25 bp, probe
agaactgatatgtactcgtgagtca

SEQ ID NO: 26163 - DNA, 25 bp, probe
tagaactgatatgtactcgtgagtc

SEQ ID NO: 26164 - DNA, 25 bp, probe
catcggcagcttatagattgtattc

SEQ ID NO: 26165 - DNA, 25 bp, probe
gctccagacaatgtattagaggtga

SEQ ID NO: 26166 - DNA, 25 bp, probe
agtgctccagacaatgtattagagg

SEQ ID NO: 26167 - DNA, 25 bp, probe
gctattcttcagtctccaggtgatt

SEQ ID NO: 26168 - DNA, 25 bp, probe
agatgtgtgcttgatactatgcgtt

SEQ ID NO: 26169 - DNA, 25 bp, probe
ttgaccttctcttggtgctattatt

SEQ ID NO: 26170 - DNA, 25 bp, probe
atcggcagcttatagattgtattcg

SEQ ID NO: 26171 - DNA, 25 bp, probe
attcgtgacagtggacatctagttc

SEQ ID NO: 26172 - DNA, 25 bp, probe
ttagaactgatatgtactcgtgagt

SEQ ID NO: 26173 - DNA, 25 bp, probe
cgtgacagtggacatctagttcata

SEQ ID NO: 26174 - DNA, 25 bp, probe
tactacctggatgtatctgcggaat

SEQ ID NO: 26175 - DNA, 25 bp, probe
gttgaccttctcttggtgctattat

SEQ ID NO: 26176 - DNA, 25 bp, probe
attagaactgatatgtactcgtgag

SEQ ID NO: 26177 - DNA, 25 bp, probe
tgctccagacaatgtattagaggtg

SEQ ID NO: 26178 - DNA, 25 bp, probe
gtgctccagacaatgtattagaggt

SEQ ID NO: 26179 - DNA, 25 bp, probe
cttcattcgtgacagtggacatcta

SEQ ID NO: 26180 - DNA, 25 bp, probe
aatcactgtctacaacaccaacatc

SEQ ID NO: 26181 - DNA, 25 bp, probe
ttatttcttctacaacatcaccctg

SEQ ID NO: 26182 - DNA, 25 bp, probe
tatttcttctacaacatcaccctga

SEQ ID NO: 26183 - DNA, 25 bp, probe
atttcttctacaacatcaccctgac

SEQ ID NO: 26184 - DNA, 25 bp, probe
tttatttcttctacaacatcaccct

SEQ ID NO: 26185 - DNA, 25 bp, probe
aaatcactgtctacaacaccaacat

SEQ ID NO: 26186 - DNA, 25 bp, probe
atcactgtctacaacaccaacatcg

SEQ ID NO: 26187 - DNA, 25 bp, probe
gaaatcactgtctacaacaccaaca

SEQ ID NO: 26188 - DNA, 25 bp, probe
catgttctttctgtccttctgcttt

SEQ ID NO: 26189 - DNA, 25 bp, probe
ggaaatcactgtctacaacaccaac

SEQ ID NO: 26190 - DNA, 25 bp, probe
atatgaagtggaagaagtttgccaa

SEQ ID NO: 26191 - DNA, 25 bp, probe
tttcttctacaacatcaccctgacc

SEQ ID NO: 26192 - DNA, 25 bp, probe
tatgaagtggaagaagtttgccaag

SEQ ID NO: 26193 - DNA, 25 bp, probe
gacttcaagacgcagaatgactttg

SEQ ID NO: 26194 - DNA, 25 bp, probe
tgctgcatatgaagtggaagaagtt

SEQ ID NO: 26195 - DNA, 25 bp, probe
caagacgcagaatgactttgtgaag

SEQ ID NO: 26196 - DNA, 25 bp, probe
cttcaagacgcagaatgactttgtg

SEQ ID NO: 26197 - DNA, 25 bp, probe
ctgcatatgaagtggaagaagtttg

SEQ ID NO: 26198 - DNA, 25 bp, probe
gttctttctgtccttctgcttttat

SEQ ID NO: 26199 - DNA, 25 bp, probe
tgttctttctgtccttctgctttta

SEQ ID NO: 26200 - DNA, 25 bp, probe
aggacttcaagacgcagaatgactt

SEQ ID NO: 26201 - DNA, 25 bp, probe
ctgtccttctgcttttatttcttct

SEQ ID NO: 26202 - DNA, 25 bp, probe
tctgtccttctgcttttatttcttc

SEQ ID NO: 26203 - DNA, 25 bp, probe
ctgctgcatatgaagtggaagaagt

SEQ ID NO: 26204 - DNA, 25 bp, probe
tcaagacgcagaatgactttgtgaa

SEQ ID NO: 26205 - DNA, 25 bp, probe
ttcaagacgcagaatgactttgtga

SEQ ID NO: 26206 - DNA, 25 bp, probe
acttcaagacgcagaatgactttgt

SEQ ID NO: 26207 - DNA, 25 bp, probe
atgttctttctgtccttctgctttt

SEQ ID NO: 26208 - DNA, 25 bp, probe
tggaaatcactgtctacaacaccaa

SEQ ID NO: 26209 - DNA, 25 bp, probe
ttctgtccttctgcttttatttctt

SEQ ID NO: 26210 - DNA, 25 bp, probe
tttctgtccttctgcttttatttct

SEQ ID NO: 26211 - DNA, 25 bp, probe
tctttctgtccttctgcttttattt

SEQ ID NO: 26212 - DNA, 25 bp, probe
ttctttctgtccttctgcttttatt

SEQ ID NO: 26213 - DNA, 25 bp, probe
ctttctgtccttctgcttttatttc

SEQ ID NO: 26214 - DNA, 25 bp, probe
gctgcatatgaagtggaagaagttt

SEQ ID NO: 26215 - DNA, 25 bp, probe
gagatcctgaagtacatcctcagtc

SEQ ID NO: 26216 - DNA, 25 bp, probe
ctggaaatcactgtctacaacacca

SEQ ID NO: 26217 - DNA, 25 bp, probe
tgctggaaatcactgtctacaacac

SEQ ID NO: 26218 - DNA, 25 bp, probe
tccttctgcttttatttcttctaca

SEQ ID NO: 26219 - DNA, 25 bp, probe
tgtccttctgcttttatttcttcta

SEQ ID NO: 26220 - DNA, 25 bp, probe
ggacttcaagacgcagaatgacttt

SEQ ID NO: 26221 - DNA, 25 bp, probe
gaggacttcaagacgcagaatgact

SEQ ID NO: 26222 - DNA, 25 bp, probe
gtccttctgcttttatttcttctac

SEQ ID NO: 26223 - DNA, 25 bp, probe
gtgctggaaatcactgtctacaaca

SEQ ID NO: 26224 - DNA, 25 bp, probe
ctatcctatgaataagaacctggtc

SEQ ID NO: 26225 - DNA, 25 bp, probe
tctatcctatgaataagaacctggt

SEQ ID NO: 26226 - DNA, 25 bp, probe
tatcctatgaataagaacctggtca

SEQ ID NO: 26227 - DNA, 25 bp, probe
gcactactgactttgttcttattgg

SEQ ID NO: 26228 - DNA, 25 bp, probe
ggcactactgactttgttcttattg

SEQ ID NO: 26229 - DNA, 25 bp, probe
aggcactactgactttgttcttatt

SEQ ID NO: 26230 - DNA, 25 bp, probe
tggaggttgatagtttaagtgtgtt

SEQ ID NO: 26231 - DNA, 25 bp, probe
ggaggttgatagtttaagtgtgttc

SEQ ID NO: 26232 - DNA, 25 bp, probe
ctggaggttgatagtttaagtgtgt

SEQ ID NO: 26233 - DNA, 25 bp, probe
aaggcactactgactttgttcttat

SEQ ID NO: 26234 - DNA, 25 bp, probe
tttcatttctcaggatgcttcttac

SEQ ID NO: 26235 - DNA, 25 bp, probe
ttcatttctcaggatgcttcttacc

SEQ ID NO: 26236 - DNA, 25 bp, probe
acttgaagacggatataaaggaaga

SEQ ID NO: 26237 - DNA, 25 bp, probe
cactactgactttgttcttattgga

SEQ ID NO: 26238 - DNA, 25 bp, probe
atctatcctatgaataagaacctgg

SEQ ID NO: 26239 - DNA, 25 bp, probe
gaggttgatagtttaagtgtgttct

SEQ ID NO: 26240 - DNA, 25 bp, probe
gactggaggttgatagtttaagtgt

SEQ ID NO: 26241 - DNA, 25 bp, probe
actggaggttgatagtttaagtgtg

SEQ ID NO: 26242 - DNA, 25 bp, probe
ggactggaggttgatagtttaagtg

SEQ ID NO: 26243 - DNA, 25 bp, probe
ttcctttatgtgtttctccagaatg

SEQ ID NO: 26244 - DNA, 25 bp, probe
cttgaagacggatataaaggaagaa

SEQ ID NO: 26245 - DNA, 25 bp, probe
aggttgatagtttaagtgtgttctt

SEQ ID NO: 26246 - DNA, 25 bp, probe
gaataagaacctggtcatgctttac

SEQ ID NO: 26247 - DNA, 25 bp, probe
tgatgaacacatatataggagaaca

SEQ ID NO: 26248 - DNA, 25 bp, probe
aataagaacctggtcatgctttact

SEQ ID NO: 26249 - DNA, 25 bp, probe
gatagtttaagtgtgttcttaccgc

SEQ ID NO: 26250 - DNA, 25 bp, probe
actgactttgttcttattggatact

SEQ ID NO: 26251 - DNA, 25 bp, probe
actactgactttgttcttattggat

SEQ ID NO: 26252 - DNA, 25 bp, probe
ataagaacctggtcatgctttactc

SEQ ID NO: 26253 - DNA, 25 bp, probe
ggtcatgctttactcctgtattgtt

SEQ ID NO: 26254 - DNA, 25 bp, probe
atcctatgaataagaacctggtcat

SEQ ID NO: 26255 - DNA, 25 bp, probe
tatgaataagaacctggtcatgctt

SEQ ID NO: 26256 - DNA, 25 bp, probe
tcctatgaataagaacctggtcatg

SEQ ID NO: 26257 - DNA, 25 bp, probe
tttcctttatgtgtttctccagaat

SEQ ID NO: 26258 - DNA, 25 bp, probe
atttcctttatgtgtttctccagaa

SEQ ID NO: 26259 - DNA, 25 bp, probe
tatttcctttatgtgtttctccaga

SEQ ID NO: 26260 - DNA, 25 bp, probe
gtcatgctttactcctgtattgtta

SEQ ID NO: 26261 - DNA, 25 bp, probe
ctatgaataagaacctggtcatgct

SEQ ID NO: 26262 - DNA, 25 bp, probe
catacttgaagacggatataaagga

SEQ ID NO: 26263 - DNA, 25 bp, probe
ttgaagacggatataaaggaagaat

SEQ ID NO: 26264 - DNA, 25 bp, probe
gggactggaggttgatagtttaagt

SEQ ID NO: 26265 - DNA, 25 bp, probe
tgggactggaggttgatagtttaag

SEQ ID NO: 26266 - DNA, 25 bp, probe
ctgggactggaggttgatagtttaa

SEQ ID NO: 26267 - DNA, 25 bp, probe
tgaataagaacctggtcatgcttta

SEQ ID NO: 26268 - DNA, 25 bp, probe
ccgagagatggttatgttacttgtc

SEQ ID NO: 26269 - DNA, 25 bp, probe
cgagagatggttatgttacttgtct

SEQ ID NO: 26270 - DNA, 25 bp, probe
gagatggttatgttacttgtcttca

SEQ ID NO: 26271 - DNA, 25 bp, probe
agagatggttatgttacttgtcttc

SEQ ID NO: 26272 - DNA, 25 bp, probe
gagagatggttatgttacttgtctt

SEQ ID NO: 26273 - DNA, 25 bp, probe
agatggttatgttacttgtcttcat

SEQ ID NO: 26274 - DNA, 25 bp, probe
taccgagagatggttatgttacttg

SEQ ID NO: 26275 - DNA, 25 bp, probe
ctaccgagagatggttatgttactt

SEQ ID NO: 26276 - DNA, 25 bp, probe
gatggttatgttacttgtcttcatt

SEQ ID NO: 26277 - DNA, 25 bp, probe
tgttacttgtcttcatttgtgttgc

SEQ ID NO: 26278 - DNA, 25 bp, probe
ttgctaccgagagatggttatgtta

SEQ ID NO: 26279 - DNA, 25 bp, probe
accgagagatggttatgttacttgt

SEQ ID NO: 26280 - DNA, 25 bp, probe
gttacttgtcttcatttgtgttgcc

SEQ ID NO: 26281 - DNA, 25 bp, probe
gctaccgagagatggttatgttact

SEQ ID NO: 26282 - DNA, 25 bp, probe
tacttgtcttcatttgtgttgccat

SEQ ID NO: 26283 - DNA, 25 bp, probe
ttacttgtcttcatttgtgttgcca

SEQ ID NO: 26284 - DNA, 25 bp, probe
tgctaccgagagatggttatgttac

SEQ ID NO: 26285 - DNA, 25 bp, probe
atgttacttgtcttcatttgtgttg

SEQ ID NO: 26286 - DNA, 25 bp, probe
ggataattgaagctatctgcatagg

SEQ ID NO: 26287 - DNA, 25 bp, probe
taattgaagctatctgcataggttg

SEQ ID NO: 26288 - DNA, 25 bp, probe
aattgaagctatctgcataggttgg

SEQ ID NO: 26289 - DNA, 25 bp, probe
ctgaacatcattgatttactggcaa

SEQ ID NO: 26290 - DNA, 25 bp, probe
cgccgtattacatctctgtgttgat

SEQ ID NO: 26291 - DNA, 25 bp, probe
gataattgaagctatctgcataggt

SEQ ID NO: 26292 - DNA, 25 bp, probe
caggataattgaagctatctgcata

SEQ ID NO: 26293 - DNA, 25 bp, probe
aggataattgaagctatctgcatag

SEQ ID NO: 26294 - DNA, 25 bp, probe
ggttatgttacttgtcttcatttgt

SEQ ID NO: 26295 - DNA, 25 bp, probe
tggttatgttacttgtcttcatttg

SEQ ID NO: 26296 - DNA, 25 bp, probe
gttgctaccgagagatggttatgtt

SEQ ID NO: 26297 - DNA, 25 bp, probe
ataattgaagctatctgcataggtt

SEQ ID NO: 26298 - DNA, 25 bp, probe
cgtattacatctctgtgttgatgac

SEQ ID NO: 26299 - DNA, 25 bp, probe
ccgtattacatctctgtgttgatga

SEQ ID NO: 26300 - DNA, 25 bp, probe
caatcacgccgtattacatctctgt

SEQ ID NO: 26301 - DNA, 25 bp, probe
attgaagctatctgcataggttggt

SEQ ID NO: 26302 - DNA, 25 bp, probe
cctgaacatcattgatttactggca

SEQ ID NO: 26303 - DNA, 25 bp, probe
ggagcaggataattgaagctatctg

SEQ ID NO: 26304 - DNA, 25 bp, probe
ttgaagctatctgcataggttggtt

SEQ ID NO: 26305 - DNA, 25 bp, probe
aatcacgccgtattacatctctgtg

SEQ ID NO: 26306 - DNA, 25 bp, probe
aaacatccaacaaggactttaccag

SEQ ID NO: 26307 - DNA, 25 bp, probe
gaaacatccaacaaggactttacca

SEQ ID NO: 26308 - DNA, 25 bp, probe
gtattacatctctgtgttgatgaca

SEQ ID NO: 26309 - DNA, 25 bp, probe
ccctgaacatcattgatttactggc

SEQ ID NO: 26310 - DNA, 25 bp, probe
tatgttacttgtcttcatttgtgtt

SEQ ID NO: 26311 - DNA, 25 bp, probe
ttatgttacttgtcttcatttgtgt

SEQ ID NO: 26312 - DNA, 25 bp, probe
ttaggtctgagaagatgacgatgac

SEQ ID NO: 26313 - DNA, 25 bp, probe
ctgaagttccatgatgttgttcctg

SEQ ID NO: 26314 - DNA, 25 bp, probe
gtcagactgtataatcctcctgctc

SEQ ID NO: 26315 - DNA, 25 bp, probe
agactgtataatcctcctgctccag

SEQ ID NO: 26316 - DNA, 25 bp, probe
tcagactgtataatcctcctgctcc

SEQ ID NO: 26317 - DNA, 25 bp, probe
cctgaagttccatgatgttgttcct

SEQ ID NO: 26318 - DNA, 25 bp, probe
tttaggtctgagaagatgacgatga

SEQ ID NO: 26319 - DNA, 25 bp, probe
gtttaggtctgagaagatgacgatg

SEQ ID NO: 26320 - DNA, 25 bp, probe
cctggagggattatttcattatgta

SEQ ID NO: 26321 - DNA, 25 bp, probe
ttgttcctggagggattatttcatt

SEQ ID NO: 26322 - DNA, 25 bp, probe
cagactgtataatcctcctgctcca

SEQ ID NO: 26323 - DNA, 25 bp, probe
ggtcagactgtataatcctcctgct

SEQ ID NO: 26324 - DNA, 25 bp, probe
ttactgaagattccttctaccgaac

SEQ ID NO: 26325 - DNA, 25 bp, probe
cttactgaagattccttctaccgaa

SEQ ID NO: 26326 - DNA, 25 bp, probe
gggattatttcattatgtatctggc

SEQ ID NO: 26327 - DNA, 25 bp, probe
tgttcctggagggattatttcatta

SEQ ID NO: 26328 - DNA, 25 bp, probe
gataagggatctgaatgacttggtc

SEQ ID NO: 26329 - DNA, 25 bp, probe
gttgttcctggagggattatttcat

SEQ ID NO: 26330 - DNA, 25 bp, probe
atgttgttcctggagggattatttc

SEQ ID NO: 26331 - DNA, 25 bp, probe
gatgttgttcctggagggattattt

SEQ ID NO: 26332 - DNA, 25 bp, probe
ggataagggatctgaatgacttggt

SEQ ID NO: 26333 - DNA, 25 bp, probe
gtctgggtttaggtctgagaagatg

SEQ ID NO: 26334 - DNA, 25 bp, probe
agtctgggtttaggtctgagaagat

SEQ ID NO: 26335 - DNA, 25 bp, probe
tcctggagggattatttcattatgt

SEQ ID NO: 26336 - DNA, 25 bp, probe
tctgggtttaggtctgagaagatga

SEQ ID NO: 26337 - DNA, 25 bp, probe
ctatcttgtctcgggcttactgaag

SEQ ID NO: 26338 - DNA, 25 bp, probe
ggtttaggtctgagaagatgacgat

SEQ ID NO: 26339 - DNA, 25 bp, probe
aagtctgggtttaggtctgagaaga

SEQ ID NO: 26340 - DNA, 25 bp, probe
caagtctgggtttaggtctgagaag

SEQ ID NO: 26341 - DNA, 25 bp, probe
atgatgttgttcctggagggattat

SEQ ID NO: 26342 - DNA, 25 bp, probe
taccctgaagttccatgatgttgtt

SEQ ID NO: 26343 - DNA, 25 bp, probe
tactgaagattccttctaccgaacc

SEQ ID NO: 26344 - DNA, 25 bp, probe
tgatgttgttcctggagggattatt

SEQ ID NO: 26345 - DNA, 25 bp, probe
ttcctggagggattatttcattatg

SEQ ID NO: 26346 - DNA, 25 bp, probe
gttcctggagggattatttcattat

SEQ ID NO: 26347 - DNA, 25 bp, probe
gggataagggatctgaatgacttgg

SEQ ID NO: 26348 - DNA, 25 bp, probe
tgttgttcctggagggattatttca

SEQ ID NO: 26349 - DNA, 25 bp, probe
ggattatttcattatgtatctggca

SEQ ID NO: 26350 - DNA, 25 bp, probe
ctgggtttaggtctgagaagatgac

SEQ ID NO: 26351 - DNA, 25 bp, probe
ctaccctgaagttccatgatgttgt

SEQ ID NO: 26352 - DNA, 25 bp, probe
gcttactgaagattccttctaccga

SEQ ID NO: 26353 - DNA, 25 bp, probe
atttcattatgtatctggcatcatg

SEQ ID NO: 26354 - DNA, 25 bp, probe
tcaagtctgggtttaggtctgagaa

SEQ ID NO: 26355 - DNA, 25 bp, probe
cttgtctcgggcttactgaagattc

SEQ ID NO: 26356 - DNA, 25 bp, probe
cttctcaaggaatctcactcttact

SEQ ID NO: 26357 - DNA, 25 bp, probe
ttctcaaggaatctcactcttactt

SEQ ID NO: 26358 - DNA, 25 bp, probe
gagcgagtcatggattatattgtct

SEQ ID NO: 26359 - DNA, 25 bp, probe
cgataccatgagatgctgaataatg

SEQ ID NO: 26360 - DNA, 25 bp, probe
ccgataccatgagatgctgaataat

SEQ ID NO: 26361 - DNA, 25 bp, probe
accatgagatgctgaataatgtacg

SEQ ID NO: 26362 - DNA, 25 bp, probe
cttagtgagcgagtcatggattata

SEQ ID NO: 26363 - DNA, 25 bp, probe
agtgagcgagtcatggattatattg

SEQ ID NO: 26364 - DNA, 25 bp, probe
tgagcgagtcatggattatattgtc

SEQ ID NO: 26365 - DNA, 25 bp, probe
gataccatgagatgctgaataatgt

SEQ ID NO: 26366 - DNA, 25 bp, probe
agcgagtcatggattatattgtctc

SEQ ID NO: 26367 - DNA, 25 bp, probe
gtgagcgagtcatggattatattgt

SEQ ID NO: 26368 - DNA, 25 bp, probe
tagtgagcgagtcatggattatatt

SEQ ID NO: 26369 - DNA, 25 bp, probe
ttagtgagcgagtcatggattatat

SEQ ID NO: 26370 - DNA, 25 bp, probe
gcgagtcatggattatattgtctca

SEQ ID NO: 26371 - DNA, 25 bp, probe
taccatgagatgctgaataatgtac

SEQ ID NO: 26372 - DNA, 25 bp, probe
ccatgagatgctgaataatgtacgg

SEQ ID NO: 26373 - DNA, 25 bp, probe
accgataccatgagatgctgaataa

SEQ ID NO: 26374 - DNA, 25 bp, probe
aaccgataccatgagatgctgaata

SEQ ID NO: 26375 - DNA, 25 bp, probe
cgagtcatggattatattgtctcaa

SEQ ID NO: 26376 - DNA, 25 bp, probe
gattatattgtctcaacatggtcca

SEQ ID NO: 26377 - DNA, 25 bp, probe
tggattatattgtctcaacatggtc

SEQ ID NO: 26378 - DNA, 25 bp, probe
ggattatattgtctcaacatggtcc

SEQ ID NO: 26379 - DNA, 25 bp, probe
ccttagtgagcgagtcatggattat

SEQ ID NO: 26380 - DNA, 25 bp, probe
tttagggaagggtgatgtatttgga

SEQ ID NO: 26381 - DNA, 25 bp, probe
ataccatgagatgctgaataatgta

SEQ ID NO: 26382 - DNA, 25 bp, probe
atggattatattgtctcaacatggt

SEQ ID NO: 26383 - DNA, 25 bp, probe
gagagctgatatctgtgttcatcta

SEQ ID NO: 26384 - DNA, 25 bp, probe
ttagggaagggtgatgtatttggag

SEQ ID NO: 26385 - DNA, 25 bp, probe
attatattgtctcaacatggtccat

SEQ ID NO: 26386 - DNA, 25 bp, probe
agtcatggattatattgtctcaaca

SEQ ID NO: 26387 - DNA, 25 bp, probe
ctgaataatgtacgggacttcctaa

SEQ ID NO: 26388 - DNA, 25 bp, probe
agagctgatatctgtgttcatctaa

SEQ ID NO: 26389 - DNA, 25 bp, probe
tgaataatgtacgggacttcctaaa

SEQ ID NO: 26390 - DNA, 25 bp, probe
tgagagctgatatctgtgttcatct

SEQ ID NO: 26391 - DNA, 25 bp, probe
gacatgagagctgatatctgtgttc

SEQ ID NO: 26392 - DNA, 25 bp, probe
tatttggagacatcttctggaagga

SEQ ID NO: 26393 - DNA, 25 bp, probe
gtatttggagacatcttctggaagg

SEQ ID NO: 26394 - DNA, 25 bp, probe
gagtcatggattatattgtctcaac

SEQ ID NO: 26395 - DNA, 25 bp, probe
caaccgataccatgagatgctgaat

SEQ ID NO: 26396 - DNA, 25 bp, probe
atgagatgctgaataatgtacggga

SEQ ID NO: 26397 - DNA, 25 bp, probe
tgtatttggagacatcttctggaag

SEQ ID NO: 26398 - DNA, 25 bp, probe
acatgagagctgatatctgtgttca

SEQ ID NO: 26399 - DNA, 25 bp, probe
tagggaagggtgatgtatttggaga

SEQ ID NO: 26400 - DNA, 25 bp, probe
attacatgagctattcaacacttca

SEQ ID NO: 26401 - DNA, 25 bp, probe
tgagctattcaacacttcataagaa

SEQ ID NO: 26402 - DNA, 25 bp, probe
aattacatgagctattcaacacttc

SEQ ID NO: 26403 - DNA, 25 bp, probe
gttcccgtaaattacatgagctatt

SEQ ID NO: 26404 - DNA, 25 bp, probe
ttcccgtaaattacatgagctattc

SEQ ID NO: 26405 - DNA, 25 bp, probe
tcccgtaaattacatgagctattca

SEQ ID NO: 26406 - DNA, 25 bp, probe
cccgtaaattacatgagctattcaa

SEQ ID NO: 26407 - DNA, 25 bp, probe
tgttcccgtaaattacatgagctat

SEQ ID NO: 26408 - DNA, 25 bp, probe
ttgttcccgtaaattacatgagcta

SEQ ID NO: 26409 - DNA, 25 bp, probe
acatgagctattcaacacttcataa

SEQ ID NO: 26410 - DNA, 25 bp, probe
ttacatgagctattcaacacttcat

SEQ ID NO: 26411 - DNA, 25 bp, probe
tgttgttcccgtaaattacatgagc

SEQ ID NO: 26412 - DNA, 25 bp, probe
ccgtaaattacatgagctattcaac

SEQ ID NO: 26413 - DNA, 25 bp, probe
catgagctattcaacacttcataag

SEQ ID NO: 26414 - DNA, 25 bp, probe
gatttgtgttagatgattttgccca

SEQ ID NO: 26415 - DNA, 25 bp, probe
aggatttgtgttagatgattttgcc

SEQ ID NO: 26416 - DNA, 25 bp, probe
atgagctattcaacacttcataaga

SEQ ID NO: 26417 - DNA, 25 bp, probe
gttgttcccgtaaattacatgagct

SEQ ID NO: 26418 - DNA, 25 bp, probe
ggatttgtgttagatgattttgccc

SEQ ID NO: 26419 - DNA, 25 bp, probe
tacatgagctattcaacacttcata

SEQ ID NO: 26420 - DNA, 25 bp, probe
gttagatgattttgcccaactgtag

SEQ ID NO: 26421 - DNA, 25 bp, probe
cgtaaattacatgagctattcaaca

SEQ ID NO: 26422 - DNA, 25 bp, probe
tgttagatgattttgcccaactgta

SEQ ID NO: 26423 - DNA, 25 bp, probe
atttgtgttagatgattttgcccaa

SEQ ID NO: 26424 - DNA, 25 bp, probe
tttgtgttagatgattttgcccaac

SEQ ID NO: 26425 - DNA, 25 bp, probe
gagctattcaacacttcataagaaa

SEQ ID NO: 26426 - DNA, 25 bp, probe
atgttgttcccgtaaattacatgag

SEQ ID NO: 26427 - DNA, 25 bp, probe
gatgttgttcccgtaaattacatga

SEQ ID NO: 26428 - DNA, 25 bp, probe
ggatgttgttcccgtaaattacatg

SEQ ID NO: 26429 - DNA, 25 bp, probe
ttgtgttagatgattttgcccaact

SEQ ID NO: 26430 - DNA, 25 bp, probe
taggatttgtgttagatgattttgc

SEQ ID NO: 26431 - DNA, 25 bp, probe
aaattacatgagctattcaacactt

SEQ ID NO: 26432 - DNA, 25 bp, probe
gtgttagatgattttgcccaactgt

SEQ ID NO: 26433 - DNA, 25 bp, probe
tgtgttagatgattttgcccaactg

SEQ ID NO: 26434 - DNA, 25 bp, probe
caaagccttcttcaagaggaccatc

SEQ ID NO: 26435 - DNA, 25 bp, probe
gtaaattacatgagctattcaacac

SEQ ID NO: 26436 - DNA, 25 bp, probe
taaattacatgagctattcaacact

SEQ ID NO: 26437 - DNA, 25 bp, probe
ttcaacacttcataagaaaatagga

SEQ ID NO: 26438 - DNA, 25 bp, probe
ctccaacgagtgtgagatcaccaag

SEQ ID NO: 26439 - DNA, 25 bp, probe
aaagccttcttcaagaggaccatcc

SEQ ID NO: 26440 - DNA, 25 bp, probe
tcaacacttcataagaaaataggat

SEQ ID NO: 26441 - DNA, 25 bp, probe
gctattcaacacttcataagaaaat

SEQ ID NO: 26442 - DNA, 25 bp, probe
agctattcaacacttcataagaaaa

SEQ ID NO: 26443 - DNA, 25 bp, probe
agaaaataggatttgtgttagatga

SEQ ID NO: 26444 - DNA, 25 bp, probe
tctatctcatcaccaaggcgaagta

SEQ ID NO: 26445 - DNA, 25 bp, probe
ctatctcatcaccaaggcgaagtac

SEQ ID NO: 26446 - DNA, 25 bp, probe
caggacatcgtgctctatctcatca

SEQ ID NO: 26447 - DNA, 25 bp, probe
catcgtgctctatctcatcaccaag

SEQ ID NO: 26448 - DNA, 25 bp, probe
ctctatctcatcaccaaggcgaagt

SEQ ID NO: 26449 - DNA, 25 bp, probe
acatcgtgctctatctcatcaccaa

SEQ ID NO: 26450 - DNA, 25 bp, probe
ccaggacatcgtgctctatctcatc

SEQ ID NO: 26451 - DNA, 25 bp, probe
aggacatcgtgctctatctcatcac

SEQ ID NO: 26452 - DNA, 25 bp, probe
tatctcatcaccaaggcgaagtacg

SEQ ID NO: 26453 - DNA, 25 bp, probe
atcgtgctctatctcatcaccaagg

SEQ ID NO: 26454 - DNA, 25 bp, probe
gacatcgtgctctatctcatcacca

SEQ ID NO: 26455 - DNA, 25 bp, probe
accaggacatcgtgctctatctcat

SEQ ID NO: 26456 - DNA, 25 bp, probe
gctctatctcatcaccaaggcgaag

SEQ ID NO: 26457 - DNA, 25 bp, probe
ggacatcgtgctctatctcatcacc

SEQ ID NO: 26458 - DNA, 25 bp, probe
gatgtcaaaagtggtggaaagagaa

SEQ ID NO: 26459 - DNA, 25 bp, probe
atgtcaaaagtggtggaaagagaac

SEQ ID NO: 26460 - DNA, 25 bp, probe
gatggatgtcaaaagtggtggaaag

SEQ ID NO: 26461 - DNA, 25 bp, probe
caaaagtggtggaaagagaactcag

SEQ ID NO: 26462 - DNA, 25 bp, probe
gtcaaaagtggtggaaagagaactc

SEQ ID NO: 26463 - DNA, 25 bp, probe
atggatgtcaaaagtggtggaaaga

SEQ ID NO: 26464 - DNA, 25 bp, probe
tcaaaagtggtggaaagagaactca

SEQ ID NO: 26465 - DNA, 25 bp, probe
tgtcaaaagtggtggaaagagaact

SEQ ID NO: 26466 - DNA, 25 bp, probe
ggatgtcaaaagtggtggaaagaga

SEQ ID NO: 26467 - DNA, 25 bp, probe
gtggtggaaagagaactcagcagat

SEQ ID NO: 26468 - DNA, 25 bp, probe
aaagtggtggaaagagaactcagca

SEQ ID NO: 26469 - DNA, 25 bp, probe
ggtggaaagagaactcagcagatca

SEQ ID NO: 26470 - DNA, 25 bp, probe
tggtggaaagagaactcagcagatc

SEQ ID NO: 26471 - DNA, 25 bp, probe
tggatgtcaaaagtggtggaaagag

SEQ ID NO: 26472 - DNA, 25 bp, probe
aagtggtggaaagagaactcagcag

SEQ ID NO: 26473 - DNA, 25 bp, probe
aaaagtggtggaaagagaactcagc

SEQ ID NO: 26474 - DNA, 25 bp, probe
cgatggatgtcaaaagtggtggaaa

SEQ ID NO: 26475 - DNA, 25 bp, probe
taacaaaacggcgatggatgtcaaa

SEQ ID NO: 26476 - DNA, 25 bp, probe
ctaacaaaacggcgatggatgtcaa

SEQ ID NO: 26477 - DNA, 25 bp, probe
aaaacggcgatggatgtcaaaagtg

SEQ ID NO: 26478 - DNA, 25 bp, probe
caaaacggcgatggatgtcaaaagt

SEQ ID NO: 26479 - DNA, 25 bp, probe
aacaaaacggcgatggatgtcaaaa

SEQ ID NO: 26480 - DNA, 25 bp, probe
acaaaacggcgatggatgtcaaaag

SEQ ID NO: 26481 - DNA, 25 bp, probe
aatcgccgcatacagctaacaaaac

SEQ ID NO: 26482 - DNA, 25 bp, probe
caatcgccgcatacagctaacaaaa

SEQ ID NO: 26483 - DNA, 25 bp, probe
catacagctaacaaaacggcgatgg

SEQ ID NO: 26484 - DNA, 25 bp, probe
tacagctaacaaaacggcgatggat

SEQ ID NO: 26485 - DNA, 25 bp, probe
atacagctaacaaaacggcgatgga

SEQ ID NO: 26486 - DNA, 25 bp, probe
ttgaaactgtggacaaacatgggag

SEQ ID NO: 26487 - DNA, 25 bp, probe
cttgaaactgtggacaaacatggga

SEQ ID NO: 26488 - DNA, 25 bp, probe
ccttgaaactgtggacaaacatggg

SEQ ID NO: 26489 - DNA, 25 bp, probe
cccttgaaactgtggacaaacatgg

SEQ ID NO: 26490 - DNA, 25 bp, probe
gttccccttgaaactgtggacaaac

SEQ ID NO: 26491 - DNA, 25 bp, probe
ccccttgaaactgtggacaaacatg

SEQ ID NO: 26492 - DNA, 25 bp, probe
tccccttgaaactgtggacaaacat

SEQ ID NO: 26493 - DNA, 25 bp, probe
ttccccttgaaactgtggacaaaca

SEQ ID NO: 26494 - DNA, 25 bp, probe
tgttccccttgaaactgtggacaaa

SEQ ID NO: 26495 - DNA, 25 bp, probe
ctgttccccttgaaactgtggacaa

SEQ ID NO: 26496 - DNA, 25 bp, probe
ggctgtggaggttgatattattaat

SEQ ID NO: 26497 - DNA, 25 bp, probe
gggctgtggaggttgatattattaa

SEQ ID NO: 26498 - DNA, 25 bp, probe
aactggagaaactagaacaaacaaa

SEQ ID NO: 26499 - DNA, 25 bp, probe
aaactggagaaactagaacaaacaa

SEQ ID NO: 26500 - DNA, 25 bp, probe
actggagaaactagaacaaacaaat

SEQ ID NO: 26501 - DNA, 25 bp, probe
ctggagaaactagaacaaacaaatc

SEQ ID NO: 26502 - DNA, 25 bp, probe
gaaactagaacaaacaaatccaact

SEQ ID NO: 26503 - DNA, 25 bp, probe
agaaactagaacaaacaaatccaac

SEQ ID NO: 26504 - DNA, 25 bp, probe
gagaaactagaacaaacaaatccaa

SEQ ID NO: 26505 - DNA, 25 bp, probe
ttaaactgaatgaccagacttgctg

SEQ ID NO: 26506 - DNA, 25 bp, probe
ggagaaactagaacaaacaaatcca

SEQ ID NO: 26507 - DNA, 25 bp, probe
tggagaaactagaacaaacaaatcc

SEQ ID NO: 26508 - DNA, 25 bp, probe
actagaacaaacaaatccaactatg

SEQ ID NO: 26509 - DNA, 25 bp, probe
gaacaaacaaatccaactatgtagt

SEQ ID NO: 26510 - DNA, 25 bp, probe
atttaaactgaatgaccagacttgc

SEQ ID NO: 26511 - DNA, 25 bp, probe
taaactgaatgaccagacttgctgt

SEQ ID NO: 26512 - DNA, 25 bp, probe
agaacaaacaaatccaactatgtag

SEQ ID NO: 26513 - DNA, 25 bp, probe
tttaaactgaatgaccagacttgct

SEQ ID NO: 26514 - DNA, 25 bp, probe
aaactagaacaaacaaatccaacta

SEQ ID NO: 26515 - DNA, 25 bp, probe
ctagaacaaacaaatccaactatgt

SEQ ID NO: 26516 - DNA, 25 bp, probe
tactgaaaacaacaagaaaatggct

SEQ ID NO: 26517 - DNA, 25 bp, probe
ataataaaataaggggctgtggagg

SEQ ID NO: 26518 - DNA, 25 bp, probe
aactagaacaaacaaatccaactat

SEQ ID NO: 26519 - DNA, 25 bp, probe
aaaaccaaccaaaatcacatcctaa

SEQ ID NO: 26520 - DNA, 25 bp, probe
aaaccaaccaaaatcacatcctaat

SEQ ID NO: 26521 - DNA, 25 bp, probe
ttaaaaccaaccaaaatcacatcct

SEQ ID NO: 26522 - DNA, 25 bp, probe
taggagattcagcaaaacagatgta

SEQ ID NO: 26523 - DNA, 25 bp, probe
actgaaaacaacaagaaaatggctt

SEQ ID NO: 26524 - DNA, 25 bp, probe
aaccaaccaaaatcacatcctaatt

SEQ ID NO: 26525 - DNA, 25 bp, probe
gagattcagcaaaacagatgtagga

SEQ ID NO: 26526 - DNA, 25 bp, probe
aggagattcagcaaaacagatgtag

SEQ ID NO: 26527 - DNA, 25 bp, probe
taaaaccaaccaaaatcacatccta

SEQ ID NO: 26528 - DNA, 25 bp, probe
aataataaaataaggggctgtggag

SEQ ID NO: 26529 - DNA, 25 bp, probe
agattcagcaaaacagatgtaggaa

SEQ ID NO: 26530 - DNA, 25 bp, probe
ttactaggagattcagcaaaacaga

SEQ ID NO: 26531 - DNA, 25 bp, probe
acaaacaaatccaactatgtagtac

SEQ ID NO: 26532 - DNA, 25 bp, probe
tactaggagattcagcaaaacagat

SEQ ID NO: 26533 - DNA, 25 bp, probe
ctgaaaacaacaagaaaatggctta

SEQ ID NO: 26534 - DNA, 25 bp, probe
taataaaataaggggctgtggaggt

SEQ ID NO: 26535 - DNA, 25 bp, probe
ctaggagattcagcaaaacagatgt

SEQ ID NO: 26536 - DNA, 25 bp, probe
actaggagattcagcaaaacagatg

SEQ ID NO: 26537 - DNA, 25 bp, probe
tctatatgaacttggaattattgga

SEQ ID NO: 26538 - DNA, 25 bp, probe
gtactgaaaacaacaagaaaatggc

SEQ ID NO: 26539 - DNA, 25 bp, probe
aaaactggagaaactagaacaaaca

SEQ ID NO: 26540 - DNA, 25 bp, probe
aatcattcttctatcacatggcagc

SEQ ID NO: 26541 - DNA, 25 bp, probe
ttaagttcacaagttcctgctcctc

SEQ ID NO: 26542 - DNA, 25 bp, probe
atcattcttctatcacatggcagca

SEQ ID NO: 26543 - DNA, 25 bp, probe
aaatcattcttctatcacatggcag

SEQ ID NO: 26544 - DNA, 25 bp, probe
gtacattcgttctcaggtggtcttg

SEQ ID NO: 26545 - DNA, 25 bp, probe
tttaagttcacaagttcctgctcct

SEQ ID NO: 26546 - DNA, 25 bp, probe
tcattcttctatcacatggcagcac

SEQ ID NO: 26547 - DNA, 25 bp, probe
taaatcattcttctatcacatggca

SEQ ID NO: 26548 - DNA, 25 bp, probe
tacattcgttctcaggtggtcttgt

SEQ ID NO: 26549 - DNA, 25 bp, probe
taagttcacaagttcctgctcctcc

SEQ ID NO: 26550 - DNA, 25 bp, probe
tgttgttttctcaggattctttcag

SEQ ID NO: 26551 - DNA, 25 bp, probe
ataaatcattcttctatcacatggc

SEQ ID NO: 26552 - DNA, 25 bp, probe
gttgttttctcaggattctttcagc

SEQ ID NO: 26553 - DNA, 25 bp, probe
tgatttgtcatggaatttgttctaa

SEQ ID NO: 26554 - DNA, 25 bp, probe
gttttaagttcacaagttcctgctc

SEQ ID NO: 26555 - DNA, 25 bp, probe
ttttaagttcacaagttcctgctcc

SEQ ID NO: 26556 - DNA, 25 bp, probe
gtgtgtgtcccctgtttacttttag

SEQ ID NO: 26557 - DNA, 25 bp, probe
gcaatgttttaagttcacaagttcc

SEQ ID NO: 26558 - DNA, 25 bp, probe
atgttttaagttcacaagttcctgc

SEQ ID NO: 26559 - DNA, 25 bp, probe
ctgttgttttctcaggattctttca

SEQ ID NO: 26560 - DNA, 25 bp, probe
actgttgttttctcaggattctttc

SEQ ID NO: 26561 - DNA, 25 bp, probe
gaactgttgttttctcaggattctt

SEQ ID NO: 26562 - DNA, 25 bp, probe
aactgttgttttctcaggattcttt

SEQ ID NO: 26563 - DNA, 25 bp, probe
gctgtctttcggaaaatggttattt

SEQ ID NO: 26564 - DNA, 25 bp, probe
tgttttaagttcacaagttcctgct

SEQ ID NO: 26565 - DNA, 25 bp, probe
ggaactgttgttttctcaggattct

SEQ ID NO: 26566 - DNA, 25 bp, probe
aggaactgttgttttctcaggattc

SEQ ID NO: 26567 - DNA, 25 bp, probe
ggctgtctttcggaaaatggttatt

SEQ ID NO: 26568 - DNA, 25 bp, probe
gatttgtcatggaatttgttctaat

SEQ ID NO: 26569 - DNA, 25 bp, probe
aatgttttaagttcacaagttcctg

SEQ ID NO: 26570 - DNA, 25 bp, probe
caatgttttaagttcacaagttcct

SEQ ID NO: 26571 - DNA, 25 bp, probe
caggaactgttgttttctcaggatt

SEQ ID NO: 26572 - DNA, 25 bp, probe
ttgttttctcaggattctttcagct

SEQ ID NO: 26573 - DNA, 25 bp, probe
gttcactgtacattcgttctcaggt

SEQ ID NO: 26574 - DNA, 25 bp, probe
ggtgtgtgtcccctgtttactttta

SEQ ID NO: 26575 - DNA, 25 bp, probe
ttcactgtacattcgttctcaggtg

SEQ ID NO: 26576 - DNA, 25 bp, probe
acattcgttctcaggtggtcttgtg

SEQ ID NO: 26577 - DNA, 25 bp, probe
atgatttgtcatggaatttgttcta

SEQ ID NO: 26578 - DNA, 25 bp, probe
tatgatttgtcatggaatttgttct

SEQ ID NO: 26579 - DNA, 25 bp, probe
tgtacattcgttctcaggtggtctt

SEQ ID NO: 26580 - DNA, 25 bp, probe
tgtgtgtcccctgtttacttttagc

SEQ ID NO: 26581 - DNA, 25 bp, probe
tggctgtctttcggaaaatggttat

SEQ ID NO: 26582 - DNA, 25 bp, probe
ggttcactgtacattcgttctcagg

SEQ ID NO: 26583 - DNA, 25 bp, probe
tgcaatgttttaagttcacaagttc

SEQ ID NO: 26584 - DNA, 25 bp, probe
ttagatactcatcaggacctcacag

SEQ ID NO: 26585 - DNA, 25 bp, probe
cttgtagagttggttgtggtatgtg

SEQ ID NO: 26586 - DNA, 25 bp, probe
gagacttatcagccagaatgtgttc

SEQ ID NO: 26587 - DNA, 25 bp, probe
tgtagagttggttgtggtatgtgtt

SEQ ID NO: 26588 - DNA, 25 bp, probe
ttgtagagttggttgtggtatgtgt

SEQ ID NO: 26589 - DNA, 25 bp, probe
tccttgtagagttggttgtggtatg

SEQ ID NO: 26590 - DNA, 25 bp, probe
ccttgtagagttggttgtggtatgt

SEQ ID NO: 26591 - DNA, 25 bp, probe
tgagacttatcagccagaatgtgtt

SEQ ID NO: 26592 - DNA, 25 bp, probe
ctccttgtagagttggttgtggtat

SEQ ID NO: 26593 - DNA, 25 bp, probe
ggacagtcgtacacatcttacagaa

SEQ ID NO: 26594 - DNA, 25 bp, probe
gttgtggtatgtgtttgatgctata

SEQ ID NO: 26595 - DNA, 25 bp, probe
aggttgtttagatactcatcaggac

SEQ ID NO: 26596 - DNA, 25 bp, probe
attcgtttgaaagagagtaagatgc

SEQ ID NO: 26597 - DNA, 25 bp, probe
aatgattagactaccagatgttact

SEQ ID NO: 26598 - DNA, 25 bp, probe
gtttagatactcatcaggacctcac

SEQ ID NO: 26599 - DNA, 25 bp, probe
gttgtttagatactcatcaggacct

SEQ ID NO: 26600 - DNA, 25 bp, probe
ttgtggtatgtgtttgatgctataa

SEQ ID NO: 26601 - DNA, 25 bp, probe
tagagttggttgtggtatgtgtttg

SEQ ID NO: 26602 - DNA, 25 bp, probe
gtagagttggttgtggtatgtgttt

SEQ ID NO: 26603 - DNA, 25 bp, probe
tttagatactcatcaggacctcaca

SEQ ID NO: 26604 - DNA, 25 bp, probe
tgtttagatactcatcaggacctca

SEQ ID NO: 26605 - DNA, 25 bp, probe
ttgtttagatactcatcaggacctc

SEQ ID NO: 26606 - DNA, 25 bp, probe
tgtggtatgtgtttgatgctataaa

SEQ ID NO: 26607 - DNA, 25 bp, probe
tagatactcatcaggacctcacagg

SEQ ID NO: 26608 - DNA, 25 bp, probe
ggttgtggtatgtgtttgatgctat

SEQ ID NO: 26609 - DNA, 25 bp, probe
gagttggttgtggtatgtgtttgat

SEQ ID NO: 26610 - DNA, 25 bp, probe
gtggtatgtgtttgatgctataaag

SEQ ID NO: 26611 - DNA, 25 bp, probe
gaggttgtttagatactcatcagga

SEQ ID NO: 26612 - DNA, 25 bp, probe
cttcggacagtcgtacacatcttac

SEQ ID NO: 26613 - DNA, 25 bp, probe
acttatcagccagaatgtgttcttc

SEQ ID NO: 26614 - DNA, 25 bp, probe
gacttatcagccagaatgtgttctt

SEQ ID NO: 26615 - DNA, 25 bp, probe
tgattagactaccagatgttactag

SEQ ID NO: 26616 - DNA, 25 bp, probe
cgattcgtttgaaagagagtaagat

SEQ ID NO: 26617 - DNA, 25 bp, probe
gattgacataaactctttgtgcctt

SEQ ID NO: 26618 - DNA, 25 bp, probe
atgattgacataaactctttgtgcc

SEQ ID NO: 26619 - DNA, 25 bp, probe
gacataaactctttgtgccttgaaa

SEQ ID NO: 26620 - DNA, 25 bp, probe
attgacataaactctttgtgccttg

SEQ ID NO: 26621 - DNA, 25 bp, probe
agttggttgtggtatgtgtttgatg

SEQ ID NO: 26622 - DNA, 25 bp, probe
tcttcggacagtcgtacacatctta

SEQ ID NO: 26623 - DNA, 25 bp, probe
gacagtcgtacacatcttacagaaa

SEQ ID NO: 26624 - DNA, 25 bp, probe
tgattgacataaactctttgtgcct

SEQ ID NO: 26625 - DNA, 25 bp, probe
gattcgtttgaaagagagtaagatg

SEQ ID NO: 26626 - DNA, 25 bp, probe
tgacataaactctttgtgccttgaa

SEQ ID NO: 26627 - DNA, 25 bp, probe
ttgacataaactctttgtgccttga

SEQ ID NO: 26628 - DNA, 25 bp, probe
aagttacatgaagaccaagaatcct

SEQ ID NO: 26629 - DNA, 25 bp, probe
ttacatgaagaccaagaatcctgac

SEQ ID NO: 26630 - DNA, 25 bp, probe
gttacatgaagaccaagaatcctga

SEQ ID NO: 26631 - DNA, 25 bp, probe
agttacatgaagaccaagaatcctg

SEQ ID NO: 26632 - DNA, 25 bp, probe
tacatgaagaccaagaatcctgaca

SEQ ID NO: 26633 - DNA, 25 bp, probe
acatgaagaccaagaatcctgacag

SEQ ID NO: 26634 - DNA, 25 bp, probe
aaagttacatgaagaccaagaatcc

SEQ ID NO: 26635 - DNA, 25 bp, probe
catgaagaccaagaatcctgacagc

SEQ ID NO: 26636 - DNA, 25 bp, probe
atgaagaccaagaatcctgacagcc

SEQ ID NO: 26637 - DNA, 25 bp, probe
gctaaaagttacatgaagaccaaga

SEQ ID NO: 26638 - DNA, 25 bp, probe
caagctaaaagttacatgaagacca

SEQ ID NO: 26639 - DNA, 25 bp, probe
acaagctaaaagttacatgaagacc

SEQ ID NO: 26640 - DNA, 25 bp, probe
agctaaaagttacatgaagaccaag

SEQ ID NO: 26641 - DNA, 25 bp, probe
aagctaaaagttacatgaagaccaa

SEQ ID NO: 26642 - DNA, 25 bp, probe
ctcgcaaacaagctaaaagttacat

SEQ ID NO: 26643 - DNA, 25 bp, probe
cgcaaacaagctaaaagttacatga

SEQ ID NO: 26644 - DNA, 25 bp, probe
tcgcaaacaagctaaaagttacatg

SEQ ID NO: 26645 - DNA, 25 bp, probe
gcaaacaagctaaaagttacatgaa

SEQ ID NO: 26646 - DNA, 25 bp, probe
aaaagttacatgaagaccaagaatc

SEQ ID NO: 26647 - DNA, 25 bp, probe
ctcgctatgaggaacatgctttctg

SEQ ID NO: 26648 - DNA, 25 bp, probe
ctatgaggaacatgctttctgtgcc

SEQ ID NO: 26649 - DNA, 25 bp, probe
gaagaccaagaatcctgacagccag

SEQ ID NO: 26650 - DNA, 25 bp, probe
aacaagctaaaagttacatgaagac

SEQ ID NO: 26651 - DNA, 25 bp, probe
ctaaaagttacatgaagaccaagaa

SEQ ID NO: 26652 - DNA, 25 bp, probe
gaaggaaattggcatcacgctgttt

SEQ ID NO: 26653 - DNA, 25 bp, probe
actgagagcgacctgaaggaaattg

SEQ ID NO: 26654 - DNA, 25 bp, probe
cactgagagcgacctgaaggaaatt

SEQ ID NO: 26655 - DNA, 25 bp, probe
cgctatgaggaacatgctttctgtg

SEQ ID NO: 26656 - DNA, 25 bp, probe
caaacaagctaaaagttacatgaag

SEQ ID NO: 26657 - DNA, 25 bp, probe
aaacaagctaaaagttacatgaaga

SEQ ID NO: 26658 - DNA, 25 bp, probe
tcgctatgaggaacatgctttctgt

SEQ ID NO: 26659 - DNA, 25 bp, probe
aaggaaattggcatcacgctgtttg

SEQ ID NO: 26660 - DNA, 25 bp, probe
tatgaggaacatgctttctgtgcca

SEQ ID NO: 26661 - DNA, 25 bp, probe
gctatgaggaacatgctttctgtgc

SEQ ID NO: 26662 - DNA, 25 bp, probe
taaaagttacatgaagaccaagaat

SEQ ID NO: 26663 - DNA, 25 bp, probe
catctttctgaccctcactgagagc

SEQ ID NO: 26664 - DNA, 25 bp, probe
gcatctttctgaccctcactgagag

SEQ ID NO: 26665 - DNA, 25 bp, probe
gctcgcaaacaagctaaaagttaca

SEQ ID NO: 26666 - DNA, 25 bp, probe
aggactcggatcatgcctgtaaaag

SEQ ID NO: 26667 - DNA, 25 bp, probe
gaggactcggatcatgcctgtaaaa

SEQ ID NO: 26668 - DNA, 25 bp, probe
tggaaaataaaatttaagaacagct

SEQ ID NO: 26669 - DNA, 25 bp, probe
ctcggatcatgcctgtaaaagctca

SEQ ID NO: 26670 - DNA, 25 bp, probe
actcggatcatgcctgtaaaagctc

SEQ ID NO: 26671 - DNA, 25 bp, probe
gactcggatcatgcctgtaaaagct

SEQ ID NO: 26672 - DNA, 25 bp, probe
tgttgataaggcagatgatgaagat

SEQ ID NO: 26673 - DNA, 25 bp, probe
taaggcagatgatgaagatgatgag

SEQ ID NO: 26674 - DNA, 25 bp, probe
ttgataaggcagatgatgaagatga

SEQ ID NO: 26675 - DNA, 25 bp, probe
gttgataaggcagatgatgaagatg

SEQ ID NO: 26676 - DNA, 25 bp, probe
ataaggcagatgatgaagatgatga

SEQ ID NO: 26677 - DNA, 25 bp, probe
tgataaggcagatgatgaagatgat

SEQ ID NO: 26678 - DNA, 25 bp, probe
gataaggcagatgatgaagatgatg

SEQ ID NO: 26679 - DNA, 25 bp, probe
ataacaactcctaatcgtctgcttc

SEQ ID NO: 26680 - DNA, 25 bp, probe
gcagatgatgaagatgatgaggatt

SEQ ID NO: 26681 - DNA, 25 bp, probe
gataacaactcctaatcgtctgctt

SEQ ID NO: 26682 - DNA, 25 bp, probe
gtgttgataaggcagatgatgaaga

SEQ ID NO: 26683 - DNA, 25 bp, probe
tgtgttgataaggcagatgatgaag

SEQ ID NO: 26684 - DNA, 25 bp, probe
tggaatgatggacgagttctgtata

SEQ ID NO: 26685 - DNA, 25 bp, probe
tcactacagttctgactatgacaac

SEQ ID NO: 26686 - DNA, 25 bp, probe
tggtatcactacagttctgactatg

SEQ ID NO: 26687 - DNA, 25 bp, probe
atcactacagttctgactatgacaa

SEQ ID NO: 26688 - DNA, 25 bp, probe
tgcttatgcttaacagtaatatggt

SEQ ID NO: 26689 - DNA, 25 bp, probe
cactacagttctgactatgacaacc

SEQ ID NO: 26690 - DNA, 25 bp, probe
ggtatcactacagttctgactatga

SEQ ID NO: 26691 - DNA, 25 bp, probe
aatctgatgctcactggataacaac

SEQ ID NO: 26692 - DNA, 25 bp, probe
atgcttaacagtaatatggttggaa

SEQ ID NO: 26693 - DNA, 25 bp, probe
gtgcttatgcttaacagtaatatgg

SEQ ID NO: 26694 - DNA, 25 bp, probe
ttggaatgatggacgagttctgtat

SEQ ID NO: 26695 - DNA, 25 bp, probe
tctggtatcactacagttctgacta

SEQ ID NO: 26696 - DNA, 25 bp, probe
atctctggtatcactacagttctga

SEQ ID NO: 26697 - DNA, 25 bp, probe
tatcactacagttctgactatgaca

SEQ ID NO: 26698 - DNA, 25 bp, probe
ggcagatgatgaagatgatgaggat

SEQ ID NO: 26699 - DNA, 25 bp, probe
ctggtatcactacagttctgactat

SEQ ID NO: 26700 - DNA, 25 bp, probe
atctgatgctcactggataacaact

SEQ ID NO: 26701 - DNA, 25 bp, probe
ctctggtatcactacagttctgact

SEQ ID NO: 26702 - DNA, 25 bp, probe
tctctggtatcactacagttctgac

SEQ ID NO: 26703 - DNA, 25 bp, probe
ctgtgttgataaggcagatgatgaa

SEQ ID NO: 26704 - DNA, 25 bp, probe
gtatcactacagttctgactatgac

SEQ ID NO: 26705 - DNA, 25 bp, probe
aaggcagatgatgaagatgatgagg

SEQ ID NO: 26706 - DNA, 25 bp, probe
gtgaggttggtcttcttgttactga

SEQ ID NO: 26707 - DNA, 25 bp, probe
gatctctggtatcactacagttctg

SEQ ID NO: 26708 - DNA, 25 bp, probe
aactgtgttgataaggcagatgatg

SEQ ID NO: 26709 - DNA, 25 bp, probe
tatgcttaacagtaatatggttgga

SEQ ID NO: 26710 - DNA, 25 bp, probe
aatcactcacacgatctctggtatc

SEQ ID NO: 26711 - DNA, 25 bp, probe
ctggataacaactcctaatcgtctg

SEQ ID NO: 26712 - DNA, 25 bp, probe
ctcactggataacaactcctaatcg

SEQ ID NO: 26713 - DNA, 25 bp, probe
ctcacacgatctctggtatcactac

SEQ ID NO: 26714 - DNA, 25 bp, probe
taacaactcctaatcgtctgcttcg

SEQ ID NO: 26715 - DNA, 25 bp, probe
actggataacaactcctaatcgtct

SEQ ID NO: 26716 - DNA, 25 bp, probe
ctgtctcttggcattgcttattatg

SEQ ID NO: 26717 - DNA, 25 bp, probe
tctcttggcattgcttattatgtga

SEQ ID NO: 26718 - DNA, 25 bp, probe
gtctcttggcattgcttattatgtg

SEQ ID NO: 26719 - DNA, 25 bp, probe
cttggcattgcttattatgtgagtg

SEQ ID NO: 26720 - DNA, 25 bp, probe
tcttggcattgcttattatgtgagt

SEQ ID NO: 26721 - DNA, 25 bp, probe
tgtctcttggcattgcttattatgt

SEQ ID NO: 26722 - DNA, 25 bp, probe
cttctggagagtattgctgttgatc

SEQ ID NO: 26723 - DNA, 25 bp, probe
ctcttggcattgcttattatgtgag

SEQ ID NO: 26724 - DNA, 25 bp, probe
gtattgctgttgatcttcgtcattg

SEQ ID NO: 26725 - DNA, 25 bp, probe
agtattgctgttgatcttcgtcatt

SEQ ID NO: 26726 - DNA, 25 bp, probe
ctggagagtattgctgttgatcttc

SEQ ID NO: 26727 - DNA, 25 bp, probe
gctgtctcttggcattgcttattat

SEQ ID NO: 26728 - DNA, 25 bp, probe
gagtattgctgttgatcttcgtcat

SEQ ID NO: 26729 - DNA, 25 bp, probe
gagagtattgctgttgatcttcgtc

SEQ ID NO: 26730 - DNA, 25 bp, probe
tctggagagtattgctgttgatctt

SEQ ID NO: 26731 - DNA, 25 bp, probe
ttctggagagtattgctgttgatct

SEQ ID NO: 26732 - DNA, 25 bp, probe
ttggcattgcttattatgtgagtgg

SEQ ID NO: 26733 - DNA, 25 bp, probe
ggaatgtagacatctgccagttact

SEQ ID NO: 26734 - DNA, 25 bp, probe
gaagaacaggaggtgaaaggattta

SEQ ID NO: 26735 - DNA, 25 bp, probe
gcttctggagagtattgctgttgat

SEQ ID NO: 26736 - DNA, 25 bp, probe
aagaacaggaggtgaaaggatttaa

SEQ ID NO: 26737 - DNA, 25 bp, probe
agagtattgctgttgatcttcgtca

SEQ ID NO: 26738 - DNA, 25 bp, probe
cgcagaggagtaaataaagatgtca

SEQ ID NO: 26739 - DNA, 25 bp, probe
gaggtgaaaggatttaacagaggaa

SEQ ID NO: 26740 - DNA, 25 bp, probe
aggtgaaaggatttaacagaggaac

SEQ ID NO: 26741 - DNA, 25 bp, probe
agaacaggaggtgaaaggatttaac

SEQ ID NO: 26742 - DNA, 25 bp, probe
aacaggaggtgaaaggatttaacag

SEQ ID NO: 26743 - DNA, 25 bp, probe
gaacaggaggtgaaaggatttaaca

SEQ ID NO: 26744 - DNA, 25 bp, probe
tattgctgttgatcttcgtcattgc

SEQ ID NO: 26745 - DNA, 25 bp, probe
caggaggtgaaaggatttaacagag

SEQ ID NO: 26746 - DNA, 25 bp, probe
gaatgtagacatctgccagttactg

SEQ ID NO: 26747 - DNA, 25 bp, probe
gcagaggagtaaataaagatgtcat

SEQ ID NO: 26748 - DNA, 25 bp, probe
ggagagtattgctgttgatcttcgt

SEQ ID NO: 26749 - DNA, 25 bp, probe
tggagagtattgctgttgatcttcg

SEQ ID NO: 26750 - DNA, 25 bp, probe
gaaaggatttaacagaggaacccac

SEQ ID NO: 26751 - DNA, 25 bp, probe
gtgaaaggatttaacagaggaaccc

SEQ ID NO: 26752 - DNA, 25 bp, probe
acaggaggtgaaaggatttaacaga

SEQ ID NO: 26753 - DNA, 25 bp, probe
aaataaagatgtcatccgattgctg

SEQ ID NO: 26754 - DNA, 25 bp, probe
aaaggatttaacagaggaacccact

SEQ ID NO: 26755 - DNA, 25 bp, probe
tgaaaggatttaacagaggaaccca

SEQ ID NO: 26756 - DNA, 25 bp, probe
ggaggtgaaaggatttaacagagga

SEQ ID NO: 26757 - DNA, 25 bp, probe
aggaggtgaaaggatttaacagagg

SEQ ID NO: 26758 - DNA, 25 bp, probe
ccacagattatcaaggaaacacagc

SEQ ID NO: 26759 - DNA, 25 bp, probe
gccacagattatcaaggaaacacag

SEQ ID NO: 26760 - DNA, 25 bp, probe
gatgagaaggatctaggctgttgta

SEQ ID NO: 26761 - DNA, 25 bp, probe
atgagaaggatctaggctgttgtac

SEQ ID NO: 26762 - DNA, 25 bp, probe
atggaaggttctggcatttatagtc

SEQ ID NO: 26763 - DNA, 25 bp, probe
gaaggatctaggctgttgtaccaag

SEQ ID NO: 26764 - DNA, 25 bp, probe
agaaggatctaggctgttgtaccaa

SEQ ID NO: 26765 - DNA, 25 bp, probe
aagtcgtttctatttccgtggctat

SEQ ID NO: 26766 - DNA, 25 bp, probe
aaagtcgtttctatttccgtggcta

SEQ ID NO: 26767 - DNA, 25 bp, probe
gagaaggatctaggctgttgtacca

SEQ ID NO: 26768 - DNA, 25 bp, probe
tgagaaggatctaggctgttgtacc

SEQ ID NO: 26769 - DNA, 25 bp, probe
caagcactacaacacagggaaattc

SEQ ID NO: 26770 - DNA, 25 bp, probe
ggatgagaaggatctaggctgttgt

SEQ ID NO: 26771 - DNA, 25 bp, probe
gtttatcttgcgggatgagaaggat

SEQ ID NO: 26772 - DNA, 25 bp, probe
agtcgtttctatttccgtggctatg

SEQ ID NO: 26773 - DNA, 25 bp, probe
aagcactacaacacagggaaattca

SEQ ID NO: 26774 - DNA, 25 bp, probe
gtctccttctggatcaacatggatg

SEQ ID NO: 26775 - DNA, 25 bp, probe
aatggaaggttctggcatttatagt

SEQ ID NO: 26776 - DNA, 25 bp, probe
caatggaaggttctggcatttatag

SEQ ID NO: 26777 - DNA, 25 bp, probe
tatcttgcgggatgagaaggatcta

SEQ ID NO: 26778 - DNA, 25 bp, probe
tttatcttgcgggatgagaaggatc

SEQ ID NO: 26779 - DNA, 25 bp, probe
ccaatggaaggttctggcatttata

SEQ ID NO: 26780 - DNA, 25 bp, probe
gaagatatcatccaagaaagtcgtt

SEQ ID NO: 26781 - DNA, 25 bp, probe
ttgtttctcgtcagcataaagaatt

SEQ ID NO: 26782 - DNA, 25 bp, probe
tttgtttctcgtcagcataaagaat

SEQ ID NO: 26783 - DNA, 25 bp, probe
tttctatttccgtggctatggcttg

SEQ ID NO: 26784 - DNA, 25 bp, probe
gtttctatttccgtggctatggctt

SEQ ID NO: 26785 - DNA, 25 bp, probe
aagatatcatccaagaaagtcgttt

SEQ ID NO: 26786 - DNA, 25 bp, probe
tggaaggttctggcatttatagtcc

SEQ ID NO: 26787 - DNA, 25 bp, probe
agcactacaacacagggaaattcac

SEQ ID NO: 26788 - DNA, 25 bp, probe
attttgtttctcgtcagcataaaga

SEQ ID NO: 26789 - DNA, 25 bp, probe
gcataaagaattcatacgacttcga

SEQ ID NO: 26790 - DNA, 25 bp, probe
agcataaagaattcatacgacttcg

SEQ ID NO: 26791 - DNA, 25 bp, probe
aattttgtttctcgtcagcataaag

SEQ ID NO: 26792 - DNA, 25 bp, probe
cagtttatcttgcgggatgagaagg

SEQ ID NO: 26793 - DNA, 25 bp, probe
ccagtttatcttgcgggatgagaag

SEQ ID NO: 26794 - DNA, 25 bp, probe
atctaggctgttgtaccaagcacta

SEQ ID NO: 26795 - DNA, 25 bp, probe
ttatcttgcgggatgagaaggatct

SEQ ID NO: 26796 - DNA, 25 bp, probe
aggaagatatcatccaagaaagtcg

SEQ ID NO: 26797 - DNA, 25 bp, probe
ggaggaagatatcatccaagaaagt

SEQ ID NO: 26798 - DNA, 25 bp, probe
ggaagatatcatccaagaaagtcgt

SEQ ID NO: 26799 - DNA, 25 bp, probe
cactacaacacagggaaattcacct

SEQ ID NO: 26800 - DNA, 25 bp, probe
agtttatcttgcgggatgagaagga

SEQ ID NO: 26801 - DNA, 25 bp, probe
gtcgtttctatttccgtggctatgg

SEQ ID NO: 26802 - DNA, 25 bp, probe
tctcgtcagcataaagaattcatac

SEQ ID NO: 26803 - DNA, 25 bp, probe
ccaagcactacaacacagggaaatt

SEQ ID NO: 26804 - DNA, 25 bp, probe
tctacttcttcgtggtcatcctctc

SEQ ID NO: 26805 - DNA, 25 bp, probe
ctctacttcttcgtggtcatcctct

SEQ ID NO: 26806 - DNA, 25 bp, probe
cttcttcgtggtcatcctctcctac

SEQ ID NO: 26807 - DNA, 25 bp, probe
ctacttcttcgtggtcatcctctcc

SEQ ID NO: 26808 - DNA, 25 bp, probe
cctctacttcttcgtggtcatcctc

SEQ ID NO: 26809 - DNA, 25 bp, probe
acttcttcgtggtcatcctctccta

SEQ ID NO: 26810 - DNA, 25 bp, probe
tacttcttcgtggtcatcctctcct

SEQ ID NO: 26811 - DNA, 25 bp, probe
cttcttcaccgtcaacatcgtcaac

SEQ ID NO: 26812 - DNA, 25 bp, probe
tccaacttagtgatgaagagatgag

SEQ ID NO: 26813 - DNA, 25 bp, probe
ccaacttagtgatgaagagatgagt

SEQ ID NO: 26814 - DNA, 25 bp, probe
ctccaacttagtgatgaagagatga

SEQ ID NO: 26815 - DNA, 25 bp, probe
cctccaacttagtgatgaagagatg

SEQ ID NO: 26816 - DNA, 25 bp, probe
ttgtaggctatctctgtaatcatgc

SEQ ID NO: 26817 - DNA, 25 bp, probe
actggagaagttacactgaagtata

SEQ ID NO: 26818 - DNA, 25 bp, probe
attgagaactcttcagccatgatta

SEQ ID NO: 26819 - DNA, 25 bp, probe
ttgagaactcttcagccatgattag

SEQ ID NO: 26820 - DNA, 25 bp, probe
gagaactcttcagccatgattagac

SEQ ID NO: 26821 - DNA, 25 bp, probe
acactgaagtataatcacactgaat

SEQ ID NO: 26822 - DNA, 25 bp, probe
gattgagaactcttcagccatgatt

SEQ ID NO: 26823 - DNA, 25 bp, probe
tgagaactcttcagccatgattaga

SEQ ID NO: 26824 - DNA, 25 bp, probe
cactgaagtataatcacactgaatg

SEQ ID NO: 26825 - DNA, 25 bp, probe
ctggagaagttacactgaagtataa

SEQ ID NO: 26826 - DNA, 25 bp, probe
attgtaggctatctctgtaatcatg

SEQ ID NO: 26827 - DNA, 25 bp, probe
actgaagtataatcacactgaatgt

SEQ ID NO: 26828 - DNA, 25 bp, probe
ctctgtaatcatgcaatagctgttc

SEQ ID NO: 26829 - DNA, 25 bp, probe
atctctgtaatcatgcaatagctgt

SEQ ID NO: 26830 - DNA, 25 bp, probe
tctctgtaatcatgcaatagctgtt

SEQ ID NO: 26831 - DNA, 25 bp, probe
gtaggctatctctgtaatcatgcaa

SEQ ID NO: 26832 - DNA, 25 bp, probe
ataatcacactgaatgttagacctt

SEQ ID NO: 26833 - DNA, 25 bp, probe
aggctatctctgtaatcatgcaata

SEQ ID NO: 26834 - DNA, 25 bp, probe
taggctatctctgtaatcatgcaat

SEQ ID NO: 26835 - DNA, 25 bp, probe
tacactgaagtataatcacactgaa

SEQ ID NO: 26836 - DNA, 25 bp, probe
ttacactgaagtataatcacactga

SEQ ID NO: 26837 - DNA, 25 bp, probe
gttacactgaagtataatcacactg

SEQ ID NO: 26838 - DNA, 25 bp, probe
atgaagagatgagtttgtttacagc

SEQ ID NO: 26839 - DNA, 25 bp, probe
tgtaggctatctctgtaatcatgca

SEQ ID NO: 26840 - DNA, 25 bp, probe
agttacactgaagtataatcacact

SEQ ID NO: 26841 - DNA, 25 bp, probe
tatctctgtaatcatgcaatagctg

SEQ ID NO: 26842 - DNA, 25 bp, probe
tctgtaatcatgcaatagctgttcg

SEQ ID NO: 26843 - DNA, 25 bp, probe
tggagaagttacactgaagtataat

SEQ ID NO: 26844 - DNA, 25 bp, probe
gtaatcatgcaatagctgttcggat

SEQ ID NO: 26845 - DNA, 25 bp, probe
cttagtgatgaagagatgagtttgt

SEQ ID NO: 26846 - DNA, 25 bp, probe
gtataatcacactgaatgttagacc

SEQ ID NO: 26847 - DNA, 25 bp, probe
agattgtaggctatctctgtaatca

SEQ ID NO: 26848 - DNA, 25 bp, probe
agaactcttcagccatgattagacg

SEQ ID NO: 26849 - DNA, 25 bp, probe
ggctatctctgtaatcatgcaatag

SEQ ID NO: 26850 - DNA, 25 bp, probe
tgatgaagagatgagtttgtttaca

SEQ ID NO: 26851 - DNA, 25 bp, probe
gtgatgaagagatgagtttgtttac

SEQ ID NO: 26852 - DNA, 25 bp, probe
agtgatgaagagatgagtttgttta

SEQ ID NO: 26853 - DNA, 25 bp, probe
tagtgatgaagagatgagtttgttt

SEQ ID NO: 26854 - DNA, 25 bp, probe
ttagtgatgaagagatgagtttgtt

SEQ ID NO: 26855 - DNA, 25 bp, probe
taaatgccctccaacttagtgatga

SEQ ID NO: 26856 - DNA, 25 bp, probe
gattatcctgttctgctacgtggag

SEQ ID NO: 26857 - DNA, 25 bp, probe
ttatcctgttctgctacgtggagat

SEQ ID NO: 26858 - DNA, 25 bp, probe
attatcctgttctgctacgtggaga

SEQ ID NO: 26859 - DNA, 25 bp, probe
gtctaccagcacaacctcttcttcc

SEQ ID NO: 26860 - DNA, 25 bp, probe
tctaccagcacaacctcttcttcct

SEQ ID NO: 26861 - DNA, 25 bp, probe
tatcctgttctgctacgtggagatc

SEQ ID NO: 26862 - DNA, 25 bp, probe
cgtctaccagcacaacctcttcttc

SEQ ID NO: 26863 - DNA, 25 bp, probe
ctaccagcacaacctcttcttcctg

SEQ ID NO: 26864 - DNA, 25 bp, probe
ggattatcctgttctgctacgtgga

SEQ ID NO: 26865 - DNA, 25 bp, probe
tccctacaacttcaccctgtttctg

SEQ ID NO: 26866 - DNA, 25 bp, probe
gtccctacaacttcaccctgtttct

SEQ ID NO: 26867 - DNA, 25 bp, probe
ctttaacccggtgctctatgtcttc

SEQ ID NO: 26868 - DNA, 25 bp, probe
ggtccctacaacttcaccctgtttc

SEQ ID NO: 26869 - DNA, 25 bp, probe
tttaacccggtgctctatgtcttcg

SEQ ID NO: 26870 - DNA, 25 bp, probe
cctacaacttcaccctgtttctgca

SEQ ID NO: 26871 - DNA, 25 bp, probe
gggattatcctgttctgctacgtgg

SEQ ID NO: 26872 - DNA, 25 bp, probe
gctttaacccggtgctctatgtctt

SEQ ID NO: 26873 - DNA, 25 bp, probe
cctggggattatcctgttctgctac

SEQ ID NO: 26874 - DNA, 25 bp, probe
ctggggattatcctgttctgctacg

SEQ ID NO: 26875 - DNA, 25 bp, probe
ccctggggattatcctgttctgcta

SEQ ID NO: 26876 - DNA, 25 bp, probe
ggggattatcctgttctgctacgtg

SEQ ID NO: 26877 - DNA, 25 bp, probe
ctgtccctggggattatcctgttct

SEQ ID NO: 26878 - DNA, 25 bp, probe
tggggattatcctgttctgctacgt

SEQ ID NO: 26879 - DNA, 25 bp, probe
ttatccaagaccttacaaccacatt

SEQ ID NO: 26880 - DNA, 25 bp, probe
ttaattgaggcttacagtaggagtg

SEQ ID NO: 26881 - DNA, 25 bp, probe
taattgaggcttacagtaggagtga

SEQ ID NO: 26882 - DNA, 25 bp, probe
ttctgtgttgttcatagtcaatcaa

SEQ ID NO: 26883 - DNA, 25 bp, probe
aattgaggcttacagtaggagtgag

SEQ ID NO: 26884 - DNA, 25 bp, probe
acattaattgaggcttacagtagga

SEQ ID NO: 26885 - DNA, 25 bp, probe
attaattgaggcttacagtaggagt

SEQ ID NO: 26886 - DNA, 25 bp, probe
cattaattgaggcttacagtaggag

SEQ ID NO: 26887 - DNA, 25 bp, probe
attgaggcttacagtaggagtgaga

SEQ ID NO: 26888 - DNA, 25 bp, probe
aacattaattgaggcttacagtagg

SEQ ID NO: 26889 - DNA, 25 bp, probe
ttgaggcttacagtaggagtgagaa

SEQ ID NO: 26890 - DNA, 25 bp, probe
ttaccaaatagggcaaagaatcaac

SEQ ID NO: 26891 - DNA, 25 bp, probe
tatccaagaccttacaaccacattt

SEQ ID NO: 26892 - DNA, 25 bp, probe
tttatccaagaccttacaaccacat

SEQ ID NO: 26893 - DNA, 25 bp, probe
taccaaatagggcaaagaatcaaca

SEQ ID NO: 26894 - DNA, 25 bp, probe
aatcaaacagggacactacaaacat

SEQ ID NO: 26895 - DNA, 25 bp, probe
caaatagggcaaagaatcaacagtg

SEQ ID NO: 26896 - DNA, 25 bp, probe
tttaccaaatagggcaaagaatcaa

SEQ ID NO: 26897 - DNA, 25 bp, probe
taactccgtttccaaatacattcca

SEQ ID NO: 26898 - DNA, 25 bp, probe
ttaactccgtttccaaatacattcc

SEQ ID NO: 26899 - DNA, 25 bp, probe
atccaagaccttacaaccacatttc

SEQ ID NO: 26900 - DNA, 25 bp, probe
aggcttacagtaggagtgagaaatt

SEQ ID NO: 26901 - DNA, 25 bp, probe
tataagccaatgaagcaaacacaca

SEQ ID NO: 26902 - DNA, 25 bp, probe
tcaatcaaacagggacactacaaac

SEQ ID NO: 26903 - DNA, 25 bp, probe
cacacaattaactccgtttccaaat

SEQ ID NO: 26904 - DNA, 25 bp, probe
gaggcttacagtaggagtgagaaat

SEQ ID NO: 26905 - DNA, 25 bp, probe
acaattaactccgtttccaaataca

SEQ ID NO: 26906 - DNA, 25 bp, probe
acacaattaactccgtttccaaata

SEQ ID NO: 26907 - DNA, 25 bp, probe
caatcaaacagggacactacaaaca

SEQ ID NO: 26908 - DNA, 25 bp, probe
cacaattaactccgtttccaaatac

SEQ ID NO: 26909 - DNA, 25 bp, probe
tgagatgggttgagtttgctgtata

SEQ ID NO: 26910 - DNA, 25 bp, probe
ccaaatagggcaaagaatcaacagt

SEQ ID NO: 26911 - DNA, 25 bp, probe
accaaatagggcaaagaatcaacag

SEQ ID NO: 26912 - DNA, 25 bp, probe
ctgtgttgttcatagtcaatcaaac

SEQ ID NO: 26913 - DNA, 25 bp, probe
tctgtgttgttcatagtcaatcaaa

SEQ ID NO: 26914 - DNA, 25 bp, probe
tttctgtgttgttcatagtcaatca

SEQ ID NO: 26915 - DNA, 25 bp, probe
aatagggcaaagaatcaacagtgaa

SEQ ID NO: 26916 - DNA, 25 bp, probe
aaatagggcaaagaatcaacagtga

SEQ ID NO: 26917 - DNA, 25 bp, probe
aactccgtttccaaatacattccag

SEQ ID NO: 26918 - DNA, 25 bp, probe
aggatttaccaaatagggcaaagaa

SEQ ID NO: 26919 - DNA, 25 bp, probe
taggatttaccaaatagggcaaaga

SEQ ID NO: 26920 - DNA, 25 bp, probe
tcttaggatttaccaaatagggcaa

SEQ ID NO: 26921 - DNA, 25 bp, probe
ggatttaccaaatagggcaaagaat

SEQ ID NO: 26922 - DNA, 25 bp, probe
atcttaggatttaccaaatagggca

SEQ ID NO: 26923 - DNA, 25 bp, probe
tcctatgagagaagagagtatggtg

SEQ ID NO: 26924 - DNA, 25 bp, probe
atcctatgagagaagagagtatggt

SEQ ID NO: 26925 - DNA, 25 bp, probe
ctatgagagaagagagtatggtgct

SEQ ID NO: 26926 - DNA, 25 bp, probe
tatgagagaagagagtatggtgctg

SEQ ID NO: 26927 - DNA, 25 bp, probe
aacgatcctatgagagaagagagta

SEQ ID NO: 26928 - DNA, 25 bp, probe
acgatcctatgagagaagagagtat

SEQ ID NO: 26929 - DNA, 25 bp, probe
cctatgagagaagagagtatggtgc

SEQ ID NO: 26930 - DNA, 25 bp, probe
cgatcctatgagagaagagagtatg

SEQ ID NO: 26931 - DNA, 25 bp, probe
gatcctatgagagaagagagtatgg

SEQ ID NO: 26932 - DNA, 25 bp, probe
caacgatcctatgagagaagagagt

SEQ ID NO: 26933 - DNA, 25 bp, probe
ccaacgatcctatgagagaagagag

SEQ ID NO: 26934 - DNA, 25 bp, probe
gaccaacgatcctatgagagaagag

SEQ ID NO: 26935 - DNA, 25 bp, probe
accaacgatcctatgagagaagaga

SEQ ID NO: 26936 - DNA, 25 bp, probe
ttatgtcatttcttctctctgtgct

SEQ ID NO: 26937 - DNA, 25 bp, probe
tgcttatgtcatttcttctctctgt

SEQ ID NO: 26938 - DNA, 25 bp, probe
tgtgcttatgtcatttcttctctct

SEQ ID NO: 26939 - DNA, 25 bp, probe
cttatgtcatttcttctctctgtgc

SEQ ID NO: 26940 - DNA, 25 bp, probe
gcttatgtcatttcttctctctgtg

SEQ ID NO: 26941 - DNA, 25 bp, probe
gtgcttatgtcatttcttctctctg

SEQ ID NO: 26942 - DNA, 25 bp, probe
gctttgtgcttatgtcatttcttct

SEQ ID NO: 26943 - DNA, 25 bp, probe
gtatccctgatttattctggtgtct

SEQ ID NO: 26944 - DNA, 25 bp, probe
agtatccctgatttattctggtgtc

SEQ ID NO: 26945 - DNA, 25 bp, probe
tatgtcatttcttctctctgtgctg

SEQ ID NO: 26946 - DNA, 25 bp, probe
ttgtgcttatgtcatttcttctctc

SEQ ID NO: 26947 - DNA, 25 bp, probe
tccctgatttattctggtgtctaat

SEQ ID NO: 26948 - DNA, 25 bp, probe
aagtatccctgatttattctggtgt

SEQ ID NO: 26949 - DNA, 25 bp, probe
ctcatctcctacaaccaagacatcg

SEQ ID NO: 26950 - DNA, 25 bp, probe
atccctgatttattctggtgtctaa

SEQ ID NO: 26951 - DNA, 25 bp, probe
tttgtgcttatgtcatttcttctct

SEQ ID NO: 26952 - DNA, 25 bp, probe
ggctttgtgcttatgtcatttcttc

SEQ ID NO: 26953 - DNA, 25 bp, probe
gctcatctcctacaaccaagacatc

SEQ ID NO: 26954 - DNA, 25 bp, probe
gaagtatccctgatttattctggtg

SEQ ID NO: 26955 - DNA, 25 bp, probe
ctttgtgcttatgtcatttcttctc

SEQ ID NO: 26956 - DNA, 25 bp, probe
gcaataaactcagtcaaatgtaccc

SEQ ID NO: 26957 - DNA, 25 bp, probe
tatccctgatttattctggtgtcta

SEQ ID NO: 26958 - DNA, 25 bp, probe
tggctttgtgcttatgtcatttctt

SEQ ID NO: 26959 - DNA, 25 bp, probe
cttcttcatccttaactgcatggtc

SEQ ID NO: 26960 - DNA, 25 bp, probe
atgagagaagagagtatggtgctgg

SEQ ID NO: 26961 - DNA, 25 bp, probe
caataaactcagtcaaatgtaccca

SEQ ID NO: 26962 - DNA, 25 bp, probe
tccctttatcatgtgtttctgtgta

SEQ ID NO: 26963 - DNA, 25 bp, probe
ataaactcagtcaaatgtacccagc

SEQ ID NO: 26964 - DNA, 25 bp, probe
aataaactcagtcaaatgtacccag

SEQ ID NO: 26965 - DNA, 25 bp, probe
ccctttatcatgtgtttctgtgtag

SEQ ID NO: 26966 - DNA, 25 bp, probe
tcatctcctacaaccaagacatcgt

SEQ ID NO: 26967 - DNA, 25 bp, probe
atcagagtgacttaacagttagagg

SEQ ID NO: 26968 - DNA, 25 bp, probe
tctggagaagaacagttaagtcaag

SEQ ID NO: 26969 - DNA, 25 bp, probe
catctggagaagaacagttaagtca

SEQ ID NO: 26970 - DNA, 25 bp, probe
acatctggagaagaacagttaagtc

SEQ ID NO: 26971 - DNA, 25 bp, probe
cagagatcagagtgacttaacagtt

SEQ ID NO: 26972 - DNA, 25 bp, probe
atctggagaagaacagttaagtcaa

SEQ ID NO: 26973 - DNA, 25 bp, probe
gtctacatctggagaagaacagtta

SEQ ID NO: 26974 - DNA, 25 bp, probe
tcagagatcagagtgacttaacagt

SEQ ID NO: 26975 - DNA, 25 bp, probe
ctcagagatcagagtgacttaacag

SEQ ID NO: 26976 - DNA, 25 bp, probe
tacatctggagaagaacagttaagt

SEQ ID NO: 26977 - DNA, 25 bp, probe
ctggagaagaacagttaagtcaagg

SEQ ID NO: 26978 - DNA, 25 bp, probe
tctacatctggagaagaacagttaa

SEQ ID NO: 26979 - DNA, 25 bp, probe
tgtctacatctggagaagaacagtt

SEQ ID NO: 26980 - DNA, 25 bp, probe
ctacatctggagaagaacagttaag

SEQ ID NO: 26981 - DNA, 25 bp, probe
agatcagagtgacttaacagttaga

SEQ ID NO: 26982 - DNA, 25 bp, probe
agagatcagagtgacttaacagtta

SEQ ID NO: 26983 - DNA, 25 bp, probe
gatcagagtgacttaacagttagag

SEQ ID NO: 26984 - DNA, 25 bp, probe
gagatcagagtgacttaacagttag

SEQ ID NO: 26985 - DNA, 25 bp, probe
atgtctacatctggagaagaacagt

SEQ ID NO: 26986 - DNA, 25 bp, probe
catgtctacatctggagaagaacag

SEQ ID NO: 26987 - DNA, 25 bp, probe
gatttgactttacagcagagacttc

SEQ ID NO: 26988 - DNA, 25 bp, probe
caggcacacaatctttacttacttt

SEQ ID NO: 26989 - DNA, 25 bp, probe
gctcagagatcagagtgacttaaca

SEQ ID NO: 26990 - DNA, 25 bp, probe
acaggcacacaatctttacttactt

SEQ ID NO: 26991 - DNA, 25 bp, probe
aacaggcacacaatctttacttact

SEQ ID NO: 26992 - DNA, 25 bp, probe
caacaggcacacaatctttacttac

SEQ ID NO: 26993 - DNA, 25 bp, probe
tgatgagtaaggtgaaatagggaaa

SEQ ID NO: 26994 - DNA, 25 bp, probe
ttgatgagtaaggtgaaatagggaa

SEQ ID NO: 26995 - DNA, 25 bp, probe
gagaagaacagttaagtcaagggat

SEQ ID NO: 26996 - DNA, 25 bp, probe
acaacaggcacacaatctttactta

SEQ ID NO: 26997 - DNA, 25 bp, probe
gatgagtaaggtgaaatagggaaac

SEQ ID NO: 26998 - DNA, 25 bp, probe
cttgatgagtaaggtgaaataggga

SEQ ID NO: 26999 - DNA, 25 bp, probe
ggatttgactttacagcagagactt

SEQ ID NO: 27000 - DNA, 25 bp, probe
gcaactgtctgataagaataaaggg

SEQ ID NO: 27001 - DNA, 25 bp, probe
gaaggatttgactttacagcagaga

SEQ ID NO: 27002 - DNA, 25 bp, probe
aaggatttgactttacagcagagac

SEQ ID NO: 27003 - DNA, 25 bp, probe
aaccatgtctacatctggagaagaa

SEQ ID NO: 27004 - DNA, 25 bp, probe
acttgatgagtaaggtgaaataggg

SEQ ID NO: 27005 - DNA, 25 bp, probe
atttgactttacagcagagacttca

SEQ ID NO: 27006 - DNA, 25 bp, probe
aggatttgactttacagcagagact

SEQ ID NO: 27007 - DNA, 25 bp, probe
attcctaaattccctggtagatcac

SEQ ID NO: 27008 - DNA, 25 bp, probe
agaagaacagttaagtcaagggatc

SEQ ID NO: 27009 - DNA, 25 bp, probe
gaagaacagttaagtcaagggatca

SEQ ID NO: 27010 - DNA, 25 bp, probe
agctcagagatcagagtgacttaac

SEQ ID NO: 27011 - DNA, 25 bp, probe
ccaactgctctacttcttctatgat

SEQ ID NO: 27012 - DNA, 25 bp, probe
actgctctacttcttctatgatgtc

SEQ ID NO: 27013 - DNA, 25 bp, probe
taccaactgctctacttcttctatg

SEQ ID NO: 27014 - DNA, 25 bp, probe
ctgctctacttcttctatgatgtca

SEQ ID NO: 27015 - DNA, 25 bp, probe
aactgctctacttcttctatgatgt

SEQ ID NO: 27016 - DNA, 25 bp, probe
accaactgctctacttcttctatga

SEQ ID NO: 27017 - DNA, 25 bp, probe
caactgctctacttcttctatgatg

SEQ ID NO: 27018 - DNA, 25 bp, probe
gtaccaactgctctacttcttctat

SEQ ID NO: 27019 - DNA, 25 bp, probe
tgctctacttcttctatgatgtcat

SEQ ID NO: 27020 - DNA, 25 bp, probe
gctctacttcttctatgatgtcatc

SEQ ID NO: 27021 - DNA, 25 bp, probe
ctatgatgtcatctgactgctgcta

SEQ ID NO: 27022 - DNA, 25 bp, probe
tatgatgtcatctgactgctgctac

SEQ ID NO: 27023 - DNA, 25 bp, probe
ttcttctatgatgtcatctgactgc

SEQ ID NO: 27024 - DNA, 25 bp, probe
cttctatgatgtcatctgactgctg

SEQ ID NO: 27025 - DNA, 25 bp, probe
acttcttctatgatgtcatctgact

SEQ ID NO: 27026 - DNA, 25 bp, probe
tcttctatgatgtcatctgactgct

SEQ ID NO: 27027 - DNA, 25 bp, probe
gacacccagcgttacataatcatta

SEQ ID NO: 27028 - DNA, 25 bp, probe
cttcttctatgatgtcatctgactg

SEQ ID NO: 27029 - DNA, 25 bp, probe
acacccagcgttacataatcattac

SEQ ID NO: 27030 - DNA, 25 bp, probe
ctacttcttctatgatgtcatctga

SEQ ID NO: 27031 - DNA, 25 bp, probe
tctacttcttctatgatgtcatctg

SEQ ID NO: 27032 - DNA, 25 bp, probe
atgctgtggtccattacttgctaag

SEQ ID NO: 27033 - DNA, 25 bp, probe
cccagcgttacataatcattaccac

SEQ ID NO: 27034 - DNA, 25 bp, probe
cacccagcgttacataatcattacc

SEQ ID NO: 27035 - DNA, 25 bp, probe
ctctacttcttctatgatgtcatct

SEQ ID NO: 27036 - DNA, 25 bp, probe
gatgctgtggtccattacttgctaa

SEQ ID NO: 27037 - DNA, 25 bp, probe
acccagcgttacataatcattacca

SEQ ID NO: 27038 - DNA, 25 bp, probe
tacttcttctatgatgtcatctgac

SEQ ID NO: 27039 - DNA, 25 bp, probe
atccttgacaactttatcagccaga

SEQ ID NO: 27040 - DNA, 25 bp, probe
tctatgatgtcatctgactgctgct

SEQ ID NO: 27041 - DNA, 25 bp, probe
gatccttgacaactttatcagccag

SEQ ID NO: 27042 - DNA, 25 bp, probe
gttacataatcattaccacgggtga

SEQ ID NO: 27043 - DNA, 25 bp, probe
ttctatgatgtcatctgactgctgc

SEQ ID NO: 27044 - DNA, 25 bp, probe
cttgacaactttatcagccagactg

SEQ ID NO: 27045 - DNA, 25 bp, probe
tcatctgactgctgctacatgctag

SEQ ID NO: 27046 - DNA, 25 bp, probe
tgacacccagcgttacataatcatt

SEQ ID NO: 27047 - DNA, 25 bp, probe
atctgactgctgctacatgctagac

SEQ ID NO: 27048 - DNA, 25 bp, probe
catctgactgctgctacatgctaga

SEQ ID NO: 27049 - DNA, 25 bp, probe
cagcgttacataatcattaccacgg

SEQ ID NO: 27050 - DNA, 25 bp, probe
ccagcgttacataatcattaccacg

SEQ ID NO: 27051 - DNA, 25 bp, probe
ccttgacaactttatcagccagact

SEQ ID NO: 27052 - DNA, 25 bp, probe
tccttgacaactttatcagccagac

SEQ ID NO: 27053 - DNA, 25 bp, probe
atgatgtcatctgactgctgctaca

SEQ ID NO: 27054 - DNA, 25 bp, probe
acataatcattaccacgggtgatag

SEQ ID NO: 27055 - DNA, 25 bp, probe
attatcagtgagcaaatgtgaagga

SEQ ID NO: 27056 - DNA, 25 bp, probe
gatttctggttatgtcaaggctctg

SEQ ID NO: 27057 - DNA, 25 bp, probe
tatcagtgagcaaatgtgaaggaaa

SEQ ID NO: 27058 - DNA, 25 bp, probe
ttatcagtgagcaaatgtgaaggaa

SEQ ID NO: 27059 - DNA, 25 bp, probe
atcagtgagcaaatgtgaaggaaat

SEQ ID NO: 27060 - DNA, 25 bp, probe
gaaggaaatggtgtctggaagaaag

SEQ ID NO: 27061 - DNA, 25 bp, probe
gaaatggtgtctggaagaaagttct

SEQ ID NO: 27062 - DNA, 25 bp, probe
aaatggtgtctggaagaaagttctg

SEQ ID NO: 27063 - DNA, 25 bp, probe
ggaaatggtgtctggaagaaagttc

SEQ ID NO: 27064 - DNA, 25 bp, probe
ctcttaaggcattatcagtgagcaa

SEQ ID NO: 27065 - DNA, 25 bp, probe
aggaaatggtgtctggaagaaagtt

SEQ ID NO: 27066 - DNA, 25 bp, probe
aaggaaatggtgtctggaagaaagt

SEQ ID NO: 27067 - DNA, 25 bp, probe
ggatttctggttatgtcaaggctct

SEQ ID NO: 27068 - DNA, 25 bp, probe
aatgtgaaggaaatggtgtctggaa

SEQ ID NO: 27069 - DNA, 25 bp, probe
aaatgtgaaggaaatggtgtctgga

SEQ ID NO: 27070 - DNA, 25 bp, probe
caaatgtgaaggaaatggtgtctgg

SEQ ID NO: 27071 - DNA, 25 bp, probe
tcagtgagcaaatgtgaaggaaatg

SEQ ID NO: 27072 - DNA, 25 bp, probe
atcctcttaaggcattatcagtgag

SEQ ID NO: 27073 - DNA, 25 bp, probe
gatcctcttaaggcattatcagtga

SEQ ID NO: 27074 - DNA, 25 bp, probe
ttcgatcctcttaaggcattatcag

SEQ ID NO: 27075 - DNA, 25 bp, probe
gagattcgatcctcttaaggcatta

SEQ ID NO: 27076 - DNA, 25 bp, probe
tgagtccatacaggagaagaaagat

SEQ ID NO: 27077 - DNA, 25 bp, probe
ttcctggtgtcctccatctacttag

SEQ ID NO: 27078 - DNA, 25 bp, probe
cttcctggtgtcctccatctactta

SEQ ID NO: 27079 - DNA, 25 bp, probe
attcgatcctcttaaggcattatca

SEQ ID NO: 27080 - DNA, 25 bp, probe
tgaaggaaatggtgtctggaagaaa

SEQ ID NO: 27081 - DNA, 25 bp, probe
agattcgatcctcttaaggcattat

SEQ ID NO: 27082 - DNA, 25 bp, probe
gattcgatcctcttaaggcattatc

SEQ ID NO: 27083 - DNA, 25 bp, probe
tctggaagaaagttctggttcacat

SEQ ID NO: 27084 - DNA, 25 bp, probe
gagtccatacaggagaagaaagatc

SEQ ID NO: 27085 - DNA, 25 bp, probe
atttctggttatgtcaaggctctgg

SEQ ID NO: 27086 - DNA, 25 bp, probe
ctgagtccatacaggagaagaaaga

SEQ ID NO: 27087 - DNA, 25 bp, probe
tctgagtccatacaggagaagaaag

SEQ ID NO: 27088 - DNA, 25 bp, probe
cgatcctcttaaggcattatcagtg

SEQ ID NO: 27089 - DNA, 25 bp, probe
tcgatcctcttaaggcattatcagt

SEQ ID NO: 27090 - DNA, 25 bp, probe
gagcaaatgtgaaggaaatggtgtc

SEQ ID NO: 27091 - DNA, 25 bp, probe
cagtgagcaaatgtgaaggaaatgg

SEQ ID NO: 27092 - DNA, 25 bp, probe
ctggaagaaagttctggttcacatg

SEQ ID NO: 27093 - DNA, 25 bp, probe
atgtgaaggaaatggtgtctggaag

SEQ ID NO: 27094 - DNA, 25 bp, probe
aagttctggttcacatgccttgtag

SEQ ID NO: 27095 - DNA, 25 bp, probe
ctagagacctcttgtacagaagttg

SEQ ID NO: 27096 - DNA, 25 bp, probe
ttctggttatgtcaaggctctggag

SEQ ID NO: 27097 - DNA, 25 bp, probe
ttaaggcattatcagtgagcaaatg

SEQ ID NO: 27098 - DNA, 25 bp, probe
gcaaatgtgaaggaaatggtgtctg

SEQ ID NO: 27099 - DNA, 25 bp, probe
gaacacatctgctgcttagaagagt

SEQ ID NO: 27100 - DNA, 25 bp, probe
aaggaacacatctgctgcttagaag

SEQ ID NO: 27101 - DNA, 25 bp, probe
atctacaccaccttcatcctgtcat

SEQ ID NO: 27102 - DNA, 25 bp, probe
ggaacacatctgctgcttagaagag

SEQ ID NO: 27103 - DNA, 25 bp, probe
aacacatctgctgcttagaagagtg

SEQ ID NO: 27104 - DNA, 25 bp, probe
cttcatcctgtcatcctcttcctcc

SEQ ID NO: 27105 - DNA, 25 bp, probe
ccttcatcctgtcatcctcttcctc

SEQ ID NO: 27106 - DNA, 25 bp, probe
aggaacacatctgctgcttagaaga

SEQ ID NO: 27107 - DNA, 25 bp, probe
tctacaccaccttcatcctgtcatc

SEQ ID NO: 27108 - DNA, 25 bp, probe
aaaggaacacatctgctgcttagaa

SEQ ID NO: 27109 - DNA, 25 bp, probe
cttatggaagaagaaacgagctgtc

SEQ ID NO: 27110 - DNA, 25 bp, probe
gatctacaccaccttcatcctgtca

SEQ ID NO: 27111 - DNA, 25 bp, probe
ttcatcctgtcatcctcttcctcct

SEQ ID NO: 27112 - DNA, 25 bp, probe
tatggaagaagaaacgagctgtcat

SEQ ID NO: 27113 - DNA, 25 bp, probe
tggaagaagaaacgagctgtcatta

SEQ ID NO: 27114 - DNA, 25 bp, probe
ttatggaagaagaaacgagctgtca

SEQ ID NO: 27115 - DNA, 25 bp, probe
caccttcatcctgtcatcctcttcc

SEQ ID NO: 27116 - DNA, 25 bp, probe
ccaccttcatcctgtcatcctcttc

SEQ ID NO: 27117 - DNA, 25 bp, probe
accttcatcctgtcatcctcttcct

SEQ ID NO: 27118 - DNA, 25 bp, probe
acatctgctgcttagaagagtggac

SEQ ID NO: 27119 - DNA, 25 bp, probe
atggaagaagaaacgagctgtcatt

SEQ ID NO: 27120 - DNA, 25 bp, probe
ctcctgcctcttatggaagaagaaa

SEQ ID NO: 27121 - DNA, 25 bp, probe
ctacaccaccttcatcctgtcatcc

SEQ ID NO: 27122 - DNA, 25 bp, probe
cctcctgcctcttatggaagaagaa

SEQ ID NO: 27123 - DNA, 25 bp, probe
tcctgcctcttatggaagaagaaac

SEQ ID NO: 27124 - DNA, 25 bp, probe
tcatcctgtcatcctcttcctcctg

SEQ ID NO: 27125 - DNA, 25 bp, probe
cacatctgctgcttagaagagtgga

SEQ ID NO: 27126 - DNA, 25 bp, probe
ctcttatggaagaagaaacgagctg

SEQ ID NO: 27127 - DNA, 25 bp, probe
tgcctcttatggaagaagaaacgag

SEQ ID NO: 27128 - DNA, 25 bp, probe
ctgcctcttatggaagaagaaacga

SEQ ID NO: 27129 - DNA, 25 bp, probe
accaccttcatcctgtcatcctctt

SEQ ID NO: 27130 - DNA, 25 bp, probe
aagatctacaccaccttcatcctgt

SEQ ID NO: 27131 - DNA, 25 bp, probe
catctgctgcttagaagagtggacc

SEQ ID NO: 27132 - DNA, 25 bp, probe
tacaccaccttcatcctgtcatcct

SEQ ID NO: 27133 - DNA, 25 bp, probe
tcttatggaagaagaaacgagctgt

SEQ ID NO: 27134 - DNA, 25 bp, probe
acacatctgctgcttagaagagtgg

SEQ ID NO: 27135 - DNA, 25 bp, probe
gaaaaggaacacatctgctgcttag

SEQ ID NO: 27136 - DNA, 25 bp, probe
agatctacaccaccttcatcctgtc

SEQ ID NO: 27137 - DNA, 25 bp, probe
aaaaggaacacatctgctgcttaga

SEQ ID NO: 27138 - DNA, 25 bp, probe
cctcttatggaagaagaaacgagct

SEQ ID NO: 27139 - DNA, 25 bp, probe
tcctcctgcctcttatggaagaaga

SEQ ID NO: 27140 - DNA, 25 bp, probe
cctgcctcttatggaagaagaaacg

SEQ ID NO: 27141 - DNA, 25 bp, probe
gaagatctacaccaccttcatcctg

SEQ ID NO: 27142 - DNA, 25 bp, probe
agaagatctacaccaccttcatcct

SEQ ID NO: 27143 - DNA, 25 bp, probe
tgtggttggaattcttctttcagag

SEQ ID NO: 27144 - DNA, 25 bp, probe
ggttggaattcttctttcagaggag

SEQ ID NO: 27145 - DNA, 25 bp, probe
aaatttctgtttatttcactcaggg

SEQ ID NO: 27146 - DNA, 25 bp, probe
aatttctgtttatttcactcagggg

SEQ ID NO: 27147 - DNA, 25 bp, probe
gtggttggaattcttctttcagagg

SEQ ID NO: 27148 - DNA, 25 bp, probe
gttggaattcttctttcagaggagc

SEQ ID NO: 27149 - DNA, 25 bp, probe
tggttggaattcttctttcagagga

SEQ ID NO: 27150 - DNA, 25 bp, probe
ctgtggttggaattcttctttcaga

SEQ ID NO: 27151 - DNA, 25 bp, probe
ttgctgtggttggaattcttctttc

SEQ ID NO: 27152 - DNA, 25 bp, probe
atttctgtttatttcactcaggggc

SEQ ID NO: 27153 - DNA, 25 bp, probe
gttgctgtggttggaattcttcttt

SEQ ID NO: 27154 - DNA, 25 bp, probe
ggttgctgtggttggaattcttctt

SEQ ID NO: 27155 - DNA, 25 bp, probe
ctccttagacactcctcacacctgt

SEQ ID NO: 27156 - DNA, 25 bp, probe
gctgtggttggaattcttctttcag

SEQ ID NO: 27157 - DNA, 25 bp, probe
tgctgtggttggaattcttctttca

SEQ ID NO: 27158 - DNA, 25 bp, probe
ttggaattcttctttcagaggagcg

SEQ ID NO: 27159 - DNA, 25 bp, probe
tttctgtttatttcactcaggggca

SEQ ID NO: 27160 - DNA, 25 bp, probe
gacatcgtcccttagttgtggttct

SEQ ID NO: 27161 - DNA, 25 bp, probe
acatcgtcccttagttgtggttctg

SEQ ID NO: 27162 - DNA, 25 bp, probe
tgacatcgtcccttagttgtggttc

SEQ ID NO: 27163 - DNA, 25 bp, probe
ctgacatcgtcccttagttgtggtt

SEQ ID NO: 27164 - DNA, 25 bp, probe
catcgtcccttagttgtggttctgg

SEQ ID NO: 27165 - DNA, 25 bp, probe
ttctgtttatttcactcaggggcac

SEQ ID NO: 27166 - DNA, 25 bp, probe
gtggttgctgtggttggaattcttc

SEQ ID NO: 27167 - DNA, 25 bp, probe
tggttgctgtggttggaattcttct

SEQ ID NO: 27168 - DNA, 25 bp, probe
ctgtttatttcactcaggggcactg

SEQ ID NO: 27169 - DNA, 25 bp, probe
cttagttgtggttctggccttctcc

SEQ ID NO: 27170 - DNA, 25 bp, probe
ccttagttgtggttctggccttctc

SEQ ID NO: 27171 - DNA, 25 bp, probe
tagacactcctcacacctgtccata

SEQ ID NO: 27172 - DNA, 25 bp, probe
tctgtttatttcactcaggggcact

SEQ ID NO: 27173 - DNA, 25 bp, probe
gtttatttcactcaggggcactgtg

SEQ ID NO: 27174 - DNA, 25 bp, probe
tgtttatttcactcaggggcactgt

SEQ ID NO: 27175 - DNA, 25 bp, probe
ttagacactcctcacacctgtccat

SEQ ID NO: 27176 - DNA, 25 bp, probe
tccttagacactcctcacacctgtc

SEQ ID NO: 27177 - DNA, 25 bp, probe
tttatttcactcaggggcactgtgg

SEQ ID NO: 27178 - DNA, 25 bp, probe
tggaattcttctttcagaggagcgc

SEQ ID NO: 27179 - DNA, 25 bp, probe
gaattcttctttcagaggagcgcct

SEQ ID NO: 27180 - DNA, 25 bp, probe
aattcttctttcagaggagcgcctg

SEQ ID NO: 27181 - DNA, 25 bp, probe
ctgtccactattgttcctattccaa

SEQ ID NO: 27182 - DNA, 25 bp, probe
gctgtccactattgttcctattcca

SEQ ID NO: 27183 - DNA, 25 bp, probe
tgtccaagagtattccaaagcataa

SEQ ID NO: 27184 - DNA, 25 bp, probe
tccaagagtattccaaagcataaga

SEQ ID NO: 27185 - DNA, 25 bp, probe
gtccaagagtattccaaagcataag

SEQ ID NO: 27186 - DNA, 25 bp, probe
ctgtccaagagtattccaaagcata

SEQ ID NO: 27187 - DNA, 25 bp, probe
tctctaaatgtcaagttgttctgga

SEQ ID NO: 27188 - DNA, 25 bp, probe
gtctctaaatgtcaagttgttctgg

SEQ ID NO: 27189 - DNA, 25 bp, probe
ggctgtccactattgttcctattcc

SEQ ID NO: 27190 - DNA, 25 bp, probe
attccttgccttattcatttgagac

SEQ ID NO: 27191 - DNA, 25 bp, probe
ttccttgccttattcatttgagaca

SEQ ID NO: 27192 - DNA, 25 bp, probe
gattccttgccttattcatttgaga

SEQ ID NO: 27193 - DNA, 25 bp, probe
ctctaaatgtcaagttgttctggaa

SEQ ID NO: 27194 - DNA, 25 bp, probe
tgtctctaaatgtcaagttgttctg

SEQ ID NO: 27195 - DNA, 25 bp, probe
ccaagagtattccaaagcataagat

SEQ ID NO: 27196 - DNA, 25 bp, probe
tgtccactattgttcctattccaaa

SEQ ID NO: 27197 - DNA, 25 bp, probe
tctaaatgtcaagttgttctggaaa

SEQ ID NO: 27198 - DNA, 25 bp, probe
ttgagaatttgggtttggcagataa

SEQ ID NO: 27199 - DNA, 25 bp, probe
tttgagaatttgggtttggcagata

SEQ ID NO: 27200 - DNA, 25 bp, probe
tgagaatttgggtttggcagataaa

SEQ ID NO: 27201 - DNA, 25 bp, probe
gtccactattgttcctattccaaag

SEQ ID NO: 27202 - DNA, 25 bp, probe
tccttgccttattcatttgagacaa

SEQ ID NO: 27203 - DNA, 25 bp, probe
ttaaggcagacaacttgttgaacag

SEQ ID NO: 27204 - DNA, 25 bp, probe
tccactattgttcctattccaaagc

SEQ ID NO: 27205 - DNA, 25 bp, probe
tgattccttgccttattcatttgag

SEQ ID NO: 27206 - DNA, 25 bp, probe
agaatttgggtttggcagataaatc

SEQ ID NO: 27207 - DNA, 25 bp, probe
gagaatttgggtttggcagataaat

SEQ ID NO: 27208 - DNA, 25 bp, probe
actgagcataatttcttcattgaca

SEQ ID NO: 27209 - DNA, 25 bp, probe
ttgaagccactgagacattcttgtt

SEQ ID NO: 27210 - DNA, 25 bp, probe
ttgtctctaaatgtcaagttgttct

SEQ ID NO: 27211 - DNA, 25 bp, probe
gaaaggctttgagaatttgggtttg

SEQ ID NO: 27212 - DNA, 25 bp, probe
ttagcatgatgttgtcggaggaatc

SEQ ID NO: 27213 - DNA, 25 bp, probe
cactattgttcctattccaaagccc

SEQ ID NO: 27214 - DNA, 25 bp, probe
ccactattgttcctattccaaagcc

SEQ ID NO: 27215 - DNA, 25 bp, probe
tggctgtccactattgttcctattc

SEQ ID NO: 27216 - DNA, 25 bp, probe
ctggctgtccactattgttcctatt

SEQ ID NO: 27217 - DNA, 25 bp, probe
atgggttgaaaggctttgagaattt

SEQ ID NO: 27218 - DNA, 25 bp, probe
aatgggttgaaaggctttgagaatt

SEQ ID NO: 27219 - DNA, 25 bp, probe
ctaaatgtcaagttgttctggaaat

SEQ ID NO: 27220 - DNA, 25 bp, probe
gaatttgggtttggcagataaatct

SEQ ID NO: 27221 - DNA, 25 bp, probe
tgaaaggctttgagaatttgggttt

SEQ ID NO: 27222 - DNA, 25 bp, probe
ttgaaaggctttgagaatttgggtt

SEQ ID NO: 27223 - DNA, 25 bp, probe
taaggcagacaacttgttgaacaga

SEQ ID NO: 27224 - DNA, 25 bp, probe
ttgagacaaactgagttagcatgat

SEQ ID NO: 27225 - DNA, 25 bp, probe
ctccattatcgctgtcttctacttc

SEQ ID NO: 27226 - DNA, 25 bp, probe
cttctccattatcgctgtcttctac

SEQ ID NO: 27227 - DNA, 25 bp, probe
cattatcgctgtcttctacttcctg

SEQ ID NO: 27228 - DNA, 25 bp, probe
tctccattatcgctgtcttctactt

SEQ ID NO: 27229 - DNA, 25 bp, probe
ttctccattatcgctgtcttctact

SEQ ID NO: 27230 - DNA, 25 bp, probe
cttgatgcttgagtagagtgaagag

SEQ ID NO: 27231 - DNA, 25 bp, probe
gtcttgatgcttgagtagagtgaag

SEQ ID NO: 27232 - DNA, 25 bp, probe
ccttctccattatcgctgtcttcta

SEQ ID NO: 27233 - DNA, 25 bp, probe
ccattatcgctgtcttctacttcct

SEQ ID NO: 27234 - DNA, 25 bp, probe
tccattatcgctgtcttctacttcc

SEQ ID NO: 27235 - DNA, 25 bp, probe
ttgatgcttgagtagagtgaagagg

SEQ ID NO: 27236 - DNA, 25 bp, probe
cttcatcaatcgcaactacaggtac

SEQ ID NO: 27237 - DNA, 25 bp, probe
attatcgctgtcttctacttcctgc

SEQ ID NO: 27238 - DNA, 25 bp, probe
actaaggatgacactaattgttagc

SEQ ID NO: 27239 - DNA, 25 bp, probe
ggtcttgatgcttgagtagagtgaa

SEQ ID NO: 27240 - DNA, 25 bp, probe
ttgactaaggatgacactaattgtt

SEQ ID NO: 27241 - DNA, 25 bp, probe
gcctggacttctgtaagataggatt

SEQ ID NO: 27242 - DNA, 25 bp, probe
aggatgacactaattgttagctgtt

SEQ ID NO: 27243 - DNA, 25 bp, probe
aaggatgacactaattgttagctgt

SEQ ID NO: 27244 - DNA, 25 bp, probe
gcttgcctggacttctgtaagatag

SEQ ID NO: 27245 - DNA, 25 bp, probe
gcttcatcaatcgcaactacaggta

SEQ ID NO: 27246 - DNA, 25 bp, probe
ctacagcttcatcaatcgcaactac

SEQ ID NO: 27247 - DNA, 25 bp, probe
tgactaaggatgacactaattgtta

SEQ ID NO: 27248 - DNA, 25 bp, probe
tctacagcttcatcaatcgcaacta

SEQ ID NO: 27249 - DNA, 25 bp, probe
cttgcctggacttctgtaagatagg

SEQ ID NO: 27250 - DNA, 25 bp, probe
ttaaggttagcgtgactttcagttt

SEQ ID NO: 27251 - DNA, 25 bp, probe
tttaaggttagcgtgactttcagtt

SEQ ID NO: 27252 - DNA, 25 bp, probe
ttatcgctgtcttctacttcctgct

SEQ ID NO: 27253 - DNA, 25 bp, probe
taaggatgacactaattgttagctg

SEQ ID NO: 27254 - DNA, 25 bp, probe
tgcctggacttctgtaagataggat

SEQ ID NO: 27255 - DNA, 25 bp, probe
tcttgatgcttgagtagagtgaaga

SEQ ID NO: 27256 - DNA, 25 bp, probe
ctaaggatgacactaattgttagct

SEQ ID NO: 27257 - DNA, 25 bp, probe
ttcatcaatcgcaactacaggtacg

SEQ ID NO: 27258 - DNA, 25 bp, probe
tacagcttcatcaatcgcaactaca

SEQ ID NO: 27259 - DNA, 25 bp, probe
ttgcctggacttctgtaagatagga

SEQ ID NO: 27260 - DNA, 25 bp, probe
tgacatatattcagagtgttgtagt

SEQ ID NO: 27261 - DNA, 25 bp, probe
gaggcatagtgctgacatatattca

SEQ ID NO: 27262 - DNA, 25 bp, probe
cctggacttctgtaagataggattt

SEQ ID NO: 27263 - DNA, 25 bp, probe
gactaaggatgacactaattgttag

SEQ ID NO: 27264 - DNA, 25 bp, probe
taaatattgtttgggaggcatagtg

SEQ ID NO: 27265 - DNA, 25 bp, probe
ggaggcatagtgctgacatatattc

SEQ ID NO: 27266 - DNA, 25 bp, probe
tttgactaaggatgacactaattgt

SEQ ID NO: 27267 - DNA, 25 bp, probe
catcttctccatcctgcactacatc

SEQ ID NO: 27268 - DNA, 25 bp, probe
ttaaatattgtttgggaggcatagt

SEQ ID NO: 27269 - DNA, 25 bp, probe
actcagccaagaagtagatgactag

SEQ ID NO: 27270 - DNA, 25 bp, probe
ccaagaagtagatgactaggtgagg

SEQ ID NO: 27271 - DNA, 25 bp, probe
tactcagccaagaagtagatgacta

SEQ ID NO: 27272 - DNA, 25 bp, probe
ctcagccaagaagtagatgactagg

SEQ ID NO: 27273 - DNA, 25 bp, probe
ttactcagccaagaagtagatgact

SEQ ID NO: 27274 - DNA, 25 bp, probe
gttactcagccaagaagtagatgac

SEQ ID NO: 27275 - DNA, 25 bp, probe
agttactcagccaagaagtagatga

SEQ ID NO: 27276 - DNA, 25 bp, probe
caagaagtagatgactaggtgaggc

SEQ ID NO: 27277 - DNA, 25 bp, probe
gccaagaagtagatgactaggtgag

SEQ ID NO: 27278 - DNA, 25 bp, probe
agaagtagatgactaggtgaggcat

SEQ ID NO: 27279 - DNA, 25 bp, probe
aagaagtagatgactaggtgaggca

SEQ ID NO: 27280 - DNA, 25 bp, probe
agccaagaagtagatgactaggtga

SEQ ID NO: 27281 - DNA, 25 bp, probe
cagccaagaagtagatgactaggtg

SEQ ID NO: 27282 - DNA, 25 bp, probe
tcagccaagaagtagatgactaggt

SEQ ID NO: 27283 - DNA, 25 bp, probe
tagagttactcagccaagaagtaga

SEQ ID NO: 27284 - DNA, 25 bp, probe
gtagagttactcagccaagaagtag

SEQ ID NO: 27285 - DNA, 25 bp, probe
tgtagagttactcagccaagaagta

SEQ ID NO: 27286 - DNA, 25 bp, probe
gagttactcagccaagaagtagatg

SEQ ID NO: 27287 - DNA, 25 bp, probe
agagttactcagccaagaagtagat

SEQ ID NO: 27288 - DNA, 25 bp, probe
gaagtagatgactaggtgaggcatg

SEQ ID NO: 27289 - DNA, 25 bp, probe
ctgtagagttactcagccaagaagt

SEQ ID NO: 27290 - DNA, 25 bp, probe
gcccattacaaagcaaataagtaca

SEQ ID NO: 27291 - DNA, 25 bp, probe
cctgtagagttactcagccaagaag

SEQ ID NO: 27292 - DNA, 25 bp, probe
cttcctgtagagttactcagccaag

SEQ ID NO: 27293 - DNA, 25 bp, probe
tcctgtagagttactcagccaagaa

SEQ ID NO: 27294 - DNA, 25 bp, probe
ttcctgtagagttactcagccaaga

SEQ ID NO: 27295 - DNA, 25 bp, probe
tcttcctgtagagttactcagccaa

SEQ ID NO: 27296 - DNA, 25 bp, probe
cagacaacatgataggtcctgatgg

SEQ ID NO: 27297 - DNA, 25 bp, probe
cccattacaaagcaaataagtacat

SEQ ID NO: 27298 - DNA, 25 bp, probe
gcagacaacatgataggtcctgatg

SEQ ID NO: 27299 - DNA, 25 bp, probe
agcagacaacatgataggtcctgat

SEQ ID NO: 27300 - DNA, 25 bp, probe
aagcagacaacatgataggtcctga

SEQ ID NO: 27301 - DNA, 25 bp, probe
tcacaaagcagacaacatgataggt

SEQ ID NO: 27302 - DNA, 25 bp, probe
cacaaagcagacaacatgataggtc

SEQ ID NO: 27303 - DNA, 25 bp, probe
gatcacaaagcagacaacatgatag

SEQ ID NO: 27304 - DNA, 25 bp, probe
ccattacaaagcaaataagtacatg

SEQ ID NO: 27305 - DNA, 25 bp, probe
tgcccattacaaagcaaataagtac

SEQ ID NO: 27306 - DNA, 25 bp, probe
atgcccattacaaagcaaataagta

SEQ ID NO: 27307 - DNA, 25 bp, probe
catgcccattacaaagcaaataagt

SEQ ID NO: 27308 - DNA, 25 bp, probe
acatgcccattacaaagcaaataag

SEQ ID NO: 27309 - DNA, 25 bp, probe
gacatgcccattacaaagcaaataa

SEQ ID NO: 27310 - DNA, 25 bp, probe
atcacaaagcagacaacatgatagg

SEQ ID NO: 27311 - DNA, 25 bp, probe
aaagcagacaacatgataggtcctg

SEQ ID NO: 27312 - DNA, 25 bp, probe
caaagcagacaacatgataggtcct

SEQ ID NO: 27313 - DNA, 25 bp, probe
ttacacaggagaggttgaccatatc

SEQ ID NO: 27314 - DNA, 25 bp, probe
gttacacaggagaggttgaccatat

SEQ ID NO: 27315 - DNA, 25 bp, probe
agttacacaggagaggttgaccata

SEQ ID NO: 27316 - DNA, 25 bp, probe
tacacaggagaggttgaccatatca

SEQ ID NO: 27317 - DNA, 25 bp, probe
gatcacagttacacaggagaggttg

SEQ ID NO: 27318 - DNA, 25 bp, probe
atcacagttacacaggagaggttga

SEQ ID NO: 27319 - DNA, 25 bp, probe
caggttaaggatgtaggtcacatag

SEQ ID NO: 27320 - DNA, 25 bp, probe
cagatcacatcattgcctaccagtc

SEQ ID NO: 27321 - DNA, 25 bp, probe
aggttaaggatgtaggtcacatagg

SEQ ID NO: 27322 - DNA, 25 bp, probe
tagagaagccagcagatcacatcat

SEQ ID NO: 27323 - DNA, 25 bp, probe
ccaggttaaggatgtaggtcacata

SEQ ID NO: 27324 - DNA, 25 bp, probe
ggatcacagttacacaggagaggtt

SEQ ID NO: 27325 - DNA, 25 bp, probe
cagttacacaggagaggttgaccat

SEQ ID NO: 27326 - DNA, 25 bp, probe
tcacagttacacaggagaggttgac

SEQ ID NO: 27327 - DNA, 25 bp, probe
gagtagagaagccagcagatcacat

SEQ ID NO: 27328 - DNA, 25 bp, probe
agtagagaagccagcagatcacatc

SEQ ID NO: 27329 - DNA, 25 bp, probe
gagaagccagcagatcacatcattg

SEQ ID NO: 27330 - DNA, 25 bp, probe
caggatcacagttacacaggagagg

SEQ ID NO: 27331 - DNA, 25 bp, probe
agagaagccagcagatcacatcatt

SEQ ID NO: 27332 - DNA, 25 bp, probe
agatcacatcattgcctaccagtcc

SEQ ID NO: 27333 - DNA, 25 bp, probe
gtagagaagccagcagatcacatca

SEQ ID NO: 27334 - DNA, 25 bp, probe
ctggctaactgcatacaaagaaagg

SEQ ID NO: 27335 - DNA, 25 bp, probe
cctggctaactgcatacaaagaaag

SEQ ID NO: 27336 - DNA, 25 bp, probe
atcacatcattgcctaccagtccac

SEQ ID NO: 27337 - DNA, 25 bp, probe
aggatcacagttacacaggagaggt

SEQ ID NO: 27338 - DNA, 25 bp, probe
gatcacatcattgcctaccagtcca

SEQ ID NO: 27339 - DNA, 25 bp, probe
acacaggagaggttgaccatatcaa

SEQ ID NO: 27340 - DNA, 25 bp, probe
acctggctaactgcatacaaagaaa

SEQ ID NO: 27341 - DNA, 25 bp, probe
gcaggatcacagttacacaggagag

SEQ ID NO: 27342 - DNA, 25 bp, probe
catcattgcctaccagtccacagag

SEQ ID NO: 27343 - DNA, 25 bp, probe
cacagttacacaggagaggttgacc

SEQ ID NO: 27344 - DNA, 25 bp, probe
ggttaaggatgtaggtcacataggg

SEQ ID NO: 27345 - DNA, 25 bp, probe
gacctggctaactgcatacaaagaa

SEQ ID NO: 27346 - DNA, 25 bp, probe
ttctccagcaggatcacagttacac

SEQ ID NO: 27347 - DNA, 25 bp, probe
ctgtgagtagagaagccagcagatc

SEQ ID NO: 27348 - DNA, 25 bp, probe
cagcaggatcacagttacacaggag

SEQ ID NO: 27349 - DNA, 25 bp, probe
tggctaactgcatacaaagaaaggg

SEQ ID NO: 27350 - DNA, 25 bp, probe
tggtgatacagcatgaggattttct

SEQ ID NO: 27351 - DNA, 25 bp, probe
acagttacacaggagaggttgacca

SEQ ID NO: 27352 - DNA, 25 bp, probe
agcaggatcacagttacacaggaga

SEQ ID NO: 27353 - DNA, 25 bp, probe
ggtgatacagcatgaggattttctc

SEQ ID NO: 27354 - DNA, 25 bp, probe
tgctccagacctgtgagtagagaag

SEQ ID NO: 27355 - DNA, 25 bp, probe
acagagaaagctctcaatactcatg

SEQ ID NO: 27356 - DNA, 25 bp, probe
cacagagaaagctctcaatactcat

SEQ ID NO: 27357 - DNA, 25 bp, probe
ccagaatctccatatgaacatgtct

SEQ ID NO: 27358 - DNA, 25 bp, probe
ctcccagaatctccatatgaacatg

SEQ ID NO: 27359 - DNA, 25 bp, probe
aatctccatatgaacatgtcttctg

SEQ ID NO: 27360 - DNA, 25 bp, probe
cagaatctccatatgaacatgtctt

SEQ ID NO: 27361 - DNA, 25 bp, probe
cctcccagaatctccatatgaacat

SEQ ID NO: 27362 - DNA, 25 bp, probe
gaatctccatatgaacatgtcttct

SEQ ID NO: 27363 - DNA, 25 bp, probe
agaatctccatatgaacatgtcttc

SEQ ID NO: 27364 - DNA, 25 bp, probe
gacctcccagaatctccatatgaac

SEQ ID NO: 27365 - DNA, 25 bp, probe
tacagttctccatcagccagatgat

SEQ ID NO: 27366 - DNA, 25 bp, probe
atctccatatgaacatgtcttctgg

SEQ ID NO: 27367 - DNA, 25 bp, probe
tgacctcccagaatctccatatgaa

SEQ ID NO: 27368 - DNA, 25 bp, probe
acctcccagaatctccatatgaaca

SEQ ID NO: 27369 - DNA, 25 bp, probe
aagaccatcggaagtgaagcatcag

SEQ ID NO: 27370 - DNA, 25 bp, probe
cccagaatctccatatgaacatgtc

SEQ ID NO: 27371 - DNA, 25 bp, probe
caagaccatcggaagtgaagcatca

SEQ ID NO: 27372 - DNA, 25 bp, probe
gctgttaaggaaaaccaggatgatg

SEQ ID NO: 27373 - DNA, 25 bp, probe
tcccagaatctccatatgaacatgt

SEQ ID NO: 27374 - DNA, 25 bp, probe
gtgacctcccagaatctccatatga

SEQ ID NO: 27375 - DNA, 25 bp, probe
ctgttaaggaaaaccaggatgatgg

SEQ ID NO: 27376 - DNA, 25 bp, probe
gtacagttctccatcagccagatga

SEQ ID NO: 27377 - DNA, 25 bp, probe
ctagctgttaaggaaaaccaggatg

SEQ ID NO: 27378 - DNA, 25 bp, probe
ctgaaagaaggatgggaactgggtc

SEQ ID NO: 27379 - DNA, 25 bp, probe
tagctgttaaggaaaaccaggatga

SEQ ID NO: 27380 - DNA, 25 bp, probe
gtctgaaagaaggatgggaactggg

SEQ ID NO: 27381 - DNA, 25 bp, probe
ggtctgaaagaaggatgggaactgg

SEQ ID NO: 27382 - DNA, 25 bp, probe
gggtctgaaagaaggatgggaactg

SEQ ID NO: 27383 - DNA, 25 bp, probe
agggtctgaaagaaggatgggaact

SEQ ID NO: 27384 - DNA, 25 bp, probe
agctgttaaggaaaaccaggatgat

SEQ ID NO: 27385 - DNA, 25 bp, probe
aggtgacctcccagaatctccatat

SEQ ID NO: 27386 - DNA, 25 bp, probe
ggtgacctcccagaatctccatatg

SEQ ID NO: 27387 - DNA, 25 bp, probe
tctccatatgaacatgtcttctggg

SEQ ID NO: 27388 - DNA, 25 bp, probe
tctgaaagaaggatgggaactgggt

SEQ ID NO: 27389 - DNA, 25 bp, probe
cagggtctgaaagaaggatgggaac

SEQ ID NO: 27390 - DNA, 25 bp, probe
aaggtgacctcccagaatctccata

SEQ ID NO: 27391 - DNA, 25 bp, probe
cttgaaggtgacctcccagaatctc

SEQ ID NO: 27392 - DNA, 25 bp, probe
ctgagcagggtctgaaagaaggatg

SEQ ID NO: 27393 - DNA, 25 bp, probe
gtgactgagcagggtctgaaagaag

SEQ ID NO: 27394 - DNA, 25 bp, probe
cagagttggaattcaatgcagaccc

SEQ ID NO: 27395 - DNA, 25 bp, probe
cgtacagttctccatcagccagatg

SEQ ID NO: 27396 - DNA, 25 bp, probe
cacttgaaggtgacctcccagaatc

SEQ ID NO: 27397 - DNA, 25 bp, probe
acttgaaggtgacctcccagaatct

SEQ ID NO: 27398 - DNA, 25 bp, probe
gcagagttggaattcaatgcagacc

SEQ ID NO: 27399 - DNA, 25 bp, probe
atatgaacatgtcttctggggtcct

SEQ ID NO: 27400 - DNA, 25 bp, probe
catatgaacatgtcttctggggtcc

SEQ ID NO: 27401 - DNA, 25 bp, probe
tgaaaggtgtatggaaatggatgat

SEQ ID NO: 27402 - DNA, 25 bp, probe
ttgaaaggtgtatggaaatggatga

SEQ ID NO: 27403 - DNA, 25 bp, probe
cttgaaaggtgtatggaaatggatg

SEQ ID NO: 27404 - DNA, 25 bp, probe
catctcttcagcaaatcctctcatt

SEQ ID NO: 27405 - DNA, 25 bp, probe
aaggtgtatggaaatggatgataac

SEQ ID NO: 27406 - DNA, 25 bp, probe
tcttagaaaccagatacgctcaaag

SEQ ID NO: 27407 - DNA, 25 bp, probe
gaaaggtgtatggaaatggatgata

SEQ ID NO: 27408 - DNA, 25 bp, probe
gcttgaaaggtgtatggaaatggat

SEQ ID NO: 27409 - DNA, 25 bp, probe
gaaggcttgaaaggtgtatggaaat

SEQ ID NO: 27410 - DNA, 25 bp, probe
aaggcttgaaaggtgtatggaaatg

SEQ ID NO: 27411 - DNA, 25 bp, probe
aaaggtgtatggaaatggatgataa

SEQ ID NO: 27412 - DNA, 25 bp, probe
atctcttcagcaaatcctctcattt

SEQ ID NO: 27413 - DNA, 25 bp, probe
tttccatctcttcagcaaatcctct

SEQ ID NO: 27414 - DNA, 25 bp, probe
ctgacaaggttccatctccagaatc

SEQ ID NO: 27415 - DNA, 25 bp, probe
tctggagagcttatgaccaatgtaa

SEQ ID NO: 27416 - DNA, 25 bp, probe
ttctggagagcttatgaccaatgta

SEQ ID NO: 27417 - DNA, 25 bp, probe
ccatctcttcagcaaatcctctcat

SEQ ID NO: 27418 - DNA, 25 bp, probe
ttccatctcttcagcaaatcctctc

SEQ ID NO: 27419 - DNA, 25 bp, probe
cattgccatcatctctgctctcttg

SEQ ID NO: 27420 - DNA, 25 bp, probe
gtttcatagccctgtctcaagtctt

SEQ ID NO: 27421 - DNA, 25 bp, probe
aggtgtatggaaatggatgataacc

SEQ ID NO: 27422 - DNA, 25 bp, probe
ggtgtatggaaatggatgataacca

SEQ ID NO: 27423 - DNA, 25 bp, probe
gtgtatggaaatggatgataaccaa

SEQ ID NO: 27424 - DNA, 25 bp, probe
attgccatcatctctgctctcttgt

SEQ ID NO: 27425 - DNA, 25 bp, probe
tgacaaggttccatctccagaatcc

SEQ ID NO: 27426 - DNA, 25 bp, probe
atcttagaaaccagatacgctcaaa

SEQ ID NO: 27427 - DNA, 25 bp, probe
aatcttagaaaccagatacgctcaa

SEQ ID NO: 27428 - DNA, 25 bp, probe
aaatcttagaaaccagatacgctca

SEQ ID NO: 27429 - DNA, 25 bp, probe
tgtatggaaatggatgataaccaaa

SEQ ID NO: 27430 - DNA, 25 bp, probe
ttcttgtgatgtcggaagagttcag

SEQ ID NO: 27431 - DNA, 25 bp, probe
ggaaggcttgaaaggtgtatggaaa

SEQ ID NO: 27432 - DNA, 25 bp, probe
tgggaacatgaagatcaagagacag

SEQ ID NO: 27433 - DNA, 25 bp, probe
ctgggaacatgaagatcaagagaca

SEQ ID NO: 27434 - DNA, 25 bp, probe
tccatctcttcagcaaatcctctca

SEQ ID NO: 27435 - DNA, 25 bp, probe
ggcttgaaaggtgtatggaaatgga

SEQ ID NO: 27436 - DNA, 25 bp, probe
aggcttgaaaggtgtatggaaatgg

SEQ ID NO: 27437 - DNA, 25 bp, probe
tttcatagccctgtctcaagtcttg

SEQ ID NO: 27438 - DNA, 25 bp, probe
caactgtctcagagtctcaggaaac

SEQ ID NO: 27439 - DNA, 25 bp, probe
tatttctggagagcttatgaccaat

SEQ ID NO: 27440 - DNA, 25 bp, probe
ctggagagcttatgaccaatgtaaa

SEQ ID NO: 27441 - DNA, 25 bp, probe
atgttttccatctcttcagcaaatc

SEQ ID NO: 27442 - DNA, 25 bp, probe
atttctggagagcttatgaccaatg

SEQ ID NO: 27443 - DNA, 25 bp, probe
cctgacaaggttccatctccagaat

SEQ ID NO: 27444 - DNA, 25 bp, probe
ttttccatctcttcagcaaatcctc

SEQ ID NO: 27445 - DNA, 25 bp, probe
ctatgtcttcattgggcatgatttc

SEQ ID NO: 27446 - DNA, 25 bp, probe
tatgtcttcattgggcatgatttct

SEQ ID NO: 27447 - DNA, 25 bp, probe
tctatgtcttcattgggcatgattt

SEQ ID NO: 27448 - DNA, 25 bp, probe
ctctatgtcttcattgggcatgatt

SEQ ID NO: 27449 - DNA, 25 bp, probe
tctctatgtcttcattgggcatgat

SEQ ID NO: 27450 - DNA, 25 bp, probe
atgtcttcattgggcatgatttctg

SEQ ID NO: 27451 - DNA, 25 bp, probe
gttaagtttagctgacccttccagg

SEQ ID NO: 27452 - DNA, 25 bp, probe
ggttaagtttagctgacccttccag

SEQ ID NO: 27453 - DNA, 25 bp, probe
ctggttaagtttagctgacccttcc

SEQ ID NO: 27454 - DNA, 25 bp, probe
cttagtgaggagccagatagtgcct

SEQ ID NO: 27455 - DNA, 25 bp, probe
ttaagtttagctgacccttccaggt

SEQ ID NO: 27456 - DNA, 25 bp, probe
tggttaagtttagctgacccttcca

SEQ ID NO: 27457 - DNA, 25 bp, probe
tgtcttcattgggcatgatttctgg

SEQ ID NO: 27458 - DNA, 25 bp, probe
gctggttaagtttagctgacccttc

SEQ ID NO: 27459 - DNA, 25 bp, probe
cttagaacgggcacttagtgaggag

SEQ ID NO: 27460 - DNA, 25 bp, probe
cttcattgggcatgatttctgggag

SEQ ID NO: 27461 - DNA, 25 bp, probe
gtcttcattgggcatgatttctggg

SEQ ID NO: 27462 - DNA, 25 bp, probe
tcttcattgggcatgatttctggga

SEQ ID NO: 27463 - DNA, 25 bp, probe
cacttagtgaggagccagatagtgc

SEQ ID NO: 27464 - DNA, 25 bp, probe
gcacttagtgaggagccagatagtg

SEQ ID NO: 27465 - DNA, 25 bp, probe
agctggttaagtttagctgaccctt

SEQ ID NO: 27466 - DNA, 25 bp, probe
taagtttagctgacccttccaggtc

SEQ ID NO: 27467 - DNA, 25 bp, probe
ggatgatgattataccaggactatg

SEQ ID NO: 27468 - DNA, 25 bp, probe
caaaggtgacaacagaatgagattt

SEQ ID NO: 27469 - DNA, 25 bp, probe
aactagattccagagatggtcactt

SEQ ID NO: 27470 - DNA, 25 bp, probe
gtgctactataactcaggaggaaag

SEQ ID NO: 27471 - DNA, 25 bp, probe
actagattccagagatggtcacttg

SEQ ID NO: 27472 - DNA, 25 bp, probe
caactagattccagagatggtcact

SEQ ID NO: 27473 - DNA, 25 bp, probe
ttccaactagattccagagatggtc

SEQ ID NO: 27474 - DNA, 25 bp, probe
cattacactggatgatgattatacc

SEQ ID NO: 27475 - DNA, 25 bp, probe
ctactataactcaggaggaaagcca

SEQ ID NO: 27476 - DNA, 25 bp, probe
tggatgatgattataccaggactat

SEQ ID NO: 27477 - DNA, 25 bp, probe
tactataactcaggaggaaagccac

SEQ ID NO: 27478 - DNA, 25 bp, probe
gatgtttccaactagattccagaga

SEQ ID NO: 27479 - DNA, 25 bp, probe
agatgtttccaactagattccagag

SEQ ID NO: 27480 - DNA, 25 bp, probe
gagatgtttccaactagattccaga

SEQ ID NO: 27481 - DNA, 25 bp, probe
agtgctactataactcaggaggaaa

SEQ ID NO: 27482 - DNA, 25 bp, probe
tgtttccaactagattccagagatg

SEQ ID NO: 27483 - DNA, 25 bp, probe
gatgatgattataccaggactatgg

SEQ ID NO: 27484 - DNA, 25 bp, probe
gaaggtgagacatttggtttcattg

SEQ ID NO: 27485 - DNA, 25 bp, probe
atgtttccaactagattccagagat

SEQ ID NO: 27486 - DNA, 25 bp, probe
tactggaggtcaagatggagacaat

SEQ ID NO: 27487 - DNA, 25 bp, probe
aaggtgagacatttggtttcattga

SEQ ID NO: 27488 - DNA, 25 bp, probe
ctagattccagagatggtcacttgg

SEQ ID NO: 27489 - DNA, 25 bp, probe
cctttccctgagtgctactataact

SEQ ID NO: 27490 - DNA, 25 bp, probe
gcaaaggtgacaacagaatgagatt

SEQ ID NO: 27491 - DNA, 25 bp, probe
atttggtttcattgaagatgtcagg

SEQ ID NO: 27492 - DNA, 25 bp, probe
gtgagacatttggtttcattgaaga

SEQ ID NO: 27493 - DNA, 25 bp, probe
gagacatttggtttcattgaagatg

SEQ ID NO: 27494 - DNA, 25 bp, probe
catttggtttcattgaagatgtcag

SEQ ID NO: 27495 - DNA, 25 bp, probe
ggtgagacatttggtttcattgaag

SEQ ID NO: 27496 - DNA, 25 bp, probe
ccaactagattccagagatggtcac

SEQ ID NO: 27497 - DNA, 25 bp, probe
tccaactagattccagagatggtca

SEQ ID NO: 27498 - DNA, 25 bp, probe
tgagacatttggtttcattgaagat

SEQ ID NO: 27499 - DNA, 25 bp, probe
aggtgagacatttggtttcattgaa

SEQ ID NO: 27500 - DNA, 25 bp, probe
ccaaatagctcaagacacagtagaa

SEQ ID NO: 27501 - DNA, 25 bp, probe
aaggagatgtttccaactagattcc

SEQ ID NO: 27502 - DNA, 25 bp, probe
attacactggatgatgattatacca

SEQ ID NO: 27503 - DNA, 25 bp, probe
caaatagctcaagacacagtagaaa

SEQ ID NO: 27504 - DNA, 25 bp, probe
atgattataccaggactatgggtct

SEQ ID NO: 27505 - DNA, 25 bp, probe
gaaggagatgtttccaactagattc

SEQ ID NO: 27506 - DNA, 25 bp, probe
tgattataccaggactatgggtctt

SEQ ID NO: 27507 - DNA, 25 bp, probe
gatgattataccaggactatgggtc

SEQ ID NO: 27508 - DNA, 25 bp, probe
tgatgattataccaggactatgggt

SEQ ID NO: 27509 - DNA, 25 bp, probe
attataccaggactatgggtctttg

SEQ ID NO: 27510 - DNA, 25 bp, probe
ggagatgtttccaactagattccag

SEQ ID NO: 27511 - DNA, 25 bp, probe
cagcaccaggctagtaatacttatt

SEQ ID NO: 27512 - DNA, 25 bp, probe
gcaccaggctagtaatacttatttc

SEQ ID NO: 27513 - DNA, 25 bp, probe
tatctaggaccttgtctgtggcaat

SEQ ID NO: 27514 - DNA, 25 bp, probe
atatctaggaccttgtctgtggcaa

SEQ ID NO: 27515 - DNA, 25 bp, probe
tatttcagttccattacggaccaat

SEQ ID NO: 27516 - DNA, 25 bp, probe
acagagacctggtgtccatatctag

SEQ ID NO: 27517 - DNA, 25 bp, probe
ttatttcagttccattacggaccaa

SEQ ID NO: 27518 - DNA, 25 bp, probe
cttatttcagttccattacggacca

SEQ ID NO: 27519 - DNA, 25 bp, probe
acttatttcagttccattacggacc

SEQ ID NO: 27520 - DNA, 25 bp, probe
cacagagacctggtgtccatatcta

SEQ ID NO: 27521 - DNA, 25 bp, probe
caccaggctagtaatacttatttca

SEQ ID NO: 27522 - DNA, 25 bp, probe
tccatatctaggaccttgtctgtgg

SEQ ID NO: 27523 - DNA, 25 bp, probe
gcagcaccaggctagtaatacttat

SEQ ID NO: 27524 - DNA, 25 bp, probe
tacttatttcagttccattacggac

SEQ ID NO: 27525 - DNA, 25 bp, probe
ccaggctagtaatacttatttcagt

SEQ ID NO: 27526 - DNA, 25 bp, probe
accaggctagtaatacttatttcag

SEQ ID NO: 27527 - DNA, 25 bp, probe
cagagacctggtgtccatatctagg

SEQ ID NO: 27528 - DNA, 25 bp, probe
catatctaggaccttgtctgtggca

SEQ ID NO: 27529 - DNA, 25 bp, probe
agagacctggtgtccatatctagga

SEQ ID NO: 27530 - DNA, 25 bp, probe
aatacttatttcagttccattacgg

SEQ ID NO: 27531 - DNA, 25 bp, probe
agcaccaggctagtaatacttattt

SEQ ID NO: 27532 - DNA, 25 bp, probe
atacttatttcagttccattacgga

SEQ ID NO: 27533 - DNA, 25 bp, probe
atttcagttccattacggaccaatg

SEQ ID NO: 27534 - DNA, 25 bp, probe
gagtagggaaggagatgctgtagtc

SEQ ID NO: 27535 - DNA, 25 bp, probe
cttgtccatagtttgagggcagaag

SEQ ID NO: 27536 - DNA, 25 bp, probe
cttgtctgtggcaatcaggagattc

SEQ ID NO: 27537 - DNA, 25 bp, probe
ggctagtaatacttatttcagttcc

SEQ ID NO: 27538 - DNA, 25 bp, probe
atctgtgttcccaaagtccatgatg

SEQ ID NO: 27539 - DNA, 25 bp, probe
catctgtgttcccaaagtccatgat

SEQ ID NO: 27540 - DNA, 25 bp, probe
atctaggaccttgtctgtggcaatc

SEQ ID NO: 27541 - DNA, 25 bp, probe
ttgtctgtggcaatcaggagattct

SEQ ID NO: 27542 - DNA, 25 bp, probe
agtagggaaggagatgctgtagtca

SEQ ID NO: 27543 - DNA, 25 bp, probe
ccatatctaggaccttgtctgtggc

SEQ ID NO: 27544 - DNA, 25 bp, probe
gctagtaatacttatttcagttcca

SEQ ID NO: 27545 - DNA, 25 bp, probe
caggctagtaatacttatttcagtt

SEQ ID NO: 27546 - DNA, 25 bp, probe
gtagggaaggagatgctgtagtcag

SEQ ID NO: 27547 - DNA, 25 bp, probe
gaagagactgtgatcccagaagaca

SEQ ID NO: 27548 - DNA, 25 bp, probe
aggctagtaatacttatttcagttc

SEQ ID NO: 27549 - DNA, 25 bp, probe
tctgtgttcccaaagtccatgatga

SEQ ID NO: 27550 - DNA, 25 bp, probe
cgcagcaccaggctagtaatactta

SEQ ID NO: 27551 - DNA, 25 bp, probe
tgtctgtggcaatcaggagattctg

SEQ ID NO: 27552 - DNA, 25 bp, probe
ttgtccatagtttgagggcagaagg

SEQ ID NO: 27553 - DNA, 25 bp, probe
aaccatctgtgttcccaaagtccat

SEQ ID NO: 27554 - DNA, 25 bp, probe
ctaggaccttgtctgtggcaatcag

SEQ ID NO: 27555 - DNA, 25 bp, probe
ctacatcatccttctccatcctgaa

SEQ ID NO: 27556 - DNA, 25 bp, probe
aatgctacatcatccttctccatcc

SEQ ID NO: 27557 - DNA, 25 bp, probe
atgctacatcatccttctccatcct

SEQ ID NO: 27558 - DNA, 25 bp, probe
tttccaaatgctacatcatccttct

SEQ ID NO: 27559 - DNA, 25 bp, probe
catatcactctcagcatgttgtctg

SEQ ID NO: 27560 - DNA, 25 bp, probe
aaatgctacatcatccttctccatc

SEQ ID NO: 27561 - DNA, 25 bp, probe
ttccaaatgctacatcatccttctc

SEQ ID NO: 27562 - DNA, 25 bp, probe
caaatgctacatcatccttctccat

SEQ ID NO: 27563 - DNA, 25 bp, probe
aagcatatcactctcagcatgttgt

SEQ ID NO: 27564 - DNA, 25 bp, probe
caatgaagcaaagcatatcactctc

SEQ ID NO: 27565 - DNA, 25 bp, probe
aatgaagcaaagcatatcactctca

SEQ ID NO: 27566 - DNA, 25 bp, probe
tcaatgaagcaaagcatatcactct

SEQ ID NO: 27567 - DNA, 25 bp, probe
tgactgtaaagtgtgataaaggctc

SEQ ID NO: 27568 - DNA, 25 bp, probe
tacatcatccttctccatcctgaaa

SEQ ID NO: 27569 - DNA, 25 bp, probe
gtgactgtaaagtgtgataaaggct

SEQ ID NO: 27570 - DNA, 25 bp, probe
agtgactgtaaagtgtgataaaggc

SEQ ID NO: 27571 - DNA, 25 bp, probe
atgaagcaaagcatatcactctcag

SEQ ID NO: 27572 - DNA, 25 bp, probe
gactgtaaagtgtgataaaggctcc

SEQ ID NO: 27573 - DNA, 25 bp, probe
ttcaatgaagcaaagcatatcactc

SEQ ID NO: 27574 - DNA, 25 bp, probe
gcatatcactctcagcatgttgtct

SEQ ID NO: 27575 - DNA, 25 bp, probe
agcatatcactctcagcatgttgtc

SEQ ID NO: 27576 - DNA, 25 bp, probe
tgctacatcatccttctccatcctg

SEQ ID NO: 27577 - DNA, 25 bp, probe
ctgtaaagtgtgataaaggctcctt

SEQ ID NO: 27578 - DNA, 25 bp, probe
actgtaaagtgtgataaaggctcct

SEQ ID NO: 27579 - DNA, 25 bp, probe
tgtaaagtgtgataaaggctccttg

SEQ ID NO: 27580 - DNA, 25 bp, probe
gctacatcatccttctccatcctga

SEQ ID NO: 27581 - DNA, 25 bp, probe
tccaaatgctacatcatccttctcc

SEQ ID NO: 27582 - DNA, 25 bp, probe
ctccttggaacttctcttggaactg

SEQ ID NO: 27583 - DNA, 25 bp, probe
aaagcatatcactctcagcatgttg

SEQ ID NO: 27584 - DNA, 25 bp, probe
caaagcatatcactctcagcatgtt

SEQ ID NO: 27585 - DNA, 25 bp, probe
ataaaggctccttggaacttctctt

SEQ ID NO: 27586 - DNA, 25 bp, probe
taaagtgtgataaaggctccttgga

SEQ ID NO: 27587 - DNA, 25 bp, probe
gtaaagtgtgataaaggctccttgg

SEQ ID NO: 27588 - DNA, 25 bp, probe
ccaaatgctacatcatccttctcca

SEQ ID NO: 27589 - DNA, 25 bp, probe
cagtgactgtaaagtgtgataaagg

SEQ ID NO: 27590 - DNA, 25 bp, probe
aagcaaagcatatcactctcagcat

SEQ ID NO: 27591 - DNA, 25 bp, probe
gataaaggctccttggaacttctct

SEQ ID NO: 27592 - DNA, 25 bp, probe
tgataaaggctccttggaacttctc

SEQ ID NO: 27593 - DNA, 25 bp, probe
aaagtgtgataaaggctccttggaa

SEQ ID NO: 27594 - DNA, 25 bp, probe
taaaggctccttggaacttctcttg

SEQ ID NO: 27595 - DNA, 25 bp, probe
ctgggctacttgagtttgctagatc

SEQ ID NO: 27596 - DNA, 25 bp, probe
gtgataaaggctccttggaacttct

SEQ ID NO: 27597 - DNA, 25 bp, probe
cctgaaaagaacacaaaagaccaaa

SEQ ID NO: 27598 - DNA, 25 bp, probe
ctccatcctgaaaagaacacaaaag

SEQ ID NO: 27599 - DNA, 25 bp, probe
gcctgaccatacacttaggaataat

SEQ ID NO: 27600 - DNA, 25 bp, probe
tgaccatacacttaggaataatacc

SEQ ID NO: 27601 - DNA, 25 bp, probe
agcctgaccatacacttaggaataa

SEQ ID NO: 27602 - DNA, 25 bp, probe
tacacttaggaataatacctgcctt

SEQ ID NO: 27603 - DNA, 25 bp, probe
catacacttaggaataatacctgcc

SEQ ID NO: 27604 - DNA, 25 bp, probe
ccatacacttaggaataatacctgc

SEQ ID NO: 27605 - DNA, 25 bp, probe
atacacttaggaataatacctgcct

SEQ ID NO: 27606 - DNA, 25 bp, probe
gagcctgaccatacacttaggaata

SEQ ID NO: 27607 - DNA, 25 bp, probe
accatacacttaggaataatacctg

SEQ ID NO: 27608 - DNA, 25 bp, probe
gttatgacaacagcaactttgagtg

SEQ ID NO: 27609 - DNA, 25 bp, probe
cttctcaaagatcagcagtgtagat

SEQ ID NO: 27610 - DNA, 25 bp, probe
ctgaccatacacttaggaataatac

SEQ ID NO: 27611 - DNA, 25 bp, probe
ttctcaaagatcagcagtgtagatg

SEQ ID NO: 27612 - DNA, 25 bp, probe
gaccatacacttaggaataatacct

SEQ ID NO: 27613 - DNA, 25 bp, probe
cctgaccatacacttaggaataata

SEQ ID NO: 27614 - DNA, 25 bp, probe
tttccacctccttcacatataaccc

SEQ ID NO: 27615 - DNA, 25 bp, probe
acacttaggaataatacctgccttt

SEQ ID NO: 27616 - DNA, 25 bp, probe
tgagcctgaccatacacttaggaat

SEQ ID NO: 27617 - DNA, 25 bp, probe
ctcaaagatcagcagtgtagatgac

SEQ ID NO: 27618 - DNA, 25 bp, probe
tctcaaagatcagcagtgtagatga

SEQ ID NO: 27619 - DNA, 25 bp, probe
agatcagcagtgtagatgacagcat

SEQ ID NO: 27620 - DNA, 25 bp, probe
ttatgacaacagcaactttgagtgg

SEQ ID NO: 27621 - DNA, 25 bp, probe
ttgagcctgaccatacacttaggaa

SEQ ID NO: 27622 - DNA, 25 bp, probe
gttactttaactggacctgagtagg

SEQ ID NO: 27623 - DNA, 25 bp, probe
caaagatcagcagtgtagatgacag

SEQ ID NO: 27624 - DNA, 25 bp, probe
ccttctcaaagatcagcagtgtaga

SEQ ID NO: 27625 - DNA, 25 bp, probe
ataatacctgcctttaaggacttcc

SEQ ID NO: 27626 - DNA, 25 bp, probe
ggaataatacctgcctttaaggact

SEQ ID NO: 27627 - DNA, 25 bp, probe
aggaataatacctgcctttaaggac

SEQ ID NO: 27628 - DNA, 25 bp, probe
tcaaagatcagcagtgtagatgaca

SEQ ID NO: 27629 - DNA, 25 bp, probe
cacttaggaataatacctgccttta

SEQ ID NO: 27630 - DNA, 25 bp, probe
taatacctgcctttaaggacttcct

SEQ ID NO: 27631 - DNA, 25 bp, probe
cttgagcctgaccatacacttagga

SEQ ID NO: 27632 - DNA, 25 bp, probe
taggaataatacctgcctttaagga

SEQ ID NO: 27633 - DNA, 25 bp, probe
ttactttaactggacctgagtaggc

SEQ ID NO: 27634 - DNA, 25 bp, probe
aataatacctgcctttaaggacttc

SEQ ID NO: 27635 - DNA, 25 bp, probe
gaataatacctgcctttaaggactt

SEQ ID NO: 27636 - DNA, 25 bp, probe
tcattgtctgtgactgctaccattt

SEQ ID NO: 27637 - DNA, 25 bp, probe
gagaacaatgtgaatgggaggatgt

SEQ ID NO: 27638 - DNA, 25 bp, probe
aagatcagcagtgtagatgacagca

SEQ ID NO: 27639 - DNA, 25 bp, probe
ttttccacctccttcacatataacc

SEQ ID NO: 27640 - DNA, 25 bp, probe
cttttccacctccttcacatataac

SEQ ID NO: 27641 - DNA, 25 bp, probe
tcttttccacctccttcacatataa

SEQ ID NO: 27642 - DNA, 25 bp, probe
ggagaacaatgtgaatgggaggatg

SEQ ID NO: 27643 - DNA, 25 bp, probe
attgtcaggaaggtgaggtcataat

SEQ ID NO: 27644 - DNA, 25 bp, probe
tgttcagtgagtgtaaggcatagag

SEQ ID NO: 27645 - DNA, 25 bp, probe
ttgtcaggaaggtgaggtcataatt

SEQ ID NO: 27646 - DNA, 25 bp, probe
caggtaaccatcactgaagacatac

SEQ ID NO: 27647 - DNA, 25 bp, probe
gtgttcagtgagtgtaaggcataga

SEQ ID NO: 27648 - DNA, 25 bp, probe
aggtaaccatcactgaagacatacg

SEQ ID NO: 27649 - DNA, 25 bp, probe
cattgtcaggaaggtgaggtcataa

SEQ ID NO: 27650 - DNA, 25 bp, probe
caggaaggtgaggtcataatttatc

SEQ ID NO: 27651 - DNA, 25 bp, probe
ggtaaccatcactgaagacatacgg

SEQ ID NO: 27652 - DNA, 25 bp, probe
gttcagtgagtgtaaggcatagagc

SEQ ID NO: 27653 - DNA, 25 bp, probe
ggtgttcagtgagtgtaaggcatag

SEQ ID NO: 27654 - DNA, 25 bp, probe
gtcaggaaggtgaggtcataattta

SEQ ID NO: 27655 - DNA, 25 bp, probe
tcattgtcaggaaggtgaggtcata

SEQ ID NO: 27656 - DNA, 25 bp, probe
aaggtgaggtcataatttatcaggt

SEQ ID NO: 27657 - DNA, 25 bp, probe
aggaaggtgaggtcataatttatca

SEQ ID NO: 27658 - DNA, 25 bp, probe
tcaggaaggtgaggtcataatttat

SEQ ID NO: 27659 - DNA, 25 bp, probe
gaaggtgaggtcataatttatcagg

SEQ ID NO: 27660 - DNA, 25 bp, probe
ggaaggtgaggtcataatttatcag

SEQ ID NO: 27661 - DNA, 25 bp, probe
gtgccacagtagttaaagtacataa

SEQ ID NO: 27662 - DNA, 25 bp, probe
aggtgaggtcataatttatcaggta

SEQ ID NO: 27663 - DNA, 25 bp, probe
ttcagtgagtgtaaggcatagagca

SEQ ID NO: 27664 - DNA, 25 bp, probe
gtaaccatcactgaagacatacggc

SEQ ID NO: 27665 - DNA, 25 bp, probe
taaccatcactgaagacatacggct

SEQ ID NO: 27666 - DNA, 25 bp, probe
tgtcaggaaggtgaggtcataattt

SEQ ID NO: 27667 - DNA, 25 bp, probe
atgtcacttgtgccacagtagttaa

SEQ ID NO: 27668 - DNA, 25 bp, probe
tgccacagtagttaaagtacataaa

SEQ ID NO: 27669 - DNA, 25 bp, probe
ggtgaggtcataatttatcaggtaa

SEQ ID NO: 27670 - DNA, 25 bp, probe
ttcattgtcaggaaggtgaggtcat

SEQ ID NO: 27671 - DNA, 25 bp, probe
gccacagtagttaaagtacataaag

SEQ ID NO: 27672 - DNA, 25 bp, probe
tgtgccacagtagttaaagtacata

SEQ ID NO: 27673 - DNA, 25 bp, probe
ttgtgccacagtagttaaagtacat

SEQ ID NO: 27674 - DNA, 25 bp, probe
cttgtgccacagtagttaaagtaca

SEQ ID NO: 27675 - DNA, 25 bp, probe
catgtcacttgtgccacagtagtta

SEQ ID NO: 27676 - DNA, 25 bp, probe
gtgaggtcataatttatcaggtaac

SEQ ID NO: 27677 - DNA, 25 bp, probe
tcttggtagcctggtcttcattgtc

SEQ ID NO: 27678 - DNA, 25 bp, probe
gaggtcataatttatcaggtaacca

SEQ ID NO: 27679 - DNA, 25 bp, probe
tgaggtcataatttatcaggtaacc

SEQ ID NO: 27680 - DNA, 25 bp, probe
ttatcaggtaaccatcactgaagac

SEQ ID NO: 27681 - DNA, 25 bp, probe
aaccatcactgaagacatacggctt

SEQ ID NO: 27682 - DNA, 25 bp, probe
ttctcatcaccagcaaaatctaagt

SEQ ID NO: 27683 - DNA, 25 bp, probe
tcaggtaaccatcactgaagacata

SEQ ID NO: 27684 - DNA, 25 bp, probe
tatcaggtaaccatcactgaagaca

SEQ ID NO: 27685 - DNA, 25 bp, probe
tctcatcaccagcaaaatctaagtc

SEQ ID NO: 27686 - DNA, 25 bp, probe
cttggtagcctggtcttcattgtca

SEQ ID NO: 27687 - DNA, 25 bp, probe
gccaacagtagtaatgatgaatacg

SEQ ID NO: 27688 - DNA, 25 bp, probe
ggaagccaacagtagtaatgatgaa

SEQ ID NO: 27689 - DNA, 25 bp, probe
gaagccaacagtagtaatgatgaat

SEQ ID NO: 27690 - DNA, 25 bp, probe
agccaacagtagtaatgatgaatac

SEQ ID NO: 27691 - DNA, 25 bp, probe
atcttctcctggctcttgacaataa

SEQ ID NO: 27692 - DNA, 25 bp, probe
aagccaacagtagtaatgatgaata

SEQ ID NO: 27693 - DNA, 25 bp, probe
gatcttctcctggctcttgacaata

SEQ ID NO: 27694 - DNA, 25 bp, probe
acagtagtaatgatgaatacgtgga

SEQ ID NO: 27695 - DNA, 25 bp, probe
gacaccaaagatgaagaggaagtag

SEQ ID NO: 27696 - DNA, 25 bp, probe
cagcagcatcatcttcttgaagtac

SEQ ID NO: 27697 - DNA, 25 bp, probe
aacagtagtaatgatgaatacgtgg

SEQ ID NO: 27698 - DNA, 25 bp, probe
ccaacagtagtaatgatgaatacgt

SEQ ID NO: 27699 - DNA, 25 bp, probe
cagtagtaatgatgaatacgtggaa

SEQ ID NO: 27700 - DNA, 25 bp, probe
cttgacaataaagaggaccgtttct

SEQ ID NO: 27701 - DNA, 25 bp, probe
gtttgataattcatccgtggtttca

SEQ ID NO: 27702 - DNA, 25 bp, probe
ttgacaataaagaggaccgtttctg

SEQ ID NO: 27703 - DNA, 25 bp, probe
tcttctcctggctcttgacaataaa

SEQ ID NO: 27704 - DNA, 25 bp, probe
accaaagatgaagaggaagtaggac

SEQ ID NO: 27705 - DNA, 25 bp, probe
caccaaagatgaagaggaagtagga

SEQ ID NO: 27706 - DNA, 25 bp, probe
cttctcctggctcttgacaataaag

SEQ ID NO: 27707 - DNA, 25 bp, probe
cgtttgataattcatccgtggtttc

SEQ ID NO: 27708 - DNA, 25 bp, probe
acaccaaagatgaagaggaagtagg

SEQ ID NO: 27709 - DNA, 25 bp, probe
gagggaagccaacagtagtaatgat

SEQ ID NO: 27710 - DNA, 25 bp, probe
tgataattcatccgtggtttcaagg

SEQ ID NO: 27711 - DNA, 25 bp, probe
ccaaagatgaagaggaagtaggact

SEQ ID NO: 27712 - DNA, 25 bp, probe
caacagtagtaatgatgaatacgtg

SEQ ID NO: 27713 - DNA, 25 bp, probe
gataattcatccgtggtttcaaggg

SEQ ID NO: 27714 - DNA, 25 bp, probe
tgaagaggaagtaggacttgtagta

SEQ ID NO: 27715 - DNA, 25 bp, probe
gatgaagaggaagtaggacttgtag

SEQ ID NO: 27716 - DNA, 25 bp, probe
agatgaagaggaagtaggacttgta

SEQ ID NO: 27717 - DNA, 25 bp, probe
gacaataaagaggaccgtttctgtt

SEQ ID NO: 27718 - DNA, 25 bp, probe
atgaagaggaagtaggacttgtagt

SEQ ID NO: 27719 - DNA, 25 bp, probe
gtacttcatggtgttgttcttgacc

SEQ ID NO: 27720 - DNA, 25 bp, probe
taggacttgtagtagagctgctgat

SEQ ID NO: 27721 - DNA, 25 bp, probe
gaagaggaagtaggacttgtagtag

SEQ ID NO: 27722 - DNA, 25 bp, probe
gggaagccaacagtagtaatgatga

SEQ ID NO: 27723 - DNA, 25 bp, probe
agggaagccaacagtagtaatgatg

SEQ ID NO: 27724 - DNA, 25 bp, probe
cgacaccaaagatgaagaggaagta

SEQ ID NO: 27725 - DNA, 25 bp, probe
aagatgaagaggaagtaggacttgt

SEQ ID NO: 27726 - DNA, 25 bp, probe
acaataaagaggaccgtttctgttg

SEQ ID NO: 27727 - DNA, 25 bp, probe
ccgtttgataattcatccgtggttt

SEQ ID NO: 27728 - DNA, 25 bp, probe
tgacaataaagaggaccgtttctgt

SEQ ID NO: 27729 - DNA, 25 bp, probe
agtacttcatggtgttgttcttgac

SEQ ID NO: 27730 - DNA, 25 bp, probe
gcagcagcatcatcttcttgaagta

SEQ ID NO: 27731 - DNA, 25 bp, probe
aggtctcatggaggaggtagtagtc

SEQ ID NO: 27732 - DNA, 25 bp, probe
caggtctcatggaggaggtagtagt

SEQ ID NO: 27733 - DNA, 25 bp, probe
ggacagcatgaagaggttgactttg

SEQ ID NO: 27734 - DNA, 25 bp, probe
gtggacagcatgaagaggttgactt

SEQ ID NO: 27735 - DNA, 25 bp, probe
ggtctcatggaggaggtagtagtcc

SEQ ID NO: 27736 - DNA, 25 bp, probe
ccaggtctcatggaggaggtagtag

SEQ ID NO: 27737 - DNA, 25 bp, probe
tggacagcatgaagaggttgacttt

SEQ ID NO: 27738 - DNA, 25 bp, probe
gaagatgaagagggccaaactgttc

SEQ ID NO: 27739 - DNA, 25 bp, probe
agaagatgaagagggccaaactgtt

SEQ ID NO: 27740 - DNA, 25 bp, probe
tctcatggaggaggtagtagtccac

SEQ ID NO: 27741 - DNA, 25 bp, probe
gtctcatggaggaggtagtagtcca

SEQ ID NO: 27742 - DNA, 25 bp, probe
gacagcatgaagaggttgactttgc

SEQ ID NO: 27743 - DNA, 25 bp, probe
cagaagatgaagagggccaaactgt

SEQ ID NO: 27744 - DNA, 25 bp, probe
aagatgaagagggccaaactgttcc

SEQ ID NO: 27745 - DNA, 25 bp, probe
gatgcagaagatgaagagggccaaa

SEQ ID NO: 27746 - DNA, 25 bp, probe
cagcatgaagaggttgactttgcag

SEQ ID NO: 27747 - DNA, 25 bp, probe
tgctaatgaatgtataggagaccac

SEQ ID NO: 27748 - DNA, 25 bp, probe
aatgcttgcttgctaatgaatgtat

SEQ ID NO: 27749 - DNA, 25 bp, probe
tgcttgcttgctaatgaatgtatag

SEQ ID NO: 27750 - DNA, 25 bp, probe
gagtaatgcttgcttgctaatgaat

SEQ ID NO: 27751 - DNA, 25 bp, probe
gcagatgatgagataatgaggtagt

SEQ ID NO: 27752 - DNA, 25 bp, probe
cagcagatgatgagataatgaggta

SEQ ID NO: 27753 - DNA, 25 bp, probe
tattctgagtaatgcttgcttgcta

SEQ ID NO: 27754 - DNA, 25 bp, probe
tgcttgctaatgaatgtataggaga

SEQ ID NO: 27755 - DNA, 25 bp, probe
gcttgcttgctaatgaatgtatagg

SEQ ID NO: 27756 - DNA, 25 bp, probe
agtaatgcttgcttgctaatgaatg

SEQ ID NO: 27757 - DNA, 25 bp, probe
agcagatgatgagataatgaggtag

SEQ ID NO: 27758 - DNA, 25 bp, probe
gcttgctaatgaatgtataggagac

SEQ ID NO: 27759 - DNA, 25 bp, probe
taatgcttgcttgctaatgaatgta

SEQ ID NO: 27760 - DNA, 25 bp, probe
ttgctaatgaatgtataggagacca

SEQ ID NO: 27761 - DNA, 25 bp, probe
gtaatgcttgcttgctaatgaatgt

SEQ ID NO: 27762 - DNA, 25 bp, probe
agatgatgagataatgaggtagtgg

SEQ ID NO: 27763 - DNA, 25 bp, probe
atgcttgcttgctaatgaatgtata

SEQ ID NO: 27764 - DNA, 25 bp, probe
aggcaacagcattaagtgataagaa

SEQ ID NO: 27765 - DNA, 25 bp, probe
ttgcttgctaatgaatgtataggag

SEQ ID NO: 27766 - DNA, 25 bp, probe
cttgcttgctaatgaatgtatagga

SEQ ID NO: 27767 - DNA, 25 bp, probe
ttctgagtaatgcttgcttgctaat

SEQ ID NO: 27768 - DNA, 25 bp, probe
attctgagtaatgcttgcttgctaa

SEQ ID NO: 27769 - DNA, 25 bp, probe
gtctggcaagatagatggtgtatta

SEQ ID NO: 27770 - DNA, 25 bp, probe
cttgctaatgaatgtataggagacc

SEQ ID NO: 27771 - DNA, 25 bp, probe
gaggcaacagcattaagtgataaga

SEQ ID NO: 27772 - DNA, 25 bp, probe
tgagtaatgcttgcttgctaatgaa

SEQ ID NO: 27773 - DNA, 25 bp, probe
ctattctgagtaatgcttgcttgct

SEQ ID NO: 27774 - DNA, 25 bp, probe
gcttacctaactctcagactattct

SEQ ID NO: 27775 - DNA, 25 bp, probe
tctggcaagatagatggtgtattat

SEQ ID NO: 27776 - DNA, 25 bp, probe
gactattctgagtaatgcttgcttg

SEQ ID NO: 27777 - DNA, 25 bp, probe
agactattctgagtaatgcttgctt

SEQ ID NO: 27778 - DNA, 25 bp, probe
ctggcaagatagatggtgtattatt

SEQ ID NO: 27779 - DNA, 25 bp, probe
cagatgatgagataatgaggtagtg

SEQ ID NO: 27780 - DNA, 25 bp, probe
ctgagtaatgcttgcttgctaatga

SEQ ID NO: 27781 - DNA, 25 bp, probe
tctgagtaatgcttgcttgctaatg

SEQ ID NO: 27782 - DNA, 25 bp, probe
tccagcagatgatgagataatgagg

SEQ ID NO: 27783 - DNA, 25 bp, probe
ctccagcagatgatgagataatgag

SEQ ID NO: 27784 - DNA, 25 bp, probe
gctaatgaatgtataggagaccaca

SEQ ID NO: 27785 - DNA, 25 bp, probe
aggagaccacattgtaattgttctt

SEQ ID NO: 27786 - DNA, 25 bp, probe
ccagcagatgatgagataatgaggt

SEQ ID NO: 27787 - DNA, 25 bp, probe
taggagaccacattgtaattgttct

SEQ ID NO: 27788 - DNA, 25 bp, probe
ggaggcaacagcattaagtgataag

SEQ ID NO: 27789 - DNA, 25 bp, probe
ggagaccacattgtaattgttctta

SEQ ID NO: 27790 - DNA, 25 bp, probe
taattgttcttagatgatggagtcc

SEQ ID NO: 27791 - DNA, 25 bp, probe
gttctgctactgacctacttgactt

SEQ ID NO: 27792 - DNA, 25 bp, probe
ctctgttctgctactgacctacttg

SEQ ID NO: 27793 - DNA, 25 bp, probe
tctctgttctgctactgacctactt

SEQ ID NO: 27794 - DNA, 25 bp, probe
ctgttctgctactgacctacttgac

SEQ ID NO: 27795 - DNA, 25 bp, probe
tctgttctgctactgacctacttga

SEQ ID NO: 27796 - DNA, 25 bp, probe
gatgggtgtttacttgttctttgtt

SEQ ID NO: 27797 - DNA, 25 bp, probe
tcccactttattatgaccaaacaga

SEQ ID NO: 27798 - DNA, 25 bp, probe
tgtttacttgttctttgttggcatt

SEQ ID NO: 27799 - DNA, 25 bp, probe
atgggtgtttacttgttctttgttg

SEQ ID NO: 27800 - DNA, 25 bp, probe
ctgatgggtgtttacttgttctttg

SEQ ID NO: 27801 - DNA, 25 bp, probe
gtttacttgttctttgttggcattt

SEQ ID NO: 27802 - DNA, 25 bp, probe
tactgacctacttgactttggagaa

SEQ ID NO: 27803 - DNA, 25 bp, probe
tgttctgctactgacctacttgact

SEQ ID NO: 27804 - DNA, 25 bp, probe
cccactttattatgaccaaacagaa

SEQ ID NO: 27805 - DNA, 25 bp, probe
ttcccactttattatgaccaaacag

SEQ ID NO: 27806 - DNA, 25 bp, probe
gtgtttacttgttctttgttggcat

SEQ ID NO: 27807 - DNA, 25 bp, probe
tgatgggtgtttacttgttctttgt

SEQ ID NO: 27808 - DNA, 25 bp, probe
ctactgacctacttgactttggaga

SEQ ID NO: 27809 - DNA, 25 bp, probe
tttcccactttattatgaccaaaca

SEQ ID NO: 27810 - DNA, 25 bp, probe
tgtttcccactttattatgaccaaa

SEQ ID NO: 27811 - DNA, 25 bp, probe
ttctgctactgacctacttgacttt

SEQ ID NO: 27812 - DNA, 25 bp, probe
tattggaagcaaagggtattctctt

SEQ ID NO: 27813 - DNA, 25 bp, probe
aaacagaagatattggaagcaaagg

SEQ ID NO: 27814 - DNA, 25 bp, probe
atattggaagcaaagggtattctct

SEQ ID NO: 27815 - DNA, 25 bp, probe
agatattggaagcaaagggtattct

SEQ ID NO: 27816 - DNA, 25 bp, probe
agaagatattggaagcaaagggtat

SEQ ID NO: 27817 - DNA, 25 bp, probe
gatattggaagcaaagggtattctc

SEQ ID NO: 27818 - DNA, 25 bp, probe
cagaagatattggaagcaaagggta

SEQ ID NO: 27819 - DNA, 25 bp, probe
atgtttcccactttattatgaccaa

SEQ ID NO: 27820 - DNA, 25 bp, probe
cctgatgggtgtttacttgttcttt

SEQ ID NO: 27821 - DNA, 25 bp, probe
aagtctctgttctgctactgaccta

SEQ ID NO: 27822 - DNA, 25 bp, probe
aagatattggaagcaaagggtattc

SEQ ID NO: 27823 - DNA, 25 bp, probe
gaagatattggaagcaaagggtatt

SEQ ID NO: 27824 - DNA, 25 bp, probe
caaacagaagatattggaagcaaag

SEQ ID NO: 27825 - DNA, 25 bp, probe
attggaagcaaagggtattctcttg

SEQ ID NO: 27826 - DNA, 25 bp, probe
aacagaagatattggaagcaaaggg

SEQ ID NO: 27827 - DNA, 25 bp, probe
agtatcagaagtatgccttgctgtg

SEQ ID NO: 27828 - DNA, 25 bp, probe
cagtatcagaagtatgccttgctgt

SEQ ID NO: 27829 - DNA, 25 bp, probe
tctgctactgacctacttgactttg

SEQ ID NO: 27830 - DNA, 25 bp, probe
tgggtgtttacttgttctttgttgg

SEQ ID NO: 27831 - DNA, 25 bp, probe
ccactttattatgaccaaacagaag

SEQ ID NO: 27832 - DNA, 25 bp, probe
tatgtttcccactttattatgacca

SEQ ID NO: 27833 - DNA, 25 bp, probe
actgacctacttgactttggagaag

SEQ ID NO: 27834 - DNA, 25 bp, probe
gtatgtttcccactttattatgacc

SEQ ID NO: 27835 - DNA, 25 bp, probe
ctacttcatcacctgggtctccttt

SEQ ID NO: 27836 - DNA, 25 bp, probe
cagaatgacgggaacacaggaaatc

SEQ ID NO: 27837 - DNA, 25 bp, probe
tacttcatcacctgggtctcctttg

SEQ ID NO: 27838 - DNA, 25 bp, probe
gaatgacgggaacacaggaaatcag

SEQ ID NO: 27839 - DNA, 25 bp, probe
agaatgacgggaacacaggaaatca

SEQ ID NO: 27840 - DNA, 25 bp, probe
gaacacaggaaatcaggggaaacat

SEQ ID NO: 27841 - DNA, 25 bp, probe
ccagaatgacgggaacacaggaaat

SEQ ID NO: 27842 - DNA, 25 bp, probe
cctacttcatcacctgggtctcctt

SEQ ID NO: 27843 - DNA, 25 bp, probe
aacacaggaaatcaggggaaacatg

SEQ ID NO: 27844 - DNA, 25 bp, probe
aatgacgggaacacaggaaatcagg

SEQ ID NO: 27845 - DNA, 25 bp, probe
caggaaatcaggggaaacatgagtg

SEQ ID NO: 27846 - DNA, 25 bp, probe
cacaggaaatcaggggaaacatgag

SEQ ID NO: 27847 - DNA, 25 bp, probe
aggaaatcaggggaaacatgagtga

SEQ ID NO: 27848 - DNA, 25 bp, probe
cttcatcacctgggtctcctttgtg

SEQ ID NO: 27849 - DNA, 25 bp, probe
gagatcttcgtggagtcagaactgc

SEQ ID NO: 27850 - DNA, 25 bp, probe
acaggaaatcaggggaaacatgagt

SEQ ID NO: 27851 - DNA, 25 bp, probe
acacaggaaatcaggggaaacatga

SEQ ID NO: 27852 - DNA, 25 bp, probe
ggaacacaggaaatcaggggaaaca

SEQ ID NO: 27853 - DNA, 25 bp, probe
cgagatcttcgtggagtcagaactg

SEQ ID NO: 27854 - DNA, 25 bp, probe
gtgaatcaatgatggtgtgaatgac

SEQ ID NO: 27855 - DNA, 25 bp, probe
tcatggagtcctcatacaatctact

SEQ ID NO: 27856 - DNA, 25 bp, probe
catggagtcctcatacaatctactt

SEQ ID NO: 27857 - DNA, 25 bp, probe
ctcatggagtcctcatacaatctac

SEQ ID NO: 27858 - DNA, 25 bp, probe
ctggtgaatcaatgatggtgtgaat

SEQ ID NO: 27859 - DNA, 25 bp, probe
cctcatggagtcctcatacaatcta

SEQ ID NO: 27860 - DNA, 25 bp, probe
ggtgaatcaatgatggtgtgaatga

SEQ ID NO: 27861 - DNA, 25 bp, probe
tggtgaatcaatgatggtgtgaatg

SEQ ID NO: 27862 - DNA, 25 bp, probe
tgaatcaatgatggtgtgaatgacc

SEQ ID NO: 27863 - DNA, 25 bp, probe
aatgatggtgtgaatgaccgagtat

SEQ ID NO: 27864 - DNA, 25 bp, probe
gacctcatggagtcctcatacaatc

SEQ ID NO: 27865 - DNA, 25 bp, probe
acctcatggagtcctcatacaatct

SEQ ID NO: 27866 - DNA, 25 bp, probe
atggagtcctcatacaatctacttt

SEQ ID NO: 27867 - DNA, 25 bp, probe
tggagtcctcatacaatctacttta

SEQ ID NO: 27868 - DNA, 25 bp, probe
gaatcaatgatggtgtgaatgaccg

SEQ ID NO: 27869 - DNA, 25 bp, probe
ggagtcctcatacaatctactttac

SEQ ID NO: 27870 - DNA, 25 bp, probe
tgacctcatggagtcctcatacaat

SEQ ID NO: 27871 - DNA, 25 bp, probe
atgatggtgtgaatgaccgagtatg

SEQ ID NO: 27872 - DNA, 25 bp, probe
cctggtgaatcaatgatggtgtgaa

SEQ ID NO: 27873 - DNA, 25 bp, probe
caatgatggtgtgaatgaccgagta

SEQ ID NO: 27874 - DNA, 25 bp, probe
aatcaatgatggtgtgaatgaccga

SEQ ID NO: 27875 - DNA, 25 bp, probe
agtcctcatacaatctactttacag

SEQ ID NO: 27876 - DNA, 25 bp, probe
gagtcctcatacaatctactttaca

SEQ ID NO: 27877 - DNA, 25 bp, probe
atcaatgatggtgtgaatgaccgag

SEQ ID NO: 27878 - DNA, 25 bp, probe
cataggaagtagtagaagcggcagg

SEQ ID NO: 27879 - DNA, 25 bp, probe
ccataggaagtagtagaagcggcag

SEQ ID NO: 27880 - DNA, 25 bp, probe
tttgagtaattatcctatgccaagg

SEQ ID NO: 27881 - DNA, 25 bp, probe
aaggacttgaagtggatgacctcat

SEQ ID NO: 27882 - DNA, 25 bp, probe
taggagtcctcatcatcaagctctg

SEQ ID NO: 27883 - DNA, 25 bp, probe
gtaggagtcctcatcatcaagctct

SEQ ID NO: 27884 - DNA, 25 bp, probe
atgacctcatggagtcctcatacaa

SEQ ID NO: 27885 - DNA, 25 bp, probe
ctatgccaaggacttgaagtggatg

SEQ ID NO: 27886 - DNA, 25 bp, probe
gacttgaagtggatgacctcatgga

SEQ ID NO: 27887 - DNA, 25 bp, probe
ccattgtcatcaccttttgagtaat

SEQ ID NO: 27888 - DNA, 25 bp, probe
cttgaagtggatgacctcatggagt

SEQ ID NO: 27889 - DNA, 25 bp, probe
acttgaagtggatgacctcatggag

SEQ ID NO: 27890 - DNA, 25 bp, probe
aattatcctatgccaaggacttgaa

SEQ ID NO: 27891 - DNA, 25 bp, probe
tgagtaattatcctatgccaaggac

SEQ ID NO: 27892 - DNA, 25 bp, probe
attatcctatgccaaggacttgaag

SEQ ID NO: 27893 - DNA, 25 bp, probe
gagtaattatcctatgccaaggact

SEQ ID NO: 27894 - DNA, 25 bp, probe
gatgacctcatggagtcctcataca

SEQ ID NO: 27895 - DNA, 25 bp, probe
gtaattatcctatgccaaggacttg

SEQ ID NO: 27896 - DNA, 25 bp, probe
taattatcctatgccaaggacttga

SEQ ID NO: 27897 - DNA, 25 bp, probe
agtaattatcctatgccaaggactt

SEQ ID NO: 27898 - DNA, 25 bp, probe
ttaagaacagcagtattcctaccag

SEQ ID NO: 27899 - DNA, 25 bp, probe
acaagttgaggaaccataagaagaa

SEQ ID NO: 27900 - DNA, 25 bp, probe
aagacaagttgaggaaccataagaa

SEQ ID NO: 27901 - DNA, 25 bp, probe
agttgaggaaccataagaagaagaa

SEQ ID NO: 27902 - DNA, 25 bp, probe
aagttgaggaaccataagaagaaga

SEQ ID NO: 27903 - DNA, 25 bp, probe
attaagaacagcagtattcctacca

SEQ ID NO: 27904 - DNA, 25 bp, probe
caagttgaggaaccataagaagaag

SEQ ID NO: 27905 - DNA, 25 bp, probe
gacaagttgaggaaccataagaaga

SEQ ID NO: 27906 - DNA, 25 bp, probe
agacaagttgaggaaccataagaag

SEQ ID NO: 27907 - DNA, 25 bp, probe
acattgactacaagactctgaactt

SEQ ID NO: 27908 - DNA, 25 bp, probe
gcatagacattgactacaagactct

SEQ ID NO: 27909 - DNA, 25 bp, probe
gacattgactacaagactctgaact

SEQ ID NO: 27910 - DNA, 25 bp, probe
agacattgactacaagactctgaac

SEQ ID NO: 27911 - DNA, 25 bp, probe
gcaattaagaacagcagtattccta

SEQ ID NO: 27912 - DNA, 25 bp, probe
ggcatagacattgactacaagactc

SEQ ID NO: 27913 - DNA, 25 bp, probe
tagacattgactacaagactctgaa

SEQ ID NO: 27914 - DNA, 25 bp, probe
catagacattgactacaagactctg

SEQ ID NO: 27915 - DNA, 25 bp, probe
aattaagaacagcagtattcctacc

SEQ ID NO: 27916 - DNA, 25 bp, probe
atagacattgactacaagactctga

SEQ ID NO: 27917 - DNA, 25 bp, probe
tgaataagagagtcaccatgtatgc

SEQ ID NO: 27918 - DNA, 25 bp, probe
cctgaataagagagtcaccatgtat

SEQ ID NO: 27919 - DNA, 25 bp, probe
caattaagaacagcagtattcctac

SEQ ID NO: 27920 - DNA, 25 bp, probe
ctgaataagagagtcaccatgtatg

SEQ ID NO: 27921 - DNA, 25 bp, probe
atcacggcatagacattgactacaa

SEQ ID NO: 27922 - DNA, 25 bp, probe
taagaacagcagtattcctaccagg

SEQ ID NO: 27923 - DNA, 25 bp, probe
cggcatagacattgactacaagact

SEQ ID NO: 27924 - DNA, 25 bp, probe
agagtcaccatgtatgcaattaaga

SEQ ID NO: 27925 - DNA, 25 bp, probe
agagagtcaccatgtatgcaattaa

SEQ ID NO: 27926 - DNA, 25 bp, probe
aagagagtcaccatgtatgcaatta

SEQ ID NO: 27927 - DNA, 25 bp, probe
taagagagtcaccatgtatgcaatt

SEQ ID NO: 27928 - DNA, 25 bp, probe
aataagagagtcaccatgtatgcaa

SEQ ID NO: 27929 - DNA, 25 bp, probe
gagagtcaccatgtatgcaattaag

SEQ ID NO: 27930 - DNA, 25 bp, probe
ataagagagtcaccatgtatgcaat

SEQ ID NO: 27931 - DNA, 25 bp, probe
agtcaccatgtatgcaattaagaac

SEQ ID NO: 27932 - DNA, 25 bp, probe
gaataagagagtcaccatgtatgca

SEQ ID NO: 27933 - DNA, 25 bp, probe
gagtcaccatgtatgcaattaagaa

SEQ ID NO: 27934 - DNA, 25 bp, probe
aagactctgaacttgctggttgatt

SEQ ID NO: 27935 - DNA, 25 bp, probe
tccctaagtgttgtcagaataagaa

SEQ ID NO: 27936 - DNA, 25 bp, probe
gcctgaataagagagtcaccatgta

SEQ ID NO: 27937 - DNA, 25 bp, probe
ctgaggagaaggagatgatgaaatc

SEQ ID NO: 27938 - DNA, 25 bp, probe
catccctaagtgttgtcagaataag

SEQ ID NO: 27939 - DNA, 25 bp, probe
gcatccctaagtgttgtcagaataa

SEQ ID NO: 27940 - DNA, 25 bp, probe
acggcatagacattgactacaagac

SEQ ID NO: 27941 - DNA, 25 bp, probe
cacggcatagacattgactacaaga

SEQ ID NO: 27942 - DNA, 25 bp, probe
gttatccagagatgtcttccttgta

SEQ ID NO: 27943 - DNA, 25 bp, probe
ttatccagagatgtcttccttgtag

SEQ ID NO: 27944 - DNA, 25 bp, probe
tcgttatccagagatgtcttccttg

SEQ ID NO: 27945 - DNA, 25 bp, probe
gtcgttatccagagatgtcttcctt

SEQ ID NO: 27946 - DNA, 25 bp, probe
tatccagagatgtcttccttgtagg

SEQ ID NO: 27947 - DNA, 25 bp, probe
cgttatccagagatgtcttccttgt

SEQ ID NO: 27948 - DNA, 25 bp, probe
ctggctttattattctttggtccct

SEQ ID NO: 27949 - DNA, 25 bp, probe
ctgtttgttactctgtcgttatcca

SEQ ID NO: 27950 - DNA, 25 bp, probe
ggctttattattctttggtccctca

SEQ ID NO: 27951 - DNA, 25 bp, probe
tggctttattattctttggtccctc

SEQ ID NO: 27952 - DNA, 25 bp, probe
tcctggctttattattctttggtcc

SEQ ID NO: 27953 - DNA, 25 bp, probe
tgtcgttatccagagatgtcttcct

SEQ ID NO: 27954 - DNA, 25 bp, probe
atcctggctttattattctttggtc

SEQ ID NO: 27955 - DNA, 25 bp, probe
ttcaacagtgacatgattatctaca

SEQ ID NO: 27956 - DNA, 25 bp, probe
tcaacagtgacatgattatctacat

SEQ ID NO: 27957 - DNA, 25 bp, probe
gctttattattctttggtccctcaa

SEQ ID NO: 27958 - DNA, 25 bp, probe
acagtgacatgattatctacattgt

SEQ ID NO: 27959 - DNA, 25 bp, probe
cctggctttattattctttggtccc

SEQ ID NO: 27960 - DNA, 25 bp, probe
ctgtcgttatccagagatgtcttcc

SEQ ID NO: 27961 - DNA, 25 bp, probe
gctgtttgttactctgtcgttatcc

SEQ ID NO: 27962 - DNA, 25 bp, probe
ggctgtttgttactctgtcgttatc

SEQ ID NO: 27963 - DNA, 25 bp, probe
aagtgcctacatggtgattctcttg

SEQ ID NO: 27964 - DNA, 25 bp, probe
caagtgcctacatggtgattctctt

SEQ ID NO: 27965 - DNA, 25 bp, probe
aacagtgacatgattatctacattg

SEQ ID NO: 27966 - DNA, 25 bp, probe
caacagtgacatgattatctacatt

SEQ ID NO: 27967 - DNA, 25 bp, probe
tttccagtgtgacccagataattct

SEQ ID NO: 27968 - DNA, 25 bp, probe
tatcctggctttattattctttggt

SEQ ID NO: 27969 - DNA, 25 bp, probe
tgtttgttactctgtcgttatccag

SEQ ID NO: 27970 - DNA, 25 bp, probe
aggctgtttgttactctgtcgttat

SEQ ID NO: 27971 - DNA, 25 bp, probe
caatgaatgtcaccatcagaaggct

SEQ ID NO: 27972 - DNA, 25 bp, probe
aaggctgtttgttactctgtcgtta

SEQ ID NO: 27973 - DNA, 25 bp, probe
ctcaagtgcctacatggtgattctc

SEQ ID NO: 27974 - DNA, 25 bp, probe
ctctcaagtgcctacatggtgattc

SEQ ID NO: 27975 - DNA, 25 bp, probe
aatgaatgtcaccatcagaaggctg

SEQ ID NO: 27976 - DNA, 25 bp, probe
ctacatggtgattctcttgtccagg

SEQ ID NO: 27977 - DNA, 25 bp, probe
cctacatggtgattctcttgtccag

SEQ ID NO: 27978 - DNA, 25 bp, probe
tctttcaacagtgacatgattatct

SEQ ID NO: 27979 - DNA, 25 bp, probe
tcaagtgcctacatggtgattctct

SEQ ID NO: 27980 - DNA, 25 bp, probe
tctcaagtgcctacatggtgattct

SEQ ID NO: 27981 - DNA, 25 bp, probe
atatcctggctttattattctttgg

SEQ ID NO: 27982 - DNA, 25 bp, probe
gtgcctacatggtgattctcttgtc

SEQ ID NO: 27983 - DNA, 25 bp, probe
cagtgacatgattatctacattgta

SEQ ID NO: 27984 - DNA, 25 bp, probe
ctttattattctttggtccctcaat

SEQ ID NO: 27985 - DNA, 25 bp, probe
ttctttcaacagtgacatgattatc

SEQ ID NO: 27986 - DNA, 25 bp, probe
gttaggcgttaccagctcttactct

SEQ ID NO: 27987 - DNA, 25 bp, probe
ctcttactctgggatgtggactctg

SEQ ID NO: 27988 - DNA, 25 bp, probe
gtgaagaccaaagaaggaagtgctg

SEQ ID NO: 27989 - DNA, 25 bp, probe
ttaggcgttaccagctcttactctg

SEQ ID NO: 27990 - DNA, 25 bp, probe
aaagggatgacccatttaaggacag

SEQ ID NO: 27991 - DNA, 25 bp, probe
gaaagggatgacccatttaaggaca

SEQ ID NO: 27992 - DNA, 25 bp, probe
atgacccatttaaggacagcaggag

SEQ ID NO: 27993 - DNA, 25 bp, probe
gatgacccatttaaggacagcagga

SEQ ID NO: 27994 - DNA, 25 bp, probe
ggaaagggatgacccatttaaggac

SEQ ID NO: 27995 - DNA, 25 bp, probe
caggaaagggatgacccatttaagg

SEQ ID NO: 27996 - DNA, 25 bp, probe
gatgaggatacagcctgtgtgactg

SEQ ID NO: 27997 - DNA, 25 bp, probe
cgttaggcgttaccagctcttactc

SEQ ID NO: 27998 - DNA, 25 bp, probe
tcttactctgggatgtggactctgg

SEQ ID NO: 27999 - DNA, 25 bp, probe
aggaaagggatgacccatttaagga

SEQ ID NO: 28000 - DNA, 25 bp, probe
ggacataggagaagggaagaggagg

SEQ ID NO: 28001 - DNA, 25 bp, probe
gggacataggagaagggaagaggag

SEQ ID NO: 28002 - DNA, 25 bp, probe
gctcttactctgggatgtggactct

SEQ ID NO: 28003 - DNA, 25 bp, probe
agggtgaagaccaaagaaggaagtg

SEQ ID NO: 28004 - DNA, 25 bp, probe
cagggtgaagaccaaagaaggaagt

SEQ ID NO: 28005 - DNA, 25 bp, probe
gaactgctcctcagctaaacagatg

SEQ ID NO: 28006 - DNA, 25 bp, probe
gcaggaaagggatgacccatttaag

SEQ ID NO: 28007 - DNA, 25 bp, probe
tgaactgctcctcagctaaacagat

SEQ ID NO: 28008 - DNA, 25 bp, probe
aactgctcctcagctaaacagatgt

SEQ ID NO: 28009 - DNA, 25 bp, probe
ggtgaagaccaaagaaggaagtgct

SEQ ID NO: 28010 - DNA, 25 bp, probe
agctcttactctgggatgtggactc

SEQ ID NO: 28011 - DNA, 25 bp, probe
ctggaacaggatgtctctctgtgac

SEQ ID NO: 28012 - DNA, 25 bp, probe
aagggatgacccatttaaggacagc

SEQ ID NO: 28013 - DNA, 25 bp, probe
gtgaactgctcctcagctaaacaga

SEQ ID NO: 28014 - DNA, 25 bp, probe
agtgaactgctcctcagctaaacag

SEQ ID NO: 28015 - DNA, 25 bp, probe
ctcctcagctaaacagatgtgtgct

SEQ ID NO: 28016 - DNA, 25 bp, probe
ctgctcctcagctaaacagatgtgt

SEQ ID NO: 28017 - DNA, 25 bp, probe
actgctcctcagctaaacagatgtg

SEQ ID NO: 28018 - DNA, 25 bp, probe
ggcaggaaagggatgacccatttaa

SEQ ID NO: 28019 - DNA, 25 bp, probe
tgctcctcagctaaacagatgtgtg

SEQ ID NO: 28020 - DNA, 25 bp, probe
cagtgaactgctcctcagctaaaca

SEQ ID NO: 28021 - DNA, 25 bp, probe
agatgtgtgctgtttgtttgcagac

SEQ ID NO: 28022 - DNA, 25 bp, probe
cagatgtgtgctgtttgtttgcaga

SEQ ID NO: 28023 - DNA, 25 bp, probe
ttagctttgcagggtgaagaccaaa

SEQ ID NO: 28024 - DNA, 25 bp, probe
ttaccagctcttactctgggatgtg

SEQ ID NO: 28025 - DNA, 25 bp, probe
gttaccagctcttactctgggatgt

SEQ ID NO: 28026 - DNA, 25 bp, probe
acagatgtgtgctgtttgtttgcag

SEQ ID NO: 28027 - DNA, 25 bp, probe
cgttaccagctcttactctgggatg

SEQ ID NO: 28028 - DNA, 25 bp, probe
gagggagctcaatatgtcctggaac

SEQ ID NO: 28029 - DNA, 25 bp, probe
gggagctcaatatgtcctggaacag

SEQ ID NO: 28030 - DNA, 25 bp, probe
gaatggttgtatatgctctgaagtg

SEQ ID NO: 28031 - DNA, 25 bp, probe
ggaatggttgtatatgctctgaagt

SEQ ID NO: 28032 - DNA, 25 bp, probe
tggaatggttgtatatgctctgaag

SEQ ID NO: 28033 - DNA, 25 bp, probe
ctggaatggttgtatatgctctgaa

SEQ ID NO: 28034 - DNA, 25 bp, probe
aatggttgtatatgctctgaagtgg

SEQ ID NO: 28035 - DNA, 25 bp, probe
gctggaatggttgtatatgctctga

SEQ ID NO: 28036 - DNA, 25 bp, probe
taaaggttagccatcagaaggattt

SEQ ID NO: 28037 - DNA, 25 bp, probe
gataaaggttagccatcagaaggat

SEQ ID NO: 28038 - DNA, 25 bp, probe
ataaaggttagccatcagaaggatt

SEQ ID NO: 28039 - DNA, 25 bp, probe
agacagagagatgggaggaaataag

SEQ ID NO: 28040 - DNA, 25 bp, probe
gagacagagagatgggaggaaataa

SEQ ID NO: 28041 - DNA, 25 bp, probe
aagtctcacataaagaactcagagg

SEQ ID NO: 28042 - DNA, 25 bp, probe
tctcacataaagaactcagaggttg

SEQ ID NO: 28043 - DNA, 25 bp, probe
gtctcacataaagaactcagaggtt

SEQ ID NO: 28044 - DNA, 25 bp, probe
gcatcaatgataaaggttagccatc

SEQ ID NO: 28045 - DNA, 25 bp, probe
agtctcacataaagaactcagaggt

SEQ ID NO: 28046 - DNA, 25 bp, probe
tgaaagtctcacataaagaactcag

SEQ ID NO: 28047 - DNA, 25 bp, probe
atagagacagagtttcaccatattg

SEQ ID NO: 28048 - DNA, 25 bp, probe
cctctttggttcctgtattgagatg

SEQ ID NO: 28049 - DNA, 25 bp, probe
tcctctttggttcctgtattgagat

SEQ ID NO: 28050 - DNA, 25 bp, probe
ctcacataaagaactcagaggttgg

SEQ ID NO: 28051 - DNA, 25 bp, probe
ttcctctttggttcctgtattgaga

SEQ ID NO: 28052 - DNA, 25 bp, probe
gttcctctttggttcctgtattgag

SEQ ID NO: 28053 - DNA, 25 bp, probe
gaaagtctcacataaagaactcaga

SEQ ID NO: 28054 - DNA, 25 bp, probe
aaagtctcacataaagaactcagag

SEQ ID NO: 28055 - DNA, 25 bp, probe
ctctttggttcctgtattgagatgc

SEQ ID NO: 28056 - DNA, 25 bp, probe
atgaaagtctcacataaagaactca

SEQ ID NO: 28057 - DNA, 25 bp, probe
atggttgtatatgctctgaagtggg

SEQ ID NO: 28058 - DNA, 25 bp, probe
ggttcctctttggttcctgtattga

SEQ ID NO: 28059 - DNA, 25 bp, probe
gacagagagatgggaggaaataagc

SEQ ID NO: 28060 - DNA, 25 bp, probe
tttaatagagacagagtttcaccat

SEQ ID NO: 28061 - DNA, 25 bp, probe
ggagacagagagatgggaggaaata

SEQ ID NO: 28062 - DNA, 25 bp, probe
gtcgagctattattcttacaccctg

SEQ ID NO: 28063 - DNA, 25 bp, probe
tagagacagagtttcaccatattgg

SEQ ID NO: 28064 - DNA, 25 bp, probe
aatagagacagagtttcaccatatt

SEQ ID NO: 28065 - DNA, 25 bp, probe
tctcaaactcctgacctctagtgat

SEQ ID NO: 28066 - DNA, 25 bp, probe
ctcaaactcctgacctctagtgatc

SEQ ID NO: 28067 - DNA, 25 bp, probe
caaactcctgacctctagtgatctg

SEQ ID NO: 28068 - DNA, 25 bp, probe
tcaaactcctgacctctagtgatct

SEQ ID NO: 28069 - DNA, 25 bp, probe
tcacataaagaactcagaggttggc

SEQ ID NO: 28070 - DNA, 25 bp, probe
tgcatcaatgataaaggttagccat

SEQ ID NO: 28071 - DNA, 25 bp, probe
aatgaaagtctcacataaagaactc

SEQ ID NO: 28072 - DNA, 25 bp, probe
ttaatagagacagagtttcaccata

SEQ ID NO: 28073 - DNA, 25 bp, probe
gggttcctctttggttcctgtattg

SEQ ID NO: 28074 - DNA, 25 bp, probe
aagttcctgtcacatcgtcactatc

SEQ ID NO: 28075 - DNA, 25 bp, probe
gttcctgtcacatcgtcactatctc

SEQ ID NO: 28076 - DNA, 25 bp, probe
agttcctgtcacatcgtcactatct

SEQ ID NO: 28077 - DNA, 25 bp, probe
ctcaacccactcatctatgcctatt

SEQ ID NO: 28078 - DNA, 25 bp, probe
gtaagggcagagaagtttcaaagtg

SEQ ID NO: 28079 - DNA, 25 bp, probe
ctccgtactgtgtctgttctcattg

SEQ ID NO: 28080 - DNA, 25 bp, probe
tctccgtactgtgtctgttctcatt

SEQ ID NO: 28081 - DNA, 25 bp, probe
agagtttgatggctaagacggtaag

SEQ ID NO: 28082 - DNA, 25 bp, probe
ttcctgtcacatcgtcactatctcc

SEQ ID NO: 28083 - DNA, 25 bp, probe
aaagttcctgtcacatcgtcactat

SEQ ID NO: 28084 - DNA, 25 bp, probe
tcaacccactcatctatgcctattg

SEQ ID NO: 28085 - DNA, 25 bp, probe
cttctactgcgacatgctcaagatt

SEQ ID NO: 28086 - DNA, 25 bp, probe
cagagtttgatggctaagacggtaa

SEQ ID NO: 28087 - DNA, 25 bp, probe
ctctccgtactgtgtctgttctcat

SEQ ID NO: 28088 - DNA, 25 bp, probe
ttctactgcgacatgctcaagattg

SEQ ID NO: 28089 - DNA, 25 bp, probe
ggtaagggcagagaagtttcaaagt

SEQ ID NO: 28090 - DNA, 25 bp, probe
gaaagttcctgtcacatcgtcacta

SEQ ID NO: 28091 - DNA, 25 bp, probe
tcacctcattcctcctctttctctc

SEQ ID NO: 28092 - DNA, 25 bp, probe
ctcacctcattcctcctctttctct

SEQ ID NO: 28093 - DNA, 25 bp, probe
gagtttgatggctaagacggtaagg

SEQ ID NO: 28094 - DNA, 25 bp, probe
actatctccagctcagagtttgatg

SEQ ID NO: 28095 - DNA, 25 bp, probe
cactatctccagctcagagtttgat

SEQ ID NO: 28096 - DNA, 25 bp, probe
taagacggtaagggcagagaagttt

SEQ ID NO: 28097 - DNA, 25 bp, probe
tccgtactgtgtctgttctcattgg

SEQ ID NO: 28098 - DNA, 25 bp, probe
tcagagtttgatggctaagacggta

SEQ ID NO: 28099 - DNA, 25 bp, probe
cagagaagtttcaaagtgcctttct

SEQ ID NO: 28100 - DNA, 25 bp, probe
gtactgtgtctgttctcattgggag

SEQ ID NO: 28101 - DNA, 25 bp, probe
tcctgtcacatcgtcactatctcca

SEQ ID NO: 28102 - DNA, 25 bp, probe
cctgtcacatcgtcactatctccag

SEQ ID NO: 28103 - DNA, 25 bp, probe
ctaagacggtaagggcagagaagtt

SEQ ID NO: 28104 - DNA, 25 bp, probe
gaagtttcaaagtgcctttctcctc

SEQ ID NO: 28105 - DNA, 25 bp, probe
cggtaagggcagagaagtttcaaag

SEQ ID NO: 28106 - DNA, 25 bp, probe
gtcactatctccagctcagagtttg

SEQ ID NO: 28107 - DNA, 25 bp, probe
caacccactcatctatgcctattgg

SEQ ID NO: 28108 - DNA, 25 bp, probe
tcactatctccagctcagagtttga

SEQ ID NO: 28109 - DNA, 25 bp, probe
gctcaacccactcatctatgcctat

SEQ ID NO: 28110 - DNA, 25 bp, probe
agaagtttcaaagtgcctttctcct

SEQ ID NO: 28111 - DNA, 25 bp, probe
catcgtcactatctccagctcagag

SEQ ID NO: 28112 - DNA, 25 bp, probe
cacctcattcctcctctttctctcg

SEQ ID NO: 28113 - DNA, 25 bp, probe
ctatctccagctcagagtttgatgg

SEQ ID NO: 28114 - DNA, 25 bp, probe
cacatcgtcactatctccagctcag

SEQ ID NO: 28115 - DNA, 25 bp, probe
gtcacatcgtcactatctccagctc

SEQ ID NO: 28116 - DNA, 25 bp, probe
agtttgatggctaagacggtaaggg

SEQ ID NO: 28117 - DNA, 25 bp, probe
tcttctactgcgacatgctcaagat

SEQ ID NO: 28118 - DNA, 25 bp, probe
cattagtaacatcagtcagtcctcc

SEQ ID NO: 28119 - DNA, 25 bp, probe
tcattagtaacatcagtcagtcctc

SEQ ID NO: 28120 - DNA, 25 bp, probe
attagtaacatcagtcagtcctcca

SEQ ID NO: 28121 - DNA, 25 bp, probe
atcattagtaacatcagtcagtcct

SEQ ID NO: 28122 - DNA, 25 bp, probe
atatctccattccagacacagtaga

SEQ ID NO: 28123 - DNA, 25 bp, probe
tatctccattccagacacagtagaa

SEQ ID NO: 28124 - DNA, 25 bp, probe
aatatctccattccagacacagtag

SEQ ID NO: 28125 - DNA, 25 bp, probe
ttaatatctccattccagacacagt

SEQ ID NO: 28126 - DNA, 25 bp, probe
ttagtaacatcagtcagtcctccac

SEQ ID NO: 28127 - DNA, 25 bp, probe
aatcattagtaacatcagtcagtcc

SEQ ID NO: 28128 - DNA, 25 bp, probe
atctccattccagacacagtagaag

SEQ ID NO: 28129 - DNA, 25 bp, probe
taatatctccattccagacacagta

SEQ ID NO: 28130 - DNA, 25 bp, probe
tcaatcattagtaacatcagtcagt

SEQ ID NO: 28131 - DNA, 25 bp, probe
tagtaacatcagtcagtcctccaca

SEQ ID NO: 28132 - DNA, 25 bp, probe
caatcattagtaacatcagtcagtc

SEQ ID NO: 28133 - DNA, 25 bp, probe
gtcaatcattagtaacatcagtcag

SEQ ID NO: 28134 - DNA, 25 bp, probe
tgtgtcaatcattagtaacatcagt

SEQ ID NO: 28135 - DNA, 25 bp, probe
actgtgtcaatcattagtaacatca

SEQ ID NO: 28136 - DNA, 25 bp, probe
cactgtgtcaatcattagtaacatc

SEQ ID NO: 28137 - DNA, 25 bp, probe
tgtcaatcattagtaacatcagtca

SEQ ID NO: 28138 - DNA, 25 bp, probe
gtgtcaatcattagtaacatcagtc

SEQ ID NO: 28139 - DNA, 25 bp, probe
ctgtgtcaatcattagtaacatcag

SEQ ID NO: 28140 - DNA, 25 bp, probe
attaatatctccattccagacacag

SEQ ID NO: 28141 - DNA, 25 bp, probe
aaatacacttggaggttcttgaaat

SEQ ID NO: 28142 - DNA, 25 bp, probe
acactgtgtcaatcattagtaacat

SEQ ID NO: 28143 - DNA, 25 bp, probe
aatacacttggaggttcttgaaatt

SEQ ID NO: 28144 - DNA, 25 bp, probe
taacatcagtcagtcctccacacaa

SEQ ID NO: 28145 - DNA, 25 bp, probe
ccagtaatcctgatggtgatattaa

SEQ ID NO: 28146 - DNA, 25 bp, probe
aaaccctatctctttctacctatga

SEQ ID NO: 28147 - DNA, 25 bp, probe
aaccctatctctttctacctatgag

SEQ ID NO: 28148 - DNA, 25 bp, probe
accctatctctttctacctatgagg

SEQ ID NO: 28149 - DNA, 25 bp, probe
aggaaatccagttgttaaataaagc

SEQ ID NO: 28150 - DNA, 25 bp, probe
cattccagacacagtagaagcacac

SEQ ID NO: 28151 - DNA, 25 bp, probe
catgaaccaaactcagaagattctt

SEQ ID NO: 28152 - DNA, 25 bp, probe
agtaacatcagtcagtcctccacac

SEQ ID NO: 28153 - DNA, 25 bp, probe
ccatgaaccaaactcagaagattct

SEQ ID NO: 28154 - DNA, 25 bp, probe
tagaagcacacaggcagaacagtaa

SEQ ID NO: 28155 - DNA, 25 bp, probe
ccaggaggaaatccagttgttaaat

SEQ ID NO: 28156 - DNA, 25 bp, probe
tctccattccagacacagtagaagc

SEQ ID NO: 28157 - DNA, 25 bp, probe
cttggaggttcttgaaatttgtgat

SEQ ID NO: 28158 - DNA, 25 bp, probe
tacacttggaggttcttgaaatttg

SEQ ID NO: 28159 - DNA, 25 bp, probe
gtaacatcagtcagtcctccacaca

SEQ ID NO: 28160 - DNA, 25 bp, probe
attccagacacagtagaagcacaca

SEQ ID NO: 28161 - DNA, 25 bp, probe
caggaggaaatccagttgttaaata

SEQ ID NO: 28162 - DNA, 25 bp, probe
caccattctcctctctacttctaag

SEQ ID NO: 28163 - DNA, 25 bp, probe
ccaccattctcctctctacttctaa

SEQ ID NO: 28164 - DNA, 25 bp, probe
taaccaccattctcctctctacttc

SEQ ID NO: 28165 - DNA, 25 bp, probe
accattctcctctctacttctaaga

SEQ ID NO: 28166 - DNA, 25 bp, probe
gtaaccaccattctcctctctactt

SEQ ID NO: 28167 - DNA, 25 bp, probe
accaccattctcctctctacttcta

SEQ ID NO: 28168 - DNA, 25 bp, probe
aaccaccattctcctctctacttct

SEQ ID NO: 28169 - DNA, 25 bp, probe
tttcctttgaccaacatctttccat

SEQ ID NO: 28170 - DNA, 25 bp, probe
cacatttattcagagacagagcata

SEQ ID NO: 28171 - DNA, 25 bp, probe
gcacatttattcagagacagagcat

SEQ ID NO: 28172 - DNA, 25 bp, probe
gtaaggaaatggaagcaaagagttg

SEQ ID NO: 28173 - DNA, 25 bp, probe
ttcctttgaccaacatctttccatc

SEQ ID NO: 28174 - DNA, 25 bp, probe
taaggaaatggaagcaaagagttgt

SEQ ID NO: 28175 - DNA, 25 bp, probe
cgtaaggaaatggaagcaaagagtt

SEQ ID NO: 28176 - DNA, 25 bp, probe
aaggaaatggaagcaaagagttgtt

SEQ ID NO: 28177 - DNA, 25 bp, probe
aatagattagtagctccaggcaggt

SEQ ID NO: 28178 - DNA, 25 bp, probe
ctttgaccaacatctttccatcctg

SEQ ID NO: 28179 - DNA, 25 bp, probe
gtttcctttgaccaacatctttcca

SEQ ID NO: 28180 - DNA, 25 bp, probe
gtgtcataaactgaactacagggtt

SEQ ID NO: 28181 - DNA, 25 bp, probe
acatttattcagagacagagcatat

SEQ ID NO: 28182 - DNA, 25 bp, probe
gttgggcatgtagaactttcatttc

SEQ ID NO: 28183 - DNA, 25 bp, probe
tgttgggcatgtagaactttcattt

SEQ ID NO: 28184 - DNA, 25 bp, probe
ttgttgggcatgtagaactttcatt

SEQ ID NO: 28185 - DNA, 25 bp, probe
gaaatagattagtagctccaggcag

SEQ ID NO: 28186 - DNA, 25 bp, probe
aggaaatggaagcaaagagttgttg

SEQ ID NO: 28187 - DNA, 25 bp, probe
ggtaaccaccattctcctctctact

SEQ ID NO: 28188 - DNA, 25 bp, probe
tgatgctcaggaaatagattagtag

SEQ ID NO: 28189 - DNA, 25 bp, probe
cttgcacatttattcagagacagag

SEQ ID NO: 28190 - DNA, 25 bp, probe
atagattagtagctccaggcaggtg

SEQ ID NO: 28191 - DNA, 25 bp, probe
ctgcgtgtcataaactgaactacag

SEQ ID NO: 28192 - DNA, 25 bp, probe
ccattctcctctctacttctaagag

SEQ ID NO: 28193 - DNA, 25 bp, probe
gatctcaaattcaagtgtagctggg

SEQ ID NO: 28194 - DNA, 25 bp, probe
gttgttgggcatgtagaactttcat

SEQ ID NO: 28195 - DNA, 25 bp, probe
aaatagattagtagctccaggcagg

SEQ ID NO: 28196 - DNA, 25 bp, probe
atgaccgtaaggaaatggaagcaaa

SEQ ID NO: 28197 - DNA, 25 bp, probe
tgatctcaaattcaagtgtagctgg

SEQ ID NO: 28198 - DNA, 25 bp, probe
tcttgcacatttattcagagacaga

SEQ ID NO: 28199 - DNA, 25 bp, probe
ttcttgcacatttattcagagacag

SEQ ID NO: 28200 - DNA, 25 bp, probe
cctttgaccaacatctttccatcct

SEQ ID NO: 28201 - DNA, 25 bp, probe
tcctttgaccaacatctttccatcc

SEQ ID NO: 28202 - DNA, 25 bp, probe
tttcttgcacatttattcagagaca

SEQ ID NO: 28203 - DNA, 25 bp, probe
tttgaccaacatctttccatcctgt

SEQ ID NO: 28204 - DNA, 25 bp, probe
ttgcacatttattcagagacagagc

SEQ ID NO: 28205 - DNA, 25 bp, probe
tgtcataaactgaactacagggttt

SEQ ID NO: 28206 - DNA, 25 bp, probe
caacacatctgtaggaacaatctct

SEQ ID NO: 28207 - DNA, 25 bp, probe
aacacatctgtaggaacaatctcta

SEQ ID NO: 28208 - DNA, 25 bp, probe
acaacacatctgtaggaacaatctc

SEQ ID NO: 28209 - DNA, 25 bp, probe
tagctctcttcgataattccagttg

SEQ ID NO: 28210 - DNA, 25 bp, probe
ttagctctcttcgataattccagtt

SEQ ID NO: 28211 - DNA, 25 bp, probe
ctctcttcgataattccagttggtg

SEQ ID NO: 28212 - DNA, 25 bp, probe
aacaacaacatcacaaagaaaggag

SEQ ID NO: 28213 - DNA, 25 bp, probe
caacaacatcacaaagaaaggagat

SEQ ID NO: 28214 - DNA, 25 bp, probe
caacaacaacatcacaaagaaagga

SEQ ID NO: 28215 - DNA, 25 bp, probe
acaacatcacaaagaaaggagattt

SEQ ID NO: 28216 - DNA, 25 bp, probe
aacaacatcacaaagaaaggagatt

SEQ ID NO: 28217 - DNA, 25 bp, probe
acaacaacatcacaaagaaaggaga

SEQ ID NO: 28218 - DNA, 25 bp, probe
tacaacacatctgtaggaacaatct

SEQ ID NO: 28219 - DNA, 25 bp, probe
agtatatgcagcattgacatccttc

SEQ ID NO: 28220 - DNA, 25 bp, probe
agcaacaacaacatcacaaagaaag

SEQ ID NO: 28221 - DNA, 25 bp, probe
gagcaacaacaacatcacaaagaaa

SEQ ID NO: 28222 - DNA, 25 bp, probe
gtacaacacatctgtaggaacaatc

SEQ ID NO: 28223 - DNA, 25 bp, probe
cagtatatgcagcattgacatcctt

SEQ ID NO: 28224 - DNA, 25 bp, probe
tttatacaactggcaaatggagcaa

SEQ ID NO: 28225 - DNA, 25 bp, probe
aaaggagatttgggatattgttctg

SEQ ID NO: 28226 - DNA, 25 bp, probe
attatgttacgccctttccttcatc

SEQ ID NO: 28227 - DNA, 25 bp, probe
acacatctgtaggaacaatctctac

SEQ ID NO: 28228 - DNA, 25 bp, probe
ggtacaacacatctgtaggaacaat

SEQ ID NO: 28229 - DNA, 25 bp, probe
agaaaggagatttgggatattgttc

SEQ ID NO: 28230 - DNA, 25 bp, probe
cacatctgtaggaacaatctctacc

SEQ ID NO: 28231 - DNA, 25 bp, probe
aaggagatttgggatattgttctgc

SEQ ID NO: 28232 - DNA, 25 bp, probe
gaaaggagatttgggatattgttct

SEQ ID NO: 28233 - DNA, 25 bp, probe
ataattccagttggtggctagtgaa

SEQ ID NO: 28234 - DNA, 25 bp, probe
cattatgttacgccctttccttcat

SEQ ID NO: 28235 - DNA, 25 bp, probe
atgaagtcacaaagtcagtatatgc

SEQ ID NO: 28236 - DNA, 25 bp, probe
aagaaaggagatttgggatattgtt

SEQ ID NO: 28237 - DNA, 25 bp, probe
aaagaaaggagatttgggatattgt

SEQ ID NO: 28238 - DNA, 25 bp, probe
tatttatacaactggcaaatggagc

SEQ ID NO: 28239 - DNA, 25 bp, probe
gtatatgcagcattgacatccttcc

SEQ ID NO: 28240 - DNA, 25 bp, probe
gcaacaacaacatcacaaagaaagg

SEQ ID NO: 28241 - DNA, 25 bp, probe
ttatacaactggcaaatggagcaac

SEQ ID NO: 28242 - DNA, 25 bp, probe
agctctcttcgataattccagttgg

SEQ ID NO: 28243 - DNA, 25 bp, probe
cctatttatacaactggcaaatgga

SEQ ID NO: 28244 - DNA, 25 bp, probe
tcctatttatacaactggcaaatgg

SEQ ID NO: 28245 - DNA, 25 bp, probe
aggtacaacacatctgtaggaacaa

SEQ ID NO: 28246 - DNA, 25 bp, probe
gataattccagttggtggctagtga

SEQ ID NO: 28247 - DNA, 25 bp, probe
tatatgcagcattgacatccttcca

SEQ ID NO: 28248 - DNA, 25 bp, probe
atttatacaactggcaaatggagca

SEQ ID NO: 28249 - DNA, 25 bp, probe
gctctcttcgataattccagttggt

SEQ ID NO: 28250 - DNA, 25 bp, probe
acagcctctacttccatcagatata

SEQ ID NO: 28251 - DNA, 25 bp, probe
tctggaaggattctgatgtcttatt

SEQ ID NO: 28252 - DNA, 25 bp, probe
atctggaaggattctgatgtcttat

SEQ ID NO: 28253 - DNA, 25 bp, probe
gacagcctctacttccatcagatat

SEQ ID NO: 28254 - DNA, 25 bp, probe
ttatggatctggaaggattctgatg

SEQ ID NO: 28255 - DNA, 25 bp, probe
gatctggaaggattctgatgtctta

SEQ ID NO: 28256 - DNA, 25 bp, probe
tatggatctggaaggattctgatgt

SEQ ID NO: 28257 - DNA, 25 bp, probe
attatggatctggaaggattctgat

SEQ ID NO: 28258 - DNA, 25 bp, probe
gcctctacttccatcagatatatgt

SEQ ID NO: 28259 - DNA, 25 bp, probe
ttcagttgtcctgtcatctcttaac

SEQ ID NO: 28260 - DNA, 25 bp, probe
agcctctacttccatcagatatatg

SEQ ID NO: 28261 - DNA, 25 bp, probe
cagcctctacttccatcagatatat

SEQ ID NO: 28262 - DNA, 25 bp, probe
ttggcattcagtggttcctaatatt

SEQ ID NO: 28263 - DNA, 25 bp, probe
tattatggatctggaaggattctga

SEQ ID NO: 28264 - DNA, 25 bp, probe
tcagttgtcctgtcatctcttaaca

SEQ ID NO: 28265 - DNA, 25 bp, probe
ggatctggaaggattctgatgtctt

SEQ ID NO: 28266 - DNA, 25 bp, probe
atggatctggaaggattctgatgtc

SEQ ID NO: 28267 - DNA, 25 bp, probe
atattcatccagtttcagttgtcct

SEQ ID NO: 28268 - DNA, 25 bp, probe
catattcatccagtttcagttgtcc

SEQ ID NO: 28269 - DNA, 25 bp, probe
tttggcattcagtggttcctaatat

SEQ ID NO: 28270 - DNA, 25 bp, probe
cctctacttccatcagatatatgtg

SEQ ID NO: 28271 - DNA, 25 bp, probe
ctacttccatcagatatatgtggct

SEQ ID NO: 28272 - DNA, 25 bp, probe
tctacttccatcagatatatgtggc

SEQ ID NO: 28273 - DNA, 25 bp, probe
gtcatattcatccagtttcagttgt

SEQ ID NO: 28274 - DNA, 25 bp, probe
tgtcatattcatccagtttcagttg

SEQ ID NO: 28275 - DNA, 25 bp, probe
atattatggatctggaaggattctg

SEQ ID NO: 28276 - DNA, 25 bp, probe
aacagttaagagagtccttgtgagg

SEQ ID NO: 28277 - DNA, 25 bp, probe
tcatattcatccagtttcagttgtc

SEQ ID NO: 28278 - DNA, 25 bp, probe
ctttggcattcagtggttcctaata

SEQ ID NO: 28279 - DNA, 25 bp, probe
tacttccatcagatatatgtggctt

SEQ ID NO: 28280 - DNA, 25 bp, probe
tctgtctgatttgctgaactttctc

SEQ ID NO: 28281 - DNA, 25 bp, probe
ttgtcatattcatccagtttcagtt

SEQ ID NO: 28282 - DNA, 25 bp, probe
tttgtcatattcatccagtttcagt

SEQ ID NO: 28283 - DNA, 25 bp, probe
gtctgtctgatttgctgaactttct

SEQ ID NO: 28284 - DNA, 25 bp, probe
tggatctggaaggattctgatgtct

SEQ ID NO: 28285 - DNA, 25 bp, probe
ctgtctgtctgatttgctgaacttt

SEQ ID NO: 28286 - DNA, 25 bp, probe
ctggaaggattctgatgtcttattt

SEQ ID NO: 28287 - DNA, 25 bp, probe
tgtctgtctgatttgctgaactttc

SEQ ID NO: 28288 - DNA, 25 bp, probe
tggcattcagtggttcctaatatta

SEQ ID NO: 28289 - DNA, 25 bp, probe
aaacagttaagagagtccttgtgag

SEQ ID NO: 28290 - DNA, 25 bp, probe
tttcagttgtcctgtcatctcttaa

SEQ ID NO: 28291 - DNA, 25 bp, probe
ctgtctgatttgctgaactttctca

SEQ ID NO: 28292 - DNA, 25 bp, probe
gtttcagttgtcctgtcatctctta

SEQ ID NO: 28293 - DNA, 25 bp, probe
atcagatatatgtggctttgagagg

SEQ ID NO: 28294 - DNA, 25 bp, probe
cattgtgagaatcagcaagaacatc

SEQ ID NO: 28295 - DNA, 25 bp, probe
cactccttatcctctatggaatcat

SEQ ID NO: 28296 - DNA, 25 bp, probe
ccattgtgagaatcagcaagaacat

SEQ ID NO: 28297 - DNA, 25 bp, probe
attgtgagaatcagcaagaacatcg

SEQ ID NO: 28298 - DNA, 25 bp, probe
gcactccttatcctctatggaatca

SEQ ID NO: 28299 - DNA, 25 bp, probe
actccttatcctctatggaatcatg

SEQ ID NO: 28300 - DNA, 25 bp, probe
ggcactccttatcctctatggaatc

SEQ ID NO: 28301 - DNA, 25 bp, probe
aagtgagagccattgtgagaatcag

SEQ ID NO: 28302 - DNA, 25 bp, probe
gaagtgagagccattgtgagaatca

SEQ ID NO: 28303 - DNA, 25 bp, probe
cattccaggtaagtccagatgcttc

SEQ ID NO: 28304 - DNA, 25 bp, probe
aggcactccttatcctctatggaat

SEQ ID NO: 28305 - DNA, 25 bp, probe
attccaggtaagtccagatgcttct

SEQ ID NO: 28306 - DNA, 25 bp, probe
ggaagtgagagccattgtgagaatc

SEQ ID NO: 28307 - DNA, 25 bp, probe
ccacattatcttctccctgctcaat

SEQ ID NO: 28308 - DNA, 25 bp, probe
aggaagtgagagccattgtgagaat

SEQ ID NO: 28309 - DNA, 25 bp, probe
gagccattgtgagaatcagcaagaa

SEQ ID NO: 28310 - DNA, 25 bp, probe
cttccacattatcttctccctgctc

SEQ ID NO: 28311 - DNA, 25 bp, probe
agccattgtgagaatcagcaagaac

SEQ ID NO: 28312 - DNA, 25 bp, probe
gagagccattgtgagaatcagcaag

SEQ ID NO: 28313 - DNA, 25 bp, probe
gagaatcagcaagaacatcgccatc

SEQ ID NO: 28314 - DNA, 25 bp, probe
tccacattatcttctccctgctcaa

SEQ ID NO: 28315 - DNA, 25 bp, probe
ttccacattatcttctccctgctca

SEQ ID NO: 28316 - DNA, 25 bp, probe
cacattatcttctccctgctcaatg

SEQ ID NO: 28317 - DNA, 25 bp, probe
caggaagtgagagccattgtgagaa

SEQ ID NO: 28318 - DNA, 25 bp, probe
ttgtgagaatcagcaagaacatcgc

SEQ ID NO: 28319 - DNA, 25 bp, probe
gccattgtgagaatcagcaagaaca

SEQ ID NO: 28320 - DNA, 25 bp, probe
agagccattgtgagaatcagcaaga

SEQ ID NO: 28321 - DNA, 25 bp, probe
ctccttatcctctatggaatcatga

SEQ ID NO: 28322 - DNA, 25 bp, probe
tgagagccattgtgagaatcagcaa

SEQ ID NO: 28323 - DNA, 25 bp, probe
caagtgcaaagtgagagaattcatg

SEQ ID NO: 28324 - DNA, 25 bp, probe
ccttccacattatcttctccctgct

SEQ ID NO: 28325 - DNA, 25 bp, probe
caaaggctatctacgacctgagatc

SEQ ID NO: 28326 - DNA, 25 bp, probe
tgaccaagtgcaaagtgagagaatt

SEQ ID NO: 28327 - DNA, 25 bp, probe
ccaagtgcaaagtgagagaattcat

SEQ ID NO: 28328 - DNA, 25 bp, probe
gaccaagtgcaaagtgagagaattc

SEQ ID NO: 28329 - DNA, 25 bp, probe
ttgttcatttcttttacctttctgt

SEQ ID NO: 28330 - DNA, 25 bp, probe
acattatcttctccctgctcaatgc

SEQ ID NO: 28331 - DNA, 25 bp, probe
tgagaatcagcaagaacatcgccat

SEQ ID NO: 28332 - DNA, 25 bp, probe
agtgagagccattgtgagaatcagc

SEQ ID NO: 28333 - DNA, 25 bp, probe
ctgaccaagtgcaaagtgagagaat

SEQ ID NO: 28334 - DNA, 25 bp, probe
aagtgcaaagtgagagaattcatga

SEQ ID NO: 28335 - DNA, 25 bp, probe
aattccatgttccaggaagtgagag

SEQ ID NO: 28336 - DNA, 25 bp, probe
aaggcactccttatcctctatggaa

SEQ ID NO: 28337 - DNA, 25 bp, probe
atgttccaggaagtgagagccattg

SEQ ID NO: 28338 - DNA, 25 bp, probe
tggtggcttcttaatgtaactcttc

SEQ ID NO: 28339 - DNA, 25 bp, probe
ctggtggcttcttaatgtaactctt

SEQ ID NO: 28340 - DNA, 25 bp, probe
ggtggcttcttaatgtaactcttcc

SEQ ID NO: 28341 - DNA, 25 bp, probe
cctggtggcttcttaatgtaactct

SEQ ID NO: 28342 - DNA, 25 bp, probe
catagatgtgaattaagacaccacc

SEQ ID NO: 28343 - DNA, 25 bp, probe
atagatgtgaattaagacaccaccg

SEQ ID NO: 28344 - DNA, 25 bp, probe
tgaattaagacaccaccgagatacg

SEQ ID NO: 28345 - DNA, 25 bp, probe
gtgaattaagacaccaccgagatac

SEQ ID NO: 28346 - DNA, 25 bp, probe
tgtgaggttcatactgtgctgatag

SEQ ID NO: 28347 - DNA, 25 bp, probe
ctgtgaggttcatactgtgctgata

SEQ ID NO: 28348 - DNA, 25 bp, probe
tcatagatgtgaattaagacaccac

SEQ ID NO: 28349 - DNA, 25 bp, probe
tgtgaattaagacaccaccgagata

SEQ ID NO: 28350 - DNA, 25 bp, probe
tagatgtgaattaagacaccaccga

SEQ ID NO: 28351 - DNA, 25 bp, probe
acctggtggcttcttaatgtaactc

SEQ ID NO: 28352 - DNA, 25 bp, probe
tgagaacactgtattcctacaatgt

SEQ ID NO: 28353 - DNA, 25 bp, probe
atgtgaattaagacaccaccgagat

SEQ ID NO: 28354 - DNA, 25 bp, probe
gtgagaacactgtattcctacaatg

SEQ ID NO: 28355 - DNA, 25 bp, probe
aggagatgggataattgttatggac

SEQ ID NO: 28356 - DNA, 25 bp, probe
gaggagatgggataattgttatgga

SEQ ID NO: 28357 - DNA, 25 bp, probe
agaggagatgggataattgttatgg

SEQ ID NO: 28358 - DNA, 25 bp, probe
gtggcttcttaatgtaactcttccc

SEQ ID NO: 28359 - DNA, 25 bp, probe
atcatagatgtgaattaagacacca

SEQ ID NO: 28360 - DNA, 25 bp, probe
ggagatgggataattgttatggacc

SEQ ID NO: 28361 - DNA, 25 bp, probe
cagaggagatgggataattgttatg

SEQ ID NO: 28362 - DNA, 25 bp, probe
cagtgaagagtcccatgtttagtat

SEQ ID NO: 28363 - DNA, 25 bp, probe
gatgtgaattaagacaccaccgaga

SEQ ID NO: 28364 - DNA, 25 bp, probe
agatgtgaattaagacaccaccgag

SEQ ID NO: 28365 - DNA, 25 bp, probe
agtgaaacaaatcaagtaaggaact

SEQ ID NO: 28366 - DNA, 25 bp, probe
agtgaagagtcccatgtttagtatg

SEQ ID NO: 28367 - DNA, 25 bp, probe
tcagtgaagagtcccatgtttagta

SEQ ID NO: 28368 - DNA, 25 bp, probe
aggtttgggatcatagatgtgaatt

SEQ ID NO: 28369 - DNA, 25 bp, probe
gaagaaagatgatgacactaagttg

SEQ ID NO: 28370 - DNA, 25 bp, probe
caggcactctacgaagtttctaatg

SEQ ID NO: 28371 - DNA, 25 bp, probe
caggtttgggatcatagatgtgaat

SEQ ID NO: 28372 - DNA, 25 bp, probe
agaacactgtattcctacaatgtac

SEQ ID NO: 28373 - DNA, 25 bp, probe
gagaacactgtattcctacaatgta

SEQ ID NO: 28374 - DNA, 25 bp, probe
agaagaaagatgatgacactaagtt

SEQ ID NO: 28375 - DNA, 25 bp, probe
gataattgttatggacccatgtgtg

SEQ ID NO: 28376 - DNA, 25 bp, probe
acaggcactctacgaagtttctaat

SEQ ID NO: 28377 - DNA, 25 bp, probe
gatcatagatgtgaattaagacacc

SEQ ID NO: 28378 - DNA, 25 bp, probe
ggatcatagatgtgaattaagacac

SEQ ID NO: 28379 - DNA, 25 bp, probe
gaacacaggtttgggatcatagatg

SEQ ID NO: 28380 - DNA, 25 bp, probe
ggataattgttatggacccatgtgt

SEQ ID NO: 28381 - DNA, 25 bp, probe
ctctacgaagtttctaatgggcaga

SEQ ID NO: 28382 - DNA, 25 bp, probe
cctacctgtacctcgaagtctatgg

SEQ ID NO: 28383 - DNA, 25 bp, probe
ctacctgtacctcgaagtctatggg

SEQ ID NO: 28384 - DNA, 25 bp, probe
ccctacctgtacctcgaagtctatg

SEQ ID NO: 28385 - DNA, 25 bp, probe
tacctgtacctcgaagtctatgggc

SEQ ID NO: 28386 - DNA, 25 bp, probe
cccctacctgtacctcgaagtctat

SEQ ID NO: 28387 - DNA, 25 bp, probe
atgccaaagataaagaggaagtagg

SEQ ID NO: 28388 - DNA, 25 bp, probe
gccaaagataaagaggaagtaggac

SEQ ID NO: 28389 - DNA, 25 bp, probe
tgccaaagataaagaggaagtagga

SEQ ID NO: 28390 - DNA, 25 bp, probe
tctatgccaaagataaagaggaagt

SEQ ID NO: 28391 - DNA, 25 bp, probe
ggatggacaatagccagatacctag

SEQ ID NO: 28392 - DNA, 25 bp, probe
ccaaagataaagaggaagtaggact

SEQ ID NO: 28393 - DNA, 25 bp, probe
ttctatgccaaagataaagaggaag

SEQ ID NO: 28394 - DNA, 25 bp, probe
tatgccaaagataaagaggaagtag

SEQ ID NO: 28395 - DNA, 25 bp, probe
ctatgccaaagataaagaggaagta

SEQ ID NO: 28396 - DNA, 25 bp, probe
attctatgccaaagataaagaggaa

SEQ ID NO: 28397 - DNA, 25 bp, probe
aattctatgccaaagataaagagga

SEQ ID NO: 28398 - DNA, 25 bp, probe
cggatggacaatagccagataccta

SEQ ID NO: 28399 - DNA, 25 bp, probe
gacgatgtagaaggcagtgaggtag

SEQ ID NO: 28400 - DNA, 25 bp, probe
cgatgtagaaggcagtgaggtagtg

SEQ ID NO: 28401 - DNA, 25 bp, probe
ccacgaattctatgccaaagataaa

SEQ ID NO: 28402 - DNA, 25 bp, probe
aaagaggaagtaggacttgtagtag

SEQ ID NO: 28403 - DNA, 25 bp, probe
aagataaagaggaagtaggacttgt

SEQ ID NO: 28404 - DNA, 25 bp, probe
cccacgaattctatgccaaagataa

SEQ ID NO: 28405 - DNA, 25 bp, probe
acgatgtagaaggcagtgaggtagt

SEQ ID NO: 28406 - DNA, 25 bp, probe
acgaattctatgccaaagataaaga

SEQ ID NO: 28407 - DNA, 25 bp, probe
cacgaattctatgccaaagataaag

SEQ ID NO: 28408 - DNA, 25 bp, probe
gtaggacttgtagtagagctgctgg

SEQ ID NO: 28409 - DNA, 25 bp, probe
ataaagaggaagtaggacttgtagt

SEQ ID NO: 28410 - DNA, 25 bp, probe
gaggtagtgcttctccttcacaaac

SEQ ID NO: 28411 - DNA, 25 bp, probe
cgaattctatgccaaagataaagag

SEQ ID NO: 28412 - DNA, 25 bp, probe
agataaagaggaagtaggacttgta

SEQ ID NO: 28413 - DNA, 25 bp, probe
aaagataaagaggaagtaggacttg

SEQ ID NO: 28414 - DNA, 25 bp, probe
caaagataaagaggaagtaggactt

SEQ ID NO: 28415 - DNA, 25 bp, probe
gataaagaggaagtaggacttgtag

SEQ ID NO: 28416 - DNA, 25 bp, probe
atcttttcctggctcttgacaatga

SEQ ID NO: 28417 - DNA, 25 bp, probe
tgaggtagtgcttctccttcacaaa

SEQ ID NO: 28418 - DNA, 25 bp, probe
taaagaggaagtaggacttgtagta

SEQ ID NO: 28419 - DNA, 25 bp, probe
taggacttgtagtagagctgctggt

SEQ ID NO: 28420 - DNA, 25 bp, probe
gaattctatgccaaagataaagagg

SEQ ID NO: 28421 - DNA, 25 bp, probe
gatcttttcctggctcttgacaatg

SEQ ID NO: 28422 - DNA, 25 bp, probe
ggtagtgcttctccttcacaaacac

SEQ ID NO: 28423 - DNA, 25 bp, probe
aggtagtgcttctccttcacaaaca

SEQ ID NO: 28424 - DNA, 25 bp, probe
gatggacaatagccagatacctagg

SEQ ID NO: 28425 - DNA, 25 bp, probe
gtagtgcttctccttcacaaacacg

SEQ ID NO: 28426 - DNA, 25 bp, probe
tcttttcctggctcttgacaatgac

SEQ ID NO: 28427 - DNA, 25 bp, probe
gcccacgaattctatgccaaagata

SEQ ID NO: 28428 - DNA, 25 bp, probe
cagcggatggacaatagccagatac

SEQ ID NO: 28429 - DNA, 25 bp, probe
gagtgttgatcatgctgttgctcat

SEQ ID NO: 28430 - DNA, 25 bp, probe
gatgtagaaggcagtgaggtagtgc

SEQ ID NO: 28431 - DNA, 25 bp, probe
acctgtcctaaatcaattcctcaaa

SEQ ID NO: 28432 - DNA, 25 bp, probe
aacctgtcctaaatcaattcctcaa

SEQ ID NO: 28433 - DNA, 25 bp, probe
cctgtcctaaatcaattcctcaaag

SEQ ID NO: 28434 - DNA, 25 bp, probe
cctaaatcaattcctcaaagtgtgc

SEQ ID NO: 28435 - DNA, 25 bp, probe
tcctaaatcaattcctcaaagtgtg

SEQ ID NO: 28436 - DNA, 25 bp, probe
gtcctaaatcaattcctcaaagtgt

SEQ ID NO: 28437 - DNA, 25 bp, probe
tgtcctaaatcaattcctcaaagtg

SEQ ID NO: 28438 - DNA, 25 bp, probe
gaacctgtcctaaatcaattcctca

SEQ ID NO: 28439 - DNA, 25 bp, probe
ctgtcctaaatcaattcctcaaagt

SEQ ID NO: 28440 - DNA, 25 bp, probe
atgaacctgtcctaaatcaattcct

SEQ ID NO: 28441 - DNA, 25 bp, probe
agtttgtcaatgaagtgatgaaagc

SEQ ID NO: 28442 - DNA, 25 bp, probe
tcagtttgtcaatgaagtgatgaaa

SEQ ID NO: 28443 - DNA, 25 bp, probe
tgaacctgtcctaaatcaattcctc

SEQ ID NO: 28444 - DNA, 25 bp, probe
cagtttgtcaatgaagtgatgaaag

SEQ ID NO: 28445 - DNA, 25 bp, probe
tatgaacctgtcctaaatcaattcc

SEQ ID NO: 28446 - DNA, 25 bp, probe
tcagtatgaacctgtcctaaatcaa

SEQ ID NO: 28447 - DNA, 25 bp, probe
cagtatgaacctgtcctaaatcaat

SEQ ID NO: 28448 - DNA, 25 bp, probe
ctggtgttaaatggagctattcaat

SEQ ID NO: 28449 - DNA, 25 bp, probe
agtatgaacctgtcctaaatcaatt

SEQ ID NO: 28450 - DNA, 25 bp, probe
ctaaatcaattcctcaaagtgtgca

SEQ ID NO: 28451 - DNA, 25 bp, probe
gtatgaacctgtcctaaatcaattc

SEQ ID NO: 28452 - DNA, 25 bp, probe
gtttgtcaatgaagtgatgaaagct

SEQ ID NO: 28453 - DNA, 25 bp, probe
tggtgttaaatggagctattcaata

SEQ ID NO: 28454 - DNA, 25 bp, probe
agagccagtatttatactttgtggt

SEQ ID NO: 28455 - DNA, 25 bp, probe
cttctctaccgctacatgaaccaga

SEQ ID NO: 28456 - DNA, 25 bp, probe
gagccagtatttatactttgtggtt

SEQ ID NO: 28457 - DNA, 25 bp, probe
cctcctcagcattcagtttgtcaat

SEQ ID NO: 28458 - DNA, 25 bp, probe
acttctctaccgctacatgaaccag

SEQ ID NO: 28459 - DNA, 25 bp, probe
atgaacaaaaccctacgaaagaatg

SEQ ID NO: 28460 - DNA, 25 bp, probe
aaatgaacaaaaccctacgaaagaa

SEQ ID NO: 28461 - DNA, 25 bp, probe
aaaatgaacaaaaccctacgaaaga

SEQ ID NO: 28462 - DNA, 25 bp, probe
aatgaacaaaaccctacgaaagaat

SEQ ID NO: 28463 - DNA, 25 bp, probe
ctttgtgaaggatttctccaaactc

SEQ ID NO: 28464 - DNA, 25 bp, probe
ttgtggttaaaatacttgattcccc

SEQ ID NO: 28465 - DNA, 25 bp, probe
cttctcctcgctgctcttctacatc

SEQ ID NO: 28466 - DNA, 25 bp, probe
actttgtgaaggatttctccaaact

SEQ ID NO: 28467 - DNA, 25 bp, probe
agtaaaatgaacaaaaccctacgaa

SEQ ID NO: 28468 - DNA, 25 bp, probe
cactttgtgaaggatttctccaaac

SEQ ID NO: 28469 - DNA, 25 bp, probe
cacttctctaccgctacatgaacca

SEQ ID NO: 28470 - DNA, 25 bp, probe
accacttctctaccgctacatgaac

SEQ ID NO: 28471 - DNA, 25 bp, probe
caccacttctctaccgctacatgaa

SEQ ID NO: 28472 - DNA, 25 bp, probe
ttcagtatgaacctgtcctaaatca

SEQ ID NO: 28473 - DNA, 25 bp, probe
ttcagtttgtcaatgaagtgatgaa

SEQ ID NO: 28474 - DNA, 25 bp, probe
gcattcagtttgtcaatgaagtgat

SEQ ID NO: 28475 - DNA, 25 bp, probe
catcatcatcaccatcctcctcatc

SEQ ID NO: 28476 - DNA, 25 bp, probe
tttgttactttgaacttcttggtgc

SEQ ID NO: 28477 - DNA, 25 bp, probe
tttctttatagccgagtttctcaca

SEQ ID NO: 28478 - DNA, 25 bp, probe
tcctcatggtctccttcttcatcat

SEQ ID NO: 28479 - DNA, 25 bp, probe
ttctttatagccgagtttctcacac

SEQ ID NO: 28480 - DNA, 25 bp, probe
taaacagagttcatttccagtaccc

SEQ ID NO: 28481 - DNA, 25 bp, probe
atcatcatcaccatcctcctcatcc

SEQ ID NO: 28482 - DNA, 25 bp, probe
ttaaacagagttcatttccagtacc

SEQ ID NO: 28483 - DNA, 25 bp, probe
cctcatcctgatccagaacttcaag

SEQ ID NO: 28484 - DNA, 25 bp, probe
tttacagatcacaaaggcatcaagg

SEQ ID NO: 28485 - DNA, 25 bp, probe
ccatcatcatcaccatcctcctcat

SEQ ID NO: 28486 - DNA, 25 bp, probe
atcctgatccagaacttcaagcaag

SEQ ID NO: 28487 - DNA, 25 bp, probe
ttgttactttgaacttcttggtgcc

SEQ ID NO: 28488 - DNA, 25 bp, probe
atgacttgtcgattatttctggcta

SEQ ID NO: 28489 - DNA, 25 bp, probe
tgacttgtcgattatttctggctaa

SEQ ID NO: 28490 - DNA, 25 bp, probe
tcctcatcctgatccagaacttcaa

SEQ ID NO: 28491 - DNA, 25 bp, probe
aaacagagttcatttccagtaccct

SEQ ID NO: 28492 - DNA, 25 bp, probe
aatgacttgtcgattatttctggct

SEQ ID NO: 28493 - DNA, 25 bp, probe
catcctgatccagaacttcaagcaa

SEQ ID NO: 28494 - DNA, 25 bp, probe
ctcctcatggtctccttcttcatca

SEQ ID NO: 28495 - DNA, 25 bp, probe
tacagatcacaaaggcatcaaggaa

SEQ ID NO: 28496 - DNA, 25 bp, probe
ttacagatcacaaaggcatcaagga

SEQ ID NO: 28497 - DNA, 25 bp, probe
ctcatcctgatccagaacttcaagc

SEQ ID NO: 28498 - DNA, 25 bp, probe
gacttgtcgattatttctggctaat

SEQ ID NO: 28499 - DNA, 25 bp, probe
ccatcctctacaacatgacactgtg

SEQ ID NO: 28500 - DNA, 25 bp, probe
ctttatagccgagtttctcacacct

SEQ ID NO: 28501 - DNA, 25 bp, probe
tctttatagccgagtttctcacacc

SEQ ID NO: 28502 - DNA, 25 bp, probe
gttactttgaacttcttggtgccag

SEQ ID NO: 28503 - DNA, 25 bp, probe
acttgtcgattatttctggctaatt

SEQ ID NO: 28504 - DNA, 25 bp, probe
ctcctcatcctgatccagaacttca

SEQ ID NO: 28505 - DNA, 25 bp, probe
tttatagccgagtttctcacacctg

SEQ ID NO: 28506 - DNA, 25 bp, probe
aaatgacttgtcgattatttctggc

SEQ ID NO: 28507 - DNA, 25 bp, probe
aatttcgatttgcacactgatttgg

SEQ ID NO: 28508 - DNA, 25 bp, probe
aacagagttcatttccagtaccctc

SEQ ID NO: 28509 - DNA, 25 bp, probe
catcatcaccatcctcctcatcctg

SEQ ID NO: 28510 - DNA, 25 bp, probe
cttcctcctcatggtctccttcttc

SEQ ID NO: 28511 - DNA, 25 bp, probe
caaccacgagaatctcttgaacctg

SEQ ID NO: 28512 - DNA, 25 bp, probe
agatcacaaaggcatcaaggaagag

SEQ ID NO: 28513 - DNA, 25 bp, probe
atgaacctatgcaaatagacatcca

SEQ ID NO: 28514 - DNA, 25 bp, probe
gatccagaacttcaagcaagacctg

SEQ ID NO: 28515 - DNA, 25 bp, probe
ctgatccagaacttcaagcaagacc

SEQ ID NO: 28516 - DNA, 25 bp, probe
cctgatccagaacttcaagcaagac

SEQ ID NO: 28517 - DNA, 25 bp, probe
gttcatttccagtaccctccatcag

SEQ ID NO: 28518 - DNA, 25 bp, probe
aaatttcgatttgcacactgatttg

SEQ ID NO: 28519 - DNA, 25 bp, probe
ttgctgcacagacatattagaagaa

SEQ ID NO: 28520 - DNA, 25 bp, probe
gaatgggtcctgttatttatgcttg

SEQ ID NO: 28521 - DNA, 25 bp, probe
cttgctgcacagacatattagaaga

SEQ ID NO: 28522 - DNA, 25 bp, probe
aatgggtcctgttatttatgcttgc

SEQ ID NO: 28523 - DNA, 25 bp, probe
gcttgctgcacagacatattagaag

SEQ ID NO: 28524 - DNA, 25 bp, probe
cttggaatgggtcctgttatttatg

SEQ ID NO: 28525 - DNA, 25 bp, probe
ccttggaatgggtcctgttatttat

SEQ ID NO: 28526 - DNA, 25 bp, probe
atgggtcctgttatttatgcttgct

SEQ ID NO: 28527 - DNA, 25 bp, probe
ggaatgggtcctgttatttatgctt

SEQ ID NO: 28528 - DNA, 25 bp, probe
ttggaatgggtcctgttatttatgc

SEQ ID NO: 28529 - DNA, 25 bp, probe
tccttggaatgggtcctgttattta

SEQ ID NO: 28530 - DNA, 25 bp, probe
tattattcttccacatatgctggct

SEQ ID NO: 28531 - DNA, 25 bp, probe
gtattattcttccacatatgctggc

SEQ ID NO: 28532 - DNA, 25 bp, probe
tgctgcacagacatattagaagaaa

SEQ ID NO: 28533 - DNA, 25 bp, probe
attattcttccacatatgctggctg

SEQ ID NO: 28534 - DNA, 25 bp, probe
atttcactacaggaccaaatggaaa

SEQ ID NO: 28535 - DNA, 25 bp, probe
tgtattattcttccacatatgctgg

SEQ ID NO: 28536 - DNA, 25 bp, probe
tggaatgggtcctgttatttatgct

SEQ ID NO: 28537 - DNA, 25 bp, probe
ttcactacaggaccaaatggaaacc

SEQ ID NO: 28538 - DNA, 25 bp, probe
ttatgcttgctgcacagacatatta

SEQ ID NO: 28539 - DNA, 25 bp, probe
tgggtcctgttatttatgcttgctg

SEQ ID NO: 28540 - DNA, 25 bp, probe
tttcactacaggaccaaatggaaac

SEQ ID NO: 28541 - DNA, 25 bp, probe
tatgcttgctgcacagacatattag

SEQ ID NO: 28542 - DNA, 25 bp, probe
gaagaacaacaggaaaccaaggtct

SEQ ID NO: 28543 - DNA, 25 bp, probe
ctccttggaatgggtcctgttattt

SEQ ID NO: 28544 - DNA, 25 bp, probe
ggaatgaaagtgccaaagaaaacat

SEQ ID NO: 28545 - DNA, 25 bp, probe
ttgtattattcttccacatatgctg

SEQ ID NO: 28546 - DNA, 25 bp, probe
ggagggaatgaaagtgccaaagaaa

SEQ ID NO: 28547 - DNA, 25 bp, probe
ccagcatttcactacaggaccaaat

SEQ ID NO: 28548 - DNA, 25 bp, probe
agaaacctacaaaatgtcaaaccag

SEQ ID NO: 28549 - DNA, 25 bp, probe
gagaaacctacaaaatgtcaaacca

SEQ ID NO: 28550 - DNA, 25 bp, probe
tctagcagatgcctcttgttttaat

SEQ ID NO: 28551 - DNA, 25 bp, probe
ttctagcagatgcctcttgttttaa

SEQ ID NO: 28552 - DNA, 25 bp, probe
tttctagcagatgcctcttgtttta

SEQ ID NO: 28553 - DNA, 25 bp, probe
gaatgaaagtgccaaagaaaacatg

SEQ ID NO: 28554 - DNA, 25 bp, probe
aaaccaaccaccagcatttcactac

SEQ ID NO: 28555 - DNA, 25 bp, probe
gagggaatgaaagtgccaaagaaaa

SEQ ID NO: 28556 - DNA, 25 bp, probe
aagaacaacaggaaaccaaggtctg

SEQ ID NO: 28557 - DNA, 25 bp, probe
ctagcagatgcctcttgttttaata

SEQ ID NO: 28558 - DNA, 25 bp, probe
ttttctagcagatgcctcttgtttt

SEQ ID NO: 28559 - DNA, 25 bp, probe
gaatgttttctagcagatgcctctt

SEQ ID NO: 28560 - DNA, 25 bp, probe
gaaacctacaaaatgtcaaaccagc

SEQ ID NO: 28561 - DNA, 25 bp, probe
atgcttgctgcacagacatattaga

SEQ ID NO: 28562 - DNA, 25 bp, probe
ggaagaacaacaggaaaccaaggtc

SEQ ID NO: 28563 - DNA, 25 bp, probe
ccatgtatgcctatatgtgtattgt

SEQ ID NO: 28564 - DNA, 25 bp, probe
taatatcacaacccagaagtaacca

SEQ ID NO: 28565 - DNA, 25 bp, probe
aatatcacaacccagaagtaaccac

SEQ ID NO: 28566 - DNA, 25 bp, probe
ataatatcacaacccagaagtaacc

SEQ ID NO: 28567 - DNA, 25 bp, probe
actcagtttatttaaccattcccat

SEQ ID NO: 28568 - DNA, 25 bp, probe
acccaagtacattctaattaccagt

SEQ ID NO: 28569 - DNA, 25 bp, probe
gcaactcagtttatttaaccattcc

SEQ ID NO: 28570 - DNA, 25 bp, probe
cccatgtatgcctatatgtgtattg

SEQ ID NO: 28571 - DNA, 25 bp, probe
atatcacaacccagaagtaaccacc

SEQ ID NO: 28572 - DNA, 25 bp, probe
acaacccagaagtaaccacctttaa

SEQ ID NO: 28573 - DNA, 25 bp, probe
aactcagtttatttaaccattccca

SEQ ID NO: 28574 - DNA, 25 bp, probe
caactcagtttatttaaccattccc

SEQ ID NO: 28575 - DNA, 25 bp, probe
tcagtttatttaaccattcccatgt

SEQ ID NO: 28576 - DNA, 25 bp, probe
gtttatttaaccattcccatgttgt

SEQ ID NO: 28577 - DNA, 25 bp, probe
ctcagtttatttaaccattcccatg

SEQ ID NO: 28578 - DNA, 25 bp, probe
cacaacccagaagtaaccaccttta

SEQ ID NO: 28579 - DNA, 25 bp, probe
caacccagaagtaaccacctttaaa

SEQ ID NO: 28580 - DNA, 25 bp, probe
gataatatcacaacccagaagtaac

SEQ ID NO: 28581 - DNA, 25 bp, probe
agtttatttaaccattcccatgttg

SEQ ID NO: 28582 - DNA, 25 bp, probe
cagtttatttaaccattcccatgtt

SEQ ID NO: 28583 - DNA, 25 bp, probe
agatgaagcactataatattgttcc

SEQ ID NO: 28584 - DNA, 25 bp, probe
ggatgcaactcagtttatttaacca

SEQ ID NO: 28585 - DNA, 25 bp, probe
tggatgcaactcagtttatttaacc

SEQ ID NO: 28586 - DNA, 25 bp, probe
cccaagtacattctaattaccagta

SEQ ID NO: 28587 - DNA, 25 bp, probe
tacccaagtacattctaattaccag

SEQ ID NO: 28588 - DNA, 25 bp, probe
tgaagcactataatattgttcccat

SEQ ID NO: 28589 - DNA, 25 bp, probe
atgaagcactataatattgttccca

SEQ ID NO: 28590 - DNA, 25 bp, probe
acagggaatgtaagtttattaccaa

SEQ ID NO: 28591 - DNA, 25 bp, probe
aacagggaatgtaagtttattacca

SEQ ID NO: 28592 - DNA, 25 bp, probe
tatcacaacccagaagtaaccacct

SEQ ID NO: 28593 - DNA, 25 bp, probe
catgtatgcctatatgtgtattgta

SEQ ID NO: 28594 - DNA, 25 bp, probe
tttatttaaccattcccatgttgtt

SEQ ID NO: 28595 - DNA, 25 bp, probe
gatgaagcactataatattgttccc

SEQ ID NO: 28596 - DNA, 25 bp, probe
tgcaactcagtttatttaaccattc

SEQ ID NO: 28597 - DNA, 25 bp, probe
ccaagtacattctaattaccagtat

SEQ ID NO: 28598 - DNA, 25 bp, probe
agtcatagaagatgaagcactataa

SEQ ID NO: 28599 - DNA, 25 bp, probe
aagtcatagaagatgaagcactata

SEQ ID NO: 28600 - DNA, 25 bp, probe
tgctctaatcacaatattaactgtt

SEQ ID NO: 28601 - DNA, 25 bp, probe
ttataaagttgcagaaatttggtgt

SEQ ID NO: 28602 - DNA, 25 bp, probe
atacccaagtacattctaattacca

SEQ ID NO: 28603 - DNA, 25 bp, probe
cataattggagtcatactgtaaaca

SEQ ID NO: 28604 - DNA, 25 bp, probe
gatgcaactcagtttatttaaccat

SEQ ID NO: 28605 - DNA, 25 bp, probe
atggatgcaactcagtttatttaac

SEQ ID NO: 28606 - DNA, 25 bp, probe
catttaatggatgcaactcagttta

SEQ ID NO: 28607 - DNA, 25 bp, probe
tcttattgaatggcactgtcttctg

SEQ ID NO: 28608 - DNA, 25 bp, probe
gtcttattgaatggcactgtcttct

SEQ ID NO: 28609 - DNA, 25 bp, probe
ttgtggttggaagagacattaactt

SEQ ID NO: 28610 - DNA, 25 bp, probe
ttacaggtgactctgctaacttatc

SEQ ID NO: 28611 - DNA, 25 bp, probe
cttacaggtgactctgctaacttat

SEQ ID NO: 28612 - DNA, 25 bp, probe
tactcattagattcctgtgctgctc

SEQ ID NO: 28613 - DNA, 25 bp, probe
ctactcattagattcctgtgctgct

SEQ ID NO: 28614 - DNA, 25 bp, probe
cttattgaatggcactgtcttctgg

SEQ ID NO: 28615 - DNA, 25 bp, probe
ggtcttattgaatggcactgtcttc

SEQ ID NO: 28616 - DNA, 25 bp, probe
tcttacaggtgactctgctaactta

SEQ ID NO: 28617 - DNA, 25 bp, probe
tacaggtgactctgctaacttatca

SEQ ID NO: 28618 - DNA, 25 bp, probe
acaggtgactctgctaacttatcat

SEQ ID NO: 28619 - DNA, 25 bp, probe
ttcttacaggtgactctgctaactt

SEQ ID NO: 28620 - DNA, 25 bp, probe
ctctactcattagattcctgtgctg

SEQ ID NO: 28621 - DNA, 25 bp, probe
gactctactcattagattcctgtgc

SEQ ID NO: 28622 - DNA, 25 bp, probe
gtgactctgctaacttatcatggag

SEQ ID NO: 28623 - DNA, 25 bp, probe
actctactcattagattcctgtgct

SEQ ID NO: 28624 - DNA, 25 bp, probe
tgactctactcattagattcctgtg

SEQ ID NO: 28625 - DNA, 25 bp, probe
ctgactctactcattagattcctgt

SEQ ID NO: 28626 - DNA, 25 bp, probe
tctgactctactcattagattcctg

SEQ ID NO: 28627 - DNA, 25 bp, probe
gtctgactctactcattagattcct

SEQ ID NO: 28628 - DNA, 25 bp, probe
caggtgactctgctaacttatcatg

SEQ ID NO: 28629 - DNA, 25 bp, probe
ccaaataaagaccatacaaaggcat

SEQ ID NO: 28630 - DNA, 25 bp, probe
cgccaaccctatcatttatttcttt

SEQ ID NO: 28631 - DNA, 25 bp, probe
aatgtttgtcaccacctcctattta

SEQ ID NO: 28632 - DNA, 25 bp, probe
atccaaataaagaccatacaaaggc

SEQ ID NO: 28633 - DNA, 25 bp, probe
tccaaataaagaccatacaaaggca

SEQ ID NO: 28634 - DNA, 25 bp, probe
tgtttgtcaccacctcctatttaat

SEQ ID NO: 28635 - DNA, 25 bp, probe
atgtttgtcaccacctcctatttaa

SEQ ID NO: 28636 - DNA, 25 bp, probe
gttcttacaggtgactctgctaact

SEQ ID NO: 28637 - DNA, 25 bp, probe
ggtgactctgctaacttatcatgga

SEQ ID NO: 28638 - DNA, 25 bp, probe
aggtgactctgctaacttatcatgg

SEQ ID NO: 28639 - DNA, 25 bp, probe
accacctcctatttaatttccttgt

SEQ ID NO: 28640 - DNA, 25 bp, probe
gtcaccacctcctatttaatttcct

SEQ ID NO: 28641 - DNA, 25 bp, probe
caccacctcctatttaatttccttg

SEQ ID NO: 28642 - DNA, 25 bp, probe
tcaccacctcctatttaatttcctt

SEQ ID NO: 28643 - DNA, 25 bp, probe
tgtcaccacctcctatttaatttcc

SEQ ID NO: 28644 - DNA, 25 bp, probe
gtttgtcaccacctcctatttaatt

SEQ ID NO: 28645 - DNA, 25 bp, probe
tgctaacttatcatggagtcgtgtt

SEQ ID NO: 28646 - DNA, 25 bp, probe
ctctgctaacttatcatggagtcgt

SEQ ID NO: 28647 - DNA, 25 bp, probe
aaatgagacgaatgaaaccatacat

SEQ ID NO: 28648 - DNA, 25 bp, probe
ttgtcaccacctcctatttaatttc

SEQ ID NO: 28649 - DNA, 25 bp, probe
agtctgactctactcattagattcc

SEQ ID NO: 28650 - DNA, 25 bp, probe
ccacctcctatttaatttccttgtt

SEQ ID NO: 28651 - DNA, 25 bp, probe
ccactgcttgaagaagaatatgtat

SEQ ID NO: 28652 - DNA, 25 bp, probe
gccactgcttgaagaagaatatgta

SEQ ID NO: 28653 - DNA, 25 bp, probe
actgcttgaagaagaatatgtatgt

SEQ ID NO: 28654 - DNA, 25 bp, probe
cactgcttgaagaagaatatgtatg

SEQ ID NO: 28655 - DNA, 25 bp, probe
ctgcttgaagaagaatatgtatgtt

SEQ ID NO: 28656 - DNA, 25 bp, probe
ttatgtggaagaagcaaacctgata

SEQ ID NO: 28657 - DNA, 25 bp, probe
gtttctatcttgtatgtctgtgtgc

SEQ ID NO: 28658 - DNA, 25 bp, probe
attatgtggaagaagcaaacctgat

SEQ ID NO: 28659 - DNA, 25 bp, probe
tatgtggaagaagcaaacctgatac

SEQ ID NO: 28660 - DNA, 25 bp, probe
tttctatcttgtatgtctgtgtgcc

SEQ ID NO: 28661 - DNA, 25 bp, probe
ggaagaagcaaacctgatacaattt

SEQ ID NO: 28662 - DNA, 25 bp, probe
aaattatgtggaagaagcaaacctg

SEQ ID NO: 28663 - DNA, 25 bp, probe
gaaattatgtggaagaagcaaacct

SEQ ID NO: 28664 - DNA, 25 bp, probe
tggaaattatgtggaagaagcaaac

SEQ ID NO: 28665 - DNA, 25 bp, probe
gtggaaattatgtggaagaagcaaa

SEQ ID NO: 28666 - DNA, 25 bp, probe
aaggagtggaaattatgtggaagaa

SEQ ID NO: 28667 - DNA, 25 bp, probe
aggagtggaaattatgtggaagaag

SEQ ID NO: 28668 - DNA, 25 bp, probe
gacataagtaaatgagcctttctgc

SEQ ID NO: 28669 - DNA, 25 bp, probe
gatacaatttgcccaaggtaaacag

SEQ ID NO: 28670 - DNA, 25 bp, probe
ctgatacaatttgcccaaggtaaac

SEQ ID NO: 28671 - DNA, 25 bp, probe
caaggagtggaaattatgtggaaga

SEQ ID NO: 28672 - DNA, 25 bp, probe
ttctggtgttatgaagtccctctat

SEQ ID NO: 28673 - DNA, 25 bp, probe
ggaaattatgtggaagaagcaaacc

SEQ ID NO: 28674 - DNA, 25 bp, probe
tgtttctatcttgtatgtctgtgtg

SEQ ID NO: 28675 - DNA, 25 bp, probe
tggaagaagcaaacctgatacaatt

SEQ ID NO: 28676 - DNA, 25 bp, probe
aattatgtggaagaagcaaacctga

SEQ ID NO: 28677 - DNA, 25 bp, probe
agtggaaattatgtggaagaagcaa

SEQ ID NO: 28678 - DNA, 25 bp, probe
tttctggtgttatgaagtccctcta

SEQ ID NO: 28679 - DNA, 25 bp, probe
tctggtgttatgaagtccctctatg

SEQ ID NO: 28680 - DNA, 25 bp, probe
ccctgtgtataaagccattattctc

SEQ ID NO: 28681 - DNA, 25 bp, probe
ccctaatcactattgcttcctaaag

SEQ ID NO: 28682 - DNA, 25 bp, probe
atacaatttgcccaaggtaaacagt

SEQ ID NO: 28683 - DNA, 25 bp, probe
tgatacaatttgcccaaggtaaaca

SEQ ID NO: 28684 - DNA, 25 bp, probe
gccctgtgtataaagccattattct

SEQ ID NO: 28685 - DNA, 25 bp, probe
agccctgtgtataaagccattattc

SEQ ID NO: 28686 - DNA, 25 bp, probe
cataagtaaatgagcctttctgcct

SEQ ID NO: 28687 - DNA, 25 bp, probe
gtggaagaagcaaacctgatacaat

SEQ ID NO: 28688 - DNA, 25 bp, probe
tggtgttatgaagtccctctatgtc

SEQ ID NO: 28689 - DNA, 25 bp, probe
ctggtgttatgaagtccctctatgt

SEQ ID NO: 28690 - DNA, 25 bp, probe
gagtggaaattatgtggaagaagca

SEQ ID NO: 28691 - DNA, 25 bp, probe
tacaatttgcccaaggtaaacagtt

SEQ ID NO: 28692 - DNA, 25 bp, probe
acataagtaaatgagcctttctgcc

SEQ ID NO: 28693 - DNA, 25 bp, probe
tgttatgaagtccctctatgtcgtc

SEQ ID NO: 28694 - DNA, 25 bp, probe
agacataagtaaatgagcctttctg

SEQ ID NO: 28695 - DNA, 25 bp, probe
tctgagttattacgctacatgacaa

SEQ ID NO: 28696 - DNA, 25 bp, probe
aaggtctgagttattacgctacatg

SEQ ID NO: 28697 - DNA, 25 bp, probe
ctgagttattacgctacatgacaac

SEQ ID NO: 28698 - DNA, 25 bp, probe
aggtctgagttattacgctacatga

SEQ ID NO: 28699 - DNA, 25 bp, probe
tgagttattacgctacatgacaacg

SEQ ID NO: 28700 - DNA, 25 bp, probe
gtctgagttattacgctacatgaca

SEQ ID NO: 28701 - DNA, 25 bp, probe
aaaggtctgagttattacgctacat

SEQ ID NO: 28702 - DNA, 25 bp, probe
ggtctgagttattacgctacatgac

SEQ ID NO: 28703 - DNA, 25 bp, probe
caaaggtctgagttattacgctaca

SEQ ID NO: 28704 - DNA, 25 bp, probe
tgttcttgcctgtgacctcttattg

SEQ ID NO: 28705 - DNA, 25 bp, probe
gtgttcttgcctgtgacctcttatt

SEQ ID NO: 28706 - DNA, 25 bp, probe
tggcagacagaatcactatttcaag

SEQ ID NO: 28707 - DNA, 25 bp, probe
gcagacagaatcactatttcaagtt

SEQ ID NO: 28708 - DNA, 25 bp, probe
ggcagacagaatcactatttcaagt

SEQ ID NO: 28709 - DNA, 25 bp, probe
gcaaaggtctgagttattacgctac

SEQ ID NO: 28710 - DNA, 25 bp, probe
ttggaagtgtggaaaggaggtttat

SEQ ID NO: 28711 - DNA, 25 bp, probe
aaatccctttcctctgtgtttacca

SEQ ID NO: 28712 - DNA, 25 bp, probe
agtgttcttgcctgtgacctcttat

SEQ ID NO: 28713 - DNA, 25 bp, probe
tggaagtgtggaaaggaggtttatc

SEQ ID NO: 28714 - DNA, 25 bp, probe
gtggcagacagaatcactatttcaa

SEQ ID NO: 28715 - DNA, 25 bp, probe
gttggaagtgtggaaaggaggttta

SEQ ID NO: 28716 - DNA, 25 bp, probe
gttcttgcctgtgacctcttattgc

SEQ ID NO: 28717 - DNA, 25 bp, probe
cagtctaagatgagagcctgtgaca

SEQ ID NO: 28718 - DNA, 25 bp, probe
ttgtcatcaaggaggcaaattgtct

SEQ ID NO: 28719 - DNA, 25 bp, probe
agtctaagatgagagcctgtgacag

SEQ ID NO: 28720 - DNA, 25 bp, probe
gaagtgtggaaaggaggtttatcgg

SEQ ID NO: 28721 - DNA, 25 bp, probe
ggaagtgtggaaaggaggtttatcg

SEQ ID NO: 28722 - DNA, 25 bp, probe
gagttattacgctacatgacaacgt

SEQ ID NO: 28723 - DNA, 25 bp, probe
tgcaaaggtctgagttattacgcta

SEQ ID NO: 28724 - DNA, 25 bp, probe
cagacagaatcactatttcaagtta

SEQ ID NO: 28725 - DNA, 25 bp, probe
aatccctttcctctgtgtttaccac

SEQ ID NO: 28726 - DNA, 25 bp, probe
ttaccaccacctgtcttcctgtaga

SEQ ID NO: 28727 - DNA, 25 bp, probe
aaaatccctttcctctgtgtttacc

SEQ ID NO: 28728 - DNA, 25 bp, probe
cagaacaatggatcggcttccttac

SEQ ID NO: 28729 - DNA, 25 bp, probe
gggataagtcttttgtcatcaagga

SEQ ID NO: 28730 - DNA, 25 bp, probe
gataagtcttttgtcatcaaggagg

SEQ ID NO: 28731 - DNA, 25 bp, probe
ggataagtcttttgtcatcaaggag

SEQ ID NO: 28732 - DNA, 25 bp, probe
tgtcatcaaggaggcaaattgtctc

SEQ ID NO: 28733 - DNA, 25 bp, probe
tttaccaccacctgtcttcctgtag

SEQ ID NO: 28734 - DNA, 25 bp, probe
cagatggacctgctagatttggaag

SEQ ID NO: 28735 - DNA, 25 bp, probe
ataagtcttttgtcatcaaggaggc

SEQ ID NO: 28736 - DNA, 25 bp, probe
ggggataagtcttttgtcatcaagg

SEQ ID NO: 28737 - DNA, 25 bp, probe
cctcggcaacagtctaagatgagag

SEQ ID NO: 28738 - DNA, 25 bp, probe
ctctttgagaatgtgttcttctggc

SEQ ID NO: 28739 - DNA, 25 bp, probe
ctcttcaagttcttcttctggatcg

SEQ ID NO: 28740 - DNA, 25 bp, probe
gctcttcaagttcttcttctggatc

SEQ ID NO: 28741 - DNA, 25 bp, probe
tcttcaagttcttcttctggatcgg

SEQ ID NO: 28742 - DNA, 25 bp, probe
cgctcttcaagttcttcttctggat

SEQ ID NO: 28743 - DNA, 25 bp, probe
caagttcttcttctggatcggctac

SEQ ID NO: 28744 - DNA, 25 bp, probe
tcaagttcttcttctggatcggcta

SEQ ID NO: 28745 - DNA, 25 bp, probe
cttcttcttcatctacagcctgtac

SEQ ID NO: 28746 - DNA, 25 bp, probe
aagttcttcttctggatcggctact

SEQ ID NO: 28747 - DNA, 25 bp, probe
caccgacaatctttgattactgaaa

SEQ ID NO: 28748 - DNA, 25 bp, probe
ccttcttcttcatctacagcctgta

SEQ ID NO: 28749 - DNA, 25 bp, probe
cttcaagttcttcttctggatcggc

SEQ ID NO: 28750 - DNA, 25 bp, probe
ccgacaatctttgattactgaaagt

SEQ ID NO: 28751 - DNA, 25 bp, probe
accgacaatctttgattactgaaag

SEQ ID NO: 28752 - DNA, 25 bp, probe
gaaagcaccgacaatctttgattac

SEQ ID NO: 28753 - DNA, 25 bp, probe
agaaagcaccgacaatctttgatta

SEQ ID NO: 28754 - DNA, 25 bp, probe
gcaccgacaatctttgattactgaa

SEQ ID NO: 28755 - DNA, 25 bp, probe
aagcaccgacaatctttgattactg

SEQ ID NO: 28756 - DNA, 25 bp, probe
aaagcaccgacaatctttgattact

SEQ ID NO: 28757 - DNA, 25 bp, probe
ttcttcttcatctacagcctgtacg

SEQ ID NO: 28758 - DNA, 25 bp, probe
atctacacggtcttcaaccaggatt

SEQ ID NO: 28759 - DNA, 25 bp, probe
ttcaagttcttcttctggatcggct

SEQ ID NO: 28760 - DNA, 25 bp, probe
agttcttcttctggatcggctactg

SEQ ID NO: 28761 - DNA, 25 bp, probe
aacagccaaaacaaccaaactattt

SEQ ID NO: 28762 - DNA, 25 bp, probe
caacagccaaaacaaccaaactatt

SEQ ID NO: 28763 - DNA, 25 bp, probe
ccgctcttcaagttcttcttctgga

SEQ ID NO: 28764 - DNA, 25 bp, probe
agcaccgacaatctttgattactga

SEQ ID NO: 28765 - DNA, 25 bp, probe
gagaaagcaccgacaatctttgatt

SEQ ID NO: 28766 - DNA, 25 bp, probe
acaacagccaaaacaaccaaactat

SEQ ID NO: 28767 - DNA, 25 bp, probe
catctacacggtcttcaaccaggat

SEQ ID NO: 28768 - DNA, 25 bp, probe
cgacaatctttgattactgaaagta

SEQ ID NO: 28769 - DNA, 25 bp, probe
aacaacagccaaaacaaccaaacta

SEQ ID NO: 28770 - DNA, 25 bp, probe
aaaacaacagccaaaacaaccaaac

SEQ ID NO: 28771 - DNA, 25 bp, probe
agccaaaacaaccaaactattttct

SEQ ID NO: 28772 - DNA, 25 bp, probe
cagccaaaacaaccaaactattttc

SEQ ID NO: 28773 - DNA, 25 bp, probe
acagccaaaacaaccaaactatttt

SEQ ID NO: 28774 - DNA, 25 bp, probe
ggttccccttcttcttcatctacag

SEQ ID NO: 28775 - DNA, 25 bp, probe
ctggttccccttcttcttcatctac

SEQ ID NO: 28776 - DNA, 25 bp, probe
gccaaaacaaccaaactattttcta

SEQ ID NO: 28777 - DNA, 25 bp, probe
ctacacggtcttcaaccaggatttc

SEQ ID NO: 28778 - DNA, 25 bp, probe
gttccccttcttcttcatctacagc

SEQ ID NO: 28779 - DNA, 25 bp, probe
tggttccccttcttcttcatctaca

SEQ ID NO: 28780 - DNA, 25 bp, probe
tcttcttcatctacagcctgtacgg

SEQ ID NO: 28781 - DNA, 25 bp, probe
aaacaacagccaaaacaaccaaact

SEQ ID NO: 28782 - DNA, 25 bp, probe
tctacacggtcttcaaccaggattt

SEQ ID NO: 28783 - DNA, 25 bp, probe
ggatgttcagatggagcaagtaatg

SEQ ID NO: 28784 - DNA, 25 bp, probe
aggatgttcagatggagcaagtaat

SEQ ID NO: 28785 - DNA, 25 bp, probe
gatgttcagatggagcaagtaatga

SEQ ID NO: 28786 - DNA, 25 bp, probe
atgttcagatggagcaagtaatgac

SEQ ID NO: 28787 - DNA, 25 bp, probe
ttactatgtcatggtcatctgctac

SEQ ID NO: 28788 - DNA, 25 bp, probe
cattactatgtcatggtcatctgct

SEQ ID NO: 28789 - DNA, 25 bp, probe
attactatgtcatggtcatctgcta

SEQ ID NO: 28790 - DNA, 25 bp, probe
gaggatgttcagatggagcaagtaa

SEQ ID NO: 28791 - DNA, 25 bp, probe
ggcattactatgtcatggtcatctg

SEQ ID NO: 28792 - DNA, 25 bp, probe
tactatgtcatggtcatctgctacg

SEQ ID NO: 28793 - DNA, 25 bp, probe
cggcattactatgtcatggtcatct

SEQ ID NO: 28794 - DNA, 25 bp, probe
tgttcagatggagcaagtaatgacg

SEQ ID NO: 28795 - DNA, 25 bp, probe
ggaggatgttcagatggagcaagta

SEQ ID NO: 28796 - DNA, 25 bp, probe
gttcagatggagcaagtaatgacgg

SEQ ID NO: 28797 - DNA, 25 bp, probe
catggtcatctgctacgtctacttc

SEQ ID NO: 28798 - DNA, 25 bp, probe
tccagctatgtgtacaataatgacc

SEQ ID NO: 28799 - DNA, 25 bp, probe
ccttccagctatgtgtacaataatg

SEQ ID NO: 28800 - DNA, 25 bp, probe
ccagctatgtgtacaataatgacca

SEQ ID NO: 28801 - DNA, 25 bp, probe
ttcagatggagcaagtaatgacgga

SEQ ID NO: 28802 - DNA, 25 bp, probe
cagctatgtgtacaataatgaccaa

SEQ ID NO: 28803 - DNA, 25 bp, probe
ctatgtcatggtcatctgctacgtc

SEQ ID NO: 28804 - DNA, 25 bp, probe
ttccagctatgtgtacaataatgac

SEQ ID NO: 28805 - DNA, 25 bp, probe
atggtcatctgctacgtctacttca

SEQ ID NO: 28806 - DNA, 25 bp, probe
tcatggtcatctgctacgtctactt

SEQ ID NO: 28807 - DNA, 25 bp, probe
gcattactatgtcatggtcatctgc

SEQ ID NO: 28808 - DNA, 25 bp, probe
cttccagctatgtgtacaataatga

SEQ ID NO: 28809 - DNA, 25 bp, probe
atgtcatggtcatctgctacgtcta

SEQ ID NO: 28810 - DNA, 25 bp, probe
tatgtcatggtcatctgctacgtct

SEQ ID NO: 28811 - DNA, 25 bp, probe
agctatgtgtacaataatgaccaat

SEQ ID NO: 28812 - DNA, 25 bp, probe
gctatgtgtacaataatgaccaatc

SEQ ID NO: 28813 - DNA, 25 bp, probe
actatgtcatggtcatctgctacgt

SEQ ID NO: 28814 - DNA, 25 bp, probe
gaactgttatgatcacctccacatc

SEQ ID NO: 28815 - DNA, 25 bp, probe
gatggagcaagtaatgacggactct

SEQ ID NO: 28816 - DNA, 25 bp, probe
agatggagcaagtaatgacggactc

SEQ ID NO: 28817 - DNA, 25 bp, probe
ttatgatcacctccacatctcagac

SEQ ID NO: 28818 - DNA, 25 bp, probe
gttatgatcacctccacatctcaga

SEQ ID NO: 28819 - DNA, 25 bp, probe
tgtgtacaataatgaccaatctgtt

SEQ ID NO: 28820 - DNA, 25 bp, probe
aactgttatgatcacctccacatct

SEQ ID NO: 28821 - DNA, 25 bp, probe
atgtgtacaataatgaccaatctgt

SEQ ID NO: 28822 - DNA, 25 bp, probe
gtcatggtcatctgctacgtctact

SEQ ID NO: 28823 - DNA, 25 bp, probe
cagatggagcaagtaatgacggact

SEQ ID NO: 28824 - DNA, 25 bp, probe
tcagatggagcaagtaatgacggac

SEQ ID NO: 28825 - DNA, 25 bp, probe
gaggaggatgttcagatggagcaag

SEQ ID NO: 28826 - DNA, 25 bp, probe
atggagcaagtaatgacggactctg

SEQ ID NO: 28827 - DNA, 25 bp, probe
aagttccataggtgattctgatagg

SEQ ID NO: 28828 - DNA, 25 bp, probe
atgatgtggaagaactgttagagag

SEQ ID NO: 28829 - DNA, 25 bp, probe
gatgtggaagaactgttagagagac

SEQ ID NO: 28830 - DNA, 25 bp, probe
tgatgtggaagaactgttagagaga

SEQ ID NO: 28831 - DNA, 25 bp, probe
tatgatgtggaagaactgttagaga

SEQ ID NO: 28832 - DNA, 25 bp, probe
agtgcctagaacataatagtgctta

SEQ ID NO: 28833 - DNA, 25 bp, probe
aagtgcctagaacataatagtgctt

SEQ ID NO: 28834 - DNA, 25 bp, probe
atcttcaacaggatatgacaacagt

SEQ ID NO: 28835 - DNA, 25 bp, probe
catcttcaacaggatatgacaacag

SEQ ID NO: 28836 - DNA, 25 bp, probe
agttccataggtgattctgataggc

SEQ ID NO: 28837 - DNA, 25 bp, probe
tcttcaacaggatatgacaacagtg

SEQ ID NO: 28838 - DNA, 25 bp, probe
atgtggaagaactgttagagagacc

SEQ ID NO: 28839 - DNA, 25 bp, probe
gttccataggtgattctgataggca

SEQ ID NO: 28840 - DNA, 25 bp, probe
aattacctgtgtcttggaagaagtg

SEQ ID NO: 28841 - DNA, 25 bp, probe
atatgatgtggaagaactgttagag

SEQ ID NO: 28842 - DNA, 25 bp, probe
gaatggcaggtcttgaagataacat

SEQ ID NO: 28843 - DNA, 25 bp, probe
caattacctgtgtcttggaagaagt

SEQ ID NO: 28844 - DNA, 25 bp, probe
gattccttctgtcctgaacacatag

SEQ ID NO: 28845 - DNA, 25 bp, probe
cttcaacaggatatgacaacagtgt

SEQ ID NO: 28846 - DNA, 25 bp, probe
tatggaatggcaggtcttgaagata

SEQ ID NO: 28847 - DNA, 25 bp, probe
atggcaggtcttgaagataacattg

SEQ ID NO: 28848 - DNA, 25 bp, probe
gtgcctagaacataatagtgcttat

SEQ ID NO: 28849 - DNA, 25 bp, probe
catctctgttcatcattgactgctc

SEQ ID NO: 28850 - DNA, 25 bp, probe
cctgatatggattcctataacatgc

SEQ ID NO: 28851 - DNA, 25 bp, probe
tgattccttctgtcctgaacacata

SEQ ID NO: 28852 - DNA, 25 bp, probe
atctctgttcatcattgactgctct

SEQ ID NO: 28853 - DNA, 25 bp, probe
tacctgtgtcttggaagaagtgatt

SEQ ID NO: 28854 - DNA, 25 bp, probe
ttacctgtgtcttggaagaagtgat

SEQ ID NO: 28855 - DNA, 25 bp, probe
attacctgtgtcttggaagaagtga

SEQ ID NO: 28856 - DNA, 25 bp, probe
tctctgttcatcattgactgctctt

SEQ ID NO: 28857 - DNA, 25 bp, probe
ataggtgattctgataggcagtgag

SEQ ID NO: 28858 - DNA, 25 bp, probe
tcatctctgttcatcattgactgct

SEQ ID NO: 28859 - DNA, 25 bp, probe
atggaatggcaggtcttgaagataa

SEQ ID NO: 28860 - DNA, 25 bp, probe
ataatagtgcttatgcttgacaccg

SEQ ID NO: 28861 - DNA, 25 bp, probe
tgattctgataggcagtgaggttag

SEQ ID NO: 28862 - DNA, 25 bp, probe
cataggtgattctgataggcagtga

SEQ ID NO: 28863 - DNA, 25 bp, probe
ttccataggtgattctgataggcag

SEQ ID NO: 28864 - DNA, 25 bp, probe
gtgattctgataggcagtgaggtta

SEQ ID NO: 28865 - DNA, 25 bp, probe
agccttctttgagttgggtattatt

SEQ ID NO: 28866 - DNA, 25 bp, probe
agttatgatgggaagtatggaatgg

SEQ ID NO: 28867 - DNA, 25 bp, probe
agggcactgtttattattgaatgtc

SEQ ID NO: 28868 - DNA, 25 bp, probe
gagggcactgtttattattgaatgt

SEQ ID NO: 28869 - DNA, 25 bp, probe
tgagggcactgtttattattgaatg

SEQ ID NO: 28870 - DNA, 25 bp, probe
ctgatatggattcctataacatgct

SEQ ID NO: 28871 - DNA, 25 bp, probe
atataccttcagagtccgtcagtaa

SEQ ID NO: 28872 - DNA, 25 bp, probe
aatataccttcagagtccgtcagta

SEQ ID NO: 28873 - DNA, 25 bp, probe
aagtgcctacagattatatggtgaa

SEQ ID NO: 28874 - DNA, 25 bp, probe
tataccttcagagtccgtcagtaag

SEQ ID NO: 28875 - DNA, 25 bp, probe
gcaactatgttcagtgatgatgata

SEQ ID NO: 28876 - DNA, 25 bp, probe
ttattggaatagcatgttagcagca

SEQ ID NO: 28877 - DNA, 25 bp, probe
tattggaatagcatgttagcagcag

SEQ ID NO: 28878 - DNA, 25 bp, probe
aaggactagagcagtgtgtattcaa

SEQ ID NO: 28879 - DNA, 25 bp, probe
ttgaaggactagagcagtgtgtatt

SEQ ID NO: 28880 - DNA, 25 bp, probe
tgatgtctgacctccttatatatgt

SEQ ID NO: 28881 - DNA, 25 bp, probe
gaaggactagagcagtgtgtattca

SEQ ID NO: 28882 - DNA, 25 bp, probe
tgaaggactagagcagtgtgtattc

SEQ ID NO: 28883 - DNA, 25 bp, probe
cttgaaggactagagcagtgtgtat

SEQ ID NO: 28884 - DNA, 25 bp, probe
aggtgatcctaatagtgaagacatt

SEQ ID NO: 28885 - DNA, 25 bp, probe
aaggtgatcctaatagtgaagacat

SEQ ID NO: 28886 - DNA, 25 bp, probe
agtgcctacagattatatggtgaaa

SEQ ID NO: 28887 - DNA, 25 bp, probe
aaagtgcctacagattatatggtga

SEQ ID NO: 28888 - DNA, 25 bp, probe
gatgatgataaacaaggtggtgact

SEQ ID NO: 28889 - DNA, 25 bp, probe
atgatgataaacaaggtggtgactt

SEQ ID NO: 28890 - DNA, 25 bp, probe
tgatgatgataaacaaggtggtgac

SEQ ID NO: 28891 - DNA, 25 bp, probe
gtgatgatgataaacaaggtggtga

SEQ ID NO: 28892 - DNA, 25 bp, probe
agtgatgatgataaacaaggtggtg

SEQ ID NO: 28893 - DNA, 25 bp, probe
cagtgatgatgataaacaaggtggt

SEQ ID NO: 28894 - DNA, 25 bp, probe
ccaacaactagaacacggtgactaa

SEQ ID NO: 28895 - DNA, 25 bp, probe
aaatataccttcagagtccgtcagt

SEQ ID NO: 28896 - DNA, 25 bp, probe
tagtgaagacattaacattgcagaa

SEQ ID NO: 28897 - DNA, 25 bp, probe
ggtgatcctaatagtgaagacatta

SEQ ID NO: 28898 - DNA, 25 bp, probe
tgcaactatgttcagtgatgatgat

SEQ ID NO: 28899 - DNA, 25 bp, probe
atagtgaagacattaacattgcaga

SEQ ID NO: 28900 - DNA, 25 bp, probe
ctggaagaagtggatgttgaagttt

SEQ ID NO: 28901 - DNA, 25 bp, probe
tcttgaaggactagagcagtgtgta

SEQ ID NO: 28902 - DNA, 25 bp, probe
taagctggaagaagtggatgttgaa

SEQ ID NO: 28903 - DNA, 25 bp, probe
aacaactagaacacggtgactaaag

SEQ ID NO: 28904 - DNA, 25 bp, probe
ttcagtgatgatgataaacaaggtg

SEQ ID NO: 28905 - DNA, 25 bp, probe
gttcagtgatgatgataaacaaggt

SEQ ID NO: 28906 - DNA, 25 bp, probe
atgatgtctgacctccttatatatg

SEQ ID NO: 28907 - DNA, 25 bp, probe
gaatagcatgttagcagcagtgaac

SEQ ID NO: 28908 - DNA, 25 bp, probe
tcagtgatgatgataaacaaggtgg

SEQ ID NO: 28909 - DNA, 25 bp, probe
caacaactagaacacggtgactaaa

SEQ ID NO: 28910 - DNA, 25 bp, probe
attggaatagcatgttagcagcagt

SEQ ID NO: 28911 - DNA, 25 bp, probe
tttattggaatagcatgttagcagc

SEQ ID NO: 28912 - DNA, 25 bp, probe
caactatgttcagtgatgatgataa

SEQ ID NO: 28913 - DNA, 25 bp, probe
caactagaacacggtgactaaagac

SEQ ID NO: 28914 - DNA, 25 bp, probe
tgactaaagacacagttctgaatgt

SEQ ID NO: 28915 - DNA, 25 bp, probe
tccacacttaatataattcgccact

SEQ ID NO: 28916 - DNA, 25 bp, probe
aatataattcgccacttctcctctt

SEQ ID NO: 28917 - DNA, 25 bp, probe
ccacacttaatataattcgccactt

SEQ ID NO: 28918 - DNA, 25 bp, probe
atccacacttaatataattcgccac

SEQ ID NO: 28919 - DNA, 25 bp, probe
taatataattcgccacttctcctct

SEQ ID NO: 28920 - DNA, 25 bp, probe
acttaatataattcgccacttctcc

SEQ ID NO: 28921 - DNA, 25 bp, probe
aatccacacttaatataattcgcca

SEQ ID NO: 28922 - DNA, 25 bp, probe
ttaatataattcgccacttctcctc

SEQ ID NO: 28923 - DNA, 25 bp, probe
cttaatataattcgccacttctcct

SEQ ID NO: 28924 - DNA, 25 bp, probe
acacttaatataattcgccacttct

SEQ ID NO: 28925 - DNA, 25 bp, probe
cacacttaatataattcgccacttc

SEQ ID NO: 28926 - DNA, 25 bp, probe
cacttaatataattcgccacttctc

SEQ ID NO: 28927 - DNA, 25 bp, probe
atataattcgccacttctcctcttt

SEQ ID NO: 28928 - DNA, 25 bp, probe
gcatacttcaacaaggactttcaaa

SEQ ID NO: 28929 - DNA, 25 bp, probe
atttacgcatacttcaacaaggact

SEQ ID NO: 28930 - DNA, 25 bp, probe
catttacgcatacttcaacaaggac

SEQ ID NO: 28931 - DNA, 25 bp, probe
gtcatttacgcatacttcaacaagg

SEQ ID NO: 28932 - DNA, 25 bp, probe
tcatttacgcatacttcaacaagga

SEQ ID NO: 28933 - DNA, 25 bp, probe
ttacgcatacttcaacaaggacttt

SEQ ID NO: 28934 - DNA, 25 bp, probe
tttacgcatacttcaacaaggactt

SEQ ID NO: 28935 - DNA, 25 bp, probe
gaatccacacttaatataattcgcc

SEQ ID NO: 28936 - DNA, 25 bp, probe
ggaatccacacttaatataattcgc

SEQ ID NO: 28937 - DNA, 25 bp, probe
tacgcatacttcaacaaggactttc

SEQ ID NO: 28938 - DNA, 25 bp, probe
cgcatacttcaacaaggactttcaa

SEQ ID NO: 28939 - DNA, 25 bp, probe
agatcattaagtgtaacttctgccg

SEQ ID NO: 28940 - DNA, 25 bp, probe
aagatcattaagtgtaacttctgcc

SEQ ID NO: 28941 - DNA, 25 bp, probe
cttcttcatcgtggctcttgttctg

SEQ ID NO: 28942 - DNA, 25 bp, probe
acgcatacttcaacaaggactttca

SEQ ID NO: 28943 - DNA, 25 bp, probe
gaagatcattaagtgtaacttctgc

SEQ ID NO: 28944 - DNA, 25 bp, probe
gatcattaagtgtaacttctgccgc

SEQ ID NO: 28945 - DNA, 25 bp, probe
gcgtttaagaagatcattaagtgta

SEQ ID NO: 28946 - DNA, 25 bp, probe
tataattcgccacttctcctctttt

SEQ ID NO: 28947 - DNA, 25 bp, probe
tacttcaacaaggactttcaaaacg

SEQ ID NO: 28948 - DNA, 25 bp, probe
gggaatccacacttaatataattcg

SEQ ID NO: 28949 - DNA, 25 bp, probe
ggctactccaactctctgcttaacc

SEQ ID NO: 28950 - DNA, 25 bp, probe
cgtcatttacgcatacttcaacaag

SEQ ID NO: 28951 - DNA, 25 bp, probe
ccttcttcatcgtggctcttgttct

SEQ ID NO: 28952 - DNA, 25 bp, probe
atacttcaacaaggactttcaaaac

SEQ ID NO: 28953 - DNA, 25 bp, probe
catacttcaacaaggactttcaaaa

SEQ ID NO: 28954 - DNA, 25 bp, probe
atcattaagtgtaacttctgccgcc

SEQ ID NO: 28955 - DNA, 25 bp, probe
ccgtcatttacgcatacttcaacaa

SEQ ID NO: 28956 - DNA, 25 bp, probe
cgcgtttaagaagatcattaagtgt

SEQ ID NO: 28957 - DNA, 25 bp, probe
agggaatccacacttaatataattc

SEQ ID NO: 28958 - DNA, 25 bp, probe
acttcaacaaggactttcaaaacgc

SEQ ID NO: 28959 - DNA, 25 bp, probe
gatcaatcacattagctcctggaag

SEQ ID NO: 28960 - DNA, 25 bp, probe
catcacctactaccgcatcttcaag

SEQ ID NO: 28961 - DNA, 25 bp, probe
ccaagaggatcaatcacattagctc

SEQ ID NO: 28962 - DNA, 25 bp, probe
caagaggatcaatcacattagctcc

SEQ ID NO: 28963 - DNA, 25 bp, probe
gccaagaggatcaatcacattagct

SEQ ID NO: 28964 - DNA, 25 bp, probe
atcaatcacattagctcctggaagg

SEQ ID NO: 28965 - DNA, 25 bp, probe
ggatcaatcacattagctcctggaa

SEQ ID NO: 28966 - DNA, 25 bp, probe
aggccaagaggatcaatcacattag

SEQ ID NO: 28967 - DNA, 25 bp, probe
atcacctactaccgcatcttcaagg

SEQ ID NO: 28968 - DNA, 25 bp, probe
caggccaagaggatcaatcacatta

SEQ ID NO: 28969 - DNA, 25 bp, probe
gcatcacctactaccgcatcttcaa

SEQ ID NO: 28970 - DNA, 25 bp, probe
aagaggatcaatcacattagctcct

SEQ ID NO: 28971 - DNA, 25 bp, probe
ggccaagaggatcaatcacattagc

SEQ ID NO: 28972 - DNA, 25 bp, probe
agaggatcaatcacattagctcctg

SEQ ID NO: 28973 - DNA, 25 bp, probe
atcaggccaagaggatcaatcacat

SEQ ID NO: 28974 - DNA, 25 bp, probe
tcaggccaagaggatcaatcacatt

SEQ ID NO: 28975 - DNA, 25 bp, probe
aatcacattagctcctggaaggcag

SEQ ID NO: 28976 - DNA, 25 bp, probe
tcaatcacattagctcctggaaggc

SEQ ID NO: 28977 - DNA, 25 bp, probe
gaggatcaatcacattagctcctgg

SEQ ID NO: 28978 - DNA, 25 bp, probe
aggatcaatcacattagctcctgga

SEQ ID NO: 28979 - DNA, 25 bp, probe
caatcacattagctcctggaaggca

SEQ ID NO: 28980 - DNA, 25 bp, probe
gatcaggccaagaggatcaatcaca

SEQ ID NO: 28981 - DNA, 25 bp, probe
cacctactaccgcatcttcaaggtc

SEQ ID NO: 28982 - DNA, 25 bp, probe
ggatcaggccaagaggatcaatcac

SEQ ID NO: 28983 - DNA, 25 bp, probe
tcacctactaccgcatcttcaaggt

SEQ ID NO: 28984 - DNA, 25 bp, probe
ttcggcagtatcacaagaagattaa

SEQ ID NO: 28985 - DNA, 25 bp, probe
gttactaattcggacctgactgatg

SEQ ID NO: 28986 - DNA, 25 bp, probe
ccataatgactgaatcaaggaggaa

SEQ ID NO: 28987 - DNA, 25 bp, probe
gaagttactaattcggacctgactg

SEQ ID NO: 28988 - DNA, 25 bp, probe
agttactaattcggacctgactgat

SEQ ID NO: 28989 - DNA, 25 bp, probe
attaaccacaataaggcatgatctg

SEQ ID NO: 28990 - DNA, 25 bp, probe
aagttactaattcggacctgactga

SEQ ID NO: 28991 - DNA, 25 bp, probe
cacaataaggcatgatctggattaa

SEQ ID NO: 28992 - DNA, 25 bp, probe
ggaagttactaattcggacctgact

SEQ ID NO: 28993 - DNA, 25 bp, probe
ttccataatgactgaatcaaggagg

SEQ ID NO: 28994 - DNA, 25 bp, probe
ttactaattcggacctgactgatgc

SEQ ID NO: 28995 - DNA, 25 bp, probe
tccataatgactgaatcaaggagga

SEQ ID NO: 28996 - DNA, 25 bp, probe
tattaaccacaataaggcatgatct

SEQ ID NO: 28997 - DNA, 25 bp, probe
agatattaaccacaataaggcatga

SEQ ID NO: 28998 - DNA, 25 bp, probe
cggcagtatcacaagaagattaaag

SEQ ID NO: 28999 - DNA, 25 bp, probe
tcggcagtatcacaagaagattaaa

SEQ ID NO: 29000 - DNA, 25 bp, probe
attccataatgactgaatcaaggag

SEQ ID NO: 29001 - DNA, 25 bp, probe
cctttccagatggttcctacttaaa

SEQ ID NO: 29002 - DNA, 25 bp, probe
ggcagtatcacaagaagattaaagt

SEQ ID NO: 29003 - DNA, 25 bp, probe
ccacaataaggcatgatctggatta

SEQ ID NO: 29004 - DNA, 25 bp, probe
ttccagatggttcctacttaaatga

SEQ ID NO: 29005 - DNA, 25 bp, probe
tccagatggttcctacttaaatgat

SEQ ID NO: 29006 - DNA, 25 bp, probe
cggaagttactaattcggacctgac

SEQ ID NO: 29007 - DNA, 25 bp, probe
ttaaccacaataaggcatgatctgg

SEQ ID NO: 29008 - DNA, 25 bp, probe
cattccataatgactgaatcaagga

SEQ ID NO: 29009 - DNA, 25 bp, probe
agactctaaggaggtgaaatgaatc

SEQ ID NO: 29010 - DNA, 25 bp, probe
gagactctaaggaggtgaaatgaat

SEQ ID NO: 29011 - DNA, 25 bp, probe
caagaactttcaagccaacaaatga

SEQ ID NO: 29012 - DNA, 25 bp, probe
ccaagaactttcaagccaacaaatg

SEQ ID NO: 29013 - DNA, 25 bp, probe
tttccagatggttcctacttaaatg

SEQ ID NO: 29014 - DNA, 25 bp, probe
tgagactctaaggaggtgaaatgaa

SEQ ID NO: 29015 - DNA, 25 bp, probe
ccagatggttcctacttaaatgatt

SEQ ID NO: 29016 - DNA, 25 bp, probe
ctttccagatggttcctacttaaat

SEQ ID NO: 29017 - DNA, 25 bp, probe
cataatgactgaatcaaggaggaaa

SEQ ID NO: 29018 - DNA, 25 bp, probe
aagatgcttcccaagaactttcaag

SEQ ID NO: 29019 - DNA, 25 bp, probe
taaccacaataaggcatgatctgga

SEQ ID NO: 29020 - DNA, 25 bp, probe
ctgagactctaaggaggtgaaatga

SEQ ID NO: 29021 - DNA, 25 bp, probe
tctgagactctaaggaggtgaaatg

SEQ ID NO: 29022 - DNA, 25 bp, probe
atattaaccacaataaggcatgatc

SEQ ID NO: 29023 - DNA, 25 bp, probe
gatattaaccacaataaggcatgat

SEQ ID NO: 29024 - DNA, 25 bp, probe
atcacaagaagattaaagtggcaga

SEQ ID NO: 29025 - DNA, 25 bp, probe
gtatcacaagaagattaaagtggca

SEQ ID NO: 29026 - DNA, 25 bp, probe
acaataaggcatgatctggattaaa

SEQ ID NO: 29027 - DNA, 25 bp, probe
tatcacaagaagattaaagtggcag

SEQ ID NO: 29028 - DNA, 25 bp, probe
tcttattcggtgatgactcttgtta

SEQ ID NO: 29029 - DNA, 25 bp, probe
attcggtgatgactcttgttatctt

SEQ ID NO: 29030 - DNA, 25 bp, probe
tattcggtgatgactcttgttatct

SEQ ID NO: 29031 - DNA, 25 bp, probe
cttattcggtgatgactcttgttat

SEQ ID NO: 29032 - DNA, 25 bp, probe
ttattcggtgatgactcttgttatc

SEQ ID NO: 29033 - DNA, 25 bp, probe
cctcatcaatccaataatctacact

SEQ ID NO: 29034 - DNA, 25 bp, probe
gtcttattcggtgatgactcttgtt

SEQ ID NO: 29035 - DNA, 25 bp, probe
tcatcaatccaataatctacactgt

SEQ ID NO: 29036 - DNA, 25 bp, probe
catcaatccaataatctacactgtg

SEQ ID NO: 29037 - DNA, 25 bp, probe
ctcatcaatccaataatctacactg

SEQ ID NO: 29038 - DNA, 25 bp, probe
ttctgagacttggattaattcatgg

SEQ ID NO: 29039 - DNA, 25 bp, probe
ttcggtgatgactcttgttatcttt

SEQ ID NO: 29040 - DNA, 25 bp, probe
aactccctcatcaatccaataatct

SEQ ID NO: 29041 - DNA, 25 bp, probe
ccctcatcaatccaataatctacac

SEQ ID NO: 29042 - DNA, 25 bp, probe
tccctcatcaatccaataatctaca

SEQ ID NO: 29043 - DNA, 25 bp, probe
cctcctagtcttattcggtgatgac

SEQ ID NO: 29044 - DNA, 25 bp, probe
aaactccctcatcaatccaataatc

SEQ ID NO: 29045 - DNA, 25 bp, probe
actccctcatcaatccaataatcta

SEQ ID NO: 29046 - DNA, 25 bp, probe
gtgtttaatgaagagtttcggcaag

SEQ ID NO: 29047 - DNA, 25 bp, probe
ctccctcatcaatccaataatctac

SEQ ID NO: 29048 - DNA, 25 bp, probe
tcaatccaataatctacactgtgtt

SEQ ID NO: 29049 - DNA, 25 bp, probe
cactgtgtttaatgaagagtttcgg

SEQ ID NO: 29050 - DNA, 25 bp, probe
tgtgtttaatgaagagtttcggcaa

SEQ ID NO: 29051 - DNA, 25 bp, probe
atcaatccaataatctacactgtgt

SEQ ID NO: 29052 - DNA, 25 bp, probe
ttaaactccctcatcaatccaataa

SEQ ID NO: 29053 - DNA, 25 bp, probe
ctgtgtttaatgaagagtttcggca

SEQ ID NO: 29054 - DNA, 25 bp, probe
taaactccctcatcaatccaataat

SEQ ID NO: 29055 - DNA, 25 bp, probe
gcctcctagtcttattcggtgatga

SEQ ID NO: 29056 - DNA, 25 bp, probe
gctatttaaactccctcatcaatcc

SEQ ID NO: 29057 - DNA, 25 bp, probe
ggctatttaaactccctcatcaatc

SEQ ID NO: 29058 - DNA, 25 bp, probe
actgtgtttaatgaagagtttcggc

SEQ ID NO: 29059 - DNA, 25 bp, probe
ctgtaacctcatcgggattgtcttt

SEQ ID NO: 29060 - DNA, 25 bp, probe
tgtttaatgaagagtttcggcaagc

SEQ ID NO: 29061 - DNA, 25 bp, probe
acactgtgtttaatgaagagtttcg

SEQ ID NO: 29062 - DNA, 25 bp, probe
ttcttcacctggctaggctatttaa

SEQ ID NO: 29063 - DNA, 25 bp, probe
atttaaactccctcatcaatccaat

SEQ ID NO: 29064 - DNA, 25 bp, probe
ctatttaaactccctcatcaatcca

SEQ ID NO: 29065 - DNA, 25 bp, probe
cttcttcacctggctaggctattta

SEQ ID NO: 29066 - DNA, 25 bp, probe
aggctatttaaactccctcatcaat

SEQ ID NO: 29067 - DNA, 25 bp, probe
ctaggctatttaaactccctcatca

SEQ ID NO: 29068 - DNA, 25 bp, probe
tttaaactccctcatcaatccaata

SEQ ID NO: 29069 - DNA, 25 bp, probe
tatttaaactccctcatcaatccaa

SEQ ID NO: 29070 - DNA, 25 bp, probe
taggctatttaaactccctcatcaa

SEQ ID NO: 29071 - DNA, 25 bp, probe
gctaggctatttaaactccctcatc

SEQ ID NO: 29072 - DNA, 25 bp, probe
attatgagtcccaaaattcaaccct

SEQ ID NO: 29073 - DNA, 25 bp, probe
cattatgagtcccaaaattcaaccc

SEQ ID NO: 29074 - DNA, 25 bp, probe
ccattatgagtcccaaaattcaacc

SEQ ID NO: 29075 - DNA, 25 bp, probe
ttatgagtcccaaaattcaaccctc

SEQ ID NO: 29076 - DNA, 25 bp, probe
tatgagtcccaaaattcaaccctcc

SEQ ID NO: 29077 - DNA, 25 bp, probe
tcccaaaattcaaccctcccgatag

SEQ ID NO: 29078 - DNA, 25 bp, probe
gtcccaaaattcaaccctcccgata

SEQ ID NO: 29079 - DNA, 25 bp, probe
atgagtcccaaaattcaaccctccc

SEQ ID NO: 29080 - DNA, 25 bp, probe
catcctttatggcttcctctcctac

SEQ ID NO: 29081 - DNA, 25 bp, probe
atcctttatggcttcctctcctacc

SEQ ID NO: 29082 - DNA, 25 bp, probe
gaagactgaggaggaggatgaggag

SEQ ID NO: 29083 - DNA, 25 bp, probe
gagaagactgaggaggaggatgagg

SEQ ID NO: 29084 - DNA, 25 bp, probe
ggagaagactgaggaggaggatgag

SEQ ID NO: 29085 - DNA, 25 bp, probe
cttctttgggctctacttcctggtg

SEQ ID NO: 29086 - DNA, 25 bp, probe
tcctttatggcttcctctcctaccg

SEQ ID NO: 29087 - DNA, 25 bp, probe
cttctacgtgctcaacatcgtcaac

SEQ ID NO: 29088 - DNA, 25 bp, probe
ccatcctttatggcttcctctccta

SEQ ID NO: 29089 - DNA, 25 bp, probe
ccttctacgtgctcaacatcgtcaa

SEQ ID NO: 29090 - DNA, 25 bp, probe
caaccccatcctttatggcttcctc

SEQ ID NO: 29091 - DNA, 25 bp, probe
ctagcgataacattgattcacaagg

SEQ ID NO: 29092 - DNA, 25 bp, probe
cctagcgataacattgattcacaag

SEQ ID NO: 29093 - DNA, 25 bp, probe
tggataggctatgtcaattctggtt

SEQ ID NO: 29094 - DNA, 25 bp, probe
ttggataggctatgtcaattctggt

SEQ ID NO: 29095 - DNA, 25 bp, probe
ctagaggacctgagtctgctatatt

SEQ ID NO: 29096 - DNA, 25 bp, probe
tccatgtatctacctcactattcaa

SEQ ID NO: 29097 - DNA, 25 bp, probe
ttccatgtatctacctcactattca

SEQ ID NO: 29098 - DNA, 25 bp, probe
gcctagcgataacattgattcacaa

SEQ ID NO: 29099 - DNA, 25 bp, probe
ccatgtatctacctcactattcaag

SEQ ID NO: 29100 - DNA, 25 bp, probe
tactgtgcctagcgataacattgat

SEQ ID NO: 29101 - DNA, 25 bp, probe
cccaacagaacactaaacagactat

SEQ ID NO: 29102 - DNA, 25 bp, probe
tgtatagagatatgcagaaggaagg

SEQ ID NO: 29103 - DNA, 25 bp, probe
tgcctagcgataacattgattcaca

SEQ ID NO: 29104 - DNA, 25 bp, probe
cctagaggacctgagtctgctatat

SEQ ID NO: 29105 - DNA, 25 bp, probe
ctatgtcaattctggtttcaatccc

SEQ ID NO: 29106 - DNA, 25 bp, probe
taggctatgtcaattctggtttcaa

SEQ ID NO: 29107 - DNA, 25 bp, probe
ataggctatgtcaattctggtttca

SEQ ID NO: 29108 - DNA, 25 bp, probe
ctgtgcctagcgataacattgattc

SEQ ID NO: 29109 - DNA, 25 bp, probe
gctatgtcaattctggtttcaatcc

SEQ ID NO: 29110 - DNA, 25 bp, probe
ggctatgtcaattctggtttcaatc

SEQ ID NO: 29111 - DNA, 25 bp, probe
gataggctatgtcaattctggtttc

SEQ ID NO: 29112 - DNA, 25 bp, probe
tgctggtaatttgtatctgaaggag

SEQ ID NO: 29113 - DNA, 25 bp, probe
ctgctggtaatttgtatctgaagga

SEQ ID NO: 29114 - DNA, 25 bp, probe
tattgctgctggtaatttgtatctg

SEQ ID NO: 29115 - DNA, 25 bp, probe
ccaacagaacactaaacagactatt

SEQ ID NO: 29116 - DNA, 25 bp, probe
ggataggctatgtcaattctggttt

SEQ ID NO: 29117 - DNA, 25 bp, probe
aggctatgtcaattctggtttcaat

SEQ ID NO: 29118 - DNA, 25 bp, probe
attggataggctatgtcaattctgg

SEQ ID NO: 29119 - DNA, 25 bp, probe
attgctgctggtaatttgtatctga

SEQ ID NO: 29120 - DNA, 25 bp, probe
ttgctgctggtaatttgtatctgaa

SEQ ID NO: 29121 - DNA, 25 bp, probe
gagcaaaggtctaaagtttacagta

SEQ ID NO: 29122 - DNA, 25 bp, probe
gctggtaatttgtatctgaaggaga

SEQ ID NO: 29123 - DNA, 25 bp, probe
ataacattgattcacaagggaggaa

SEQ ID NO: 29124 - DNA, 25 bp, probe
cgagcaaaggtctaaagtttacagt

SEQ ID NO: 29125 - DNA, 25 bp, probe
gataacattgattcacaagggagga

SEQ ID NO: 29126 - DNA, 25 bp, probe
aaataaactgctgtgtgaagacctc

SEQ ID NO: 29127 - DNA, 25 bp, probe
tgctgctggtaatttgtatctgaag

SEQ ID NO: 29128 - DNA, 25 bp, probe
atattgctgctggtaatttgtatct

SEQ ID NO: 29129 - DNA, 25 bp, probe
catgtatctacctcactattcaagt

SEQ ID NO: 29130 - DNA, 25 bp, probe
gtgcctagcgataacattgattcac

SEQ ID NO: 29131 - DNA, 25 bp, probe
tagcgataacattgattcacaaggg

SEQ ID NO: 29132 - DNA, 25 bp, probe
tgtgcctagcgataacattgattca

SEQ ID NO: 29133 - DNA, 25 bp, probe
actgtgcctagcgataacattgatt

SEQ ID NO: 29134 - DNA, 25 bp, probe
ccgagcaaaggtctaaagtttacag

SEQ ID NO: 29135 - DNA, 25 bp, probe
ctataatccagtggtgccttacatg

SEQ ID NO: 29136 - DNA, 25 bp, probe
gctataatccagtggtgccttacat

SEQ ID NO: 29137 - DNA, 25 bp, probe
atgctataatccagtggtgccttac

SEQ ID NO: 29138 - DNA, 25 bp, probe
tttcataatccacttactcccttcc

SEQ ID NO: 29139 - DNA, 25 bp, probe
catgctataatccagtggtgcctta

SEQ ID NO: 29140 - DNA, 25 bp, probe
ataatccacttactcccttcccttc

SEQ ID NO: 29141 - DNA, 25 bp, probe
gttggtcaaatgtcttgtgtcataa

SEQ ID NO: 29142 - DNA, 25 bp, probe
ttggtcaaatgtcttgtgtcataaa

SEQ ID NO: 29143 - DNA, 25 bp, probe
ttgaaatccagttgccattgagtag

SEQ ID NO: 29144 - DNA, 25 bp, probe
cttgaaatccagttgccattgagta

SEQ ID NO: 29145 - DNA, 25 bp, probe
cataatccacttactcccttccctt

SEQ ID NO: 29146 - DNA, 25 bp, probe
ttcataatccacttactcccttccc

SEQ ID NO: 29147 - DNA, 25 bp, probe
tggtcaaatgtcttgtgtcataaat

SEQ ID NO: 29148 - DNA, 25 bp, probe
ggttggtcaaatgtcttgtgtcata

SEQ ID NO: 29149 - DNA, 25 bp, probe
cacccttcctgaaactcttgaaatc

SEQ ID NO: 29150 - DNA, 25 bp, probe
tatattctgatgtttcccagccttt

SEQ ID NO: 29151 - DNA, 25 bp, probe
aatccacttactcccttcccttcta

SEQ ID NO: 29152 - DNA, 25 bp, probe
taatccacttactcccttcccttct

SEQ ID NO: 29153 - DNA, 25 bp, probe
tcataatccacttactcccttccct

SEQ ID NO: 29154 - DNA, 25 bp, probe
cttcctgaaactcttgaaatccagt

SEQ ID NO: 29155 - DNA, 25 bp, probe
atattctgatgtttcccagcctttc

SEQ ID NO: 29156 - DNA, 25 bp, probe
tataatccagtggtgccttacatgg

SEQ ID NO: 29157 - DNA, 25 bp, probe
tgctataatccagtggtgccttaca

SEQ ID NO: 29158 - DNA, 25 bp, probe
acttactcccttcccttctactctg

SEQ ID NO: 29159 - DNA, 25 bp, probe
cacttactcccttcccttctactct

SEQ ID NO: 29160 - DNA, 25 bp, probe
atatattctgatgtttcccagcctt

SEQ ID NO: 29161 - DNA, 25 bp, probe
ccttcctgaaactcttgaaatccag

SEQ ID NO: 29162 - DNA, 25 bp, probe
atccacttactcccttcccttctac

SEQ ID NO: 29163 - DNA, 25 bp, probe
ggtcaaatgtcttgtgtcataaata

SEQ ID NO: 29164 - DNA, 25 bp, probe
cccttcctgaaactcttgaaatcca

SEQ ID NO: 29165 - DNA, 25 bp, probe
acccttcctgaaactcttgaaatcc

SEQ ID NO: 29166 - DNA, 25 bp, probe
tcttgaaatccagttgccattgagt

SEQ ID NO: 29167 - DNA, 25 bp, probe
ctcttgaaatccagttgccattgag

SEQ ID NO: 29168 - DNA, 25 bp, probe
ccacccttcctgaaactcttgaaat

SEQ ID NO: 29169 - DNA, 25 bp, probe
ttcttcctaatcttcatcaaacaaa

SEQ ID NO: 29170 - DNA, 25 bp, probe
tttcttcctaatcttcatcaaacaa

SEQ ID NO: 29171 - DNA, 25 bp, probe
actcttgaaatccagttgccattga

SEQ ID NO: 29172 - DNA, 25 bp, probe
ccacttactcccttcccttctactc

SEQ ID NO: 29173 - DNA, 25 bp, probe
ccctccgtttgttttcttttcataa

SEQ ID NO: 29174 - DNA, 25 bp, probe
tattctgatgtttcccagcctttcc

SEQ ID NO: 29175 - DNA, 25 bp, probe
cctaatcctcactcttttcttccta

SEQ ID NO: 29176 - DNA, 25 bp, probe
tccctccgtttgttttcttttcata

SEQ ID NO: 29177 - DNA, 25 bp, probe
cttttgacagaggcagtaaattagg

SEQ ID NO: 29178 - DNA, 25 bp, probe
tcctcactcttttcttcctaatctt

SEQ ID NO: 29179 - DNA, 25 bp, probe
tttgaatggtgttgtatgcctttaa

SEQ ID NO: 29180 - DNA, 25 bp, probe
gtttacttatcttatgccacgggaa

SEQ ID NO: 29181 - DNA, 25 bp, probe
tttcttcttccctccctatctaacc

SEQ ID NO: 29182 - DNA, 25 bp, probe
ttatcttatgccacgggaagtttag

SEQ ID NO: 29183 - DNA, 25 bp, probe
cttatcttatgccacgggaagttta

SEQ ID NO: 29184 - DNA, 25 bp, probe
tttacttatcttatgccacgggaag

SEQ ID NO: 29185 - DNA, 25 bp, probe
tatcttatgccacgggaagtttaga

SEQ ID NO: 29186 - DNA, 25 bp, probe
cagtgaagcattggaaaccctattt

SEQ ID NO: 29187 - DNA, 25 bp, probe
aaagtcaagcccatctatttccaca

SEQ ID NO: 29188 - DNA, 25 bp, probe
gtgttgtatgcctttaaatctgtga

SEQ ID NO: 29189 - DNA, 25 bp, probe
atggtgttgtatgcctttaaatctg

SEQ ID NO: 29190 - DNA, 25 bp, probe
ttgaatggtgttgtatgcctttaaa

SEQ ID NO: 29191 - DNA, 25 bp, probe
atgcctttaaatctgtgatgatcct

SEQ ID NO: 29192 - DNA, 25 bp, probe
ggtgttgtatgcctttaaatctgtg

SEQ ID NO: 29193 - DNA, 25 bp, probe
tgaatggtgttgtatgcctttaaat

SEQ ID NO: 29194 - DNA, 25 bp, probe
ttcttcttccctccctatctaaccc

SEQ ID NO: 29195 - DNA, 25 bp, probe
aatggtgttgtatgcctttaaatct

SEQ ID NO: 29196 - DNA, 25 bp, probe
tggtgttgtatgcctttaaatctgt

SEQ ID NO: 29197 - DNA, 25 bp, probe
tgcctttaaatctgtgatgatcctc

SEQ ID NO: 29198 - DNA, 25 bp, probe
gaatggtgttgtatgcctttaaatc

SEQ ID NO: 29199 - DNA, 25 bp, probe
atcttatgccacgggaagtttagag

SEQ ID NO: 29200 - DNA, 25 bp, probe
tgttgtatgcctttaaatctgtgat

SEQ ID NO: 29201 - DNA, 25 bp, probe
tatgcctttaaatctgtgatgatcc

SEQ ID NO: 29202 - DNA, 25 bp, probe
gttgtatgcctttaaatctgtgatg

SEQ ID NO: 29203 - DNA, 25 bp, probe
ttgtatgcctttaaatctgtgatga

SEQ ID NO: 29204 - DNA, 25 bp, probe
cttcttccctccctatctaaccctc

SEQ ID NO: 29205 - DNA, 25 bp, probe
gcctttaaatctgtgatgatcctca

SEQ ID NO: 29206 - DNA, 25 bp, probe
tgtatgcctttaaatctgtgatgat

SEQ ID NO: 29207 - DNA, 25 bp, probe
aagtcaagcccatctatttccacac

SEQ ID NO: 29208 - DNA, 25 bp, probe
cgggaagtttagagagctaagatta

SEQ ID NO: 29209 - DNA, 25 bp, probe
cttatgccacgggaagtttagagag

SEQ ID NO: 29210 - DNA, 25 bp, probe
tcttcttccctccctatctaaccct

SEQ ID NO: 29211 - DNA, 25 bp, probe
gtatgcctttaaatctgtgatgatc

SEQ ID NO: 29212 - DNA, 25 bp, probe
attgatgtacagtctgtcatgaaca

SEQ ID NO: 29213 - DNA, 25 bp, probe
cctctattgatgtacagtctgtcat

SEQ ID NO: 29214 - DNA, 25 bp, probe
ttcctctattgatgtacagtctgtc

SEQ ID NO: 29215 - DNA, 25 bp, probe
tcctctattgatgtacagtctgtca

SEQ ID NO: 29216 - DNA, 25 bp, probe
acgggaagtttagagagctaagatt

SEQ ID NO: 29217 - DNA, 25 bp, probe
tctgtgttttgaatggtgttgtatg

SEQ ID NO: 29218 - DNA, 25 bp, probe
ctatctgtgttttgaatggtgttgt

SEQ ID NO: 29219 - DNA, 25 bp, probe
ttcagatgtcttctgcctgttataa

SEQ ID NO: 29220 - DNA, 25 bp, probe
ttttgaatggtgttgtatgccttta

SEQ ID NO: 29221 - DNA, 25 bp, probe
agtgaagcattggaaaccctatttc

SEQ ID NO: 29222 - DNA, 25 bp, probe
atctgtgttttgaatggtgttgtat

SEQ ID NO: 29223 - DNA, 25 bp, probe
atgattggatggagcttctaatgtc

SEQ ID NO: 29224 - DNA, 25 bp, probe
attggatggagcttctaatgtcatt

SEQ ID NO: 29225 - DNA, 25 bp, probe
gattggatggagcttctaatgtcat

SEQ ID NO: 29226 - DNA, 25 bp, probe
ggatggagcttctaatgtcattcaa

SEQ ID NO: 29227 - DNA, 25 bp, probe
ttggatggagcttctaatgtcattc

SEQ ID NO: 29228 - DNA, 25 bp, probe
catgattggatggagcttctaatgt

SEQ ID NO: 29229 - DNA, 25 bp, probe
tggatggagcttctaatgtcattca

SEQ ID NO: 29230 - DNA, 25 bp, probe
tgattggatggagcttctaatgtca

SEQ ID NO: 29231 - DNA, 25 bp, probe
gcatgattggatggagcttctaatg

SEQ ID NO: 29232 - DNA, 25 bp, probe
gatggagcttctaatgtcattcaaa

SEQ ID NO: 29233 - DNA, 25 bp, probe
ggcatgattggatggagcttctaat

SEQ ID NO: 29234 - DNA, 25 bp, probe
aggcatgattggatggagcttctaa

SEQ ID NO: 29235 - DNA, 25 bp, probe
aatggaaccagaggaagtggagatc

SEQ ID NO: 29236 - DNA, 25 bp, probe
agatcatggcaacagagctactgaa

SEQ ID NO: 29237 - DNA, 25 bp, probe
gaggcatgattggatggagcttcta

SEQ ID NO: 29238 - DNA, 25 bp, probe
aaatggaaccagaggaagtggagat

SEQ ID NO: 29239 - DNA, 25 bp, probe
gagatcatggcaacagagctactga

SEQ ID NO: 29240 - DNA, 25 bp, probe
atggagcttctaatgtcattcaaaa

SEQ ID NO: 29241 - DNA, 25 bp, probe
atcatggcaacagagctactgaaag

SEQ ID NO: 29242 - DNA, 25 bp, probe
gatcatggcaacagagctactgaaa

SEQ ID NO: 29243 - DNA, 25 bp, probe
gaaccagaggaagtggagatcatgg

SEQ ID NO: 29244 - DNA, 25 bp, probe
ggaaccagaggaagtggagatcatg

SEQ ID NO: 29245 - DNA, 25 bp, probe
tggaaccagaggaagtggagatcat

SEQ ID NO: 29246 - DNA, 25 bp, probe
atggaaccagaggaagtggagatca

SEQ ID NO: 29247 - DNA, 25 bp, probe
aagaggcatgattggatggagcttc

SEQ ID NO: 29248 - DNA, 25 bp, probe
aacagagctactgaaaggacgagag

SEQ ID NO: 29249 - DNA, 25 bp, probe
caaatggaaccagaggaagtggaga

SEQ ID NO: 29250 - DNA, 25 bp, probe
caacagagctactgaaaggacgaga

SEQ ID NO: 29251 - DNA, 25 bp, probe
ggagatcatggcaacagagctactg

SEQ ID NO: 29252 - DNA, 25 bp, probe
gatgcaaacttcatcatggcaacag

SEQ ID NO: 29253 - DNA, 25 bp, probe
ccaaatggaaccagaggaagtggag

SEQ ID NO: 29254 - DNA, 25 bp, probe
atggcaacagagctactgaaaggac

SEQ ID NO: 29255 - DNA, 25 bp, probe
catggcaacagagctactgaaagga

SEQ ID NO: 29256 - DNA, 25 bp, probe
tcatggcaacagagctactgaaagg

SEQ ID NO: 29257 - DNA, 25 bp, probe
atgcaaacttcatcatggcaacagg

SEQ ID NO: 29258 - DNA, 25 bp, probe
cccttattcctccaaggctgtgatg

SEQ ID NO: 29259 - DNA, 25 bp, probe
tgcaggacattaaaatctccaggcc

SEQ ID NO: 29260 - DNA, 25 bp, probe
ttgacaaggatggagatggtatcat

SEQ ID NO: 29261 - DNA, 25 bp, probe
aacaaccagctctatgacatcatta

SEQ ID NO: 29262 - DNA, 25 bp, probe
acaaccagctctatgacatcattac

SEQ ID NO: 29263 - DNA, 25 bp, probe
ccagctctatgacatcattaccatg

SEQ ID NO: 29264 - DNA, 25 bp, probe
caaccagctctatgacatcattacc

SEQ ID NO: 29265 - DNA, 25 bp, probe
gatagcaggagatgacatggagatc

SEQ ID NO: 29266 - DNA, 25 bp, probe
accagctctatgacatcattaccat

SEQ ID NO: 29267 - DNA, 25 bp, probe
caacaaccagctctatgacatcatt

SEQ ID NO: 29268 - DNA, 25 bp, probe
atttgacaaggatggagatggtatc

SEQ ID NO: 29269 - DNA, 25 bp, probe
agatagcaggagatgacatggagat

SEQ ID NO: 29270 - DNA, 25 bp, probe
aaccagctctatgacatcattacca

SEQ ID NO: 29271 - DNA, 25 bp, probe
cagctctatgacatcattaccatgc

SEQ ID NO: 29272 - DNA, 25 bp, probe
catttgacaaggatggagatggtat

SEQ ID NO: 29273 - DNA, 25 bp, probe
tttcaaacactatgacacagaccag

SEQ ID NO: 29274 - DNA, 25 bp, probe
tcaacaaccagctctatgacatcat

SEQ ID NO: 29275 - DNA, 25 bp, probe
tttgacaaggatggagatggtatca

SEQ ID NO: 29276 - DNA, 25 bp, probe
cagatagcaggagatgacatggaga

SEQ ID NO: 29277 - DNA, 25 bp, probe
tcaagcagatagcaggagatgacat

SEQ ID NO: 29278 - DNA, 25 bp, probe
caagcagatagcaggagatgacatg

SEQ ID NO: 29279 - DNA, 25 bp, probe
ctcaagaaggtccttaacacagtcg

SEQ ID NO: 29280 - DNA, 25 bp, probe
ctcaacaaccagctctatgacatca

SEQ ID NO: 29281 - DNA, 25 bp, probe
caaggatggagatggtatcatcaag

SEQ ID NO: 29282 - DNA, 25 bp, probe
agctctatgacatcattaccatgcg

SEQ ID NO: 29283 - DNA, 25 bp, probe
ttcaaacactatgacacagaccagt

SEQ ID NO: 29284 - DNA, 25 bp, probe
ttcaagcagatagcaggagatgaca

SEQ ID NO: 29285 - DNA, 25 bp, probe
gctcaagaaggtccttaacacagtc

SEQ ID NO: 29286 - DNA, 25 bp, probe
ctctatgacatcattaccatgcggt

SEQ ID NO: 29287 - DNA, 25 bp, probe
acaaggatggagatggtatcatcaa

SEQ ID NO: 29288 - DNA, 25 bp, probe
caccacctctggaacaagattaagg

SEQ ID NO: 29289 - DNA, 25 bp, probe
ccaccacctctggaacaagattaag

SEQ ID NO: 29290 - DNA, 25 bp, probe
agacaaacacatgaacatcgacttt

SEQ ID NO: 29291 - DNA, 25 bp, probe
ttaacacagtcgtgaacaaacacaa

SEQ ID NO: 29292 - DNA, 25 bp, probe
gaacatcgactttgacagtttcatc

SEQ ID NO: 29293 - DNA, 25 bp, probe
gacaaggatggagatggtatcatca

SEQ ID NO: 29294 - DNA, 25 bp, probe
tgacaaggatggagatggtatcatc

SEQ ID NO: 29295 - DNA, 25 bp, probe
ggaaagtgaggaacagcaacaattc

SEQ ID NO: 29296 - DNA, 25 bp, probe
gcatttgacaaggatggagatggta

SEQ ID NO: 29297 - DNA, 25 bp, probe
aacatcgactttgacagtttcatct

SEQ ID NO: 29298 - DNA, 25 bp, probe
catgaacatcgactttgacagtttc

SEQ ID NO: 29299 - DNA, 25 bp, probe
aaacacatgaacatcgactttgaca

SEQ ID NO: 29300 - DNA, 25 bp, probe
tttcaagcagatagcaggagatgac

SEQ ID NO: 29301 - DNA, 25 bp, probe
gctctatgacatcattaccatgcgg

SEQ ID NO: 29302 - DNA, 25 bp, probe
cctcaacaaccagctctatgacatc

SEQ ID NO: 29303 - DNA, 25 bp, probe
taacacagtcgtgaacaaacacaag

SEQ ID NO: 29304 - DNA, 25 bp, probe
catattgcttctccctttagttctg

SEQ ID NO: 29305 - DNA, 25 bp, probe
tcatattgcttctccctttagttct

SEQ ID NO: 29306 - DNA, 25 bp, probe
atattgcttctccctttagttctgc

SEQ ID NO: 29307 - DNA, 25 bp, probe
ttcatattgcttctccctttagttc

SEQ ID NO: 29308 - DNA, 25 bp, probe
caggagaggaagatttgtctacttg

SEQ ID NO: 29309 - DNA, 25 bp, probe
atatctctgacatttctggaaagcc

SEQ ID NO: 29310 - DNA, 25 bp, probe
ttgaattaaatcagcaaggatgagc

SEQ ID NO: 29311 - DNA, 25 bp, probe
tttcatattgcttctccctttagtt

SEQ ID NO: 29312 - DNA, 25 bp, probe
gaattaaatcagcaaggatgagcag

SEQ ID NO: 29313 - DNA, 25 bp, probe
tattgcttctccctttagttctgct

SEQ ID NO: 29314 - DNA, 25 bp, probe
attaaatcagcaaggatgagcagaa

SEQ ID NO: 29315 - DNA, 25 bp, probe
aattaaatcagcaaggatgagcaga

SEQ ID NO: 29316 - DNA, 25 bp, probe
gaagatttgtctacttgctccactc

SEQ ID NO: 29317 - DNA, 25 bp, probe
ttaaatcagcaaggatgagcagaaa

SEQ ID NO: 29318 - DNA, 25 bp, probe
cgactcattgaattaaatcagcaag

SEQ ID NO: 29319 - DNA, 25 bp, probe
tgaattaaatcagcaaggatgagca

SEQ ID NO: 29320 - DNA, 25 bp, probe
actcattgaattaaatcagcaagga

SEQ ID NO: 29321 - DNA, 25 bp, probe
gagaggaagatttgtctacttgctc

SEQ ID NO: 29322 - DNA, 25 bp, probe
gtgaaccctctttagtaaatgaaac

SEQ ID NO: 29323 - DNA, 25 bp, probe
gactcattgaattaaatcagcaagg

SEQ ID NO: 29324 - DNA, 25 bp, probe
agtgaaccctctttagtaaatgaaa

SEQ ID NO: 29325 - DNA, 25 bp, probe
gagtgaaccctctttagtaaatgaa

SEQ ID NO: 29326 - DNA, 25 bp, probe
ggagaggaagatttgtctacttgct

SEQ ID NO: 29327 - DNA, 25 bp, probe
aggagaggaagatttgtctacttgc

SEQ ID NO: 29328 - DNA, 25 bp, probe
gcaggagaggaagatttgtctactt

SEQ ID NO: 29329 - DNA, 25 bp, probe
cattgaattaaatcagcaaggatga

SEQ ID NO: 29330 - DNA, 25 bp, probe
tcattgaattaaatcagcaaggatg

SEQ ID NO: 29331 - DNA, 25 bp, probe
tgaaccctctttagtaaatgaaact

SEQ ID NO: 29332 - DNA, 25 bp, probe
cttctccctttagttctgctgtctc

SEQ ID NO: 29333 - DNA, 25 bp, probe
attgaattaaatcagcaaggatgag

SEQ ID NO: 29334 - DNA, 25 bp, probe
ctcattgaattaaatcagcaaggat

SEQ ID NO: 29335 - DNA, 25 bp, probe
caagtacatcgcagagaccatgaag

SEQ ID NO: 29336 - DNA, 25 bp, probe
agaagacattgatatctctgacatt

SEQ ID NO: 29337 - DNA, 25 bp, probe
catcaagtacatcgcagagaccatg

SEQ ID NO: 29338 - DNA, 25 bp, probe
tcgactcattgaattaaatcagcaa

SEQ ID NO: 29339 - DNA, 25 bp, probe
ctttagttctgctgtctccctgaag

SEQ ID NO: 29340 - DNA, 25 bp, probe
gatatctctgacatttctggaaagc

SEQ ID NO: 29341 - DNA, 25 bp, probe
attgcttctccctttagttctgctg

SEQ ID NO: 29342 - DNA, 25 bp, probe
aagatttgtctacttgctccactcg

SEQ ID NO: 29343 - DNA, 25 bp, probe
agaggaagatttgtctacttgctcc

SEQ ID NO: 29344 - DNA, 25 bp, probe
aagtacatcgcagagaccatgaagt

SEQ ID NO: 29345 - DNA, 25 bp, probe
tatctctgacatttctggaaagcca

SEQ ID NO: 29346 - DNA, 25 bp, probe
acattgatatctctgacatttctgg

SEQ ID NO: 29347 - DNA, 25 bp, probe
atcaagtacatcgcagagaccatga

SEQ ID NO: 29348 - DNA, 25 bp, probe
ggttacttgctgctcacactatata

SEQ ID NO: 29349 - DNA, 25 bp, probe
ttacttgctgctcacactatataca

SEQ ID NO: 29350 - DNA, 25 bp, probe
gttacttgctgctcacactatatac

SEQ ID NO: 29351 - DNA, 25 bp, probe
tacttgctgctcacactatatacag

SEQ ID NO: 29352 - DNA, 25 bp, probe
cttgctgctcacactatatacagat

SEQ ID NO: 29353 - DNA, 25 bp, probe
ttgctgctcacactatatacagatg

SEQ ID NO: 29354 - DNA, 25 bp, probe
tgctgctcacactatatacagatgc

SEQ ID NO: 29355 - DNA, 25 bp, probe
acttgctgctcacactatatacaga

SEQ ID NO: 29356 - DNA, 25 bp, probe
cacactatatacagatgcaagcaag

SEQ ID NO: 29357 - DNA, 25 bp, probe
tcacactatatacagatgcaagcaa

SEQ ID NO: 29358 - DNA, 25 bp, probe
ctcacactatatacagatgcaagca

SEQ ID NO: 29359 - DNA, 25 bp, probe
acactatatacagatgcaagcaagg

SEQ ID NO: 29360 - DNA, 25 bp, probe
ttccacagtcatttcttctaggttt

SEQ ID NO: 29361 - DNA, 25 bp, probe
cttccacagtcatttcttctaggtt

SEQ ID NO: 29362 - DNA, 25 bp, probe
acccttccacagtcatttcttctag

SEQ ID NO: 29363 - DNA, 25 bp, probe
gggttacttgctgctcacactatat

SEQ ID NO: 29364 - DNA, 25 bp, probe
gctggttgaattgtctttattaaca

SEQ ID NO: 29365 - DNA, 25 bp, probe
ggagctggttgaattgtctttatta

SEQ ID NO: 29366 - DNA, 25 bp, probe
gacccttccacagtcatttcttcta

SEQ ID NO: 29367 - DNA, 25 bp, probe
gggagctggttgaattgtctttatt

SEQ ID NO: 29368 - DNA, 25 bp, probe
gctctctctgcctagtctacagtac

SEQ ID NO: 29369 - DNA, 25 bp, probe
cactatatacagatgcaagcaaggg

SEQ ID NO: 29370 - DNA, 25 bp, probe
ccttccacagtcatttcttctaggt

SEQ ID NO: 29371 - DNA, 25 bp, probe
tgctcacactatatacagatgcaag

SEQ ID NO: 29372 - DNA, 25 bp, probe
ctgctcacactatatacagatgcaa

SEQ ID NO: 29373 - DNA, 25 bp, probe
gctcacactatatacagatgcaagc

SEQ ID NO: 29374 - DNA, 25 bp, probe
agggttacttgctgctcacactata

SEQ ID NO: 29375 - DNA, 25 bp, probe
agctggttgaattgtctttattaac

SEQ ID NO: 29376 - DNA, 25 bp, probe
gagctggttgaattgtctttattaa

SEQ ID NO: 29377 - DNA, 25 bp, probe
gctgctcacactatatacagatgca

SEQ ID NO: 29378 - DNA, 25 bp, probe
tgggagctggttgaattgtctttat

SEQ ID NO: 29379 - DNA, 25 bp, probe
ctctctctgcctagtctacagtact

SEQ ID NO: 29380 - DNA, 25 bp, probe
cccttccacagtcatttcttctagg

SEQ ID NO: 29381 - DNA, 25 bp, probe
ccacagtcatttcttctaggttttc

SEQ ID NO: 29382 - DNA, 25 bp, probe
tccacagtcatttcttctaggtttt

SEQ ID NO: 29383 - DNA, 25 bp, probe
gtcatttcttctaggttttcttggc

SEQ ID NO: 29384 - DNA, 25 bp, probe
cacagtcatttcttctaggttttct

SEQ ID NO: 29385 - DNA, 25 bp, probe
gaaggggaatcattaaagtgctttc

SEQ ID NO: 29386 - DNA, 25 bp, probe
gatatccaaggccactacattgagg

SEQ ID NO: 29387 - DNA, 25 bp, probe
agtcatttcttctaggttttcttgg

SEQ ID NO: 29388 - DNA, 25 bp, probe
aaggggaatcattaaagtgctttca

SEQ ID NO: 29389 - DNA, 25 bp, probe
ggggaatcattaaagtgctttcaga

SEQ ID NO: 29390 - DNA, 25 bp, probe
aggggaatcattaaagtgctttcag

SEQ ID NO: 29391 - DNA, 25 bp, probe
acagtcatttcttctaggttttctt

SEQ ID NO: 29392 - DNA, 25 bp, probe
ttgattcctgctgtattgaccagtc

SEQ ID NO: 29393 - DNA, 25 bp, probe
gattcctgctgtattgaccagtctc

SEQ ID NO: 29394 - DNA, 25 bp, probe
tgattcctgctgtattgaccagtct

SEQ ID NO: 29395 - DNA, 25 bp, probe
tttgattcctgctgtattgaccagt

SEQ ID NO: 29396 - DNA, 25 bp, probe
cgaggaggatgaggatgaactgatc

SEQ ID NO: 29397 - DNA, 25 bp, probe
ctgttttgattcctgctgtattgac

SEQ ID NO: 29398 - DNA, 25 bp, probe
tctgttttgattcctgctgtattga

SEQ ID NO: 29399 - DNA, 25 bp, probe
gtctgttttgattcctgctgtattg

SEQ ID NO: 29400 - DNA, 25 bp, probe
tgtctgttttgattcctgctgtatt

SEQ ID NO: 29401 - DNA, 25 bp, probe
acgaggaggatgaggatgaactgat

SEQ ID NO: 29402 - DNA, 25 bp, probe
attcctgctgtattgaccagtctcc

SEQ ID NO: 29403 - DNA, 25 bp, probe
caagactcataccctgttttcactc

SEQ ID NO: 29404 - DNA, 25 bp, probe
ctgtctgttttgattcctgctgtat

SEQ ID NO: 29405 - DNA, 25 bp, probe
gttttgattcctgctgtattgacca

SEQ ID NO: 29406 - DNA, 25 bp, probe
tgttttgattcctgctgtattgacc

SEQ ID NO: 29407 - DNA, 25 bp, probe
gactcataccctgttttcactcctt

SEQ ID NO: 29408 - DNA, 25 bp, probe
aagactcataccctgttttcactcc

SEQ ID NO: 29409 - DNA, 25 bp, probe
actcataccctgttttcactccttg

SEQ ID NO: 29410 - DNA, 25 bp, probe
ttttgattcctgctgtattgaccag

SEQ ID NO: 29411 - DNA, 25 bp, probe
acaagactcataccctgttttcact

SEQ ID NO: 29412 - DNA, 25 bp, probe
cacaagactcataccctgttttcac

SEQ ID NO: 29413 - DNA, 25 bp, probe
agactcataccctgttttcactcct

SEQ ID NO: 29414 - DNA, 25 bp, probe
cctgtctgttttgattcctgctgta

SEQ ID NO: 29415 - DNA, 25 bp, probe
ctcataccctgttttcactccttgg

SEQ ID NO: 29416 - DNA, 25 bp, probe
ctgtattgaccagtctcccttccag

SEQ ID NO: 29417 - DNA, 25 bp, probe
gaggaggatgaggatgaactgatcc

SEQ ID NO: 29418 - DNA, 25 bp, probe
ctgctgtattgaccagtctcccttc

SEQ ID NO: 29419 - DNA, 25 bp, probe
gcacaagactcataccctgttttca

SEQ ID NO: 29420 - DNA, 25 bp, probe
aacacgacttcaactcgaaagagta

SEQ ID NO: 29421 - DNA, 25 bp, probe
agacaaccctgcacaagactcatac

SEQ ID NO: 29422 - DNA, 25 bp, probe
ggaacacgacttcaactcgaaagag

SEQ ID NO: 29423 - DNA, 25 bp, probe
acacgacttcaactcgaaagagtac

SEQ ID NO: 29424 - DNA, 25 bp, probe
cagacaaccctgcacaagactcata

SEQ ID NO: 29425 - DNA, 25 bp, probe
gaacacgacttcaactcgaaagagt

SEQ ID NO: 29426 - DNA, 25 bp, probe
tgcacaagactcataccctgttttc

SEQ ID NO: 29427 - DNA, 25 bp, probe
ctgcacaagactcataccctgtttt

SEQ ID NO: 29428 - DNA, 25 bp, probe
cctgcacaagactcataccctgttt

SEQ ID NO: 29429 - DNA, 25 bp, probe
cacgacttcaactcgaaagagtacc

SEQ ID NO: 29430 - DNA, 25 bp, probe
tcataccctgttttcactccttggc

SEQ ID NO: 29431 - DNA, 25 bp, probe
acgacttcaactcgaaagagtaccg

SEQ ID NO: 29432 - DNA, 25 bp, probe
gacttcaactcgaaagagtaccggg

SEQ ID NO: 29433 - DNA, 25 bp, probe
acctcctcataaagaccgtggagag

SEQ ID NO: 29434 - DNA, 25 bp, probe
gacctcctcataaagaccgtggaga

SEQ ID NO: 29435 - DNA, 25 bp, probe
atagttaggcttccatgatgttaca

SEQ ID NO: 29436 - DNA, 25 bp, probe
taggcttccatgatgttacattagg

SEQ ID NO: 29437 - DNA, 25 bp, probe
agttaggcttccatgatgttacatt

SEQ ID NO: 29438 - DNA, 25 bp, probe
tagttaggcttccatgatgttacat

SEQ ID NO: 29439 - DNA, 25 bp, probe
ctgttgttactggaagacgaaggta

SEQ ID NO: 29440 - DNA, 25 bp, probe
gttaggcttccatgatgttacatta

SEQ ID NO: 29441 - DNA, 25 bp, probe
ttaggcttccatgatgttacattag

SEQ ID NO: 29442 - DNA, 25 bp, probe
aattccaaccgtcctgacctataac

SEQ ID NO: 29443 - DNA, 25 bp, probe
atctaactgttgttactggaagacg

SEQ ID NO: 29444 - DNA, 25 bp, probe
taactgttgttactggaagacgaag

SEQ ID NO: 29445 - DNA, 25 bp, probe
ctaactgttgttactggaagacgaa

SEQ ID NO: 29446 - DNA, 25 bp, probe
ttctgattataagacaatgctgctt

SEQ ID NO: 29447 - DNA, 25 bp, probe
ggatctaactgttgttactggaaga

SEQ ID NO: 29448 - DNA, 25 bp, probe
tatagttaggcttccatgatgttac

SEQ ID NO: 29449 - DNA, 25 bp, probe
tctaactgttgttactggaagacga

SEQ ID NO: 29450 - DNA, 25 bp, probe
gatctaactgttgttactggaagac

SEQ ID NO: 29451 - DNA, 25 bp, probe
aagtagttagccaatatgcaatcac

SEQ ID NO: 29452 - DNA, 25 bp, probe
tactggaagacgaaggtaaactaag

SEQ ID NO: 29453 - DNA, 25 bp, probe
cattagtgtgttgtctctttcctac

SEQ ID NO: 29454 - DNA, 25 bp, probe
atgctgctttggttaatctcttcta

SEQ ID NO: 29455 - DNA, 25 bp, probe
attatagttaggcttccatgatgtt

SEQ ID NO: 29456 - DNA, 25 bp, probe
aattatagttaggcttccatgatgt

SEQ ID NO: 29457 - DNA, 25 bp, probe
tgctgctttggttaatctcttctaa

SEQ ID NO: 29458 - DNA, 25 bp, probe
gctgctttggttaatctcttctaaa

SEQ ID NO: 29459 - DNA, 25 bp, probe
aatgctgctttggttaatctcttct

SEQ ID NO: 29460 - DNA, 25 bp, probe
tgttgttactggaagacgaaggtaa

SEQ ID NO: 29461 - DNA, 25 bp, probe
tagttagccaatatgcaatcactga

SEQ ID NO: 29462 - DNA, 25 bp, probe
gtagttagccaatatgcaatcactg

SEQ ID NO: 29463 - DNA, 25 bp, probe
agtagttagccaatatgcaatcact

SEQ ID NO: 29464 - DNA, 25 bp, probe
taagacaatgctgctttggttaatc

SEQ ID NO: 29465 - DNA, 25 bp, probe
gttcaaatgttatccttgttcctgt

SEQ ID NO: 29466 - DNA, 25 bp, probe
aactgttgttactggaagacgaagg

SEQ ID NO: 29467 - DNA, 25 bp, probe
taaccagttgcactacataatctct

SEQ ID NO: 29468 - DNA, 25 bp, probe
ataagacaatgctgctttggttaat

SEQ ID NO: 29469 - DNA, 25 bp, probe
agttcaaatgttatccttgttcctg

SEQ ID NO: 29470 - DNA, 25 bp, probe
cagttcaaatgttatccttgttcct

SEQ ID NO: 29471 - DNA, 25 bp, probe
tcagttcaaatgttatccttgttcc

SEQ ID NO: 29472 - DNA, 25 bp, probe
aaccgtcctgacctataacctgtag

SEQ ID NO: 29473 - DNA, 25 bp, probe
agttagccaatatgcaatcactgaa

SEQ ID NO: 29474 - DNA, 25 bp, probe
aggcttccatgatgttacattagga

SEQ ID NO: 29475 - DNA, 25 bp, probe
caatgctgctttggttaatctcttc

SEQ ID NO: 29476 - DNA, 25 bp, probe
ttcaaatgttatccttgttcctgtt

SEQ ID NO: 29477 - DNA, 25 bp, probe
tataagacaatgctgctttggttaa

SEQ ID NO: 29478 - DNA, 25 bp, probe
ttaaccagttgcactacataatctc

SEQ ID NO: 29479 - DNA, 25 bp, probe
ttaggtgaaggacaagtaggtaaga

SEQ ID NO: 29480 - DNA, 25 bp, probe
taggtgaaggacaagtaggtaagag

SEQ ID NO: 29481 - DNA, 25 bp, probe
ttgatgaagacattgtaagcagagt

SEQ ID NO: 29482 - DNA, 25 bp, probe
attgatgaagacattgtaagcagag

SEQ ID NO: 29483 - DNA, 25 bp, probe
aattgatgaagacattgtaagcaga

SEQ ID NO: 29484 - DNA, 25 bp, probe
tgatgaagacattgtaagcagagtg

SEQ ID NO: 29485 - DNA, 25 bp, probe
agactgctcagattctaagttgttg

SEQ ID NO: 29486 - DNA, 25 bp, probe
gagactgctcagattctaagttgtt

SEQ ID NO: 29487 - DNA, 25 bp, probe
gagagactgctcagattctaagttg

SEQ ID NO: 29488 - DNA, 25 bp, probe
gtgaaggacaagtaggtaagaggac

SEQ ID NO: 29489 - DNA, 25 bp, probe
gatgaagacattgtaagcagagtgg

SEQ ID NO: 29490 - DNA, 25 bp, probe
agagactgctcagattctaagttgt

SEQ ID NO: 29491 - DNA, 25 bp, probe
gactgctcagattctaagttgttgg

SEQ ID NO: 29492 - DNA, 25 bp, probe
gtttaggtgaaggacaagtaggtaa

SEQ ID NO: 29493 - DNA, 25 bp, probe
tttaggtgaaggacaagtaggtaag

SEQ ID NO: 29494 - DNA, 25 bp, probe
ggtgaaggacaagtaggtaagagga

SEQ ID NO: 29495 - DNA, 25 bp, probe
aggtgaaggacaagtaggtaagagg

SEQ ID NO: 29496 - DNA, 25 bp, probe
tgctctctgctggattctaaattat

SEQ ID NO: 29497 - DNA, 25 bp, probe
gctctctgctggattctaaattatg

SEQ ID NO: 29498 - DNA, 25 bp, probe
aattccaagtgtttctgtttcaagg

SEQ ID NO: 29499 - DNA, 25 bp, probe
tttcaataacaagaacagtggcttc

SEQ ID NO: 29500 - DNA, 25 bp, probe
gtgctctctgctggattctaaatta

SEQ ID NO: 29501 - DNA, 25 bp, probe
aagtgtttctgtttcaaggaaggat

SEQ ID NO: 29502 - DNA, 25 bp, probe
gaggctatgaaattgatgaagacat

SEQ ID NO: 29503 - DNA, 25 bp, probe
cgaggctatgaaattgatgaagaca

SEQ ID NO: 29504 - DNA, 25 bp, probe
ctctgctggattctaaattatgtga

SEQ ID NO: 29505 - DNA, 25 bp, probe
tctctgctggattctaaattatgtg

SEQ ID NO: 29506 - DNA, 25 bp, probe
tgaaggacaagtaggtaagaggacg

SEQ ID NO: 29507 - DNA, 25 bp, probe
tcaccaagttagattattactacga

SEQ ID NO: 29508 - DNA, 25 bp, probe
agtgtttctgtttcaaggaaggatg

SEQ ID NO: 29509 - DNA, 25 bp, probe
ggctatgaaattgatgaagacattg

SEQ ID NO: 29510 - DNA, 25 bp, probe
aggctatgaaattgatgaagacatt

SEQ ID NO: 29511 - DNA, 25 bp, probe
ttcaataacaagaacagtggcttct

SEQ ID NO: 29512 - DNA, 25 bp, probe
agtgaatgttcctgtttgatgtgac

SEQ ID NO: 29513 - DNA, 25 bp, probe
ctctctgctggattctaaattatgt

SEQ ID NO: 29514 - DNA, 25 bp, probe
caagtgtttctgtttcaaggaagga

SEQ ID NO: 29515 - DNA, 25 bp, probe
aagtgtttaggtgaaggacaagtag

SEQ ID NO: 29516 - DNA, 25 bp, probe
gaagtgtttaggtgaaggacaagta

SEQ ID NO: 29517 - DNA, 25 bp, probe
taattccaagtgtttctgtttcaag

SEQ ID NO: 29518 - DNA, 25 bp, probe
aaattgatgaagacattgtaagcag

SEQ ID NO: 29519 - DNA, 25 bp, probe
gaaattgatgaagacattgtaagca

SEQ ID NO: 29520 - DNA, 25 bp, probe
tgaaattgatgaagacattgtaagc

SEQ ID NO: 29521 - DNA, 25 bp, probe
ccgaggctatgaaattgatgaagac

SEQ ID NO: 29522 - DNA, 25 bp, probe
ttattactacgatgattgacagtca

SEQ ID NO: 29523 - DNA, 25 bp, probe
actgctaatgtggatgtatgttcaa

SEQ ID NO: 29524 - DNA, 25 bp, probe
cactgctaatgtggatgtatgttca

SEQ ID NO: 29525 - DNA, 25 bp, probe
gccaaaggaatacagtttatagcaa

SEQ ID NO: 29526 - DNA, 25 bp, probe
ctgctaatgtggatgtatgttcaaa

SEQ ID NO: 29527 - DNA, 25 bp, probe
tgctaatgtggatgtatgttcaaac

SEQ ID NO: 29528 - DNA, 25 bp, probe
tttctcccttattatccactgctaa

SEQ ID NO: 29529 - DNA, 25 bp, probe
ctcccttattatccactgctaatgt

SEQ ID NO: 29530 - DNA, 25 bp, probe
tctcccttattatccactgctaatg

SEQ ID NO: 29531 - DNA, 25 bp, probe
ttctcccttattatccactgctaat

SEQ ID NO: 29532 - DNA, 25 bp, probe
acaattatcaagcaagtatgaagtt

SEQ ID NO: 29533 - DNA, 25 bp, probe
aaaggtgctatcgttcaacttcaaa

SEQ ID NO: 29534 - DNA, 25 bp, probe
aggactttaatatagcaacagacaa

SEQ ID NO: 29535 - DNA, 25 bp, probe
aaggactttaatatagcaacagaca

SEQ ID NO: 29536 - DNA, 25 bp, probe
tcccttattatccactgctaatgtg

SEQ ID NO: 29537 - DNA, 25 bp, probe
ccaaaggaatacagtttatagcaaa

SEQ ID NO: 29538 - DNA, 25 bp, probe
gctaatgtggatgtatgttcaaaca

SEQ ID NO: 29539 - DNA, 25 bp, probe
tacaattatcaagcaagtatgaagt

SEQ ID NO: 29540 - DNA, 25 bp, probe
ggactttaatatagcaacagacaaa

SEQ ID NO: 29541 - DNA, 25 bp, probe
taatgtggatgtatgttcaaacacc

SEQ ID NO: 29542 - DNA, 25 bp, probe
agaaatataaatgtgacaagtggac

SEQ ID NO: 29543 - DNA, 25 bp, probe
atgtggatgtatgttcaaacacctt

SEQ ID NO: 29544 - DNA, 25 bp, probe
aatgtggatgtatgttcaaacacct

SEQ ID NO: 29545 - DNA, 25 bp, probe
tgtggatgtatgttcaaacaccttt

SEQ ID NO: 29546 - DNA, 25 bp, probe
gaaatataaatgtgacaagtggaca

SEQ ID NO: 29547 - DNA, 25 bp, probe
ctaatgtggatgtatgttcaaacac

SEQ ID NO: 29548 - DNA, 25 bp, probe
tagtattgatagcttacatatggcc

SEQ ID NO: 29549 - DNA, 25 bp, probe
attttctcccttattatccactgct

SEQ ID NO: 29550 - DNA, 25 bp, probe
aagaaatataaatgtgacaagtgga

SEQ ID NO: 29551 - DNA, 25 bp, probe
ttttctcccttattatccactgcta

SEQ ID NO: 29552 - DNA, 25 bp, probe
gtgctatcgttcaacttcaaaacat

SEQ ID NO: 29553 - DNA, 25 bp, probe
atgggtatgctgtagctaactttat

SEQ ID NO: 29554 - DNA, 25 bp, probe
caattatcaagcaagtatgaagtta

SEQ ID NO: 29555 - DNA, 25 bp, probe
cctaaagtggctatagttactgatt

SEQ ID NO: 29556 - DNA, 25 bp, probe
taaggactttaatatagcaacagac

SEQ ID NO: 29557 - DNA, 25 bp, probe
tattttctcccttattatccactgc

SEQ ID NO: 29558 - DNA, 25 bp, probe
catgggtatgctgtagctaacttta

SEQ ID NO: 29559 - DNA, 25 bp, probe
tcaagcaagtatgaagttattcaat

SEQ ID NO: 29560 - DNA, 25 bp, probe
atcaagcaagtatgaagttattcaa

SEQ ID NO: 29561 - DNA, 25 bp, probe
tgggtatgctgtagctaactttata

SEQ ID NO: 29562 - DNA, 25 bp, probe
aaggtgctatcgttcaacttcaaaa

SEQ ID NO: 29563 - DNA, 25 bp, probe
aaaaggtgctatcgttcaacttcaa

SEQ ID NO: 29564 - DNA, 25 bp, probe
ggccaaaggaatacagtttatagca

SEQ ID NO: 29565 - DNA, 25 bp, probe
tgtgacaagtggacattatttatgt

SEQ ID NO: 29566 - DNA, 25 bp, probe
ttatcaagcaagtatgaagttattc

SEQ ID NO: 29567 - DNA, 25 bp, probe
acagagaggtcattggttatagaga

SEQ ID NO: 29568 - DNA, 25 bp, probe
cacagagaggtcattggttatagag

SEQ ID NO: 29569 - DNA, 25 bp, probe
ttcacagagaggtcattggttatag

SEQ ID NO: 29570 - DNA, 25 bp, probe
cttgccgtaatgattctataatgcc

SEQ ID NO: 29571 - DNA, 25 bp, probe
tcacagagaggtcattggttataga

SEQ ID NO: 29572 - DNA, 25 bp, probe
cattcacagagaggtcattggttat

SEQ ID NO: 29573 - DNA, 25 bp, probe
ttgccgtaatgattctataatgcca

SEQ ID NO: 29574 - DNA, 25 bp, probe
gcttgccgtaatgattctataatgc

SEQ ID NO: 29575 - DNA, 25 bp, probe
attcacagagaggtcattggttata

SEQ ID NO: 29576 - DNA, 25 bp, probe
atactattactgatgtgactcggtt

SEQ ID NO: 29577 - DNA, 25 bp, probe
gccgtaatgattctataatgccatc

SEQ ID NO: 29578 - DNA, 25 bp, probe
catactattactgatgtgactcggt

SEQ ID NO: 29579 - DNA, 25 bp, probe
tgccgtaatgattctataatgccat

SEQ ID NO: 29580 - DNA, 25 bp, probe
gcatactattactgatgtgactcgg

SEQ ID NO: 29581 - DNA, 25 bp, probe
taagtaattgctgcctctattatgg

SEQ ID NO: 29582 - DNA, 25 bp, probe
agagaggtcattggttatagagact

SEQ ID NO: 29583 - DNA, 25 bp, probe
cagagaggtcattggttatagagac

SEQ ID NO: 29584 - DNA, 25 bp, probe
gaggtcattggttatagagacttga

SEQ ID NO: 29585 - DNA, 25 bp, probe
agaggtcattggttatagagacttg

SEQ ID NO: 29586 - DNA, 25 bp, probe
gagaggtcattggttatagagactt

SEQ ID NO: 29587 - DNA, 25 bp, probe
aggtcattggttatagagacttgaa

SEQ ID NO: 29588 - DNA, 25 bp, probe
cctagcttgccgtaatgattctata

SEQ ID NO: 29589 - DNA, 25 bp, probe
agcttgccgtaatgattctataatg

SEQ ID NO: 29590 - DNA, 25 bp, probe
ggtcattggttatagagacttgaat

SEQ ID NO: 29591 - DNA, 25 bp, probe
ctagcttgccgtaatgattctataa

SEQ ID NO: 29592 - DNA, 25 bp, probe
gcattcacagagaggtcattggtta

SEQ ID NO: 29593 - DNA, 25 bp, probe
ccaaagagaagaccctatcaatgta

SEQ ID NO: 29594 - DNA, 25 bp, probe
atccaaagagaagaccctatcaatg

SEQ ID NO: 29595 - DNA, 25 bp, probe
catccaaagagaagaccctatcaat

SEQ ID NO: 29596 - DNA, 25 bp, probe
aaagaacaacatcagcagtaaagtc

SEQ ID NO: 29597 - DNA, 25 bp, probe
gaaagaacaacatcagcagtaaagt

SEQ ID NO: 29598 - DNA, 25 bp, probe
agaaagaacaacatcagcagtaaag

SEQ ID NO: 29599 - DNA, 25 bp, probe
gaagaaagaacaacatcagcagtaa

SEQ ID NO: 29600 - DNA, 25 bp, probe
tagagaagaaagaacaacatcagca

SEQ ID NO: 29601 - DNA, 25 bp, probe
ttctaagtaattgctgcctctatta

SEQ ID NO: 29602 - DNA, 25 bp, probe
agaagaaagaacaacatcagcagta

SEQ ID NO: 29603 - DNA, 25 bp, probe
aagaaagaacaacatcagcagtaaa

SEQ ID NO: 29604 - DNA, 25 bp, probe
aaggcaaataaagtcatacagtagc

SEQ ID NO: 29605 - DNA, 25 bp, probe
tactattactgatgtgactcggttt

SEQ ID NO: 29606 - DNA, 25 bp, probe
tgcatactattactgatgtgactcg

SEQ ID NO: 29607 - DNA, 25 bp, probe
ctaagtaattgctgcctctattatg

SEQ ID NO: 29608 - DNA, 25 bp, probe
tcatccaaagagaagaccctatcaa

SEQ ID NO: 29609 - DNA, 25 bp, probe
tctaagtaattgctgcctctattat

SEQ ID NO: 29610 - DNA, 25 bp, probe
tccaaagagaagaccctatcaatgt

SEQ ID NO: 29611 - DNA, 25 bp, probe
gccagaagagatacagaggacataa

SEQ ID NO: 29612 - DNA, 25 bp, probe
tgccagaagagatacagaggacata

SEQ ID NO: 29613 - DNA, 25 bp, probe
gaagagtgccagaagagatacagag

SEQ ID NO: 29614 - DNA, 25 bp, probe
gtgaattacacagattctcaacgac

SEQ ID NO: 29615 - DNA, 25 bp, probe
agtgaattacacagattctcaacga

SEQ ID NO: 29616 - DNA, 25 bp, probe
cagtgaattacacagattctcaacg

SEQ ID NO: 29617 - DNA, 25 bp, probe
aaccacagtgaattacacagattct

SEQ ID NO: 29618 - DNA, 25 bp, probe
acagtgaattacacagattctcaac

SEQ ID NO: 29619 - DNA, 25 bp, probe
cacagtgaattacacagattctcaa

SEQ ID NO: 29620 - DNA, 25 bp, probe
ccacagtgaattacacagattctca

SEQ ID NO: 29621 - DNA, 25 bp, probe
accacagtgaattacacagattctc

SEQ ID NO: 29622 - DNA, 25 bp, probe
tgaattacacagattctcaacgacc

SEQ ID NO: 29623 - DNA, 25 bp, probe
ccagaagagatacagaggacataaa

SEQ ID NO: 29624 - DNA, 25 bp, probe
aatactctccagaaagccaagatac

SEQ ID NO: 29625 - DNA, 25 bp, probe
aaatactctccagaaagccaagata

SEQ ID NO: 29626 - DNA, 25 bp, probe
caacgaagagtgccagaagagatac

SEQ ID NO: 29627 - DNA, 25 bp, probe
tacacagattctcaacgacccatat

SEQ ID NO: 29628 - DNA, 25 bp, probe
ttacacagattctcaacgacccata

SEQ ID NO: 29629 - DNA, 25 bp, probe
aagagtgccagaagagatacagagg

SEQ ID NO: 29630 - DNA, 25 bp, probe
aacgaagagtgccagaagagataca

SEQ ID NO: 29631 - DNA, 25 bp, probe
atactctccagaaagccaagatacc

SEQ ID NO: 29632 - DNA, 25 bp, probe
aataacccataagatgatctgtgcc

SEQ ID NO: 29633 - DNA, 25 bp, probe
aaataacccataagatgatctgtgc

SEQ ID NO: 29634 - DNA, 25 bp, probe
attacacagattctcaacgacccat

SEQ ID NO: 29635 - DNA, 25 bp, probe
aagatacccttagtgaccaacgaag

SEQ ID NO: 29636 - DNA, 25 bp, probe
agaaagccaagatacccttagtgac

SEQ ID NO: 29637 - DNA, 25 bp, probe
cagaaagccaagatacccttagtga

SEQ ID NO: 29638 - DNA, 25 bp, probe
gaaaccacagtgaattacacagatt

SEQ ID NO: 29639 - DNA, 25 bp, probe
gtgccagaagagatacagaggacat

SEQ ID NO: 29640 - DNA, 25 bp, probe
cgaagagtgccagaagagatacaga

SEQ ID NO: 29641 - DNA, 25 bp, probe
taatatacactgattgctgggtgac

SEQ ID NO: 29642 - DNA, 25 bp, probe
gtaatatacactgattgctgggtga

SEQ ID NO: 29643 - DNA, 25 bp, probe
aattacacagattctcaacgaccca

SEQ ID NO: 29644 - DNA, 25 bp, probe
caagatacccttagtgaccaacgaa

SEQ ID NO: 29645 - DNA, 25 bp, probe
ctccagaaagccaagatacccttag

SEQ ID NO: 29646 - DNA, 25 bp, probe
ggaaaccacagtgaattacacagat

SEQ ID NO: 29647 - DNA, 25 bp, probe
acgaagagtgccagaagagatacag

SEQ ID NO: 29648 - DNA, 25 bp, probe
gatacccttagtgaccaacgaagag

SEQ ID NO: 29649 - DNA, 25 bp, probe
aaaccacagtgaattacacagattc

SEQ ID NO: 29650 - DNA, 25 bp, probe
gagtgccagaagagatacagaggac

SEQ ID NO: 29651 - DNA, 25 bp, probe
agagtgccagaagagatacagagga

SEQ ID NO: 29652 - DNA, 25 bp, probe
aatatacactgattgctgggtgact

SEQ ID NO: 29653 - DNA, 25 bp, probe
tctccagaaagccaagataccctta

SEQ ID NO: 29654 - DNA, 25 bp, probe
ccaacgaagagtgccagaagagata

SEQ ID NO: 29655 - DNA, 25 bp, probe
agactaatagagacacagagatgga

SEQ ID NO: 29656 - DNA, 25 bp, probe
gagactaatagagacacagagatgg

SEQ ID NO: 29657 - DNA, 25 bp, probe
gactaatagagacacagagatggaa

SEQ ID NO: 29658 - DNA, 25 bp, probe
tccattatcatcttcacttcagaca

SEQ ID NO: 29659 - DNA, 25 bp, probe
tcatcttcacttcagacaattcaga

SEQ ID NO: 29660 - DNA, 25 bp, probe
agagactaatagagacacagagatg

SEQ ID NO: 29661 - DNA, 25 bp, probe
gagagagacagagacagagagagac

SEQ ID NO: 29662 - DNA, 25 bp, probe
cagagagagacagagacagagagag

SEQ ID NO: 29663 - DNA, 25 bp, probe
catcttcacttcagacaattcagaa

SEQ ID NO: 29664 - DNA, 25 bp, probe
actaatagagacacagagatggaat

SEQ ID NO: 29665 - DNA, 25 bp, probe
atcatcttcacttcagacaattcag

SEQ ID NO: 29666 - DNA, 25 bp, probe
agagagagacagagacagagagaga

SEQ ID NO: 29667 - DNA, 25 bp, probe
ccattatcatcttcacttcagacaa

SEQ ID NO: 29668 - DNA, 25 bp, probe
atagagacacagagatggaatagaa

SEQ ID NO: 29669 - DNA, 25 bp, probe
aatagagacacagagatggaataga

SEQ ID NO: 29670 - DNA, 25 bp, probe
agagagacagagacagagagagact

SEQ ID NO: 29671 - DNA, 25 bp, probe
atccattatcatcttcacttcagac

SEQ ID NO: 29672 - DNA, 25 bp, probe
aagagactaatagagacacagagat

SEQ ID NO: 29673 - DNA, 25 bp, probe
agatgcacacacagatatacacatg

SEQ ID NO: 29674 - DNA, 25 bp, probe
cagatgcacacacagatatacacat

SEQ ID NO: 29675 - DNA, 25 bp, probe
acagagagagacagagacagagaga

SEQ ID NO: 29676 - DNA, 25 bp, probe
tatcatcttcacttcagacaattca

SEQ ID NO: 29677 - DNA, 25 bp, probe
cacagatgcacacacagatatacac

SEQ ID NO: 29678 - DNA, 25 bp, probe
cacacagatgcacacacagatatac

SEQ ID NO: 29679 - DNA, 25 bp, probe
aacagagagagacagagacagagag

SEQ ID NO: 29680 - DNA, 25 bp, probe
tcagacaattcagaagcatcaccat

SEQ ID NO: 29681 - DNA, 25 bp, probe
cacacacagatatacacatggatgc

SEQ ID NO: 29682 - DNA, 25 bp, probe
gcacacacagatatacacatggatg

SEQ ID NO: 29683 - DNA, 25 bp, probe
acagatgcacacacagatatacaca

SEQ ID NO: 29684 - DNA, 25 bp, probe
acacagatgcacacacagatataca

SEQ ID NO: 29685 - DNA, 25 bp, probe
acacacagatgcacacacagatata

SEQ ID NO: 29686 - DNA, 25 bp, probe
acatagagatatgcacacacagatg

SEQ ID NO: 29687 - DNA, 25 bp, probe
cacatagagatatgcacacacagat

SEQ ID NO: 29688 - DNA, 25 bp, probe
ggttcttatccattatcatcttcac

SEQ ID NO: 29689 - DNA, 25 bp, probe
gagacagagacagagagagactgag

SEQ ID NO: 29690 - DNA, 25 bp, probe
gagagacagagacagagagagactg

SEQ ID NO: 29691 - DNA, 25 bp, probe
ttcagacaattcagaagcatcacca

SEQ ID NO: 29692 - DNA, 25 bp, probe
cacacagatggtcacacagagatac

SEQ ID NO: 29693 - DNA, 25 bp, probe
tcaaagagactccaagattcaaaga

SEQ ID NO: 29694 - DNA, 25 bp, probe
cattatcatcttcacttcagacaat

SEQ ID NO: 29695 - DNA, 25 bp, probe
agagacagagacagagagagactga

SEQ ID NO: 29696 - DNA, 25 bp, probe
acacacagatggtcacacagagata

SEQ ID NO: 29697 - DNA, 25 bp, probe
taatagagacacagagatggaatag

SEQ ID NO: 29698 - DNA, 25 bp, probe
ctaatagagacacagagatggaata

SEQ ID NO: 29699 - DNA, 25 bp, probe
atatatagtgtgtgtgtgtatgcgt

SEQ ID NO: 29700 - DNA, 25 bp, probe
tatatagtgtgtgtgtgtatgcgtg

SEQ ID NO: 29701 - DNA, 25 bp, probe
agacacacacgcatacacacatata

SEQ ID NO: 29702 - DNA, 25 bp, probe
tagacacacacgcatacacacatat

SEQ ID NO: 29703 - DNA, 25 bp, probe
ggagcatcattctgttatacttctg

SEQ ID NO: 29704 - DNA, 25 bp, probe
cactatggcaactaactcactcaat

SEQ ID NO: 29705 - DNA, 25 bp, probe
atatagtgtgtgtgtgtatgcgtgt

SEQ ID NO: 29706 - DNA, 25 bp, probe
actatggcaactaactcactcaatt

SEQ ID NO: 29707 - DNA, 25 bp, probe
cacgcatacacacatataatggaag

SEQ ID NO: 29708 - DNA, 25 bp, probe
gcatacacacatataatggaagcaa

SEQ ID NO: 29709 - DNA, 25 bp, probe
acacacacgcatacacacatataat

SEQ ID NO: 29710 - DNA, 25 bp, probe
ttgtatggttatggaggtctgacta

SEQ ID NO: 29711 - DNA, 25 bp, probe
acacatataatggaagcaataagcc

SEQ ID NO: 29712 - DNA, 25 bp, probe
acacgcatacacacatataatggaa

SEQ ID NO: 29713 - DNA, 25 bp, probe
cacacacgcatacacacatataatg

SEQ ID NO: 29714 - DNA, 25 bp, probe
gcaagattggcatatcattgtaact

SEQ ID NO: 29715 - DNA, 25 bp, probe
gagcatcattctgttatacttctgt

SEQ ID NO: 29716 - DNA, 25 bp, probe
tgtatggttatggaggtctgactag

SEQ ID NO: 29717 - DNA, 25 bp, probe
taagtcattccaatcagccaactaa

SEQ ID NO: 29718 - DNA, 25 bp, probe
ataagtcattccaatcagccaacta

SEQ ID NO: 29719 - DNA, 25 bp, probe
ggcaagattggcatatcattgtaac

SEQ ID NO: 29720 - DNA, 25 bp, probe
aggcaagattggcatatcattgtaa

SEQ ID NO: 29721 - DNA, 25 bp, probe
aaggcaagattggcatatcattgta

SEQ ID NO: 29722 - DNA, 25 bp, probe
gacacacacgcatacacacatataa

SEQ ID NO: 29723 - DNA, 25 bp, probe
cacacatataatggaagcaataagc

SEQ ID NO: 29724 - DNA, 25 bp, probe
cacacgcatacacacatataatgga

SEQ ID NO: 29725 - DNA, 25 bp, probe
cttgtatggttatggaggtctgact

SEQ ID NO: 29726 - DNA, 25 bp, probe
cgcatacacacatataatggaagca

SEQ ID NO: 29727 - DNA, 25 bp, probe
acgcatacacacatataatggaagc

SEQ ID NO: 29728 - DNA, 25 bp, probe
acacacgcatacacacatataatgg

SEQ ID NO: 29729 - DNA, 25 bp, probe
tggaaccactagaggaatataatgt

SEQ ID NO: 29730 - DNA, 25 bp, probe
ctagaccagaggacataagtatcat

SEQ ID NO: 29731 - DNA, 25 bp, probe
gtatggttatggaggtctgactagg

SEQ ID NO: 29732 - DNA, 25 bp, probe
aatatatagtgtgtgtgtgtatgcg

SEQ ID NO: 29733 - DNA, 25 bp, probe
aagtcattccaatcagccaactaag

SEQ ID NO: 29734 - DNA, 25 bp, probe
cataagtcattccaatcagccaact

SEQ ID NO: 29735 - DNA, 25 bp, probe
gtagacacacacgcatacacacata

SEQ ID NO: 29736 - DNA, 25 bp, probe
ggaagcaataagccattctaagagc

SEQ ID NO: 29737 - DNA, 25 bp, probe
tatagtgtgtgtgtgtatgcgtgtg

SEQ ID NO: 29738 - DNA, 25 bp, probe
tagaccagaggacataagtatcatg

SEQ ID NO: 29739 - DNA, 25 bp, probe
gaaggcaagattggcatatcattgt

SEQ ID NO: 29740 - DNA, 25 bp, probe
cctagaccagaggacataagtatca

SEQ ID NO: 29741 - DNA, 25 bp, probe
gtcattccaatcagccaactaagtt

SEQ ID NO: 29742 - DNA, 25 bp, probe
agcatcattctgttatacttctgta

SEQ ID NO: 29743 - DNA, 25 bp, probe
cttcctctatgccatctttaccaaa

SEQ ID NO: 29744 - DNA, 25 bp, probe
aactttcgcagagatttcttcattc

SEQ ID NO: 29745 - DNA, 25 bp, probe
aaactttcgcagagatttcttcatt

SEQ ID NO: 29746 - DNA, 25 bp, probe
cccatttctttctttgccatttctg

SEQ ID NO: 29747 - DNA, 25 bp, probe
actttcgcagagatttcttcattct

SEQ ID NO: 29748 - DNA, 25 bp, probe
cacccatttctttctttgccatttc

SEQ ID NO: 29749 - DNA, 25 bp, probe
aatgataattcagtccttgcctttg

SEQ ID NO: 29750 - DNA, 25 bp, probe
acccatttctttctttgccatttct

SEQ ID NO: 29751 - DNA, 25 bp, probe
atgataattcagtccttgcctttga

SEQ ID NO: 29752 - DNA, 25 bp, probe
ctttaaggtaaattggtcaggaact

SEQ ID NO: 29753 - DNA, 25 bp, probe
catttctttctttgccatttctgcc

SEQ ID NO: 29754 - DNA, 25 bp, probe
ccatttctttctttgccatttctgc

SEQ ID NO: 29755 - DNA, 25 bp, probe
tccacttacatacttgtccctctaa

SEQ ID NO: 29756 - DNA, 25 bp, probe
ttccacttacatacttgtccctcta

SEQ ID NO: 29757 - DNA, 25 bp, probe
atttctttctttgccatttctgcct

SEQ ID NO: 29758 - DNA, 25 bp, probe
ccacttacatacttgtccctctaag

SEQ ID NO: 29759 - DNA, 25 bp, probe
ccttcctctatgccatctttaccaa

SEQ ID NO: 29760 - DNA, 25 bp, probe
ggaagctgaattattagtaacaaca

SEQ ID NO: 29761 - DNA, 25 bp, probe
aaagattctgctggttctgtttcac

SEQ ID NO: 29762 - DNA, 25 bp, probe
caaagattctgctggttctgtttca

SEQ ID NO: 29763 - DNA, 25 bp, probe
acagtgcttctacacatttcatcta

SEQ ID NO: 29764 - DNA, 25 bp, probe
atcactgtgtccaaagcaaagattc

SEQ ID NO: 29765 - DNA, 25 bp, probe
tgtgatacattaggaagctgaatta

SEQ ID NO: 29766 - DNA, 25 bp, probe
cagtgcttctacacatttcatctaa

SEQ ID NO: 29767 - DNA, 25 bp, probe
tttctttctttgccatttctgcctc

SEQ ID NO: 29768 - DNA, 25 bp, probe
tataggacagaaacttcatccactg

SEQ ID NO: 29769 - DNA, 25 bp, probe
catcactgtgtccaaagcaaagatt

SEQ ID NO: 29770 - DNA, 25 bp, probe
gacagtgcttctacacatttcatct

SEQ ID NO: 29771 - DNA, 25 bp, probe
gttccacttacatacttgtccctct

SEQ ID NO: 29772 - DNA, 25 bp, probe
aggaagctgaattattagtaacaac

SEQ ID NO: 29773 - DNA, 25 bp, probe
aggtaaattggtcaggaactattaa

SEQ ID NO: 29774 - DNA, 25 bp, probe
aaggtaaattggtcaggaactatta

SEQ ID NO: 29775 - DNA, 25 bp, probe
taaggtaaattggtcaggaactatt

SEQ ID NO: 29776 - DNA, 25 bp, probe
ttaaggtaaattggtcaggaactat

SEQ ID NO: 29777 - DNA, 25 bp, probe
tgacagtgcttctacacatttcatc

SEQ ID NO: 29778 - DNA, 25 bp, probe
ctgacagtgcttctacacatttcat

SEQ ID NO: 29779 - DNA, 25 bp, probe
ttataggacagaaacttcatccact

SEQ ID NO: 29780 - DNA, 25 bp, probe
tttaaggtaaattggtcaggaacta

SEQ ID NO: 29781 - DNA, 25 bp, probe
gaatgataattcagtccttgccttt

SEQ ID NO: 29782 - DNA, 25 bp, probe
agcccaaatttataggacagaaact

SEQ ID NO: 29783 - DNA, 25 bp, probe
gcccaaatttataggacagaaactt

SEQ ID NO: 29784 - DNA, 25 bp, probe
aagcccaaatttataggacagaaac

SEQ ID NO: 29785 - DNA, 25 bp, probe
caagcccaaatttataggacagaaa

SEQ ID NO: 29786 - DNA, 25 bp, probe
agtgcttctacacatttcatctaat

SEQ ID NO: 29787 - DNA, 25 bp, probe
gaaatgtcctccaacaataaagagc

SEQ ID NO: 29788 - DNA, 25 bp, probe
ggaaatgtcctccaacaataaagag

SEQ ID NO: 29789 - DNA, 25 bp, probe
aaatgtcctccaacaataaagagct

SEQ ID NO: 29790 - DNA, 25 bp, probe
catcctgatcaacttcttcatcttc

SEQ ID NO: 29791 - DNA, 25 bp, probe
ccatcctgatcaacttcttcatctt

SEQ ID NO: 29792 - DNA, 25 bp, probe
caacttcttcatcttcgtccgcatc

SEQ ID NO: 29793 - DNA, 25 bp, probe
atcctgatcaacttcttcatcttcg

SEQ ID NO: 29794 - DNA, 25 bp, probe
gatcaacttcttcatcttcgtccgc

SEQ ID NO: 29795 - DNA, 25 bp, probe
tgtcctctactgcttcctcaacaag

SEQ ID NO: 29796 - DNA, 25 bp, probe
ctgtcctctactgcttcctcaacaa

SEQ ID NO: 29797 - DNA, 25 bp, probe
ctgatcaacttcttcatcttcgtcc

SEQ ID NO: 29798 - DNA, 25 bp, probe
cctgatcaacttcttcatcttcgtc

SEQ ID NO: 29799 - DNA, 25 bp, probe
tcctgatcaacttcttcatcttcgt

SEQ ID NO: 29800 - DNA, 25 bp, probe
tcaacttcttcatcttcgtccgcat

SEQ ID NO: 29801 - DNA, 25 bp, probe
atcaacttcttcatcttcgtccgca

SEQ ID NO: 29802 - DNA, 25 bp, probe
gatgcaccacacagactacaagttc

SEQ ID NO: 29803 - DNA, 25 bp, probe
gccatcctgatcaacttcttcatct

SEQ ID NO: 29804 - DNA, 25 bp, probe
gtcctctactgcttcctcaacaagg

SEQ ID NO: 29805 - DNA, 25 bp, probe
tgatcaacttcttcatcttcgtccg

SEQ ID NO: 29806 - DNA, 25 bp, probe
agatgcaccacacagactacaagtt

SEQ ID NO: 29807 - DNA, 25 bp, probe
caagctcttcttcgacctcttcctc

SEQ ID NO: 29808 - DNA, 25 bp, probe
agtggtcaagtgtctgttcgagaac

SEQ ID NO: 29809 - DNA, 25 bp, probe
ggccatcctgatcaacttcttcatc

SEQ ID NO: 29810 - DNA, 25 bp, probe
cagtggtcaagtgtctgttcgagaa

SEQ ID NO: 29811 - DNA, 25 bp, probe
aagctcttcttcgacctcttcctca

SEQ ID NO: 29812 - DNA, 25 bp, probe
cagatgcaccacacagactacaagt

SEQ ID NO: 29813 - DNA, 25 bp, probe
tggaaatgtcctccaacaataaaga

SEQ ID NO: 29814 - DNA, 25 bp, probe
catggaaatgtcctccaacaataaa

SEQ ID NO: 29815 - DNA, 25 bp, probe
atggaaatgtcctccaacaataaag

SEQ ID NO: 29816 - DNA, 25 bp, probe
atgcaccacacagactacaagttcc

SEQ ID NO: 29817 - DNA, 25 bp, probe
aacaataaagagctcaagtggtcac

SEQ ID NO: 29818 - DNA, 25 bp, probe
caacaataaagagctcaagtggtca

SEQ ID NO: 29819 - DNA, 25 bp, probe
gcatggaaatgtcctccaacaataa

SEQ ID NO: 29820 - DNA, 25 bp, probe
aatgtcctccaacaataaagagctc

SEQ ID NO: 29821 - DNA, 25 bp, probe
gtcctccaacaataaagagctcaag

SEQ ID NO: 29822 - DNA, 25 bp, probe
cctccaacaataaagagctcaagtg

SEQ ID NO: 29823 - DNA, 25 bp, probe
tcctccaacaataaagagctcaagt

SEQ ID NO: 29824 - DNA, 25 bp, probe
atgtcctccaacaataaagagctca

SEQ ID NO: 29825 - DNA, 25 bp, probe
tgtcctccaacaataaagagctcaa

SEQ ID NO: 29826 - DNA, 25 bp, probe
cctctactgcttcctcaacaaggag

SEQ ID NO: 29827 - DNA, 25 bp, probe
acaataaagagctcaagtggtcacc

SEQ ID NO: 29828 - DNA, 25 bp, probe
ctccaacaataaagagctcaagtgg

SEQ ID NO: 29829 - DNA, 25 bp, probe
ccaacaataaagagctcaagtggtc

SEQ ID NO: 29830 - DNA, 25 bp, probe
tgcatggaaatgtcctccaacaata

SEQ ID NO: 29831 - DNA, 25 bp, probe
ccagtgagattacagaggaagttat

SEQ ID NO: 29832 - DNA, 25 bp, probe
tctcataggttgccaataatacact

SEQ ID NO: 29833 - DNA, 25 bp, probe
ggttgccaataatacactaattcct

SEQ ID NO: 29834 - DNA, 25 bp, probe
aggttgccaataatacactaattcc

SEQ ID NO: 29835 - DNA, 25 bp, probe
cagaatctcataggttgccaataat

SEQ ID NO: 29836 - DNA, 25 bp, probe
atctcataggttgccaataatacac

SEQ ID NO: 29837 - DNA, 25 bp, probe
cagtgagattacagaggaagttatc

SEQ ID NO: 29838 - DNA, 25 bp, probe
ctcataggttgccaataatacacta

SEQ ID NO: 29839 - DNA, 25 bp, probe
aatctcataggttgccaataataca

SEQ ID NO: 29840 - DNA, 25 bp, probe
tcataggttgccaataatacactaa

SEQ ID NO: 29841 - DNA, 25 bp, probe
gaatctcataggttgccaataatac

SEQ ID NO: 29842 - DNA, 25 bp, probe
agtgagattacagaggaagttatcc

SEQ ID NO: 29843 - DNA, 25 bp, probe
gttgccaataatacactaattcctt

SEQ ID NO: 29844 - DNA, 25 bp, probe
agaatctcataggttgccaataata

SEQ ID NO: 29845 - DNA, 25 bp, probe
atgctgatggataacctatatgatt

SEQ ID NO: 29846 - DNA, 25 bp, probe
aatgctgatggataacctatatgat

SEQ ID NO: 29847 - DNA, 25 bp, probe
taatagcgggttactttcacataca

SEQ ID NO: 29848 - DNA, 25 bp, probe
atctaatagcgggttactttcacat

SEQ ID NO: 29849 - DNA, 25 bp, probe
ctaatagcgggttactttcacatac

SEQ ID NO: 29850 - DNA, 25 bp, probe
tctaatagcgggttactttcacata

SEQ ID NO: 29851 - DNA, 25 bp, probe
catctaatagcgggttactttcaca

SEQ ID NO: 29852 - DNA, 25 bp, probe
ttcctctcactaaactttacccaaa

SEQ ID NO: 29853 - DNA, 25 bp, probe
attcctctcactaaactttacccaa

SEQ ID NO: 29854 - DNA, 25 bp, probe
aatagcgggttactttcacatacag

SEQ ID NO: 29855 - DNA, 25 bp, probe
caaagaaatgctgatggataaccta

SEQ ID NO: 29856 - DNA, 25 bp, probe
attggtattcactaatctgggaagg

SEQ ID NO: 29857 - DNA, 25 bp, probe
aattcctctcactaaactttaccca

SEQ ID NO: 29858 - DNA, 25 bp, probe
gtattcactaatctgggaagggaag

SEQ ID NO: 29859 - DNA, 25 bp, probe
cctaatgtgtgccatagagtttaac

SEQ ID NO: 29860 - DNA, 25 bp, probe
ccctaatgtgtgccatagagtttaa

SEQ ID NO: 29861 - DNA, 25 bp, probe
cccagtgagattacagaggaagtta

SEQ ID NO: 29862 - DNA, 25 bp, probe
cataggttgccaataatacactaat

SEQ ID NO: 29863 - DNA, 25 bp, probe
ccatctaatagcgggttactttcac

SEQ ID NO: 29864 - DNA, 25 bp, probe
tcctttctatcctacaacaagagtt

SEQ ID NO: 29865 - DNA, 25 bp, probe
ttcctttctatcctacaacaagagt

SEQ ID NO: 29866 - DNA, 25 bp, probe
gcaggtttagtttactcaatctccc

SEQ ID NO: 29867 - DNA, 25 bp, probe
tattcactaatctgggaagggaagg

SEQ ID NO: 29868 - DNA, 25 bp, probe
tccctaatgtgtgccatagagttta

SEQ ID NO: 29869 - DNA, 25 bp, probe
tcaaagaaatgctgatggataacct

SEQ ID NO: 29870 - DNA, 25 bp, probe
taggttgccaataatacactaattc

SEQ ID NO: 29871 - DNA, 25 bp, probe
gtcaaagaaatgctgatggataacc

SEQ ID NO: 29872 - DNA, 25 bp, probe
ggtcaaagaaatgctgatggataac

SEQ ID NO: 29873 - DNA, 25 bp, probe
ttggttaatctttcctgatggtaca

SEQ ID NO: 29874 - DNA, 25 bp, probe
aaagaaatgctgatggataacctat

SEQ ID NO: 29875 - DNA, 25 bp, probe
ctccttacctattccaacctaatga

SEQ ID NO: 29876 - DNA, 25 bp, probe
tctccttacctattccaacctaatg

SEQ ID NO: 29877 - DNA, 25 bp, probe
gtctccttacctattccaacctaat

SEQ ID NO: 29878 - DNA, 25 bp, probe
ttatattggtggctgttggattctg

SEQ ID NO: 29879 - DNA, 25 bp, probe
tccttacctattccaacctaatgat

SEQ ID NO: 29880 - DNA, 25 bp, probe
tatattggtggctgttggattctga

SEQ ID NO: 29881 - DNA, 25 bp, probe
cctattccaacctaatgatacatgc

SEQ ID NO: 29882 - DNA, 25 bp, probe
gatgccaacaatgtgacttatgtct

SEQ ID NO: 29883 - DNA, 25 bp, probe
tatggatgccaacaatgtgacttat

SEQ ID NO: 29884 - DNA, 25 bp, probe
ccttacctattccaacctaatgata

SEQ ID NO: 29885 - DNA, 25 bp, probe
atgccaacaatgtgacttatgtctg

SEQ ID NO: 29886 - DNA, 25 bp, probe
cttagtctgtatggatgccaacaat

SEQ ID NO: 29887 - DNA, 25 bp, probe
acctattccaacctaatgatacatg

SEQ ID NO: 29888 - DNA, 25 bp, probe
ggtctccttacctattccaacctaa

SEQ ID NO: 29889 - DNA, 25 bp, probe
atttcgctgatgtggtttgttatac

SEQ ID NO: 29890 - DNA, 25 bp, probe
gatttcgctgatgtggtttgttata

SEQ ID NO: 29891 - DNA, 25 bp, probe
ttagtctgtatggatgccaacaatg

SEQ ID NO: 29892 - DNA, 25 bp, probe
tttatattggtggctgttggattct

SEQ ID NO: 29893 - DNA, 25 bp, probe
atttatattggtggctgttggattc

SEQ ID NO: 29894 - DNA, 25 bp, probe
gtatggatgccaacaatgtgactta

SEQ ID NO: 29895 - DNA, 25 bp, probe
atgacatcgctttgattgaaatgaa

SEQ ID NO: 29896 - DNA, 25 bp, probe
aatgacatcgctttgattgaaatga

SEQ ID NO: 29897 - DNA, 25 bp, probe
gaatttatattggtggctgttggat

SEQ ID NO: 29898 - DNA, 25 bp, probe
tgacatcgctttgattgaaatgaaa

SEQ ID NO: 29899 - DNA, 25 bp, probe
aaatgacatcgctttgattgaaatg

SEQ ID NO: 29900 - DNA, 25 bp, probe
atattggtggctgttggattctgac

SEQ ID NO: 29901 - DNA, 25 bp, probe
aatttatattggtggctgttggatt

SEQ ID NO: 29902 - DNA, 25 bp, probe
gatggtatcaatgattgtggagacc

SEQ ID NO: 29903 - DNA, 25 bp, probe
tgtgatctctctcttcattctattc

SEQ ID NO: 29904 - DNA, 25 bp, probe
ttacctattccaacctaatgataca

SEQ ID NO: 29905 - DNA, 25 bp, probe
caattaaggatgccagtggaatcac

SEQ ID NO: 29906 - DNA, 25 bp, probe
ggatgccaacaatgtgacttatgtc

SEQ ID NO: 29907 - DNA, 25 bp, probe
ctattccaacctaatgatacatgca

SEQ ID NO: 29908 - DNA, 25 bp, probe
atggatgccaacaatgtgacttatg

SEQ ID NO: 29909 - DNA, 25 bp, probe
cagattctccaatggatgacttctt

SEQ ID NO: 29910 - DNA, 25 bp, probe
ccaaagtgatgaactgtgttgtaaa

SEQ ID NO: 29911 - DNA, 25 bp, probe
ggaatttatattggtggctgttgga

SEQ ID NO: 29912 - DNA, 25 bp, probe
aaagtgatgaactgtgttgtaaagc

SEQ ID NO: 29913 - DNA, 25 bp, probe
tggtctccttacctattccaaccta

SEQ ID NO: 29914 - DNA, 25 bp, probe
tagtctgtatggatgccaacaatgt

SEQ ID NO: 29915 - DNA, 25 bp, probe
caaagtgatgaactgtgttgtaaag

SEQ ID NO: 29916 - DNA, 25 bp, probe
actaagagaagaactatgggttacc

SEQ ID NO: 29917 - DNA, 25 bp, probe
gtgatctctctcttcattctattct

SEQ ID NO: 29918 - DNA, 25 bp, probe
accaaagtgatgaactgtgttgtaa

SEQ ID NO: 29919 - DNA, 25 bp, probe
ggcattacatcgcatagaaatcaat

SEQ ID NO: 29920 - DNA, 25 bp, probe
taatttgtggtgatttggatctgtg

SEQ ID NO: 29921 - DNA, 25 bp, probe
gggcattacatcgcatagaaatcaa

SEQ ID NO: 29922 - DNA, 25 bp, probe
ataatttgtggtgatttggatctgt

SEQ ID NO: 29923 - DNA, 25 bp, probe
gcattacatcgcatagaaatcaata

SEQ ID NO: 29924 - DNA, 25 bp, probe
ctgggcattacatcgcatagaaatc

SEQ ID NO: 29925 - DNA, 25 bp, probe
atttgtggtgatttggatctgtgtt

SEQ ID NO: 29926 - DNA, 25 bp, probe
aatttgtggtgatttggatctgtgt

SEQ ID NO: 29927 - DNA, 25 bp, probe
tttgtggtgatttggatctgtgttt

SEQ ID NO: 29928 - DNA, 25 bp, probe
cgcatagaaatcaataatttgtggt

SEQ ID NO: 29929 - DNA, 25 bp, probe
tcgcatagaaatcaataatttgtgg

SEQ ID NO: 29930 - DNA, 25 bp, probe
aataatttgtggtgatttggatctg

SEQ ID NO: 29931 - DNA, 25 bp, probe
tgggcattacatcgcatagaaatca

SEQ ID NO: 29932 - DNA, 25 bp, probe
tctgggcattacatcgcatagaaat

SEQ ID NO: 29933 - DNA, 25 bp, probe
caataatttgtggtgatttggatct

SEQ ID NO: 29934 - DNA, 25 bp, probe
tcaataatttgtggtgatttggatc

SEQ ID NO: 29935 - DNA, 25 bp, probe
ctcactgttcatctccgtctcagaa

SEQ ID NO: 29936 - DNA, 25 bp, probe
gcatagaaatcaataatttgtggtg

SEQ ID NO: 29937 - DNA, 25 bp, probe
ttcctaataaacgtggagaatcaca

SEQ ID NO: 29938 - DNA, 25 bp, probe
ctgaaccgagtagaagacaaggtga

SEQ ID NO: 29939 - DNA, 25 bp, probe
tttcctaataaacgtggagaatcac

SEQ ID NO: 29940 - DNA, 25 bp, probe
gtggtgatttggatctgtgttttaa

SEQ ID NO: 29941 - DNA, 25 bp, probe
tgaaccgagtagaagacaaggtgac

SEQ ID NO: 29942 - DNA, 25 bp, probe
tgtggtgatttggatctgtgtttta

SEQ ID NO: 29943 - DNA, 25 bp, probe
tggtgatttggatctgtgttttaat

SEQ ID NO: 29944 - DNA, 25 bp, probe
ggtgatttggatctgtgttttaatg

SEQ ID NO: 29945 - DNA, 25 bp, probe
atcgcatagaaatcaataatttgtg

SEQ ID NO: 29946 - DNA, 25 bp, probe
catcgcatagaaatcaataatttgt

SEQ ID NO: 29947 - DNA, 25 bp, probe
acatcgcatagaaatcaataatttg

SEQ ID NO: 29948 - DNA, 25 bp, probe
tcactgttcatctccgtctcagaaa

SEQ ID NO: 29949 - DNA, 25 bp, probe
ttgtggtgatttggatctgtgtttt

SEQ ID NO: 29950 - DNA, 25 bp, probe
tggatctgtgttttaatgagtttca

SEQ ID NO: 29951 - DNA, 25 bp, probe
cattacatcgcatagaaatcaataa

SEQ ID NO: 29952 - DNA, 25 bp, probe
ttctgggcattacatcgcatagaaa

SEQ ID NO: 29953 - DNA, 25 bp, probe
ttccttctgggcattacatcgcata

SEQ ID NO: 29954 - DNA, 25 bp, probe
gtgatttggatctgtgttttaatga

SEQ ID NO: 29955 - DNA, 25 bp, probe
ttggatctgtgttttaatgagtttc

SEQ ID NO: 29956 - DNA, 25 bp, probe
atcaataatttgtggtgatttggat

SEQ ID NO: 29957 - DNA, 25 bp, probe
cagagaagtgacggttcctacacag

SEQ ID NO: 29958 - DNA, 25 bp, probe
gatttggatctgtgttttaatgagt

SEQ ID NO: 29959 - DNA, 25 bp, probe
tgatttggatctgtgttttaatgag

SEQ ID NO: 29960 - DNA, 25 bp, probe
cttctgggcattacatcgcatagaa

SEQ ID NO: 29961 - DNA, 25 bp, probe
tgttcatctccgtctcagaaaagag

SEQ ID NO: 29962 - DNA, 25 bp, probe
ggatctgtgttttaatgagtttcac

SEQ ID NO: 29963 - DNA, 25 bp, probe
aagatgttagagccaggatgaagag

SEQ ID NO: 29964 - DNA, 25 bp, probe
gatgttagagccaggatgaagagag

SEQ ID NO: 29965 - DNA, 25 bp, probe
agatgttagagccaggatgaagaga

SEQ ID NO: 29966 - DNA, 25 bp, probe
caggatgaagagaggctatgacaac

SEQ ID NO: 29967 - DNA, 25 bp, probe
taatgagaaagatgttagagccagg

SEQ ID NO: 29968 - DNA, 25 bp, probe
tcttattggcagtcacatttatgga

SEQ ID NO: 29969 - DNA, 25 bp, probe
tattggcagtcacatttatggaaag

SEQ ID NO: 29970 - DNA, 25 bp, probe
cttattggcagtcacatttatggaa

SEQ ID NO: 29971 - DNA, 25 bp, probe
ttcttattggcagtcacatttatgg

SEQ ID NO: 29972 - DNA, 25 bp, probe
ccttcttattggcagtcacatttat

SEQ ID NO: 29973 - DNA, 25 bp, probe
ttattggcagtcacatttatggaaa

SEQ ID NO: 29974 - DNA, 25 bp, probe
gaaagatgttagagccaggatgaag

SEQ ID NO: 29975 - DNA, 25 bp, probe
atgagaaagatgttagagccaggat

SEQ ID NO: 29976 - DNA, 25 bp, probe
aaagatgttagagccaggatgaaga

SEQ ID NO: 29977 - DNA, 25 bp, probe
agaaagatgttagagccaggatgaa

SEQ ID NO: 29978 - DNA, 25 bp, probe
aatgagaaagatgttagagccagga

SEQ ID NO: 29979 - DNA, 25 bp, probe
cataactttagcaagacagtggaag

SEQ ID NO: 29980 - DNA, 25 bp, probe
ggatttccataactttagcaagaca

SEQ ID NO: 29981 - DNA, 25 bp, probe
tttccataactttagcaagacagtg

SEQ ID NO: 29982 - DNA, 25 bp, probe
cttcttattggcagtcacatttatg

SEQ ID NO: 29983 - DNA, 25 bp, probe
ataatgagaaagatgttagagccag

SEQ ID NO: 29984 - DNA, 25 bp, probe
atgttagagccaggatgaagagagg

SEQ ID NO: 29985 - DNA, 25 bp, probe
gagaaagatgttagagccaggatga

SEQ ID NO: 29986 - DNA, 25 bp, probe
ttgtcagaagtcaatgaaacagatg

SEQ ID NO: 29987 - DNA, 25 bp, probe
tcttgtcagaagtcaatgaaacaga

SEQ ID NO: 29988 - DNA, 25 bp, probe
catcttgtcagaagtcaatgaaaca

SEQ ID NO: 29989 - DNA, 25 bp, probe
tgtcagaagtcaatgaaacagatga

SEQ ID NO: 29990 - DNA, 25 bp, probe
cttgtcagaagtcaatgaaacagat

SEQ ID NO: 29991 - DNA, 25 bp, probe
atcttgtcagaagtcaatgaaacag

SEQ ID NO: 29992 - DNA, 25 bp, probe
tggaccagatcaatatcaactttgt

SEQ ID NO: 29993 - DNA, 25 bp, probe
atttccataactttagcaagacagt

SEQ ID NO: 29994 - DNA, 25 bp, probe
tgctcccatagtatccaagacaaag

SEQ ID NO: 29995 - DNA, 25 bp, probe
gatttccataactttagcaagacag

SEQ ID NO: 29996 - DNA, 25 bp, probe
tgagaaagatgttagagccaggatg

SEQ ID NO: 29997 - DNA, 25 bp, probe
ttggaccagatcaatatcaactttg

SEQ ID NO: 29998 - DNA, 25 bp, probe
aggatgaagagaggctatgacaacc

SEQ ID NO: 29999 - DNA, 25 bp, probe
ccaggatgaagagaggctatgacaa

SEQ ID NO: 30000 - DNA, 25 bp, probe
ttgctcccatagtatccaagacaaa

SEQ ID NO: 30001 - DNA, 25 bp, probe
tttgctcccatagtatccaagacaa

SEQ ID NO: 30002 - DNA, 25 bp, probe
tcctaatccgagtggctaatctcag

SEQ ID NO: 30003 - DNA, 25 bp, probe
ctcctaatccgagtggctaatctca

SEQ ID NO: 30004 - DNA, 25 bp, probe
attggcagtcacatttatggaaagc

SEQ ID NO: 30005 - DNA, 25 bp, probe
tgccatgtgcctttataatgagaaa

SEQ ID NO: 30006 - DNA, 25 bp, probe
ggaccagatcaatatcaactttgta

SEQ ID NO: 30007 - DNA, 25 bp, probe
atgtatgccctatctggattctact

SEQ ID NO: 30008 - DNA, 25 bp, probe
tgtatgccctatctggattctactt

SEQ ID NO: 30009 - DNA, 25 bp, probe
tttatgtatgccctatctggattct

SEQ ID NO: 30010 - DNA, 25 bp, probe
tatgtatgccctatctggattctac

SEQ ID NO: 30011 - DNA, 25 bp, probe
gtatgccctatctggattctactta

SEQ ID NO: 30012 - DNA, 25 bp, probe
ttatgtatgccctatctggattcta

SEQ ID NO: 30013 - DNA, 25 bp, probe
tagagatgcactgttcaattcggta

SEQ ID NO: 30014 - DNA, 25 bp, probe
caatggctacgtcaagttctcaatg

SEQ ID NO: 30015 - DNA, 25 bp, probe
tcaatggctacgtcaagttctcaat

SEQ ID NO: 30016 - DNA, 25 bp, probe
aagttctcaatggctacgtcaagtt

SEQ ID NO: 30017 - DNA, 25 bp, probe
ttcaagttctcaatggctacgtcaa

SEQ ID NO: 30018 - DNA, 25 bp, probe
ttctcaatggctacgtcaagttctc

SEQ ID NO: 30019 - DNA, 25 bp, probe
ctagagatgcactgttcaattcggt

SEQ ID NO: 30020 - DNA, 25 bp, probe
ctcaatggctacgtcaagttctcaa

SEQ ID NO: 30021 - DNA, 25 bp, probe
gttctcaatggctacgtcaagttct

SEQ ID NO: 30022 - DNA, 25 bp, probe
agttctcaatggctacgtcaagttc

SEQ ID NO: 30023 - DNA, 25 bp, probe
tcaagttctcaatggctacgtcaag

SEQ ID NO: 30024 - DNA, 25 bp, probe
ctacgtttcaagttctcaatggcta

SEQ ID NO: 30025 - DNA, 25 bp, probe
tacgtttcaagttctcaatggctac

SEQ ID NO: 30026 - DNA, 25 bp, probe
agagatgcactgttcaattcggtac

SEQ ID NO: 30027 - DNA, 25 bp, probe
cactgttcaattcggtacgcactag

SEQ ID NO: 30028 - DNA, 25 bp, probe
caagttctcaatggctacgtcaagt

SEQ ID NO: 30029 - DNA, 25 bp, probe
tctagagatgcactgttcaattcgg

SEQ ID NO: 30030 - DNA, 25 bp, probe
aatggctacgtcaagttctcaatgg

SEQ ID NO: 30031 - DNA, 25 bp, probe
gacttttatgtatgccctatctgga

SEQ ID NO: 30032 - DNA, 25 bp, probe
ttgcactacgtttcaagttctcaat

SEQ ID NO: 30033 - DNA, 25 bp, probe
acttttatgtatgccctatctggat

SEQ ID NO: 30034 - DNA, 25 bp, probe
agacttttatgtatgccctatctgg

SEQ ID NO: 30035 - DNA, 25 bp, probe
gtttcaagttctcaatggctacgtc

SEQ ID NO: 30036 - DNA, 25 bp, probe
tgcactacgtttcaagttctcaatg

SEQ ID NO: 30037 - DNA, 25 bp, probe
tttctcagttgcactacgtttcaag

SEQ ID NO: 30038 - DNA, 25 bp, probe
gctacgtcaagttctcaatggctac

SEQ ID NO: 30039 - DNA, 25 bp, probe
tctcaatggctacgtcaagttctca

SEQ ID NO: 30040 - DNA, 25 bp, probe
ttttatgtatgccctatctggattc

SEQ ID NO: 30041 - DNA, 25 bp, probe
cttttatgtatgccctatctggatt

SEQ ID NO: 30042 - DNA, 25 bp, probe
gagacttttatgtatgccctatctg

SEQ ID NO: 30043 - DNA, 25 bp, probe
gttgcactacgtttcaagttctcaa

SEQ ID NO: 30044 - DNA, 25 bp, probe
gtttctcagttgcactacgtttcaa

SEQ ID NO: 30045 - DNA, 25 bp, probe
tagtttctcagttgcactacgtttc

SEQ ID NO: 30046 - DNA, 25 bp, probe
tttcaagttctcaatggctacgtca

SEQ ID NO: 30047 - DNA, 25 bp, probe
actacgtttcaagttctcaatggct

SEQ ID NO: 30048 - DNA, 25 bp, probe
cactacgtttcaagttctcaatggc

SEQ ID NO: 30049 - DNA, 25 bp, probe
gcactacgtttcaagttctcaatgg

SEQ ID NO: 30050 - DNA, 25 bp, probe
cagttgcactacgtttcaagttctc

SEQ ID NO: 30051 - DNA, 25 bp, probe
aatgaagatgctgatgactatgaat

SEQ ID NO: 30052 - DNA, 25 bp, probe
tgaagatgctgatgactatgaataa

SEQ ID NO: 30053 - DNA, 25 bp, probe
taatgaagatgctgatgactatgaa

SEQ ID NO: 30054 - DNA, 25 bp, probe
ttaatgaagatgctgatgactatga

SEQ ID NO: 30055 - DNA, 25 bp, probe
atgaagatgctgatgactatgaata

SEQ ID NO: 30056 - DNA, 25 bp, probe
gaagatgctgatgactatgaataat

SEQ ID NO: 30057 - DNA, 25 bp, probe
tctgctatttactgctcttattgtt

SEQ ID NO: 30058 - DNA, 25 bp, probe
ttctgctatttactgctcttattgt

SEQ ID NO: 30059 - DNA, 25 bp, probe
attaatgaagatgctgatgactatg

SEQ ID NO: 30060 - DNA, 25 bp, probe
tttctgctatttactgctcttattg

SEQ ID NO: 30061 - DNA, 25 bp, probe
ctgctatttactgctcttattgtta

SEQ ID NO: 30062 - DNA, 25 bp, probe
caacctgcgagataccaacatgatc

SEQ ID NO: 30063 - DNA, 25 bp, probe
aattaatgaagatgctgatgactat

SEQ ID NO: 30064 - DNA, 25 bp, probe
ataattaatgaagatgctgatgact

SEQ ID NO: 30065 - DNA, 25 bp, probe
gagatcaccttcaacctgcgagata

SEQ ID NO: 30066 - DNA, 25 bp, probe
agatgctgatgactatgaataataa

SEQ ID NO: 30067 - DNA, 25 bp, probe
aagatgctgatgactatgaataata

SEQ ID NO: 30068 - DNA, 25 bp, probe
cttcaacctgcgagataccaacatg

SEQ ID NO: 30069 - DNA, 25 bp, probe
aaggacttttctgctatttactgct

SEQ ID NO: 30070 - DNA, 25 bp, probe
caaggacttttctgctatttactgc

SEQ ID NO: 30071 - DNA, 25 bp, probe
gacttttctgctatttactgctctt

SEQ ID NO: 30072 - DNA, 25 bp, probe
ggacttttctgctatttactgctct

SEQ ID NO: 30073 - DNA, 25 bp, probe
aggacttttctgctatttactgctc

SEQ ID NO: 30074 - DNA, 25 bp, probe
agatcaccttcaacctgcgagatac

SEQ ID NO: 30075 - DNA, 25 bp, probe
tgctatttactgctcttattgttaa

SEQ ID NO: 30076 - DNA, 25 bp, probe
acctcaaggacttttctgctattta

SEQ ID NO: 30077 - DNA, 25 bp, probe
tcaaggacttttctgctatttactg

SEQ ID NO: 30078 - DNA, 25 bp, probe
cctcaaggacttttctgctatttac

SEQ ID NO: 30079 - DNA, 25 bp, probe
ctcaaggacttttctgctatttact

SEQ ID NO: 30080 - DNA, 25 bp, probe
cacctcaaggacttttctgctattt

SEQ ID NO: 30081 - DNA, 25 bp, probe
tcaacctgcgagataccaacatgat

SEQ ID NO: 30082 - DNA, 25 bp, probe
taattaatgaagatgctgatgacta

SEQ ID NO: 30083 - DNA, 25 bp, probe
acttttctgctatttactgctctta

SEQ ID NO: 30084 - DNA, 25 bp, probe
aataattaatgaagatgctgatgac

SEQ ID NO: 30085 - DNA, 25 bp, probe
tgaataattaatgaagatgctgatg

SEQ ID NO: 30086 - DNA, 25 bp, probe
ttactgctcttattgttaaggataa

SEQ ID NO: 30087 - DNA, 25 bp, probe
ttcaacctgcgagataccaacatga

SEQ ID NO: 30088 - DNA, 25 bp, probe
ccttcaacctgcgagataccaacat

SEQ ID NO: 30089 - DNA, 25 bp, probe
gaataattaatgaagatgctgatga

SEQ ID NO: 30090 - DNA, 25 bp, probe
actgctcttattgttaaggataata

SEQ ID NO: 30091 - DNA, 25 bp, probe
tactgctcttattgttaaggataat

SEQ ID NO: 30092 - DNA, 25 bp, probe
aacctgcgagataccaacatgatcc

SEQ ID NO: 30093 - DNA, 25 bp, probe
atttactgctcttattgttaaggat

SEQ ID NO: 30094 - DNA, 25 bp, probe
gctatttactgctcttattgttaag

SEQ ID NO: 30095 - DNA, 25 bp, probe
ccatattcctcagactcaacaattc

SEQ ID NO: 30096 - DNA, 25 bp, probe
tattcctcagactcaacaattcttg

SEQ ID NO: 30097 - DNA, 25 bp, probe
catattcctcagactcaacaattct

SEQ ID NO: 30098 - DNA, 25 bp, probe
atattcctcagactcaacaattctt

SEQ ID NO: 30099 - DNA, 25 bp, probe
tgttggttgtcgaatatcatcaatg

SEQ ID NO: 30100 - DNA, 25 bp, probe
ttgttggttgtcgaatatcatcaat

SEQ ID NO: 30101 - DNA, 25 bp, probe
gttggttgtcgaatatcatcaatga

SEQ ID NO: 30102 - DNA, 25 bp, probe
cccatattcctcagactcaacaatt

SEQ ID NO: 30103 - DNA, 25 bp, probe
ttggttgtcgaatatcatcaatgaa

SEQ ID NO: 30104 - DNA, 25 bp, probe
ctggctgtaaagtaagtgtaaggtc

SEQ ID NO: 30105 - DNA, 25 bp, probe
ttaaaggaagacaaggcatttacac

SEQ ID NO: 30106 - DNA, 25 bp, probe
cttaaaggaagacaaggcatttaca

SEQ ID NO: 30107 - DNA, 25 bp, probe
acttaaaggaagacaaggcatttac

SEQ ID NO: 30108 - DNA, 25 bp, probe
ttacttaaaggaagacaaggcattt

SEQ ID NO: 30109 - DNA, 25 bp, probe
tttacttaaaggaagacaaggcatt

SEQ ID NO: 30110 - DNA, 25 bp, probe
tggtttattatgggaatcctgaatc

SEQ ID NO: 30111 - DNA, 25 bp, probe
taaaggaagacaaggcatttacacg

SEQ ID NO: 30112 - DNA, 25 bp, probe
tttaggataggagaaagggttcatg

SEQ ID NO: 30113 - DNA, 25 bp, probe
acatggtttattatgggaatcctga

SEQ ID NO: 30114 - DNA, 25 bp, probe
cacatggtttattatgggaatcctg

SEQ ID NO: 30115 - DNA, 25 bp, probe
ggctgtaaagtaagtgtaaggtcca

SEQ ID NO: 30116 - DNA, 25 bp, probe
tggctgtaaagtaagtgtaaggtcc

SEQ ID NO: 30117 - DNA, 25 bp, probe
taaagtaagtgtaaggtccacatcc

SEQ ID NO: 30118 - DNA, 25 bp, probe
ctgtaaagtaagtgtaaggtccaca

SEQ ID NO: 30119 - DNA, 25 bp, probe
tgtaaagtaagtgtaaggtccacat

SEQ ID NO: 30120 - DNA, 25 bp, probe
tacttaaaggaagacaaggcattta

SEQ ID NO: 30121 - DNA, 25 bp, probe
catggtttattatgggaatcctgaa

SEQ ID NO: 30122 - DNA, 25 bp, probe
atggtttattatgggaatcctgaat

SEQ ID NO: 30123 - DNA, 25 bp, probe
gtaaagtaagtgtaaggtccacatc

SEQ ID NO: 30124 - DNA, 25 bp, probe
aggctggctgtaaagtaagtgtaag

SEQ ID NO: 30125 - DNA, 25 bp, probe
gaggctggctgtaaagtaagtgtaa

SEQ ID NO: 30126 - DNA, 25 bp, probe
ggtttattatgggaatcctgaatcc

SEQ ID NO: 30127 - DNA, 25 bp, probe
aaagtaagtgtaaggtccacatcct

SEQ ID NO: 30128 - DNA, 25 bp, probe
gctgtaaagtaagtgtaaggtccac

SEQ ID NO: 30129 - DNA, 25 bp, probe
atttgttggttgtcgaatatcatca

SEQ ID NO: 30130 - DNA, 25 bp, probe
ttattatgggaatcctgaatccagc

SEQ ID NO: 30131 - DNA, 25 bp, probe
gctggctgtaaagtaagtgtaaggt

SEQ ID NO: 30132 - DNA, 25 bp, probe
tttctgaggctggctgtaaagtaag

SEQ ID NO: 30133 - DNA, 25 bp, probe
ttaggataggagaaagggttcatgc

SEQ ID NO: 30134 - DNA, 25 bp, probe
attcctcagactcaacaattcttgt

SEQ ID NO: 30135 - DNA, 25 bp, probe
tttgttggttgtcgaatatcatcaa

SEQ ID NO: 30136 - DNA, 25 bp, probe
gtcgaatatcatcaatgaaagcctt

SEQ ID NO: 30137 - DNA, 25 bp, probe
ttgtcgaatatcatcaatgaaagcc

SEQ ID NO: 30138 - DNA, 25 bp, probe
tgtcgaatatcatcaatgaaagcct

SEQ ID NO: 30139 - DNA, 25 bp, probe
aatgaaagaatatgggttggaaagc

SEQ ID NO: 30140 - DNA, 25 bp, probe
aagtgggaatgaaagaatatgggtt

SEQ ID NO: 30141 - DNA, 25 bp, probe
aaagtgggaatgaaagaatatgggt

SEQ ID NO: 30142 - DNA, 25 bp, probe
ggaatgaaagaatatgggttggaaa

SEQ ID NO: 30143 - DNA, 25 bp, probe
tgtgtcttgctgtcatttatattcc

SEQ ID NO: 30144 - DNA, 25 bp, probe
gtgtcttgctgtcatttatattcct

SEQ ID NO: 30145 - DNA, 25 bp, probe
gggaatgaaagaatatgggttggaa

SEQ ID NO: 30146 - DNA, 25 bp, probe
agtgggaatgaaagaatatgggttg

SEQ ID NO: 30147 - DNA, 25 bp, probe
aagtcaacaataccattcttcaccc

SEQ ID NO: 30148 - DNA, 25 bp, probe
tgtcttgctgtcatttatattcctt

SEQ ID NO: 30149 - DNA, 25 bp, probe
atgaaagaatatgggttggaaagcc

SEQ ID NO: 30150 - DNA, 25 bp, probe
gaagcatttctgatactttctgtca

SEQ ID NO: 30151 - DNA, 25 bp, probe
gaatgaaagaatatgggttggaaag

SEQ ID NO: 30152 - DNA, 25 bp, probe
acaataccattcttcacccagagat

SEQ ID NO: 30153 - DNA, 25 bp, probe
gtcaacaataccattcttcacccag

SEQ ID NO: 30154 - DNA, 25 bp, probe
gaaagaatatgggttggaaagcctc

SEQ ID NO: 30155 - DNA, 25 bp, probe
gtgggaatgaaagaatatgggttgg

SEQ ID NO: 30156 - DNA, 25 bp, probe
agcatttctgatactttctgtcaaa

SEQ ID NO: 30157 - DNA, 25 bp, probe
aagcatttctgatactttctgtcaa

SEQ ID NO: 30158 - DNA, 25 bp, probe
tgggaatgaaagaatatgggttgga

SEQ ID NO: 30159 - DNA, 25 bp, probe
aacaataccattcttcacccagaga

SEQ ID NO: 30160 - DNA, 25 bp, probe
caacaataccattcttcacccagag

SEQ ID NO: 30161 - DNA, 25 bp, probe
caataccattcttcacccagagatc

SEQ ID NO: 30162 - DNA, 25 bp, probe
agtcaacaataccattcttcaccca

SEQ ID NO: 30163 - DNA, 25 bp, probe
tcaacaataccattcttcacccaga

SEQ ID NO: 30164 - DNA, 25 bp, probe
aaagaatatgggttggaaagcctct

SEQ ID NO: 30165 - DNA, 25 bp, probe
gtcttgctgtcatttatattccttt

SEQ ID NO: 30166 - DNA, 25 bp, probe
tgaaagaatatgggttggaaagcct

SEQ ID NO: 30167 - DNA, 25 bp, probe
gaagtcaacaataccattcttcacc

SEQ ID NO: 30168 - DNA, 25 bp, probe
atgtgtcttgctgtcatttatattc

SEQ ID NO: 30169 - DNA, 25 bp, probe
cgaagtcaacaataccattcttcac

SEQ ID NO: 30170 - DNA, 25 bp, probe
agaatatgggttggaaagcctcttc

SEQ ID NO: 30171 - DNA, 25 bp, probe
aataccattcttcacccagagatcg

SEQ ID NO: 30172 - DNA, 25 bp, probe
tcgaagtcaacaataccattcttca

SEQ ID NO: 30173 - DNA, 25 bp, probe
taccttgcttattaaatgagcgact

SEQ ID NO: 30174 - DNA, 25 bp, probe
ccttgcttattaaatgagcgactta

SEQ ID NO: 30175 - DNA, 25 bp, probe
ataccttgcttattaaatgagcgac

SEQ ID NO: 30176 - DNA, 25 bp, probe
gagtgtttaagacggatatggagct

SEQ ID NO: 30177 - DNA, 25 bp, probe
caggaaagaagcatttctgatactt

SEQ ID NO: 30178 - DNA, 25 bp, probe
ccaggaaagaagcatttctgatact

SEQ ID NO: 30179 - DNA, 25 bp, probe
agaagcatttctgatactttctgtc

SEQ ID NO: 30180 - DNA, 25 bp, probe
accttgcttattaaatgagcgactt

SEQ ID NO: 30181 - DNA, 25 bp, probe
gctgtaaaagtgggaatgaaagaat

SEQ ID NO: 30182 - DNA, 25 bp, probe
taatgaaggctgtaaaagtgggaat

SEQ ID NO: 30183 - DNA, 25 bp, probe
ggattctgtagtaaggtgacatagc

SEQ ID NO: 30184 - DNA, 25 bp, probe
ttctgactgctggattctgtagtaa

SEQ ID NO: 30185 - DNA, 25 bp, probe
tggattctgtagtaaggtgacatag

SEQ ID NO: 30186 - DNA, 25 bp, probe
ctggattctgtagtaaggtgacata

SEQ ID NO: 30187 - DNA, 25 bp, probe
tctgactgctggattctgtagtaag

SEQ ID NO: 30188 - DNA, 25 bp, probe
ctgctggattctgtagtaaggtgac

SEQ ID NO: 30189 - DNA, 25 bp, probe
ggattgagggagtgatgagaaataa

SEQ ID NO: 30190 - DNA, 25 bp, probe
aataagcctggtgtctatgttcgtg

SEQ ID NO: 30191 - DNA, 25 bp, probe
caataagcctggtgtctatgttcgt

SEQ ID NO: 30192 - DNA, 25 bp, probe
gaagaagactgtatgtttgggaatg

SEQ ID NO: 30193 - DNA, 25 bp, probe
gctggattctgtagtaaggtgacat

SEQ ID NO: 30194 - DNA, 25 bp, probe
ctgactgctggattctgtagtaagg

SEQ ID NO: 30195 - DNA, 25 bp, probe
tatgtttgggaatgggaaaggatac

SEQ ID NO: 30196 - DNA, 25 bp, probe
gtatgtttgggaatgggaaaggata

SEQ ID NO: 30197 - DNA, 25 bp, probe
tccctgtgattgagaataaagtgtg

SEQ ID NO: 30198 - DNA, 25 bp, probe
agatgtagagactccttccgaagaa

SEQ ID NO: 30199 - DNA, 25 bp, probe
tggattgagggagtgatgagaaata

SEQ ID NO: 30200 - DNA, 25 bp, probe
aagaagactgtatgtttgggaatgg

SEQ ID NO: 30201 - DNA, 25 bp, probe
gattctgtagtaaggtgacatagct

SEQ ID NO: 30202 - DNA, 25 bp, probe
gactgctggattctgtagtaaggtg

SEQ ID NO: 30203 - DNA, 25 bp, probe
tgtctatgttcgtgtttcaaggttt

SEQ ID NO: 30204 - DNA, 25 bp, probe
cgaagaagactgtatgtttgggaat

SEQ ID NO: 30205 - DNA, 25 bp, probe
aatcgctatgagtttctgaatggaa

SEQ ID NO: 30206 - DNA, 25 bp, probe
gctatgagtttctgaatggaagagt

SEQ ID NO: 30207 - DNA, 25 bp, probe
atcgctatgagtttctgaatggaag

SEQ ID NO: 30208 - DNA, 25 bp, probe
caatcgctatgagtttctgaatgga

SEQ ID NO: 30209 - DNA, 25 bp, probe
cagtcttagaacaaggtttggaatg

SEQ ID NO: 30210 - DNA, 25 bp, probe
tcagtcttagaacaaggtttggaat

SEQ ID NO: 30211 - DNA, 25 bp, probe
caagtcagtcttagaacaaggtttg

SEQ ID NO: 30212 - DNA, 25 bp, probe
ggcaagtcagtcttagaacaaggtt

SEQ ID NO: 30213 - DNA, 25 bp, probe
ctatgttcgtgtttcaaggtttgtt

SEQ ID NO: 30214 - DNA, 25 bp, probe
tatgttcgtgtttcaaggtttgtta

SEQ ID NO: 30215 - DNA, 25 bp, probe
gttcgtgtttcaaggtttgttactt

SEQ ID NO: 30216 - DNA, 25 bp, probe
atgttcgtgtttcaaggtttgttac

SEQ ID NO: 30217 - DNA, 25 bp, probe
ctatgagtttctgaatggaagagtc

SEQ ID NO: 30218 - DNA, 25 bp, probe
aatagaagtgtctaggctgttcttg

SEQ ID NO: 30219 - DNA, 25 bp, probe
gattgagggagtgatgagaaataat

SEQ ID NO: 30220 - DNA, 25 bp, probe
ttggattgagggagtgatgagaaat

SEQ ID NO: 30221 - DNA, 25 bp, probe
gtctatgttcgtgtttcaaggtttg

SEQ ID NO: 30222 - DNA, 25 bp, probe
gtcagtcttagaacaaggtttggaa

SEQ ID NO: 30223 - DNA, 25 bp, probe
aagtcagtcttagaacaaggtttgg

SEQ ID NO: 30224 - DNA, 25 bp, probe
actgctggattctgtagtaaggtga

SEQ ID NO: 30225 - DNA, 25 bp, probe
tgactgctggattctgtagtaaggt

SEQ ID NO: 30226 - DNA, 25 bp, probe
gtgtctatgttcgtgtttcaaggtt

SEQ ID NO: 30227 - DNA, 25 bp, probe
ggacggactgtaattgatagattga

SEQ ID NO: 30228 - DNA, 25 bp, probe
tggacggactgtaattgatagattg

SEQ ID NO: 30229 - DNA, 25 bp, probe
gtggacggactgtaattgatagatt

SEQ ID NO: 30230 - DNA, 25 bp, probe
gacggactgtaattgatagattgat

SEQ ID NO: 30231 - DNA, 25 bp, probe
acggactgtaattgatagattgatt

SEQ ID NO: 30232 - DNA, 25 bp, probe
ggtggacggactgtaattgatagat

SEQ ID NO: 30233 - DNA, 25 bp, probe
gtggtggacggactgtaattgatag

SEQ ID NO: 30234 - DNA, 25 bp, probe
tggtggacggactgtaattgataga

SEQ ID NO: 30235 - DNA, 25 bp, probe
cggactgtaattgatagattgatta

SEQ ID NO: 30236 - DNA, 25 bp, probe
atggaattaaattgggtacagcttc

SEQ ID NO: 30237 - DNA, 25 bp, probe
attatggaattaaattgggtacagc

SEQ ID NO: 30238 - DNA, 25 bp, probe
tatggaattaaattgggtacagctt

SEQ ID NO: 30239 - DNA, 25 bp, probe
ttatggaattaaattgggtacagct

SEQ ID NO: 30240 - DNA, 25 bp, probe
ggtggtggacggactgtaattgata

SEQ ID NO: 30241 - DNA, 25 bp, probe
ctgaacaagcagccatactgatgac

SEQ ID NO: 30242 - DNA, 25 bp, probe
cttctctgcttaaagaatgcccttt

SEQ ID NO: 30243 - DNA, 25 bp, probe
ggagagtcctcttctaagcaaagtg

SEQ ID NO: 30244 - DNA, 25 bp, probe
ttcctgaacaagcagccatactgat

SEQ ID NO: 30245 - DNA, 25 bp, probe
tgattatggaattaaattgggtaca

SEQ ID NO: 30246 - DNA, 25 bp, probe
tgcttaaagaatgccctttatgatg

SEQ ID NO: 30247 - DNA, 25 bp, probe
ctctgcttaaagaatgccctttatg

SEQ ID NO: 30248 - DNA, 25 bp, probe
tctctgcttaaagaatgccctttat

SEQ ID NO: 30249 - DNA, 25 bp, probe
ctgcttaaagaatgccctttatgat

SEQ ID NO: 30250 - DNA, 25 bp, probe
ttctctgcttaaagaatgcccttta

SEQ ID NO: 30251 - DNA, 25 bp, probe
tctgcttaaagaatgccctttatga

SEQ ID NO: 30252 - DNA, 25 bp, probe
gattgattatggaattaaattgggt

SEQ ID NO: 30253 - DNA, 25 bp, probe
gcttaaagaatgccctttatgatgc

SEQ ID NO: 30254 - DNA, 25 bp, probe
gattatggaattaaattgggtacag

SEQ ID NO: 30255 - DNA, 25 bp, probe
cttcctgaacaagcagccatactga

SEQ ID NO: 30256 - DNA, 25 bp, probe
ccttctctgcttaaagaatgccctt

SEQ ID NO: 30257 - DNA, 25 bp, probe
cctgaacaagcagccatactgatga

SEQ ID NO: 30258 - DNA, 25 bp, probe
tcctgaacaagcagccatactgatg

SEQ ID NO: 30259 - DNA, 25 bp, probe
gccctttatgatgcactgattccat

SEQ ID NO: 30260 - DNA, 25 bp, probe
ttgtggattccctcaaccagaagat

SEQ ID NO: 30261 - DNA, 25 bp, probe
agattgattatggaattaaattggg

SEQ ID NO: 30262 - DNA, 25 bp, probe
gtttgtggattccctcaaccagaag

SEQ ID NO: 30263 - DNA, 25 bp, probe
ttaaagaatgccctttatgatgcac

SEQ ID NO: 30264 - DNA, 25 bp, probe
cttaaagaatgccctttatgatgca

SEQ ID NO: 30265 - DNA, 25 bp, probe
aatgccctttatgatgcactgattc

SEQ ID NO: 30266 - DNA, 25 bp, probe
gaatgccctttatgatgcactgatt

SEQ ID NO: 30267 - DNA, 25 bp, probe
tttgtggattccctcaaccagaaga

SEQ ID NO: 30268 - DNA, 25 bp, probe
gaacaagcagccatactgatgacca

SEQ ID NO: 30269 - DNA, 25 bp, probe
tgaacaagcagccatactgatgacc

SEQ ID NO: 30270 - DNA, 25 bp, probe
ctttatgatgcactgattccatccc

SEQ ID NO: 30271 - DNA, 25 bp, probe
agaagaccaagaagaccaagtagat

SEQ ID NO: 30272 - DNA, 25 bp, probe
ttcgtcctcaacttcatcaagattc

SEQ ID NO: 30273 - DNA, 25 bp, probe
cttcgtcctcaacttcatcaagatt

SEQ ID NO: 30274 - DNA, 25 bp, probe
gaagaccaagaagaccaagtagatc

SEQ ID NO: 30275 - DNA, 25 bp, probe
cagaagaccaagaagaccaagtaga

SEQ ID NO: 30276 - DNA, 25 bp, probe
acagaagaccaagaagaccaagtag

SEQ ID NO: 30277 - DNA, 25 bp, probe
agaatcttaactcctagagcaactc

SEQ ID NO: 30278 - DNA, 25 bp, probe
cacagaagaccaagaagaccaagta

SEQ ID NO: 30279 - DNA, 25 bp, probe
aagaccaagaagaccaagtagatcc

SEQ ID NO: 30280 - DNA, 25 bp, probe
tgtcacatgccttatgaatagaatc

SEQ ID NO: 30281 - DNA, 25 bp, probe
gttgtatgtcacatgccttatgaat

SEQ ID NO: 30282 - DNA, 25 bp, probe
tagaatcttaactcctagagcaact

SEQ ID NO: 30283 - DNA, 25 bp, probe
tgttgtatgtcacatgccttatgaa

SEQ ID NO: 30284 - DNA, 25 bp, probe
gtcacatgccttatgaatagaatct

SEQ ID NO: 30285 - DNA, 25 bp, probe
tcgtcctcaacttcatcaagattcc

SEQ ID NO: 30286 - DNA, 25 bp, probe
ccttcgtcctcaacttcatcaagat

SEQ ID NO: 30287 - DNA, 25 bp, probe
ctgttgtatgtcacatgccttatga

SEQ ID NO: 30288 - DNA, 25 bp, probe
gtatgtcacatgccttatgaataga

SEQ ID NO: 30289 - DNA, 25 bp, probe
tgtatgtcacatgccttatgaatag

SEQ ID NO: 30290 - DNA, 25 bp, probe
atgtcacatgccttatgaatagaat

SEQ ID NO: 30291 - DNA, 25 bp, probe
gccttatgaatagaatcttaactcc

SEQ ID NO: 30292 - DNA, 25 bp, probe
tcacatgccttatgaatagaatctt

SEQ ID NO: 30293 - DNA, 25 bp, probe
ttgtatgtcacatgccttatgaata

SEQ ID NO: 30294 - DNA, 25 bp, probe
atagaatcttaactcctagagcaac

SEQ ID NO: 30295 - DNA, 25 bp, probe
atttactgagcacctgttgtatgtc

SEQ ID NO: 30296 - DNA, 25 bp, probe
ttactgagcacctgttgtatgtcac

SEQ ID NO: 30297 - DNA, 25 bp, probe
cctgttgtatgtcacatgccttatg

SEQ ID NO: 30298 - DNA, 25 bp, probe
tatgtcacatgccttatgaatagaa

SEQ ID NO: 30299 - DNA, 25 bp, probe
gacacagaagaccaagaagaccaag

SEQ ID NO: 30300 - DNA, 25 bp, probe
catttactgagcacctgttgtatgt

SEQ ID NO: 30301 - DNA, 25 bp, probe
gaatagaatcttaactcctagagca

SEQ ID NO: 30302 - DNA, 25 bp, probe
tgaatagaatcttaactcctagagc

SEQ ID NO: 30303 - DNA, 25 bp, probe
acctgttgtatgtcacatgccttat

SEQ ID NO: 30304 - DNA, 25 bp, probe
agacacagaagaccaagaagaccaa

SEQ ID NO: 30305 - DNA, 25 bp, probe
tgccttatgaatagaatcttaactc

SEQ ID NO: 30306 - DNA, 25 bp, probe
aatagaatcttaactcctagagcaa

SEQ ID NO: 30307 - DNA, 25 bp, probe
acatttactgagcacctgttgtatg

SEQ ID NO: 30308 - DNA, 25 bp, probe
aacgagacacagaagaccaagaaga

SEQ ID NO: 30309 - DNA, 25 bp, probe
caccttcgtcctcaacttcatcaag

SEQ ID NO: 30310 - DNA, 25 bp, probe
acacagaagaccaagaagaccaagt

SEQ ID NO: 30311 - DNA, 25 bp, probe
accttcgtcctcaacttcatcaaga

SEQ ID NO: 30312 - DNA, 25 bp, probe
tttactgagcacctgttgtatgtca

SEQ ID NO: 30313 - DNA, 25 bp, probe
gagacacagaagaccaagaagacca

SEQ ID NO: 30314 - DNA, 25 bp, probe
agaccaagaagaccaagtagatccg

SEQ ID NO: 30315 - DNA, 25 bp, probe
ctatgagatgctcttcaactccttc

SEQ ID NO: 30316 - DNA, 25 bp, probe
actatgagatgctcttcaactcctt

SEQ ID NO: 30317 - DNA, 25 bp, probe
tatgagatgctcttcaactccttcc

SEQ ID NO: 30318 - DNA, 25 bp, probe
cactatgagatgctcttcaactcct

SEQ ID NO: 30319 - DNA, 25 bp, probe
ttgtcgcaatcatatactgtttctg

SEQ ID NO: 30320 - DNA, 25 bp, probe
tttgtcgcaatcatatactgtttct

SEQ ID NO: 30321 - DNA, 25 bp, probe
aaagatgggtggttgaatgatttcc

SEQ ID NO: 30322 - DNA, 25 bp, probe
tgacatagtggatggacagatggac

SEQ ID NO: 30323 - DNA, 25 bp, probe
gaggtacaagctgagatcaagaaat

SEQ ID NO: 30324 - DNA, 25 bp, probe
aggtacaagctgagatcaagaaatc

SEQ ID NO: 30325 - DNA, 25 bp, probe
atgagatgctcttcaactccttcca

SEQ ID NO: 30326 - DNA, 25 bp, probe
ctgacatagtggatggacagatgga

SEQ ID NO: 30327 - DNA, 25 bp, probe
aatcatatactgtttctgcaatggc

SEQ ID NO: 30328 - DNA, 25 bp, probe
gacatagtggatggacagatggacc

SEQ ID NO: 30329 - DNA, 25 bp, probe
caatcatatactgtttctgcaatgg

SEQ ID NO: 30330 - DNA, 25 bp, probe
ctgctgacatagtggatggacagat

SEQ ID NO: 30331 - DNA, 25 bp, probe
tgagatgctcttcaactccttccag

SEQ ID NO: 30332 - DNA, 25 bp, probe
atcatatactgtttctgcaatggcg

SEQ ID NO: 30333 - DNA, 25 bp, probe
aaaagatgggtggttgaatgatttc

SEQ ID NO: 30334 - DNA, 25 bp, probe
cgaggtacaagctgagatcaagaaa

SEQ ID NO: 30335 - DNA, 25 bp, probe
caaaagatgggtggttgaatgattt

SEQ ID NO: 30336 - DNA, 25 bp, probe
tgctgacatagtggatggacagatg

SEQ ID NO: 30337 - DNA, 25 bp, probe
ggtacaagctgagatcaagaaatct

SEQ ID NO: 30338 - DNA, 25 bp, probe
catagtggatggacagatggaccaa

SEQ ID NO: 30339 - DNA, 25 bp, probe
catatactgtttctgcaatggcgag

SEQ ID NO: 30340 - DNA, 25 bp, probe
gtacaagctgagatcaagaaatctt

SEQ ID NO: 30341 - DNA, 25 bp, probe
atgcactatgagatgctcttcaact

SEQ ID NO: 30342 - DNA, 25 bp, probe
ttttgtcgcaatcatatactgtttc

SEQ ID NO: 30343 - DNA, 25 bp, probe
gcactatgagatgctcttcaactcc

SEQ ID NO: 30344 - DNA, 25 bp, probe
tcatatactgtttctgcaatggcga

SEQ ID NO: 30345 - DNA, 25 bp, probe
tgtcgcaatcatatactgtttctgc

SEQ ID NO: 30346 - DNA, 25 bp, probe
tgcactatgagatgctcttcaactc

SEQ ID NO: 30347 - DNA, 25 bp, probe
atagtggatggacagatggaccaaa

SEQ ID NO: 30348 - DNA, 25 bp, probe
gagatgctcttcaactccttccagg

SEQ ID NO: 30349 - DNA, 25 bp, probe
tacaggaagagtgggagacagtcat

SEQ ID NO: 30350 - DNA, 25 bp, probe
cgcaatcatatactgtttctgcaat

SEQ ID NO: 30351 - DNA, 25 bp, probe
atatactgtttctgcaatggcgagg

SEQ ID NO: 30352 - DNA, 25 bp, probe
gcgaggtacaagctgagatcaagaa

SEQ ID NO: 30353 - DNA, 25 bp, probe
gcaatcatatactgtttctgcaatg

SEQ ID NO: 30354 - DNA, 25 bp, probe
gctgacatagtggatggacagatgg

SEQ ID NO: 30355 - DNA, 25 bp, probe
tcgcaatcatatactgtttctgcaa

SEQ ID NO: 30356 - DNA, 25 bp, probe
gtcgcaatcatatactgtttctgca

SEQ ID NO: 30357 - DNA, 25 bp, probe
acatagtggatggacagatggacca

SEQ ID NO: 30358 - DNA, 25 bp, probe
ccaaaagatgggtggttgaatgatt

SEQ ID NO: 30359 - DNA, 25 bp, probe
ttggaatctgatatactgtgtgctt

SEQ ID NO: 30360 - DNA, 25 bp, probe
attggaatctgatatactgtgtgct

SEQ ID NO: 30361 - DNA, 25 bp, probe
ggaatctgatatactgtgtgcttgt

SEQ ID NO: 30362 - DNA, 25 bp, probe
tggaatctgatatactgtgtgcttg

SEQ ID NO: 30363 - DNA, 25 bp, probe
gaatctgatatactgtgtgcttgtt

SEQ ID NO: 30364 - DNA, 25 bp, probe
tattggaatctgatatactgtgtgc

SEQ ID NO: 30365 - DNA, 25 bp, probe
taggaacttcagagatcgtgtattg

SEQ ID NO: 30366 - DNA, 25 bp, probe
ttaggaacttcagagatcgtgtatt

SEQ ID NO: 30367 - DNA, 25 bp, probe
gaacttcagagatcgtgtattgaga

SEQ ID NO: 30368 - DNA, 25 bp, probe
acttcagagatcgtgtattgagatt

SEQ ID NO: 30369 - DNA, 25 bp, probe
aacttcagagatcgtgtattgagat

SEQ ID NO: 30370 - DNA, 25 bp, probe
agttcacattagaattagtgccaga

SEQ ID NO: 30371 - DNA, 25 bp, probe
ggaacttcagagatcgtgtattgag

SEQ ID NO: 30372 - DNA, 25 bp, probe
gttcacattagaattagtgccagaa

SEQ ID NO: 30373 - DNA, 25 bp, probe
aagttcacattagaattagtgccag

SEQ ID NO: 30374 - DNA, 25 bp, probe
aggaacttcagagatcgtgtattga

SEQ ID NO: 30375 - DNA, 25 bp, probe
tcacattagaattagtgccagaatt

SEQ ID NO: 30376 - DNA, 25 bp, probe
ttcacattagaattagtgccagaat

SEQ ID NO: 30377 - DNA, 25 bp, probe
acagactgttaattataggagcctt

SEQ ID NO: 30378 - DNA, 25 bp, probe
ttaggtcaagggcttactatttctg

SEQ ID NO: 30379 - DNA, 25 bp, probe
tgtgtcctatctatcttccaaatgc

SEQ ID NO: 30380 - DNA, 25 bp, probe
taagttcacattagaattagtgcca

SEQ ID NO: 30381 - DNA, 25 bp, probe
tttaggtcaagggcttactatttct

SEQ ID NO: 30382 - DNA, 25 bp, probe
ctgggtcctgaagaattaagataca

SEQ ID NO: 30383 - DNA, 25 bp, probe
gactccatttcatcattgtttctgc

SEQ ID NO: 30384 - DNA, 25 bp, probe
tgggtcctgaagaattaagatacaa

SEQ ID NO: 30385 - DNA, 25 bp, probe
taatcaagggtcattatgggttagg

SEQ ID NO: 30386 - DNA, 25 bp, probe
aagtaatcaagggtcattatgggtt

SEQ ID NO: 30387 - DNA, 25 bp, probe
tttctaatgtttctgggtcctgaag

SEQ ID NO: 30388 - DNA, 25 bp, probe
ctttctaatgtttctgggtcctgaa

SEQ ID NO: 30389 - DNA, 25 bp, probe
actattggaatctgatatactgtgt

SEQ ID NO: 30390 - DNA, 25 bp, probe
caagtaatcaagggtcattatgggt

SEQ ID NO: 30391 - DNA, 25 bp, probe
acaagtaatcaagggtcattatggg

SEQ ID NO: 30392 - DNA, 25 bp, probe
aatctgatatactgtgtgcttgttt

SEQ ID NO: 30393 - DNA, 25 bp, probe
tcaaagccacattatttctagtcca

SEQ ID NO: 30394 - DNA, 25 bp, probe
caaagccacattatttctagtccaa

SEQ ID NO: 30395 - DNA, 25 bp, probe
gaccctaacacagtatatcccaagt

SEQ ID NO: 30396 - DNA, 25 bp, probe
ctattggaatctgatatactgtgtg

SEQ ID NO: 30397 - DNA, 25 bp, probe
cagactgttaattataggagcctta

SEQ ID NO: 30398 - DNA, 25 bp, probe
tctgggtcctgaagaattaagatac

SEQ ID NO: 30399 - DNA, 25 bp, probe
ctaagttcacattagaattagtgcc

SEQ ID NO: 30400 - DNA, 25 bp, probe
agtaatcaagggtcattatgggtta

SEQ ID NO: 30401 - DNA, 25 bp, probe
ttcaaagccacattatttctagtcc

SEQ ID NO: 30402 - DNA, 25 bp, probe
actttctaatgtttctgggtcctga

SEQ ID NO: 30403 - DNA, 25 bp, probe
gttgtctgaactaatcgagcacttc

SEQ ID NO: 30404 - DNA, 25 bp, probe
ttgtctgaactaatcgagcacttct

SEQ ID NO: 30405 - DNA, 25 bp, probe
gatgttgtctgaactaatcgagcac

SEQ ID NO: 30406 - DNA, 25 bp, probe
agatgttgtctgaactaatcgagca

SEQ ID NO: 30407 - DNA, 25 bp, probe
tttaacatagagaactgtcaccctg

SEQ ID NO: 30408 - DNA, 25 bp, probe
ttaacatagagaactgtcaccctga

SEQ ID NO: 30409 - DNA, 25 bp, probe
atgttgtctgaactaatcgagcact

SEQ ID NO: 30410 - DNA, 25 bp, probe
taacatagagaactgtcaccctgag

SEQ ID NO: 30411 - DNA, 25 bp, probe
tgttgtctgaactaatcgagcactt

SEQ ID NO: 30412 - DNA, 25 bp, probe
tctgaactaatcgagcacttctcac

SEQ ID NO: 30413 - DNA, 25 bp, probe
gtctgaactaatcgagcacttctca

SEQ ID NO: 30414 - DNA, 25 bp, probe
tgtctgaactaatcgagcacttctc

SEQ ID NO: 30415 - DNA, 25 bp, probe
ttaatttccagaactgcacaatgac

SEQ ID NO: 30416 - DNA, 25 bp, probe
tttaatttccagaactgcacaatga

SEQ ID NO: 30417 - DNA, 25 bp, probe
gaactaatcgagcacttctcaccaa

SEQ ID NO: 30418 - DNA, 25 bp, probe
ctgaactaatcgagcacttctcacc

SEQ ID NO: 30419 - DNA, 25 bp, probe
taatttccagaactgcacaatgacc

SEQ ID NO: 30420 - DNA, 25 bp, probe
atagagaactgtcaccctgaggtaa

SEQ ID NO: 30421 - DNA, 25 bp, probe
gaaggacagacatcaagtgccagat

SEQ ID NO: 30422 - DNA, 25 bp, probe
gtttaactgtcccagcgagatttct

SEQ ID NO: 30423 - DNA, 25 bp, probe
catagagaactgtcaccctgaggta

SEQ ID NO: 30424 - DNA, 25 bp, probe
gtgccagatgttgtctgaactaatc

SEQ ID NO: 30425 - DNA, 25 bp, probe
taatcgagcacttctcaccaaactt

SEQ ID NO: 30426 - DNA, 25 bp, probe
aactaatcgagcacttctcaccaaa

SEQ ID NO: 30427 - DNA, 25 bp, probe
tgaactaatcgagcacttctcacca

SEQ ID NO: 30428 - DNA, 25 bp, probe
tttaactgtcccagcgagatttctc

SEQ ID NO: 30429 - DNA, 25 bp, probe
ccagatgttgtctgaactaatcgag

SEQ ID NO: 30430 - DNA, 25 bp, probe
ttttaacatagagaactgtcaccct

SEQ ID NO: 30431 - DNA, 25 bp, probe
cttttaacatagagaactgtcaccc

SEQ ID NO: 30432 - DNA, 25 bp, probe
aaaggagggaaggacagacatcaag

SEQ ID NO: 30433 - DNA, 25 bp, probe
tagagaactgtcaccctgaggtaac

SEQ ID NO: 30434 - DNA, 25 bp, probe
agtgccagatgttgtctgaactaat

SEQ ID NO: 30435 - DNA, 25 bp, probe
aacatagagaactgtcaccctgagg

SEQ ID NO: 30436 - DNA, 25 bp, probe
aagtgccagatgttgtctgaactaa

SEQ ID NO: 30437 - DNA, 25 bp, probe
ctaatcgagcacttctcaccaaact

SEQ ID NO: 30438 - DNA, 25 bp, probe
cagatgttgtctgaactaatcgagc

SEQ ID NO: 30439 - DNA, 25 bp, probe
tcttttaacatagagaactgtcacc

SEQ ID NO: 30440 - DNA, 25 bp, probe
actaatcgagcacttctcaccaaac

SEQ ID NO: 30441 - DNA, 25 bp, probe
aatttccagaactgcacaatgacca

SEQ ID NO: 30442 - DNA, 25 bp, probe
ggtttaactgtcccagcgagatttc

SEQ ID NO: 30443 - DNA, 25 bp, probe
caagtgccagatgttgtctgaacta

SEQ ID NO: 30444 - DNA, 25 bp, probe
ttttaatttccagaactgcacaatg

SEQ ID NO: 30445 - DNA, 25 bp, probe
tgccagatgttgtctgaactaatcg

SEQ ID NO: 30446 - DNA, 25 bp, probe
aatcgagcacttctcaccaaacttc

SEQ ID NO: 30447 - DNA, 25 bp, probe
ttaacactacactactcacaatggt

SEQ ID NO: 30448 - DNA, 25 bp, probe
tggaagatgtctatgaactgattga

SEQ ID NO: 30449 - DNA, 25 bp, probe
actcttctatccacttaactcctgt

SEQ ID NO: 30450 - DNA, 25 bp, probe
taacactacactactcacaatggta

SEQ ID NO: 30451 - DNA, 25 bp, probe
tactcttctatccacttaactcctg

SEQ ID NO: 30452 - DNA, 25 bp, probe
atggaagatgtctatgaactgattg

SEQ ID NO: 30453 - DNA, 25 bp, probe
ggaagatgtctatgaactgattgaa

SEQ ID NO: 30454 - DNA, 25 bp, probe
ccaatctcattctatgctctgtcag

SEQ ID NO: 30455 - DNA, 25 bp, probe
ggtactcttctatccacttaactcc

SEQ ID NO: 30456 - DNA, 25 bp, probe
gtactcttctatccacttaactcct

SEQ ID NO: 30457 - DNA, 25 bp, probe
tgccaatccattcctctatgctatt

SEQ ID NO: 30458 - DNA, 25 bp, probe
ctcttctatccacttaactcctgtg

SEQ ID NO: 30459 - DNA, 25 bp, probe
catggaagatgtctatgaactgatt

SEQ ID NO: 30460 - DNA, 25 bp, probe
gtgccaatccattcctctatgctat

SEQ ID NO: 30461 - DNA, 25 bp, probe
caattctgaacaagcctctcatcac

SEQ ID NO: 30462 - DNA, 25 bp, probe
atgtgttcatcctactcagcaagtt

SEQ ID NO: 30463 - DNA, 25 bp, probe
aattctgaacaagcctctcatcact

SEQ ID NO: 30464 - DNA, 25 bp, probe
gtgttgatcttcaccgacttcatat

SEQ ID NO: 30465 - DNA, 25 bp, probe
ctctcatcactgttagcaactccaa

SEQ ID NO: 30466 - DNA, 25 bp, probe
gctggtactcttctatccacttaac

SEQ ID NO: 30467 - DNA, 25 bp, probe
tcttctatccacttaactcctgtgc

SEQ ID NO: 30468 - DNA, 25 bp, probe
tgctggtactcttctatccacttaa

SEQ ID NO: 30469 - DNA, 25 bp, probe
ttgctggtactcttctatccactta

SEQ ID NO: 30470 - DNA, 25 bp, probe
tggtactcttctatccacttaactc

SEQ ID NO: 30471 - DNA, 25 bp, probe
ctggtactcttctatccacttaact

SEQ ID NO: 30472 - DNA, 25 bp, probe
aatcttgctggtactcttctatcca

SEQ ID NO: 30473 - DNA, 25 bp, probe
acttaactcctgtgccaatccattc

SEQ ID NO: 30474 - DNA, 25 bp, probe
gccaatccattcctctatgctattt

SEQ ID NO: 30475 - DNA, 25 bp, probe
aacactacactactcacaatggtag

SEQ ID NO: 30476 - DNA, 25 bp, probe
attctgaacaagcctctcatcactg

SEQ ID NO: 30477 - DNA, 25 bp, probe
tatccacttaactcctgtgccaatc

SEQ ID NO: 30478 - DNA, 25 bp, probe
ctatccacttaactcctgtgccaat

SEQ ID NO: 30479 - DNA, 25 bp, probe
aaatcttgctggtactcttctatcc

SEQ ID NO: 30480 - DNA, 25 bp, probe
atcttgctggtactcttctatccac

SEQ ID NO: 30481 - DNA, 25 bp, probe
tgtgttgatcttcaccgacttcata

SEQ ID NO: 30482 - DNA, 25 bp, probe
cttgctggtactcttctatccactt

SEQ ID NO: 30483 - DNA, 25 bp, probe
ctccaaagaacagcactgatattca

SEQ ID NO: 30484 - DNA, 25 bp, probe
cttctatccacttaactcctgtgcc

SEQ ID NO: 30485 - DNA, 25 bp, probe
cctccaaagaacagcactgatattc

SEQ ID NO: 30486 - DNA, 25 bp, probe
gttaacactacactactcacaatgg

SEQ ID NO: 30487 - DNA, 25 bp, probe
acactacactactcacaatggtagg

SEQ ID NO: 30488 - DNA, 25 bp, probe
tcctccaaagaacagcactgatatt

SEQ ID NO: 30489 - DNA, 25 bp, probe
caatctcattctatgctctgtcagc

SEQ ID NO: 30490 - DNA, 25 bp, probe
tgttgatcttcaccgacttcatatg

SEQ ID NO: 30491 - DNA, 25 bp, probe
atctactctcctcatctctaacagc

SEQ ID NO: 30492 - DNA, 25 bp, probe
ggtcatactatctactctcctcatc

SEQ ID NO: 30493 - DNA, 25 bp, probe
ctaatgctccttgttcctagagtag

SEQ ID NO: 30494 - DNA, 25 bp, probe
taatgctccttgttcctagagtaga

SEQ ID NO: 30495 - DNA, 25 bp, probe
gtcatactatctactctcctcatct

SEQ ID NO: 30496 - DNA, 25 bp, probe
gatcaggtcatactatctactctcc

SEQ ID NO: 30497 - DNA, 25 bp, probe
tatctactctcctcatctctaacag

SEQ ID NO: 30498 - DNA, 25 bp, probe
ctatctactctcctcatctctaaca

SEQ ID NO: 30499 - DNA, 25 bp, probe
actatctactctcctcatctctaac

SEQ ID NO: 30500 - DNA, 25 bp, probe
cctaatgctccttgttcctagagta

SEQ ID NO: 30501 - DNA, 25 bp, probe
caggtcatactatctactctcctca

SEQ ID NO: 30502 - DNA, 25 bp, probe
tcaggtcatactatctactctcctc

SEQ ID NO: 30503 - DNA, 25 bp, probe
catactatctactctcctcatctct

SEQ ID NO: 30504 - DNA, 25 bp, probe
tcatactatctactctcctcatctc

SEQ ID NO: 30505 - DNA, 25 bp, probe
aatgctccttgttcctagagtagag

SEQ ID NO: 30506 - DNA, 25 bp, probe
aggtcatactatctactctcctcat

SEQ ID NO: 30507 - DNA, 25 bp, probe
atcaggtcatactatctactctcct

SEQ ID NO: 30508 - DNA, 25 bp, probe
atctctaacagctcaggatctctta

SEQ ID NO: 30509 - DNA, 25 bp, probe
ctactctcctcatctctaacagctc

SEQ ID NO: 30510 - DNA, 25 bp, probe
agacctaatgctccttgttcctaga

SEQ ID NO: 30511 - DNA, 25 bp, probe
cagacctaatgctccttgttcctag

SEQ ID NO: 30512 - DNA, 25 bp, probe
catctctaacagctcaggatctctt

SEQ ID NO: 30513 - DNA, 25 bp, probe
tctactctcctcatctctaacagct

SEQ ID NO: 30514 - DNA, 25 bp, probe
gacctaatgctccttgttcctagag

SEQ ID NO: 30515 - DNA, 25 bp, probe
atgctccttgttcctagagtagagt

SEQ ID NO: 30516 - DNA, 25 bp, probe
tactctcctcatctctaacagctca

SEQ ID NO: 30517 - DNA, 25 bp, probe
ctcatctctaacagctcaggatctc

SEQ ID NO: 30518 - DNA, 25 bp, probe
tctctaacagctcaggatctcttag

SEQ ID NO: 30519 - DNA, 25 bp, probe
tcatctctaacagctcaggatctct

SEQ ID NO: 30520 - DNA, 25 bp, probe
taataagacgagaggacgagcgatt

SEQ ID NO: 30521 - DNA, 25 bp, probe
acctaatgctccttgttcctagagt

SEQ ID NO: 30522 - DNA, 25 bp, probe
ttaataagacgagaggacgagcgat

SEQ ID NO: 30523 - DNA, 25 bp, probe
aaagtttggttctgtgtctgtgttt

SEQ ID NO: 30524 - DNA, 25 bp, probe
tccttgttcctagagtagagtggag

SEQ ID NO: 30525 - DNA, 25 bp, probe
ctccttgttcctagagtagagtgga

SEQ ID NO: 30526 - DNA, 25 bp, probe
acagacctaatgctccttgttccta

SEQ ID NO: 30527 - DNA, 25 bp, probe
tgctttatgctgaaacagaatactg

SEQ ID NO: 30528 - DNA, 25 bp, probe
gtgctttatgctgaaacagaatact

SEQ ID NO: 30529 - DNA, 25 bp, probe
tgtgctttatgctgaaacagaatac

SEQ ID NO: 30530 - DNA, 25 bp, probe
gtgtgctttatgctgaaacagaata

SEQ ID NO: 30531 - DNA, 25 bp, probe
ggaagatcaggtcatactatctact

SEQ ID NO: 30532 - DNA, 25 bp, probe
tactatctactctcctcatctctaa

SEQ ID NO: 30533 - DNA, 25 bp, probe
tgctccttgttcctagagtagagtg

SEQ ID NO: 30534 - DNA, 25 bp, probe
gtatcactgtctttcctagatggca

SEQ ID NO: 30535 - DNA, 25 bp, probe
ctgaggaagaagggataatagacac

SEQ ID NO: 30536 - DNA, 25 bp, probe
tgaggaagaagggataatagacaca

SEQ ID NO: 30537 - DNA, 25 bp, probe
ggaagaagggataatagacacatca

SEQ ID NO: 30538 - DNA, 25 bp, probe
gaggaagaagggataatagacacat

SEQ ID NO: 30539 - DNA, 25 bp, probe
tcttaaatgacagtgaattgaccca

SEQ ID NO: 30540 - DNA, 25 bp, probe
aggaagaagggataatagacacatc

SEQ ID NO: 30541 - DNA, 25 bp, probe
atcttaaatgacagtgaattgaccc

SEQ ID NO: 30542 - DNA, 25 bp, probe
agggataatagacacatcaaatgcc

SEQ ID NO: 30543 - DNA, 25 bp, probe
tctgaggaagaagggataatagaca

SEQ ID NO: 30544 - DNA, 25 bp, probe
cccgaatttagtcacaccatcttaa

SEQ ID NO: 30545 - DNA, 25 bp, probe
aagggataatagacacatcaaatgc

SEQ ID NO: 30546 - DNA, 25 bp, probe
cttaaatgacagtgaattgacccat

SEQ ID NO: 30547 - DNA, 25 bp, probe
ctctgaggaagaagggataatagac

SEQ ID NO: 30548 - DNA, 25 bp, probe
ccgaatttagtcacaccatcttaaa

SEQ ID NO: 30549 - DNA, 25 bp, probe
accatcttaaatgacagtgaattga

SEQ ID NO: 30550 - DNA, 25 bp, probe
catcttaaatgacagtgaattgacc

SEQ ID NO: 30551 - DNA, 25 bp, probe
ccatcttaaatgacagtgaattgac

SEQ ID NO: 30552 - DNA, 25 bp, probe
gaagaagggataatagacacatcaa

SEQ ID NO: 30553 - DNA, 25 bp, probe
ttaaatgacagtgaattgacccatg

SEQ ID NO: 30554 - DNA, 25 bp, probe
cacaccatcttaaatgacagtgaat

SEQ ID NO: 30555 - DNA, 25 bp, probe
aagaagggataatagacacatcaaa

SEQ ID NO: 30556 - DNA, 25 bp, probe
acaccatcttaaatgacagtgaatt

SEQ ID NO: 30557 - DNA, 25 bp, probe
taaatgacagtgaattgacccatgt

SEQ ID NO: 30558 - DNA, 25 bp, probe
gaagggataatagacacatcaaatg

SEQ ID NO: 30559 - DNA, 25 bp, probe
agaagggataatagacacatcaaat

SEQ ID NO: 30560 - DNA, 25 bp, probe
caccatcttaaatgacagtgaattg

SEQ ID NO: 30561 - DNA, 25 bp, probe
aaatgacagtgaattgacccatgtt

SEQ ID NO: 30562 - DNA, 25 bp, probe
aatgacagtgaattgacccatgttc

SEQ ID NO: 30563 - DNA, 25 bp, probe
cctctgaggaagaagggataataga

SEQ ID NO: 30564 - DNA, 25 bp, probe
tcataaaatggaaggagaagactgg

SEQ ID NO: 30565 - DNA, 25 bp, probe
cataaaatggaaggagaagactggg

SEQ ID NO: 30566 - DNA, 25 bp, probe
ttcataaaatggaaggagaagactg

SEQ ID NO: 30567 - DNA, 25 bp, probe
ggataatagacacatcaaatgcccc

SEQ ID NO: 30568 - DNA, 25 bp, probe
gggataatagacacatcaaatgccc

SEQ ID NO: 30569 - DNA, 25 bp, probe
gataatagacacatcaaatgccccg

SEQ ID NO: 30570 - DNA, 25 bp, probe
aaatggaaggagaagactgggctag

SEQ ID NO: 30571 - DNA, 25 bp, probe
cgaatttagtcacaccatcttaaat

SEQ ID NO: 30572 - DNA, 25 bp, probe
cagtgaattgacccatgttcccttt

SEQ ID NO: 30573 - DNA, 25 bp, probe
ataatagacacatcaaatgccccga

SEQ ID NO: 30574 - DNA, 25 bp, probe
attcataaaatggaaggagaagact

SEQ ID NO: 30575 - DNA, 25 bp, probe
atgacagtgaattgacccatgttcc

SEQ ID NO: 30576 - DNA, 25 bp, probe
ttgtagtgtccagttcacagagctt

SEQ ID NO: 30577 - DNA, 25 bp, probe
acttgtagtgtccagttcacagagc

SEQ ID NO: 30578 - DNA, 25 bp, probe
ccccgaatttagtcacaccatctta

SEQ ID NO: 30579 - DNA, 25 bp, probe
acataggttagattctcattcacgg

SEQ ID NO: 30580 - DNA, 25 bp, probe
cacataggttagattctcattcacg

SEQ ID NO: 30581 - DNA, 25 bp, probe
gatgtggtgatactgagattgtctg

SEQ ID NO: 30582 - DNA, 25 bp, probe
agatgtggtgatactgagattgtct

SEQ ID NO: 30583 - DNA, 25 bp, probe
tagtggattgtgtgtctgagaatga

SEQ ID NO: 30584 - DNA, 25 bp, probe
ggtaatctgacttctcacttcctaa

SEQ ID NO: 30585 - DNA, 25 bp, probe
gtggtgatactgagattgtctgttc

SEQ ID NO: 30586 - DNA, 25 bp, probe
ctagtggattgtgtgtctgagaatg

SEQ ID NO: 30587 - DNA, 25 bp, probe
atgtggtgatactgagattgtctgt

SEQ ID NO: 30588 - DNA, 25 bp, probe
tgtggtgatactgagattgtctgtt

SEQ ID NO: 30589 - DNA, 25 bp, probe
tcacataggttagattctcattcac

SEQ ID NO: 30590 - DNA, 25 bp, probe
gtggattgtgtgtctgagaatgatg

SEQ ID NO: 30591 - DNA, 25 bp, probe
agtggattgtgtgtctgagaatgat

SEQ ID NO: 30592 - DNA, 25 bp, probe
tggtgatactgagattgtctgttca

SEQ ID NO: 30593 - DNA, 25 bp, probe
gtaatctgacttctcacttcctaag

SEQ ID NO: 30594 - DNA, 25 bp, probe
ctacatgaccaatgccttccaatat

SEQ ID NO: 30595 - DNA, 25 bp, probe
cagatgtggtgatactgagattgtc

SEQ ID NO: 30596 - DNA, 25 bp, probe
tacatgaccaatgccttccaatatg

SEQ ID NO: 30597 - DNA, 25 bp, probe
cctagtggattgtgtgtctgagaat

SEQ ID NO: 30598 - DNA, 25 bp, probe
ttcacataggttagattctcattca

SEQ ID NO: 30599 - DNA, 25 bp, probe
aagcagatgtggtgatactgagatt

SEQ ID NO: 30600 - DNA, 25 bp, probe
aatgtgatttgtcttcccttctttg

SEQ ID NO: 30601 - DNA, 25 bp, probe
atgacaccctttatatcccagaatg

SEQ ID NO: 30602 - DNA, 25 bp, probe
cagcaaaggtgtgtattatgatgaa

SEQ ID NO: 30603 - DNA, 25 bp, probe
cagtaatgacaccctttatatccca

SEQ ID NO: 30604 - DNA, 25 bp, probe
cttaggctaagagatgtgactacag

SEQ ID NO: 30605 - DNA, 25 bp, probe
tggattgtgtgtctgagaatgatgg

SEQ ID NO: 30606 - DNA, 25 bp, probe
gtaatgacaccctttatatcccaga

SEQ ID NO: 30607 - DNA, 25 bp, probe
agtaatgacaccctttatatcccag

SEQ ID NO: 30608 - DNA, 25 bp, probe
aatgacaccctttatatcccagaat

SEQ ID NO: 30609 - DNA, 25 bp, probe
atccataaccttgaggcttctcttg

SEQ ID NO: 30610 - DNA, 25 bp, probe
catccataaccttgaggcttctctt

SEQ ID NO: 30611 - DNA, 25 bp, probe
gaagcagatgtggtgatactgagat

SEQ ID NO: 30612 - DNA, 25 bp, probe
ataggttagattctcattcacggga

SEQ ID NO: 30613 - DNA, 25 bp, probe
cataggttagattctcattcacggg

SEQ ID NO: 30614 - DNA, 25 bp, probe
agcaaaggtgtgtattatgatgaaa

SEQ ID NO: 30615 - DNA, 25 bp, probe
gcagtaatgacaccctttatatccc

SEQ ID NO: 30616 - DNA, 25 bp, probe
tcctaagttcccttctatatcctca

SEQ ID NO: 30617 - DNA, 25 bp, probe
caatagcgataatctgaaccatgcg

SEQ ID NO: 30618 - DNA, 25 bp, probe
taatgacaccctttatatcccagaa

SEQ ID NO: 30619 - DNA, 25 bp, probe
atatttccatccataaccttgaggc

SEQ ID NO: 30620 - DNA, 25 bp, probe
ctgcaatagcgataatctgaaccat

SEQ ID NO: 30621 - DNA, 25 bp, probe
caaaggtgtgtattatgatgaaagc

SEQ ID NO: 30622 - DNA, 25 bp, probe
gcaaaggtgtgtattatgatgaaag

SEQ ID NO: 30623 - DNA, 25 bp, probe
gaccacagttatacatcttcaggat

SEQ ID NO: 30624 - DNA, 25 bp, probe
caggaccacagttatacatcttcag

SEQ ID NO: 30625 - DNA, 25 bp, probe
ggaccacagttatacatcttcagga

SEQ ID NO: 30626 - DNA, 25 bp, probe
aggaccacagttatacatcttcagg

SEQ ID NO: 30627 - DNA, 25 bp, probe
gcaggaccacagttatacatcttca

SEQ ID NO: 30628 - DNA, 25 bp, probe
ttgcaggaccacagttatacatctt

SEQ ID NO: 30629 - DNA, 25 bp, probe
tgcaggaccacagttatacatcttc

SEQ ID NO: 30630 - DNA, 25 bp, probe
ccacagttatacatcttcaggatga

SEQ ID NO: 30631 - DNA, 25 bp, probe
accacagttatacatcttcaggatg

SEQ ID NO: 30632 - DNA, 25 bp, probe
cacagttatacatcttcaggatgat

SEQ ID NO: 30633 - DNA, 25 bp, probe
ctttgcaggaccacagttatacatc

SEQ ID NO: 30634 - DNA, 25 bp, probe
atcttcaggatgattcatctagcag

SEQ ID NO: 30635 - DNA, 25 bp, probe
catcttcaggatgattcatctagca

SEQ ID NO: 30636 - DNA, 25 bp, probe
acatcttcaggatgattcatctagc

SEQ ID NO: 30637 - DNA, 25 bp, probe
tttgcaggaccacagttatacatct

SEQ ID NO: 30638 - DNA, 25 bp, probe
tctttgcaggaccacagttatacat

SEQ ID NO: 30639 - DNA, 25 bp, probe
cttcaggatgattcatctagcagac

SEQ ID NO: 30640 - DNA, 25 bp, probe
tcttcaggatgattcatctagcaga

SEQ ID NO: 30641 - DNA, 25 bp, probe
acagttatacatcttcaggatgatt

SEQ ID NO: 30642 - DNA, 25 bp, probe
ttcaggatgattcatctagcagaca

SEQ ID NO: 30643 - DNA, 25 bp, probe
ggacagacaaaagttttctctcaat

SEQ ID NO: 30644 - DNA, 25 bp, probe
agttatacatcttcaggatgattca

SEQ ID NO: 30645 - DNA, 25 bp, probe
tggacagacaaaagttttctctcaa

SEQ ID NO: 30646 - DNA, 25 bp, probe
tcaggatgattcatctagcagacag

SEQ ID NO: 30647 - DNA, 25 bp, probe
gacagacaaaagttttctctcaatg

SEQ ID NO: 30648 - DNA, 25 bp, probe
ctggacagacaaaagttttctctca

SEQ ID NO: 30649 - DNA, 25 bp, probe
cagttatacatcttcaggatgattc

SEQ ID NO: 30650 - DNA, 25 bp, probe
gatgattcatctagcagacagctct

SEQ ID NO: 30651 - DNA, 25 bp, probe
agacaaaagttttctctcaatgtgt

SEQ ID NO: 30652 - DNA, 25 bp, probe
acagacaaaagttttctctcaatgt

SEQ ID NO: 30653 - DNA, 25 bp, probe
cagacaaaagttttctctcaatgtg

SEQ ID NO: 30654 - DNA, 25 bp, probe
ggtggcatcaagcattttataactt

SEQ ID NO: 30655 - DNA, 25 bp, probe
atggtggcatcaagcattttataac

SEQ ID NO: 30656 - DNA, 25 bp, probe
tggtggcatcaagcattttataact

SEQ ID NO: 30657 - DNA, 25 bp, probe
tctggacagacaaaagttttctctc

SEQ ID NO: 30658 - DNA, 25 bp, probe
ctctggacagacaaaagttttctct

SEQ ID NO: 30659 - DNA, 25 bp, probe
gtggcatcaagcattttataacttt

SEQ ID NO: 30660 - DNA, 25 bp, probe
tacatcttcaggatgattcatctag

SEQ ID NO: 30661 - DNA, 25 bp, probe
atgattcatctagcagacagctctg

SEQ ID NO: 30662 - DNA, 25 bp, probe
gtctttgcaggaccacagttataca

SEQ ID NO: 30663 - DNA, 25 bp, probe
tgtctttgcaggaccacagttatac

SEQ ID NO: 30664 - DNA, 25 bp, probe
gttatacatcttcaggatgattcat

SEQ ID NO: 30665 - DNA, 25 bp, probe
gacaaaagttttctctcaatgtgta

SEQ ID NO: 30666 - DNA, 25 bp, probe
ggatgattcatctagcagacagctc

SEQ ID NO: 30667 - DNA, 25 bp, probe
cgacaagaatacaacgatatacagc

SEQ ID NO: 30668 - DNA, 25 bp, probe
ccgacaagaatacaacgatatacag

SEQ ID NO: 30669 - DNA, 25 bp, probe
caatgcttactattcggtatctgac

SEQ ID NO: 30670 - DNA, 25 bp, probe
gtcaatgcttactattcggtatctg

SEQ ID NO: 30671 - DNA, 25 bp, probe
cgtcaatgcttactattcggtatct

SEQ ID NO: 30672 - DNA, 25 bp, probe
tcaatgcttactattcggtatctga

SEQ ID NO: 30673 - DNA, 25 bp, probe
attacctagcagaacctccttcaat

SEQ ID NO: 30674 - DNA, 25 bp, probe
ttacctagcagaacctccttcaatg

SEQ ID NO: 30675 - DNA, 25 bp, probe
cattacctagcagaacctccttcaa

SEQ ID NO: 30676 - DNA, 25 bp, probe
aatgcttactattcggtatctgacc

SEQ ID NO: 30677 - DNA, 25 bp, probe
gacaagaatacaacgatatacagct

SEQ ID NO: 30678 - DNA, 25 bp, probe
agaatacaacgatatacagcttgga

SEQ ID NO: 30679 - DNA, 25 bp, probe
tgcttactattcggtatctgaccat

SEQ ID NO: 30680 - DNA, 25 bp, probe
atgcttactattcggtatctgacca

SEQ ID NO: 30681 - DNA, 25 bp, probe
cccgacaagaatacaacgatataca

SEQ ID NO: 30682 - DNA, 25 bp, probe
aagaatacaacgatatacagcttgg

SEQ ID NO: 30683 - DNA, 25 bp, probe
acgtcaatgcttactattcggtatc

SEQ ID NO: 30684 - DNA, 25 bp, probe
aatacaacgatatacagcttggatc

SEQ ID NO: 30685 - DNA, 25 bp, probe
gaatacaacgatatacagcttggat

SEQ ID NO: 30686 - DNA, 25 bp, probe
ttactattcggtatctgaccatgtg

SEQ ID NO: 30687 - DNA, 25 bp, probe
cttactattcggtatctgaccatgt

SEQ ID NO: 30688 - DNA, 25 bp, probe
ctagcagaacctccttcaatgactc

SEQ ID NO: 30689 - DNA, 25 bp, probe
acaagaatacaacgatatacagctt

SEQ ID NO: 30690 - DNA, 25 bp, probe
caagatttcctttctgcttctgttc

SEQ ID NO: 30691 - DNA, 25 bp, probe
cattatgctgcctttccattaccta

SEQ ID NO: 30692 - DNA, 25 bp, probe
atttcctttctgcttctgttccaaa

SEQ ID NO: 30693 - DNA, 25 bp, probe
tacctagcagaacctccttcaatga

SEQ ID NO: 30694 - DNA, 25 bp, probe
gcttactattcggtatctgaccatg

SEQ ID NO: 30695 - DNA, 25 bp, probe
attatgctgcctttccattacctag

SEQ ID NO: 30696 - DNA, 25 bp, probe
gcccgacaagaatacaacgatatac

SEQ ID NO: 30697 - DNA, 25 bp, probe
gatttcctttctgcttctgttccaa

SEQ ID NO: 30698 - DNA, 25 bp, probe
ttccattacctagcagaacctcctt

SEQ ID NO: 30699 - DNA, 25 bp, probe
tactattcggtatctgaccatgtgg

SEQ ID NO: 30700 - DNA, 25 bp, probe
aagatttcctttctgcttctgttcc

SEQ ID NO: 30701 - DNA, 25 bp, probe
tccattacctagcagaacctccttc

SEQ ID NO: 30702 - DNA, 25 bp, probe
tattcggtatctgaccatgtggtag

SEQ ID NO: 30703 - DNA, 25 bp, probe
ctattcggtatctgaccatgtggta

SEQ ID NO: 30704 - DNA, 25 bp, probe
ttgcacatcttctaccagctcttac

SEQ ID NO: 30705 - DNA, 25 bp, probe
gttgcacatcttctaccagctctta

SEQ ID NO: 30706 - DNA, 25 bp, probe
agatttcctttctgcttctgttcca

SEQ ID NO: 30707 - DNA, 25 bp, probe
ccattacctagcagaacctccttca

SEQ ID NO: 30708 - DNA, 25 bp, probe
tagcagaacctccttcaatgactcc

SEQ ID NO: 30709 - DNA, 25 bp, probe
cctagcagaacctccttcaatgact

SEQ ID NO: 30710 - DNA, 25 bp, probe
ttcaatgactccctcacattcttag

SEQ ID NO: 30711 - DNA, 25 bp, probe
tcgatctctgagttatggtgctata

SEQ ID NO: 30712 - DNA, 25 bp, probe
gcatgattaaccagtatagcaacta

SEQ ID NO: 30713 - DNA, 25 bp, probe
atctctgagttatggtgctatagga

SEQ ID NO: 30714 - DNA, 25 bp, probe
taggagtaattgtcggacatgaatt

SEQ ID NO: 30715 - DNA, 25 bp, probe
tatggtgctataggagtaattgtcg

SEQ ID NO: 30716 - DNA, 25 bp, probe
tctgagttatggtgctataggagta

SEQ ID NO: 30717 - DNA, 25 bp, probe
gatctctgagttatggtgctatagg

SEQ ID NO: 30718 - DNA, 25 bp, probe
cgatctctgagttatggtgctatag

SEQ ID NO: 30719 - DNA, 25 bp, probe
ataggagtaattgtcggacatgaat

SEQ ID NO: 30720 - DNA, 25 bp, probe
gaaatggataaatgacagaaggcag

SEQ ID NO: 30721 - DNA, 25 bp, probe
ggcttacaggaaatggataaatgac

SEQ ID NO: 30722 - DNA, 25 bp, probe
caggaaatggataaatgacagaagg

SEQ ID NO: 30723 - DNA, 25 bp, probe
tataggagtaattgtcggacatgaa

SEQ ID NO: 30724 - DNA, 25 bp, probe
ctgagttatggtgctataggagtaa

SEQ ID NO: 30725 - DNA, 25 bp, probe
gttggaaagatgtttgtagatgtgt

SEQ ID NO: 30726 - DNA, 25 bp, probe
tgttggaaagatgtttgtagatgtg

SEQ ID NO: 30727 - DNA, 25 bp, probe
ttagggcttacaggaaatggataaa

SEQ ID NO: 30728 - DNA, 25 bp, probe
tttagggcttacaggaaatggataa

SEQ ID NO: 30729 - DNA, 25 bp, probe
gcttacaggaaatggataaatgaca

SEQ ID NO: 30730 - DNA, 25 bp, probe
tagggcttacaggaaatggataaat

SEQ ID NO: 30731 - DNA, 25 bp, probe
gggcttacaggaaatggataaatga

SEQ ID NO: 30732 - DNA, 25 bp, probe
agggcttacaggaaatggataaatg

SEQ ID NO: 30733 - DNA, 25 bp, probe
agataagaaggaaatgatggaggaa

SEQ ID NO: 30734 - DNA, 25 bp, probe
aagataagaaggaaatgatggagga

SEQ ID NO: 30735 - DNA, 25 bp, probe
aggaagataagaaggaaatgatgga

SEQ ID NO: 30736 - DNA, 25 bp, probe
caggaagataagaaggaaatgatgg

SEQ ID NO: 30737 - DNA, 25 bp, probe
ccaggaagataagaaggaaatgatg

SEQ ID NO: 30738 - DNA, 25 bp, probe
atatcctcgatctctgagttatggt

SEQ ID NO: 30739 - DNA, 25 bp, probe
gcaagtatttagcacagtctgattt

SEQ ID NO: 30740 - DNA, 25 bp, probe
ttgttggaaagatgtttgtagatgt

SEQ ID NO: 30741 - DNA, 25 bp, probe
tgttgttggaaagatgtttgtagat

SEQ ID NO: 30742 - DNA, 25 bp, probe
atgttgttggaaagatgtttgtaga

SEQ ID NO: 30743 - DNA, 25 bp, probe
cccttatgttgttggaaagatgttt

SEQ ID NO: 30744 - DNA, 25 bp, probe
ttggtggtctactgaatcagaagaa

SEQ ID NO: 30745 - DNA, 25 bp, probe
acaggaaatggataaatgacagaag

SEQ ID NO: 30746 - DNA, 25 bp, probe
gaagataagaaggaaatgatggagg

SEQ ID NO: 30747 - DNA, 25 bp, probe
ggaagataagaaggaaatgatggag

SEQ ID NO: 30748 - DNA, 25 bp, probe
aggaaatggataaatgacagaaggc

SEQ ID NO: 30749 - DNA, 25 bp, probe
aatatcctcgatctctgagttatgg

SEQ ID NO: 30750 - DNA, 25 bp, probe
gttgttggaaagatgtttgtagatg

SEQ ID NO: 30751 - DNA, 25 bp, probe
tgagttatggtgctataggagtaat

SEQ ID NO: 30752 - DNA, 25 bp, probe
aaatggataaatgacagaaggcagg

SEQ ID NO: 30753 - DNA, 25 bp, probe
ggaaatggataaatgacagaaggca

SEQ ID NO: 30754 - DNA, 25 bp, probe
tatcctcgatctctgagttatggtg

SEQ ID NO: 30755 - DNA, 25 bp, probe
agactgactggattccttcctataa

SEQ ID NO: 30756 - DNA, 25 bp, probe
ttagactgactggattccttcctat

SEQ ID NO: 30757 - DNA, 25 bp, probe
attagactgactggattccttccta

SEQ ID NO: 30758 - DNA, 25 bp, probe
tgactggattccttcctataattcc

SEQ ID NO: 30759 - DNA, 25 bp, probe
tagactgactggattccttcctata

SEQ ID NO: 30760 - DNA, 25 bp, probe
gactgactggattccttcctataat

SEQ ID NO: 30761 - DNA, 25 bp, probe
aatcatcacaccagcaattaccaga

SEQ ID NO: 30762 - DNA, 25 bp, probe
actgactggattccttcctataatt

SEQ ID NO: 30763 - DNA, 25 bp, probe
gattagactgactggattccttcct

SEQ ID NO: 30764 - DNA, 25 bp, probe
ctgactggattccttcctataattc

SEQ ID NO: 30765 - DNA, 25 bp, probe
atcatcacaccagcaattaccagag

SEQ ID NO: 30766 - DNA, 25 bp, probe
ttcgaggattagactgactggattc

SEQ ID NO: 30767 - DNA, 25 bp, probe
cttgcctgtgttgagagaatagaaa

SEQ ID NO: 30768 - DNA, 25 bp, probe
gcttgcctgtgttgagagaatagaa

SEQ ID NO: 30769 - DNA, 25 bp, probe
gttcgaggattagactgactggatt

SEQ ID NO: 30770 - DNA, 25 bp, probe
ggattagactgactggattccttcc

SEQ ID NO: 30771 - DNA, 25 bp, probe
aaagtaccaagatagtttcctgctg

SEQ ID NO: 30772 - DNA, 25 bp, probe
gaagtgttcgaggattagactgact

SEQ ID NO: 30773 - DNA, 25 bp, probe
aaatcatcacaccagcaattaccag

SEQ ID NO: 30774 - DNA, 25 bp, probe
aagtgttcgaggattagactgactg

SEQ ID NO: 30775 - DNA, 25 bp, probe
tctctgtcttctttcaacctggatg

SEQ ID NO: 30776 - DNA, 25 bp, probe
gtctctgtcttctttcaacctggat

SEQ ID NO: 30777 - DNA, 25 bp, probe
catgtctctgtcttctttcaacctg

SEQ ID NO: 30778 - DNA, 25 bp, probe
tgttcgaggattagactgactggat

SEQ ID NO: 30779 - DNA, 25 bp, probe
atgtctctgtcttctttcaacctgg

SEQ ID NO: 30780 - DNA, 25 bp, probe
taggcatgtctctgtcttctttcaa

SEQ ID NO: 30781 - DNA, 25 bp, probe
ggaagtgttcgaggattagactgac

SEQ ID NO: 30782 - DNA, 25 bp, probe
ctggaagtgttcgaggattagactg

SEQ ID NO: 30783 - DNA, 25 bp, probe
ctctgtcttctttcaacctggatga

SEQ ID NO: 30784 - DNA, 25 bp, probe
ctaggcatgtctctgtcttctttca

SEQ ID NO: 30785 - DNA, 25 bp, probe
atgtgaagaccagatcatcctcctc

SEQ ID NO: 30786 - DNA, 25 bp, probe
tcatcacaccagcaattaccagagt

SEQ ID NO: 30787 - DNA, 25 bp, probe
gaagaccagatcatcctcctcaaag

SEQ ID NO: 30788 - DNA, 25 bp, probe
tggaagtgttcgaggattagactga

SEQ ID NO: 30789 - DNA, 25 bp, probe
gtgaagaccagatcatcctcctcaa

SEQ ID NO: 30790 - DNA, 25 bp, probe
cttctttcaacctggatgacactga

SEQ ID NO: 30791 - DNA, 25 bp, probe
tcttctttcaacctggatgacactg

SEQ ID NO: 30792 - DNA, 25 bp, probe
ttcaacctggatgacactgaagtag

SEQ ID NO: 30793 - DNA, 25 bp, probe
catgtgaagaccagatcatcctcct

SEQ ID NO: 30794 - DNA, 25 bp, probe
tctgtcttctttcaacctggatgac

SEQ ID NO: 30795 - DNA, 25 bp, probe
gtgttcgaggattagactgactgga

SEQ ID NO: 30796 - DNA, 25 bp, probe
tgtctctgtcttctttcaacctgga

SEQ ID NO: 30797 - DNA, 25 bp, probe
gtcttctttcaacctggatgacact

SEQ ID NO: 30798 - DNA, 25 bp, probe
ttgcctgtgttgagagaatagaaaa

SEQ ID NO: 30799 - DNA, 25 bp, probe
attctcaatggatgctggattctaa

SEQ ID NO: 30800 - DNA, 25 bp, probe
gattctcaatggatgctggattcta

SEQ ID NO: 30801 - DNA, 25 bp, probe
ggattctcaatggatgctggattct

SEQ ID NO: 30802 - DNA, 25 bp, probe
tctgcacacagtatatcatctatga

SEQ ID NO: 30803 - DNA, 25 bp, probe
gcacacagtatatcatctatgaaga

SEQ ID NO: 30804 - DNA, 25 bp, probe
ttctcaatggatgctggattctaaa

SEQ ID NO: 30805 - DNA, 25 bp, probe
tgatggatgctacttctatttgtgg

SEQ ID NO: 30806 - DNA, 25 bp, probe
ttgatggatgctacttctatttgtg

SEQ ID NO: 30807 - DNA, 25 bp, probe
gctgtttgatggatgctacttctat

SEQ ID NO: 30808 - DNA, 25 bp, probe
aaagtatgaaattcctgaaggtcca

SEQ ID NO: 30809 - DNA, 25 bp, probe
ctgtttgatggatgctacttctatt

SEQ ID NO: 30810 - DNA, 25 bp, probe
ctcagaccatcaatacagtcgcata

SEQ ID NO: 30811 - DNA, 25 bp, probe
gatggatgctacttctatttgtggg

SEQ ID NO: 30812 - DNA, 25 bp, probe
aagtatgaaattcctgaaggtccac

SEQ ID NO: 30813 - DNA, 25 bp, probe
tcagaccatcaatacagtcgcatac

SEQ ID NO: 30814 - DNA, 25 bp, probe
tttgatggatgctacttctatttgt

SEQ ID NO: 30815 - DNA, 25 bp, probe
tgtttgatggatgctacttctattt

SEQ ID NO: 30816 - DNA, 25 bp, probe
gtttgatggatgctacttctatttg

SEQ ID NO: 30817 - DNA, 25 bp, probe
gcttctgcacacagtatatcatcta

SEQ ID NO: 30818 - DNA, 25 bp, probe
gaccatcaatacagtcgcataccat

SEQ ID NO: 30819 - DNA, 25 bp, probe
tatagactgtgtgatgtcctttgag

SEQ ID NO: 30820 - DNA, 25 bp, probe
ggtttatagactgtgtgatgtcctt

SEQ ID NO: 30821 - DNA, 25 bp, probe
gacaaccttattaagctcgtcactg

SEQ ID NO: 30822 - DNA, 25 bp, probe
tgcacacagtatatcatctatgaag

SEQ ID NO: 30823 - DNA, 25 bp, probe
ttatagactgtgtgatgtcctttga

SEQ ID NO: 30824 - DNA, 25 bp, probe
gtatgcttgggattctcaatggatg

SEQ ID NO: 30825 - DNA, 25 bp, probe
accatcaatacagtcgcataccatg

SEQ ID NO: 30826 - DNA, 25 bp, probe
ctggtttatagactgtgtgatgtcc

SEQ ID NO: 30827 - DNA, 25 bp, probe
tggtttatagactgtgtgatgtcct

SEQ ID NO: 30828 - DNA, 25 bp, probe
tttatagactgtgtgatgtcctttg

SEQ ID NO: 30829 - DNA, 25 bp, probe
gtttatagactgtgtgatgtccttt

SEQ ID NO: 30830 - DNA, 25 bp, probe
tgtatgcttgggattctcaatggat

SEQ ID NO: 30831 - DNA, 25 bp, probe
ctgcacacagtatatcatctatgaa

SEQ ID NO: 30832 - DNA, 25 bp, probe
ttctgcacacagtatatcatctatg

SEQ ID NO: 30833 - DNA, 25 bp, probe
atagactgtgtgatgtcctttgagt

SEQ ID NO: 30834 - DNA, 25 bp, probe
gctggtttatagactgtgtgatgtc

SEQ ID NO: 30835 - DNA, 25 bp, probe
tagactgtgtgatgtcctttgagtt

SEQ ID NO: 30836 - DNA, 25 bp, probe
agctgaatattataccagatgaaca

SEQ ID NO: 30837 - DNA, 25 bp, probe
cttctgcacacagtatatcatctat

SEQ ID NO: 30838 - DNA, 25 bp, probe
agtatgaaattcctgaaggtccacg

SEQ ID NO: 30839 - DNA, 25 bp, probe
gagctggtttatagactgtgtgatg

SEQ ID NO: 30840 - DNA, 25 bp, probe
cagaccatcaatacagtcgcatacc

SEQ ID NO: 30841 - DNA, 25 bp, probe
aggtagagtcattcatatttgtctt

SEQ ID NO: 30842 - DNA, 25 bp, probe
ggacaaccttattaagctcgtcact

SEQ ID NO: 30843 - DNA, 25 bp, probe
tgagattcatcaatgccaatgtcat

SEQ ID NO: 30844 - DNA, 25 bp, probe
ctgagattcatcaatgccaatgtca

SEQ ID NO: 30845 - DNA, 25 bp, probe
cacagtcagcatggatgatatgatg

SEQ ID NO: 30846 - DNA, 25 bp, probe
ccatagttaaagaagacatttgcca

SEQ ID NO: 30847 - DNA, 25 bp, probe
taaagaagacatttgccaacaggta

SEQ ID NO: 30848 - DNA, 25 bp, probe
gatatgatgctggaaatgctctgta

SEQ ID NO: 30849 - DNA, 25 bp, probe
tccatagttaaagaagacatttgcc

SEQ ID NO: 30850 - DNA, 25 bp, probe
gatgatatgatgctggaaatgctct

SEQ ID NO: 30851 - DNA, 25 bp, probe
gagattcatcaatgccaatgtcatt

SEQ ID NO: 30852 - DNA, 25 bp, probe
agttaaagaagacatttgccaacag

SEQ ID NO: 30853 - DNA, 25 bp, probe
gctgagattcatcaatgccaatgtc

SEQ ID NO: 30854 - DNA, 25 bp, probe
ctgctgagattcatcaatgccaatg

SEQ ID NO: 30855 - DNA, 25 bp, probe
atgatatgatgctggaaatgctctg

SEQ ID NO: 30856 - DNA, 25 bp, probe
ttaaagaagacatttgccaacaggt

SEQ ID NO: 30857 - DNA, 25 bp, probe
tagttaaagaagacatttgccaaca

SEQ ID NO: 30858 - DNA, 25 bp, probe
gttaaagaagacatttgccaacagg

SEQ ID NO: 30859 - DNA, 25 bp, probe
tttattcccagcacagtcacaaatt

SEQ ID NO: 30860 - DNA, 25 bp, probe
atggatgatatgatgctggaaatgc

SEQ ID NO: 30861 - DNA, 25 bp, probe
ccatcaagtgctttctttccaaatg

SEQ ID NO: 30862 - DNA, 25 bp, probe
aaagaagacatttgccaacaggtag

SEQ ID NO: 30863 - DNA, 25 bp, probe
aatactcagtgaacacaccaggatg

SEQ ID NO: 30864 - DNA, 25 bp, probe
atatgatgctggaaatgctctgtac

SEQ ID NO: 30865 - DNA, 25 bp, probe
ggatgatatgatgctggaaatgctc

SEQ ID NO: 30866 - DNA, 25 bp, probe
catagttaaagaagacatttgccaa

SEQ ID NO: 30867 - DNA, 25 bp, probe
gaactcagcaaatactcagtgaaca

SEQ ID NO: 30868 - DNA, 25 bp, probe
catggatgatatgatgctggaaatg

SEQ ID NO: 30869 - DNA, 25 bp, probe
atcaagtgctttctttccaaatgct

SEQ ID NO: 30870 - DNA, 25 bp, probe
catcaagtgctttctttccaaatgc

SEQ ID NO: 30871 - DNA, 25 bp, probe
tgacagattcatcgaacttaatagt

SEQ ID NO: 30872 - DNA, 25 bp, probe
atagttaaagaagacatttgccaac

SEQ ID NO: 30873 - DNA, 25 bp, probe
aactcagcaaatactcagtgaacac

SEQ ID NO: 30874 - DNA, 25 bp, probe
ttcaccatgagggaagaataaagag

SEQ ID NO: 30875 - DNA, 25 bp, probe
tctctgttccatagttaaagaagac

SEQ ID NO: 30876 - DNA, 25 bp, probe
tgctgagattcatcaatgccaatgt

SEQ ID NO: 30877 - DNA, 25 bp, probe
gttcaccatgagggaagaataaaga

SEQ ID NO: 30878 - DNA, 25 bp, probe
agttcaccatgagggaagaataaag

SEQ ID NO: 30879 - DNA, 25 bp, probe
tgatatgatgctggaaatgctctgt

SEQ ID NO: 30880 - DNA, 25 bp, probe
ggaactcagcaaatactcagtgaac

SEQ ID NO: 30881 - DNA, 25 bp, probe
cagttcaccatgagggaagaataaa

SEQ ID NO: 30882 - DNA, 25 bp, probe
ttccatagttaaagaagacatttgc

SEQ ID NO: 30883 - DNA, 25 bp, probe
tggatgatatgatgctggaaatgct

SEQ ID NO: 30884 - DNA, 25 bp, probe
ctctgttccatagttaaagaagaca

SEQ ID NO: 30885 - DNA, 25 bp, probe
gcacagtcagcatggatgatatgat

SEQ ID NO: 30886 - DNA, 25 bp, probe
atactcagtgaacacaccaggatga

SEQ ID NO: 30887 - DNA, 25 bp, probe
gttcacaaaggagacctatgacttc

SEQ ID NO: 30888 - DNA, 25 bp, probe
cataacgtcctctccattaaagtga

SEQ ID NO: 30889 - DNA, 25 bp, probe
tcataacgtcctctccattaaagtg

SEQ ID NO: 30890 - DNA, 25 bp, probe
gtcataacgtcctctccattaaagt

SEQ ID NO: 30891 - DNA, 25 bp, probe
ggtcataacgtcctctccattaaag

SEQ ID NO: 30892 - DNA, 25 bp, probe
ataacgtcctctccattaaagtgag

SEQ ID NO: 30893 - DNA, 25 bp, probe
ttcacaaaggagacctatgacttcg

SEQ ID NO: 30894 - DNA, 25 bp, probe
ggttcacaaaggagacctatgactt

SEQ ID NO: 30895 - DNA, 25 bp, probe
aggtcataacgtcctctccattaaa

SEQ ID NO: 30896 - DNA, 25 bp, probe
aaaggagacctatgacttcgacatc

SEQ ID NO: 30897 - DNA, 25 bp, probe
ttcaaggacacctacttcgtgacag

SEQ ID NO: 30898 - DNA, 25 bp, probe
cttcaaggacacctacttcgtgaca

SEQ ID NO: 30899 - DNA, 25 bp, probe
caaaggagacctatgacttcgacat

SEQ ID NO: 30900 - DNA, 25 bp, probe
aaggagacctatgacttcgacatcg

SEQ ID NO: 30901 - DNA, 25 bp, probe
cacaaaggagacctatgacttcgac

SEQ ID NO: 30902 - DNA, 25 bp, probe
tcacaaaggagacctatgacttcga

SEQ ID NO: 30903 - DNA, 25 bp, probe
gaagtacgggatctacaccaaggtc

SEQ ID NO: 30904 - DNA, 25 bp, probe
acaaaggagacctatgacttcgaca

SEQ ID NO: 30905 - DNA, 25 bp, probe
gtcctctccattaaagtgagatccc

SEQ ID NO: 30906 - DNA, 25 bp, probe
taacgtcctctccattaaagtgaga

SEQ ID NO: 30907 - DNA, 25 bp, probe
cagcttcatcatcacccagaacatg

SEQ ID NO: 30908 - DNA, 25 bp, probe
cctctccattaaagtgagatcccac

SEQ ID NO: 30909 - DNA, 25 bp, probe
tcctctccattaaagtgagatccca

SEQ ID NO: 30910 - DNA, 25 bp, probe
cgtcctctccattaaagtgagatcc

SEQ ID NO: 30911 - DNA, 25 bp, probe
cggttcacaaaggagacctatgact

SEQ ID NO: 30912 - DNA, 25 bp, probe
aacgtcctctccattaaagtgagat

SEQ ID NO: 30913 - DNA, 25 bp, probe
aagtacgggatctacaccaaggtca

SEQ ID NO: 30914 - DNA, 25 bp, probe
tctccattaaagtgagatcccactc

SEQ ID NO: 30915 - DNA, 25 bp, probe
ctctccattaaagtgagatcccact

SEQ ID NO: 30916 - DNA, 25 bp, probe
gaggtcataacgtcctctccattaa

SEQ ID NO: 30917 - DNA, 25 bp, probe
acgtcctctccattaaagtgagatc

SEQ ID NO: 30918 - DNA, 25 bp, probe
gtaaggggaagtacgggatctacac

SEQ ID NO: 30919 - DNA, 25 bp, probe
ggaggtcataacgtcctctccatta

SEQ ID NO: 30920 - DNA, 25 bp, probe
taaggggaagtacgggatctacacc

SEQ ID NO: 30921 - DNA, 25 bp, probe
agcttcatcatcacccagaacatgt

SEQ ID NO: 30922 - DNA, 25 bp, probe
ccggttcacaaaggagacctatgac

SEQ ID NO: 30923 - DNA, 25 bp, probe
caagtggatcgacaggtccatgaaa

SEQ ID NO: 30924 - DNA, 25 bp, probe
aagtggatcgacaggtccatgaaaa

SEQ ID NO: 30925 - DNA, 25 bp, probe
cgtaaggggaagtacgggatctaca

SEQ ID NO: 30926 - DNA, 25 bp, probe
agtggatcgacaggtccatgaaaac

SEQ ID NO: 30927 - DNA, 25 bp, probe
ctcatctttccctccttggtgattc

SEQ ID NO: 30928 - DNA, 25 bp, probe
gcgaggaactcaataaagtgctttg

SEQ ID NO: 30929 - DNA, 25 bp, probe
gaggaactcaataaagtgctttgaa

SEQ ID NO: 30930 - DNA, 25 bp, probe
aggaactcaataaagtgctttgaaa

SEQ ID NO: 30931 - DNA, 25 bp, probe
actcatctttccctccttggtgatt

SEQ ID NO: 30932 - DNA, 25 bp, probe
aataaagtgctttgaaaatgctgag

SEQ ID NO: 30933 - DNA, 25 bp, probe
caggatggcgaggaactcaataaag

SEQ ID NO: 30934 - DNA, 25 bp, probe
caataaagtgctttgaaaatgctga

SEQ ID NO: 30935 - DNA, 25 bp, probe
cgaggaactcaataaagtgctttga

SEQ ID NO: 30936 - DNA, 25 bp, probe
ggatggcgaggaactcaataaagtg

SEQ ID NO: 30937 - DNA, 25 bp, probe
gactcatctttccctccttggtgat

SEQ ID NO: 30938 - DNA, 25 bp, probe
aggatggcgaggaactcaataaagt

SEQ ID NO: 30939 - DNA, 25 bp, probe
tcatctttccctccttggtgattcc

SEQ ID NO: 30940 - DNA, 25 bp, probe
ggcgaggaactcaataaagtgcttt

SEQ ID NO: 30941 - DNA, 25 bp, probe
gatggcgaggaactcaataaagtgc

SEQ ID NO: 30942 - DNA, 25 bp, probe
atggcgaggaactcaataaagtgct

SEQ ID NO: 30943 - DNA, 25 bp, probe
tgattgctcagggactcatctttcc

SEQ ID NO: 30944 - DNA, 25 bp, probe
tcaataaagtgctttgaaaatgctg

SEQ ID NO: 30945 - DNA, 25 bp, probe
actcaataaagtgctttgaaaatgc

SEQ ID NO: 30946 - DNA, 25 bp, probe
tggcgaggaactcaataaagtgctt

SEQ ID NO: 30947 - DNA, 25 bp, probe
ctcaataaagtgctttgaaaatgct

SEQ ID NO: 30948 - DNA, 25 bp, probe
ggaactcaataaagtgctttgaaaa

SEQ ID NO: 30949 - DNA, 25 bp, probe
ccaggatggcgaggaactcaataaa

SEQ ID NO: 30950 - DNA, 25 bp, probe
ctgattgctcagggactcatctttc

SEQ ID NO: 30951 - DNA, 25 bp, probe
aactcaataaagtgctttgaaaatg

SEQ ID NO: 30952 - DNA, 25 bp, probe
gaactcaataaagtgctttgaaaat

SEQ ID NO: 30953 - DNA, 25 bp, probe
atggaaggcaagattgtgtcccatt

SEQ ID NO: 30954 - DNA, 25 bp, probe
gaagaagtggatacagaaggtcatt

SEQ ID NO: 30955 - DNA, 25 bp, probe
aagaagtggatacagaaggtcattg

SEQ ID NO: 30956 - DNA, 25 bp, probe
gaagtggatacagaaggtcattgat

SEQ ID NO: 30957 - DNA, 25 bp, probe
agaagtggatacagaaggtcattga

SEQ ID NO: 30958 - DNA, 25 bp, probe
aagtggatacagaaggtcattgatc

SEQ ID NO: 30959 - DNA, 25 bp, probe
tgaagaagtggatacagaaggtcat

SEQ ID NO: 30960 - DNA, 25 bp, probe
ctgaagaagtggatacagaaggtca

SEQ ID NO: 30961 - DNA, 25 bp, probe
gaaccaatcccgtgaaagaattatt

SEQ ID NO: 30962 - DNA, 25 bp, probe
aaccaatcccgtgaaagaattattt

SEQ ID NO: 30963 - DNA, 25 bp, probe
aagaacttcaccgagaatgaccttc

SEQ ID NO: 30964 - DNA, 25 bp, probe
cctgaagaagtggatacagaaggtc

SEQ ID NO: 30965 - DNA, 25 bp, probe
caagaacttcaccgagaatgacctt

SEQ ID NO: 30966 - DNA, 25 bp, probe
gatgggaaatatggcttctacacac

SEQ ID NO: 30967 - DNA, 25 bp, probe
agtgagtaccagactttcttcaatc

SEQ ID NO: 30968 - DNA, 25 bp, probe
cagtgagtaccagactttcttcaat

SEQ ID NO: 30969 - DNA, 25 bp, probe
ctgttgccttcagtgactacattca

SEQ ID NO: 30970 - DNA, 25 bp, probe
tgggaaatatggcttctacacacat

SEQ ID NO: 30971 - DNA, 25 bp, probe
atgggaaatatggcttctacacaca

SEQ ID NO: 30972 - DNA, 25 bp, probe
gtgagtaccagactttcttcaatcc

SEQ ID NO: 30973 - DNA, 25 bp, probe
ggatgggaaatatggcttctacaca

SEQ ID NO: 30974 - DNA, 25 bp, probe
gacaagaacttcaccgagaatgacc

SEQ ID NO: 30975 - DNA, 25 bp, probe
ggacaagaacttcaccgagaatgac

SEQ ID NO: 30976 - DNA, 25 bp, probe
gggaaatatggcttctacacacatg

SEQ ID NO: 30977 - DNA, 25 bp, probe
ggaaccaatcccgtgaaagaattat

SEQ ID NO: 30978 - DNA, 25 bp, probe
ctttaacaaccgctggtatcaaatg

SEQ ID NO: 30979 - DNA, 25 bp, probe
ggatacagaaggtcattgatcagtt

SEQ ID NO: 30980 - DNA, 25 bp, probe
agtaccagactttcttcaatccgag

SEQ ID NO: 30981 - DNA, 25 bp, probe
gagtaccagactttcttcaatccga

SEQ ID NO: 30982 - DNA, 25 bp, probe
gactttcttcaatccgaggaccttt

SEQ ID NO: 30983 - DNA, 25 bp, probe
gtggatacagaaggtcattgatcag

SEQ ID NO: 30984 - DNA, 25 bp, probe
cctgttgccttcagtgactacattc

SEQ ID NO: 30985 - DNA, 25 bp, probe
ccagtgagtaccagactttcttcaa

SEQ ID NO: 30986 - DNA, 25 bp, probe
acaagaacttcaccgagaatgacct

SEQ ID NO: 30987 - DNA, 25 bp, probe
tggatacagaaggtcattgatcagt

SEQ ID NO: 30988 - DNA, 25 bp, probe
agtggatacagaaggtcattgatca

SEQ ID NO: 30989 - DNA, 25 bp, probe
gggatgggaaatatggcttctacac

SEQ ID NO: 30990 - DNA, 25 bp, probe
tgagtaccagactttcttcaatccg

SEQ ID NO: 30991 - DNA, 25 bp, probe
cctttaacaaccgctggtatcaaat

SEQ ID NO: 30992 - DNA, 25 bp, probe
taccagactttcttcaatccgagga

SEQ ID NO: 30993 - DNA, 25 bp, probe
tttaacaaccgctggtatcaaatgg

SEQ ID NO: 30994 - DNA, 25 bp, probe
actttcttcaatccgaggacctttg

SEQ ID NO: 30995 - DNA, 25 bp, probe
gtaccagactttcttcaatccgagg

SEQ ID NO: 30996 - DNA, 25 bp, probe
caccagtgagtaccagactttcttc

SEQ ID NO: 30997 - DNA, 25 bp, probe
tacgagcgaaacattgaaaagatat

SEQ ID NO: 30998 - DNA, 25 bp, probe
atctaccatgtcattgatgccaaca

SEQ ID NO: 30999 - DNA, 25 bp, probe
tctaccatgtcattgatgccaacag

SEQ ID NO: 31000 - DNA, 25 bp, probe
gatcatctaccatgtcattgatgcc

SEQ ID NO: 31001 - DNA, 25 bp, probe
caagttcagcatctctccagattcc

SEQ ID NO: 31002 - DNA, 25 bp, probe
ccaagttcagcatctctccagattc

SEQ ID NO: 31003 - DNA, 25 bp, probe
atcatctaccatgtcattgatgcca

SEQ ID NO: 31004 - DNA, 25 bp, probe
catctaccatgtcattgatgccaac

SEQ ID NO: 31005 - DNA, 25 bp, probe
tcatctaccatgtcattgatgccaa

SEQ ID NO: 31006 - DNA, 25 bp, probe
cgctgatcatctaccatgtcattga

SEQ ID NO: 31007 - DNA, 25 bp, probe
gctgatcatctaccatgtcattgat

SEQ ID NO: 31008 - DNA, 25 bp, probe
ctaccatgtcattgatgccaacagc

SEQ ID NO: 31009 - DNA, 25 bp, probe
ctgatcatctaccatgtcattgatg

SEQ ID NO: 31010 - DNA, 25 bp, probe
tgatcatctaccatgtcattgatgc

SEQ ID NO: 31011 - DNA, 25 bp, probe
gttactctgtggactactccaagtt

SEQ ID NO: 31012 - DNA, 25 bp, probe
ccgctgatcatctaccatgtcattg

SEQ ID NO: 31013 - DNA, 25 bp, probe
aagttcagcatctctccagattccc

SEQ ID NO: 31014 - DNA, 25 bp, probe
caagtttggcaacaccatcaaagtg

SEQ ID NO: 31015 - DNA, 25 bp, probe
ctactccaagtttggcaacaccatc

SEQ ID NO: 31016 - DNA, 25 bp, probe
ttactctgtggactactccaagttt

SEQ ID NO: 31017 - DNA, 25 bp, probe
cccaagttcagcatctctccagatt

SEQ ID NO: 31018 - DNA, 25 bp, probe
tactctgtggactactccaagtttg

SEQ ID NO: 31019 - DNA, 25 bp, probe
cgttactctgtggactactccaagt

SEQ ID NO: 31020 - DNA, 25 bp, probe
gttcagcatctctccagattccctg

SEQ ID NO: 31021 - DNA, 25 bp, probe
tactccaagtttggcaacaccatca

SEQ ID NO: 31022 - DNA, 25 bp, probe
actactccaagtttggcaacaccat

SEQ ID NO: 31023 - DNA, 25 bp, probe
agttcagcatctctccagattccct

SEQ ID NO: 31024 - DNA, 25 bp, probe
catctctccagattccctgtcctga

SEQ ID NO: 31025 - DNA, 25 bp, probe
tccaagtttggcaacaccatcaaag

SEQ ID NO: 31026 - DNA, 25 bp, probe
ctccaagtttggcaacaccatcaaa

SEQ ID NO: 31027 - DNA, 25 bp, probe
acgttactctgtggactactccaag

SEQ ID NO: 31028 - DNA, 25 bp, probe
gacgttactctgtggactactccaa

SEQ ID NO: 31029 - DNA, 25 bp, probe
ttcagcatctctccagattccctgt

SEQ ID NO: 31030 - DNA, 25 bp, probe
ccaagtttggcaacaccatcaaagt

SEQ ID NO: 31031 - DNA, 25 bp, probe
cccgctgatcatctaccatgtcatt

SEQ ID NO: 31032 - DNA, 25 bp, probe
actctgtggactactccaagtttgg

SEQ ID NO: 31033 - DNA, 25 bp, probe
ctcgagatcatcgtcatcctggaag

SEQ ID NO: 31034 - DNA, 25 bp, probe
ggacgttactctgtggactactcca

SEQ ID NO: 31035 - DNA, 25 bp, probe
ctgtggactactccaagtttggcaa

SEQ ID NO: 31036 - DNA, 25 bp, probe
ctctgtggactactccaagtttggc

SEQ ID NO: 31037 - DNA, 25 bp, probe
ctttgtgcttcatgtcctcttgatg

SEQ ID NO: 31038 - DNA, 25 bp, probe
ttgatgacattctgcccaagtaacc

SEQ ID NO: 31039 - DNA, 25 bp, probe
ctggtcttcatcctgtgcctctatg

SEQ ID NO: 31040 - DNA, 25 bp, probe
ctccatcttcagcctgtctgtgatt

SEQ ID NO: 31041 - DNA, 25 bp, probe
ggtcttcatcctgtgcctctatgtg

SEQ ID NO: 31042 - DNA, 25 bp, probe
ttgtgcttcatgtcctcttgatgac

SEQ ID NO: 31043 - DNA, 25 bp, probe
cctttgtgcttcatgtcctcttgat

SEQ ID NO: 31044 - DNA, 25 bp, probe
ctacatgtctctcttccaggtgaac

SEQ ID NO: 31045 - DNA, 25 bp, probe
tccatcttcagcctgtctgtgattg

SEQ ID NO: 31046 - DNA, 25 bp, probe
tggtcttcatcctgtgcctctatgt

SEQ ID NO: 31047 - DNA, 25 bp, probe
tttgtgcttcatgtcctcttgatga

SEQ ID NO: 31048 - DNA, 25 bp, probe
cttgatgacattctgcccaagtaac

SEQ ID NO: 31049 - DNA, 25 bp, probe
tcttgatgacattctgcccaagtaa

SEQ ID NO: 31050 - DNA, 25 bp, probe
tgatgacattctgcccaagtaaccc

SEQ ID NO: 31051 - DNA, 25 bp, probe
ctcttgatgacattctgcccaagta

SEQ ID NO: 31052 - DNA, 25 bp, probe
tacatgtctctcttccaggtgaacg

SEQ ID NO: 31053 - DNA, 25 bp, probe
gctacatgtctctcttccaggtgaa

SEQ ID NO: 31054 - DNA, 25 bp, probe
atgacatcatcgactccctgtttgt

SEQ ID NO: 31055 - DNA, 25 bp, probe
gtcctcttgatgacattctgcccaa

SEQ ID NO: 31056 - DNA, 25 bp, probe
catcttcagcctgtctgtgattgct

SEQ ID NO: 31057 - DNA, 25 bp, probe
ccctttgtgcttcatgtcctcttga

SEQ ID NO: 31058 - DNA, 25 bp, probe
catggtgatcttctcccatcatgtg

SEQ ID NO: 31059 - DNA, 25 bp, probe
gatgacatcatcgactccctgtttg

SEQ ID NO: 31060 - DNA, 25 bp, probe
tgctacatgtctctcttccaggtga

SEQ ID NO: 31061 - DNA, 25 bp, probe
tgtgcttcatgtcctcttgatgaca

SEQ ID NO: 31062 - DNA, 25 bp, probe
ctgctacatgtctctcttccaggtg

SEQ ID NO: 31063 - DNA, 25 bp, probe
tgccgtcattgaccccttcatatat

SEQ ID NO: 31064 - DNA, 25 bp, probe
atgccgtcattgaccccttcatata

SEQ ID NO: 31065 - DNA, 25 bp, probe
catcatcgactccctgtttgtcctc

SEQ ID NO: 31066 - DNA, 25 bp, probe
atcatcgactccctgtttgtcctct

SEQ ID NO: 31067 - DNA, 25 bp, probe
gacattctgcccaagtaacccctac

SEQ ID NO: 31068 - DNA, 25 bp, probe
cattgaccccttcatatatgccttc

SEQ ID NO: 31069 - DNA, 25 bp, probe
tcattgaccccttcatatatgcctt

SEQ ID NO: 31070 - DNA, 25 bp, probe
tcctcttgatgacattctgcccaag

SEQ ID NO: 31071 - DNA, 25 bp, probe
attgaccccttcatatatgccttcc

SEQ ID NO: 31072 - DNA, 25 bp, probe
gttgatcatgtgcaatgccgtcatt

SEQ ID NO: 31073 - DNA, 25 bp, probe
gtcattgaccccttcatatatgcct

SEQ ID NO: 31074 - DNA, 25 bp, probe
cctcttgatgacattctgcccaagt

SEQ ID NO: 31075 - DNA, 25 bp, probe
aatgccgtcattgaccccttcatat

SEQ ID NO: 31076 - DNA, 25 bp, probe
cattctgcccaagtaacccctactg

SEQ ID NO: 31077 - DNA, 25 bp, probe
atggtgatcttctcccatcatgtgc

SEQ ID NO: 31078 - DNA, 25 bp, probe
tgacatcatcgactccctgtttgtc

SEQ ID NO: 31079 - DNA, 25 bp, probe
gaacggcatgttgatcatgtgcaat

SEQ ID NO: 31080 - DNA, 25 bp, probe
cgtcattgaccccttcatatatgcc

SEQ ID NO: 31081 - DNA, 25 bp, probe
actatatcaacctcatcaagactgg

SEQ ID NO: 31082 - DNA, 25 bp, probe
ccactatatcaacctcatcaagact

SEQ ID NO: 31083 - DNA, 25 bp, probe
tccactatatcaacctcatcaagac

SEQ ID NO: 31084 - DNA, 25 bp, probe
ttccactatatcaacctcatcaaga

SEQ ID NO: 31085 - DNA, 25 bp, probe
tctactacaacagagattccgagaa

SEQ ID NO: 31086 - DNA, 25 bp, probe
ttctactacaacagagattccgaga

SEQ ID NO: 31087 - DNA, 25 bp, probe
cactatatcaacctcatcaagactg

SEQ ID NO: 31088 - DNA, 25 bp, probe
ctacaagcacaatggaacagaactc

SEQ ID NO: 31089 - DNA, 25 bp, probe
tacaagcacaatggaacagaactca

SEQ ID NO: 31090 - DNA, 25 bp, probe
tatatcaacctcatcaagactggtg

SEQ ID NO: 31091 - DNA, 25 bp, probe
ctactacaacagagattccgagaat

SEQ ID NO: 31092 - DNA, 25 bp, probe
ctatatcaacctcatcaagactggt

SEQ ID NO: 31093 - DNA, 25 bp, probe
tactacaacagagattccgagaatt

SEQ ID NO: 31094 - DNA, 25 bp, probe
ctgtttgattatgtcgtgaagtgta

SEQ ID NO: 31095 - DNA, 25 bp, probe
atatcaacctcatcaagactggtgt

SEQ ID NO: 31096 - DNA, 25 bp, probe
tgtttgattatgtcgtgaagtgtaa

SEQ ID NO: 31097 - DNA, 25 bp, probe
tttctactacaacagagattccgag

SEQ ID NO: 31098 - DNA, 25 bp, probe
ctttctactacaacagagattccga

SEQ ID NO: 31099 - DNA, 25 bp, probe
tctttctactacaacagagattccg

SEQ ID NO: 31100 - DNA, 25 bp, probe
cgtcttctctttctactacaacaga

SEQ ID NO: 31101 - DNA, 25 bp, probe
caagaagaggctgtttgattatgtc

SEQ ID NO: 31102 - DNA, 25 bp, probe
catcctacatctcaggttctaccag

SEQ ID NO: 31103 - DNA, 25 bp, probe
aagaagaggctgtttgattatgtcg

SEQ ID NO: 31104 - DNA, 25 bp, probe
ccgaaagttctacacagagtttgat

SEQ ID NO: 31105 - DNA, 25 bp, probe
atccgaaagttctacacagagtttg

SEQ ID NO: 31106 - DNA, 25 bp, probe
catccgaaagttctacacagagttt

SEQ ID NO: 31107 - DNA, 25 bp, probe
cttcatccgaaagttctacacagag

SEQ ID NO: 31108 - DNA, 25 bp, probe
gtttgattatgtcgtgaagtgtaac

SEQ ID NO: 31109 - DNA, 25 bp, probe
tatcaacctcatcaagactggtgtc

SEQ ID NO: 31110 - DNA, 25 bp, probe
tttccactatatcaacctcatcaag

SEQ ID NO: 31111 - DNA, 25 bp, probe
gaggacaaagagaataaagacttca

SEQ ID NO: 31112 - DNA, 25 bp, probe
tgaggacaaagagaataaagacttc

SEQ ID NO: 31113 - DNA, 25 bp, probe
ccaagaagaggctgtttgattatgt

SEQ ID NO: 31114 - DNA, 25 bp, probe
gaaagttctacacagagtttgatcg

SEQ ID NO: 31115 - DNA, 25 bp, probe
cgaaagttctacacagagtttgatc

SEQ ID NO: 31116 - DNA, 25 bp, probe
tcatccgaaagttctacacagagtt

SEQ ID NO: 31117 - DNA, 25 bp, probe
ttcatccgaaagttctacacagagt

SEQ ID NO: 31118 - DNA, 25 bp, probe
gctgtttgattatgtcgtgaagtgt

SEQ ID NO: 31119 - DNA, 25 bp, probe
aaagttctacacagagtttgatcgg

SEQ ID NO: 31120 - DNA, 25 bp, probe
tccgaaagttctacacagagtttga

SEQ ID NO: 31121 - DNA, 25 bp, probe
gaggctgtttgattatgtcgtgaag

SEQ ID NO: 31122 - DNA, 25 bp, probe
gaagaggctgtttgattatgtcgtg

SEQ ID NO: 31123 - DNA, 25 bp, probe
agaagaggctgtttgattatgtcgt

SEQ ID NO: 31124 - DNA, 25 bp, probe
aggacaaagagaataaagacttcat

SEQ ID NO: 31125 - DNA, 25 bp, probe
catcaccttcttcttcttcgtcatc

SEQ ID NO: 31126 - DNA, 25 bp, probe
cttcttcttcttcgtcatcgtcatc

SEQ ID NO: 31127 - DNA, 25 bp, probe
aacaagagcaagtgaaggaggatat

SEQ ID NO: 31128 - DNA, 25 bp, probe
acatcaccttcttcttcttcgtcat

SEQ ID NO: 31129 - DNA, 25 bp, probe
ggaagatgtaccaagagagatgttg

SEQ ID NO: 31130 - DNA, 25 bp, probe
acaagagcaagtgaaggaggatatg

SEQ ID NO: 31131 - DNA, 25 bp, probe
caacaagagcaagtgaaggaggata

SEQ ID NO: 31132 - DNA, 25 bp, probe
ttcttcttcttcgtcatcgtcatcc

SEQ ID NO: 31133 - DNA, 25 bp, probe
ccttcttcttcttcgtcatcgtcat

SEQ ID NO: 31134 - DNA, 25 bp, probe
atcaccttcttcttcttcgtcatcg

SEQ ID NO: 31135 - DNA, 25 bp, probe
ataaacaaggatgagacagaacaca

SEQ ID NO: 31136 - DNA, 25 bp, probe
tgataaacaaggatgagacagaaca

SEQ ID NO: 31137 - DNA, 25 bp, probe
gataaacaaggatgagacagaacac

SEQ ID NO: 31138 - DNA, 25 bp, probe
ttatgtctggaagatgtaccaagag

SEQ ID NO: 31139 - DNA, 25 bp, probe
cttatgtctggaagatgtaccaaga

SEQ ID NO: 31140 - DNA, 25 bp, probe
tatgtctggaagatgtaccaagaga

SEQ ID NO: 31141 - DNA, 25 bp, probe
cttcgacatcaccttcttcttcttc

SEQ ID NO: 31142 - DNA, 25 bp, probe
aagagcaagtgaaggaggatatgga

SEQ ID NO: 31143 - DNA, 25 bp, probe
caagagcaagtgaaggaggatatgg

SEQ ID NO: 31144 - DNA, 25 bp, probe
taaacaaggatgagacagaacacac

SEQ ID NO: 31145 - DNA, 25 bp, probe
tgattgtttccgtaagcagtatgag

SEQ ID NO: 31146 - DNA, 25 bp, probe
tggaagatgtaccaagagagatgtt

SEQ ID NO: 31147 - DNA, 25 bp, probe
tcttcgacatcaccttcttcttctt

SEQ ID NO: 31148 - DNA, 25 bp, probe
tctggaagatgtaccaagagagatg

SEQ ID NO: 31149 - DNA, 25 bp, probe
gtctggaagatgtaccaagagagat

SEQ ID NO: 31150 - DNA, 25 bp, probe
gtgattgtttccgtaagcagtatga

SEQ ID NO: 31151 - DNA, 25 bp, probe
aggagtcttatgtctggaagatgta

SEQ ID NO: 31152 - DNA, 25 bp, probe
ctggaagatgtaccaagagagatgt

SEQ ID NO: 31153 - DNA, 25 bp, probe
atgtctggaagatgtaccaagagag

SEQ ID NO: 31154 - DNA, 25 bp, probe
cttcttcttcgtcatcgtcatcctg

SEQ ID NO: 31155 - DNA, 25 bp, probe
gacatcaccttcttcttcttcgtca

SEQ ID NO: 31156 - DNA, 25 bp, probe
gtcttatgtctggaagatgtaccaa

SEQ ID NO: 31157 - DNA, 25 bp, probe
ttgataaacaaggatgagacagaac

SEQ ID NO: 31158 - DNA, 25 bp, probe
tcttatgtctggaagatgtaccaag

SEQ ID NO: 31159 - DNA, 25 bp, probe
gagtcttatgtctggaagatgtacc

SEQ ID NO: 31160 - DNA, 25 bp, probe
ggagtcttatgtctggaagatgtac

SEQ ID NO: 31161 - DNA, 25 bp, probe
gattgtttccgtaagcagtatgagg

SEQ ID NO: 31162 - DNA, 25 bp, probe
tcttcttcttcgtcatcgtcatcct

SEQ ID NO: 31163 - DNA, 25 bp, probe
agtcttatgtctggaagatgtacca

SEQ ID NO: 31164 - DNA, 25 bp, probe
gagcaagtgaaggaggatatggaga

SEQ ID NO: 31165 - DNA, 25 bp, probe
agagcaagtgaaggaggatatggag

SEQ ID NO: 31166 - DNA, 25 bp, probe
gatatggagaccaagtgcttcatct

SEQ ID NO: 31167 - DNA, 25 bp, probe
caccttcttcttcttcgtcatcgtc

SEQ ID NO: 31168 - DNA, 25 bp, probe
tcaggagtcttatgtctggaagatg

SEQ ID NO: 31169 - DNA, 25 bp, probe
ggtgtcagaataataagaggtgcta

SEQ ID NO: 31170 - DNA, 25 bp, probe
gcacatactacacattcaataagca

SEQ ID NO: 31171 - DNA, 25 bp, probe
agcacatactacacattcaataagc

SEQ ID NO: 31172 - DNA, 25 bp, probe
aaggtgtcagaataataagaggtgc

SEQ ID NO: 31173 - DNA, 25 bp, probe
tgtcagaataataagaggtgctact

SEQ ID NO: 31174 - DNA, 25 bp, probe
gtgtcagaataataagaggtgctac

SEQ ID NO: 31175 - DNA, 25 bp, probe
gaaggtgtcagaataataagaggtg

SEQ ID NO: 31176 - DNA, 25 bp, probe
aggtgtcagaataataagaggtgct

SEQ ID NO: 31177 - DNA, 25 bp, probe
agaataataagaggtgctactgact

SEQ ID NO: 31178 - DNA, 25 bp, probe
tcaagaagaagatggattggtgtaa

SEQ ID NO: 31179 - DNA, 25 bp, probe
ttaggtcaagaagaagatggattgg

SEQ ID NO: 31180 - DNA, 25 bp, probe
gtcaagaagaagatggattggtgta

SEQ ID NO: 31181 - DNA, 25 bp, probe
taggtcaagaagaagatggattggt

SEQ ID NO: 31182 - DNA, 25 bp, probe
tgaaggtgtcagaataataagaggt

SEQ ID NO: 31183 - DNA, 25 bp, probe
tacttattccagatgccttctccag

SEQ ID NO: 31184 - DNA, 25 bp, probe
gaataataagaggtgctactgactt

SEQ ID NO: 31185 - DNA, 25 bp, probe
atgaatacacgaggtatgaggtcta

SEQ ID NO: 31186 - DNA, 25 bp, probe
tatgaatacacgaggtatgaggtct

SEQ ID NO: 31187 - DNA, 25 bp, probe
ttatgaatacacgaggtatgaggtc

SEQ ID NO: 31188 - DNA, 25 bp, probe
cagaataataagaggtgctactgac

SEQ ID NO: 31189 - DNA, 25 bp, probe
gtcagaataataagaggtgctactg

SEQ ID NO: 31190 - DNA, 25 bp, probe
atgaaggtgtcagaataataagagg

SEQ ID NO: 31191 - DNA, 25 bp, probe
atgaggtctaggaacatacttcagc

SEQ ID NO: 31192 - DNA, 25 bp, probe
cacatactacacattcaataagcat

SEQ ID NO: 31193 - DNA, 25 bp, probe
gtgaggattgattacctagtagtca

SEQ ID NO: 31194 - DNA, 25 bp, probe
tgaatacacgaggtatgaggtctag

SEQ ID NO: 31195 - DNA, 25 bp, probe
ttaggtacttattccagatgccttc

SEQ ID NO: 31196 - DNA, 25 bp, probe
cttaggtacttattccagatgcctt

SEQ ID NO: 31197 - DNA, 25 bp, probe
gtacttattccagatgccttctcca

SEQ ID NO: 31198 - DNA, 25 bp, probe
taggtacttattccagatgccttct

SEQ ID NO: 31199 - DNA, 25 bp, probe
ctctgaatatgaacggtgagcattg

SEQ ID NO: 31200 - DNA, 25 bp, probe
cctagtcttcaagcagattggagaa

SEQ ID NO: 31201 - DNA, 25 bp, probe
tatgaggtctaggaacatacttcag

SEQ ID NO: 31202 - DNA, 25 bp, probe
ctgaatatgaacggtgagcattgtg

SEQ ID NO: 31203 - DNA, 25 bp, probe
tctgaatatgaacggtgagcattgt

SEQ ID NO: 31204 - DNA, 25 bp, probe
ggtgaggattgattacctagtagtc

SEQ ID NO: 31205 - DNA, 25 bp, probe
ccatcatagtacaggtaaggtgagg

SEQ ID NO: 31206 - DNA, 25 bp, probe
ggaatagtaagtggtgagaactact

SEQ ID NO: 31207 - DNA, 25 bp, probe
catactacacattcaataagcatca

SEQ ID NO: 31208 - DNA, 25 bp, probe
acatactacacattcaataagcatc

SEQ ID NO: 31209 - DNA, 25 bp, probe
aggtcaagaagaagatggattggtg

SEQ ID NO: 31210 - DNA, 25 bp, probe
attcatttcaaagggagagagagag

SEQ ID NO: 31211 - DNA, 25 bp, probe
gaatacacgaggtatgaggtctagg

SEQ ID NO: 31212 - DNA, 25 bp, probe
ggtttaggtcaagaagaagatggat

SEQ ID NO: 31213 - DNA, 25 bp, probe
attgatgtaactgtgtcaggattga

SEQ ID NO: 31214 - DNA, 25 bp, probe
ctgcttggttccacaatcatctatt

SEQ ID NO: 31215 - DNA, 25 bp, probe
ttgatgtaactgtgtcaggattgag

SEQ ID NO: 31216 - DNA, 25 bp, probe
tattgatgtaactgtgtcaggattg

SEQ ID NO: 31217 - DNA, 25 bp, probe
taactgtgtcaggattgaggatgaa

SEQ ID NO: 31218 - DNA, 25 bp, probe
atgtaactgtgtcaggattgaggat

SEQ ID NO: 31219 - DNA, 25 bp, probe
tctgcttggttccacaatcatctat

SEQ ID NO: 31220 - DNA, 25 bp, probe
tgtatattgatgtaactgtgtcagg

SEQ ID NO: 31221 - DNA, 25 bp, probe
gtatattgatgtaactgtgtcagga

SEQ ID NO: 31222 - DNA, 25 bp, probe
ttctgcttggttccacaatcatcta

SEQ ID NO: 31223 - DNA, 25 bp, probe
gtaactgtgtcaggattgaggatga

SEQ ID NO: 31224 - DNA, 25 bp, probe
gatgtaactgtgtcaggattgagga

SEQ ID NO: 31225 - DNA, 25 bp, probe
atattgatgtaactgtgtcaggatt

SEQ ID NO: 31226 - DNA, 25 bp, probe
ttggttccacaatcatctattgagt

SEQ ID NO: 31227 - DNA, 25 bp, probe
cttggttccacaatcatctattgag

SEQ ID NO: 31228 - DNA, 25 bp, probe
tgtaactgtgtcaggattgaggatg

SEQ ID NO: 31229 - DNA, 25 bp, probe
tgatgtaactgtgtcaggattgagg

SEQ ID NO: 31230 - DNA, 25 bp, probe
cattctgcttggttccacaatcatc

SEQ ID NO: 31231 - DNA, 25 bp, probe
ggttccacaatcatctattgagtgt

SEQ ID NO: 31232 - DNA, 25 bp, probe
tggttccacaatcatctattgagtg

SEQ ID NO: 31233 - DNA, 25 bp, probe
attctgcttggttccacaatcatct

SEQ ID NO: 31234 - DNA, 25 bp, probe
gcttggttccacaatcatctattga

SEQ ID NO: 31235 - DNA, 25 bp, probe
gttccacaatcatctattgagtgta

SEQ ID NO: 31236 - DNA, 25 bp, probe
gctttcagatccatcggtttatact

SEQ ID NO: 31237 - DNA, 25 bp, probe
atgctttcagatccatcggtttata

SEQ ID NO: 31238 - DNA, 25 bp, probe
tgctttcagatccatcggtttatac

SEQ ID NO: 31239 - DNA, 25 bp, probe
tgcttggttccacaatcatctattg

SEQ ID NO: 31240 - DNA, 25 bp, probe
aactgtgtcaggattgaggatgaac

SEQ ID NO: 31241 - DNA, 25 bp, probe
tatattgatgtaactgtgtcaggat

SEQ ID NO: 31242 - DNA, 25 bp, probe
ttccacaatcatctattgagtgtac

SEQ ID NO: 31243 - DNA, 25 bp, probe
ctgtgtcaggattgaggatgaactc

SEQ ID NO: 31244 - DNA, 25 bp, probe
ctttcagatccatcggtttatacta

SEQ ID NO: 31245 - DNA, 25 bp, probe
atgtatattgatgtaactgtgtcag

SEQ ID NO: 31246 - DNA, 25 bp, probe
actgtgtcaggattgaggatgaact

SEQ ID NO: 31247 - DNA, 25 bp, probe
aatgtatattgatgtaactgtgtca

SEQ ID NO: 31248 - DNA, 25 bp, probe
aaatccttgccttcaaacgaaatgg

SEQ ID NO: 31249 - DNA, 25 bp, probe
tcagatccatcggtttatactattt

SEQ ID NO: 31250 - DNA, 25 bp, probe
ttcagatccatcggtttatactatt

SEQ ID NO: 31251 - DNA, 25 bp, probe
tttcagatccatcggtttatactat

SEQ ID NO: 31252 - DNA, 25 bp, probe
ttcctatgacactcatcaggtaaac

SEQ ID NO: 31253 - DNA, 25 bp, probe
ctttcctatgacactcatcaggtaa

SEQ ID NO: 31254 - DNA, 25 bp, probe
aaattatctgatccttgtggcacac

SEQ ID NO: 31255 - DNA, 25 bp, probe
tttcctatgacactcatcaggtaaa

SEQ ID NO: 31256 - DNA, 25 bp, probe
cctatgacactcatcaggtaaactg

SEQ ID NO: 31257 - DNA, 25 bp, probe
ttgtgatgaggcagaggaagatatt

SEQ ID NO: 31258 - DNA, 25 bp, probe
aatcctgaccaatccaactctgaat

SEQ ID NO: 31259 - DNA, 25 bp, probe
atcctgaccaatccaactctgaatt

SEQ ID NO: 31260 - DNA, 25 bp, probe
agactcaatgagctgttatgttgta

SEQ ID NO: 31261 - DNA, 25 bp, probe
ataaatcctgaccaatccaactctg

SEQ ID NO: 31262 - DNA, 25 bp, probe
cataaatcctgaccaatccaactct

SEQ ID NO: 31263 - DNA, 25 bp, probe
gactcaatgagctgttatgttgtaa

SEQ ID NO: 31264 - DNA, 25 bp, probe
aagactcaatgagctgttatgttgt

SEQ ID NO: 31265 - DNA, 25 bp, probe
tgttcctgtcaatcaatggtttatt

SEQ ID NO: 31266 - DNA, 25 bp, probe
tagaacctggagaactagaacctgg

SEQ ID NO: 31267 - DNA, 25 bp, probe
gcagaggaagatatttctaatcggt

SEQ ID NO: 31268 - DNA, 25 bp, probe
aggcagaggaagatatttctaatcg

SEQ ID NO: 31269 - DNA, 25 bp, probe
gatgaggcagaggaagatatttcta

SEQ ID NO: 31270 - DNA, 25 bp, probe
ctctcctctgcctcagtaagtatct

SEQ ID NO: 31271 - DNA, 25 bp, probe
ggcagaggaagatatttctaatcgg

SEQ ID NO: 31272 - DNA, 25 bp, probe
gtgatgaggcagaggaagatatttc

SEQ ID NO: 31273 - DNA, 25 bp, probe
taaatcctgaccaatccaactctga

SEQ ID NO: 31274 - DNA, 25 bp, probe
ccataaatcctgaccaatccaactc

SEQ ID NO: 31275 - DNA, 25 bp, probe
tagaacctgtagagctagaacatgg

SEQ ID NO: 31276 - DNA, 25 bp, probe
gatatttctaatcggtcttgcccag

SEQ ID NO: 31277 - DNA, 25 bp, probe
atggtgtagatgccctgataaagaa

SEQ ID NO: 31278 - DNA, 25 bp, probe
ctagaacctggagaactagaacctg

SEQ ID NO: 31279 - DNA, 25 bp, probe
tgaggcagaggaagatatttctaat

SEQ ID NO: 31280 - DNA, 25 bp, probe
atgaggcagaggaagatatttctaa

SEQ ID NO: 31281 - DNA, 25 bp, probe
tgatgaggcagaggaagatatttct

SEQ ID NO: 31282 - DNA, 25 bp, probe
atttgtgatgaggcagaggaagata

SEQ ID NO: 31283 - DNA, 25 bp, probe
tgtgatgaggcagaggaagatattt

SEQ ID NO: 31284 - DNA, 25 bp, probe
tttgtgatgaggcagaggaagatat

SEQ ID NO: 31285 - DNA, 25 bp, probe
ttgttcctgtcaatcaatggtttat

SEQ ID NO: 31286 - DNA, 25 bp, probe
tattagaatgaagtcaaactgtgcc

SEQ ID NO: 31287 - DNA, 25 bp, probe
attagaatgaagtcaaactgtgcca

SEQ ID NO: 31288 - DNA, 25 bp, probe
tctcctctgcctcagtaagtatctg

SEQ ID NO: 31289 - DNA, 25 bp, probe
actctcctctgcctcagtaagtatc

SEQ ID NO: 31290 - DNA, 25 bp, probe
agaggaagatatttctaatcggtct

SEQ ID NO: 31291 - DNA, 25 bp, probe
cagaggaagatatttctaatcggtc

SEQ ID NO: 31292 - DNA, 25 bp, probe
gaggcagaggaagatatttctaatc

SEQ ID NO: 31293 - DNA, 25 bp, probe
tgataaagaacatctgtcctgtgaa

SEQ ID NO: 31294 - DNA, 25 bp, probe
ttgtaaacaggaagcatttcacatc

SEQ ID NO: 31295 - DNA, 25 bp, probe
taaagaacatctgtcctgtgaaaga

SEQ ID NO: 31296 - DNA, 25 bp, probe
ctgataaagaacatctgtcctgtga

SEQ ID NO: 31297 - DNA, 25 bp, probe
gttgtaaacaggaagcatttcacat

SEQ ID NO: 31298 - DNA, 25 bp, probe
agagcataataaatggatgaggttt

SEQ ID NO: 31299 - DNA, 25 bp, probe
atatttctaatcggtcttgcccaga

SEQ ID NO: 31300 - DNA, 25 bp, probe
agatatttctaatcggtcttgccca

SEQ ID NO: 31301 - DNA, 25 bp, probe
cttcttcgtctgtcaatgtctcttc

SEQ ID NO: 31302 - DNA, 25 bp, probe
acttcttcgtctgtcaatgtctctt

SEQ ID NO: 31303 - DNA, 25 bp, probe
gttacctcctacacttcttcgtctg

SEQ ID NO: 31304 - DNA, 25 bp, probe
gaagtatcttggttgtgacagagtc

SEQ ID NO: 31305 - DNA, 25 bp, probe
ctacacttcttcgtctgtcaatgtc

SEQ ID NO: 31306 - DNA, 25 bp, probe
ttaactcctgctagaacagtctctt

SEQ ID NO: 31307 - DNA, 25 bp, probe
ttcttcgtctgtcaatgtctcttcc

SEQ ID NO: 31308 - DNA, 25 bp, probe
cacttcttcgtctgtcaatgtctct

SEQ ID NO: 31309 - DNA, 25 bp, probe
tacacttcttcgtctgtcaatgtct

SEQ ID NO: 31310 - DNA, 25 bp, probe
ggaagtatcttggttgtgacagagt

SEQ ID NO: 31311 - DNA, 25 bp, probe
tggaagtatcttggttgtgacagag

SEQ ID NO: 31312 - DNA, 25 bp, probe
taactcctgctagaacagtctcttg

SEQ ID NO: 31313 - DNA, 25 bp, probe
cttcgtctgtcaatgtctcttccaa

SEQ ID NO: 31314 - DNA, 25 bp, probe
gtggaagtatcttggttgtgacaga

SEQ ID NO: 31315 - DNA, 25 bp, probe
ctcctacacttcttcgtctgtcaat

SEQ ID NO: 31316 - DNA, 25 bp, probe
ctcagaaggaaagaataaccaacac

SEQ ID NO: 31317 - DNA, 25 bp, probe
gtcaatgtctcttccaacctctgaa

SEQ ID NO: 31318 - DNA, 25 bp, probe
tcagaaggaaagaataaccaacacc

SEQ ID NO: 31319 - DNA, 25 bp, probe
tcctacacttcttcgtctgtcaatg

SEQ ID NO: 31320 - DNA, 25 bp, probe
ccgaatctgacattagatgagagaa

SEQ ID NO: 31321 - DNA, 25 bp, probe
ctgtcaatgtctcttccaacctctg

SEQ ID NO: 31322 - DNA, 25 bp, probe
gtctgtcaatgtctcttccaacctc

SEQ ID NO: 31323 - DNA, 25 bp, probe
ttcgtctgtcaatgtctcttccaac

SEQ ID NO: 31324 - DNA, 25 bp, probe
atctgacattagatgagagaacagg

SEQ ID NO: 31325 - DNA, 25 bp, probe
tctcagaaggaaagaataaccaaca

SEQ ID NO: 31326 - DNA, 25 bp, probe
tctgtcaatgtctcttccaacctct

SEQ ID NO: 31327 - DNA, 25 bp, probe
cgaatctgacattagatgagagaac

SEQ ID NO: 31328 - DNA, 25 bp, probe
cctacacttcttcgtctgtcaatgt

SEQ ID NO: 31329 - DNA, 25 bp, probe
tgtggaagtatcttggttgtgacag

SEQ ID NO: 31330 - DNA, 25 bp, probe
ctgtggaagtatcttggttgtgaca

SEQ ID NO: 31331 - DNA, 25 bp, probe
ggatgaacaaagagaaagagggttt

SEQ ID NO: 31332 - DNA, 25 bp, probe
ttacctcctacacttcttcgtctgt

SEQ ID NO: 31333 - DNA, 25 bp, probe
tgttacctcctacacttcttcgtct

SEQ ID NO: 31334 - DNA, 25 bp, probe
cgtcacatctttaacccactaactg

SEQ ID NO: 31335 - DNA, 25 bp, probe
cagaaggaaagaataaccaacaccc

SEQ ID NO: 31336 - DNA, 25 bp, probe
acacttcttcgtctgtcaatgtctc

SEQ ID NO: 31337 - DNA, 25 bp, probe
cctgtggaagtatcttggttgtgac

SEQ ID NO: 31338 - DNA, 25 bp, probe
gtggtggatgaacaaagagaaagag

SEQ ID NO: 31339 - DNA, 25 bp, probe
tagaacagtctcttgaggcacagaa

SEQ ID NO: 31340 - DNA, 25 bp, probe
tcttcgtctgtcaatgtctcttcca

SEQ ID NO: 31341 - DNA, 25 bp, probe
attagatgagagaacagggctgaag

SEQ ID NO: 31342 - DNA, 25 bp, probe
gaatctgacattagatgagagaaca

SEQ ID NO: 31343 - DNA, 25 bp, probe
tacctcctacacttcttcgtctgtc

SEQ ID NO: 31344 - DNA, 25 bp, probe
aatctgacattagatgagagaacag

SEQ ID NO: 31345 - DNA, 25 bp, probe
ctcattaccttgtgctaatcctctt

SEQ ID NO: 31346 - DNA, 25 bp, probe
ctccattgttcagatgcttcttagg

SEQ ID NO: 31347 - DNA, 25 bp, probe
aatatcatgctccattgttcagatg

SEQ ID NO: 31348 - DNA, 25 bp, probe
cctcattaccttgtgctaatcctct

SEQ ID NO: 31349 - DNA, 25 bp, probe
gctccattgttcagatgcttcttag

SEQ ID NO: 31350 - DNA, 25 bp, probe
atatcatgctccattgttcagatgc

SEQ ID NO: 31351 - DNA, 25 bp, probe
actcaatctctgattctgtcaatgt

SEQ ID NO: 31352 - DNA, 25 bp, probe
ttcactcaatctctgattctgtcaa

SEQ ID NO: 31353 - DNA, 25 bp, probe
tcttcactcaatctctgattctgtc

SEQ ID NO: 31354 - DNA, 25 bp, probe
tcaatctctgattctgtcaatgtct

SEQ ID NO: 31355 - DNA, 25 bp, probe
cactcaatctctgattctgtcaatg

SEQ ID NO: 31356 - DNA, 25 bp, probe
tcactcaatctctgattctgtcaat

SEQ ID NO: 31357 - DNA, 25 bp, probe
cttcactcaatctctgattctgtca

SEQ ID NO: 31358 - DNA, 25 bp, probe
ttcttcactcaatctctgattctgt

SEQ ID NO: 31359 - DNA, 25 bp, probe
ctcaatctctgattctgtcaatgtc

SEQ ID NO: 31360 - DNA, 25 bp, probe
tgctccattgttcagatgcttctta

SEQ ID NO: 31361 - DNA, 25 bp, probe
aatctctgattctgtcaatgtcttg

SEQ ID NO: 31362 - DNA, 25 bp, probe
caatctctgattctgtcaatgtctt

SEQ ID NO: 31363 - DNA, 25 bp, probe
ctggaggtgaagaagagaatgtgac

SEQ ID NO: 31364 - DNA, 25 bp, probe
gaggtgaagaagagaatgtgacagg

SEQ ID NO: 31365 - DNA, 25 bp, probe
ggaggtgaagaagagaatgtgacag

SEQ ID NO: 31366 - DNA, 25 bp, probe
tcattaccttgtgctaatcctcttt

SEQ ID NO: 31367 - DNA, 25 bp, probe
tatcatgctccattgttcagatgct

SEQ ID NO: 31368 - DNA, 25 bp, probe
atgcctcattaccttgtgctaatcc

SEQ ID NO: 31369 - DNA, 25 bp, probe
tccattgttcagatgcttcttaggc

SEQ ID NO: 31370 - DNA, 25 bp, probe
atgctccattgttcagatgcttctt

SEQ ID NO: 31371 - DNA, 25 bp, probe
ttattacagtttatctatggcaccc

SEQ ID NO: 31372 - DNA, 25 bp, probe
aatgcctcattaccttgtgctaatc

SEQ ID NO: 31373 - DNA, 25 bp, probe
gcctcattaccttgtgctaatcctc

SEQ ID NO: 31374 - DNA, 25 bp, probe
tggaggtgaagaagagaatgtgaca

SEQ ID NO: 31375 - DNA, 25 bp, probe
gaaatatcatgctccattgttcaga

SEQ ID NO: 31376 - DNA, 25 bp, probe
tctctgattctgtcaatgtcttgaa

SEQ ID NO: 31377 - DNA, 25 bp, probe
atctctgattctgtcaatgtcttga

SEQ ID NO: 31378 - DNA, 25 bp, probe
atcatgctccattgttcagatgctt

SEQ ID NO: 31379 - DNA, 25 bp, probe
aaatatcatgctccattgttcagat

SEQ ID NO: 31380 - DNA, 25 bp, probe
gcaccttacatttgaaatctatgaa

SEQ ID NO: 31381 - DNA, 25 bp, probe
tgcctcattaccttgtgctaatcct

SEQ ID NO: 31382 - DNA, 25 bp, probe
tattacagtttatctatggcaccca

SEQ ID NO: 31383 - DNA, 25 bp, probe
gctttattacagtttatctatggca

SEQ ID NO: 31384 - DNA, 25 bp, probe
tgctttattacagtttatctatggc

SEQ ID NO: 31385 - DNA, 25 bp, probe
tttcttcactcaatctctgattctg

SEQ ID NO: 31386 - DNA, 25 bp, probe
ccatgcaccttacatttgaaatcta

SEQ ID NO: 31387 - DNA, 25 bp, probe
tcatgctccattgttcagatgcttc

SEQ ID NO: 31388 - DNA, 25 bp, probe
catgctccattgttcagatgcttct

SEQ ID NO: 31389 - DNA, 25 bp, probe
tgatggagaggagaacactagacat

SEQ ID NO: 31390 - DNA, 25 bp, probe
gagtctgcttgtcttagatgttggt

SEQ ID NO: 31391 - DNA, 25 bp, probe
gatggagaggagaacactagacatg

SEQ ID NO: 31392 - DNA, 25 bp, probe
aagggtaggttcagtaatcatttct

SEQ ID NO: 31393 - DNA, 25 bp, probe
agtctgcttgtcttagatgttggtg

SEQ ID NO: 31394 - DNA, 25 bp, probe
cagaaagggtaggttcagtaatcat

SEQ ID NO: 31395 - DNA, 25 bp, probe
ctgatggagaggagaacactagaca

SEQ ID NO: 31396 - DNA, 25 bp, probe
agaaagggtaggttcagtaatcatt

SEQ ID NO: 31397 - DNA, 25 bp, probe
aaagggtaggttcagtaatcatttc

SEQ ID NO: 31398 - DNA, 25 bp, probe
gaaagggtaggttcagtaatcattt

SEQ ID NO: 31399 - DNA, 25 bp, probe
ggagtctgcttgtcttagatgttgg

SEQ ID NO: 31400 - DNA, 25 bp, probe
agggtaggttcagtaatcatttctg

SEQ ID NO: 31401 - DNA, 25 bp, probe
tgtctgtaaggactcagtgttgact

SEQ ID NO: 31402 - DNA, 25 bp, probe
gtgtctgtaaggactcagtgttgac

SEQ ID NO: 31403 - DNA, 25 bp, probe
agtgtctgtaaggactcagtgttga

SEQ ID NO: 31404 - DNA, 25 bp, probe
gcagaaagggtaggttcagtaatca

SEQ ID NO: 31405 - DNA, 25 bp, probe
gtctgcttgtcttagatgttggtgg

SEQ ID NO: 31406 - DNA, 25 bp, probe
gaccttctgaacatgagtgtcaact

SEQ ID NO: 31407 - DNA, 25 bp, probe
gatggaaggagagaggttgaggatg

SEQ ID NO: 31408 - DNA, 25 bp, probe
ctgcttgtcttagatgttggtggtg

SEQ ID NO: 31409 - DNA, 25 bp, probe
tctgcttgtcttagatgttggtggt

SEQ ID NO: 31410 - DNA, 25 bp, probe
cctgatggagaggagaacactagac

SEQ ID NO: 31411 - DNA, 25 bp, probe
ggcagaaagggtaggttcagtaatc

SEQ ID NO: 31412 - DNA, 25 bp, probe
atttctgatgatttgctggagtgct

SEQ ID NO: 31413 - DNA, 25 bp, probe
gagaggagaacactagacatgccaa

SEQ ID NO: 31414 - DNA, 25 bp, probe
atggagaggagaacactagacatgc

SEQ ID NO: 31415 - DNA, 25 bp, probe
catttctgatgatttgctggagtgc

SEQ ID NO: 31416 - DNA, 25 bp, probe
ttgctgtcatgtgaatccctcaata

SEQ ID NO: 31417 - DNA, 25 bp, probe
aggcagaaagggtaggttcagtaat

SEQ ID NO: 31418 - DNA, 25 bp, probe
gggagtctgcttgtcttagatgttg

SEQ ID NO: 31419 - DNA, 25 bp, probe
ggttgaccttctgaacatgagtgtc

SEQ ID NO: 31420 - DNA, 25 bp, probe
gtctaggactttagggatctgggat

SEQ ID NO: 31421 - DNA, 25 bp, probe
gaggagaacactagacatgccaact

SEQ ID NO: 31422 - DNA, 25 bp, probe
agaggagaacactagacatgccaac

SEQ ID NO: 31423 - DNA, 25 bp, probe
tgctgtcatgtgaatccctcaatac

SEQ ID NO: 31424 - DNA, 25 bp, probe
ctgtcatgtgaatccctcaataccc

SEQ ID NO: 31425 - DNA, 25 bp, probe
tttctgatgatttgctggagtgctg

SEQ ID NO: 31426 - DNA, 25 bp, probe
aggagaacactagacatgccaactc

SEQ ID NO: 31427 - DNA, 25 bp, probe
tcatttctgatgatttgctggagtg

SEQ ID NO: 31428 - DNA, 25 bp, probe
cttgtcttagatgttggtggtgcag

SEQ ID NO: 31429 - DNA, 25 bp, probe
gaggcagaaagggtaggttcagtaa

SEQ ID NO: 31430 - DNA, 25 bp, probe
ctggagtgtaattacctgtcatctg

SEQ ID NO: 31431 - DNA, 25 bp, probe
ggatggaaggagagaggttgaggat

SEQ ID NO: 31432 - DNA, 25 bp, probe
cttgctgtcatgtgaatccctcaat

SEQ ID NO: 31433 - DNA, 25 bp, probe
ctacacatcatcaactgcttcactt

SEQ ID NO: 31434 - DNA, 25 bp, probe
ttgtctaactgcctttccttctaaa

SEQ ID NO: 31435 - DNA, 25 bp, probe
cctacacatcatcaactgcttcact

SEQ ID NO: 31436 - DNA, 25 bp, probe
cttgtctaactgcctttccttctaa

SEQ ID NO: 31437 - DNA, 25 bp, probe
atctttatctttctggttggcttga

SEQ ID NO: 31438 - DNA, 25 bp, probe
tttattacctttcactctctggctg

SEQ ID NO: 31439 - DNA, 25 bp, probe
atcatcaactgcttcactttcttct

SEQ ID NO: 31440 - DNA, 25 bp, probe
catcatcaactgcttcactttcttc

SEQ ID NO: 31441 - DNA, 25 bp, probe
tacacatcatcaactgcttcacttt

SEQ ID NO: 31442 - DNA, 25 bp, probe
acatcatcaactgcttcactttctt

SEQ ID NO: 31443 - DNA, 25 bp, probe
tctttatctttctggttggcttgac

SEQ ID NO: 31444 - DNA, 25 bp, probe
tcatcaactgcttcactttcttctg

SEQ ID NO: 31445 - DNA, 25 bp, probe
atcaaggatagggagttgtaacaga

SEQ ID NO: 31446 - DNA, 25 bp, probe
gatctttatctttctggttggcttg

SEQ ID NO: 31447 - DNA, 25 bp, probe
cacatcatcaactgcttcactttct

SEQ ID NO: 31448 - DNA, 25 bp, probe
tcaaggatagggagttgtaacagag

SEQ ID NO: 31449 - DNA, 25 bp, probe
ccttgtctaactgcctttccttcta

SEQ ID NO: 31450 - DNA, 25 bp, probe
gatcaaggatagggagttgtaacag

SEQ ID NO: 31451 - DNA, 25 bp, probe
acacatcatcaactgcttcactttc

SEQ ID NO: 31452 - DNA, 25 bp, probe
aaatgtaagtgtgaggaaacccttt

SEQ ID NO: 31453 - DNA, 25 bp, probe
gagtgtcctgatgattcatggagtt

SEQ ID NO: 31454 - DNA, 25 bp, probe
ggatcaaggatagggagttgtaaca

SEQ ID NO: 31455 - DNA, 25 bp, probe
ttattacctttcactctctggctgc

SEQ ID NO: 31456 - DNA, 25 bp, probe
gatagggagttgtaacagagcagtg

SEQ ID NO: 31457 - DNA, 25 bp, probe
catcaactgcttcactttcttctgc

SEQ ID NO: 31458 - DNA, 25 bp, probe
gggatcaaggatagggagttgtaac

SEQ ID NO: 31459 - DNA, 25 bp, probe
caaggatagggagttgtaacagagc

SEQ ID NO: 31460 - DNA, 25 bp, probe
tgtctaactgcctttccttctaaag

SEQ ID NO: 31461 - DNA, 25 bp, probe
aaggatagggagttgtaacagagca

SEQ ID NO: 31462 - DNA, 25 bp, probe
tgggatcaaggatagggagttgtaa

SEQ ID NO: 31463 - DNA, 25 bp, probe
tattacctttcactctctggctgct

SEQ ID NO: 31464 - DNA, 25 bp, probe
gttcctactttggactgagagaagg

SEQ ID NO: 31465 - DNA, 25 bp, probe
ggttcctactttggactgagagaag

SEQ ID NO: 31466 - DNA, 25 bp, probe
ctttatctttctggttggcttgacc

SEQ ID NO: 31467 - DNA, 25 bp, probe
ttttattacctttcactctctggct

SEQ ID NO: 31468 - DNA, 25 bp, probe
aggatagggagttgtaacagagcag

SEQ ID NO: 31469 - DNA, 25 bp, probe
ctgggatcaaggatagggagttgta

SEQ ID NO: 31470 - DNA, 25 bp, probe
gtgtcctgatgattcatggagtttg

SEQ ID NO: 31471 - DNA, 25 bp, probe
agtgtcctgatgattcatggagttt

SEQ ID NO: 31472 - DNA, 25 bp, probe
attttattacctttcactctctggc

SEQ ID NO: 31473 - DNA, 25 bp, probe
ggatagggagttgtaacagagcagt

SEQ ID NO: 31474 - DNA, 25 bp, probe
ccctacacatcatcaactgcttcac

SEQ ID NO: 31475 - DNA, 25 bp, probe
atcaactgcttcactttcttctgcc

SEQ ID NO: 31476 - DNA, 25 bp, probe
ggagtgtcctgatgattcatggagt

SEQ ID NO: 31477 - DNA, 25 bp, probe
atatgtatgtgtcagtagtaggctc

SEQ ID NO: 31478 - DNA, 25 bp, probe
tatgtatgtgtcagtagtaggctcc

SEQ ID NO: 31479 - DNA, 25 bp, probe
aatatgtatgtgtcagtagtaggct

SEQ ID NO: 31480 - DNA, 25 bp, probe
gcttgaatggattctaacagactct

SEQ ID NO: 31481 - DNA, 25 bp, probe
aattatctccaggtatcttctctgc

SEQ ID NO: 31482 - DNA, 25 bp, probe
ctgcttataatgctggtgatctaca

SEQ ID NO: 31483 - DNA, 25 bp, probe
actgcttataatgctggtgatctac

SEQ ID NO: 31484 - DNA, 25 bp, probe
cttgaatggattctaacagactctt

SEQ ID NO: 31485 - DNA, 25 bp, probe
tgcttataatgctggtgatctacat

SEQ ID NO: 31486 - DNA, 25 bp, probe
gtatgtgtcagtagtaggctccaag

SEQ ID NO: 31487 - DNA, 25 bp, probe
attatctccaggtatcttctctgcc

SEQ ID NO: 31488 - DNA, 25 bp, probe
atgtatgtgtcagtagtaggctcca

SEQ ID NO: 31489 - DNA, 25 bp, probe
taatatgtatgtgtcagtagtaggc

SEQ ID NO: 31490 - DNA, 25 bp, probe
aacagcttgaatggattctaacaga

SEQ ID NO: 31491 - DNA, 25 bp, probe
agcttgaatggattctaacagactc

SEQ ID NO: 31492 - DNA, 25 bp, probe
tgtatgtgtcagtagtaggctccaa

SEQ ID NO: 31493 - DNA, 25 bp, probe
caacagcttgaatggattctaacag

SEQ ID NO: 31494 - DNA, 25 bp, probe
cagcttgaatggattctaacagact

SEQ ID NO: 31495 - DNA, 25 bp, probe
acagcttgaatggattctaacagac

SEQ ID NO: 31496 - DNA, 25 bp, probe
tacaaatccacaagaaacaaagagg

SEQ ID NO: 31497 - DNA, 25 bp, probe
cattcttctgtcacatgccaattca

SEQ ID NO: 31498 - DNA, 25 bp, probe
cactgcttataatgctggtgatcta

SEQ ID NO: 31499 - DNA, 25 bp, probe
tatgtgtcagtagtaggctccaagg

SEQ ID NO: 31500 - DNA, 25 bp, probe
tatctccaggtatcttctctgccaa

SEQ ID NO: 31501 - DNA, 25 bp, probe
ttatctccaggtatcttctctgcca

SEQ ID NO: 31502 - DNA, 25 bp, probe
attcttctgtcacatgccaattcag

SEQ ID NO: 31503 - DNA, 25 bp, probe
atttcaatttctttgggtgtgttct

SEQ ID NO: 31504 - DNA, 25 bp, probe
agaagatacaaatccacaagaaaca

SEQ ID NO: 31505 - DNA, 25 bp, probe
tttcaatttctttgggtgtgttctg

SEQ ID NO: 31506 - DNA, 25 bp, probe
gtaggctccaaggattgacaaatat

SEQ ID NO: 31507 - DNA, 25 bp, probe
ccattcttctgtcacatgccaattc

SEQ ID NO: 31508 - DNA, 25 bp, probe
agtagtaggctccaaggattgacaa

SEQ ID NO: 31509 - DNA, 25 bp, probe
taggctccaaggattgacaaatata

SEQ ID NO: 31510 - DNA, 25 bp, probe
gagaagatacaaatccacaagaaac

SEQ ID NO: 31511 - DNA, 25 bp, probe
tcacatgccaattcagttgtcaatc

SEQ ID NO: 31512 - DNA, 25 bp, probe
atacaaatccacaagaaacaaagag

SEQ ID NO: 31513 - DNA, 25 bp, probe
aggctccaaggattgacaaatatat

SEQ ID NO: 31514 - DNA, 25 bp, probe
gatacaaatccacaagaaacaaaga

SEQ ID NO: 31515 - DNA, 25 bp, probe
agatacaaatccacaagaaacaaag

SEQ ID NO: 31516 - DNA, 25 bp, probe
gaagatacaaatccacaagaaacaa

SEQ ID NO: 31517 - DNA, 25 bp, probe
gcttataatgctggtgatctacatt

SEQ ID NO: 31518 - DNA, 25 bp, probe
tatttcaatttctttgggtgtgttc

SEQ ID NO: 31519 - DNA, 25 bp, probe
agtaggctccaaggattgacaaata

SEQ ID NO: 31520 - DNA, 25 bp, probe
tagtaggctccaaggattgacaaat

SEQ ID NO: 31521 - DNA, 25 bp, probe
ttatgacttgcctactgcttatctt

SEQ ID NO: 31522 - DNA, 25 bp, probe
tacatccttgattacttccactgag

SEQ ID NO: 31523 - DNA, 25 bp, probe
ttacatccttgattacttccactga

SEQ ID NO: 31524 - DNA, 25 bp, probe
cactactctcttcctccacttcatt

SEQ ID NO: 31525 - DNA, 25 bp, probe
atagaagaataagtcatggagcctg

SEQ ID NO: 31526 - DNA, 25 bp, probe
caatagaagaataagtcatggagcc

SEQ ID NO: 31527 - DNA, 25 bp, probe
aatagaagaataagtcatggagcct

SEQ ID NO: 31528 - DNA, 25 bp, probe
ttggacacaagcattgagaagaatt

SEQ ID NO: 31529 - DNA, 25 bp, probe
tagaagaataagtcatggagcctga

SEQ ID NO: 31530 - DNA, 25 bp, probe
ctcagtctgaacttatctaactcca

SEQ ID NO: 31531 - DNA, 25 bp, probe
actcagtctgaacttatctaactcc

SEQ ID NO: 31532 - DNA, 25 bp, probe
gaagaataagtcatggagcctgaag

SEQ ID NO: 31533 - DNA, 25 bp, probe
tcagtctgaacttatctaactccaa

SEQ ID NO: 31534 - DNA, 25 bp, probe
agaagaataagtcatggagcctgaa

SEQ ID NO: 31535 - DNA, 25 bp, probe
atgaaccctatcgtctatgcctata

SEQ ID NO: 31536 - DNA, 25 bp, probe
atgacttgcctactgcttatcttta

SEQ ID NO: 31537 - DNA, 25 bp, probe
tatgacttgcctactgcttatcttt

SEQ ID NO: 31538 - DNA, 25 bp, probe
tttatgacttgcctactgcttatct

SEQ ID NO: 31539 - DNA, 25 bp, probe
ccaccttctatttcattgtctctct

SEQ ID NO: 31540 - DNA, 25 bp, probe
accaccttctatttcattgtctctc

SEQ ID NO: 31541 - DNA, 25 bp, probe
tgaaccctatcgtctatgcctataa

SEQ ID NO: 31542 - DNA, 25 bp, probe
gaaccctatcgtctatgcctataaa

SEQ ID NO: 31543 - DNA, 25 bp, probe
tttacatcattcggaacaaactcag

SEQ ID NO: 31544 - DNA, 25 bp, probe
caccaccttctatttcattgtctct

SEQ ID NO: 31545 - DNA, 25 bp, probe
tgacttgcctactgcttatctttac

SEQ ID NO: 31546 - DNA, 25 bp, probe
tctatcatcaactgcatcatctact

SEQ ID NO: 31547 - DNA, 25 bp, probe
actactctcttcctccacttcattt

SEQ ID NO: 31548 - DNA, 25 bp, probe
tgtcctttctctctaattcagtgtt

SEQ ID NO: 31549 - DNA, 25 bp, probe
ttgtcctttctctctaattcagtgt

SEQ ID NO: 31550 - DNA, 25 bp, probe
ctacatggtatacttcagcttcctc

SEQ ID NO: 31551 - DNA, 25 bp, probe
ttacatcattcggaacaaactcagt

SEQ ID NO: 31552 - DNA, 25 bp, probe
gactacatggtatacttcagcttcc

SEQ ID NO: 31553 - DNA, 25 bp, probe
ggactacatggtatacttcagcttc

SEQ ID NO: 31554 - DNA, 25 bp, probe
tcctttgtcctttctctctaattca

SEQ ID NO: 31555 - DNA, 25 bp, probe
ccactactctcttcctccacttcat

SEQ ID NO: 31556 - DNA, 25 bp, probe
atccttgattacttccactgaggtg

SEQ ID NO: 31557 - DNA, 25 bp, probe
catccttgattacttccactgaggt

SEQ ID NO: 31558 - DNA, 25 bp, probe
acatccttgattacttccactgagg

SEQ ID NO: 31559 - DNA, 25 bp, probe
tacatggtatacttcagcttcctca

SEQ ID NO: 31560 - DNA, 25 bp, probe
actacatggtatacttcagcttcct

SEQ ID NO: 31561 - DNA, 25 bp, probe
aatggactacatggtatacttcagc

SEQ ID NO: 31562 - DNA, 25 bp, probe
gacttgcctactgcttatctttacc

SEQ ID NO: 31563 - DNA, 25 bp, probe
ccaatagaagaataagtcatggagc

SEQ ID NO: 31564 - DNA, 25 bp, probe
cctttgtcctttctctctaattcag

SEQ ID NO: 31565 - DNA, 25 bp, probe
cccaatccctatttgagaaacactg

SEQ ID NO: 31566 - DNA, 25 bp, probe
tcccaatccctatttgagaaacact

SEQ ID NO: 31567 - DNA, 25 bp, probe
ctcccaatccctatttgagaaacac

SEQ ID NO: 31568 - DNA, 25 bp, probe
caatccctatttgagaaacactgcc

SEQ ID NO: 31569 - DNA, 25 bp, probe
ccaatccctatttgagaaacactgc

SEQ ID NO: 31570 - DNA, 25 bp, probe
ttgctcccaatccctatttgagaaa

SEQ ID NO: 31571 - DNA, 25 bp, probe
tttgctcccaatccctatttgagaa

SEQ ID NO: 31572 - DNA, 25 bp, probe
aatccctatttgagaaacactgccc

SEQ ID NO: 31573 - DNA, 25 bp, probe
gctcccaatccctatttgagaaaca

SEQ ID NO: 31574 - DNA, 25 bp, probe
tgctcccaatccctatttgagaaac

SEQ ID NO: 31575 - DNA, 25 bp, probe
cttttgctcccaatccctatttgag

SEQ ID NO: 31576 - DNA, 25 bp, probe
ttttgctcccaatccctatttgaga

SEQ ID NO: 31577 - DNA, 25 bp, probe
gatatttaaggaccccagagctagg

SEQ ID NO: 31578 - DNA, 25 bp, probe
cgatatttaaggaccccagagctag

SEQ ID NO: 31579 - DNA, 25 bp, probe
agaccgatatttaaggaccccagag

SEQ ID NO: 31580 - DNA, 25 bp, probe
gagaccgatatttaaggaccccaga

SEQ ID NO: 31581 - DNA, 25 bp, probe
cagaactcttttcttagaagggaga

SEQ ID NO: 31582 - DNA, 25 bp, probe
ccagaactcttttcttagaagggag

SEQ ID NO: 31583 - DNA, 25 bp, probe
aacctacgggagaccgatatttaag

SEQ ID NO: 31584 - DNA, 25 bp, probe
ccttttgctcccaatccctatttga

SEQ ID NO: 31585 - DNA, 25 bp, probe
caacctacgggagaccgatatttaa

SEQ ID NO: 31586 - DNA, 25 bp, probe
ctacgggagaccgatatttaaggac

SEQ ID NO: 31587 - DNA, 25 bp, probe
gtgcccagaactcttttcttagaag

SEQ ID NO: 31588 - DNA, 25 bp, probe
ctatttgagaaacactgccccatcc

SEQ ID NO: 31589 - DNA, 25 bp, probe
cctatttgagaaacactgccccatc

SEQ ID NO: 31590 - DNA, 25 bp, probe
cccagaactcttttcttagaaggga

SEQ ID NO: 31591 - DNA, 25 bp, probe
tatttgagaaacactgccccatcct

SEQ ID NO: 31592 - DNA, 25 bp, probe
gaactcttttcttagaagggagagg

SEQ ID NO: 31593 - DNA, 25 bp, probe
ccgatatttaaggaccccagagcta

SEQ ID NO: 31594 - DNA, 25 bp, probe
ggagaccgatatttaaggaccccag

SEQ ID NO: 31595 - DNA, 25 bp, probe
agaactcttttcttagaagggagag

SEQ ID NO: 31596 - DNA, 25 bp, probe
tgcccagaactcttttcttagaagg

SEQ ID NO: 31597 - DNA, 25 bp, probe
cctacgggagaccgatatttaagga

SEQ ID NO: 31598 - DNA, 25 bp, probe
cttgaaaggtgaaaagtagtggggc

SEQ ID NO: 31599 - DNA, 25 bp, probe
gagcccttgaaaggtgaaaagtagt

SEQ ID NO: 31600 - DNA, 25 bp, probe
ggtgcccagaactcttttcttagaa

SEQ ID NO: 31601 - DNA, 25 bp, probe
acctacgggagaccgatatttaagg

SEQ ID NO: 31602 - DNA, 25 bp, probe
atatttaaggaccccagagctaggc

SEQ ID NO: 31603 - DNA, 25 bp, probe
agcccttgaaaggtgaaaagtagtg

SEQ ID NO: 31604 - DNA, 25 bp, probe
tacgggagaccgatatttaaggacc

SEQ ID NO: 31605 - DNA, 25 bp, probe
aactcttttcttagaagggagaggc

SEQ ID NO: 31606 - DNA, 25 bp, probe
tcttttcttagaagggagaggctgc

SEQ ID NO: 31607 - DNA, 25 bp, probe
ccttgaaaggtgaaaagtagtgggg

SEQ ID NO: 31608 - DNA, 25 bp, probe
gaccgatatttaaggaccccagagc

SEQ ID NO: 31609 - DNA, 25 bp, probe
ttacttaagaccgatagcaggtgaa

SEQ ID NO: 31610 - DNA, 25 bp, probe
ctgaatcatccgaggcaaagagaaa

SEQ ID NO: 31611 - DNA, 25 bp, probe
tgtgtttacttaagaccgatagcag

SEQ ID NO: 31612 - DNA, 25 bp, probe
ctgtgtttacttaagaccgatagca

SEQ ID NO: 31613 - DNA, 25 bp, probe
tctgtgtttacttaagaccgatagc

SEQ ID NO: 31614 - DNA, 25 bp, probe
tacttaagaccgatagcaggtgaac

SEQ ID NO: 31615 - DNA, 25 bp, probe
gtgtttacttaagaccgatagcagg

SEQ ID NO: 31616 - DNA, 25 bp, probe
acgaggagatctgtgtttacttaag

SEQ ID NO: 31617 - DNA, 25 bp, probe
gagatctgtgtttacttaagaccga

SEQ ID NO: 31618 - DNA, 25 bp, probe
cgaggagatctgtgtttacttaaga

SEQ ID NO: 31619 - DNA, 25 bp, probe
gaacgaggagatctgtgtttactta

SEQ ID NO: 31620 - DNA, 25 bp, probe
aggagatctgtgtttacttaagacc

SEQ ID NO: 31621 - DNA, 25 bp, probe
aacgaggagatctgtgtttacttaa

SEQ ID NO: 31622 - DNA, 25 bp, probe
agatctgtgtttacttaagaccgat

SEQ ID NO: 31623 - DNA, 25 bp, probe
atctgtgtttacttaagaccgatag

SEQ ID NO: 31624 - DNA, 25 bp, probe
gatctgtgtttacttaagaccgata

SEQ ID NO: 31625 - DNA, 25 bp, probe
ggagatctgtgtttacttaagaccg

SEQ ID NO: 31626 - DNA, 25 bp, probe
cttaagaccgatagcaggtgaactc

SEQ ID NO: 31627 - DNA, 25 bp, probe
tctgaatcatccgaggcaaagagaa

SEQ ID NO: 31628 - DNA, 25 bp, probe
gaggagatctgtgtttacttaagac

SEQ ID NO: 31629 - DNA, 25 bp, probe
gaatcatccgaggcaaagagaaaag

SEQ ID NO: 31630 - DNA, 25 bp, probe
tttacttaagaccgatagcaggtga

SEQ ID NO: 31631 - DNA, 25 bp, probe
gtttacttaagaccgatagcaggtg

SEQ ID NO: 31632 - DNA, 25 bp, probe
tgtttacttaagaccgatagcaggt

SEQ ID NO: 31633 - DNA, 25 bp, probe
acttaagaccgatagcaggtgaact

SEQ ID NO: 31634 - DNA, 25 bp, probe
tgaatcatccgaggcaaagagaaaa

SEQ ID NO: 31635 - DNA, 25 bp, probe
ttaagaccgatagcaggtgaactcg

SEQ ID NO: 31636 - DNA, 25 bp, probe
ggaacgaggagatctgtgtttactt

SEQ ID NO: 31637 - DNA, 25 bp, probe
gtctgaatcatccgaggcaaagaga

SEQ ID NO: 31638 - DNA, 25 bp, probe
cacaatcctcgtctgaatcatccga

SEQ ID NO: 31639 - DNA, 25 bp, probe
aaaaggaaagtttgggaagggatgg

SEQ ID NO: 31640 - DNA, 25 bp, probe
gaaagtttgggaagggatgggagag

SEQ ID NO: 31641 - DNA, 25 bp, probe
aaaggaaagtttgggaagggatggg

SEQ ID NO: 31642 - DNA, 25 bp, probe
cccacaatcctcgtctgaatcatcc

SEQ ID NO: 31643 - DNA, 25 bp, probe
aatcatccgaggcaaagagaaaagc

SEQ ID NO: 31644 - DNA, 25 bp, probe
gggaacgaggagatctgtgtttact

SEQ ID NO: 31645 - DNA, 25 bp, probe
taagaccgatagcaggtgaactcga

SEQ ID NO: 31646 - DNA, 25 bp, probe
ggggaacgaggagatctgtgtttac

SEQ ID NO: 31647 - DNA, 25 bp, probe
aggggaacgaggagatctgtgttta

SEQ ID NO: 31648 - DNA, 25 bp, probe
ccaagtagtagtgtcctcctagtat

SEQ ID NO: 31649 - DNA, 25 bp, probe
caagtagtagtgtcctcctagtata

SEQ ID NO: 31650 - DNA, 25 bp, probe
ttagaggagcaacaggagatgagag

SEQ ID NO: 31651 - DNA, 25 bp, probe
ggagatgagagttccagattgttct

SEQ ID NO: 31652 - DNA, 25 bp, probe
aggagatgagagttccagattgttc

SEQ ID NO: 31653 - DNA, 25 bp, probe
gttaaactacttgtaaaggtgctgc

SEQ ID NO: 31654 - DNA, 25 bp, probe
caggagatgagagttccagattgtt

SEQ ID NO: 31655 - DNA, 25 bp, probe
aacaggagatgagagttccagattg

SEQ ID NO: 31656 - DNA, 25 bp, probe
caacaggagatgagagttccagatt

SEQ ID NO: 31657 - DNA, 25 bp, probe
attaaatcgttagaggagcaacagg

SEQ ID NO: 31658 - DNA, 25 bp, probe
agtagtgtcctcctagtatattagt

SEQ ID NO: 31659 - DNA, 25 bp, probe
agtagtagtgtcctcctagtatatt

SEQ ID NO: 31660 - DNA, 25 bp, probe
aagtagtagtgtcctcctagtatat

SEQ ID NO: 31661 - DNA, 25 bp, probe
tattaaatcgttagaggagcaacag

SEQ ID NO: 31662 - DNA, 25 bp, probe
tgtcttataggtttacactgccaaa

SEQ ID NO: 31663 - DNA, 25 bp, probe
cacttcactaccaaatgagcattag

SEQ ID NO: 31664 - DNA, 25 bp, probe
agatggcttatttgtataatggtgt

SEQ ID NO: 31665 - DNA, 25 bp, probe
agattgttctgtccagtttccaaag

SEQ ID NO: 31666 - DNA, 25 bp, probe
ttaaatcgttagaggagcaacagga

SEQ ID NO: 31667 - DNA, 25 bp, probe
gttagaggagcaacaggagatgaga

SEQ ID NO: 31668 - DNA, 25 bp, probe
aatcgttagaggagcaacaggagat

SEQ ID NO: 31669 - DNA, 25 bp, probe
cccaagtagtagtgtcctcctagta

SEQ ID NO: 31670 - DNA, 25 bp, probe
cagtttccaaagggcagtaaagttt

SEQ ID NO: 31671 - DNA, 25 bp, probe
tttgtgaaattcaacctgtgtctta

SEQ ID NO: 31672 - DNA, 25 bp, probe
agttaaactacttgtaaaggtgctg

SEQ ID NO: 31673 - DNA, 25 bp, probe
atattaaatcgttagaggagcaaca

SEQ ID NO: 31674 - DNA, 25 bp, probe
ttgtgaaattcaacctgtgtcttat

SEQ ID NO: 31675 - DNA, 25 bp, probe
cgatgaatgtgttgatttgagaaat

SEQ ID NO: 31676 - DNA, 25 bp, probe
acttcactaccaaatgagcattagc

SEQ ID NO: 31677 - DNA, 25 bp, probe
taaatcgttagaggagcaacaggag

SEQ ID NO: 31678 - DNA, 25 bp, probe
ctgagaagtgtatatagtttgtggt

SEQ ID NO: 31679 - DNA, 25 bp, probe
cccgtaagatggcttatttgtataa

SEQ ID NO: 31680 - DNA, 25 bp, probe
gcacttcactaccaaatgagcatta

SEQ ID NO: 31681 - DNA, 25 bp, probe
gatggcttatttgtataatggtgtt

SEQ ID NO: 31682 - DNA, 25 bp, probe
acaggagatgagagttccagattgt

SEQ ID NO: 31683 - DNA, 25 bp, probe
tcgatgaatgtgttgatttgagaaa

SEQ ID NO: 31684 - DNA, 25 bp, probe
gaagaacaatgtcagaaactcgatg

SEQ ID NO: 31685 - DNA, 25 bp, probe
tctgagaagtgtatatagtttgtgg

SEQ ID NO: 31686 - DNA, 25 bp, probe
gtagtgtcctcctagtatattagtt

SEQ ID NO: 31687 - DNA, 25 bp, probe
tgtgaaattcaacctgtgtcttata

SEQ ID NO: 31688 - DNA, 25 bp, probe
gattgttctgtccagtttccaaagg

SEQ ID NO: 31689 - DNA, 25 bp, probe
cagaaactcgatgaatgtgttgatt

SEQ ID NO: 31690 - DNA, 25 bp, probe
aaactcgatgaatgtgttgatttga

SEQ ID NO: 31691 - DNA, 25 bp, probe
tagaggagcaacaggagatgagagt

SEQ ID NO: 31692 - DNA, 25 bp, probe
acttgtaataaacccttaactggca

SEQ ID NO: 31693 - DNA, 25 bp, probe
aacttgtaataaacccttaactggc

SEQ ID NO: 31694 - DNA, 25 bp, probe
cttgtaataaacccttaactggcat

SEQ ID NO: 31695 - DNA, 25 bp, probe
cttaactggcataggaaatggtatc

SEQ ID NO: 31696 - DNA, 25 bp, probe
tgtaataaacccttaactggcatag

SEQ ID NO: 31697 - DNA, 25 bp, probe
ctttggttctgggttgtttcctaaa

SEQ ID NO: 31698 - DNA, 25 bp, probe
gatgtgctgctttgatatataggac

SEQ ID NO: 31699 - DNA, 25 bp, probe
agatgtgctgctttgatatatagga

SEQ ID NO: 31700 - DNA, 25 bp, probe
ttaatgctttggttctgggttgttt

SEQ ID NO: 31701 - DNA, 25 bp, probe
ttgtaataaacccttaactggcata

SEQ ID NO: 31702 - DNA, 25 bp, probe
tgctgctttgatatataggacattg

SEQ ID NO: 31703 - DNA, 25 bp, probe
gtgctgctttgatatataggacatt

SEQ ID NO: 31704 - DNA, 25 bp, probe
gctgctttgatatataggacattga

SEQ ID NO: 31705 - DNA, 25 bp, probe
taatgctttggttctgggttgtttc

SEQ ID NO: 31706 - DNA, 25 bp, probe
ttattaatgctttggttctgggttg

SEQ ID NO: 31707 - DNA, 25 bp, probe
tcactaaactctgaataagcacttt

SEQ ID NO: 31708 - DNA, 25 bp, probe
taaacccttaactggcataggaaat

SEQ ID NO: 31709 - DNA, 25 bp, probe
ataaacccttaactggcataggaaa

SEQ ID NO: 31710 - DNA, 25 bp, probe
aataaacccttaactggcataggaa

SEQ ID NO: 31711 - DNA, 25 bp, probe
ccttaactggcataggaaatggtat

SEQ ID NO: 31712 - DNA, 25 bp, probe
tattaatgctttggttctgggttgt

SEQ ID NO: 31713 - DNA, 25 bp, probe
attattaatgctttggttctgggtt

SEQ ID NO: 31714 - DNA, 25 bp, probe
taataaacccttaactggcatagga

SEQ ID NO: 31715 - DNA, 25 bp, probe
gtaataaacccttaactggcatagg

SEQ ID NO: 31716 - DNA, 25 bp, probe
tgtgctgctttgatatataggacat

SEQ ID NO: 31717 - DNA, 25 bp, probe
atgtgctgctttgatatataggaca

SEQ ID NO: 31718 - DNA, 25 bp, probe
ttaactggcataggaaatggtatcc

SEQ ID NO: 31719 - DNA, 25 bp, probe
aaacccttaactggcataggaaatg

SEQ ID NO: 31720 - DNA, 25 bp, probe
tagatgtgctgctttgatatatagg

SEQ ID NO: 31721 - DNA, 25 bp, probe
actgtttgttccagaatctgtatga

SEQ ID NO: 31722 - DNA, 25 bp, probe
cactgtttgttccagaatctgtatg

SEQ ID NO: 31723 - DNA, 25 bp, probe
acactgtttgttccagaatctgtat

SEQ ID NO: 31724 - DNA, 25 bp, probe
attaatgctttggttctgggttgtt

SEQ ID NO: 31725 - DNA, 25 bp, probe
tattattaatgctttggttctgggt

SEQ ID NO: 31726 - DNA, 25 bp, probe
tatttgtgtgttcactaaactctga

SEQ ID NO: 31727 - DNA, 25 bp, probe
atctgtatgattctatggagctatt

SEQ ID NO: 31728 - DNA, 25 bp, probe
ctgtttgttccagaatctgtatgat

SEQ ID NO: 31729 - DNA, 25 bp, probe
taactggcataggaaatggtatcca

SEQ ID NO: 31730 - DNA, 25 bp, probe
gcataggaaatggtatccagaatgg

SEQ ID NO: 31731 - DNA, 25 bp, probe
ggcataggaaatggtatccagaatg

SEQ ID NO: 31732 - DNA, 25 bp, probe
tggcataggaaatggtatccagaat

SEQ ID NO: 31733 - DNA, 25 bp, probe
cccttaactggcataggaaatggta

SEQ ID NO: 31734 - DNA, 25 bp, probe
ttattattaatgctttggttctggg

SEQ ID NO: 31735 - DNA, 25 bp, probe
acagttatagaaagcaagatgtact

SEQ ID NO: 31736 - DNA, 25 bp, probe
ttggttcctcacatattattggtca

SEQ ID NO: 31737 - DNA, 25 bp, probe
tggttcctcacatattattggtcaa

SEQ ID NO: 31738 - DNA, 25 bp, probe
ggttcctcacatattattggtcaag

SEQ ID NO: 31739 - DNA, 25 bp, probe
gttcctcacatattattggtcaaga

SEQ ID NO: 31740 - DNA, 25 bp, probe
gtgctatgctggacattaacaagat

SEQ ID NO: 31741 - DNA, 25 bp, probe
ctatgctggacattaacaagatcat

SEQ ID NO: 31742 - DNA, 25 bp, probe
gctatgctggacattaacaagatca

SEQ ID NO: 31743 - DNA, 25 bp, probe
tgctatgctggacattaacaagatc

SEQ ID NO: 31744 - DNA, 25 bp, probe
tgctggacattaacaagatcattat

SEQ ID NO: 31745 - DNA, 25 bp, probe
atgctggacattaacaagatcatta

SEQ ID NO: 31746 - DNA, 25 bp, probe
tatgctggacattaacaagatcatt

SEQ ID NO: 31747 - DNA, 25 bp, probe
ttcctcacatattattggtcaagaa

SEQ ID NO: 31748 - DNA, 25 bp, probe
gctggacattaacaagatcattatc

SEQ ID NO: 31749 - DNA, 25 bp, probe
agtcagatttgtataaggaaagcca

SEQ ID NO: 31750 - DNA, 25 bp, probe
ctgtgctatgctggacattaacaag

SEQ ID NO: 31751 - DNA, 25 bp, probe
tatcctgtgctatgctggacattaa

SEQ ID NO: 31752 - DNA, 25 bp, probe
ggactttctcttggacattgtaaac

SEQ ID NO: 31753 - DNA, 25 bp, probe
tggactttctcttggacattgtaaa

SEQ ID NO: 31754 - DNA, 25 bp, probe
gactttctcttggacattgtaaacg

SEQ ID NO: 31755 - DNA, 25 bp, probe
aagtcagatttgtataaggaaagcc

SEQ ID NO: 31756 - DNA, 25 bp, probe
tttggttcctcacatattattggtc

SEQ ID NO: 31757 - DNA, 25 bp, probe
tattagaagctatcaatcaccttgc

SEQ ID NO: 31758 - DNA, 25 bp, probe
ctggactttctcttggacattgtaa

SEQ ID NO: 31759 - DNA, 25 bp, probe
tactctggactttctcttggacatt

SEQ ID NO: 31760 - DNA, 25 bp, probe
tagaagctatcaatcaccttgcatt

SEQ ID NO: 31761 - DNA, 25 bp, probe
ttagaagctatcaatcaccttgcat

SEQ ID NO: 31762 - DNA, 25 bp, probe
attagaagctatcaatcaccttgca

SEQ ID NO: 31763 - DNA, 25 bp, probe
tgtgctatgctggacattaacaaga

SEQ ID NO: 31764 - DNA, 25 bp, probe
gtcagatttgtataaggaaagccaa

SEQ ID NO: 31765 - DNA, 25 bp, probe
tctggactttctcttggacattgta

SEQ ID NO: 31766 - DNA, 25 bp, probe
gtatcctgtgctatgctggacatta

SEQ ID NO: 31767 - DNA, 25 bp, probe
ttaaggtactctggactttctcttg

SEQ ID NO: 31768 - DNA, 25 bp, probe
gctcatcatcagtcttaatattcag

SEQ ID NO: 31769 - DNA, 25 bp, probe
agctcatcatcagtcttaatattca

SEQ ID NO: 31770 - DNA, 25 bp, probe
taaggtactctggactttctcttgg

SEQ ID NO: 31771 - DNA, 25 bp, probe
tcctcacatattattggtcaagaaa

SEQ ID NO: 31772 - DNA, 25 bp, probe
cggcactatttctgaacaaagagag

SEQ ID NO: 31773 - DNA, 25 bp, probe
tattacaagggtatcctgtgctatg

SEQ ID NO: 31774 - DNA, 25 bp, probe
gtattacaagggtatcctgtgctat

SEQ ID NO: 31775 - DNA, 25 bp, probe
atcagtattacaagggtatcctgtg

SEQ ID NO: 31776 - DNA, 25 bp, probe
agtattacaagggtatcctgtgcta

SEQ ID NO: 31777 - DNA, 25 bp, probe
gtactctggactttctcttggacat

SEQ ID NO: 31778 - DNA, 25 bp, probe
ggcactatttctgaacaaagagagc

SEQ ID NO: 31779 - DNA, 25 bp, probe
actctggactttctcttggacattg

SEQ ID NO: 31780 - DNA, 25 bp, probe
gttgttgttgttgttgttagagaga

SEQ ID NO: 31781 - DNA, 25 bp, probe
tgttgttgttgttgttgttagagag

SEQ ID NO: 31782 - DNA, 25 bp, probe
gttgttgttgttgttgttgttagag

SEQ ID NO: 31783 - DNA, 25 bp, probe
tgttgttgttgttgttgttgttaga

SEQ ID NO: 31784 - DNA, 25 bp, probe
gttgttgttgttgttgttgttgtta

SEQ ID NO: 31785 - DNA, 25 bp, probe
ttgttgttgttgttgttgttagaga

SEQ ID NO: 31786 - DNA, 25 bp, probe
ttgttgttgttgttgttgttgttag

SEQ ID NO: 31787 - DNA, 25 bp, probe
ttgttgttgttgttgttagagagaa

SEQ ID NO: 31788 - DNA, 25 bp, probe
tgttgttgttgttgttgttgttgtt

SEQ ID NO: 31789 - DNA, 25 bp, probe
ttgttgttgttgttgttgttgttgt

SEQ ID NO: 31790 - DNA, 25 bp, probe
ctacctgtctccattctaacctgac

SEQ ID NO: 31791 - DNA, 25 bp, probe
gatttgttgttgttgttgttgttgt

SEQ ID NO: 31792 - DNA, 25 bp, probe
atttgttgttgttgttgttgttgtt

SEQ ID NO: 31793 - DNA, 25 bp, probe
tttgttgttgttgttgttgttgttg

SEQ ID NO: 31794 - DNA, 25 bp, probe
ggatttgttgttgttgttgttgttg

SEQ ID NO: 31795 - DNA, 25 bp, probe
tggatttgttgttgttgttgttgtt

SEQ ID NO: 31796 - DNA, 25 bp, probe
tacctgtctccattctaacctgact

SEQ ID NO: 31797 - DNA, 25 bp, probe
ctggatttgttgttgttgttgttgt

SEQ ID NO: 31798 - DNA, 25 bp, probe
cattctaacctgactggcacatctc

SEQ ID NO: 31799 - DNA, 25 bp, probe
gctacctgtctccattctaacctga

SEQ ID NO: 31800 - DNA, 25 bp, probe
cctggatttgttgttgttgttgttg

SEQ ID NO: 31801 - DNA, 25 bp, probe
tcctggatttgttgttgttgttgtt

SEQ ID NO: 31802 - DNA, 25 bp, probe
gatcctggatttgttgttgttgttg

SEQ ID NO: 31803 - DNA, 25 bp, probe
attctaacctgactggcacatctca

SEQ ID NO: 31804 - DNA, 25 bp, probe
atcctggatttgttgttgttgttgt

SEQ ID NO: 31805 - DNA, 25 bp, probe
acctgtctccattctaacctgactg

SEQ ID NO: 31806 - DNA, 25 bp, probe
ggctacctgtctccattctaacctg

SEQ ID NO: 31807 - DNA, 25 bp, probe
ctgccatattcatagggtgtccatg

SEQ ID NO: 31808 - DNA, 25 bp, probe
ctcataagctcccaatctcagacac

SEQ ID NO: 31809 - DNA, 25 bp, probe
gctgagaccatcatcttttaggaaa

SEQ ID NO: 31810 - DNA, 25 bp, probe
tcataagctcccaatctcagacact

SEQ ID NO: 31811 - DNA, 25 bp, probe
cctgtctccattctaacctgactgg

SEQ ID NO: 31812 - DNA, 25 bp, probe
ctggctacctgtctccattctaacc

SEQ ID NO: 31813 - DNA, 25 bp, probe
cctggctacctgtctccattctaac

SEQ ID NO: 31814 - DNA, 25 bp, probe
ccattctaacctgactggcacatct

SEQ ID NO: 31815 - DNA, 25 bp, probe
tccattctaacctgactggcacatc

SEQ ID NO: 31816 - DNA, 25 bp, probe
ctccattctaacctgactggcacat

SEQ ID NO: 31817 - DNA, 25 bp, probe
cataagctcccaatctcagacactg

SEQ ID NO: 31818 - DNA, 25 bp, probe
cctcataagctcccaatctcagaca

SEQ ID NO: 31819 - DNA, 25 bp, probe
tggctacctgtctccattctaacct

SEQ ID NO: 31820 - DNA, 25 bp, probe
catattcatagggtgtccatgcaca

SEQ ID NO: 31821 - DNA, 25 bp, probe
aaaccgtgaggaggactctatttgg

SEQ ID NO: 31822 - DNA, 25 bp, probe
ctgtctccattctaacctgactggc

SEQ ID NO: 31823 - DNA, 25 bp, probe
agggtaagggttggagttagaggag

SEQ ID NO: 31824 - DNA, 25 bp, probe
aagtcttgctccaatatcttcatcc

SEQ ID NO: 31825 - DNA, 25 bp, probe
gatcgtcttcttcaactaccacatc

SEQ ID NO: 31826 - DNA, 25 bp, probe
atcgtcttcttcaactaccacatcc

SEQ ID NO: 31827 - DNA, 25 bp, probe
ttgctccaatatcttcatcccatag

SEQ ID NO: 31828 - DNA, 25 bp, probe
cttgctccaatatcttcatcccata

SEQ ID NO: 31829 - DNA, 25 bp, probe
cgtcttcttcaactaccacatcctg

SEQ ID NO: 31830 - DNA, 25 bp, probe
tcgtcttcttcaactaccacatcct

SEQ ID NO: 31831 - DNA, 25 bp, probe
aaagtcttgctccaatatcttcatc

SEQ ID NO: 31832 - DNA, 25 bp, probe
tgctccaatatcttcatcccatagg

SEQ ID NO: 31833 - DNA, 25 bp, probe
tcttgctccaatatcttcatcccat

SEQ ID NO: 31834 - DNA, 25 bp, probe
gctccctgaatccagtaatttatgt

SEQ ID NO: 31835 - DNA, 25 bp, probe
tccctgaatccagtaatttatgtct

SEQ ID NO: 31836 - DNA, 25 bp, probe
ggattgtggagttaaatattctggg

SEQ ID NO: 31837 - DNA, 25 bp, probe
ctccctgaatccagtaatttatgtc

SEQ ID NO: 31838 - DNA, 25 bp, probe
agttaaatattctgggtttcctcct

SEQ ID NO: 31839 - DNA, 25 bp, probe
tgtggagttaaatattctgggtttc

SEQ ID NO: 31840 - DNA, 25 bp, probe
agtcttgctccaatatcttcatccc

SEQ ID NO: 31841 - DNA, 25 bp, probe
gattgtggagttaaatattctgggt

SEQ ID NO: 31842 - DNA, 25 bp, probe
ctccaatatcttcatcccataggaa

SEQ ID NO: 31843 - DNA, 25 bp, probe
ccctgaatccagtaatttatgtctt

SEQ ID NO: 31844 - DNA, 25 bp, probe
ccaacttctttgccttcactaacag

SEQ ID NO: 31845 - DNA, 25 bp, probe
ttgtggagttaaatattctgggttt

SEQ ID NO: 31846 - DNA, 25 bp, probe
tccaatatcttcatcccataggaaa

SEQ ID NO: 31847 - DNA, 25 bp, probe
gtcttcttcaactaccacatcctgg

SEQ ID NO: 31848 - DNA, 25 bp, probe
gtcttgctccaatatcttcatccca

SEQ ID NO: 31849 - DNA, 25 bp, probe
aggattgtggagttaaatattctgg

SEQ ID NO: 31850 - DNA, 25 bp, probe
attgtggagttaaatattctgggtt

SEQ ID NO: 31851 - DNA, 25 bp, probe
ccaatatcttcatcccataggaaag

SEQ ID NO: 31852 - DNA, 25 bp, probe
gctccaatatcttcatcccatagga

SEQ ID NO: 31853 - DNA, 25 bp, probe
atccagtaatttatgtctttgtggg

SEQ ID NO: 31854 - DNA, 25 bp, probe
gagttaaatattctgggtttcctcc

SEQ ID NO: 31855 - DNA, 25 bp, probe
gcaaggattgtggagttaaatattc

SEQ ID NO: 31856 - DNA, 25 bp, probe
tccagtaatttatgtctttgtgggc

SEQ ID NO: 31857 - DNA, 25 bp, probe
ttaaatattctgggtttcctcctac

SEQ ID NO: 31858 - DNA, 25 bp, probe
gttaaatattctgggtttcctccta

SEQ ID NO: 31859 - DNA, 25 bp, probe
aattcttattccaggtgcaagcagt

SEQ ID NO: 31860 - DNA, 25 bp, probe
ttcatcccataggaaagaaatcttc

SEQ ID NO: 31861 - DNA, 25 bp, probe
cttcatcccataggaaagaaatctt

SEQ ID NO: 31862 - DNA, 25 bp, probe
agctccctgaatccagtaatttatg

SEQ ID NO: 31863 - DNA, 25 bp, probe
cagctccctgaatccagtaatttat

SEQ ID NO: 31864 - DNA, 25 bp, probe
caacttctttgccttcactaacagc

SEQ ID NO: 31865 - DNA, 25 bp, probe
tggagttaaatattctgggtttcct

SEQ ID NO: 31866 - DNA, 25 bp, probe
gtggagttaaatattctgggtttcc

SEQ ID NO: 31867 - DNA, 25 bp, probe
tgcaaggattgtggagttaaatatt

SEQ ID NO: 31868 - DNA, 25 bp, probe
ttcaatgttcctaatgggttcgttt

SEQ ID NO: 31869 - DNA, 25 bp, probe
tttcaatgttcctaatgggttcgtt

SEQ ID NO: 31870 - DNA, 25 bp, probe
ttgtttcaatgttcctaatgggttc

SEQ ID NO: 31871 - DNA, 25 bp, probe
tttgtttcaatgttcctaatgggtt

SEQ ID NO: 31872 - DNA, 25 bp, probe
aatgttcctaatgggttcgtttcag

SEQ ID NO: 31873 - DNA, 25 bp, probe
tcaatgttcctaatgggttcgtttc

SEQ ID NO: 31874 - DNA, 25 bp, probe
atttgtttcaatgttcctaatgggt

SEQ ID NO: 31875 - DNA, 25 bp, probe
caatgttcctaatgggttcgtttca

SEQ ID NO: 31876 - DNA, 25 bp, probe
gtttcaatgttcctaatgggttcgt

SEQ ID NO: 31877 - DNA, 25 bp, probe
tgtttcaatgttcctaatgggttcg

SEQ ID NO: 31878 - DNA, 25 bp, probe
gttcctaatgggttcgtttcagaag

SEQ ID NO: 31879 - DNA, 25 bp, probe
atgttcctaatgggttcgtttcaga

SEQ ID NO: 31880 - DNA, 25 bp, probe
ttcctaatgggttcgtttcagaagt

SEQ ID NO: 31881 - DNA, 25 bp, probe
tgttcctaatgggttcgtttcagaa

SEQ ID NO: 31882 - DNA, 25 bp, probe
tatttgtttcaatgttcctaatggg

SEQ ID NO: 31883 - DNA, 25 bp, probe
tcctaatgggttcgtttcagaagtg

SEQ ID NO: 31884 - DNA, 25 bp, probe
gtttgctcaagatcccaagttcatc

SEQ ID NO: 31885 - DNA, 25 bp, probe
agtttgctcaagatcccaagttcat

SEQ ID NO: 31886 - DNA, 25 bp, probe
ttatttgtttcaatgttcctaatgg

SEQ ID NO: 31887 - DNA, 25 bp, probe
cagtttgctcaagatcccaagttca

SEQ ID NO: 31888 - DNA, 25 bp, probe
tttgctcaagatcccaagttcatcg

SEQ ID NO: 31889 - DNA, 25 bp, probe
ctgcgacatgaccatagaggagatg

SEQ ID NO: 31890 - DNA, 25 bp, probe
ctaatgggttcgtttcagaagtgcc

SEQ ID NO: 31891 - DNA, 25 bp, probe
cctaatgggttcgtttcagaagtgc

SEQ ID NO: 31892 - DNA, 25 bp, probe
gtggaagcggtcttgatttcagaag

SEQ ID NO: 31893 - DNA, 25 bp, probe
gaagcggtcttgatttcagaaggac

SEQ ID NO: 31894 - DNA, 25 bp, probe
acatgaccatagaggagatggagag

SEQ ID NO: 31895 - DNA, 25 bp, probe
gacatgaccatagaggagatggaga

SEQ ID NO: 31896 - DNA, 25 bp, probe
taatgggttcgtttcagaagtgcct

SEQ ID NO: 31897 - DNA, 25 bp, probe
aagcggtcttgatttcagaaggact

SEQ ID NO: 31898 - DNA, 25 bp, probe
tcaagatcccaagttcatcgaggtc

SEQ ID NO: 31899 - DNA, 25 bp, probe
ggaagcggtcttgatttcagaagga

SEQ ID NO: 31900 - DNA, 25 bp, probe
aagatcccaagttcatcgaggtcac

SEQ ID NO: 31901 - DNA, 25 bp, probe
ctcaagatcccaagttcatcgaggt

SEQ ID NO: 31902 - DNA, 25 bp, probe
caagatcccaagttcatcgaggtca

SEQ ID NO: 31903 - DNA, 25 bp, probe
ttgctcaagatcccaagttcatcga

SEQ ID NO: 31904 - DNA, 25 bp, probe
tggaagcggtcttgatttcagaagg

SEQ ID NO: 31905 - DNA, 25 bp, probe
catgaccatagaggagatggagagc

SEQ ID NO: 31906 - DNA, 25 bp, probe
cgacatgaccatagaggagatggag

SEQ ID NO: 31907 - DNA, 25 bp, probe
agcggtcttgatttcagaaggactg

SEQ ID NO: 31908 - DNA, 25 bp, probe
tgctcaagatcccaagttcatcgag

SEQ ID NO: 31909 - DNA, 25 bp, probe
cggtcttgatttcagaaggactggg

SEQ ID NO: 31910 - DNA, 25 bp, probe
gcagtttgctcaagatcccaagttc

SEQ ID NO: 31911 - DNA, 25 bp, probe
gtttcagaagtgcctcactgttctc

SEQ ID NO: 31912 - DNA, 25 bp, probe
gtataagagatgtcatgcctcaaga

SEQ ID NO: 31913 - DNA, 25 bp, probe
tgtataagagatgtcatgcctcaag

SEQ ID NO: 31914 - DNA, 25 bp, probe
ttgtataagagatgtcatgcctcaa

SEQ ID NO: 31915 - DNA, 25 bp, probe
tataagagatgtcatgcctcaagaa

SEQ ID NO: 31916 - DNA, 25 bp, probe
ctcatagttaggaaagtttaggcac

SEQ ID NO: 31917 - DNA, 25 bp, probe
tcatagttaggaaagtttaggcact

SEQ ID NO: 31918 - DNA, 25 bp, probe
cctcatagttaggaaagtttaggca

SEQ ID NO: 31919 - DNA, 25 bp, probe
tgcctcatagttaggaaagtttagg

SEQ ID NO: 31920 - DNA, 25 bp, probe
aagtgcctcatagttaggaaagttt

SEQ ID NO: 31921 - DNA, 25 bp, probe
aaagtgcctcatagttaggaaagtt

SEQ ID NO: 31922 - DNA, 25 bp, probe
ccatcggtctagcatatcagtcact

SEQ ID NO: 31923 - DNA, 25 bp, probe
agtgcctcatagttaggaaagttta

SEQ ID NO: 31924 - DNA, 25 bp, probe
ataagagatgtcatgcctcaagaaa

SEQ ID NO: 31925 - DNA, 25 bp, probe
gtgcctcatagttaggaaagtttag

SEQ ID NO: 31926 - DNA, 25 bp, probe
gggaaagttaaaggtgatgacgatc

SEQ ID NO: 31927 - DNA, 25 bp, probe
tttgtataagagatgtcatgcctca

SEQ ID NO: 31928 - DNA, 25 bp, probe
taagagatgtcatgcctcaagaaag

SEQ ID NO: 31929 - DNA, 25 bp, probe
catcggtctagcatatcagtcactg

SEQ ID NO: 31930 - DNA, 25 bp, probe
gttcctgtttagctgttctgaaata

SEQ ID NO: 31931 - DNA, 25 bp, probe
ggttcctgtttagctgttctgaaat

SEQ ID NO: 31932 - DNA, 25 bp, probe
ctcaagaaagccataaacctggtag

SEQ ID NO: 31933 - DNA, 25 bp, probe
aagaaagccataaacctggtaggaa

SEQ ID NO: 31934 - DNA, 25 bp, probe
catagttaggaaagtttaggcacta

SEQ ID NO: 31935 - DNA, 25 bp, probe
gtcatgcctcaagaaagccataaac

SEQ ID NO: 31936 - DNA, 25 bp, probe
atgtcatgcctcaagaaagccataa

SEQ ID NO: 31937 - DNA, 25 bp, probe
atcggtctagcatatcagtcactgg

SEQ ID NO: 31938 - DNA, 25 bp, probe
gaaagttaaaggtgatgacgatcat

SEQ ID NO: 31939 - DNA, 25 bp, probe
atagttaggaaagtttaggcactag

SEQ ID NO: 31940 - DNA, 25 bp, probe
ctcagccatcggtctagcatatcag

SEQ ID NO: 31941 - DNA, 25 bp, probe
tgtcatgcctcaagaaagccataaa

SEQ ID NO: 31942 - DNA, 25 bp, probe
agaaagccataaacctggtaggaac

SEQ ID NO: 31943 - DNA, 25 bp, probe
caagaaagccataaacctggtagga

SEQ ID NO: 31944 - DNA, 25 bp, probe
tcaagaaagccataaacctggtagg

SEQ ID NO: 31945 - DNA, 25 bp, probe
cctcaagaaagccataaacctggta

SEQ ID NO: 31946 - DNA, 25 bp, probe
ggaaagttaaaggtgatgacgatca

SEQ ID NO: 31947 - DNA, 25 bp, probe
tggttcctgtttagctgttctgaaa

SEQ ID NO: 31948 - DNA, 25 bp, probe
atgcctcaagaaagccataaacctg

SEQ ID NO: 31949 - DNA, 25 bp, probe
gatgtcatgcctcaagaaagccata

SEQ ID NO: 31950 - DNA, 25 bp, probe
cagccatcggtctagcatatcagtc

SEQ ID NO: 31951 - DNA, 25 bp, probe
aaagccataaacctggtaggaacag

SEQ ID NO: 31952 - DNA, 25 bp, probe
gaaagccataaacctggtaggaaca

SEQ ID NO: 31953 - DNA, 25 bp, probe
gtttaggcactagttgggagtaata

SEQ ID NO: 31954 - DNA, 25 bp, probe
ggcactagttgggagtaatattcaa

SEQ ID NO: 31955 - DNA, 25 bp, probe
ttaggaaagtttaggcactagttgg

SEQ ID NO: 31956 - DNA, 25 bp, probe
taagtgacacggaagaagatgacaa

SEQ ID NO: 31957 - DNA, 25 bp, probe
ctaagtgacacggaagaagatgaca

SEQ ID NO: 31958 - DNA, 25 bp, probe
ggaagaagatgacaaatgctagagg

SEQ ID NO: 31959 - DNA, 25 bp, probe
cggaagaagatgacaaatgctagag

SEQ ID NO: 31960 - DNA, 25 bp, probe
gaagaagatgacaaatgctagaggc

SEQ ID NO: 31961 - DNA, 25 bp, probe
gctaagtgacacggaagaagatgac

SEQ ID NO: 31962 - DNA, 25 bp, probe
ctgctaagtgacacggaagaagatg

SEQ ID NO: 31963 - DNA, 25 bp, probe
aagaagatgacaaatgctagaggct

SEQ ID NO: 31964 - DNA, 25 bp, probe
acggaagaagatgacaaatgctaga

SEQ ID NO: 31965 - DNA, 25 bp, probe
cacggaagaagatgacaaatgctag

SEQ ID NO: 31966 - DNA, 25 bp, probe
acacggaagaagatgacaaatgcta

SEQ ID NO: 31967 - DNA, 25 bp, probe
gtgacacggaagaagatgacaaatg

SEQ ID NO: 31968 - DNA, 25 bp, probe
agtgacacggaagaagatgacaaat

SEQ ID NO: 31969 - DNA, 25 bp, probe
tgctaagtgacacggaagaagatga

SEQ ID NO: 31970 - DNA, 25 bp, probe
aagtgacacggaagaagatgacaaa

SEQ ID NO: 31971 - DNA, 25 bp, probe
agaagatgacaaatgctagaggctg

SEQ ID NO: 31972 - DNA, 25 bp, probe
cctgctaagtgacacggaagaagat

SEQ ID NO: 31973 - DNA, 25 bp, probe
gacacggaagaagatgacaaatgct

SEQ ID NO: 31974 - DNA, 25 bp, probe
tgacacggaagaagatgacaaatgc

SEQ ID NO: 31975 - DNA, 25 bp, probe
aacctgctaagtgacacggaagaag

SEQ ID NO: 31976 - DNA, 25 bp, probe
gaagatgacaaatgctagaggctgc

SEQ ID NO: 31977 - DNA, 25 bp, probe
caacctgctaagtgacacggaagaa

SEQ ID NO: 31978 - DNA, 25 bp, probe
ggaagagggaaaaggaagatggaag

SEQ ID NO: 31979 - DNA, 25 bp, probe
aagatgacaaatgctagaggctgct

SEQ ID NO: 31980 - DNA, 25 bp, probe
aggaagagggaaaaggaagatggaa

SEQ ID NO: 31981 - DNA, 25 bp, probe
catggagaaaaccaagacagaattg

SEQ ID NO: 31982 - DNA, 25 bp, probe
acatggagaaaaccaagacagaatt

SEQ ID NO: 31983 - DNA, 25 bp, probe
cacatggagaaaaccaagacagaat

SEQ ID NO: 31984 - DNA, 25 bp, probe
gaggaagagggaaaaggaagatgga

SEQ ID NO: 31985 - DNA, 25 bp, probe
agatgacaaatgctagaggctgctc

SEQ ID NO: 31986 - DNA, 25 bp, probe
tcacatggagaaaaccaagacagaa

SEQ ID NO: 31987 - DNA, 25 bp, probe
ctcctttcctacagctccctgattc

SEQ ID NO: 31988 - DNA, 25 bp, probe
ctcacatggagaaaaccaagacaga

SEQ ID NO: 31989 - DNA, 25 bp, probe
ggaggaagagggaaaaggaagatgg

SEQ ID NO: 31990 - DNA, 25 bp, probe
gggaggaagagggaaaaggaagatg

SEQ ID NO: 31991 - DNA, 25 bp, probe
ctttcctacagctccctgattcgac

SEQ ID NO: 31992 - DNA, 25 bp, probe
tctctcacatggagaaaaccaagac

SEQ ID NO: 31993 - DNA, 25 bp, probe
tctcacatggagaaaaccaagacag

SEQ ID NO: 31994 - DNA, 25 bp, probe
ctctcacatggagaaaaccaagaca

SEQ ID NO: 31995 - DNA, 25 bp, probe
agaaaaccaagacagaattgggaag

SEQ ID NO: 31996 - DNA, 25 bp, probe
gagaaaaccaagacagaattgggaa

SEQ ID NO: 31997 - DNA, 25 bp, probe
atggagaaaaccaagacagaattgg

SEQ ID NO: 31998 - DNA, 25 bp, probe
gaaaaccaagacagaattgggaagc

SEQ ID NO: 31999 - DNA, 25 bp, probe
ggagaaaaccaagacagaattggga

SEQ ID NO: 32000 - DNA, 25 bp, probe
ttgtttacatcaagatcacctctcc

SEQ ID NO: 32001 - DNA, 25 bp, probe
cccatcattgtttacatcaagatca

SEQ ID NO: 32002 - DNA, 25 bp, probe
cattgtttacatcaagatcacctct

SEQ ID NO: 32003 - DNA, 25 bp, probe
tcattgtttacatcaagatcacctc

SEQ ID NO: 32004 - DNA, 25 bp, probe
tccaaacacctcaatgtccaaatag

SEQ ID NO: 32005 - DNA, 25 bp, probe
aaagtctcagtccaaacacctcaat

SEQ ID NO: 32006 - DNA, 25 bp, probe
attgtttacatcaagatcacctctc

SEQ ID NO: 32007 - DNA, 25 bp, probe
gtccaaacacctcaatgtccaaata

SEQ ID NO: 32008 - DNA, 25 bp, probe
tttacatcaagatcacctctcccaa

SEQ ID NO: 32009 - DNA, 25 bp, probe
atcattgtttacatcaagatcacct

SEQ ID NO: 32010 - DNA, 25 bp, probe
catcattgtttacatcaagatcacc

SEQ ID NO: 32011 - DNA, 25 bp, probe
ccatcattgtttacatcaagatcac

SEQ ID NO: 32012 - DNA, 25 bp, probe
caaggtacttcaaaggctcatcaag

SEQ ID NO: 32013 - DNA, 25 bp, probe
ttacatcaagatcacctctcccaag

SEQ ID NO: 32014 - DNA, 25 bp, probe
gtttacatcaagatcacctctccca

SEQ ID NO: 32015 - DNA, 25 bp, probe
tgtttacatcaagatcacctctccc

SEQ ID NO: 32016 - DNA, 25 bp, probe
gaaagtctcagtccaaacacctcaa

SEQ ID NO: 32017 - DNA, 25 bp, probe
aagtctcagtccaaacacctcaatg

SEQ ID NO: 32018 - DNA, 25 bp, probe
ccaaacacctcaatgtccaaatagc

SEQ ID NO: 32019 - DNA, 25 bp, probe
gaggaggaagggaagagctttattt

SEQ ID NO: 32020 - DNA, 25 bp, probe
agtccaaacacctcaatgtccaaat

SEQ ID NO: 32021 - DNA, 25 bp, probe
ccaaggtacttcaaaggctcatcaa

SEQ ID NO: 32022 - DNA, 25 bp, probe
caaacacctcaatgtccaaatagcg

SEQ ID NO: 32023 - DNA, 25 bp, probe
ggagtacttggaagcctattggaag

SEQ ID NO: 32024 - DNA, 25 bp, probe
tgaaatgtttgacatcatcctggat

SEQ ID NO: 32025 - DNA, 25 bp, probe
ctgaaatgtttgacatcatcctgga

SEQ ID NO: 32026 - DNA, 25 bp, probe
ccccatcattgtttacatcaagatc

SEQ ID NO: 32027 - DNA, 25 bp, probe
gtctcagtccaaacacctcaatgtc

SEQ ID NO: 32028 - DNA, 25 bp, probe
gagtacttggaagcctattggaagg

SEQ ID NO: 32029 - DNA, 25 bp, probe
cagtccaaacacctcaatgtccaaa

SEQ ID NO: 32030 - DNA, 25 bp, probe
tacatcaagatcacctctcccaagg

SEQ ID NO: 32031 - DNA, 25 bp, probe
cctgaaatgtttgacatcatcctgg

SEQ ID NO: 32032 - DNA, 25 bp, probe
ccctgaaatgtttgacatcatcctg

SEQ ID NO: 32033 - DNA, 25 bp, probe
aaggtacttcaaaggctcatcaagt

SEQ ID NO: 32034 - DNA, 25 bp, probe
aaacacctcaatgtccaaatagcgg

SEQ ID NO: 32035 - DNA, 25 bp, probe
aggaagggaagagctttattttgta

SEQ ID NO: 32036 - DNA, 25 bp, probe
agtctcagtccaaacacctcaatgt

SEQ ID NO: 32037 - DNA, 25 bp, probe
ggaagggaagagctttattttgtaa

SEQ ID NO: 32038 - DNA, 25 bp, probe
gaggaagggaagagctttattttgt

SEQ ID NO: 32039 - DNA, 25 bp, probe
ggaggaggaagggaagagctttatt

SEQ ID NO: 32040 - DNA, 25 bp, probe
aggtacttcaaaggctcatcaagtc

SEQ ID NO: 32041 - DNA, 25 bp, probe
ggaggaagggaagagctttattttg

SEQ ID NO: 32042 - DNA, 25 bp, probe
aggaggaagggaagagctttatttt

SEQ ID NO: 32043 - DNA, 25 bp, probe
tcccaaggtacttcaaaggctcatc

SEQ ID NO: 32044 - DNA, 25 bp, probe
tgaatagcaatagcatggatagagt

SEQ ID NO: 32045 - DNA, 25 bp, probe
ttgatgtatccaacaagccagaatc

SEQ ID NO: 32046 - DNA, 25 bp, probe
tgtattattgctgttgcttgaatag

SEQ ID NO: 32047 - DNA, 25 bp, probe
gatgtatccaacaagccagaatcag

SEQ ID NO: 32048 - DNA, 25 bp, probe
gcatattcattcatggaccactgtt

SEQ ID NO: 32049 - DNA, 25 bp, probe
ttgaatagcaatagcatggatagag

SEQ ID NO: 32050 - DNA, 25 bp, probe
cttgaatagcaatagcatggataga

SEQ ID NO: 32051 - DNA, 25 bp, probe
acagattcagtcttgccttacacaa

SEQ ID NO: 32052 - DNA, 25 bp, probe
ttgtattattgctgttgcttgaata

SEQ ID NO: 32053 - DNA, 25 bp, probe
aacaagccagaatcagcacagataa

SEQ ID NO: 32054 - DNA, 25 bp, probe
gaatagcaatagcatggatagagta

SEQ ID NO: 32055 - DNA, 25 bp, probe
gtattattgctgttgcttgaatagc

SEQ ID NO: 32056 - DNA, 25 bp, probe
tttgtattattgctgttgcttgaat

SEQ ID NO: 32057 - DNA, 25 bp, probe
ttgcatattcattcatggaccactg

SEQ ID NO: 32058 - DNA, 25 bp, probe
agattcagtcttgccttacacaaag

SEQ ID NO: 32059 - DNA, 25 bp, probe
tattcattcatggaccactgtttct

SEQ ID NO: 32060 - DNA, 25 bp, probe
caacaagccagaatcagcacagata

SEQ ID NO: 32061 - DNA, 25 bp, probe
aatagcaatagcatggatagagtat

SEQ ID NO: 32062 - DNA, 25 bp, probe
gcttgaatagcaatagcatggatag

SEQ ID NO: 32063 - DNA, 25 bp, probe
gacagattcagtcttgccttacaca

SEQ ID NO: 32064 - DNA, 25 bp, probe
atattcattcatggaccactgtttc

SEQ ID NO: 32065 - DNA, 25 bp, probe
cagattcagtcttgccttacacaaa

SEQ ID NO: 32066 - DNA, 25 bp, probe
attcattcatggaccactgtttctt

SEQ ID NO: 32067 - DNA, 25 bp, probe
catattcattcatggaccactgttt

SEQ ID NO: 32068 - DNA, 25 bp, probe
atagcaatagcatggatagagtatt

SEQ ID NO: 32069 - DNA, 25 bp, probe
gcaaacaaacacctccttattatat

SEQ ID NO: 32070 - DNA, 25 bp, probe
aatagcatggatagagtattgagat

SEQ ID NO: 32071 - DNA, 25 bp, probe
ttcattcatggaccactgtttcttg

SEQ ID NO: 32072 - DNA, 25 bp, probe
atgtatccaacaagccagaatcagc

SEQ ID NO: 32073 - DNA, 25 bp, probe
tgcatattcattcatggaccactgt

SEQ ID NO: 32074 - DNA, 25 bp, probe
ggacagattcagtcttgccttacac

SEQ ID NO: 32075 - DNA, 25 bp, probe
ctgcaaacaaacacctccttattat

SEQ ID NO: 32076 - DNA, 25 bp, probe
cttgtacctctggctgactaaattt

SEQ ID NO: 32077 - DNA, 25 bp, probe
acaagccagaatcagcacagataaa

SEQ ID NO: 32078 - DNA, 25 bp, probe
tctgcaaacaaacacctccttatta

SEQ ID NO: 32079 - DNA, 25 bp, probe
tagcatggatagagtattgagatac

SEQ ID NO: 32080 - DNA, 25 bp, probe
ttgtacctctggctgactaaatttg

SEQ ID NO: 32081 - DNA, 25 bp, probe
atttgcatattcattcatggaccac

SEQ ID NO: 32082 - DNA, 25 bp, probe
gatttgcatattcattcatggacca

SEQ ID NO: 32083 - DNA, 25 bp, probe
tgatgtatccaacaagccagaatca

SEQ ID NO: 32084 - DNA, 25 bp, probe
gtatccaacaagccagaatcagcac

SEQ ID NO: 32085 - DNA, 25 bp, probe
tgcaaacaaacacctccttattata

SEQ ID NO: 32086 - DNA, 25 bp, probe
ttctgcaaacaaacacctccttatt

SEQ ID NO: 32087 - DNA, 25 bp, probe
tttgcatattcattcatggaccact

SEQ ID NO: 32088 - DNA, 25 bp, probe
acgaagtctaatgacctctgatgaa

SEQ ID NO: 32089 - DNA, 25 bp, probe
gacgaagtctaatgacctctgatga

SEQ ID NO: 32090 - DNA, 25 bp, probe
ctgactcataccaggacacttacaa

SEQ ID NO: 32091 - DNA, 25 bp, probe
gaagaagattaccctgactcatacc

SEQ ID NO: 32092 - DNA, 25 bp, probe
ggaagaagattaccctgactcatac

SEQ ID NO: 32093 - DNA, 25 bp, probe
tggaagaagattaccctgactcata

SEQ ID NO: 32094 - DNA, 25 bp, probe
aagaagattaccctgactcatacca

SEQ ID NO: 32095 - DNA, 25 bp, probe
gactcataccaggacacttacaaac

SEQ ID NO: 32096 - DNA, 25 bp, probe
cataggctttgagtctaatgaaaca

SEQ ID NO: 32097 - DNA, 25 bp, probe
acataggctttgagtctaatgaaac

SEQ ID NO: 32098 - DNA, 25 bp, probe
caatcatcttaacttggctaacata

SEQ ID NO: 32099 - DNA, 25 bp, probe
agtgctaggataaaccaatcatctt

SEQ ID NO: 32100 - DNA, 25 bp, probe
cagtgctaggataaaccaatcatct

SEQ ID NO: 32101 - DNA, 25 bp, probe
aatcatcttaacttggctaacatag

SEQ ID NO: 32102 - DNA, 25 bp, probe
tgactcataccaggacacttacaaa

SEQ ID NO: 32103 - DNA, 25 bp, probe
ttcatctgttgacaatttgccatag

SEQ ID NO: 32104 - DNA, 25 bp, probe
attcatctgttgacaatttgccata

SEQ ID NO: 32105 - DNA, 25 bp, probe
tattcatctgttgacaatttgccat

SEQ ID NO: 32106 - DNA, 25 bp, probe
atattcatctgttgacaatttgcca

SEQ ID NO: 32107 - DNA, 25 bp, probe
gtggaagaagattaccctgactcat

SEQ ID NO: 32108 - DNA, 25 bp, probe
ttgtggaagaagattaccctgactc

SEQ ID NO: 32109 - DNA, 25 bp, probe
cttgtcttccagttctcagcatagc

SEQ ID NO: 32110 - DNA, 25 bp, probe
aattacattatgcccttgagtctag

SEQ ID NO: 32111 - DNA, 25 bp, probe
ataggctttgagtctaatgaaacaa

SEQ ID NO: 32112 - DNA, 25 bp, probe
gtgctaggataaaccaatcatctta

SEQ ID NO: 32113 - DNA, 25 bp, probe
cgaagtctaatgacctctgatgaaa

SEQ ID NO: 32114 - DNA, 25 bp, probe
cttgtggaagaagattaccctgact

SEQ ID NO: 32115 - DNA, 25 bp, probe
aaattacattatgcccttgagtcta

SEQ ID NO: 32116 - DNA, 25 bp, probe
cgacataggctttgagtctaatgaa

SEQ ID NO: 32117 - DNA, 25 bp, probe
actcataccaggacacttacaaacc

SEQ ID NO: 32118 - DNA, 25 bp, probe
agaagattaccctgactcataccag

SEQ ID NO: 32119 - DNA, 25 bp, probe
gacataggctttgagtctaatgaaa

SEQ ID NO: 32120 - DNA, 25 bp, probe
aaattatcacaatgaaagggctcgg

SEQ ID NO: 32121 - DNA, 25 bp, probe
gcagtgctaggataaaccaatcatc

SEQ ID NO: 32122 - DNA, 25 bp, probe
tcatctgttgacaatttgccatagc

SEQ ID NO: 32123 - DNA, 25 bp, probe
tgctaggataaaccaatcatcttaa

SEQ ID NO: 32124 - DNA, 25 bp, probe
gctaggataaaccaatcatcttaac

SEQ ID NO: 32125 - DNA, 25 bp, probe
gatatagccatgactcccgacatag

SEQ ID NO: 32126 - DNA, 25 bp, probe
ctcataccaggacacttacaaaccc

SEQ ID NO: 32127 - DNA, 25 bp, probe
tgtggaagaagattaccctgactca

SEQ ID NO: 32128 - DNA, 25 bp, probe
aatattcatctgttgacaatttgcc

SEQ ID NO: 32129 - DNA, 25 bp, probe
attatcacaatgaaagggctcggaa

SEQ ID NO: 32130 - DNA, 25 bp, probe
ctcaccatatcccacagcaatttct

SEQ ID NO: 32131 - DNA, 25 bp, probe
tctcaccatatcccacagcaatttc

SEQ ID NO: 32132 - DNA, 25 bp, probe
aagaagagatcaggaagagaaggag

SEQ ID NO: 32133 - DNA, 25 bp, probe
gaagaagagatcaggaagagaagga

SEQ ID NO: 32134 - DNA, 25 bp, probe
ggaagaagagatcaggaagagaagg

SEQ ID NO: 32135 - DNA, 25 bp, probe
aagaacggaagaagagatcaggaag

SEQ ID NO: 32136 - DNA, 25 bp, probe
cggaagaagagatcaggaagagaag

SEQ ID NO: 32137 - DNA, 25 bp, probe
gagaagaaagaacggaagaagagat

SEQ ID NO: 32138 - DNA, 25 bp, probe
gaacggaagaagagatcaggaagag

SEQ ID NO: 32139 - DNA, 25 bp, probe
gcagttcaaagcaggatatgttaag

SEQ ID NO: 32140 - DNA, 25 bp, probe
cagttcaaagcaggatatgttaagt

SEQ ID NO: 32141 - DNA, 25 bp, probe
agagaagaaagaacggaagaagaga

SEQ ID NO: 32142 - DNA, 25 bp, probe
cagagaagaaagaacggaagaagag

SEQ ID NO: 32143 - DNA, 25 bp, probe
acggaagaagagatcaggaagagaa

SEQ ID NO: 32144 - DNA, 25 bp, probe
aacggaagaagagatcaggaagaga

SEQ ID NO: 32145 - DNA, 25 bp, probe
agaacggaagaagagatcaggaaga

SEQ ID NO: 32146 - DNA, 25 bp, probe
agaagaaagaacggaagaagagatc

SEQ ID NO: 32147 - DNA, 25 bp, probe
aagaaagaacggaagaagagatcag

SEQ ID NO: 32148 - DNA, 25 bp, probe
ggcagttcaaagcaggatatgttaa

SEQ ID NO: 32149 - DNA, 25 bp, probe
gaagaaagaacggaagaagagatca

SEQ ID NO: 32150 - DNA, 25 bp, probe
agaagagatcaggaagagaaggagc

SEQ ID NO: 32151 - DNA, 25 bp, probe
atgattggtttctaggcagttcaaa

SEQ ID NO: 32152 - DNA, 25 bp, probe
agttcaaagcaggatatgttaagta

SEQ ID NO: 32153 - DNA, 25 bp, probe
ttctaggcagttcaaagcaggatat

SEQ ID NO: 32154 - DNA, 25 bp, probe
aggcagttcaaagcaggatatgtta

SEQ ID NO: 32155 - DNA, 25 bp, probe
taggcagttcaaagcaggatatgtt

SEQ ID NO: 32156 - DNA, 25 bp, probe
aaagaacggaagaagagatcaggaa

SEQ ID NO: 32157 - DNA, 25 bp, probe
tttctaggcagttcaaagcaggata

SEQ ID NO: 32158 - DNA, 25 bp, probe
tgattggtttctaggcagttcaaag

SEQ ID NO: 32159 - DNA, 25 bp, probe
aagagatcaggaagagaaggagcag

SEQ ID NO: 32160 - DNA, 25 bp, probe
gaagagatcaggaagagaaggagca

SEQ ID NO: 32161 - DNA, 25 bp, probe
gaaagaacggaagaagagatcagga

SEQ ID NO: 32162 - DNA, 25 bp, probe
agaaagaacggaagaagagatcagg

SEQ ID NO: 32163 - DNA, 25 bp, probe
tctaggcagttcaaagcaggatatg

SEQ ID NO: 32164 - DNA, 25 bp, probe
gttcaaagcaggatatgttaagtaa

SEQ ID NO: 32165 - DNA, 25 bp, probe
gcagagaagaaagaacggaagaaga

SEQ ID NO: 32166 - DNA, 25 bp, probe
catgattggtttctaggcagttcaa

SEQ ID NO: 32167 - DNA, 25 bp, probe
gagatcaggaagagaaggagcagag

SEQ ID NO: 32168 - DNA, 25 bp, probe
ctaggcagttcaaagcaggatatgt

SEQ ID NO: 32169 - DNA, 25 bp, probe
ttcaaagcaggatatgttaagtaac

SEQ ID NO: 32170 - DNA, 25 bp, probe
agcaggatatgttaagtaacactca

SEQ ID NO: 32171 - DNA, 25 bp, probe
gattggtttctaggcagttcaaagc

SEQ ID NO: 32172 - DNA, 25 bp, probe
agagatcaggaagagaaggagcaga

SEQ ID NO: 32173 - DNA, 25 bp, probe
atgttaagtaacactcaaccatcag

SEQ ID NO: 32174 - DNA, 25 bp, probe
gcaggatatgttaagtaacactcaa

SEQ ID NO: 32175 - DNA, 25 bp, probe
aagcaggatatgttaagtaacactc

SEQ ID NO: 32176 - DNA, 25 bp, probe
tccttcccaaactgttcaagaaata

SEQ ID NO: 32177 - DNA, 25 bp, probe
ccttcccaaactgttcaagaaataa

SEQ ID NO: 32178 - DNA, 25 bp, probe
ttccttcccaaactgttcaagaaat

SEQ ID NO: 32179 - DNA, 25 bp, probe
cttccttcccaaactgttcaagaaa

SEQ ID NO: 32180 - DNA, 25 bp, probe
cttcccaaactgttcaagaaataat

SEQ ID NO: 32181 - DNA, 25 bp, probe
ctgcttctgctcttgttcttcatcc

SEQ ID NO: 32182 - DNA, 25 bp, probe
ccttccttcccaaactgttcaagaa

SEQ ID NO: 32183 - DNA, 25 bp, probe
tcccaaactgttcaagaaataataa

SEQ ID NO: 32184 - DNA, 25 bp, probe
gctgcttctgctcttgttcttcatc

SEQ ID NO: 32185 - DNA, 25 bp, probe
ttcccaaactgttcaagaaataata

SEQ ID NO: 32186 - DNA, 25 bp, probe
tactgctgcttctgctcttgttctt

SEQ ID NO: 32187 - DNA, 25 bp, probe
ctccttccttcccaaactgttcaag

SEQ ID NO: 32188 - DNA, 25 bp, probe
tctccttccttcccaaactgttcaa

SEQ ID NO: 32189 - DNA, 25 bp, probe
tccttccttcccaaactgttcaaga

SEQ ID NO: 32190 - DNA, 25 bp, probe
tgctgcttctgctcttgttcttcat

SEQ ID NO: 32191 - DNA, 25 bp, probe
ctctccttccttcccaaactgttca

SEQ ID NO: 32192 - DNA, 25 bp, probe
gtactgctgcttctgctcttgttct

SEQ ID NO: 32193 - DNA, 25 bp, probe
tagtttgacctcacagtgacccttc

SEQ ID NO: 32194 - DNA, 25 bp, probe
ctagtttgacctcacagtgaccctt

SEQ ID NO: 32195 - DNA, 25 bp, probe
cctctccttccttcccaaactgttc

SEQ ID NO: 32196 - DNA, 25 bp, probe
ctcctagtttgacctcacagtgacc

SEQ ID NO: 32197 - DNA, 25 bp, probe
tgcttctgctcttgttcttcatccc

SEQ ID NO: 32198 - DNA, 25 bp, probe
gctcctagtttgacctcacagtgac

SEQ ID NO: 32199 - DNA, 25 bp, probe
ccaacgacaggaaaaggtagcttac

SEQ ID NO: 32200 - DNA, 25 bp, probe
tgctcctagtttgacctcacagtga

SEQ ID NO: 32201 - DNA, 25 bp, probe
taaccccaacgacaggaaaaggtag

SEQ ID NO: 32202 - DNA, 25 bp, probe
ctaaccccaacgacaggaaaaggta

SEQ ID NO: 32203 - DNA, 25 bp, probe
cccaacgacaggaaaaggtagctta

SEQ ID NO: 32204 - DNA, 25 bp, probe
acccttcccaatcagcactgaaaat

SEQ ID NO: 32205 - DNA, 25 bp, probe
caacgacaggaaaaggtagcttacc

SEQ ID NO: 32206 - DNA, 25 bp, probe
catccctttccagttaaggaccgtg

SEQ ID NO: 32207 - DNA, 25 bp, probe
caagattgtgaagatgactaagcag

SEQ ID NO: 32208 - DNA, 25 bp, probe
aagattgtgaagatgactaagcagc

SEQ ID NO: 32209 - DNA, 25 bp, probe
gcaagattgtgaagatgactaagca

SEQ ID NO: 32210 - DNA, 25 bp, probe
ccgcaagattgtgaagatgactaag

SEQ ID NO: 32211 - DNA, 25 bp, probe
cgcaagattgtgaagatgactaagc

SEQ ID NO: 32212 - DNA, 25 bp, probe
agtcagtgctgttgcctctaatatg

SEQ ID NO: 32213 - DNA, 25 bp, probe
ctattctgttggctttcatcatcac

SEQ ID NO: 32214 - DNA, 25 bp, probe
caggacaatcttggctattctgttg

SEQ ID NO: 32215 - DNA, 25 bp, probe
gattgtgaagatgactaagcagcct

SEQ ID NO: 32216 - DNA, 25 bp, probe
agattgtgaagatgactaagcagcc

SEQ ID NO: 32217 - DNA, 25 bp, probe
gagatgatgaaataacccaggatga

SEQ ID NO: 32218 - DNA, 25 bp, probe
agagatgatgaaataacccaggatg

SEQ ID NO: 32219 - DNA, 25 bp, probe
gagagatgatgaaataacccaggat

SEQ ID NO: 32220 - DNA, 25 bp, probe
atgagagatgatgaaataacccagg

SEQ ID NO: 32221 - DNA, 25 bp, probe
agatgatgaaataacccaggatgaa

SEQ ID NO: 32222 - DNA, 25 bp, probe
tattctgttggctttcatcatcact

SEQ ID NO: 32223 - DNA, 25 bp, probe
aattggttactggctttgttacatc

SEQ ID NO: 32224 - DNA, 25 bp, probe
gatgatgaaataacccaggatgaaa

SEQ ID NO: 32225 - DNA, 25 bp, probe
tgagagatgatgaaataacccagga

SEQ ID NO: 32226 - DNA, 25 bp, probe
cagtgctgttgcctctaatatgaga

SEQ ID NO: 32227 - DNA, 25 bp, probe
tcagtgctgttgcctctaatatgag

SEQ ID NO: 32228 - DNA, 25 bp, probe
attctgttggctttcatcatcactt

SEQ ID NO: 32229 - DNA, 25 bp, probe
attggttactggctttgttacatca

SEQ ID NO: 32230 - DNA, 25 bp, probe
ccaaagatgagaactctaagcaaac

SEQ ID NO: 32231 - DNA, 25 bp, probe
tccaaagatgagaactctaagcaaa

SEQ ID NO: 32232 - DNA, 25 bp, probe
ttccaaagatgagaactctaagcaa

SEQ ID NO: 32233 - DNA, 25 bp, probe
attccaaagatgagaactctaagca

SEQ ID NO: 32234 - DNA, 25 bp, probe
gtcagtgctgttgcctctaatatga

SEQ ID NO: 32235 - DNA, 25 bp, probe
cattccaaagatgagaactctaagc

SEQ ID NO: 32236 - DNA, 25 bp, probe
caaagatgagaactctaagcaaaca

SEQ ID NO: 32237 - DNA, 25 bp, probe
ccattccaaagatgagaactctaag

SEQ ID NO: 32238 - DNA, 25 bp, probe
gccattccaaagatgagaactctaa

SEQ ID NO: 32239 - DNA, 25 bp, probe
gctattctgttggctttcatcatca

SEQ ID NO: 32240 - DNA, 25 bp, probe
attgtgaagatgactaagcagcctg

SEQ ID NO: 32241 - DNA, 25 bp, probe
caccttctcatgtgtcattataaga

SEQ ID NO: 32242 - DNA, 25 bp, probe
atacaatgtcatggtgctcattaac

SEQ ID NO: 32243 - DNA, 25 bp, probe
catacaatgtcatggtgctcattaa

SEQ ID NO: 32244 - DNA, 25 bp, probe
aggacaatcttggctattctgttgg

SEQ ID NO: 32245 - DNA, 25 bp, probe
tacaatgtcatggtgctcattaaca

SEQ ID NO: 32246 - DNA, 25 bp, probe
cagtcagtgctgttgcctctaatat

SEQ ID NO: 32247 - DNA, 25 bp, probe
ttggttactggctttgttacatcaa

SEQ ID NO: 32248 - DNA, 25 bp, probe
aatcttggctattctgttggctttc

SEQ ID NO: 32249 - DNA, 25 bp, probe
aaagatgagaactctaagcaaacat

SEQ ID NO: 32250 - DNA, 25 bp, probe
ttacatcaacagcactatcaaccct

SEQ ID NO: 32251 - DNA, 25 bp, probe
gaagaccagaagtcagatcactaag

SEQ ID NO: 32252 - DNA, 25 bp, probe
tgaagaccagaagtcagatcactaa

SEQ ID NO: 32253 - DNA, 25 bp, probe
catacaacatcatggttctggtgaa

SEQ ID NO: 32254 - DNA, 25 bp, probe
aacattcagaaccactttcaagatg

SEQ ID NO: 32255 - DNA, 25 bp, probe
atcttgcttgccttcatcatcactt

SEQ ID NO: 32256 - DNA, 25 bp, probe
aaacattcagaaccactttcaagat

SEQ ID NO: 32257 - DNA, 25 bp, probe
aagaccagaagtcagatcactaagc

SEQ ID NO: 32258 - DNA, 25 bp, probe
cattcagaaccactttcaagatgct

SEQ ID NO: 32259 - DNA, 25 bp, probe
acattcagaaccactttcaagatgc

SEQ ID NO: 32260 - DNA, 25 bp, probe
tcttgcttgccttcatcatcacttg

SEQ ID NO: 32261 - DNA, 25 bp, probe
gatcttgcttgccttcatcatcact

SEQ ID NO: 32262 - DNA, 25 bp, probe
attcagaaccactttcaagatgctg

SEQ ID NO: 32263 - DNA, 25 bp, probe
atacaacatcatggttctggtgaac

SEQ ID NO: 32264 - DNA, 25 bp, probe
cagaagtcagatcactaagcggaaa

SEQ ID NO: 32265 - DNA, 25 bp, probe
acaaaacattcagaaccactttcaa

SEQ ID NO: 32266 - DNA, 25 bp, probe
aacaaaacattcagaaccactttca

SEQ ID NO: 32267 - DNA, 25 bp, probe
caacaaaacattcagaaccactttc

SEQ ID NO: 32268 - DNA, 25 bp, probe
aaaacattcagaaccactttcaaga

SEQ ID NO: 32269 - DNA, 25 bp, probe
caaaacattcagaaccactttcaag

SEQ ID NO: 32270 - DNA, 25 bp, probe
ctgaagaccagaagtcagatcacta

SEQ ID NO: 32271 - DNA, 25 bp, probe
cttgcttgccttcatcatcacttgg

SEQ ID NO: 32272 - DNA, 25 bp, probe
ccagaagtcagatcactaagcggaa

SEQ ID NO: 32273 - DNA, 25 bp, probe
agaccagaagtcagatcactaagcg

SEQ ID NO: 32274 - DNA, 25 bp, probe
gcaacaaaacattcagaaccacttt

SEQ ID NO: 32275 - DNA, 25 bp, probe
tacaacatcatggttctggtgaaca

SEQ ID NO: 32276 - DNA, 25 bp, probe
cgatcttgcttgccttcatcatcac

SEQ ID NO: 32277 - DNA, 25 bp, probe
ttgcttgccttcatcatcacttgga

SEQ ID NO: 32278 - DNA, 25 bp, probe
gaagtcagatcactaagcggaaaag

SEQ ID NO: 32279 - DNA, 25 bp, probe
aaaaccttttggaatctgggctact

SEQ ID NO: 32280 - DNA, 25 bp, probe
agaagtcagatcactaagcggaaaa

SEQ ID NO: 32281 - DNA, 25 bp, probe
gaccagaagtcagatcactaagcgg

SEQ ID NO: 32282 - DNA, 25 bp, probe
ttcagaaccactttcaagatgctgc

SEQ ID NO: 32283 - DNA, 25 bp, probe
ccatacaacatcatggttctggtga

SEQ ID NO: 32284 - DNA, 25 bp, probe
agatcactaagcggaaaaggatgtc

SEQ ID NO: 32285 - DNA, 25 bp, probe
tcagatcactaagcggaaaaggatg

SEQ ID NO: 32286 - DNA, 25 bp, probe
gtcagatcactaagcggaaaaggat

SEQ ID NO: 32287 - DNA, 25 bp, probe
accagaagtcagatcactaagcgga

SEQ ID NO: 32288 - DNA, 25 bp, probe
aaaccttttggaatctgggctactg

SEQ ID NO: 32289 - DNA, 25 bp, probe
atgtccctggtcaaggagaagaaag

SEQ ID NO: 32290 - DNA, 25 bp, probe
gatgtccctggtcaaggagaagaaa

SEQ ID NO: 32291 - DNA, 25 bp, probe
cagatcactaagcggaaaaggatgt

SEQ ID NO: 32292 - DNA, 25 bp, probe
acaacatcatggttctggtgaacac

SEQ ID NO: 32293 - DNA, 25 bp, probe
aagtcagatcactaagcggaaaagg

SEQ ID NO: 32294 - DNA, 25 bp, probe
tgcaacaaaacattcagaaccactt

SEQ ID NO: 32295 - DNA, 25 bp, probe
aatgtttagatttggagatgagccc

SEQ ID NO: 32296 - DNA, 25 bp, probe
caatgtttagatttggagatgagcc

SEQ ID NO: 32297 - DNA, 25 bp, probe
acaatgtttagatttggagatgagc

SEQ ID NO: 32298 - DNA, 25 bp, probe
gaagggctttgaacaatgtttagat

SEQ ID NO: 32299 - DNA, 25 bp, probe
agggctttgaacaatgtttagattt

SEQ ID NO: 32300 - DNA, 25 bp, probe
aagggctttgaacaatgtttagatt

SEQ ID NO: 32301 - DNA, 25 bp, probe
ggctttgaacaatgtttagatttgg

SEQ ID NO: 32302 - DNA, 25 bp, probe
gggctttgaacaatgtttagatttg

SEQ ID NO: 32303 - DNA, 25 bp, probe
gctttgaacaatgtttagatttgga

SEQ ID NO: 32304 - DNA, 25 bp, probe
ggaagggctttgaacaatgtttaga

SEQ ID NO: 32305 - DNA, 25 bp, probe
tggaagggctttgaacaatgtttag

SEQ ID NO: 32306 - DNA, 25 bp, probe
gtggaagggctttgaacaatgttta

SEQ ID NO: 32307 - DNA, 25 bp, probe
tgaacaatgtttagatttggagatg

SEQ ID NO: 32308 - DNA, 25 bp, probe
aacaatgtttagatttggagatgag

SEQ ID NO: 32309 - DNA, 25 bp, probe
gaacaatgtttagatttggagatga

SEQ ID NO: 32310 - DNA, 25 bp, probe
atgtttagatttggagatgagccca

SEQ ID NO: 32311 - DNA, 25 bp, probe
ctgtttatcatcgtctgcttcctgg

SEQ ID NO: 32312 - DNA, 25 bp, probe
tttgaacaatgtttagatttggaga

SEQ ID NO: 32313 - DNA, 25 bp, probe
ttgaacaatgtttagatttggagat

SEQ ID NO: 32314 - DNA, 25 bp, probe
ctttgaacaatgtttagatttggag

SEQ ID NO: 32315 - DNA, 25 bp, probe
gctgtttatcatcgtctgcttcctg

SEQ ID NO: 32316 - DNA, 25 bp, probe
ctggctgtttatcatcgtctgcttc

SEQ ID NO: 32317 - DNA, 25 bp, probe
tcctctggctgtttatcatcgtctg

SEQ ID NO: 32318 - DNA, 25 bp, probe
atgtggaagggctttgaacaatgtt

SEQ ID NO: 32319 - DNA, 25 bp, probe
tctggctgtttatcatcgtctgctt

SEQ ID NO: 32320 - DNA, 25 bp, probe
gatgtggaagggctttgaacaatgt

SEQ ID NO: 32321 - DNA, 25 bp, probe
gaagtttggagtctgtccgagtttg

SEQ ID NO: 32322 - DNA, 25 bp, probe
tgtggaagggctttgaacaatgttt

SEQ ID NO: 32323 - DNA, 25 bp, probe
ccaggtgaggtctctctaagtcagg

SEQ ID NO: 32324 - DNA, 25 bp, probe
tgtttatcatcgtctgcttcctggg

SEQ ID NO: 32325 - DNA, 25 bp, probe
ttcttggatgtggaagggctttgaa

SEQ ID NO: 32326 - DNA, 25 bp, probe
ctctggctgtttatcatcgtctgct

SEQ ID NO: 32327 - DNA, 25 bp, probe
gttcctagctggaatgatctgactg

SEQ ID NO: 32328 - DNA, 25 bp, probe
tgaagtttggagtctgtccgagttt

SEQ ID NO: 32329 - DNA, 25 bp, probe
ttgaagtttggagtctgtccgagtt

SEQ ID NO: 32330 - DNA, 25 bp, probe
ggctgtttatcatcgtctgcttcct

SEQ ID NO: 32331 - DNA, 25 bp, probe
ggatgtggaagggctttgaacaatg

SEQ ID NO: 32332 - DNA, 25 bp, probe
ctagctggaatgatctgactgcacc

SEQ ID NO: 32333 - DNA, 25 bp, probe
cctagctggaatgatctgactgcac

SEQ ID NO: 32334 - DNA, 25 bp, probe
ccatccatctggaagcacatttgag

SEQ ID NO: 32335 - DNA, 25 bp, probe
tgtttagatttggagatgagcccaa

SEQ ID NO: 32336 - DNA, 25 bp, probe
tggatgtggaagggctttgaacaat

SEQ ID NO: 32337 - DNA, 25 bp, probe
tatggtccagcaggggagtaataag

SEQ ID NO: 32338 - DNA, 25 bp, probe
gttgaagtttggagtctgtccgagt

SEQ ID NO: 32339 - DNA, 25 bp, probe
tgagagcagaatgaataattgaggt

SEQ ID NO: 32340 - DNA, 25 bp, probe
gagagcagaatgaataattgaggtt

SEQ ID NO: 32341 - DNA, 25 bp, probe
gcagaatgaataattgaggttagga

SEQ ID NO: 32342 - DNA, 25 bp, probe
agcagaatgaataattgaggttagg

SEQ ID NO: 32343 - DNA, 25 bp, probe
ctgagagcagaatgaataattgagg

SEQ ID NO: 32344 - DNA, 25 bp, probe
cctgagagcagaatgaataattgag

SEQ ID NO: 32345 - DNA, 25 bp, probe
agagcagaatgaataattgaggtta

SEQ ID NO: 32346 - DNA, 25 bp, probe
gagcagaatgaataattgaggttag

SEQ ID NO: 32347 - DNA, 25 bp, probe
gcctgagagcagaatgaataattga

SEQ ID NO: 32348 - DNA, 25 bp, probe
cagaatgaataattgaggttaggaa

SEQ ID NO: 32349 - DNA, 25 bp, probe
agaatgaataattgaggttaggaac

SEQ ID NO: 32350 - DNA, 25 bp, probe
tgcctgagagcagaatgaataattg

SEQ ID NO: 32351 - DNA, 25 bp, probe
gtgcctgagagcagaatgaataatt

SEQ ID NO: 32352 - DNA, 25 bp, probe
ggtgcctgagagcagaatgaataat

SEQ ID NO: 32353 - DNA, 25 bp, probe
aggtgcctgagagcagaatgaataa

SEQ ID NO: 32354 - DNA, 25 bp, probe
gaatgaataattgaggttaggaacc

SEQ ID NO: 32355 - DNA, 25 bp, probe
gaggtgcctgagagcagaatgaata

SEQ ID NO: 32356 - DNA, 25 bp, probe
atgaataattgaggttaggaacccg

SEQ ID NO: 32357 - DNA, 25 bp, probe
aatgaataattgaggttaggaaccc

SEQ ID NO: 32358 - DNA, 25 bp, probe
tcccactgagtctcattcctctgtc

SEQ ID NO: 32359 - DNA, 25 bp, probe
tgaataattgaggttaggaacccgg

SEQ ID NO: 32360 - DNA, 25 bp, probe
gaataattgaggttaggaacccggc

SEQ ID NO: 32361 - DNA, 25 bp, probe
ataattgaggttaggaacccggcat

SEQ ID NO: 32362 - DNA, 25 bp, probe
aataattgaggttaggaacccggca

SEQ ID NO: 32363 - DNA, 25 bp, probe
taattgaggttaggaacccggcatg

SEQ ID NO: 32364 - DNA, 25 bp, probe
ctatccttctctgcctcttaactcc

SEQ ID NO: 32365 - DNA, 25 bp, probe
cctatccttctctgcctcttaactc

SEQ ID NO: 32366 - DNA, 25 bp, probe
tatccttctctgcctcttaactcct

SEQ ID NO: 32367 - DNA, 25 bp, probe
cttctctgcctcttaactccttcac

SEQ ID NO: 32368 - DNA, 25 bp, probe
atccttctctgcctcttaactcctt

SEQ ID NO: 32369 - DNA, 25 bp, probe
ttgaagtgagagagtttggtgatac

SEQ ID NO: 32370 - DNA, 25 bp, probe
gttgaagtgagagagtttggtgata

SEQ ID NO: 32371 - DNA, 25 bp, probe
tccttctctgcctcttaactccttc

SEQ ID NO: 32372 - DNA, 25 bp, probe
gagagagtttggtgatactgtcaag

SEQ ID NO: 32373 - DNA, 25 bp, probe
gaagtgagagagtttggtgatactg

SEQ ID NO: 32374 - DNA, 25 bp, probe
agttgaagtgagagagtttggtgat

SEQ ID NO: 32375 - DNA, 25 bp, probe
tgaagtgagagagtttggtgatact

SEQ ID NO: 32376 - DNA, 25 bp, probe
tgagagagtttggtgatactgtcaa

SEQ ID NO: 32377 - DNA, 25 bp, probe
aagtgagagagtttggtgatactgt

SEQ ID NO: 32378 - DNA, 25 bp, probe
ccttctctgcctcttaactccttca

SEQ ID NO: 32379 - DNA, 25 bp, probe
agtgagagagtttggtgatactgtc

SEQ ID NO: 32380 - DNA, 25 bp, probe
atactgtcaagccctatccttctct

SEQ ID NO: 32381 - DNA, 25 bp, probe
gtgagagagtttggtgatactgtca

SEQ ID NO: 32382 - DNA, 25 bp, probe
cagttgaagtgagagagtttggtga

SEQ ID NO: 32383 - DNA, 25 bp, probe
gatactgtcaagccctatccttctc

SEQ ID NO: 32384 - DNA, 25 bp, probe
cttcctgtggactttcatcatcttc

SEQ ID NO: 32385 - DNA, 25 bp, probe
ccctatccttctctgcctcttaact

SEQ ID NO: 32386 - DNA, 25 bp, probe
gtttggtgatactgtcaagccctat

SEQ ID NO: 32387 - DNA, 25 bp, probe
agagagtttggtgatactgtcaagc

SEQ ID NO: 32388 - DNA, 25 bp, probe
tcttcctgtggactttcatcatctt

SEQ ID NO: 32389 - DNA, 25 bp, probe
ttctctgcctcttaactccttcacg

SEQ ID NO: 32390 - DNA, 25 bp, probe
tttggtgatactgtcaagccctatc

SEQ ID NO: 32391 - DNA, 25 bp, probe
gtgatactgtcaagccctatccttc

SEQ ID NO: 32392 - DNA, 25 bp, probe
ttcctgtggactttcatcatcttca

SEQ ID NO: 32393 - DNA, 25 bp, probe
tgatactgtcaagccctatccttct

SEQ ID NO: 32394 - DNA, 25 bp, probe
gatcttcattcacaaacttccgctg

SEQ ID NO: 32395 - DNA, 25 bp, probe
tactgtcaagccctatccttctctg

SEQ ID NO: 32396 - DNA, 25 bp, probe
ctcttcctgtggactttcatcatct

SEQ ID NO: 32397 - DNA, 25 bp, probe
ggtcgtctcctctatcagctacatc

SEQ ID NO: 32398 - DNA, 25 bp, probe
tcttcattcacaaacttccgctgta

SEQ ID NO: 32399 - DNA, 25 bp, probe
attttctcttccccaaacccaatag

SEQ ID NO: 32400 - DNA, 25 bp, probe
gattttctcttccccaaacccaata

SEQ ID NO: 32401 - DNA, 25 bp, probe
cttcattcacaaacttccgctgtac

SEQ ID NO: 32402 - DNA, 25 bp, probe
tcctgtggactttcatcatcttcac

SEQ ID NO: 32403 - DNA, 25 bp, probe
gactttcatcatcttcaccagcgtt

SEQ ID NO: 32404 - DNA, 25 bp, probe
gtcgtctcctctatcagctacatcg

SEQ ID NO: 32405 - DNA, 25 bp, probe
gtcagatcttcattcacaaacttcc

SEQ ID NO: 32406 - DNA, 25 bp, probe
gagagtttggtgatactgtcaagcc

SEQ ID NO: 32407 - DNA, 25 bp, probe
cgtcagatcttcattcacaaacttc

SEQ ID NO: 32408 - DNA, 25 bp, probe
taagtggaagacagagatggcagag

SEQ ID NO: 32409 - DNA, 25 bp, probe
ctaagtggaagacagagatggcaga

SEQ ID NO: 32410 - DNA, 25 bp, probe
gctaagtggaagacagagatggcag

SEQ ID NO: 32411 - DNA, 25 bp, probe
cacagatccatccttttgcttcatc

SEQ ID NO: 32412 - DNA, 25 bp, probe
ctgctaagtggaagacagagatggc

SEQ ID NO: 32413 - DNA, 25 bp, probe
gctgctaagtggaagacagagatgg

SEQ ID NO: 32414 - DNA, 25 bp, probe
ggctgctaagtggaagacagagatg

SEQ ID NO: 32415 - DNA, 25 bp, probe
aggctgctaagtggaagacagagat

SEQ ID NO: 32416 - DNA, 25 bp, probe
aagtcatgggagaagaggggtatag

SEQ ID NO: 32417 - DNA, 25 bp, probe
caaggctgctaagtggaagacagag

SEQ ID NO: 32418 - DNA, 25 bp, probe
caagtcatgggagaagaggggtata

SEQ ID NO: 32419 - DNA, 25 bp, probe
ccacagatccatccttttgcttcat

SEQ ID NO: 32420 - DNA, 25 bp, probe
atgggagaagaggggtataggacaa

SEQ ID NO: 32421 - DNA, 25 bp, probe
cctgacacaatggtagctctgaagg

SEQ ID NO: 32422 - DNA, 25 bp, probe
acagatccatccttttgcttcatct

SEQ ID NO: 32423 - DNA, 25 bp, probe
gatcctctttccccactgaagaatt

SEQ ID NO: 32424 - DNA, 25 bp, probe
tttggctgctctccatctcttgtac

SEQ ID NO: 32425 - DNA, 25 bp, probe
gacacaatggtagctctgaagggag

SEQ ID NO: 32426 - DNA, 25 bp, probe
agatccatccttttgcttcatctgg

SEQ ID NO: 32427 - DNA, 25 bp, probe
tgggagaagaggggtataggacaag

SEQ ID NO: 32428 - DNA, 25 bp, probe
ctgacacaatggtagctctgaaggg

SEQ ID NO: 32429 - DNA, 25 bp, probe
catccttttgcttcatctggagtcc

SEQ ID NO: 32430 - DNA, 25 bp, probe
agatcctctttccccactgaagaat

SEQ ID NO: 32431 - DNA, 25 bp, probe
tcatgggagaagaggggtataggac

SEQ ID NO: 32432 - DNA, 25 bp, probe
gtcatgggagaagaggggtatagga

SEQ ID NO: 32433 - DNA, 25 bp, probe
agtcatgggagaagaggggtatagg

SEQ ID NO: 32434 - DNA, 25 bp, probe
ccatccttttgcttcatctggagtc

SEQ ID NO: 32435 - DNA, 25 bp, probe
catgggagaagaggggtataggaca

SEQ ID NO: 32436 - DNA, 25 bp, probe
ttttggctgctctccatctcttgta

SEQ ID NO: 32437 - DNA, 25 bp, probe
gagaagaggggtataggacaagggg

SEQ ID NO: 32438 - DNA, 25 bp, probe
ggagaagaggggtataggacaaggg

SEQ ID NO: 32439 - DNA, 25 bp, probe
gggagaagaggggtataggacaagg

SEQ ID NO: 32440 - DNA, 25 bp, probe
cagatcctctttccccactgaagaa

SEQ ID NO: 32441 - DNA, 25 bp, probe
atcctctttccccactgaagaattc

SEQ ID NO: 32442 - DNA, 25 bp, probe
caatagtgttgaggaggggagcaag

SEQ ID NO: 32443 - DNA, 25 bp, probe
ctttgttttggctgctctccatctc

SEQ ID NO: 32444 - DNA, 25 bp, probe
atccttttgcttcatctggagtccc

SEQ ID NO: 32445 - DNA, 25 bp, probe
cccacagatccatccttttgcttca

SEQ ID NO: 32446 - DNA, 25 bp, probe
ttgttttggctgctctccatctctt

SEQ ID NO: 32447 - DNA, 25 bp, probe
tttgttttggctgctctccatctct

SEQ ID NO: 32448 - DNA, 25 bp, probe
ccttttgcttcatctggagtccctc

SEQ ID NO: 32449 - DNA, 25 bp, probe
agagacctgctccagatcctctttc

SEQ ID NO: 32450 - DNA, 25 bp, probe
cttgcttctaagggatccagagacc

SEQ ID NO: 32451 - DNA, 25 bp, probe
atccatccttttgcttcatctggag

SEQ ID NO: 32452 - DNA, 25 bp, probe
aattacaccttagacctgacatctg

SEQ ID NO: 32453 - DNA, 25 bp, probe
attacaccttagacctgacatctgg

SEQ ID NO: 32454 - DNA, 25 bp, probe
ggctacatagttaccattaggaatt

SEQ ID NO: 32455 - DNA, 25 bp, probe
agctgctgattccattagatacatt

SEQ ID NO: 32456 - DNA, 25 bp, probe
aagctgctgattccattagatacat

SEQ ID NO: 32457 - DNA, 25 bp, probe
gtggctacatagttaccattaggaa

SEQ ID NO: 32458 - DNA, 25 bp, probe
cttagacctgacatctggctatcac

SEQ ID NO: 32459 - DNA, 25 bp, probe
tgtggctacatagttaccattagga

SEQ ID NO: 32460 - DNA, 25 bp, probe
tggctacatagttaccattaggaat

SEQ ID NO: 32461 - DNA, 25 bp, probe
ctatcacacagacagaatccaaatg

SEQ ID NO: 32462 - DNA, 25 bp, probe
gctgctgattccattagatacattt

SEQ ID NO: 32463 - DNA, 25 bp, probe
ttatcagccaggtagtacaagactg

SEQ ID NO: 32464 - DNA, 25 bp, probe
catcattgttaccgtgtttgtcatt

SEQ ID NO: 32465 - DNA, 25 bp, probe
tgctgattccattagatacatttcg

SEQ ID NO: 32466 - DNA, 25 bp, probe
atcattgttaccgtgtttgtcatta

SEQ ID NO: 32467 - DNA, 25 bp, probe
tcattgttaccgtgtttgtcattaa

SEQ ID NO: 32468 - DNA, 25 bp, probe
aagaggagagtcaaccagtagtgaa

SEQ ID NO: 32469 - DNA, 25 bp, probe
gctatcacacagacagaatccaaat

SEQ ID NO: 32470 - DNA, 25 bp, probe
aagttcttgaccgaatcttcctgtg

SEQ ID NO: 32471 - DNA, 25 bp, probe
tatcacacagacagaatccaaatgc

SEQ ID NO: 32472 - DNA, 25 bp, probe
ttagacctgacatctggctatcaca

SEQ ID NO: 32473 - DNA, 25 bp, probe
aaattacaccttagacctgacatct

SEQ ID NO: 32474 - DNA, 25 bp, probe
aatcttcctgtggctctttctgata

SEQ ID NO: 32475 - DNA, 25 bp, probe
accttagacctgacatctggctatc

SEQ ID NO: 32476 - DNA, 25 bp, probe
gagaaagaggagagtcaaccagtag

SEQ ID NO: 32477 - DNA, 25 bp, probe
atcttcctgtggctctttctgatag

SEQ ID NO: 32478 - DNA, 25 bp, probe
ccttagacctgacatctggctatca

SEQ ID NO: 32479 - DNA, 25 bp, probe
ccatcattgttaccgtgtttgtcat

SEQ ID NO: 32480 - DNA, 25 bp, probe
caccttagacctgacatctggctat

SEQ ID NO: 32481 - DNA, 25 bp, probe
taaattacaccttagacctgacatc

SEQ ID NO: 32482 - DNA, 25 bp, probe
cattggagagtacctgctgttcatc

SEQ ID NO: 32483 - DNA, 25 bp, probe
ctgctgattccattagatacatttc

SEQ ID NO: 32484 - DNA, 25 bp, probe
agagaaagaggagagtcaaccagta

SEQ ID NO: 32485 - DNA, 25 bp, probe
atgtggctacatagttaccattagg

SEQ ID NO: 32486 - DNA, 25 bp, probe
gaagatgtggctacatagttaccat

SEQ ID NO: 32487 - DNA, 25 bp, probe
aagatgtggctacatagttaccatt

SEQ ID NO: 32488 - DNA, 25 bp, probe
ttgaagatgtggctacatagttacc

SEQ ID NO: 32489 - DNA, 25 bp, probe
actaaattacaccttagacctgaca

SEQ ID NO: 32490 - DNA, 25 bp, probe
tttatcagccaggtagtacaagact

SEQ ID NO: 32491 - DNA, 25 bp, probe
gaaagaggagagtcaaccagtagtg

SEQ ID NO: 32492 - DNA, 25 bp, probe
agaaagaggagagtcaaccagtagt

SEQ ID NO: 32493 - DNA, 25 bp, probe
tagacctgacatctggctatcacac

SEQ ID NO: 32494 - DNA, 25 bp, probe
caagttcttgaccgaatcttcctgt

SEQ ID NO: 32495 - DNA, 25 bp, probe
agatgtggctacatagttaccatta

SEQ ID NO: 32496 - DNA, 25 bp, probe
accagaacaattacaatgaggagaa

SEQ ID NO: 32497 - DNA, 25 bp, probe
gaccagaacaattacaatgaggaga

SEQ ID NO: 32498 - DNA, 25 bp, probe
ggaccagaacaattacaatgaggag

SEQ ID NO: 32499 - DNA, 25 bp, probe
caattacaatgaggagaaagacagc

SEQ ID NO: 32500 - DNA, 25 bp, probe
ccagaacaattacaatgaggagaaa

SEQ ID NO: 32501 - DNA, 25 bp, probe
acaattacaatgaggagaaagacag

SEQ ID NO: 32502 - DNA, 25 bp, probe
atgagggaccagaacaattacaatg

SEQ ID NO: 32503 - DNA, 25 bp, probe
gagggaccagaacaattacaatgag

SEQ ID NO: 32504 - DNA, 25 bp, probe
aacaattacaatgaggagaaagaca

SEQ ID NO: 32505 - DNA, 25 bp, probe
gaacaattacaatgaggagaaagac

SEQ ID NO: 32506 - DNA, 25 bp, probe
cagaacaattacaatgaggagaaag

SEQ ID NO: 32507 - DNA, 25 bp, probe
tgagggaccagaacaattacaatga

SEQ ID NO: 32508 - DNA, 25 bp, probe
agaacaattacaatgaggagaaaga

SEQ ID NO: 32509 - DNA, 25 bp, probe
catgagggaccagaacaattacaat

SEQ ID NO: 32510 - DNA, 25 bp, probe
aattacaatgaggagaaagacagct

SEQ ID NO: 32511 - DNA, 25 bp, probe
gggaccagaacaattacaatgagga

SEQ ID NO: 32512 - DNA, 25 bp, probe
agggaccagaacaattacaatgagg

SEQ ID NO: 32513 - DNA, 25 bp, probe
acatgagggaccagaacaattacaa

SEQ ID NO: 32514 - DNA, 25 bp, probe
cacatgagggaccagaacaattaca

SEQ ID NO: 32515 - DNA, 25 bp, probe
ccacatgagggaccagaacaattac

SEQ ID NO: 32516 - DNA, 25 bp, probe
accacatgagggaccagaacaatta

SEQ ID NO: 32517 - DNA, 25 bp, probe
taaccacatgagggaccagaacaat

SEQ ID NO: 32518 - DNA, 25 bp, probe
ggcaaacttcattgttaaccacatg

SEQ ID NO: 32519 - DNA, 25 bp, probe
ttaaccacatgagggaccagaacaa

SEQ ID NO: 32520 - DNA, 25 bp, probe
gggcaaacttcattgttaaccacat

SEQ ID NO: 32521 - DNA, 25 bp, probe
aaacttcattgttaaccacatgagg

SEQ ID NO: 32522 - DNA, 25 bp, probe
gcaaacttcattgttaaccacatga

SEQ ID NO: 32523 - DNA, 25 bp, probe
caaacttcattgttaaccacatgag

SEQ ID NO: 32524 - DNA, 25 bp, probe
aaccacatgagggaccagaacaatt

SEQ ID NO: 32525 - DNA, 25 bp, probe
tggatggggcaaacttcattgttaa

SEQ ID NO: 32526 - DNA, 25 bp, probe
aacttcattgttaaccacatgaggg

SEQ ID NO: 32527 - DNA, 25 bp, probe
cctcatgttcgagaagcagtcagag

SEQ ID NO: 32528 - DNA, 25 bp, probe
cttcattgttaaccacatgagggac

SEQ ID NO: 32529 - DNA, 25 bp, probe
agcaggaactcttcaatgagctgaa

SEQ ID NO: 32530 - DNA, 25 bp, probe
acttcattgttaaccacatgaggga

SEQ ID NO: 32531 - DNA, 25 bp, probe
agtccctaatgacacccactcctag

SEQ ID NO: 32532 - DNA, 25 bp, probe
cagtccctaatgacacccactccta

SEQ ID NO: 32533 - DNA, 25 bp, probe
gtggatggggcaaacttcattgtta

SEQ ID NO: 32534 - DNA, 25 bp, probe
cattgttaaccacatgagggaccag

SEQ ID NO: 32535 - DNA, 25 bp, probe
attgttaaccacatgagggaccaga

SEQ ID NO: 32536 - DNA, 25 bp, probe
ttgttaaccacatgagggaccagaa

SEQ ID NO: 32537 - DNA, 25 bp, probe
ttcattgttaaccacatgagggacc

SEQ ID NO: 32538 - DNA, 25 bp, probe
gatggggcaaacttcattgttaacc

SEQ ID NO: 32539 - DNA, 25 bp, probe
ggatggggcaaacttcattgttaac

SEQ ID NO: 32540 - DNA, 25 bp, probe
caagtgtgacatctaccagtccaag

SEQ ID NO: 32541 - DNA, 25 bp, probe
acaagtgtgacatctaccagtccaa

SEQ ID NO: 32542 - DNA, 25 bp, probe
aagtgtgacatctaccagtccaagg

SEQ ID NO: 32543 - DNA, 25 bp, probe
gtgtgacatctaccagtccaaggag

SEQ ID NO: 32544 - DNA, 25 bp, probe
agtgtgacatctaccagtccaagga

SEQ ID NO: 32545 - DNA, 25 bp, probe
cacaagtgtgacatctaccagtcca

SEQ ID NO: 32546 - DNA, 25 bp, probe
tgcacaagtgtgacatctaccagtc

SEQ ID NO: 32547 - DNA, 25 bp, probe
ctgcacaagtgtgacatctaccagt

SEQ ID NO: 32548 - DNA, 25 bp, probe
tagactctgtaacatcactatccga

SEQ ID NO: 32549 - DNA, 25 bp, probe
catcatctacaccaccttcaacatt

SEQ ID NO: 32550 - DNA, 25 bp, probe
agactctgtaacatcactatccgat

SEQ ID NO: 32551 - DNA, 25 bp, probe
atcatctacaccaccttcaacattg

SEQ ID NO: 32552 - DNA, 25 bp, probe
gcctagactctgtaacatcactatc

SEQ ID NO: 32553 - DNA, 25 bp, probe
ctagactctgtaacatcactatccg

SEQ ID NO: 32554 - DNA, 25 bp, probe
cctagactctgtaacatcactatcc

SEQ ID NO: 32555 - DNA, 25 bp, probe
atcacacacatcctgaacatacact

SEQ ID NO: 32556 - DNA, 25 bp, probe
catcacacacatcctgaacatacac

SEQ ID NO: 32557 - DNA, 25 bp, probe
tcatcacacacatcctgaacataca

SEQ ID NO: 32558 - DNA, 25 bp, probe
ccatcatctacaccaccttcaacat

SEQ ID NO: 32559 - DNA, 25 bp, probe
catctacaccaccttcaacattgag

SEQ ID NO: 32560 - DNA, 25 bp, probe
ctacaccaccttcaacattgagttc

SEQ ID NO: 32561 - DNA, 25 bp, probe
atctacaccaccttcaacattgagt

SEQ ID NO: 32562 - DNA, 25 bp, probe
tcatctacaccaccttcaacattga

SEQ ID NO: 32563 - DNA, 25 bp, probe
tctacaccaccttcaacattgagtt

SEQ ID NO: 32564 - DNA, 25 bp, probe
tcacacacatcctgaacatacactg

SEQ ID NO: 32565 - DNA, 25 bp, probe
acatcctgaacatacactgtgactg

SEQ ID NO: 32566 - DNA, 25 bp, probe
cacacacatcctgaacatacactgt

SEQ ID NO: 32567 - DNA, 25 bp, probe
tacaccaccttcaacattgagttcc

SEQ ID NO: 32568 - DNA, 25 bp, probe
cttcatcacacacatcctgaacata

SEQ ID NO: 32569 - DNA, 25 bp, probe
ttcatcacacacatcctgaacatac

SEQ ID NO: 32570 - DNA, 25 bp, probe
ggcctagactctgtaacatcactat

SEQ ID NO: 32571 - DNA, 25 bp, probe
gactctgtaacatcactatccgatg

SEQ ID NO: 32572 - DNA, 25 bp, probe
actatccgatgcaccaaactaataa

SEQ ID NO: 32573 - DNA, 25 bp, probe
ctagggacatcagaggttctttgag

SEQ ID NO: 32574 - DNA, 25 bp, probe
cttcttcatcacacacatcctgaac

SEQ ID NO: 32575 - DNA, 25 bp, probe
cactatccgatgcaccaaactaata

SEQ ID NO: 32576 - DNA, 25 bp, probe
ctatccgatgcaccaaactaataaa

SEQ ID NO: 32577 - DNA, 25 bp, probe
gaacatacactgtgactgcaacatc

SEQ ID NO: 32578 - DNA, 25 bp, probe
catcctgaacatacactgtgactgc

SEQ ID NO: 32579 - DNA, 25 bp, probe
ggagacccatgtaaataccagactg

SEQ ID NO: 32580 - DNA, 25 bp, probe
tcttcatcacacacatcctgaacat

SEQ ID NO: 32581 - DNA, 25 bp, probe
ttcttcatcacacacatcctgaaca

SEQ ID NO: 32582 - DNA, 25 bp, probe
actctgtaacatcactatccgatgc

SEQ ID NO: 32583 - DNA, 25 bp, probe
accactttccttttctattccttct

SEQ ID NO: 32584 - DNA, 25 bp, probe
tgaacatacactgtgactgcaacat

SEQ ID NO: 32585 - DNA, 25 bp, probe
cactttccttttctattccttctgg

SEQ ID NO: 32586 - DNA, 25 bp, probe
ccactttccttttctattccttctg

SEQ ID NO: 32587 - DNA, 25 bp, probe
actttccttttctattccttctggc

SEQ ID NO: 32588 - DNA, 25 bp, probe
aaccactttccttttctattccttc

SEQ ID NO: 32589 - DNA, 25 bp, probe
gagacccatgtaaataccagactgc

SEQ ID NO: 32590 - DNA, 25 bp, probe
tcactatccgatgcaccaaactaat

SEQ ID NO: 32591 - DNA, 25 bp, probe
ccttcttcatcacacacatcctgaa

SEQ ID NO: 32592 - DNA, 25 bp, probe
gtccttgtctatgccagaatctatg

SEQ ID NO: 32593 - DNA, 25 bp, probe
ccttgtctatgccagaatctatgtg

SEQ ID NO: 32594 - DNA, 25 bp, probe
tccttgtctatgccagaatctatgt

SEQ ID NO: 32595 - DNA, 25 bp, probe
tgtccttgtctatgccagaatctat

SEQ ID NO: 32596 - DNA, 25 bp, probe
tataccaccttcaatatcgagttcc

SEQ ID NO: 32597 - DNA, 25 bp, probe
ctgtccttgtctatgccagaatcta

SEQ ID NO: 32598 - DNA, 25 bp, probe
cctgtgatctataccaccttcaata

SEQ ID NO: 32599 - DNA, 25 bp, probe
tctataccaccttcaatatcgagtt

SEQ ID NO: 32600 - DNA, 25 bp, probe
cttgtctatgccagaatctatgtgg

SEQ ID NO: 32601 - DNA, 25 bp, probe
ctataccaccttcaatatcgagttc

SEQ ID NO: 32602 - DNA, 25 bp, probe
atctataccaccttcaatatcgagt

SEQ ID NO: 32603 - DNA, 25 bp, probe
gtgatctataccaccttcaatatcg

SEQ ID NO: 32604 - DNA, 25 bp, probe
ttgtctatgccagaatctatgtggt

SEQ ID NO: 32605 - DNA, 25 bp, probe
gatctataccaccttcaatatcgag

SEQ ID NO: 32606 - DNA, 25 bp, probe
tgatctataccaccttcaatatcga

SEQ ID NO: 32607 - DNA, 25 bp, probe
ataccaccttcaatatcgagttccg

SEQ ID NO: 32608 - DNA, 25 bp, probe
tgtctatgccagaatctatgtggtg

SEQ ID NO: 32609 - DNA, 25 bp, probe
tgtgatctataccaccttcaatatc

SEQ ID NO: 32610 - DNA, 25 bp, probe
ctgtgatctataccaccttcaatat

SEQ ID NO: 32611 - DNA, 25 bp, probe
gaatctatgtggtgctgaaacaaag

SEQ ID NO: 32612 - DNA, 25 bp, probe
agaatctatgtggtgctgaaacaaa

SEQ ID NO: 32613 - DNA, 25 bp, probe
gactgtccttgtctatgccagaatc

SEQ ID NO: 32614 - DNA, 25 bp, probe
ccaagaaagaggaggagagttgaaa

SEQ ID NO: 32615 - DNA, 25 bp, probe
aatctatgtggtgctgaaacaaagg

SEQ ID NO: 32616 - DNA, 25 bp, probe
cagaatctatgtggtgctgaaacaa

SEQ ID NO: 32617 - DNA, 25 bp, probe
actgtccttgtctatgccagaatct

SEQ ID NO: 32618 - DNA, 25 bp, probe
tgactgtccttgtctatgccagaat

SEQ ID NO: 32619 - DNA, 25 bp, probe
ccctgtgatctataccaccttcaat

SEQ ID NO: 32620 - DNA, 25 bp, probe
atctatgtggtgctgaaacaaagga

SEQ ID NO: 32621 - DNA, 25 bp, probe
ctatgccagaatctatgtggtgctg

SEQ ID NO: 32622 - DNA, 25 bp, probe
gtctatgccagaatctatgtggtgc

SEQ ID NO: 32623 - DNA, 25 bp, probe
tcagcaatggcagattatcgacatc

SEQ ID NO: 32624 - DNA, 25 bp, probe
ctcagcaatggcagattatcgacat

SEQ ID NO: 32625 - DNA, 25 bp, probe
gattatcgacatctttgaagctggg

SEQ ID NO: 32626 - DNA, 25 bp, probe
tctatgccagaatctatgtggtgct

SEQ ID NO: 32627 - DNA, 25 bp, probe
aactcagcaatggcagattatcgac

SEQ ID NO: 32628 - DNA, 25 bp, probe
aagaaagaggaggagagttgaaaag

SEQ ID NO: 32629 - DNA, 25 bp, probe
gagagttgaaaagagaggagaagac

SEQ ID NO: 32630 - DNA, 25 bp, probe
tatgccagaatctatgtggtgctga

SEQ ID NO: 32631 - DNA, 25 bp, probe
gaaaactcagcaatggcagattatc

SEQ ID NO: 32632 - DNA, 25 bp, probe
gaaagaggaggagagttgaaaagag

SEQ ID NO: 32633 - DNA, 25 bp, probe
aaagaggaggagagttgaaaagaga

SEQ ID NO: 32634 - DNA, 25 bp, probe
agaaagaggaggagagttgaaaaga

SEQ ID NO: 32635 - DNA, 25 bp, probe
ctatgtggtgctgaaacaaaggaga

SEQ ID NO: 32636 - DNA, 25 bp, probe
acgttaattaaacaaattccttccc

SEQ ID NO: 32637 - DNA, 25 bp, probe
agggcgcttttgtacgttaattaaa

SEQ ID NO: 32638 - DNA, 25 bp, probe
tacgttaattaaacaaattccttcc

SEQ ID NO: 32639 - DNA, 25 bp, probe
ggcgcttttgtacgttaattaaaca

SEQ ID NO: 32640 - DNA, 25 bp, probe
gggcgcttttgtacgttaattaaac

SEQ ID NO: 32641 - DNA, 25 bp, probe
gagggcgcttttgtacgttaattaa

SEQ ID NO: 32642 - DNA, 25 bp, probe
ccccgtcatctacactgtcttcaac

SEQ ID NO: 32643 - DNA, 25 bp, probe
caaccccgtcatctacactgtcttc

SEQ ID NO: 32644 - DNA, 25 bp, probe
tgtacgttaattaaacaaattcctt

SEQ ID NO: 32645 - DNA, 25 bp, probe
gtacgttaattaaacaaattccttc

SEQ ID NO: 32646 - DNA, 25 bp, probe
gcgcttttgtacgttaattaaacaa

SEQ ID NO: 32647 - DNA, 25 bp, probe
ggagggcgcttttgtacgttaatta

SEQ ID NO: 32648 - DNA, 25 bp, probe
ttgtacgttaattaaacaaattcct

SEQ ID NO: 32649 - DNA, 25 bp, probe
ttactcacattctgttgttcagttc

SEQ ID NO: 32650 - DNA, 25 bp, probe
tactcacattctgttgttcagttcc

SEQ ID NO: 32651 - DNA, 25 bp, probe
ctcacattctgttgttcagttcctc

SEQ ID NO: 32652 - DNA, 25 bp, probe
cacattctgttgttcagttcctctg

SEQ ID NO: 32653 - DNA, 25 bp, probe
tcacattctgttgttcagttcctct

SEQ ID NO: 32654 - DNA, 25 bp, probe
cgctgctatttggaatctttaactt

SEQ ID NO: 32655 - DNA, 25 bp, probe
ctttaacttagtctactgggctacg

SEQ ID NO: 32656 - DNA, 25 bp, probe
tctttaacttagtctactgggctac

SEQ ID NO: 32657 - DNA, 25 bp, probe
aatctttaacttagtctactgggct

SEQ ID NO: 32658 - DNA, 25 bp, probe
actcacattctgttgttcagttcct

SEQ ID NO: 32659 - DNA, 25 bp, probe
gaatctttaacttagtctactgggc

SEQ ID NO: 32660 - DNA, 25 bp, probe
tttatgttctcaacgcagtaattcc

SEQ ID NO: 32661 - DNA, 25 bp, probe
gggaatttatttatgttctcaacgc

SEQ ID NO: 32662 - DNA, 25 bp, probe
agtaattcccatctgcctttattgc

SEQ ID NO: 32663 - DNA, 25 bp, probe
atctgcctttattgcctctgtctta

SEQ ID NO: 32664 - DNA, 25 bp, probe
ccgctgctatttggaatctttaact

SEQ ID NO: 32665 - DNA, 25 bp, probe
atctttaacttagtctactgggcta

SEQ ID NO: 32666 - DNA, 25 bp, probe
ggaatctttaacttagtctactggg

SEQ ID NO: 32667 - DNA, 25 bp, probe
tgccacagtaaactatttcactaag

SEQ ID NO: 32668 - DNA, 25 bp, probe
ctgcctttattgcctctgtcttaaa

SEQ ID NO: 32669 - DNA, 25 bp, probe
ttatgttctcaacgcagtaattccc

SEQ ID NO: 32670 - DNA, 25 bp, probe
gcactgggaatttatttatgttctc

SEQ ID NO: 32671 - DNA, 25 bp, probe
actatttcactaagagaggttatgc

SEQ ID NO: 32672 - DNA, 25 bp, probe
gccacagtaaactatttcactaaga

SEQ ID NO: 32673 - DNA, 25 bp, probe
tgcctctgtcttaaagaatttgaaa

SEQ ID NO: 32674 - DNA, 25 bp, probe
ttgcctctgtcttaaagaatttgaa

SEQ ID NO: 32675 - DNA, 25 bp, probe
tctgcctttattgcctctgtcttaa

SEQ ID NO: 32676 - DNA, 25 bp, probe
ggaatttatttatgttctcaacgca

SEQ ID NO: 32677 - DNA, 25 bp, probe
attgcctctgtcttaaagaatttga

SEQ ID NO: 32678 - DNA, 25 bp, probe
cagtaattcccatctgcctttattg

SEQ ID NO: 32679 - DNA, 25 bp, probe
ttgccacagtaaactatttcactaa

SEQ ID NO: 32680 - DNA, 25 bp, probe
tttgccacagtaaactatttcacta

SEQ ID NO: 32681 - DNA, 25 bp, probe
atttatgttctcaacgcagtaattc

SEQ ID NO: 32682 - DNA, 25 bp, probe
gcctctgtcttaaagaatttgaaag

SEQ ID NO: 32683 - DNA, 25 bp, probe
tttactcacattctgttgttcagtt

SEQ ID NO: 32684 - DNA, 25 bp, probe
tggaatctttaacttagtctactgg

SEQ ID NO: 32685 - DNA, 25 bp, probe
taattcccatctgcctttattgcct

SEQ ID NO: 32686 - DNA, 25 bp, probe
gtaattcccatctgcctttattgcc

SEQ ID NO: 32687 - DNA, 25 bp, probe
gctgctatttggaatctttaactta

SEQ ID NO: 32688 - DNA, 25 bp, probe
tgggaatttatttatgttctcaacg

SEQ ID NO: 32689 - DNA, 25 bp, probe
ctatggattggtttattgccgtgtg

SEQ ID NO: 32690 - DNA, 25 bp, probe
ctctgattgagtttgccacagtaaa

SEQ ID NO: 32691 - DNA, 25 bp, probe
tatgttctcaacgcagtaattccca

SEQ ID NO: 32692 - DNA, 25 bp, probe
aatttatttatgttctcaacgcagt

SEQ ID NO: 32693 - DNA, 25 bp, probe
gagtatcagtgccagaaattcctta

SEQ ID NO: 32694 - DNA, 25 bp, probe
agtatcagtgccagaaattccttac

SEQ ID NO: 32695 - DNA, 25 bp, probe
agaaattccttacctaaagtggcat

SEQ ID NO: 32696 - DNA, 25 bp, probe
tgccatattcaatctggtctattgg

SEQ ID NO: 32697 - DNA, 25 bp, probe
ttgccatattcaatctggtctattg

SEQ ID NO: 32698 - DNA, 25 bp, probe
cagtgccagaaattccttacctaaa

SEQ ID NO: 32699 - DNA, 25 bp, probe
agtgccagaaattccttacctaaag

SEQ ID NO: 32700 - DNA, 25 bp, probe
gaatttgccactgtcaactatttca

SEQ ID NO: 32701 - DNA, 25 bp, probe
aatttgccactgtcaactatttcac

SEQ ID NO: 32702 - DNA, 25 bp, probe
cagaaattccttacctaaagtggca

SEQ ID NO: 32703 - DNA, 25 bp, probe
tgccagaaattccttacctaaagtg

SEQ ID NO: 32704 - DNA, 25 bp, probe
gtgccagaaattccttacctaaagt

SEQ ID NO: 32705 - DNA, 25 bp, probe
tgaatttgccactgtcaactatttc

SEQ ID NO: 32706 - DNA, 25 bp, probe
atcagtgccagaaattccttaccta

SEQ ID NO: 32707 - DNA, 25 bp, probe
tatcagtgccagaaattccttacct

SEQ ID NO: 32708 - DNA, 25 bp, probe
gtatcagtgccagaaattccttacc

SEQ ID NO: 32709 - DNA, 25 bp, probe
gaaattccttacctaaagtggcata

SEQ ID NO: 32710 - DNA, 25 bp, probe
tcagtgccagaaattccttacctaa

SEQ ID NO: 32711 - DNA, 25 bp, probe
ctgtgctctttgccatattcaatct

SEQ ID NO: 32712 - DNA, 25 bp, probe
atagccgtctgttatgcctttgtat

SEQ ID NO: 32713 - DNA, 25 bp, probe
aaattccttacctaaagtggcatat

SEQ ID NO: 32714 - DNA, 25 bp, probe
cttgagtatcagtgccagaaattcc

SEQ ID NO: 32715 - DNA, 25 bp, probe
ccttgagtatcagtgccagaaattc

SEQ ID NO: 32716 - DNA, 25 bp, probe
tagccgtctgttatgcctttgtatt

SEQ ID NO: 32717 - DNA, 25 bp, probe
tgtgctctttgccatattcaatctg

SEQ ID NO: 32718 - DNA, 25 bp, probe
atttgccactgtcaactatttcacc

SEQ ID NO: 32719 - DNA, 25 bp, probe
ctttcctgtgctctttgccatattc

SEQ ID NO: 32720 - DNA, 25 bp, probe
tgagtatcagtgccagaaattcctt

SEQ ID NO: 32721 - DNA, 25 bp, probe
ttgagtatcagtgccagaaattcct

SEQ ID NO: 32722 - DNA, 25 bp, probe
catgatccgcaaacagtagatagtg

SEQ ID NO: 32723 - DNA, 25 bp, probe
atctttcctgtgctctttgccatat

SEQ ID NO: 32724 - DNA, 25 bp, probe
tctttgccatattcaatctggtcta

SEQ ID NO: 32725 - DNA, 25 bp, probe
accttgagtatcagtgccagaaatt

SEQ ID NO: 32726 - DNA, 25 bp, probe
ctctttgccatattcaatctggtct

SEQ ID NO: 32727 - DNA, 25 bp, probe
cctgtgctctttgccatattcaatc

SEQ ID NO: 32728 - DNA, 25 bp, probe
tctttcctgtgctctttgccatatt

SEQ ID NO: 32729 - DNA, 25 bp, probe
gactggttcatagccgtctgttatg

SEQ ID NO: 32730 - DNA, 25 bp, probe
ctttgccatattcaatctggtctat

SEQ ID NO: 32731 - DNA, 25 bp, probe
atgatccgcaaacagtagatagtgg

SEQ ID NO: 32732 - DNA, 25 bp, probe
tttcctgtgctctttgccatattca

SEQ ID NO: 32733 - DNA, 25 bp, probe
tttgccatattcaatctggtctatt

SEQ ID NO: 32734 - DNA, 25 bp, probe
tcctgtgctctttgccatattcaat

SEQ ID NO: 32735 - DNA, 25 bp, probe
agccgtctgttatgcctttgtattt

SEQ ID NO: 32736 - DNA, 25 bp, probe
ccagaaattccttacctaaagtggc

SEQ ID NO: 32737 - DNA, 25 bp, probe
ttccatctgcttctcctacttctat

SEQ ID NO: 32738 - DNA, 25 bp, probe
tccatctgcttctcctacttctatc

SEQ ID NO: 32739 - DNA, 25 bp, probe
cttccatctgcttctcctacttcta

SEQ ID NO: 32740 - DNA, 25 bp, probe
cttccacagttgttcaagaatcttc

SEQ ID NO: 32741 - DNA, 25 bp, probe
ccatctgcttctcctacttctatcc

SEQ ID NO: 32742 - DNA, 25 bp, probe
tccacagttgttcaagaatcttcta

SEQ ID NO: 32743 - DNA, 25 bp, probe
ttccacagttgttcaagaatcttct

SEQ ID NO: 32744 - DNA, 25 bp, probe
ccacagttgttcaagaatcttctaa

SEQ ID NO: 32745 - DNA, 25 bp, probe
cttctcctacttctatccgaactgg

SEQ ID NO: 32746 - DNA, 25 bp, probe
catctgcttctcctacttctatccg

SEQ ID NO: 32747 - DNA, 25 bp, probe
atctgcttctcctacttctatccga

SEQ ID NO: 32748 - DNA, 25 bp, probe
gcttctcctacttctatccgaactg

SEQ ID NO: 32749 - DNA, 25 bp, probe
ctgcttctcctacttctatccgaac

SEQ ID NO: 32750 - DNA, 25 bp, probe
tctgcttctcctacttctatccgaa

SEQ ID NO: 32751 - DNA, 25 bp, probe
ctacttctatccgaactggacatat

SEQ ID NO: 32752 - DNA, 25 bp, probe
cctacttctatccgaactggacata

SEQ ID NO: 32753 - DNA, 25 bp, probe
cacttccatctgcttctcctacttc

SEQ ID NO: 32754 - DNA, 25 bp, probe
tgcttctcctacttctatccgaact

SEQ ID NO: 32755 - DNA, 25 bp, probe
acttccatctgcttctcctacttct

SEQ ID NO: 32756 - DNA, 25 bp, probe
aggacactatggagaaatcagaaag

SEQ ID NO: 32757 - DNA, 25 bp, probe
cgtattctctttccagtcacatttg

SEQ ID NO: 32758 - DNA, 25 bp, probe
aaggacactatggagaaatcagaaa

SEQ ID NO: 32759 - DNA, 25 bp, probe
aaagaccacagttaataccataggg

SEQ ID NO: 32760 - DNA, 25 bp, probe
ctaaggacactatggagaaatcaga

SEQ ID NO: 32761 - DNA, 25 bp, probe
gcagaggataaagaccacagttaat

SEQ ID NO: 32762 - DNA, 25 bp, probe
taaggacactatggagaaatcagaa

SEQ ID NO: 32763 - DNA, 25 bp, probe
ccgtattctctttccagtcacattt

SEQ ID NO: 32764 - DNA, 25 bp, probe
aggataaagaccacagttaatacca

SEQ ID NO: 32765 - DNA, 25 bp, probe
gacaaatatgcccgtattctctttc

SEQ ID NO: 32766 - DNA, 25 bp, probe
agacaaatatgcccgtattctcttt

SEQ ID NO: 32767 - DNA, 25 bp, probe
tagacaaatatgcccgtattctctt

SEQ ID NO: 32768 - DNA, 25 bp, probe
atagacaaatatgcccgtattctct

SEQ ID NO: 32769 - DNA, 25 bp, probe
tctaaggacactatggagaaatcag

SEQ ID NO: 32770 - DNA, 25 bp, probe
aaatatgcccgtattctctttccag

SEQ ID NO: 32771 - DNA, 25 bp, probe
gaggataaagaccacagttaatacc

SEQ ID NO: 32772 - DNA, 25 bp, probe
ttctcctacttctatccgaactgga

SEQ ID NO: 32773 - DNA, 25 bp, probe
ggacactatggagaaatcagaaagt

SEQ ID NO: 32774 - DNA, 25 bp, probe
atcttccacagttgttcaagaatct

SEQ ID NO: 32775 - DNA, 25 bp, probe
aatcttccacagttgttcaagaatc

SEQ ID NO: 32776 - DNA, 25 bp, probe
tcttccacagttgttcaagaatctt

SEQ ID NO: 32777 - DNA, 25 bp, probe
gaaaccattcaagcaaatcttccac

SEQ ID NO: 32778 - DNA, 25 bp, probe
acactatggagaaatcagaaagtct

SEQ ID NO: 32779 - DNA, 25 bp, probe
caaatatgcccgtattctctttcca

SEQ ID NO: 32780 - DNA, 25 bp, probe
acaaatatgcccgtattctctttcc

SEQ ID NO: 32781 - DNA, 25 bp, probe
tagaagaccaactatattgcgagaa

SEQ ID NO: 32782 - DNA, 25 bp, probe
ttagaagaccaactatattgcgaga

SEQ ID NO: 32783 - DNA, 25 bp, probe
attagaagaccaactatattgcgag

SEQ ID NO: 32784 - DNA, 25 bp, probe
actctccatgattattagaagacca

SEQ ID NO: 32785 - DNA, 25 bp, probe
ttaactgcttcaagtgttacctaac

SEQ ID NO: 32786 - DNA, 25 bp, probe
ctccatgattattagaagaccaact

SEQ ID NO: 32787 - DNA, 25 bp, probe
acacgaagaaatagaataggcaaac

SEQ ID NO: 32788 - DNA, 25 bp, probe
tctccatgattattagaagaccaac

SEQ ID NO: 32789 - DNA, 25 bp, probe
cacgaagaaatagaataggcaaact

SEQ ID NO: 32790 - DNA, 25 bp, probe
tattagaagaccaactatattgcga

SEQ ID NO: 32791 - DNA, 25 bp, probe
ctctccatgattattagaagaccaa

SEQ ID NO: 32792 - DNA, 25 bp, probe
aactctccatgattattagaagacc

SEQ ID NO: 32793 - DNA, 25 bp, probe
gaagaccaactatattgcgagaaac

SEQ ID NO: 32794 - DNA, 25 bp, probe
agaagaccaactatattgcgagaaa

SEQ ID NO: 32795 - DNA, 25 bp, probe
atgtttccaagatgtcccattgata

SEQ ID NO: 32796 - DNA, 25 bp, probe
gtaacttcagatgtttccaagatgt

SEQ ID NO: 32797 - DNA, 25 bp, probe
tgtaacttcagatgtttccaagatg

SEQ ID NO: 32798 - DNA, 25 bp, probe
tgtttccaagatgtcccattgataa

SEQ ID NO: 32799 - DNA, 25 bp, probe
aagaccaactatattgcgagaaaca

SEQ ID NO: 32800 - DNA, 25 bp, probe
ccaactatattgcgagaaacagaga

SEQ ID NO: 32801 - DNA, 25 bp, probe
gtttccaagatgtcccattgataat

SEQ ID NO: 32802 - DNA, 25 bp, probe
taacttcagatgtttccaagatgtc

SEQ ID NO: 32803 - DNA, 25 bp, probe
acgaagaaatagaataggcaaactt

SEQ ID NO: 32804 - DNA, 25 bp, probe
cttacacgaagaaatagaataggca

SEQ ID NO: 32805 - DNA, 25 bp, probe
accaactatattgcgagaaacagag

SEQ ID NO: 32806 - DNA, 25 bp, probe
gaccaactatattgcgagaaacaga

SEQ ID NO: 32807 - DNA, 25 bp, probe
agaccaactatattgcgagaaacag

SEQ ID NO: 32808 - DNA, 25 bp, probe
ttgcgagaaacagagatcataaaga

SEQ ID NO: 32809 - DNA, 25 bp, probe
actatattgcgagaaacagagatca

SEQ ID NO: 32810 - DNA, 25 bp, probe
caactatattgcgagaaacagagat

SEQ ID NO: 32811 - DNA, 25 bp, probe
aacttcagatgtttccaagatgtcc

SEQ ID NO: 32812 - DNA, 25 bp, probe
gagaaacagagatcataaagagcac

SEQ ID NO: 32813 - DNA, 25 bp, probe
attgcgagaaacagagatcataaag

SEQ ID NO: 32814 - DNA, 25 bp, probe
tacacgaagaaatagaataggcaaa

SEQ ID NO: 32815 - DNA, 25 bp, probe
ttacacgaagaaatagaataggcaa

SEQ ID NO: 32816 - DNA, 25 bp, probe
tccaagatgtcccattgataattcg

SEQ ID NO: 32817 - DNA, 25 bp, probe
ttccaagatgtcccattgataattc

SEQ ID NO: 32818 - DNA, 25 bp, probe
cgagaaacagagatcataaagagca

SEQ ID NO: 32819 - DNA, 25 bp, probe
tgcgagaaacagagatcataaagag

SEQ ID NO: 32820 - DNA, 25 bp, probe
atatgtgagcactatctttcaggaa

SEQ ID NO: 32821 - DNA, 25 bp, probe
tgcctttgataattcttactgttct

SEQ ID NO: 32822 - DNA, 25 bp, probe
agaaacagagatcataaagagcacg

SEQ ID NO: 32823 - DNA, 25 bp, probe
gatgtttccaagatgtcccattgat

SEQ ID NO: 32824 - DNA, 25 bp, probe
atgtgagcactatctttcaggaaat

SEQ ID NO: 32825 - DNA, 25 bp, probe
aggtaagagattcagccatccaatt

SEQ ID NO: 32826 - DNA, 25 bp, probe
aagagagaagttagacaggtagatc

SEQ ID NO: 32827 - DNA, 25 bp, probe
tacactgaggtctgttctaatggtt

SEQ ID NO: 32828 - DNA, 25 bp, probe
gaggtaagagattcagccatccaat

SEQ ID NO: 32829 - DNA, 25 bp, probe
actgcttcctggtaaactataacaa

SEQ ID NO: 32830 - DNA, 25 bp, probe
cactgaggtctgttctaatggttcc

SEQ ID NO: 32831 - DNA, 25 bp, probe
atgtcgtctattggctttactatgt

SEQ ID NO: 32832 - DNA, 25 bp, probe
cacaaagagagaagttagacaggta

SEQ ID NO: 32833 - DNA, 25 bp, probe
cactgcttcctggtaaactataaca

SEQ ID NO: 32834 - DNA, 25 bp, probe
acaaagagagaagttagacaggtag

SEQ ID NO: 32835 - DNA, 25 bp, probe
gtacactgaggtctgttctaatggt

SEQ ID NO: 32836 - DNA, 25 bp, probe
tgcttcctggtaaactataacaaac

SEQ ID NO: 32837 - DNA, 25 bp, probe
acactgaggtctgttctaatggttc

SEQ ID NO: 32838 - DNA, 25 bp, probe
caaagagagaagttagacaggtaga

SEQ ID NO: 32839 - DNA, 25 bp, probe
tgtcgtctattggctttactatgta

SEQ ID NO: 32840 - DNA, 25 bp, probe
ctgaggtctgttctaatggttccat

SEQ ID NO: 32841 - DNA, 25 bp, probe
gcttcctggtaaactataacaaact

SEQ ID NO: 32842 - DNA, 25 bp, probe
ctgcttcctggtaaactataacaaa

SEQ ID NO: 32843 - DNA, 25 bp, probe
tacaaacaaacacaaagagagaagt

SEQ ID NO: 32844 - DNA, 25 bp, probe
aatgtcgtctattggctttactatg

SEQ ID NO: 32845 - DNA, 25 bp, probe
acaaacaaacacaaagagagaagtt

SEQ ID NO: 32846 - DNA, 25 bp, probe
ggttccatttagactactttcctct

SEQ ID NO: 32847 - DNA, 25 bp, probe
tggttccatttagactactttcctc

SEQ ID NO: 32848 - DNA, 25 bp, probe
aacacaaagagagaagttagacagg

SEQ ID NO: 32849 - DNA, 25 bp, probe
gtttccctggatttcactgatttat

SEQ ID NO: 32850 - DNA, 25 bp, probe
acacaaagagagaagttagacaggt

SEQ ID NO: 32851 - DNA, 25 bp, probe
caaacacaaagagagaagttagaca

SEQ ID NO: 32852 - DNA, 25 bp, probe
acaaacacaaagagagaagttagac

SEQ ID NO: 32853 - DNA, 25 bp, probe
aaacacaaagagagaagttagacag

SEQ ID NO: 32854 - DNA, 25 bp, probe
aaagagagaagttagacaggtagat

SEQ ID NO: 32855 - DNA, 25 bp, probe
tttaatgtcgtctattggctttact

SEQ ID NO: 32856 - DNA, 25 bp, probe
agtttccctggatttcactgattta

SEQ ID NO: 32857 - DNA, 25 bp, probe
tagtttccctggatttcactgattt

SEQ ID NO: 32858 - DNA, 25 bp, probe
ttccctggatttcactgatttattt

SEQ ID NO: 32859 - DNA, 25 bp, probe
tttccctggatttcactgatttatt

SEQ ID NO: 32860 - DNA, 25 bp, probe
tccatttagactactttcctcttct

SEQ ID NO: 32861 - DNA, 25 bp, probe
actgaggtctgttctaatggttcca

SEQ ID NO: 32862 - DNA, 25 bp, probe
ttacaaacaaacacaaagagagaag

SEQ ID NO: 32863 - DNA, 25 bp, probe
gtcgtctattggctttactatgtac

SEQ ID NO: 32864 - DNA, 25 bp, probe
aacaaacacaaagagagaagttaga

SEQ ID NO: 32865 - DNA, 25 bp, probe
ctagtttccctggatttcactgatt

SEQ ID NO: 32866 - DNA, 25 bp, probe
tttctagtttccctggatttcactg

SEQ ID NO: 32867 - DNA, 25 bp, probe
caaacaaacacaaagagagaagtta

SEQ ID NO: 32868 - DNA, 25 bp, probe
gttccatttagactactttcctctt

SEQ ID NO: 32869 - DNA, 25 bp, probe
cttcaacatcgtctattggctttat

SEQ ID NO: 32870 - DNA, 25 bp, probe
cgtctattggctttattatgtgaac

SEQ ID NO: 32871 - DNA, 25 bp, probe
tcgtctattggctttattatgtgaa

SEQ ID NO: 32872 - DNA, 25 bp, probe
ttcaacatcgtctattggctttatt

SEQ ID NO: 32873 - DNA, 25 bp, probe
atcgtctattggctttattatgtga

SEQ ID NO: 32874 - DNA, 25 bp, probe
catcgtctattggctttattatgtg

SEQ ID NO: 32875 - DNA, 25 bp, probe
tcaacatcgtctattggctttatta

SEQ ID NO: 32876 - DNA, 25 bp, probe
aacatcgtctattggctttattatg

SEQ ID NO: 32877 - DNA, 25 bp, probe
caacatcgtctattggctttattat

SEQ ID NO: 32878 - DNA, 25 bp, probe
gtctattggctttattatgtgaact

SEQ ID NO: 32879 - DNA, 25 bp, probe
acatcgtctattggctttattatgt

SEQ ID NO: 32880 - DNA, 25 bp, probe
tctattggctttattatgtgaacta

SEQ ID NO: 32881 - DNA, 25 bp, probe
tggctttattatgtgaactaaaaca

SEQ ID NO: 32882 - DNA, 25 bp, probe
ctattggctttattatgtgaactaa

SEQ ID NO: 32883 - DNA, 25 bp, probe
ttggctttattatgtgaactaaaac

SEQ ID NO: 32884 - DNA, 25 bp, probe
attggctttattatgtgaactaaaa

SEQ ID NO: 32885 - DNA, 25 bp, probe
attatgtgaactaaaacatggcctc

SEQ ID NO: 32886 - DNA, 25 bp, probe
ttatgtgaactaaaacatggcctcc

SEQ ID NO: 32887 - DNA, 25 bp, probe
tattatgtgaactaaaacatggcct

SEQ ID NO: 32888 - DNA, 25 bp, probe
tttattatgtgaactaaaacatggc

SEQ ID NO: 32889 - DNA, 25 bp, probe
ggctttattatgtgaactaaaacat

SEQ ID NO: 32890 - DNA, 25 bp, probe
ttattatgtgaactaaaacatggcc

SEQ ID NO: 32891 - DNA, 25 bp, probe
tatgtgaactaaaacatggcctccc

SEQ ID NO: 32892 - DNA, 25 bp, probe
gctttattatgtgaactaaaacatg

SEQ ID NO: 32893 - DNA, 25 bp, probe
atgtgaactaaaacatggcctccca

SEQ ID NO: 32894 - DNA, 25 bp, probe
tgaactaaaacatggcctcccactg

SEQ ID NO: 32895 - DNA, 25 bp, probe
gtgaactaaaacatggcctcccact

SEQ ID NO: 32896 - DNA, 25 bp, probe
ctacttctggatctgctatgtcttc

SEQ ID NO: 32897 - DNA, 25 bp, probe
tctacttctggatctgctatgtctt

SEQ ID NO: 32898 - DNA, 25 bp, probe
gtctacttctggatctgctatgtct

SEQ ID NO: 32899 - DNA, 25 bp, probe
tacttctggatctgctatgtcttcg

SEQ ID NO: 32900 - DNA, 25 bp, probe
cgtctacttctggatctgctatgtc

SEQ ID NO: 32901 - DNA, 25 bp, probe
cttctggatctgctatgtcttcgtg

SEQ ID NO: 32902 - DNA, 25 bp, probe
acttctggatctgctatgtcttcgt

SEQ ID NO: 32903 - DNA, 25 bp, probe
tctggatctgctatgtcttcgtgtt

SEQ ID NO: 32904 - DNA, 25 bp, probe
ttctggatctgctatgtcttcgtgt

SEQ ID NO: 32905 - DNA, 25 bp, probe
acgtctacttctggatctgctatgt

SEQ ID NO: 32906 - DNA, 25 bp, probe
ctggatctgctatgtcttcgtgttt

SEQ ID NO: 32907 - DNA, 25 bp, probe
tggatctgctatgtcttcgtgtttg

SEQ ID NO: 32908 - DNA, 25 bp, probe
gatctgctatgtcttcgtgtttgcc

SEQ ID NO: 32909 - DNA, 25 bp, probe
ggatctgctatgtcttcgtgtttgc

SEQ ID NO: 32910 - DNA, 25 bp, probe
atttcaacgccgactacaggaagaa

SEQ ID NO: 32911 - DNA, 25 bp, probe
gacgcagacaccattgacatttacg

SEQ ID NO: 32912 - DNA, 25 bp, probe
cgacgcagacaccattgacatttac

SEQ ID NO: 32913 - DNA, 25 bp, probe
ctttgctcatttcaacgccgactac

SEQ ID NO: 32914 - DNA, 25 bp, probe
tttcaacgccgactacaggaagaag

SEQ ID NO: 32915 - DNA, 25 bp, probe
catttcaacgccgactacaggaaga

SEQ ID NO: 32916 - DNA, 25 bp, probe
tcatttcaacgccgactacaggaag

SEQ ID NO: 32917 - DNA, 25 bp, probe
ctcatttcaacgccgactacaggaa

SEQ ID NO: 32918 - DNA, 25 bp, probe
ggagtacgcctttgctcatttcaac

SEQ ID NO: 32919 - DNA, 25 bp, probe
gagtacgcctttgctcatttcaacg

SEQ ID NO: 32920 - DNA, 25 bp, probe
tcgacgcagacaccattgacattta

SEQ ID NO: 32921 - DNA, 25 bp, probe
tggagtacgcctttgctcatttcaa

SEQ ID NO: 32922 - DNA, 25 bp, probe
ctacaggaagaagcagaaggccaag

SEQ ID NO: 32923 - DNA, 25 bp, probe
aataatgctacacaccttcaagaga

SEQ ID NO: 32924 - DNA, 25 bp, probe
ataatgctacacaccttcaagagag

SEQ ID NO: 32925 - DNA, 25 bp, probe
gaataatgctacacaccttcaagag

SEQ ID NO: 32926 - DNA, 25 bp, probe
taatgctacacaccttcaagagaga

SEQ ID NO: 32927 - DNA, 25 bp, probe
gagagatgtctgttctaagtccact

SEQ ID NO: 32928 - DNA, 25 bp, probe
gtggttgataagtatctgaatctgt

SEQ ID NO: 32929 - DNA, 25 bp, probe
tgtggttgataagtatctgaatctg

SEQ ID NO: 32930 - DNA, 25 bp, probe
cctctatgtggttgataagtatctg

SEQ ID NO: 32931 - DNA, 25 bp, probe
ctacacaccttcaagagagagatga

SEQ ID NO: 32932 - DNA, 25 bp, probe
tcctctatgtggttgataagtatct

SEQ ID NO: 32933 - DNA, 25 bp, probe
agagatgtctgttctaagtccactt

SEQ ID NO: 32934 - DNA, 25 bp, probe
catggagagatgtctgttctaagtc

SEQ ID NO: 32935 - DNA, 25 bp, probe
tcatggagagatgtctgttctaagt

SEQ ID NO: 32936 - DNA, 25 bp, probe
gatatggttcttattcactgagtct

SEQ ID NO: 32937 - DNA, 25 bp, probe
atatggttcttattcactgagtctc

SEQ ID NO: 32938 - DNA, 25 bp, probe
aatgctacacaccttcaagagagag

SEQ ID NO: 32939 - DNA, 25 bp, probe
gttcttattcactgagtctcatgga

SEQ ID NO: 32940 - DNA, 25 bp, probe
tggttcttattcactgagtctcatg

SEQ ID NO: 32941 - DNA, 25 bp, probe
ctcatggagagatgtctgttctaag

SEQ ID NO: 32942 - DNA, 25 bp, probe
atggttcttattcactgagtctcat

SEQ ID NO: 32943 - DNA, 25 bp, probe
gagagatgaagagtacggctatgag

SEQ ID NO: 32944 - DNA, 25 bp, probe
gagagagatgaagagtacggctatg

SEQ ID NO: 32945 - DNA, 25 bp, probe
tgatatggttcttattcactgagtc

SEQ ID NO: 32946 - DNA, 25 bp, probe
ctgatatggttcttattcactgagt

SEQ ID NO: 32947 - DNA, 25 bp, probe
actgatatggttcttattcactgag

SEQ ID NO: 32948 - DNA, 25 bp, probe
ttcttattcactgagtctcatggag

SEQ ID NO: 32949 - DNA, 25 bp, probe
agagagagatgaagagtacggctat

SEQ ID NO: 32950 - DNA, 25 bp, probe
tggttgataagtatctgaatctgtt

SEQ ID NO: 32951 - DNA, 25 bp, probe
ggttcttattcactgagtctcatgg

SEQ ID NO: 32952 - DNA, 25 bp, probe
aagagagagatgaagagtacggcta

SEQ ID NO: 32953 - DNA, 25 bp, probe
tatggttcttattcactgagtctca

SEQ ID NO: 32954 - DNA, 25 bp, probe
agagagatgaagagtacggctatga

SEQ ID NO: 32955 - DNA, 25 bp, probe
gctacacaccttcaagagagagatg

SEQ ID NO: 32956 - DNA, 25 bp, probe
atgtggttgataagtatctgaatct

SEQ ID NO: 32957 - DNA, 25 bp, probe
atggagagatgtctgttctaagtcc

SEQ ID NO: 32958 - DNA, 25 bp, probe
ctctatgtggttgataagtatctga

SEQ ID NO: 32959 - DNA, 25 bp, probe
atcctctatgtggttgataagtatc

SEQ ID NO: 32960 - DNA, 25 bp, probe
gagatgaagagtacggctatgagtg

SEQ ID NO: 32961 - DNA, 25 bp, probe
agagatgaagagtacggctatgagt

SEQ ID NO: 32962 - DNA, 25 bp, probe
gaaaccaagcaaggacaaagataaa

SEQ ID NO: 32963 - DNA, 25 bp, probe
tttgtttcatctttgtcttctctgc

SEQ ID NO: 32964 - DNA, 25 bp, probe
gagatgtctgttctaagtccactta

SEQ ID NO: 32965 - DNA, 25 bp, probe
taatctggtctattgggtctcctac

SEQ ID NO: 32966 - DNA, 25 bp, probe
ttaatctggtctattgggtctccta

SEQ ID NO: 32967 - DNA, 25 bp, probe
tcactacatcatcttcaacttcctg

SEQ ID NO: 32968 - DNA, 25 bp, probe
ttcactacatcatcttcaacttcct

SEQ ID NO: 32969 - DNA, 25 bp, probe
attcactacatcatcttcaacttcc

SEQ ID NO: 32970 - DNA, 25 bp, probe
cactacatcatcttcaacttcctgc

SEQ ID NO: 32971 - DNA, 25 bp, probe
ttctccacagtgaagattatctaca

SEQ ID NO: 32972 - DNA, 25 bp, probe
ctgtatgtctacctctgacttctgt

SEQ ID NO: 32973 - DNA, 25 bp, probe
ctgctctcatccattcctcttactg

SEQ ID NO: 32974 - DNA, 25 bp, probe
gtctgctctcatccattcctcttac

SEQ ID NO: 32975 - DNA, 25 bp, probe
tgtatgtctacctctgacttctgtg

SEQ ID NO: 32976 - DNA, 25 bp, probe
ctccacagtgaagattatctacacc

SEQ ID NO: 32977 - DNA, 25 bp, probe
tctccacagtgaagattatctacac

SEQ ID NO: 32978 - DNA, 25 bp, probe
tctgctctcatccattcctcttact

SEQ ID NO: 32979 - DNA, 25 bp, probe
ctacatcatcttcaacttcctgcca

SEQ ID NO: 32980 - DNA, 25 bp, probe
actacatcatcttcaacttcctgcc

SEQ ID NO: 32981 - DNA, 25 bp, probe
cctgtatgtctacctctgacttctg

SEQ ID NO: 32982 - DNA, 25 bp, probe
tacatcatcttcaacttcctgccag

SEQ ID NO: 32983 - DNA, 25 bp, probe
aggaatcttacttctccacagtgaa

SEQ ID NO: 32984 - DNA, 25 bp, probe
ttctcaatattatccgcatcctggt

SEQ ID NO: 32985 - DNA, 25 bp, probe
cacagtgaagattatctacaccgtg

SEQ ID NO: 32986 - DNA, 25 bp, probe
tgtctgctctcatccattcctctta

SEQ ID NO: 32987 - DNA, 25 bp, probe
aattcactacatcatcttcaacttc

SEQ ID NO: 32988 - DNA, 25 bp, probe
ggagccaataaacctgtaaatgaaa

SEQ ID NO: 32989 - DNA, 25 bp, probe
gtatgtctacctctgacttctgtgg

SEQ ID NO: 32990 - DNA, 25 bp, probe
gaggaatcttacttctccacagtga

SEQ ID NO: 32991 - DNA, 25 bp, probe
tagcatctctattgtagccctcttc

SEQ ID NO: 32992 - DNA, 25 bp, probe
tccacagtgaagattatctacaccg

SEQ ID NO: 32993 - DNA, 25 bp, probe
tctcaatattatccgcatcctggtg

SEQ ID NO: 32994 - DNA, 25 bp, probe
gattgtactatcactggctggtctg

SEQ ID NO: 32995 - DNA, 25 bp, probe
acagtgaagattatctacaccgtgg

SEQ ID NO: 32996 - DNA, 25 bp, probe
ccacagtgaagattatctacaccgt

SEQ ID NO: 32997 - DNA, 25 bp, probe
tatgtctacctctgacttctgtggt

SEQ ID NO: 32998 - DNA, 25 bp, probe
tcaatattatccgcatcctggtgag

SEQ ID NO: 32999 - DNA, 25 bp, probe
ctcaatattatccgcatcctggtga

SEQ ID NO: 33000 - DNA, 25 bp, probe
atagcatctctattgtagccctctt

SEQ ID NO: 33001 - DNA, 25 bp, probe
ctggctgaggaggaatcttacttct

SEQ ID NO: 33002 - DNA, 25 bp, probe
atcttcaacttcctgccagacaatg

SEQ ID NO: 33003 - DNA, 25 bp, probe
catcttcaacttcctgccagacaat

SEQ ID NO: 33004 - DNA, 25 bp, probe
catagcatctctattgtagccctct

SEQ ID NO: 33005 - DNA, 25 bp, probe
aggagccaataaacctgtaaatgaa

SEQ ID NO: 33006 - DNA, 25 bp, probe
tttctcaatattatccgcatcctgg

SEQ ID NO: 33007 - DNA, 25 bp, probe
tggaattcactacatcatcttcaac

SEQ ID NO: 33008 - DNA, 25 bp, probe
attgtactatcactggctggtctga

SEQ ID NO: 33009 - DNA, 25 bp, probe
gaggagccaataaacctgtaaatga

SEQ ID NO: 33010 - DNA, 25 bp, probe
agaggagccaataaacctgtaaatg

SEQ ID NO: 33011 - DNA, 25 bp, probe
aatctcaggctaagaacaacaagaa

SEQ ID NO: 33012 - DNA, 25 bp, probe
atctcaggctaagaacaacaagaag

SEQ ID NO: 33013 - DNA, 25 bp, probe
ttctgcttcttgttcttcaatgtta

SEQ ID NO: 33014 - DNA, 25 bp, probe
tctgcttcttgttcttcaatgttat

SEQ ID NO: 33015 - DNA, 25 bp, probe
tccatacaattctcttcagttagtg

SEQ ID NO: 33016 - DNA, 25 bp, probe
aatatctgtgctctaataacgatgt

SEQ ID NO: 33017 - DNA, 25 bp, probe
aatgaaggacaagcatactacataa

SEQ ID NO: 33018 - DNA, 25 bp, probe
ccatacaattctcttcagttagtgt

SEQ ID NO: 33019 - DNA, 25 bp, probe
atgaaggacaagcatactacataat

SEQ ID NO: 33020 - DNA, 25 bp, probe
tgtaatatctgtgctctaataacga

SEQ ID NO: 33021 - DNA, 25 bp, probe
tgaactatccaattatgactgctat

SEQ ID NO: 33022 - DNA, 25 bp, probe
ttgaactatccaattatgactgcta

SEQ ID NO: 33023 - DNA, 25 bp, probe
ttgtacttctaagtctgatctgaga

SEQ ID NO: 33024 - DNA, 25 bp, probe
atccatacaattctcttcagttagt

SEQ ID NO: 33025 - DNA, 25 bp, probe
tgaaggacaagcatactacataata

SEQ ID NO: 33026 - DNA, 25 bp, probe
tctgtgctctaataacgatgtatat

SEQ ID NO: 33027 - DNA, 25 bp, probe
ctgcttcttgttcttcaatgttata

SEQ ID NO: 33028 - DNA, 25 bp, probe
gaactatccaattatgactgctatg

SEQ ID NO: 33029 - DNA, 25 bp, probe
tgtacttctaagtctgatctgagat

SEQ ID NO: 33030 - DNA, 25 bp, probe
atctgtgctctaataacgatgtata

SEQ ID NO: 33031 - DNA, 25 bp, probe
tatctgtgctctaataacgatgtat

SEQ ID NO: 33032 - DNA, 25 bp, probe
atatctgtgctctaataacgatgta

SEQ ID NO: 33033 - DNA, 25 bp, probe
attgtttcctttctgcttcttgttc

SEQ ID NO: 33034 - DNA, 25 bp, probe
gactcctgttcatattagcactttg

SEQ ID NO: 33035 - DNA, 25 bp, probe
cctactcctttcataaatgccaatc

SEQ ID NO: 33036 - DNA, 25 bp, probe
acctactcctttcataaatgccaat

SEQ ID NO: 33037 - DNA, 25 bp, probe
ctcctttcataaatgccaatctgtg

SEQ ID NO: 33038 - DNA, 25 bp, probe
cattgtttcctttctgcttcttgtt

SEQ ID NO: 33039 - DNA, 25 bp, probe
gtttcctttctgcttcttgttcttc

SEQ ID NO: 33040 - DNA, 25 bp, probe
actcctttcataaatgccaatctgt

SEQ ID NO: 33041 - DNA, 25 bp, probe
ttcctatgtgaaggctcttgatgtt

SEQ ID NO: 33042 - DNA, 25 bp, probe
aatactataaaggcacgggctacta

SEQ ID NO: 33043 - DNA, 25 bp, probe
gacctactcctttcataaatgccaa

SEQ ID NO: 33044 - DNA, 25 bp, probe
acaaatgaaggacaagcatactaca

SEQ ID NO: 33045 - DNA, 25 bp, probe
aacaaatgaaggacaagcatactac

SEQ ID NO: 33046 - DNA, 25 bp, probe
gtaacaaatgaaggacaagcatact

SEQ ID NO: 33047 - DNA, 25 bp, probe
agtaacaaatgaaggacaagcatac

SEQ ID NO: 33048 - DNA, 25 bp, probe
tactcctttcataaatgccaatctg

SEQ ID NO: 33049 - DNA, 25 bp, probe
tttcctttctgcttcttgttcttca

SEQ ID NO: 33050 - DNA, 25 bp, probe
cttagtaacaaatgaaggacaagca

SEQ ID NO: 33051 - DNA, 25 bp, probe
tgcttagtaacaaatgaaggacaag

SEQ ID NO: 33052 - DNA, 25 bp, probe
caaatgaaggacaagcatactacat

SEQ ID NO: 33053 - DNA, 25 bp, probe
cataaatgccaatctgtgagaactt

SEQ ID NO: 33054 - DNA, 25 bp, probe
gaaatctcaggctaagaacaacaag

SEQ ID NO: 33055 - DNA, 25 bp, probe
atctctcgtgattgataagaacctt

SEQ ID NO: 33056 - DNA, 25 bp, probe
tgactgatctctcgtgattgataag

SEQ ID NO: 33057 - DNA, 25 bp, probe
gtgactgatctctcgtgattgataa

SEQ ID NO: 33058 - DNA, 25 bp, probe
gatctctcgtgattgataagaacct

SEQ ID NO: 33059 - DNA, 25 bp, probe
tgatctctcgtgattgataagaacc

SEQ ID NO: 33060 - DNA, 25 bp, probe
gactgatctctcgtgattgataaga

SEQ ID NO: 33061 - DNA, 25 bp, probe
tgtgactgatctctcgtgattgata

SEQ ID NO: 33062 - DNA, 25 bp, probe
actgatctctcgtgattgataagaa

SEQ ID NO: 33063 - DNA, 25 bp, probe
ctgatctctcgtgattgataagaac

SEQ ID NO: 33064 - DNA, 25 bp, probe
agccactattgttagtctcttgatt

SEQ ID NO: 33065 - DNA, 25 bp, probe
cagccactattgttagtctcttgat

SEQ ID NO: 33066 - DNA, 25 bp, probe
gccactattgttagtctcttgattc

SEQ ID NO: 33067 - DNA, 25 bp, probe
taaggaaggttacaacgtatatggc

SEQ ID NO: 33068 - DNA, 25 bp, probe
gaggcatccagtatcttgaagactt

SEQ ID NO: 33069 - DNA, 25 bp, probe
gtgagaggcatccagtatcttgaag

SEQ ID NO: 33070 - DNA, 25 bp, probe
gtgtgactgatctctcgtgattgat

SEQ ID NO: 33071 - DNA, 25 bp, probe
gttatgactccagaatttcccaaag

SEQ ID NO: 33072 - DNA, 25 bp, probe
tgttatgactccagaatttcccaaa

SEQ ID NO: 33073 - DNA, 25 bp, probe
gagaggcatccagtatcttgaagac

SEQ ID NO: 33074 - DNA, 25 bp, probe
tctctcgtgattgataagaaccttt

SEQ ID NO: 33075 - DNA, 25 bp, probe
tcttgtgtgtttattgtcaaagtgg

SEQ ID NO: 33076 - DNA, 25 bp, probe
gtgttatgactccagaatttcccaa

SEQ ID NO: 33077 - DNA, 25 bp, probe
ccactattgttagtctcttgattca

SEQ ID NO: 33078 - DNA, 25 bp, probe
cttgtgtgtttattgtcaaagtggt

SEQ ID NO: 33079 - DNA, 25 bp, probe
ttgtgtgtttattgtcaaagtggtg

SEQ ID NO: 33080 - DNA, 25 bp, probe
ttatgactccagaatttcccaaagc

SEQ ID NO: 33081 - DNA, 25 bp, probe
ggaaggttacaacgtatatggcatc

SEQ ID NO: 33082 - DNA, 25 bp, probe
gtgtttattgtcaaagtggtgagag

SEQ ID NO: 33083 - DNA, 25 bp, probe
tgagaggcatccagtatcttgaaga

SEQ ID NO: 33084 - DNA, 25 bp, probe
tgtgtttattgtcaaagtggtgaga

SEQ ID NO: 33085 - DNA, 25 bp, probe
gtgtgtttattgtcaaagtggtgag

SEQ ID NO: 33086 - DNA, 25 bp, probe
cataatgacttaagcacacttgaca

SEQ ID NO: 33087 - DNA, 25 bp, probe
aggaaggttacaacgtatatggcat

SEQ ID NO: 33088 - DNA, 25 bp, probe
ataaggaaggttacaacgtatatgg

SEQ ID NO: 33089 - DNA, 25 bp, probe
taatgacttaagcacacttgacatc

SEQ ID NO: 33090 - DNA, 25 bp, probe
agaggcatccagtatcttgaagact

SEQ ID NO: 33091 - DNA, 25 bp, probe
ttcttgtgtgtttattgtcaaagtg

SEQ ID NO: 33092 - DNA, 25 bp, probe
gaaggttacaacgtatatggcatcg

SEQ ID NO: 33093 - DNA, 25 bp, probe
tgtttattgtcaaagtggtgagagg

SEQ ID NO: 33094 - DNA, 25 bp, probe
aaggaaggttacaacgtatatggca

SEQ ID NO: 33095 - DNA, 25 bp, probe
tgtgtgtttattgtcaaagtggtga

SEQ ID NO: 33096 - DNA, 25 bp, probe
aggttacaacgtatatggcatcgaa

SEQ ID NO: 33097 - DNA, 25 bp, probe
aaggttacaacgtatatggcatcga

SEQ ID NO: 33098 - DNA, 25 bp, probe
ataatgacttaagcacacttgacat

SEQ ID NO: 33099 - DNA, 25 bp, probe
ttcagttgttagtgtgtcttagtgt

SEQ ID NO: 33100 - DNA, 25 bp, probe
tcagttgttagtgtgtcttagtgtg

SEQ ID NO: 33101 - DNA, 25 bp, probe
agttgttagtgtgtcttagtgtgtg

SEQ ID NO: 33102 - DNA, 25 bp, probe
cagttgttagtgtgtcttagtgtgt

SEQ ID NO: 33103 - DNA, 25 bp, probe
attcagttgttagtgtgtcttagtg

SEQ ID NO: 33104 - DNA, 25 bp, probe
gtagagtcactggaacactaatgag

SEQ ID NO: 33105 - DNA, 25 bp, probe
gagtagagtcactggaacactaatg

SEQ ID NO: 33106 - DNA, 25 bp, probe
agagtagagtcactggaacactaat

SEQ ID NO: 33107 - DNA, 25 bp, probe
agtagagtcactggaacactaatga

SEQ ID NO: 33108 - DNA, 25 bp, probe
cacaagaaggatgattcaacaggtt

SEQ ID NO: 33109 - DNA, 25 bp, probe
gagagtagagtcactggaacactaa

SEQ ID NO: 33110 - DNA, 25 bp, probe
aattcagttgttagtgtgtcttagt

SEQ ID NO: 33111 - DNA, 25 bp, probe
tagagtcactggaacactaatgagg

SEQ ID NO: 33112 - DNA, 25 bp, probe
gaccacaagaaggatgattcaacag

SEQ ID NO: 33113 - DNA, 25 bp, probe
gttgttagtgtgtcttagtgtgtgc

SEQ ID NO: 33114 - DNA, 25 bp, probe
gagtcactggaacactaatgaggaa

SEQ ID NO: 33115 - DNA, 25 bp, probe
tgagagtagagtcactggaacacta

SEQ ID NO: 33116 - DNA, 25 bp, probe
ttagtgtgtcttagtgtgtgcaatt

SEQ ID NO: 33117 - DNA, 25 bp, probe
gagtaaccctgtctaatgaaacctg

SEQ ID NO: 33118 - DNA, 25 bp, probe
agagtcactggaacactaatgagga

SEQ ID NO: 33119 - DNA, 25 bp, probe
ctgtctaatgaaacctgtgtctctg

SEQ ID NO: 33120 - DNA, 25 bp, probe
ttctgtttgctaagtgaggatgaaa

SEQ ID NO: 33121 - DNA, 25 bp, probe
tttctgtttgctaagtgaggatgaa

SEQ ID NO: 33122 - DNA, 25 bp, probe
gtctaatgaaacctgtgtctctgag

SEQ ID NO: 33123 - DNA, 25 bp, probe
gagagtaaccctgtctaatgaaacc

SEQ ID NO: 33124 - DNA, 25 bp, probe
ggagagtaaccctgtctaatgaaac

SEQ ID NO: 33125 - DNA, 25 bp, probe
tgtctaatgaaacctgtgtctctga

SEQ ID NO: 33126 - DNA, 25 bp, probe
gtaaccctgtctaatgaaacctgtg

SEQ ID NO: 33127 - DNA, 25 bp, probe
agtaaccctgtctaatgaaacctgt

SEQ ID NO: 33128 - DNA, 25 bp, probe
ccacaagaaggatgattcaacaggt

SEQ ID NO: 33129 - DNA, 25 bp, probe
accacaagaaggatgattcaacagg

SEQ ID NO: 33130 - DNA, 25 bp, probe
acaagaaggatgattcaacaggttt

SEQ ID NO: 33131 - DNA, 25 bp, probe
agagtaaccctgtctaatgaaacct

SEQ ID NO: 33132 - DNA, 25 bp, probe
gttagtgtgtcttagtgtgtgcaat

SEQ ID NO: 33133 - DNA, 25 bp, probe
cactggaacactaatgaggaaactg

SEQ ID NO: 33134 - DNA, 25 bp, probe
taaccctgtctaatgaaacctgtgt

SEQ ID NO: 33135 - DNA, 25 bp, probe
ctgagagtagagtcactggaacact

SEQ ID NO: 33136 - DNA, 25 bp, probe
tctgagagtagagtcactggaacac

SEQ ID NO: 33137 - DNA, 25 bp, probe
taattcagttgttagtgtgtcttag

SEQ ID NO: 33138 - DNA, 25 bp, probe
cgaccacaagaaggatgattcaaca

SEQ ID NO: 33139 - DNA, 25 bp, probe
cctgtctaatgaaacctgtgtctct

SEQ ID NO: 33140 - DNA, 25 bp, probe
gtcactggaacactaatgaggaaac

SEQ ID NO: 33141 - DNA, 25 bp, probe
tcactggaacactaatgaggaaact

SEQ ID NO: 33142 - DNA, 25 bp, probe
agtcactggaacactaatgaggaaa

SEQ ID NO: 33143 - DNA, 25 bp, probe
attgtaagagttctgtcatgcagtc

SEQ ID NO: 33144 - DNA, 25 bp, probe
cattgtaagagttctgtcatgcagt

SEQ ID NO: 33145 - DNA, 25 bp, probe
taagagttctgtcatgcagtctgaa

SEQ ID NO: 33146 - DNA, 25 bp, probe
agctgcattgtaagagttctgtcat

SEQ ID NO: 33147 - DNA, 25 bp, probe
gctgcattgtaagagttctgtcatg

SEQ ID NO: 33148 - DNA, 25 bp, probe
ttgtaagagttctgtcatgcagtct

SEQ ID NO: 33149 - DNA, 25 bp, probe
gtaagagttctgtcatgcagtctga

SEQ ID NO: 33150 - DNA, 25 bp, probe
tgtaagagttctgtcatgcagtctg

SEQ ID NO: 33151 - DNA, 25 bp, probe
aaacaaatggtggtacgacaaagga

SEQ ID NO: 33152 - DNA, 25 bp, probe
agtattaaaactgaatgagcaaggc

SEQ ID NO: 33153 - DNA, 25 bp, probe
aacaaatggtggtacgacaaaggag

SEQ ID NO: 33154 - DNA, 25 bp, probe
aatgctgttaacctggcagtattaa

SEQ ID NO: 33155 - DNA, 25 bp, probe
caaatggtggtacgacaaaggagag

SEQ ID NO: 33156 - DNA, 25 bp, probe
aagagttctgtcatgcagtctgaaa

SEQ ID NO: 33157 - DNA, 25 bp, probe
acagagagtgttaagatctaggatc

SEQ ID NO: 33158 - DNA, 25 bp, probe
aaatggtggtacgacaaaggagagt

SEQ ID NO: 33159 - DNA, 25 bp, probe
gtctgaaaagggaagaaacaggatg

SEQ ID NO: 33160 - DNA, 25 bp, probe
gaacagagagtgttaagatctagga

SEQ ID NO: 33161 - DNA, 25 bp, probe
agtctgaaaagggaagaaacaggat

SEQ ID NO: 33162 - DNA, 25 bp, probe
aaaacaaatggtggtacgacaaagg

SEQ ID NO: 33163 - DNA, 25 bp, probe
acaaatggtggtacgacaaaggaga

SEQ ID NO: 33164 - DNA, 25 bp, probe
aacagagagtgttaagatctaggat

SEQ ID NO: 33165 - DNA, 25 bp, probe
aaagggaagaaacaggatggctttc

SEQ ID NO: 33166 - DNA, 25 bp, probe
tctgaaaagggaagaaacaggatgg

SEQ ID NO: 33167 - DNA, 25 bp, probe
cagtctgaaaagggaagaaacagga

SEQ ID NO: 33168 - DNA, 25 bp, probe
aatggtggtacgacaaaggagagtg

SEQ ID NO: 33169 - DNA, 25 bp, probe
atgctgttaacctggcagtattaaa

SEQ ID NO: 33170 - DNA, 25 bp, probe
aaatgctgttaacctggcagtatta

SEQ ID NO: 33171 - DNA, 25 bp, probe
gaaaagggaagaaacaggatggctt

SEQ ID NO: 33172 - DNA, 25 bp, probe
gtattaaaactgaatgagcaaggcc

SEQ ID NO: 33173 - DNA, 25 bp, probe
cattaggaaatgctgttaacctggc

SEQ ID NO: 33174 - DNA, 25 bp, probe
gaaatgctgttaacctggcagtatt

SEQ ID NO: 33175 - DNA, 25 bp, probe
cagagagtgttaagatctaggatcc

SEQ ID NO: 33176 - DNA, 25 bp, probe
catgcagtctgaaaagggaagaaac

SEQ ID NO: 33177 - DNA, 25 bp, probe
gagttctgtcatgcagtctgaaaag

SEQ ID NO: 33178 - DNA, 25 bp, probe
gctgttaacctggcagtattaaaac

SEQ ID NO: 33179 - DNA, 25 bp, probe
ctgttaacctggcagtattaaaact

SEQ ID NO: 33180 - DNA, 25 bp, probe
tcatgcagtctgaaaagggaagaaa

SEQ ID NO: 33181 - DNA, 25 bp, probe
agagttctgtcatgcagtctgaaaa

SEQ ID NO: 33182 - DNA, 25 bp, probe
gcattgtaagagttctgtcatgcag

SEQ ID NO: 33183 - DNA, 25 bp, probe
ctgcattgtaagagttctgtcatgc

SEQ ID NO: 33184 - DNA, 25 bp, probe
atgcagtctgaaaagggaagaaaca

SEQ ID NO: 33185 - DNA, 25 bp, probe
aaaagggaagaaacaggatggcttt

SEQ ID NO: 33186 - DNA, 25 bp, probe
attaggaaatgctgttaacctggca

SEQ ID NO: 33187 - DNA, 25 bp, probe
atattggaggcatcttcattgttct

SEQ ID NO: 33188 - DNA, 25 bp, probe
tattggaggcatcttcattgttctg

SEQ ID NO: 33189 - DNA, 25 bp, probe
actattgctattcttcaactccaag

SEQ ID NO: 33190 - DNA, 25 bp, probe
ggaagaataatgatattgaacaggc

SEQ ID NO: 33191 - DNA, 25 bp, probe
aatattggaggcatcttcattgttc

SEQ ID NO: 33192 - DNA, 25 bp, probe
cggaagaataatgatattgaacagg

SEQ ID NO: 33193 - DNA, 25 bp, probe
tactattgctattcttcaactccaa

SEQ ID NO: 33194 - DNA, 25 bp, probe
ttactattgctattcttcaactcca

SEQ ID NO: 33195 - DNA, 25 bp, probe
cacggaagaataatgatattgaaca

SEQ ID NO: 33196 - DNA, 25 bp, probe
acttctggaactactttatctacgg

SEQ ID NO: 33197 - DNA, 25 bp, probe
cttctggaactactttatctacgga

SEQ ID NO: 33198 - DNA, 25 bp, probe
acggaagaataatgatattgaacag

SEQ ID NO: 33199 - DNA, 25 bp, probe
gaagaataatgatattgaacaggct

SEQ ID NO: 33200 - DNA, 25 bp, probe
cacttctggaactactttatctacg

SEQ ID NO: 33201 - DNA, 25 bp, probe
tctggaactactttatctacggatt

SEQ ID NO: 33202 - DNA, 25 bp, probe
tcacggaagaataatgatattgaac

SEQ ID NO: 33203 - DNA, 25 bp, probe
ttctggaactactttatctacggat

SEQ ID NO: 33204 - DNA, 25 bp, probe
gactggtcctttctgtatttgtagc

SEQ ID NO: 33205 - DNA, 25 bp, probe
attggaggcatcttcattgttctgg

SEQ ID NO: 33206 - DNA, 25 bp, probe
ctggaactactttatctacggattt

SEQ ID NO: 33207 - DNA, 25 bp, probe
aagaataatgatattgaacaggctt

SEQ ID NO: 33208 - DNA, 25 bp, probe
ctattgctattcttcaactccaaga

SEQ ID NO: 33209 - DNA, 25 bp, probe
attactattgctattcttcaactcc

SEQ ID NO: 33210 - DNA, 25 bp, probe
aaatattggaggcatcttcattgtt

SEQ ID NO: 33211 - DNA, 25 bp, probe
cattgagtatgtgacgcagagaaac

SEQ ID NO: 33212 - DNA, 25 bp, probe
attaattcgagaggagagagggatt

SEQ ID NO: 33213 - DNA, 25 bp, probe
ttaattcgagaggagagagggattc

SEQ ID NO: 33214 - DNA, 25 bp, probe
attgagtatgtgacgcagagaaact

SEQ ID NO: 33215 - DNA, 25 bp, probe
actggtcctttctgtatttgtagct

SEQ ID NO: 33216 - DNA, 25 bp, probe
atatgatgaaagagaagtggtggcg

SEQ ID NO: 33217 - DNA, 25 bp, probe
tggaactactttatctacggattta

SEQ ID NO: 33218 - DNA, 25 bp, probe
ccacttctggaactactttatctac

SEQ ID NO: 33219 - DNA, 25 bp, probe
atctacggatttagaatgtggtaaa

SEQ ID NO: 33220 - DNA, 25 bp, probe
tttatctacggatttagaatgtggt

SEQ ID NO: 33221 - DNA, 25 bp, probe
gaagctgcatatgatgaaagagaag

SEQ ID NO: 33222 - DNA, 25 bp, probe
aagctgcatatgatgaaagagaagt

SEQ ID NO: 33223 - DNA, 25 bp, probe
agaataatgatattgaacaggcttt

SEQ ID NO: 33224 - DNA, 25 bp, probe
ctgcatatgatgaaagagaagtggt

SEQ ID NO: 33225 - DNA, 25 bp, probe
aattcatatacaaatcacggaagaa

SEQ ID NO: 33226 - DNA, 25 bp, probe
ggactggtcctttctgtatttgtag

SEQ ID NO: 33227 - DNA, 25 bp, probe
agcattgagtatgtgacgcagagaa

SEQ ID NO: 33228 - DNA, 25 bp, probe
aatgtaagcaaacccatccaaccaa

SEQ ID NO: 33229 - DNA, 25 bp, probe
ggaactactttatctacggatttag

SEQ ID NO: 33230 - DNA, 25 bp, probe
tgcatatgatgaaagagaagtggtg

SEQ ID NO: 33231 - DNA, 25 bp, probe
ttctgagttattctctctgttggtg

SEQ ID NO: 33232 - DNA, 25 bp, probe
cttctgagttattctctctgttggt

SEQ ID NO: 33233 - DNA, 25 bp, probe
ccttctgagttattctctctgttgg

SEQ ID NO: 33234 - DNA, 25 bp, probe
ccgtatgtgtactgtgatctgtaag

SEQ ID NO: 33235 - DNA, 25 bp, probe
cgtatgtgtactgtgatctgtaaga

SEQ ID NO: 33236 - DNA, 25 bp, probe
ccgacaagatagttgctatgttatg

SEQ ID NO: 33237 - DNA, 25 bp, probe
cttcatagcaccaacagagatgtag

SEQ ID NO: 33238 - DNA, 25 bp, probe
atgtgtactgtgatctgtaagaagt

SEQ ID NO: 33239 - DNA, 25 bp, probe
cgacaagatagttgctatgttatga

SEQ ID NO: 33240 - DNA, 25 bp, probe
tctgagttattctctctgttggtgg

SEQ ID NO: 33241 - DNA, 25 bp, probe
taagaagtacaatgccatctgtctg

SEQ ID NO: 33242 - DNA, 25 bp, probe
gtaagaagtacaatgccatctgtct

SEQ ID NO: 33243 - DNA, 25 bp, probe
acttcatagcaccaacagagatgta

SEQ ID NO: 33244 - DNA, 25 bp, probe
acaagatagttgctatgttatgaca

SEQ ID NO: 33245 - DNA, 25 bp, probe
gtatgtgtactgtgatctgtaagaa

SEQ ID NO: 33246 - DNA, 25 bp, probe
caagatagttgctatgttatgacac

SEQ ID NO: 33247 - DNA, 25 bp, probe
atcccattcttattctcctcaaacc

SEQ ID NO: 33248 - DNA, 25 bp, probe
catagcaccaacagagatgtaggaa

SEQ ID NO: 33249 - DNA, 25 bp, probe
ttcatagcaccaacagagatgtagg

SEQ ID NO: 33250 - DNA, 25 bp, probe
tatgtgtactgtgatctgtaagaag

SEQ ID NO: 33251 - DNA, 25 bp, probe
cattcttattctcctcaaacctgtg

SEQ ID NO: 33252 - DNA, 25 bp, probe
ccattcttattctcctcaaacctgt

SEQ ID NO: 33253 - DNA, 25 bp, probe
agatagttgctatgttatgacactt

SEQ ID NO: 33254 - DNA, 25 bp, probe
aagatagttgctatgttatgacact

SEQ ID NO: 33255 - DNA, 25 bp, probe
gccgtatgtgtactgtgatctgtaa

SEQ ID NO: 33256 - DNA, 25 bp, probe
ggatacagtttagtgagacaagcaa

SEQ ID NO: 33257 - DNA, 25 bp, probe
acagtttagtgagacaagcaatttc

SEQ ID NO: 33258 - DNA, 25 bp, probe
gcattatcccattcttattctcctc

SEQ ID NO: 33259 - DNA, 25 bp, probe
gatacagtttagtgagacaagcaat

SEQ ID NO: 33260 - DNA, 25 bp, probe
attcttattctcctcaaacctgtgc

SEQ ID NO: 33261 - DNA, 25 bp, probe
cccattcttattctcctcaaacctg

SEQ ID NO: 33262 - DNA, 25 bp, probe
tcccattcttattctcctcaaacct

SEQ ID NO: 33263 - DNA, 25 bp, probe
tgtgtactgtgatctgtaagaagta

SEQ ID NO: 33264 - DNA, 25 bp, probe
gacaagatagttgctatgttatgac

SEQ ID NO: 33265 - DNA, 25 bp, probe
ggtttatcttccttcacatccagaa

SEQ ID NO: 33266 - DNA, 25 bp, probe
cagtttagtgagacaagcaatttct

SEQ ID NO: 33267 - DNA, 25 bp, probe
atctgtaagaagtacaatgccatct

SEQ ID NO: 33268 - DNA, 25 bp, probe
tgatctgtaagaagtacaatgccat

SEQ ID NO: 33269 - DNA, 25 bp, probe
ctgtgatctgtaagaagtacaatgc

SEQ ID NO: 33270 - DNA, 25 bp, probe
tacagtttagtgagacaagcaattt

SEQ ID NO: 33271 - DNA, 25 bp, probe
gtggatacagtttagtgagacaagc

SEQ ID NO: 33272 - DNA, 25 bp, probe
gatctgtaagaagtacaatgccatc

SEQ ID NO: 33273 - DNA, 25 bp, probe
tctgtaagaagtacaatgccatctg

SEQ ID NO: 33274 - DNA, 25 bp, probe
aaagtatttgtcatttctgagtcgc

SEQ ID NO: 33275 - DNA, 25 bp, probe
tggagtcagaagtgtgagttatcag

SEQ ID NO: 33276 - DNA, 25 bp, probe
ctggagtcagaagtgtgagttatca

SEQ ID NO: 33277 - DNA, 25 bp, probe
gagtcagaagtgtgagttatcagcc

SEQ ID NO: 33278 - DNA, 25 bp, probe
ggagtcagaagtgtgagttatcagc

SEQ ID NO: 33279 - DNA, 25 bp, probe
tagagtttcttctcatcagagcact

SEQ ID NO: 33280 - DNA, 25 bp, probe
ctagagtttcttctcatcagagcac

SEQ ID NO: 33281 - DNA, 25 bp, probe
tacctggctagagtttcttctcatc

SEQ ID NO: 33282 - DNA, 25 bp, probe
ctacctggctagagtttcttctcat

SEQ ID NO: 33283 - DNA, 25 bp, probe
agtcagaagtgtgagttatcagcca

SEQ ID NO: 33284 - DNA, 25 bp, probe
tggctagagtttcttctcatcagag

SEQ ID NO: 33285 - DNA, 25 bp, probe
ctggctagagtttcttctcatcaga

SEQ ID NO: 33286 - DNA, 25 bp, probe
gtcagaagtgtgagttatcagccac

SEQ ID NO: 33287 - DNA, 25 bp, probe
agagtttcttctcatcagagcactg

SEQ ID NO: 33288 - DNA, 25 bp, probe
ctcatcagagcactgggacattaaa

SEQ ID NO: 33289 - DNA, 25 bp, probe
cctggctagagtttcttctcatcag

SEQ ID NO: 33290 - DNA, 25 bp, probe
tctacctggctagagtttcttctca

SEQ ID NO: 33291 - DNA, 25 bp, probe
tcatcagagcactgggacattaaac

SEQ ID NO: 33292 - DNA, 25 bp, probe
acctggctagagtttcttctcatca

SEQ ID NO: 33293 - DNA, 25 bp, probe
agtgacctcagtagcctcaaatcat

SEQ ID NO: 33294 - DNA, 25 bp, probe
atcagtgacctcagtagcctcaaat

SEQ ID NO: 33295 - DNA, 25 bp, probe
tctggagtcagaagtgtgagttatc

SEQ ID NO: 33296 - DNA, 25 bp, probe
gtctggagtcagaagtgtgagttat

SEQ ID NO: 33297 - DNA, 25 bp, probe
gagtttcttctcatcagagcactgg

SEQ ID NO: 33298 - DNA, 25 bp, probe
tttctggcttctaccatgaaatcct

SEQ ID NO: 33299 - DNA, 25 bp, probe
tctcatcagagcactgggacattaa

SEQ ID NO: 33300 - DNA, 25 bp, probe
ttctcatcagagcactgggacatta

SEQ ID NO: 33301 - DNA, 25 bp, probe
gctagagtttcttctcatcagagca

SEQ ID NO: 33302 - DNA, 25 bp, probe
gtgacctcagtagcctcaaatcatg

SEQ ID NO: 33303 - DNA, 25 bp, probe
ttctggcttctaccatgaaatcctg

SEQ ID NO: 33304 - DNA, 25 bp, probe
tcatcagtgacctcagtagcctcaa

SEQ ID NO: 33305 - DNA, 25 bp, probe
tcagtgacctcagtagcctcaaatc

SEQ ID NO: 33306 - DNA, 25 bp, probe
catcagagcactgggacattaaacc

SEQ ID NO: 33307 - DNA, 25 bp, probe
ggctagagtttcttctcatcagagc

SEQ ID NO: 33308 - DNA, 25 bp, probe
agtctggagtcagaagtgtgagtta

SEQ ID NO: 33309 - DNA, 25 bp, probe
acattaaacccaccttttcccagaa

SEQ ID NO: 33310 - DNA, 25 bp, probe
cagtgacctcagtagcctcaaatca

SEQ ID NO: 33311 - DNA, 25 bp, probe
catcagtgacctcagtagcctcaaa

SEQ ID NO: 33312 - DNA, 25 bp, probe
gacattaaacccaccttttcccaga

SEQ ID NO: 33313 - DNA, 25 bp, probe
cctcagtagcctcaaatcatggtga

SEQ ID NO: 33314 - DNA, 25 bp, probe
tgacctcagtagcctcaaatcatgg

SEQ ID NO: 33315 - DNA, 25 bp, probe
cttttctggcttctaccatgaaatc

SEQ ID NO: 33316 - DNA, 25 bp, probe
cttctcatcagagcactgggacatt

SEQ ID NO: 33317 - DNA, 25 bp, probe
tttcttctcatcagagcactgggac

SEQ ID NO: 33318 - DNA, 25 bp, probe
gtttcttctcatcagagcactggga

SEQ ID NO: 33319 - DNA, 25 bp, probe
actctgaatgcctactattatcctg

SEQ ID NO: 33320 - DNA, 25 bp, probe
ctctgaatgcctactattatcctga

SEQ ID NO: 33321 - DNA, 25 bp, probe
ctcttaacgccactaatatacatcc

SEQ ID NO: 33322 - DNA, 25 bp, probe
tctgaatgcctactattatcctgat

SEQ ID NO: 33323 - DNA, 25 bp, probe
aactcttcaccttgatgtatgttct

SEQ ID NO: 33324 - DNA, 25 bp, probe
tcttcaccttgatgtatgttctgat

SEQ ID NO: 33325 - DNA, 25 bp, probe
ctcttcaccttgatgtatgttctga

SEQ ID NO: 33326 - DNA, 25 bp, probe
actcttcaccttgatgtatgttctg

SEQ ID NO: 33327 - DNA, 25 bp, probe
actcttaacgccactaatatacatc

SEQ ID NO: 33328 - DNA, 25 bp, probe
tactctgaatgcctactattatcct

SEQ ID NO: 33329 - DNA, 25 bp, probe
ctgaatgcctactattatcctgatt

SEQ ID NO: 33330 - DNA, 25 bp, probe
cttcaccttgatgtatgttctgata

SEQ ID NO: 33331 - DNA, 25 bp, probe
caatggctccagtgattaatagatg

SEQ ID NO: 33332 - DNA, 25 bp, probe
atgcctactattatcctgattatgg

SEQ ID NO: 33333 - DNA, 25 bp, probe
ttactctgaatgcctactattatcc

SEQ ID NO: 33334 - DNA, 25 bp, probe
tcaatggctccagtgattaatagat

SEQ ID NO: 33335 - DNA, 25 bp, probe
ttcaccttgatgtatgttctgatac

SEQ ID NO: 33336 - DNA, 25 bp, probe
ttactcttaacgccactaatataca

SEQ ID NO: 33337 - DNA, 25 bp, probe
cttaacgccactaatatacatccct

SEQ ID NO: 33338 - DNA, 25 bp, probe
tcttaacgccactaatatacatccc

SEQ ID NO: 33339 - DNA, 25 bp, probe
tactcttaacgccactaatatacat

SEQ ID NO: 33340 - DNA, 25 bp, probe
aacgccactaatatacatccctaat

SEQ ID NO: 33341 - DNA, 25 bp, probe
tgcctactattatcctgattatggg

SEQ ID NO: 33342 - DNA, 25 bp, probe
acacatacataccctataccaagag

SEQ ID NO: 33343 - DNA, 25 bp, probe
taacgccactaatatacatccctaa

SEQ ID NO: 33344 - DNA, 25 bp, probe
ttaacgccactaatatacatcccta

SEQ ID NO: 33345 - DNA, 25 bp, probe
acgccactaatatacatccctaata

SEQ ID NO: 33346 - DNA, 25 bp, probe
tgaatgcctactattatcctgatta

SEQ ID NO: 33347 - DNA, 25 bp, probe
aatggctccagtgattaatagatgg

SEQ ID NO: 33348 - DNA, 25 bp, probe
cactttattactctgaatgcctact

SEQ ID NO: 33349 - DNA, 25 bp, probe
aaactcttcaccttgatgtatgttc

SEQ ID NO: 33350 - DNA, 25 bp, probe
gaaactcttcaccttgatgtatgtt

SEQ ID NO: 33351 - DNA, 25 bp, probe
cgaaactcttcaccttgatgtatgt

SEQ ID NO: 33352 - DNA, 25 bp, probe
tacacatacataccctataccaaga

SEQ ID NO: 33353 - DNA, 25 bp, probe
tcactttattactctgaatgcctac

SEQ ID NO: 33354 - DNA, 25 bp, probe
ccgaaactcttcaccttgatgtatg

SEQ ID NO: 33355 - DNA, 25 bp, probe
cacatacataccctataccaagagg

SEQ ID NO: 33356 - DNA, 25 bp, probe
tgttcagcttcttgtaaatgtgttt

SEQ ID NO: 33357 - DNA, 25 bp, probe
ttgttcagcttcttgtaaatgtgtt

SEQ ID NO: 33358 - DNA, 25 bp, probe
agttgttcagcttcttgtaaatgtg

SEQ ID NO: 33359 - DNA, 25 bp, probe
gatcactttattactctgaatgcct

SEQ ID NO: 33360 - DNA, 25 bp, probe
gttgttcagcttcttgtaaatgtgt

SEQ ID NO: 33361 - DNA, 25 bp, probe
atcaatggctccagtgattaataga

SEQ ID NO: 33362 - DNA, 25 bp, probe
cgccactaatatacatccctaatat

SEQ ID NO: 33363 - DNA, 25 bp, probe
cattgttgcccatcttctatgtcac

SEQ ID NO: 33364 - DNA, 25 bp, probe
caagttcattggcttcaccatgtac

SEQ ID NO: 33365 - DNA, 25 bp, probe
attgttgcccatcttctatgtcacc

SEQ ID NO: 33366 - DNA, 25 bp, probe
ctttatgccttcaatactcgcaagt

SEQ ID NO: 33367 - DNA, 25 bp, probe
ttgttgcccatcttctatgtcacct

SEQ ID NO: 33368 - DNA, 25 bp, probe
tttatgccttcaatactcgcaagtg

SEQ ID NO: 33369 - DNA, 25 bp, probe
tgttgcccatcttctatgtcacctc

SEQ ID NO: 33370 - DNA, 25 bp, probe
ttatgccttcaatactcgcaagtgc

SEQ ID NO: 33371 - DNA, 25 bp, probe
gctttatgccttcaatactcgcaag

SEQ ID NO: 33372 - DNA, 25 bp, probe
aagttcattggcttcaccatgtaca

SEQ ID NO: 33373 - DNA, 25 bp, probe
cccatcttctatgtcacctccagtg

SEQ ID NO: 33374 - DNA, 25 bp, probe
cacgctttatgccttcaatactcgc

SEQ ID NO: 33375 - DNA, 25 bp, probe
gttgcccatcttctatgtcacctcc

SEQ ID NO: 33376 - DNA, 25 bp, probe
ccatcttctatgtcacctccagtga

SEQ ID NO: 33377 - DNA, 25 bp, probe
agttcattggcttcaccatgtacac

SEQ ID NO: 33378 - DNA, 25 bp, probe
gcattgttgcccatcttctatgtca

SEQ ID NO: 33379 - DNA, 25 bp, probe
ccaagttcattggcttcaccatgta

SEQ ID NO: 33380 - DNA, 25 bp, probe
cgctttatgccttcaatactcgcaa

SEQ ID NO: 33381 - DNA, 25 bp, probe
ctctgcacgctttatgccttcaata

SEQ ID NO: 33382 - DNA, 25 bp, probe
gttcattggcttcaccatgtacacc

SEQ ID NO: 33383 - DNA, 25 bp, probe
tgcacgctttatgccttcaatactc

SEQ ID NO: 33384 - DNA, 25 bp, probe
ctgcacgctttatgccttcaatact

SEQ ID NO: 33385 - DNA, 25 bp, probe
tctgcacgctttatgccttcaatac

SEQ ID NO: 33386 - DNA, 25 bp, probe
ttcattggcttcaccatgtacacca

SEQ ID NO: 33387 - DNA, 25 bp, probe
gcacgctttatgccttcaatactcg

SEQ ID NO: 33388 - DNA, 25 bp, probe
aacttcaacgaggccaagttcattg

SEQ ID NO: 33389 - DNA, 25 bp, probe
aaacttcaacgaggccaagttcatt

SEQ ID NO: 33390 - DNA, 25 bp, probe
aaaacttcaacgaggccaagttcat

SEQ ID NO: 33391 - DNA, 25 bp, probe
gaaaacttcaacgaggccaagttca

SEQ ID NO: 33392 - DNA, 25 bp, probe
cgaaaacttcaacgaggccaagttc

SEQ ID NO: 33393 - DNA, 25 bp, probe
ttcagattcacctccattaaccaag

SEQ ID NO: 33394 - DNA, 25 bp, probe
ggtgaagagcatagttaataagcaa

SEQ ID NO: 33395 - DNA, 25 bp, probe
cagattcacctccattaaccaagaa

SEQ ID NO: 33396 - DNA, 25 bp, probe
tcagattcacctccattaaccaaga

SEQ ID NO: 33397 - DNA, 25 bp, probe
gtgaagagcatagttaataagcaac

SEQ ID NO: 33398 - DNA, 25 bp, probe
cctacttatttcagattcacctcca

SEQ ID NO: 33399 - DNA, 25 bp, probe
acctacttatttcagattcacctcc

SEQ ID NO: 33400 - DNA, 25 bp, probe
ccacctacttatttcagattcacct

SEQ ID NO: 33401 - DNA, 25 bp, probe
tccacctacttatttcagattcacc

SEQ ID NO: 33402 - DNA, 25 bp, probe
atttcagattcacctccattaacca

SEQ ID NO: 33403 - DNA, 25 bp, probe
tttcagattcacctccattaaccaa

SEQ ID NO: 33404 - DNA, 25 bp, probe
ggagggtgaagagcatagttaataa

SEQ ID NO: 33405 - DNA, 25 bp, probe
agggtgaagagcatagttaataagc

SEQ ID NO: 33406 - DNA, 25 bp, probe
gggtgaagagcatagttaataagca

SEQ ID NO: 33407 - DNA, 25 bp, probe
agattcacctccattaaccaagaaa

SEQ ID NO: 33408 - DNA, 25 bp, probe
gtctcttcaaacagttccataccaa

SEQ ID NO: 33409 - DNA, 25 bp, probe
cacctacttatttcagattcacctc

SEQ ID NO: 33410 - DNA, 25 bp, probe
gggattccacctacttatttcagat

SEQ ID NO: 33411 - DNA, 25 bp, probe
gagggtgaagagcatagttaataag

SEQ ID NO: 33412 - DNA, 25 bp, probe
tctcttcaaacagttccataccaac

SEQ ID NO: 33413 - DNA, 25 bp, probe
ttccacctacttatttcagattcac

SEQ ID NO: 33414 - DNA, 25 bp, probe
tatttcagattcacctccattaacc

SEQ ID NO: 33415 - DNA, 25 bp, probe
cggagggtgaagagcatagttaata

SEQ ID NO: 33416 - DNA, 25 bp, probe
ctacttatttcagattcacctccat

SEQ ID NO: 33417 - DNA, 25 bp, probe
accagtggaagatttcttgactatt

SEQ ID NO: 33418 - DNA, 25 bp, probe
aaccagtggaagatttcttgactat

SEQ ID NO: 33419 - DNA, 25 bp, probe
aaaccagtggaagatttcttgacta

SEQ ID NO: 33420 - DNA, 25 bp, probe
ggattccacctacttatttcagatt

SEQ ID NO: 33421 - DNA, 25 bp, probe
ggaagatttcttgactatttcacca

SEQ ID NO: 33422 - DNA, 25 bp, probe
tggaagatttcttgactatttcacc

SEQ ID NO: 33423 - DNA, 25 bp, probe
ccagtggaagatttcttgactattt

SEQ ID NO: 33424 - DNA, 25 bp, probe
agcagtaacttgggtccagtattta

SEQ ID NO: 33425 - DNA, 25 bp, probe
tttcttgactatttcaccatgttgc

SEQ ID NO: 33426 - DNA, 25 bp, probe
acttatttcagattcacctccatta

SEQ ID NO: 33427 - DNA, 25 bp, probe
tacttatttcagattcacctccatt

SEQ ID NO: 33428 - DNA, 25 bp, probe
attccacctacttatttcagattca

SEQ ID NO: 33429 - DNA, 25 bp, probe
aagagcatagttaataagcaactgt

SEQ ID NO: 33430 - DNA, 25 bp, probe
ttgactatttcaccatgttgccaat

SEQ ID NO: 33431 - DNA, 25 bp, probe
aattgggttgtgaaatactcttcca

SEQ ID NO: 33432 - DNA, 25 bp, probe
cagtaacttgggtccagtatttacg

SEQ ID NO: 33433 - DNA, 25 bp, probe
gattccacctacttatttcagattc

SEQ ID NO: 33434 - DNA, 25 bp, probe
agtggaagatttcttgactatttca

SEQ ID NO: 33435 - DNA, 25 bp, probe
aagcagtaacttgggtccagtattt

SEQ ID NO: 33436 - DNA, 25 bp, probe
aaagcagtaacttgggtccagtatt

SEQ ID NO: 33437 - DNA, 25 bp, probe
atcctctgttactgaagatgttgtc

SEQ ID NO: 33438 - DNA, 25 bp, probe
cctctgttactgaagatgttgtcat

SEQ ID NO: 33439 - DNA, 25 bp, probe
tcctctgttactgaagatgttgtca

SEQ ID NO: 33440 - DNA, 25 bp, probe
attatataggcattcttccagtgtg

SEQ ID NO: 33441 - DNA, 25 bp, probe
ctctgttactgaagatgttgtcata

SEQ ID NO: 33442 - DNA, 25 bp, probe
aattatataggcattcttccagtgt

SEQ ID NO: 33443 - DNA, 25 bp, probe
tctgttactgaagatgttgtcatat

SEQ ID NO: 33444 - DNA, 25 bp, probe
ttatataggcattcttccagtgtgg

SEQ ID NO: 33445 - DNA, 25 bp, probe
tgttgcccttgaattatctgtatga

SEQ ID NO: 33446 - DNA, 25 bp, probe
tctacactgattgcactgaggatat

SEQ ID NO: 33447 - DNA, 25 bp, probe
catttgttgcccttgaattatctgt

SEQ ID NO: 33448 - DNA, 25 bp, probe
atagggtcttgctcaatttcttagg

SEQ ID NO: 33449 - DNA, 25 bp, probe
ttgttgcccttgaattatctgtatg

SEQ ID NO: 33450 - DNA, 25 bp, probe
tatataggcattcttccagtgtggt

SEQ ID NO: 33451 - DNA, 25 bp, probe
cacaaataactgacttccacaagag

SEQ ID NO: 33452 - DNA, 25 bp, probe
gttgcccttgaattatctgtatgaa

SEQ ID NO: 33453 - DNA, 25 bp, probe
acacaaataactgacttccacaaga

SEQ ID NO: 33454 - DNA, 25 bp, probe
ttctacactgattgcactgaggata

SEQ ID NO: 33455 - DNA, 25 bp, probe
gatagggtcttgctcaatttcttag

SEQ ID NO: 33456 - DNA, 25 bp, probe
ccatttgttgcccttgaattatctg

SEQ ID NO: 33457 - DNA, 25 bp, probe
tacacaaataactgacttccacaag

SEQ ID NO: 33458 - DNA, 25 bp, probe
ctacactgattgcactgaggatatc

SEQ ID NO: 33459 - DNA, 25 bp, probe
acaaataactgacttccacaagagg

SEQ ID NO: 33460 - DNA, 25 bp, probe
tttgttgcccttgaattatctgtat

SEQ ID NO: 33461 - DNA, 25 bp, probe
atttgttgcccttgaattatctgta

SEQ ID NO: 33462 - DNA, 25 bp, probe
atataggcattcttccagtgtggtt

SEQ ID NO: 33463 - DNA, 25 bp, probe
aagcagttcttagtagaggcatttc

SEQ ID NO: 33464 - DNA, 25 bp, probe
gaagcagttcttagtagaggcattt

SEQ ID NO: 33465 - DNA, 25 bp, probe
tacactgattgcactgaggatatct

SEQ ID NO: 33466 - DNA, 25 bp, probe
agatagggtcttgctcaatttctta

SEQ ID NO: 33467 - DNA, 25 bp, probe
ttcagaatcagaagcagttcttagt

SEQ ID NO: 33468 - DNA, 25 bp, probe
aatcagaagcagttcttagtagagg

SEQ ID NO: 33469 - DNA, 25 bp, probe
gaagagcttctgtatagtaaccatt

SEQ ID NO: 33470 - DNA, 25 bp, probe
gtacacaaataactgacttccacaa

SEQ ID NO: 33471 - DNA, 25 bp, probe
ctgttactgaagatgttgtcatatt

SEQ ID NO: 33472 - DNA, 25 bp, probe
tcagaatcagaagcagttcttagta

SEQ ID NO: 33473 - DNA, 25 bp, probe
ttcattgcttactgtaaagagtcca

SEQ ID NO: 33474 - DNA, 25 bp, probe
ttgcccttgaattatctgtatgaat

SEQ ID NO: 33475 - DNA, 25 bp, probe
ttctccactgtgaactctgtgattc

SEQ ID NO: 33476 - DNA, 25 bp, probe
caaataactgacttccacaagaggg

SEQ ID NO: 33477 - DNA, 25 bp, probe
gagatagggtcttgctcaatttctt

SEQ ID NO: 33478 - DNA, 25 bp, probe
agcagttcttagtagaggcatttct

SEQ ID NO: 33479 - DNA, 25 bp, probe
agaatcagaagcagttcttagtaga

SEQ ID NO: 33480 - DNA, 25 bp, probe
cagaatcagaagcagttcttagtag

SEQ ID NO: 33481 - DNA, 25 bp, probe
aaggtattggctgaactgaatagag

SEQ ID NO: 33482 - DNA, 25 bp, probe
gaaggtattggctgaactgaataga

SEQ ID NO: 33483 - DNA, 25 bp, probe
tattggctgaactgaatagaggtct

SEQ ID NO: 33484 - DNA, 25 bp, probe
gtattggctgaactgaatagaggtc

SEQ ID NO: 33485 - DNA, 25 bp, probe
ggaaggtattggctgaactgaatag

SEQ ID NO: 33486 - DNA, 25 bp, probe
attggctgaactgaatagaggtctt

SEQ ID NO: 33487 - DNA, 25 bp, probe
aggaaggtattggctgaactgaata

SEQ ID NO: 33488 - DNA, 25 bp, probe
gctgaactgaatagaggtcttgatc

SEQ ID NO: 33489 - DNA, 25 bp, probe
ctgaactgaatagaggtcttgatct

SEQ ID NO: 33490 - DNA, 25 bp, probe
ttaatcttgctgcttatgtgccaat

SEQ ID NO: 33491 - DNA, 25 bp, probe
tgaactgaatagaggtcttgatctt

SEQ ID NO: 33492 - DNA, 25 bp, probe
taatcttgctgcttatgtgccaatt

SEQ ID NO: 33493 - DNA, 25 bp, probe
aaggaaggtattggctgaactgaat

SEQ ID NO: 33494 - DNA, 25 bp, probe
aggtattggctgaactgaatagagg

SEQ ID NO: 33495 - DNA, 25 bp, probe
ggctgaactgaatagaggtcttgat

SEQ ID NO: 33496 - DNA, 25 bp, probe
ggtattggctgaactgaatagaggt

SEQ ID NO: 33497 - DNA, 25 bp, probe
ttcgttaatcttgctgcttatgtgc

SEQ ID NO: 33498 - DNA, 25 bp, probe
tctgtgatattgtccaagaatgtat

SEQ ID NO: 33499 - DNA, 25 bp, probe
ttggctgaactgaatagaggtcttg

SEQ ID NO: 33500 - DNA, 25 bp, probe
gttaatcttgctgcttatgtgccaa

SEQ ID NO: 33501 - DNA, 25 bp, probe
ttccctctttccattctctttcaat

SEQ ID NO: 33502 - DNA, 25 bp, probe
attccctctttccattctctttcaa

SEQ ID NO: 33503 - DNA, 25 bp, probe
gctgtttgaaggaaagaatatggat

SEQ ID NO: 33504 - DNA, 25 bp, probe
ctttcgttaatcttgctgcttatgt

SEQ ID NO: 33505 - DNA, 25 bp, probe
actttcgttaatcttgctgcttatg

SEQ ID NO: 33506 - DNA, 25 bp, probe
tttcgttaatcttgctgcttatgtg

SEQ ID NO: 33507 - DNA, 25 bp, probe
ccctctttccattctctttcaattc

SEQ ID NO: 33508 - DNA, 25 bp, probe
tccctctttccattctctttcaatt

SEQ ID NO: 33509 - DNA, 25 bp, probe
aattccctctttccattctctttca

SEQ ID NO: 33510 - DNA, 25 bp, probe
aaattccctctttccattctctttc

SEQ ID NO: 33511 - DNA, 25 bp, probe
ctgtgatattgtccaagaatgtatc

SEQ ID NO: 33512 - DNA, 25 bp, probe
tacgattatagtaccactgcacatc

SEQ ID NO: 33513 - DNA, 25 bp, probe
tactttcgttaatcttgctgcttat

SEQ ID NO: 33514 - DNA, 25 bp, probe
ttacgattatagtaccactgcacat

SEQ ID NO: 33515 - DNA, 25 bp, probe
attacgattatagtaccactgcaca

SEQ ID NO: 33516 - DNA, 25 bp, probe
cctctttccattctctttcaattct

SEQ ID NO: 33517 - DNA, 25 bp, probe
gattatagtaccactgcacatcatg

SEQ ID NO: 33518 - DNA, 25 bp, probe
cgattatagtaccactgcacatcat

SEQ ID NO: 33519 - DNA, 25 bp, probe
tggctgaactgaatagaggtcttga

SEQ ID NO: 33520 - DNA, 25 bp, probe
tgtccaagaatgtatcaataaggaa

SEQ ID NO: 33521 - DNA, 25 bp, probe
ttgtccaagaatgtatcaataagga

SEQ ID NO: 33522 - DNA, 25 bp, probe
ttatagtaccactgcacatcatgtt

SEQ ID NO: 33523 - DNA, 25 bp, probe
attatagtaccactgcacatcatgt

SEQ ID NO: 33524 - DNA, 25 bp, probe
ctttccattctctttcaattctgtg

SEQ ID NO: 33525 - DNA, 25 bp, probe
tctctttggtttctcatcacatttg

SEQ ID NO: 33526 - DNA, 25 bp, probe
ctttctctttggtttctcatcacat

SEQ ID NO: 33527 - DNA, 25 bp, probe
atttctacctttctgagtctcttgg

SEQ ID NO: 33528 - DNA, 25 bp, probe
ctctttggtttctcatcacatttgt

SEQ ID NO: 33529 - DNA, 25 bp, probe
ttgatatgggctttctctttggttt

SEQ ID NO: 33530 - DNA, 25 bp, probe
tttgatatgggctttctctttggtt

SEQ ID NO: 33531 - DNA, 25 bp, probe
ttctctttggtttctcatcacattt

SEQ ID NO: 33532 - DNA, 25 bp, probe
tttctctttggtttctcatcacatt

SEQ ID NO: 33533 - DNA, 25 bp, probe
ggctaagtgtccattatttaccttg

SEQ ID NO: 33534 - DNA, 25 bp, probe
atatgggctttctctttggtttctc

SEQ ID NO: 33535 - DNA, 25 bp, probe
gatatgggctttctctttggtttct

SEQ ID NO: 33536 - DNA, 25 bp, probe
tttctacctttctgagtctcttgga

SEQ ID NO: 33537 - DNA, 25 bp, probe
taacagagtttgatatgggctttct

SEQ ID NO: 33538 - DNA, 25 bp, probe
tgatatgggctttctctttggtttc

SEQ ID NO: 33539 - DNA, 25 bp, probe
agtttgatatgggctttctctttgg

SEQ ID NO: 33540 - DNA, 25 bp, probe
ttaacagagtttgatatgggctttc

SEQ ID NO: 33541 - DNA, 25 bp, probe
tctttggtttctcatcacatttgta

SEQ ID NO: 33542 - DNA, 25 bp, probe
ctagtggagagaactgattgtgagc

SEQ ID NO: 33543 - DNA, 25 bp, probe
gctaagtgtccattatttaccttga

SEQ ID NO: 33544 - DNA, 25 bp, probe
gtttgatatgggctttctctttggt

SEQ ID NO: 33545 - DNA, 25 bp, probe
gctttctctttggtttctcatcaca

SEQ ID NO: 33546 - DNA, 25 bp, probe
gagtttgatatgggctttctctttg

SEQ ID NO: 33547 - DNA, 25 bp, probe
ctttggtttctcatcacatttgtaa

SEQ ID NO: 33548 - DNA, 25 bp, probe
aacagagtttgatatgggctttctc

SEQ ID NO: 33549 - DNA, 25 bp, probe
tatgggctttctctttggtttctca

SEQ ID NO: 33550 - DNA, 25 bp, probe
cagaaaccattgttcagaagacctc

SEQ ID NO: 33551 - DNA, 25 bp, probe
tcagaaaccattgttcagaagacct

SEQ ID NO: 33552 - DNA, 25 bp, probe
ggctttctctttggtttctcatcac

SEQ ID NO: 33553 - DNA, 25 bp, probe
agtgtccattatttaccttgaacaa

SEQ ID NO: 33554 - DNA, 25 bp, probe
aagtgtccattatttaccttgaaca

SEQ ID NO: 33555 - DNA, 25 bp, probe
tatttctacctttctgagtctcttg

SEQ ID NO: 33556 - DNA, 25 bp, probe
tttggtttctcatcacatttgtaaa

SEQ ID NO: 33557 - DNA, 25 bp, probe
aaccacaatatgtatagcacatgga

SEQ ID NO: 33558 - DNA, 25 bp, probe
cacaatatgtatagcacatggagtg

SEQ ID NO: 33559 - DNA, 25 bp, probe
ccacaatatgtatagcacatggagt

SEQ ID NO: 33560 - DNA, 25 bp, probe
accacaatatgtatagcacatggag

SEQ ID NO: 33561 - DNA, 25 bp, probe
ttctacctttctgagtctcttggac

SEQ ID NO: 33562 - DNA, 25 bp, probe
ttggtttctcatcacatttgtaaat

SEQ ID NO: 33563 - DNA, 25 bp, probe
tggctaagtgtccattatttacctt

SEQ ID NO: 33564 - DNA, 25 bp, probe
gtggctaagtgtccattatttacct

SEQ ID NO: 33565 - DNA, 25 bp, probe
agtggctaagtgtccattatttacc

SEQ ID NO: 33566 - DNA, 25 bp, probe
acaagtggctaagtgtccattattt

SEQ ID NO: 33567 - DNA, 25 bp, probe
aagtggctaagtgtccattatttac

SEQ ID NO: 33568 - DNA, 25 bp, probe
caagtggctaagtgtccattattta

SEQ ID NO: 33569 - DNA, 25 bp, probe
cattataccacaagagacaagcaag

SEQ ID NO: 33570 - DNA, 25 bp, probe
attataccacaagagacaagcaagt

SEQ ID NO: 33571 - DNA, 25 bp, probe
tataccacaagagacaagcaagtag

SEQ ID NO: 33572 - DNA, 25 bp, probe
acattataccacaagagacaagcaa

SEQ ID NO: 33573 - DNA, 25 bp, probe
ttataccacaagagacaagcaagta

SEQ ID NO: 33574 - DNA, 25 bp, probe
agacattataccacaagagacaagc

SEQ ID NO: 33575 - DNA, 25 bp, probe
gacattataccacaagagacaagca

SEQ ID NO: 33576 - DNA, 25 bp, probe
aagacattataccacaagagacaag

SEQ ID NO: 33577 - DNA, 25 bp, probe
cacaagagacaagcaagtaggattg

SEQ ID NO: 33578 - DNA, 25 bp, probe
ataccacaagagacaagcaagtagg

SEQ ID NO: 33579 - DNA, 25 bp, probe
aattcatagcacagtgagaagtctc

SEQ ID NO: 33580 - DNA, 25 bp, probe
ccacaagagacaagcaagtaggatt

SEQ ID NO: 33581 - DNA, 25 bp, probe
gcaaagacattataccacaagagac

SEQ ID NO: 33582 - DNA, 25 bp, probe
agcaaagacattataccacaagaga

SEQ ID NO: 33583 - DNA, 25 bp, probe
cagcaaagacattataccacaagag

SEQ ID NO: 33584 - DNA, 25 bp, probe
atagagcagcaaagacattatacca

SEQ ID NO: 33585 - DNA, 25 bp, probe
tagagcagcaaagacattataccac

SEQ ID NO: 33586 - DNA, 25 bp, probe
gcatttgtaatatgttggcttcctt

SEQ ID NO: 33587 - DNA, 25 bp, probe
caaagacattataccacaagagaca

SEQ ID NO: 33588 - DNA, 25 bp, probe
taccacaagagacaagcaagtagga

SEQ ID NO: 33589 - DNA, 25 bp, probe
acattgtttccaccatttactcaac

SEQ ID NO: 33590 - DNA, 25 bp, probe
cacattgtttccaccatttactcaa

SEQ ID NO: 33591 - DNA, 25 bp, probe
aaagcactaaatcagtttccacatc

SEQ ID NO: 33592 - DNA, 25 bp, probe
gtttccaccatttactcaacatttg

SEQ ID NO: 33593 - DNA, 25 bp, probe
gcagcaaagacattataccacaaga

SEQ ID NO: 33594 - DNA, 25 bp, probe
agcagcaaagacattataccacaag

SEQ ID NO: 33595 - DNA, 25 bp, probe
gagcagcaaagacattataccacaa

SEQ ID NO: 33596 - DNA, 25 bp, probe
aaattcatagcacagtgagaagtct

SEQ ID NO: 33597 - DNA, 25 bp, probe
gcactaaatcagtttccacatccta

SEQ ID NO: 33598 - DNA, 25 bp, probe
tatagagcagcaaagacattatacc

SEQ ID NO: 33599 - DNA, 25 bp, probe
gaagacttcaagaaagcattccaaa

SEQ ID NO: 33600 - DNA, 25 bp, probe
aaagacattataccacaagagacaa

SEQ ID NO: 33601 - DNA, 25 bp, probe
ccacattgtttccaccatttactca

SEQ ID NO: 33602 - DNA, 25 bp, probe
accacattgtttccaccatttactc

SEQ ID NO: 33603 - DNA, 25 bp, probe
gaccacattgtttccaccatttact

SEQ ID NO: 33604 - DNA, 25 bp, probe
agaattagttgttaatgtctgtgac

SEQ ID NO: 33605 - DNA, 25 bp, probe
catttgtaatatgttggcttccttt

SEQ ID NO: 33606 - DNA, 25 bp, probe
actaaatcagtttccacatcctatg

SEQ ID NO: 33607 - DNA, 25 bp, probe
cactaaatcagtttccacatcctat

SEQ ID NO: 33608 - DNA, 25 bp, probe
aagtctttatctgacccatcaacag

SEQ ID NO: 33609 - DNA, 25 bp, probe
aagcactaaatcagtttccacatcc

SEQ ID NO: 33610 - DNA, 25 bp, probe
aagaattagttgttaatgtctgtga

SEQ ID NO: 33611 - DNA, 25 bp, probe
agagcagcaaagacattataccaca

SEQ ID NO: 33612 - DNA, 25 bp, probe
aaagtctttatctgacccatcaaca

SEQ ID NO: 33613 - DNA, 25 bp, probe
aagttgtgtgctattcgtaagttct

SEQ ID NO: 33614 - DNA, 25 bp, probe
caagttgtgtgctattcgtaagttc

SEQ ID NO: 33615 - DNA, 25 bp, probe
attatcctcaagttgtgtgctattc

SEQ ID NO: 33616 - DNA, 25 bp, probe
tcaagttgtgtgctattcgtaagtt

SEQ ID NO: 33617 - DNA, 25 bp, probe
ttatcctcaagttgtgtgctattcg

SEQ ID NO: 33618 - DNA, 25 bp, probe
agttgtgtgctattcgtaagttctg

SEQ ID NO: 33619 - DNA, 25 bp, probe
ctcaagttgtgtgctattcgtaagt

SEQ ID NO: 33620 - DNA, 25 bp, probe
gtgttgtcttattcctaattcctgt

SEQ ID NO: 33621 - DNA, 25 bp, probe
tcctaattcctgtatgttatccact

SEQ ID NO: 33622 - DNA, 25 bp, probe
aattatcctcaagttgtgtgctatt

SEQ ID NO: 33623 - DNA, 25 bp, probe
ttgtgtgctattcgtaagttctgtg

SEQ ID NO: 33624 - DNA, 25 bp, probe
gttgtgtgctattcgtaagttctgt

SEQ ID NO: 33625 - DNA, 25 bp, probe
agtgttgtcttattcctaattcctg

SEQ ID NO: 33626 - DNA, 25 bp, probe
cctcaagttgtgtgctattcgtaag

SEQ ID NO: 33627 - DNA, 25 bp, probe
ctggtaattatcctcaagttgtgtg

SEQ ID NO: 33628 - DNA, 25 bp, probe
cctggtaattatcctcaagttgtgt

SEQ ID NO: 33629 - DNA, 25 bp, probe
acctggtaattatcctcaagttgtg

SEQ ID NO: 33630 - DNA, 25 bp, probe
ttcctaattcctgtatgttatccac

SEQ ID NO: 33631 - DNA, 25 bp, probe
atcctcaagttgtgtgctattcgta

SEQ ID NO: 33632 - DNA, 25 bp, probe
tatcctcaagttgtgtgctattcgt

SEQ ID NO: 33633 - DNA, 25 bp, probe
ggtaattatcctcaagttgtgtgct

SEQ ID NO: 33634 - DNA, 25 bp, probe
aacctggtaattatcctcaagttgt

SEQ ID NO: 33635 - DNA, 25 bp, probe
tcctcaagttgtgtgctattcgtaa

SEQ ID NO: 33636 - DNA, 25 bp, probe
gtaattatcctcaagttgtgtgcta

SEQ ID NO: 33637 - DNA, 25 bp, probe
tggtaattatcctcaagttgtgtgc

SEQ ID NO: 33638 - DNA, 25 bp, probe
aagtgttgtcttattcctaattcct

SEQ ID NO: 33639 - DNA, 25 bp, probe
cctaattcctgtatgttatccacta

SEQ ID NO: 33640 - DNA, 25 bp, probe
tgttgtcttattcctaattcctgta

SEQ ID NO: 33641 - DNA, 25 bp, probe
taattatcctcaagttgtgtgctat

SEQ ID NO: 33642 - DNA, 25 bp, probe
attcctaattcctgtatgttatcca

SEQ ID NO: 33643 - DNA, 25 bp, probe
tgtcttattcctaattcctgtatgt

SEQ ID NO: 33644 - DNA, 25 bp, probe
ccaacctggtaattatcctcaagtt

SEQ ID NO: 33645 - DNA, 25 bp, probe
ttctgtaattcttctcctttgtcaa

SEQ ID NO: 33646 - DNA, 25 bp, probe
tttctgtaattcttctcctttgtca

SEQ ID NO: 33647 - DNA, 25 bp, probe
ttcttctcctttgtcaaatggtatt

SEQ ID NO: 33648 - DNA, 25 bp, probe
aattcttctcctttgtcaaatggta

SEQ ID NO: 33649 - DNA, 25 bp, probe
taattcttctcctttgtcaaatggt

SEQ ID NO: 33650 - DNA, 25 bp, probe
gtccatgtgataattgtaaaggtga

SEQ ID NO: 33651 - DNA, 25 bp, probe
agtccatgtgataattgtaaaggtg

SEQ ID NO: 33652 - DNA, 25 bp, probe
tgtgtgctattcgtaagttctgtgc

SEQ ID NO: 33653 - DNA, 25 bp, probe
ctaattcctgtatgttatccactac

SEQ ID NO: 33654 - DNA, 25 bp, probe
attcttctcctttgtcaaatggtat

SEQ ID NO: 33655 - DNA, 25 bp, probe
gtaattcttctcctttgtcaaatgg

SEQ ID NO: 33656 - DNA, 25 bp, probe
tctgtaattcttctcctttgtcaaa

SEQ ID NO: 33657 - DNA, 25 bp, probe
ataactctgtacgaggcttctctaa

SEQ ID NO: 33658 - DNA, 25 bp, probe
gataactctgtacgaggcttctcta

SEQ ID NO: 33659 - DNA, 25 bp, probe
taactctgtacgaggcttctctaac

SEQ ID NO: 33660 - DNA, 25 bp, probe
attctgcttctctttcacaactttg

SEQ ID NO: 33661 - DNA, 25 bp, probe
aattctgcttctctttcacaacttt

SEQ ID NO: 33662 - DNA, 25 bp, probe
caattcatctcagcaatcacaagcc

SEQ ID NO: 33663 - DNA, 25 bp, probe
ccaattcatctcagcaatcacaagc

SEQ ID NO: 33664 - DNA, 25 bp, probe
gccaattcatctcagcaatcacaag

SEQ ID NO: 33665 - DNA, 25 bp, probe
agatgatgggagtgggaagaataaa

SEQ ID NO: 33666 - DNA, 25 bp, probe
ctgataactctgtacgaggcttctc

SEQ ID NO: 33667 - DNA, 25 bp, probe
attcatctcagcaatcacaagccaa

SEQ ID NO: 33668 - DNA, 25 bp, probe
ctgctattccacatttacctgctag

SEQ ID NO: 33669 - DNA, 25 bp, probe
aattcatctcagcaatcacaagcca

SEQ ID NO: 33670 - DNA, 25 bp, probe
tgataactctgtacgaggcttctct

SEQ ID NO: 33671 - DNA, 25 bp, probe
cagatgatgggagtgggaagaataa

SEQ ID NO: 33672 - DNA, 25 bp, probe
ctctttcaagattacactcctcctg

SEQ ID NO: 33673 - DNA, 25 bp, probe
tctctttcaagattacactcctcct

SEQ ID NO: 33674 - DNA, 25 bp, probe
gtctctttcaagattacactcctcc

SEQ ID NO: 33675 - DNA, 25 bp, probe
ggtctctttcaagattacactcctc

SEQ ID NO: 33676 - DNA, 25 bp, probe
ctcctctcattggtgtctactttgt

SEQ ID NO: 33677 - DNA, 25 bp, probe
actcctctcattggtgtctactttg

SEQ ID NO: 33678 - DNA, 25 bp, probe
tgcttctctttcacaactttgcttt

SEQ ID NO: 33679 - DNA, 25 bp, probe
gagggtctctttcaagattacactc

SEQ ID NO: 33680 - DNA, 25 bp, probe
tcctctcattggtgtctactttgtg

SEQ ID NO: 33681 - DNA, 25 bp, probe
tgtttccaatgccaattcatctcag

SEQ ID NO: 33682 - DNA, 25 bp, probe
ctgtttccaatgccaattcatctca

SEQ ID NO: 33683 - DNA, 25 bp, probe
agcatggaaagcagtaactactatg

SEQ ID NO: 33684 - DNA, 25 bp, probe
cagcatggaaagcagtaactactat

SEQ ID NO: 33685 - DNA, 25 bp, probe
cacctgaataagggactttggaatt

SEQ ID NO: 33686 - DNA, 25 bp, probe
ctctcattggtgtctactttgtggt

SEQ ID NO: 33687 - DNA, 25 bp, probe
ttcatctcagcaatcacaagccaag

SEQ ID NO: 33688 - DNA, 25 bp, probe
tctttcaagattacactcctcctgg

SEQ ID NO: 33689 - DNA, 25 bp, probe
gggtctctttcaagattacactcct

SEQ ID NO: 33690 - DNA, 25 bp, probe
agggtctctttcaagattacactcc

SEQ ID NO: 33691 - DNA, 25 bp, probe
ctgcttctctttcacaactttgctt

SEQ ID NO: 33692 - DNA, 25 bp, probe
ttctgcttctctttcacaactttgc

SEQ ID NO: 33693 - DNA, 25 bp, probe
ctttcaagattacactcctcctggg

SEQ ID NO: 33694 - DNA, 25 bp, probe
tcagatgatgggagtgggaagaata

SEQ ID NO: 33695 - DNA, 25 bp, probe
tctcattggtgtctactttgtggtg

SEQ ID NO: 33696 - DNA, 25 bp, probe
tcagcatggaaagcagtaactacta

SEQ ID NO: 33697 - DNA, 25 bp, probe
tcacctgaataagggactttggaat

SEQ ID NO: 33698 - DNA, 25 bp, probe
cctgtttccaatgccaattcatctc

SEQ ID NO: 33699 - DNA, 25 bp, probe
gctgctattccacatttacctgcta

SEQ ID NO: 33700 - DNA, 25 bp, probe
ctcattggtgtctactttgtggtgt

SEQ ID NO: 33701 - DNA, 25 bp, probe
atgtactaagggatgcagtggagtg

SEQ ID NO: 33702 - DNA, 25 bp, probe
catgtactaagggatgcagtggagt

SEQ ID NO: 33703 - DNA, 25 bp, probe
gtactaagggatgcagtggagtgtg

SEQ ID NO: 33704 - DNA, 25 bp, probe
cacacatgtactaagggatgcagtg

SEQ ID NO: 33705 - DNA, 25 bp, probe
tgtactaagggatgcagtggagtgt

SEQ ID NO: 33706 - DNA, 25 bp, probe
acatgtactaagggatgcagtggag

SEQ ID NO: 33707 - DNA, 25 bp, probe
ccacacatgtactaagggatgcagt

SEQ ID NO: 33708 - DNA, 25 bp, probe
cacatgtactaagggatgcagtgga

SEQ ID NO: 33709 - DNA, 25 bp, probe
tccacacatgtactaagggatgcag

SEQ ID NO: 33710 - DNA, 25 bp, probe
acacatgtactaagggatgcagtgg

SEQ ID NO: 33711 - DNA, 25 bp, probe
gatccacacatgtactaagggatgc

SEQ ID NO: 33712 - DNA, 25 bp, probe
ggatccacacatgtactaagggatg

SEQ ID NO: 33713 - DNA, 25 bp, probe
atccacacatgtactaagggatgca

SEQ ID NO: 33714 - DNA, 25 bp, probe
aatctcagagtgcttctaatcatca

SEQ ID NO: 33715 - DNA, 25 bp, probe
gaatctcagagtgcttctaatcatc

SEQ ID NO: 33716 - DNA, 25 bp, probe
gagtgcttctaatcatcacagtagt

SEQ ID NO: 33717 - DNA, 25 bp, probe
agagtgcttctaatcatcacagtag

SEQ ID NO: 33718 - DNA, 25 bp, probe
cagagtgcttctaatcatcacagta

SEQ ID NO: 33719 - DNA, 25 bp, probe
agtgcttctaatcatcacagtagtt

SEQ ID NO: 33720 - DNA, 25 bp, probe
atctcagagtgcttctaatcatcac

SEQ ID NO: 33721 - DNA, 25 bp, probe
ctcagagtgcttctaatcatcacag

SEQ ID NO: 33722 - DNA, 25 bp, probe
tctcagagtgcttctaatcatcaca

SEQ ID NO: 33723 - DNA, 25 bp, probe
tcagagtgcttctaatcatcacagt

SEQ ID NO: 33724 - DNA, 25 bp, probe
ccaagaatctcagagtgcttctaat

SEQ ID NO: 33725 - DNA, 25 bp, probe
aagaatctcagagtgcttctaatca

SEQ ID NO: 33726 - DNA, 25 bp, probe
agaatctcagagtgcttctaatcat

SEQ ID NO: 33727 - DNA, 25 bp, probe
caagaatctcagagtgcttctaatc

SEQ ID NO: 33728 - DNA, 25 bp, probe
gtgcttctaatcatcacagtagttt

SEQ ID NO: 33729 - DNA, 25 bp, probe
gaaaccccgtctctactgaaaatag

SEQ ID NO: 33730 - DNA, 25 bp, probe
tgaaaccccgtctctactgaaaata

SEQ ID NO: 33731 - DNA, 25 bp, probe
tgcttctaatcatcacagtagtttt

SEQ ID NO: 33732 - DNA, 25 bp, probe
tgtgttttgttttgttttgttttgt

SEQ ID NO: 33733 - DNA, 25 bp, probe
cccaagaatctcagagtgcttctaa

SEQ ID NO: 33734 - DNA, 25 bp, probe
gtgttttgttttgttttgttttgtt

SEQ ID NO: 33735 - DNA, 25 bp, probe
ttgtgttttgttttgttttgttttg

SEQ ID NO: 33736 - DNA, 25 bp, probe
ccccgtctctactgaaaatagaaaa

SEQ ID NO: 33737 - DNA, 25 bp, probe
accccgtctctactgaaaatagaaa

SEQ ID NO: 33738 - DNA, 25 bp, probe
aaccccgtctctactgaaaatagaa

SEQ ID NO: 33739 - DNA, 25 bp, probe
aaaccccgtctctactgaaaataga

SEQ ID NO: 33740 - DNA, 25 bp, probe
gtgaaaccccgtctctactgaaaat

SEQ ID NO: 33741 - DNA, 25 bp, probe
tttgtgttttgttttgttttgtttt

SEQ ID NO: 33742 - DNA, 25 bp, probe
ttttgtgttttgttttgttttgttt

SEQ ID NO: 33743 - DNA, 25 bp, probe
gcccaagaatctcagagtgcttcta

SEQ ID NO: 33744 - DNA, 25 bp, probe
caaggagagccaggagcatttaaaa

SEQ ID NO: 33745 - DNA, 25 bp, probe
ggtgaaaccccgtctctactgaaaa

SEQ ID NO: 33746 - DNA, 25 bp, probe
tggatcatgaggtcaggagatcgag

SEQ ID NO: 33747 - DNA, 25 bp, probe
aaagttgagtgtcaggggacatgat

SEQ ID NO: 33748 - DNA, 25 bp, probe
gagaaagttgagtgtcaggggacat

SEQ ID NO: 33749 - DNA, 25 bp, probe
aagttgagtgtcaggggacatgatg

SEQ ID NO: 33750 - DNA, 25 bp, probe
gaaagttgagtgtcaggggacatga

SEQ ID NO: 33751 - DNA, 25 bp, probe
agaaagttgagtgtcaggggacatg

SEQ ID NO: 33752 - DNA, 25 bp, probe
gttgagtgtcaggggacatgatgag

SEQ ID NO: 33753 - DNA, 25 bp, probe
atatgactgactgattccttctctg

SEQ ID NO: 33754 - DNA, 25 bp, probe
gatatgactgactgattccttctct

SEQ ID NO: 33755 - DNA, 25 bp, probe
agatatgactgactgattccttctc

SEQ ID NO: 33756 - DNA, 25 bp, probe
gagatatgactgactgattccttct

SEQ ID NO: 33757 - DNA, 25 bp, probe
tatgactgactgattccttctctgg

SEQ ID NO: 33758 - DNA, 25 bp, probe
ggagatatgactgactgattccttc

SEQ ID NO: 33759 - DNA, 25 bp, probe
gatttgagtaaacaggacattgaca

SEQ ID NO: 33760 - DNA, 25 bp, probe
tgatttgagtaaacaggacattgac

SEQ ID NO: 33761 - DNA, 25 bp, probe
cggagatatgactgactgattcctt

SEQ ID NO: 33762 - DNA, 25 bp, probe
tggaatagttactttacaacacggt

SEQ ID NO: 33763 - DNA, 25 bp, probe
ggaatagttactttacaacacggtc

SEQ ID NO: 33764 - DNA, 25 bp, probe
ctggaatagttactttacaacacgg

SEQ ID NO: 33765 - DNA, 25 bp, probe
tttgagtaaacaggacattgacaac

SEQ ID NO: 33766 - DNA, 25 bp, probe
tatctagcaaatgaaatcctgtggg

SEQ ID NO: 33767 - DNA, 25 bp, probe
ttgaagagaagcactactacaaagt

SEQ ID NO: 33768 - DNA, 25 bp, probe
ttatctagcaaatgaaatcctgtgg

SEQ ID NO: 33769 - DNA, 25 bp, probe
atttgagtaaacaggacattgacaa

SEQ ID NO: 33770 - DNA, 25 bp, probe
atgatttgagtaaacaggacattga

SEQ ID NO: 33771 - DNA, 25 bp, probe
gaatagttactttacaacacggtct

SEQ ID NO: 33772 - DNA, 25 bp, probe
tctggaatagttactttacaacacg

SEQ ID NO: 33773 - DNA, 25 bp, probe
tcggagatatgactgactgattcct

SEQ ID NO: 33774 - DNA, 25 bp, probe
gtcggagatatgactgactgattcc

SEQ ID NO: 33775 - DNA, 25 bp, probe
tctttgaagagaagcactactacaa

SEQ ID NO: 33776 - DNA, 25 bp, probe
ccctctggatcaaatagacatcaat

SEQ ID NO: 33777 - DNA, 25 bp, probe
tttgaaatcgtggtcatactggaag

SEQ ID NO: 33778 - DNA, 25 bp, probe
ctttgaaatcgtggtcatactggaa

SEQ ID NO: 33779 - DNA, 25 bp, probe
ccatgaaatagatgaagacagtcct

SEQ ID NO: 33780 - DNA, 25 bp, probe
tccatgaaatagatgaagacagtcc

SEQ ID NO: 33781 - DNA, 25 bp, probe
cctctggatcaaatagacatcaatg

SEQ ID NO: 33782 - DNA, 25 bp, probe
cattgacaacgcagactttgaaatc

SEQ ID NO: 33783 - DNA, 25 bp, probe
ttgagtaaacaggacattgacaacg

SEQ ID NO: 33784 - DNA, 25 bp, probe
cttatctagcaaatgaaatcctgtg

SEQ ID NO: 33785 - DNA, 25 bp, probe
ggatcaaatagacatcaatgttggg

SEQ ID NO: 33786 - DNA, 25 bp, probe
atgactgactgattccttctctgga

SEQ ID NO: 33787 - DNA, 25 bp, probe
agactttgaaatcgtggtcatactg

SEQ ID NO: 33788 - DNA, 25 bp, probe
cagactttgaaatcgtggtcatact

SEQ ID NO: 33789 - DNA, 25 bp, probe
tcttatctagcaaatgaaatcctgt

SEQ ID NO: 33790 - DNA, 25 bp, probe
gatcaaatagacatcaatgttgggt

SEQ ID NO: 33791 - DNA, 25 bp, probe
tggatcaaatagacatcaatgttgg

SEQ ID NO: 33792 - DNA, 25 bp, probe
ccttctctggaatagttactttaca

SEQ ID NO: 33793 - DNA, 25 bp, probe
atgaaatagatgaagacagtccttt

SEQ ID NO: 33794 - DNA, 25 bp, probe
catgaaatagatgaagacagtcctt

SEQ ID NO: 33795 - DNA, 25 bp, probe
tcaaatagacatcaatgttgggttt

SEQ ID NO: 33796 - DNA, 25 bp, probe
acattgacaacgcagactttgaaat

SEQ ID NO: 33797 - DNA, 25 bp, probe
ctgtaaggaagagaagtgtaagtgt

SEQ ID NO: 33798 - DNA, 25 bp, probe
tgtaaggaagagaagtgtaagtgtt

SEQ ID NO: 33799 - DNA, 25 bp, probe
ttggaggagaagaattgaatgtgac

SEQ ID NO: 33800 - DNA, 25 bp, probe
ggaggagaagaattgaatgtgactt

SEQ ID NO: 33801 - DNA, 25 bp, probe
actgtaaggaagagaagtgtaagtg

SEQ ID NO: 33802 - DNA, 25 bp, probe
gactgtaaggaagagaagtgtaagt

SEQ ID NO: 33803 - DNA, 25 bp, probe
agactgtaaggaagagaagtgtaag

SEQ ID NO: 33804 - DNA, 25 bp, probe
gaagactgtaaggaagagaagtgta

SEQ ID NO: 33805 - DNA, 25 bp, probe
agaagactgtaaggaagagaagtgt

SEQ ID NO: 33806 - DNA, 25 bp, probe
aagactgtaaggaagagaagtgtaa

SEQ ID NO: 33807 - DNA, 25 bp, probe
tggaggagaagaattgaatgtgact

SEQ ID NO: 33808 - DNA, 25 bp, probe
cagaagactgtaaggaagagaagtg

SEQ ID NO: 33809 - DNA, 25 bp, probe
ccagaagactgtaaggaagagaagt

SEQ ID NO: 33810 - DNA, 25 bp, probe
ggtaacaaatgaagaatgccagaaa

SEQ ID NO: 33811 - DNA, 25 bp, probe
accaagttcctctactcctcaagaa

SEQ ID NO: 33812 - DNA, 25 bp, probe
gacacaagcacaatttataccaact

SEQ ID NO: 33813 - DNA, 25 bp, probe
acacaagcacaatttataccaactg

SEQ ID NO: 33814 - DNA, 25 bp, probe
tgacacaagcacaatttataccaac

SEQ ID NO: 33815 - DNA, 25 bp, probe
tttggaggagaagaattgaatgtga

SEQ ID NO: 33816 - DNA, 25 bp, probe
tttgttaaaggagtgaatgtttgcc

SEQ ID NO: 33817 - DNA, 25 bp, probe
gttaaaggagtgaatgtttgccaag

SEQ ID NO: 33818 - DNA, 25 bp, probe
ctttggaggagaagaattgaatgtg

SEQ ID NO: 33819 - DNA, 25 bp, probe
gactttggaggagaagaattgaatg

SEQ ID NO: 33820 - DNA, 25 bp, probe
tgactttggaggagaagaattgaat

SEQ ID NO: 33821 - DNA, 25 bp, probe
aaagatgcttgtaagggagattcag

SEQ ID NO: 33822 - DNA, 25 bp, probe
actttggaggagaagaattgaatgt

SEQ ID NO: 33823 - DNA, 25 bp, probe
ttgactttggaggagaagaattgaa

SEQ ID NO: 33824 - DNA, 25 bp, probe
ttaaaggagtgaatgtttgccaaga

SEQ ID NO: 33825 - DNA, 25 bp, probe
gtaaggaagagaagtgtaagtgttt

SEQ ID NO: 33826 - DNA, 25 bp, probe
gaggagaagaattgaatgtgacttt

SEQ ID NO: 33827 - DNA, 25 bp, probe
gagttgactttggaggagaagaatt

SEQ ID NO: 33828 - DNA, 25 bp, probe
gttgactttggaggagaagaattga

SEQ ID NO: 33829 - DNA, 25 bp, probe
agttgactttggaggagaagaattg

SEQ ID NO: 33830 - DNA, 25 bp, probe
aaaccaatatgcctaccttccaaag

SEQ ID NO: 33831 - DNA, 25 bp, probe
taaaggagtgaatgtttgccaagag

SEQ ID NO: 33832 - DNA, 25 bp, probe
tgttaaaggagtgaatgtttgccaa

SEQ ID NO: 33833 - DNA, 25 bp, probe
ttgttaaaggagtgaatgtttgcca

SEQ ID NO: 33834 - DNA, 25 bp, probe
aacctgagttcaagtcaaattctga

SEQ ID NO: 33835 - DNA, 25 bp, probe
caacctgagttcaagtcaaattctg

SEQ ID NO: 33836 - DNA, 25 bp, probe
tacaacctgagttcaagtcaaattc

SEQ ID NO: 33837 - DNA, 25 bp, probe
ctctggttactctttgagattgtgt

SEQ ID NO: 33838 - DNA, 25 bp, probe
acaacctgagttcaagtcaaattct

SEQ ID NO: 33839 - DNA, 25 bp, probe
taaggaagagaagtgtaagtgtttc

SEQ ID NO: 33840 - DNA, 25 bp, probe
tttacaacctgagttcaagtcaaat

SEQ ID NO: 33841 - DNA, 25 bp, probe
ccaggtaactttgcttgattaaaca

SEQ ID NO: 33842 - DNA, 25 bp, probe
tctccaggtaactttgcttgattaa

SEQ ID NO: 33843 - DNA, 25 bp, probe
tccaggtaactttgcttgattaaac

SEQ ID NO: 33844 - DNA, 25 bp, probe
gtctccaggtaactttgcttgatta

SEQ ID NO: 33845 - DNA, 25 bp, probe
gagggaggagtctttcttacataat

SEQ ID NO: 33846 - DNA, 25 bp, probe
ctccaggtaactttgcttgattaaa

SEQ ID NO: 33847 - DNA, 25 bp, probe
tccaaattgtctgtctgctcttatt

SEQ ID NO: 33848 - DNA, 25 bp, probe
tgattaaacagcaaagccatattct

SEQ ID NO: 33849 - DNA, 25 bp, probe
acagcaaagccatattctaaattca

SEQ ID NO: 33850 - DNA, 25 bp, probe
agagggaggagtctttcttacataa

SEQ ID NO: 33851 - DNA, 25 bp, probe
gcaaagccatattctaaattcactg

SEQ ID NO: 33852 - DNA, 25 bp, probe
cagcaaagccatattctaaattcac

SEQ ID NO: 33853 - DNA, 25 bp, probe
caggtaactttgcttgattaaacag

SEQ ID NO: 33854 - DNA, 25 bp, probe
aagccacactttgaaggtaataaat

SEQ ID NO: 33855 - DNA, 25 bp, probe
gtccaaattgtctgtctgctcttat

SEQ ID NO: 33856 - DNA, 25 bp, probe
agcaaagccatattctaaattcact

SEQ ID NO: 33857 - DNA, 25 bp, probe
cagagggaggagtctttcttacata

SEQ ID NO: 33858 - DNA, 25 bp, probe
agggaggagtctttcttacataatt

SEQ ID NO: 33859 - DNA, 25 bp, probe
gccacactttgaaggtaataaatac

SEQ ID NO: 33860 - DNA, 25 bp, probe
tggtttggtacagttcataattcac

SEQ ID NO: 33861 - DNA, 25 bp, probe
agccacactttgaaggtaataaata

SEQ ID NO: 33862 - DNA, 25 bp, probe
aacagcaaagccatattctaaattc

SEQ ID NO: 33863 - DNA, 25 bp, probe
ttgattaaacagcaaagccatattc

SEQ ID NO: 33864 - DNA, 25 bp, probe
ccaaattgtctgtctgctcttattt

SEQ ID NO: 33865 - DNA, 25 bp, probe
ctttgtgtgtctccaggtaactttg

SEQ ID NO: 33866 - DNA, 25 bp, probe
cttgattaaacagcaaagccatatt

SEQ ID NO: 33867 - DNA, 25 bp, probe
ttggtttggtacagttcataattca

SEQ ID NO: 33868 - DNA, 25 bp, probe
gggaggagtctttcttacataattt

SEQ ID NO: 33869 - DNA, 25 bp, probe
tctttgtgtgtctccaggtaacttt

SEQ ID NO: 33870 - DNA, 25 bp, probe
agtccaaattgtctgtctgctctta

SEQ ID NO: 33871 - DNA, 25 bp, probe
tcttggtttggtacagttcataatt

SEQ ID NO: 33872 - DNA, 25 bp, probe
aatcttggtttggtacagttcataa

SEQ ID NO: 33873 - DNA, 25 bp, probe
aaatcttggtttggtacagttcata

SEQ ID NO: 33874 - DNA, 25 bp, probe
agccatattctaaattcactgttga

SEQ ID NO: 33875 - DNA, 25 bp, probe
aaacagcaaagccatattctaaatt

SEQ ID NO: 33876 - DNA, 25 bp, probe
gaggagtctttcttacataatttgc

SEQ ID NO: 33877 - DNA, 25 bp, probe
cttggtttggtacagttcataattc

SEQ ID NO: 33878 - DNA, 25 bp, probe
atcttggtttggtacagttcataat

SEQ ID NO: 33879 - DNA, 25 bp, probe
aagccatattctaaattcactgttg

SEQ ID NO: 33880 - DNA, 25 bp, probe
caaagccatattctaaattcactgt

SEQ ID NO: 33881 - DNA, 25 bp, probe
tgtctccaggtaactttgcttgatt

SEQ ID NO: 33882 - DNA, 25 bp, probe
gcacagtaatatgaaagccacactt

SEQ ID NO: 33883 - DNA, 25 bp, probe
gattaaacagcaaagccatattcta

SEQ ID NO: 33884 - DNA, 25 bp, probe
tcagagggaggagtctttcttacat

SEQ ID NO: 33885 - DNA, 25 bp, probe
cttctaccatgagcagagacaatta

SEQ ID NO: 33886 - DNA, 25 bp, probe
ttctaccatgagcagagacaattaa

SEQ ID NO: 33887 - DNA, 25 bp, probe
tctaccatgagcagagacaattaaa

SEQ ID NO: 33888 - DNA, 25 bp, probe
ctgtatgccttgcttctaccatgag

SEQ ID NO: 33889 - DNA, 25 bp, probe
aaaggatggaagtaatttgaatagc

SEQ ID NO: 33890 - DNA, 25 bp, probe
tggaagtaatttgaatagctcaggt

SEQ ID NO: 33891 - DNA, 25 bp, probe
ggaagtaatttgaatagctcaggtg

SEQ ID NO: 33892 - DNA, 25 bp, probe
aggatggaagtaatttgaatagctc

SEQ ID NO: 33893 - DNA, 25 bp, probe
aagtaatttgaatagctcaggtgtg

SEQ ID NO: 33894 - DNA, 25 bp, probe
gaagtaatttgaatagctcaggtgt

SEQ ID NO: 33895 - DNA, 25 bp, probe
atggaagtaatttgaatagctcagg

SEQ ID NO: 33896 - DNA, 25 bp, probe
ggatggaagtaatttgaatagctca

SEQ ID NO: 33897 - DNA, 25 bp, probe
aaggatggaagtaatttgaatagct

SEQ ID NO: 33898 - DNA, 25 bp, probe
agtaatttgaatagctcaggtgtgc

SEQ ID NO: 33899 - DNA, 25 bp, probe
gccaaaggatggaagtaatttgaat

SEQ ID NO: 33900 - DNA, 25 bp, probe
gcttctaccatgagcagagacaatt

SEQ ID NO: 33901 - DNA, 25 bp, probe
cagtgaagacaccagataggacctc

SEQ ID NO: 33902 - DNA, 25 bp, probe
agtgaagacaccagataggacctct

SEQ ID NO: 33903 - DNA, 25 bp, probe
gatggaagtaatttgaatagctcag

SEQ ID NO: 33904 - DNA, 25 bp, probe
atgaaaagagactaggtgaagagag

SEQ ID NO: 33905 - DNA, 25 bp, probe
tgaaaagagactaggtgaagagagg

SEQ ID NO: 33906 - DNA, 25 bp, probe
catgaaaagagactaggtgaagaga

SEQ ID NO: 33907 - DNA, 25 bp, probe
acatgaaaagagactaggtgaagag

SEQ ID NO: 33908 - DNA, 25 bp, probe
accatgagcagagacaattaaaatc

SEQ ID NO: 33909 - DNA, 25 bp, probe
aacatgaaaagagactaggtgaaga

SEQ ID NO: 33910 - DNA, 25 bp, probe
ggaacatgaaaagagactaggtgaa

SEQ ID NO: 33911 - DNA, 25 bp, probe
atcgccaaaggatggaagtaatttg

SEQ ID NO: 33912 - DNA, 25 bp, probe
gaacatgaaaagagactaggtgaag

SEQ ID NO: 33913 - DNA, 25 bp, probe
cctgtatgccttgcttctaccatga

SEQ ID NO: 33914 - DNA, 25 bp, probe
gaaggggaacatgaaaagagactag

SEQ ID NO: 33915 - DNA, 25 bp, probe
ctaccatgagcagagacaattaaaa

SEQ ID NO: 33916 - DNA, 25 bp, probe
cgccaaaggatggaagtaatttgaa

SEQ ID NO: 33917 - DNA, 25 bp, probe
taatttgaatagctcaggtgtgctg

SEQ ID NO: 33918 - DNA, 25 bp, probe
gtaatttgaatagctcaggtgtgct

SEQ ID NO: 33919 - DNA, 25 bp, probe
ccatgagcagagacaattaaaatct

SEQ ID NO: 33920 - DNA, 25 bp, probe
gaaaagagactaggtgaagagaggg

SEQ ID NO: 33921 - DNA, 25 bp, probe
tgaaggggaacatgaaaagagacta

SEQ ID NO: 33922 - DNA, 25 bp, probe
taccatgagcagagacaattaaaat

SEQ ID NO: 33923 - DNA, 25 bp, probe
catcgccaaaggatggaagtaattt

SEQ ID NO: 33924 - DNA, 25 bp, probe
gggaacatgaaaagagactaggtga

SEQ ID NO: 33925 - DNA, 25 bp, probe
aaggggaacatgaaaagagactagg

SEQ ID NO: 33926 - DNA, 25 bp, probe
ccaaaggatggaagtaatttgaata

SEQ ID NO: 33927 - DNA, 25 bp, probe
tcgccaaaggatggaagtaatttga

SEQ ID NO: 33928 - DNA, 25 bp, probe
catgagcagagacaattaaaatctt

SEQ ID NO: 33929 - DNA, 25 bp, probe
aaggaagtaacaccaaggtacaatg

SEQ ID NO: 33930 - DNA, 25 bp, probe
gttgtgtcatgttaatgtgcctaat

SEQ ID NO: 33931 - DNA, 25 bp, probe
tagttgtgtcatgttaatgtgccta

SEQ ID NO: 33932 - DNA, 25 bp, probe
aatagttgtgtcatgttaatgtgcc

SEQ ID NO: 33933 - DNA, 25 bp, probe
ttgtgtcatgttaatgtgcctaatt

SEQ ID NO: 33934 - DNA, 25 bp, probe
atagttgtgtcatgttaatgtgcct

SEQ ID NO: 33935 - DNA, 25 bp, probe
agttgtgtcatgttaatgtgcctaa

SEQ ID NO: 33936 - DNA, 25 bp, probe
gaatagttgtgtcatgttaatgtgc

SEQ ID NO: 33937 - DNA, 25 bp, probe
agcttctggtctaatatgtactcga

SEQ ID NO: 33938 - DNA, 25 bp, probe
gcttctggtctaatatgtactcgaa

SEQ ID NO: 33939 - DNA, 25 bp, probe
cttgtataaactgtgtgacttgtgg

SEQ ID NO: 33940 - DNA, 25 bp, probe
acttgtataaactgtgtgacttgtg

SEQ ID NO: 33941 - DNA, 25 bp, probe
aggaagtaacaccaaggtacaatgt

SEQ ID NO: 33942 - DNA, 25 bp, probe
agattactgaatagttgtgtcatgt

SEQ ID NO: 33943 - DNA, 25 bp, probe
aacttgtataaactgtgtgacttgt

SEQ ID NO: 33944 - DNA, 25 bp, probe
tgaatagttgtgtcatgttaatgtg

SEQ ID NO: 33945 - DNA, 25 bp, probe
tttcaaaggaagtaacaccaaggta

SEQ ID NO: 33946 - DNA, 25 bp, probe
catctttcaaaggaagtaacaccaa

SEQ ID NO: 33947 - DNA, 25 bp, probe
aaaggaagtaacaccaaggtacaat

SEQ ID NO: 33948 - DNA, 25 bp, probe
caccaaggtacaatgttaaaggaat

SEQ ID NO: 33949 - DNA, 25 bp, probe
tgaggagtctctttcagtttcattt

SEQ ID NO: 33950 - DNA, 25 bp, probe
ttgtataaactgtgtgacttgtggc

SEQ ID NO: 33951 - DNA, 25 bp, probe
atctttcaaaggaagtaacaccaag

SEQ ID NO: 33952 - DNA, 25 bp, probe
ctgaatagttgtgtcatgttaatgt

SEQ ID NO: 33953 - DNA, 25 bp, probe
actgaatagttgtgtcatgttaatg

SEQ ID NO: 33954 - DNA, 25 bp, probe
gcctcagaatcatttggagaaacta

SEQ ID NO: 33955 - DNA, 25 bp, probe
tctttcaaaggaagtaacaccaagg

SEQ ID NO: 33956 - DNA, 25 bp, probe
ccatctttcaaaggaagtaacacca

SEQ ID NO: 33957 - DNA, 25 bp, probe
caaaggaagtaacaccaaggtacaa

SEQ ID NO: 33958 - DNA, 25 bp, probe
acttgtggcgtcttataaataatgc

SEQ ID NO: 33959 - DNA, 25 bp, probe
ttcaaaggaagtaacaccaaggtac

SEQ ID NO: 33960 - DNA, 25 bp, probe
gattactgaatagttgtgtcatgtt

SEQ ID NO: 33961 - DNA, 25 bp, probe
ctttcaaaggaagtaacaccaaggt

SEQ ID NO: 33962 - DNA, 25 bp, probe
tgtgtcatgttaatgtgcctaattt

SEQ ID NO: 33963 - DNA, 25 bp, probe
tgtcatgttaatgtgcctaatttca

SEQ ID NO: 33964 - DNA, 25 bp, probe
cctcagaatcatttggagaaactat

SEQ ID NO: 33965 - DNA, 25 bp, probe
gtgtcatgttaatgtgcctaatttc

SEQ ID NO: 33966 - DNA, 25 bp, probe
atgtgcctaatttcatgtatcttgt

SEQ ID NO: 33967 - DNA, 25 bp, probe
acaccaaggtacaatgttaaaggaa

SEQ ID NO: 33968 - DNA, 25 bp, probe
tcaaaggaagtaacaccaaggtaca

SEQ ID NO: 33969 - DNA, 25 bp, probe
aagattactgaatagttgtgtcatg

SEQ ID NO: 33970 - DNA, 25 bp, probe
atattcactttacctagcagggaaa

SEQ ID NO: 33971 - DNA, 25 bp, probe
accaaggtacaatgttaaaggaata

SEQ ID NO: 33972 - DNA, 25 bp, probe
tgtgcctaatttcatgtatcttgta

SEQ ID NO: 33973 - DNA, 25 bp, probe
gctttcctatcctatccctatccta

SEQ ID NO: 33974 - DNA, 25 bp, probe
tttcctatcctatccctatcctagc

SEQ ID NO: 33975 - DNA, 25 bp, probe
gtctgaatctgcactactcaactta

SEQ ID NO: 33976 - DNA, 25 bp, probe
tctgaatctgcactactcaacttat

SEQ ID NO: 33977 - DNA, 25 bp, probe
ctatcgagtctgaatctgcactact

SEQ ID NO: 33978 - DNA, 25 bp, probe
ctgaactcgctttaccttcttgttt

SEQ ID NO: 33979 - DNA, 25 bp, probe
agtctgaatctgcactactcaactt

SEQ ID NO: 33980 - DNA, 25 bp, probe
ctgaatctgcactactcaacttata

SEQ ID NO: 33981 - DNA, 25 bp, probe
ctttcctatcctatccctatcctag

SEQ ID NO: 33982 - DNA, 25 bp, probe
tgaactcgctttaccttcttgtttg

SEQ ID NO: 33983 - DNA, 25 bp, probe
atctgaactcgctttaccttcttgt

SEQ ID NO: 33984 - DNA, 25 bp, probe
cctatcctatccctatcctagcttt

SEQ ID NO: 33985 - DNA, 25 bp, probe
tagctttcctatcctatccctatcc

SEQ ID NO: 33986 - DNA, 25 bp, probe
actctcgattggaagttgtggaatt

SEQ ID NO: 33987 - DNA, 25 bp, probe
actactcaacttataaactgtctgc

SEQ ID NO: 33988 - DNA, 25 bp, probe
gcactactcaacttataaactgtct

SEQ ID NO: 33989 - DNA, 25 bp, probe
gatctgaactcgctttaccttcttg

SEQ ID NO: 33990 - DNA, 25 bp, probe
tcctatcctatccctatcctagctt

SEQ ID NO: 33991 - DNA, 25 bp, probe
ttcctatcctatccctatcctagct

SEQ ID NO: 33992 - DNA, 25 bp, probe
tgaatctgcactactcaacttataa

SEQ ID NO: 33993 - DNA, 25 bp, probe
tctgaactcgctttaccttcttgtt

SEQ ID NO: 33994 - DNA, 25 bp, probe
gaactcgctttaccttcttgtttgg

SEQ ID NO: 33995 - DNA, 25 bp, probe
agctttcctatcctatccctatcct

SEQ ID NO: 33996 - DNA, 25 bp, probe
ttattcgtgtcccatagctttccta

SEQ ID NO: 33997 - DNA, 25 bp, probe
ctttaccttcttgtttggagcacag

SEQ ID NO: 33998 - DNA, 25 bp, probe
ctctcgattggaagttgtggaattt

SEQ ID NO: 33999 - DNA, 25 bp, probe
ccatagctttcctatcctatcccta

SEQ ID NO: 34000 - DNA, 25 bp, probe
tgcactactcaacttataaactgtc

SEQ ID NO: 34001 - DNA, 25 bp, probe
ctgcactactcaacttataaactgt

SEQ ID NO: 34002 - DNA, 25 bp, probe
aactcgctttaccttcttgtttgga

SEQ ID NO: 34003 - DNA, 25 bp, probe
ggatctgaactcgctttaccttctt

SEQ ID NO: 34004 - DNA, 25 bp, probe
gctatcgagtctgaatctgcactac

SEQ ID NO: 34005 - DNA, 25 bp, probe
tgtcccatagctttcctatcctatc

SEQ ID NO: 34006 - DNA, 25 bp, probe
ctactcaacttataaactgtctgca

SEQ ID NO: 34007 - DNA, 25 bp, probe
tctgcactactcaacttataaactg

SEQ ID NO: 34008 - DNA, 25 bp, probe
gtgtcccatagctttcctatcctat

SEQ ID NO: 34009 - DNA, 25 bp, probe
tattcgtgtcccatagctttcctat

SEQ ID NO: 34010 - DNA, 25 bp, probe
tttattcgtgtcccatagctttcct

SEQ ID NO: 34011 - DNA, 25 bp, probe
catagctttcctatcctatccctat

SEQ ID NO: 34012 - DNA, 25 bp, probe
gtcccatagctttcctatcctatcc

SEQ ID NO: 34013 - DNA, 25 bp, probe
cctacacacacaaaagaaaacaact

SEQ ID NO: 34014 - DNA, 25 bp, probe
tcctacacacacaaaagaaaacaac

SEQ ID NO: 34015 - DNA, 25 bp, probe
ctcctacacacacaaaagaaaacaa

SEQ ID NO: 34016 - DNA, 25 bp, probe
attgtgttttattcgtgtcccatag

SEQ ID NO: 34017 - DNA, 25 bp, probe
aatgaactatatgctgtggaccgtc

SEQ ID NO: 34018 - DNA, 25 bp, probe
caatgaactatatgctgtggaccgt

SEQ ID NO: 34019 - DNA, 25 bp, probe
gaactatatgctgtggaccgtcaac

SEQ ID NO: 34020 - DNA, 25 bp, probe
atgaactatatgctgtggaccgtca

SEQ ID NO: 34021 - DNA, 25 bp, probe
tgaactatatgctgtggaccgtcaa

SEQ ID NO: 34022 - DNA, 25 bp, probe
aactatatgctgtggaccgtcaacc

SEQ ID NO: 34023 - DNA, 25 bp, probe
ctccagcggtgcaatgaactatatg

SEQ ID NO: 34024 - DNA, 25 bp, probe
gtgcaatgaactatatgctgtggac

SEQ ID NO: 34025 - DNA, 25 bp, probe
tttcctggtcttgactgctctgttt

SEQ ID NO: 34026 - DNA, 25 bp, probe
ctctgtttgggtgggagaagattct

SEQ ID NO: 34027 - DNA, 25 bp, probe
tgcaatgaactatatgctgtggacc

SEQ ID NO: 34028 - DNA, 25 bp, probe
ggtgcaatgaactatatgctgtgga

SEQ ID NO: 34029 - DNA, 25 bp, probe
gcaatgaactatatgctgtggaccg

SEQ ID NO: 34030 - DNA, 25 bp, probe
cctccagcggtgcaatgaactatat

SEQ ID NO: 34031 - DNA, 25 bp, probe
ttcctggtcttgactgctctgtttg

SEQ ID NO: 34032 - DNA, 25 bp, probe
cttcatttacaagcctcaagatggc

SEQ ID NO: 34033 - DNA, 25 bp, probe
cggtgcaatgaactatatgctgtgg

SEQ ID NO: 34034 - DNA, 25 bp, probe
ttttcctggtcttgactgctctgtt

SEQ ID NO: 34035 - DNA, 25 bp, probe
ctgcttcatttacaagcctcaagat

SEQ ID NO: 34036 - DNA, 25 bp, probe
tgcttcatttacaagcctcaagatg

SEQ ID NO: 34037 - DNA, 25 bp, probe
gcggtgcaatgaactatatgctgtg

SEQ ID NO: 34038 - DNA, 25 bp, probe
agcggtgcaatgaactatatgctgt

SEQ ID NO: 34039 - DNA, 25 bp, probe
gcttcatttacaagcctcaagatgg

SEQ ID NO: 34040 - DNA, 25 bp, probe
gttttcctggtcttgactgctctgt

SEQ ID NO: 34041 - DNA, 25 bp, probe
ctgtttgggtgggagaagattctct

SEQ ID NO: 34042 - DNA, 25 bp, probe
tctgtttgggtgggagaagattctc

SEQ ID NO: 34043 - DNA, 25 bp, probe
cctgcttcatttacaagcctcaaga

SEQ ID NO: 34044 - DNA, 25 bp, probe
tgtttgggtgggagaagattctctg

SEQ ID NO: 34045 - DNA, 25 bp, probe
gtttgggtgggagaagattctctgg

SEQ ID NO: 34046 - DNA, 25 bp, probe
gcctgcttcatttacaagcctcaag

SEQ ID NO: 34047 - DNA, 25 bp, probe
gtggtatgtgaattgaagtcatcat

SEQ ID NO: 34048 - DNA, 25 bp, probe
atcgtggtatgtgaattgaagtcat

SEQ ID NO: 34049 - DNA, 25 bp, probe
tcgtggtatgtgaattgaagtcatc

SEQ ID NO: 34050 - DNA, 25 bp, probe
cgtggtatgtgaattgaagtcatca

SEQ ID NO: 34051 - DNA, 25 bp, probe
catcgtggtatgtgaattgaagtca

SEQ ID NO: 34052 - DNA, 25 bp, probe
ttaagttcaccgtagtaacacataa

SEQ ID NO: 34053 - DNA, 25 bp, probe
gttaagttcaccgtagtaacacata

SEQ ID NO: 34054 - DNA, 25 bp, probe
gcatttggaaggaaaggaatatacc

SEQ ID NO: 34055 - DNA, 25 bp, probe
ttatgacctcaacaaagaagaacca

SEQ ID NO: 34056 - DNA, 25 bp, probe
ttcattcttaggctttcagtggttt

SEQ ID NO: 34057 - DNA, 25 bp, probe
tttcattcttaggctttcagtggtt

SEQ ID NO: 34058 - DNA, 25 bp, probe
tttatgacctcaacaaagaagaacc

SEQ ID NO: 34059 - DNA, 25 bp, probe
agcatttggaaggaaaggaatatac

SEQ ID NO: 34060 - DNA, 25 bp, probe
attcttaggctttcagtggtttgtt

SEQ ID NO: 34061 - DNA, 25 bp, probe
ggagcatttggaaggaaaggaatat

SEQ ID NO: 34062 - DNA, 25 bp, probe
tatgacctcaacaaagaagaaccat

SEQ ID NO: 34063 - DNA, 25 bp, probe
tggtatgtgaattgaagtcatcata

SEQ ID NO: 34064 - DNA, 25 bp, probe
agttcaccgtagtaacacataaagt

SEQ ID NO: 34065 - DNA, 25 bp, probe
gagcatttggaaggaaaggaatata

SEQ ID NO: 34066 - DNA, 25 bp, probe
tcattcttaggctttcagtggtttg

SEQ ID NO: 34067 - DNA, 25 bp, probe
acacataaagtaaatgctacctctg

SEQ ID NO: 34068 - DNA, 25 bp, probe
aagttcaccgtagtaacacataaag

SEQ ID NO: 34069 - DNA, 25 bp, probe
ttcttaggctttcagtggtttgttc

SEQ ID NO: 34070 - DNA, 25 bp, probe
atgacctcaacaaagaagaaccatc

SEQ ID NO: 34071 - DNA, 25 bp, probe
cattcttaggctttcagtggtttgt

SEQ ID NO: 34072 - DNA, 25 bp, probe
cacataaagtaaatgctacctctga

SEQ ID NO: 34073 - DNA, 25 bp, probe
ccatcgtggtatgtgaattgaagtc

SEQ ID NO: 34074 - DNA, 25 bp, probe
gttcaccgtagtaacacataaagta

SEQ ID NO: 34075 - DNA, 25 bp, probe
aaggaatataccacaccgaggagtc

SEQ ID NO: 34076 - DNA, 25 bp, probe
gggaagagattagcatgaaaggtaa

SEQ ID NO: 34077 - DNA, 25 bp, probe
ccgtagtaacacataaagtaaatgc

SEQ ID NO: 34078 - DNA, 25 bp, probe
tagcatgaaaggtaatctgaaacac

SEQ ID NO: 34079 - DNA, 25 bp, probe
tcaccgtagtaacacataaagtaaa

SEQ ID NO: 34080 - DNA, 25 bp, probe
ttcaccgtagtaacacataaagtaa

SEQ ID NO: 34081 - DNA, 25 bp, probe
gtaagtggagcatttggaaggaaag

SEQ ID NO: 34082 - DNA, 25 bp, probe
aacacataaagtaaatgctacctct

SEQ ID NO: 34083 - DNA, 25 bp, probe
aaggaaaggaatataccacaccgag

SEQ ID NO: 34084 - DNA, 25 bp, probe
agcatgaaaggtaatctgaaacaca

SEQ ID NO: 34085 - DNA, 25 bp, probe
agggaagagattagcatgaaaggta

SEQ ID NO: 34086 - DNA, 25 bp, probe
tgaaaggtaatctgaaacacagtca

SEQ ID NO: 34087 - DNA, 25 bp, probe
tggagcatttggaaggaaaggaata

SEQ ID NO: 34088 - DNA, 25 bp, probe
gaaggaaaggaatataccacaccga

SEQ ID NO: 34089 - DNA, 25 bp, probe
gaaaggtaatctgaaacacagtcat

SEQ ID NO: 34090 - DNA, 25 bp, probe
atgaaaggtaatctgaaacacagtc

SEQ ID NO: 34091 - DNA, 25 bp, probe
aggatagacatacggagcagaataa

SEQ ID NO: 34092 - DNA, 25 bp, probe
aaggatagacatacggagcagaata

SEQ ID NO: 34093 - DNA, 25 bp, probe
taaggatagacatacggagcagaat

SEQ ID NO: 34094 - DNA, 25 bp, probe
ttaaggatagacatacggagcagaa

SEQ ID NO: 34095 - DNA, 25 bp, probe
acaatcactaggatggctacaataa

SEQ ID NO: 34096 - DNA, 25 bp, probe
ttacaatcactaggatggctacaat

SEQ ID NO: 34097 - DNA, 25 bp, probe
tacaatcactaggatggctacaata

SEQ ID NO: 34098 - DNA, 25 bp, probe
tgagagatgaggcatgactactaag

SEQ ID NO: 34099 - DNA, 25 bp, probe
tgaacacttatacttacggtcaatt

SEQ ID NO: 34100 - DNA, 25 bp, probe
atgaacacttatacttacggtcaat

SEQ ID NO: 34101 - DNA, 25 bp, probe
gtgagagatgaggcatgactactaa

SEQ ID NO: 34102 - DNA, 25 bp, probe
gagagatgaggcatgactactaagg

SEQ ID NO: 34103 - DNA, 25 bp, probe
ccaaatgtctaccaactgatgaatg

SEQ ID NO: 34104 - DNA, 25 bp, probe
ggatagacatacggagcagaataaa

SEQ ID NO: 34105 - DNA, 25 bp, probe
gagtgaatatagattagcgtttgcc

SEQ ID NO: 34106 - DNA, 25 bp, probe
agatatgataccaaagacacaagca

SEQ ID NO: 34107 - DNA, 25 bp, probe
gacatacggagcagaataaagagta

SEQ ID NO: 34108 - DNA, 25 bp, probe
tagacatacggagcagaataaagag

SEQ ID NO: 34109 - DNA, 25 bp, probe
gtgaatatagattagcgtttgccag

SEQ ID NO: 34110 - DNA, 25 bp, probe
tgaggatgtagagaaactggtagaa

SEQ ID NO: 34111 - DNA, 25 bp, probe
tatgaacacttatacttacggtcaa

SEQ ID NO: 34112 - DNA, 25 bp, probe
agtgaatatagattagcgtttgcca

SEQ ID NO: 34113 - DNA, 25 bp, probe
gaggatgtagagaaactggtagaaa

SEQ ID NO: 34114 - DNA, 25 bp, probe
atatgataccaaagacacaagcaac

SEQ ID NO: 34115 - DNA, 25 bp, probe
ctggtttaaggatagacatacggag

SEQ ID NO: 34116 - DNA, 25 bp, probe
gatatgataccaaagacacaagcaa

SEQ ID NO: 34117 - DNA, 25 bp, probe
aaggttcccaagacaattcaataga

SEQ ID NO: 34118 - DNA, 25 bp, probe
caaggttcccaagacaattcaatag

SEQ ID NO: 34119 - DNA, 25 bp, probe
agatatgaacacttatacttacggt

SEQ ID NO: 34120 - DNA, 25 bp, probe
tactggtttaaggatagacatacgg

SEQ ID NO: 34121 - DNA, 25 bp, probe
atagacatacggagcagaataaaga

SEQ ID NO: 34122 - DNA, 25 bp, probe
aaattgttggtgggaatgtaaatgg

SEQ ID NO: 34123 - DNA, 25 bp, probe
ttaggcagtggtttcttagatatga

SEQ ID NO: 34124 - DNA, 25 bp, probe
actggtttaaggatagacatacgga

SEQ ID NO: 34125 - DNA, 25 bp, probe
agagtgaatatagattagcgtttgc

SEQ ID NO: 34126 - DNA, 25 bp, probe
ggttcccaagacaattcaatagaga

SEQ ID NO: 34127 - DNA, 25 bp, probe
aggttcccaagacaattcaatagag

SEQ ID NO: 34128 - DNA, 25 bp, probe
tttaaggatagacatacggagcaga

SEQ ID NO: 34129 - DNA, 25 bp, probe
gtttaaggatagacatacggagcag

SEQ ID NO: 34130 - DNA, 25 bp, probe
cccaaatgtctaccaactgatgaat

SEQ ID NO: 34131 - DNA, 25 bp, probe
gtgaggatgtagagaaactggtaga

SEQ ID NO: 34132 - DNA, 25 bp, probe
ggcagtggtttcttagatatgatac

SEQ ID NO: 34133 - DNA, 25 bp, probe
acaaggttcccaagacaattcaata

SEQ ID NO: 34134 - DNA, 25 bp, probe
tgaatatagattagcgtttgccagg

SEQ ID NO: 34135 - DNA, 25 bp, probe
ttcaagttagccaagaagagttcct

SEQ ID NO: 34136 - DNA, 25 bp, probe
ctattcattatgccttaccatgtgg

SEQ ID NO: 34137 - DNA, 25 bp, probe
aactctcattcagtattcttggatg

SEQ ID NO: 34138 - DNA, 25 bp, probe
tcattctattcattatgccttacca

SEQ ID NO: 34139 - DNA, 25 bp, probe
tctattcattatgccttaccatgtg

SEQ ID NO: 34140 - DNA, 25 bp, probe
tattcttggatgagcttaatggtgt

SEQ ID NO: 34141 - DNA, 25 bp, probe
gtattcttggatgagcttaatggtg

SEQ ID NO: 34142 - DNA, 25 bp, probe
agtattcttggatgagcttaatggt

SEQ ID NO: 34143 - DNA, 25 bp, probe
cagtattcttggatgagcttaatgg

SEQ ID NO: 34144 - DNA, 25 bp, probe
attcttggatgagcttaatggtgtt

SEQ ID NO: 34145 - DNA, 25 bp, probe
gatgaggtcaagctacattagagag

SEQ ID NO: 34146 - DNA, 25 bp, probe
gagatgaggtcaagctacattagag

SEQ ID NO: 34147 - DNA, 25 bp, probe
agatgaggtcaagctacattagaga

SEQ ID NO: 34148 - DNA, 25 bp, probe
tcaagttagccaagaagagttcctc

SEQ ID NO: 34149 - DNA, 25 bp, probe
ctaaatgaacagcggatgaaagaat

SEQ ID NO: 34150 - DNA, 25 bp, probe
tactaaatgaacagcggatgaaaga

SEQ ID NO: 34151 - DNA, 25 bp, probe
aaatgatgtctgaagttattgctgc

SEQ ID NO: 34152 - DNA, 25 bp, probe
ttctattcattatgccttaccatgt

SEQ ID NO: 34153 - DNA, 25 bp, probe
atactaaatgaacagcggatgaaag

SEQ ID NO: 34154 - DNA, 25 bp, probe
tcttgataacttgcatgatcttgtc

SEQ ID NO: 34155 - DNA, 25 bp, probe
taaatgaacagcggatgaaagaatc

SEQ ID NO: 34156 - DNA, 25 bp, probe
aggagatgaggtcaagctacattag

SEQ ID NO: 34157 - DNA, 25 bp, probe
tgcttgaatacatttatccagtccc

SEQ ID NO: 34158 - DNA, 25 bp, probe
ggagatgaggtcaagctacattaga

SEQ ID NO: 34159 - DNA, 25 bp, probe
gaggagatgaggtcaagctacatta

SEQ ID NO: 34160 - DNA, 25 bp, probe
aatactaaatgaacagcggatgaaa

SEQ ID NO: 34161 - DNA, 25 bp, probe
ttcttgataacttgcatgatcttgt

SEQ ID NO: 34162 - DNA, 25 bp, probe
actaaatgaacagcggatgaaagaa

SEQ ID NO: 34163 - DNA, 25 bp, probe
cacagcgtttctatcaacttacaaa

SEQ ID NO: 34164 - DNA, 25 bp, probe
aatgatgtctgaagttattgctgca

SEQ ID NO: 34165 - DNA, 25 bp, probe
gaaatgatgtctgaagttattgctg

SEQ ID NO: 34166 - DNA, 25 bp, probe
ctaatactaaatgaacagcggatga

SEQ ID NO: 34167 - DNA, 25 bp, probe
tctaatactaaatgaacagcggatg

SEQ ID NO: 34168 - DNA, 25 bp, probe
tcagtattcttggatgagcttaatg

SEQ ID NO: 34169 - DNA, 25 bp, probe
cattcagtattcttggatgagctta

SEQ ID NO: 34170 - DNA, 25 bp, probe
cttgataacttgcatgatcttgtca

SEQ ID NO: 34171 - DNA, 25 bp, probe
acttcttgataacttgcatgatctt

SEQ ID NO: 34172 - DNA, 25 bp, probe
aacttcttgataacttgcatgatct

SEQ ID NO: 34173 - DNA, 25 bp, probe
tcacagcgtttctatcaacttacaa

SEQ ID NO: 34174 - DNA, 25 bp, probe
cttcttgataacttgcatgatcttg

SEQ ID NO: 34175 - DNA, 25 bp, probe
cattctattcattatgccttaccat

SEQ ID NO: 34176 - DNA, 25 bp, probe
taactctcattcagtattcttggat

SEQ ID NO: 34177 - DNA, 25 bp, probe
ataactctcattcagtattcttgga

SEQ ID NO: 34178 - DNA, 25 bp, probe
ctcacagcgtttctatcaacttaca

SEQ ID NO: 34179 - DNA, 25 bp, probe
aattccatgatcctgataggcaagg

SEQ ID NO: 34180 - DNA, 25 bp, probe
atgatcctgataggcaaggtttaca

SEQ ID NO: 34181 - DNA, 25 bp, probe
catgatcctgataggcaaggtttac

SEQ ID NO: 34182 - DNA, 25 bp, probe
gaattccatgatcctgataggcaag

SEQ ID NO: 34183 - DNA, 25 bp, probe
atcctgataggcaaggtttacacag

SEQ ID NO: 34184 - DNA, 25 bp, probe
attccatgatcctgataggcaaggt

SEQ ID NO: 34185 - DNA, 25 bp, probe
gatcctgataggcaaggtttacaca

SEQ ID NO: 34186 - DNA, 25 bp, probe
tgatcctgataggcaaggtttacac

SEQ ID NO: 34187 - DNA, 25 bp, probe
ccatgatcctgataggcaaggttta

SEQ ID NO: 34188 - DNA, 25 bp, probe
ttccatgatcctgataggcaaggtt

SEQ ID NO: 34189 - DNA, 25 bp, probe
gataggcaaggtttacacagcacag

SEQ ID NO: 34190 - DNA, 25 bp, probe
aaacagtgactgctactttgggaat

SEQ ID NO: 34191 - DNA, 25 bp, probe
ataggcaaggtttacacagcacaga

SEQ ID NO: 34192 - DNA, 25 bp, probe
gaaacagtgactgctactttgggaa

SEQ ID NO: 34193 - DNA, 25 bp, probe
aacagtgactgctactttgggaatg

SEQ ID NO: 34194 - DNA, 25 bp, probe
taggcaaggtttacacagcacagaa

SEQ ID NO: 34195 - DNA, 25 bp, probe
ctgataggcaaggtttacacagcac

SEQ ID NO: 34196 - DNA, 25 bp, probe
tgataggcaaggtttacacagcaca

SEQ ID NO: 34197 - DNA, 25 bp, probe
tccatgatcctgataggcaaggttt

SEQ ID NO: 34198 - DNA, 25 bp, probe
gagggaaacagtgactgctactttg

SEQ ID NO: 34199 - DNA, 25 bp, probe
ctactttgggaatgggtcagcctac

SEQ ID NO: 34200 - DNA, 25 bp, probe
aaacataattactgccggactggac

SEQ ID NO: 34201 - DNA, 25 bp, probe
caaacataattactgccggactgga

SEQ ID NO: 34202 - DNA, 25 bp, probe
tgagggaaacagtgactgctacttt

SEQ ID NO: 34203 - DNA, 25 bp, probe
ctgagggaaacagtgactgctactt

SEQ ID NO: 34204 - DNA, 25 bp, probe
tcctgataggcaaggtttacacagc

SEQ ID NO: 34205 - DNA, 25 bp, probe
cctgataggcaaggtttacacagca

SEQ ID NO: 34206 - DNA, 25 bp, probe
aacataattactgccggactggacg

SEQ ID NO: 34207 - DNA, 25 bp, probe
ctctgagggaaacagtgactgctac

SEQ ID NO: 34208 - DNA, 25 bp, probe
acagtgactgctactttgggaatgg

SEQ ID NO: 34209 - DNA, 25 bp, probe
ggaaacagtgactgctactttggga

SEQ ID NO: 34210 - DNA, 25 bp, probe
agggaaacagtgactgctactttgg

SEQ ID NO: 34211 - DNA, 25 bp, probe
gactgctactttgggaatgggtcag

SEQ ID NO: 34212 - DNA, 25 bp, probe
tctgagggaaacagtgactgctact

SEQ ID NO: 34213 - DNA, 25 bp, probe
ctgggcctgggcaaacataattact

SEQ ID NO: 34214 - DNA, 25 bp, probe
aaagccctggtgctacgtctttaag

SEQ ID NO: 34215 - DNA, 25 bp, probe
ctacgtctttaaggcggggaagtac

SEQ ID NO: 34216 - DNA, 25 bp, probe
gcaaacataattactgccggactgg

SEQ ID NO: 34217 - DNA, 25 bp, probe
agtcctcatcatccacatcttcatc

SEQ ID NO: 34218 - DNA, 25 bp, probe
cagtcctcatcatccacatcttcat

SEQ ID NO: 34219 - DNA, 25 bp, probe
cttcttcctggtcttcctcatcatc

SEQ ID NO: 34220 - DNA, 25 bp, probe
tgttatctactgtttcctcaccaag

SEQ ID NO: 34221 - DNA, 25 bp, probe
ctgttatctactgtttcctcaccaa

SEQ ID NO: 34222 - DNA, 25 bp, probe
ctggtcttcctcatcatcctcttct

SEQ ID NO: 34223 - DNA, 25 bp, probe
catcatccacatcttcatcgtgttc

SEQ ID NO: 34224 - DNA, 25 bp, probe
gtcctcatcatccacatcttcatcg

SEQ ID NO: 34225 - DNA, 25 bp, probe
gttatctactgtttcctcaccaaga

SEQ ID NO: 34226 - DNA, 25 bp, probe
tatctactgtttcctcaccaagaag

SEQ ID NO: 34227 - DNA, 25 bp, probe
ttatctactgtttcctcaccaagaa

SEQ ID NO: 34228 - DNA, 25 bp, probe
gaccctgttatctactgtttcctca

SEQ ID NO: 34229 - DNA, 25 bp, probe
atcatccacatcttcatcgtgttca

SEQ ID NO: 34230 - DNA, 25 bp, probe
tcatcatccacatcttcatcgtgtt

SEQ ID NO: 34231 - DNA, 25 bp, probe
agaccctgttatctactgtttcctc

SEQ ID NO: 34232 - DNA, 25 bp, probe
cctgttatctactgtttcctcacca

SEQ ID NO: 34233 - DNA, 25 bp, probe
accctgttatctactgtttcctcac

SEQ ID NO: 34234 - DNA, 25 bp, probe
catcttcatcgtgttcagcttcttc

SEQ ID NO: 34235 - DNA, 25 bp, probe
tggtcttcctcatcatcctcttctg

SEQ ID NO: 34236 - DNA, 25 bp, probe
tcctcatcatccacatcttcatcgt

SEQ ID NO: 34237 - DNA, 25 bp, probe
ctactgtttcctcaccaagaagttc

SEQ ID NO: 34238 - DNA, 25 bp, probe
atctactgtttcctcaccaagaagt

SEQ ID NO: 34239 - DNA, 25 bp, probe
tctactgtttcctcaccaagaagtt

SEQ ID NO: 34240 - DNA, 25 bp, probe
ttcttcctggtcttcctcatcatcc

SEQ ID NO: 34241 - DNA, 25 bp, probe
ctcatcatccacatcttcatcgtgt

SEQ ID NO: 34242 - DNA, 25 bp, probe
ctccttagcaccaactgtgtcttag

SEQ ID NO: 34243 - DNA, 25 bp, probe
tcatccacatcttcatcgtgttcag

SEQ ID NO: 34244 - DNA, 25 bp, probe
ccctgttatctactgtttcctcacc

SEQ ID NO: 34245 - DNA, 25 bp, probe
tagaccctgttatctactgtttcct

SEQ ID NO: 34246 - DNA, 25 bp, probe
ttagaccctgttatctactgtttcc

SEQ ID NO: 34247 - DNA, 25 bp, probe
ctacttcctcatcctggactctacc

SEQ ID NO: 34248 - DNA, 25 bp, probe
cctacttcctcatcctggactctac

SEQ ID NO: 34249 - DNA, 25 bp, probe
tcctacttcctcatcctggactcta

SEQ ID NO: 34250 - DNA, 25 bp, probe
cctggtcttcctcatcatcctcttc

SEQ ID NO: 34251 - DNA, 25 bp, probe
cttcctggtcttcctcatcatcctc

SEQ ID NO: 34252 - DNA, 25 bp, probe
ccagtcctcatcatccacatcttca

SEQ ID NO: 34253 - DNA, 25 bp, probe
tccttagcaccaactgtgtcttaga

SEQ ID NO: 34254 - DNA, 25 bp, probe
cctcatcatccacatcttcatcgtg

SEQ ID NO: 34255 - DNA, 25 bp, probe
tactgtttcctcaccaagaagttcc

SEQ ID NO: 34256 - DNA, 25 bp, probe
atcttcatcgtgttcagcttcttcc

SEQ ID NO: 34257 - DNA, 25 bp, probe
aactgtgtcttagaccctgttatct

SEQ ID NO: 34258 - DNA, 25 bp, probe
caactgtgtcttagaccctgttatc

SEQ ID NO: 34259 - DNA, 25 bp, probe
tcttagaccctgttatctactgttt

SEQ ID NO: 34260 - DNA, 25 bp, probe
acatcttcatcgtgttcagcttctt

SEQ ID NO: 34261 - DNA, 25 bp, probe
aatcttgctactaccgttatacaca

SEQ ID NO: 34262 - DNA, 25 bp, probe
atcttgctactaccgttatacacat

SEQ ID NO: 34263 - DNA, 25 bp, probe
taggaagtcaatatgtggaagcaac

SEQ ID NO: 34264 - DNA, 25 bp, probe
tgtctcaaggcagttaattctcatt

SEQ ID NO: 34265 - DNA, 25 bp, probe
aatgtctcaaggcagttaattctca

SEQ ID NO: 34266 - DNA, 25 bp, probe
tcttgctactaccgttatacacata

SEQ ID NO: 34267 - DNA, 25 bp, probe
atgtctcaaggcagttaattctcat

SEQ ID NO: 34268 - DNA, 25 bp, probe
ctaggaagtcaatatgtggaagcaa

SEQ ID NO: 34269 - DNA, 25 bp, probe
ctctaggaagtcaatatgtggaagc

SEQ ID NO: 34270 - DNA, 25 bp, probe
tctctaggaagtcaatatgtggaag

SEQ ID NO: 34271 - DNA, 25 bp, probe
gtctcaaggcagttaattctcatta

SEQ ID NO: 34272 - DNA, 25 bp, probe
tctaggaagtcaatatgtggaagca

SEQ ID NO: 34273 - DNA, 25 bp, probe
atctctaggaagtcaatatgtggaa

SEQ ID NO: 34274 - DNA, 25 bp, probe
aatctctaggaagtcaatatgtgga

SEQ ID NO: 34275 - DNA, 25 bp, probe
cttgctactaccgttatacacatat

SEQ ID NO: 34276 - DNA, 25 bp, probe
taatcttgctactaccgttatacac

SEQ ID NO: 34277 - DNA, 25 bp, probe
ccatgtagcagtgagtcatatctta

SEQ ID NO: 34278 - DNA, 25 bp, probe
tggttcattcttcagatatactgga

SEQ ID NO: 34279 - DNA, 25 bp, probe
ctggttcattcttcagatatactgg

SEQ ID NO: 34280 - DNA, 25 bp, probe
accatgtagcagtgagtcatatctt

SEQ ID NO: 34281 - DNA, 25 bp, probe
aaccatgtagcagtgagtcatatct

SEQ ID NO: 34282 - DNA, 25 bp, probe
gttctacacagtcagatgccagtaa

SEQ ID NO: 34283 - DNA, 25 bp, probe
tgctactaccgttatacacatatag

SEQ ID NO: 34284 - DNA, 25 bp, probe
ttaatcttgctactaccgttataca

SEQ ID NO: 34285 - DNA, 25 bp, probe
actctcatcactacagtattactct

SEQ ID NO: 34286 - DNA, 25 bp, probe
catgtagcagtgagtcatatcttaa

SEQ ID NO: 34287 - DNA, 25 bp, probe
attaagaacacaagatgcaacacaa

SEQ ID NO: 34288 - DNA, 25 bp, probe
ttcattcttcagatatactggaacc

SEQ ID NO: 34289 - DNA, 25 bp, probe
ggttcattcttcagatatactggaa

SEQ ID NO: 34290 - DNA, 25 bp, probe
atgtagcagtgagtcatatcttaat

SEQ ID NO: 34291 - DNA, 25 bp, probe
tttactgtgatgtttgtgtatgtgg

SEQ ID NO: 34292 - DNA, 25 bp, probe
tagcgaaccctttatttgaacaatg

SEQ ID NO: 34293 - DNA, 25 bp, probe
cttagcgaaccctttatttgaacaa

SEQ ID NO: 34294 - DNA, 25 bp, probe
agccagaccagattaaacttcatat

SEQ ID NO: 34295 - DNA, 25 bp, probe
cacttagcgaaccctttatttgaac

SEQ ID NO: 34296 - DNA, 25 bp, probe
taatctctaggaagtcaatatgtgg

SEQ ID NO: 34297 - DNA, 25 bp, probe
ttagcgaaccctttatttgaacaat

SEQ ID NO: 34298 - DNA, 25 bp, probe
tcattaagaacacaagatgcaacac

SEQ ID NO: 34299 - DNA, 25 bp, probe
ttcattaagaacacaagatgcaaca

SEQ ID NO: 34300 - DNA, 25 bp, probe
cagccagaccagattaaacttcata

SEQ ID NO: 34301 - DNA, 25 bp, probe
cattaagaacacaagatgcaacaca

SEQ ID NO: 34302 - DNA, 25 bp, probe
acttagcgaaccctttatttgaaca

SEQ ID NO: 34303 - DNA, 25 bp, probe
aaatgtctcaaggcagttaattctc

SEQ ID NO: 34304 - DNA, 25 bp, probe
gcgaaccctttatttgaacaatgaa

SEQ ID NO: 34305 - DNA, 25 bp, probe
aagaagactcagagagcaagagatg

SEQ ID NO: 34306 - DNA, 25 bp, probe
aactgttatccagaagctgttatgt

SEQ ID NO: 34307 - DNA, 25 bp, probe
actgttatccagaagctgttatgtc

SEQ ID NO: 34308 - DNA, 25 bp, probe
ctgggatgaagtatctgtgaactat

SEQ ID NO: 34309 - DNA, 25 bp, probe
tgatgacttgaagataaatctgcct

SEQ ID NO: 34310 - DNA, 25 bp, probe
ctgatgacttgaagataaatctgcc

SEQ ID NO: 34311 - DNA, 25 bp, probe
gttatccagaagctgttatgtcctg

SEQ ID NO: 34312 - DNA, 25 bp, probe
ctgttatccagaagctgttatgtcc

SEQ ID NO: 34313 - DNA, 25 bp, probe
tgggatgaagtatctgtgaactatt

SEQ ID NO: 34314 - DNA, 25 bp, probe
cttgaagataaatctgcctaaccct

SEQ ID NO: 34315 - DNA, 25 bp, probe
gctgatgacttgaagataaatctgc

SEQ ID NO: 34316 - DNA, 25 bp, probe
ttgaagataaatctgcctaaccctg

SEQ ID NO: 34317 - DNA, 25 bp, probe
acttgaagataaatctgcctaaccc

SEQ ID NO: 34318 - DNA, 25 bp, probe
gacttgaagataaatctgcctaacc

SEQ ID NO: 34319 - DNA, 25 bp, probe
tatccagaagctgttatgtcctgtt

SEQ ID NO: 34320 - DNA, 25 bp, probe
ttatccagaagctgttatgtcctgt

SEQ ID NO: 34321 - DNA, 25 bp, probe
tgttatccagaagctgttatgtcct

SEQ ID NO: 34322 - DNA, 25 bp, probe
cctgggatgaagtatctgtgaacta

SEQ ID NO: 34323 - DNA, 25 bp, probe
tgacttgaagataaatctgcctaac

SEQ ID NO: 34324 - DNA, 25 bp, probe
aaagaagactcagagagcaagagat

SEQ ID NO: 34325 - DNA, 25 bp, probe
taactgttatccagaagctgttatg

SEQ ID NO: 34326 - DNA, 25 bp, probe
cttgagatttatccacattgaaaca

SEQ ID NO: 34327 - DNA, 25 bp, probe
gggatgaagtatctgtgaactattt

SEQ ID NO: 34328 - DNA, 25 bp, probe
gatgacttgaagataaatctgccta

SEQ ID NO: 34329 - DNA, 25 bp, probe
agaagactcagagagcaagagatgg

SEQ ID NO: 34330 - DNA, 25 bp, probe
aaccgctatagagtattccataatt

SEQ ID NO: 34331 - DNA, 25 bp, probe
tcttgagatttatccacattgaaac

SEQ ID NO: 34332 - DNA, 25 bp, probe
gtttcttgagatttatccacattga

SEQ ID NO: 34333 - DNA, 25 bp, probe
agctaagctgatgacttgaagataa

SEQ ID NO: 34334 - DNA, 25 bp, probe
atataactgttatccagaagctgtt

SEQ ID NO: 34335 - DNA, 25 bp, probe
aatataactgttatccagaagctgt

SEQ ID NO: 34336 - DNA, 25 bp, probe
tgaagataaatctgcctaaccctgg

SEQ ID NO: 34337 - DNA, 25 bp, probe
atgacttgaagataaatctgcctaa

SEQ ID NO: 34338 - DNA, 25 bp, probe
ctaaccctgggatgaagtatctgtg

SEQ ID NO: 34339 - DNA, 25 bp, probe
gctaagctgatgacttgaagataaa

SEQ ID NO: 34340 - DNA, 25 bp, probe
ttgagatttatccacattgaaacat

SEQ ID NO: 34341 - DNA, 25 bp, probe
agctgatgacttgaagataaatctg

SEQ ID NO: 34342 - DNA, 25 bp, probe
tgtttcttgagatttatccacattg

SEQ ID NO: 34343 - DNA, 25 bp, probe
tgagatttatccacattgaaacatg

SEQ ID NO: 34344 - DNA, 25 bp, probe
taaccctgggatgaagtatctgtga

SEQ ID NO: 34345 - DNA, 25 bp, probe
ttaaccgctatagagtattccataa

SEQ ID NO: 34346 - DNA, 25 bp, probe
aagctgatgacttgaagataaatct

SEQ ID NO: 34347 - DNA, 25 bp, probe
gataaatctgcctaaccctgggatg

SEQ ID NO: 34348 - DNA, 25 bp, probe
taaccgctatagagtattccataat

SEQ ID NO: 34349 - DNA, 25 bp, probe
ttgcgaatatcagagacctcagact

SEQ ID NO: 34350 - DNA, 25 bp, probe
agagagtgtcttactggtggatgag

SEQ ID NO: 34351 - DNA, 25 bp, probe
taataggcaaggaaagaaatacagt

SEQ ID NO: 34352 - DNA, 25 bp, probe
ataggcaaggaaagaaatacagtac

SEQ ID NO: 34353 - DNA, 25 bp, probe
aataggcaaggaaagaaatacagta

SEQ ID NO: 34354 - DNA, 25 bp, probe
ctttgcgaatatcagagacctcaga

SEQ ID NO: 34355 - DNA, 25 bp, probe
ctcagagagtgtcttactggtggat

SEQ ID NO: 34356 - DNA, 25 bp, probe
tatatcctcctgagaaagacagtgc

SEQ ID NO: 34357 - DNA, 25 bp, probe
tttgcgaatatcagagacctcagac

SEQ ID NO: 34358 - DNA, 25 bp, probe
actttgcgaatatcagagacctcag

SEQ ID NO: 34359 - DNA, 25 bp, probe
gactttgcgaatatcagagacctca

SEQ ID NO: 34360 - DNA, 25 bp, probe
cagagagtgtcttactggtggatga

SEQ ID NO: 34361 - DNA, 25 bp, probe
tcagagagtgtcttactggtggatg

SEQ ID NO: 34362 - DNA, 25 bp, probe
tgcgaatatcagagacctcagactc

SEQ ID NO: 34363 - DNA, 25 bp, probe
atatatcctcctgagaaagacagtg

SEQ ID NO: 34364 - DNA, 25 bp, probe
aatatcagagacctcagactcttca

SEQ ID NO: 34365 - DNA, 25 bp, probe
gaatatcagagacctcagactcttc

SEQ ID NO: 34366 - DNA, 25 bp, probe
tcagtaaagcaatagagaagatcaa

SEQ ID NO: 34367 - DNA, 25 bp, probe
tgaggactttgcgaatatcagagac

SEQ ID NO: 34368 - DNA, 25 bp, probe
ctcagtaaagcaatagagaagatca

SEQ ID NO: 34369 - DNA, 25 bp, probe
atatcagagacctcagactcttcac

SEQ ID NO: 34370 - DNA, 25 bp, probe
ctcagacagtcaaaggacatcttct

SEQ ID NO: 34371 - DNA, 25 bp, probe
gagagtgtcttactggtggatgagg

SEQ ID NO: 34372 - DNA, 25 bp, probe
cgaatatcagagacctcagactctt

SEQ ID NO: 34373 - DNA, 25 bp, probe
gaggactttgcgaatatcagagacc

SEQ ID NO: 34374 - DNA, 25 bp, probe
ataataggcaaggaaagaaatacag

SEQ ID NO: 34375 - DNA, 25 bp, probe
ggactttgcgaatatcagagacctc

SEQ ID NO: 34376 - DNA, 25 bp, probe
cagtaaagcaatagagaagatcaaa

SEQ ID NO: 34377 - DNA, 25 bp, probe
gctcagtaaagcaatagagaagatc

SEQ ID NO: 34378 - DNA, 25 bp, probe
tatcagagacctcagactcttcaca

SEQ ID NO: 34379 - DNA, 25 bp, probe
tatatatcctcctgagaaagacagt

SEQ ID NO: 34380 - DNA, 25 bp, probe
atatcctcctgagaaagacagtgct

SEQ ID NO: 34381 - DNA, 25 bp, probe
aaagcaatagagaagatcaaatgcc

SEQ ID NO: 34382 - DNA, 25 bp, probe
ctcactgaggactttgcgaatatca

SEQ ID NO: 34383 - DNA, 25 bp, probe
aagcaatagagaagatcaaatgcct

SEQ ID NO: 34384 - DNA, 25 bp, probe
taggcaaggaaagaaatacagtact

SEQ ID NO: 34385 - DNA, 25 bp, probe
agcaatagagaagatcaaatgcctc

SEQ ID NO: 34386 - DNA, 25 bp, probe
agtactgtttctggacccttataaa

SEQ ID NO: 34387 - DNA, 25 bp, probe
gctcagacagtcaaaggacatcttc

SEQ ID NO: 34388 - DNA, 25 bp, probe
tatcctcctgagaaagacagtgctc

SEQ ID NO: 34389 - DNA, 25 bp, probe
gtaaagcaatagagaagatcaaatg

SEQ ID NO: 34390 - DNA, 25 bp, probe
aggactttgcgaatatcagagacct

SEQ ID NO: 34391 - DNA, 25 bp, probe
gcaatagagaagatcaaatgcctct

SEQ ID NO: 34392 - DNA, 25 bp, probe
agtaaagcaatagagaagatcaaat

SEQ ID NO: 34393 - DNA, 25 bp, probe
accattctccatccttccttatcat

SEQ ID NO: 34394 - DNA, 25 bp, probe
ttgtgaacagagatataaggaacca

SEQ ID NO: 34395 - DNA, 25 bp, probe
tgtgaacagagatataaggaaccat

SEQ ID NO: 34396 - DNA, 25 bp, probe
gaaccattctccatccttccttatc

SEQ ID NO: 34397 - DNA, 25 bp, probe
aaccattctccatccttccttatca

SEQ ID NO: 34398 - DNA, 25 bp, probe
cttgtgaacagagatataaggaacc

SEQ ID NO: 34399 - DNA, 25 bp, probe
gtgaacagagatataaggaaccatt

SEQ ID NO: 34400 - DNA, 25 bp, probe
tgaacagagatataaggaaccattc

SEQ ID NO: 34401 - DNA, 25 bp, probe
ccattctccatccttccttatcatg

SEQ ID NO: 34402 - DNA, 25 bp, probe
tgtcttgtgaacagagatataagga

SEQ ID NO: 34403 - DNA, 25 bp, probe
gttgatgtcttgtgaacagagatat

SEQ ID NO: 34404 - DNA, 25 bp, probe
tcttgtgaacagagatataaggaac

SEQ ID NO: 34405 - DNA, 25 bp, probe
gtcttgtgaacagagatataaggaa

SEQ ID NO: 34406 - DNA, 25 bp, probe
aattcttgctgtattgccatgatgt

SEQ ID NO: 34407 - DNA, 25 bp, probe
gaacagagatataaggaaccattct

SEQ ID NO: 34408 - DNA, 25 bp, probe
attctccatccttccttatcatgct

SEQ ID NO: 34409 - DNA, 25 bp, probe
cattctccatccttccttatcatgc

SEQ ID NO: 34410 - DNA, 25 bp, probe
agatataaggaaccattctccatcc

SEQ ID NO: 34411 - DNA, 25 bp, probe
attcttgctgtattgccatgatgtc

SEQ ID NO: 34412 - DNA, 25 bp, probe
atgtcttgtgaacagagatataagg

SEQ ID NO: 34413 - DNA, 25 bp, probe
cttgaggcttctaaataaatggcag

SEQ ID NO: 34414 - DNA, 25 bp, probe
ttctccatccttccttatcatgctg

SEQ ID NO: 34415 - DNA, 25 bp, probe
agactttcagatggtttatttgctt

SEQ ID NO: 34416 - DNA, 25 bp, probe
ctttaaggagtgagagagatgtgta

SEQ ID NO: 34417 - DNA, 25 bp, probe
aagactttcagatggtttatttgct

SEQ ID NO: 34418 - DNA, 25 bp, probe
ggagggttatctatgttatctgagt

SEQ ID NO: 34419 - DNA, 25 bp, probe
ccatgtgtactgacttgaggagatc

SEQ ID NO: 34420 - DNA, 25 bp, probe
ttgaggcttctaaataaatggcaga

SEQ ID NO: 34421 - DNA, 25 bp, probe
tctctaggaaatctggtgaagtaac

SEQ ID NO: 34422 - DNA, 25 bp, probe
tgatgtcttgtgaacagagatataa

SEQ ID NO: 34423 - DNA, 25 bp, probe
ttgatgtcttgtgaacagagatata

SEQ ID NO: 34424 - DNA, 25 bp, probe
gaagactttcagatggtttatttgc

SEQ ID NO: 34425 - DNA, 25 bp, probe
aggagggttatctatgttatctgag

SEQ ID NO: 34426 - DNA, 25 bp, probe
tccttgaggcttctaaataaatggc

SEQ ID NO: 34427 - DNA, 25 bp, probe
tttcagatggtttatttgctttcag

SEQ ID NO: 34428 - DNA, 25 bp, probe
ctttcagatggtttatttgctttca

SEQ ID NO: 34429 - DNA, 25 bp, probe
actttcagatggtttatttgctttc

SEQ ID NO: 34430 - DNA, 25 bp, probe
gactttcagatggtttatttgcttt

SEQ ID NO: 34431 - DNA, 25 bp, probe
ttaagagtgttgatgtcttgtgaac

SEQ ID NO: 34432 - DNA, 25 bp, probe
ccttgaggcttctaaataaatggca

SEQ ID NO: 34433 - DNA, 25 bp, probe
tttaaggagtgagagagatgtgtac

SEQ ID NO: 34434 - DNA, 25 bp, probe
aaggctttaaggagtgagagagatg

SEQ ID NO: 34435 - DNA, 25 bp, probe
caaggctttaaggagtgagagagat

SEQ ID NO: 34436 - DNA, 25 bp, probe
ctccttgaggcttctaaataaatgg

SEQ ID NO: 34437 - DNA, 25 bp, probe
cccatccatctcattgtctaaatat

SEQ ID NO: 34438 - DNA, 25 bp, probe
aatatttagaaggcggagaagttcc

SEQ ID NO: 34439 - DNA, 25 bp, probe
atatttagaaggcggagaagttccc

SEQ ID NO: 34440 - DNA, 25 bp, probe
ccccatccatctcattgtctaaata

SEQ ID NO: 34441 - DNA, 25 bp, probe
tttatcctggagtgcagaaagaatg

SEQ ID NO: 34442 - DNA, 25 bp, probe
gtttatcctggagtgcagaaagaat

SEQ ID NO: 34443 - DNA, 25 bp, probe
tccccatccatctcattgtctaaat

SEQ ID NO: 34444 - DNA, 25 bp, probe
attccccatccatctcattgtctaa

SEQ ID NO: 34445 - DNA, 25 bp, probe
ttccccatccatctcattgtctaaa

SEQ ID NO: 34446 - DNA, 25 bp, probe
gattccccatccatctcattgtcta

SEQ ID NO: 34447 - DNA, 25 bp, probe
ccatccatctcattgtctaaatatt

SEQ ID NO: 34448 - DNA, 25 bp, probe
gaagagagtgagggacagaggaaac

SEQ ID NO: 34449 - DNA, 25 bp, probe
tatttagaaggcggagaagttccca

SEQ ID NO: 34450 - DNA, 25 bp, probe
ttatcctggagtgcagaaagaatgg

SEQ ID NO: 34451 - DNA, 25 bp, probe
aaatatttagaaggcggagaagttc

SEQ ID NO: 34452 - DNA, 25 bp, probe
gtgcagaaagaatggttctctcaaa

SEQ ID NO: 34453 - DNA, 25 bp, probe
cgtttatcctggagtgcagaaagaa

SEQ ID NO: 34454 - DNA, 25 bp, probe
gcagaaagaatggttctctcaaaat

SEQ ID NO: 34455 - DNA, 25 bp, probe
agtgcagaaagaatggttctctcaa

SEQ ID NO: 34456 - DNA, 25 bp, probe
aaaaccacagttattggaaaagctc

SEQ ID NO: 34457 - DNA, 25 bp, probe
tatcctggagtgcagaaagaatggt

SEQ ID NO: 34458 - DNA, 25 bp, probe
gagtgcagaaagaatggttctctca

SEQ ID NO: 34459 - DNA, 25 bp, probe
atttagaaggcggagaagttcccag

SEQ ID NO: 34460 - DNA, 25 bp, probe
ggaagagagtgagggacagaggaaa

SEQ ID NO: 34461 - DNA, 25 bp, probe
aaaccacagttattggaaaagctcc

SEQ ID NO: 34462 - DNA, 25 bp, probe
acgtttatcctggagtgcagaaaga

SEQ ID NO: 34463 - DNA, 25 bp, probe
ggagtgcagaaagaatggttctctc

SEQ ID NO: 34464 - DNA, 25 bp, probe
tgcagaaagaatggttctctcaaaa

SEQ ID NO: 34465 - DNA, 25 bp, probe
atcctggagtgcagaaagaatggtt

SEQ ID NO: 34466 - DNA, 25 bp, probe
ctggagtgcagaaagaatggttctc

SEQ ID NO: 34467 - DNA, 25 bp, probe
cagaaagaatggttctctcaaaata

SEQ ID NO: 34468 - DNA, 25 bp, probe
gatgacgtaggacatgtgcttggta

SEQ ID NO: 34469 - DNA, 25 bp, probe
tggagtgcagaaagaatggttctct

SEQ ID NO: 34470 - DNA, 25 bp, probe
atgacgtaggacatgtgcttggtac

SEQ ID NO: 34471 - DNA, 25 bp, probe
attgtgggtgatgacgtaggacatg

SEQ ID NO: 34472 - DNA, 25 bp, probe
cattgtgggtgatgacgtaggacat

SEQ ID NO: 34473 - DNA, 25 bp, probe
gaaagaatggttctctcaaaataac

SEQ ID NO: 34474 - DNA, 25 bp, probe
tcctggagtgcagaaagaatggttc

SEQ ID NO: 34475 - DNA, 25 bp, probe
agaaagaatggttctctcaaaataa

SEQ ID NO: 34476 - DNA, 25 bp, probe
gttctctcaaaataaccagtggcct

SEQ ID NO: 34477 - DNA, 25 bp, probe
aaccacagttattggaaaagctccc

SEQ ID NO: 34478 - DNA, 25 bp, probe
gacgtaggacatgtgcttggtacaa

SEQ ID NO: 34479 - DNA, 25 bp, probe
aacgtttatcctggagtgcagaaag

SEQ ID NO: 34480 - DNA, 25 bp, probe
ttctctcaaaataaccagtggcctg

SEQ ID NO: 34481 - DNA, 25 bp, probe
tatactgaaggaatttgtgctgtgt

SEQ ID NO: 34482 - DNA, 25 bp, probe
ttatactgaaggaatttgtgctgtg

SEQ ID NO: 34483 - DNA, 25 bp, probe
tactgaaggaatttgtgctgtgtat

SEQ ID NO: 34484 - DNA, 25 bp, probe
atactgaaggaatttgtgctgtgta

SEQ ID NO: 34485 - DNA, 25 bp, probe
ctgaaggaatttgtgctgtgtattg

SEQ ID NO: 34486 - DNA, 25 bp, probe
actgaaggaatttgtgctgtgtatt

SEQ ID NO: 34487 - DNA, 25 bp, probe
tttatactgaaggaatttgtgctgt

SEQ ID NO: 34488 - DNA, 25 bp, probe
tgaaggaatttgtgctgtgtattgg

SEQ ID NO: 34489 - DNA, 25 bp, probe
atttatactgaaggaatttgtgctg

SEQ ID NO: 34490 - DNA, 25 bp, probe
catttatactgaaggaatttgtgct

SEQ ID NO: 34491 - DNA, 25 bp, probe
agcacatttatactgaaggaatttg

SEQ ID NO: 34492 - DNA, 25 bp, probe
acatttatactgaaggaatttgtgc

SEQ ID NO: 34493 - DNA, 25 bp, probe
gcacatttatactgaaggaatttgt

SEQ ID NO: 34494 - DNA, 25 bp, probe
gaaggaatttgtgctgtgtattggg

SEQ ID NO: 34495 - DNA, 25 bp, probe
catcctcagaactcacaagccattg

SEQ ID NO: 34496 - DNA, 25 bp, probe
aagcacatttatactgaaggaattt

SEQ ID NO: 34497 - DNA, 25 bp, probe
tttaagcacatttatactgaaggaa

SEQ ID NO: 34498 - DNA, 25 bp, probe
ccttttcctcctcagttttctcttt

SEQ ID NO: 34499 - DNA, 25 bp, probe
ttaagcacatttatactgaaggaat

SEQ ID NO: 34500 - DNA, 25 bp, probe
aacacacacacactggacagtagat

SEQ ID NO: 34501 - DNA, 25 bp, probe
cttttcctcctcagttttctcttta

SEQ ID NO: 34502 - DNA, 25 bp, probe
taagcacatttatactgaaggaatt

SEQ ID NO: 34503 - DNA, 25 bp, probe
ccatcctcagaactcacaagccatt

SEQ ID NO: 34504 - DNA, 25 bp, probe
ttttcctcctcagttttctctttaa

SEQ ID NO: 34505 - DNA, 25 bp, probe
ggtattaattctcgctggttttgtt

SEQ ID NO: 34506 - DNA, 25 bp, probe
aggtattaattctcgctggttttgt

SEQ ID NO: 34507 - DNA, 25 bp, probe
ctcaccacatcttcatcaccagcaa

SEQ ID NO: 34508 - DNA, 25 bp, probe
gtattaattctcgctggttttgttt

SEQ ID NO: 34509 - DNA, 25 bp, probe
acacacacacactggacagtagatg

SEQ ID NO: 34510 - DNA, 25 bp, probe
ccactgagatctactggataaagaa

SEQ ID NO: 34511 - DNA, 25 bp, probe
gccttttcctcctcagttttctctt

SEQ ID NO: 34512 - DNA, 25 bp, probe
caggtattaattctcgctggttttg

SEQ ID NO: 34513 - DNA, 25 bp, probe
cactgagatctactggataaagaat

SEQ ID NO: 34514 - DNA, 25 bp, probe
tattaattctcgctggttttgtttt

SEQ ID NO: 34515 - DNA, 25 bp, probe
tttcctcctcagttttctctttaaa

SEQ ID NO: 34516 - DNA, 25 bp, probe
caccacatcttcatcaccagcaaac

SEQ ID NO: 34517 - DNA, 25 bp, probe
tcaccacatcttcatcaccagcaaa

SEQ ID NO: 34518 - DNA, 25 bp, probe
ttactgttgggctttccactgagat

SEQ ID NO: 34519 - DNA, 25 bp, probe
caaacacacacacactggacagtag

SEQ ID NO: 34520 - DNA, 25 bp, probe
aaacacacacacactggacagtaga

SEQ ID NO: 34521 - DNA, 25 bp, probe
ttttaagcacatttatactgaagga

SEQ ID NO: 34522 - DNA, 25 bp, probe
cacacacacactggacagtagatgg

SEQ ID NO: 34523 - DNA, 25 bp, probe
actgtgaagtactaactttccaagg

SEQ ID NO: 34524 - DNA, 25 bp, probe
agccttttcctcctcagttttctct

SEQ ID NO: 34525 - DNA, 25 bp, probe
aacaggactattgacaggactattg

SEQ ID NO: 34526 - DNA, 25 bp, probe
agtatgacaagataaggctgaagat

SEQ ID NO: 34527 - DNA, 25 bp, probe
tggaatagtcaagacatcaaggtaa

SEQ ID NO: 34528 - DNA, 25 bp, probe
tactcctcactgtgtaacttaccta

SEQ ID NO: 34529 - DNA, 25 bp, probe
atactcctcactgtgtaacttacct

SEQ ID NO: 34530 - DNA, 25 bp, probe
gtaactctagtgtccttcctgattc

SEQ ID NO: 34531 - DNA, 25 bp, probe
atagtcaagacatcaaggtaaggaa

SEQ ID NO: 34532 - DNA, 25 bp, probe
aatagtcaagacatcaaggtaagga

SEQ ID NO: 34533 - DNA, 25 bp, probe
taactctagtgtccttcctgattca

SEQ ID NO: 34534 - DNA, 25 bp, probe
atgtaactctagtgtccttcctgat

SEQ ID NO: 34535 - DNA, 25 bp, probe
tcctcactgtgtaacttacctagaa

SEQ ID NO: 34536 - DNA, 25 bp, probe
tgtaactctagtgtccttcctgatt

SEQ ID NO: 34537 - DNA, 25 bp, probe
gaatagtcaagacatcaaggtaagg

SEQ ID NO: 34538 - DNA, 25 bp, probe
ggaatagtcaagacatcaaggtaag

SEQ ID NO: 34539 - DNA, 25 bp, probe
atggaatagtcaagacatcaaggta

SEQ ID NO: 34540 - DNA, 25 bp, probe
ctcctcactgtgtaacttacctaga

SEQ ID NO: 34541 - DNA, 25 bp, probe
tatactcctcactgtgtaacttacc

SEQ ID NO: 34542 - DNA, 25 bp, probe
aactctagtgtccttcctgattcat

SEQ ID NO: 34543 - DNA, 25 bp, probe
actcctcactgtgtaacttacctag

SEQ ID NO: 34544 - DNA, 25 bp, probe
tgacaagataaggctgaagatattc

SEQ ID NO: 34545 - DNA, 25 bp, probe
caggactattgacaggactattgta

SEQ ID NO: 34546 - DNA, 25 bp, probe
gtatgacaagataaggctgaagata

SEQ ID NO: 34547 - DNA, 25 bp, probe
tcatggaatagtcaagacatcaagg

SEQ ID NO: 34548 - DNA, 25 bp, probe
cagtatgacaagataaggctgaaga

SEQ ID NO: 34549 - DNA, 25 bp, probe
acagtatgacaagataaggctgaag

SEQ ID NO: 34550 - DNA, 25 bp, probe
acaggactattgacaggactattgt

SEQ ID NO: 34551 - DNA, 25 bp, probe
catggaatagtcaagacatcaaggt

SEQ ID NO: 34552 - DNA, 25 bp, probe
gacaagataaggctgaagatattct

SEQ ID NO: 34553 - DNA, 25 bp, probe
catgtaactctagtgtccttcctga

SEQ ID NO: 34554 - DNA, 25 bp, probe
tacagtatgacaagataaggctgaa

SEQ ID NO: 34555 - DNA, 25 bp, probe
atgacaagataaggctgaagatatt

SEQ ID NO: 34556 - DNA, 25 bp, probe
ttcatggaatagtcaagacatcaag

SEQ ID NO: 34557 - DNA, 25 bp, probe
actctagtgtccttcctgattcatg

SEQ ID NO: 34558 - DNA, 25 bp, probe
aggactattgacaggactattgtac

SEQ ID NO: 34559 - DNA, 25 bp, probe
gtacagtatgacaagataaggctga

SEQ ID NO: 34560 - DNA, 25 bp, probe
ctaccactggaccatgtaactctag

SEQ ID NO: 34561 - DNA, 25 bp, probe
tctaccactggaccatgtaactcta

SEQ ID NO: 34562 - DNA, 25 bp, probe
cttcctgattcatgcctgatattgg

SEQ ID NO: 34563 - DNA, 25 bp, probe
ccttcctgattcatgcctgatattg

SEQ ID NO: 34564 - DNA, 25 bp, probe
tccttcctgattcatgcctgatatt

SEQ ID NO: 34565 - DNA, 25 bp, probe
ccatgtaactctagtgtccttcctg

SEQ ID NO: 34566 - DNA, 25 bp, probe
gaaacaggactattgacaggactat

SEQ ID NO: 34567 - DNA, 25 bp, probe
aaggtaaggaaacaggactattgac

SEQ ID NO: 34568 - DNA, 25 bp, probe
catcaaggtaaggaaacaggactat

SEQ ID NO: 34569 - DNA, 25 bp, probe
agagggtgaaagggacagatagatg

SEQ ID NO: 34570 - DNA, 25 bp, probe
cagagggtgaaagggacagatagat

SEQ ID NO: 34571 - DNA, 25 bp, probe
aacagagggtgaaagggacagatag

SEQ ID NO: 34572 - DNA, 25 bp, probe
gaacagagggtgaaagggacagata

SEQ ID NO: 34573 - DNA, 25 bp, probe
cttttgtttacaccgtggaattgac

SEQ ID NO: 34574 - DNA, 25 bp, probe
cctccaatccccagtttgtatttag

SEQ ID NO: 34575 - DNA, 25 bp, probe
tcctccaatccccagtttgtattta

SEQ ID NO: 34576 - DNA, 25 bp, probe
tatttagctgccaaataagattccc

SEQ ID NO: 34577 - DNA, 25 bp, probe
ccagtttgtatttagctgccaaata

SEQ ID NO: 34578 - DNA, 25 bp, probe
ctccaatccccagtttgtatttagc

SEQ ID NO: 34579 - DNA, 25 bp, probe
tttgtttacaccgtggaattgaccc

SEQ ID NO: 34580 - DNA, 25 bp, probe
ttcctccaatccccagtttgtattt

SEQ ID NO: 34581 - DNA, 25 bp, probe
gtatttagctgccaaataagattcc

SEQ ID NO: 34582 - DNA, 25 bp, probe
ttattagcttttgtttacaccgtgg

SEQ ID NO: 34583 - DNA, 25 bp, probe
acagagggtgaaagggacagataga

SEQ ID NO: 34584 - DNA, 25 bp, probe
tattagcttttgtttacaccgtgga

SEQ ID NO: 34585 - DNA, 25 bp, probe
aggaagcctctatttatttattagc

SEQ ID NO: 34586 - DNA, 25 bp, probe
cagtttgtatttagctgccaaataa

SEQ ID NO: 34587 - DNA, 25 bp, probe
gtttacaccgtggaattgacccttc

SEQ ID NO: 34588 - DNA, 25 bp, probe
ttttgtttacaccgtggaattgacc

SEQ ID NO: 34589 - DNA, 25 bp, probe
cttcctccaatccccagtttgtatt

SEQ ID NO: 34590 - DNA, 25 bp, probe
gtttgtatttagctgccaaataaga

SEQ ID NO: 34591 - DNA, 25 bp, probe
agtttgtatttagctgccaaataag

SEQ ID NO: 34592 - DNA, 25 bp, probe
tagcttttgtttacaccgtggaatt

SEQ ID NO: 34593 - DNA, 25 bp, probe
ttagcttttgtttacaccgtggaat

SEQ ID NO: 34594 - DNA, 25 bp, probe
attagcttttgtttacaccgtggaa

SEQ ID NO: 34595 - DNA, 25 bp, probe
tttattagcttttgtttacaccgtg

SEQ ID NO: 34596 - DNA, 25 bp, probe
cccagtttgtatttagctgccaaat

SEQ ID NO: 34597 - DNA, 25 bp, probe
tgtatttagctgccaaataagattc

SEQ ID NO: 34598 - DNA, 25 bp, probe
gcttttgtttacaccgtggaattga

SEQ ID NO: 34599 - DNA, 25 bp, probe
gagggtgaaagggacagatagatgc

SEQ ID NO: 34600 - DNA, 25 bp, probe
ttgtatttagctgccaaataagatt

SEQ ID NO: 34601 - DNA, 25 bp, probe
atttagctgccaaataagattcccc

SEQ ID NO: 34602 - DNA, 25 bp, probe
tgtttacaccgtggaattgaccctt

SEQ ID NO: 34603 - DNA, 25 bp, probe
ttgtttacaccgtggaattgaccct

SEQ ID NO: 34604 - DNA, 25 bp, probe
tagctgccaaataagattccccatt

SEQ ID NO: 34605 - DNA, 25 bp, probe
ttagctgccaaataagattccccat

SEQ ID NO: 34606 - DNA, 25 bp, probe
atttattagcttttgtttacaccgt

SEQ ID NO: 34607 - DNA, 25 bp, probe
tccaatccccagtttgtatttagct

SEQ ID NO: 34608 - DNA, 25 bp, probe
gacagatagatgcaggtccattctg

SEQ ID NO: 34609 - DNA, 25 bp, probe
tttgtatttagctgccaaataagat

SEQ ID NO: 34610 - DNA, 25 bp, probe
tcttcctccaatccccagtttgtat

SEQ ID NO: 34611 - DNA, 25 bp, probe
ctctgtttacatctcccctctaccc

SEQ ID NO: 34612 - DNA, 25 bp, probe
cctctgtttacatctcccctctacc

SEQ ID NO: 34613 - DNA, 25 bp, probe
gactgaatcttgcccgtttatgtat

SEQ ID NO: 34614 - DNA, 25 bp, probe
actgaatcttgcccgtttatgtatg

SEQ ID NO: 34615 - DNA, 25 bp, probe
ccgtttatgtatgctccatgtctag

SEQ ID NO: 34616 - DNA, 25 bp, probe
gaatcttgcccgtttatgtatgctc

SEQ ID NO: 34617 - DNA, 25 bp, probe
ccctgtgtctttcatacctctacat

SEQ ID NO: 34618 - DNA, 25 bp, probe
ctgaatcttgcccgtttatgtatgc

SEQ ID NO: 34619 - DNA, 25 bp, probe
ctcccgtagcacactataacatctg

SEQ ID NO: 34620 - DNA, 25 bp, probe
cctgtgtctttcatacctctacatg

SEQ ID NO: 34621 - DNA, 25 bp, probe
tgaatcttgcccgtttatgtatgct

SEQ ID NO: 34622 - DNA, 25 bp, probe
ggactgaatcttgcccgtttatgta

SEQ ID NO: 34623 - DNA, 25 bp, probe
gatgtctgctcctcctcttgaactt

SEQ ID NO: 34624 - DNA, 25 bp, probe
caggaagttgctccaagaacagtag

SEQ ID NO: 34625 - DNA, 25 bp, probe
cccgtttatgtatgctccatgtcta

SEQ ID NO: 34626 - DNA, 25 bp, probe
aactttcctaagaaaccgctgataa

SEQ ID NO: 34627 - DNA, 25 bp, probe
agctcaataaatgtttgttgcatga

SEQ ID NO: 34628 - DNA, 25 bp, probe
gctcaataaatgtttgttgcatgaa

SEQ ID NO: 34629 - DNA, 25 bp, probe
gaactttcctaagaaaccgctgata

SEQ ID NO: 34630 - DNA, 25 bp, probe
atgtctgctcctcctcttgaacttg

SEQ ID NO: 34631 - DNA, 25 bp, probe
tctcccttcccaactagactgtaag

SEQ ID NO: 34632 - DNA, 25 bp, probe
actttcctaagaaaccgctgataac

SEQ ID NO: 34633 - DNA, 25 bp, probe
tcaggaagttgctccaagaacagta

SEQ ID NO: 34634 - DNA, 25 bp, probe
ttagaaccctgctcagacaccatta

SEQ ID NO: 34635 - DNA, 25 bp, probe
ttcctaagaaaccgctgataaccag

SEQ ID NO: 34636 - DNA, 25 bp, probe
gatatttcctcagcctgaaagtttc

SEQ ID NO: 34637 - DNA, 25 bp, probe
agatatttcctcagcctgaaagttt

SEQ ID NO: 34638 - DNA, 25 bp, probe
gagatatttcctcagcctgaaagtt

SEQ ID NO: 34639 - DNA, 25 bp, probe
aaccatctgccagagaactcctatg

SEQ ID NO: 34640 - DNA, 25 bp, probe
caaccatctgccagagaactcctat

SEQ ID NO: 34641 - DNA, 25 bp, probe
aatcttgcccgtttatgtatgctcc

SEQ ID NO: 34642 - DNA, 25 bp, probe
ctcccttcccaactagactgtaagt

SEQ ID NO: 34643 - DNA, 25 bp, probe
atatttcctcagcctgaaagtttcc

SEQ ID NO: 34644 - DNA, 25 bp, probe
cctctacatgtctgcttgagatatt

SEQ ID NO: 34645 - DNA, 25 bp, probe
ctttcctaagaaaccgctgataacc

SEQ ID NO: 34646 - DNA, 25 bp, probe
catttgtgtctcccttcccaactag

SEQ ID NO: 34647 - DNA, 25 bp, probe
tacctctacatgtctgcttgagata

SEQ ID NO: 34648 - DNA, 25 bp, probe
ctgccctgtgtctttcatacctcta

SEQ ID NO: 34649 - DNA, 25 bp, probe
acctctacatgtctgcttgagatat

SEQ ID NO: 34650 - DNA, 25 bp, probe
atacctctacatgtctgcttgagat

SEQ ID NO: 34651 - DNA, 25 bp, probe
atttgtgtctcccttcccaactaga

SEQ ID NO: 34652 - DNA, 25 bp, probe
ttcatacctctacatgtctgcttga

SEQ ID NO: 34653 - DNA, 25 bp, probe
tcccttcccaactagactgtaagtg

SEQ ID NO: 34654 - DNA, 25 bp, probe
gtttatgtatgctccatgtctagcc

SEQ ID NO: 34655 - DNA, 25 bp, probe
tgccctgtgtctttcatacctctac

SEQ ID NO: 34656 - DNA, 25 bp, probe
ctaagaaaccgctgataaccaggac

SEQ ID NO: 34657 - DNA, 25 bp, probe
ccacttcataccacattcacatctg

SEQ ID NO: 34658 - DNA, 25 bp, probe
gaagaagattctgtgactcatggaa

SEQ ID NO: 34659 - DNA, 25 bp, probe
aactgttcttcatcattgacactgg

SEQ ID NO: 34660 - DNA, 25 bp, probe
ctgttcttcatcattgacactggag

SEQ ID NO: 34661 - DNA, 25 bp, probe
tgttcttcatcattgacactggaga

SEQ ID NO: 34662 - DNA, 25 bp, probe
tgactccagctatcaggtattaagt

SEQ ID NO: 34663 - DNA, 25 bp, probe
actgttcttcatcattgacactgga

SEQ ID NO: 34664 - DNA, 25 bp, probe
ggatgaataaattgaggcacagaaa

SEQ ID NO: 34665 - DNA, 25 bp, probe
tgaggcacagaaagattaagttacc

SEQ ID NO: 34666 - DNA, 25 bp, probe
ttgaggcacagaaagattaagttac

SEQ ID NO: 34667 - DNA, 25 bp, probe
actccagctatcaggtattaagtcc

SEQ ID NO: 34668 - DNA, 25 bp, probe
tggatgaataaattgaggcacagaa

SEQ ID NO: 34669 - DNA, 25 bp, probe
aattgaggcacagaaagattaagtt

SEQ ID NO: 34670 - DNA, 25 bp, probe
aaattgaggcacagaaagattaagt

SEQ ID NO: 34671 - DNA, 25 bp, probe
cacttcataccacattcacatctgg

SEQ ID NO: 34672 - DNA, 25 bp, probe
tgaataaattgaggcacagaaagat

SEQ ID NO: 34673 - DNA, 25 bp, probe
atgaataaattgaggcacagaaaga

SEQ ID NO: 34674 - DNA, 25 bp, probe
ctgaactattagcacgtcactagag

SEQ ID NO: 34675 - DNA, 25 bp, probe
cagatgccaaagataggagaaagtg

SEQ ID NO: 34676 - DNA, 25 bp, probe
gatgaataaattgaggcacagaaag

SEQ ID NO: 34677 - DNA, 25 bp, probe
tgaactattagcacgtcactagaga

SEQ ID NO: 34678 - DNA, 25 bp, probe
attgaggcacagaaagattaagtta

SEQ ID NO: 34679 - DNA, 25 bp, probe
tcttcatcattgacactggagaaag

SEQ ID NO: 34680 - DNA, 25 bp, probe
gaggcacagaaagattaagttaccg

SEQ ID NO: 34681 - DNA, 25 bp, probe
gttcttcatcattgacactggagaa

SEQ ID NO: 34682 - DNA, 25 bp, probe
aaactgttcttcatcattgacactg

SEQ ID NO: 34683 - DNA, 25 bp, probe
gaactattagcacgtcactagagac

SEQ ID NO: 34684 - DNA, 25 bp, probe
aactattagcacgtcactagagact

SEQ ID NO: 34685 - DNA, 25 bp, probe
aagaagaagattctgtgactcatgg

SEQ ID NO: 34686 - DNA, 25 bp, probe
gaagattctgtgactcatggaaatg

SEQ ID NO: 34687 - DNA, 25 bp, probe
cctgaactattagcacgtcactaga

SEQ ID NO: 34688 - DNA, 25 bp, probe
gaataaattgaggcacagaaagatt

SEQ ID NO: 34689 - DNA, 25 bp, probe
agaagattctgtgactcatggaaat

SEQ ID NO: 34690 - DNA, 25 bp, probe
aagaagattctgtgactcatggaaa

SEQ ID NO: 34691 - DNA, 25 bp, probe
cttcatcattgacactggagaaagg

SEQ ID NO: 34692 - DNA, 25 bp, probe
agaagaagattctgtgactcatgga

SEQ ID NO: 34693 - DNA, 25 bp, probe
tttgtggatgaataaattgaggcac

SEQ ID NO: 34694 - DNA, 25 bp, probe
actattagcacgtcactagagactg

SEQ ID NO: 34695 - DNA, 25 bp, probe
acctgaactattagcacgtcactag

SEQ ID NO: 34696 - DNA, 25 bp, probe
ccagatgccaaagataggagaaagt

SEQ ID NO: 34697 - DNA, 25 bp, probe
agaaataggatctcactatgttgcc

SEQ ID NO: 34698 - DNA, 25 bp, probe
taaactgttcttcatcattgacact

SEQ ID NO: 34699 - DNA, 25 bp, probe
cccacttcataccacattcacatct

SEQ ID NO: 34700 - DNA, 25 bp, probe
gaaataggatctcactatgttgccc

SEQ ID NO: 34701 - DNA, 25 bp, probe
cttaatggtgatgatggtggtgatg

SEQ ID NO: 34702 - DNA, 25 bp, probe
ccttaatggtgatgatggtggtgat

SEQ ID NO: 34703 - DNA, 25 bp, probe
ttaatggtgatgatggtggtgatgg

SEQ ID NO: 34704 - DNA, 25 bp, probe
ctatggctttctctcagacaacttc

SEQ ID NO: 34705 - DNA, 25 bp, probe
tctatggctttctctcagacaactt

SEQ ID NO: 34706 - DNA, 25 bp, probe
tatggctttctctcagacaacttca

SEQ ID NO: 34707 - DNA, 25 bp, probe
ctctatggctttctctcagacaact

SEQ ID NO: 34708 - DNA, 25 bp, probe
taatggtgatgatggtggtgatggt

SEQ ID NO: 34709 - DNA, 25 bp, probe
catcctctatggctttctctcagac

SEQ ID NO: 34710 - DNA, 25 bp, probe
atggctttctctcagacaacttcaa

SEQ ID NO: 34711 - DNA, 25 bp, probe
atcctctatggctttctctcagaca

SEQ ID NO: 34712 - DNA, 25 bp, probe
cctctatggctttctctcagacaac

SEQ ID NO: 34713 - DNA, 25 bp, probe
tcctctatggctttctctcagacaa

SEQ ID NO: 34714 - DNA, 25 bp, probe
tggctttctctcagacaacttcaag

SEQ ID NO: 34715 - DNA, 25 bp, probe
gctacgtgctcatcattgctaagat

SEQ ID NO: 34716 - DNA, 25 bp, probe
accttaatggtgatgatggtggtga

SEQ ID NO: 34717 - DNA, 25 bp, probe
ctacgtgctcatcattgctaagatg

SEQ ID NO: 34718 - DNA, 25 bp, probe
gatgatggtggtgatggtgtttgtc

SEQ ID NO: 34719 - DNA, 25 bp, probe
gtacacatttctcatgggcttcctg

SEQ ID NO: 34720 - DNA, 25 bp, probe
aatggtgatgatggtggtgatggtg

SEQ ID NO: 34721 - DNA, 25 bp, probe
gtgctacgtgctcatcattgctaag

SEQ ID NO: 34722 - DNA, 25 bp, probe
tgctacgtgctcatcattgctaaga

SEQ ID NO: 34723 - DNA, 25 bp, probe
gtgatgatggtggtgatggtgtttg

SEQ ID NO: 34724 - DNA, 25 bp, probe
tgatgatggtggtgatggtgtttgt

SEQ ID NO: 34725 - DNA, 25 bp, probe
gttgtacacatttctcatgggcttc

SEQ ID NO: 34726 - DNA, 25 bp, probe
gaagacttccaacctgagaacctgg

SEQ ID NO: 34727 - DNA, 25 bp, probe
tgtgctacgtgctcatcattgctaa

SEQ ID NO: 34728 - DNA, 25 bp, probe
tacgtgctcatcattgctaagatgc

SEQ ID NO: 34729 - DNA, 25 bp, probe
tgatggtggtgatggtgtttgtcat

SEQ ID NO: 34730 - DNA, 25 bp, probe
atgatggtggtgatggtgtttgtca

SEQ ID NO: 34731 - DNA, 25 bp, probe
ttgtacacatttctcatgggcttcc

SEQ ID NO: 34732 - DNA, 25 bp, probe
tgttgtacacatttctcatgggctt

SEQ ID NO: 34733 - DNA, 25 bp, probe
ttgtcatctgctggatgcctttcta

SEQ ID NO: 34734 - DNA, 25 bp, probe
tacacatttctcatgggcttcctgc

SEQ ID NO: 34735 - DNA, 25 bp, probe
ccatcctctatggctttctctcaga

SEQ ID NO: 34736 - DNA, 25 bp, probe
gatggtggtgatggtgtttgtcatc

SEQ ID NO: 34737 - DNA, 25 bp, probe
gatggtgtttgtcatctgctggatg

SEQ ID NO: 34738 - DNA, 25 bp, probe
tgtacacatttctcatgggcttcct

SEQ ID NO: 34739 - DNA, 25 bp, probe
tgatggtgtttgtcatctgctggat

SEQ ID NO: 34740 - DNA, 25 bp, probe
atggtggtgatggtgtttgtcatct

SEQ ID NO: 34741 - DNA, 25 bp, probe
tgtcatctgctggatgcctttctac

SEQ ID NO: 34742 - DNA, 25 bp, probe
gtttgtcatctgctggatgcctttc

SEQ ID NO: 34743 - DNA, 25 bp, probe
cttcgtgttgtacacatttctcatg

SEQ ID NO: 34744 - DNA, 25 bp, probe
tttgtcatctgctggatgcctttct

SEQ ID NO: 34745 - DNA, 25 bp, probe
cctatcctatatgccttcttgtctg

SEQ ID NO: 34746 - DNA, 25 bp, probe
ctatcctatatgccttcttgtctga

SEQ ID NO: 34747 - DNA, 25 bp, probe
tatcctatatgccttcttgtctgac

SEQ ID NO: 34748 - DNA, 25 bp, probe
tctaagaggaagaagtctgagaaga

SEQ ID NO: 34749 - DNA, 25 bp, probe
taagaggaagaagtctgagaagaag

SEQ ID NO: 34750 - DNA, 25 bp, probe
ctaagaggaagaagtctgagaagaa

SEQ ID NO: 34751 - DNA, 25 bp, probe
ttgctacctgttcattatcatcaag

SEQ ID NO: 34752 - DNA, 25 bp, probe
aagaggaagaagtctgagaagaagg

SEQ ID NO: 34753 - DNA, 25 bp, probe
attatcatcaaggtgaagtcctctg

SEQ ID NO: 34754 - DNA, 25 bp, probe
cattatcatcaaggtgaagtcctct

SEQ ID NO: 34755 - DNA, 25 bp, probe
tcattatcatcaaggtgaagtcctc

SEQ ID NO: 34756 - DNA, 25 bp, probe
gaggaagaagtctgagaagaaggtc

SEQ ID NO: 34757 - DNA, 25 bp, probe
tgctacctgttcattatcatcaagg

SEQ ID NO: 34758 - DNA, 25 bp, probe
ctctaagaggaagaagtctgagaag

SEQ ID NO: 34759 - DNA, 25 bp, probe
agaggaagaagtctgagaagaaggt

SEQ ID NO: 34760 - DNA, 25 bp, probe
tgtctttgctacctgttcattatca

SEQ ID NO: 34761 - DNA, 25 bp, probe
tctgtctttgctacctgttcattat

SEQ ID NO: 34762 - DNA, 25 bp, probe
atctgtctttgctacctgttcatta

SEQ ID NO: 34763 - DNA, 25 bp, probe
agggttcatcatctacactttcatt

SEQ ID NO: 34764 - DNA, 25 bp, probe
ttatcatcaaggtgaagtcctctgg

SEQ ID NO: 34765 - DNA, 25 bp, probe
ctgtctttgctacctgttcattatc

SEQ ID NO: 34766 - DNA, 25 bp, probe
tcatcatctacactttcattctggg

SEQ ID NO: 34767 - DNA, 25 bp, probe
gggttcatcatctacactttcattc

SEQ ID NO: 34768 - DNA, 25 bp, probe
aacttcaagaagagcttccagaatg

SEQ ID NO: 34769 - DNA, 25 bp, probe
caacttcaagaagagcttccagaat

SEQ ID NO: 34770 - DNA, 25 bp, probe
atcctatatgccttcttgtctgaca

SEQ ID NO: 34771 - DNA, 25 bp, probe
cagggttcatcatctacactttcat

SEQ ID NO: 34772 - DNA, 25 bp, probe
aaccctatcctatatgccttcttgt

SEQ ID NO: 34773 - DNA, 25 bp, probe
ggaagaagtctgagaagaaggtcac

SEQ ID NO: 34774 - DNA, 25 bp, probe
aggaagaagtctgagaagaaggtca

SEQ ID NO: 34775 - DNA, 25 bp, probe
ctttgctacctgttcattatcatca

SEQ ID NO: 34776 - DNA, 25 bp, probe
gtctttgctacctgttcattatcat

SEQ ID NO: 34777 - DNA, 25 bp, probe
ccctatcctatatgccttcttgtct

SEQ ID NO: 34778 - DNA, 25 bp, probe
tctttgctacctgttcattatcatc

SEQ ID NO: 34779 - DNA, 25 bp, probe
tacacagggttcatcatctacactt

SEQ ID NO: 34780 - DNA, 25 bp, probe
cttcaagaagagcttccagaatgtc

SEQ ID NO: 34781 - DNA, 25 bp, probe
accctatcctatatgccttcttgtc

SEQ ID NO: 34782 - DNA, 25 bp, probe
ttcatcatctacactttcattctgg

SEQ ID NO: 34783 - DNA, 25 bp, probe
ggttcatcatctacactttcattct

SEQ ID NO: 34784 - DNA, 25 bp, probe
ctggcttcccttctacatattcaac

SEQ ID NO: 34785 - DNA, 25 bp, probe
gaagaagtctgagaagaaggtcacc

SEQ ID NO: 34786 - DNA, 25 bp, probe
catctgtctttgctacctgttcatt

SEQ ID NO: 34787 - DNA, 25 bp, probe
caaccctatcctatatgccttcttg

SEQ ID NO: 34788 - DNA, 25 bp, probe
cacagggttcatcatctacactttc

SEQ ID NO: 34789 - DNA, 25 bp, probe
catcatctactgctgtctcaaccac

SEQ ID NO: 34790 - DNA, 25 bp, probe
ccaagaagaagtttgtgaagaccat

SEQ ID NO: 34791 - DNA, 25 bp, probe
cacaagttcatccagcaagtctacc

SEQ ID NO: 34792 - DNA, 25 bp, probe
ccacaagttcatccagcaagtctac

SEQ ID NO: 34793 - DNA, 25 bp, probe
gtcacactaaggagactttgttcat

SEQ ID NO: 34794 - DNA, 25 bp, probe
caagaagaagtttgtgaagaccatg

SEQ ID NO: 34795 - DNA, 25 bp, probe
acaagttcatccagcaagtctacct

SEQ ID NO: 34796 - DNA, 25 bp, probe
ctatggtttgggtatggtttgcttg

SEQ ID NO: 34797 - DNA, 25 bp, probe
gacatctactgccacaagttcatcc

SEQ ID NO: 34798 - DNA, 25 bp, probe
ggacatctactgccacaagttcatc

SEQ ID NO: 34799 - DNA, 25 bp, probe
tcacactaaggagactttgttcatg

SEQ ID NO: 34800 - DNA, 25 bp, probe
atcatctactgctgtctcaaccaca

SEQ ID NO: 34801 - DNA, 25 bp, probe
caatcccatcatctactgctgtctc

SEQ ID NO: 34802 - DNA, 25 bp, probe
caagttcatccagcaagtctacctg

SEQ ID NO: 34803 - DNA, 25 bp, probe
tgtcacactaaggagactttgttca

SEQ ID NO: 34804 - DNA, 25 bp, probe
catctactgccacaagttcatccag

SEQ ID NO: 34805 - DNA, 25 bp, probe
aggacatctactgccacaagttcat

SEQ ID NO: 34806 - DNA, 25 bp, probe
gagagtcaacaggtgtcacactaag

SEQ ID NO: 34807 - DNA, 25 bp, probe
ccatcatctactgctgtctcaacca

SEQ ID NO: 34808 - DNA, 25 bp, probe
cacactaaggagactttgttcatgg

SEQ ID NO: 34809 - DNA, 25 bp, probe
atcccatcatctactgctgtctcaa

SEQ ID NO: 34810 - DNA, 25 bp, probe
aatcccatcatctactgctgtctca

SEQ ID NO: 34811 - DNA, 25 bp, probe
acatctactgccacaagttcatcca

SEQ ID NO: 34812 - DNA, 25 bp, probe
gtgtcacactaaggagactttgttc

SEQ ID NO: 34813 - DNA, 25 bp, probe
aacaggtgtcacactaaggagactt

SEQ ID NO: 34814 - DNA, 25 bp, probe
actaaggagactttgttcatggctg

SEQ ID NO: 34815 - DNA, 25 bp, probe
cactaaggagactttgttcatggct

SEQ ID NO: 34816 - DNA, 25 bp, probe
gaggacatctactgccacaagttca

SEQ ID NO: 34817 - DNA, 25 bp, probe
gctatggtttgggtatggtttgctt

SEQ ID NO: 34818 - DNA, 25 bp, probe
tcccatcatctactgctgtctcaac

SEQ ID NO: 34819 - DNA, 25 bp, probe
acactaaggagactttgttcatggc

SEQ ID NO: 34820 - DNA, 25 bp, probe
gccaagaagaagtttgtgaagacca

SEQ ID NO: 34821 - DNA, 25 bp, probe
ctaaggagactttgttcatggctgg

SEQ ID NO: 34822 - DNA, 25 bp, probe
caacaggtgtcacactaaggagact

SEQ ID NO: 34823 - DNA, 25 bp, probe
tcaacaggtgtcacactaaggagac

SEQ ID NO: 34824 - DNA, 25 bp, probe
gtcaacaggtgtcacactaaggaga

SEQ ID NO: 34825 - DNA, 25 bp, probe
agtcaacaggtgtcacactaaggag

SEQ ID NO: 34826 - DNA, 25 bp, probe
gagtcaacaggtgtcacactaagga

SEQ ID NO: 34827 - DNA, 25 bp, probe
agagtcaacaggtgtcacactaagg

SEQ ID NO: 34828 - DNA, 25 bp, probe
ggtgtcacactaaggagactttgtt

SEQ ID NO: 34829 - DNA, 25 bp, probe
tatggtttgggtatggtttgcttgc

SEQ ID NO: 34830 - DNA, 25 bp, probe
taccatgtacaatcccatcatctac

SEQ ID NO: 34831 - DNA, 25 bp, probe
ctctaccatgtacaatcccatcatc

SEQ ID NO: 34832 - DNA, 25 bp, probe
gccacaagttcatccagcaagtcta

SEQ ID NO: 34833 - DNA, 25 bp, probe
agaatgaggacagtgacgaactatt

SEQ ID NO: 34834 - DNA, 25 bp, probe
aagaatgaggacagtgacgaactat

SEQ ID NO: 34835 - DNA, 25 bp, probe
catctgtgtgactgtgctgatctac

SEQ ID NO: 34836 - DNA, 25 bp, probe
tccgaacaagatttatgagaaagtg

SEQ ID NO: 34837 - DNA, 25 bp, probe
atctgtgtgactgtgctgatctact

SEQ ID NO: 34838 - DNA, 25 bp, probe
gcatccgaacaagatttatgagaaa

SEQ ID NO: 34839 - DNA, 25 bp, probe
agcatccgaacaagatttatgagaa

SEQ ID NO: 34840 - DNA, 25 bp, probe
agagcatccgaacaagatttatgag

SEQ ID NO: 34841 - DNA, 25 bp, probe
gagcatccgaacaagatttatgaga

SEQ ID NO: 34842 - DNA, 25 bp, probe
gaagaagtttatccagcaggtctac

SEQ ID NO: 34843 - DNA, 25 bp, probe
gactcaaaccaaatcactgaacttt

SEQ ID NO: 34844 - DNA, 25 bp, probe
ctactactcaaccacagagaccatg

SEQ ID NO: 34845 - DNA, 25 bp, probe
cagagcatccgaacaagatttatga

SEQ ID NO: 34846 - DNA, 25 bp, probe
atctcaattcttccctatctttgcc

SEQ ID NO: 34847 - DNA, 25 bp, probe
tgaagaagtttatccagcaggtcta

SEQ ID NO: 34848 - DNA, 25 bp, probe
atccgaacaagatttatgagaaagt

SEQ ID NO: 34849 - DNA, 25 bp, probe
aatctcaattcttccctatctttgc

SEQ ID NO: 34850 - DNA, 25 bp, probe
gaatgaggacagtgacgaactattt

SEQ ID NO: 34851 - DNA, 25 bp, probe
tgactcaaaccaaatcactgaactt

SEQ ID NO: 34852 - DNA, 25 bp, probe
atctctacctgaagaagtttatcca

SEQ ID NO: 34853 - DNA, 25 bp, probe
ccgaacaagatttatgagaaagtgt

SEQ ID NO: 34854 - DNA, 25 bp, probe
catccgaacaagatttatgagaaag

SEQ ID NO: 34855 - DNA, 25 bp, probe
ctgtgtgactgtgctgatctacttc

SEQ ID NO: 34856 - DNA, 25 bp, probe
acatctgtgtgactgtgctgatcta

SEQ ID NO: 34857 - DNA, 25 bp, probe
ctcaattcttccctatctttgccac

SEQ ID NO: 34858 - DNA, 25 bp, probe
ctctacctgaagaagtttatccagc

SEQ ID NO: 34859 - DNA, 25 bp, probe
tctctacctgaagaagtttatccag

SEQ ID NO: 34860 - DNA, 25 bp, probe
ccagagcatccgaacaagatttatg

SEQ ID NO: 34861 - DNA, 25 bp, probe
tctcaattcttccctatctttgcca

SEQ ID NO: 34862 - DNA, 25 bp, probe
ctacctgaagaagtttatccagcag

SEQ ID NO: 34863 - DNA, 25 bp, probe
aaagaatgaggacagtgacgaacta

SEQ ID NO: 34864 - DNA, 25 bp, probe
tctacctgaagaagtttatccagca

SEQ ID NO: 34865 - DNA, 25 bp, probe
tctgtgtgactgtgctgatctactt

SEQ ID NO: 34866 - DNA, 25 bp, probe
aagaagtttatccagcaggtctacc

SEQ ID NO: 34867 - DNA, 25 bp, probe
ttatgagaaagtgtaccacatctgt

SEQ ID NO: 34868 - DNA, 25 bp, probe
gatctctacctgaagaagtttatcc

SEQ ID NO: 34869 - DNA, 25 bp, probe
gctactactcaaccacagagaccat

SEQ ID NO: 34870 - DNA, 25 bp, probe
gaacttcacctatgctgtccacaac

SEQ ID NO: 34871 - DNA, 25 bp, probe
tttatgagaaagtgtaccacatctg

SEQ ID NO: 34872 - DNA, 25 bp, probe
gcattcaatacagtggtgaacttca

SEQ ID NO: 34873 - DNA, 25 bp, probe
cttctcctccaatgtgctctcctag

SEQ ID NO: 34874 - DNA, 25 bp, probe
tgtgactgtgctgatctacttcctc

SEQ ID NO: 34875 - DNA, 25 bp, probe
ctgtcttcgccagtatctactccat

SEQ ID NO: 34876 - DNA, 25 bp, probe
acaagatttatgagaaagtgtacca

SEQ ID NO: 34877 - DNA, 25 bp, probe
ggtggacaggtatatggctattatt

SEQ ID NO: 34878 - DNA, 25 bp, probe
gtggacaggtatatggctattattg

SEQ ID NO: 34879 - DNA, 25 bp, probe
tggacaggtatatggctattattga

SEQ ID NO: 34880 - DNA, 25 bp, probe
ccatcatctactgctgtctgaataa

SEQ ID NO: 34881 - DNA, 25 bp, probe
cggtggacaggtatatggctattat

SEQ ID NO: 34882 - DNA, 25 bp, probe
atcgtcattatactggtgtactgtt

SEQ ID NO: 34883 - DNA, 25 bp, probe
tatcgtcattatactggtgtactgt

SEQ ID NO: 34884 - DNA, 25 bp, probe
ggacaggtatatggctattattgat

SEQ ID NO: 34885 - DNA, 25 bp, probe
ttatcgtcattatactggtgtactg

SEQ ID NO: 34886 - DNA, 25 bp, probe
tacaccattgttggaattactctct

SEQ ID NO: 34887 - DNA, 25 bp, probe
acatacaccattgttggaattactc

SEQ ID NO: 34888 - DNA, 25 bp, probe
acaggtatatggctattattgatcc

SEQ ID NO: 34889 - DNA, 25 bp, probe
acttcattctcactgcaatctatca

SEQ ID NO: 34890 - DNA, 25 bp, probe
tctcactgcaatctatcaacaacta

SEQ ID NO: 34891 - DNA, 25 bp, probe
tcattctcactgcaatctatcaaca

SEQ ID NO: 34892 - DNA, 25 bp, probe
catacaccattgttggaattactct

SEQ ID NO: 34893 - DNA, 25 bp, probe
ggtattacatacaccattgttggaa

SEQ ID NO: 34894 - DNA, 25 bp, probe
ttctcactgcaatctatcaacaact

SEQ ID NO: 34895 - DNA, 25 bp, probe
attctcactgcaatctatcaacaac

SEQ ID NO: 34896 - DNA, 25 bp, probe
cattctcactgcaatctatcaacaa

SEQ ID NO: 34897 - DNA, 25 bp, probe
acaccattgttggaattactctctg

SEQ ID NO: 34898 - DNA, 25 bp, probe
accctatacctctgtggatgaatat

SEQ ID NO: 34899 - DNA, 25 bp, probe
ttcattctcactgcaatctatcaac

SEQ ID NO: 34900 - DNA, 25 bp, probe
cccaaacaacatttcacttaccata

SEQ ID NO: 34901 - DNA, 25 bp, probe
cttcattctcactgcaatctatcaa

SEQ ID NO: 34902 - DNA, 25 bp, probe
atacaccattgttggaattactctc

SEQ ID NO: 34903 - DNA, 25 bp, probe
ctcactgcaatctatcaacaactaa

SEQ ID NO: 34904 - DNA, 25 bp, probe
cttccctcagtgtctttattccaaa

SEQ ID NO: 34905 - DNA, 25 bp, probe
ttctcctatttatcagtcctgtcct

SEQ ID NO: 34906 - DNA, 25 bp, probe
cccattctcctatttatcagtcctg

SEQ ID NO: 34907 - DNA, 25 bp, probe
ccattctcctatttatcagtcctgt

SEQ ID NO: 34908 - DNA, 25 bp, probe
tcccaaacaacatttcacttaccat

SEQ ID NO: 34909 - DNA, 25 bp, probe
gctgccctatcatatttacttcatt

SEQ ID NO: 34910 - DNA, 25 bp, probe
tctcctatttatcagtcctgtccta

SEQ ID NO: 34911 - DNA, 25 bp, probe
attctcctatttatcagtcctgtcc

SEQ ID NO: 34912 - DNA, 25 bp, probe
caccattgttggaattactctctgg

SEQ ID NO: 34913 - DNA, 25 bp, probe
aaggtcccaaacaacatttcactta

SEQ ID NO: 34914 - DNA, 25 bp, probe
tacttcattctcactgcaatctatc

SEQ ID NO: 34915 - DNA, 25 bp, probe
aagattgtcattggaagtatttgga

SEQ ID NO: 34916 - DNA, 25 bp, probe
tacatacaccattgttggaattact

SEQ ID NO: 34917 - DNA, 25 bp, probe
cagtcctgtcctatataccctctag

SEQ ID NO: 34918 - DNA, 25 bp, probe
tatcagtcctgtcctatataccctc

SEQ ID NO: 34919 - DNA, 25 bp, probe
tcagtcctgtcctatataccctcta

SEQ ID NO: 34920 - DNA, 25 bp, probe
agattgtcattggaagtatttggat

SEQ ID NO: 34921 - DNA, 25 bp, probe
ctttgaccctgaatttgacctactt

SEQ ID NO: 34922 - DNA, 25 bp, probe
tttgaccctgaatttgacctacttg

SEQ ID NO: 34923 - DNA, 25 bp, probe
ctctttgaccctgaatttgacctac

SEQ ID NO: 34924 - DNA, 25 bp, probe
tctttgaccctgaatttgacctact

SEQ ID NO: 34925 - DNA, 25 bp, probe
gtccagaaaggattgaatgtgaaac

SEQ ID NO: 34926 - DNA, 25 bp, probe
tgtccagaaaggattgaatgtgaaa

SEQ ID NO: 34927 - DNA, 25 bp, probe
cagaaaggattgaatgtgaaacggg

SEQ ID NO: 34928 - DNA, 25 bp, probe
ccagaaaggattgaatgtgaaacgg

SEQ ID NO: 34929 - DNA, 25 bp, probe
ctgtccagaaaggattgaatgtgaa

SEQ ID NO: 34930 - DNA, 25 bp, probe
gctctttgaccctgaatttgaccta

SEQ ID NO: 34931 - DNA, 25 bp, probe
tccagaaaggattgaatgtgaaacg

SEQ ID NO: 34932 - DNA, 25 bp, probe
catgctctttgaccctgaatttgac

SEQ ID NO: 34933 - DNA, 25 bp, probe
ctctgtccagaaaggattgaatgtg

SEQ ID NO: 34934 - DNA, 25 bp, probe
ttgaccctgaatttgacctacttgc

SEQ ID NO: 34935 - DNA, 25 bp, probe
tctgtccagaaaggattgaatgtga

SEQ ID NO: 34936 - DNA, 25 bp, probe
atgctctttgaccctgaatttgacc

SEQ ID NO: 34937 - DNA, 25 bp, probe
gaccctgaatttgacctacttgctg

SEQ ID NO: 34938 - DNA, 25 bp, probe
tcttgccaaaatatatctctgcctt

SEQ ID NO: 34939 - DNA, 25 bp, probe
ttcttgccaaaatatatctctgcct

SEQ ID NO: 34940 - DNA, 25 bp, probe
cttgccaaaatatatctctgccttt

SEQ ID NO: 34941 - DNA, 25 bp, probe
tttcttgccaaaatatatctctgcc

SEQ ID NO: 34942 - DNA, 25 bp, probe
tgaccctgaatttgacctacttgct

SEQ ID NO: 34943 - DNA, 25 bp, probe
gctctgtccagaaaggattgaatgt

SEQ ID NO: 34944 - DNA, 25 bp, probe
ccccttttcttgccaaaatatatct

SEQ ID NO: 34945 - DNA, 25 bp, probe
tgctctttgaccctgaatttgacct

SEQ ID NO: 34946 - DNA, 25 bp, probe
gtacagttgcttccttttgaacctc

SEQ ID NO: 34947 - DNA, 25 bp, probe
ttttcttgccaaaatatatctctgc

SEQ ID NO: 34948 - DNA, 25 bp, probe
cccttttcttgccaaaatatatctc

SEQ ID NO: 34949 - DNA, 25 bp, probe
ggctctgtccagaaaggattgaatg

SEQ ID NO: 34950 - DNA, 25 bp, probe
aggctctgtccagaaaggattgaat

SEQ ID NO: 34951 - DNA, 25 bp, probe
tacagttgcttccttttgaacctcc

SEQ ID NO: 34952 - DNA, 25 bp, probe
accctgaatttgacctacttgctgg

SEQ ID NO: 34953 - DNA, 25 bp, probe
agaaaggattgaatgtgaaacgggg

SEQ ID NO: 34954 - DNA, 25 bp, probe
ttgccaaaatatatctctgcctttg

SEQ ID NO: 34955 - DNA, 25 bp, probe
aaggctctgtccagaaaggattgaa

SEQ ID NO: 34956 - DNA, 25 bp, probe
ccttttcttgccaaaatatatctct

SEQ ID NO: 34957 - DNA, 25 bp, probe
aaaatatatctctgcctttggtttt

SEQ ID NO: 34958 - DNA, 25 bp, probe
gaaggctctgtccagaaaggattga

SEQ ID NO: 34959 - DNA, 25 bp, probe
aaatatatctctgcctttggtttta

SEQ ID NO: 34960 - DNA, 25 bp, probe
ttgcttccttttgaacctccaacag

SEQ ID NO: 34961 - DNA, 25 bp, probe
cagttgcttccttttgaacctccaa

SEQ ID NO: 34962 - DNA, 25 bp, probe
caaaatatatctctgcctttggttt

SEQ ID NO: 34963 - DNA, 25 bp, probe
aatatatctctgcctttggttttat

SEQ ID NO: 34964 - DNA, 25 bp, probe
cttttcttgccaaaatatatctctg

SEQ ID NO: 34965 - DNA, 25 bp, probe
gactctctgctacattcagttcttg

SEQ ID NO: 34966 - DNA, 25 bp, probe
ctctctgctacattcagttcttgtg

SEQ ID NO: 34967 - DNA, 25 bp, probe
ctctgctacattcagttcttgtgtc

SEQ ID NO: 34968 - DNA, 25 bp, probe
actctctgctacattcagttcttgt

SEQ ID NO: 34969 - DNA, 25 bp, probe
tctctgctacattcagttcttgtgt

SEQ ID NO: 34970 - DNA, 25 bp, probe
ttgtgtcgtttgtgaaagttcttaa

SEQ ID NO: 34971 - DNA, 25 bp, probe
ggactctctgctacattcagttctt

SEQ ID NO: 34972 - DNA, 25 bp, probe
cttgtgtcgtttgtgaaagttctta

SEQ ID NO: 34973 - DNA, 25 bp, probe
tgtgtcgtttgtgaaagttcttaac

SEQ ID NO: 34974 - DNA, 25 bp, probe
gtcgtttgtgaaagttcttaacctg

SEQ ID NO: 34975 - DNA, 25 bp, probe
gtgtcgtttgtgaaagttcttaacc

SEQ ID NO: 34976 - DNA, 25 bp, probe
tgtcgtttgtgaaagttcttaacct

SEQ ID NO: 34977 - DNA, 25 bp, probe
tcttgtgtcgtttgtgaaagttctt

SEQ ID NO: 34978 - DNA, 25 bp, probe
ttcttgtgtcgtttgtgaaagttct

SEQ ID NO: 34979 - DNA, 25 bp, probe
gttcttgtgtcgtttgtgaaagttc

SEQ ID NO: 34980 - DNA, 25 bp, probe
ctacattcagttcttgtgtcgtttg

SEQ ID NO: 34981 - DNA, 25 bp, probe
tgctacattcagttcttgtgtcgtt

SEQ ID NO: 34982 - DNA, 25 bp, probe
agttcttgtgtcgtttgtgaaagtt

SEQ ID NO: 34983 - DNA, 25 bp, probe
gaatcagaactgcacaatcaagagg

SEQ ID NO: 34984 - DNA, 25 bp, probe
ggaatcagaactgcacaatcaagag

SEQ ID NO: 34985 - DNA, 25 bp, probe
tacattcagttcttgtgtcgtttgt

SEQ ID NO: 34986 - DNA, 25 bp, probe
cgtgcttcaaatcacagtcatatta

SEQ ID NO: 34987 - DNA, 25 bp, probe
atttattcgtgcttcaaatcacagt

SEQ ID NO: 34988 - DNA, 25 bp, probe
tttattcgtgcttcaaatcacagtc

SEQ ID NO: 34989 - DNA, 25 bp, probe
tctgctacattcagttcttgtgtcg

SEQ ID NO: 34990 - DNA, 25 bp, probe
gatgttctgaggtttgctttggttt

SEQ ID NO: 34991 - DNA, 25 bp, probe
tttgatgttctgaggtttgctttgg

SEQ ID NO: 34992 - DNA, 25 bp, probe
tttatgtttgtccgatggagatttg

SEQ ID NO: 34993 - DNA, 25 bp, probe
tcgtttgtgaaagttcttaacctgc

SEQ ID NO: 34994 - DNA, 25 bp, probe
tcgtgcttcaaatcacagtcatatt

SEQ ID NO: 34995 - DNA, 25 bp, probe
ttcgtgcttcaaatcacagtcatat

SEQ ID NO: 34996 - DNA, 25 bp, probe
attcgtgcttcaaatcacagtcata

SEQ ID NO: 34997 - DNA, 25 bp, probe
tattcgtgcttcaaatcacagtcat

SEQ ID NO: 34998 - DNA, 25 bp, probe
tatgtttgtccgatggagatttgtt

SEQ ID NO: 34999 - DNA, 25 bp, probe
ttatgtttgtccgatggagatttgt

SEQ ID NO: 35000 - DNA, 25 bp, probe
ttattcgtgcttcaaatcacagtca

SEQ ID NO: 35001 - DNA, 25 bp, probe
tggaatcagaactgcacaatcaaga

SEQ ID NO: 35002 - DNA, 25 bp, probe
cagttcttgtgtcgtttgtgaaagt

SEQ ID NO: 35003 - DNA, 25 bp, probe
tcagttcttgtgtcgtttgtgaaag

SEQ ID NO: 35004 - DNA, 25 bp, probe
cattcagttcttgtgtcgtttgtga

SEQ ID NO: 35005 - DNA, 25 bp, probe
ctgctacattcagttcttgtgtcgt

SEQ ID NO: 35006 - DNA, 25 bp, probe
gctacattcagttcttgtgtcgttt

SEQ ID NO: 35007 - DNA, 25 bp, probe
tgcttcaaatcacagtcatattaaa

SEQ ID NO: 35008 - DNA, 25 bp, probe
atgtttgtccgatggagatttgttt

SEQ ID NO: 35009 - DNA, 25 bp, probe
gtctaataaactgggtttcaaccaa

SEQ ID NO: 35010 - DNA, 25 bp, probe
ggtctaataaactgggtttcaacca

SEQ ID NO: 35011 - DNA, 25 bp, probe
tctaataaactgggtttcaaccaaa

SEQ ID NO: 35012 - DNA, 25 bp, probe
ctaataaactgggtttcaaccaaaa

SEQ ID NO: 35013 - DNA, 25 bp, probe
ctgtgcaagagagatatgtggagaa

SEQ ID NO: 35014 - DNA, 25 bp, probe
tatctctgctcaccttccttggtat

SEQ ID NO: 35015 - DNA, 25 bp, probe
aataatgtgcatgactggagactgg

SEQ ID NO: 35016 - DNA, 25 bp, probe
ctatctctgctcaccttccttggta

SEQ ID NO: 35017 - DNA, 25 bp, probe
tatgggaacaataaaccagtaaagg

SEQ ID NO: 35018 - DNA, 25 bp, probe
atctcatcgacctggacttgtgtaa

SEQ ID NO: 35019 - DNA, 25 bp, probe
atgggaacaataaaccagtaaaggc

SEQ ID NO: 35020 - DNA, 25 bp, probe
cagtgtccgtggttgctaaagataa

SEQ ID NO: 35021 - DNA, 25 bp, probe
atctctgctcaccttccttggtatt

SEQ ID NO: 35022 - DNA, 25 bp, probe
aaataatgtgcatgactggagactg

SEQ ID NO: 35023 - DNA, 25 bp, probe
cgacggaaagaaccattatgacatg

SEQ ID NO: 35024 - DNA, 25 bp, probe
tacagcagctcatagaggtcttgaa

SEQ ID NO: 35025 - DNA, 25 bp, probe
tttcggagcaaaggaaattacatat

SEQ ID NO: 35026 - DNA, 25 bp, probe
gcaaaggaaattacatatgggaaca

SEQ ID NO: 35027 - DNA, 25 bp, probe
agcaaaggaaattacatatgggaac

SEQ ID NO: 35028 - DNA, 25 bp, probe
agtgtccgtggttgctaaagataac

SEQ ID NO: 35029 - DNA, 25 bp, probe
tgtgcaagagagatatgtggagaaa

SEQ ID NO: 35030 - DNA, 25 bp, probe
gagcaaaggaaattacatatgggaa

SEQ ID NO: 35031 - DNA, 25 bp, probe
ggagcaaaggaaattacatatggga

SEQ ID NO: 35032 - DNA, 25 bp, probe
ttcggagcaaaggaaattacatatg

SEQ ID NO: 35033 - DNA, 25 bp, probe
cattatgacatggagaccacagagc

SEQ ID NO: 35034 - DNA, 25 bp, probe
ctacagcagctcatagaggtcttga

SEQ ID NO: 35035 - DNA, 25 bp, probe
tcggagcaaaggaaattacatatgg

SEQ ID NO: 35036 - DNA, 25 bp, probe
ttgagatgctaccaactgccattct

SEQ ID NO: 35037 - DNA, 25 bp, probe
gcaagagagatatgtggagaaaatc

SEQ ID NO: 35038 - DNA, 25 bp, probe
gatctcatcgacctggacttgtgta

SEQ ID NO: 35039 - DNA, 25 bp, probe
cctgtgcaagagagatatgtggaga

SEQ ID NO: 35040 - DNA, 25 bp, probe
tacaccctcatctaccacaaaactt

SEQ ID NO: 35041 - DNA, 25 bp, probe
ccgacggaaagaaccattatgacat

SEQ ID NO: 35042 - DNA, 25 bp, probe
ataatgtgcatgactggagactggt

SEQ ID NO: 35043 - DNA, 25 bp, probe
gatcgcctccaagattggttctaac

SEQ ID NO: 35044 - DNA, 25 bp, probe
attatgacatggagaccacagagct

SEQ ID NO: 35045 - DNA, 25 bp, probe
cacctacaccctcatctaccacaaa

SEQ ID NO: 35046 - DNA, 25 bp, probe
ctggggatatatagaagagaaagcc

SEQ ID NO: 35047 - DNA, 25 bp, probe
ggctggggatatatagaagagaaag

SEQ ID NO: 35048 - DNA, 25 bp, probe
caagagagatatgtggagaaaatca

SEQ ID NO: 35049 - DNA, 25 bp, probe
cggagcaaaggaaattacatatggg

SEQ ID NO: 35050 - DNA, 25 bp, probe
tcatcgacctggacttgtgtaactc

SEQ ID NO: 35051 - DNA, 25 bp, probe
ctcatcgacctggacttgtgtaact

SEQ ID NO: 35052 - DNA, 25 bp, probe
tctcatcgacctggacttgtgtaac

SEQ ID NO: 35053 - DNA, 25 bp, probe
ctacaccctcatctaccacaaaact

SEQ ID NO: 35054 - DNA, 25 bp, probe
caaaggaaattacatatgggaacaa

SEQ ID NO: 35055 - DNA, 25 bp, probe
ctcctgatctgacctggttctcaac

SEQ ID NO: 35056 - DNA, 25 bp, probe
taatgtgcatgactggagactggtt

SEQ ID NO: 35057 - DNA, 25 bp, probe
accgagttctgtagattcttgttag

SEQ ID NO: 35058 - DNA, 25 bp, probe
gaccgagttctgtagattcttgtta

SEQ ID NO: 35059 - DNA, 25 bp, probe
attgaccgagttctgtagattcttg

SEQ ID NO: 35060 - DNA, 25 bp, probe
tattgaccgagttctgtagattctt

SEQ ID NO: 35061 - DNA, 25 bp, probe
ttattgaccgagttctgtagattct

SEQ ID NO: 35062 - DNA, 25 bp, probe
ccgagttctgtagattcttgttaga

SEQ ID NO: 35063 - DNA, 25 bp, probe
attattgaccgagttctgtagattc

SEQ ID NO: 35064 - DNA, 25 bp, probe
tgaccgagttctgtagattcttgtt

SEQ ID NO: 35065 - DNA, 25 bp, probe
ttgaccgagttctgtagattcttgt

SEQ ID NO: 35066 - DNA, 25 bp, probe
aattattgaccgagttctgtagatt

SEQ ID NO: 35067 - DNA, 25 bp, probe
ttcttgagacctcagatgtgtgttc

SEQ ID NO: 35068 - DNA, 25 bp, probe
aaattattgaccgagttctgtagat

SEQ ID NO: 35069 - DNA, 25 bp, probe
cttgagacctcagatgtgtgttcag

SEQ ID NO: 35070 - DNA, 25 bp, probe
taaattattgaccgagttctgtaga

SEQ ID NO: 35071 - DNA, 25 bp, probe
agctgctgttctaacctcagtaatg

SEQ ID NO: 35072 - DNA, 25 bp, probe
tcttgagacctcagatgtgtgttca

SEQ ID NO: 35073 - DNA, 25 bp, probe
tttcttgagacctcagatgtgtgtt

SEQ ID NO: 35074 - DNA, 25 bp, probe
tttatggaaagggctatgtgggaga

SEQ ID NO: 35075 - DNA, 25 bp, probe
ctatgtgggagagtcagctatcttg

SEQ ID NO: 35076 - DNA, 25 bp, probe
ttctaacctcagtaatgcatctacc

SEQ ID NO: 35077 - DNA, 25 bp, probe
tctaacctcagtaatgcatctacct

SEQ ID NO: 35078 - DNA, 25 bp, probe
ataaattattgaccgagttctgtag

SEQ ID NO: 35079 - DNA, 25 bp, probe
tgttctaacctcagtaatgcatcta

SEQ ID NO: 35080 - DNA, 25 bp, probe
gctgctgttctaacctcagtaatgc

SEQ ID NO: 35081 - DNA, 25 bp, probe
gttctaacctcagtaatgcatctac

SEQ ID NO: 35082 - DNA, 25 bp, probe
ttatggaaagggctatgtgggagag

SEQ ID NO: 35083 - DNA, 25 bp, probe
gcttaggaatgccctttatggaaag

SEQ ID NO: 35084 - DNA, 25 bp, probe
gctatcttgtctggttttcttgaga

SEQ ID NO: 35085 - DNA, 25 bp, probe
cctgtgtggaaatttggagaagttg

SEQ ID NO: 35086 - DNA, 25 bp, probe
tatgtgggagagtcagctatcttgt

SEQ ID NO: 35087 - DNA, 25 bp, probe
gagagtcagctatcttgtctggttt

SEQ ID NO: 35088 - DNA, 25 bp, probe
ggagagtcagctatcttgtctggtt

SEQ ID NO: 35089 - DNA, 25 bp, probe
ctgttctaacctcagtaatgcatct

SEQ ID NO: 35090 - DNA, 25 bp, probe
ctaacctcagtaatgcatctacctg

SEQ ID NO: 35091 - DNA, 25 bp, probe
agcttaggaatgccctttatggaaa

SEQ ID NO: 35092 - DNA, 25 bp, probe
ctgtgtggaaatttggagaagttgc

SEQ ID NO: 35093 - DNA, 25 bp, probe
aataaattattgaccgagttctgta

SEQ ID NO: 35094 - DNA, 25 bp, probe
taataaattattgaccgagttctgt

SEQ ID NO: 35095 - DNA, 25 bp, probe
ctttatggaaagggctatgtgggag

SEQ ID NO: 35096 - DNA, 25 bp, probe
gctgttctaacctcagtaatgcatc

SEQ ID NO: 35097 - DNA, 25 bp, probe
agctatcttgtctggttttcttgag

SEQ ID NO: 35098 - DNA, 25 bp, probe
ctgctgttctaacctcagtaatgca

SEQ ID NO: 35099 - DNA, 25 bp, probe
gagacctcagatgtgtgttcagcag

SEQ ID NO: 35100 - DNA, 25 bp, probe
actaataaattattgaccgagttct

SEQ ID NO: 35101 - DNA, 25 bp, probe
caggataacagagaatggtggtatt

SEQ ID NO: 35102 - DNA, 25 bp, probe
tcaggataacagagaatggtggtat

SEQ ID NO: 35103 - DNA, 25 bp, probe
atactcaggataacagagaatggtg

SEQ ID NO: 35104 - DNA, 25 bp, probe
catactcaggataacagagaatggt

SEQ ID NO: 35105 - DNA, 25 bp, probe
acatactcaggataacagagaatgg

SEQ ID NO: 35106 - DNA, 25 bp, probe
ttgacatactcaggataacagagaa

SEQ ID NO: 35107 - DNA, 25 bp, probe
ctcaggataacagagaatggtggta

SEQ ID NO: 35108 - DNA, 25 bp, probe
tactcaggataacagagaatggtgg

SEQ ID NO: 35109 - DNA, 25 bp, probe
tgacatactcaggataacagagaat

SEQ ID NO: 35110 - DNA, 25 bp, probe
attgacatactcaggataacagaga

SEQ ID NO: 35111 - DNA, 25 bp, probe
gacatactcaggataacagagaatg

SEQ ID NO: 35112 - DNA, 25 bp, probe
tattcagtggtccaggattctgtaa

SEQ ID NO: 35113 - DNA, 25 bp, probe
aatggcaagagatcatatcctcaga

SEQ ID NO: 35114 - DNA, 25 bp, probe
aattgacatactcaggataacagag

SEQ ID NO: 35115 - DNA, 25 bp, probe
attcagtggtccaggattctgtaat

SEQ ID NO: 35116 - DNA, 25 bp, probe
ggataacagagaatggtggtattca

SEQ ID NO: 35117 - DNA, 25 bp, probe
taacagagaatggtggtattcagtg

SEQ ID NO: 35118 - DNA, 25 bp, probe
aggataacagagaatggtggtattc

SEQ ID NO: 35119 - DNA, 25 bp, probe
gtattcagtggtccaggattctgta

SEQ ID NO: 35120 - DNA, 25 bp, probe
ataacagagaatggtggtattcagt

SEQ ID NO: 35121 - DNA, 25 bp, probe
atggcaagagatcatatcctcagac

SEQ ID NO: 35122 - DNA, 25 bp, probe
atatcctcagaccaggtggaattac

SEQ ID NO: 35123 - DNA, 25 bp, probe
catatcctcagaccaggtggaatta

SEQ ID NO: 35124 - DNA, 25 bp, probe
gataacagagaatggtggtattcag

SEQ ID NO: 35125 - DNA, 25 bp, probe
cctcagaccaggtggaattacttaa

SEQ ID NO: 35126 - DNA, 25 bp, probe
ctcagaccaggtggaattacttaaa

SEQ ID NO: 35127 - DNA, 25 bp, probe
tcagaccaggtggaattacttaaat

SEQ ID NO: 35128 - DNA, 25 bp, probe
caagagatcatatcctcagaccagg

SEQ ID NO: 35129 - DNA, 25 bp, probe
ttcagtggtccaggattctgtaatg

SEQ ID NO: 35130 - DNA, 25 bp, probe
gcaaacttggctctcaataaacttt

SEQ ID NO: 35131 - DNA, 25 bp, probe
gcaagagatcatatcctcagaccag

SEQ ID NO: 35132 - DNA, 25 bp, probe
aagagatcatatcctcagaccaggt

SEQ ID NO: 35133 - DNA, 25 bp, probe
tatcctcagaccaggtggaattact

SEQ ID NO: 35134 - DNA, 25 bp, probe
actcaggataacagagaatggtggt

SEQ ID NO: 35135 - DNA, 25 bp, probe
acctcaacattggagacatcacttg

SEQ ID NO: 35136 - DNA, 25 bp, probe
cacctcaacattggagacatcactt

SEQ ID NO: 35137 - DNA, 25 bp, probe
tcctcagaccaggtggaattactta

SEQ ID NO: 35138 - DNA, 25 bp, probe
taattgacatactcaggataacaga

SEQ ID NO: 35139 - DNA, 25 bp, probe
atcatatcctcagaccaggtggaat

SEQ ID NO: 35140 - DNA, 25 bp, probe
acataccttgttatatgcagacatg

SEQ ID NO: 35141 - DNA, 25 bp, probe
aaatggcaagagatcatatcctcag

SEQ ID NO: 35142 - DNA, 25 bp, probe
cagaccaggtggaattacttaaatt

SEQ ID NO: 35143 - DNA, 25 bp, probe
aacagagaatggtggtattcagtgg

SEQ ID NO: 35144 - DNA, 25 bp, probe
agagatcatatcctcagaccaggtg

SEQ ID NO: 35145 - DNA, 25 bp, probe
ggactatcaatgacttcagttacct

SEQ ID NO: 35146 - DNA, 25 bp, probe
actatcaatgacttcagttacctgc

SEQ ID NO: 35147 - DNA, 25 bp, probe
gactatcaatgacttcagttacctg

SEQ ID NO: 35148 - DNA, 25 bp, probe
gggactatcaatgacttcagttacc

SEQ ID NO: 35149 - DNA, 25 bp, probe
atcaatgacttcagttacctgcata

SEQ ID NO: 35150 - DNA, 25 bp, probe
tatcaatgacttcagttacctgcat

SEQ ID NO: 35151 - DNA, 25 bp, probe
cgggactatcaatgacttcagttac

SEQ ID NO: 35152 - DNA, 25 bp, probe
ctatcaatgacttcagttacctgca

SEQ ID NO: 35153 - DNA, 25 bp, probe
tcaatgacttcagttacctgcatac

SEQ ID NO: 35154 - DNA, 25 bp, probe
tagagacctacacagtgaactttgg

SEQ ID NO: 35155 - DNA, 25 bp, probe
cagtagagacctacacagtgaactt

SEQ ID NO: 35156 - DNA, 25 bp, probe
aacagtagagacctacacagtgaac

SEQ ID NO: 35157 - DNA, 25 bp, probe
caacagtagagacctacacagtgaa

SEQ ID NO: 35158 - DNA, 25 bp, probe
ttcacaacagtagagacctacacag

SEQ ID NO: 35159 - DNA, 25 bp, probe
cttcacaacagtagagacctacaca

SEQ ID NO: 35160 - DNA, 25 bp, probe
caagacctgcaatgttgactatgac

SEQ ID NO: 35161 - DNA, 25 bp, probe
gaggaggagaaagaggaggagatag

SEQ ID NO: 35162 - DNA, 25 bp, probe
caatgacttcagttacctgcatacc

SEQ ID NO: 35163 - DNA, 25 bp, probe
atgacttcagttacctgcataccaa

SEQ ID NO: 35164 - DNA, 25 bp, probe
aatgacttcagttacctgcatacca

SEQ ID NO: 35165 - DNA, 25 bp, probe
acagtagagacctacacagtgaact

SEQ ID NO: 35166 - DNA, 25 bp, probe
ccttcacaacagtagagacctacac

SEQ ID NO: 35167 - DNA, 25 bp, probe
aagacctgcaatgttgactatgaca

SEQ ID NO: 35168 - DNA, 25 bp, probe
cacaacagtagagacctacacagtg

SEQ ID NO: 35169 - DNA, 25 bp, probe
acaacagtagagacctacacagtga

SEQ ID NO: 35170 - DNA, 25 bp, probe
tcacaacagtagagacctacacagt

SEQ ID NO: 35171 - DNA, 25 bp, probe
ccatctctgtgagtggcattaatca

SEQ ID NO: 35172 - DNA, 25 bp, probe
accatctctgtgagtggcattaatc

SEQ ID NO: 35173 - DNA, 25 bp, probe
tggtgattactggcgaatcttgaac

SEQ ID NO: 35174 - DNA, 25 bp, probe
gtggtgattactggcgaatcttgaa

SEQ ID NO: 35175 - DNA, 25 bp, probe
ccaagacctgcaatgttgactatga

SEQ ID NO: 35176 - DNA, 25 bp, probe
caccatctctgtgagtggcattaat

SEQ ID NO: 35177 - DNA, 25 bp, probe
tgacttcagttacctgcataccaac

SEQ ID NO: 35178 - DNA, 25 bp, probe
gtagagacctacacagtgaactttg

SEQ ID NO: 35179 - DNA, 25 bp, probe
agtagagacctacacagtgaacttt

SEQ ID NO: 35180 - DNA, 25 bp, probe
ggaggaggagaaagaggaggagata

SEQ ID NO: 35181 - DNA, 25 bp, probe
gagaaagaggaggagatagccactg

SEQ ID NO: 35182 - DNA, 25 bp, probe
gacctgcaatgttgactatgacatc

SEQ ID NO: 35183 - DNA, 25 bp, probe
ggtgattactggcgaatcttgaacc

SEQ ID NO: 35184 - DNA, 25 bp, probe
agacctgcaatgttgactatgacat

SEQ ID NO: 35185 - DNA, 25 bp, probe
agagacctacacagtgaactttggg

SEQ ID NO: 35186 - DNA, 25 bp, probe
gacttcagttacctgcataccaact

SEQ ID NO: 35187 - DNA, 25 bp, probe
aggaggagaaagaggaggagatagc

SEQ ID NO: 35188 - DNA, 25 bp, probe
ccaaggtcactccaataaaacaagc

SEQ ID NO: 35189 - DNA, 25 bp, probe
ctaccatcatcagcattaccaacaa

SEQ ID NO: 35190 - DNA, 25 bp, probe
ctctaccatcatcagcattaccaac

SEQ ID NO: 35191 - DNA, 25 bp, probe
taccatcatcagcattaccaacaac

SEQ ID NO: 35192 - DNA, 25 bp, probe
tctaccatcatcagcattaccaaca

SEQ ID NO: 35193 - DNA, 25 bp, probe
cctctaccatcatcagcattaccaa

SEQ ID NO: 35194 - DNA, 25 bp, probe
tcctgattgaagagagacagtacat

SEQ ID NO: 35195 - DNA, 25 bp, probe
ttcctgattgaagagagacagtaca

SEQ ID NO: 35196 - DNA, 25 bp, probe
cctgattgaagagagacagtacatg

SEQ ID NO: 35197 - DNA, 25 bp, probe
cacctctaccatcatcagcattacc

SEQ ID NO: 35198 - DNA, 25 bp, probe
ccacctctaccatcatcagcattac

SEQ ID NO: 35199 - DNA, 25 bp, probe
ctgattgaagagagacagtacatgc

SEQ ID NO: 35200 - DNA, 25 bp, probe
catgaagaactacctgaagaagcag

SEQ ID NO: 35201 - DNA, 25 bp, probe
tgattgaagagagacagtacatgcc

SEQ ID NO: 35202 - DNA, 25 bp, probe
acctctaccatcatcagcattacca

SEQ ID NO: 35203 - DNA, 25 bp, probe
tttccctaaagaccctaaatctgag

SEQ ID NO: 35204 - DNA, 25 bp, probe
ccatgaagaactacctgaagaagca

SEQ ID NO: 35205 - DNA, 25 bp, probe
ccctcttcattcacttcagaaataa

SEQ ID NO: 35206 - DNA, 25 bp, probe
aagaccctaaatctgaggaatcaac

SEQ ID NO: 35207 - DNA, 25 bp, probe
catcagcattaccaacaacgtcatt

SEQ ID NO: 35208 - DNA, 25 bp, probe
aaagaccctaaatctgaggaatcaa

SEQ ID NO: 35209 - DNA, 25 bp, probe
cctaaagaccctaaatctgaggaat

SEQ ID NO: 35210 - DNA, 25 bp, probe
gaccctaaatctgaggaatcaacag

SEQ ID NO: 35211 - DNA, 25 bp, probe
gtaccctctttcacctttccctaaa

SEQ ID NO: 35212 - DNA, 25 bp, probe
agaccctaaatctgaggaatcaaca

SEQ ID NO: 35213 - DNA, 25 bp, probe
taaagaccctaaatctgaggaatca

SEQ ID NO: 35214 - DNA, 25 bp, probe
cttcctgattgaagagagacagtac

SEQ ID NO: 35215 - DNA, 25 bp, probe
ccctaaagaccctaaatctgaggaa

SEQ ID NO: 35216 - DNA, 25 bp, probe
ttccctaaagaccctaaatctgagg

SEQ ID NO: 35217 - DNA, 25 bp, probe
atcagcattaccaacaacgtcattg

SEQ ID NO: 35218 - DNA, 25 bp, probe
cacttcagaaataataccaacaact

SEQ ID NO: 35219 - DNA, 25 bp, probe
tcacttcagaaataataccaacaac

SEQ ID NO: 35220 - DNA, 25 bp, probe
accatcatcagcattaccaacaacg

SEQ ID NO: 35221 - DNA, 25 bp, probe
cagaaataataccaacaactggagg

SEQ ID NO: 35222 - DNA, 25 bp, probe
catcatcagcattaccaacaacgtc

SEQ ID NO: 35223 - DNA, 25 bp, probe
aaataataccaacaactggagggag

SEQ ID NO: 35224 - DNA, 25 bp, probe
gaaataataccaacaactggaggga

SEQ ID NO: 35225 - DNA, 25 bp, probe
agaaataataccaacaactggaggg

SEQ ID NO: 35226 - DNA, 25 bp, probe
ctaaagaccctaaatctgaggaatc

SEQ ID NO: 35227 - DNA, 25 bp, probe
ataataccaacaactggagggagat

SEQ ID NO: 35228 - DNA, 25 bp, probe
aataataccaacaactggagggaga

SEQ ID NO: 35229 - DNA, 25 bp, probe
tcagaaataataccaacaactggag

SEQ ID NO: 35230 - DNA, 25 bp, probe
tcatcagcattaccaacaacgtcat

SEQ ID NO: 35231 - DNA, 25 bp, probe
atcatcagcattaccaacaacgtca

SEQ ID NO: 35232 - DNA, 25 bp, probe
accctaaatctgaggaatcaacagg

SEQ ID NO: 35233 - DNA, 25 bp, probe
catcatccaggagatcgtcaagtac

SEQ ID NO: 35234 - DNA, 25 bp, probe
ccatcatccaggagatcgtcaagta

SEQ ID NO: 35235 - DNA, 25 bp, probe
tattcaacaaccaggagaacgccat

SEQ ID NO: 35236 - DNA, 25 bp, probe
gaagaattccatcctcctgcacaag

SEQ ID NO: 35237 - DNA, 25 bp, probe
caagaagaattccatcctcctgcac

SEQ ID NO: 35238 - DNA, 25 bp, probe
catcggcaagaagaattccatcctc

SEQ ID NO: 35239 - DNA, 25 bp, probe
atcatccaggagatcgtcaagtacg

SEQ ID NO: 35240 - DNA, 25 bp, probe
gaggatcgttttctaagtgcaatac

SEQ ID NO: 35241 - DNA, 25 bp, probe
ggaggatcgttttctaagtgcaata

SEQ ID NO: 35242 - DNA, 25 bp, probe
agaagaattccatcctcctgcacaa

SEQ ID NO: 35243 - DNA, 25 bp, probe
aagaagaattccatcctcctgcaca

SEQ ID NO: 35244 - DNA, 25 bp, probe
aggatcgttttctaagtgcaatact

SEQ ID NO: 35245 - DNA, 25 bp, probe
aggaggatcgttttctaagtgcaat

SEQ ID NO: 35246 - DNA, 25 bp, probe
gaagccatagacgagacgtaggtag

SEQ ID NO: 35247 - DNA, 25 bp, probe
atcggcaagaagaattccatcctcc

SEQ ID NO: 35248 - DNA, 25 bp, probe
gaggaggatcgttttctaagtgcaa

SEQ ID NO: 35249 - DNA, 25 bp, probe
agaagccatagacgagacgtaggta

SEQ ID NO: 35250 - DNA, 25 bp, probe
atcgttttctaagtgcaatacttgg

SEQ ID NO: 35251 - DNA, 25 bp, probe
ggatcgttttctaagtgcaatactt

SEQ ID NO: 35252 - DNA, 25 bp, probe
gatcgttttctaagtgcaatacttg

SEQ ID NO: 35253 - DNA, 25 bp, probe
atagacgagacgtaggtagccgtag

SEQ ID NO: 35254 - DNA, 25 bp, probe
aagaattccatcctcctgcacaagg

SEQ ID NO: 35255 - DNA, 25 bp, probe
catagacgagacgtaggtagccgta

SEQ ID NO: 35256 - DNA, 25 bp, probe
tcgttttctaagtgcaatacttggc

SEQ ID NO: 35257 - DNA, 25 bp, probe
tccgaggaggatcgttttctaagtg

SEQ ID NO: 35258 - DNA, 25 bp, probe
gtccgaggaggatcgttttctaagt

SEQ ID NO: 35259 - DNA, 25 bp, probe
gcaagaagaattccatcctcctgca

SEQ ID NO: 35260 - DNA, 25 bp, probe
gttttctaagtgcaatacttggccc

SEQ ID NO: 35261 - DNA, 25 bp, probe
cgttttctaagtgcaatacttggcc

SEQ ID NO: 35262 - DNA, 25 bp, probe
cgtccgaggaggatcgttttctaag

SEQ ID NO: 35263 - DNA, 25 bp, probe
cgaggaggatcgttttctaagtgca

SEQ ID NO: 35264 - DNA, 25 bp, probe
ttttctaagtgcaatacttggcccg

SEQ ID NO: 35265 - DNA, 25 bp, probe
taaggaaactgtatgaatgtctgct

SEQ ID NO: 35266 - DNA, 25 bp, probe
ataaggaaactgtatgaatgtctgc

SEQ ID NO: 35267 - DNA, 25 bp, probe
aaggaaactgtatgaatgtctgctg

SEQ ID NO: 35268 - DNA, 25 bp, probe
aggaaactgtatgaatgtctgctgg

SEQ ID NO: 35269 - DNA, 25 bp, probe
ggaaactgtatgaatgtctgctggg

SEQ ID NO: 35270 - DNA, 25 bp, probe
gaaactgtatgaatgtctgctgggc

SEQ ID NO: 35271 - DNA, 25 bp, probe
aaactgtatgaatgtctgctgggca

SEQ ID NO: 35272 - DNA, 25 bp, probe
tctaggatttgaagtgaaatgcttt

SEQ ID NO: 35273 - DNA, 25 bp, probe
atctaggatttgaagtgaaatgctt

SEQ ID NO: 35274 - DNA, 25 bp, probe
gatctaggatttgaagtgaaatgct

SEQ ID NO: 35275 - DNA, 25 bp, probe
ggatttgaagtgaaatgctttaatg

SEQ ID NO: 35276 - DNA, 25 bp, probe
aggatttgaagtgaaatgctttaat

SEQ ID NO: 35277 - DNA, 25 bp, probe
tgaagtgaaatgctttaatgatctt

SEQ ID NO: 35278 - DNA, 25 bp, probe
ttgaagtgaaatgctttaatgatct

SEQ ID NO: 35279 - DNA, 25 bp, probe
ctaggatttgaagtgaaatgcttta

SEQ ID NO: 35280 - DNA, 25 bp, probe
taggatttgaagtgaaatgctttaa

SEQ ID NO: 35281 - DNA, 25 bp, probe
aattcatgaggtgtcaactgttagc

SEQ ID NO: 35282 - DNA, 25 bp, probe
tgatcttaaagcagaagaactactg

SEQ ID NO: 35283 - DNA, 25 bp, probe
tttgaagtgaaatgctttaatgatc

SEQ ID NO: 35284 - DNA, 25 bp, probe
gatttgaagtgaaatgctttaatga

SEQ ID NO: 35285 - DNA, 25 bp, probe
agaagaactactgctcaaaattcat

SEQ ID NO: 35286 - DNA, 25 bp, probe
cagatagagacaatcttacccgcag

SEQ ID NO: 35287 - DNA, 25 bp, probe
cagaagaactactgctcaaaattca

SEQ ID NO: 35288 - DNA, 25 bp, probe
atgatcttaaagcagaagaactact

SEQ ID NO: 35289 - DNA, 25 bp, probe
agatctaggatttgaagtgaaatgc

SEQ ID NO: 35290 - DNA, 25 bp, probe
gaagaactactgctcaaaattcatg

SEQ ID NO: 35291 - DNA, 25 bp, probe
atagagacaatcttacccgcaggtt

SEQ ID NO: 35292 - DNA, 25 bp, probe
atttgaagtgaaatgctttaatgat

SEQ ID NO: 35293 - DNA, 25 bp, probe
aaattcatgaggtgtcaactgttag

SEQ ID NO: 35294 - DNA, 25 bp, probe
attcatgaggtgtcaactgttagcc

SEQ ID NO: 35295 - DNA, 25 bp, probe
tagagacaatcttacccgcaggttt

SEQ ID NO: 35296 - DNA, 25 bp, probe
aatgatcttaaagcagaagaactac

SEQ ID NO: 35297 - DNA, 25 bp, probe
gaagtgaaatgctttaatgatctta

SEQ ID NO: 35298 - DNA, 25 bp, probe
gatagagacaatcttacccgcaggt

SEQ ID NO: 35299 - DNA, 25 bp, probe
cagatctaggatttgaagtgaaatg

SEQ ID NO: 35300 - DNA, 25 bp, probe
agatagagacaatcttacccgcagg

SEQ ID NO: 35301 - DNA, 25 bp, probe
tcagatctaggatttgaagtgaaat

SEQ ID NO: 35302 - DNA, 25 bp, probe
ttaatgatcttaaagcagaagaact

SEQ ID NO: 35303 - DNA, 25 bp, probe
aagtgaaatgctttaatgatcttaa

SEQ ID NO: 35304 - DNA, 25 bp, probe
gcagatagagacaatcttacccgca

SEQ ID NO: 35305 - DNA, 25 bp, probe
ttcatgaggtgtcaactgttagcca

SEQ ID NO: 35306 - DNA, 25 bp, probe
gcaggttttcagatctaggatttga

SEQ ID NO: 35307 - DNA, 25 bp, probe
ttcagatctaggatttgaagtgaaa

SEQ ID NO: 35308 - DNA, 25 bp, probe
tttcagatctaggatttgaagtgaa

SEQ ID NO: 35309 - DNA, 25 bp, probe
cgcaggttttcagatctaggatttg

SEQ ID NO: 35310 - DNA, 25 bp, probe
taatgatcttaaagcagaagaacta

SEQ ID NO: 35311 - DNA, 25 bp, probe
caaaattcatgaggtgtcaactgtt

SEQ ID NO: 35312 - DNA, 25 bp, probe
tttaatgatcttaaagcagaagaac

SEQ ID NO: 35313 - DNA, 25 bp, probe
aaaattcatgaggtgtcaactgtta

SEQ ID NO: 35314 - DNA, 25 bp, probe
tcaaaattcatgaggtgtcaactgt

SEQ ID NO: 35315 - DNA, 25 bp, probe
aagaactactgctcaaaattcatga

SEQ ID NO: 35316 - DNA, 25 bp, probe
tgagacagataagagaataccttgg

SEQ ID NO: 35317 - DNA, 25 bp, probe
gagacagataagagaataccttggt

SEQ ID NO: 35318 - DNA, 25 bp, probe
ggttgtcagatagtctatgtatgtg

SEQ ID NO: 35319 - DNA, 25 bp, probe
gctgagacagataagagaatacctt

SEQ ID NO: 35320 - DNA, 25 bp, probe
gacagataagagaataccttggtct

SEQ ID NO: 35321 - DNA, 25 bp, probe
agacagataagagaataccttggtc

SEQ ID NO: 35322 - DNA, 25 bp, probe
gttgtcagatagtctatgtatgtgt

SEQ ID NO: 35323 - DNA, 25 bp, probe
ctgagacagataagagaataccttg

SEQ ID NO: 35324 - DNA, 25 bp, probe
taagtgaggaagagtttatggcaaa

SEQ ID NO: 35325 - DNA, 25 bp, probe
tgaggaagagtttatggcaaagatt

SEQ ID NO: 35326 - DNA, 25 bp, probe
gaggaagagtttatggcaaagattt

SEQ ID NO: 35327 - DNA, 25 bp, probe
gtgaggaagagtttatggcaaagat

SEQ ID NO: 35328 - DNA, 25 bp, probe
ataagtgaggaagagtttatggcaa

SEQ ID NO: 35329 - DNA, 25 bp, probe
gagctgagacagataagagaatacc

SEQ ID NO: 35330 - DNA, 25 bp, probe
aagtgaggaagagtttatggcaaag

SEQ ID NO: 35331 - DNA, 25 bp, probe
agctgagacagataagagaatacct

SEQ ID NO: 35332 - DNA, 25 bp, probe
tcatttattcattgggttgtcagat

SEQ ID NO: 35333 - DNA, 25 bp, probe
atcatttattcattgggttgtcaga

SEQ ID NO: 35334 - DNA, 25 bp, probe
cattgggttgtcagatagtctatgt

SEQ ID NO: 35335 - DNA, 25 bp, probe
tcattgggttgtcagatagtctatg

SEQ ID NO: 35336 - DNA, 25 bp, probe
tgagctgagacagataagagaatac

SEQ ID NO: 35337 - DNA, 25 bp, probe
gtgagctgagacagataagagaata

SEQ ID NO: 35338 - DNA, 25 bp, probe
tataagtgaggaagagtttatggca

SEQ ID NO: 35339 - DNA, 25 bp, probe
attcattgggttgtcagatagtcta

SEQ ID NO: 35340 - DNA, 25 bp, probe
tattcattgggttgtcagatagtct

SEQ ID NO: 35341 - DNA, 25 bp, probe
agtgagctgagacagataagagaat

SEQ ID NO: 35342 - DNA, 25 bp, probe
ttattcattgggttgtcagatagtc

SEQ ID NO: 35343 - DNA, 25 bp, probe
gggttgtcagatagtctatgtatgt

SEQ ID NO: 35344 - DNA, 25 bp, probe
tgggttgtcagatagtctatgtatg

SEQ ID NO: 35345 - DNA, 25 bp, probe
cataagtaatcactaatgctcaaca

SEQ ID NO: 35346 - DNA, 25 bp, probe
acataagtaatcactaatgctcaac

SEQ ID NO: 35347 - DNA, 25 bp, probe
ttcattgggttgtcagatagtctat

SEQ ID NO: 35348 - DNA, 25 bp, probe
tcactaatgctcaacaatttatcca

SEQ ID NO: 35349 - DNA, 25 bp, probe
aagtaatcactaatgctcaacaatt

SEQ ID NO: 35350 - DNA, 25 bp, probe
gaataccttggtctcacctatcctg

SEQ ID NO: 35351 - DNA, 25 bp, probe
agaataccttggtctcacctatcct

SEQ ID NO: 35352 - DNA, 25 bp, probe
ctataagtgaggaagagtttatggc

SEQ ID NO: 35353 - DNA, 25 bp, probe
gagtgagctgagacagataagagaa

SEQ ID NO: 35354 - DNA, 25 bp, probe
tttattcattgggttgtcagatagt

SEQ ID NO: 35355 - DNA, 25 bp, probe
gctcaacaatttatccattcaatca

SEQ ID NO: 35356 - DNA, 25 bp, probe
tgctcaacaatttatccattcaatc

SEQ ID NO: 35357 - DNA, 25 bp, probe
ttgggttgtcagatagtctatgtat

SEQ ID NO: 35358 - DNA, 25 bp, probe
attgggttgtcagatagtctatgta

SEQ ID NO: 35359 - DNA, 25 bp, probe
gaacataagtaatcactaatgctca

SEQ ID NO: 35360 - DNA, 25 bp, probe
tatgaagtaagcaacaaggatgaca

SEQ ID NO: 35361 - DNA, 25 bp, probe
ctatgaagtaagcaacaaggatgac

SEQ ID NO: 35362 - DNA, 25 bp, probe
atcctgactgaagtgaactatgaag

SEQ ID NO: 35363 - DNA, 25 bp, probe
aagtaagcaacaaggatgacaagaa

SEQ ID NO: 35364 - DNA, 25 bp, probe
atgaagtaagcaacaaggatgacaa

SEQ ID NO: 35365 - DNA, 25 bp, probe
catcctgactgaagtgaactatgaa

SEQ ID NO: 35366 - DNA, 25 bp, probe
gaagtaagcaacaaggatgacaaga

SEQ ID NO: 35367 - DNA, 25 bp, probe
tgaagtaagcaacaaggatgacaag

SEQ ID NO: 35368 - DNA, 25 bp, probe
actatgaagtaagcaacaaggatga

SEQ ID NO: 35369 - DNA, 25 bp, probe
tgaactatgaagtaagcaacaagga

SEQ ID NO: 35370 - DNA, 25 bp, probe
gtgaactatgaagtaagcaacaagg

SEQ ID NO: 35371 - DNA, 25 bp, probe
actgaagtgaactatgaagtaagca

SEQ ID NO: 35372 - DNA, 25 bp, probe
cctgactgaagtgaactatgaagta

SEQ ID NO: 35373 - DNA, 25 bp, probe
gactgaagtgaactatgaagtaagc

SEQ ID NO: 35374 - DNA, 25 bp, probe
gatattctcaccatcctgactgaag

SEQ ID NO: 35375 - DNA, 25 bp, probe
aactatgaagtaagcaacaaggatg

SEQ ID NO: 35376 - DNA, 25 bp, probe
agtgaactatgaagtaagcaacaag

SEQ ID NO: 35377 - DNA, 25 bp, probe
gaagtgaactatgaagtaagcaaca

SEQ ID NO: 35378 - DNA, 25 bp, probe
tgaagtgaactatgaagtaagcaac

SEQ ID NO: 35379 - DNA, 25 bp, probe
atgatattctcaccatcctgactga

SEQ ID NO: 35380 - DNA, 25 bp, probe
gaactatgaagtaagcaacaaggat

SEQ ID NO: 35381 - DNA, 25 bp, probe
ctgaagtgaactatgaagtaagcaa

SEQ ID NO: 35382 - DNA, 25 bp, probe
atattctcaccatcctgactgaagt

SEQ ID NO: 35383 - DNA, 25 bp, probe
tgatattctcaccatcctgactgaa

SEQ ID NO: 35384 - DNA, 25 bp, probe
aagtgaactatgaagtaagcaacaa

SEQ ID NO: 35385 - DNA, 25 bp, probe
tcctgactgaagtgaactatgaagt

SEQ ID NO: 35386 - DNA, 25 bp, probe
gtatggtggctcatgtctataatcc

SEQ ID NO: 35387 - DNA, 25 bp, probe
ccatcctgactgaagtgaactatga

SEQ ID NO: 35388 - DNA, 25 bp, probe
cgtatggtggctcatgtctataatc

SEQ ID NO: 35389 - DNA, 25 bp, probe
tgactgaagtgaactatgaagtaag

SEQ ID NO: 35390 - DNA, 25 bp, probe
ctgactgaagtgaactatgaagtaa

SEQ ID NO: 35391 - DNA, 25 bp, probe
accatcctgactgaagtgaactatg

SEQ ID NO: 35392 - DNA, 25 bp, probe
ttaacaacaataacactgtctcctt

SEQ ID NO: 35393 - DNA, 25 bp, probe
attaacaacaataacactgtctcct

SEQ ID NO: 35394 - DNA, 25 bp, probe
ttgctttatgccttcttattgcttt

SEQ ID NO: 35395 - DNA, 25 bp, probe
aaacttgtcttcccttctgattgat

SEQ ID NO: 35396 - DNA, 25 bp, probe
cttgctttatgccttcttattgctt

SEQ ID NO: 35397 - DNA, 25 bp, probe
aacttgctttatgccttcttattgc

SEQ ID NO: 35398 - DNA, 25 bp, probe
ccaaacttgctttatgccttcttat

SEQ ID NO: 35399 - DNA, 25 bp, probe
tattctcaccatcctgactgaagtg

SEQ ID NO: 35400 - DNA, 25 bp, probe
atgcttggctaactatatttgcttt

SEQ ID NO: 35401 - DNA, 25 bp, probe
agtaagcaacaaggatgacaagaaa

SEQ ID NO: 35402 - DNA, 25 bp, probe
agagggcttatgattcagattgtta

SEQ ID NO: 35403 - DNA, 25 bp, probe
tagagggcttatgattcagattgtt

SEQ ID NO: 35404 - DNA, 25 bp, probe
gattaacctctgcactactgacatg

SEQ ID NO: 35405 - DNA, 25 bp, probe
tacacacaaaccagtatcgctcata

SEQ ID NO: 35406 - DNA, 25 bp, probe
acacaaaccagtatcgctcatagat

SEQ ID NO: 35407 - DNA, 25 bp, probe
caaaccagtatcgctcatagatcag

SEQ ID NO: 35408 - DNA, 25 bp, probe
ggattaacctctgcactactgacat

SEQ ID NO: 35409 - DNA, 25 bp, probe
cacaaaccagtatcgctcatagatc

SEQ ID NO: 35410 - DNA, 25 bp, probe
acaaaccagtatcgctcatagatca

SEQ ID NO: 35411 - DNA, 25 bp, probe
gttctcaggtgttgccaaatatgtc

SEQ ID NO: 35412 - DNA, 25 bp, probe
cacacaaaccagtatcgctcataga

SEQ ID NO: 35413 - DNA, 25 bp, probe
aaggttctcaggtgttgccaaatat

SEQ ID NO: 35414 - DNA, 25 bp, probe
acacacaaaccagtatcgctcatag

SEQ ID NO: 35415 - DNA, 25 bp, probe
ctacacacaaaccagtatcgctcat

SEQ ID NO: 35416 - DNA, 25 bp, probe
aaaggttctcaggtgttgccaaata

SEQ ID NO: 35417 - DNA, 25 bp, probe
ttctcaggtgttgccaaatatgtcc

SEQ ID NO: 35418 - DNA, 25 bp, probe
aggttctcaggtgttgccaaatatg

SEQ ID NO: 35419 - DNA, 25 bp, probe
tatgtcctggggtataaaactttcc

SEQ ID NO: 35420 - DNA, 25 bp, probe
ggttctcaggtgttgccaaatatgt

SEQ ID NO: 35421 - DNA, 25 bp, probe
attaacctctgcactactgacatgt

SEQ ID NO: 35422 - DNA, 25 bp, probe
tataaaactttcctcgcctgacaac

SEQ ID NO: 35423 - DNA, 25 bp, probe
gtataaaactttcctcgcctgacaa

SEQ ID NO: 35424 - DNA, 25 bp, probe
atgtcctggggtataaaactttcct

SEQ ID NO: 35425 - DNA, 25 bp, probe
cagtatcgctcatagatcagcaaac

SEQ ID NO: 35426 - DNA, 25 bp, probe
caaatatgtcctggggtataaaact

SEQ ID NO: 35427 - DNA, 25 bp, probe
atatgtcctggggtataaaactttc

SEQ ID NO: 35428 - DNA, 25 bp, probe
accagtatcgctcatagatcagcaa

SEQ ID NO: 35429 - DNA, 25 bp, probe
aaccagtatcgctcatagatcagca

SEQ ID NO: 35430 - DNA, 25 bp, probe
tgtcctggggtataaaactttcctc

SEQ ID NO: 35431 - DNA, 25 bp, probe
gattgacgacaagtgctgaacagtg

SEQ ID NO: 35432 - DNA, 25 bp, probe
cagattgacgacaagtgctgaacag

SEQ ID NO: 35433 - DNA, 25 bp, probe
agattgacgacaagtgctgaacagt

SEQ ID NO: 35434 - DNA, 25 bp, probe
aatatgtcctggggtataaaacttt

SEQ ID NO: 35435 - DNA, 25 bp, probe
aaatatgtcctggggtataaaactt

SEQ ID NO: 35436 - DNA, 25 bp, probe
gctgtaatctatgaattctaagtga

SEQ ID NO: 35437 - DNA, 25 bp, probe
agctgtaatctatgaattctaagtg

SEQ ID NO: 35438 - DNA, 25 bp, probe
agtatcgctcatagatcagcaaacc

SEQ ID NO: 35439 - DNA, 25 bp, probe
ccagtatcgctcatagatcagcaaa

SEQ ID NO: 35440 - DNA, 25 bp, probe
aaaccagtatcgctcatagatcagc

SEQ ID NO: 35441 - DNA, 25 bp, probe
ctcttagcagcttccagattgacga

SEQ ID NO: 35442 - DNA, 25 bp, probe
ttccagattgacgacaagtgctgaa

SEQ ID NO: 35443 - DNA, 25 bp, probe
ccaaatatgtcctggggtataaaac

SEQ ID NO: 35444 - DNA, 25 bp, probe
gccaaatatgtcctggggtataaaa

SEQ ID NO: 35445 - DNA, 25 bp, probe
gtggaggaagagggacagatgaatg

SEQ ID NO: 35446 - DNA, 25 bp, probe
ttagcagcttccagattgacgacaa

SEQ ID NO: 35447 - DNA, 25 bp, probe
ggtataaaactttcctcgcctgaca

SEQ ID NO: 35448 - DNA, 25 bp, probe
acaacttatgacacgaatggtagat

SEQ ID NO: 35449 - DNA, 25 bp, probe
attatgtggaagtggataggagaac

SEQ ID NO: 35450 - DNA, 25 bp, probe
tattcatatcaacagcaccattcct

SEQ ID NO: 35451 - DNA, 25 bp, probe
ttaccttggaactactggataatgg

SEQ ID NO: 35452 - DNA, 25 bp, probe
taccttggaactactggataatgga

SEQ ID NO: 35453 - DNA, 25 bp, probe
ttatgacacgaatggtagatacagt

SEQ ID NO: 35454 - DNA, 25 bp, probe
acttatgacacgaatggtagataca

SEQ ID NO: 35455 - DNA, 25 bp, probe
atattcatatcaacagcaccattcc

SEQ ID NO: 35456 - DNA, 25 bp, probe
cacaacttatgacacgaatggtaga

SEQ ID NO: 35457 - DNA, 25 bp, probe
cttatgacacgaatggtagatacag

SEQ ID NO: 35458 - DNA, 25 bp, probe
aattatgtggaagtggataggagaa

SEQ ID NO: 35459 - DNA, 25 bp, probe
tcaagtgaatactactgctctcatc

SEQ ID NO: 35460 - DNA, 25 bp, probe
caacttatgacacgaatggtagata

SEQ ID NO: 35461 - DNA, 25 bp, probe
accttggaactactggataatggag

SEQ ID NO: 35462 - DNA, 25 bp, probe
aacttatgacacgaatggtagatac

SEQ ID NO: 35463 - DNA, 25 bp, probe
ttcacaacttatgacacgaatggta

SEQ ID NO: 35464 - DNA, 25 bp, probe
gttaccttggaactactggataatg

SEQ ID NO: 35465 - DNA, 25 bp, probe
ttatgtggaagtggataggagaact

SEQ ID NO: 35466 - DNA, 25 bp, probe
cattgctattcaggctgttgataag

SEQ ID NO: 35467 - DNA, 25 bp, probe
caagtgaatactactgctctcatcc

SEQ ID NO: 35468 - DNA, 25 bp, probe
tcattgctattcaggctgttgataa

SEQ ID NO: 35469 - DNA, 25 bp, probe
ttcattgctattcaggctgttgata

SEQ ID NO: 35470 - DNA, 25 bp, probe
tcacaacttatgacacgaatggtag

SEQ ID NO: 35471 - DNA, 25 bp, probe
attgctattcaggctgttgataagg

SEQ ID NO: 35472 - DNA, 25 bp, probe
tatgtggaagtggataggagaactg

SEQ ID NO: 35473 - DNA, 25 bp, probe
cttggaactactggataatggagca

SEQ ID NO: 35474 - DNA, 25 bp, probe
cttcaagtgaatactactgctctca

SEQ ID NO: 35475 - DNA, 25 bp, probe
tcttcaagtgaatactactgctctc

SEQ ID NO: 35476 - DNA, 25 bp, probe
ctcttcaagtgaatactactgctct

SEQ ID NO: 35477 - DNA, 25 bp, probe
tctcttcaagtgaatactactgctc

SEQ ID NO: 35478 - DNA, 25 bp, probe
ttcaagtgaatactactgctctcat

SEQ ID NO: 35479 - DNA, 25 bp, probe
gtctgctccttgtcctaatattcat

SEQ ID NO: 35480 - DNA, 25 bp, probe
atctcttcaagtgaatactactgct

SEQ ID NO: 35481 - DNA, 25 bp, probe
tatgacacgaatggtagatacagtg

SEQ ID NO: 35482 - DNA, 25 bp, probe
tgatctcagagacaagttcaatgaa

SEQ ID NO: 35483 - DNA, 25 bp, probe
tctcagagacaagttcaatgaatct

SEQ ID NO: 35484 - DNA, 25 bp, probe
tacatacctggctggattgagaatg

SEQ ID NO: 35485 - DNA, 25 bp, probe
atacctggctggattgagaatgatg

SEQ ID NO: 35486 - DNA, 25 bp, probe
tggaacagctcacaagtatatcatt

SEQ ID NO: 35487 - DNA, 25 bp, probe
aataaggatgatgttcaacacaagc

SEQ ID NO: 35488 - DNA, 25 bp, probe
attcatatcaacagcaccattcctg

SEQ ID NO: 35489 - DNA, 25 bp, probe
tctgctccttgtcctaatattcata

SEQ ID NO: 35490 - DNA, 25 bp, probe
catggaacagctcacaagtatatca

SEQ ID NO: 35491 - DNA, 25 bp, probe
aatctcttcaagtgaatactactgc

SEQ ID NO: 35492 - DNA, 25 bp, probe
ttgctcctgaccttgattaacttaa

SEQ ID NO: 35493 - DNA, 25 bp, probe
gctcctgaccttgattaacttaaca

SEQ ID NO: 35494 - DNA, 25 bp, probe
tgctcctgaccttgattaacttaac

SEQ ID NO: 35495 - DNA, 25 bp, probe
tcctgaccttgattaacttaacagt

SEQ ID NO: 35496 - DNA, 25 bp, probe
ctcctgaccttgattaacttaacag

SEQ ID NO: 35497 - DNA, 25 bp, probe
tttatttgaacctttggaacttggg

SEQ ID NO: 35498 - DNA, 25 bp, probe
ttagcccagagatagacagtagaat

SEQ ID NO: 35499 - DNA, 25 bp, probe
tttagcccagagatagacagtagaa

SEQ ID NO: 35500 - DNA, 25 bp, probe
ttgacttctaaatgtttctgcttcc

SEQ ID NO: 35501 - DNA, 25 bp, probe
gctttgacttctaaatgtttctgct

SEQ ID NO: 35502 - DNA, 25 bp, probe
tgctttgacttctaaatgtttctgc

SEQ ID NO: 35503 - DNA, 25 bp, probe
tttgctcctgaccttgattaactta

SEQ ID NO: 35504 - DNA, 25 bp, probe
tagcccagagatagacagtagaatg

SEQ ID NO: 35505 - DNA, 25 bp, probe
ttatttgaacctttggaacttggga

SEQ ID NO: 35506 - DNA, 25 bp, probe
atgatttgctcctgaccttgattaa

SEQ ID NO: 35507 - DNA, 25 bp, probe
cactgtttgtttgtatgatgttagc

SEQ ID NO: 35508 - DNA, 25 bp, probe
gcactgtttgtttgtatgatgttag

SEQ ID NO: 35509 - DNA, 25 bp, probe
gatgatttgctcctgaccttgatta

SEQ ID NO: 35510 - DNA, 25 bp, probe
gtttagcccagagatagacagtaga

SEQ ID NO: 35511 - DNA, 25 bp, probe
agtttagcccagagatagacagtag

SEQ ID NO: 35512 - DNA, 25 bp, probe
atttgctcctgaccttgattaactt

SEQ ID NO: 35513 - DNA, 25 bp, probe
tatttgaacctttggaacttgggag

SEQ ID NO: 35514 - DNA, 25 bp, probe
cagtttagcccagagatagacagta

SEQ ID NO: 35515 - DNA, 25 bp, probe
gatttgctcctgaccttgattaact

SEQ ID NO: 35516 - DNA, 25 bp, probe
gacttctaaatgtttctgcttccca

SEQ ID NO: 35517 - DNA, 25 bp, probe
tgacttctaaatgtttctgcttccc

SEQ ID NO: 35518 - DNA, 25 bp, probe
atcagtttagcccagagatagacag

SEQ ID NO: 35519 - DNA, 25 bp, probe
tgatttgctcctgaccttgattaac

SEQ ID NO: 35520 - DNA, 25 bp, probe
ttgctttgacttctaaatgtttctg

SEQ ID NO: 35521 - DNA, 25 bp, probe
ctcagcacactctagggaataattc

SEQ ID NO: 35522 - DNA, 25 bp, probe
catcagtttagcccagagatagaca

SEQ ID NO: 35523 - DNA, 25 bp, probe
tttgacttctaaatgtttctgcttc

SEQ ID NO: 35524 - DNA, 25 bp, probe
ctttgacttctaaatgtttctgctt

SEQ ID NO: 35525 - DNA, 25 bp, probe
ggagttctcattgtaaccctaacat

SEQ ID NO: 35526 - DNA, 25 bp, probe
ccatcagtttagcccagagatagac

SEQ ID NO: 35527 - DNA, 25 bp, probe
attgctttgacttctaaatgtttct

SEQ ID NO: 35528 - DNA, 25 bp, probe
cctgttgtgtttaagtcaccagata

SEQ ID NO: 35529 - DNA, 25 bp, probe
acttctaaatgtttctgcttcccag

SEQ ID NO: 35530 - DNA, 25 bp, probe
tgaccttgattaacttaacagttcc

SEQ ID NO: 35531 - DNA, 25 bp, probe
tcagtttagcccagagatagacagt

SEQ ID NO: 35532 - DNA, 25 bp, probe
cctgaccttgattaacttaacagtt

SEQ ID NO: 35533 - DNA, 25 bp, probe
ctgttgtgtttaagtcaccagatat

SEQ ID NO: 35534 - DNA, 25 bp, probe
gagttctcattgtaaccctaacatg

SEQ ID NO: 35535 - DNA, 25 bp, probe
actgtttgtttgtatgatgttagct

SEQ ID NO: 35536 - DNA, 25 bp, probe
actctcctcgtctaggtttctttac

SEQ ID NO: 35537 - DNA, 25 bp, probe
cactctcctcgtctaggtttcttta

SEQ ID NO: 35538 - DNA, 25 bp, probe
ctctcctcgtctaggtttctttacc

SEQ ID NO: 35539 - DNA, 25 bp, probe
ccactctcctcgtctaggtttcttt

SEQ ID NO: 35540 - DNA, 25 bp, probe
gtttctttacctccagggatcagct

SEQ ID NO: 35541 - DNA, 25 bp, probe
tccactctcctcgtctaggtttctt

SEQ ID NO: 35542 - DNA, 25 bp, probe
ctccactctcctcgtctaggtttct

SEQ ID NO: 35543 - DNA, 25 bp, probe
ctaggtttctttacctccagggatc

SEQ ID NO: 35544 - DNA, 25 bp, probe
ctcctcgtctaggtttctttacctc

SEQ ID NO: 35545 - DNA, 25 bp, probe
tctaggtttctttacctccagggat

SEQ ID NO: 35546 - DNA, 25 bp, probe
ctcgtctaggtttctttacctccag

SEQ ID NO: 35547 - DNA, 25 bp, probe
tctcctcgtctaggtttctttacct

SEQ ID NO: 35548 - DNA, 25 bp, probe
gtgctgtgatgttgagagctgagaa

SEQ ID NO: 35549 - DNA, 25 bp, probe
taggtttctttacctccagggatca

SEQ ID NO: 35550 - DNA, 25 bp, probe
ggtttctttacctccagggatcagc

SEQ ID NO: 35551 - DNA, 25 bp, probe
tgctgtgatgttgagagctgagaaa

SEQ ID NO: 35552 - DNA, 25 bp, probe
gtctaggtttctttacctccaggga

SEQ ID NO: 35553 - DNA, 25 bp, probe
tcctcgtctaggtttctttacctcc

SEQ ID NO: 35554 - DNA, 25 bp, probe
tcgtctaggtttctttacctccagg

SEQ ID NO: 35555 - DNA, 25 bp, probe
cctcgtctaggtttctttacctcca

SEQ ID NO: 35556 - DNA, 25 bp, probe
aggtttctttacctccagggatcag

SEQ ID NO: 35557 - DNA, 25 bp, probe
gctgtgatgttgagagctgagaaaa

SEQ ID NO: 35558 - DNA, 25 bp, probe
cgtctaggtttctttacctccaggg

SEQ ID NO: 35559 - DNA, 25 bp, probe
attcaagcgtctggatgactactta

SEQ ID NO: 35560 - DNA, 25 bp, probe
ttcaagcgtctggatgactacttaa

SEQ ID NO: 35561 - DNA, 25 bp, probe
aaatatcgtgactttgacattccag

SEQ ID NO: 35562 - DNA, 25 bp, probe
aaatacttacgcaaatgtggcttaa

SEQ ID NO: 35563 - DNA, 25 bp, probe
gaaatatcgtgactttgacattcca

SEQ ID NO: 35564 - DNA, 25 bp, probe
agaaatatcgtgactttgacattcc

SEQ ID NO: 35565 - DNA, 25 bp, probe
aattcaagcgtctggatgactactt

SEQ ID NO: 35566 - DNA, 25 bp, probe
ctgaacattattaaagttgctgcca

SEQ ID NO: 35567 - DNA, 25 bp, probe
tgaacattattaaagttgctgccaa

SEQ ID NO: 35568 - DNA, 25 bp, probe
acattattaaagttgctgccaagaa

SEQ ID NO: 35569 - DNA, 25 bp, probe
aacattattaaagttgctgccaaga

SEQ ID NO: 35570 - DNA, 25 bp, probe
caatcctccgttcctggtgtataac

SEQ ID NO: 35571 - DNA, 25 bp, probe
ccaagaaatatcgtgactttgacat

SEQ ID NO: 35572 - DNA, 25 bp, probe
ttaaagttgctgccaagaaatatcg

SEQ ID NO: 35573 - DNA, 25 bp, probe
gaacattattaaagttgctgccaag

SEQ ID NO: 35574 - DNA, 25 bp, probe
aatatcgtgactttgacattccagc

SEQ ID NO: 35575 - DNA, 25 bp, probe
cattattaaagttgctgccaagaaa

SEQ ID NO: 35576 - DNA, 25 bp, probe
taaagttgctgccaagaaatatcgt

SEQ ID NO: 35577 - DNA, 25 bp, probe
gctgaacattattaaagttgctgcc

SEQ ID NO: 35578 - DNA, 25 bp, probe
ctgccaagaaatatcgtgactttga

SEQ ID NO: 35579 - DNA, 25 bp, probe
attaaagttgctgccaagaaatatc

SEQ ID NO: 35580 - DNA, 25 bp, probe
aagaaatatcgtgactttgacattc

SEQ ID NO: 35581 - DNA, 25 bp, probe
caagaaatatcgtgactttgacatt

SEQ ID NO: 35582 - DNA, 25 bp, probe
gccaagaaatatcgtgactttgaca

SEQ ID NO: 35583 - DNA, 25 bp, probe
tgccaagaaatatcgtgactttgac

SEQ ID NO: 35584 - DNA, 25 bp, probe
aagcctgaagaactaaaggacttag

SEQ ID NO: 35585 - DNA, 25 bp, probe
aaagcctgaagaactaaaggactta

SEQ ID NO: 35586 - DNA, 25 bp, probe
cctggtgtataacaaggagttgaaa

SEQ ID NO: 35587 - DNA, 25 bp, probe
attattaaagttgctgccaagaaat

SEQ ID NO: 35588 - DNA, 25 bp, probe
gaaagcctgaagaactaaaggactt

SEQ ID NO: 35589 - DNA, 25 bp, probe
atcctccgttcctggtgtataacaa

SEQ ID NO: 35590 - DNA, 25 bp, probe
aatcctccgttcctggtgtataaca

SEQ ID NO: 35591 - DNA, 25 bp, probe
ttaatgtgacaactgttgacatgac

SEQ ID NO: 35592 - DNA, 25 bp, probe
atatcgtgactttgacattccagca

SEQ ID NO: 35593 - DNA, 25 bp, probe
gaccagaaagcctgaagaactaaag

SEQ ID NO: 35594 - DNA, 25 bp, probe
caagcgtctggatgactacttaaac

SEQ ID NO: 35595 - DNA, 25 bp, probe
tcaagcgtctggatgactacttaaa

SEQ ID NO: 35596 - DNA, 25 bp, probe
cagaaagcctgaagaactaaaggac

SEQ ID NO: 35597 - DNA, 25 bp, probe
aattctcaggagtctggcgttatct

SEQ ID NO: 35598 - DNA, 25 bp, probe
ccaagctgaacattattaaagttgc

SEQ ID NO: 35599 - DNA, 25 bp, probe
agaaagcctgaagaactaaaggact

SEQ ID NO: 35600 - DNA, 25 bp, probe
acccaagctgaacattattaaagtt

SEQ ID NO: 35601 - DNA, 25 bp, probe
atgaccagaaagcctgaagaactaa

SEQ ID NO: 35602 - DNA, 25 bp, probe
ttattaaagttgctgccaagaaata

SEQ ID NO: 35603 - DNA, 25 bp, probe
tgatatgttggtagattctaatggc

SEQ ID NO: 35604 - DNA, 25 bp, probe
gatatgttggtagattctaatggct

SEQ ID NO: 35605 - DNA, 25 bp, probe
tgttcttcatctaagccttctggtt

SEQ ID NO: 35606 - DNA, 25 bp, probe
ttgttcttcatctaagccttctggt

SEQ ID NO: 35607 - DNA, 25 bp, probe
atatgttggtagattctaatggctt

SEQ ID NO: 35608 - DNA, 25 bp, probe
atgaataacatggtgtgcttcttaa

SEQ ID NO: 35609 - DNA, 25 bp, probe
atatgaataacatggtgtgcttctt

SEQ ID NO: 35610 - DNA, 25 bp, probe
actcatcatttccatttacccttct

SEQ ID NO: 35611 - DNA, 25 bp, probe
agacctaacgagaaatagaaatggg

SEQ ID NO: 35612 - DNA, 25 bp, probe
aagttgggtgatatgttggtagatt

SEQ ID NO: 35613 - DNA, 25 bp, probe
gactcatcatttccatttacccttc

SEQ ID NO: 35614 - DNA, 25 bp, probe
agttgggtgatatgttggtagattc

SEQ ID NO: 35615 - DNA, 25 bp, probe
gttgggtgatatgttggtagattct

SEQ ID NO: 35616 - DNA, 25 bp, probe
ctcatcatttccatttacccttctt

SEQ ID NO: 35617 - DNA, 25 bp, probe
gagacctaacgagaaatagaaatgg

SEQ ID NO: 35618 - DNA, 25 bp, probe
tatgaataacatggtgtgcttctta

SEQ ID NO: 35619 - DNA, 25 bp, probe
gaagagttgagacctaacgagaaat

SEQ ID NO: 35620 - DNA, 25 bp, probe
gagttgagacctaacgagaaataga

SEQ ID NO: 35621 - DNA, 25 bp, probe
agagttgagacctaacgagaaatag

SEQ ID NO: 35622 - DNA, 25 bp, probe
tggtagattctaatggctttattgc

SEQ ID NO: 35623 - DNA, 25 bp, probe
gtgatatgttggtagattctaatgg

SEQ ID NO: 35624 - DNA, 25 bp, probe
ggtgatatgttggtagattctaatg

SEQ ID NO: 35625 - DNA, 25 bp, probe
gttcttcatctaagccttctggttt

SEQ ID NO: 35626 - DNA, 25 bp, probe
tttgttcttcatctaagccttctgg

SEQ ID NO: 35627 - DNA, 25 bp, probe
agttgagacctaacgagaaatagaa

SEQ ID NO: 35628 - DNA, 25 bp, probe
aagagttgagacctaacgagaaata

SEQ ID NO: 35629 - DNA, 25 bp, probe
caagttgggtgatatgttggtagat

SEQ ID NO: 35630 - DNA, 25 bp, probe
tcatcatttccatttacccttcttt

SEQ ID NO: 35631 - DNA, 25 bp, probe
tttcaagttgggtgatatgttggta

SEQ ID NO: 35632 - DNA, 25 bp, probe
tgggtgatatgttggtagattctaa

SEQ ID NO: 35633 - DNA, 25 bp, probe
ttgggtgatatgttggtagattcta

SEQ ID NO: 35634 - DNA, 25 bp, probe
tgagacctaacgagaaatagaaatg

SEQ ID NO: 35635 - DNA, 25 bp, probe
ttcaagttgggtgatatgttggtag

SEQ ID NO: 35636 - DNA, 25 bp, probe
gttgagacctaacgagaaatagaaa

SEQ ID NO: 35637 - DNA, 25 bp, probe
gaatttctgttcttccatcacctcc

SEQ ID NO: 35638 - DNA, 25 bp, probe
tcaagttgggtgatatgttggtaga

SEQ ID NO: 35639 - DNA, 25 bp, probe
ttgagacctaacgagaaatagaaat

SEQ ID NO: 35640 - DNA, 25 bp, probe
catgacggaagagttgagacctaac

SEQ ID NO: 35641 - DNA, 25 bp, probe
tgttggtagattctaatggctttat

SEQ ID NO: 35642 - DNA, 25 bp, probe
atgttggtagattctaatggcttta

SEQ ID NO: 35643 - DNA, 25 bp, probe
tatgttggtagattctaatggcttt

SEQ ID NO: 35644 - DNA, 25 bp, probe
ggaagagttgagacctaacgagaaa

SEQ ID NO: 35645 - DNA, 25 bp, probe
catatgaataacatggtgtgcttct

SEQ ID NO: 35646 - DNA, 25 bp, probe
aaatagtgatttccacagtgactcc

SEQ ID NO: 35647 - DNA, 25 bp, probe
agtaaagtgttattgaatgtgtggg

SEQ ID NO: 35648 - DNA, 25 bp, probe
actatcatttgagagccctaccttt

SEQ ID NO: 35649 - DNA, 25 bp, probe
cactatcatttgagagccctacctt

SEQ ID NO: 35650 - DNA, 25 bp, probe
cctcaggaatttgtctaacacattt

SEQ ID NO: 35651 - DNA, 25 bp, probe
aagtaaagtgttattgaatgtgtgg

SEQ ID NO: 35652 - DNA, 25 bp, probe
ccctcaggaatttgtctaacacatt

SEQ ID NO: 35653 - DNA, 25 bp, probe
ggaatttgtctaacacatttcaagg

SEQ ID NO: 35654 - DNA, 25 bp, probe
tcaggaatttgtctaacacatttca

SEQ ID NO: 35655 - DNA, 25 bp, probe
ttaaagttcatgggtgagggataaa

SEQ ID NO: 35656 - DNA, 25 bp, probe
ctcaggaatttgtctaacacatttc

SEQ ID NO: 35657 - DNA, 25 bp, probe
caggaatttgtctaacacatttcaa

SEQ ID NO: 35658 - DNA, 25 bp, probe
gaatttgtctaacacatttcaagga

SEQ ID NO: 35659 - DNA, 25 bp, probe
aggaatttgtctaacacatttcaag

SEQ ID NO: 35660 - DNA, 25 bp, probe
tttaaagttcatgggtgagggataa

SEQ ID NO: 35661 - DNA, 25 bp, probe
tcactatcatttgagagccctacct

SEQ ID NO: 35662 - DNA, 25 bp, probe
ctcatgcctataatcccagtgcttt

SEQ ID NO: 35663 - DNA, 25 bp, probe
aatttgtctaacacatttcaaggat

SEQ ID NO: 35664 - DNA, 25 bp, probe
tgtctaacacatttcaaggatagaa

SEQ ID NO: 35665 - DNA, 25 bp, probe
ttgtctaacacatttcaaggataga

SEQ ID NO: 35666 - DNA, 25 bp, probe
tttgtctaacacatttcaaggatag

SEQ ID NO: 35667 - DNA, 25 bp, probe
gtaaagtgttattgaatgtgtgggg

SEQ ID NO: 35668 - DNA, 25 bp, probe
taaagtgttattgaatgtgtggggt

SEQ ID NO: 35669 - DNA, 25 bp, probe
tatcatttgagagccctaccttttc

SEQ ID NO: 35670 - DNA, 25 bp, probe
ctatcatttgagagccctacctttt

SEQ ID NO: 35671 - DNA, 25 bp, probe
aaagtaaagtgttattgaatgtgtg

SEQ ID NO: 35672 - DNA, 25 bp, probe
tcatgcctataatcccagtgctttg

SEQ ID NO: 35673 - DNA, 25 bp, probe
caaggatagaaaatacttcactgcc

SEQ ID NO: 35674 - DNA, 25 bp, probe
aaggatagaaaatacttcactgccg

SEQ ID NO: 35675 - DNA, 25 bp, probe
aagtgttattgaatgtgtggggttt

SEQ ID NO: 35676 - DNA, 25 bp, probe
aaagtgttattgaatgtgtggggtt

SEQ ID NO: 35677 - DNA, 25 bp, probe
tcaaggatagaaaatacttcactgc

SEQ ID NO: 35678 - DNA, 25 bp, probe
taccttttcctgactgttcctcttt

SEQ ID NO: 35679 - DNA, 25 bp, probe
atttgtctaacacatttcaaggata

SEQ ID NO: 35680 - DNA, 25 bp, probe
ctcaagagaagatgcttttccgtag

SEQ ID NO: 35681 - DNA, 25 bp, probe
ctaccttttcctgactgttcctctt

SEQ ID NO: 35682 - DNA, 25 bp, probe
agtgttattgaatgtgtggggtttc

SEQ ID NO: 35683 - DNA, 25 bp, probe
caagagaagatgcttttccgtagtc

SEQ ID NO: 35684 - DNA, 25 bp, probe
tcaagagaagatgcttttccgtagt

SEQ ID NO: 35685 - DNA, 25 bp, probe
accttttcctgactgttcctctttt

SEQ ID NO: 35686 - DNA, 25 bp, probe
aaagttcatgggtgagggataaaat

SEQ ID NO: 35687 - DNA, 25 bp, probe
taaagttcatgggtgagggataaaa

SEQ ID NO: 35688 - DNA, 25 bp, probe
aaatgaggctccaatacatgggaag

SEQ ID NO: 35689 - DNA, 25 bp, probe
aagttcatgggtgagggataaaatg

SEQ ID NO: 35690 - DNA, 25 bp, probe
gggataaaatgaggctccaatacat

SEQ ID NO: 35691 - DNA, 25 bp, probe
ttagattgaaggttggaatggtgta

SEQ ID NO: 35692 - DNA, 25 bp, probe
attgaaggttggaatggtgtactaa

SEQ ID NO: 35693 - DNA, 25 bp, probe
gctgaaggtacaacatagtgactaa

SEQ ID NO: 35694 - DNA, 25 bp, probe
gattgaaggttggaatggtgtacta

SEQ ID NO: 35695 - DNA, 25 bp, probe
tagattgaaggttggaatggtgtac

SEQ ID NO: 35696 - DNA, 25 bp, probe
ttagaagattagaccattaggaacg

SEQ ID NO: 35697 - DNA, 25 bp, probe
aattccatccttcacttatgtaaca

SEQ ID NO: 35698 - DNA, 25 bp, probe
acctattctaactcaaggaggagag

SEQ ID NO: 35699 - DNA, 25 bp, probe
gacctattctaactcaaggaggaga

SEQ ID NO: 35700 - DNA, 25 bp, probe
ttccatccttcacttatgtaacatg

SEQ ID NO: 35701 - DNA, 25 bp, probe
tgacctattctaactcaaggaggag

SEQ ID NO: 35702 - DNA, 25 bp, probe
agattgaaggttggaatggtgtact

SEQ ID NO: 35703 - DNA, 25 bp, probe
gtgacctattctaactcaaggagga

SEQ ID NO: 35704 - DNA, 25 bp, probe
agctgaaggtacaacatagtgacta

SEQ ID NO: 35705 - DNA, 25 bp, probe
attccatccttcacttatgtaacat

SEQ ID NO: 35706 - DNA, 25 bp, probe
gaagctgaaggtacaacatagtgac

SEQ ID NO: 35707 - DNA, 25 bp, probe
ttatttagtcacctttctcctgtcc

SEQ ID NO: 35708 - DNA, 25 bp, probe
cctattctaactcaaggaggagagc

SEQ ID NO: 35709 - DNA, 25 bp, probe
tctttcttcttccttctttcttcct

SEQ ID NO: 35710 - DNA, 25 bp, probe
tttagattgaaggttggaatggtgt

SEQ ID NO: 35711 - DNA, 25 bp, probe
attctaactcaaggaggagagctat

SEQ ID NO: 35712 - DNA, 25 bp, probe
tattctaactcaaggaggagagcta

SEQ ID NO: 35713 - DNA, 25 bp, probe
ttcttaatctggtatcacctcgtgt

SEQ ID NO: 35714 - DNA, 25 bp, probe
aagctgaaggtacaacatagtgact

SEQ ID NO: 35715 - DNA, 25 bp, probe
ctaactcaaggaggagagctatgta

SEQ ID NO: 35716 - DNA, 25 bp, probe
tatttagtcacctttctcctgtcca

SEQ ID NO: 35717 - DNA, 25 bp, probe
acctcaaattccatccttcacttat

SEQ ID NO: 35718 - DNA, 25 bp, probe
ggtgacctattctaactcaaggagg

SEQ ID NO: 35719 - DNA, 25 bp, probe
gacctcaaattccatccttcactta

SEQ ID NO: 35720 - DNA, 25 bp, probe
taactcaaggaggagagctatgtac

SEQ ID NO: 35721 - DNA, 25 bp, probe
ctattctaactcaaggaggagagct

SEQ ID NO: 35722 - DNA, 25 bp, probe
ctttcttcttccttctttcttcctt

SEQ ID NO: 35723 - DNA, 25 bp, probe
ttctttcttcttccttctttcttcc

SEQ ID NO: 35724 - DNA, 25 bp, probe
agaagattagaccattaggaacgta

SEQ ID NO: 35725 - DNA, 25 bp, probe
tagaagattagaccattaggaacgt

SEQ ID NO: 35726 - DNA, 25 bp, probe
cctcaaattccatccttcacttatg

SEQ ID NO: 35727 - DNA, 25 bp, probe
ttctaactcaaggaggagagctatg

SEQ ID NO: 35728 - DNA, 25 bp, probe
tataacaggaagctgaaggtacaac

SEQ ID NO: 35729 - DNA, 25 bp, probe
gatgagtctttcttctttctttcct

SEQ ID NO: 35730 - DNA, 25 bp, probe
atataacaggaagctgaaggtacaa

SEQ ID NO: 35731 - DNA, 25 bp, probe
ggtatataacaggaagctgaaggta

SEQ ID NO: 35732 - DNA, 25 bp, probe
ttaatctggtatcacctcgtgtgtt

SEQ ID NO: 35733 - DNA, 25 bp, probe
tacacaagacagtttgaggcatatt

SEQ ID NO: 35734 - DNA, 25 bp, probe
ttacacaagacagtttgaggcatat

SEQ ID NO: 35735 - DNA, 25 bp, probe
aatgtatcagttatcccaaagcctt

SEQ ID NO: 35736 - DNA, 25 bp, probe
taatgtatcagttatcccaaagcct

SEQ ID NO: 35737 - DNA, 25 bp, probe
atttggttctttgccctaatgtttc

SEQ ID NO: 35738 - DNA, 25 bp, probe
gatttggttctttgccctaatgttt

SEQ ID NO: 35739 - DNA, 25 bp, probe
tatgtctgtcttatcatgcaatgga

SEQ ID NO: 35740 - DNA, 25 bp, probe
tactattattgaaatcgcttgaccg

SEQ ID NO: 35741 - DNA, 25 bp, probe
atgtatcagttatcccaaagccttc

SEQ ID NO: 35742 - DNA, 25 bp, probe
atgtctgtcttatcatgcaatggaa

SEQ ID NO: 35743 - DNA, 25 bp, probe
ttatgtctgtcttatcatgcaatgg

SEQ ID NO: 35744 - DNA, 25 bp, probe
ttaatgtatcagttatcccaaagcc

SEQ ID NO: 35745 - DNA, 25 bp, probe
tttaataaccaagttgctgctgaac

SEQ ID NO: 35746 - DNA, 25 bp, probe
gtatcagttatcccaaagccttcag

SEQ ID NO: 35747 - DNA, 25 bp, probe
tgatttggttctttgccctaatgtt

SEQ ID NO: 35748 - DNA, 25 bp, probe
aatgtaaactatgactgctgagtga

SEQ ID NO: 35749 - DNA, 25 bp, probe
tttggttctttgccctaatgtttca

SEQ ID NO: 35750 - DNA, 25 bp, probe
gagtgatttggttctttgccctaat

SEQ ID NO: 35751 - DNA, 25 bp, probe
atgtaaactatgactgctgagtgat

SEQ ID NO: 35752 - DNA, 25 bp, probe
ttggttctttgccctaatgtttcat

SEQ ID NO: 35753 - DNA, 25 bp, probe
aaatgtaaactatgactgctgagtg

SEQ ID NO: 35754 - DNA, 25 bp, probe
tgtaaactatgactgctgagtgata

SEQ ID NO: 35755 - DNA, 25 bp, probe
agtgatttggttctttgccctaatg

SEQ ID NO: 35756 - DNA, 25 bp, probe
tgtatcagttatcccaaagccttca

SEQ ID NO: 35757 - DNA, 25 bp, probe
gtgatttggttctttgccctaatgt

SEQ ID NO: 35758 - DNA, 25 bp, probe
acttgctcttatcttctcaaattgt

SEQ ID NO: 35759 - DNA, 25 bp, probe
gttgctgctgaacttatactaaatc

SEQ ID NO: 35760 - DNA, 25 bp, probe
gcatactattattgaaatcgcttga

SEQ ID NO: 35761 - DNA, 25 bp, probe
ttgctgctgaacttatactaaatca

SEQ ID NO: 35762 - DNA, 25 bp, probe
gtaaactatgactgctgagtgataa

SEQ ID NO: 35763 - DNA, 25 bp, probe
tatcagttatcccaaagccttcagg

SEQ ID NO: 35764 - DNA, 25 bp, probe
ttaataaccaagttgctgctgaact

SEQ ID NO: 35765 - DNA, 25 bp, probe
attatgtctgtcttatcatgcaatg

SEQ ID NO: 35766 - DNA, 25 bp, probe
aacttgctcttatcttctcaaattg

SEQ ID NO: 35767 - DNA, 25 bp, probe
taaactatgactgctgagtgataaa

SEQ ID NO: 35768 - DNA, 25 bp, probe
accaatgatgtaacggtttaatacc

SEQ ID NO: 35769 - DNA, 25 bp, probe
ttaagtatagcttcctcccttgaaa

SEQ ID NO: 35770 - DNA, 25 bp, probe
tttaagtatagcttcctcccttgaa

SEQ ID NO: 35771 - DNA, 25 bp, probe
atactattattgaaatcgcttgacc

SEQ ID NO: 35772 - DNA, 25 bp, probe
ccaatgatgtaacggtttaatacct

SEQ ID NO: 35773 - DNA, 25 bp, probe
tctgtcttatcatgcaatggaaatg

SEQ ID NO: 35774 - DNA, 25 bp, probe
gtctgtcttatcatgcaatggaaat

SEQ ID NO: 35775 - DNA, 25 bp, probe
gcatcttaccaatgatgtaacggtt

SEQ ID NO: 35776 - DNA, 25 bp, probe
tgtctgtcttatcatgcaatggaaa

SEQ ID NO: 35777 - DNA, 25 bp, probe
tctttgccctaatgtttcatttgac

SEQ ID NO: 35778 - DNA, 25 bp, probe
tgatgtaacggtttaatacctttga

SEQ ID NO: 35779 - DNA, 25 bp, probe
gaattacaataatctcgccaatgct

SEQ ID NO: 35780 - DNA, 25 bp, probe
agaattacaataatctcgccaatgc

SEQ ID NO: 35781 - DNA, 25 bp, probe
aattacaataatctcgccaatgctg

SEQ ID NO: 35782 - DNA, 25 bp, probe
gaatggtgcttgatgagaattacaa

SEQ ID NO: 35783 - DNA, 25 bp, probe
ggaatggtgcttgatgagaattaca

SEQ ID NO: 35784 - DNA, 25 bp, probe
aatggtgcttgatgagaattacaat

SEQ ID NO: 35785 - DNA, 25 bp, probe
ctctcagatcagatcaagcattctt

SEQ ID NO: 35786 - DNA, 25 bp, probe
tggtgcttgatgagaattacaataa

SEQ ID NO: 35787 - DNA, 25 bp, probe
atggtgcttgatgagaattacaata

SEQ ID NO: 35788 - DNA, 25 bp, probe
attacaataatctcgccaatgctgt

SEQ ID NO: 35789 - DNA, 25 bp, probe
ttacaataatctcgccaatgctgtc

SEQ ID NO: 35790 - DNA, 25 bp, probe
gcttccaggtatctacactgttagt

SEQ ID NO: 35791 - DNA, 25 bp, probe
tgcttccaggtatctacactgttag

SEQ ID NO: 35792 - DNA, 25 bp, probe
ctgcttccaggtatctacactgtta

SEQ ID NO: 35793 - DNA, 25 bp, probe
ggattaaccatgatgtcacttcagg

SEQ ID NO: 35794 - DNA, 25 bp, probe
ggtgcttgatgagaattacaataat

SEQ ID NO: 35795 - DNA, 25 bp, probe
cagaaagaaagaaatggagatgagg

SEQ ID NO: 35796 - DNA, 25 bp, probe
agaaagaaagaaatggagatgaggc

SEQ ID NO: 35797 - DNA, 25 bp, probe
aaagaaagaaatggagatgaggcag

SEQ ID NO: 35798 - DNA, 25 bp, probe
gaaagaaagaaatggagatgaggca

SEQ ID NO: 35799 - DNA, 25 bp, probe
gattaaccatgatgtcacttcaggt

SEQ ID NO: 35800 - DNA, 25 bp, probe
tgtcatttctgtcagtgggattaac

SEQ ID NO: 35801 - DNA, 25 bp, probe
attaaccatgatgtcacttcaggtg

SEQ ID NO: 35802 - DNA, 25 bp, probe
tacaataatctcgccaatgctgtca

SEQ ID NO: 35803 - DNA, 25 bp, probe
gtcatttctgtcagtgggattaacc

SEQ ID NO: 35804 - DNA, 25 bp, probe
tcagatcagatcaagcattctttct

SEQ ID NO: 35805 - DNA, 25 bp, probe
ctcagatcagatcaagcattctttc

SEQ ID NO: 35806 - DNA, 25 bp, probe
tctcagatcagatcaagcattcttt

SEQ ID NO: 35807 - DNA, 25 bp, probe
gggaatggtgcttgatgagaattac

SEQ ID NO: 35808 - DNA, 25 bp, probe
agggaatggtgcttgatgagaatta

SEQ ID NO: 35809 - DNA, 25 bp, probe
ctgtcatttctgtcagtgggattaa

SEQ ID NO: 35810 - DNA, 25 bp, probe
cagatcagatcaagcattctttcta

SEQ ID NO: 35811 - DNA, 25 bp, probe
gtgcttgatgagaattacaataatc

SEQ ID NO: 35812 - DNA, 25 bp, probe
acaataatctcgccaatgctgtcat

SEQ ID NO: 35813 - DNA, 25 bp, probe
tgcttgatgagaattacaataatct

SEQ ID NO: 35814 - DNA, 25 bp, probe
caataatctcgccaatgctgtcatt

SEQ ID NO: 35815 - DNA, 25 bp, probe
ccagaaagaaagaaatggagatgag

SEQ ID NO: 35816 - DNA, 25 bp, probe
aagccagaaagaaagaaatggagat

SEQ ID NO: 35817 - DNA, 25 bp, probe
gggattaaccatgatgtcacttcag

SEQ ID NO: 35818 - DNA, 25 bp, probe
catttctgtcagtgggattaaccat

SEQ ID NO: 35819 - DNA, 25 bp, probe
agccagaaagaaagaaatggagatg

SEQ ID NO: 35820 - DNA, 25 bp, probe
agatcagatcaagcattctttctat

SEQ ID NO: 35821 - DNA, 25 bp, probe
gctctcagatcagatcaagcattct

SEQ ID NO: 35822 - DNA, 25 bp, probe
gccagaaagaaagaaatggagatga

SEQ ID NO: 35823 - DNA, 25 bp, probe
attcgtccttccagttctacaaatc

SEQ ID NO: 35824 - DNA, 25 bp, probe
cattcgtccttccagttctacaaat

SEQ ID NO: 35825 - DNA, 25 bp, probe
gataaaccagttgaatcattgagga

SEQ ID NO: 35826 - DNA, 25 bp, probe
agactcattgcttaattctaagact

SEQ ID NO: 35827 - DNA, 25 bp, probe
aaatagccaaagacaagaacaacca

SEQ ID NO: 35828 - DNA, 25 bp, probe
cttccagttctacaaatcaggcatt

SEQ ID NO: 35829 - DNA, 25 bp, probe
agataaaccagttgaatcattgagg

SEQ ID NO: 35830 - DNA, 25 bp, probe
tatcttgaaactgaccaaacgctta

SEQ ID NO: 35831 - DNA, 25 bp, probe
atcttgaaactgaccaaacgcttat

SEQ ID NO: 35832 - DNA, 25 bp, probe
ataaaccagttgaatcattgaggat

SEQ ID NO: 35833 - DNA, 25 bp, probe
tgtgtaagataaaccagttgaatca

SEQ ID NO: 35834 - DNA, 25 bp, probe
taaaccagttgaatcattgaggatc

SEQ ID NO: 35835 - DNA, 25 bp, probe
tccagttctacaaatcaggcattta

SEQ ID NO: 35836 - DNA, 25 bp, probe
aatagccaaagacaagaacaaccac

SEQ ID NO: 35837 - DNA, 25 bp, probe
ttcgtccttccagttctacaaatca

SEQ ID NO: 35838 - DNA, 25 bp, probe
aactgaccaaacgcttattgtgtaa

SEQ ID NO: 35839 - DNA, 25 bp, probe
aaactgaccaaacgcttattgtgta

SEQ ID NO: 35840 - DNA, 25 bp, probe
cttgaaactgaccaaacgcttattg

SEQ ID NO: 35841 - DNA, 25 bp, probe
tcttgaaactgaccaaacgcttatt

SEQ ID NO: 35842 - DNA, 25 bp, probe
ttatcttgaaactgaccaaacgctt

SEQ ID NO: 35843 - DNA, 25 bp, probe
tttatcttgaaactgaccaaacgct

SEQ ID NO: 35844 - DNA, 25 bp, probe
ccagttctacaaatcaggcatttat

SEQ ID NO: 35845 - DNA, 25 bp, probe
ttccagttctacaaatcaggcattt

SEQ ID NO: 35846 - DNA, 25 bp, probe
cgcttattgtgtaagataaaccagt

SEQ ID NO: 35847 - DNA, 25 bp, probe
acgcttattgtgtaagataaaccag

SEQ ID NO: 35848 - DNA, 25 bp, probe
gaccaaacgcttattgtgtaagata

SEQ ID NO: 35849 - DNA, 25 bp, probe
gactcattgcttaattctaagactt

SEQ ID NO: 35850 - DNA, 25 bp, probe
aagactcattgcttaattctaagac

SEQ ID NO: 35851 - DNA, 25 bp, probe
aacgcttattgtgtaagataaacca

SEQ ID NO: 35852 - DNA, 25 bp, probe
accaaacgcttattgtgtaagataa

SEQ ID NO: 35853 - DNA, 25 bp, probe
tgaccaaacgcttattgtgtaagat

SEQ ID NO: 35854 - DNA, 25 bp, probe
tcgtccttccagttctacaaatcag

SEQ ID NO: 35855 - DNA, 25 bp, probe
ttgaaactgaccaaacgcttattgt

SEQ ID NO: 35856 - DNA, 25 bp, probe
ctgaccaaacgcttattgtgtaaga

SEQ ID NO: 35857 - DNA, 25 bp, probe
aagataaaccagttgaatcattgag

SEQ ID NO: 35858 - DNA, 25 bp, probe
ttgtgtaagataaaccagttgaatc

SEQ ID NO: 35859 - DNA, 25 bp, probe
atagccaaagacaagaacaaccact

SEQ ID NO: 35860 - DNA, 25 bp, probe
ccattcgtccttccagttctacaaa

SEQ ID NO: 35861 - DNA, 25 bp, probe
gtgtaagataaaccagttgaatcat

SEQ ID NO: 35862 - DNA, 25 bp, probe
aaacgcttattgtgtaagataaacc

SEQ ID NO: 35863 - DNA, 25 bp, probe
ccaaacgcttattgtgtaagataaa

SEQ ID NO: 35864 - DNA, 25 bp, probe
actgaccaaacgcttattgtgtaag

SEQ ID NO: 35865 - DNA, 25 bp, probe
gaataacagcaagtattggctcgtc

SEQ ID NO: 35866 - DNA, 25 bp, probe
cagttctacaaatcaggcatttatt

SEQ ID NO: 35867 - DNA, 25 bp, probe
acagttagttatattagcagccctc

SEQ ID NO: 35868 - DNA, 25 bp, probe
cagttagttatattagcagccctct

SEQ ID NO: 35869 - DNA, 25 bp, probe
cgtatctatcggaaggatttcaaac

SEQ ID NO: 35870 - DNA, 25 bp, probe
aatgttcccttcttgtagagagatg

SEQ ID NO: 35871 - DNA, 25 bp, probe
gaatgttcccttcttgtagagagat

SEQ ID NO: 35872 - DNA, 25 bp, probe
tatcggaaggatttcaaacaccaat

SEQ ID NO: 35873 - DNA, 25 bp, probe
tacagttagttatattagcagccct

SEQ ID NO: 35874 - DNA, 25 bp, probe
atctatcggaaggatttcaaacacc

SEQ ID NO: 35875 - DNA, 25 bp, probe
gcgtatctatcggaaggatttcaaa

SEQ ID NO: 35876 - DNA, 25 bp, probe
ctatcggaaggatttcaaacaccaa

SEQ ID NO: 35877 - DNA, 25 bp, probe
tatctatcggaaggatttcaaacac

SEQ ID NO: 35878 - DNA, 25 bp, probe
gtatctatcggaaggatttcaaaca

SEQ ID NO: 35879 - DNA, 25 bp, probe
gtgggatcaaagaggtcataagaat

SEQ ID NO: 35880 - DNA, 25 bp, probe
ttattgtgagatatttcaggtggga

SEQ ID NO: 35881 - DNA, 25 bp, probe
tgggatcaaagaggtcataagaatt

SEQ ID NO: 35882 - DNA, 25 bp, probe
agatatttcaggtgggatcaaagag

SEQ ID NO: 35883 - DNA, 25 bp, probe
gagatatttcaggtgggatcaaaga

SEQ ID NO: 35884 - DNA, 25 bp, probe
tattgtgagatatttcaggtgggat

SEQ ID NO: 35885 - DNA, 25 bp, probe
tgagacgaaattcagattaggagat

SEQ ID NO: 35886 - DNA, 25 bp, probe
atcggaaggatttcaaacaccaatt

SEQ ID NO: 35887 - DNA, 25 bp, probe
gatatttcaggtgggatcaaagagg

SEQ ID NO: 35888 - DNA, 25 bp, probe
atgttcccttcttgtagagagatgg

SEQ ID NO: 35889 - DNA, 25 bp, probe
tttattgtgagatatttcaggtggg

SEQ ID NO: 35890 - DNA, 25 bp, probe
gtacagttagttatattagcagccc

SEQ ID NO: 35891 - DNA, 25 bp, probe
gggatcaaagaggtcataagaattt

SEQ ID NO: 35892 - DNA, 25 bp, probe
aactaagtttcagaatgttcccttc

SEQ ID NO: 35893 - DNA, 25 bp, probe
tagttatattagcagccctctgaga

SEQ ID NO: 35894 - DNA, 25 bp, probe
gttagttatattagcagccctctga

SEQ ID NO: 35895 - DNA, 25 bp, probe
agttagttatattagcagccctctg

SEQ ID NO: 35896 - DNA, 25 bp, probe
tgagatatttcaggtgggatcaaag

SEQ ID NO: 35897 - DNA, 25 bp, probe
attgtgagatatttcaggtgggatc

SEQ ID NO: 35898 - DNA, 25 bp, probe
tctatcggaaggatttcaaacacca

SEQ ID NO: 35899 - DNA, 25 bp, probe
atatttcaggtgggatcaaagaggt

SEQ ID NO: 35900 - DNA, 25 bp, probe
gttatattagcagccctctgagatg

SEQ ID NO: 35901 - DNA, 25 bp, probe
agttatattagcagccctctgagat

SEQ ID NO: 35902 - DNA, 25 bp, probe
ttagttatattagcagccctctgag

SEQ ID NO: 35903 - DNA, 25 bp, probe
gtgagatatttcaggtgggatcaaa

SEQ ID NO: 35904 - DNA, 25 bp, probe
gagacgaaattcagattaggagata

SEQ ID NO: 35905 - DNA, 25 bp, probe
gatggcgtatctatcggaaggattt

SEQ ID NO: 35906 - DNA, 25 bp, probe
atggcgtatctatcggaaggatttc

SEQ ID NO: 35907 - DNA, 25 bp, probe
tgtgagatatttcaggtgggatcaa

SEQ ID NO: 35908 - DNA, 25 bp, probe
ttgtgagatatttcaggtgggatca

SEQ ID NO: 35909 - DNA, 25 bp, probe
gtttattgtgagatatttcaggtgg

SEQ ID NO: 35910 - DNA, 25 bp, probe
ttatattagcagccctctgagatgg

SEQ ID NO: 35911 - DNA, 25 bp, probe
gcgttcataactgtcctcaacaaca

SEQ ID NO: 35912 - DNA, 25 bp, probe
caatacctgtggcatcaccaagttc

SEQ ID NO: 35913 - DNA, 25 bp, probe
catcaccgtgaccatcaacatgaag

SEQ ID NO: 35914 - DNA, 25 bp, probe
cgttcataactgtcctcaacaacag

SEQ ID NO: 35915 - DNA, 25 bp, probe
gttcataactgtcctcaacaacagc

SEQ ID NO: 35916 - DNA, 25 bp, probe
aatacctgtggcatcaccaagttcc

SEQ ID NO: 35917 - DNA, 25 bp, probe
catactggatcctgaagaactcctg

SEQ ID NO: 35918 - DNA, 25 bp, probe
ttcataactgtcctcaacaacagcg

SEQ ID NO: 35919 - DNA, 25 bp, probe
ctataccggaaaggtgtgatcaagg

SEQ ID NO: 35920 - DNA, 25 bp, probe
atactggatcctgaagaactcctgg

SEQ ID NO: 35921 - DNA, 25 bp, probe
ccatactggatcctgaagaactcct

SEQ ID NO: 35922 - DNA, 25 bp, probe
ttcagctataccggaaaggtgtgat

SEQ ID NO: 35923 - DNA, 25 bp, probe
gctataccggaaaggtgtgatcaag

SEQ ID NO: 35924 - DNA, 25 bp, probe
tcagctataccggaaaggtgtgatc

SEQ ID NO: 35925 - DNA, 25 bp, probe
agctataccggaaaggtgtgatcaa

SEQ ID NO: 35926 - DNA, 25 bp, probe
cttcagctataccggaaaggtgtga

SEQ ID NO: 35927 - DNA, 25 bp, probe
ccaatggggagagaagggctatttc

SEQ ID NO: 35928 - DNA, 25 bp, probe
cgcgttcataactgtcctcaacaac

SEQ ID NO: 35929 - DNA, 25 bp, probe
cagctataccggaaaggtgtgatca

SEQ ID NO: 35930 - DNA, 25 bp, probe
tcataactgtcctcaacaacagcgg

SEQ ID NO: 35931 - DNA, 25 bp, probe
caatggggagagaagggctatttcc

SEQ ID NO: 35932 - DNA, 25 bp, probe
tataccggaaaggtgtgatcaaggc

SEQ ID NO: 35933 - DNA, 25 bp, probe
ggatatgggcagagacagtctcatc

SEQ ID NO: 35934 - DNA, 25 bp, probe
cagtgaaaaggactacccgttccag

SEQ ID NO: 35935 - DNA, 25 bp, probe
cccatactggatcctgaagaactcc

SEQ ID NO: 35936 - DNA, 25 bp, probe
gatatgggcagagacagtctcatcg

SEQ ID NO: 35937 - DNA, 25 bp, probe
tactggatcctgaagaactcctggg

SEQ ID NO: 35938 - DNA, 25 bp, probe
ccttcagctataccggaaaggtgtg

SEQ ID NO: 35939 - DNA, 25 bp, probe
ccccatactggatcctgaagaactc

SEQ ID NO: 35940 - DNA, 25 bp, probe
caccccatactggatcctgaagaac

SEQ ID NO: 35941 - DNA, 25 bp, probe
accccatactggatcctgaagaact

SEQ ID NO: 35942 - DNA, 25 bp, probe
cttcttcagcagaggacttgatatt

SEQ ID NO: 35943 - DNA, 25 bp, probe
agagttcagacttatcaccattctt

SEQ ID NO: 35944 - DNA, 25 bp, probe
aagagttcagacttatcaccattct

SEQ ID NO: 35945 - DNA, 25 bp, probe
tcttcttcagcagaggacttgatat

SEQ ID NO: 35946 - DNA, 25 bp, probe
acttatcaccattcttatgtcactt

SEQ ID NO: 35947 - DNA, 25 bp, probe
gagttcagacttatcaccattctta

SEQ ID NO: 35948 - DNA, 25 bp, probe
ttcagacttatcaccattcttatgt

SEQ ID NO: 35949 - DNA, 25 bp, probe
gacttatcaccattcttatgtcact

SEQ ID NO: 35950 - DNA, 25 bp, probe
agacttatcaccattcttatgtcac

SEQ ID NO: 35951 - DNA, 25 bp, probe
cagacttatcaccattcttatgtca

SEQ ID NO: 35952 - DNA, 25 bp, probe
gttcagacttatcaccattcttatg

SEQ ID NO: 35953 - DNA, 25 bp, probe
gtcttcttcagcagaggacttgata

SEQ ID NO: 35954 - DNA, 25 bp, probe
tcagacttatcaccattcttatgtc

SEQ ID NO: 35955 - DNA, 25 bp, probe
gggcaataatatggcatttaagagg

SEQ ID NO: 35956 - DNA, 25 bp, probe
tgtgggcaataatatggcatttaag

SEQ ID NO: 35957 - DNA, 25 bp, probe
ctgtgggcaataatatggcatttaa

SEQ ID NO: 35958 - DNA, 25 bp, probe
tatggcatttaagaggtgaaagagt

SEQ ID NO: 35959 - DNA, 25 bp, probe
gtgggcaataatatggcatttaaga

SEQ ID NO: 35960 - DNA, 25 bp, probe
agttcagacttatcaccattcttat

SEQ ID NO: 35961 - DNA, 25 bp, probe
atggcatttaagaggtgaaagagtt

SEQ ID NO: 35962 - DNA, 25 bp, probe
ggcaataatatggcatttaagaggt

SEQ ID NO: 35963 - DNA, 25 bp, probe
tgggcaataatatggcatttaagag

SEQ ID NO: 35964 - DNA, 25 bp, probe
actgtgggcaataatatggcattta

SEQ ID NO: 35965 - DNA, 25 bp, probe
atatggcatttaagaggtgaaagag

SEQ ID NO: 35966 - DNA, 25 bp, probe
ttcttcagcagaggacttgatattt

SEQ ID NO: 35967 - DNA, 25 bp, probe
gcaataatatggcatttaagaggtg

SEQ ID NO: 35968 - DNA, 25 bp, probe
tggcatttaagaggtgaaagagttc

SEQ ID NO: 35969 - DNA, 25 bp, probe
aactgtgggcaataatatggcattt

SEQ ID NO: 35970 - DNA, 25 bp, probe
aatatggcatttaagaggtgaaaga

SEQ ID NO: 35971 - DNA, 25 bp, probe
tatttggcaactgtgggcaataata

SEQ ID NO: 35972 - DNA, 25 bp, probe
aaagagttcagacttatcaccattc

SEQ ID NO: 35973 - DNA, 25 bp, probe
gaaagagttcagacttatcaccatt

SEQ ID NO: 35974 - DNA, 25 bp, probe
atttggcaactgtgggcaataatat

SEQ ID NO: 35975 - DNA, 25 bp, probe
tcttatgtcactttagaatcaaggg

SEQ ID NO: 35976 - DNA, 25 bp, probe
caactgtgggcaataatatggcatt

SEQ ID NO: 35977 - DNA, 25 bp, probe
atcaccattcttatgtcactttaga

SEQ ID NO: 35978 - DNA, 25 bp, probe
tttggcaactgtgggcaataatatg

SEQ ID NO: 35979 - DNA, 25 bp, probe
gtatttggcaactgtgggcaataat

SEQ ID NO: 35980 - DNA, 25 bp, probe
caataatatggcatttaagaggtga

SEQ ID NO: 35981 - DNA, 25 bp, probe
taatatggcatttaagaggtgaaag

SEQ ID NO: 35982 - DNA, 25 bp, probe
cttatcaccattcttatgtcacttt

SEQ ID NO: 35983 - DNA, 25 bp, probe
gagtgttcctgagagttgaaagtgg

SEQ ID NO: 35984 - DNA, 25 bp, probe
atatataaaccatgtcgtttccgtg

SEQ ID NO: 35985 - DNA, 25 bp, probe
catatataaaccatgtcgtttccgt

SEQ ID NO: 35986 - DNA, 25 bp, probe
ctcaccaataaccagctcttcttcc

SEQ ID NO: 35987 - DNA, 25 bp, probe
cctcaccaataaccagctcttcttc

SEQ ID NO: 35988 - DNA, 25 bp, probe
tcaccaataaccagctcttcttcct

SEQ ID NO: 35989 - DNA, 25 bp, probe
catggtagagcagtacagcaactac

SEQ ID NO: 35990 - DNA, 25 bp, probe
caccaataaccagctcttcttcctg

SEQ ID NO: 35991 - DNA, 25 bp, probe
atggtagagcagtacagcaactaca

SEQ ID NO: 35992 - DNA, 25 bp, probe
cttaccagaactgggtgaagaagaa

SEQ ID NO: 35993 - DNA, 25 bp, probe
gcatggtagagcagtacagcaacta

SEQ ID NO: 35994 - DNA, 25 bp, probe
tggtagagcagtacagcaactacag

SEQ ID NO: 35995 - DNA, 25 bp, probe
ttaccagaactgggtgaagaagaac

SEQ ID NO: 35996 - DNA, 25 bp, probe
attccaaggagttctcagaacactt

SEQ ID NO: 35997 - DNA, 25 bp, probe
aattccaaggagttctcagaacact

SEQ ID NO: 35998 - DNA, 25 bp, probe
caattccaaggagttctcagaacac

SEQ ID NO: 35999 - DNA, 25 bp, probe
ttccaaggagttctcagaacacttc

SEQ ID NO: 36000 - DNA, 25 bp, probe
tccaattccaaggagttctcagaac

SEQ ID NO: 36001 - DNA, 25 bp, probe
gcctcaccaataaccagctcttctt

SEQ ID NO: 36002 - DNA, 25 bp, probe
ccaattccaaggagttctcagaaca

SEQ ID NO: 36003 - DNA, 25 bp, probe
gatcaaggacgggagtatgacaagg

SEQ ID NO: 36004 - DNA, 25 bp, probe
ctccaattccaaggagttctcagaa

SEQ ID NO: 36005 - DNA, 25 bp, probe
atcaaggacgggagtatgacaagga

SEQ ID NO: 36006 - DNA, 25 bp, probe
ctctccaattccaaggagttctcag

SEQ ID NO: 36007 - DNA, 25 bp, probe
ggtagagcagtacagcaactacagc

SEQ ID NO: 36008 - DNA, 25 bp, probe
tctccaattccaaggagttctcaga

SEQ ID NO: 36009 - DNA, 25 bp, probe
atgatcaaggacgggagtatgacaa

SEQ ID NO: 36010 - DNA, 25 bp, probe
tccaaggagttctcagaacacttcc

SEQ ID NO: 36011 - DNA, 25 bp, probe
taccagaactgggtgaagaagaacg

SEQ ID NO: 36012 - DNA, 25 bp, probe
gcttaccagaactgggtgaagaaga

SEQ ID NO: 36013 - DNA, 25 bp, probe
gatgatcaaggacgggagtatgaca

SEQ ID NO: 36014 - DNA, 25 bp, probe
tgatgatcaaggacgggagtatgac

SEQ ID NO: 36015 - DNA, 25 bp, probe
gagctgactcatgcttttgatgatc

SEQ ID NO: 36016 - DNA, 25 bp, probe
tttgatgatcaaggacgggagtatg

SEQ ID NO: 36017 - DNA, 25 bp, probe
tgatcaaggacgggagtatgacaag

SEQ ID NO: 36018 - DNA, 25 bp, probe
cctctccaattccaaggagttctca

SEQ ID NO: 36019 - DNA, 25 bp, probe
ttgatgatcaaggacgggagtatga

SEQ ID NO: 36020 - DNA, 25 bp, probe
ggcttaccagaactgggtgaagaag

SEQ ID NO: 36021 - DNA, 25 bp, probe
ctgactcatgcttttgatgatcaag

SEQ ID NO: 36022 - DNA, 25 bp, probe
ccaaggagttctcagaacacttccg

SEQ ID NO: 36023 - DNA, 25 bp, probe
gactcatgcttttgatgatcaagga

SEQ ID NO: 36024 - DNA, 25 bp, probe
actcatgcttttgatgatcaaggac

SEQ ID NO: 36025 - DNA, 25 bp, probe
tgactcatgcttttgatgatcaagg

SEQ ID NO: 36026 - DNA, 25 bp, probe
accaataaccagctcttcttcctgg

SEQ ID NO: 36027 - DNA, 25 bp, probe
ttttgatgatcaaggacgggagtat

SEQ ID NO: 36028 - DNA, 25 bp, probe
tgagctgactcatgcttttgatgat

SEQ ID NO: 36029 - DNA, 25 bp, probe
gctgactcatgcttttgatgatcaa

SEQ ID NO: 36030 - DNA, 25 bp, probe
agcattactttaactggtagggaac

SEQ ID NO: 36031 - DNA, 25 bp, probe
aaggaagcccactttatctaaatga

SEQ ID NO: 36032 - DNA, 25 bp, probe
gatgaagatggtttggaggtgtaaa

SEQ ID NO: 36033 - DNA, 25 bp, probe
aagcattactttaactggtagggaa

SEQ ID NO: 36034 - DNA, 25 bp, probe
aggaagcccactttatctaaatgat

SEQ ID NO: 36035 - DNA, 25 bp, probe
aaaccaagggagatttcttagcaaa

SEQ ID NO: 36036 - DNA, 25 bp, probe
gcataaggaagcccactttatctaa

SEQ ID NO: 36037 - DNA, 25 bp, probe
taagcattactttaactggtaggga

SEQ ID NO: 36038 - DNA, 25 bp, probe
caattaaaccgagagatgtcttgtt

SEQ ID NO: 36039 - DNA, 25 bp, probe
agatgaagatggtttggaggtgtaa

SEQ ID NO: 36040 - DNA, 25 bp, probe
aagatgaagatggtttggaggtgta

SEQ ID NO: 36041 - DNA, 25 bp, probe
tgtatttgtttcaggaagaagtcat

SEQ ID NO: 36042 - DNA, 25 bp, probe
atgtatttgtttcaggaagaagtca

SEQ ID NO: 36043 - DNA, 25 bp, probe
caaaccaagggagatttcttagcaa

SEQ ID NO: 36044 - DNA, 25 bp, probe
taaggaagcccactttatctaaatg

SEQ ID NO: 36045 - DNA, 25 bp, probe
tttccttcactttagtttcaaaccc

SEQ ID NO: 36046 - DNA, 25 bp, probe
tttggaatttggttgaagtcacttt

SEQ ID NO: 36047 - DNA, 25 bp, probe
ccttcactttagtttcaaacccaag

SEQ ID NO: 36048 - DNA, 25 bp, probe
cataaggaagcccactttatctaaa

SEQ ID NO: 36049 - DNA, 25 bp, probe
cattactttaactggtagggaacgc

SEQ ID NO: 36050 - DNA, 25 bp, probe
gcattactttaactggtagggaacg

SEQ ID NO: 36051 - DNA, 25 bp, probe
aagggagatttcttagcaaatgagt

SEQ ID NO: 36052 - DNA, 25 bp, probe
caagggagatttcttagcaaatgag

SEQ ID NO: 36053 - DNA, 25 bp, probe
ttggaatttggttgaagtcactttg

SEQ ID NO: 36054 - DNA, 25 bp, probe
tccttcactttagtttcaaacccaa

SEQ ID NO: 36055 - DNA, 25 bp, probe
ttccttcactttagtttcaaaccca

SEQ ID NO: 36056 - DNA, 25 bp, probe
tgtgattcatttcaagcaacaacat

SEQ ID NO: 36057 - DNA, 25 bp, probe
gggagatttcttagcaaatgagtct

SEQ ID NO: 36058 - DNA, 25 bp, probe
agggagatttcttagcaaatgagtc

SEQ ID NO: 36059 - DNA, 25 bp, probe
tcatatccattgaagccgaaatctg

SEQ ID NO: 36060 - DNA, 25 bp, probe
aaccaagggagatttcttagcaaat

SEQ ID NO: 36061 - DNA, 25 bp, probe
ttaagcattactttaactggtaggg

SEQ ID NO: 36062 - DNA, 25 bp, probe
ctttagtttcaaacccaagtgagtg

SEQ ID NO: 36063 - DNA, 25 bp, probe
tgagtctaacaaatatgacatccgt

SEQ ID NO: 36064 - DNA, 25 bp, probe
gtcaactcttcttcctagaactgga

SEQ ID NO: 36065 - DNA, 25 bp, probe
ggaatttggttgaagtcactttgat

SEQ ID NO: 36066 - DNA, 25 bp, probe
agtctaacaaatatgacatccgtct

SEQ ID NO: 36067 - DNA, 25 bp, probe
ccaagggagatttcttagcaaatga

SEQ ID NO: 36068 - DNA, 25 bp, probe
tgtgttaccatttcatatccattga

SEQ ID NO: 36069 - DNA, 25 bp, probe
gagtctaacaaatatgacatccgtc

SEQ ID NO: 36070 - DNA, 25 bp, probe
tggttgaagtcactttgatttcttt

SEQ ID NO: 36071 - DNA, 25 bp, probe
ttggttgaagtcactttgatttctt

SEQ ID NO: 36072 - DNA, 25 bp, probe
tttggttgaagtcactttgatttct

SEQ ID NO: 36073 - DNA, 25 bp, probe
gcaattaaaccgagagatgtcttgt

SEQ ID NO: 36074 - DNA, 25 bp, probe
cagatccagaagaccttgagagtag

SEQ ID NO: 36075 - DNA, 25 bp, probe
ctatgctcatctctctctccttcct

SEQ ID NO: 36076 - DNA, 25 bp, probe
tatgctcatctctctctccttcctg

SEQ ID NO: 36077 - DNA, 25 bp, probe
ggatgtgtgtgtttattatgtggag

SEQ ID NO: 36078 - DNA, 25 bp, probe
ctggtggatgtgtgtgtttattatg

SEQ ID NO: 36079 - DNA, 25 bp, probe
tggatgtgtgtgtttattatgtgga

SEQ ID NO: 36080 - DNA, 25 bp, probe
gtggatgtgtgtgtttattatgtgg

SEQ ID NO: 36081 - DNA, 25 bp, probe
ggtggatgtgtgtgtttattatgtg

SEQ ID NO: 36082 - DNA, 25 bp, probe
tggtggatgtgtgtgtttattatgt

SEQ ID NO: 36083 - DNA, 25 bp, probe
atgtgtgtgtttattatgtggagtc

SEQ ID NO: 36084 - DNA, 25 bp, probe
gatgtgtgtgtttattatgtggagt

SEQ ID NO: 36085 - DNA, 25 bp, probe
ctttcctgtctgtgtaaattgttcc

SEQ ID NO: 36086 - DNA, 25 bp, probe
tctttcctgtctgtgtaaattgttc

SEQ ID NO: 36087 - DNA, 25 bp, probe
ttaacagcagatccagaagaccttg

SEQ ID NO: 36088 - DNA, 25 bp, probe
ttccactcctcctttattcccttaa

SEQ ID NO: 36089 - DNA, 25 bp, probe
cctggtggatgtgtgtgtttattat

SEQ ID NO: 36090 - DNA, 25 bp, probe
ctctttcctgtctgtgtaaattgtt

SEQ ID NO: 36091 - DNA, 25 bp, probe
cctctttcctgtctgtgtaaattgt

SEQ ID NO: 36092 - DNA, 25 bp, probe
gttccactcctcctttattccctta

SEQ ID NO: 36093 - DNA, 25 bp, probe
tgtgtgtgtttattatgtggagtcc

SEQ ID NO: 36094 - DNA, 25 bp, probe
tccactcctcctttattcccttaaa

SEQ ID NO: 36095 - DNA, 25 bp, probe
cctatgctcatctctctctccttcc

SEQ ID NO: 36096 - DNA, 25 bp, probe
gtgtgtttattatgtggagtccctg

SEQ ID NO: 36097 - DNA, 25 bp, probe
ccctctttcctgtctgtgtaaattg

SEQ ID NO: 36098 - DNA, 25 bp, probe
tttcctgtctgtgtaaattgttccg

SEQ ID NO: 36099 - DNA, 25 bp, probe
tgtgtgtttattatgtggagtccct

SEQ ID NO: 36100 - DNA, 25 bp, probe
gtgtgtgtttattatgtggagtccc

SEQ ID NO: 36101 - DNA, 25 bp, probe
tgtctgtgtaaattgttccgtgaag

SEQ ID NO: 36102 - DNA, 25 bp, probe
ctgtctgtgtaaattgttccgtgaa

SEQ ID NO: 36103 - DNA, 25 bp, probe
taacagcagatccagaagaccttga

SEQ ID NO: 36104 - DNA, 25 bp, probe
agatccagaagaccttgagagtagg

SEQ ID NO: 36105 - DNA, 25 bp, probe
caaaccctatgctcatctctctctc

SEQ ID NO: 36106 - DNA, 25 bp, probe
gttactgtttacaagtccagattca

SEQ ID NO: 36107 - DNA, 25 bp, probe
tgttactgtttacaagtccagattc

SEQ ID NO: 36108 - DNA, 25 bp, probe
gcagatccagaagaccttgagagta

SEQ ID NO: 36109 - DNA, 25 bp, probe
tttaacagcagatccagaagacctt

SEQ ID NO: 36110 - DNA, 25 bp, probe
ctgccacttactgccttatgaccta

SEQ ID NO: 36111 - DNA, 25 bp, probe
tactgtttacaagtccagattcaaa

SEQ ID NO: 36112 - DNA, 25 bp, probe
ttactgtttacaagtccagattcaa

SEQ ID NO: 36113 - DNA, 25 bp, probe
ttcctgtctgtgtaaattgttccgt

SEQ ID NO: 36114 - DNA, 25 bp, probe
tgccacttactgccttatgacctag

SEQ ID NO: 36115 - DNA, 25 bp, probe
ggagggtgtctttactatgtcctag

SEQ ID NO: 36116 - DNA, 25 bp, probe
agcttcctgggagattagaaattct

SEQ ID NO: 36117 - DNA, 25 bp, probe
agaaattctacttccctgactggag

SEQ ID NO: 36118 - DNA, 25 bp, probe
atgctggatgctaacttgatactaa

SEQ ID NO: 36119 - DNA, 25 bp, probe
gatgctggatgctaacttgatacta

SEQ ID NO: 36120 - DNA, 25 bp, probe
tgctggatgctaacttgatactaac

SEQ ID NO: 36121 - DNA, 25 bp, probe
gctggatgctaacttgatactaacc

SEQ ID NO: 36122 - DNA, 25 bp, probe
aagatgctggatgctaacttgatac

SEQ ID NO: 36123 - DNA, 25 bp, probe
agatgctggatgctaacttgatact

SEQ ID NO: 36124 - DNA, 25 bp, probe
cttcttggaattggctctcttcttc

SEQ ID NO: 36125 - DNA, 25 bp, probe
ttactccaagcatgtattccagact

SEQ ID NO: 36126 - DNA, 25 bp, probe
ttcttggaattggctctcttcttca

SEQ ID NO: 36127 - DNA, 25 bp, probe
tactccaagcatgtattccagactt

SEQ ID NO: 36128 - DNA, 25 bp, probe
tcttggaattggctctcttcttcaa

SEQ ID NO: 36129 - DNA, 25 bp, probe
ctggatgctaacttgatactaacca

SEQ ID NO: 36130 - DNA, 25 bp, probe
tggatgctaacttgatactaaccat

SEQ ID NO: 36131 - DNA, 25 bp, probe
aaatacaaagatgctggatgctaac

SEQ ID NO: 36132 - DNA, 25 bp, probe
agtttggttgttgctgtaaatatgg

SEQ ID NO: 36133 - DNA, 25 bp, probe
aatacaaagatgctggatgctaact

SEQ ID NO: 36134 - DNA, 25 bp, probe
ttggttgttgctgtaaatatggtag

SEQ ID NO: 36135 - DNA, 25 bp, probe
gtttggttgttgctgtaaatatggt

SEQ ID NO: 36136 - DNA, 25 bp, probe
ccttcttggaattggctctcttctt

SEQ ID NO: 36137 - DNA, 25 bp, probe
tttggttgttgctgtaaatatggta

SEQ ID NO: 36138 - DNA, 25 bp, probe
aaagatgctggatgctaacttgata

SEQ ID NO: 36139 - DNA, 25 bp, probe
atacaaagatgctggatgctaactt

SEQ ID NO: 36140 - DNA, 25 bp, probe
aagcatgtattccagacttgtcact

SEQ ID NO: 36141 - DNA, 25 bp, probe
atgtattccagacttgtcactgact

SEQ ID NO: 36142 - DNA, 25 bp, probe
catgtattccagacttgtcactgac

SEQ ID NO: 36143 - DNA, 25 bp, probe
aaatgctactttgtctaacctgctg

SEQ ID NO: 36144 - DNA, 25 bp, probe
tgtattccagacttgtcactgactt

SEQ ID NO: 36145 - DNA, 25 bp, probe
tacaaagatgctggatgctaacttg

SEQ ID NO: 36146 - DNA, 25 bp, probe
atttactccaagcatgtattccaga

SEQ ID NO: 36147 - DNA, 25 bp, probe
ctccctgtgaagagagagttaatat

SEQ ID NO: 36148 - DNA, 25 bp, probe
tgctaacttgatactaaccatcaga

SEQ ID NO: 36149 - DNA, 25 bp, probe
catttactccaagcatgtattccag

SEQ ID NO: 36150 - DNA, 25 bp, probe
ttggaattggctctcttcttcaaag

SEQ ID NO: 36151 - DNA, 25 bp, probe
cttggaattggctctcttcttcaaa

SEQ ID NO: 36152 - DNA, 25 bp, probe
tttactccaagcatgtattccagac

SEQ ID NO: 36153 - DNA, 25 bp, probe
caccatttactccaagcatgtattc

SEQ ID NO: 36154 - DNA, 25 bp, probe
caaagatgctggatgctaacttgat

SEQ ID NO: 36155 - DNA, 25 bp, probe
tcaccatttactccaagcatgtatt

SEQ ID NO: 36156 - DNA, 25 bp, probe
gctccctgtgaagagagagttaata

SEQ ID NO: 36157 - DNA, 25 bp, probe
cagtttggttgttgctgtaaatatg

SEQ ID NO: 36158 - DNA, 25 bp, probe
tccctgtgaagagagagttaatata

SEQ ID NO: 36159 - DNA, 25 bp, probe
ccatttactccaagcatgtattcca

SEQ ID NO: 36160 - DNA, 25 bp, probe
accatttactccaagcatgtattcc

SEQ ID NO: 36161 - DNA, 25 bp, probe
gtcaccatttactccaagcatgtat

SEQ ID NO: 36162 - DNA, 25 bp, probe
ctgttggatggaggtgttaatgatg

SEQ ID NO: 36163 - DNA, 25 bp, probe
gatcctgctcaattccagtatgtac

SEQ ID NO: 36164 - DNA, 25 bp, probe
tgatcctgctcaattccagtatgta

SEQ ID NO: 36165 - DNA, 25 bp, probe
tgttggatggaggtgttaatgatgg

SEQ ID NO: 36166 - DNA, 25 bp, probe
catgatcctgctcaattccagtatg

SEQ ID NO: 36167 - DNA, 25 bp, probe
atgatcctgctcaattccagtatgt

SEQ ID NO: 36168 - DNA, 25 bp, probe
gctgttggatggaggtgttaatgat

SEQ ID NO: 36169 - DNA, 25 bp, probe
aactccaacacaaagaatatctctg

SEQ ID NO: 36170 - DNA, 25 bp, probe
atcctgctcaattccagtatgtacc

SEQ ID NO: 36171 - DNA, 25 bp, probe
aattctggaaatctttgacatgctc

SEQ ID NO: 36172 - DNA, 25 bp, probe
actccaacacaaagaatatctctgt

SEQ ID NO: 36173 - DNA, 25 bp, probe
aaactccaacacaaagaatatctct

SEQ ID NO: 36174 - DNA, 25 bp, probe
acaaagaatatctctgtgtcaaggc

SEQ ID NO: 36175 - DNA, 25 bp, probe
atggaacatctgctcaacatgaagt

SEQ ID NO: 36176 - DNA, 25 bp, probe
ccatgatcctgctcaattccagtat

SEQ ID NO: 36177 - DNA, 25 bp, probe
actacttcaaggtttcgagagttaa

SEQ ID NO: 36178 - DNA, 25 bp, probe
aagaatatctctgtgtcaaggccat

SEQ ID NO: 36179 - DNA, 25 bp, probe
ctacttcaaggtttcgagagttaaa

SEQ ID NO: 36180 - DNA, 25 bp, probe
tggaacatctgctcaacatgaagtg

SEQ ID NO: 36181 - DNA, 25 bp, probe
aatatctctgtgtcaaggccatgat

SEQ ID NO: 36182 - DNA, 25 bp, probe
attctggaaatctttgacatgctcc

SEQ ID NO: 36183 - DNA, 25 bp, probe
tgctcaattccagtatgtaccctct

SEQ ID NO: 36184 - DNA, 25 bp, probe
gagctgttggatggaggtgttaatg

SEQ ID NO: 36185 - DNA, 25 bp, probe
agagctgttggatggaggtgttaat

SEQ ID NO: 36186 - DNA, 25 bp, probe
gttggatggaggtgttaatgatggg

SEQ ID NO: 36187 - DNA, 25 bp, probe
agaatatctctgtgtcaaggccatg

SEQ ID NO: 36188 - DNA, 25 bp, probe
atatctctgtgtcaaggccatgatc

SEQ ID NO: 36189 - DNA, 25 bp, probe
gaattctggaaatctttgacatgct

SEQ ID NO: 36190 - DNA, 25 bp, probe
aggaattctggaaatctttgacatg

SEQ ID NO: 36191 - DNA, 25 bp, probe
gaatatctctgtgtcaaggccatga

SEQ ID NO: 36192 - DNA, 25 bp, probe
ggaattctggaaatctttgacatgc

SEQ ID NO: 36193 - DNA, 25 bp, probe
gaaggaattctggaaatctttgaca

SEQ ID NO: 36194 - DNA, 25 bp, probe
gctcaattccagtatgtaccctctg

SEQ ID NO: 36195 - DNA, 25 bp, probe
ctgctcaattccagtatgtaccctc

SEQ ID NO: 36196 - DNA, 25 bp, probe
agctgttggatggaggtgttaatga

SEQ ID NO: 36197 - DNA, 25 bp, probe
aaggaattctggaaatctttgacat

SEQ ID NO: 36198 - DNA, 25 bp, probe
ttctggaaatctttgacatgctcct

SEQ ID NO: 36199 - DNA, 25 bp, probe
catggaacatctgctcaacatgaag

SEQ ID NO: 36200 - DNA, 25 bp, probe
gagagctgttggatggaggtgttaa

SEQ ID NO: 36201 - DNA, 25 bp, probe
caaagaatatctctgtgtcaaggcc

SEQ ID NO: 36202 - DNA, 25 bp, probe
aactacttcaaggtttcgagagtta

SEQ ID NO: 36203 - DNA, 25 bp, probe
gagtaacaagggcatggaacatctg

SEQ ID NO: 36204 - DNA, 25 bp, probe
aaaactccaacacaaagaatatctc

SEQ ID NO: 36205 - DNA, 25 bp, probe
gcaactacttcaaggtttcgagagt

SEQ ID NO: 36206 - DNA, 25 bp, probe
aatatgattgtgtgactccttgtag

SEQ ID NO: 36207 - DNA, 25 bp, probe
atgattgtgtgactccttgtagtta

SEQ ID NO: 36208 - DNA, 25 bp, probe
tatgattgtgtgactccttgtagtt

SEQ ID NO: 36209 - DNA, 25 bp, probe
tgattgtgtgactccttgtagttac

SEQ ID NO: 36210 - DNA, 25 bp, probe
atatgattgtgtgactccttgtagt

SEQ ID NO: 36211 - DNA, 25 bp, probe
actccaatcagttcagatgtgtaac

SEQ ID NO: 36212 - DNA, 25 bp, probe
ctccaatcagttcagatgtgtaacc

SEQ ID NO: 36213 - DNA, 25 bp, probe
gattgtgtgactccttgtagttaca

SEQ ID NO: 36214 - DNA, 25 bp, probe
ttcaggatgatggtagagcaatatt

SEQ ID NO: 36215 - DNA, 25 bp, probe
gtgactccttgtagttacacttgtg

SEQ ID NO: 36216 - DNA, 25 bp, probe
ctgcttataataatccaggagttgc

SEQ ID NO: 36217 - DNA, 25 bp, probe
ggagttgcattatagccagtagtaa

SEQ ID NO: 36218 - DNA, 25 bp, probe
caggatgatggtagagcaatattaa

SEQ ID NO: 36219 - DNA, 25 bp, probe
tcaggatgatggtagagcaatatta

SEQ ID NO: 36220 - DNA, 25 bp, probe
gactccttgtagttacacttgtgtt

SEQ ID NO: 36221 - DNA, 25 bp, probe
tgtgactccttgtagttacacttgt

SEQ ID NO: 36222 - DNA, 25 bp, probe
aggagttgcattatagccagtagta

SEQ ID NO: 36223 - DNA, 25 bp, probe
gcttataataatccaggagttgcat

SEQ ID NO: 36224 - DNA, 25 bp, probe
ttatttaagcgtctctgtttacctg

SEQ ID NO: 36225 - DNA, 25 bp, probe
tcagttcagatgtgtaacccaaata

SEQ ID NO: 36226 - DNA, 25 bp, probe
atcagttcagatgtgtaacccaaat

SEQ ID NO: 36227 - DNA, 25 bp, probe
aatcagttcagatgtgtaacccaaa

SEQ ID NO: 36228 - DNA, 25 bp, probe
tatttaagcgtctctgtttacctgc

SEQ ID NO: 36229 - DNA, 25 bp, probe
aagcaatatgattgtgtgactcctt

SEQ ID NO: 36230 - DNA, 25 bp, probe
tgactccttgtagttacacttgtgt

SEQ ID NO: 36231 - DNA, 25 bp, probe
cagttcagatgtgtaacccaaatat

SEQ ID NO: 36232 - DNA, 25 bp, probe
actgcttataataatccaggagttg

SEQ ID NO: 36233 - DNA, 25 bp, probe
ctttcaggatgatggtagagcaata

SEQ ID NO: 36234 - DNA, 25 bp, probe
caatatgattgtgtgactccttgta

SEQ ID NO: 36235 - DNA, 25 bp, probe
tttcaggatgatggtagagcaatat

SEQ ID NO: 36236 - DNA, 25 bp, probe
caatcagttcagatgtgtaacccaa

SEQ ID NO: 36237 - DNA, 25 bp, probe
agcaatatgattgtgtgactccttg

SEQ ID NO: 36238 - DNA, 25 bp, probe
taatccaggagttgcattatagcca

SEQ ID NO: 36239 - DNA, 25 bp, probe
attatttaagcgtctctgtttacct

SEQ ID NO: 36240 - DNA, 25 bp, probe
gcaatatgattgtgtgactccttgt

SEQ ID NO: 36241 - DNA, 25 bp, probe
cttcacatctgtaaagcaatcaatt

SEQ ID NO: 36242 - DNA, 25 bp, probe
cacttgtgtttcaatcagatcagat

SEQ ID NO: 36243 - DNA, 25 bp, probe
caggagttgcattatagccagtagt

SEQ ID NO: 36244 - DNA, 25 bp, probe
tttgtgatgtgtaccatactgtgtg

SEQ ID NO: 36245 - DNA, 25 bp, probe
aactccaatcagttcagatgtgtaa

SEQ ID NO: 36246 - DNA, 25 bp, probe
ctgtaactccaatcagttcagatgt

SEQ ID NO: 36247 - DNA, 25 bp, probe
atattatgcctttcaggatgatggt

SEQ ID NO: 36248 - DNA, 25 bp, probe
taactccaatcagttcagatgtgta

SEQ ID NO: 36249 - DNA, 25 bp, probe
gattctgtaactccaatcagttcag

SEQ ID NO: 36250 - DNA, 25 bp, probe
aatggagaactgaggactattcaag

SEQ ID NO: 36251 - DNA, 25 bp, probe
tgtgtactgattgctataatggtga

SEQ ID NO: 36252 - DNA, 25 bp, probe
ctgtgtactgattgctataatggtg

SEQ ID NO: 36253 - DNA, 25 bp, probe
tctgtgtactgattgctataatggt

SEQ ID NO: 36254 - DNA, 25 bp, probe
gtgtactgattgctataatggtgaa

SEQ ID NO: 36255 - DNA, 25 bp, probe
ttctgtgtactgattgctataatgg

SEQ ID NO: 36256 - DNA, 25 bp, probe
gagtaattatctgtgatggatggac

SEQ ID NO: 36257 - DNA, 25 bp, probe
agagtaattatctgtgatggatgga

SEQ ID NO: 36258 - DNA, 25 bp, probe
gagaactgaggactattcaagcgat

SEQ ID NO: 36259 - DNA, 25 bp, probe
atggagaactgaggactattcaagc

SEQ ID NO: 36260 - DNA, 25 bp, probe
agtaattatctgtgatggatggaca

SEQ ID NO: 36261 - DNA, 25 bp, probe
tcttacgctatttctgttggttagt

SEQ ID NO: 36262 - DNA, 25 bp, probe
cgctacattgagaacatttaccatt

SEQ ID NO: 36263 - DNA, 25 bp, probe
aactgaggactattcaagcgatgag

SEQ ID NO: 36264 - DNA, 25 bp, probe
gaactgaggactattcaagcgatga

SEQ ID NO: 36265 - DNA, 25 bp, probe
agaactgaggactattcaagcgatg

SEQ ID NO: 36266 - DNA, 25 bp, probe
gttatcttacgctatttctgttggt

SEQ ID NO: 36267 - DNA, 25 bp, probe
gtaattatctgtgatggatggacac

SEQ ID NO: 36268 - DNA, 25 bp, probe
gagaacatttaccattccaaaccaa

SEQ ID NO: 36269 - DNA, 25 bp, probe
aatgtaatgaggtggtactatgatt

SEQ ID NO: 36270 - DNA, 25 bp, probe
atcttacgctatttctgttggttag

SEQ ID NO: 36271 - DNA, 25 bp, probe
agttatcttacgctatttctgttgg

SEQ ID NO: 36272 - DNA, 25 bp, probe
cctgaaagtgagagtgaacctaaag

SEQ ID NO: 36273 - DNA, 25 bp, probe
agaacatttaccattccaaaccaat

SEQ ID NO: 36274 - DNA, 25 bp, probe
tgagaacatttaccattccaaacca

SEQ ID NO: 36275 - DNA, 25 bp, probe
acgctatttctgttggttagtagac

SEQ ID NO: 36276 - DNA, 25 bp, probe
tacgctatttctgttggttagtaga

SEQ ID NO: 36277 - DNA, 25 bp, probe
ttgagaacatttaccattccaaacc

SEQ ID NO: 36278 - DNA, 25 bp, probe
ttacgctatttctgttggttagtag

SEQ ID NO: 36279 - DNA, 25 bp, probe
cttacgctatttctgttggttagta

SEQ ID NO: 36280 - DNA, 25 bp, probe
ctgaaagtgagagtgaacctaaagg

SEQ ID NO: 36281 - DNA, 25 bp, probe
ttatcttacgctatttctgttggtt

SEQ ID NO: 36282 - DNA, 25 bp, probe
acctgaaagtgagagtgaacctaaa

SEQ ID NO: 36283 - DNA, 25 bp, probe
aacctgaaagtgagagtgaacctaa

SEQ ID NO: 36284 - DNA, 25 bp, probe
aaatggagaactgaggactattcaa

SEQ ID NO: 36285 - DNA, 25 bp, probe
acattgagaacatttaccattccaa

SEQ ID NO: 36286 - DNA, 25 bp, probe
gctacattgagaacatttaccattc

SEQ ID NO: 36287 - DNA, 25 bp, probe
tacattgagaacatttaccattcca

SEQ ID NO: 36288 - DNA, 25 bp, probe
gctatttctgttggttagtagacac

SEQ ID NO: 36289 - DNA, 25 bp, probe
cgctatttctgttggttagtagaca

SEQ ID NO: 36290 - DNA, 25 bp, probe
tagagtaattatctgtgatggatgg

SEQ ID NO: 36291 - DNA, 25 bp, probe
actgattgctataatggtgaaagtt

SEQ ID NO: 36292 - DNA, 25 bp, probe
caacctgaaagtgagagtgaaccta

SEQ ID NO: 36293 - DNA, 25 bp, probe
attgagaacatttaccattccaaac

SEQ ID NO: 36294 - DNA, 25 bp, probe
catcgtcatcgcttgctacttctac

SEQ ID NO: 36295 - DNA, 25 bp, probe
catcctatctcagctacaagtttct

SEQ ID NO: 36296 - DNA, 25 bp, probe
ccatcctatctcagctacaagtttc

SEQ ID NO: 36297 - DNA, 25 bp, probe
cctcttcatgatgctctacttcttc

SEQ ID NO: 36298 - DNA, 25 bp, probe
tgccatcctatctcagctacaagtt

SEQ ID NO: 36299 - DNA, 25 bp, probe
atcctcttcatgatgctctacttct

SEQ ID NO: 36300 - DNA, 25 bp, probe
tcctcttcatgatgctctacttctt

SEQ ID NO: 36301 - DNA, 25 bp, probe
atcctatctcagctacaagtttctg

SEQ ID NO: 36302 - DNA, 25 bp, probe
tcttcatgatgctctacttcttcag

SEQ ID NO: 36303 - DNA, 25 bp, probe
ctcttcatgatgctctacttcttca

SEQ ID NO: 36304 - DNA, 25 bp, probe
gatggttccatgttcttctcacagg

SEQ ID NO: 36305 - DNA, 25 bp, probe
cccctacagactccgtattttattt

SEQ ID NO: 36306 - DNA, 25 bp, probe
gccatcctatctcagctacaagttt

SEQ ID NO: 36307 - DNA, 25 bp, probe
tcctatctcagctacaagtttctgg

SEQ ID NO: 36308 - DNA, 25 bp, probe
ccatcgtcatcgcttgctacttcta

SEQ ID NO: 36309 - DNA, 25 bp, probe
cgatggttccatgttcttctcacag

SEQ ID NO: 36310 - DNA, 25 bp, probe
cttcttcactgtcaccacgtacttg

SEQ ID NO: 36311 - DNA, 25 bp, probe
gtgccatcctatctcagctacaagt

SEQ ID NO: 36312 - DNA, 25 bp, probe
ccctacagactccgtattttatttt

SEQ ID NO: 36313 - DNA, 25 bp, probe
atggttccatgttcttctcacagga

SEQ ID NO: 36314 - DNA, 25 bp, probe
ttccatgttcttctcacaggaggag

SEQ ID NO: 36315 - DNA, 25 bp, probe
cctatctcagctacaagtttctggg

SEQ ID NO: 36316 - DNA, 25 bp, probe
gcccctacagactccgtattttatt

SEQ ID NO: 36317 - DNA, 25 bp, probe
gttccatgttcttctcacaggagga

SEQ ID NO: 36318 - DNA, 25 bp, probe
cactcgtggaggaagttctacactc

SEQ ID NO: 36319 - DNA, 25 bp, probe
tggttccatgttcttctcacaggag

SEQ ID NO: 36320 - DNA, 25 bp, probe
acttcacggtctacatgatcaaata

SEQ ID NO: 36321 - DNA, 25 bp, probe
cttcacggtctacatgatcaaatac

SEQ ID NO: 36322 - DNA, 25 bp, probe
ggtgccatcctatctcagctacaag

SEQ ID NO: 36323 - DNA, 25 bp, probe
ctatctcagctacaagtttctgggc

SEQ ID NO: 36324 - DNA, 25 bp, probe
accatttcacttttaggttgctttt

SEQ ID NO: 36325 - DNA, 25 bp, probe
cttcatgatgctctacttcttcagc

SEQ ID NO: 36326 - DNA, 25 bp, probe
ccttcttcactgtcaccacgtactt

SEQ ID NO: 36327 - DNA, 25 bp, probe
catcctcttcatgatgctctacttc

SEQ ID NO: 36328 - DNA, 25 bp, probe
gacttcacggtctacatgatcaaat

SEQ ID NO: 36329 - DNA, 25 bp, probe
ccgatggttccatgttcttctcaca

SEQ ID NO: 36330 - DNA, 25 bp, probe
ttcacggtctacatgatcaaatacc

SEQ ID NO: 36331 - DNA, 25 bp, probe
caaggtgccatcctatctcagctac

SEQ ID NO: 36332 - DNA, 25 bp, probe
cacggtctacatgatcaaatacctc

SEQ ID NO: 36333 - DNA, 25 bp, probe
tcctcaaggtgccatcctatctcag

SEQ ID NO: 36334 - DNA, 25 bp, probe
ccatcctcttcatgatgctctactt

SEQ ID NO: 36335 - DNA, 25 bp, probe
tcaaggtgccatcctatctcagcta

SEQ ID NO: 36336 - DNA, 25 bp, probe
ggttccatgttcttctcacaggagg

SEQ ID NO: 36337 - DNA, 25 bp, probe
acggtctacatgatcaaatacctca

SEQ ID NO: 36338 - DNA, 25 bp, probe
cagcgaggttgatgtagataataat

SEQ ID NO: 36339 - DNA, 25 bp, probe
tcagcgaggttgatgtagataataa

SEQ ID NO: 36340 - DNA, 25 bp, probe
cagtaagtcacatgaagtaatggtc

SEQ ID NO: 36341 - DNA, 25 bp, probe
agcgaggttgatgtagataataatt

SEQ ID NO: 36342 - DNA, 25 bp, probe
agtaagtcacatgaagtaatggtca

SEQ ID NO: 36343 - DNA, 25 bp, probe
tcagtaagtcacatgaagtaatggt

SEQ ID NO: 36344 - DNA, 25 bp, probe
atcctgtgaaactggctttatagag

SEQ ID NO: 36345 - DNA, 25 bp, probe
tttgccttgaatggaacctactaaa

SEQ ID NO: 36346 - DNA, 25 bp, probe
acatttccaccaaacattatttcct

SEQ ID NO: 36347 - DNA, 25 bp, probe
tatcctgtgaaactggctttataga

SEQ ID NO: 36348 - DNA, 25 bp, probe
catttccaccaaacattatttcctc

SEQ ID NO: 36349 - DNA, 25 bp, probe
atttccaccaaacattatttcctct

SEQ ID NO: 36350 - DNA, 25 bp, probe
aacatttccaccaaacattatttcc

SEQ ID NO: 36351 - DNA, 25 bp, probe
atttatcctgtgaaactggctttat

SEQ ID NO: 36352 - DNA, 25 bp, probe
tatgggaccaaagactagacagaat

SEQ ID NO: 36353 - DNA, 25 bp, probe
ttatcctgtgaaactggctttatag

SEQ ID NO: 36354 - DNA, 25 bp, probe
aatttatcctgtgaaactggcttta

SEQ ID NO: 36355 - DNA, 25 bp, probe
tccaccaaacattatttcctctaaa

SEQ ID NO: 36356 - DNA, 25 bp, probe
ttccaccaaacattatttcctctaa

SEQ ID NO: 36357 - DNA, 25 bp, probe
tttccaccaaacattatttcctcta

SEQ ID NO: 36358 - DNA, 25 bp, probe
ctatgggaccaaagactagacagaa

SEQ ID NO: 36359 - DNA, 25 bp, probe
tttatcctgtgaaactggctttata

SEQ ID NO: 36360 - DNA, 25 bp, probe
aatcagcgaggttgatgtagataat

SEQ ID NO: 36361 - DNA, 25 bp, probe
atgggaccaaagactagacagaatt

SEQ ID NO: 36362 - DNA, 25 bp, probe
atcagcgaggttgatgtagataata

SEQ ID NO: 36363 - DNA, 25 bp, probe
tcctgtgaaactggctttatagagt

SEQ ID NO: 36364 - DNA, 25 bp, probe
agtagtaggcactgttgattcaaat

SEQ ID NO: 36365 - DNA, 25 bp, probe
tgaacatttccaccaaacattattt

SEQ ID NO: 36366 - DNA, 25 bp, probe
gtagtaggcactgttgattcaaatt

SEQ ID NO: 36367 - DNA, 25 bp, probe
aaatcatgggactgaatatacctgg

SEQ ID NO: 36368 - DNA, 25 bp, probe
atgaacatttccaccaaacattatt

SEQ ID NO: 36369 - DNA, 25 bp, probe
gtaagtcacatgaagtaatggtcat

SEQ ID NO: 36370 - DNA, 25 bp, probe
tttaatgaacatttccaccaaacat

SEQ ID NO: 36371 - DNA, 25 bp, probe
gaacatttccaccaaacattatttc

SEQ ID NO: 36372 - DNA, 25 bp, probe
atttctatgggaccaaagactagac

SEQ ID NO: 36373 - DNA, 25 bp, probe
aataatttctatgggaccaaagact

SEQ ID NO: 36374 - DNA, 25 bp, probe
tttctatgggaccaaagactagaca

SEQ ID NO: 36375 - DNA, 25 bp, probe
ttcagtaagtcacatgaagtaatgg

SEQ ID NO: 36376 - DNA, 25 bp, probe
aatttctatgggaccaaagactaga

SEQ ID NO: 36377 - DNA, 25 bp, probe
caaatttatcctgtgaaactggctt

SEQ ID NO: 36378 - DNA, 25 bp, probe
agacagaattcagtaagtcacatga

SEQ ID NO: 36379 - DNA, 25 bp, probe
aaatttatcctgtgaaactggcttt

SEQ ID NO: 36380 - DNA, 25 bp, probe
taatttctatgggaccaaagactag

SEQ ID NO: 36381 - DNA, 25 bp, probe
aatcatgggactgaatatacctggg

SEQ ID NO: 36382 - DNA, 25 bp, probe
ctcttcaacatcaacttctacgcag

SEQ ID NO: 36383 - DNA, 25 bp, probe
ttcaacatcaacttctacgcaggag

SEQ ID NO: 36384 - DNA, 25 bp, probe
cttcaacatcaacttctacgcagga

SEQ ID NO: 36385 - DNA, 25 bp, probe
tcttcaacatcaacttctacgcagg

SEQ ID NO: 36386 - DNA, 25 bp, probe
cctcttcaacatcaacttctacgca

SEQ ID NO: 36387 - DNA, 25 bp, probe
tttcaataaacaagatcgtcaggac

SEQ ID NO: 36388 - DNA, 25 bp, probe
ctgcccttctcatttggaaactaaa

SEQ ID NO: 36389 - DNA, 25 bp, probe
aataaacaagatcgtcaggaccaaa

SEQ ID NO: 36390 - DNA, 25 bp, probe
ttcaataaacaagatcgtcaggacc

SEQ ID NO: 36391 - DNA, 25 bp, probe
caataaacaagatcgtcaggaccaa

SEQ ID NO: 36392 - DNA, 25 bp, probe
tcaataaacaagatcgtcaggacca

SEQ ID NO: 36393 - DNA, 25 bp, probe
actgcccttctcatttggaaactaa

SEQ ID NO: 36394 - DNA, 25 bp, probe
tgccctcttcaacatcaacttctac

SEQ ID NO: 36395 - DNA, 25 bp, probe
gtgccctcttcaacatcaacttcta

SEQ ID NO: 36396 - DNA, 25 bp, probe
ctttgaccgctacctgaacatagtt

SEQ ID NO: 36397 - DNA, 25 bp, probe
cactgcccttctcatttggaaacta

SEQ ID NO: 36398 - DNA, 25 bp, probe
cccaagacctctatatttgctcttt

SEQ ID NO: 36399 - DNA, 25 bp, probe
aaactaaaacttcatcttccccaag

SEQ ID NO: 36400 - DNA, 25 bp, probe
gaaactaaaacttcatcttccccaa

SEQ ID NO: 36401 - DNA, 25 bp, probe
cccttctcatttggaaactaaaact

SEQ ID NO: 36402 - DNA, 25 bp, probe
gcccttctcatttggaaactaaaac

SEQ ID NO: 36403 - DNA, 25 bp, probe
tgcccttctcatttggaaactaaaa

SEQ ID NO: 36404 - DNA, 25 bp, probe
ccctcttcaacatcaacttctacgc

SEQ ID NO: 36405 - DNA, 25 bp, probe
gccctcttcaacatcaacttctacg

SEQ ID NO: 36406 - DNA, 25 bp, probe
ataaacaagatcgtcaggaccaaaa

SEQ ID NO: 36407 - DNA, 25 bp, probe
ttttcaataaacaagatcgtcagga

SEQ ID NO: 36408 - DNA, 25 bp, probe
cttttcaataaacaagatcgtcagg

SEQ ID NO: 36409 - DNA, 25 bp, probe
ccttctcatttggaaactaaaactt

SEQ ID NO: 36410 - DNA, 25 bp, probe
tcaacatcaacttctacgcaggagc

SEQ ID NO: 36411 - DNA, 25 bp, probe
acttttcaataaacaagatcgtcag

SEQ ID NO: 36412 - DNA, 25 bp, probe
tgtctaaaatcctgcttaaaacttt

SEQ ID NO: 36413 - DNA, 25 bp, probe
tccccaagacctctatatttgctct

SEQ ID NO: 36414 - DNA, 25 bp, probe
ttctcatttggaaactaaaacttca

SEQ ID NO: 36415 - DNA, 25 bp, probe
aacttttcaataaacaagatcgtca

SEQ ID NO: 36416 - DNA, 25 bp, probe
atgtctaaaatcctgcttaaaactt

SEQ ID NO: 36417 - DNA, 25 bp, probe
tcatttggaaactaaaacttcatct

SEQ ID NO: 36418 - DNA, 25 bp, probe
tctcatttggaaactaaaacttcat

SEQ ID NO: 36419 - DNA, 25 bp, probe
cctgcttaaaacttttcaataaaca

SEQ ID NO: 36420 - DNA, 25 bp, probe
gtccccaagacctctatatttgctc

SEQ ID NO: 36421 - DNA, 25 bp, probe
ctcatttggaaactaaaacttcatc

SEQ ID NO: 36422 - DNA, 25 bp, probe
cttctcatttggaaactaaaacttc

SEQ ID NO: 36423 - DNA, 25 bp, probe
tcctgcttaaaacttttcaataaac

SEQ ID NO: 36424 - DNA, 25 bp, probe
ccaagacctctatatttgctctttt

SEQ ID NO: 36425 - DNA, 25 bp, probe
gctttgaccgctacctgaacatagt

SEQ ID NO: 36426 - DNA, 25 bp, probe
cactcttcacacagaattgctacaa

SEQ ID NO: 36427 - DNA, 25 bp, probe
ctcttcacacagaattgctacaatc

SEQ ID NO: 36428 - DNA, 25 bp, probe
actcttcacacagaattgctacaat

SEQ ID NO: 36429 - DNA, 25 bp, probe
tcttcacacagaattgctacaatcc

SEQ ID NO: 36430 - DNA, 25 bp, probe
cctttgtcaataaacctgtcatgtg

SEQ ID NO: 36431 - DNA, 25 bp, probe
ctttgtcaataaacctgtcatgtgc

SEQ ID NO: 36432 - DNA, 25 bp, probe
agcctttgtcaataaacctgtcatg

SEQ ID NO: 36433 - DNA, 25 bp, probe
ttacacaggaaccctaaagcaaatc

SEQ ID NO: 36434 - DNA, 25 bp, probe
gttacacaggaaccctaaagcaaat

SEQ ID NO: 36435 - DNA, 25 bp, probe
cagcctttgtcaataaacctgtcat

SEQ ID NO: 36436 - DNA, 25 bp, probe
ttcagcctttgtcaataaacctgtc

SEQ ID NO: 36437 - DNA, 25 bp, probe
gcctttgtcaataaacctgtcatgt

SEQ ID NO: 36438 - DNA, 25 bp, probe
gttcagcctttgtcaataaacctgt

SEQ ID NO: 36439 - DNA, 25 bp, probe
tacacaggaaccctaaagcaaatct

SEQ ID NO: 36440 - DNA, 25 bp, probe
ggctgacgaatttgtttctacagaa

SEQ ID NO: 36441 - DNA, 25 bp, probe
gtgtggctgacgaatttgtttctac

SEQ ID NO: 36442 - DNA, 25 bp, probe
tttgtcaataaacctgtcatgtgcg

SEQ ID NO: 36443 - DNA, 25 bp, probe
agttacacaggaaccctaaagcaaa

SEQ ID NO: 36444 - DNA, 25 bp, probe
tcagcctttgtcaataaacctgtca

SEQ ID NO: 36445 - DNA, 25 bp, probe
gtggctgacgaatttgtttctacag

SEQ ID NO: 36446 - DNA, 25 bp, probe
cctcagttacacaggaaccctaaag

SEQ ID NO: 36447 - DNA, 25 bp, probe
tggctgacgaatttgtttctacaga

SEQ ID NO: 36448 - DNA, 25 bp, probe
acacagaattgctacaatcccaaag

SEQ ID NO: 36449 - DNA, 25 bp, probe
cgttcagcctttgtcaataaacctg

SEQ ID NO: 36450 - DNA, 25 bp, probe
gctgacgaatttgtttctacagaaa

SEQ ID NO: 36451 - DNA, 25 bp, probe
cgagttaaagaggagaaggaaaaca

SEQ ID NO: 36452 - DNA, 25 bp, probe
cacacagaattgctacaatcccaaa

SEQ ID NO: 36453 - DNA, 25 bp, probe
tgtggctgacgaatttgtttctaca

SEQ ID NO: 36454 - DNA, 25 bp, probe
cttcacacagaattgctacaatccc

SEQ ID NO: 36455 - DNA, 25 bp, probe
ccttcccataaaatgtaagaaaagc

SEQ ID NO: 36456 - DNA, 25 bp, probe
cagttacacaggaaccctaaagcaa

SEQ ID NO: 36457 - DNA, 25 bp, probe
accttgcactcttcacacagaattg

SEQ ID NO: 36458 - DNA, 25 bp, probe
caccttgcactcttcacacagaatt

SEQ ID NO: 36459 - DNA, 25 bp, probe
gagttaaagaggagaaggaaaacat

SEQ ID NO: 36460 - DNA, 25 bp, probe
ccgagttaaagaggagaaggaaaac

SEQ ID NO: 36461 - DNA, 25 bp, probe
ctcagttacacaggaaccctaaagc

SEQ ID NO: 36462 - DNA, 25 bp, probe
ttaaagaggagaaggaaaacatgct

SEQ ID NO: 36463 - DNA, 25 bp, probe
tcaataaacctgtcatgtgcggatc

SEQ ID NO: 36464 - DNA, 25 bp, probe
taaagaggagaaggaaaacatgctg

SEQ ID NO: 36465 - DNA, 25 bp, probe
acacaggaaccctaaagcaaatctg

SEQ ID NO: 36466 - DNA, 25 bp, probe
gttaaagaggagaaggaaaacatgc

SEQ ID NO: 36467 - DNA, 25 bp, probe
tcacacagaattgctacaatcccaa

SEQ ID NO: 36468 - DNA, 25 bp, probe
ttcacacagaattgctacaatccca

SEQ ID NO: 36469 - DNA, 25 bp, probe
ctgacgaatttgtttctacagaaat

SEQ ID NO: 36470 - DNA, 25 bp, probe
atctatcaacccaatcctctacaac

SEQ ID NO: 36471 - DNA, 25 bp, probe
catctatcaacccaatcctctacaa

SEQ ID NO: 36472 - DNA, 25 bp, probe
gcagaatcatttacataaacacgga

SEQ ID NO: 36473 - DNA, 25 bp, probe
tggcagaatcatttacataaacacg

SEQ ID NO: 36474 - DNA, 25 bp, probe
ccaatcctctacaacctcatttcaa

SEQ ID NO: 36475 - DNA, 25 bp, probe
atttacataaacacggaagattcgc

SEQ ID NO: 36476 - DNA, 25 bp, probe
caatcctctacaacctcatttcaaa

SEQ ID NO: 36477 - DNA, 25 bp, probe
aatcctctacaacctcatttcaaag

SEQ ID NO: 36478 - DNA, 25 bp, probe
ggcagaatcatttacataaacacgg

SEQ ID NO: 36479 - DNA, 25 bp, probe
tcctctacaacctcatttcaaagaa

SEQ ID NO: 36480 - DNA, 25 bp, probe
cctctacaacctcatttcaaagaag

SEQ ID NO: 36481 - DNA, 25 bp, probe
atcctctacaacctcatttcaaaga

SEQ ID NO: 36482 - DNA, 25 bp, probe
catttacataaacacggaagattcg

SEQ ID NO: 36483 - DNA, 25 bp, probe
cgttggcagaatcatttacataaac

SEQ ID NO: 36484 - DNA, 25 bp, probe
ctctacaacctcatttcaaagaagt

SEQ ID NO: 36485 - DNA, 25 bp, probe
tatcaacccaatcctctacaacctc

SEQ ID NO: 36486 - DNA, 25 bp, probe
ctatcaacccaatcctctacaacct

SEQ ID NO: 36487 - DNA, 25 bp, probe
tctatcaacccaatcctctacaacc

SEQ ID NO: 36488 - DNA, 25 bp, probe
ttggcagaatcatttacataaacac

SEQ ID NO: 36489 - DNA, 25 bp, probe
aacccaatcctctacaacctcattt

SEQ ID NO: 36490 - DNA, 25 bp, probe
acaacctcatttcaaagaagtacag

SEQ ID NO: 36491 - DNA, 25 bp, probe
gcatctatcaacccaatcctctaca

SEQ ID NO: 36492 - DNA, 25 bp, probe
caacctcatttcaaagaagtacaga

SEQ ID NO: 36493 - DNA, 25 bp, probe
gttggcagaatcatttacataaaca

SEQ ID NO: 36494 - DNA, 25 bp, probe
tggtggttctggcatttataatttg

SEQ ID NO: 36495 - DNA, 25 bp, probe
gtggtggttctggcatttataattt

SEQ ID NO: 36496 - DNA, 25 bp, probe
atttataatttgctggttgcccttc

SEQ ID NO: 36497 - DNA, 25 bp, probe
catttataatttgctggttgccctt

SEQ ID NO: 36498 - DNA, 25 bp, probe
cccaatcctctacaacctcatttca

SEQ ID NO: 36499 - DNA, 25 bp, probe
acccaatcctctacaacctcatttc

SEQ ID NO: 36500 - DNA, 25 bp, probe
cagaatcatttacataaacacggaa

SEQ ID NO: 36501 - DNA, 25 bp, probe
tcatttacataaacacggaagattc

SEQ ID NO: 36502 - DNA, 25 bp, probe
gaatcatttacataaacacggaaga

SEQ ID NO: 36503 - DNA, 25 bp, probe
agaatcatttacataaacacggaag

SEQ ID NO: 36504 - DNA, 25 bp, probe
acctcatttcaaagaagtacagagc

SEQ ID NO: 36505 - DNA, 25 bp, probe
aacctcatttcaaagaagtacagag

SEQ ID NO: 36506 - DNA, 25 bp, probe
caacccaatcctctacaacctcatt

SEQ ID NO: 36507 - DNA, 25 bp, probe
tacaacctcatttcaaagaagtaca

SEQ ID NO: 36508 - DNA, 25 bp, probe
tctacaacctcatttcaaagaagta

SEQ ID NO: 36509 - DNA, 25 bp, probe
ggtggtggttctggcatttataatt

SEQ ID NO: 36510 - DNA, 25 bp, probe
ctacaacctcatttcaaagaagtac

SEQ ID NO: 36511 - DNA, 25 bp, probe
cacgttggcagaatcatttacataa

SEQ ID NO: 36512 - DNA, 25 bp, probe
cgcatctatcaacccaatcctctac

SEQ ID NO: 36513 - DNA, 25 bp, probe
acgttggcagaatcatttacataaa

SEQ ID NO: 36514 - DNA, 25 bp, probe
gtctaagtcccagtcattgagtctc

SEQ ID NO: 36515 - DNA, 25 bp, probe
cagtctaagtcccagtcattgagtc

SEQ ID NO: 36516 - DNA, 25 bp, probe
agtctaagtcccagtcattgagtct

SEQ ID NO: 36517 - DNA, 25 bp, probe
ctctgcaaggagaactgagaagatt

SEQ ID NO: 36518 - DNA, 25 bp, probe
catcttcctgaggctgattgttgtg

SEQ ID NO: 36519 - DNA, 25 bp, probe
atcttcctgaggctgattgttgtga

SEQ ID NO: 36520 - DNA, 25 bp, probe
tcatcttcctgaggctgattgttgt

SEQ ID NO: 36521 - DNA, 25 bp, probe
atcatcttcctgaggctgattgttg

SEQ ID NO: 36522 - DNA, 25 bp, probe
catcatcttcctgaggctgattgtt

SEQ ID NO: 36523 - DNA, 25 bp, probe
tctaagtcccagtcattgagtctcg

SEQ ID NO: 36524 - DNA, 25 bp, probe
ccagtctaagtcccagtcattgagt

SEQ ID NO: 36525 - DNA, 25 bp, probe
tctgcaaggagaactgagaagattt

SEQ ID NO: 36526 - DNA, 25 bp, probe
ctgaggctgattgttgtgacattgg

SEQ ID NO: 36527 - DNA, 25 bp, probe
cctgaggctgattgttgtgacattg

SEQ ID NO: 36528 - DNA, 25 bp, probe
tcttcctgaggctgattgttgtgac

SEQ ID NO: 36529 - DNA, 25 bp, probe
tcctgaggctgattgttgtgacatt

SEQ ID NO: 36530 - DNA, 25 bp, probe
ttcctgaggctgattgttgtgacat

SEQ ID NO: 36531 - DNA, 25 bp, probe
cccagtctaagtcccagtcattgag

SEQ ID NO: 36532 - DNA, 25 bp, probe
ctaagtcccagtcattgagtctcga

SEQ ID NO: 36533 - DNA, 25 bp, probe
cctctgcaaggagaactgagaagat

SEQ ID NO: 36534 - DNA, 25 bp, probe
ctgcaaggagaactgagaagatttt

SEQ ID NO: 36535 - DNA, 25 bp, probe
cttcctgaggctgattgttgtgaca

SEQ ID NO: 36536 - DNA, 25 bp, probe
gaccatcatcttcctgaggctgatt

SEQ ID NO: 36537 - DNA, 25 bp, probe
tgcaaggagaactgagaagattttc

SEQ ID NO: 36538 - DNA, 25 bp, probe
ccatcatcttcctgaggctgattgt

SEQ ID NO: 36539 - DNA, 25 bp, probe
accatcatcttcctgaggctgattg

SEQ ID NO: 36540 - DNA, 25 bp, probe
caaggagaactgagaagattttctt

SEQ ID NO: 36541 - DNA, 25 bp, probe
gcaaggagaactgagaagattttct

SEQ ID NO: 36542 - DNA, 25 bp, probe
ctgattgttgtgacattggccgtat

SEQ ID NO: 36543 - DNA, 25 bp, probe
attttcttaagcacttttcagagcg

SEQ ID NO: 36544 - DNA, 25 bp, probe
gattttcttaagcacttttcagagc

SEQ ID NO: 36545 - DNA, 25 bp, probe
gtcattgagtctcgagtcactagag

SEQ ID NO: 36546 - DNA, 25 bp, probe
agtcattgagtctcgagtcactaga

SEQ ID NO: 36547 - DNA, 25 bp, probe
cagtcattgagtctcgagtcactag

SEQ ID NO: 36548 - DNA, 25 bp, probe
tgattgttgtgacattggccgtatg

SEQ ID NO: 36549 - DNA, 25 bp, probe
ttttcttaagcacttttcagagcga

SEQ ID NO: 36550 - DNA, 25 bp, probe
cagagaatggttttcaggagcatga

SEQ ID NO: 36551 - DNA, 25 bp, probe
tttcttaagcacttttcagagcgag

SEQ ID NO: 36552 - DNA, 25 bp, probe
agaccatcatcttcctgaggctgat

SEQ ID NO: 36553 - DNA, 25 bp, probe
aggagaactgagaagattttcttaa

SEQ ID NO: 36554 - DNA, 25 bp, probe
aaggagaactgagaagattttctta

SEQ ID NO: 36555 - DNA, 25 bp, probe
aatggttttcaggagcatgaagttt

SEQ ID NO: 36556 - DNA, 25 bp, probe
agattttcttaagcacttttcagag

SEQ ID NO: 36557 - DNA, 25 bp, probe
gaatggttttcaggagcatgaagtt

SEQ ID NO: 36558 - DNA, 25 bp, probe
gaacactcatattaccacaacaacc

SEQ ID NO: 36559 - DNA, 25 bp, probe
ggaacactcatattaccacaacaac

SEQ ID NO: 36560 - DNA, 25 bp, probe
aggaacactcatattaccacaacaa

SEQ ID NO: 36561 - DNA, 25 bp, probe
ttcaggaacactcatattaccacaa

SEQ ID NO: 36562 - DNA, 25 bp, probe
acactcatattaccacaacaacctt

SEQ ID NO: 36563 - DNA, 25 bp, probe
aacactcatattaccacaacaacct

SEQ ID NO: 36564 - DNA, 25 bp, probe
tattccttatcaaccaactcctacc

SEQ ID NO: 36565 - DNA, 25 bp, probe
tcaggaacactcatattaccacaac

SEQ ID NO: 36566 - DNA, 25 bp, probe
caggaacactcatattaccacaaca

SEQ ID NO: 36567 - DNA, 25 bp, probe
catctattccttatcaaccaactcc

SEQ ID NO: 36568 - DNA, 25 bp, probe
atctattccttatcaaccaactcct

SEQ ID NO: 36569 - DNA, 25 bp, probe
tgtcatctattccttatcaaccaac

SEQ ID NO: 36570 - DNA, 25 bp, probe
ctattccttatcaaccaactcctac

SEQ ID NO: 36571 - DNA, 25 bp, probe
tctattccttatcaaccaactccta

SEQ ID NO: 36572 - DNA, 25 bp, probe
gtcatctattccttatcaaccaact

SEQ ID NO: 36573 - DNA, 25 bp, probe
tcatctattccttatcaaccaactc

SEQ ID NO: 36574 - DNA, 25 bp, probe
atgtcatctattccttatcaaccaa

SEQ ID NO: 36575 - DNA, 25 bp, probe
aatgtcatctattccttatcaacca

SEQ ID NO: 36576 - DNA, 25 bp, probe
caatgtcatctattccttatcaacc

SEQ ID NO: 36577 - DNA, 25 bp, probe
tattaccacaacaacctttatccca

SEQ ID NO: 36578 - DNA, 25 bp, probe
tttcaggaacactcatattaccaca

SEQ ID NO: 36579 - DNA, 25 bp, probe
cactcatattaccacaacaaccttt

SEQ ID NO: 36580 - DNA, 25 bp, probe
attaccacaacaacctttatcccag

SEQ ID NO: 36581 - DNA, 25 bp, probe
atattaccacaacaacctttatccc

SEQ ID NO: 36582 - DNA, 25 bp, probe
atttcaggaacactcatattaccac

SEQ ID NO: 36583 - DNA, 25 bp, probe
gatttcaggaacactcatattacca

SEQ ID NO: 36584 - DNA, 25 bp, probe
acaatgtcatctattccttatcaac

SEQ ID NO: 36585 - DNA, 25 bp, probe
attccttatcaaccaactcctaccc

SEQ ID NO: 36586 - DNA, 25 bp, probe
ttaccacaacaacctttatcccaga

SEQ ID NO: 36587 - DNA, 25 bp, probe
aaagaggatgacaaggaaattgacc

SEQ ID NO: 36588 - DNA, 25 bp, probe
actcatattaccacaacaaccttta

SEQ ID NO: 36589 - DNA, 25 bp, probe
catattaccacaacaacctttatcc

SEQ ID NO: 36590 - DNA, 25 bp, probe
tgatttcaggaacactcatattacc

SEQ ID NO: 36591 - DNA, 25 bp, probe
taccacaacaacctttatcccagag

SEQ ID NO: 36592 - DNA, 25 bp, probe
ggaattgtcctctcctgcttcatag

SEQ ID NO: 36593 - DNA, 25 bp, probe
ttccttatcaaccaactcctaccct

SEQ ID NO: 36594 - DNA, 25 bp, probe
aacaatgtcatctattccttatcaa

SEQ ID NO: 36595 - DNA, 25 bp, probe
caacaacctttatcccagagcagat

SEQ ID NO: 36596 - DNA, 25 bp, probe
ctccatagacgtgtaaatagcttgt

SEQ ID NO: 36597 - DNA, 25 bp, probe
tccatagacgtgtaaatagcttgtg

SEQ ID NO: 36598 - DNA, 25 bp, probe
aagaggatgacaaggaaattgacct

SEQ ID NO: 36599 - DNA, 25 bp, probe
tggaattgtcctctcctgcttcata

SEQ ID NO: 36600 - DNA, 25 bp, probe
tcatattaccacaacaacctttatc

SEQ ID NO: 36601 - DNA, 25 bp, probe
ctcatattaccacaacaacctttat

SEQ ID NO: 36602 - DNA, 25 bp, probe
catcatctacaacttcctcagtggc

SEQ ID NO: 36603 - DNA, 25 bp, probe
ccatcatctacaacttcctcagtgg

SEQ ID NO: 36604 - DNA, 25 bp, probe
atcatctacaacttcctcagtggca

SEQ ID NO: 36605 - DNA, 25 bp, probe
atctacaacttcctcagtggcaaat

SEQ ID NO: 36606 - DNA, 25 bp, probe
ctacaacttcctcagtggcaaattc

SEQ ID NO: 36607 - DNA, 25 bp, probe
tcatctacaacttcctcagtggcaa

SEQ ID NO: 36608 - DNA, 25 bp, probe
tctacaacttcctcagtggcaaatt

SEQ ID NO: 36609 - DNA, 25 bp, probe
ttctgcctgtgtgactctggataag

SEQ ID NO: 36610 - DNA, 25 bp, probe
cccatcatctacaacttcctcagtg

SEQ ID NO: 36611 - DNA, 25 bp, probe
catctacaacttcctcagtggcaaa

SEQ ID NO: 36612 - DNA, 25 bp, probe
tacaacttcctcagtggcaaattcc

SEQ ID NO: 36613 - DNA, 25 bp, probe
tttctgcctgtgtgactctggataa

SEQ ID NO: 36614 - DNA, 25 bp, probe
ccatcagcgtcctcaatgtccttaa

SEQ ID NO: 36615 - DNA, 25 bp, probe
atcagcgtcctcaatgtccttaaga

SEQ ID NO: 36616 - DNA, 25 bp, probe
catcagcgtcctcaatgtccttaag

SEQ ID NO: 36617 - DNA, 25 bp, probe
gtttctgcctgtgtgactctggata

SEQ ID NO: 36618 - DNA, 25 bp, probe
tctgcctgtgtgactctggataagt

SEQ ID NO: 36619 - DNA, 25 bp, probe
caaccccatcatctacaacttcctc

SEQ ID NO: 36620 - DNA, 25 bp, probe
ctccatctccaaaatctctgagcat

SEQ ID NO: 36621 - DNA, 25 bp, probe
atgctccatctccaaaatctctgag

SEQ ID NO: 36622 - DNA, 25 bp, probe
catctccaaaatctctgagcatgtg

SEQ ID NO: 36623 - DNA, 25 bp, probe
tcagcgtcctcaatgtccttaagag

SEQ ID NO: 36624 - DNA, 25 bp, probe
aaccccatcatctacaacttcctca

SEQ ID NO: 36625 - DNA, 25 bp, probe
accccatcatctacaacttcctcag

SEQ ID NO: 36626 - DNA, 25 bp, probe
tccatctccaaaatctctgagcatg

SEQ ID NO: 36627 - DNA, 25 bp, probe
ctcaatgtccttaagagggtgttcg

SEQ ID NO: 36628 - DNA, 25 bp, probe
ccatctccaaaatctctgagcatgt

SEQ ID NO: 36629 - DNA, 25 bp, probe
ccccatcatctacaacttcctcagt

SEQ ID NO: 36630 - DNA, 25 bp, probe
ccaaccccatcatctacaacttcct

SEQ ID NO: 36631 - DNA, 25 bp, probe
atctccaaaatctctgagcatgtgg

SEQ ID NO: 36632 - DNA, 25 bp, probe
gatgctccatctccaaaatctctga

SEQ ID NO: 36633 - DNA, 25 bp, probe
ctgcctgtgtgactctggataagtc

SEQ ID NO: 36634 - DNA, 25 bp, probe
tcaatgtccttaagagggtgttcgg

SEQ ID NO: 36635 - DNA, 25 bp, probe
tgccaaccccatcatctacaacttc

SEQ ID NO: 36636 - DNA, 25 bp, probe
ctgccaaccccatcatctacaactt

SEQ ID NO: 36637 - DNA, 25 bp, probe
ctccaaaatctctgagcatgtggtg

SEQ ID NO: 36638 - DNA, 25 bp, probe
tctccaaaatctctgagcatgtggt

SEQ ID NO: 36639 - DNA, 25 bp, probe
cgatgctccatctccaaaatctctg

SEQ ID NO: 36640 - DNA, 25 bp, probe
ccttaagagggtgttcgggatgttc

SEQ ID NO: 36641 - DNA, 25 bp, probe
cttaagagggtgttcgggatgttcc

SEQ ID NO: 36642 - DNA, 25 bp, probe
atgtccttaagagggtgttcgggat

SEQ ID NO: 36643 - DNA, 25 bp, probe
caatgtccttaagagggtgttcggg

SEQ ID NO: 36644 - DNA, 25 bp, probe
cctcaatgtccttaagagggtgttc

SEQ ID NO: 36645 - DNA, 25 bp, probe
tcctcaatgtccttaagagggtgtt

SEQ ID NO: 36646 - DNA, 25 bp, probe
atctaccaattagcatcctcaatgt

SEQ ID NO: 36647 - DNA, 25 bp, probe
caatagtgctgcgaatccaattatt

SEQ ID NO: 36648 - DNA, 25 bp, probe
tctaccaattagcatcctcaatgtg

SEQ ID NO: 36649 - DNA, 25 bp, probe
aagtgattccttatctacagaccgt

SEQ ID NO: 36650 - DNA, 25 bp, probe
agtgattccttatctacagaccgtg

SEQ ID NO: 36651 - DNA, 25 bp, probe
ccaatagtgctgcgaatccaattat

SEQ ID NO: 36652 - DNA, 25 bp, probe
aggacggtaaccaactacttcatag

SEQ ID NO: 36653 - DNA, 25 bp, probe
gaggacggtaaccaactacttcata

SEQ ID NO: 36654 - DNA, 25 bp, probe
gcattgtcatcatctggattgtctc

SEQ ID NO: 36655 - DNA, 25 bp, probe
taacagcattgtcatcatctggatt

SEQ ID NO: 36656 - DNA, 25 bp, probe
tatctaccaattagcatcctcaatg

SEQ ID NO: 36657 - DNA, 25 bp, probe
ctatctaccaattagcatcctcaat

SEQ ID NO: 36658 - DNA, 25 bp, probe
gtatatgccaatagtgctgcgaatc

SEQ ID NO: 36659 - DNA, 25 bp, probe
agcattgtcatcatctggattgtct

SEQ ID NO: 36660 - DNA, 25 bp, probe
gtaacagcattgtcatcatctggat

SEQ ID NO: 36661 - DNA, 25 bp, probe
tgattccttatctacagaccgtgtc

SEQ ID NO: 36662 - DNA, 25 bp, probe
cggtaaccaactacttcatagtcaa

SEQ ID NO: 36663 - DNA, 25 bp, probe
gtgattccttatctacagaccgtgt

SEQ ID NO: 36664 - DNA, 25 bp, probe
gacggtaaccaactacttcatagtc

SEQ ID NO: 36665 - DNA, 25 bp, probe
tgtatatgccaatagtgctgcgaat

SEQ ID NO: 36666 - DNA, 25 bp, probe
tgctaaagagagtatttgggatgtt

SEQ ID NO: 36667 - DNA, 25 bp, probe
aatgtgctaaagagagtatttggga

SEQ ID NO: 36668 - DNA, 25 bp, probe
aacagcattgtcatcatctggattg

SEQ ID NO: 36669 - DNA, 25 bp, probe
atgtgctaaagagagtatttgggat

SEQ ID NO: 36670 - DNA, 25 bp, probe
cttcatagtcaatctttctctggct

SEQ ID NO: 36671 - DNA, 25 bp, probe
attgtcatcatctggattgtctcct

SEQ ID NO: 36672 - DNA, 25 bp, probe
cattgtcatcatctggattgtctcc

SEQ ID NO: 36673 - DNA, 25 bp, probe
ttcatagtcaatctttctctggctg

SEQ ID NO: 36674 - DNA, 25 bp, probe
gtgctaaagagagtatttgggatgt

SEQ ID NO: 36675 - DNA, 25 bp, probe
tgtgctaaagagagtatttgggatg

SEQ ID NO: 36676 - DNA, 25 bp, probe
acggtaaccaactacttcatagtca

SEQ ID NO: 36677 - DNA, 25 bp, probe
taaagagagtatttgggatgtttgc

SEQ ID NO: 36678 - DNA, 25 bp, probe
gctaaagagagtatttgggatgttt

SEQ ID NO: 36679 - DNA, 25 bp, probe
aaagtgattccttatctacagaccg

SEQ ID NO: 36680 - DNA, 25 bp, probe
gcaaagtgattccttatctacagac

SEQ ID NO: 36681 - DNA, 25 bp, probe
cagcattgtcatcatctggattgtc

SEQ ID NO: 36682 - DNA, 25 bp, probe
caatgtgctaaagagagtatttggg

SEQ ID NO: 36683 - DNA, 25 bp, probe
agtgctgcgaatccaattatttata

SEQ ID NO: 36684 - DNA, 25 bp, probe
tagtgctgcgaatccaattatttat

SEQ ID NO: 36685 - DNA, 25 bp, probe
atagtgctgcgaatccaattattta

SEQ ID NO: 36686 - DNA, 25 bp, probe
aatagtgctgcgaatccaattattt

SEQ ID NO: 36687 - DNA, 25 bp, probe
tatatgccaatagtgctgcgaatcc

SEQ ID NO: 36688 - DNA, 25 bp, probe
ggtaaccaactacttcatagtcaat

SEQ ID NO: 36689 - DNA, 25 bp, probe
caaagtgattccttatctacagacc

SEQ ID NO: 36690 - DNA, 25 bp, probe
ctgccttgctgacaataaagatatt

SEQ ID NO: 36691 - DNA, 25 bp, probe
tgccttgctgacaataaagatattt

SEQ ID NO: 36692 - DNA, 25 bp, probe
cctgccttgctgacaataaagatat

SEQ ID NO: 36693 - DNA, 25 bp, probe
gccttgctgacaataaagatatttc

SEQ ID NO: 36694 - DNA, 25 bp, probe
ccttgctgacaataaagatatttcc

SEQ ID NO: 36695 - DNA, 25 bp, probe
caactatgtggactggatcaacgac

SEQ ID NO: 36696 - DNA, 25 bp, probe
tgctgacaataaagatatttccaag

SEQ ID NO: 36697 - DNA, 25 bp, probe
cttgctgacaataaagatatttcca

SEQ ID NO: 36698 - DNA, 25 bp, probe
ttgctgacaataaagatatttccaa

SEQ ID NO: 36699 - DNA, 25 bp, probe
ccctgccttgctgacaataaagata

SEQ ID NO: 36700 - DNA, 25 bp, probe
aactatgtggactggatcaacgacc

SEQ ID NO: 36701 - DNA, 25 bp, probe
attccctgccttgctgacaataaag

SEQ ID NO: 36702 - DNA, 25 bp, probe
cattccctgccttgctgacaataaa

SEQ ID NO: 36703 - DNA, 25 bp, probe
ccaactatgtggactggatcaacga

SEQ ID NO: 36704 - DNA, 25 bp, probe
tccctgccttgctgacaataaagat

SEQ ID NO: 36705 - DNA, 25 bp, probe
ttccctgccttgctgacaataaaga

SEQ ID NO: 36706 - DNA, 25 bp, probe
agaagtacatcccgtacaccctgta

SEQ ID NO: 36707 - DNA, 25 bp, probe
gaccttcggcatcgagaagtacatc

SEQ ID NO: 36708 - DNA, 25 bp, probe
catcgagaagtacatcccgtacacc

SEQ ID NO: 36709 - DNA, 25 bp, probe
gcatcgagaagtacatcccgtacac

SEQ ID NO: 36710 - DNA, 25 bp, probe
aatgaatgaatgaatggctaagcaa

SEQ ID NO: 36711 - DNA, 25 bp, probe
caatgaatgaatgaatggctaagca

SEQ ID NO: 36712 - DNA, 25 bp, probe
cacttccactactctctaagacctc

SEQ ID NO: 36713 - DNA, 25 bp, probe
cttctcttcacagtcacattccaag

SEQ ID NO: 36714 - DNA, 25 bp, probe
tcaatgaatgaatgaatggctaagc

SEQ ID NO: 36715 - DNA, 25 bp, probe
acacttccactactctctaagacct

SEQ ID NO: 36716 - DNA, 25 bp, probe
cacacttccactactctctaagacc

SEQ ID NO: 36717 - DNA, 25 bp, probe
tagttgtaccgcaatgtgacttaat

SEQ ID NO: 36718 - DNA, 25 bp, probe
atagttgtaccgcaatgtgacttaa

SEQ ID NO: 36719 - DNA, 25 bp, probe
acatagaattaacacatgatcctgc

SEQ ID NO: 36720 - DNA, 25 bp, probe
gttcttcttggtctcagtgtcaatg

SEQ ID NO: 36721 - DNA, 25 bp, probe
gatagttgtaccgcaatgtgactta

SEQ ID NO: 36722 - DNA, 25 bp, probe
catggcactctatgttctaagaagt

SEQ ID NO: 36723 - DNA, 25 bp, probe
tactctctaagacctcctgcctaag

SEQ ID NO: 36724 - DNA, 25 bp, probe
ctactctctaagacctcctgcctaa

SEQ ID NO: 36725 - DNA, 25 bp, probe
cttccactactctctaagacctcct

SEQ ID NO: 36726 - DNA, 25 bp, probe
catcaatgaatgaatgaatggctaa

SEQ ID NO: 36727 - DNA, 25 bp, probe
tacatgaggtactgagagtgaacaa

SEQ ID NO: 36728 - DNA, 25 bp, probe
cagtagtgatagttgtaccgcaatg

SEQ ID NO: 36729 - DNA, 25 bp, probe
ttccactactctctaagacctcctg

SEQ ID NO: 36730 - DNA, 25 bp, probe
acttccactactctctaagacctcc

SEQ ID NO: 36731 - DNA, 25 bp, probe
atcaatgaatgaatgaatggctaag

SEQ ID NO: 36732 - DNA, 25 bp, probe
gcacacttccactactctctaagac

SEQ ID NO: 36733 - DNA, 25 bp, probe
ccttctcttcacagtcacattccaa

SEQ ID NO: 36734 - DNA, 25 bp, probe
ctacatgaggtactgagagtgaaca

SEQ ID NO: 36735 - DNA, 25 bp, probe
attcatagcagcttattcacaagac

SEQ ID NO: 36736 - DNA, 25 bp, probe
tagtgatagttgtaccgcaatgtga

SEQ ID NO: 36737 - DNA, 25 bp, probe
gtagtgatagttgtaccgcaatgtg

SEQ ID NO: 36738 - DNA, 25 bp, probe
agtagtgatagttgtaccgcaatgt

SEQ ID NO: 36739 - DNA, 25 bp, probe
tgtctcagtccatgaagatgtagag

SEQ ID NO: 36740 - DNA, 25 bp, probe
agttgtaccgcaatgtgacttaatg

SEQ ID NO: 36741 - DNA, 25 bp, probe
gtacaccaatattcatagcagctta

SEQ ID NO: 36742 - DNA, 25 bp, probe
acatgatcctgcaattccacttata

SEQ ID NO: 36743 - DNA, 25 bp, probe
catgatcctgcaattccacttatag

SEQ ID NO: 36744 - DNA, 25 bp, probe
ttcatagcagcttattcacaagacc

SEQ ID NO: 36745 - DNA, 25 bp, probe
gtgatatgtacctaacgaagtatcc

SEQ ID NO: 36746 - DNA, 25 bp, probe
atttacagagacagaaagcagaaca

SEQ ID NO: 36747 - DNA, 25 bp, probe
agccagacatcaacagataaatagt

SEQ ID NO: 36748 - DNA, 25 bp, probe
tgatatgtacctaacgaagtatcct

SEQ ID NO: 36749 - DNA, 25 bp, probe
gaagatgtagaggagaaactggaac

SEQ ID NO: 36750 - DNA, 25 bp, probe
atgaagatgtagaggagaaactgga

SEQ ID NO: 36751 - DNA, 25 bp, probe
cagggtttatgtttaggatgttgaa

SEQ ID NO: 36752 - DNA, 25 bp, probe
gagacagaaagcagaacagtgatta

SEQ ID NO: 36753 - DNA, 25 bp, probe
aagatgtagaggagaaactggaact

SEQ ID NO: 36754 - DNA, 25 bp, probe
gaagacaccactgttactgatgttg

SEQ ID NO: 36755 - DNA, 25 bp, probe
tgaagacaccactgttactgatgtt

SEQ ID NO: 36756 - DNA, 25 bp, probe
gtgaagacaccactgttactgatgt

SEQ ID NO: 36757 - DNA, 25 bp, probe
ggaatgtgggctatgtagtcataat

SEQ ID NO: 36758 - DNA, 25 bp, probe
aggaatgtgggctatgtagtcataa

SEQ ID NO: 36759 - DNA, 25 bp, probe
cattatcagaggtggaggtggagtc

SEQ ID NO: 36760 - DNA, 25 bp, probe
gaggaatgtgggctatgtagtcata

SEQ ID NO: 36761 - DNA, 25 bp, probe
aagacaccactgttactgatgttgg

SEQ ID NO: 36762 - DNA, 25 bp, probe
atcagatacatccctcaggtgaaga

SEQ ID NO: 36763 - DNA, 25 bp, probe
catcagatacatccctcaggtgaag

SEQ ID NO: 36764 - DNA, 25 bp, probe
tactactagtgaactatcgtggctc

SEQ ID NO: 36765 - DNA, 25 bp, probe
gtactactagtgaactatcgtggct

SEQ ID NO: 36766 - DNA, 25 bp, probe
agaggaatgtgggctatgtagtcat

SEQ ID NO: 36767 - DNA, 25 bp, probe
gaatgtgggctatgtagtcataata

SEQ ID NO: 36768 - DNA, 25 bp, probe
ttgcggtactactagtgaactatcg

SEQ ID NO: 36769 - DNA, 25 bp, probe
attatcagaggtggaggtggagtca

SEQ ID NO: 36770 - DNA, 25 bp, probe
cggtactactagtgaactatcgtgg

SEQ ID NO: 36771 - DNA, 25 bp, probe
tgtgggctatgtagtcataataaat

SEQ ID NO: 36772 - DNA, 25 bp, probe
atgtgggctatgtagtcataataaa

SEQ ID NO: 36773 - DNA, 25 bp, probe
aatgtgggctatgtagtcataataa

SEQ ID NO: 36774 - DNA, 25 bp, probe
ggtactactagtgaactatcgtggc

SEQ ID NO: 36775 - DNA, 25 bp, probe
tcagatacatccctcaggtgaagac

SEQ ID NO: 36776 - DNA, 25 bp, probe
cagatacatccctcaggtgaagaca

SEQ ID NO: 36777 - DNA, 25 bp, probe
gcggtactactagtgaactatcgtg

SEQ ID NO: 36778 - DNA, 25 bp, probe
cagaggaatgtgggctatgtagtca

SEQ ID NO: 36779 - DNA, 25 bp, probe
gacaaatcgcccatcagatacatcc

SEQ ID NO: 36780 - DNA, 25 bp, probe
ggacaaatcgcccatcagatacatc

SEQ ID NO: 36781 - DNA, 25 bp, probe
tgcggtactactagtgaactatcgt

SEQ ID NO: 36782 - DNA, 25 bp, probe
ccatcagatacatccctcaggtgaa

SEQ ID NO: 36783 - DNA, 25 bp, probe
ttatcagaggtggaggtggagtcag

SEQ ID NO: 36784 - DNA, 25 bp, probe
ctactagtgaactatcgtggctcca

SEQ ID NO: 36785 - DNA, 25 bp, probe
tttgcggtactactagtgaactatc

SEQ ID NO: 36786 - DNA, 25 bp, probe
ctttgcggtactactagtgaactat

SEQ ID NO: 36787 - DNA, 25 bp, probe
cttcaagcagggcatggagtattac

SEQ ID NO: 36788 - DNA, 25 bp, probe
gttacctcagtggtggtagatgttg

SEQ ID NO: 36789 - DNA, 25 bp, probe
gtgggctatgtagtcataataaatt

SEQ ID NO: 36790 - DNA, 25 bp, probe
agatacatccctcaggtgaagacac

SEQ ID NO: 36791 - DNA, 25 bp, probe
actactagtgaactatcgtggctcc

SEQ ID NO: 36792 - DNA, 25 bp, probe
ttacctcagtggtggtagatgttgt

SEQ ID NO: 36793 - DNA, 25 bp, probe
aaatcgcccatcagatacatccctc

SEQ ID NO: 36794 - DNA, 25 bp, probe
caggatgtgaaggatgtccagtttg

SEQ ID NO: 36795 - DNA, 25 bp, probe
gctttgcggtactactagtgaacta

SEQ ID NO: 36796 - DNA, 25 bp, probe
agctgtgcctgtatgactggtatac

SEQ ID NO: 36797 - DNA, 25 bp, probe
caaatcgcccatcagatacatccct

SEQ ID NO: 36798 - DNA, 25 bp, probe
ctacgatatgagcctcctgaagaat

SEQ ID NO: 36799 - DNA, 25 bp, probe
ctgtaatggtgtgcttcaaggtatc

SEQ ID NO: 36800 - DNA, 25 bp, probe
tacgatatgagcctcctgaagaatc

SEQ ID NO: 36801 - DNA, 25 bp, probe
tctgtaatggtgtgcttcaaggtat

SEQ ID NO: 36802 - DNA, 25 bp, probe
tgtaatggtgtgcttcaaggtatca

SEQ ID NO: 36803 - DNA, 25 bp, probe
atgcctggagacatatcactcaatt

SEQ ID NO: 36804 - DNA, 25 bp, probe
tctacgatatgagcctcctgaagaa

SEQ ID NO: 36805 - DNA, 25 bp, probe
gtctgtaatggtgtgcttcaaggta

SEQ ID NO: 36806 - DNA, 25 bp, probe
gtaaacttggaaccttggaaatgac

SEQ ID NO: 36807 - DNA, 25 bp, probe
attgtagtaaacttggaaccttgga

SEQ ID NO: 36808 - DNA, 25 bp, probe
tgtagtaaacttggaaccttggaaa

SEQ ID NO: 36809 - DNA, 25 bp, probe
ttgtagtaaacttggaaccttggaa

SEQ ID NO: 36810 - DNA, 25 bp, probe
ccctattgtagtaaacttggaacct

SEQ ID NO: 36811 - DNA, 25 bp, probe
agtaaacttggaaccttggaaatga

SEQ ID NO: 36812 - DNA, 25 bp, probe
gtaatggtgtgcttcaaggtatcac

SEQ ID NO: 36813 - DNA, 25 bp, probe
tagtaaacttggaaccttggaaatg

SEQ ID NO: 36814 - DNA, 25 bp, probe
gtagtaaacttggaaccttggaaat

SEQ ID NO: 36815 - DNA, 25 bp, probe
acttgtctgtaatggtgtgcttcaa

SEQ ID NO: 36816 - DNA, 25 bp, probe
taaacttggaaccttggaaatgacc

SEQ ID NO: 36817 - DNA, 25 bp, probe
tattgtagtaaacttggaaccttgg

SEQ ID NO: 36818 - DNA, 25 bp, probe
gacaaccctcagatttgatgatttc

SEQ ID NO: 36819 - DNA, 25 bp, probe
ctctacgatatgagcctcctgaaga

SEQ ID NO: 36820 - DNA, 25 bp, probe
aaccctcagatttgatgatttccta

SEQ ID NO: 36821 - DNA, 25 bp, probe
agacaaccctcagatttgatgattt

SEQ ID NO: 36822 - DNA, 25 bp, probe
cctggagacatatcactcaatttct

SEQ ID NO: 36823 - DNA, 25 bp, probe
tgtagaccagagtgtttcttaaatg

SEQ ID NO: 36824 - DNA, 25 bp, probe
gtgtagaccagagtgtttcttaaat

SEQ ID NO: 36825 - DNA, 25 bp, probe
cctattgtagtaaacttggaacctt

SEQ ID NO: 36826 - DNA, 25 bp, probe
caaccctcagatttgatgatttcct

SEQ ID NO: 36827 - DNA, 25 bp, probe
cagacaaccctcagatttgatgatt

SEQ ID NO: 36828 - DNA, 25 bp, probe
ccctcagatttgatgatttcctagt

SEQ ID NO: 36829 - DNA, 25 bp, probe
accctcagatttgatgatttcctag

SEQ ID NO: 36830 - DNA, 25 bp, probe
catgcctggagacatatcactcaat

SEQ ID NO: 36831 - DNA, 25 bp, probe
acaaccctcagatttgatgatttcc

SEQ ID NO: 36832 - DNA, 25 bp, probe
tgatttcctagtagaactcacagaa

SEQ ID NO: 36833 - DNA, 25 bp, probe
tgatgatttcctagtagaactcaca

SEQ ID NO: 36834 - DNA, 25 bp, probe
agtagaactcacagaaataaagagc

SEQ ID NO: 36835 - DNA, 25 bp, probe
atgatttcctagtagaactcacaga

SEQ ID NO: 36836 - DNA, 25 bp, probe
gcctggagacatatcactcaatttc

SEQ ID NO: 36837 - DNA, 25 bp, probe
gtgtattgaagtcctccagacaacc

SEQ ID NO: 36838 - DNA, 25 bp, probe
ggtgtattgaagtcctccagacaac

SEQ ID NO: 36839 - DNA, 25 bp, probe
ttgtctgtaatggtgtgcttcaagg

SEQ ID NO: 36840 - DNA, 25 bp, probe
gatgatttcctagtagaactcacag

SEQ ID NO: 36841 - DNA, 25 bp, probe
ctattgtagtaaacttggaaccttg

SEQ ID NO: 36842 - DNA, 25 bp, probe
cagaactggactttgagaagatcat

SEQ ID NO: 36843 - DNA, 25 bp, probe
agaactggactttgagaagatcatg

SEQ ID NO: 36844 - DNA, 25 bp, probe
agtacagcatccacattgaccagat

SEQ ID NO: 36845 - DNA, 25 bp, probe
gaactggactttgagaagatcatgc

SEQ ID NO: 36846 - DNA, 25 bp, probe
aagtacagcatccacattgaccaga

SEQ ID NO: 36847 - DNA, 25 bp, probe
caagtacagcatccacattgaccag

SEQ ID NO: 36848 - DNA, 25 bp, probe
tatgcagaactggactttgagaaga

SEQ ID NO: 36849 - DNA, 25 bp, probe
gtatgcagaactggactttgagaag

SEQ ID NO: 36850 - DNA, 25 bp, probe
gcagaactggactttgagaagatca

SEQ ID NO: 36851 - DNA, 25 bp, probe
atgcagaactggactttgagaagat

SEQ ID NO: 36852 - DNA, 25 bp, probe
ggtatgcagaactggactttgagaa

SEQ ID NO: 36853 - DNA, 25 bp, probe
aactggactttgagaagatcatgca

SEQ ID NO: 36854 - DNA, 25 bp, probe
tgcagaactggactttgagaagatc

SEQ ID NO: 36855 - DNA, 25 bp, probe
ctggactttgagaagatcatgcaca

SEQ ID NO: 36856 - DNA, 25 bp, probe
actggactttgagaagatcatgcac

SEQ ID NO: 36857 - DNA, 25 bp, probe
ttttctctccttttcttttcttcaa

SEQ ID NO: 36858 - DNA, 25 bp, probe
gtacagcatccacattgaccagatg

SEQ ID NO: 36859 - DNA, 25 bp, probe
tggactttgagaagatcatgcacac

SEQ ID NO: 36860 - DNA, 25 bp, probe
tttctctccttttcttttcttcaat

SEQ ID NO: 36861 - DNA, 25 bp, probe
ccaagtacagcatccacattgacca

SEQ ID NO: 36862 - DNA, 25 bp, probe
catcttcaagaagctggactcggag

SEQ ID NO: 36863 - DNA, 25 bp, probe
gactttgagaagatcatgcacaccc

SEQ ID NO: 36864 - DNA, 25 bp, probe
ggactttgagaagatcatgcacacc

SEQ ID NO: 36865 - DNA, 25 bp, probe
tctctccttttcttttcttcaataa

SEQ ID NO: 36866 - DNA, 25 bp, probe
ttctctccttttcttttcttcaata

SEQ ID NO: 36867 - DNA, 25 bp, probe
cggtatgcagaactggactttgaga

SEQ ID NO: 36868 - DNA, 25 bp, probe
ctctccttttcttttcttcaataaa

SEQ ID NO: 36869 - DNA, 25 bp, probe
gggacatcttcaagaagctggactc

SEQ ID NO: 36870 - DNA, 25 bp, probe
tctccttttcttttcttcaataaaa

SEQ ID NO: 36871 - DNA, 25 bp, probe
ttctgaccatcctgtgttgtaagta

SEQ ID NO: 36872 - DNA, 25 bp, probe
aatcacgatattcagaccttgactt

SEQ ID NO: 36873 - DNA, 25 bp, probe
tctatctggacagtgtgactatctt

SEQ ID NO: 36874 - DNA, 25 bp, probe
ttctatctggacagtgtgactatct

SEQ ID NO: 36875 - DNA, 25 bp, probe
atctggacagtgtgactatcttatg

SEQ ID NO: 36876 - DNA, 25 bp, probe
gaattgcggagaactgtgtacttat

SEQ ID NO: 36877 - DNA, 25 bp, probe
ctatctggacagtgtgactatctta

SEQ ID NO: 36878 - DNA, 25 bp, probe
atatgaacttagagcaacatctcgc

SEQ ID NO: 36879 - DNA, 25 bp, probe
aatatgaacttagagcaacatctcg

SEQ ID NO: 36880 - DNA, 25 bp, probe
gattcatgttgtaaccgcttcatat

SEQ ID NO: 36881 - DNA, 25 bp, probe
tatcttatgtcaggaccttcatgtg

SEQ ID NO: 36882 - DNA, 25 bp, probe
tctggacagtgtgactatcttatgt

SEQ ID NO: 36883 - DNA, 25 bp, probe
ctatcttatgtcaggaccttcatgt

SEQ ID NO: 36884 - DNA, 25 bp, probe
actatcttatgtcaggaccttcatg

SEQ ID NO: 36885 - DNA, 25 bp, probe
aattgcggagaactgtgtacttatg

SEQ ID NO: 36886 - DNA, 25 bp, probe
gactatcttatgtcaggaccttcat

SEQ ID NO: 36887 - DNA, 25 bp, probe
cctgtaatggaccagttcaatatga

SEQ ID NO: 36888 - DNA, 25 bp, probe
tatctggacagtgtgactatcttat

SEQ ID NO: 36889 - DNA, 25 bp, probe
ttgcggagaactgtgtacttatgta

SEQ ID NO: 36890 - DNA, 25 bp, probe
agttctgaccatcctgtgttgtaag

SEQ ID NO: 36891 - DNA, 25 bp, probe
tcaatatgaacttagagcaacatct

SEQ ID NO: 36892 - DNA, 25 bp, probe
atagtgaattgcggagaactgtgta

SEQ ID NO: 36893 - DNA, 25 bp, probe
tctgaccatcctgtgttgtaagtac

SEQ ID NO: 36894 - DNA, 25 bp, probe
gttctgaccatcctgtgttgtaagt

SEQ ID NO: 36895 - DNA, 25 bp, probe
attacaccacaatcaatgtcttaga

SEQ ID NO: 36896 - DNA, 25 bp, probe
cgattcatgttgtaaccgcttcata

SEQ ID NO: 36897 - DNA, 25 bp, probe
tatgaacttagagcaacatctcgca

SEQ ID NO: 36898 - DNA, 25 bp, probe
caatatgaacttagagcaacatctc

SEQ ID NO: 36899 - DNA, 25 bp, probe
attgcggagaactgtgtacttatgt

SEQ ID NO: 36900 - DNA, 25 bp, probe
tgaattgcggagaactgtgtactta

SEQ ID NO: 36901 - DNA, 25 bp, probe
tagataaacctcaagcaacgattca

SEQ ID NO: 36902 - DNA, 25 bp, probe
aactttggacagatttcgggatata

SEQ ID NO: 36903 - DNA, 25 bp, probe
ttacaccacaatcaatgtcttagac

SEQ ID NO: 36904 - DNA, 25 bp, probe
cgggatataccaaatacaagcagta

SEQ ID NO: 36905 - DNA, 25 bp, probe
tttcgggatataccaaatacaagca

SEQ ID NO: 36906 - DNA, 25 bp, probe
actttggacagatttcgggatatac

SEQ ID NO: 36907 - DNA, 25 bp, probe
acatagtccatcctcaagaaagaat

SEQ ID NO: 36908 - DNA, 25 bp, probe
aaactttggacagatttcgggatat

SEQ ID NO: 36909 - DNA, 25 bp, probe
agataaacctcaagcaacgattcat

SEQ ID NO: 36910 - DNA, 25 bp, probe
atagataaacctcaagcaacgattc

SEQ ID NO: 36911 - DNA, 25 bp, probe
ttcgggatataccaaatacaagcag

SEQ ID NO: 36912 - DNA, 25 bp, probe
caagaaagaatgatggaaagtgact

SEQ ID NO: 36913 - DNA, 25 bp, probe
tcaccatgaagcacaatgtatatat

SEQ ID NO: 36914 - DNA, 25 bp, probe
gcattacaccacaatcaatgtctta

SEQ ID NO: 36915 - DNA, 25 bp, probe
ttgtcaccattccttcattcttctc

SEQ ID NO: 36916 - DNA, 25 bp, probe
cttgtcaccattccttcattcttct

SEQ ID NO: 36917 - DNA, 25 bp, probe
ttcctcttcatcttctgcttcattg

SEQ ID NO: 36918 - DNA, 25 bp, probe
gttcctcttcatcttctgcttcatt

SEQ ID NO: 36919 - DNA, 25 bp, probe
tcaccattccttcattcttctccaa

SEQ ID NO: 36920 - DNA, 25 bp, probe
caccattccttcattcttctccaag

SEQ ID NO: 36921 - DNA, 25 bp, probe
cctcttcatcttctgcttcattgtg

SEQ ID NO: 36922 - DNA, 25 bp, probe
tcctcttcatcttctgcttcattgt

SEQ ID NO: 36923 - DNA, 25 bp, probe
gcttgtcaccattccttcattcttc

SEQ ID NO: 36924 - DNA, 25 bp, probe
ctcttcatcttctgcttcattgtgc

SEQ ID NO: 36925 - DNA, 25 bp, probe
gtcaccattccttcattcttctcca

SEQ ID NO: 36926 - DNA, 25 bp, probe
tgtcaccattccttcattcttctcc

SEQ ID NO: 36927 - DNA, 25 bp, probe
ggttcctcttcatcttctgcttcat

SEQ ID NO: 36928 - DNA, 25 bp, probe
ctatacgtggttcctcttcatcttc

SEQ ID NO: 36929 - DNA, 25 bp, probe
tatacgtggttcctcttcatcttct

SEQ ID NO: 36930 - DNA, 25 bp, probe
ctacaatcccatcatctactgcttc

SEQ ID NO: 36931 - DNA, 25 bp, probe
atctacaatcccatcatctactgct

SEQ ID NO: 36932 - DNA, 25 bp, probe
catctacaatcccatcatctactgc

SEQ ID NO: 36933 - DNA, 25 bp, probe
gcatctacaatcccatcatctactg

SEQ ID NO: 36934 - DNA, 25 bp, probe
tctacaatcccatcatctactgctt

SEQ ID NO: 36935 - DNA, 25 bp, probe
tacaatcccatcatctactgcttca

SEQ ID NO: 36936 - DNA, 25 bp, probe
cctatacgtggttcctcttcatctt

SEQ ID NO: 36937 - DNA, 25 bp, probe
attccttcattcttctccaagagtg

SEQ ID NO: 36938 - DNA, 25 bp, probe
cattccttcattcttctccaagagt

SEQ ID NO: 36939 - DNA, 25 bp, probe
gtggttcctcttcatcttctgcttc

SEQ ID NO: 36940 - DNA, 25 bp, probe
acaatcccatcatctactgcttcat

SEQ ID NO: 36941 - DNA, 25 bp, probe
ccattccttcattcttctccaagag

SEQ ID NO: 36942 - DNA, 25 bp, probe
ggcttgtcaccattccttcattctt

SEQ ID NO: 36943 - DNA, 25 bp, probe
atacgtggttcctcttcatcttctg

SEQ ID NO: 36944 - DNA, 25 bp, probe
ttcatcttctgcttcattgtgcctc

SEQ ID NO: 36945 - DNA, 25 bp, probe
cttcatcttctgcttcattgtgcct

SEQ ID NO: 36946 - DNA, 25 bp, probe
tcttcatcttctgcttcattgtgcc

SEQ ID NO: 36947 - DNA, 25 bp, probe
gtcctatacgtggttcctcttcatc

SEQ ID NO: 36948 - DNA, 25 bp, probe
accattccttcattcttctccaaga

SEQ ID NO: 36949 - DNA, 25 bp, probe
tcctatacgtggttcctcttcatct

SEQ ID NO: 36950 - DNA, 25 bp, probe
tggttcctcttcatcttctgcttca

SEQ ID NO: 36951 - DNA, 25 bp, probe
gtttctactgtctcgtctacccaag

SEQ ID NO: 36952 - DNA, 25 bp, probe
agaagtttctactgtctcgtctacc

SEQ ID NO: 36953 - DNA, 25 bp, probe
cagaagtttctactgtctcgtctac

SEQ ID NO: 36954 - DNA, 25 bp, probe
agtcctatacgtggttcctcttcat

SEQ ID NO: 36955 - DNA, 25 bp, probe
caatcccatcatctactgcttcatg

SEQ ID NO: 36956 - DNA, 25 bp, probe
gaagtttctactgtctcgtctaccc

SEQ ID NO: 36957 - DNA, 25 bp, probe
atcttctgcttcattgtgcctctct

SEQ ID NO: 36958 - DNA, 25 bp, probe
catcttctgcttcattgtgcctctc

SEQ ID NO: 36959 - DNA, 25 bp, probe
ttgatagttcacaagagaagtcgtt

SEQ ID NO: 36960 - DNA, 25 bp, probe
ggaaggaggtctacatcaagaatgg

SEQ ID NO: 36961 - DNA, 25 bp, probe
ttcattcaagttggtgtaatcagct

SEQ ID NO: 36962 - DNA, 25 bp, probe
tcgtttcattcaagttggtgtaatc

SEQ ID NO: 36963 - DNA, 25 bp, probe
tttcattcaagttggtgtaatcagc

SEQ ID NO: 36964 - DNA, 25 bp, probe
cgtttcattcaagttggtgtaatca

SEQ ID NO: 36965 - DNA, 25 bp, probe
gtcgtttcattcaagttggtgtaat

SEQ ID NO: 36966 - DNA, 25 bp, probe
cggaaggaggtctacatcaagaatg

SEQ ID NO: 36967 - DNA, 25 bp, probe
tcggaaggaggtctacatcaagaat

SEQ ID NO: 36968 - DNA, 25 bp, probe
caagagaagtcgtttcattcaagtt

SEQ ID NO: 36969 - DNA, 25 bp, probe
gactttcacatcaacctctttcaag

SEQ ID NO: 36970 - DNA, 25 bp, probe
tagttcacaagagaagtcgtttcat

SEQ ID NO: 36971 - DNA, 25 bp, probe
atagttcacaagagaagtcgtttca

SEQ ID NO: 36972 - DNA, 25 bp, probe
gatagttcacaagagaagtcgtttc

SEQ ID NO: 36973 - DNA, 25 bp, probe
aagagaagtcgtttcattcaagttg

SEQ ID NO: 36974 - DNA, 25 bp, probe
cacaagagaagtcgtttcattcaag

SEQ ID NO: 36975 - DNA, 25 bp, probe
gttcacaagagaagtcgtttcattc

SEQ ID NO: 36976 - DNA, 25 bp, probe
agactttcacatcaacctctttcaa

SEQ ID NO: 36977 - DNA, 25 bp, probe
gtttcattcaagttggtgtaatcag

SEQ ID NO: 36978 - DNA, 25 bp, probe
agtcgtttcattcaagttggtgtaa

SEQ ID NO: 36979 - DNA, 25 bp, probe
aagtcgtttcattcaagttggtgta

SEQ ID NO: 36980 - DNA, 25 bp, probe
acaagagaagtcgtttcattcaagt

SEQ ID NO: 36981 - DNA, 25 bp, probe
tcacaagagaagtcgtttcattcaa

SEQ ID NO: 36982 - DNA, 25 bp, probe
ttcacaagagaagtcgtttcattca

SEQ ID NO: 36983 - DNA, 25 bp, probe
agttcacaagagaagtcgtttcatt

SEQ ID NO: 36984 - DNA, 25 bp, probe
tgatagttcacaagagaagtcgttt

SEQ ID NO: 36985 - DNA, 25 bp, probe
agagaagtcgtttcattcaagttgg

SEQ ID NO: 36986 - DNA, 25 bp, probe
gagactttcacatcaacctctttca

SEQ ID NO: 36987 - DNA, 25 bp, probe
gagaagtcgtttcattcaagttggt

SEQ ID NO: 36988 - DNA, 25 bp, probe
agaagtcgtttcattcaagttggtg

SEQ ID NO: 36989 - DNA, 25 bp, probe
ctttcacatcaacctctttcaagtg

SEQ ID NO: 36990 - DNA, 25 bp, probe
gaagtcgtttcattcaagttggtgt

SEQ ID NO: 36991 - DNA, 25 bp, probe
ctcggaaggaggtctacatcaagaa

SEQ ID NO: 36992 - DNA, 25 bp, probe
cgagactttcacatcaacctctttc

SEQ ID NO: 36993 - DNA, 25 bp, probe
gaaggaggtctacatcaagaatggg

SEQ ID NO: 36994 - DNA, 25 bp, probe
cttgatagttcacaagagaagtcgt

SEQ ID NO: 36995 - DNA, 25 bp, probe
tttcacatcaacctctttcaagtgc

SEQ ID NO: 36996 - DNA, 25 bp, probe
ccttgatagttcacaagagaagtcg

SEQ ID NO: 36997 - DNA, 25 bp, probe
tgaggatttgggttttctataaggg

SEQ ID NO: 36998 - DNA, 25 bp, probe
ccgagactttcacatcaacctcttt

SEQ ID NO: 36999 - DNA, 25 bp, probe
ggatttgggttttctataaggggtt

SEQ ID NO: 37000 - DNA, 25 bp, probe
tttgggttttctataaggggtttcc

SEQ ID NO: 37001 - DNA, 25 bp, probe
atttgggttttctataaggggtttc

SEQ ID NO: 37002 - DNA, 25 bp, probe
gatttgggttttctataaggggttt

SEQ ID NO: 37003 - DNA, 25 bp, probe
atcctaatcatccaatgctcaagaa

SEQ ID NO: 37004 - DNA, 25 bp, probe
catcctaatcatccaatgctcaaga

SEQ ID NO: 37005 - DNA, 25 bp, probe
ccatcctaatcatccaatgctcaag

SEQ ID NO: 37006 - DNA, 25 bp, probe
cctaatcatccaatgctcaagaaac

SEQ ID NO: 37007 - DNA, 25 bp, probe
tcctaatcatccaatgctcaagaaa

SEQ ID NO: 37008 - DNA, 25 bp, probe
ctaatcatccaatgctcaagaaaca

SEQ ID NO: 37009 - DNA, 25 bp, probe
aatcatccaatgctcaagaaacaac

SEQ ID NO: 37010 - DNA, 25 bp, probe
taatcatccaatgctcaagaaacaa

SEQ ID NO: 37011 - DNA, 25 bp, probe
catccaatgctcaagaaacaacttc

SEQ ID NO: 37012 - DNA, 25 bp, probe
atcatccaatgctcaagaaacaact

SEQ ID NO: 37013 - DNA, 25 bp, probe
tcatccaatgctcaagaaacaactt

SEQ ID NO: 37014 - DNA, 25 bp, probe
gaaacaacttctacttctgcccttg

SEQ ID NO: 37015 - DNA, 25 bp, probe
cccatcctaatcatccaatgctcaa

SEQ ID NO: 37016 - DNA, 25 bp, probe
aaggagggagatggatcaatcaaac

SEQ ID NO: 37017 - DNA, 25 bp, probe
caaggagggagatggatcaatcaaa

SEQ ID NO: 37018 - DNA, 25 bp, probe
ctcccatcctaatcatccaatgctc

SEQ ID NO: 37019 - DNA, 25 bp, probe
cacctcccatcctaatcatccaatg

SEQ ID NO: 37020 - DNA, 25 bp, probe
cataagctatagacccgaggaaact

SEQ ID NO: 37021 - DNA, 25 bp, probe
aaacaggtcaatacagtacaggcag

SEQ ID NO: 37022 - DNA, 25 bp, probe
cttaggcagggaagtgtaagaaaca

SEQ ID NO: 37023 - DNA, 25 bp, probe
ctcactcccttcccataagctatag

SEQ ID NO: 37024 - DNA, 25 bp, probe
ctcaagaaacaacttctacttctgc

SEQ ID NO: 37025 - DNA, 25 bp, probe
gctcaagaaacaacttctacttctg

SEQ ID NO: 37026 - DNA, 25 bp, probe
tgctcaagaaacaacttctacttct

SEQ ID NO: 37027 - DNA, 25 bp, probe
caatgctcaagaaacaacttctact

SEQ ID NO: 37028 - DNA, 25 bp, probe
atgctcaagaaacaacttctacttc

SEQ ID NO: 37029 - DNA, 25 bp, probe
ccaatgctcaagaaacaacttctac

SEQ ID NO: 37030 - DNA, 25 bp, probe
tccaatgctcaagaaacaacttcta

SEQ ID NO: 37031 - DNA, 25 bp, probe
cactcccttcccataagctatagac

SEQ ID NO: 37032 - DNA, 25 bp, probe
tcactcccttcccataagctataga

SEQ ID NO: 37033 - DNA, 25 bp, probe
ataagctatagacccgaggaaactc

SEQ ID NO: 37034 - DNA, 25 bp, probe
aatgctcaagaaacaacttctactt

SEQ ID NO: 37035 - DNA, 25 bp, probe
atccaatgctcaagaaacaacttct

SEQ ID NO: 37036 - DNA, 25 bp, probe
tcaagaaacaacttctacttctgcc

SEQ ID NO: 37037 - DNA, 25 bp, probe
tcccatcctaatcatccaatgctca

SEQ ID NO: 37038 - DNA, 25 bp, probe
ggcagaggatggattttgaattttc

SEQ ID NO: 37039 - DNA, 25 bp, probe
ccataagctatagacccgaggaaac

SEQ ID NO: 37040 - DNA, 25 bp, probe
gcagaggatggattttgaattttct

SEQ ID NO: 37041 - DNA, 25 bp, probe
aggcagaggatggattttgaatttt

SEQ ID NO: 37042 - DNA, 25 bp, probe
aatacagtacaggcagcacagagac

SEQ ID NO: 37043 - DNA, 25 bp, probe
caatacagtacaggcagcacagaga

SEQ ID NO: 37044 - DNA, 25 bp, probe
tcaatacagtacaggcagcacagag

SEQ ID NO: 37045 - DNA, 25 bp, probe
cctcactcccttcccataagctata

SEQ ID NO: 37046 - DNA, 25 bp, probe
tatagacccgaggaaactcagagtc

SEQ ID NO: 37047 - DNA, 25 bp, probe
ctctgtctactattccttgattgct

SEQ ID NO: 37048 - DNA, 25 bp, probe
tctctgtctactattccttgattgc

SEQ ID NO: 37049 - DNA, 25 bp, probe
cctctaccattcattcacttctcaa

SEQ ID NO: 37050 - DNA, 25 bp, probe
tacctctaccattcattcacttctc

SEQ ID NO: 37051 - DNA, 25 bp, probe
acctctaccattcattcacttctca

SEQ ID NO: 37052 - DNA, 25 bp, probe
tctgtctactattccttgattgcta

SEQ ID NO: 37053 - DNA, 25 bp, probe
tgtacctctaccattcattcacttc

SEQ ID NO: 37054 - DNA, 25 bp, probe
ctgtacctctaccattcattcactt

SEQ ID NO: 37055 - DNA, 25 bp, probe
gtacctctaccattcattcacttct

SEQ ID NO: 37056 - DNA, 25 bp, probe
tccactctctattatctctgtctac

SEQ ID NO: 37057 - DNA, 25 bp, probe
ctgtctactattccttgattgctag

SEQ ID NO: 37058 - DNA, 25 bp, probe
ccactctctattatctctgtctact

SEQ ID NO: 37059 - DNA, 25 bp, probe
attccactctctattatctctgtct

SEQ ID NO: 37060 - DNA, 25 bp, probe
ctcctgtacctctaccattcattca

SEQ ID NO: 37061 - DNA, 25 bp, probe
cctgtacctctaccattcattcact

SEQ ID NO: 37062 - DNA, 25 bp, probe
tcctgtacctctaccattcattcac

SEQ ID NO: 37063 - DNA, 25 bp, probe
tgtctactattccttgattgctagg

SEQ ID NO: 37064 - DNA, 25 bp, probe
atctctgtctactattccttgattg

SEQ ID NO: 37065 - DNA, 25 bp, probe
cctcctgtacctctaccattcattc

SEQ ID NO: 37066 - DNA, 25 bp, probe
ttccactctctattatctctgtcta

SEQ ID NO: 37067 - DNA, 25 bp, probe
accattcattcacttctcaaaccta

SEQ ID NO: 37068 - DNA, 25 bp, probe
taccattcattcacttctcaaacct

SEQ ID NO: 37069 - DNA, 25 bp, probe
ctaccattcattcacttctcaaacc

SEQ ID NO: 37070 - DNA, 25 bp, probe
cctgaacatacctactgaggaacaa

SEQ ID NO: 37071 - DNA, 25 bp, probe
acctcctgtacctctaccattcatt

SEQ ID NO: 37072 - DNA, 25 bp, probe
aatcacctcctgtacctctaccatt

SEQ ID NO: 37073 - DNA, 25 bp, probe
ccattcattcacttctcaaacctat

SEQ ID NO: 37074 - DNA, 25 bp, probe
tctaccattcattcacttctcaaac

SEQ ID NO: 37075 - DNA, 25 bp, probe
ttcacttctcaaacctatgtagacc

SEQ ID NO: 37076 - DNA, 25 bp, probe
ctctaccattcattcacttctcaaa

SEQ ID NO: 37077 - DNA, 25 bp, probe
cagattgaatcccgaaagagaattg

SEQ ID NO: 37078 - DNA, 25 bp, probe
atcacctcctgtacctctaccattc

SEQ ID NO: 37079 - DNA, 25 bp, probe
gtgttctacattattccactctcta

SEQ ID NO: 37080 - DNA, 25 bp, probe
tattccactctctattatctctgtc

SEQ ID NO: 37081 - DNA, 25 bp, probe
gaaagagaattgccagaacggtatt

SEQ ID NO: 37082 - DNA, 25 bp, probe
attcattcacttctcaaacctatgt

SEQ ID NO: 37083 - DNA, 25 bp, probe
tcacttctcaaacctatgtagaccc

SEQ ID NO: 37084 - DNA, 25 bp, probe
tcattcacttctcaaacctatgtag

SEQ ID NO: 37085 - DNA, 25 bp, probe
cacctcctgtacctctaccattcat

SEQ ID NO: 37086 - DNA, 25 bp, probe
aaagagaattgccagaacggtattg

SEQ ID NO: 37087 - DNA, 25 bp, probe
cttgattgctaggaccctttacaaa

SEQ ID NO: 37088 - DNA, 25 bp, probe
attcacttctcaaacctatgtagac

SEQ ID NO: 37089 - DNA, 25 bp, probe
cattcacttctcaaacctatgtaga

SEQ ID NO: 37090 - DNA, 25 bp, probe
cattcattcacttctcaaacctatg

SEQ ID NO: 37091 - DNA, 25 bp, probe
gaataggatggatgtgttctctcaa

SEQ ID NO: 37092 - DNA, 25 bp, probe
ccagttgttgataaccactaagagt

SEQ ID NO: 37093 - DNA, 25 bp, probe
accagttgttgataaccactaagag

SEQ ID NO: 37094 - DNA, 25 bp, probe
gaccagttgttgataaccactaaga

SEQ ID NO: 37095 - DNA, 25 bp, probe
cagttgttgataaccactaagagtc

SEQ ID NO: 37096 - DNA, 25 bp, probe
agttgttgataaccactaagagtct

SEQ ID NO: 37097 - DNA, 25 bp, probe
tgaccagttgttgataaccactaag

SEQ ID NO: 37098 - DNA, 25 bp, probe
gttgttgataaccactaagagtctc

SEQ ID NO: 37099 - DNA, 25 bp, probe
ctgaccagttgttgataaccactaa

SEQ ID NO: 37100 - DNA, 25 bp, probe
ttgttgataaccactaagagtctct

SEQ ID NO: 37101 - DNA, 25 bp, probe
tgttgataaccactaagagtctcta

SEQ ID NO: 37102 - DNA, 25 bp, probe
aataggatggatgtgttctctcaaa

SEQ ID NO: 37103 - DNA, 25 bp, probe
aaattctctttcctgtagtcccatt

SEQ ID NO: 37104 - DNA, 25 bp, probe
actgaccagttgttgataaccacta

SEQ ID NO: 37105 - DNA, 25 bp, probe
aattctctttcctgtagtcccattg

SEQ ID NO: 37106 - DNA, 25 bp, probe
tctttcctgtagtcccattgatgta

SEQ ID NO: 37107 - DNA, 25 bp, probe
ttctctttcctgtagtcccattgat

SEQ ID NO: 37108 - DNA, 25 bp, probe
attctctttcctgtagtcccattga

SEQ ID NO: 37109 - DNA, 25 bp, probe
gggaaagaataggatggatgtgttc

SEQ ID NO: 37110 - DNA, 25 bp, probe
aagaataggatggatgtgttctctc

SEQ ID NO: 37111 - DNA, 25 bp, probe
cccattgatgtactttacctgaaac

SEQ ID NO: 37112 - DNA, 25 bp, probe
tcccattgatgtactttacctgaaa

SEQ ID NO: 37113 - DNA, 25 bp, probe
agaataggatggatgtgttctctca

SEQ ID NO: 37114 - DNA, 25 bp, probe
gtcccattgatgtactttacctgaa

SEQ ID NO: 37115 - DNA, 25 bp, probe
tctctttcctgtagtcccattgatg

SEQ ID NO: 37116 - DNA, 25 bp, probe
ctttcctgtagtcccattgatgtac

SEQ ID NO: 37117 - DNA, 25 bp, probe
gttgataaccactaagagtctctat

SEQ ID NO: 37118 - DNA, 25 bp, probe
ctctttcctgtagtcccattgatgt

SEQ ID NO: 37119 - DNA, 25 bp, probe
tagtcccattgatgtactttacctg

SEQ ID NO: 37120 - DNA, 25 bp, probe
gtagtcccattgatgtactttacct

SEQ ID NO: 37121 - DNA, 25 bp, probe
tgtagtcccattgatgtactttacc

SEQ ID NO: 37122 - DNA, 25 bp, probe
cctgtagtcccattgatgtacttta

SEQ ID NO: 37123 - DNA, 25 bp, probe
ctgacaacgataccttctacgacct

SEQ ID NO: 37124 - DNA, 25 bp, probe
ctgtagtcccattgatgtactttac

SEQ ID NO: 37125 - DNA, 25 bp, probe
tgatgtactttacctgaaacaacca

SEQ ID NO: 37126 - DNA, 25 bp, probe
agtcccattgatgtactttacctga

SEQ ID NO: 37127 - DNA, 25 bp, probe
tcctgtagtcccattgatgtacttt

SEQ ID NO: 37128 - DNA, 25 bp, probe
ttcctgtagtcccattgatgtactt

SEQ ID NO: 37129 - DNA, 25 bp, probe
tttcctgtagtcccattgatgtact

SEQ ID NO: 37130 - DNA, 25 bp, probe
gatgtactttacctgaaacaaccaa

SEQ ID NO: 37131 - DNA, 25 bp, probe
ttgatgtactttacctgaaacaacc

SEQ ID NO: 37132 - DNA, 25 bp, probe
ccattgatgtactttacctgaaaca

SEQ ID NO: 37133 - DNA, 25 bp, probe
atgtactttacctgaaacaaccaaa

SEQ ID NO: 37134 - DNA, 25 bp, probe
gatcaagaaagagatggaggaggag

SEQ ID NO: 37135 - DNA, 25 bp, probe
gttgactggataatgaagactatgc

SEQ ID NO: 37136 - DNA, 25 bp, probe
cacttgtgaggagccatattactac

SEQ ID NO: 37137 - DNA, 25 bp, probe
ctacacttgtgaggagccatattac

SEQ ID NO: 37138 - DNA, 25 bp, probe
acacttgtgaggagccatattacta

SEQ ID NO: 37139 - DNA, 25 bp, probe
tacacttgtgaggagccatattact

SEQ ID NO: 37140 - DNA, 25 bp, probe
tgttgactggataatgaagactatg

SEQ ID NO: 37141 - DNA, 25 bp, probe
actatgttgactggataatgaagac

SEQ ID NO: 37142 - DNA, 25 bp, probe
gatcatagaattgtgctggtcatac

SEQ ID NO: 37143 - DNA, 25 bp, probe
gcattaccttctgttccttatgata

SEQ ID NO: 37144 - DNA, 25 bp, probe
tcatagaattgtgctggtcatacat

SEQ ID NO: 37145 - DNA, 25 bp, probe
atcatagaattgtgctggtcataca

SEQ ID NO: 37146 - DNA, 25 bp, probe
cttgtgaggagccatattactacat

SEQ ID NO: 37147 - DNA, 25 bp, probe
ctatgttgactggataatgaagact

SEQ ID NO: 37148 - DNA, 25 bp, probe
catagaattgtgctggtcatacatt

SEQ ID NO: 37149 - DNA, 25 bp, probe
aatagaacttgattgttgagacgcc

SEQ ID NO: 37150 - DNA, 25 bp, probe
acttgtgaggagccatattactaca

SEQ ID NO: 37151 - DNA, 25 bp, probe
accttctgttccttatgatattctc

SEQ ID NO: 37152 - DNA, 25 bp, probe
cggagtacctattgtagataacact

SEQ ID NO: 37153 - DNA, 25 bp, probe
atagaacttgattgttgagacgcct

SEQ ID NO: 37154 - DNA, 25 bp, probe
ttgtgaggagccatattactacatg

SEQ ID NO: 37155 - DNA, 25 bp, probe
atgttgactggataatgaagactat

SEQ ID NO: 37156 - DNA, 25 bp, probe
aactatgttgactggataatgaaga

SEQ ID NO: 37157 - DNA, 25 bp, probe
agaactatgttgactggataatgaa

SEQ ID NO: 37158 - DNA, 25 bp, probe
aagaactatgttgactggataatga

SEQ ID NO: 37159 - DNA, 25 bp, probe
ccttctgttccttatgatattctca

SEQ ID NO: 37160 - DNA, 25 bp, probe
tagaacttgattgttgagacgcctt

SEQ ID NO: 37161 - DNA, 25 bp, probe
gaactatgttgactggataatgaag

SEQ ID NO: 37162 - DNA, 25 bp, probe
ttgactggataatgaagactatgca

SEQ ID NO: 37163 - DNA, 25 bp, probe
tctttgtttcctctttacctgttca

SEQ ID NO: 37164 - DNA, 25 bp, probe
ttctttgtttcctctttacctgttc

SEQ ID NO: 37165 - DNA, 25 bp, probe
tgcattaccttctgttccttatgat

SEQ ID NO: 37166 - DNA, 25 bp, probe
tatgttgactggataatgaagacta

SEQ ID NO: 37167 - DNA, 25 bp, probe
aaatagaacttgattgttgagacgc

SEQ ID NO: 37168 - DNA, 25 bp, probe
aaagaagacacgagcgaatgattta

SEQ ID NO: 37169 - DNA, 25 bp, probe
gggtaaagaactatgttgactggat

SEQ ID NO: 37170 - DNA, 25 bp, probe
attctttgtttcctctttacctgtt

SEQ ID NO: 37171 - DNA, 25 bp, probe
aagaagacacgagcgaatgatttaa

SEQ ID NO: 37172 - DNA, 25 bp, probe
ctctacacacgggtaaagaactatg

SEQ ID NO: 37173 - DNA, 25 bp, probe
atcccaatgacaagaccaaattcta

SEQ ID NO: 37174 - DNA, 25 bp, probe
ctttgtttcctctttacctgttcaa

SEQ ID NO: 37175 - DNA, 25 bp, probe
cgtgaggactaatccagatacatcc

SEQ ID NO: 37176 - DNA, 25 bp, probe
ccgtgaggactaatccagatacatc

SEQ ID NO: 37177 - DNA, 25 bp, probe
aattctttgtttcctctttacctgt

SEQ ID NO: 37178 - DNA, 25 bp, probe
tcccaatgacaagaccaaattctac

SEQ ID NO: 37179 - DNA, 25 bp, probe
accaggatattgacattgatacagt

SEQ ID NO: 37180 - DNA, 25 bp, probe
ccaggatattgacattgatacagtg

SEQ ID NO: 37181 - DNA, 25 bp, probe
tgatacagtgaagatacaggacatt

SEQ ID NO: 37182 - DNA, 25 bp, probe
ttgatacagtgaagatacaggacat

SEQ ID NO: 37183 - DNA, 25 bp, probe
attgatacagtgaagatacaggaca

SEQ ID NO: 37184 - DNA, 25 bp, probe
acattgatacagtgaagatacagga

SEQ ID NO: 37185 - DNA, 25 bp, probe
cattgatacagtgaagatacaggac

SEQ ID NO: 37186 - DNA, 25 bp, probe
gacattgatacagtgaagatacagg

SEQ ID NO: 37187 - DNA, 25 bp, probe
tacagtgaagatacaggacattctc

SEQ ID NO: 37188 - DNA, 25 bp, probe
gaagatacaggacattctcatcacc

SEQ ID NO: 37189 - DNA, 25 bp, probe
aaccaggatattgacattgatacag

SEQ ID NO: 37190 - DNA, 25 bp, probe
tgaagatacaggacattctcatcac

SEQ ID NO: 37191 - DNA, 25 bp, probe
gtgaagatacaggacattctcatca

SEQ ID NO: 37192 - DNA, 25 bp, probe
agtgaagatacaggacattctcatc

SEQ ID NO: 37193 - DNA, 25 bp, probe
cagtgaagatacaggacattctcat

SEQ ID NO: 37194 - DNA, 25 bp, probe
atacagtgaagatacaggacattct

SEQ ID NO: 37195 - DNA, 25 bp, probe
gatacagtgaagatacaggacattc

SEQ ID NO: 37196 - DNA, 25 bp, probe
ggaactcagaatacagacaagtaga

SEQ ID NO: 37197 - DNA, 25 bp, probe
tgacattgatacagtgaagatacag

SEQ ID NO: 37198 - DNA, 25 bp, probe
caggatattgacattgatacagtga

SEQ ID NO: 37199 - DNA, 25 bp, probe
aagatacaggacattctcatcacca

SEQ ID NO: 37200 - DNA, 25 bp, probe
acaatgtagtctcataaccaggata

SEQ ID NO: 37201 - DNA, 25 bp, probe
acagtgaagatacaggacattctca

SEQ ID NO: 37202 - DNA, 25 bp, probe
ttgacattgatacagtgaagataca

SEQ ID NO: 37203 - DNA, 25 bp, probe
tacaatgtagtctcataaccaggat

SEQ ID NO: 37204 - DNA, 25 bp, probe
atacaggacattctcatcaccacag

SEQ ID NO: 37205 - DNA, 25 bp, probe
agatacaggacattctcatcaccac

SEQ ID NO: 37206 - DNA, 25 bp, probe
tgtagtctcataaccaggatattga

SEQ ID NO: 37207 - DNA, 25 bp, probe
gatacaggacattctcatcaccaca

SEQ ID NO: 37208 - DNA, 25 bp, probe
ctcataaccaggatattgacattga

SEQ ID NO: 37209 - DNA, 25 bp, probe
tctcataaccaggatattgacattg

SEQ ID NO: 37210 - DNA, 25 bp, probe
aggatattgacattgatacagtgaa

SEQ ID NO: 37211 - DNA, 25 bp, probe
agtctcataaccaggatattgacat

SEQ ID NO: 37212 - DNA, 25 bp, probe
gaactcagaatacagacaagtagaa

SEQ ID NO: 37213 - DNA, 25 bp, probe
ggatattgacattgatacagtgaag

SEQ ID NO: 37214 - DNA, 25 bp, probe
atgtagtctcataaccaggatattg

SEQ ID NO: 37215 - DNA, 25 bp, probe
caatgtagtctcataaccaggatat

SEQ ID NO: 37216 - DNA, 25 bp, probe
taaccaggatattgacattgataca

SEQ ID NO: 37217 - DNA, 25 bp, probe
tagtctcataaccaggatattgaca

SEQ ID NO: 37218 - DNA, 25 bp, probe
gtctcataaccaggatattgacatt

SEQ ID NO: 37219 - DNA, 25 bp, probe
tcataaccaggatattgacattgat

SEQ ID NO: 37220 - DNA, 25 bp, probe
gtagtctcataaccaggatattgac

SEQ ID NO: 37221 - DNA, 25 bp, probe
gactcttctcatccttcctcatttg

SEQ ID NO: 37222 - DNA, 25 bp, probe
attgacattgatacagtgaagatac

SEQ ID NO: 37223 - DNA, 25 bp, probe
tctccagtctcatctatgtcatatt

SEQ ID NO: 37224 - DNA, 25 bp, probe
aatctccagtctcatctatgtcata

SEQ ID NO: 37225 - DNA, 25 bp, probe
atctccagtctcatctatgtcatat

SEQ ID NO: 37226 - DNA, 25 bp, probe
gcaacagtaatcagagttaccatta

SEQ ID NO: 37227 - DNA, 25 bp, probe
ttatgtgaaatgcttatgcttgtgt

SEQ ID NO: 37228 - DNA, 25 bp, probe
atgtgaaatgcttatgcttgtgtat

SEQ ID NO: 37229 - DNA, 25 bp, probe
caaatctccagtctcatctatgtca

SEQ ID NO: 37230 - DNA, 25 bp, probe
ctccaaatctccagtctcatctatg

SEQ ID NO: 37231 - DNA, 25 bp, probe
ccaaatctccagtctcatctatgtc

SEQ ID NO: 37232 - DNA, 25 bp, probe
tccaaatctccagtctcatctatgt

SEQ ID NO: 37233 - DNA, 25 bp, probe
tgcccaaattatgtgaaatgcttat

SEQ ID NO: 37234 - DNA, 25 bp, probe
cagaagtgatttagttgtggaaaga

SEQ ID NO: 37235 - DNA, 25 bp, probe
tgtgaaatgcttatgcttgtgtata

SEQ ID NO: 37236 - DNA, 25 bp, probe
tatgtgaaatgcttatgcttgtgta

SEQ ID NO: 37237 - DNA, 25 bp, probe
cccaaattatgtgaaatgcttatgc

SEQ ID NO: 37238 - DNA, 25 bp, probe
gcccaaattatgtgaaatgcttatg

SEQ ID NO: 37239 - DNA, 25 bp, probe
ctgcccaaattatgtgaaatgctta

SEQ ID NO: 37240 - DNA, 25 bp, probe
aaatctccagtctcatctatgtcat

SEQ ID NO: 37241 - DNA, 25 bp, probe
cctccaaatctccagtctcatctat

SEQ ID NO: 37242 - DNA, 25 bp, probe
tcacagtgttatgtagtattgttct

SEQ ID NO: 37243 - DNA, 25 bp, probe
tccaatcacagtgttatgtagtatt

SEQ ID NO: 37244 - DNA, 25 bp, probe
ttccaatcacagtgttatgtagtat

SEQ ID NO: 37245 - DNA, 25 bp, probe
agttctgcccaaattatgtgaaatg

SEQ ID NO: 37246 - DNA, 25 bp, probe
attatgtgaaatgcttatgcttgtg

SEQ ID NO: 37247 - DNA, 25 bp, probe
cctttcagaagtgatttagttgtgg

SEQ ID NO: 37248 - DNA, 25 bp, probe
ccaaattatgtgaaatgcttatgct

SEQ ID NO: 37249 - DNA, 25 bp, probe
tagttctgcccaaattatgtgaaat

SEQ ID NO: 37250 - DNA, 25 bp, probe
atagttctgcccaaattatgtgaaa

SEQ ID NO: 37251 - DNA, 25 bp, probe
agaagtgatttagttgtggaaagat

SEQ ID NO: 37252 - DNA, 25 bp, probe
gcctttcagaagtgatttagttgtg

SEQ ID NO: 37253 - DNA, 25 bp, probe
tcagaagtgatttagttgtggaaag

SEQ ID NO: 37254 - DNA, 25 bp, probe
ctttcagaagtgatttagttgtgga

SEQ ID NO: 37255 - DNA, 25 bp, probe
tgcctttcagaagtgatttagttgt

SEQ ID NO: 37256 - DNA, 25 bp, probe
aatgcttatgcttgtgtatatgtat

SEQ ID NO: 37257 - DNA, 25 bp, probe
tctgcccaaattatgtgaaatgctt

SEQ ID NO: 37258 - DNA, 25 bp, probe
ttcagaagtgatttagttgtggaaa

SEQ ID NO: 37259 - DNA, 25 bp, probe
tttcagaagtgatttagttgtggaa

SEQ ID NO: 37260 - DNA, 25 bp, probe
gaaatgcttatgcttgtgtatatgt

SEQ ID NO: 37261 - DNA, 25 bp, probe
tgaaatgcttatgcttgtgtatatg

SEQ ID NO: 37262 - DNA, 25 bp, probe
gtgaaatgcttatgcttgtgtatat

SEQ ID NO: 37263 - DNA, 25 bp, probe
aattatgtgaaatgcttatgcttgt

SEQ ID NO: 37264 - DNA, 25 bp, probe
ttctgcccaaattatgtgaaatgct

SEQ ID NO: 37265 - DNA, 25 bp, probe
gttctgcccaaattatgtgaaatgc

SEQ ID NO: 37266 - DNA, 25 bp, probe
ctgcctttcagaagtgatttagttg

SEQ ID NO: 37267 - DNA, 25 bp, probe
tcgttctccttacaatcaagttctt

SEQ ID NO: 37268 - DNA, 25 bp, probe
atcgttctccttacaatcaagttct

SEQ ID NO: 37269 - DNA, 25 bp, probe
aatcgttctccttacaatcaagttc

SEQ ID NO: 37270 - DNA, 25 bp, probe
cgttctccttacaatcaagttcttg

SEQ ID NO: 37271 - DNA, 25 bp, probe
acggtttatgagcacacaattatag

SEQ ID NO: 37272 - DNA, 25 bp, probe
gacggtttatgagcacacaattata

SEQ ID NO: 37273 - DNA, 25 bp, probe
cggtttatgagcacacaattatagc

SEQ ID NO: 37274 - DNA, 25 bp, probe
gccttatacatctggtcttacaaag

SEQ ID NO: 37275 - DNA, 25 bp, probe
ttgttgccttatcttcttccaaatg

SEQ ID NO: 37276 - DNA, 25 bp, probe
cttgttgccttatcttcttccaaat

SEQ ID NO: 37277 - DNA, 25 bp, probe
aaatcgttctccttacaatcaagtt

SEQ ID NO: 37278 - DNA, 25 bp, probe
gttgccttatcttcttccaaatgta

SEQ ID NO: 37279 - DNA, 25 bp, probe
tgccttatcttcttccaaatgtact

SEQ ID NO: 37280 - DNA, 25 bp, probe
tgttgccttatcttcttccaaatgt

SEQ ID NO: 37281 - DNA, 25 bp, probe
gccttatcttcttccaaatgtactg

SEQ ID NO: 37282 - DNA, 25 bp, probe
ggacggtttatgagcacacaattat

SEQ ID NO: 37283 - DNA, 25 bp, probe
gctgcctctgtaaattcatgtattc

SEQ ID NO: 37284 - DNA, 25 bp, probe
ccttgttgccttatcttcttccaaa

SEQ ID NO: 37285 - DNA, 25 bp, probe
ttgccttgttgccttatcttcttcc

SEQ ID NO: 37286 - DNA, 25 bp, probe
aggcatccaatttgtaaaccaatta

SEQ ID NO: 37287 - DNA, 25 bp, probe
caggcatccaatttgtaaaccaatt

SEQ ID NO: 37288 - DNA, 25 bp, probe
tgctgcctctgtaaattcatgtatt

SEQ ID NO: 37289 - DNA, 25 bp, probe
tatgctgcctctgtaaattcatgta

SEQ ID NO: 37290 - DNA, 25 bp, probe
tttgccttgttgccttatcttcttc

SEQ ID NO: 37291 - DNA, 25 bp, probe
taaatcgttctccttacaatcaagt

SEQ ID NO: 37292 - DNA, 25 bp, probe
ctgcctctgtaaattcatgtattca

SEQ ID NO: 37293 - DNA, 25 bp, probe
gtttctactttaacagggtatgctg

SEQ ID NO: 37294 - DNA, 25 bp, probe
aactttatgaacttcaccaccacta

SEQ ID NO: 37295 - DNA, 25 bp, probe
atgctgcctctgtaaattcatgtat

SEQ ID NO: 37296 - DNA, 25 bp, probe
ttgccttatcttcttccaaatgtac

SEQ ID NO: 37297 - DNA, 25 bp, probe
actttatgaacttcaccaccactag

SEQ ID NO: 37298 - DNA, 25 bp, probe
ccttatcttcttccaaatgtactgt

SEQ ID NO: 37299 - DNA, 25 bp, probe
aaactttatgaacttcaccaccact

SEQ ID NO: 37300 - DNA, 25 bp, probe
tgcctctgtaaattcatgtattcaa

SEQ ID NO: 37301 - DNA, 25 bp, probe
tttctactttaacagggtatgctgc

SEQ ID NO: 37302 - DNA, 25 bp, probe
aagtttgtttcctggctttaccttg

SEQ ID NO: 37303 - DNA, 25 bp, probe
ttggtaatagtaaatcgttctcctt

SEQ ID NO: 37304 - DNA, 25 bp, probe
gccttgttgccttatcttcttccaa

SEQ ID NO: 37305 - DNA, 25 bp, probe
caagtttgtttcctggctttacctt

SEQ ID NO: 37306 - DNA, 25 bp, probe
ggcatccaatttgtaaaccaattat

SEQ ID NO: 37307 - DNA, 25 bp, probe
gtatgctgcctctgtaaattcatgt

SEQ ID NO: 37308 - DNA, 25 bp, probe
attcggccttatacatctggtctta

SEQ ID NO: 37309 - DNA, 25 bp, probe
tattcggccttatacatctggtctt

SEQ ID NO: 37310 - DNA, 25 bp, probe
attggtaatagtaaatcgttctcct

SEQ ID NO: 37311 - DNA, 25 bp, probe
aaattaaacacatgcatacagaaaa

SEQ ID NO: 37312 - DNA, 25 bp, probe
aaaattaaacacatgcatacagaaa

SEQ ID NO: 37313 - DNA, 25 bp, probe
taaaattaaacacatgcatacagaa

SEQ ID NO: 37314 - DNA, 25 bp, probe
ttaaaattaaacacatgcatacaga

SEQ ID NO: 37315 - DNA, 25 bp, probe
ctctctctctctctctctctctcta

SEQ ID NO: 37316 - DNA, 25 bp, probe
ctctctctctctctctctctctact

SEQ ID NO: 37317 - DNA, 25 bp, probe
tctctctctctctctctctctctac

SEQ ID NO: 37318 - DNA, 25 bp, probe
ctctctctctctctctctctactga

SEQ ID NO: 37319 - DNA, 25 bp, probe
tctctctctctctctctctctactg

SEQ ID NO: 37320 - DNA, 25 bp, probe
tctctctctctctctctctactgag

SEQ ID NO: 37321 - DNA, 25 bp, probe
ctctctctctctctctctactgagc

SEQ ID NO: 37322 - DNA, 25 bp, probe
ttcttgtgccattaaccatgtagtt

SEQ ID NO: 37323 - DNA, 25 bp, probe
actatgatatacaagtgctgttgag

SEQ ID NO: 37324 - DNA, 25 bp, probe
ctctctctctctctactgagctgta

SEQ ID NO: 37325 - DNA, 25 bp, probe
cagcgtatcaactcctattgttctg

SEQ ID NO: 37326 - DNA, 25 bp, probe
atttctctctctctctctctctctc

SEQ ID NO: 37327 - DNA, 25 bp, probe
gcctttatttctctctctctctctc

SEQ ID NO: 37328 - DNA, 25 bp, probe
agcctttatttctctctctctctct

SEQ ID NO: 37329 - DNA, 25 bp, probe
cggaagaggaagtttatttgttgaa

SEQ ID NO: 37330 - DNA, 25 bp, probe
aagcagcgtatcaactcctattgtt

SEQ ID NO: 37331 - DNA, 25 bp, probe
tacttgaatggacctctataaacgc

SEQ ID NO: 37332 - DNA, 25 bp, probe
tgaatagcacaactctttaacctga

SEQ ID NO: 37333 - DNA, 25 bp, probe
acggaagaggaagtttatttgttga

SEQ ID NO: 37334 - DNA, 25 bp, probe
aggatacttgaatggacctctataa

SEQ ID NO: 37335 - DNA, 25 bp, probe
agagaaggaaaggagtgaggtattt

SEQ ID NO: 37336 - DNA, 25 bp, probe
ctctctctctactgagctgtaacaa

SEQ ID NO: 37337 - DNA, 25 bp, probe
aagcattacctttctacattccaga

SEQ ID NO: 37338 - DNA, 25 bp, probe
aacggaagaggaagtttatttgttg

SEQ ID NO: 37339 - DNA, 25 bp, probe
ctctctctctctctctactgagctg

SEQ ID NO: 37340 - DNA, 25 bp, probe
ataatgttcaactgaatctcacaga

SEQ ID NO: 37341 - DNA, 25 bp, probe
gagagaaggaaaggagtgaggtatt

SEQ ID NO: 37342 - DNA, 25 bp, probe
tatcaactcctattgttctgcactg

SEQ ID NO: 37343 - DNA, 25 bp, probe
gtatcaactcctattgttctgcact

SEQ ID NO: 37344 - DNA, 25 bp, probe
tctacattccagaagagcctttatt

SEQ ID NO: 37345 - DNA, 25 bp, probe
cctctcagactttatggataatgtg

SEQ ID NO: 37346 - DNA, 25 bp, probe
aacaaaggctcatcaaacaggtaaa

SEQ ID NO: 37347 - DNA, 25 bp, probe
tatttctctctctctctctctctct

SEQ ID NO: 37348 - DNA, 25 bp, probe
ctctctctctctactgagctgtaac

SEQ ID NO: 37349 - DNA, 25 bp, probe
tctctctctctctactgagctgtaa

SEQ ID NO: 37350 - DNA, 25 bp, probe
tctctctctctctctctactgagct

SEQ ID NO: 37351 - DNA, 25 bp, probe
atgttcaactgaatctcacagatga

SEQ ID NO: 37352 - DNA, 25 bp, probe
caataatgttcaactgaatctcaca

SEQ ID NO: 37353 - DNA, 25 bp, probe
aaaggctcatcaaacaggtaaagtc

SEQ ID NO: 37354 - DNA, 25 bp, probe
ttgaatagcacaactctttaacctg

SEQ ID NO: 37355 - DNA, 25 bp, probe
aatgttcaactgaatctcacagatg

SEQ ID NO: 37356 - DNA, 25 bp, probe
cctttatttctctctctctctctct

SEQ ID NO: 37357 - DNA, 25 bp, probe
tcaataatgttcaactgaatctcac

SEQ ID NO: 37358 - DNA, 25 bp, probe
ttgaagcagtcctttctcatattga

SEQ ID NO: 37359 - DNA, 25 bp, probe
tataacacttctactcttcaccacg

SEQ ID NO: 37360 - DNA, 25 bp, probe
aacataacagaggaagaagacacat

SEQ ID NO: 37361 - DNA, 25 bp, probe
taacataacagaggaagaagacaca

SEQ ID NO: 37362 - DNA, 25 bp, probe
acacttctactcttcaccacgatat

SEQ ID NO: 37363 - DNA, 25 bp, probe
ccataacataacagaggaagaagac

SEQ ID NO: 37364 - DNA, 25 bp, probe
aacacttctactcttcaccacgata

SEQ ID NO: 37365 - DNA, 25 bp, probe
taacacttctactcttcaccacgat

SEQ ID NO: 37366 - DNA, 25 bp, probe
ataacacttctactcttcaccacga

SEQ ID NO: 37367 - DNA, 25 bp, probe
ataacataacagaggaagaagacac

SEQ ID NO: 37368 - DNA, 25 bp, probe
cataacataacagaggaagaagaca

SEQ ID NO: 37369 - DNA, 25 bp, probe
acataacagaggaagaagacacatg

SEQ ID NO: 37370 - DNA, 25 bp, probe
atataacacttctactcttcaccac

SEQ ID NO: 37371 - DNA, 25 bp, probe
cataacagaggaagaagacacatgg

SEQ ID NO: 37372 - DNA, 25 bp, probe
cccataacataacagaggaagaaga

SEQ ID NO: 37373 - DNA, 25 bp, probe
aatataacacttctactcttcacca

SEQ ID NO: 37374 - DNA, 25 bp, probe
ttactaaagttgaaggagaaagcca

SEQ ID NO: 37375 - DNA, 25 bp, probe
gttactaaagttgaaggagaaagcc

SEQ ID NO: 37376 - DNA, 25 bp, probe
tactaaagttgaaggagaaagccag

SEQ ID NO: 37377 - DNA, 25 bp, probe
ctcttcaccacgatatcatgttact

SEQ ID NO: 37378 - DNA, 25 bp, probe
ctactcttcaccacgatatcatgtt

SEQ ID NO: 37379 - DNA, 25 bp, probe
ttctactcttcaccacgatatcatg

SEQ ID NO: 37380 - DNA, 25 bp, probe
cttctactcttcaccacgatatcat

SEQ ID NO: 37381 - DNA, 25 bp, probe
actcttcaccacgatatcatgttac

SEQ ID NO: 37382 - DNA, 25 bp, probe
cacttctactcttcaccacgatatc

SEQ ID NO: 37383 - DNA, 25 bp, probe
tgttactaaagttgaaggagaaagc

SEQ ID NO: 37384 - DNA, 25 bp, probe
ctcattgtgcaggaaggtctataac

SEQ ID NO: 37385 - DNA, 25 bp, probe
tctactcttcaccacgatatcatgt

SEQ ID NO: 37386 - DNA, 25 bp, probe
acttctactcttcaccacgatatca

SEQ ID NO: 37387 - DNA, 25 bp, probe
gcccataacataacagaggaagaag

SEQ ID NO: 37388 - DNA, 25 bp, probe
tcttcaccacgatatcatgttacta

SEQ ID NO: 37389 - DNA, 25 bp, probe
tactcttcaccacgatatcatgtta

SEQ ID NO: 37390 - DNA, 25 bp, probe
ataacagaggaagaagacacatggc

SEQ ID NO: 37391 - DNA, 25 bp, probe
agcccataacataacagaggaagaa

SEQ ID NO: 37392 - DNA, 25 bp, probe
cttcaccacgatatcatgttactaa

SEQ ID NO: 37393 - DNA, 25 bp, probe
ttcagagactttgaccacaatcttc

SEQ ID NO: 37394 - DNA, 25 bp, probe
cttcagagactttgaccacaatctt

SEQ ID NO: 37395 - DNA, 25 bp, probe
gagcccataacataacagaggaaga

SEQ ID NO: 37396 - DNA, 25 bp, probe
gttataaagcaattccgtcatccaa

SEQ ID NO: 37397 - DNA, 25 bp, probe
gaggttataaagcaattccgtcatc

SEQ ID NO: 37398 - DNA, 25 bp, probe
cagagactttgaccacaatcttcag

SEQ ID NO: 37399 - DNA, 25 bp, probe
ttataaagcaattccgtcatccaaa

SEQ ID NO: 37400 - DNA, 25 bp, probe
cattgtgcaggaaggtctataacag

SEQ ID NO: 37401 - DNA, 25 bp, probe
tcagagactttgaccacaatcttca

SEQ ID NO: 37402 - DNA, 25 bp, probe
acttcagagactttgaccacaatct

SEQ ID NO: 37403 - DNA, 25 bp, probe
ccttctctcttcctatcaatccatc

SEQ ID NO: 37404 - DNA, 25 bp, probe
tccttctctcttcctatcaatccat

SEQ ID NO: 37405 - DNA, 25 bp, probe
atccttctctcttcctatcaatcca

SEQ ID NO: 37406 - DNA, 25 bp, probe
gctatccttctctcttcctatcaat

SEQ ID NO: 37407 - DNA, 25 bp, probe
cttctctcttcctatcaatccatct

SEQ ID NO: 37408 - DNA, 25 bp, probe
ggctatccttctctcttcctatcaa

SEQ ID NO: 37409 - DNA, 25 bp, probe
ttctctcttcctatcaatccatctt

SEQ ID NO: 37410 - DNA, 25 bp, probe
tacaatgtggctatccttctctctt

SEQ ID NO: 37411 - DNA, 25 bp, probe
tatccttctctcttcctatcaatcc

SEQ ID NO: 37412 - DNA, 25 bp, probe
gtggctatccttctctcttcctatc

SEQ ID NO: 37413 - DNA, 25 bp, probe
ctacaatgtggctatccttctctct

SEQ ID NO: 37414 - DNA, 25 bp, probe
tggctatccttctctcttcctatca

SEQ ID NO: 37415 - DNA, 25 bp, probe
tctctcttcctatcaatccatctta

SEQ ID NO: 37416 - DNA, 25 bp, probe
tgtggctatccttctctcttcctat

SEQ ID NO: 37417 - DNA, 25 bp, probe
atgtggctatccttctctcttccta

SEQ ID NO: 37418 - DNA, 25 bp, probe
acaatgtggctatccttctctcttc

SEQ ID NO: 37419 - DNA, 25 bp, probe
cctacaatgtggctatccttctctc

SEQ ID NO: 37420 - DNA, 25 bp, probe
ctatccttctctcttcctatcaatc

SEQ ID NO: 37421 - DNA, 25 bp, probe
caatgtggctatccttctctcttcc

SEQ ID NO: 37422 - DNA, 25 bp, probe
aatgtggctatccttctctcttcct

SEQ ID NO: 37423 - DNA, 25 bp, probe
ctctcttcctatcaatccatcttat

SEQ ID NO: 37424 - DNA, 25 bp, probe
atcttatttggaaatgactgtgagc

SEQ ID NO: 37425 - DNA, 25 bp, probe
attaagccttccacactcacctcta

SEQ ID NO: 37426 - DNA, 25 bp, probe
caaggagatgaagcaaacacattaa

SEQ ID NO: 37427 - DNA, 25 bp, probe
aaggagatgaagcaaacacattaag

SEQ ID NO: 37428 - DNA, 25 bp, probe
ccacactctgagaatgaccatcttc

SEQ ID NO: 37429 - DNA, 25 bp, probe
aatgaccatcttctgtctcgttctc

SEQ ID NO: 37430 - DNA, 25 bp, probe
gaatgaccatcttctgtctcgttct

SEQ ID NO: 37431 - DNA, 25 bp, probe
ttaagccttccacactcacctctaa

SEQ ID NO: 37432 - DNA, 25 bp, probe
atacatcccattccttcctagtgag

SEQ ID NO: 37433 - DNA, 25 bp, probe
gatacatcccattccttcctagtga

SEQ ID NO: 37434 - DNA, 25 bp, probe
agatacatcccattccttcctagtg

SEQ ID NO: 37435 - DNA, 25 bp, probe
cagatacatcccattccttcctagt

SEQ ID NO: 37436 - DNA, 25 bp, probe
agatgaagcaaacacattaagcctt

SEQ ID NO: 37437 - DNA, 25 bp, probe
ccaaggagatgaagcaaacacatta

SEQ ID NO: 37438 - DNA, 25 bp, probe
tctcttcctatcaatccatcttatt

SEQ ID NO: 37439 - DNA, 25 bp, probe
ccatctgctacacaggaatcatcaa

SEQ ID NO: 37440 - DNA, 25 bp, probe
tcttatttggaaatgactgtgagcg

SEQ ID NO: 37441 - DNA, 25 bp, probe
tccacactctgagaatgaccatctt

SEQ ID NO: 37442 - DNA, 25 bp, probe
ttccacactctgagaatgaccatct

SEQ ID NO: 37443 - DNA, 25 bp, probe
aagaggaaggaccaaggagatgaag

SEQ ID NO: 37444 - DNA, 25 bp, probe
aacacattaagccttccacactcac

SEQ ID NO: 37445 - DNA, 25 bp, probe
gagatgaagcaaacacattaagcct

SEQ ID NO: 37446 - DNA, 25 bp, probe
aggagatgaagcaaacacattaagc

SEQ ID NO: 37447 - DNA, 25 bp, probe
aagagtcctctgaatgaaccttctg

SEQ ID NO: 37448 - DNA, 25 bp, probe
ctgaagagtcctctgaatgaacctt

SEQ ID NO: 37449 - DNA, 25 bp, probe
ttcgattcgttaagagagcaacatt

SEQ ID NO: 37450 - DNA, 25 bp, probe
cttgttctttgttctttgtcacagg

SEQ ID NO: 37451 - DNA, 25 bp, probe
gcttgttctttgttctttgtcacag

SEQ ID NO: 37452 - DNA, 25 bp, probe
ttgttctttgttctttgtcacaggg

SEQ ID NO: 37453 - DNA, 25 bp, probe
gagcttgttctttgttctttgtcac

SEQ ID NO: 37454 - DNA, 25 bp, probe
agagtcctctgaatgaaccttctgg

SEQ ID NO: 37455 - DNA, 25 bp, probe
cctgaagagtcctctgaatgaacct

SEQ ID NO: 37456 - DNA, 25 bp, probe
tcatgttctgctttcgattcgttaa

SEQ ID NO: 37457 - DNA, 25 bp, probe
catgttctgctttcgattcgttaag

SEQ ID NO: 37458 - DNA, 25 bp, probe
tcgattcgttaagagagcaacattt

SEQ ID NO: 37459 - DNA, 25 bp, probe
tttcgattcgttaagagagcaacat

SEQ ID NO: 37460 - DNA, 25 bp, probe
atgttctgctttcgattcgttaaga

SEQ ID NO: 37461 - DNA, 25 bp, probe
ttctgctttcgattcgttaagagag

SEQ ID NO: 37462 - DNA, 25 bp, probe
ctcatgttctgctttcgattcgtta

SEQ ID NO: 37463 - DNA, 25 bp, probe
gttctgctttcgattcgttaagaga

SEQ ID NO: 37464 - DNA, 25 bp, probe
gaagagtcctctgaatgaaccttct

SEQ ID NO: 37465 - DNA, 25 bp, probe
ctttcgattcgttaagagagcaaca

SEQ ID NO: 37466 - DNA, 25 bp, probe
tgttctgctttcgattcgttaagag

SEQ ID NO: 37467 - DNA, 25 bp, probe
ttctttgttctttgtcacagggact

SEQ ID NO: 37468 - DNA, 25 bp, probe
gttctttgttctttgtcacagggac

SEQ ID NO: 37469 - DNA, 25 bp, probe
tgaagagtcctctgaatgaaccttc

SEQ ID NO: 37470 - DNA, 25 bp, probe
cccttgaggaaacaacagctttaaa

SEQ ID NO: 37471 - DNA, 25 bp, probe
tgttctttgttctttgtcacaggga

SEQ ID NO: 37472 - DNA, 25 bp, probe
caacattttacccacacacagataa

SEQ ID NO: 37473 - DNA, 25 bp, probe
ttacccacacacagataaagttttc

SEQ ID NO: 37474 - DNA, 25 bp, probe
ttgttctttgtcacagggactgaaa

SEQ ID NO: 37475 - DNA, 25 bp, probe
tttgttctttgtcacagggactgaa

SEQ ID NO: 37476 - DNA, 25 bp, probe
agcttgttctttgttctttgtcaca

SEQ ID NO: 37477 - DNA, 25 bp, probe
ttaagagagcaacattttacccaca

SEQ ID NO: 37478 - DNA, 25 bp, probe
cgagcttgttctttgttctttgtca

SEQ ID NO: 37479 - DNA, 25 bp, probe
acgagcttgttctttgttctttgtc

SEQ ID NO: 37480 - DNA, 25 bp, probe
cacacagataaagttttcccttgag

SEQ ID NO: 37481 - DNA, 25 bp, probe
tacccacacacagataaagttttcc

SEQ ID NO: 37482 - DNA, 25 bp, probe
acacacagataaagttttcccttga

SEQ ID NO: 37483 - DNA, 25 bp, probe
cacacacagataaagttttcccttg

SEQ ID NO: 37484 - DNA, 25 bp, probe
ttcgttaagagagcaacattttacc

SEQ ID NO: 37485 - DNA, 25 bp, probe
taagagagcaacattttacccacac

SEQ ID NO: 37486 - DNA, 25 bp, probe
gttaagagagcaacattttacccac

SEQ ID NO: 37487 - DNA, 25 bp, probe
cacgagcttgttctttgttctttgt

SEQ ID NO: 37488 - DNA, 25 bp, probe
aaacctctcctcatgttctgctttc

SEQ ID NO: 37489 - DNA, 25 bp, probe
cattttacccacacacagataaagt

SEQ ID NO: 37490 - DNA, 25 bp, probe
acattttacccacacacagataaag

SEQ ID NO: 37491 - DNA, 25 bp, probe
catcatctatgctctgaggagtaag

SEQ ID NO: 37492 - DNA, 25 bp, probe
gaagagtctattgtctccttggtta

SEQ ID NO: 37493 - DNA, 25 bp, probe
agaagagtctattgtctccttggtt

SEQ ID NO: 37494 - DNA, 25 bp, probe
atcatctatgctctgaggagtaagg

SEQ ID NO: 37495 - DNA, 25 bp, probe
aagagtctattgtctccttggttat

SEQ ID NO: 37496 - DNA, 25 bp, probe
ccatcatctatgctctgaggagtaa

SEQ ID NO: 37497 - DNA, 25 bp, probe
catctatgctctgaggagtaaggac

SEQ ID NO: 37498 - DNA, 25 bp, probe
tagaagagtctattgtctccttggt

SEQ ID NO: 37499 - DNA, 25 bp, probe
agagtctattgtctccttggttata

SEQ ID NO: 37500 - DNA, 25 bp, probe
tcatctatgctctgaggagtaagga

SEQ ID NO: 37501 - DNA, 25 bp, probe
ctagaagagtctattgtctccttgg

SEQ ID NO: 37502 - DNA, 25 bp, probe
cttatttgcttagtttccgtttggg

SEQ ID NO: 37503 - DNA, 25 bp, probe
gagtctattgtctccttggttatat

SEQ ID NO: 37504 - DNA, 25 bp, probe
atctatgctctgaggagtaaggacc

SEQ ID NO: 37505 - DNA, 25 bp, probe
agtctattgtctccttggttatatt

SEQ ID NO: 37506 - DNA, 25 bp, probe
gtcacttatttgcttagtttccgtt

SEQ ID NO: 37507 - DNA, 25 bp, probe
atgtcacttatttgcttagtttccg

SEQ ID NO: 37508 - DNA, 25 bp, probe
acttatttgcttagtttccgtttgg

SEQ ID NO: 37509 - DNA, 25 bp, probe
cacttatttgcttagtttccgtttg

SEQ ID NO: 37510 - DNA, 25 bp, probe
tcacttatttgcttagtttccgttt

SEQ ID NO: 37511 - DNA, 25 bp, probe
tgtcacttatttgcttagtttccgt

SEQ ID NO: 37512 - DNA, 25 bp, probe
tcaagattgccaaggtaaccatgtc

SEQ ID NO: 37513 - DNA, 25 bp, probe
ttagtttccgtttgggctaatcttc

SEQ ID NO: 37514 - DNA, 25 bp, probe
cttagtttccgtttgggctaatctt

SEQ ID NO: 37515 - DNA, 25 bp, probe
ttatttgcttagtttccgtttgggc

SEQ ID NO: 37516 - DNA, 25 bp, probe
catggtgtatgatgtctttgggaag

SEQ ID NO: 37517 - DNA, 25 bp, probe
aagattgccaaggtaaccatgtctg

SEQ ID NO: 37518 - DNA, 25 bp, probe
caagattgccaaggtaaccatgtct

SEQ ID NO: 37519 - DNA, 25 bp, probe
catgtcacttatttgcttagtttcc

SEQ ID NO: 37520 - DNA, 25 bp, probe
ggaagatgaacaagctcattaagac

SEQ ID NO: 37521 - DNA, 25 bp, probe
gtcaagattgccaaggtaaccatgt

SEQ ID NO: 37522 - DNA, 25 bp, probe
gaagatgaacaagctcattaagacg

SEQ ID NO: 37523 - DNA, 25 bp, probe
tagtttccgtttgggctaatcttcc

SEQ ID NO: 37524 - DNA, 25 bp, probe
ctatgctctgaggagtaaggacctg

SEQ ID NO: 37525 - DNA, 25 bp, probe
aagatgaacaagctcattaagacgg

SEQ ID NO: 37526 - DNA, 25 bp, probe
tttaactttaccatgctcaatgaaa

SEQ ID NO: 37527 - DNA, 25 bp, probe
tctatgctctgaggagtaaggacct

SEQ ID NO: 37528 - DNA, 25 bp, probe
tctagaagagtctattgtctccttg

SEQ ID NO: 37529 - DNA, 25 bp, probe
cccatcatctatgctctgaggagta

SEQ ID NO: 37530 - DNA, 25 bp, probe
tatgatgtctttgggaagatgaaca

SEQ ID NO: 37531 - DNA, 25 bp, probe
gtatgatgtctttgggaagatgaac

SEQ ID NO: 37532 - DNA, 25 bp, probe
tgtatgatgtctttgggaagatgaa

SEQ ID NO: 37533 - DNA, 25 bp, probe
atttgcttagtttccgtttgggcta

SEQ ID NO: 37534 - DNA, 25 bp, probe
tatttgcttagtttccgtttgggct

SEQ ID NO: 37535 - DNA, 25 bp, probe
atgctatgatgaggattaaggtgtt

SEQ ID NO: 37536 - DNA, 25 bp, probe
gtcttggcactctcttcttacttaa

SEQ ID NO: 37537 - DNA, 25 bp, probe
gctatgatgaggattaaggtgttga

SEQ ID NO: 37538 - DNA, 25 bp, probe
tgctatgatgaggattaaggtgttg

SEQ ID NO: 37539 - DNA, 25 bp, probe
tatgatgaggattaaggtgttgact

SEQ ID NO: 37540 - DNA, 25 bp, probe
gaggactatgctatgatgaggatta

SEQ ID NO: 37541 - DNA, 25 bp, probe
atgatgaggattaaggtgttgactt

SEQ ID NO: 37542 - DNA, 25 bp, probe
tatgctatgatgaggattaaggtgt

SEQ ID NO: 37543 - DNA, 25 bp, probe
ctatgatgaggattaaggtgttgac

SEQ ID NO: 37544 - DNA, 25 bp, probe
tgatgaggattaaggtgttgacttg

SEQ ID NO: 37545 - DNA, 25 bp, probe
actatgctatgatgaggattaaggt

SEQ ID NO: 37546 - DNA, 25 bp, probe
cgaggactatgctatgatgaggatt

SEQ ID NO: 37547 - DNA, 25 bp, probe
ctatgctatgatgaggattaaggtg

SEQ ID NO: 37548 - DNA, 25 bp, probe
aggactatgctatgatgaggattaa

SEQ ID NO: 37549 - DNA, 25 bp, probe
gtcttctctctgcctaattgtcaag

SEQ ID NO: 37550 - DNA, 25 bp, probe
gactatgctatgatgaggattaagg

SEQ ID NO: 37551 - DNA, 25 bp, probe
ggactatgctatgatgaggattaag

SEQ ID NO: 37552 - DNA, 25 bp, probe
ggtcttggcactctcttcttactta

SEQ ID NO: 37553 - DNA, 25 bp, probe
gatgaggattaaggtgttgacttgc

SEQ ID NO: 37554 - DNA, 25 bp, probe
ggtcttctctctgcctaattgtcaa

SEQ ID NO: 37555 - DNA, 25 bp, probe
ctagacctctctgattgctgatgag

SEQ ID NO: 37556 - DNA, 25 bp, probe
cttggcactctcttcttacttaaac

SEQ ID NO: 37557 - DNA, 25 bp, probe
tcttggcactctcttcttacttaaa

SEQ ID NO: 37558 - DNA, 25 bp, probe
ttggcactctcttcttacttaaacc

SEQ ID NO: 37559 - DNA, 25 bp, probe
ccgaggactatgctatgatgaggat

SEQ ID NO: 37560 - DNA, 25 bp, probe
tcttctctctgcctaattgtcaagg

SEQ ID NO: 37561 - DNA, 25 bp, probe
gaaatctgagaagaatgggttgttc

SEQ ID NO: 37562 - DNA, 25 bp, probe
gacttgggagaaatctgagaagaat

SEQ ID NO: 37563 - DNA, 25 bp, probe
agaaatctgagaagaatgggttgtt

SEQ ID NO: 37564 - DNA, 25 bp, probe
acttgggagaaatctgagaagaatg

SEQ ID NO: 37565 - DNA, 25 bp, probe
ggcactctcttcttacttaaaccag

SEQ ID NO: 37566 - DNA, 25 bp, probe
gagaaatctgagaagaatgggttgt

SEQ ID NO: 37567 - DNA, 25 bp, probe
tctttcagagataaatgacaagcct

SEQ ID NO: 37568 - DNA, 25 bp, probe
atgaggattaaggtgttgacttgcc

SEQ ID NO: 37569 - DNA, 25 bp, probe
ttcagagataaatgacaagccttca

SEQ ID NO: 37570 - DNA, 25 bp, probe
ctctcttcttacttaaaccagtccc

SEQ ID NO: 37571 - DNA, 25 bp, probe
actctcttcttacttaaaccagtcc

SEQ ID NO: 37572 - DNA, 25 bp, probe
cttgggagaaatctgagaagaatgg

SEQ ID NO: 37573 - DNA, 25 bp, probe
ctcttcttacttaaaccagtcccag

SEQ ID NO: 37574 - DNA, 25 bp, probe
gcactctcttcttacttaaaccagt

SEQ ID NO: 37575 - DNA, 25 bp, probe
tttcagagataaatgacaagccttc

SEQ ID NO: 37576 - DNA, 25 bp, probe
ctttcagagataaatgacaagcctt

SEQ ID NO: 37577 - DNA, 25 bp, probe
actcaagtcagaaatcagttcactc

SEQ ID NO: 37578 - DNA, 25 bp, probe
tcttcttacttaaaccagtcccaga

SEQ ID NO: 37579 - DNA, 25 bp, probe
gttcaactatggcagcatcatcaag

SEQ ID NO: 37580 - DNA, 25 bp, probe
agcatcatcaaggcaatttatcaag

SEQ ID NO: 37581 - DNA, 25 bp, probe
cagcatcatcaaggcaatttatcaa

SEQ ID NO: 37582 - DNA, 25 bp, probe
cattgtagactttgtgaaggaccat

SEQ ID NO: 37583 - DNA, 25 bp, probe
aaagaagatcactcaagactatggg

SEQ ID NO: 37584 - DNA, 25 bp, probe
gcaaagaagatcactcaagactatg

SEQ ID NO: 37585 - DNA, 25 bp, probe
caagttcaactatggcagcatcatc

SEQ ID NO: 37586 - DNA, 25 bp, probe
gaagcactattgactggacctacag

SEQ ID NO: 37587 - DNA, 25 bp, probe
caaagaagatcactcaagactatgg

SEQ ID NO: 37588 - DNA, 25 bp, probe
gcatcatcaaggcaatttatcaagc

SEQ ID NO: 37589 - DNA, 25 bp, probe
agttcaactatggcagcatcatcaa

SEQ ID NO: 37590 - DNA, 25 bp, probe
aagttcaactatggcagcatcatca

SEQ ID NO: 37591 - DNA, 25 bp, probe
ttcaactatggcagcatcatcaagg

SEQ ID NO: 37592 - DNA, 25 bp, probe
aataaagtttgagtgtaccaggaac

SEQ ID NO: 37593 - DNA, 25 bp, probe
aaataaagtttgagtgtaccaggaa

SEQ ID NO: 37594 - DNA, 25 bp, probe
attgtagactttgtgaaggaccatg

SEQ ID NO: 37595 - DNA, 25 bp, probe
ataaagtttgagtgtaccaggaaca

SEQ ID NO: 37596 - DNA, 25 bp, probe
taaagtttgagtgtaccaggaacag

SEQ ID NO: 37597 - DNA, 25 bp, probe
ggaagcactattgactggacctaca

SEQ ID NO: 37598 - DNA, 25 bp, probe
tggaagcactattgactggacctac

SEQ ID NO: 37599 - DNA, 25 bp, probe
ccatccaggcaaccaaataaagttt

SEQ ID NO: 37600 - DNA, 25 bp, probe
gcagcatcatcaaggcaatttatca

SEQ ID NO: 37601 - DNA, 25 bp, probe
atccagattggcaacacctatgaag

SEQ ID NO: 37602 - DNA, 25 bp, probe
aagaagatcactcaagactatgggc

SEQ ID NO: 37603 - DNA, 25 bp, probe
gtttgagtgtaccaggaacagaatc

SEQ ID NO: 37604 - DNA, 25 bp, probe
ccattgtagactttgtgaaggacca

SEQ ID NO: 37605 - DNA, 25 bp, probe
tgcaaagaagatcactcaagactat

SEQ ID NO: 37606 - DNA, 25 bp, probe
gatccagattggcaacacctatgaa

SEQ ID NO: 37607 - DNA, 25 bp, probe
aagatccagattggcaacacctatg

SEQ ID NO: 37608 - DNA, 25 bp, probe
caagatccagattggcaacacctat

SEQ ID NO: 37609 - DNA, 25 bp, probe
agtttgagtgtaccaggaacagaat

SEQ ID NO: 37610 - DNA, 25 bp, probe
ctatggcagcatcatcaaggcaatt

SEQ ID NO: 37611 - DNA, 25 bp, probe
aagtttgagtgtaccaggaacagaa

SEQ ID NO: 37612 - DNA, 25 bp, probe
aaagtttgagtgtaccaggaacaga

SEQ ID NO: 37613 - DNA, 25 bp, probe
ggcagcatcatcaaggcaatttatc

SEQ ID NO: 37614 - DNA, 25 bp, probe
gaagatcactcaagactatgggcag

SEQ ID NO: 37615 - DNA, 25 bp, probe
cattctcgacaccttggacatcttc

SEQ ID NO: 37616 - DNA, 25 bp, probe
gtggaagcactattgactggaccta

SEQ ID NO: 37617 - DNA, 25 bp, probe
tatccctatggctacaaaacagaac

SEQ ID NO: 37618 - DNA, 25 bp, probe
ctctacgggaccaagttcaactatg

SEQ ID NO: 37619 - DNA, 25 bp, probe
gtatccctatggctacaaaacagaa

SEQ ID NO: 37620 - DNA, 25 bp, probe
ggcaaccaaataaagtttgagtgta

SEQ ID NO: 37621 - DNA, 25 bp, probe
ccaaataaagtttgagtgtaccagg

SEQ ID NO: 37622 - DNA, 25 bp, probe
agaagatcactcaagactatgggca

SEQ ID NO: 37623 - DNA, 25 bp, probe
aagcattgactggtcctatgattat

SEQ ID NO: 37624 - DNA, 25 bp, probe
agcattgactggtcctatgattatg

SEQ ID NO: 37625 - DNA, 25 bp, probe
gaagcattgactggtcctatgatta

SEQ ID NO: 37626 - DNA, 25 bp, probe
attgactggtcctatgattatggca

SEQ ID NO: 37627 - DNA, 25 bp, probe
cattgactggtcctatgattatggc

SEQ ID NO: 37628 - DNA, 25 bp, probe
gcattgactggtcctatgattatgg

SEQ ID NO: 37629 - DNA, 25 bp, probe
ttgactggtcctatgattatggcat

SEQ ID NO: 37630 - DNA, 25 bp, probe
tgactggtcctatgattatggcatc

SEQ ID NO: 37631 - DNA, 25 bp, probe
cttcattatcctccacagctattcc

SEQ ID NO: 37632 - DNA, 25 bp, probe
ccttcattatcctccacagctattc

SEQ ID NO: 37633 - DNA, 25 bp, probe
tgaagttgaagtgaaatccatagtg

SEQ ID NO: 37634 - DNA, 25 bp, probe
ccaatctgctctgtcatctaccaag

SEQ ID NO: 37635 - DNA, 25 bp, probe
ctgaagttgaagtgaaatccatagt

SEQ ID NO: 37636 - DNA, 25 bp, probe
tctgaagttgaagtgaaatccatag

SEQ ID NO: 37637 - DNA, 25 bp, probe
ctctgaagttgaagtgaaatccata

SEQ ID NO: 37638 - DNA, 25 bp, probe
actctgaagttgaagtgaaatccat

SEQ ID NO: 37639 - DNA, 25 bp, probe
ggtcctatgattatggcatcaagta

SEQ ID NO: 37640 - DNA, 25 bp, probe
accaatctgctctgtcatctaccaa

SEQ ID NO: 37641 - DNA, 25 bp, probe
gccttcattatcctccacagctatt

SEQ ID NO: 37642 - DNA, 25 bp, probe
gtcctatgattatggcatcaagtac

SEQ ID NO: 37643 - DNA, 25 bp, probe
ctggtcctatgattatggcatcaag

SEQ ID NO: 37644 - DNA, 25 bp, probe
ggaagcattgactggtcctatgatt

SEQ ID NO: 37645 - DNA, 25 bp, probe
tggtcctatgattatggcatcaagt

SEQ ID NO: 37646 - DNA, 25 bp, probe
actggtcctatgattatggcatcaa

SEQ ID NO: 37647 - DNA, 25 bp, probe
catttgcctttgaactgagagacac

SEQ ID NO: 37648 - DNA, 25 bp, probe
gaagttgaagtgaaatccatagtgg

SEQ ID NO: 37649 - DNA, 25 bp, probe
gactggtcctatgattatggcatca

SEQ ID NO: 37650 - DNA, 25 bp, probe
agttagatgactttgatgagctgag

SEQ ID NO: 37651 - DNA, 25 bp, probe
atttgcctttgaactgagagacaca

SEQ ID NO: 37652 - DNA, 25 bp, probe
ttagatgactttgatgagctgagtg

SEQ ID NO: 37653 - DNA, 25 bp, probe
gttagatgactttgatgagctgagt

SEQ ID NO: 37654 - DNA, 25 bp, probe
tcatttgcctttgaactgagagaca

SEQ ID NO: 37655 - DNA, 25 bp, probe
tagatgactttgatgagctgagtga

SEQ ID NO: 37656 - DNA, 25 bp, probe
ttcattatcctccacagctattccc

SEQ ID NO: 37657 - DNA, 25 bp, probe
tacaaatgtaccaagttagatgact

SEQ ID NO: 37658 - DNA, 25 bp, probe
gatgactttgatgagctgagtgaag

SEQ ID NO: 37659 - DNA, 25 bp, probe
atagtggacttcatcaagagtcatg

SEQ ID NO: 37660 - DNA, 25 bp, probe
catagtggacttcatcaagagtcat

SEQ ID NO: 37661 - DNA, 25 bp, probe
gaccaatctgctctgtcatctacca

SEQ ID NO: 37662 - DNA, 25 bp, probe
agatgactttgatgagctgagtgaa

SEQ ID NO: 37663 - DNA, 25 bp, probe
gggaagaaacaagagccattaaaat

SEQ ID NO: 37664 - DNA, 25 bp, probe
cattatcctccacagctattcccag

SEQ ID NO: 37665 - DNA, 25 bp, probe
ggaagaaacaagagccattaaaatc

SEQ ID NO: 37666 - DNA, 25 bp, probe
aactctgaagttgaagtgaaatcca

SEQ ID NO: 37667 - DNA, 25 bp, probe
ggcttatgaccaaggaatcagatat

SEQ ID NO: 37668 - DNA, 25 bp, probe
aactctcttccatcaaggcatatct

SEQ ID NO: 37669 - DNA, 25 bp, probe
catatctgacaatccactcgtactc

SEQ ID NO: 37670 - DNA, 25 bp, probe
ttccatcaaggcatatctgacaatc

SEQ ID NO: 37671 - DNA, 25 bp, probe
cttccatcaaggcatatctgacaat

SEQ ID NO: 37672 - DNA, 25 bp, probe
gcttatgaccaaggaatcagatatt

SEQ ID NO: 37673 - DNA, 25 bp, probe
atatctgacaatccactcgtactcc

SEQ ID NO: 37674 - DNA, 25 bp, probe
actctcttccatcaaggcatatctg

SEQ ID NO: 37675 - DNA, 25 bp, probe
ctctcttccatcaaggcatatctga

SEQ ID NO: 37676 - DNA, 25 bp, probe
tcttccatcaaggcatatctgacaa

SEQ ID NO: 37677 - DNA, 25 bp, probe
atcaaggcatatctgacaatccact

SEQ ID NO: 37678 - DNA, 25 bp, probe
catcaaggcatatctgacaatccac

SEQ ID NO: 37679 - DNA, 25 bp, probe
tctcttccatcaaggcatatctgac

SEQ ID NO: 37680 - DNA, 25 bp, probe
ctcttccatcaaggcatatctgaca

SEQ ID NO: 37681 - DNA, 25 bp, probe
gaacttcgagatacaggcagatatg

SEQ ID NO: 37682 - DNA, 25 bp, probe
gcatatctgacaatccactcgtact

SEQ ID NO: 37683 - DNA, 25 bp, probe
tgaacttcgagatacaggcagatat

SEQ ID NO: 37684 - DNA, 25 bp, probe
tcaaggcatatctgacaatccactc

SEQ ID NO: 37685 - DNA, 25 bp, probe
ttgaacttcgagatacaggcagata

SEQ ID NO: 37686 - DNA, 25 bp, probe
tccatcaaggcatatctgacaatcc

SEQ ID NO: 37687 - DNA, 25 bp, probe
ggtgagaacaatgctgagttgaatg

SEQ ID NO: 37688 - DNA, 25 bp, probe
ccatcaaggcatatctgacaatcca

SEQ ID NO: 37689 - DNA, 25 bp, probe
aaactctcttccatcaaggcatatc

SEQ ID NO: 37690 - DNA, 25 bp, probe
caaactctcttccatcaaggcatat

SEQ ID NO: 37691 - DNA, 25 bp, probe
aggcatatctgacaatccactcgta

SEQ ID NO: 37692 - DNA, 25 bp, probe
gaccttcctggcaatcaagtatgtt

SEQ ID NO: 37693 - DNA, 25 bp, probe
aacttcgagatacaggcagatatgg

SEQ ID NO: 37694 - DNA, 25 bp, probe
ctacaacaatctatcctgctgctgg

SEQ ID NO: 37695 - DNA, 25 bp, probe
gagaccttcctggcaatcaagtatg

SEQ ID NO: 37696 - DNA, 25 bp, probe
cccaaatgatgatctacccttactc

SEQ ID NO: 37697 - DNA, 25 bp, probe
ctcccaaatgatgatctacccttac

SEQ ID NO: 37698 - DNA, 25 bp, probe
ctcgtactcccaaatgatgatctac

SEQ ID NO: 37699 - DNA, 25 bp, probe
tcccaaatgatgatctacccttact

SEQ ID NO: 37700 - DNA, 25 bp, probe
actcccaaatgatgatctaccctta

SEQ ID NO: 37701 - DNA, 25 bp, probe
tactcccaaatgatgatctaccctt

SEQ ID NO: 37702 - DNA, 25 bp, probe
actcgtactcccaaatgatgatcta

SEQ ID NO: 37703 - DNA, 25 bp, probe
gtgagaacaatgctgagttgaatgc

SEQ ID NO: 37704 - DNA, 25 bp, probe
ggcatatctgacaatccactcgtac

SEQ ID NO: 37705 - DNA, 25 bp, probe
atatgcttacaaactcggtgagaac

SEQ ID NO: 37706 - DNA, 25 bp, probe
accttcctggcaatcaagtatgttg

SEQ ID NO: 37707 - DNA, 25 bp, probe
ccaaatgatgatctacccttactca

SEQ ID NO: 37708 - DNA, 25 bp, probe
gtactcccaaatgatgatctaccct

SEQ ID NO: 37709 - DNA, 25 bp, probe
acaaactctcttccatcaaggcata

SEQ ID NO: 37710 - DNA, 25 bp, probe
atttcatccgcaacaaactctcttc

SEQ ID NO: 37711 - DNA, 25 bp, probe
ttaatgtggacggttatgactactc

SEQ ID NO: 37712 - DNA, 25 bp, probe
gttaatgtggacggttatgactact

SEQ ID NO: 37713 - DNA, 25 bp, probe
ggttaatgtggacggttatgactac

SEQ ID NO: 37714 - DNA, 25 bp, probe
tggttaatgtggacggttatgacta

SEQ ID NO: 37715 - DNA, 25 bp, probe
taatgtggacggttatgactactca

SEQ ID NO: 37716 - DNA, 25 bp, probe
caatataccaatctcctgaggcttg

SEQ ID NO: 37717 - DNA, 25 bp, probe
aatataccaatctcctgaggcttgt

SEQ ID NO: 37718 - DNA, 25 bp, probe
atataccaatctcctgaggcttgtg

SEQ ID NO: 37719 - DNA, 25 bp, probe
gcaatataccaatctcctgaggctt

SEQ ID NO: 37720 - DNA, 25 bp, probe
gaggcttgtggatttctatgttatg

SEQ ID NO: 37721 - DNA, 25 bp, probe
tgaggcttgtggatttctatgttat

SEQ ID NO: 37722 - DNA, 25 bp, probe
gtggttaatgtggacggttatgact

SEQ ID NO: 37723 - DNA, 25 bp, probe
ctgaggcttgtggatttctatgtta

SEQ ID NO: 37724 - DNA, 25 bp, probe
aggcttgtggatttctatgttatgc

SEQ ID NO: 37725 - DNA, 25 bp, probe
gggataatagggcaatataccaatc

SEQ ID NO: 37726 - DNA, 25 bp, probe
ctcaattctatgggataatagggca

SEQ ID NO: 37727 - DNA, 25 bp, probe
actcaattctatgggataatagggc

SEQ ID NO: 37728 - DNA, 25 bp, probe
tcaattctatgggataatagggcaa

SEQ ID NO: 37729 - DNA, 25 bp, probe
tgggcatcaaatattcgtttacaat

SEQ ID NO: 37730 - DNA, 25 bp, probe
aatagggcaatataccaatctcctg

SEQ ID NO: 37731 - DNA, 25 bp, probe
atagggcaatataccaatctcctga

SEQ ID NO: 37732 - DNA, 25 bp, probe
ataatagggcaatataccaatctcc

SEQ ID NO: 37733 - DNA, 25 bp, probe
ggtggttaatgtggacggttatgac

SEQ ID NO: 37734 - DNA, 25 bp, probe
aatgtggacggttatgactactcat

SEQ ID NO: 37735 - DNA, 25 bp, probe
ggataatagggcaatataccaatct

SEQ ID NO: 37736 - DNA, 25 bp, probe
ttctatgttatgccggtggttaatg

SEQ ID NO: 37737 - DNA, 25 bp, probe
caattctatgggataatagggcaat

SEQ ID NO: 37738 - DNA, 25 bp, probe
ttgggcatcaaatattcgtttacaa

SEQ ID NO: 37739 - DNA, 25 bp, probe
gcttgtggatttctatgttatgccg

SEQ ID NO: 37740 - DNA, 25 bp, probe
tagggcaatataccaatctcctgag

SEQ ID NO: 37741 - DNA, 25 bp, probe
aaagaatcgaatgtggagaaagaac

SEQ ID NO: 37742 - DNA, 25 bp, probe
gggcatcaaatattcgtttacaatt

SEQ ID NO: 37743 - DNA, 25 bp, probe
taatagggcaatataccaatctcct

SEQ ID NO: 37744 - DNA, 25 bp, probe
ggttcataggccatataactcaatt

SEQ ID NO: 37745 - DNA, 25 bp, probe
tgggataatagggcaatataccaat

SEQ ID NO: 37746 - DNA, 25 bp, probe
atgggataatagggcaatataccaa

SEQ ID NO: 37747 - DNA, 25 bp, probe
ctatgggataatagggcaatatacc

SEQ ID NO: 37748 - DNA, 25 bp, probe
aagaatcgaatgtggagaaagaacc

SEQ ID NO: 37749 - DNA, 25 bp, probe
cctgaggcttgtggatttctatgtt

SEQ ID NO: 37750 - DNA, 25 bp, probe
ggcaatataccaatctcctgaggct

SEQ ID NO: 37751 - DNA, 25 bp, probe
ctatgttatgccggtggttaatgtg

SEQ ID NO: 37752 - DNA, 25 bp, probe
tctatgttatgccggtggttaatgt

SEQ ID NO: 37753 - DNA, 25 bp, probe
atgtggacggttatgactactcatg

SEQ ID NO: 37754 - DNA, 25 bp, probe
aactcaattctatgggataataggg

SEQ ID NO: 37755 - DNA, 25 bp, probe
attactggagattgcttatacctgg

SEQ ID NO: 37756 - DNA, 25 bp, probe
atggtgattactggagattgcttat

SEQ ID NO: 37757 - DNA, 25 bp, probe
gatggtgattactggagattgctta

SEQ ID NO: 37758 - DNA, 25 bp, probe
tactggagattgcttatacctggaa

SEQ ID NO: 37759 - DNA, 25 bp, probe
ttactggagattgcttatacctgga

SEQ ID NO: 37760 - DNA, 25 bp, probe
tggtgattactggagattgcttata

SEQ ID NO: 37761 - DNA, 25 bp, probe
agaagaggagaaggaagaattgatg

SEQ ID NO: 37762 - DNA, 25 bp, probe
gaggagaaggaagaattgatggaat

SEQ ID NO: 37763 - DNA, 25 bp, probe
gtgattactggagattgcttatacc

SEQ ID NO: 37764 - DNA, 25 bp, probe
ggtgattactggagattgcttatac

SEQ ID NO: 37765 - DNA, 25 bp, probe
aggagaaggaagaattgatggaatg

SEQ ID NO: 37766 - DNA, 25 bp, probe
tgattactggagattgcttatacct

SEQ ID NO: 37767 - DNA, 25 bp, probe
aagaagaggagaaggaagaattgat

SEQ ID NO: 37768 - DNA, 25 bp, probe
gagaaggaagaattgatggaatggt

SEQ ID NO: 37769 - DNA, 25 bp, probe
gattactggagattgcttatacctg

SEQ ID NO: 37770 - DNA, 25 bp, probe
gaagaggagaaggaagaattgatgg

SEQ ID NO: 37771 - DNA, 25 bp, probe
agaaggaagaattgatggaatggtg

SEQ ID NO: 37772 - DNA, 25 bp, probe
agaggagaaggaagaattgatggaa

SEQ ID NO: 37773 - DNA, 25 bp, probe
aagaggagaaggaagaattgatgga

SEQ ID NO: 37774 - DNA, 25 bp, probe
aagacttcaattaccttagcagcaa

SEQ ID NO: 37775 - DNA, 25 bp, probe
gacttcaattaccttagcagcaact

SEQ ID NO: 37776 - DNA, 25 bp, probe
agacttcaattaccttagcagcaac

SEQ ID NO: 37777 - DNA, 25 bp, probe
ggagaaggaagaattgatggaatgg

SEQ ID NO: 37778 - DNA, 25 bp, probe
caagacttcaattaccttagcagca

SEQ ID NO: 37779 - DNA, 25 bp, probe
gaaggaatagaccacgatgttacat

SEQ ID NO: 37780 - DNA, 25 bp, probe
gaaggaagaattgatggaatggtgg

SEQ ID NO: 37781 - DNA, 25 bp, probe
aggaagaattgatggaatggtggaa

SEQ ID NO: 37782 - DNA, 25 bp, probe
aaggaagaattgatggaatggtgga

SEQ ID NO: 37783 - DNA, 25 bp, probe
ggaaggaatagaccacgatgttaca

SEQ ID NO: 37784 - DNA, 25 bp, probe
ttcaattaccttagcagcaactgtt

SEQ ID NO: 37785 - DNA, 25 bp, probe
atgtagtatgatgtaatgtggtctt

SEQ ID NO: 37786 - DNA, 25 bp, probe
aatgtagtatgatgtaatgtggtct

SEQ ID NO: 37787 - DNA, 25 bp, probe
cttcaattaccttagcagcaactgt

SEQ ID NO: 37788 - DNA, 25 bp, probe
acttcaattaccttagcagcaactg

SEQ ID NO: 37789 - DNA, 25 bp, probe
ctgaagagactctgaagacctactg

SEQ ID NO: 37790 - DNA, 25 bp, probe
ggatggtgattactggagattgctt

SEQ ID NO: 37791 - DNA, 25 bp, probe
aaggatggtgattactggagattgc

SEQ ID NO: 37792 - DNA, 25 bp, probe
gcaagacttcaattaccttagcagc

SEQ ID NO: 37793 - DNA, 25 bp, probe
ggagattgcttatacctggaaacta

SEQ ID NO: 37794 - DNA, 25 bp, probe
gaaactataaacttacagcctcagc

SEQ ID NO: 37795 - DNA, 25 bp, probe
tggaaactataaacttacagcctca

SEQ ID NO: 37796 - DNA, 25 bp, probe
aaaggatggtgattactggagattg

SEQ ID NO: 37797 - DNA, 25 bp, probe
caaaggatggtgattactggagatt

SEQ ID NO: 37798 - DNA, 25 bp, probe
gaaaggaaagaagaggagaaggaag

SEQ ID NO: 37799 - DNA, 25 bp, probe
tgaatggaagacacttacctaacaa

SEQ ID NO: 37800 - DNA, 25 bp, probe
tacatacaagacttcaccataaggc

SEQ ID NO: 37801 - DNA, 25 bp, probe
gaatggaagacacttacctaacaag

SEQ ID NO: 37802 - DNA, 25 bp, probe
ctacatacaagacttcaccataagg

SEQ ID NO: 37803 - DNA, 25 bp, probe
cggatgaatataagcaatgaagatg

SEQ ID NO: 37804 - DNA, 25 bp, probe
gtgaatggaagacacttacctaaca

SEQ ID NO: 37805 - DNA, 25 bp, probe
tctacatacaagacttcaccataag

SEQ ID NO: 37806 - DNA, 25 bp, probe
cttctacatacaagacttcaccata

SEQ ID NO: 37807 - DNA, 25 bp, probe
ttctacatacaagacttcaccataa

SEQ ID NO: 37808 - DNA, 25 bp, probe
ggtgaatggaagacacttacctaac

SEQ ID NO: 37809 - DNA, 25 bp, probe
ggatgaatataagcaatgaagatga

SEQ ID NO: 37810 - DNA, 25 bp, probe
gtttccaaattccacaataagcaat

SEQ ID NO: 37811 - DNA, 25 bp, probe
tgaatataagcaatgaagatgaaca

SEQ ID NO: 37812 - DNA, 25 bp, probe
tcttctacatacaagacttcaccat

SEQ ID NO: 37813 - DNA, 25 bp, probe
atcttctacatacaagacttcacca

SEQ ID NO: 37814 - DNA, 25 bp, probe
caataagcaatatgtggtgataatg

SEQ ID NO: 37815 - DNA, 25 bp, probe
tgtttccaaattccacaataagcaa

SEQ ID NO: 37816 - DNA, 25 bp, probe
atgtttccaaattccacaataagca

SEQ ID NO: 37817 - DNA, 25 bp, probe
cggtgaatggaagacacttacctaa

SEQ ID NO: 37818 - DNA, 25 bp, probe
ataagcaatatgtggtgataatgaa

SEQ ID NO: 37819 - DNA, 25 bp, probe
aataagcaatatgtggtgataatga

SEQ ID NO: 37820 - DNA, 25 bp, probe
gatgtttccaaattccacaataagc

SEQ ID NO: 37821 - DNA, 25 bp, probe
tccaaattccacaataagcaatatg

SEQ ID NO: 37822 - DNA, 25 bp, probe
gatcttctacatacaagacttcacc

SEQ ID NO: 37823 - DNA, 25 bp, probe
accggatgaatataagcaatgaaga

SEQ ID NO: 37824 - DNA, 25 bp, probe
agaaccggatgaatataagcaatga

SEQ ID NO: 37825 - DNA, 25 bp, probe
gagaaccggatgaatataagcaatg

SEQ ID NO: 37826 - DNA, 25 bp, probe
agagaaccggatgaatataagcaat

SEQ ID NO: 37827 - DNA, 25 bp, probe
tacagagaaccggatgaatataagc

SEQ ID NO: 37828 - DNA, 25 bp, probe
cttgacggtgaatggaagacactta

SEQ ID NO: 37829 - DNA, 25 bp, probe
aaccggatgaatataagcaatgaag

SEQ ID NO: 37830 - DNA, 25 bp, probe
gaaccggatgaatataagcaatgaa

SEQ ID NO: 37831 - DNA, 25 bp, probe
tggaagacacttacctaacaagtac

SEQ ID NO: 37832 - DNA, 25 bp, probe
aatggaagacacttacctaacaagt

SEQ ID NO: 37833 - DNA, 25 bp, probe
cagagaaccggatgaatataagcaa

SEQ ID NO: 37834 - DNA, 25 bp, probe
gtgaaaccctgtctctactaaatat

SEQ ID NO: 37835 - DNA, 25 bp, probe
ccggatgaatataagcaatgaagat

SEQ ID NO: 37836 - DNA, 25 bp, probe
atggaagacacttacctaacaagta

SEQ ID NO: 37837 - DNA, 25 bp, probe
acaataagcaatatgtggtgataat

SEQ ID NO: 37838 - DNA, 25 bp, probe
tcctgaagaagagaaatggatgttt

SEQ ID NO: 37839 - DNA, 25 bp, probe
ttcctgaagaagagaaatggatgtt

SEQ ID NO: 37840 - DNA, 25 bp, probe
tttccaaattccacaataagcaata

SEQ ID NO: 37841 - DNA, 25 bp, probe
ccaaattccacaataagcaatatgt

SEQ ID NO: 37842 - DNA, 25 bp, probe
ttgacggtgaatggaagacacttac

SEQ ID NO: 37843 - DNA, 25 bp, probe
aatgctataccttacctacctcgta

SEQ ID NO: 37844 - DNA, 25 bp, probe
gaatccaggctctatcaccttacta

SEQ ID NO: 37845 - DNA, 25 bp, probe
atgctataccttacctacctcgtaa

SEQ ID NO: 37846 - DNA, 25 bp, probe
aatccaggctctatcaccttactag

SEQ ID NO: 37847 - DNA, 25 bp, probe
ggaaatgctataccttacctacctc

SEQ ID NO: 37848 - DNA, 25 bp, probe
gaaatgctataccttacctacctcg

SEQ ID NO: 37849 - DNA, 25 bp, probe
tggaaatgctataccttacctacct

SEQ ID NO: 37850 - DNA, 25 bp, probe
atggaaatgctataccttacctacc

SEQ ID NO: 37851 - DNA, 25 bp, probe
aaatgctataccttacctacctcgt

SEQ ID NO: 37852 - DNA, 25 bp, probe
atcaatcttcaccctcatccctaaa

SEQ ID NO: 37853 - DNA, 25 bp, probe
aagatggaaatgctataccttacct

SEQ ID NO: 37854 - DNA, 25 bp, probe
gatggaaatgctataccttacctac

SEQ ID NO: 37855 - DNA, 25 bp, probe
agatggaaatgctataccttaccta

SEQ ID NO: 37856 - DNA, 25 bp, probe
catcaatcttcaccctcatccctaa

SEQ ID NO: 37857 - DNA, 25 bp, probe
ttaaagagatggagcaagagagtgg

SEQ ID NO: 37858 - DNA, 25 bp, probe
tgctataccttacctacctcgtaaa

SEQ ID NO: 37859 - DNA, 25 bp, probe
tttaaagagatggagcaagagagtg

SEQ ID NO: 37860 - DNA, 25 bp, probe
cttagcagaaggtcgatgtgtctac

SEQ ID NO: 37861 - DNA, 25 bp, probe
tcataagatggaaatgctatacctt

SEQ ID NO: 37862 - DNA, 25 bp, probe
ttcataagatggaaatgctatacct

SEQ ID NO: 37863 - DNA, 25 bp, probe
acatcaatcttcaccctcatcccta

SEQ ID NO: 37864 - DNA, 25 bp, probe
cttcataagatggaaatgctatacc

SEQ ID NO: 37865 - DNA, 25 bp, probe
ctccatctgcccttaaatgctgtat

SEQ ID NO: 37866 - DNA, 25 bp, probe
attactgggcaatagagcaggtatc

SEQ ID NO: 37867 - DNA, 25 bp, probe
catttctcctttccttcctcccatc

SEQ ID NO: 37868 - DNA, 25 bp, probe
atctgcccttaaatgctgtatgctt

SEQ ID NO: 37869 - DNA, 25 bp, probe
taaagagatggagcaagagagtggt

SEQ ID NO: 37870 - DNA, 25 bp, probe
taagatggaaatgctataccttacc

SEQ ID NO: 37871 - DNA, 25 bp, probe
cgaatccaggctctatcaccttact

SEQ ID NO: 37872 - DNA, 25 bp, probe
cattactgggcaatagagcaggtat

SEQ ID NO: 37873 - DNA, 25 bp, probe
tctgcccttaaatgctgtatgcttt

SEQ ID NO: 37874 - DNA, 25 bp, probe
tccatctgcccttaaatgctgtatg

SEQ ID NO: 37875 - DNA, 25 bp, probe
tatccattactgggcaatagagcag

SEQ ID NO: 37876 - DNA, 25 bp, probe
ctatccattactgggcaatagagca

SEQ ID NO: 37877 - DNA, 25 bp, probe
acttaacagagtgcatagcatacac

SEQ ID NO: 37878 - DNA, 25 bp, probe
caacttgcccaacatcaatcttcac

SEQ ID NO: 37879 - DNA, 25 bp, probe
caacatcaatcttcaccctcatccc

SEQ ID NO: 37880 - DNA, 25 bp, probe
ccaacatcaatcttcaccctcatcc

SEQ ID NO: 37881 - DNA, 25 bp, probe
cccaacatcaatcttcaccctcatc

SEQ ID NO: 37882 - DNA, 25 bp, probe
gaccatctccatctgcccttaaatg

SEQ ID NO: 37883 - DNA, 25 bp, probe
tacctacctcgtaaaagtctgatga

SEQ ID NO: 37884 - DNA, 25 bp, probe
cagtttcttcataagatggaaatgc

SEQ ID NO: 37885 - DNA, 25 bp, probe
aacatcaatcttcaccctcatccct

SEQ ID NO: 37886 - DNA, 25 bp, probe
agtttcttcataagatggaaatgct

SEQ ID NO: 37887 - DNA, 25 bp, probe
tctgtcttctactgcttcttcaatg

SEQ ID NO: 37888 - DNA, 25 bp, probe
gtctgtcttctactgcttcttcaat

SEQ ID NO: 37889 - DNA, 25 bp, probe
gtcttctactgcttcttcaatggag

SEQ ID NO: 37890 - DNA, 25 bp, probe
ctgtcttctactgcttcttcaatgg

SEQ ID NO: 37891 - DNA, 25 bp, probe
cttctactgcttcttcaatggagag

SEQ ID NO: 37892 - DNA, 25 bp, probe
tgtcttctactgcttcttcaatgga

SEQ ID NO: 37893 - DNA, 25 bp, probe
tgtctgtcttctactgcttcttcaa

SEQ ID NO: 37894 - DNA, 25 bp, probe
tctactatgagaatgaacagtgctg

SEQ ID NO: 37895 - DNA, 25 bp, probe
tcttctactgcttcttcaatggaga

SEQ ID NO: 37896 - DNA, 25 bp, probe
ctctactatgagaatgaacagtgct

SEQ ID NO: 37897 - DNA, 25 bp, probe
ctactatgagaatgaacagtgctgg

SEQ ID NO: 37898 - DNA, 25 bp, probe
gctctactatgagaatgaacagtgc

SEQ ID NO: 37899 - DNA, 25 bp, probe
gtgtctgtcttctactgcttcttca

SEQ ID NO: 37900 - DNA, 25 bp, probe
tactatgagaatgaacagtgctggt

SEQ ID NO: 37901 - DNA, 25 bp, probe
ttctactgcttcttcaatggagagg

SEQ ID NO: 37902 - DNA, 25 bp, probe
actatgagaatgaacagtgctggtt

SEQ ID NO: 37903 - DNA, 25 bp, probe
ctagtccacagattaggcaatcaag

SEQ ID NO: 37904 - DNA, 25 bp, probe
catctctgctctctgtgaaataaac

SEQ ID NO: 37905 - DNA, 25 bp, probe
agctctactatgagaatgaacagtg

SEQ ID NO: 37906 - DNA, 25 bp, probe
atctctgctctctgtgaaataaacc

SEQ ID NO: 37907 - DNA, 25 bp, probe
ctctgctctctgtgaaataaaccat

SEQ ID NO: 37908 - DNA, 25 bp, probe
ttcatctatttcaactccttcctgc

SEQ ID NO: 37909 - DNA, 25 bp, probe
gcaagctctactatgagaatgaaca

SEQ ID NO: 37910 - DNA, 25 bp, probe
aagctctactatgagaatgaacagt

SEQ ID NO: 37911 - DNA, 25 bp, probe
ctatttatagtagcagacacagggc

SEQ ID NO: 37912 - DNA, 25 bp, probe
ctactgcttcttcaatggagaggtg

SEQ ID NO: 37913 - DNA, 25 bp, probe
caagctctactatgagaatgaacag

SEQ ID NO: 37914 - DNA, 25 bp, probe
tgttcatctatttcaactccttcct

SEQ ID NO: 37915 - DNA, 25 bp, probe
cacagattaggcaatcaaggaagac

SEQ ID NO: 37916 - DNA, 25 bp, probe
gttcatctatttcaactccttcctg

SEQ ID NO: 37917 - DNA, 25 bp, probe
tctactgcttcttcaatggagaggt

SEQ ID NO: 37918 - DNA, 25 bp, probe
cgtgtctgtcttctactgcttcttc

SEQ ID NO: 37919 - DNA, 25 bp, probe
cttcgtgtctgtcttctactgcttc

SEQ ID NO: 37920 - DNA, 25 bp, probe
gtttcttcgtgtctgtcttctactg

SEQ ID NO: 37921 - DNA, 25 bp, probe
ggcaagctctactatgagaatgaac

SEQ ID NO: 37922 - DNA, 25 bp, probe
acctacatgctcttcttcgtcaatc

SEQ ID NO: 37923 - DNA, 25 bp, probe
tctctgctctctgtgaaataaacca

SEQ ID NO: 37924 - DNA, 25 bp, probe
atgttcatctatttcaactccttcc

SEQ ID NO: 37925 - DNA, 25 bp, probe
tagtccacagattaggcaatcaagg

SEQ ID NO: 37926 - DNA, 25 bp, probe
acatctctgctctctgtgaaataaa

SEQ ID NO: 37927 - DNA, 25 bp, probe
aacatctctgctctctgtgaaataa

SEQ ID NO: 37928 - DNA, 25 bp, probe
aaacatctctgctctctgtgaaata

SEQ ID NO: 37929 - DNA, 25 bp, probe
ctatgagaatgaacagtgctggttt

SEQ ID NO: 37930 - DNA, 25 bp, probe
cctgtcacagatcatgttcatctat

SEQ ID NO: 37931 - DNA, 25 bp, probe
tacaattcctacagcgtctccaata

SEQ ID NO: 37932 - DNA, 25 bp, probe
cactgatctctactaccacaaggaa

SEQ ID NO: 37933 - DNA, 25 bp, probe
atacaattcctacagcgtctccaat

SEQ ID NO: 37934 - DNA, 25 bp, probe
acaattcctacagcgtctccaatag

SEQ ID NO: 37935 - DNA, 25 bp, probe
gatacaattcctacagcgtctccaa

SEQ ID NO: 37936 - DNA, 25 bp, probe
caatgtcacaacctctctgatcttg

SEQ ID NO: 37937 - DNA, 25 bp, probe
aggacaagcactacggatacaattc

SEQ ID NO: 37938 - DNA, 25 bp, probe
caagcactacggatacaattcctac

SEQ ID NO: 37939 - DNA, 25 bp, probe
aagcactacggatacaattcctaca

SEQ ID NO: 37940 - DNA, 25 bp, probe
acaagcactacggatacaattccta

SEQ ID NO: 37941 - DNA, 25 bp, probe
caggacaagcactacggatacaatt

SEQ ID NO: 37942 - DNA, 25 bp, probe
gtattcggacttcctgctctacaag

SEQ ID NO: 37943 - DNA, 25 bp, probe
agcactacggatacaattcctacag

SEQ ID NO: 37944 - DNA, 25 bp, probe
ccactgatctctactaccacaagga

SEQ ID NO: 37945 - DNA, 25 bp, probe
ttgtcacagaaatcagaggagagat

SEQ ID NO: 37946 - DNA, 25 bp, probe
tttgtcacagaaatcagaggagaga

SEQ ID NO: 37947 - DNA, 25 bp, probe
actgatctctactaccacaaggaaa

SEQ ID NO: 37948 - DNA, 25 bp, probe
tttctgacccactgatctctactac

SEQ ID NO: 37949 - DNA, 25 bp, probe
gtttctgacccactgatctctacta

SEQ ID NO: 37950 - DNA, 25 bp, probe
atttgtcacagaaatcagaggagag

SEQ ID NO: 37951 - DNA, 25 bp, probe
gatcactgtggaatcgaatcagaag

SEQ ID NO: 37952 - DNA, 25 bp, probe
catttgtcacagaaatcagaggaga

SEQ ID NO: 37953 - DNA, 25 bp, probe
ttccacatttgtcacagaaatcaga

SEQ ID NO: 37954 - DNA, 25 bp, probe
tgtcacagaaatcagaggagagatg

SEQ ID NO: 37955 - DNA, 25 bp, probe
agaaatcagaggagagatggtgttg

SEQ ID NO: 37956 - DNA, 25 bp, probe
cagaaatcagaggagagatggtgtt

SEQ ID NO: 37957 - DNA, 25 bp, probe
acatttgtcacagaaatcagaggag

SEQ ID NO: 37958 - DNA, 25 bp, probe
taagatacaagtttcaggcagggtc

SEQ ID NO: 37959 - DNA, 25 bp, probe
gacaagcactacggatacaattcct

SEQ ID NO: 37960 - DNA, 25 bp, probe
cacatttgtcacagaaatcagagga

SEQ ID NO: 37961 - DNA, 25 bp, probe
tccacatttgtcacagaaatcagag

SEQ ID NO: 37962 - DNA, 25 bp, probe
ctttctctgtgtattcggacttcct

SEQ ID NO: 37963 - DNA, 25 bp, probe
caattcctacagcgtctccaatagc

SEQ ID NO: 37964 - DNA, 25 bp, probe
gcaatgtcacaacctctctgatctt

SEQ ID NO: 37965 - DNA, 25 bp, probe
taacaaggaatgcctgtgccaataa

SEQ ID NO: 37966 - DNA, 25 bp, probe
ttaacaaggaatgcctgtgccaata

SEQ ID NO: 37967 - DNA, 25 bp, probe
atcactgtggaatcgaatcagaagt

SEQ ID NO: 37968 - DNA, 25 bp, probe
acaggacaagcactacggatacaat

SEQ ID NO: 37969 - DNA, 25 bp, probe
gtcacagaaatcagaggagagatgg

SEQ ID NO: 37970 - DNA, 25 bp, probe
ttgtttctgacccactgatctctac

SEQ ID NO: 37971 - DNA, 25 bp, probe
gttgtttctgacccactgatctcta

SEQ ID NO: 37972 - DNA, 25 bp, probe
ctgtgtattcggacttcctgctcta

SEQ ID NO: 37973 - DNA, 25 bp, probe
gtaagatacaagtttcaggcagggt

SEQ ID NO: 37974 - DNA, 25 bp, probe
tttctctgtgtattcggacttcctg

SEQ ID NO: 37975 - DNA, 25 bp, probe
agctgacatggaaatacagttgttg

SEQ ID NO: 37976 - DNA, 25 bp, probe
ctgacatggaaatacagttgttggc

SEQ ID NO: 37977 - DNA, 25 bp, probe
gctgacatggaaatacagttgttgg

SEQ ID NO: 37978 - DNA, 25 bp, probe
ctgtctgtctctccatctgtttggt

SEQ ID NO: 37979 - DNA, 25 bp, probe
tgtctgtctctccatctgtttggtg

SEQ ID NO: 37980 - DNA, 25 bp, probe
tgttttgttctgtggttttcccctc

SEQ ID NO: 37981 - DNA, 25 bp, probe
ctgttttgttctgtggttttcccct

SEQ ID NO: 37982 - DNA, 25 bp, probe
gcctgtctgtctctccatctgtttg

SEQ ID NO: 37983 - DNA, 25 bp, probe
gtagagctgatccagagcacagatc

SEQ ID NO: 37984 - DNA, 25 bp, probe
agatctgtttcgtgcattggaagac

SEQ ID NO: 37985 - DNA, 25 bp, probe
gatctgtttcgtgcattggaagacc

SEQ ID NO: 37986 - DNA, 25 bp, probe
cctgtctgtctctccatctgtttgg

SEQ ID NO: 37987 - DNA, 25 bp, probe
acatggaaatacagttgttggcctc

SEQ ID NO: 37988 - DNA, 25 bp, probe
gacatggaaatacagttgttggcct

SEQ ID NO: 37989 - DNA, 25 bp, probe
gtctgtctctccatctgtttggtgg

SEQ ID NO: 37990 - DNA, 25 bp, probe
tgacatggaaatacagttgttggcc

SEQ ID NO: 37991 - DNA, 25 bp, probe
gttttgttctgtggttttcccctcc

SEQ ID NO: 37992 - DNA, 25 bp, probe
tgctgttttgttctgtggttttccc

SEQ ID NO: 37993 - DNA, 25 bp, probe
catggaaatacagttgttggcctcc

SEQ ID NO: 37994 - DNA, 25 bp, probe
tagagctgatccagagcacagatct

SEQ ID NO: 37995 - DNA, 25 bp, probe
ctggataaggacaacaatgagaagc

SEQ ID NO: 37996 - DNA, 25 bp, probe
accatccagaatgacatcatgttat

SEQ ID NO: 37997 - DNA, 25 bp, probe
cctggataaggacaacaatgagaag

SEQ ID NO: 37998 - DNA, 25 bp, probe
atccagaatgacatcatgttattgc

SEQ ID NO: 37999 - DNA, 25 bp, probe
gaccatccagaatgacatcatgtta

SEQ ID NO: 38000 - DNA, 25 bp, probe
ccatccagaatgacatcatgttatt

SEQ ID NO: 38001 - DNA, 25 bp, probe
atataatcagcggaccatccagaat

SEQ ID NO: 38002 - DNA, 25 bp, probe
aatataatcagcggaccatccagaa

SEQ ID NO: 38003 - DNA, 25 bp, probe
catccagaatgacatcatgttattg

SEQ ID NO: 38004 - DNA, 25 bp, probe
tggataaggacaacaatgagaagct

SEQ ID NO: 38005 - DNA, 25 bp, probe
ccagaatgacatcatgttattgcag

SEQ ID NO: 38006 - DNA, 25 bp, probe
tataatcagcggaccatccagaatg

SEQ ID NO: 38007 - DNA, 25 bp, probe
caatataatcagcggaccatccaga

SEQ ID NO: 38008 - DNA, 25 bp, probe
tcaatataatcagcggaccatccag

SEQ ID NO: 38009 - DNA, 25 bp, probe
ctcaatataatcagcggaccatcca

SEQ ID NO: 38010 - DNA, 25 bp, probe
ggaagcaatataaatgtcaccctgg

SEQ ID NO: 38011 - DNA, 25 bp, probe
tccagaatgacatcatgttattgca

SEQ ID NO: 38012 - DNA, 25 bp, probe
cacagtgttgccagagccttaataa

SEQ ID NO: 38013 - DNA, 25 bp, probe
agaatgacatcatgttattgcagct

SEQ ID NO: 38014 - DNA, 25 bp, probe
cagaatgacatcatgttattgcagc

SEQ ID NO: 38015 - DNA, 25 bp, probe
tatcttcagatccagagtccagcag

SEQ ID NO: 38016 - DNA, 25 bp, probe
gaagcaatataaatgtcaccctggg

SEQ ID NO: 38017 - DNA, 25 bp, probe
cctcaatataatcagcggaccatcc

SEQ ID NO: 38018 - DNA, 25 bp, probe
cagtgttgccagagccttaataaac

SEQ ID NO: 38019 - DNA, 25 bp, probe
gtatcttcagatccagagtccagca

SEQ ID NO: 38020 - DNA, 25 bp, probe
acagtgttgccagagccttaataaa

SEQ ID NO: 38021 - DNA, 25 bp, probe
ctacatggcgtatcttcagatccag

SEQ ID NO: 38022 - DNA, 25 bp, probe
ccctcaatataatcagcggaccatc

SEQ ID NO: 38023 - DNA, 25 bp, probe
gccttaataaacgtccacagagtat

SEQ ID NO: 38024 - DNA, 25 bp, probe
ggaccatccagaatgacatcatgtt

SEQ ID NO: 38025 - DNA, 25 bp, probe
aaacgtccacagagtataaataacc

SEQ ID NO: 38026 - DNA, 25 bp, probe
tacatggcgtatcttcagatccaga

SEQ ID NO: 38027 - DNA, 25 bp, probe
catccgccaccctcaatataatcag

SEQ ID NO: 38028 - DNA, 25 bp, probe
agccttaataaacgtccacagagta

SEQ ID NO: 38029 - DNA, 25 bp, probe
ccctggataaggacaacaatgagaa

SEQ ID NO: 38030 - DNA, 25 bp, probe
ataatcagcggaccatccagaatga

SEQ ID NO: 38031 - DNA, 25 bp, probe
accctcaatataatcagcggaccat

SEQ ID NO: 38032 - DNA, 25 bp, probe
ggataaggacaacaatgagaagctt

SEQ ID NO: 38033 - DNA, 25 bp, probe
ccttaataaacgtccacagagtata

SEQ ID NO: 38034 - DNA, 25 bp, probe
agagccttaataaacgtccacagag

SEQ ID NO: 38035 - DNA, 25 bp, probe
aagcaatataaatgtcaccctgggc

SEQ ID NO: 38036 - DNA, 25 bp, probe
cgtatcttcagatccagagtccagc

SEQ ID NO: 38037 - DNA, 25 bp, probe
gcgtatcttcagatccagagtccag

SEQ ID NO: 38038 - DNA, 25 bp, probe
agtgttgccagagccttaataaacg

SEQ ID NO: 38039 - DNA, 25 bp, probe
atgaatgaagaaggatggaggagag

SEQ ID NO: 38040 - DNA, 25 bp, probe
ttatacggcatgaatgaagaaggat

SEQ ID NO: 38041 - DNA, 25 bp, probe
attatacggcatgaatgaagaagga

SEQ ID NO: 38042 - DNA, 25 bp, probe
gattatacggcatgaatgaagaagg

SEQ ID NO: 38043 - DNA, 25 bp, probe
acagattatacggcatgaatgaaga

SEQ ID NO: 38044 - DNA, 25 bp, probe
caacagattatacggcatgaatgaa

SEQ ID NO: 38045 - DNA, 25 bp, probe
caagtattctgttgctaatgacacc

SEQ ID NO: 38046 - DNA, 25 bp, probe
ccaagtattctgttgctaatgacac

SEQ ID NO: 38047 - DNA, 25 bp, probe
aacagattatacggcatgaatgaag

SEQ ID NO: 38048 - DNA, 25 bp, probe
acaacagattatacggcatgaatga

SEQ ID NO: 38049 - DNA, 25 bp, probe
cacaacagattatacggcatgaatg

SEQ ID NO: 38050 - DNA, 25 bp, probe
cagattatacggcatgaatgaagaa

SEQ ID NO: 38051 - DNA, 25 bp, probe
aagaacatgaagatgattgaactgc

SEQ ID NO: 38052 - DNA, 25 bp, probe
agattatacggcatgaatgaagaag

SEQ ID NO: 38053 - DNA, 25 bp, probe
tatacggcatgaatgaagaaggatg

SEQ ID NO: 38054 - DNA, 25 bp, probe
ggagaagaacatgaagatgattgaa

SEQ ID NO: 38055 - DNA, 25 bp, probe
aagtattctgttgctaatgacaccg

SEQ ID NO: 38056 - DNA, 25 bp, probe
gaagaacatgaagatgattgaactg

SEQ ID NO: 38057 - DNA, 25 bp, probe
agaagaacatgaagatgattgaact

SEQ ID NO: 38058 - DNA, 25 bp, probe
gaattgcctcagctactctaacatt

SEQ ID NO: 38059 - DNA, 25 bp, probe
gagaagaacatgaagatgattgaac

SEQ ID NO: 38060 - DNA, 25 bp, probe
tacacactcgaatcattgaagatcc

SEQ ID NO: 38061 - DNA, 25 bp, probe
ggatacacactcgaatcattgaaga

SEQ ID NO: 38062 - DNA, 25 bp, probe
cagaagaatcctgtaagtacaatcc

SEQ ID NO: 38063 - DNA, 25 bp, probe
catgaatgaagaaggatggaggaga

SEQ ID NO: 38064 - DNA, 25 bp, probe
gcacaacagattatacggcatgaat

SEQ ID NO: 38065 - DNA, 25 bp, probe
atacacactcgaatcattgaagatc

SEQ ID NO: 38066 - DNA, 25 bp, probe
gatacacactcgaatcattgaagat

SEQ ID NO: 38067 - DNA, 25 bp, probe
gattatgctttccagtatgttcagg

SEQ ID NO: 38068 - DNA, 25 bp, probe
ggactctgaggaatcctatccatat

SEQ ID NO: 38069 - DNA, 25 bp, probe
gaacatgaagatgattgaactgcac

SEQ ID NO: 38070 - DNA, 25 bp, probe
agaacatgaagatgattgaactgca

SEQ ID NO: 38071 - DNA, 25 bp, probe
atcccaagtattctgttgctaatga

SEQ ID NO: 38072 - DNA, 25 bp, probe
cggatacacactcgaatcattgaag

SEQ ID NO: 38073 - DNA, 25 bp, probe
aatcccaagtattctgttgctaatg

SEQ ID NO: 38074 - DNA, 25 bp, probe
caatcccaagtattctgttgctaat

SEQ ID NO: 38075 - DNA, 25 bp, probe
ctatccatatgaggcaacagaagaa

SEQ ID NO: 38076 - DNA, 25 bp, probe
tcccaagtattctgttgctaatgac

SEQ ID NO: 38077 - DNA, 25 bp, probe
aacatgaagatgattgaactgcaca

SEQ ID NO: 38078 - DNA, 25 bp, probe
tatccatatgaggcaacagaagaat

SEQ ID NO: 38079 - DNA, 25 bp, probe
atccatatgaggcaacagaagaatc

SEQ ID NO: 38080 - DNA, 25 bp, probe
ttgaaagcacagaatcagataacaa

SEQ ID NO: 38081 - DNA, 25 bp, probe
tttgaaagcacagaatcagataaca

SEQ ID NO: 38082 - DNA, 25 bp, probe
acatgaagatgattgaactgcacaa

SEQ ID NO: 38083 - DNA, 25 bp, probe
gcgactccatctctacaaataaata

SEQ ID NO: 38084 - DNA, 25 bp, probe
catctggttggtctttattgagcac

SEQ ID NO: 38085 - DNA, 25 bp, probe
gttggtctttattgagcacctacta

SEQ ID NO: 38086 - DNA, 25 bp, probe
ttggtctttattgagcacctactat

SEQ ID NO: 38087 - DNA, 25 bp, probe
tggtctttattgagcacctactata

SEQ ID NO: 38088 - DNA, 25 bp, probe
gtctttattgagcacctactatatg

SEQ ID NO: 38089 - DNA, 25 bp, probe
attgagcacctactatatgcagaag

SEQ ID NO: 38090 - DNA, 25 bp, probe
gatcattggatctcaggagttggag

SEQ ID NO: 38091 - DNA, 25 bp, probe
gaggatcattggatctcaggagttg

SEQ ID NO: 38092 - DNA, 25 bp, probe
tattgagcacctactatatgcagaa

SEQ ID NO: 38093 - DNA, 25 bp, probe
ttattgagcacctactatatgcaga

SEQ ID NO: 38094 - DNA, 25 bp, probe
ctgcatctggttggtctttattgag

SEQ ID NO: 38095 - DNA, 25 bp, probe
ggtctttattgagcacctactatat

SEQ ID NO: 38096 - DNA, 25 bp, probe
cgactccatctctacaaataaataa

SEQ ID NO: 38097 - DNA, 25 bp, probe
gcatctggttggtctttattgagca

SEQ ID NO: 38098 - DNA, 25 bp, probe
ggttggtctttattgagcacctact

SEQ ID NO: 38099 - DNA, 25 bp, probe
ctggttggtctttattgagcaccta

SEQ ID NO: 38100 - DNA, 25 bp, probe
ttgagcacctactatatgcagaagg

SEQ ID NO: 38101 - DNA, 25 bp, probe
tggttggtctttattgagcacctac

SEQ ID NO: 38102 - DNA, 25 bp, probe
caatgaagtcatccactcctgcatc

SEQ ID NO: 38103 - DNA, 25 bp, probe
ctcctgcatctggttggtctttatt

SEQ ID NO: 38104 - DNA, 25 bp, probe
aatgaagtcatccactcctgcatct

SEQ ID NO: 38105 - DNA, 25 bp, probe
tctttattgagcacctactatatgc

SEQ ID NO: 38106 - DNA, 25 bp, probe
ggaggatcattggatctcaggagtt

SEQ ID NO: 38107 - DNA, 25 bp, probe
atctggttggtctttattgagcacc

SEQ ID NO: 38108 - DNA, 25 bp, probe
atcattggatctcaggagttggaga

SEQ ID NO: 38109 - DNA, 25 bp, probe
cctgcatctggttggtctttattga

SEQ ID NO: 38110 - DNA, 25 bp, probe
tcctgcatctggttggtctttattg

SEQ ID NO: 38111 - DNA, 25 bp, probe
ggatcattggatctcaggagttgga

SEQ ID NO: 38112 - DNA, 25 bp, probe
aggatcattggatctcaggagttgg

SEQ ID NO: 38113 - DNA, 25 bp, probe
cgcgactccatctctacaaataaat

SEQ ID NO: 38114 - DNA, 25 bp, probe
tgcatctggttggtctttattgagc

SEQ ID NO: 38115 - DNA, 25 bp, probe
caaagtcccgagcaatgaagtcatc

SEQ ID NO: 38116 - DNA, 25 bp, probe
tttattgagcacctactatatgcag

SEQ ID NO: 38117 - DNA, 25 bp, probe
ctttattgagcacctactatatgca

SEQ ID NO: 38118 - DNA, 25 bp, probe
atgaagtcatccactcctgcatctg

SEQ ID NO: 38119 - DNA, 25 bp, probe
caacaaagtcccgagcaatgaagtc

SEQ ID NO: 38120 - DNA, 25 bp, probe
cttgtagttccagctactcaggagg

SEQ ID NO: 38121 - DNA, 25 bp, probe
actcctgcatctggttggtctttat

SEQ ID NO: 38122 - DNA, 25 bp, probe
tctggttggtctttattgagcacct

SEQ ID NO: 38123 - DNA, 25 bp, probe
aacaaagtcccgagcaatgaagtca

SEQ ID NO: 38124 - DNA, 25 bp, probe
acaaagtcccgagcaatgaagtcat

SEQ ID NO: 38125 - DNA, 25 bp, probe
gcttgtagttccagctactcaggag

SEQ ID NO: 38126 - DNA, 25 bp, probe
cactcctgcatctggttggtcttta

SEQ ID NO: 38127 - DNA, 25 bp, probe
gaagacaaccttgaccattacagaa

SEQ ID NO: 38128 - DNA, 25 bp, probe
cagaagacaaccttgaccattacag

SEQ ID NO: 38129 - DNA, 25 bp, probe
agaagacaaccttgaccattacaga

SEQ ID NO: 38130 - DNA, 25 bp, probe
aacaagttgagtacctccttattca

SEQ ID NO: 38131 - DNA, 25 bp, probe
acaagttgagtacctccttattcat

SEQ ID NO: 38132 - DNA, 25 bp, probe
aagttgagtacctccttattcatgg

SEQ ID NO: 38133 - DNA, 25 bp, probe
ctccagaagacaaccttgaccatta

SEQ ID NO: 38134 - DNA, 25 bp, probe
caagttgagtacctccttattcatg

SEQ ID NO: 38135 - DNA, 25 bp, probe
tcacaacagattattaccttacaga

SEQ ID NO: 38136 - DNA, 25 bp, probe
tccagaagacaaccttgaccattac

SEQ ID NO: 38137 - DNA, 25 bp, probe
tgtcttcacaacagattattacctt

SEQ ID NO: 38138 - DNA, 25 bp, probe
ccagaagacaaccttgaccattaca

SEQ ID NO: 38139 - DNA, 25 bp, probe
aagagggattagggagagaagatag

SEQ ID NO: 38140 - DNA, 25 bp, probe
gataagagggattagggagagaaga

SEQ ID NO: 38141 - DNA, 25 bp, probe
tttctctttaccttagcacctcaaa

SEQ ID NO: 38142 - DNA, 25 bp, probe
aatgtttctctttaccttagcacct

SEQ ID NO: 38143 - DNA, 25 bp, probe
caatgtttctctttaccttagcacc

SEQ ID NO: 38144 - DNA, 25 bp, probe
aacagtctcaggaaatcaaatatgc

SEQ ID NO: 38145 - DNA, 25 bp, probe
atgtttctctttaccttagcacctc

SEQ ID NO: 38146 - DNA, 25 bp, probe
ttgagtacctccttattcatggaac

SEQ ID NO: 38147 - DNA, 25 bp, probe
gttgagtacctccttattcatggaa

SEQ ID NO: 38148 - DNA, 25 bp, probe
ataagagggattagggagagaagat

SEQ ID NO: 38149 - DNA, 25 bp, probe
gagtacctccttattcatggaacag

SEQ ID NO: 38150 - DNA, 25 bp, probe
agacaaccttgaccattacagaaat

SEQ ID NO: 38151 - DNA, 25 bp, probe
gtttctctttaccttagcacctcaa

SEQ ID NO: 38152 - DNA, 25 bp, probe
agttgagtacctccttattcatgga

SEQ ID NO: 38153 - DNA, 25 bp, probe
ggataagagggattagggagagaag

SEQ ID NO: 38154 - DNA, 25 bp, probe
acaaccttgaccattacagaaattc

SEQ ID NO: 38155 - DNA, 25 bp, probe
gacaaccttgaccattacagaaatt

SEQ ID NO: 38156 - DNA, 25 bp, probe
acaatgtttctctttaccttagcac

SEQ ID NO: 38157 - DNA, 25 bp, probe
tgagtacctccttattcatggaaca

SEQ ID NO: 38158 - DNA, 25 bp, probe
taagagggattagggagagaagata

SEQ ID NO: 38159 - DNA, 25 bp, probe
gcacagcacaccaacatatatatac

SEQ ID NO: 38160 - DNA, 25 bp, probe
agcacagcacaccaacatatatata

SEQ ID NO: 38161 - DNA, 25 bp, probe
aagacaaccttgaccattacagaaa

SEQ ID NO: 38162 - DNA, 25 bp, probe
gctgctgaaacaacaaataggaatt

SEQ ID NO: 38163 - DNA, 25 bp, probe
aggataagagggattagggagagaa

SEQ ID NO: 38164 - DNA, 25 bp, probe
ttctaactggactggttcaaatgtt

SEQ ID NO: 38165 - DNA, 25 bp, probe
tttctaactggactggttcaaatgt

SEQ ID NO: 38166 - DNA, 25 bp, probe
cacagcacaccaacatatatatacc

SEQ ID NO: 38167 - DNA, 25 bp, probe
ttcaaacagtctcaggaaatcaaat

SEQ ID NO: 38168 - DNA, 25 bp, probe
attcaaacagtctcaggaaatcaaa

SEQ ID NO: 38169 - DNA, 25 bp, probe
ctggttcaaatgttgttctcttctt

SEQ ID NO: 38170 - DNA, 25 bp, probe
accattacagaaattcaacagtcat

SEQ ID NO: 38171 - DNA, 25 bp, probe
gatgaagaagcagatcggaagtaac

SEQ ID NO: 38172 - DNA, 25 bp, probe
atgaagaagcagatcggaagtaact

SEQ ID NO: 38173 - DNA, 25 bp, probe
tgatgaagaagcagatcggaagtaa

SEQ ID NO: 38174 - DNA, 25 bp, probe
ttgatgaagaagcagatcggaagta

SEQ ID NO: 38175 - DNA, 25 bp, probe
tatttacatccgtccttacaaccat

SEQ ID NO: 38176 - DNA, 25 bp, probe
tctatttacatccgtccttacaacc

SEQ ID NO: 38177 - DNA, 25 bp, probe
ctatttacatccgtccttacaacca

SEQ ID NO: 38178 - DNA, 25 bp, probe
gtctatttacatccgtccttacaac

SEQ ID NO: 38179 - DNA, 25 bp, probe
atttacatccgtccttacaaccatc

SEQ ID NO: 38180 - DNA, 25 bp, probe
tatatgggcttgctacttcctgtaa

SEQ ID NO: 38181 - DNA, 25 bp, probe
tacatccgtccttacaaccatcctt

SEQ ID NO: 38182 - DNA, 25 bp, probe
ttacatccgtccttacaaccatcct

SEQ ID NO: 38183 - DNA, 25 bp, probe
atatgggcttgctacttcctgtaat

SEQ ID NO: 38184 - DNA, 25 bp, probe
cttgatgaagaagcagatcggaagt

SEQ ID NO: 38185 - DNA, 25 bp, probe
ctgtctatttacatccgtccttaca

SEQ ID NO: 38186 - DNA, 25 bp, probe
actgtctatttacatccgtccttac

SEQ ID NO: 38187 - DNA, 25 bp, probe
cactgtctatttacatccgtcctta

SEQ ID NO: 38188 - DNA, 25 bp, probe
atatatgggcttgctacttcctgta

SEQ ID NO: 38189 - DNA, 25 bp, probe
tgtctatttacatccgtccttacaa

SEQ ID NO: 38190 - DNA, 25 bp, probe
tgaagaagcagatcggaagtaactg

SEQ ID NO: 38191 - DNA, 25 bp, probe
tatgggcttgctacttcctgtaatg

SEQ ID NO: 38192 - DNA, 25 bp, probe
tttacatccgtccttacaaccatcc

SEQ ID NO: 38193 - DNA, 25 bp, probe
aagacagccaatagcacccattaaa

SEQ ID NO: 38194 - DNA, 25 bp, probe
tatcaagctctttcccatgacattt

SEQ ID NO: 38195 - DNA, 25 bp, probe
ttgtttccctttcctttctccagtc

SEQ ID NO: 38196 - DNA, 25 bp, probe
cttgtttccctttcctttctccagt

SEQ ID NO: 38197 - DNA, 25 bp, probe
gtatcaagctctttcccatgacatt

SEQ ID NO: 38198 - DNA, 25 bp, probe
gaagacagccaatagcacccattaa

SEQ ID NO: 38199 - DNA, 25 bp, probe
taatgaggacgttcaacatggtgag

SEQ ID NO: 38200 - DNA, 25 bp, probe
gcactgtctatttacatccgtcctt

SEQ ID NO: 38201 - DNA, 25 bp, probe
gtaatgaggacgttcaacatggtga

SEQ ID NO: 38202 - DNA, 25 bp, probe
atcaagctctttcccatgacatttg

SEQ ID NO: 38203 - DNA, 25 bp, probe
taaataaaacctctctcccactcag

SEQ ID NO: 38204 - DNA, 25 bp, probe
ctaaataaaacctctctcccactca

SEQ ID NO: 38205 - DNA, 25 bp, probe
cctaaataaaacctctctcccactc

SEQ ID NO: 38206 - DNA, 25 bp, probe
tacctaaataaaacctctctcccac

SEQ ID NO: 38207 - DNA, 25 bp, probe
gccaatagcacccattaaaagaaat

SEQ ID NO: 38208 - DNA, 25 bp, probe
ctgtaatgaggacgttcaacatggt

SEQ ID NO: 38209 - DNA, 25 bp, probe
acctaaataaaacctctctcccact

SEQ ID NO: 38210 - DNA, 25 bp, probe
ccttgtttccctttcctttctccag

SEQ ID NO: 38211 - DNA, 25 bp, probe
agccaatagcacccattaaaagaaa

SEQ ID NO: 38212 - DNA, 25 bp, probe
tgtaatgaggacgttcaacatggtg

SEQ ID NO: 38213 - DNA, 25 bp, probe
atacctaaataaaacctctctccca

SEQ ID NO: 38214 - DNA, 25 bp, probe
gttttagcagtgcgtgttcatatat

SEQ ID NO: 38215 - DNA, 25 bp, probe
atgtgtgtgatggtatgtatggatt

SEQ ID NO: 38216 - DNA, 25 bp, probe
caccagtaacttaacgattcttcac

SEQ ID NO: 38217 - DNA, 25 bp, probe
aacttaacgattcttcacttcttgg

SEQ ID NO: 38218 - DNA, 25 bp, probe
ccaccagtaacttaacgattcttca

SEQ ID NO: 38219 - DNA, 25 bp, probe
ttcttatcctcaattcaatgtggtg

SEQ ID NO: 38220 - DNA, 25 bp, probe
gttcttatcctcaattcaatgtggt

SEQ ID NO: 38221 - DNA, 25 bp, probe
tgttcttatcctcaattcaatgtgg

SEQ ID NO: 38222 - DNA, 25 bp, probe
accagtaacttaacgattcttcact

SEQ ID NO: 38223 - DNA, 25 bp, probe
tatcctcaattcaatgtggtgatga

SEQ ID NO: 38224 - DNA, 25 bp, probe
tcttatcctcaattcaatgtggtga

SEQ ID NO: 38225 - DNA, 25 bp, probe
ttatcctcaattcaatgtggtgatg

SEQ ID NO: 38226 - DNA, 25 bp, probe
ccagtaacttaacgattcttcactt

SEQ ID NO: 38227 - DNA, 25 bp, probe
aatgccaccagtaacttaacgattc

SEQ ID NO: 38228 - DNA, 25 bp, probe
cttatcctcaattcaatgtggtgat

SEQ ID NO: 38229 - DNA, 25 bp, probe
tatggactggtaagtaactgtggtt

SEQ ID NO: 38230 - DNA, 25 bp, probe
ttatggactggtaagtaactgtggt

SEQ ID NO: 38231 - DNA, 25 bp, probe
gccaccagtaacttaacgattcttc

SEQ ID NO: 38232 - DNA, 25 bp, probe
aataacatcaggttccagttgcttg

SEQ ID NO: 38233 - DNA, 25 bp, probe
catgtgtgtgatggtatgtatggat

SEQ ID NO: 38234 - DNA, 25 bp, probe
atgccaccagtaacttaacgattct

SEQ ID NO: 38235 - DNA, 25 bp, probe
agtaacttaacgattcttcacttct

SEQ ID NO: 38236 - DNA, 25 bp, probe
cagtaacttaacgattcttcacttc

SEQ ID NO: 38237 - DNA, 25 bp, probe
tgccaccagtaacttaacgattctt

SEQ ID NO: 38238 - DNA, 25 bp, probe
atataagccataggttcacaccatt

SEQ ID NO: 38239 - DNA, 25 bp, probe
aatataagccataggttcacaccat

SEQ ID NO: 38240 - DNA, 25 bp, probe
ttgttcttatcctcaattcaatgtg

SEQ ID NO: 38241 - DNA, 25 bp, probe
taacttaacgattcttcacttcttg

SEQ ID NO: 38242 - DNA, 25 bp, probe
gtaacttaacgattcttcacttctt

SEQ ID NO: 38243 - DNA, 25 bp, probe
taatataagccataggttcacacca

SEQ ID NO: 38244 - DNA, 25 bp, probe
ttggtttgataaagcagtatttggg

SEQ ID NO: 38245 - DNA, 25 bp, probe
gttggttggtttgataaagcagtat

SEQ ID NO: 38246 - DNA, 25 bp, probe
tttgtttggttggttggtttgataa

SEQ ID NO: 38247 - DNA, 25 bp, probe
tgtgtgtgatggtatgtatggattt

SEQ ID NO: 38248 - DNA, 25 bp, probe
ttgtttggttggttggtttgataaa

SEQ ID NO: 38249 - DNA, 25 bp, probe
ataacatcaggttccagttgcttga

SEQ ID NO: 38250 - DNA, 25 bp, probe
tggttggtttgataaagcagtattt

SEQ ID NO: 38251 - DNA, 25 bp, probe
ttggttggtttgataaagcagtatt

SEQ ID NO: 38252 - DNA, 25 bp, probe
tgtttggttggttggtttgataaag

SEQ ID NO: 38253 - DNA, 25 bp, probe
agtaactttgtagaaatgagccaga

SEQ ID NO: 38254 - DNA, 25 bp, probe
gtaactttgtagaaatgagccagaa

SEQ ID NO: 38255 - DNA, 25 bp, probe
ttacaaatgggatataagaggcagc

SEQ ID NO: 38256 - DNA, 25 bp, probe
gttggtttgataaagcagtatttgg

SEQ ID NO: 38257 - DNA, 25 bp, probe
ggttggtttgataaagcagtatttg

SEQ ID NO: 38258 - DNA, 25 bp, probe
tcgccagacagattgctgataataa

SEQ ID NO: 38259 - DNA, 25 bp, probe
gtctctgcttacatctcctggataa

SEQ ID NO: 38260 - DNA, 25 bp, probe
ataaataatgtcatcgcctccaact

SEQ ID NO: 38261 - DNA, 25 bp, probe
gataaataatgtcatcgcctccaac

SEQ ID NO: 38262 - DNA, 25 bp, probe
ctctgcttacatctcctggataaat

SEQ ID NO: 38263 - DNA, 25 bp, probe
ggtctctgcttacatctcctggata

SEQ ID NO: 38264 - DNA, 25 bp, probe
taaataatgtcatcgcctccaactg

SEQ ID NO: 38265 - DNA, 25 bp, probe
tctcctggataaataatgtcatcgc

SEQ ID NO: 38266 - DNA, 25 bp, probe
tctctgcttacatctcctggataaa

SEQ ID NO: 38267 - DNA, 25 bp, probe
cctggataaataatgtcatcgcctc

SEQ ID NO: 38268 - DNA, 25 bp, probe
tctgcttacatctcctggataaata

SEQ ID NO: 38269 - DNA, 25 bp, probe
ctcctggataaataatgtcatcgcc

SEQ ID NO: 38270 - DNA, 25 bp, probe
tcctggataaataatgtcatcgcct

SEQ ID NO: 38271 - DNA, 25 bp, probe
atctcctggataaataatgtcatcg

SEQ ID NO: 38272 - DNA, 25 bp, probe
ctgcttacatctcctggataaataa

SEQ ID NO: 38273 - DNA, 25 bp, probe
ttggtgaatggcaagtattctctcc

SEQ ID NO: 38274 - DNA, 25 bp, probe
gaccataacctgagccagaatgatg

SEQ ID NO: 38275 - DNA, 25 bp, probe
agaccataacctgagccagaatgat

SEQ ID NO: 38276 - DNA, 25 bp, probe
ggataaataatgtcatcgcctccaa

SEQ ID NO: 38277 - DNA, 25 bp, probe
tgcttacatctcctggataaataat

SEQ ID NO: 38278 - DNA, 25 bp, probe
ctggataaataatgtcatcgcctcc

SEQ ID NO: 38279 - DNA, 25 bp, probe
taatgtctccaggaagcctacagtc

SEQ ID NO: 38280 - DNA, 25 bp, probe
aaataatgtcatcgcctccaactga

SEQ ID NO: 38281 - DNA, 25 bp, probe
gcttacatctcctggataaataatg

SEQ ID NO: 38282 - DNA, 25 bp, probe
gtaatgtctccaggaagcctacagt

SEQ ID NO: 38283 - DNA, 25 bp, probe
catctcctggataaataatgtcatc

SEQ ID NO: 38284 - DNA, 25 bp, probe
gagaccataacctgagccagaatga

SEQ ID NO: 38285 - DNA, 25 bp, probe
cttggtgaatggcaagtattctctc

SEQ ID NO: 38286 - DNA, 25 bp, probe
tggtgaatggcaagtattctctcca

SEQ ID NO: 38287 - DNA, 25 bp, probe
tgtaatgtctccaggaagcctacag

SEQ ID NO: 38288 - DNA, 25 bp, probe
ctgtaatgtctccaggaagcctaca

SEQ ID NO: 38289 - DNA, 25 bp, probe
ctaacaacagtccctgctacatcac

SEQ ID NO: 38290 - DNA, 25 bp, probe
aggtctctgcttacatctcctggat

SEQ ID NO: 38291 - DNA, 25 bp, probe
gtgaatggcaagtattctctccatg

SEQ ID NO: 38292 - DNA, 25 bp, probe
taacaacagtccctgctacatcaca

SEQ ID NO: 38293 - DNA, 25 bp, probe
ggagaccataacctgagccagaatg

SEQ ID NO: 38294 - DNA, 25 bp, probe
atgtctccaggaagcctacagtctt

SEQ ID NO: 38295 - DNA, 25 bp, probe
aatgtctccaggaagcctacagtct

SEQ ID NO: 38296 - DNA, 25 bp, probe
acatctcctggataaataatgtcat

SEQ ID NO: 38297 - DNA, 25 bp, probe
ggtgaatggcaagtattctctccat

SEQ ID NO: 38298 - DNA, 25 bp, probe
ctgcgtggattaccagaagactttc

SEQ ID NO: 38299 - DNA, 25 bp, probe
gcttggtgaatggcaagtattctct

SEQ ID NO: 38300 - DNA, 25 bp, probe
cactgcgtggattaccagaagactt

SEQ ID NO: 38301 - DNA, 25 bp, probe
tgcttggtgaatggcaagtattctc

SEQ ID NO: 38302 - DNA, 25 bp, probe
tacatctcctggataaataatgtca

SEQ ID NO: 38303 - DNA, 25 bp, probe
catctggcacaataaacattctctg

SEQ ID NO: 38304 - DNA, 25 bp, probe
gcatctggcacaataaacattctct

SEQ ID NO: 38305 - DNA, 25 bp, probe
agcatctggcacaataaacattctc

SEQ ID NO: 38306 - DNA, 25 bp, probe
atctggcacaataaacattctctgt

SEQ ID NO: 38307 - DNA, 25 bp, probe
tgtaaactggatcgactctatcatc

SEQ ID NO: 38308 - DNA, 25 bp, probe
tttgtaaactggatcgactctatca

SEQ ID NO: 38309 - DNA, 25 bp, probe
ttgtaaactggatcgactctatcat

SEQ ID NO: 38310 - DNA, 25 bp, probe
gtttgtaaactggatcgactctatc

SEQ ID NO: 38311 - DNA, 25 bp, probe
cagcatctggcacaataaacattct

SEQ ID NO: 38312 - DNA, 25 bp, probe
tctggcacaataaacattctctgtt

SEQ ID NO: 38313 - DNA, 25 bp, probe
agtttgtaaactggatcgactctat

SEQ ID NO: 38314 - DNA, 25 bp, probe
gatcgactctatcatccaacgctcc

SEQ ID NO: 38315 - DNA, 25 bp, probe
gtaaactggatcgactctatcatcc

SEQ ID NO: 38316 - DNA, 25 bp, probe
aacttgctcaacgacatcgtgattc

SEQ ID NO: 38317 - DNA, 25 bp, probe
taaacttgctcaacgacatcgtgat

SEQ ID NO: 38318 - DNA, 25 bp, probe
cttgctcaacgacatcgtgattctc

SEQ ID NO: 38319 - DNA, 25 bp, probe
aaacttgctcaacgacatcgtgatt

SEQ ID NO: 38320 - DNA, 25 bp, probe
acttgctcaacgacatcgtgattct

SEQ ID NO: 38321 - DNA, 25 bp, probe
gtaaacttgctcaacgacatcgtga

SEQ ID NO: 38322 - DNA, 25 bp, probe
ggatcgactctatcatccaacgctc

SEQ ID NO: 38323 - DNA, 25 bp, probe
ccagcatctggcacaataaacattc

SEQ ID NO: 38324 - DNA, 25 bp, probe
tccagcatctggcacaataaacatt

SEQ ID NO: 38325 - DNA, 25 bp, probe
cgtaaacttgctcaacgacatcgtg

SEQ ID NO: 38326 - DNA, 25 bp, probe
ctccagcatctggcacaataaacat

SEQ ID NO: 38327 - DNA, 25 bp, probe
ctctccagcatctggcacaataaac

SEQ ID NO: 38328 - DNA, 25 bp, probe
cactctccagcatctggcacaataa

SEQ ID NO: 38329 - DNA, 25 bp, probe
actctccagcatctggcacaataaa

SEQ ID NO: 38330 - DNA, 25 bp, probe
tctccagcatctggcacaataaaca

SEQ ID NO: 38331 - DNA, 25 bp, probe
tacgagaagaatacaagaggtggat

SEQ ID NO: 38332 - DNA, 25 bp, probe
tatacacaagactgacaacaagacg

SEQ ID NO: 38333 - DNA, 25 bp, probe
gtacgagaagaatacaagaggtgga

SEQ ID NO: 38334 - DNA, 25 bp, probe
aggtacgagaagaatacaagaggtg

SEQ ID NO: 38335 - DNA, 25 bp, probe
caggtacgagaagaatacaagaggt

SEQ ID NO: 38336 - DNA, 25 bp, probe
ctgtgatactgttcttgatggtcag

SEQ ID NO: 38337 - DNA, 25 bp, probe
cgagaagaatacaagaggtggatca

SEQ ID NO: 38338 - DNA, 25 bp, probe
acgagaagaatacaagaggtggatc

SEQ ID NO: 38339 - DNA, 25 bp, probe
tgtgatactgttcttgatggtcaga

SEQ ID NO: 38340 - DNA, 25 bp, probe
aatctcttctcagcttaacatggaa

SEQ ID NO: 38341 - DNA, 25 bp, probe
atgtaggcattatcatctccttggt

SEQ ID NO: 38342 - DNA, 25 bp, probe
cttcatcttcctcatccactgtctg

SEQ ID NO: 38343 - DNA, 25 bp, probe
gagaagaatacaagaggtggatcac

SEQ ID NO: 38344 - DNA, 25 bp, probe
gaagaatacaagaggtggatcactg

SEQ ID NO: 38345 - DNA, 25 bp, probe
agaagaatacaagaggtggatcact

SEQ ID NO: 38346 - DNA, 25 bp, probe
ccaggtacgagaagaatacaagagg

SEQ ID NO: 38347 - DNA, 25 bp, probe
ggtacgagaagaatacaagaggtgg

SEQ ID NO: 38348 - DNA, 25 bp, probe
catgtaggcattatcatctccttgg

SEQ ID NO: 38349 - DNA, 25 bp, probe
ccatgtaggcattatcatctccttg

SEQ ID NO: 38350 - DNA, 25 bp, probe
gtatacacaagactgacaacaagac

SEQ ID NO: 38351 - DNA, 25 bp, probe
ggtatacacaagactgacaacaaga

SEQ ID NO: 38352 - DNA, 25 bp, probe
atacacaagactgacaacaagacgg

SEQ ID NO: 38353 - DNA, 25 bp, probe
taggcattatcatctccttggtgtg

SEQ ID NO: 38354 - DNA, 25 bp, probe
gtaggcattatcatctccttggtgt

SEQ ID NO: 38355 - DNA, 25 bp, probe
tgtaggcattatcatctccttggtg

SEQ ID NO: 38356 - DNA, 25 bp, probe
aataaatgatttgtcgcctgtctga

SEQ ID NO: 38357 - DNA, 25 bp, probe
gaggctgtgatactgttcttgatgg

SEQ ID NO: 38358 - DNA, 25 bp, probe
ggaggctgtgatactgttcttgatg

SEQ ID NO: 38359 - DNA, 25 bp, probe
gcctttcttgctttcaaatatgcta

SEQ ID NO: 38360 - DNA, 25 bp, probe
tcttgctttcaaatatgctatggag

SEQ ID NO: 38361 - DNA, 25 bp, probe
gccaggtacgagaagaatacaagag

SEQ ID NO: 38362 - DNA, 25 bp, probe
gctgtgatactgttcttgatggtca

SEQ ID NO: 38363 - DNA, 25 bp, probe
gtgatactgttcttgatggtcagaa

SEQ ID NO: 38364 - DNA, 25 bp, probe
cattatcatctccttggtgtgcctc

SEQ ID NO: 38365 - DNA, 25 bp, probe
aacctctcaataaatgatttgtcgc

SEQ ID NO: 38366 - DNA, 25 bp, probe
ttcttgctttcaaatatgctatgga

SEQ ID NO: 38367 - DNA, 25 bp, probe
aagaatacaagaggtggatcactgg

SEQ ID NO: 38368 - DNA, 25 bp, probe
ctctcaataaatgatttgtcgcctg

SEQ ID NO: 38369 - DNA, 25 bp, probe
caataaatgatttgtcgcctgtctg

SEQ ID NO: 38370 - DNA, 25 bp, probe
agcttctgagacatataccatctgc

SEQ ID NO: 38371 - DNA, 25 bp, probe
ctcaataaatgatttgtcgcctgtc

SEQ ID NO: 38372 - DNA, 25 bp, probe
cggtatacacaagactgacaacaag

SEQ ID NO: 38373 - DNA, 25 bp, probe
tcaataaatgatttgtcgcctgtct

SEQ ID NO: 38374 - DNA, 25 bp, probe
tctcaataaatgatttgtcgcctgt

SEQ ID NO: 38375 - DNA, 25 bp, probe
atggaactacactcttgagcaatac

SEQ ID NO: 38376 - DNA, 25 bp, probe
tgtatggattagcatcagtgaagaa

SEQ ID NO: 38377 - DNA, 25 bp, probe
gtatggattagcatcagtgaagaac

SEQ ID NO: 38378 - DNA, 25 bp, probe
tatggattagcatcagtgaagaacg

SEQ ID NO: 38379 - DNA, 25 bp, probe
gaactacactcttgagcaataccag

SEQ ID NO: 38380 - DNA, 25 bp, probe
actacactcttgagcaataccagaa

SEQ ID NO: 38381 - DNA, 25 bp, probe
aactacactcttgagcaataccaga

SEQ ID NO: 38382 - DNA, 25 bp, probe
catggaactacactcttgagcaata

SEQ ID NO: 38383 - DNA, 25 bp, probe
ctgtatggattagcatcagtgaaga

SEQ ID NO: 38384 - DNA, 25 bp, probe
ctggaattggatacaactcaactgg

SEQ ID NO: 38385 - DNA, 25 bp, probe
cctggaattggatacaactcaactg

SEQ ID NO: 38386 - DNA, 25 bp, probe
ggaactacactcttgagcaatacca

SEQ ID NO: 38387 - DNA, 25 bp, probe
tggaactacactcttgagcaatacc

SEQ ID NO: 38388 - DNA, 25 bp, probe
acaacatagaaacaccatcagagaa

SEQ ID NO: 38389 - DNA, 25 bp, probe
aacaacatagaaacaccatcagaga

SEQ ID NO: 38390 - DNA, 25 bp, probe
aaacaacatagaaacaccatcagag

SEQ ID NO: 38391 - DNA, 25 bp, probe
caacatagaaacaccatcagagaat

SEQ ID NO: 38392 - DNA, 25 bp, probe
tcatggaactacactcttgagcaat

SEQ ID NO: 38393 - DNA, 25 bp, probe
tacttgagagtggttaatgtattca

SEQ ID NO: 38394 - DNA, 25 bp, probe
aacatagaaacaccatcagagaatg

SEQ ID NO: 38395 - DNA, 25 bp, probe
tttgtcaaggtatttggatttgctc

SEQ ID NO: 38396 - DNA, 25 bp, probe
ttcatggaactacactcttgagcaa

SEQ ID NO: 38397 - DNA, 25 bp, probe
ctacactcttgagcaataccagaaa

SEQ ID NO: 38398 - DNA, 25 bp, probe
gtcaaggtatttggatttgctcaag

SEQ ID NO: 38399 - DNA, 25 bp, probe
atacaactcaactgggactatctag

SEQ ID NO: 38400 - DNA, 25 bp, probe
atacactcaataacagaaaccttgg

SEQ ID NO: 38401 - DNA, 25 bp, probe
ttggatacaactcaactgggactat

SEQ ID NO: 38402 - DNA, 25 bp, probe
attggatacaactcaactgggacta

SEQ ID NO: 38403 - DNA, 25 bp, probe
tgtcaaggtatttggatttgctcaa

SEQ ID NO: 38404 - DNA, 25 bp, probe
ttgtcaaggtatttggatttgctca

SEQ ID NO: 38405 - DNA, 25 bp, probe
tacactcaataacagaaaccttggc

SEQ ID NO: 38406 - DNA, 25 bp, probe
gtcaacagatatacactcaataaca

SEQ ID NO: 38407 - DNA, 25 bp, probe
gcctggaattggatacaactcaact

SEQ ID NO: 38408 - DNA, 25 bp, probe
tacaactcaactgggactatctagt

SEQ ID NO: 38409 - DNA, 25 bp, probe
aactcaggatgtgtttacagtcatt

SEQ ID NO: 38410 - DNA, 25 bp, probe
aaggtatttggatttgctcaaggac

SEQ ID NO: 38411 - DNA, 25 bp, probe
caaggtatttggatttgctcaagga

SEQ ID NO: 38412 - DNA, 25 bp, probe
tcaaggtatttggatttgctcaagg

SEQ ID NO: 38413 - DNA, 25 bp, probe
actcaggatgtgtttacagtcattc

SEQ ID NO: 38414 - DNA, 25 bp, probe
gatacaactcaactgggactatcta

SEQ ID NO: 38415 - DNA, 25 bp, probe
cacaatagcagagccattcaacact

SEQ ID NO: 38416 - DNA, 25 bp, probe
tcacaatagcagagccattcaacac

SEQ ID NO: 38417 - DNA, 25 bp, probe
gtcacaatagcagagccattcaaca

SEQ ID NO: 38418 - DNA, 25 bp, probe
gctgtatggattagcatcagtgaag

SEQ ID NO: 38419 - DNA, 25 bp, probe
gaatcaatcatgtcagtctgcttag

SEQ ID NO: 38420 - DNA, 25 bp, probe
atcaatcatgtcagtctgcttagaa

SEQ ID NO: 38421 - DNA, 25 bp, probe
aatcaatcatgtcagtctgcttaga

SEQ ID NO: 38422 - DNA, 25 bp, probe
agaatcaatcatgtcagtctgctta

SEQ ID NO: 38423 - DNA, 25 bp, probe
taagaatcaatcatgtcagtctgct

SEQ ID NO: 38424 - DNA, 25 bp, probe
ttaagaatcaatcatgtcagtctgc

SEQ ID NO: 38425 - DNA, 25 bp, probe
aagaatcaatcatgtcagtctgctt

SEQ ID NO: 38426 - DNA, 25 bp, probe
tcaatcatgtcagtctgcttagaaa

SEQ ID NO: 38427 - DNA, 25 bp, probe
caatcatgtcagtctgcttagaaat

SEQ ID NO: 38428 - DNA, 25 bp, probe
atgtcagtctgcttagaaataacag

SEQ ID NO: 38429 - DNA, 25 bp, probe
tcatgtcagtctgcttagaaataac

SEQ ID NO: 38430 - DNA, 25 bp, probe
aacctcctaagtatcaagtatagaa

SEQ ID NO: 38431 - DNA, 25 bp, probe
catgtcagtctgcttagaaataaca

SEQ ID NO: 38432 - DNA, 25 bp, probe
ttgctcaatagattgctcaaatcag

SEQ ID NO: 38433 - DNA, 25 bp, probe
ctcaatagattgctcaaatcaggtt

SEQ ID NO: 38434 - DNA, 25 bp, probe
tcaatagattgctcaaatcaggttt

SEQ ID NO: 38435 - DNA, 25 bp, probe
atcatgtcagtctgcttagaaataa

SEQ ID NO: 38436 - DNA, 25 bp, probe
aatcatgtcagtctgcttagaaata

SEQ ID NO: 38437 - DNA, 25 bp, probe
tggaaattaggttgaaacatatctc

SEQ ID NO: 38438 - DNA, 25 bp, probe
gctcaatagattgctcaaatcaggt

SEQ ID NO: 38439 - DNA, 25 bp, probe
tgctcaatagattgctcaaatcagg

SEQ ID NO: 38440 - DNA, 25 bp, probe
ggaaattaggttgaaacatatctct

SEQ ID NO: 38441 - DNA, 25 bp, probe
tttaagaatcaatcatgtcagtctg

SEQ ID NO: 38442 - DNA, 25 bp, probe
tttgctcaatagattgctcaaatca

SEQ ID NO: 38443 - DNA, 25 bp, probe
ttggaaattaggttgaaacatatct

SEQ ID NO: 38444 - DNA, 25 bp, probe
taacctcctaagtatcaagtataga

SEQ ID NO: 38445 - DNA, 25 bp, probe
agaattgacattgaaatctaggaaa

SEQ ID NO: 38446 - DNA, 25 bp, probe
tgctcaaatcaggttttcttttaag

SEQ ID NO: 38447 - DNA, 25 bp, probe
atgttttgctcaatagattgctcaa

SEQ ID NO: 38448 - DNA, 25 bp, probe
aatgttttgctcaatagattgctca

SEQ ID NO: 38449 - DNA, 25 bp, probe
acctcctaagtatcaagtatagaaa

SEQ ID NO: 38450 - DNA, 25 bp, probe
ttgctcaaatcaggttttcttttaa

SEQ ID NO: 38451 - DNA, 25 bp, probe
aaatgttttgctcaatagattgctc

SEQ ID NO: 38452 - DNA, 25 bp, probe
attgctcaaatcaggttttctttta

SEQ ID NO: 38453 - DNA, 25 bp, probe
tttggaaattaggttgaaacatatc

SEQ ID NO: 38454 - DNA, 25 bp, probe
gctcaaatcaggttttcttttaaga

SEQ ID NO: 38455 - DNA, 25 bp, probe
gttgaaacatatctcttatcttacg

SEQ ID NO: 38456 - DNA, 25 bp, probe
agattgctcaaatcaggttttcttt

SEQ ID NO: 38457 - DNA, 25 bp, probe
tgtcagtctgcttagaaataacaga

SEQ ID NO: 38458 - DNA, 25 bp, probe
gattgctcaaatcaggttttctttt

SEQ ID NO: 38459 - DNA, 25 bp, probe
tagattgctcaaatcaggttttctt

SEQ ID NO: 38460 - DNA, 25 bp, probe
atagattgctcaaatcaggttttct

SEQ ID NO: 38461 - DNA, 25 bp, probe
tgaaacatatctcttatcttacgaa

SEQ ID NO: 38462 - DNA, 25 bp, probe
ttgaaacatatctcttatcttacga

SEQ ID NO: 38463 - DNA, 25 bp, probe
ctcctcacattgccagttatcattc

SEQ ID NO: 38464 - DNA, 25 bp, probe
cagttatcattcgtgtgactacagt

SEQ ID NO: 38465 - DNA, 25 bp, probe
agttatcattcgtgtgactacagta

SEQ ID NO: 38466 - DNA, 25 bp, probe
ccagttatcattcgtgtgactacag

SEQ ID NO: 38467 - DNA, 25 bp, probe
ttatcattcgtgtgactacagtacc

SEQ ID NO: 38468 - DNA, 25 bp, probe
gttatcattcgtgtgactacagtac

SEQ ID NO: 38469 - DNA, 25 bp, probe
tatcattcgtgtgactacagtacct

SEQ ID NO: 38470 - DNA, 25 bp, probe
ttaccatagtggacatcaacttgtt

SEQ ID NO: 38471 - DNA, 25 bp, probe
ttgccagttatcattcgtgtgacta

SEQ ID NO: 38472 - DNA, 25 bp, probe
taccatagtggacatcaacttgttc

SEQ ID NO: 38473 - DNA, 25 bp, probe
cacagtcagaatccgtgagttattg

SEQ ID NO: 38474 - DNA, 25 bp, probe
atagtggacatcaacttgttcggaa

SEQ ID NO: 38475 - DNA, 25 bp, probe
tttaggattacccactcatcagaaa

SEQ ID NO: 38476 - DNA, 25 bp, probe
ctaccaattctactttaccttctgc

SEQ ID NO: 38477 - DNA, 25 bp, probe
gctaccaattctactttaccttctg

SEQ ID NO: 38478 - DNA, 25 bp, probe
cattgccagttatcattcgtgtgac

SEQ ID NO: 38479 - DNA, 25 bp, probe
tcctcacattgccagttatcattcg

SEQ ID NO: 38480 - DNA, 25 bp, probe
ctgtatctgctggctatctcttcct

SEQ ID NO: 38481 - DNA, 25 bp, probe
tgccagttatcattcgtgtgactac

SEQ ID NO: 38482 - DNA, 25 bp, probe
attgccagttatcattcgtgtgact

SEQ ID NO: 38483 - DNA, 25 bp, probe
agtgacacagctaccaattctactt

SEQ ID NO: 38484 - DNA, 25 bp, probe
atcattcgtgtgactacagtacctg

SEQ ID NO: 38485 - DNA, 25 bp, probe
tagtggacatcaacttgttcggaag

SEQ ID NO: 38486 - DNA, 25 bp, probe
cctcacattgccagttatcattcgt

SEQ ID NO: 38487 - DNA, 25 bp, probe
gctcctcacattgccagttatcatt

SEQ ID NO: 38488 - DNA, 25 bp, probe
ccacagtcagaatccgtgagttatt

SEQ ID NO: 38489 - DNA, 25 bp, probe
ctcacattgccagttatcattcgtg

SEQ ID NO: 38490 - DNA, 25 bp, probe
gctatctcttcctggatatcatcac

SEQ ID NO: 38491 - DNA, 25 bp, probe
gccagttatcattcgtgtgactaca

SEQ ID NO: 38492 - DNA, 25 bp, probe
catagtggacatcaacttgttcgga

SEQ ID NO: 38493 - DNA, 25 bp, probe
tcctggatatcatcacttatctggt

SEQ ID NO: 38494 - DNA, 25 bp, probe
tgtatctgctggctatctcttcctg

SEQ ID NO: 38495 - DNA, 25 bp, probe
ttcctggatatcatcacttatctgg

SEQ ID NO: 38496 - DNA, 25 bp, probe
tctcttcctggatatcatcacttat

SEQ ID NO: 38497 - DNA, 25 bp, probe
atctcttcctggatatcatcactta

SEQ ID NO: 38498 - DNA, 25 bp, probe
acagtcagaatccgtgagttattgc

SEQ ID NO: 38499 - DNA, 25 bp, probe
gagcagacaagatggagacaaattc

SEQ ID NO: 38500 - DNA, 25 bp, probe
ggctatctcttcctggatatcatca

SEQ ID NO: 38501 - DNA, 25 bp, probe
tggctatctcttcctggatatcatc

SEQ ID NO: 38502 - DNA, 25 bp, probe
ctggctatctcttcctggatatcat

SEQ ID NO: 38503 - DNA, 25 bp, probe
acattgccagttatcattcgtgtga

SEQ ID NO: 38504 - DNA, 25 bp, probe
cctggatatcatcacttatctggta

SEQ ID NO: 38505 - DNA, 25 bp, probe
aacgaccctaaagagaggataaatg

SEQ ID NO: 38506 - DNA, 25 bp, probe
caacgaccctaaagagaggataaat

SEQ ID NO: 38507 - DNA, 25 bp, probe
caacctgaattaaagtctacactgc

SEQ ID NO: 38508 - DNA, 25 bp, probe
acctgtcaacctgaattaaagtcta

SEQ ID NO: 38509 - DNA, 25 bp, probe
cctgtcaacctgaattaaagtctac

SEQ ID NO: 38510 - DNA, 25 bp, probe
cctgaattaaagtctacactgcctt

SEQ ID NO: 38511 - DNA, 25 bp, probe
cacctgtcaacctgaattaaagtct

SEQ ID NO: 38512 - DNA, 25 bp, probe
aacctgaattaaagtctacactgcc

SEQ ID NO: 38513 - DNA, 25 bp, probe
tcaacctgaattaaagtctacactg

SEQ ID NO: 38514 - DNA, 25 bp, probe
gtcaacctgaattaaagtctacact

SEQ ID NO: 38515 - DNA, 25 bp, probe
tgtcaacctgaattaaagtctacac

SEQ ID NO: 38516 - DNA, 25 bp, probe
acctgaattaaagtctacactgcct

SEQ ID NO: 38517 - DNA, 25 bp, probe
ctgtcaacctgaattaaagtctaca

SEQ ID NO: 38518 - DNA, 25 bp, probe
ccacctgtcaacctgaattaaagtc

SEQ ID NO: 38519 - DNA, 25 bp, probe
cttggaagcaaatcctagttctctt

SEQ ID NO: 38520 - DNA, 25 bp, probe
ttcccacctgtcaacctgaattaaa

SEQ ID NO: 38521 - DNA, 25 bp, probe
ctgtcttgccatctttgtcttgttg

SEQ ID NO: 38522 - DNA, 25 bp, probe
caaatcctagttctcttcccacctg

SEQ ID NO: 38523 - DNA, 25 bp, probe
aagcaaatcctagttctcttcccac

SEQ ID NO: 38524 - DNA, 25 bp, probe
aattaaagtctacactgcctttgtg

SEQ ID NO: 38525 - DNA, 25 bp, probe
gaattaaagtctacactgcctttgt

SEQ ID NO: 38526 - DNA, 25 bp, probe
tgaattaaagtctacactgcctttg

SEQ ID NO: 38527 - DNA, 25 bp, probe
tcccacctgtcaacctgaattaaag

SEQ ID NO: 38528 - DNA, 25 bp, probe
cttcccacctgtcaacctgaattaa

SEQ ID NO: 38529 - DNA, 25 bp, probe
ctgaattaaagtctacactgccttt

SEQ ID NO: 38530 - DNA, 25 bp, probe
aaatcctagttctcttcccacctgt

SEQ ID NO: 38531 - DNA, 25 bp, probe
cccacctgtcaacctgaattaaagt

SEQ ID NO: 38532 - DNA, 25 bp, probe
ccttggaagcaaatcctagttctct

SEQ ID NO: 38533 - DNA, 25 bp, probe
aatcctagttctcttcccacctgtc

SEQ ID NO: 38534 - DNA, 25 bp, probe
cctgtcttgccatctttgtcttgtt

SEQ ID NO: 38535 - DNA, 25 bp, probe
tcttcccacctgtcaacctgaatta

SEQ ID NO: 38536 - DNA, 25 bp, probe
atctttgtcttgttgccattgggtt

SEQ ID NO: 38537 - DNA, 25 bp, probe
ctttgtcttgttgccattgggtttg

SEQ ID NO: 38538 - DNA, 25 bp, probe
ttggaagcaaatcctagttctcttc

SEQ ID NO: 38539 - DNA, 25 bp, probe
tctttgtcttgttgccattgggttt

SEQ ID NO: 38540 - DNA, 25 bp, probe
cccttggaagcaaatcctagttctc

SEQ ID NO: 38541 - DNA, 25 bp, probe
gtcttgttgccattgggtttgtttg

SEQ ID NO: 38542 - DNA, 25 bp, probe
gcaaatcctagttctcttcccacct

SEQ ID NO: 38543 - DNA, 25 bp, probe
agcaaatcctagttctcttcccacc

SEQ ID NO: 38544 - DNA, 25 bp, probe
ttgccatctttgtcttgttgccatt

SEQ ID NO: 38545 - DNA, 25 bp, probe
tagcctgtcttgccatctttgtctt

SEQ ID NO: 38546 - DNA, 25 bp, probe
ctgaaggatggtcttctcatctgga

SEQ ID NO: 38547 - DNA, 25 bp, probe
catctttgtcttgttgccattgggt

SEQ ID NO: 38548 - DNA, 25 bp, probe
atcctagttctcttcccacctgtca

SEQ ID NO: 38549 - DNA, 25 bp, probe
gaaggatggtcttctcatctggaca

SEQ ID NO: 38550 - DNA, 25 bp, probe
tgaaggatggtcttctcatctggac

SEQ ID NO: 38551 - DNA, 25 bp, probe
gcacttattaaccgtctgttgaata

SEQ ID NO: 38552 - DNA, 25 bp, probe
ctgtagcgactgatgttagttgtta

SEQ ID NO: 38553 - DNA, 25 bp, probe
tacattgacgagacacttactggtt

SEQ ID NO: 38554 - DNA, 25 bp, probe
tgtagcgactgatgttagttgttac

SEQ ID NO: 38555 - DNA, 25 bp, probe
aagtgtcattacattgttcaggcta

SEQ ID NO: 38556 - DNA, 25 bp, probe
ctacattgacgagacacttactggt

SEQ ID NO: 38557 - DNA, 25 bp, probe
gtagcgactgatgttagttgttacc

SEQ ID NO: 38558 - DNA, 25 bp, probe
agtgtcattacattgttcaggctac

SEQ ID NO: 38559 - DNA, 25 bp, probe
cacttattaaccgtctgttgaatac

SEQ ID NO: 38560 - DNA, 25 bp, probe
ttattaaccgtctgttgaatacaca

SEQ ID NO: 38561 - DNA, 25 bp, probe
acttattaaccgtctgttgaataca

SEQ ID NO: 38562 - DNA, 25 bp, probe
actgtagcgactgatgttagttgtt

SEQ ID NO: 38563 - DNA, 25 bp, probe
cttattaaccgtctgttgaatacac

SEQ ID NO: 38564 - DNA, 25 bp, probe
ttgacgagacacttactggtttaat

SEQ ID NO: 38565 - DNA, 25 bp, probe
attgacgagacacttactggtttaa

SEQ ID NO: 38566 - DNA, 25 bp, probe
gtgtcattacattgttcaggctacg

SEQ ID NO: 38567 - DNA, 25 bp, probe
cattgacgagacacttactggttta

SEQ ID NO: 38568 - DNA, 25 bp, probe
tgacgagacacttactggtttaatt

SEQ ID NO: 38569 - DNA, 25 bp, probe
acgagacacttactggtttaatttg

SEQ ID NO: 38570 - DNA, 25 bp, probe
cgagacacttactggtttaatttgc

SEQ ID NO: 38571 - DNA, 25 bp, probe
gacgagacacttactggtttaattt

SEQ ID NO: 38572 - DNA, 25 bp, probe
atcatctttccagcagcatacattt

SEQ ID NO: 38573 - DNA, 25 bp, probe
aagctacattgacgagacacttact

SEQ ID NO: 38574 - DNA, 25 bp, probe
tgcacttattaaccgtctgttgaat

SEQ ID NO: 38575 - DNA, 25 bp, probe
acctaaatcctcactttgacagaaa

SEQ ID NO: 38576 - DNA, 25 bp, probe
cactgtagcgactgatgttagttgt

SEQ ID NO: 38577 - DNA, 25 bp, probe
ttgcacttattaaccgtctgttgaa

SEQ ID NO: 38578 - DNA, 25 bp, probe
aatcctcactttgacagaaactcat

SEQ ID NO: 38579 - DNA, 25 bp, probe
cctaaatcctcactttgacagaaac

SEQ ID NO: 38580 - DNA, 25 bp, probe
attagacccttgatgctattcacat

SEQ ID NO: 38581 - DNA, 25 bp, probe
gattagacccttgatgctattcaca

SEQ ID NO: 38582 - DNA, 25 bp, probe
aaatcctcactttgacagaaactca

SEQ ID NO: 38583 - DNA, 25 bp, probe
gacactgtagcgactgatgttagtt

SEQ ID NO: 38584 - DNA, 25 bp, probe
gctacattgacgagacacttactgg

SEQ ID NO: 38585 - DNA, 25 bp, probe
tctcctagatgcttgtaattctaca

SEQ ID NO: 38586 - DNA, 25 bp, probe
cacctaaatcctcactttgacagaa

SEQ ID NO: 38587 - DNA, 25 bp, probe
ttctcctagatgcttgtaattctac

SEQ ID NO: 38588 - DNA, 25 bp, probe
taaatcctcactttgacagaaactc

SEQ ID NO: 38589 - DNA, 25 bp, probe
ctaaatcctcactttgacagaaact

SEQ ID NO: 38590 - DNA, 25 bp, probe
agctacattgacgagacacttactg

SEQ ID NO: 38591 - DNA, 25 bp, probe
acactgtagcgactgatgttagttg

SEQ ID NO: 38592 - DNA, 25 bp, probe
cgattagacccttgatgctattcac

SEQ ID NO: 38593 - DNA, 25 bp, probe
gactgatgttagttgttacccagat

SEQ ID NO: 38594 - DNA, 25 bp, probe
tgatgttagttgttacccagataaa

SEQ ID NO: 38595 - DNA, 25 bp, probe
accattctcaagagttacatcagat

SEQ ID NO: 38596 - DNA, 25 bp, probe
gagaagtcactgttactgtcctaag

SEQ ID NO: 38597 - DNA, 25 bp, probe
agattcattaagaccttctgacacc

SEQ ID NO: 38598 - DNA, 25 bp, probe
gaagtcactgttactgtcctaagtc

SEQ ID NO: 38599 - DNA, 25 bp, probe
taccattctcaagagttacatcaga

SEQ ID NO: 38600 - DNA, 25 bp, probe
agaagtcactgttactgtcctaagt

SEQ ID NO: 38601 - DNA, 25 bp, probe
ccgatccagattcattaagaccttc

SEQ ID NO: 38602 - DNA, 25 bp, probe
cgatccagattcattaagaccttct

SEQ ID NO: 38603 - DNA, 25 bp, probe
ataccattctcaagagttacatcag

SEQ ID NO: 38604 - DNA, 25 bp, probe
attctcaagagttacatcagatcct

SEQ ID NO: 38605 - DNA, 25 bp, probe
cattctcaagagttacatcagatcc

SEQ ID NO: 38606 - DNA, 25 bp, probe
ccattctcaagagttacatcagatc

SEQ ID NO: 38607 - DNA, 25 bp, probe
accgatccagattcattaagacctt

SEQ ID NO: 38608 - DNA, 25 bp, probe
ctcaagagttacatcagatcctcaa

SEQ ID NO: 38609 - DNA, 25 bp, probe
tctcaagagttacatcagatcctca

SEQ ID NO: 38610 - DNA, 25 bp, probe
ttctcaagagttacatcagatcctc

SEQ ID NO: 38611 - DNA, 25 bp, probe
agagttacatcagatcctcaatcaa

SEQ ID NO: 38612 - DNA, 25 bp, probe
aagagttacatcagatcctcaatca

SEQ ID NO: 38613 - DNA, 25 bp, probe
tcaagagttacatcagatcctcaat

SEQ ID NO: 38614 - DNA, 25 bp, probe
cgagaagtcactgttactgtcctaa

SEQ ID NO: 38615 - DNA, 25 bp, probe
caagagttacatcagatcctcaatc

SEQ ID NO: 38616 - DNA, 25 bp, probe
tcaagatgctccacataagatccaa

SEQ ID NO: 38617 - DNA, 25 bp, probe
aagtcactgttactgtcctaagtcg

SEQ ID NO: 38618 - DNA, 25 bp, probe
caccgatccagattcattaagacct

SEQ ID NO: 38619 - DNA, 25 bp, probe
ctaatatgctcgcaggttagagttg

SEQ ID NO: 38620 - DNA, 25 bp, probe
aggttagagttgggtgtaagtaaag

SEQ ID NO: 38621 - DNA, 25 bp, probe
caggttagagttgggtgtaagtaaa

SEQ ID NO: 38622 - DNA, 25 bp, probe
ttagagttgggtgtaagtaaagcag

SEQ ID NO: 38623 - DNA, 25 bp, probe
gttagagttgggtgtaagtaaagca

SEQ ID NO: 38624 - DNA, 25 bp, probe
gtcaagatgctccacataagatcca

SEQ ID NO: 38625 - DNA, 25 bp, probe
aattattggagggaaagaagtgtca

SEQ ID NO: 38626 - DNA, 25 bp, probe
ggaaattattggagggaaagaagtg

SEQ ID NO: 38627 - DNA, 25 bp, probe
tggaaattattggagggaaagaagt

SEQ ID NO: 38628 - DNA, 25 bp, probe
ccgcctcatacaaattaagttacaa

SEQ ID NO: 38629 - DNA, 25 bp, probe
tagagttgggtgtaagtaaagcaga

SEQ ID NO: 38630 - DNA, 25 bp, probe
acacatttcatctgggcttcttaaa

SEQ ID NO: 38631 - DNA, 25 bp, probe
aacacatttcatctgggcttcttaa

SEQ ID NO: 38632 - DNA, 25 bp, probe
aaattattggagggaaagaagtgtc

SEQ ID NO: 38633 - DNA, 25 bp, probe
gaaattattggagggaaagaagtgt

SEQ ID NO: 38634 - DNA, 25 bp, probe
tcccgcctcatacaaattaagttac

SEQ ID NO: 38635 - DNA, 25 bp, probe
gtcccgcctcatacaaattaagtta

SEQ ID NO: 38636 - DNA, 25 bp, probe
attattggagggaaagaagtgtcac

SEQ ID NO: 38637 - DNA, 25 bp, probe
ggttagagttgggtgtaagtaaagc

SEQ ID NO: 38638 - DNA, 25 bp, probe
tataccattctcaagagttacatca

SEQ ID NO: 38639 - DNA, 25 bp, probe
actctaggaagaagacaaatgacag

SEQ ID NO: 38640 - DNA, 25 bp, probe
ctctaggaagaagacaaatgacaga

SEQ ID NO: 38641 - DNA, 25 bp, probe
cactctaggaagaagacaaatgaca

SEQ ID NO: 38642 - DNA, 25 bp, probe
taggaagaagacaaatgacagattc

SEQ ID NO: 38643 - DNA, 25 bp, probe
tctaggaagaagacaaatgacagat

SEQ ID NO: 38644 - DNA, 25 bp, probe
tcactctaggaagaagacaaatgac

SEQ ID NO: 38645 - DNA, 25 bp, probe
ctaggaagaagacaaatgacagatt

SEQ ID NO: 38646 - DNA, 25 bp, probe
cataaactgtcactctaggaagaag

SEQ ID NO: 38647 - DNA, 25 bp, probe
ataaactgtcactctaggaagaaga

SEQ ID NO: 38648 - DNA, 25 bp, probe
gtcactctaggaagaagacaaatga

SEQ ID NO: 38649 - DNA, 25 bp, probe
taaactgtcactctaggaagaagac

SEQ ID NO: 38650 - DNA, 25 bp, probe
acataaactgtcactctaggaagaa

SEQ ID NO: 38651 - DNA, 25 bp, probe
tacataaactgtcactctaggaaga

SEQ ID NO: 38652 - DNA, 25 bp, probe
aaatacaggaagaaagagcttgagg

SEQ ID NO: 38653 - DNA, 25 bp, probe
gaagacaaatgacagattctgacat

SEQ ID NO: 38654 - DNA, 25 bp, probe
gtacataaactgtcactctaggaag

SEQ ID NO: 38655 - DNA, 25 bp, probe
gtaaatacaggaagaaagagcttga

SEQ ID NO: 38656 - DNA, 25 bp, probe
taaatacaggaagaaagagcttgag

SEQ ID NO: 38657 - DNA, 25 bp, probe
aatacaggaagaaagagcttgaggt

SEQ ID NO: 38658 - DNA, 25 bp, probe
tgtaaatacaggaagaaagagcttg

SEQ ID NO: 38659 - DNA, 25 bp, probe
aggaagaagacaaatgacagattct

SEQ ID NO: 38660 - DNA, 25 bp, probe
tcctggatttatagtatgtgacttt

SEQ ID NO: 38661 - DNA, 25 bp, probe
ttcctggatttatagtatgtgactt

SEQ ID NO: 38662 - DNA, 25 bp, probe
tttcctggatttatagtatgtgact

SEQ ID NO: 38663 - DNA, 25 bp, probe
atacaggaagaaagagcttgaggtg

SEQ ID NO: 38664 - DNA, 25 bp, probe
agaagacaaatgacagattctgaca

SEQ ID NO: 38665 - DNA, 25 bp, probe
ggaagaagacaaatgacagattctg

SEQ ID NO: 38666 - DNA, 25 bp, probe
aagacaaatgacagattctgacatt

SEQ ID NO: 38667 - DNA, 25 bp, probe
aagaagacaaatgacagattctgac

SEQ ID NO: 38668 - DNA, 25 bp, probe
gaagaagacaaatgacagattctga

SEQ ID NO: 38669 - DNA, 25 bp, probe
aactgtcactctaggaagaagacaa

SEQ ID NO: 38670 - DNA, 25 bp, probe
aataagcccagtgctgctgtaaata

SEQ ID NO: 38671 - DNA, 25 bp, probe
taaataagcccagtgctgctgtaaa

SEQ ID NO: 38672 - DNA, 25 bp, probe
tgtacataaactgtcactctaggaa

SEQ ID NO: 38673 - DNA, 25 bp, probe
ataagcccagtgctgctgtaaatac

SEQ ID NO: 38674 - DNA, 25 bp, probe
ctctcttcctaccctccttccacat

SEQ ID NO: 38675 - DNA, 25 bp, probe
aaataagcccagtgctgctgtaaat

SEQ ID NO: 38676 - DNA, 25 bp, probe
gtaaataagcccagtgctgctgtaa

SEQ ID NO: 38677 - DNA, 25 bp, probe
ctgtcactctaggaagaagacaaat

SEQ ID NO: 38678 - DNA, 25 bp, probe
tgtcactctaggaagaagacaaatg

SEQ ID NO: 38679 - DNA, 25 bp, probe
tacaggaagaaagagcttgaggtgg

SEQ ID NO: 38680 - DNA, 25 bp, probe
atggtgaaggaagttgtccgaacag

SEQ ID NO: 38681 - DNA, 25 bp, probe
cagaatgactccaccttctcacctg

SEQ ID NO: 38682 - DNA, 25 bp, probe
actgtcactctaggaagaagacaaa

SEQ ID NO: 38683 - DNA, 25 bp, probe
cccatgtaaatattgttctgctgtc

SEQ ID NO: 38684 - DNA, 25 bp, probe
atgtaaatattgttctgctgtctgg

SEQ ID NO: 38685 - DNA, 25 bp, probe
ccatgtaaatattgttctgctgtct

SEQ ID NO: 38686 - DNA, 25 bp, probe
gtaaatattgttctgctgtctggga

SEQ ID NO: 38687 - DNA, 25 bp, probe
tgtaaatattgttctgctgtctggg

SEQ ID NO: 38688 - DNA, 25 bp, probe
cctgatgatgggatgctctttaaat

SEQ ID NO: 38689 - DNA, 25 bp, probe
catgtaaatattgttctgctgtctg

SEQ ID NO: 38690 - DNA, 25 bp, probe
ctgatgatgggatgctctttaaata

SEQ ID NO: 38691 - DNA, 25 bp, probe
tgacttctatggaaaccagatcaag

SEQ ID NO: 38692 - DNA, 25 bp, probe
ctgacttctatggaaaccagatcaa

SEQ ID NO: 38693 - DNA, 25 bp, probe
tgatgatgggatgctctttaaataa

SEQ ID NO: 38694 - DNA, 25 bp, probe
taaatattgttctgctgtctgggac

SEQ ID NO: 38695 - DNA, 25 bp, probe
gacttctatggaaaccagatcaagc

SEQ ID NO: 38696 - DNA, 25 bp, probe
ataatcagcaatgatgtctgcaatg

SEQ ID NO: 38697 - DNA, 25 bp, probe
cataatcagcaatgatgtctgcaat

SEQ ID NO: 38698 - DNA, 25 bp, probe
aaatattgttctgctgtctgggact

SEQ ID NO: 38699 - DNA, 25 bp, probe
gctgacttctatggaaaccagatca

SEQ ID NO: 38700 - DNA, 25 bp, probe
taatcagcaatgatgtctgcaatgg

SEQ ID NO: 38701 - DNA, 25 bp, probe
ccataatcagcaatgatgtctgcaa

SEQ ID NO: 38702 - DNA, 25 bp, probe
gatgatgggatgctctttaaataat

SEQ ID NO: 38703 - DNA, 25 bp, probe
acttctatggaaaccagatcaagcc

SEQ ID NO: 38704 - DNA, 25 bp, probe
aatattgttctgctgtctgggactc

SEQ ID NO: 38705 - DNA, 25 bp, probe
aaaccagatcaagcccaagatgttc

SEQ ID NO: 38706 - DNA, 25 bp, probe
gaaaccagatcaagcccaagatgtt

SEQ ID NO: 38707 - DNA, 25 bp, probe
ccccatgtaaatattgttctgctgt

SEQ ID NO: 38708 - DNA, 25 bp, probe
cttctatggaaaccagatcaagccc

SEQ ID NO: 38709 - DNA, 25 bp, probe
cgctgacttctatggaaaccagatc

SEQ ID NO: 38710 - DNA, 25 bp, probe
ctatggaaaccagatcaagcccaag

SEQ ID NO: 38711 - DNA, 25 bp, probe
tgatgggatgctctttaaataataa

SEQ ID NO: 38712 - DNA, 25 bp, probe
aaccagatcaagcccaagatgttct

SEQ ID NO: 38713 - DNA, 25 bp, probe
atattgttctgctgtctgggactcc

SEQ ID NO: 38714 - DNA, 25 bp, probe
tatggaaaccagatcaagcccaaga

SEQ ID NO: 38715 - DNA, 25 bp, probe
tctatggaaaccagatcaagcccaa

SEQ ID NO: 38716 - DNA, 25 bp, probe
ttctatggaaaccagatcaagccca

SEQ ID NO: 38717 - DNA, 25 bp, probe
atgatgggatgctctttaaataata

SEQ ID NO: 38718 - DNA, 25 bp, probe
ccctgatgatgggatgctctttaaa

SEQ ID NO: 38719 - DNA, 25 bp, probe
ccataaagactcactccgaagccag

SEQ ID NO: 38720 - DNA, 25 bp, probe
tttgtgtgtgaggacagcatctctc

SEQ ID NO: 38721 - DNA, 25 bp, probe
ctttgtgtgtgaggacagcatctct

SEQ ID NO: 38722 - DNA, 25 bp, probe
atggaaaccagatcaagcccaagat

SEQ ID NO: 38723 - DNA, 25 bp, probe
ggaaaccagatcaagcccaagatgt

SEQ ID NO: 38724 - DNA, 25 bp, probe
gatgggatgctctttaaataataaa

SEQ ID NO: 38725 - DNA, 25 bp, probe
tattgttctgctgtctgggactcct

SEQ ID NO: 38726 - DNA, 25 bp, probe
tccccataatcagcaatgatgtctg

SEQ ID NO: 38727 - DNA, 25 bp, probe
gtgataatgctccaagtctatgaac

SEQ ID NO: 38728 - DNA, 25 bp, probe
agtgataatgctccaagtctatgaa

SEQ ID NO: 38729 - DNA, 25 bp, probe
tagtgataatgctccaagtctatga

SEQ ID NO: 38730 - DNA, 25 bp, probe
tcctagtgataatgctccaagtcta

SEQ ID NO: 38731 - DNA, 25 bp, probe
cctagtgataatgctccaagtctat

SEQ ID NO: 38732 - DNA, 25 bp, probe
atgctccaagtctatgaactgttaa

SEQ ID NO: 38733 - DNA, 25 bp, probe
aatgctccaagtctatgaactgtta

SEQ ID NO: 38734 - DNA, 25 bp, probe
taatgctccaagtctatgaactgtt

SEQ ID NO: 38735 - DNA, 25 bp, probe
ataatgctccaagtctatgaactgt

SEQ ID NO: 38736 - DNA, 25 bp, probe
tgataatgctccaagtctatgaact

SEQ ID NO: 38737 - DNA, 25 bp, probe
gataatgctccaagtctatgaactg

SEQ ID NO: 38738 - DNA, 25 bp, probe
ctcctagtgataatgctccaagtct

SEQ ID NO: 38739 - DNA, 25 bp, probe
ctagtgataatgctccaagtctatg

SEQ ID NO: 38740 - DNA, 25 bp, probe
tctcctagtgataatgctccaagtc

SEQ ID NO: 38741 - DNA, 25 bp, probe
gtctcctagtgataatgctccaagt

SEQ ID NO: 38742 - DNA, 25 bp, probe
ttcttcatctgaaccaacatgctac

SEQ ID NO: 38743 - DNA, 25 bp, probe
cgtctcctagtgataatgctccaag

SEQ ID NO: 38744 - DNA, 25 bp, probe
catctgaaccaacatgctacagtag

SEQ ID NO: 38745 - DNA, 25 bp, probe
tcttcatctgaaccaacatgctaca

SEQ ID NO: 38746 - DNA, 25 bp, probe
tcatctgaaccaacatgctacagta

SEQ ID NO: 38747 - DNA, 25 bp, probe
tgctccaagtctatgaactgttaaa

SEQ ID NO: 38748 - DNA, 25 bp, probe
cttcatctgaaccaacatgctacag

SEQ ID NO: 38749 - DNA, 25 bp, probe
gctccaagtctatgaactgttaaat

SEQ ID NO: 38750 - DNA, 25 bp, probe
tttcttcatctgaaccaacatgcta

SEQ ID NO: 38751 - DNA, 25 bp, probe
ttcatctgaaccaacatgctacagt

SEQ ID NO: 38752 - DNA, 25 bp, probe
atcagtgtcatctcctgggtaaatt

SEQ ID NO: 38753 - DNA, 25 bp, probe
aatcagtgtcatctcctgggtaaat

SEQ ID NO: 38754 - DNA, 25 bp, probe
aagtctatgaactgttaaatcagca

SEQ ID NO: 38755 - DNA, 25 bp, probe
tccaagtctatgaactgttaaatca

SEQ ID NO: 38756 - DNA, 25 bp, probe
ccgtctcctagtgataatgctccaa

SEQ ID NO: 38757 - DNA, 25 bp, probe
agtctatgaactgttaaatcagcat

SEQ ID NO: 38758 - DNA, 25 bp, probe
caagtctatgaactgttaaatcagc

SEQ ID NO: 38759 - DNA, 25 bp, probe
ctccgtctcctagtgataatgctcc

SEQ ID NO: 38760 - DNA, 25 bp, probe
cctccgtctcctagtgataatgctc

SEQ ID NO: 38761 - DNA, 25 bp, probe
ctatgcaatgttcaggataaatcga

SEQ ID NO: 38762 - DNA, 25 bp, probe
tctatgcaatgttcaggataaatcg

SEQ ID NO: 38763 - DNA, 25 bp, probe
ctccaagtctatgaactgttaaatc

SEQ ID NO: 38764 - DNA, 25 bp, probe
caatcagtgtcatctcctgggtaaa

SEQ ID NO: 38765 - DNA, 25 bp, probe
gtctatgaactgttaaatcagcatt

SEQ ID NO: 38766 - DNA, 25 bp, probe
ccaagtctatgaactgttaaatcag

SEQ ID NO: 38767 - DNA, 25 bp, probe
ctcatactttagcttgtgaagaaga

SEQ ID NO: 38768 - DNA, 25 bp, probe
actttctatgcaatgttcaggataa

SEQ ID NO: 38769 - DNA, 25 bp, probe
gttattcttctgaaagagccacatt

SEQ ID NO: 38770 - DNA, 25 bp, probe
tgttattcttctgaaagagccacat

SEQ ID NO: 38771 - DNA, 25 bp, probe
cttcttcatcgtcatcatcattgtg

SEQ ID NO: 38772 - DNA, 25 bp, probe
tcttcttcatcgtcatcatcattgt

SEQ ID NO: 38773 - DNA, 25 bp, probe
tgttcttcttcatcgtcatcatcat

SEQ ID NO: 38774 - DNA, 25 bp, probe
ttcttcttcatcgtcatcatcattg

SEQ ID NO: 38775 - DNA, 25 bp, probe
gttcttcttcatcgtcatcatcatt

SEQ ID NO: 38776 - DNA, 25 bp, probe
ctgttcttcttcatcgtcatcatca

SEQ ID NO: 38777 - DNA, 25 bp, probe
cctgttcttcttcatcgtcatcatc

SEQ ID NO: 38778 - DNA, 25 bp, probe
gtggaactacttgtacttcattgtg

SEQ ID NO: 38779 - DNA, 25 bp, probe
tgtggaactacttgtacttcattgt

SEQ ID NO: 38780 - DNA, 25 bp, probe
gaactacttgtacttcattgtgctg

SEQ ID NO: 38781 - DNA, 25 bp, probe
tcctgttcttcttcatcgtcatcat

SEQ ID NO: 38782 - DNA, 25 bp, probe
aactacttgtacttcattgtgctgg

SEQ ID NO: 38783 - DNA, 25 bp, probe
ttcttcatcgtcatcatcattgtgc

SEQ ID NO: 38784 - DNA, 25 bp, probe
ggaactacttgtacttcattgtgct

SEQ ID NO: 38785 - DNA, 25 bp, probe
atgtggaactacttgtacttcattg

SEQ ID NO: 38786 - DNA, 25 bp, probe
gcctgagaactaatatgttaattgc

SEQ ID NO: 38787 - DNA, 25 bp, probe
tggaactacttgtacttcattgtgc

SEQ ID NO: 38788 - DNA, 25 bp, probe
ctacttgtacttcattgtgctggtc

SEQ ID NO: 38789 - DNA, 25 bp, probe
catgtggaactacttgtacttcatt

SEQ ID NO: 38790 - DNA, 25 bp, probe
ctcctgttcttcttcatcgtcatca

SEQ ID NO: 38791 - DNA, 25 bp, probe
cttcatcgtcatcatcattgtgctg

SEQ ID NO: 38792 - DNA, 25 bp, probe
gtctatgacctcctgttcttcttca

SEQ ID NO: 38793 - DNA, 25 bp, probe
cctgagaactaatatgttaattgcc

SEQ ID NO: 38794 - DNA, 25 bp, probe
gagaagcagaagaaggaggagattc

SEQ ID NO: 38795 - DNA, 25 bp, probe
tcttcatcgtcatcatcattgtgct

SEQ ID NO: 38796 - DNA, 25 bp, probe
actacttgtacttcattgtgctggt

SEQ ID NO: 38797 - DNA, 25 bp, probe
catcatcattgtgctgaacctcatc

SEQ ID NO: 38798 - DNA, 25 bp, probe
atcatcattgtgctgaacctcatct

SEQ ID NO: 38799 - DNA, 25 bp, probe
tcatcattgtgctgaacctcatctt

SEQ ID NO: 38800 - DNA, 25 bp, probe
ggactcagtttaccttaatgcctta

SEQ ID NO: 38801 - DNA, 25 bp, probe
tgagaagcagaagaaggaggagatt

SEQ ID NO: 38802 - DNA, 25 bp, probe
tcatcatcattgtgctgaacctcat

SEQ ID NO: 38803 - DNA, 25 bp, probe
cctcctgttcttcttcatcgtcatc

SEQ ID NO: 38804 - DNA, 25 bp, probe
ccttaaagcaataactgacaactct

SEQ ID NO: 38805 - DNA, 25 bp, probe
tccttaaagcaataactgacaactc

SEQ ID NO: 38806 - DNA, 25 bp, probe
tttaacttatttcaagggtgctgtg

SEQ ID NO: 38807 - DNA, 25 bp, probe
actcagtttaccttaatgccttagc

SEQ ID NO: 38808 - DNA, 25 bp, probe
gactcagtttaccttaatgccttag

SEQ ID NO: 38809 - DNA, 25 bp, probe
tagtgagaagcagaagaaggaggag

SEQ ID NO: 38810 - DNA, 25 bp, probe
ccttagcagaagataaatcctacct

SEQ ID NO: 38811 - DNA, 25 bp, probe
gccttagcagaagataaatcctacc

SEQ ID NO: 38812 - DNA, 25 bp, probe
ttccttaaagcaataactgacaact

SEQ ID NO: 38813 - DNA, 25 bp, probe
aaatcctacctagagacctttgttc

SEQ ID NO: 38814 - DNA, 25 bp, probe
atttaacttatttcaagggtgctgt

SEQ ID NO: 38815 - DNA, 25 bp, probe
gagatggaagaaggagttaaggaat

SEQ ID NO: 38816 - DNA, 25 bp, probe
tagagatggaagaaggagttaagga

SEQ ID NO: 38817 - DNA, 25 bp, probe
agatggaagaaggagttaaggaatc

SEQ ID NO: 38818 - DNA, 25 bp, probe
agagatggaagaaggagttaaggaa

SEQ ID NO: 38819 - DNA, 25 bp, probe
ggtcatcttaatctccattgtcatc

SEQ ID NO: 38820 - DNA, 25 bp, probe
gatggaagaaggagttaaggaatct

SEQ ID NO: 38821 - DNA, 25 bp, probe
ctagagatggaagaaggagttaagg

SEQ ID NO: 38822 - DNA, 25 bp, probe
aagaaggagttaaggaatctctgtg

SEQ ID NO: 38823 - DNA, 25 bp, probe
atggaagaaggagttaaggaatctc

SEQ ID NO: 38824 - DNA, 25 bp, probe
gaagaaggagttaaggaatctctgt

SEQ ID NO: 38825 - DNA, 25 bp, probe
ggaagaaggagttaaggaatctctg

SEQ ID NO: 38826 - DNA, 25 bp, probe
gtcatcttaatctccattgtcatct

SEQ ID NO: 38827 - DNA, 25 bp, probe
tggaagaaggagttaaggaatctct

SEQ ID NO: 38828 - DNA, 25 bp, probe
gaaggagttaaggaatctctgtgtg

SEQ ID NO: 38829 - DNA, 25 bp, probe
agaaggagttaaggaatctctgtgt

SEQ ID NO: 38830 - DNA, 25 bp, probe
ccttctgatcttcttcctcttcatt

SEQ ID NO: 38831 - DNA, 25 bp, probe
ttctgatcttcttcctcttcattgg

SEQ ID NO: 38832 - DNA, 25 bp, probe
cttctgatcttcttcctcttcattg

SEQ ID NO: 38833 - DNA, 25 bp, probe
tgaggaggtgaagttctatcagttg

SEQ ID NO: 38834 - DNA, 25 bp, probe
tcatcttaatctccattgtcatctt

SEQ ID NO: 38835 - DNA, 25 bp, probe
tggtcatcttaatctccattgtcat

SEQ ID NO: 38836 - DNA, 25 bp, probe
ctggtcatcttaatctccattgtca

SEQ ID NO: 38837 - DNA, 25 bp, probe
ctgtggagactgatgtgtgaatctt

SEQ ID NO: 38838 - DNA, 25 bp, probe
gaggaggtgaagttctatcagttgg

SEQ ID NO: 38839 - DNA, 25 bp, probe
cctggtcatcttaatctccattgtc

SEQ ID NO: 38840 - DNA, 25 bp, probe
gtcctggtcatcttaatctccattg

SEQ ID NO: 38841 - DNA, 25 bp, probe
gaacatcattgacattgtctccatt

SEQ ID NO: 38842 - DNA, 25 bp, probe
tgaacatcattgacattgtctccat

SEQ ID NO: 38843 - DNA, 25 bp, probe
tcctggtcatcttaatctccattgt

SEQ ID NO: 38844 - DNA, 25 bp, probe
gccttctgatcttcttcctcttcat

SEQ ID NO: 38845 - DNA, 25 bp, probe
atgaacctactacccatttccaaag

SEQ ID NO: 38846 - DNA, 25 bp, probe
gatgaacctactacccatttccaaa

SEQ ID NO: 38847 - DNA, 25 bp, probe
aaggagttaaggaatctctgtgtgc

SEQ ID NO: 38848 - DNA, 25 bp, probe
cagatttggctcctctttgaatatc

SEQ ID NO: 38849 - DNA, 25 bp, probe
agatttggctcctctttgaatatcc

SEQ ID NO: 38850 - DNA, 25 bp, probe
cagtgccagtgattgtctctaactt

SEQ ID NO: 38851 - DNA, 25 bp, probe
gccagtgattgtctctaactttaac

SEQ ID NO: 38852 - DNA, 25 bp, probe
tgccagtgattgtctctaactttaa

SEQ ID NO: 38853 - DNA, 25 bp, probe
atggtgggttgttgaatgatacttc

SEQ ID NO: 38854 - DNA, 25 bp, probe
gtgccagtgattgtctctaacttta

SEQ ID NO: 38855 - DNA, 25 bp, probe
gcagatttggctcctctttgaatat

SEQ ID NO: 38856 - DNA, 25 bp, probe
cgtcctggtcatcttaatctccatt

SEQ ID NO: 38857 - DNA, 25 bp, probe
actatttctaccacagagagactga

SEQ ID NO: 38858 - DNA, 25 bp, probe
aacctactacccatttccaaagcat

SEQ ID NO: 38859 - DNA, 25 bp, probe
aactgtgatgtactgttctgagatc

SEQ ID NO: 38860 - DNA, 25 bp, probe
tttgcctttgataaactgtgatgta

SEQ ID NO: 38861 - DNA, 25 bp, probe
gttctgaaactgaaaggactgttaa

SEQ ID NO: 38862 - DNA, 25 bp, probe
tctatgctttcagactctttgatga

SEQ ID NO: 38863 - DNA, 25 bp, probe
gcctttgataaactgtgatgtactg

SEQ ID NO: 38864 - DNA, 25 bp, probe
ttgcctttgataaactgtgatgtac

SEQ ID NO: 38865 - DNA, 25 bp, probe
gatcttgccataactttacagggta

SEQ ID NO: 38866 - DNA, 25 bp, probe
tgcctttgataaactgtgatgtact

SEQ ID NO: 38867 - DNA, 25 bp, probe
aatgtgtgaatcttagtcatggatt

SEQ ID NO: 38868 - DNA, 25 bp, probe
ctatgctttcagactctttgatgat

SEQ ID NO: 38869 - DNA, 25 bp, probe
atctatgctttcagactctttgatg

SEQ ID NO: 38870 - DNA, 25 bp, probe
aaactgtgatgtactgttctgagat

SEQ ID NO: 38871 - DNA, 25 bp, probe
cctttgataaactgtgatgtactgt

SEQ ID NO: 38872 - DNA, 25 bp, probe
gtttctcagtaacattgccatttgt

SEQ ID NO: 38873 - DNA, 25 bp, probe
taaactgtgatgtactgttctgaga

SEQ ID NO: 38874 - DNA, 25 bp, probe
tgctttcagactctttgatgataat

SEQ ID NO: 38875 - DNA, 25 bp, probe
atgctttcagactctttgatgataa

SEQ ID NO: 38876 - DNA, 25 bp, probe
tgataaactgtgatgtactgttctg

SEQ ID NO: 38877 - DNA, 25 bp, probe
ctgtgatgtactgttctgagatctt

SEQ ID NO: 38878 - DNA, 25 bp, probe
cctcagtttacccacccattaaatg

SEQ ID NO: 38879 - DNA, 25 bp, probe
ataaactgtgatgtactgttctgag

SEQ ID NO: 38880 - DNA, 25 bp, probe
gataaactgtgatgtactgttctga

SEQ ID NO: 38881 - DNA, 25 bp, probe
caaatgtgtgaatcttagtcatgga

SEQ ID NO: 38882 - DNA, 25 bp, probe
gcaaatgtgtgaatcttagtcatgg

SEQ ID NO: 38883 - DNA, 25 bp, probe
caacttacgagaggacagccttatg

SEQ ID NO: 38884 - DNA, 25 bp, probe
ataactttacagggtaacttgggtc

SEQ ID NO: 38885 - DNA, 25 bp, probe
atcttgccataactttacagggtaa

SEQ ID NO: 38886 - DNA, 25 bp, probe
ttgccataactttacagggtaactt

SEQ ID NO: 38887 - DNA, 25 bp, probe
cataactttacagggtaacttgggt

SEQ ID NO: 38888 - DNA, 25 bp, probe
actgtgatgtactgttctgagatct

SEQ ID NO: 38889 - DNA, 25 bp, probe
atctcgatcttgccataactttaca

SEQ ID NO: 38890 - DNA, 25 bp, probe
aacttacgagaggacagccttatga

SEQ ID NO: 38891 - DNA, 25 bp, probe
cttgccataactttacagggtaact

SEQ ID NO: 38892 - DNA, 25 bp, probe
tcttgccataactttacagggtaac

SEQ ID NO: 38893 - DNA, 25 bp, probe
tctaaatctcgatcttgccataact

SEQ ID NO: 38894 - DNA, 25 bp, probe
ctctaaatctcgatcttgccataac

SEQ ID NO: 38895 - DNA, 25 bp, probe
tctcgatcttgccataactttacag

SEQ ID NO: 38896 - DNA, 25 bp, probe
ttgataaactgtgatgtactgttct

SEQ ID NO: 38897 - DNA, 25 bp, probe
tgccataactttacagggtaacttg

SEQ ID NO: 38898 - DNA, 25 bp, probe
aatctcgatcttgccataactttac

SEQ ID NO: 38899 - DNA, 25 bp, probe
gctctaaatctcgatcttgccataa

SEQ ID NO: 38900 - DNA, 25 bp, probe
tatgctttcagactctttgatgata

SEQ ID NO: 38901 - DNA, 25 bp, probe
ctaaatctcgatcttgccataactt

SEQ ID NO: 38902 - DNA, 25 bp, probe
aaatgtgtgaatcttagtcatggat

SEQ ID NO: 38903 - DNA, 25 bp, probe
ctcggacaccagagacaataactga

SEQ ID NO: 38904 - DNA, 25 bp, probe
gacagtgacatcttgttcggaagtg

SEQ ID NO: 38905 - DNA, 25 bp, probe
ctcctcggacaccagagacaataac

SEQ ID NO: 38906 - DNA, 25 bp, probe
aggacagtgacatcttgttcggaag

SEQ ID NO: 38907 - DNA, 25 bp, probe
cctcggacaccagagacaataactg

SEQ ID NO: 38908 - DNA, 25 bp, probe
tcctcggacaccagagacaataact

SEQ ID NO: 38909 - DNA, 25 bp, probe
ggacagtgacatcttgttcggaagt

SEQ ID NO: 38910 - DNA, 25 bp, probe
caggacagtgacatcttgttcggaa

SEQ ID NO: 38911 - DNA, 25 bp, probe
ctctacgtcatcgagaacgagatgg

SEQ ID NO: 38912 - DNA, 25 bp, probe
gttcctcatcaaaaccaagtcgcag

SEQ ID NO: 38913 - DNA, 25 bp, probe
cagttcctcatcaaaaccaagtcgc

SEQ ID NO: 38914 - DNA, 25 bp, probe
gcagttcctcatcaaaaccaagtcg

SEQ ID NO: 38915 - DNA, 25 bp, probe
cgcagttcctcatcaaaaccaagtc

SEQ ID NO: 38916 - DNA, 25 bp, probe
gtcccaggacagtgacatcttgttc

SEQ ID NO: 38917 - DNA, 25 bp, probe
gctctacgtcatcgagaacgagatg

SEQ ID NO: 38918 - DNA, 25 bp, probe
agttcctcatcaaaaccaagtcgca

SEQ ID NO: 38919 - DNA, 25 bp, probe
attaacttccagaagatcctctcag

SEQ ID NO: 38920 - DNA, 25 bp, probe
ttaacttccagaagatcctctcagt

SEQ ID NO: 38921 - DNA, 25 bp, probe
taacttccagaagatcctctcagtc

SEQ ID NO: 38922 - DNA, 25 bp, probe
aagtcagagacagatacctacaacc

SEQ ID NO: 38923 - DNA, 25 bp, probe
tattaacttccagaagatcctctca

SEQ ID NO: 38924 - DNA, 25 bp, probe
actcaggatattaacttccagaaga

SEQ ID NO: 38925 - DNA, 25 bp, probe
aacttccagaagatcctctcagtct

SEQ ID NO: 38926 - DNA, 25 bp, probe
atattaacttccagaagatcctctc

SEQ ID NO: 38927 - DNA, 25 bp, probe
gatattaacttccagaagatcctct

SEQ ID NO: 38928 - DNA, 25 bp, probe
acttccagaagatcctctcagtctc

SEQ ID NO: 38929 - DNA, 25 bp, probe
aaagtcagagacagatacctacaac

SEQ ID NO: 38930 - DNA, 25 bp, probe
cagaagatcctctcagtctcctcag

SEQ ID NO: 38931 - DNA, 25 bp, probe
tcaggatattaacttccagaagatc

SEQ ID NO: 38932 - DNA, 25 bp, probe
ctcaggatattaacttccagaagat

SEQ ID NO: 38933 - DNA, 25 bp, probe
gatactcaggatattaacttccaga

SEQ ID NO: 38934 - DNA, 25 bp, probe
agatactcaggatattaacttccag

SEQ ID NO: 38935 - DNA, 25 bp, probe
gagatactcaggatattaacttcca

SEQ ID NO: 38936 - DNA, 25 bp, probe
cttccagaagatcctctcagtctcc

SEQ ID NO: 38937 - DNA, 25 bp, probe
tactcaggatattaacttccagaag

SEQ ID NO: 38938 - DNA, 25 bp, probe
ctcaggagttgtttgaaatatcgag

SEQ ID NO: 38939 - DNA, 25 bp, probe
tcaggagttgtttgaaatatcgagg

SEQ ID NO: 38940 - DNA, 25 bp, probe
cctcaggagttgtttgaaatatcga

SEQ ID NO: 38941 - DNA, 25 bp, probe
ttccagaagatcctctcagtctcct

SEQ ID NO: 38942 - DNA, 25 bp, probe
atactcaggatattaacttccagaa

SEQ ID NO: 38943 - DNA, 25 bp, probe
tcctcaggagttgtttgaaatatcg

SEQ ID NO: 38944 - DNA, 25 bp, probe
caggagttgtttgaaatatcgaggc

SEQ ID NO: 38945 - DNA, 25 bp, probe
caggatattaacttccagaagatcc

SEQ ID NO: 38946 - DNA, 25 bp, probe
ccttaaacgccaaaatgaccaatat

SEQ ID NO: 38947 - DNA, 25 bp, probe
tccagaagatcctctcagtctcctc

SEQ ID NO: 38948 - DNA, 25 bp, probe
ggatattaacttccagaagatcctc

SEQ ID NO: 38949 - DNA, 25 bp, probe
ccagaagatcctctcagtctcctca

SEQ ID NO: 38950 - DNA, 25 bp, probe
gaagaagacagactcgtgtgacagt

SEQ ID NO: 38951 - DNA, 25 bp, probe
tgaagaagacagactcgtgtgacag

SEQ ID NO: 38952 - DNA, 25 bp, probe
ctgaagaagacagactcgtgtgaca

SEQ ID NO: 38953 - DNA, 25 bp, probe
actgaagaagacagactcgtgtgac

SEQ ID NO: 38954 - DNA, 25 bp, probe
agaagatcctctcagtctcctcagg

SEQ ID NO: 38955 - DNA, 25 bp, probe
cactgaagaagacagactcgtgtga

SEQ ID NO: 38956 - DNA, 25 bp, probe
ccccagaatcagagagagacatttt

SEQ ID NO: 38957 - DNA, 25 bp, probe
aagaagacagactcgtgtgacagtg

SEQ ID NO: 38958 - DNA, 25 bp, probe
aaaagtcagagacagatacctacaa

SEQ ID NO: 38959 - DNA, 25 bp, probe
gaagagtgaggactggaacaaggtg

SEQ ID NO: 38960 - DNA, 25 bp, probe
cttaaacgccaaaatgaccaatatt

SEQ ID NO: 38961 - DNA, 25 bp, probe
tccccagaatcagagagagacattt

SEQ ID NO: 38962 - DNA, 25 bp, probe
gccttaaacgccaaaatgaccaata

SEQ ID NO: 38963 - DNA, 25 bp, probe
cctctctcagttattcagattgaca

SEQ ID NO: 38964 - DNA, 25 bp, probe
tctcagttattcagattgacaaggt

SEQ ID NO: 38965 - DNA, 25 bp, probe
ctctcagttattcagattgacaagg

SEQ ID NO: 38966 - DNA, 25 bp, probe
cagattgacaaggtagacatggatt

SEQ ID NO: 38967 - DNA, 25 bp, probe
gttattcagattgacaaggtagaca

SEQ ID NO: 38968 - DNA, 25 bp, probe
tattcattcagtgagacacagagtg

SEQ ID NO: 38969 - DNA, 25 bp, probe
ttattcattcagtgagacacagagt

SEQ ID NO: 38970 - DNA, 25 bp, probe
agttattcagattgacaaggtagac

SEQ ID NO: 38971 - DNA, 25 bp, probe
cagttattcagattgacaaggtaga

SEQ ID NO: 38972 - DNA, 25 bp, probe
tcagttattcagattgacaaggtag

SEQ ID NO: 38973 - DNA, 25 bp, probe
ctcagttattcagattgacaaggta

SEQ ID NO: 38974 - DNA, 25 bp, probe
tctctcagttattcagattgacaag

SEQ ID NO: 38975 - DNA, 25 bp, probe
ctctctcagttattcagattgacaa

SEQ ID NO: 38976 - DNA, 25 bp, probe
attcagattgacaaggtagacatgg

SEQ ID NO: 38977 - DNA, 25 bp, probe
tcagattgacaaggtagacatggat

SEQ ID NO: 38978 - DNA, 25 bp, probe
ttcagattgacaaggtagacatgga

SEQ ID NO: 38979 - DNA, 25 bp, probe
ttattcagattgacaaggtagacat

SEQ ID NO: 38980 - DNA, 25 bp, probe
tattcagattgacaaggtagacatg

SEQ ID NO: 38981 - DNA, 25 bp, probe
ggtttctggtgcctatttattcatt

SEQ ID NO: 38982 - DNA, 25 bp, probe
agttacttacctgcatgtgttgtac

SEQ ID NO: 38983 - DNA, 25 bp, probe
ccaattcatttcatctactacaggg

SEQ ID NO: 38984 - DNA, 25 bp, probe
cccaattcatttcatctactacagg

SEQ ID NO: 38985 - DNA, 25 bp, probe
tttctggtgcctatttattcattca

SEQ ID NO: 38986 - DNA, 25 bp, probe
gtttctggtgcctatttattcattc

SEQ ID NO: 38987 - DNA, 25 bp, probe
ttcatttcatctactacagggtgag

SEQ ID NO: 38988 - DNA, 25 bp, probe
ggtgcctatttattcattcagtgag

SEQ ID NO: 38989 - DNA, 25 bp, probe
tggtgcctatttattcattcagtga

SEQ ID NO: 38990 - DNA, 25 bp, probe
ccctctctcagttattcagattgac

SEQ ID NO: 38991 - DNA, 25 bp, probe
aattcatttcatctactacagggtg

SEQ ID NO: 38992 - DNA, 25 bp, probe
caattcatttcatctactacagggt

SEQ ID NO: 38993 - DNA, 25 bp, probe
attcatttcatctactacagggtga

SEQ ID NO: 38994 - DNA, 25 bp, probe
ctctcttgctttgttctttatttgt

SEQ ID NO: 38995 - DNA, 25 bp, probe
agattgacaaggtagacatggattt

SEQ ID NO: 38996 - DNA, 25 bp, probe
attcattcagtgagacacagagtgg

SEQ ID NO: 38997 - DNA, 25 bp, probe
gcctatttattcattcagtgagaca

SEQ ID NO: 38998 - DNA, 25 bp, probe
tgcctatttattcattcagtgagac

SEQ ID NO: 38999 - DNA, 25 bp, probe
gtgcctatttattcattcagtgaga

SEQ ID NO: 39000 - DNA, 25 bp, probe
tcccaattcatttcatctactacag

SEQ ID NO: 39001 - DNA, 25 bp, probe
tcatttcatctactacagggtgagg

SEQ ID NO: 39002 - DNA, 25 bp, probe
ggtagacatggatttgatgaaagtg

SEQ ID NO: 39003 - DNA, 25 bp, probe
aggtagacatggatttgatgaaagt

SEQ ID NO: 39004 - DNA, 25 bp, probe
tctctcttgctttgttctttatttg

SEQ ID NO: 39005 - DNA, 25 bp, probe
gtctctcttgctttgttctttattt

SEQ ID NO: 39006 - DNA, 25 bp, probe
cagttacttacctgcatgtgttgta

SEQ ID NO: 39007 - DNA, 25 bp, probe
cataggaggagaatacttgaagcag

SEQ ID NO: 39008 - DNA, 25 bp, probe
tacataggaggagaatacttgaagc

SEQ ID NO: 39009 - DNA, 25 bp, probe
agcaggatgtctaatatgtgaggaa

SEQ ID NO: 39010 - DNA, 25 bp, probe
acataggaggagaatacttgaagca

SEQ ID NO: 39011 - DNA, 25 bp, probe
cagcaggatgtctaatatgtgagga

SEQ ID NO: 39012 - DNA, 25 bp, probe
ataggaggagaatacttgaagcagt

SEQ ID NO: 39013 - DNA, 25 bp, probe
cgaccttacataggaggagaatact

SEQ ID NO: 39014 - DNA, 25 bp, probe
accttacataggaggagaatacttg

SEQ ID NO: 39015 - DNA, 25 bp, probe
ccagcaggatgtctaatatgtgagg

SEQ ID NO: 39016 - DNA, 25 bp, probe
ccttacataggaggagaatacttga

SEQ ID NO: 39017 - DNA, 25 bp, probe
gaccttacataggaggagaatactt

SEQ ID NO: 39018 - DNA, 25 bp, probe
taggaggagaatacttgaagcagta

SEQ ID NO: 39019 - DNA, 25 bp, probe
cttacataggaggagaatacttgaa

SEQ ID NO: 39020 - DNA, 25 bp, probe
atcatctactccgtcattggcattc

SEQ ID NO: 39021 - DNA, 25 bp, probe
ttacataggaggagaatacttgaag

SEQ ID NO: 39022 - DNA, 25 bp, probe
gcaggatgtctaatatgtgaggaaa

SEQ ID NO: 39023 - DNA, 25 bp, probe
catcatctactccgtcattggcatt

SEQ ID NO: 39024 - DNA, 25 bp, probe
actaaagaatccagagttgctacaa

SEQ ID NO: 39025 - DNA, 25 bp, probe
attatctcgaccttacataggagga

SEQ ID NO: 39026 - DNA, 25 bp, probe
ctatgtgaagaaggacaaggacgag

SEQ ID NO: 39027 - DNA, 25 bp, probe
atgttctatgtgaagaaggacaagg

SEQ ID NO: 39028 - DNA, 25 bp, probe
ctcgaccttacataggaggagaata

SEQ ID NO: 39029 - DNA, 25 bp, probe
ttatctcgaccttacataggaggag

SEQ ID NO: 39030 - DNA, 25 bp, probe
aataggtttatgtgtactggtttgc

SEQ ID NO: 39031 - DNA, 25 bp, probe
tactaaagaatccagagttgctaca

SEQ ID NO: 39032 - DNA, 25 bp, probe
ttggagaatctaagtcaaactcact

SEQ ID NO: 39033 - DNA, 25 bp, probe
tcgaccttacataggaggagaatac

SEQ ID NO: 39034 - DNA, 25 bp, probe
aggaagaggcttaagtatgttcatt

SEQ ID NO: 39035 - DNA, 25 bp, probe
aaggaagaggcttaagtatgttcat

SEQ ID NO: 39036 - DNA, 25 bp, probe
ctaaagaatccagagttgctacaat

SEQ ID NO: 39037 - DNA, 25 bp, probe
aattatctcgaccttacataggagg

SEQ ID NO: 39038 - DNA, 25 bp, probe
caaggaagaggcttaagtatgttca

SEQ ID NO: 39039 - DNA, 25 bp, probe
aatgttctatgtgaagaaggacaag

SEQ ID NO: 39040 - DNA, 25 bp, probe
ggatgtctaatatgtgaggaaatga

SEQ ID NO: 39041 - DNA, 25 bp, probe
gttctatgtgaagaaggacaaggac

SEQ ID NO: 39042 - DNA, 25 bp, probe
aggatgtctaatatgtgaggaaatg

SEQ ID NO: 39043 - DNA, 25 bp, probe
caggatgtctaatatgtgaggaaat

SEQ ID NO: 39044 - DNA, 25 bp, probe
tgttctatgtgaagaaggacaagga

SEQ ID NO: 39045 - DNA, 25 bp, probe
tggagaatctaagtcaaactcacta

SEQ ID NO: 39046 - DNA, 25 bp, probe
tctatgtgaagaaggacaaggacga

SEQ ID NO: 39047 - DNA, 25 bp, probe
aagaatccagagttgctacaataaa

SEQ ID NO: 39048 - DNA, 25 bp, probe
aaagaatccagagttgctacaataa

SEQ ID NO: 39049 - DNA, 25 bp, probe
cttattgccatgttggtagttctgg

SEQ ID NO: 39050 - DNA, 25 bp, probe
ccttattgccatgttggtagttctg

SEQ ID NO: 39051 - DNA, 25 bp, probe
tatgtatgatagtgtgcatgtggtt

SEQ ID NO: 39052 - DNA, 25 bp, probe
atatgtatgatagtgtgcatgtggt

SEQ ID NO: 39053 - DNA, 25 bp, probe
atgtatgatagtgtgcatgtggttg

SEQ ID NO: 39054 - DNA, 25 bp, probe
catatgtatgatagtgtgcatgtgg

SEQ ID NO: 39055 - DNA, 25 bp, probe
gtatgatagtgtgcatgtggttgtc

SEQ ID NO: 39056 - DNA, 25 bp, probe
gacggacctgatcttctgcttaatg

SEQ ID NO: 39057 - DNA, 25 bp, probe
tatgatagtgtgcatgtggttgtca

SEQ ID NO: 39058 - DNA, 25 bp, probe
tgtatgatagtgtgcatgtggttgt

SEQ ID NO: 39059 - DNA, 25 bp, probe
gtgaaactgtatctgccactcattt

SEQ ID NO: 39060 - DNA, 25 bp, probe
gcatatgtatgatagtgtgcatgtg

SEQ ID NO: 39061 - DNA, 25 bp, probe
gaagagcggctttgatatgtgtatc

SEQ ID NO: 39062 - DNA, 25 bp, probe
aaactgtatctgccactcatttccc

SEQ ID NO: 39063 - DNA, 25 bp, probe
tgatagtgtgcatgtggttgtcatt

SEQ ID NO: 39064 - DNA, 25 bp, probe
cacaaagaggtatgtcatcaccaac

SEQ ID NO: 39065 - DNA, 25 bp, probe
tgaaactgtatctgccactcatttc

SEQ ID NO: 39066 - DNA, 25 bp, probe
tgtgaaactgtatctgccactcatt

SEQ ID NO: 39067 - DNA, 25 bp, probe
ggaagagcggctttgatatgtgtat

SEQ ID NO: 39068 - DNA, 25 bp, probe
ttatttcaccaccataaaacccttg

SEQ ID NO: 39069 - DNA, 25 bp, probe
gatagtgtgcatgtggttgtcattt

SEQ ID NO: 39070 - DNA, 25 bp, probe
gaaactgtatctgccactcatttcc

SEQ ID NO: 39071 - DNA, 25 bp, probe
cttgagcacaacagcaaataagcag

SEQ ID NO: 39072 - DNA, 25 bp, probe
atatgctttgttttggaatttaccg

SEQ ID NO: 39073 - DNA, 25 bp, probe
tatttcaccaccataaaacccttga

SEQ ID NO: 39074 - DNA, 25 bp, probe
aagagcggctttgatatgtgtatcc

SEQ ID NO: 39075 - DNA, 25 bp, probe
gtttccaacaaagtaactttccctg

SEQ ID NO: 39076 - DNA, 25 bp, probe
gtgtgaaactgtatctgccactcat

SEQ ID NO: 39077 - DNA, 25 bp, probe
cgacggacctgatcttctgcttaat

SEQ ID NO: 39078 - DNA, 25 bp, probe
acaaagaggtatgtcatcaccaacc

SEQ ID NO: 39079 - DNA, 25 bp, probe
tttccaacaaagtaactttccctgt

SEQ ID NO: 39080 - DNA, 25 bp, probe
aacccttgagcacaacagcaaataa

SEQ ID NO: 39081 - DNA, 25 bp, probe
aaacccttgagcacaacagcaaata

SEQ ID NO: 39082 - DNA, 25 bp, probe
atttcaccaccataaaacccttgag

SEQ ID NO: 39083 - DNA, 25 bp, probe
atgatagtgtgcatgtggttgtcat

SEQ ID NO: 39084 - DNA, 25 bp, probe
catgctccagacataaatagctcac

SEQ ID NO: 39085 - DNA, 25 bp, probe
atgctccagacataaatagctcact

SEQ ID NO: 39086 - DNA, 25 bp, probe
taactttccctgttttcccctgtag

SEQ ID NO: 39087 - DNA, 25 bp, probe
acccttgagcacaacagcaaataag

SEQ ID NO: 39088 - DNA, 25 bp, probe
gcacaaagaggtatgtcatcaccaa

SEQ ID NO: 39089 - DNA, 25 bp, probe
aggaagagcggctttgatatgtgta

SEQ ID NO: 39090 - DNA, 25 bp, probe
ctgtgtgaaactgtatctgccactc

SEQ ID NO: 39091 - DNA, 25 bp, probe
gtaactttccctgttttcccctgta

SEQ ID NO: 39092 - DNA, 25 bp, probe
acggacctgatcttctgcttaatgc

SEQ ID NO: 39093 - DNA, 25 bp, probe
caaagaggtatgtcatcaccaaccc

SEQ ID NO: 39094 - DNA, 25 bp, probe
ggcccaaagttatttatgattctgg

SEQ ID NO: 39095 - DNA, 25 bp, probe
gcctctgctcttatctttgtaataa

SEQ ID NO: 39096 - DNA, 25 bp, probe
aacactctcactatgctgctatgga

SEQ ID NO: 39097 - DNA, 25 bp, probe
tataccaaagagatgaaggagtccg

SEQ ID NO: 39098 - DNA, 25 bp, probe
gttctacaaacatactcgcaggaag

SEQ ID NO: 39099 - DNA, 25 bp, probe
tacaagaagcctggatgttctacaa

SEQ ID NO: 39100 - DNA, 25 bp, probe
caagatgcacatgatcctgtatgac

SEQ ID NO: 39101 - DNA, 25 bp, probe
ctacaagaagcctggatgttctaca

SEQ ID NO: 39102 - DNA, 25 bp, probe
aaacactctcactatgctgctatgg

SEQ ID NO: 39103 - DNA, 25 bp, probe
ttctacaaacatactcgcaggaagg

SEQ ID NO: 39104 - DNA, 25 bp, probe
acactctcactatgctgctatggac

SEQ ID NO: 39105 - DNA, 25 bp, probe
ctccaagatgcacatgatcctgtat

SEQ ID NO: 39106 - DNA, 25 bp, probe
gtataccaaagagatgaaggagtcc

SEQ ID NO: 39107 - DNA, 25 bp, probe
ccagtataccaaagagatgaaggag

SEQ ID NO: 39108 - DNA, 25 bp, probe
cagtataccaaagagatgaaggagt

SEQ ID NO: 39109 - DNA, 25 bp, probe
atccagtataccaaagagatgaagg

SEQ ID NO: 39110 - DNA, 25 bp, probe
agtataccaaagagatgaaggagtc

SEQ ID NO: 39111 - DNA, 25 bp, probe
aagatgcacatgatcctgtatgacc

SEQ ID NO: 39112 - DNA, 25 bp, probe
ccaagatgcacatgatcctgtatga

SEQ ID NO: 39113 - DNA, 25 bp, probe
tccaagatgcacatgatcctgtatg

SEQ ID NO: 39114 - DNA, 25 bp, probe
tctacaaacatactcgcaggaagga

SEQ ID NO: 39115 - DNA, 25 bp, probe
cagcctctgctcttatctttgtaat

SEQ ID NO: 39116 - DNA, 25 bp, probe
agcctctgctcttatctttgtaata

SEQ ID NO: 39117 - DNA, 25 bp, probe
ctacaaacatactcgcaggaaggag

SEQ ID NO: 39118 - DNA, 25 bp, probe
gctacaagaagcctggatgttctac

SEQ ID NO: 39119 - DNA, 25 bp, probe
aaaacactctcactatgctgctatg

SEQ ID NO: 39120 - DNA, 25 bp, probe
gaagaagtgtaactcaccagcctct

SEQ ID NO: 39121 - DNA, 25 bp, probe
ctctcactatgctgctatggacgac

SEQ ID NO: 39122 - DNA, 25 bp, probe
gatgcacatgatcctgtatgacctg

SEQ ID NO: 39123 - DNA, 25 bp, probe
tctccaagatgcacatgatcctgta

SEQ ID NO: 39124 - DNA, 25 bp, probe
cctctgctcttatctttgtaataaa

SEQ ID NO: 39125 - DNA, 25 bp, probe
tccagtataccaaagagatgaagga

SEQ ID NO: 39126 - DNA, 25 bp, probe
agatgcacatgatcctgtatgacct

SEQ ID NO: 39127 - DNA, 25 bp, probe
tgctacaagaagcctggatgttcta

SEQ ID NO: 39128 - DNA, 25 bp, probe
atcacattcctgaccatcggctatg

SEQ ID NO: 39129 - DNA, 25 bp, probe
catcacattcctgaccatcggctat

SEQ ID NO: 39130 - DNA, 25 bp, probe
aagaagtgtaactcaccagcctctg

SEQ ID NO: 39131 - DNA, 25 bp, probe
cactctcactatgctgctatggacg

SEQ ID NO: 39132 - DNA, 25 bp, probe
caagaagcctggatgttctacaaac

SEQ ID NO: 39133 - DNA, 25 bp, probe
taactcaccagcctctgctcttatc

SEQ ID NO: 39134 - DNA, 25 bp, probe
actctcactatgctgctatggacga

SEQ ID NO: 39135 - DNA, 25 bp, probe
ccagcctctgctcttatctttgtaa

SEQ ID NO: 39136 - DNA, 25 bp, probe
acaagaagcctggatgttctacaaa

SEQ ID NO: 39137 - DNA, 25 bp, probe
tatccagtataccaaagagatgaag

SEQ ID NO: 39138 - DNA, 25 bp, probe
ggagtttaacaaggcagagaagcac

SEQ ID NO: 39139 - DNA, 25 bp, probe
tgatatactggcttctgacttatgg

SEQ ID NO: 39140 - DNA, 25 bp, probe
actctgatatactggcttctgactt

SEQ ID NO: 39141 - DNA, 25 bp, probe
ctctgatatactggcttctgactta

SEQ ID NO: 39142 - DNA, 25 bp, probe
ctgatatactggcttctgacttatg

SEQ ID NO: 39143 - DNA, 25 bp, probe
tctgatatactggcttctgacttat

SEQ ID NO: 39144 - DNA, 25 bp, probe
cactctgatatactggcttctgact

SEQ ID NO: 39145 - DNA, 25 bp, probe
aatagatcaaccaattcctacagcc

SEQ ID NO: 39146 - DNA, 25 bp, probe
gtaggttcttcactcactcactcaa

SEQ ID NO: 39147 - DNA, 25 bp, probe
ttgtaggttcttcactcactcactc

SEQ ID NO: 39148 - DNA, 25 bp, probe
cttgtaggttcttcactcactcact

SEQ ID NO: 39149 - DNA, 25 bp, probe
taggttcttcactcactcactcaac

SEQ ID NO: 39150 - DNA, 25 bp, probe
tattccttgtaggttcttcactcac

SEQ ID NO: 39151 - DNA, 25 bp, probe
atattccttgtaggttcttcactca

SEQ ID NO: 39152 - DNA, 25 bp, probe
attccttgtaggttcttcactcact

SEQ ID NO: 39153 - DNA, 25 bp, probe
ctagtctcaagagatacagtggtgg

SEQ ID NO: 39154 - DNA, 25 bp, probe
ttcctgagcaagtgacaatctaacc

SEQ ID NO: 39155 - DNA, 25 bp, probe
cttcactcactcactcaacaaatac

SEQ ID NO: 39156 - DNA, 25 bp, probe
tcttcactcactcactcaacaaata

SEQ ID NO: 39157 - DNA, 25 bp, probe
tgtaggttcttcactcactcactca

SEQ ID NO: 39158 - DNA, 25 bp, probe
tagtctcaagagatacagtggtgga

SEQ ID NO: 39159 - DNA, 25 bp, probe
gatatactggcttctgacttatggg

SEQ ID NO: 39160 - DNA, 25 bp, probe
caggtgtgtataatgtatcagggac

SEQ ID NO: 39161 - DNA, 25 bp, probe
ttcttcactcactcactcaacaaat

SEQ ID NO: 39162 - DNA, 25 bp, probe
gaatagatcaaccaattcctacagc

SEQ ID NO: 39163 - DNA, 25 bp, probe
ttcactcactcactcaacaaatacc

SEQ ID NO: 39164 - DNA, 25 bp, probe
ttccttgtaggttcttcactcactc

SEQ ID NO: 39165 - DNA, 25 bp, probe
atctaacctgccatccaaatgataa

SEQ ID NO: 39166 - DNA, 25 bp, probe
aatctaacctgccatccaaatgata

SEQ ID NO: 39167 - DNA, 25 bp, probe
gtgtgtataatgtatcagggaccat

SEQ ID NO: 39168 - DNA, 25 bp, probe
tctaacctgccatccaaatgataaa

SEQ ID NO: 39169 - DNA, 25 bp, probe
ctaacctgccatccaaatgataaat

SEQ ID NO: 39170 - DNA, 25 bp, probe
ggttcttcactcactcactcaacaa

SEQ ID NO: 39171 - DNA, 25 bp, probe
tttcctgagcaagtgacaatctaac

SEQ ID NO: 39172 - DNA, 25 bp, probe
ctttcctgagcaagtgacaatctaa

SEQ ID NO: 39173 - DNA, 25 bp, probe
ctgccatccaaatgataaattgcta

SEQ ID NO: 39174 - DNA, 25 bp, probe
aacctgccatccaaatgataaattg

SEQ ID NO: 39175 - DNA, 25 bp, probe
tgccatccaaatgataaattgctaa

SEQ ID NO: 39176 - DNA, 25 bp, probe
taacctgccatccaaatgataaatt

SEQ ID NO: 39177 - DNA, 25 bp, probe
aaatacccgttggaagagtcttaaa

SEQ ID NO: 39178 - DNA, 25 bp, probe
caatctaacctgccatccaaatgat

SEQ ID NO: 39179 - DNA, 25 bp, probe
tatattccttgtaggttcttcactc

SEQ ID NO: 39180 - DNA, 25 bp, probe
gctctactaagtacaggtgtgtata

SEQ ID NO: 39181 - DNA, 25 bp, probe
tgaatagatcaaccaattcctacag

SEQ ID NO: 39182 - DNA, 25 bp, probe
cctgagcaagtgacaatctaacctg

SEQ ID NO: 39183 - DNA, 25 bp, probe
ggaagagagtgaggatattgagaac

SEQ ID NO: 39184 - DNA, 25 bp, probe
aggaagagagtgaggatattgagaa

SEQ ID NO: 39185 - DNA, 25 bp, probe
gaagagagtgaggatattgagaaca

SEQ ID NO: 39186 - DNA, 25 bp, probe
gaggaagagagtgaggatattgaga

SEQ ID NO: 39187 - DNA, 25 bp, probe
aagagagtgaggatattgagaacat

SEQ ID NO: 39188 - DNA, 25 bp, probe
aaggaggaagagagtgaggatattg

SEQ ID NO: 39189 - DNA, 25 bp, probe
caaggaggaagagagtgaggatatt

SEQ ID NO: 39190 - DNA, 25 bp, probe
ggaggaagagagtgaggatattgag

SEQ ID NO: 39191 - DNA, 25 bp, probe
aggaggaagagagtgaggatattga

SEQ ID NO: 39192 - DNA, 25 bp, probe
ccatcaccatcatcttcaacaagtt

SEQ ID NO: 39193 - DNA, 25 bp, probe
agagagtgaggatattgagaacatg

SEQ ID NO: 39194 - DNA, 25 bp, probe
gagagtgaggatattgagaacatgg

SEQ ID NO: 39195 - DNA, 25 bp, probe
gaatgaggatggagaagtggatgat

SEQ ID NO: 39196 - DNA, 25 bp, probe
ttcattaccagtctctcttctgtag

SEQ ID NO: 39197 - DNA, 25 bp, probe
cttcattaccagtctctcttctgta

SEQ ID NO: 39198 - DNA, 25 bp, probe
tcattaccagtctctcttctgtagg

SEQ ID NO: 39199 - DNA, 25 bp, probe
ccaaggaggaagagagtgaggatat

SEQ ID NO: 39200 - DNA, 25 bp, probe
aatgaggatggagaagtggatgatc

SEQ ID NO: 39201 - DNA, 25 bp, probe
ccttcattaccagtctctcttctgt

SEQ ID NO: 39202 - DNA, 25 bp, probe
cagaatgaggatggagaagtggatg

SEQ ID NO: 39203 - DNA, 25 bp, probe
agaatgaggatggagaagtggatga

SEQ ID NO: 39204 - DNA, 25 bp, probe
gcatcattctgtgtttgtcatttac

SEQ ID NO: 39205 - DNA, 25 bp, probe
ctctattattcccttctatgccacg

SEQ ID NO: 39206 - DNA, 25 bp, probe
tctctattattcccttctatgccac

SEQ ID NO: 39207 - DNA, 25 bp, probe
gtctctattattcccttctatgcca

SEQ ID NO: 39208 - DNA, 25 bp, probe
tgtctctattattcccttctatgcc

SEQ ID NO: 39209 - DNA, 25 bp, probe
tttgtgcctgtttctcttatccttt

SEQ ID NO: 39210 - DNA, 25 bp, probe
cattaccagtctctcttctgtaggc

SEQ ID NO: 39211 - DNA, 25 bp, probe
catcaccatcatcttcaacaagttt

SEQ ID NO: 39212 - DNA, 25 bp, probe
tcattctgtgtttgtcatttactca

SEQ ID NO: 39213 - DNA, 25 bp, probe
ttgtgcctgtttctcttatcctttc

SEQ ID NO: 39214 - DNA, 25 bp, probe
agagagagttgtgatatagtttgga

SEQ ID NO: 39215 - DNA, 25 bp, probe
gtttctcttatcctttcccaacatt

SEQ ID NO: 39216 - DNA, 25 bp, probe
gtttgtgcctgtttctcttatcctt

SEQ ID NO: 39217 - DNA, 25 bp, probe
taccagtctctcttctgtaggcatt

SEQ ID NO: 39218 - DNA, 25 bp, probe
ttaccagtctctcttctgtaggcat

SEQ ID NO: 39219 - DNA, 25 bp, probe
attaccagtctctcttctgtaggca

SEQ ID NO: 39220 - DNA, 25 bp, probe
ggtcaattaaatgccttgttctgaa

SEQ ID NO: 39221 - DNA, 25 bp, probe
tggaaactaggagcctaataaactt

SEQ ID NO: 39222 - DNA, 25 bp, probe
aaaccctctgaacatcattgacttt

SEQ ID NO: 39223 - DNA, 25 bp, probe
tttctctgtgaggtcaattaaatgc

SEQ ID NO: 39224 - DNA, 25 bp, probe
cctgtttctcttatcctttcccaac

SEQ ID NO: 39225 - DNA, 25 bp, probe
atggaaactaggagcctaataaact

SEQ ID NO: 39226 - DNA, 25 bp, probe
gccttcattaccagtctctcttctg

SEQ ID NO: 39227 - DNA, 25 bp, probe
gagtgctgtcttatgtgaagtggat

SEQ ID NO: 39228 - DNA, 25 bp, probe
agtgctgtcttatgtgaagtggatc

SEQ ID NO: 39229 - DNA, 25 bp, probe
tcagagtgctgtcttatgtgaagtg

SEQ ID NO: 39230 - DNA, 25 bp, probe
gtcagagtgctgtcttatgtgaagt

SEQ ID NO: 39231 - DNA, 25 bp, probe
agagtgctgtcttatgtgaagtgga

SEQ ID NO: 39232 - DNA, 25 bp, probe
ctgtcttatgtgaagtggatcgagg

SEQ ID NO: 39233 - DNA, 25 bp, probe
cagagtgctgtcttatgtgaagtgg

SEQ ID NO: 39234 - DNA, 25 bp, probe
cgtcagagtgctgtcttatgtgaag

SEQ ID NO: 39235 - DNA, 25 bp, probe
tgtcttatgtgaagtggatcgagga

SEQ ID NO: 39236 - DNA, 25 bp, probe
gtcttatgtgaagtggatcgaggac

SEQ ID NO: 39237 - DNA, 25 bp, probe
gtgctgtcttatgtgaagtggatcg

SEQ ID NO: 39238 - DNA, 25 bp, probe
gctgtcttatgtgaagtggatcgag

SEQ ID NO: 39239 - DNA, 25 bp, probe
atttccagatgatctccagtgtgtg

SEQ ID NO: 39240 - DNA, 25 bp, probe
catttccagatgatctccagtgtgt

SEQ ID NO: 39241 - DNA, 25 bp, probe
tcttatgtgaagtggatcgaggaca

SEQ ID NO: 39242 - DNA, 25 bp, probe
cttatgtgaagtggatcgaggacac

SEQ ID NO: 39243 - DNA, 25 bp, probe
tttctcatttccagatgatctccag

SEQ ID NO: 39244 - DNA, 25 bp, probe
atttctcatttccagatgatctcca

SEQ ID NO: 39245 - DNA, 25 bp, probe
aatttctcatttccagatgatctcc

SEQ ID NO: 39246 - DNA, 25 bp, probe
tgctgtcttatgtgaagtggatcga

SEQ ID NO: 39247 - DNA, 25 bp, probe
ttctcatttccagatgatctccagt

SEQ ID NO: 39248 - DNA, 25 bp, probe
gtttgttcatgtcagtgagagcttc

SEQ ID NO: 39249 - DNA, 25 bp, probe
tcaaaatcctgcctaatgatgagtg

SEQ ID NO: 39250 - DNA, 25 bp, probe
agtttgttcatgtcagtgagagctt

SEQ ID NO: 39251 - DNA, 25 bp, probe
tctcatttccagatgatctccagtg

SEQ ID NO: 39252 - DNA, 25 bp, probe
ctcatttccagatgatctccagtgt

SEQ ID NO: 39253 - DNA, 25 bp, probe
agaatttctcatttccagatgatct

SEQ ID NO: 39254 - DNA, 25 bp, probe
gacctcaaaatcctgcctaatgatg

SEQ ID NO: 39255 - DNA, 25 bp, probe
gaatttctcatttccagatgatctc

SEQ ID NO: 39256 - DNA, 25 bp, probe
ccgtcagagtgctgtcttatgtgaa

SEQ ID NO: 39257 - DNA, 25 bp, probe
acctcaaaatcctgcctaatgatga

SEQ ID NO: 39258 - DNA, 25 bp, probe
tcatttccagatgatctccagtgtg

SEQ ID NO: 39259 - DNA, 25 bp, probe
caaaatcctgcctaatgatgagtgc

SEQ ID NO: 39260 - DNA, 25 bp, probe
cccagtttgttcatgtcagtgagag

SEQ ID NO: 39261 - DNA, 25 bp, probe
tttgttcatgtcagtgagagcttcc

SEQ ID NO: 39262 - DNA, 25 bp, probe
cagtttgttcatgtcagtgagagct

SEQ ID NO: 39263 - DNA, 25 bp, probe
ttatgtgaagtggatcgaggacacc

SEQ ID NO: 39264 - DNA, 25 bp, probe
ccagagaatttctcatttccagatg

SEQ ID NO: 39265 - DNA, 25 bp, probe
accagagaatttctcatttccagat

SEQ ID NO: 39266 - DNA, 25 bp, probe
aaccagagaatttctcatttccaga

SEQ ID NO: 39267 - DNA, 25 bp, probe
gaaccagagaatttctcatttccag

SEQ ID NO: 39268 - DNA, 25 bp, probe
catcgaaccagagaatttctcattt

SEQ ID NO: 39269 - DNA, 25 bp, probe
ccagtttgttcatgtcagtgagagc

SEQ ID NO: 39270 - DNA, 25 bp, probe
atcgaaccagagaatttctcatttc

SEQ ID NO: 39271 - DNA, 25 bp, probe
gtatgtcgcaggcattactaatctg

SEQ ID NO: 39272 - DNA, 25 bp, probe
tatgtcgcaggcattactaatctga

SEQ ID NO: 39273 - DNA, 25 bp, probe
cagtatgtcgcaggcattactaatc

SEQ ID NO: 39274 - DNA, 25 bp, probe
agtatgtcgcaggcattactaatct

SEQ ID NO: 39275 - DNA, 25 bp, probe
atgtcgcaggcattactaatctgaa

SEQ ID NO: 39276 - DNA, 25 bp, probe
acagtatgtcgcaggcattactaat

SEQ ID NO: 39277 - DNA, 25 bp, probe
ttgcttattccagtctgaaaccaaa

SEQ ID NO: 39278 - DNA, 25 bp, probe
tttgcttattccagtctgaaaccaa

SEQ ID NO: 39279 - DNA, 25 bp, probe
aatttgggagaaatggatctgactg

SEQ ID NO: 39280 - DNA, 25 bp, probe
aaataacaatgaggcatgggctaag

SEQ ID NO: 39281 - DNA, 25 bp, probe
gaaataacaatgaggcatgggctaa

SEQ ID NO: 39282 - DNA, 25 bp, probe
cacagtatgtcgcaggcattactaa

SEQ ID NO: 39283 - DNA, 25 bp, probe
cttctgttcaatgacaacactgagt

SEQ ID NO: 39284 - DNA, 25 bp, probe
ttacaattccctgctgtcgtcttag

SEQ ID NO: 39285 - DNA, 25 bp, probe
cttacaattccctgctgtcgtctta

SEQ ID NO: 39286 - DNA, 25 bp, probe
gctaaatttgggagaaatggatctg

SEQ ID NO: 39287 - DNA, 25 bp, probe
aaatttgggagaaatggatctgact

SEQ ID NO: 39288 - DNA, 25 bp, probe
tgtcgcaggcattactaatctgaaa

SEQ ID NO: 39289 - DNA, 25 bp, probe
caacaggctaaatttgggagaaatg

SEQ ID NO: 39290 - DNA, 25 bp, probe
taaatttgggagaaatggatctgac

SEQ ID NO: 39291 - DNA, 25 bp, probe
ggctaaatttgggagaaatggatct

SEQ ID NO: 39292 - DNA, 25 bp, probe
aggctaaatttgggagaaatggatc

SEQ ID NO: 39293 - DNA, 25 bp, probe
aaccttctgttcaatgacaacactg

SEQ ID NO: 39294 - DNA, 25 bp, probe
ctcaggaagtaaaaccgaagaagat

SEQ ID NO: 39295 - DNA, 25 bp, probe
ctaaatttgggagaaatggatctga

SEQ ID NO: 39296 - DNA, 25 bp, probe
ccttctgttcaatgacaacactgag

SEQ ID NO: 39297 - DNA, 25 bp, probe
tcaggaagtaaaaccgaagaagatg

SEQ ID NO: 39298 - DNA, 25 bp, probe
caggctaaatttgggagaaatggat

SEQ ID NO: 39299 - DNA, 25 bp, probe
ttctgttcaatgacaacactgagtg

SEQ ID NO: 39300 - DNA, 25 bp, probe
ccatccatctgcttacaattccctg

SEQ ID NO: 39301 - DNA, 25 bp, probe
aacaggctaaatttgggagaaatgg

SEQ ID NO: 39302 - DNA, 25 bp, probe
aagttttgcttattccagtctgaaa

SEQ ID NO: 39303 - DNA, 25 bp, probe
caagttttgcttattccagtctgaa

SEQ ID NO: 39304 - DNA, 25 bp, probe
gtgtctcggatggataaggtggaac

SEQ ID NO: 39305 - DNA, 25 bp, probe
taaggatttgaagctggcagacttt

SEQ ID NO: 39306 - DNA, 25 bp, probe
caggaagtaaaaccgaagaagatgg

SEQ ID NO: 39307 - DNA, 25 bp, probe
tgcttattccagtctgaaaccaaaa

SEQ ID NO: 39308 - DNA, 25 bp, probe
ttttgcttattccagtctgaaacca

SEQ ID NO: 39309 - DNA, 25 bp, probe
aataacaatgaggcatgggctaagg

SEQ ID NO: 39310 - DNA, 25 bp, probe
ggaaataacaatgaggcatgggcta

SEQ ID NO: 39311 - DNA, 25 bp, probe
accttctgttcaatgacaacactga

SEQ ID NO: 39312 - DNA, 25 bp, probe
acaagttttgcttattccagtctga

SEQ ID NO: 39313 - DNA, 25 bp, probe
atttgggagaaatggatctgactgc

SEQ ID NO: 39314 - DNA, 25 bp, probe
ttgcccatccatctgcttacaattc

SEQ ID NO: 39315 - DNA, 25 bp, probe
ccatcattatattcctcatcttcgc

SEQ ID NO: 39316 - DNA, 25 bp, probe
gcagtaagaagaagagattcaagga

SEQ ID NO: 39317 - DNA, 25 bp, probe
agcagtaagaagaagagattcaagg

SEQ ID NO: 39318 - DNA, 25 bp, probe
ggaagcagtaagaagaagagattca

SEQ ID NO: 39319 - DNA, 25 bp, probe
ttatattcctcatcttcgctatgcc

SEQ ID NO: 39320 - DNA, 25 bp, probe
catcattatattcctcatcttcgct

SEQ ID NO: 39321 - DNA, 25 bp, probe
taagaagaagagattcaaggagtcc

SEQ ID NO: 39322 - DNA, 25 bp, probe
agtaagaagaagagattcaaggagt

SEQ ID NO: 39323 - DNA, 25 bp, probe
aagcagtaagaagaagagattcaag

SEQ ID NO: 39324 - DNA, 25 bp, probe
gaagcagtaagaagaagagattcaa

SEQ ID NO: 39325 - DNA, 25 bp, probe
gtaagaagaagagattcaaggagtc

SEQ ID NO: 39326 - DNA, 25 bp, probe
cagtaagaagaagagattcaaggag

SEQ ID NO: 39327 - DNA, 25 bp, probe
attatattcctcatcttcgctatgc

SEQ ID NO: 39328 - DNA, 25 bp, probe
ggtcaccatcattatattcctcatc

SEQ ID NO: 39329 - DNA, 25 bp, probe
accatcattatattcctcatcttcg

SEQ ID NO: 39330 - DNA, 25 bp, probe
tgtgatacagaagaacatctcatcc

SEQ ID NO: 39331 - DNA, 25 bp, probe
aattgtaatacggtcacagttgaga

SEQ ID NO: 39332 - DNA, 25 bp, probe
gtcaccatcattatattcctcatct

SEQ ID NO: 39333 - DNA, 25 bp, probe
attgtaatacggtcacagttgagac

SEQ ID NO: 39334 - DNA, 25 bp, probe
tgctcttctccacaatcaacagtag

SEQ ID NO: 39335 - DNA, 25 bp, probe
ttgtaatacggtcacagttgagact

SEQ ID NO: 39336 - DNA, 25 bp, probe
tcattatattcctcatcttcgctat

SEQ ID NO: 39337 - DNA, 25 bp, probe
atcattatattcctcatcttcgcta

SEQ ID NO: 39338 - DNA, 25 bp, probe
tcaccatcattatattcctcatctt

SEQ ID NO: 39339 - DNA, 25 bp, probe
aaccctttcatttacttctttgtgg

SEQ ID NO: 39340 - DNA, 25 bp, probe
agtcatcatctttatagccatcctg

SEQ ID NO: 39341 - DNA, 25 bp, probe
cagtcatcatctttatagccatcct

SEQ ID NO: 39342 - DNA, 25 bp, probe
agcagtcatcatctttatagccatc

SEQ ID NO: 39343 - DNA, 25 bp, probe
gagcagtcatcatctttatagccat

SEQ ID NO: 39344 - DNA, 25 bp, probe
ttacctgctgtactatgagtattgg

SEQ ID NO: 39345 - DNA, 25 bp, probe
cattatattcctcatcttcgctatg

SEQ ID NO: 39346 - DNA, 25 bp, probe
tacctgctgtactatgagtattggt

SEQ ID NO: 39347 - DNA, 25 bp, probe
caccatcattatattcctcatcttc

SEQ ID NO: 39348 - DNA, 25 bp, probe
cctttcatttacttctttgtgggaa

SEQ ID NO: 39349 - DNA, 25 bp, probe
aagaagaagagattcaaggagtcct

SEQ ID NO: 39350 - DNA, 25 bp, probe
gatacagaagaacatctcatcccat

SEQ ID NO: 39351 - DNA, 25 bp, probe
gggaagcagtaagaagaagagattc

SEQ ID NO: 39352 - DNA, 25 bp, probe
ccaaccctttcatttacttctttgt

SEQ ID NO: 39353 - DNA, 25 bp, probe
tgggaagcagtaagaagaagagatt

SEQ ID NO: 39354 - DNA, 25 bp, probe
gcagtcatcatctttatagccatcc

SEQ ID NO: 39355 - DNA, 25 bp, probe
gtcatcatctttatagccatcctga

SEQ ID NO: 39356 - DNA, 25 bp, probe
tcatcatctttatagccatcctgag

SEQ ID NO: 39357 - DNA, 25 bp, probe
ctgctcttctccacaatcaacagta

SEQ ID NO: 39358 - DNA, 25 bp, probe
tacagaagaacatctcatcccatat

SEQ ID NO: 39359 - DNA, 25 bp, probe
gatattgtgtggtctggttcctgtg

SEQ ID NO: 39360 - DNA, 25 bp, probe
gtgatattgtgtggtctggttcctg

SEQ ID NO: 39361 - DNA, 25 bp, probe
aggatggactaaatgatctctgaaa

SEQ ID NO: 39362 - DNA, 25 bp, probe
ggatggactaaatgatctctgaaag

SEQ ID NO: 39363 - DNA, 25 bp, probe
ttgtcaaagaggatggactaaatga

SEQ ID NO: 39364 - DNA, 25 bp, probe
tgtcaaagaggatggactaaatgat

SEQ ID NO: 39365 - DNA, 25 bp, probe
tggactaaatgatctctgaaagtgt

SEQ ID NO: 39366 - DNA, 25 bp, probe
gcatcttcaagaacttcaacctctt

SEQ ID NO: 39367 - DNA, 25 bp, probe
gtggtgatattgtgtggtctggttc

SEQ ID NO: 39368 - DNA, 25 bp, probe
gaggatggactaaatgatctctgaa

SEQ ID NO: 39369 - DNA, 25 bp, probe
tcaaagaggatggactaaatgatct

SEQ ID NO: 39370 - DNA, 25 bp, probe
ctgcatcttcaagaacttcaacctc

SEQ ID NO: 39371 - DNA, 25 bp, probe
tgatattgtgtggtctggttcctgt

SEQ ID NO: 39372 - DNA, 25 bp, probe
ggactaaatgatctctgaaagtgtt

SEQ ID NO: 39373 - DNA, 25 bp, probe
caaagaggatggactaaatgatctc

SEQ ID NO: 39374 - DNA, 25 bp, probe
tgcatcttcaagaacttcaacctct

SEQ ID NO: 39375 - DNA, 25 bp, probe
atggactaaatgatctctgaaagtg

SEQ ID NO: 39376 - DNA, 25 bp, probe
tttgtcaaagaggatggactaaatg

SEQ ID NO: 39377 - DNA, 25 bp, probe
gtttgtcaaagaggatggactaaat

SEQ ID NO: 39378 - DNA, 25 bp, probe
gtcaaagaggatggactaaatgatc

SEQ ID NO: 39379 - DNA, 25 bp, probe
atattgtgtggtctggttcctgtgt

SEQ ID NO: 39380 - DNA, 25 bp, probe
gatggactaaatgatctctgaaagt

SEQ ID NO: 39381 - DNA, 25 bp, probe
cgtttgtcaaagaggatggactaaa

SEQ ID NO: 39382 - DNA, 25 bp, probe
actaaatgatctctgaaagtgttga

SEQ ID NO: 39383 - DNA, 25 bp, probe
gactaaatgatctctgaaagtgttg

SEQ ID NO: 39384 - DNA, 25 bp, probe
cttcttcctgcatctcacactcatc

SEQ ID NO: 39385 - DNA, 25 bp, probe
taaatgatctctgaaagtgttgaag

SEQ ID NO: 39386 - DNA, 25 bp, probe
ctaaatgatctctgaaagtgttgaa

SEQ ID NO: 39387 - DNA, 25 bp, probe
ggtgatattgtgtggtctggttcct

SEQ ID NO: 39388 - DNA, 25 bp, probe
tcttcaagaacttcaacctctttct

SEQ ID NO: 39389 - DNA, 25 bp, probe
cttcaagaacttcaacctctttctc

SEQ ID NO: 39390 - DNA, 25 bp, probe
catcttcaagaacttcaacctcttt

SEQ ID NO: 39391 - DNA, 25 bp, probe
atcttcaagaacttcaacctctttc

SEQ ID NO: 39392 - DNA, 25 bp, probe
ttcaagaacttcaacctctttctcg

SEQ ID NO: 39393 - DNA, 25 bp, probe
tggtgatattgtgtggtctggttcc

SEQ ID NO: 39394 - DNA, 25 bp, probe
ccgtttgtcaaagaggatggactaa

SEQ ID NO: 39395 - DNA, 25 bp, probe
tattgtgtggtctggttcctgtgtg

SEQ ID NO: 39396 - DNA, 25 bp, probe
ggtggtgatattgtgtggtctggtt

SEQ ID NO: 39397 - DNA, 25 bp, probe
gctgcatcttcaagaacttcaacct

SEQ ID NO: 39398 - DNA, 25 bp, probe
agaggatggactaaatgatctctga

SEQ ID NO: 39399 - DNA, 25 bp, probe
gaggtggtgatattgtgtggtctgg

SEQ ID NO: 39400 - DNA, 25 bp, probe
ggaggtggtgatattgtgtggtctg

SEQ ID NO: 39401 - DNA, 25 bp, probe
aagaggatggactaaatgatctctg

SEQ ID NO: 39402 - DNA, 25 bp, probe
aaagaggatggactaaatgatctct

SEQ ID NO: 39403 - DNA, 25 bp, probe
ttggaggaagtatgagtgctgattc

SEQ ID NO: 39404 - DNA, 25 bp, probe
cttggaggaagtatgagtgctgatt

SEQ ID NO: 39405 - DNA, 25 bp, probe
ggaggaagtatgagtgctgattcaa

SEQ ID NO: 39406 - DNA, 25 bp, probe
gtatgagtgctgattcaaaccaaag

SEQ ID NO: 39407 - DNA, 25 bp, probe
gaggaagtatgagtgctgattcaaa

SEQ ID NO: 39408 - DNA, 25 bp, probe
agtatgagtgctgattcaaaccaaa

SEQ ID NO: 39409 - DNA, 25 bp, probe
aagtatgagtgctgattcaaaccaa

SEQ ID NO: 39410 - DNA, 25 bp, probe
aggaagtatgagtgctgattcaaac

SEQ ID NO: 39411 - DNA, 25 bp, probe
gaagtatgagtgctgattcaaacca

SEQ ID NO: 39412 - DNA, 25 bp, probe
tggaggaagtatgagtgctgattca

SEQ ID NO: 39413 - DNA, 25 bp, probe
ggaagtatgagtgctgattcaaacc

SEQ ID NO: 39414 - DNA, 25 bp, probe
cttcctcctctgtgtcaacatctct

SEQ ID NO: 39415 - DNA, 25 bp, probe
catcagtagtgtcaccttctaccac

SEQ ID NO: 39416 - DNA, 25 bp, probe
acatcagtagtgtcaccttctacca

SEQ ID NO: 39417 - DNA, 25 bp, probe
ttcctcctctgtgtcaacatctctg

SEQ ID NO: 39418 - DNA, 25 bp, probe
tcctataataaaatggcaccttccc

SEQ ID NO: 39419 - DNA, 25 bp, probe
gcttggaggaagtatgagtgctgat

SEQ ID NO: 39420 - DNA, 25 bp, probe
cctataataaaatggcaccttcccc

SEQ ID NO: 39421 - DNA, 25 bp, probe
ttcctataataaaatggcaccttcc

SEQ ID NO: 39422 - DNA, 25 bp, probe
atcagtagtgtcaccttctaccacc

SEQ ID NO: 39423 - DNA, 25 bp, probe
agacggagagatataaaggtcccag

SEQ ID NO: 39424 - DNA, 25 bp, probe
gagacggagagatataaaggtccca

SEQ ID NO: 39425 - DNA, 25 bp, probe
tatgagtgctgattcaaaccaaagc

SEQ ID NO: 39426 - DNA, 25 bp, probe
gttcctataataaaatggcaccttc

SEQ ID NO: 39427 - DNA, 25 bp, probe
gtgtgaatgtagcttccacctcatg

SEQ ID NO: 39428 - DNA, 25 bp, probe
gagacatcagtagtgtcaccttcta

SEQ ID NO: 39429 - DNA, 25 bp, probe
agacatcagtagtgtcaccttctac

SEQ ID NO: 39430 - DNA, 25 bp, probe
ggagacggagagatataaaggtccc

SEQ ID NO: 39431 - DNA, 25 bp, probe
gggagacggagagatataaaggtcc

SEQ ID NO: 39432 - DNA, 25 bp, probe
cagtagtgtcaccttctaccaccag

SEQ ID NO: 39433 - DNA, 25 bp, probe
gacatcagtagtgtcaccttctacc

SEQ ID NO: 39434 - DNA, 25 bp, probe
ggttcctataataaaatggcacctt

SEQ ID NO: 39435 - DNA, 25 bp, probe
gcttcctcctctgtgtcaacatctc

SEQ ID NO: 39436 - DNA, 25 bp, probe
tcagtagtgtcaccttctaccacca

SEQ ID NO: 39437 - DNA, 25 bp, probe
taggttcctataataaaatggcacc

SEQ ID NO: 39438 - DNA, 25 bp, probe
ctgagcttggaggaagtatgagtgc

SEQ ID NO: 39439 - DNA, 25 bp, probe
gctgagcttggaggaagtatgagtg

SEQ ID NO: 39440 - DNA, 25 bp, probe
gacggagagatataaaggtcccagc

SEQ ID NO: 39441 - DNA, 25 bp, probe
actgaatcttaatcgatgaatgtaa

SEQ ID NO: 39442 - DNA, 25 bp, probe
aactgaatcttaatcgatgaatgta

SEQ ID NO: 39443 - DNA, 25 bp, probe
atgcaaatgtcttccaggtccaaac

SEQ ID NO: 39444 - DNA, 25 bp, probe
catgcaaatgtcttccaggtccaaa

SEQ ID NO: 39445 - DNA, 25 bp, probe
tgtgaatgtagcttccacctcatgg

SEQ ID NO: 39446 - DNA, 25 bp, probe
gatgtggggatgttttgacatttac

SEQ ID NO: 39447 - DNA, 25 bp, probe
attaggtcactcaagaagtaagcaa

SEQ ID NO: 39448 - DNA, 25 bp, probe
cattaggtcactcaagaagtaagca

SEQ ID NO: 39449 - DNA, 25 bp, probe
ttaggtcactcaagaagtaagcaac

SEQ ID NO: 39450 - DNA, 25 bp, probe
ccattaggtcactcaagaagtaagc

SEQ ID NO: 39451 - DNA, 25 bp, probe
aggtcactcaagaagtaagcaacta

SEQ ID NO: 39452 - DNA, 25 bp, probe
taggtcactcaagaagtaagcaact

SEQ ID NO: 39453 - DNA, 25 bp, probe
gcttagtaattgtgtctggaatgac

SEQ ID NO: 39454 - DNA, 25 bp, probe
ggtcactcaagaagtaagcaactag

SEQ ID NO: 39455 - DNA, 25 bp, probe
gtcactcaagaagtaagcaactagc

SEQ ID NO: 39456 - DNA, 25 bp, probe
agcttagtaattgtgtctggaatga

SEQ ID NO: 39457 - DNA, 25 bp, probe
accattaggtcactcaagaagtaag

SEQ ID NO: 39458 - DNA, 25 bp, probe
caccattaggtcactcaagaagtaa

SEQ ID NO: 39459 - DNA, 25 bp, probe
tcaccattaggtcactcaagaagta

SEQ ID NO: 39460 - DNA, 25 bp, probe
agtgatgatactgtaacgaagataa

SEQ ID NO: 39461 - DNA, 25 bp, probe
aagtgatgatactgtaacgaagata

SEQ ID NO: 39462 - DNA, 25 bp, probe
cagcttagtaattgtgtctggaatg

SEQ ID NO: 39463 - DNA, 25 bp, probe
aagtcaccattaggtcactcaagaa

SEQ ID NO: 39464 - DNA, 25 bp, probe
aacgaagataaattggctaatcagt

SEQ ID NO: 39465 - DNA, 25 bp, probe
agtcaccattaggtcactcaagaag

SEQ ID NO: 39466 - DNA, 25 bp, probe
gaagtcaccattaggtcactcaaga

SEQ ID NO: 39467 - DNA, 25 bp, probe
tttaacagtcagaaacccactaatg

SEQ ID NO: 39468 - DNA, 25 bp, probe
actgtaacgaagataaattggctaa

SEQ ID NO: 39469 - DNA, 25 bp, probe
gcagcttagtaattgtgtctggaat

SEQ ID NO: 39470 - DNA, 25 bp, probe
atactgtaacgaagataaattggct

SEQ ID NO: 39471 - DNA, 25 bp, probe
tgaaagtgatgatactgtaacgaag

SEQ ID NO: 39472 - DNA, 25 bp, probe
gtcaccattaggtcactcaagaagt

SEQ ID NO: 39473 - DNA, 25 bp, probe
tgaagtcaccattaggtcactcaag

SEQ ID NO: 39474 - DNA, 25 bp, probe
ctgaagtcaccattaggtcactcaa

SEQ ID NO: 39475 - DNA, 25 bp, probe
gatactgtaacgaagataaattggc

SEQ ID NO: 39476 - DNA, 25 bp, probe
gaaagtgatgatactgtaacgaaga

SEQ ID NO: 39477 - DNA, 25 bp, probe
gtaagcagcttagtaattgtgtctg

SEQ ID NO: 39478 - DNA, 25 bp, probe
ccagtagtgtaagcagcttagtaat

SEQ ID NO: 39479 - DNA, 25 bp, probe
tgtaagcagcttagtaattgtgtct

SEQ ID NO: 39480 - DNA, 25 bp, probe
gtgtaagcagcttagtaattgtgtc

SEQ ID NO: 39481 - DNA, 25 bp, probe
agtgtaagcagcttagtaattgtgt

SEQ ID NO: 39482 - DNA, 25 bp, probe
acgaagataaattggctaatcagta

SEQ ID NO: 39483 - DNA, 25 bp, probe
taagcagcttagtaattgtgtctgg

SEQ ID NO: 39484 - DNA, 25 bp, probe
atgaaagtgatgatactgtaacgaa

SEQ ID NO: 39485 - DNA, 25 bp, probe
aatgaaagtgatgatactgtaacga

SEQ ID NO: 39486 - DNA, 25 bp, probe
tagtgtaagcagcttagtaattgtg

SEQ ID NO: 39487 - DNA, 25 bp, probe
gtagtgtaagcagcttagtaattgt

SEQ ID NO: 39488 - DNA, 25 bp, probe
tactgtaacgaagataaattggcta

SEQ ID NO: 39489 - DNA, 25 bp, probe
agtagtgtaagcagcttagtaattg

SEQ ID NO: 39490 - DNA, 25 bp, probe
cagtagtgtaagcagcttagtaatt

SEQ ID NO: 39491 - DNA, 25 bp, probe
ttcagagagtacaacttacatcgtg

SEQ ID NO: 39492 - DNA, 25 bp, probe
ttgtggcttatggattcatataggc

SEQ ID NO: 39493 - DNA, 25 bp, probe
cagagagtacaacttacatcgtgtt

SEQ ID NO: 39494 - DNA, 25 bp, probe
tcagagagtacaacttacatcgtgt

SEQ ID NO: 39495 - DNA, 25 bp, probe
gctaacctttgatgctataactacg

SEQ ID NO: 39496 - DNA, 25 bp, probe
gcttcagtgacaaacatatcctttc

SEQ ID NO: 39497 - DNA, 25 bp, probe
ataggcaagggataactcttctaac

SEQ ID NO: 39498 - DNA, 25 bp, probe
gacaaacatatcctttcaagacaga

SEQ ID NO: 39499 - DNA, 25 bp, probe
gcaagggataactcttctaacacaa

SEQ ID NO: 39500 - DNA, 25 bp, probe
taggcaagggataactcttctaaca

SEQ ID NO: 39501 - DNA, 25 bp, probe
gataggcaagggataactcttctaa

SEQ ID NO: 39502 - DNA, 25 bp, probe
acctttgatgctataactacgattc

SEQ ID NO: 39503 - DNA, 25 bp, probe
ggataggcaagggataactcttcta

SEQ ID NO: 39504 - DNA, 25 bp, probe
tcaagtttgtggcttatggattcat

SEQ ID NO: 39505 - DNA, 25 bp, probe
tgtttggaataaagtcaaccttgtt

SEQ ID NO: 39506 - DNA, 25 bp, probe
ctttgatgctataactacgattcgg

SEQ ID NO: 39507 - DNA, 25 bp, probe
cctttgatgctataactacgattcg

SEQ ID NO: 39508 - DNA, 25 bp, probe
atgtttggaataaagtcaaccttgt

SEQ ID NO: 39509 - DNA, 25 bp, probe
aagtcaagtttgtggcttatggatt

SEQ ID NO: 39510 - DNA, 25 bp, probe
aaagtcaagtttgtggcttatggat

SEQ ID NO: 39511 - DNA, 25 bp, probe
gtgacaaacatatcctttcaagaca

SEQ ID NO: 39512 - DNA, 25 bp, probe
caagggataactcttctaacacaaa

SEQ ID NO: 39513 - DNA, 25 bp, probe
aacctttgatgctataactacgatt

SEQ ID NO: 39514 - DNA, 25 bp, probe
gaccaacaatttcagagagtacaac

SEQ ID NO: 39515 - DNA, 25 bp, probe
tttgatgctataactacgattcggg

SEQ ID NO: 39516 - DNA, 25 bp, probe
ttggaataaagtcaaccttgtttct

SEQ ID NO: 39517 - DNA, 25 bp, probe
tgacaaacatatcctttcaagacag

SEQ ID NO: 39518 - DNA, 25 bp, probe
agtgacaaacatatcctttcaagac

SEQ ID NO: 39519 - DNA, 25 bp, probe
cagtgacaaacatatcctttcaaga

SEQ ID NO: 39520 - DNA, 25 bp, probe
tcagtgacaaacatatcctttcaag

SEQ ID NO: 39521 - DNA, 25 bp, probe
cttcagtgacaaacatatcctttca

SEQ ID NO: 39522 - DNA, 25 bp, probe
aaagtcaaccttgtttctactgttt

SEQ ID NO: 39523 - DNA, 25 bp, probe
acaaacatatcctttcaagacagaa

SEQ ID NO: 39524 - DNA, 25 bp, probe
ctaacctttgatgctataactacga

SEQ ID NO: 39525 - DNA, 25 bp, probe
actggaggtatgatgaatataaacg

SEQ ID NO: 39526 - DNA, 25 bp, probe
aagatgaaaggtggaccaacaattt

SEQ ID NO: 39527 - DNA, 25 bp, probe
agtcaagtttgtggcttatggattc

SEQ ID NO: 39528 - DNA, 25 bp, probe
ggaccaacaatttcagagagtacaa

SEQ ID NO: 39529 - DNA, 25 bp, probe
ttcagtgacaaacatatcctttcaa

SEQ ID NO: 39530 - DNA, 25 bp, probe
gtttggaataaagtcaaccttgttt

SEQ ID NO: 39531 - DNA, 25 bp, probe
gtcaagtttgtggcttatggattca

SEQ ID NO: 39532 - DNA, 25 bp, probe
caagacagaaagagacaggagacat

SEQ ID NO: 39533 - DNA, 25 bp, probe
ctggaggtatgatgaatataaacga

SEQ ID NO: 39534 - DNA, 25 bp, probe
tggaataaagtcaaccttgtttcta

SEQ ID NO: 39535 - DNA, 25 bp, probe
gaacttgagcgtgaatctgtatctt

SEQ ID NO: 39536 - DNA, 25 bp, probe
atatgaagttactagcaaggacctc

SEQ ID NO: 39537 - DNA, 25 bp, probe
aacttgagcgtgaatctgtatcttg

SEQ ID NO: 39538 - DNA, 25 bp, probe
caagtgactgtatctgtgtagacta

SEQ ID NO: 39539 - DNA, 25 bp, probe
ttccgcctgtctcaagatgatataa

SEQ ID NO: 39540 - DNA, 25 bp, probe
gacaagtgactgtatctgtgtagac

SEQ ID NO: 39541 - DNA, 25 bp, probe
agacaagtgactgtatctgtgtaga

SEQ ID NO: 39542 - DNA, 25 bp, probe
tatgaagttactagcaaggacctcg

SEQ ID NO: 39543 - DNA, 25 bp, probe
acaagtgactgtatctgtgtagact

SEQ ID NO: 39544 - DNA, 25 bp, probe
agtgactgtatctgtgtagactatt

SEQ ID NO: 39545 - DNA, 25 bp, probe
aagtgactgtatctgtgtagactat

SEQ ID NO: 39546 - DNA, 25 bp, probe
gagatatgtagaaggcacaatatgg

SEQ ID NO: 39547 - DNA, 25 bp, probe
gttccgcctgtctcaagatgatata

SEQ ID NO: 39548 - DNA, 25 bp, probe
ggaacttgagcgtgaatctgtatct

SEQ ID NO: 39549 - DNA, 25 bp, probe
agagatatgtagaaggcacaatatg

SEQ ID NO: 39550 - DNA, 25 bp, probe
atgaacaatggacaaaggatacaac

SEQ ID NO: 39551 - DNA, 25 bp, probe
tgatgatgatgaacaatggacaaag

SEQ ID NO: 39552 - DNA, 25 bp, probe
gaacaatggacaaaggatacaacag

SEQ ID NO: 39553 - DNA, 25 bp, probe
tgttgaaagagatatgtagaaggca

SEQ ID NO: 39554 - DNA, 25 bp, probe
actggagatttgatgagaagagaaa

SEQ ID NO: 39555 - DNA, 25 bp, probe
tgatgaacaatggacaaaggataca

SEQ ID NO: 39556 - DNA, 25 bp, probe
gatgatgatgaacaatggacaaagg

SEQ ID NO: 39557 - DNA, 25 bp, probe
gatgaacaatggacaaaggatacaa

SEQ ID NO: 39558 - DNA, 25 bp, probe
aataattcttcacctaagtctctgt

SEQ ID NO: 39559 - DNA, 25 bp, probe
gttgaaagagatatgtagaaggcac

SEQ ID NO: 39560 - DNA, 25 bp, probe
atgatgaacaatggacaaaggatac

SEQ ID NO: 39561 - DNA, 25 bp, probe
tgatgatgaacaatggacaaaggat

SEQ ID NO: 39562 - DNA, 25 bp, probe
atgatgatgaacaatggacaaagga

SEQ ID NO: 39563 - DNA, 25 bp, probe
tgaacaatggacaaaggatacaaca

SEQ ID NO: 39564 - DNA, 25 bp, probe
aggatacaacagggaccaatttatt

SEQ ID NO: 39565 - DNA, 25 bp, probe
aaggatacaacagggaccaatttat

SEQ ID NO: 39566 - DNA, 25 bp, probe
aaaggatacaacagggaccaattta

SEQ ID NO: 39567 - DNA, 25 bp, probe
ataattcttcacctaagtctctgtg

SEQ ID NO: 39568 - DNA, 25 bp, probe
gatgatgaacaatggacaaaggata

SEQ ID NO: 39569 - DNA, 25 bp, probe
tactggagatttgatgagaagagaa

SEQ ID NO: 39570 - DNA, 25 bp, probe
ttgttgaaagagatatgtagaaggc

SEQ ID NO: 39571 - DNA, 25 bp, probe
ggatacaacagggaccaatttattt

SEQ ID NO: 39572 - DNA, 25 bp, probe
aagtctctgtgaattgaaatgttcg

SEQ ID NO: 39573 - DNA, 25 bp, probe
tctctgtgaattgaaatgttcgttt

SEQ ID NO: 39574 - DNA, 25 bp, probe
gtctctgtgaattgaaatgttcgtt

SEQ ID NO: 39575 - DNA, 25 bp, probe
gctggcttaattgttgaaagagata

SEQ ID NO: 39576 - DNA, 25 bp, probe
atactggagatttgatgagaagaga

SEQ ID NO: 39577 - DNA, 25 bp, probe
actgtatctgtgtagactatttgct

SEQ ID NO: 39578 - DNA, 25 bp, probe
cctaagtctctgtgaattgaaatgt

SEQ ID NO: 39579 - DNA, 25 bp, probe
actgtgtcttattccatctatgagc

SEQ ID NO: 39580 - DNA, 25 bp, probe
gcagaacatccattcattcattcat

SEQ ID NO: 39581 - DNA, 25 bp, probe
aggcagaacatccattcattcattc

SEQ ID NO: 39582 - DNA, 25 bp, probe
ggtcacctacaggatcgtatcatat

SEQ ID NO: 39583 - DNA, 25 bp, probe
agacttaccgcatattacagtggat

SEQ ID NO: 39584 - DNA, 25 bp, probe
agaacatccattcattcattcattg

SEQ ID NO: 39585 - DNA, 25 bp, probe
cagaacatccattcattcattcatt

SEQ ID NO: 39586 - DNA, 25 bp, probe
ggcagaacatccattcattcattca

SEQ ID NO: 39587 - DNA, 25 bp, probe
caggcagaacatccattcattcatt

SEQ ID NO: 39588 - DNA, 25 bp, probe
gtgtgactgtgtcttattccatcta

SEQ ID NO: 39589 - DNA, 25 bp, probe
gtcacctacaggatcgtatcatata

SEQ ID NO: 39590 - DNA, 25 bp, probe
tcattggattgtatatcattgttgc

SEQ ID NO: 39591 - DNA, 25 bp, probe
ttatggtgtgactgtgtcttattcc

SEQ ID NO: 39592 - DNA, 25 bp, probe
tgtgactgtgtcttattccatctat

SEQ ID NO: 39593 - DNA, 25 bp, probe
tcagaattgataagcactgttcctc

SEQ ID NO: 39594 - DNA, 25 bp, probe
gaattgataagcactgttcctccac

SEQ ID NO: 39595 - DNA, 25 bp, probe
agaattgataagcactgttcctcca

SEQ ID NO: 39596 - DNA, 25 bp, probe
aattgataagcactgttcctccact

SEQ ID NO: 39597 - DNA, 25 bp, probe
tgactgtgtcttattccatctatga

SEQ ID NO: 39598 - DNA, 25 bp, probe
gtgactgtgtcttattccatctatg

SEQ ID NO: 39599 - DNA, 25 bp, probe
gacttaccgcatattacagtggatc

SEQ ID NO: 39600 - DNA, 25 bp, probe
cttcaggcagaacatccattcattc

SEQ ID NO: 39601 - DNA, 25 bp, probe
gagacttaccgcatattacagtgga

SEQ ID NO: 39602 - DNA, 25 bp, probe
ctgtgtcttattccatctatgagct

SEQ ID NO: 39603 - DNA, 25 bp, probe
tgtgtcttattccatctatgagctt

SEQ ID NO: 39604 - DNA, 25 bp, probe
gactgtgtcttattccatctatgag

SEQ ID NO: 39605 - DNA, 25 bp, probe
attgataagcactgttcctccactc

SEQ ID NO: 39606 - DNA, 25 bp, probe
cctacaggatcgtatcatatactcg

SEQ ID NO: 39607 - DNA, 25 bp, probe
cagaattgataagcactgttcctcc

SEQ ID NO: 39608 - DNA, 25 bp, probe
atcaaccataggtccaagaacaatt

SEQ ID NO: 39609 - DNA, 25 bp, probe
aatcaaccataggtccaagaacaat

SEQ ID NO: 39610 - DNA, 25 bp, probe
tcaggcagaacatccattcattcat

SEQ ID NO: 39611 - DNA, 25 bp, probe
tggtcacctacaggatcgtatcata

SEQ ID NO: 39612 - DNA, 25 bp, probe
ctaatgcagtgatgtatccaaccta

SEQ ID NO: 39613 - DNA, 25 bp, probe
taatgcagtgatgtatccaacctat

SEQ ID NO: 39614 - DNA, 25 bp, probe
ccagatgttgcagaatactcactat

SEQ ID NO: 39615 - DNA, 25 bp, probe
gaacatccattcattcattcattgg

SEQ ID NO: 39616 - DNA, 25 bp, probe
cacctacaggatcgtatcatatact

SEQ ID NO: 39617 - DNA, 25 bp, probe
tcacctacaggatcgtatcatatac

SEQ ID NO: 39618 - DNA, 25 bp, probe
gatcctaatgcagtgatgtatccaa

SEQ ID NO: 39619 - DNA, 25 bp, probe
ttcaggcagaacatccattcattca

SEQ ID NO: 39620 - DNA, 25 bp, probe
acttcaggcagaacatccattcatt

SEQ ID NO: 39621 - DNA, 25 bp, probe
aacttcaggcagaacatccattcat

SEQ ID NO: 39622 - DNA, 25 bp, probe
atcctaatgcagtgatgtatccaac

SEQ ID NO: 39623 - DNA, 25 bp, probe
ggcttattcagttcttacacattcc

SEQ ID NO: 39624 - DNA, 25 bp, probe
tataagaagaagagagcatagccac

SEQ ID NO: 39625 - DNA, 25 bp, probe
acttgcctatctgacttcatacatc

SEQ ID NO: 39626 - DNA, 25 bp, probe
gcttattcagttcttacacattcca

SEQ ID NO: 39627 - DNA, 25 bp, probe
aggcttattcagttcttacacattc

SEQ ID NO: 39628 - DNA, 25 bp, probe
gaggcttattcagttcttacacatt

SEQ ID NO: 39629 - DNA, 25 bp, probe
cttgcctatctgacttcatacatcc

SEQ ID NO: 39630 - DNA, 25 bp, probe
ttacttgcctatctgacttcataca

SEQ ID NO: 39631 - DNA, 25 bp, probe
agaggcttattcagttcttacacat

SEQ ID NO: 39632 - DNA, 25 bp, probe
tacttgcctatctgacttcatacat

SEQ ID NO: 39633 - DNA, 25 bp, probe
cagttcttacacattccatcttaca

SEQ ID NO: 39634 - DNA, 25 bp, probe
cagaggcttattcagttcttacaca

SEQ ID NO: 39635 - DNA, 25 bp, probe
tcagttcttacacattccatcttac

SEQ ID NO: 39636 - DNA, 25 bp, probe
attcagttcttacacattccatctt

SEQ ID NO: 39637 - DNA, 25 bp, probe
tccatcttacattagtgattccatc

SEQ ID NO: 39638 - DNA, 25 bp, probe
ataagaagaagagagcatagccacc

SEQ ID NO: 39639 - DNA, 25 bp, probe
attacttgcctatctgacttcatac

SEQ ID NO: 39640 - DNA, 25 bp, probe
gcagaggcttattcagttcttacac

SEQ ID NO: 39641 - DNA, 25 bp, probe
agttcttacacattccatcttacat

SEQ ID NO: 39642 - DNA, 25 bp, probe
ttcagttcttacacattccatctta

SEQ ID NO: 39643 - DNA, 25 bp, probe
ttataagaagaagagagcatagcca

SEQ ID NO: 39644 - DNA, 25 bp, probe
tattcagttcttacacattccatct

SEQ ID NO: 39645 - DNA, 25 bp, probe
ttccatcttacattagtgattccat

SEQ ID NO: 39646 - DNA, 25 bp, probe
attccatcttacattagtgattcca

SEQ ID NO: 39647 - DNA, 25 bp, probe
cattccatcttacattagtgattcc

SEQ ID NO: 39648 - DNA, 25 bp, probe
gttcttacacattccatcttacatt

SEQ ID NO: 39649 - DNA, 25 bp, probe
aagaagaagagagcatagccaccta

SEQ ID NO: 39650 - DNA, 25 bp, probe
taagaagaagagagcatagccacct

SEQ ID NO: 39651 - DNA, 25 bp, probe
atattacttgcctatctgacttcat

SEQ ID NO: 39652 - DNA, 25 bp, probe
atgtagatgatatgtttcgtgggtt

SEQ ID NO: 39653 - DNA, 25 bp, probe
aatgtagatgatatgtttcgtgggt

SEQ ID NO: 39654 - DNA, 25 bp, probe
ggctctaaatccattatgactgttg

SEQ ID NO: 39655 - DNA, 25 bp, probe
gggctctaaatccattatgactgtt

SEQ ID NO: 39656 - DNA, 25 bp, probe
taaggtgagatcacactgaattagg

SEQ ID NO: 39657 - DNA, 25 bp, probe
agttaaggtgagatcacactgaatt

SEQ ID NO: 39658 - DNA, 25 bp, probe
aagttaaggtgagatcacactgaat

SEQ ID NO: 39659 - DNA, 25 bp, probe
gtagatgatatgtttcgtgggttga

SEQ ID NO: 39660 - DNA, 25 bp, probe
ttattcagttcttacacattccatc

SEQ ID NO: 39661 - DNA, 25 bp, probe
cttattcagttcttacacattccat

SEQ ID NO: 39662 - DNA, 25 bp, probe
aaatgtagatgatatgtttcgtggg

SEQ ID NO: 39663 - DNA, 25 bp, probe
taagttaaggtgagatcacactgaa

SEQ ID NO: 39664 - DNA, 25 bp, probe
ttaagttaaggtgagatcacactga

SEQ ID NO: 39665 - DNA, 25 bp, probe
gttaagttaaggtgagatcacactg

SEQ ID NO: 39666 - DNA, 25 bp, probe
tagatgatatgtttcgtgggttgaa

SEQ ID NO: 39667 - DNA, 25 bp, probe
acaggattgtgaattatacaccaga

SEQ ID NO: 39668 - DNA, 25 bp, probe
ccaccttacatacaggattgtgaat

SEQ ID NO: 39669 - DNA, 25 bp, probe
caccttacatacaggattgtgaatt

SEQ ID NO: 39670 - DNA, 25 bp, probe
aatgaggtacaagcaggttatccaa

SEQ ID NO: 39671 - DNA, 25 bp, probe
ttctacttcttcagtggatcatcac

SEQ ID NO: 39672 - DNA, 25 bp, probe
caggattgtgaattatacaccagat

SEQ ID NO: 39673 - DNA, 25 bp, probe
ctacttcttcagtggatcatcacag

SEQ ID NO: 39674 - DNA, 25 bp, probe
tctacttcttcagtggatcatcaca

SEQ ID NO: 39675 - DNA, 25 bp, probe
caggttatccaagaggcatccatac

SEQ ID NO: 39676 - DNA, 25 bp, probe
tacaggattgtgaattatacaccag

SEQ ID NO: 39677 - DNA, 25 bp, probe
atgtgcaataggtgagagaatgtat

SEQ ID NO: 39678 - DNA, 25 bp, probe
atgaggtacaagcaggttatccaag

SEQ ID NO: 39679 - DNA, 25 bp, probe
tacttcttcagtggatcatcacagt

SEQ ID NO: 39680 - DNA, 25 bp, probe
tgggctttatggagatattcacttt

SEQ ID NO: 39681 - DNA, 25 bp, probe
gggctttatggagatattcactttg

SEQ ID NO: 39682 - DNA, 25 bp, probe
ctgggctttatggagatattcactt

SEQ ID NO: 39683 - DNA, 25 bp, probe
ttatacaccagatttgccaagagat

SEQ ID NO: 39684 - DNA, 25 bp, probe
attatacaccagatttgccaagaga

SEQ ID NO: 39685 - DNA, 25 bp, probe
tgtgcaataggtgagagaatgtatt

SEQ ID NO: 39686 - DNA, 25 bp, probe
tatacaccagatttgccaagagatg

SEQ ID NO: 39687 - DNA, 25 bp, probe
catgtgcaataggtgagagaatgta

SEQ ID NO: 39688 - DNA, 25 bp, probe
tgaattatacaccagatttgccaag

SEQ ID NO: 39689 - DNA, 25 bp, probe
gaattatacaccagatttgccaaga

SEQ ID NO: 39690 - DNA, 25 bp, probe
aattatacaccagatttgccaagag

SEQ ID NO: 39691 - DNA, 25 bp, probe
aggattgtgaattatacaccagatt

SEQ ID NO: 39692 - DNA, 25 bp, probe
tcatagatgtgttattacttcctca

SEQ ID NO: 39693 - DNA, 25 bp, probe
gaggtacaagcaggttatccaagag

SEQ ID NO: 39694 - DNA, 25 bp, probe
ctggttacattgctaggcgagatag

SEQ ID NO: 39695 - DNA, 25 bp, probe
acttcttcagtggatcatcacagtt

SEQ ID NO: 39696 - DNA, 25 bp, probe
atgttctgtgactgaagaagatgag

SEQ ID NO: 39697 - DNA, 25 bp, probe
aagagatgctgttgattctgccatt

SEQ ID NO: 39698 - DNA, 25 bp, probe
atacaggattgtgaattatacacca

SEQ ID NO: 39699 - DNA, 25 bp, probe
accttacatacaggattgtgaatta

SEQ ID NO: 39700 - DNA, 25 bp, probe
tacccactctacaactcattcacag

SEQ ID NO: 39701 - DNA, 25 bp, probe
catacaggattgtgaattatacacc

SEQ ID NO: 39702 - DNA, 25 bp, probe
gaagaagatgagccttgcagatatc

SEQ ID NO: 39703 - DNA, 25 bp, probe
aggctgatataatgatctctttcgc

SEQ ID NO: 39704 - DNA, 25 bp, probe
tgaattgcactgaacagaattaaga

SEQ ID NO: 39705 - DNA, 25 bp, probe
cctgggctttatggagatattcact

SEQ ID NO: 39706 - DNA, 25 bp, probe
ggctgatataatgatctctttcgca

SEQ ID NO: 39707 - DNA, 25 bp, probe
ggctttatggagatattcactttga

SEQ ID NO: 39708 - DNA, 25 bp, probe
tgaagaagatgagccttgcagatat

SEQ ID NO: 39709 - DNA, 25 bp, probe
gagcctaaggttgatgctgtattac

SEQ ID NO: 39710 - DNA, 25 bp, probe
gacctgggctttatggagatattca

SEQ ID NO: 39711 - DNA, 25 bp, probe
tccattcttgcttgactctactatt

SEQ ID NO: 39712 - DNA, 25 bp, probe
aactctaattgtccattcttgcttg

SEQ ID NO: 39713 - DNA, 25 bp, probe
actctaattgtccattcttgcttga

SEQ ID NO: 39714 - DNA, 25 bp, probe
aactgattaccaagaacttccaagg

SEQ ID NO: 39715 - DNA, 25 bp, probe
ttgaatatgacttcctactccaacg

SEQ ID NO: 39716 - DNA, 25 bp, probe
aattcagcaagattaacacaggcat

SEQ ID NO: 39717 - DNA, 25 bp, probe
actgattaccaagaacttccaagga

SEQ ID NO: 39718 - DNA, 25 bp, probe
ccattcttgcttgactctactatta

SEQ ID NO: 39719 - DNA, 25 bp, probe
gtaagttgcttcctaacatccttgg

SEQ ID NO: 39720 - DNA, 25 bp, probe
ctgtaagttgcttcctaacatcctt

SEQ ID NO: 39721 - DNA, 25 bp, probe
gtccattcttgcttgactctactat

SEQ ID NO: 39722 - DNA, 25 bp, probe
ctaattgtccattcttgcttgactc

SEQ ID NO: 39723 - DNA, 25 bp, probe
ctctaattgtccattcttgcttgac

SEQ ID NO: 39724 - DNA, 25 bp, probe
aattgtccattcttgcttgactcta

SEQ ID NO: 39725 - DNA, 25 bp, probe
taattgtccattcttgcttgactct

SEQ ID NO: 39726 - DNA, 25 bp, probe
tctaattgtccattcttgcttgact

SEQ ID NO: 39727 - DNA, 25 bp, probe
tgtaagttgcttcctaacatccttg

SEQ ID NO: 39728 - DNA, 25 bp, probe
ctctgtaagttgcttcctaacatcc

SEQ ID NO: 39729 - DNA, 25 bp, probe
tgattaccaagaacttccaaggaat

SEQ ID NO: 39730 - DNA, 25 bp, probe
attgtccattcttgcttgactctac

SEQ ID NO: 39731 - DNA, 25 bp, probe
ctgattaccaagaacttccaaggaa

SEQ ID NO: 39732 - DNA, 25 bp, probe
tctgtaagttgcttcctaacatcct

SEQ ID NO: 39733 - DNA, 25 bp, probe
tgtccattcttgcttgactctacta

SEQ ID NO: 39734 - DNA, 25 bp, probe
attaccaagaacttccaaggaatcg

SEQ ID NO: 39735 - DNA, 25 bp, probe
gctctgtaagttgcttcctaacatc

SEQ ID NO: 39736 - DNA, 25 bp, probe
attcagcaagattaacacaggcatg

SEQ ID NO: 39737 - DNA, 25 bp, probe
ttgtccattcttgcttgactctact

SEQ ID NO: 39738 - DNA, 25 bp, probe
ggtttggttgttagaaatggtgtaa

SEQ ID NO: 39739 - DNA, 25 bp, probe
tatgatgaaaggagacagatgatgg

SEQ ID NO: 39740 - DNA, 25 bp, probe
ggtatgatgaaaggagacagatgat

SEQ ID NO: 39741 - DNA, 25 bp, probe
cagtattggaggtatgatgaaagga

SEQ ID NO: 39742 - DNA, 25 bp, probe
atatgacttcctactccaacgtatc

SEQ ID NO: 39743 - DNA, 25 bp, probe
catgctctgtaagttgcttcctaac

SEQ ID NO: 39744 - DNA, 25 bp, probe
tattggaggtatgatgaaaggagac

SEQ ID NO: 39745 - DNA, 25 bp, probe
gtattggaggtatgatgaaaggaga

SEQ ID NO: 39746 - DNA, 25 bp, probe
agtattggaggtatgatgaaaggag

SEQ ID NO: 39747 - DNA, 25 bp, probe
taaccagtattggaggtatgatgaa

SEQ ID NO: 39748 - DNA, 25 bp, probe
caaactgattaccaagaacttccaa

SEQ ID NO: 39749 - DNA, 25 bp, probe
gaggtatgatgaaaggagacagatg

SEQ ID NO: 39750 - DNA, 25 bp, probe
aattctggactacacattcaggagg

SEQ ID NO: 39751 - DNA, 25 bp, probe
tgctctgtaagttgcttcctaacat

SEQ ID NO: 39752 - DNA, 25 bp, probe
atgctctgtaagttgcttcctaaca

SEQ ID NO: 39753 - DNA, 25 bp, probe
atcccaaactgattaccaagaactt

SEQ ID NO: 39754 - DNA, 25 bp, probe
tatcccaaactgattaccaagaact

SEQ ID NO: 39755 - DNA, 25 bp, probe
agcagtggtaagaatagtagatgtg

SEQ ID NO: 39756 - DNA, 25 bp, probe
gagcagtggtaagaatagtagatgt

SEQ ID NO: 39757 - DNA, 25 bp, probe
agagcagtggtaagaatagtagatg

SEQ ID NO: 39758 - DNA, 25 bp, probe
cagtggtaagaatagtagatgtggc

SEQ ID NO: 39759 - DNA, 25 bp, probe
gcagtggtaagaatagtagatgtgg

SEQ ID NO: 39760 - DNA, 25 bp, probe
gtatctatatgactatgcgtggctg

SEQ ID NO: 39761 - DNA, 25 bp, probe
aagagcagtggtaagaatagtagat

SEQ ID NO: 39762 - DNA, 25 bp, probe
atggtctgtcaatgagagcataatt

SEQ ID NO: 39763 - DNA, 25 bp, probe
tatctatatgactatgcgtggctgg

SEQ ID NO: 39764 - DNA, 25 bp, probe
ggcacttattgaatatatgatcggc

SEQ ID NO: 39765 - DNA, 25 bp, probe
agtatctatatgactatgcgtggct

SEQ ID NO: 39766 - DNA, 25 bp, probe
gttcttcagaagtcacacattacaa

SEQ ID NO: 39767 - DNA, 25 bp, probe
aggttcttcagaagtcacacattac

SEQ ID NO: 39768 - DNA, 25 bp, probe
caggttcttcagaagtcacacatta

SEQ ID NO: 39769 - DNA, 25 bp, probe
tggcacttattgaatatatgatcgg

SEQ ID NO: 39770 - DNA, 25 bp, probe
ggttcttcagaagtcacacattaca

SEQ ID NO: 39771 - DNA, 25 bp, probe
catggtctgtcaatgagagcataat

SEQ ID NO: 39772 - DNA, 25 bp, probe
atacagcatctggagtaaccgtatt

SEQ ID NO: 39773 - DNA, 25 bp, probe
aatacagcatctggagtaaccgtat

SEQ ID NO: 39774 - DNA, 25 bp, probe
gaagaactattgtgctcagagacac

SEQ ID NO: 39775 - DNA, 25 bp, probe
tagtatctatatgactatgcgtggc

SEQ ID NO: 39776 - DNA, 25 bp, probe
tcaggttcttcagaagtcacacatt

SEQ ID NO: 39777 - DNA, 25 bp, probe
ttcaggttcttcagaagtcacacat

SEQ ID NO: 39778 - DNA, 25 bp, probe
aagaactattgtgctcagagacact

SEQ ID NO: 39779 - DNA, 25 bp, probe
gaatacagcatctggagtaaccgta

SEQ ID NO: 39780 - DNA, 25 bp, probe
tcacacagacactaacgaaatatca

SEQ ID NO: 39781 - DNA, 25 bp, probe
agcatctggagtaaccgtattgttc

SEQ ID NO: 39782 - DNA, 25 bp, probe
cacacagacactaacgaaatatcaa

SEQ ID NO: 39783 - DNA, 25 bp, probe
tgtagtatctatatgactatgcgtg

SEQ ID NO: 39784 - DNA, 25 bp, probe
cccatacagtttgaatacagcatct

SEQ ID NO: 39785 - DNA, 25 bp, probe
gcttggcacttattgaatatatgat

SEQ ID NO: 39786 - DNA, 25 bp, probe
ccttcttcacacagacactaacgaa

SEQ ID NO: 39787 - DNA, 25 bp, probe
attgtgctcagagacactgttgata

SEQ ID NO: 39788 - DNA, 25 bp, probe
tattgtgctcagagacactgttgat

SEQ ID NO: 39789 - DNA, 25 bp, probe
tacagcatctggagtaaccgtattg

SEQ ID NO: 39790 - DNA, 25 bp, probe
ggaagaactattgtgctcagagaca

SEQ ID NO: 39791 - DNA, 25 bp, probe
ttcagaagtcacacattacaaagtt

SEQ ID NO: 39792 - DNA, 25 bp, probe
ggatattcagatgtatgtgcccttc

SEQ ID NO: 39793 - DNA, 25 bp, probe
aaagagcagtggtaagaatagtaga

SEQ ID NO: 39794 - DNA, 25 bp, probe
acccatacagtttgaatacagcatc

SEQ ID NO: 39795 - DNA, 25 bp, probe
gacccatacagtttgaatacagcat

SEQ ID NO: 39796 - DNA, 25 bp, probe
tcttcacacagacactaacgaaata

SEQ ID NO: 39797 - DNA, 25 bp, probe
atattcagatgtatgtgcccttctt

SEQ ID NO: 39798 - DNA, 25 bp, probe
gatattcagatgtatgtgcccttct

SEQ ID NO: 39799 - DNA, 25 bp, probe
tacttgaccatttgtttctgtttcc

SEQ ID NO: 39800 - DNA, 25 bp, probe
ccttacttgaccatttgtttctgtt

SEQ ID NO: 39801 - DNA, 25 bp, probe
caccttacttgaccatttgtttctg

SEQ ID NO: 39802 - DNA, 25 bp, probe
accttacttgaccatttgtttctgt

SEQ ID NO: 39803 - DNA, 25 bp, probe
ttacttgaccatttgtttctgtttc

SEQ ID NO: 39804 - DNA, 25 bp, probe
cttacttgaccatttgtttctgttt

SEQ ID NO: 39805 - DNA, 25 bp, probe
tcattatttatgtccaggtgtttgt

SEQ ID NO: 39806 - DNA, 25 bp, probe
gcaccttacttgaccatttgtttct

SEQ ID NO: 39807 - DNA, 25 bp, probe
ctcattatttatgtccaggtgtttg

SEQ ID NO: 39808 - DNA, 25 bp, probe
acttgaccatttgtttctgtttccc

SEQ ID NO: 39809 - DNA, 25 bp, probe
cattatttatgtccaggtgtttgtt

SEQ ID NO: 39810 - DNA, 25 bp, probe
ccctcattatttatgtccaggtgtt

SEQ ID NO: 39811 - DNA, 25 bp, probe
cctcattatttatgtccaggtgttt

SEQ ID NO: 39812 - DNA, 25 bp, probe
attatttatgtccaggtgtttgttt

SEQ ID NO: 39813 - DNA, 25 bp, probe
ggcaccttacttgaccatttgtttc

SEQ ID NO: 39814 - DNA, 25 bp, probe
ccaggtgtttgttttgttttgtttt

SEQ ID NO: 39815 - DNA, 25 bp, probe
tatgtccaggtgtttgttttgtttt

SEQ ID NO: 39816 - DNA, 25 bp, probe
ttatgtccaggtgtttgttttgttt

SEQ ID NO: 39817 - DNA, 25 bp, probe
tttatgtccaggtgtttgttttgtt

SEQ ID NO: 39818 - DNA, 25 bp, probe
atttatgtccaggtgtttgttttgt

SEQ ID NO: 39819 - DNA, 25 bp, probe
tccaggtgtttgttttgttttgttt

SEQ ID NO: 39820 - DNA, 25 bp, probe
gccctcattatttatgtccaggtgt

SEQ ID NO: 39821 - DNA, 25 bp, probe
atgtccaggtgtttgttttgttttg

SEQ ID NO: 39822 - DNA, 25 bp, probe
gtccaggtgtttgttttgttttgtt

SEQ ID NO: 39823 - DNA, 25 bp, probe
tatttatgtccaggtgtttgttttg

SEQ ID NO: 39824 - DNA, 25 bp, probe
ttttctaaatgtagttctgctccag

SEQ ID NO: 39825 - DNA, 25 bp, probe
tgtccaggtgtttgttttgttttgt

SEQ ID NO: 39826 - DNA, 25 bp, probe
ttatttatgtccaggtgtttgtttt

SEQ ID NO: 39827 - DNA, 25 bp, probe
attttctaaatgtagttctgctcca

SEQ ID NO: 39828 - DNA, 25 bp, probe
cgccctcattatttatgtccaggtg

SEQ ID NO: 39829 - DNA, 25 bp, probe
tggcaccttacttgaccatttgttt

SEQ ID NO: 39830 - DNA, 25 bp, probe
ttggcaccttacttgaccatttgtt

SEQ ID NO: 39831 - DNA, 25 bp, probe
tttggcaccttacttgaccatttgt

SEQ ID NO: 39832 - DNA, 25 bp, probe
cttgaccatttgtttctgtttcccc

SEQ ID NO: 39833 - DNA, 25 bp, probe
ttctaaatgtagttctgctccagac

SEQ ID NO: 39834 - DNA, 25 bp, probe
tttctaaatgtagttctgctccaga

SEQ ID NO: 39835 - DNA, 25 bp, probe
ctaaatgtagttctgctccagacag

SEQ ID NO: 39836 - DNA, 25 bp, probe
tctaaatgtagttctgctccagaca

SEQ ID NO: 39837 - DNA, 25 bp, probe
aattttctaaatgtagttctgctcc

SEQ ID NO: 39838 - DNA, 25 bp, probe
taaatgtagttctgctccagacagg

SEQ ID NO: 39839 - DNA, 25 bp, probe
ttttggcaccttacttgaccatttg

SEQ ID NO: 39840 - DNA, 25 bp, probe
ccgccctcattatttatgtccaggt

SEQ ID NO: 39841 - DNA, 25 bp, probe
tagttctgctccagacagggaatta

SEQ ID NO: 39842 - DNA, 25 bp, probe
gaattttctaaatgtagttctgctc

SEQ ID NO: 39843 - DNA, 25 bp, probe
tcacagaagacagttactcaacatt

SEQ ID NO: 39844 - DNA, 25 bp, probe
ctcacagaagacagttactcaacat

SEQ ID NO: 39845 - DNA, 25 bp, probe
ctctcacagaagacagttactcaac

SEQ ID NO: 39846 - DNA, 25 bp, probe
aactgaattgcttggtggaacatat

SEQ ID NO: 39847 - DNA, 25 bp, probe
acttgctcttctgtgattattgtca

SEQ ID NO: 39848 - DNA, 25 bp, probe
cttgctcttctgtgattattgtcat

SEQ ID NO: 39849 - DNA, 25 bp, probe
tctcacagaagacagttactcaaca

SEQ ID NO: 39850 - DNA, 25 bp, probe
gaactgaattgcttggtggaacata

SEQ ID NO: 39851 - DNA, 25 bp, probe
atgtattaggctaatgctgtgttgt

SEQ ID NO: 39852 - DNA, 25 bp, probe
tattaggctaatgctgtgttgtctc

SEQ ID NO: 39853 - DNA, 25 bp, probe
catgtattaggctaatgctgtgttg

SEQ ID NO: 39854 - DNA, 25 bp, probe
tcatgtattaggctaatgctgtgtt

SEQ ID NO: 39855 - DNA, 25 bp, probe
ttgtcatgtattaggctaatgctgt

SEQ ID NO: 39856 - DNA, 25 bp, probe
cacataactgtctccttaaccactg

SEQ ID NO: 39857 - DNA, 25 bp, probe
gtattaggctaatgctgtgttgtct

SEQ ID NO: 39858 - DNA, 25 bp, probe
attgtcatgtattaggctaatgctg

SEQ ID NO: 39859 - DNA, 25 bp, probe
cacttgctcttctgtgattattgtc

SEQ ID NO: 39860 - DNA, 25 bp, probe
aacacttgctcttctgtgattattg

SEQ ID NO: 39861 - DNA, 25 bp, probe
gaacacttgctcttctgtgattatt

SEQ ID NO: 39862 - DNA, 25 bp, probe
gtcatgtattaggctaatgctgtgt

SEQ ID NO: 39863 - DNA, 25 bp, probe
tgtcatgtattaggctaatgctgtg

SEQ ID NO: 39864 - DNA, 25 bp, probe
tgtattaggctaatgctgtgttgtc

SEQ ID NO: 39865 - DNA, 25 bp, probe
ttgctcttctgtgattattgtcatg

SEQ ID NO: 39866 - DNA, 25 bp, probe
tgctcttctgtgattattgtcatgt

SEQ ID NO: 39867 - DNA, 25 bp, probe
gtaggctactccatgatagtgttaa

SEQ ID NO: 39868 - DNA, 25 bp, probe
acacttgctcttctgtgattattgt

SEQ ID NO: 39869 - DNA, 25 bp, probe
ttctggcacataactgtctccttaa

SEQ ID NO: 39870 - DNA, 25 bp, probe
gctctcacagaagacagttactcaa

SEQ ID NO: 39871 - DNA, 25 bp, probe
gctcttctgtgattattgtcatgta

SEQ ID NO: 39872 - DNA, 25 bp, probe
caggtactgagtgatgctgtatata

SEQ ID NO: 39873 - DNA, 25 bp, probe
ataactgtctccttaaccactggaa

SEQ ID NO: 39874 - DNA, 25 bp, probe
ataccaccatcatgttcagaccatt

SEQ ID NO: 39875 - DNA, 25 bp, probe
acataactgtctccttaaccactgg

SEQ ID NO: 39876 - DNA, 25 bp, probe
ttcatgtggcagagtcttctatgtt

SEQ ID NO: 39877 - DNA, 25 bp, probe
tactacatctttctggcacataact

SEQ ID NO: 39878 - DNA, 25 bp, probe
cctcagatatttaaccagtaagcct

SEQ ID NO: 39879 - DNA, 25 bp, probe
tctggcacataactgtctccttaac

SEQ ID NO: 39880 - DNA, 25 bp, probe
actacatctttctggcacataactg

SEQ ID NO: 39881 - DNA, 25 bp, probe
tgcctcagatatttaaccagtaagc

SEQ ID NO: 39882 - DNA, 25 bp, probe
cagcatataaggaaagtgttcaagg

SEQ ID NO: 39883 - DNA, 25 bp, probe
ccagcatataaggaaagtgttcaag

SEQ ID NO: 39884 - DNA, 25 bp, probe
tattgtcatgtattaggctaatgct

SEQ ID NO: 39885 - DNA, 25 bp, probe
tgtgattattgtcatgtattaggct

SEQ ID NO: 39886 - DNA, 25 bp, probe
tcttcatgtggcagagtcttctatg

SEQ ID NO: 39887 - DNA, 25 bp, probe
tcctggagaatacaatgaacatacc

SEQ ID NO: 39888 - DNA, 25 bp, probe
acacaatcttcctggagaatacaat

SEQ ID NO: 39889 - DNA, 25 bp, probe
tcttcctggagaatacaatgaacat

SEQ ID NO: 39890 - DNA, 25 bp, probe
atcttcctggagaatacaatgaaca

SEQ ID NO: 39891 - DNA, 25 bp, probe
acaatcttcctggagaatacaatga

SEQ ID NO: 39892 - DNA, 25 bp, probe
cacaatcttcctggagaatacaatg

SEQ ID NO: 39893 - DNA, 25 bp, probe
cacacaatcttcctggagaatacaa

SEQ ID NO: 39894 - DNA, 25 bp, probe
aactcactacctggagagaacttag

SEQ ID NO: 39895 - DNA, 25 bp, probe
aatcttcctggagaatacaatgaac

SEQ ID NO: 39896 - DNA, 25 bp, probe
caatcttcctggagaatacaatgaa

SEQ ID NO: 39897 - DNA, 25 bp, probe
ttcctggagaatacaatgaacatac

SEQ ID NO: 39898 - DNA, 25 bp, probe
caactcactacctggagagaactta

SEQ ID NO: 39899 - DNA, 25 bp, probe
cttcctggagaatacaatgaacata

SEQ ID NO: 39900 - DNA, 25 bp, probe
tcctcataccacttgctattattag

SEQ ID NO: 39901 - DNA, 25 bp, probe
attcaactcactacctggagagaac

SEQ ID NO: 39902 - DNA, 25 bp, probe
cattcaactcactacctggagagaa

SEQ ID NO: 39903 - DNA, 25 bp, probe
tcactacctggagagaacttagtaa

SEQ ID NO: 39904 - DNA, 25 bp, probe
ctcactacctggagagaacttagta

SEQ ID NO: 39905 - DNA, 25 bp, probe
cctggagaatacaatgaacatacca

SEQ ID NO: 39906 - DNA, 25 bp, probe
ttcctcataccacttgctattatta

SEQ ID NO: 39907 - DNA, 25 bp, probe
gtctatttcctcataccacttgcta

SEQ ID NO: 39908 - DNA, 25 bp, probe
ccaaagattcattcagtgctcattt

SEQ ID NO: 39909 - DNA, 25 bp, probe
ttacatccaaagattcattcagtgc

SEQ ID NO: 39910 - DNA, 25 bp, probe
ctggagaatacaatgaacataccaa

SEQ ID NO: 39911 - DNA, 25 bp, probe
tttgctctttacctactcagtgaaa

SEQ ID NO: 39912 - DNA, 25 bp, probe
atttgctctttacctactcagtgaa

SEQ ID NO: 39913 - DNA, 25 bp, probe
tacatccaaagattcattcagtgct

SEQ ID NO: 39914 - DNA, 25 bp, probe
catttgctctttacctactcagtga

SEQ ID NO: 39915 - DNA, 25 bp, probe
tccaaagattcattcagtgctcatt

SEQ ID NO: 39916 - DNA, 25 bp, probe
ctatcaagagagaggaaccagctac

SEQ ID NO: 39917 - DNA, 25 bp, probe
atccaaagattcattcagtgctcat

SEQ ID NO: 39918 - DNA, 25 bp, probe
tctatttcctcataccacttgctat

SEQ ID NO: 39919 - DNA, 25 bp, probe
tcaactcactacctggagagaactt

SEQ ID NO: 39920 - DNA, 25 bp, probe
ttcaactcactacctggagagaact

SEQ ID NO: 39921 - DNA, 25 bp, probe
actcactacctggagagaacttagt

SEQ ID NO: 39922 - DNA, 25 bp, probe
gcacacaatcttcctggagaataca

SEQ ID NO: 39923 - DNA, 25 bp, probe
ccatttgctctttacctactcagtg

SEQ ID NO: 39924 - DNA, 25 bp, probe
ctatttcctcataccacttgctatt

SEQ ID NO: 39925 - DNA, 25 bp, probe
catccaaagattcattcagtgctca

SEQ ID NO: 39926 - DNA, 25 bp, probe
acatccaaagattcattcagtgctc

SEQ ID NO: 39927 - DNA, 25 bp, probe
aacccatttgctctttacctactca

SEQ ID NO: 39928 - DNA, 25 bp, probe
tttcctcataccacttgctattatt

SEQ ID NO: 39929 - DNA, 25 bp, probe
caacccatttgctctttacctactc

SEQ ID NO: 39930 - DNA, 25 bp, probe
aatgctaagaacatggtgaccaatt

SEQ ID NO: 39931 - DNA, 25 bp, probe
tgtcaatatccttacgcataacctt

SEQ ID NO: 39932 - DNA, 25 bp, probe
ttgtcaatatccttacgcataacct

SEQ ID NO: 39933 - DNA, 25 bp, probe
caggagtctaagagaatatacgctt

SEQ ID NO: 39934 - DNA, 25 bp, probe
gtcaatatccttacgcataaccttg

SEQ ID NO: 39935 - DNA, 25 bp, probe
ataggaactggaatgaagtggttac

SEQ ID NO: 39936 - DNA, 25 bp, probe
gataggaactggaatgaagtggtta

SEQ ID NO: 39937 - DNA, 25 bp, probe
ccaggagtctaagagaatatacgct

SEQ ID NO: 39938 - DNA, 25 bp, probe
accaggagtctaagagaatatacgc

SEQ ID NO: 39939 - DNA, 25 bp, probe
aagtatgaactggaagaggatggat

SEQ ID NO: 39940 - DNA, 25 bp, probe
agattgaagcactgaagtcattctc

SEQ ID NO: 39941 - DNA, 25 bp, probe
gagattgaagcactgaagtcattct

SEQ ID NO: 39942 - DNA, 25 bp, probe
taccaggagtctaagagaatatacg

SEQ ID NO: 39943 - DNA, 25 bp, probe
gaatgtcacaagcacagaatctatg

SEQ ID NO: 39944 - DNA, 25 bp, probe
gattgaagcactgaagtcattctca

SEQ ID NO: 39945 - DNA, 25 bp, probe
taggaactggaatgaagtggttaca

SEQ ID NO: 39946 - DNA, 25 bp, probe
gaagtatgaactggaagaggatgga

SEQ ID NO: 39947 - DNA, 25 bp, probe
ggaatgtcacaagcacagaatctat

SEQ ID NO: 39948 - DNA, 25 bp, probe
caactctgaagtcactgtgtactac

SEQ ID NO: 39949 - DNA, 25 bp, probe
aatgtcacaagcacagaatctatgg

SEQ ID NO: 39950 - DNA, 25 bp, probe
tctatgattgacaagtaccaggctt

SEQ ID NO: 39951 - DNA, 25 bp, probe
gaggtggataggaactggaatgaag

SEQ ID NO: 39952 - DNA, 25 bp, probe
agtatgaactggaagaggatggatc

SEQ ID NO: 39953 - DNA, 25 bp, probe
cgagattgaagcactgaagtcattc

SEQ ID NO: 39954 - DNA, 25 bp, probe
ggataggaactggaatgaagtggtt

SEQ ID NO: 39955 - DNA, 25 bp, probe
aactctgaagtcactgtgtactacc

SEQ ID NO: 39956 - DNA, 25 bp, probe
ccaactctgaagtcactgtgtacta

SEQ ID NO: 39957 - DNA, 25 bp, probe
tgtcacaagcacagaatctatggat

SEQ ID NO: 39958 - DNA, 25 bp, probe
atgtcacaagcacagaatctatgga

SEQ ID NO: 39959 - DNA, 25 bp, probe
ctgagcagttgaagaagacctactt

SEQ ID NO: 39960 - DNA, 25 bp, probe
ggaagtatgaactggaagaggatgg

SEQ ID NO: 39961 - DNA, 25 bp, probe
gactacttagctgagttcaattcca

SEQ ID NO: 39962 - DNA, 25 bp, probe
tgactacttagctgagttcaattcc

SEQ ID NO: 39963 - DNA, 25 bp, probe
aggagtctaagagaatatacgctta

SEQ ID NO: 39964 - DNA, 25 bp, probe
ccgttggtctatgattgacaagtac

SEQ ID NO: 39965 - DNA, 25 bp, probe
ctacttagctgagttcaattccaca

SEQ ID NO: 39966 - DNA, 25 bp, probe
actacttagctgagttcaattccac

SEQ ID NO: 39967 - DNA, 25 bp, probe
gtcacaagcacagaatctatggatt

SEQ ID NO: 39968 - DNA, 25 bp, probe
gaactggaatgaagtggttacacag

SEQ ID NO: 39969 - DNA, 25 bp, probe
tacttagctgagttcaattccacac

SEQ ID NO: 39970 - DNA, 25 bp, probe
tttgtcaatatccttacgcataacc

SEQ ID NO: 39971 - DNA, 25 bp, probe
tgaaaggatttaaccacaaactacc

SEQ ID NO: 39972 - DNA, 25 bp, probe
ctactttaacatcctcatcaagcct

SEQ ID NO: 39973 - DNA, 25 bp, probe
agacctactttaacatcctcatcaa

SEQ ID NO: 39974 - DNA, 25 bp, probe
ggatttaaccacaaactacctctac

SEQ ID NO: 39975 - DNA, 25 bp, probe
gttgatgtcttgatgctcctatctg

SEQ ID NO: 39976 - DNA, 25 bp, probe
ttgatgtcttgatgctcctatctgt

SEQ ID NO: 39977 - DNA, 25 bp, probe
tgatgtcttgatgctcctatctgtg

SEQ ID NO: 39978 - DNA, 25 bp, probe
cgttgatgtcttgatgctcctatct

SEQ ID NO: 39979 - DNA, 25 bp, probe
aatgagagtcgaatgctacagtatc

SEQ ID NO: 39980 - DNA, 25 bp, probe
atgagagtcgaatgctacagtatct

SEQ ID NO: 39981 - DNA, 25 bp, probe
gatgtcttgatgctcctatctgtgc

SEQ ID NO: 39982 - DNA, 25 bp, probe
ccgttgatgtcttgatgctcctatc

SEQ ID NO: 39983 - DNA, 25 bp, probe
tgagagtcgaatgctacagtatctg

SEQ ID NO: 39984 - DNA, 25 bp, probe
aaatgagagtcgaatgctacagtat

SEQ ID NO: 39985 - DNA, 25 bp, probe
ttaagaaggtcgcctaagcctaaga

SEQ ID NO: 39986 - DNA, 25 bp, probe
gaaatgagagtcgaatgctacagta

SEQ ID NO: 39987 - DNA, 25 bp, probe
cccgtgtatctctcaataaaggtgg

SEQ ID NO: 39988 - DNA, 25 bp, probe
gagaaatgagagtcgaatgctacag

SEQ ID NO: 39989 - DNA, 25 bp, probe
ctgagaaatgagagtcgaatgctac

SEQ ID NO: 39990 - DNA, 25 bp, probe
taagaaggtcgcctaagcctaagag

SEQ ID NO: 39991 - DNA, 25 bp, probe
taagagaagacagtcccaggagaag

SEQ ID NO: 39992 - DNA, 25 bp, probe
ctaagagaagacagtcccaggagaa

SEQ ID NO: 39993 - DNA, 25 bp, probe
tctgagaaatgagagtcgaatgcta

SEQ ID NO: 39994 - DNA, 25 bp, probe
agaaatgagagtcgaatgctacagt

SEQ ID NO: 39995 - DNA, 25 bp, probe
tgagaaatgagagtcgaatgctaca

SEQ ID NO: 39996 - DNA, 25 bp, probe
gagagtcgaatgctacagtatctgc

SEQ ID NO: 39997 - DNA, 25 bp, probe
taagcctaagagaagacagtcccag

SEQ ID NO: 39998 - DNA, 25 bp, probe
ctaagcctaagagaagacagtccca

SEQ ID NO: 39999 - DNA, 25 bp, probe
gcctaagcctaagagaagacagtcc

SEQ ID NO: 40000 - DNA, 25 bp, probe
ccgtgtatctctcaataaaggtggc

SEQ ID NO: 40001 - DNA, 25 bp, probe
aaaccccgtgtatctctcaataaag

SEQ ID NO: 40002 - DNA, 25 bp, probe
caaaccccgtgtatctctcaataaa

SEQ ID NO: 40003 - DNA, 25 bp, probe
cgcctaagcctaagagaagacagtc

SEQ ID NO: 40004 - DNA, 25 bp, probe
cacctgatctcgtatcactagcttg

SEQ ID NO: 40005 - DNA, 25 bp, probe
cttaagaaggtcgcctaagcctaag

SEQ ID NO: 40006 - DNA, 25 bp, probe
cataatttctgagcctcggtttccc

SEQ ID NO: 40007 - DNA, 25 bp, probe
ccataatttctgagcctcggtttcc

SEQ ID NO: 40008 - DNA, 25 bp, probe
cctaagcctaagagaagacagtccc

SEQ ID NO: 40009 - DNA, 25 bp, probe
gtctgagaaatgagagtcgaatgct

SEQ ID NO: 40010 - DNA, 25 bp, probe
atctaaggaacagatgtggtcgttc

SEQ ID NO: 40011 - DNA, 25 bp, probe
tcgcctaagcctaagagaagacagt

SEQ ID NO: 40012 - DNA, 25 bp, probe
acacctgatctcgtatcactagctt

SEQ ID NO: 40013 - DNA, 25 bp, probe
aaccccgtgtatctctcaataaagg

SEQ ID NO: 40014 - DNA, 25 bp, probe
gtcgcctaagcctaagagaagacag

SEQ ID NO: 40015 - DNA, 25 bp, probe
ctttgccttctctggactcagtttc

SEQ ID NO: 40016 - DNA, 25 bp, probe
gaaggtcgcctaagcctaagagaag

SEQ ID NO: 40017 - DNA, 25 bp, probe
ctttcccgttgatgtcttgatgctc

SEQ ID NO: 40018 - DNA, 25 bp, probe
tatctctcaataaaggtggccgaag

SEQ ID NO: 40019 - DNA, 25 bp, probe
ctgtgtgacatcatagtcctctact

SEQ ID NO: 40020 - DNA, 25 bp, probe
tgtgtgacatcatagtcctctactg

SEQ ID NO: 40021 - DNA, 25 bp, probe
aaatatgtggaagattacgagcagg

SEQ ID NO: 40022 - DNA, 25 bp, probe
taaatatgtggaagattacgagcag

SEQ ID NO: 40023 - DNA, 25 bp, probe
gtgtgacatcatagtcctctactgc

SEQ ID NO: 40024 - DNA, 25 bp, probe
gctgtgtgacatcatagtcctctac

SEQ ID NO: 40025 - DNA, 25 bp, probe
aatttctggaatctgattgagtctc

SEQ ID NO: 40026 - DNA, 25 bp, probe
agactctactatcgggagaagaaat

SEQ ID NO: 40027 - DNA, 25 bp, probe
aagactctactatcgggagaagaaa

SEQ ID NO: 40028 - DNA, 25 bp, probe
aaagactctactatcgggagaagaa

SEQ ID NO: 40029 - DNA, 25 bp, probe
ataaatatgtggaagattacgagca

SEQ ID NO: 40030 - DNA, 25 bp, probe
tgctgtgtgacatcatagtcctcta

SEQ ID NO: 40031 - DNA, 25 bp, probe
ctacaatttcaggtttgccaagtac

SEQ ID NO: 40032 - DNA, 25 bp, probe
gactctactatcgggagaagaaata

SEQ ID NO: 40033 - DNA, 25 bp, probe
aatatgtggaagattacgagcaggg

SEQ ID NO: 40034 - DNA, 25 bp, probe
tgacatcatagtcctctactgcatg

SEQ ID NO: 40035 - DNA, 25 bp, probe
gtgacatcatagtcctctactgcat

SEQ ID NO: 40036 - DNA, 25 bp, probe
gctacaatttcaggtttgccaagta

SEQ ID NO: 40037 - DNA, 25 bp, probe
atttctggaatctgattgagtctcc

SEQ ID NO: 40038 - DNA, 25 bp, probe
actctactatcgggagaagaaatat

SEQ ID NO: 40039 - DNA, 25 bp, probe
cgggagaagaaatataaatatgtgg

SEQ ID NO: 40040 - DNA, 25 bp, probe
cacaacgtatctcctggctacaatt

SEQ ID NO: 40041 - DNA, 25 bp, probe
atcaaagaacagagaggaggaggag

SEQ ID NO: 40042 - DNA, 25 bp, probe
atcatagtcctctactgcatgaaga

SEQ ID NO: 40043 - DNA, 25 bp, probe
catcatagtcctctactgcatgaag

SEQ ID NO: 40044 - DNA, 25 bp, probe
tcatagtcctctactgcatgaagaa

SEQ ID NO: 40045 - DNA, 25 bp, probe
catagtcctctactgcatgaagaaa

SEQ ID NO: 40046 - DNA, 25 bp, probe
aaatttctggaatctgattgagtct

SEQ ID NO: 40047 - DNA, 25 bp, probe
acatcatagtcctctactgcatgaa

SEQ ID NO: 40048 - DNA, 25 bp, probe
catcaaagaacagagaggaggagga

SEQ ID NO: 40049 - DNA, 25 bp, probe
tgtgacatcatagtcctctactgca

SEQ ID NO: 40050 - DNA, 25 bp, probe
caacgtatctcctggctacaatttc

SEQ ID NO: 40051 - DNA, 25 bp, probe
gacatcatagtcctctactgcatga

SEQ ID NO: 40052 - DNA, 25 bp, probe
atatgtggaagattacgagcagggt

SEQ ID NO: 40053 - DNA, 25 bp, probe
tataaatatgtggaagattacgagc

SEQ ID NO: 40054 - DNA, 25 bp, probe
aacgtatctcctggctacaatttca

SEQ ID NO: 40055 - DNA, 25 bp, probe
atgaagaaaagactctactatcggg

SEQ ID NO: 40056 - DNA, 25 bp, probe
tcgggagaagaaatataaatatgtg

SEQ ID NO: 40057 - DNA, 25 bp, probe
tgaagaaaagactctactatcggga

SEQ ID NO: 40058 - DNA, 25 bp, probe
gtgctgtgtgacatcatagtcctct

SEQ ID NO: 40059 - DNA, 25 bp, probe
acaacgtatctcctggctacaattt

SEQ ID NO: 40060 - DNA, 25 bp, probe
gaaggcagggaaatttgacatcatc

SEQ ID NO: 40061 - DNA, 25 bp, probe
aatttcaggtttgccaagtactaca

SEQ ID NO: 40062 - DNA, 25 bp, probe
aaaagactctactatcgggagaaga

SEQ ID NO: 40063 - DNA, 25 bp, probe
tacagtggcttcaagagtccttact

SEQ ID NO: 40064 - DNA, 25 bp, probe
gtacagtggcttcaagagtccttac

SEQ ID NO: 40065 - DNA, 25 bp, probe
agtacagtggcttcaagagtcctta

SEQ ID NO: 40066 - DNA, 25 bp, probe
cagtacagtggcttcaagagtcctt

SEQ ID NO: 40067 - DNA, 25 bp, probe
ctactagggagaagtctgcaagatg

SEQ ID NO: 40068 - DNA, 25 bp, probe
tactagggagaagtctgcaagatgt

SEQ ID NO: 40069 - DNA, 25 bp, probe
agtggcttcaagagtccttactgaa

SEQ ID NO: 40070 - DNA, 25 bp, probe
tagggagaagtctgcaagatgtcaa

SEQ ID NO: 40071 - DNA, 25 bp, probe
gaaagagtttccgaagagtgaaggg

SEQ ID NO: 40072 - DNA, 25 bp, probe
ttcaagagtccttactgaagccagg

SEQ ID NO: 40073 - DNA, 25 bp, probe
gctactagggagaagtctgcaagat

SEQ ID NO: 40074 - DNA, 25 bp, probe
ctagggagaagtctgcaagatgtca

SEQ ID NO: 40075 - DNA, 25 bp, probe
ctgcgatggacttcacagatttgtc

SEQ ID NO: 40076 - DNA, 25 bp, probe
actagggagaagtctgcaagatgtc

SEQ ID NO: 40077 - DNA, 25 bp, probe
aaagagtttccgaagagtgaagggc

SEQ ID NO: 40078 - DNA, 25 bp, probe
agggagaagtctgcaagatgtcaag

SEQ ID NO: 40079 - DNA, 25 bp, probe
agctactagggagaagtctgcaaga

SEQ ID NO: 40080 - DNA, 25 bp, probe
cagctactagggagaagtctgcaag

SEQ ID NO: 40081 - DNA, 25 bp, probe
cagtggcttcaagagtccttactga

SEQ ID NO: 40082 - DNA, 25 bp, probe
gacctgcgatggacttcacagattt

SEQ ID NO: 40083 - DNA, 25 bp, probe
gattcctggacaaccagaggagata

SEQ ID NO: 40084 - DNA, 25 bp, probe
acagtggcttcaagagtccttactg

SEQ ID NO: 40085 - DNA, 25 bp, probe
attcctggacaaccagaggagatac

SEQ ID NO: 40086 - DNA, 25 bp, probe
ggagaagtctgcaagatgtcaaggg

SEQ ID NO: 40087 - DNA, 25 bp, probe
gggagaagtctgcaagatgtcaagg

SEQ ID NO: 40088 - DNA, 25 bp, probe
ttcctggacaaccagaggagataca

SEQ ID NO: 40089 - DNA, 25 bp, probe
gctcacgtctgtaatcccacctttt

SEQ ID NO: 40090 - DNA, 25 bp, probe
tcctggacaaccagaggagatacag

SEQ ID NO: 40091 - DNA, 25 bp, probe
gtaagttgaaggatattggacagga

SEQ ID NO: 40092 - DNA, 25 bp, probe
agtaagttgaaggatattggacagg

SEQ ID NO: 40093 - DNA, 25 bp, probe
taagttgaaggatattggacaggag

SEQ ID NO: 40094 - DNA, 25 bp, probe
ggatattggacaggaggacagtatt

SEQ ID NO: 40095 - DNA, 25 bp, probe
aggatattggacaggaggacagtat

SEQ ID NO: 40096 - DNA, 25 bp, probe
aagttgaaggatattggacaggagg

SEQ ID NO: 40097 - DNA, 25 bp, probe
aaggatattggacaggaggacagta

SEQ ID NO: 40098 - DNA, 25 bp, probe
tagtaagttgaaggatattggacag

SEQ ID NO: 40099 - DNA, 25 bp, probe
gttgaaggatattggacaggaggac

SEQ ID NO: 40100 - DNA, 25 bp, probe
agttgaaggatattggacaggagga

SEQ ID NO: 40101 - DNA, 25 bp, probe
ttagtaagttgaaggatattggaca

SEQ ID NO: 40102 - DNA, 25 bp, probe
tgttagtaagttgaaggatattgga

SEQ ID NO: 40103 - DNA, 25 bp, probe
gcctgcatatattatcgtactggta

SEQ ID NO: 40104 - DNA, 25 bp, probe
aagcctgcatatattatcgtactgg

SEQ ID NO: 40105 - DNA, 25 bp, probe
gttagtaagttgaaggatattggac

SEQ ID NO: 40106 - DNA, 25 bp, probe
ctgttagtaagttgaaggatattgg

SEQ ID NO: 40107 - DNA, 25 bp, probe
atattgggtgctaaatgtttgatgg

SEQ ID NO: 40108 - DNA, 25 bp, probe
atattggacaggaggacagtatttc

SEQ ID NO: 40109 - DNA, 25 bp, probe
gatattggacaggaggacagtattt

SEQ ID NO: 40110 - DNA, 25 bp, probe
ttgaaggatattggacaggaggaca

SEQ ID NO: 40111 - DNA, 25 bp, probe
tattggacaggaggacagtatttca

SEQ ID NO: 40112 - DNA, 25 bp, probe
agcctgcatatattatcgtactggt

SEQ ID NO: 40113 - DNA, 25 bp, probe
gacaagtgttcactcacatctgtaa

SEQ ID NO: 40114 - DNA, 25 bp, probe
agctctcttagacatcttgtgataa

SEQ ID NO: 40115 - DNA, 25 bp, probe
tattgggtgctaaatgtttgatggg

SEQ ID NO: 40116 - DNA, 25 bp, probe
gaaggatattggacaggaggacagt

SEQ ID NO: 40117 - DNA, 25 bp, probe
tgaaggatattggacaggaggacag

SEQ ID NO: 40118 - DNA, 25 bp, probe
tactctcaaatgtatgaagcaactg

SEQ ID NO: 40119 - DNA, 25 bp, probe
aatgccttaggactttgtttgtgtt

SEQ ID NO: 40120 - DNA, 25 bp, probe
aaggtctcattatatattgggtgct

SEQ ID NO: 40121 - DNA, 25 bp, probe
agggcattgaatagacaagtaaagc

SEQ ID NO: 40122 - DNA, 25 bp, probe
tagggcattgaatagacaagtaaag

SEQ ID NO: 40123 - DNA, 25 bp, probe
actctcaaatgtatgaagcaactgg

SEQ ID NO: 40124 - DNA, 25 bp, probe
attggacaggaggacagtatttcag

SEQ ID NO: 40125 - DNA, 25 bp, probe
cctgcatatattatcgtactggtaa

SEQ ID NO: 40126 - DNA, 25 bp, probe
acagaccaaagattgagtaaagtca

SEQ ID NO: 40127 - DNA, 25 bp, probe
aaaggtctcattatatattgggtgc

SEQ ID NO: 40128 - DNA, 25 bp, probe
atgccttaggactttgtttgtgttc

SEQ ID NO: 40129 - DNA, 25 bp, probe
aggtctcattatatattgggtgcta

SEQ ID NO: 40130 - DNA, 25 bp, probe
ttagggcattgaatagacaagtaaa

SEQ ID NO: 40131 - DNA, 25 bp, probe
tttagggcattgaatagacaagtaa

SEQ ID NO: 40132 - DNA, 25 bp, probe
ggacaggaggacagtatttcagaaa

SEQ ID NO: 40133 - DNA, 25 bp, probe
tatattgggtgctaaatgtttgatg

SEQ ID NO: 40134 - DNA, 25 bp, probe
ctctcaaatgtatgaagcaactggg

SEQ ID NO: 40135 - DNA, 25 bp, probe
cttaccaagatcacataccagagtc

SEQ ID NO: 40136 - DNA, 25 bp, probe
agtgtgaggctgtaacttatactaa

SEQ ID NO: 40137 - DNA, 25 bp, probe
ttaccaagatcacataccagagtct

SEQ ID NO: 40138 - DNA, 25 bp, probe
cagtgtgaggctgtaacttatacta

SEQ ID NO: 40139 - DNA, 25 bp, probe
agatatggaccatcagtgactcatg

SEQ ID NO: 40140 - DNA, 25 bp, probe
cagatatggaccatcagtgactcat

SEQ ID NO: 40141 - DNA, 25 bp, probe
gcttaccaagatcacataccagagt

SEQ ID NO: 40142 - DNA, 25 bp, probe
gcctaatcaagtcaaatggagaaac

SEQ ID NO: 40143 - DNA, 25 bp, probe
agcctaatcaagtcaaatggagaaa

SEQ ID NO: 40144 - DNA, 25 bp, probe
agtcatcgtttgtgtgtataagttg

SEQ ID NO: 40145 - DNA, 25 bp, probe
gtcatcgtttgtgtgtataagttgg

SEQ ID NO: 40146 - DNA, 25 bp, probe
taatcaagtcaaatggagaaacagg

SEQ ID NO: 40147 - DNA, 25 bp, probe
cctaatcaagtcaaatggagaaaca

SEQ ID NO: 40148 - DNA, 25 bp, probe
taccaagatcacataccagagtctg

SEQ ID NO: 40149 - DNA, 25 bp, probe
cagcctaatcaagtcaaatggagaa

SEQ ID NO: 40150 - DNA, 25 bp, probe
aacttatactaaaggttgtgttgcc

SEQ ID NO: 40151 - DNA, 25 bp, probe
gcagtgtgaggctgtaacttatact

SEQ ID NO: 40152 - DNA, 25 bp, probe
tcatcgtttgtgtgtataagttggg

SEQ ID NO: 40153 - DNA, 25 bp, probe
ccctagtcatcgtttgtgtgtataa

SEQ ID NO: 40154 - DNA, 25 bp, probe
attaagtttcaagaaaggcaagagc

SEQ ID NO: 40155 - DNA, 25 bp, probe
tgaggctgtaacttatactaaaggt

SEQ ID NO: 40156 - DNA, 25 bp, probe
cctagtcatcgtttgtgtgtataag

SEQ ID NO: 40157 - DNA, 25 bp, probe
gtgaggctgtaacttatactaaagg

SEQ ID NO: 40158 - DNA, 25 bp, probe
gagtccagcctaatcaagtcaaatg

SEQ ID NO: 40159 - DNA, 25 bp, probe
gggaattaagtttcaagaaaggcaa

SEQ ID NO: 40160 - DNA, 25 bp, probe
ggactaatatcatagacccatctgg

SEQ ID NO: 40161 - DNA, 25 bp, probe
ggcttaccaagatcacataccagag

SEQ ID NO: 40162 - DNA, 25 bp, probe
ctaatatcatagacccatctggagg

SEQ ID NO: 40163 - DNA, 25 bp, probe
tagtcatcgtttgtgtgtataagtt

SEQ ID NO: 40164 - DNA, 25 bp, probe
gtgtgaggctgtaacttatactaaa

SEQ ID NO: 40165 - DNA, 25 bp, probe
ctaatcaagtcaaatggagaaacag

SEQ ID NO: 40166 - DNA, 25 bp, probe
ggaattaagtttcaagaaaggcaag

SEQ ID NO: 40167 - DNA, 25 bp, probe
ctagtcatcgtttgtgtgtataagt

SEQ ID NO: 40168 - DNA, 25 bp, probe
taatatcatagacccatctggaggc

SEQ ID NO: 40169 - DNA, 25 bp, probe
ggctgtaacttatactaaaggttgt

SEQ ID NO: 40170 - DNA, 25 bp, probe
actaatatcatagacccatctggag

SEQ ID NO: 40171 - DNA, 25 bp, probe
gactaatatcatagacccatctgga

SEQ ID NO: 40172 - DNA, 25 bp, probe
aatcaagtcaaatggagaaacaggc

SEQ ID NO: 40173 - DNA, 25 bp, probe
aggctgtaacttatactaaaggttg

SEQ ID NO: 40174 - DNA, 25 bp, probe
tgtgaggctgtaacttatactaaag

SEQ ID NO: 40175 - DNA, 25 bp, probe
ctggtaagtaatgagggctgagttt

SEQ ID NO: 40176 - DNA, 25 bp, probe
gaggctgtaacttatactaaaggtt

SEQ ID NO: 40177 - DNA, 25 bp, probe
cttatactaaaggttgtgttgcctg

SEQ ID NO: 40178 - DNA, 25 bp, probe
acttatactaaaggttgtgttgcct

SEQ ID NO: 40179 - DNA, 25 bp, probe
tgaacattgtcaacgtggtctataa

SEQ ID NO: 40180 - DNA, 25 bp, probe
ctgaacattgtcaacgtggtctata

SEQ ID NO: 40181 - DNA, 25 bp, probe
tcactcttgtttgctatggactcat

SEQ ID NO: 40182 - DNA, 25 bp, probe
tactgaacattgtcaacgtggtcta

SEQ ID NO: 40183 - DNA, 25 bp, probe
actgaacattgtcaacgtggtctat

SEQ ID NO: 40184 - DNA, 25 bp, probe
cattgtcaacgtggtctataaagtg

SEQ ID NO: 40185 - DNA, 25 bp, probe
aacattgtcaacgtggtctataaag

SEQ ID NO: 40186 - DNA, 25 bp, probe
gaacattgtcaacgtggtctataaa

SEQ ID NO: 40187 - DNA, 25 bp, probe
cactcttgtttgctatggactcatg

SEQ ID NO: 40188 - DNA, 25 bp, probe
acattgtcaacgtggtctataaagt

SEQ ID NO: 40189 - DNA, 25 bp, probe
attgtcaacgtggtctataaagtga

SEQ ID NO: 40190 - DNA, 25 bp, probe
gtcactcttgtttgctatggactca

SEQ ID NO: 40191 - DNA, 25 bp, probe
gtactgaacattgtcaacgtggtct

SEQ ID NO: 40192 - DNA, 25 bp, probe
actcttgtttgctatggactcatgg

SEQ ID NO: 40193 - DNA, 25 bp, probe
ggtcactcttgtttgctatggactc

SEQ ID NO: 40194 - DNA, 25 bp, probe
ctggtcactcttgtttgctatggac

SEQ ID NO: 40195 - DNA, 25 bp, probe
tcaacgtggtctataaagtgactcg

SEQ ID NO: 40196 - DNA, 25 bp, probe
agtactgaacattgtcaacgtggtc

SEQ ID NO: 40197 - DNA, 25 bp, probe
gagtactgaacattgtcaacgtggt

SEQ ID NO: 40198 - DNA, 25 bp, probe
cctgaagagtttgaccactatgtgc

SEQ ID NO: 40199 - DNA, 25 bp, probe
gcctgaagagtttgaccactatgtg

SEQ ID NO: 40200 - DNA, 25 bp, probe
tacttgctcactggggacaaatatc

SEQ ID NO: 40201 - DNA, 25 bp, probe
ctacttgctcactggggacaaatat

SEQ ID NO: 40202 - DNA, 25 bp, probe
tggtcactcttgtttgctatggact

SEQ ID NO: 40203 - DNA, 25 bp, probe
cttgtttgctatggactcatggctc

SEQ ID NO: 40204 - DNA, 25 bp, probe
ctcttgtttgctatggactcatggc

SEQ ID NO: 40205 - DNA, 25 bp, probe
cctggtcactcttgtttgctatgga

SEQ ID NO: 40206 - DNA, 25 bp, probe
ctactcctagggcagatagattgta

SEQ ID NO: 40207 - DNA, 25 bp, probe
tactcctagggcagatagattgtaa

SEQ ID NO: 40208 - DNA, 25 bp, probe
ctgaagagtttgaccactatgtgca

SEQ ID NO: 40209 - DNA, 25 bp, probe
caacgtggtctataaagtgactcgg

SEQ ID NO: 40210 - DNA, 25 bp, probe
tcttgtttgctatggactcatggct

SEQ ID NO: 40211 - DNA, 25 bp, probe
gatcctgtgctctacttgctcactg

SEQ ID NO: 40212 - DNA, 25 bp, probe
tctacttgctcactggggacaaata

SEQ ID NO: 40213 - DNA, 25 bp, probe
cgagtactgaacattgtcaacgtgg

SEQ ID NO: 40214 - DNA, 25 bp, probe
ccgagtactgaacattgtcaacgtg

SEQ ID NO: 40215 - DNA, 25 bp, probe
ctgccgagtactgaacattgtcaac

SEQ ID NO: 40216 - DNA, 25 bp, probe
ctgcctggtcactcttgtttgctat

SEQ ID NO: 40217 - DNA, 25 bp, probe
ccaacctgttctttgtcacaaccag

SEQ ID NO: 40218 - DNA, 25 bp, probe
ctctactcctagggcagatagattg

SEQ ID NO: 40219 - DNA, 25 bp, probe
ttgtcaacgtggtctataaagtgac

SEQ ID NO: 40220 - DNA, 25 bp, probe
actgccgagtactgaacattgtcaa

SEQ ID NO: 40221 - DNA, 25 bp, probe
gtcaacgtggtctataaagtgactc

SEQ ID NO: 40222 - DNA, 25 bp, probe
tctactcctagggcagatagattgt

SEQ ID NO: 40223 - DNA, 25 bp, probe
cttctgtgtccaccctctactctac

SEQ ID NO: 40224 - DNA, 25 bp, probe
tctgtgtccaccctctactctacat

SEQ ID NO: 40225 - DNA, 25 bp, probe
ttctgtgtccaccctctactctaca

SEQ ID NO: 40226 - DNA, 25 bp, probe
ccttctgtgtccaccctctactcta

SEQ ID NO: 40227 - DNA, 25 bp, probe
ctgtgtccaccctctactctacatg

SEQ ID NO: 40228 - DNA, 25 bp, probe
tgtgtccaccctctactctacatgg

SEQ ID NO: 40229 - DNA, 25 bp, probe
ttgctgaggagtgaggaatagttga

SEQ ID NO: 40230 - DNA, 25 bp, probe
gttgctgaggagtgaggaatagttg

SEQ ID NO: 40231 - DNA, 25 bp, probe
attgctggttctatttaatggacat

SEQ ID NO: 40232 - DNA, 25 bp, probe
atgttgctgaggagtgaggaatagt

SEQ ID NO: 40233 - DNA, 25 bp, probe
gctggttctatttaatggacatgag

SEQ ID NO: 40234 - DNA, 25 bp, probe
tgctggttctatttaatggacatga

SEQ ID NO: 40235 - DNA, 25 bp, probe
ttgctggttctatttaatggacatg

SEQ ID NO: 40236 - DNA, 25 bp, probe
tgttgctgaggagtgaggaatagtt

SEQ ID NO: 40237 - DNA, 25 bp, probe
catgttgctgaggagtgaggaatag

SEQ ID NO: 40238 - DNA, 25 bp, probe
tgctgaggagtgaggaatagttgag

SEQ ID NO: 40239 - DNA, 25 bp, probe
tggacatgagataatgttagaggtt

SEQ ID NO: 40240 - DNA, 25 bp, probe
atggacatgagataatgttagaggt

SEQ ID NO: 40241 - DNA, 25 bp, probe
ctggttctatttaatggacatgaga

SEQ ID NO: 40242 - DNA, 25 bp, probe
cattgctggttctatttaatggaca

SEQ ID NO: 40243 - DNA, 25 bp, probe
ctgaggagtgaggaatagttgagcc

SEQ ID NO: 40244 - DNA, 25 bp, probe
aatggacatgagataatgttagagg

SEQ ID NO: 40245 - DNA, 25 bp, probe
aaagtgattaaacgtgcagactatg

SEQ ID NO: 40246 - DNA, 25 bp, probe
tggttctatttaatggacatgagat

SEQ ID NO: 40247 - DNA, 25 bp, probe
gcattgctggttctatttaatggac

SEQ ID NO: 40248 - DNA, 25 bp, probe
ttaaagtgattaaacgtgcagacta

SEQ ID NO: 40249 - DNA, 25 bp, probe
taaagtgattaaacgtgcagactat

SEQ ID NO: 40250 - DNA, 25 bp, probe
cttttcttttctaccctagccattc

SEQ ID NO: 40251 - DNA, 25 bp, probe
gagtccccttttcttttctacccta

SEQ ID NO: 40252 - DNA, 25 bp, probe
ttttcttttctaccctagccattcc

SEQ ID NO: 40253 - DNA, 25 bp, probe
ccttttcttttctaccctagccatt

SEQ ID NO: 40254 - DNA, 25 bp, probe
ctggttttgtaagatactgggttgg

SEQ ID NO: 40255 - DNA, 25 bp, probe
ggttttgtaagatactgggttggtg

SEQ ID NO: 40256 - DNA, 25 bp, probe
tttcttttctaccctagccattcct

SEQ ID NO: 40257 - DNA, 25 bp, probe
agtccccttttcttttctaccctag

SEQ ID NO: 40258 - DNA, 25 bp, probe
tggttttgtaagatactgggttggt

SEQ ID NO: 40259 - DNA, 25 bp, probe
gctggttttgtaagatactgggttg

SEQ ID NO: 40260 - DNA, 25 bp, probe
agcattgctggttctatttaatgga

SEQ ID NO: 40261 - DNA, 25 bp, probe
tttcttgtaatttaaacaggcccag

SEQ ID NO: 40262 - DNA, 25 bp, probe
ggacatgagataatgttagaggttt

SEQ ID NO: 40263 - DNA, 25 bp, probe
gttttgtaagatactgggttggtgc

SEQ ID NO: 40264 - DNA, 25 bp, probe
ttcttttctaccctagccattcctg

SEQ ID NO: 40265 - DNA, 25 bp, probe
tttaaagtgattaaacgtgcagact

SEQ ID NO: 40266 - DNA, 25 bp, probe
cccttttcttttctaccctagccat

SEQ ID NO: 40267 - DNA, 25 bp, probe
ttgtaatttaaacaggcccagcatt

SEQ ID NO: 40268 - DNA, 25 bp, probe
ggttctatttaatggacatgagata

SEQ ID NO: 40269 - DNA, 25 bp, probe
gttcataggtcactggctctccaag

SEQ ID NO: 40270 - DNA, 25 bp, probe
ggctggttttgtaagatactgggtt

SEQ ID NO: 40271 - DNA, 25 bp, probe
cttgtaatttaaacaggcccagcat

SEQ ID NO: 40272 - DNA, 25 bp, probe
ttcttgtaatttaaacaggcccagc

SEQ ID NO: 40273 - DNA, 25 bp, probe
gcattgttaatcatccatcacttcc

SEQ ID NO: 40274 - DNA, 25 bp, probe
tattacaagcctacatgacacagtt

SEQ ID NO: 40275 - DNA, 25 bp, probe
atattacaagcctacatgacacagt

SEQ ID NO: 40276 - DNA, 25 bp, probe
gtatattacaagcctacatgacaca

SEQ ID NO: 40277 - DNA, 25 bp, probe
attacaagcctacatgacacagttg

SEQ ID NO: 40278 - DNA, 25 bp, probe
tatattacaagcctacatgacacag

SEQ ID NO: 40279 - DNA, 25 bp, probe
tgcattgttaatcatccatcacttc

SEQ ID NO: 40280 - DNA, 25 bp, probe
gatttattctgccaaacctgtgtag

SEQ ID NO: 40281 - DNA, 25 bp, probe
cattgttaatcatccatcacttccc

SEQ ID NO: 40282 - DNA, 25 bp, probe
tgttaatcatccatcacttcccatt

SEQ ID NO: 40283 - DNA, 25 bp, probe
ttgttaatcatccatcacttcccat

SEQ ID NO: 40284 - DNA, 25 bp, probe
attgttaatcatccatcacttccca

SEQ ID NO: 40285 - DNA, 25 bp, probe
cttgaatagggaagtaacatttgcc

SEQ ID NO: 40286 - DNA, 25 bp, probe
gttaatcatccatcacttcccattt

SEQ ID NO: 40287 - DNA, 25 bp, probe
atcaatgaagcaagtacaatgttaa

SEQ ID NO: 40288 - DNA, 25 bp, probe
aatcaatgaagcaagtacaatgtta

SEQ ID NO: 40289 - DNA, 25 bp, probe
agagaacccagatgttgtttattga

SEQ ID NO: 40290 - DNA, 25 bp, probe
gagagaacccagatgttgtttattg

SEQ ID NO: 40291 - DNA, 25 bp, probe
ctgtgtctgtgtatattacaagcct

SEQ ID NO: 40292 - DNA, 25 bp, probe
tcctgtgtctgtgtatattacaagc

SEQ ID NO: 40293 - DNA, 25 bp, probe
ctgggaccataagtttactgaatct

SEQ ID NO: 40294 - DNA, 25 bp, probe
tctgggaccataagtttactgaatc

SEQ ID NO: 40295 - DNA, 25 bp, probe
gagaacccagatgttgtttattgaa

SEQ ID NO: 40296 - DNA, 25 bp, probe
tgtctgtgtatattacaagcctaca

SEQ ID NO: 40297 - DNA, 25 bp, probe
tgtgtctgtgtatattacaagccta

SEQ ID NO: 40298 - DNA, 25 bp, probe
ggagagaacccagatgttgtttatt

SEQ ID NO: 40299 - DNA, 25 bp, probe
ggatttattctgccaaacctgtgta

SEQ ID NO: 40300 - DNA, 25 bp, probe
actcctgtgtctgtgtatattacaa

SEQ ID NO: 40301 - DNA, 25 bp, probe
aactcctgtgtctgtgtatattaca

SEQ ID NO: 40302 - DNA, 25 bp, probe
gggaccataagtttactgaatcttc

SEQ ID NO: 40303 - DNA, 25 bp, probe
gtgtctgtgtatattacaagcctac

SEQ ID NO: 40304 - DNA, 25 bp, probe
cttctgggaccataagtttactgaa

SEQ ID NO: 40305 - DNA, 25 bp, probe
tgggaccataagtttactgaatctt

SEQ ID NO: 40306 - DNA, 25 bp, probe
ttctgggaccataagtttactgaat

SEQ ID NO: 40307 - DNA, 25 bp, probe
agaacccagatgttgtttattgaat

SEQ ID NO: 40308 - DNA, 25 bp, probe
cctgtgtctgtgtatattacaagcc

SEQ ID NO: 40309 - DNA, 25 bp, probe
tgaaagagaaatcaatgaagcaagt

SEQ ID NO: 40310 - DNA, 25 bp, probe
ctcctgtgtctgtgtatattacaag

SEQ ID NO: 40311 - DNA, 25 bp, probe
tctgaaagagaaatcaatgaagcaa

SEQ ID NO: 40312 - DNA, 25 bp, probe
acggtttggtcagactataaataag

SEQ ID NO: 40313 - DNA, 25 bp, probe
gaacccagatgttgtttattgaatc

SEQ ID NO: 40314 - DNA, 25 bp, probe
aaactcctgtgtctgtgtatattac

SEQ ID NO: 40315 - DNA, 25 bp, probe
ctgaaagagaaatcaatgaagcaag

SEQ ID NO: 40316 - DNA, 25 bp, probe
ttagaaagtccaattccaaagccag

SEQ ID NO: 40317 - DNA, 25 bp, probe
aagtctgagatggattgcatataca

SEQ ID NO: 40318 - DNA, 25 bp, probe
catccctttggtattgatttcacag

SEQ ID NO: 40319 - DNA, 25 bp, probe
atccctttggtattgatttcacagt

SEQ ID NO: 40320 - DNA, 25 bp, probe
cacatccctttggtattgatttcac

SEQ ID NO: 40321 - DNA, 25 bp, probe
tgagatggattgcatatacagtgtg

SEQ ID NO: 40322 - DNA, 25 bp, probe
acatccctttggtattgatttcaca

SEQ ID NO: 40323 - DNA, 25 bp, probe
atggctaaggaaggacaagaagttg

SEQ ID NO: 40324 - DNA, 25 bp, probe
tccctttggtattgatttcacagtc

SEQ ID NO: 40325 - DNA, 25 bp, probe
cctttggtattgatttcacagtcag

SEQ ID NO: 40326 - DNA, 25 bp, probe
ctttggtattgatttcacagtcagc

SEQ ID NO: 40327 - DNA, 25 bp, probe
catggctaaggaaggacaagaagtt

SEQ ID NO: 40328 - DNA, 25 bp, probe
tctgagatggattgcatatacagtg

SEQ ID NO: 40329 - DNA, 25 bp, probe
gtctgagatggattgcatatacagt

SEQ ID NO: 40330 - DNA, 25 bp, probe
agtctgagatggattgcatatacag

SEQ ID NO: 40331 - DNA, 25 bp, probe
ctgagatggattgcatatacagtgt

SEQ ID NO: 40332 - DNA, 25 bp, probe
ccctttggtattgatttcacagtca

SEQ ID NO: 40333 - DNA, 25 bp, probe
ccacatccctttggtattgatttca

SEQ ID NO: 40334 - DNA, 25 bp, probe
tttggtattgatttcacagtcagct

SEQ ID NO: 40335 - DNA, 25 bp, probe
aaagtctgagatggattgcatatac

SEQ ID NO: 40336 - DNA, 25 bp, probe
cccacatccctttggtattgatttc

SEQ ID NO: 40337 - DNA, 25 bp, probe
caaagtctgagatggattgcatata

SEQ ID NO: 40338 - DNA, 25 bp, probe
attccctatgtcctgtgacctacaa

SEQ ID NO: 40339 - DNA, 25 bp, probe
tttaattttacccaggaaggactca

SEQ ID NO: 40340 - DNA, 25 bp, probe
ttaattttacccaggaaggactcac

SEQ ID NO: 40341 - DNA, 25 bp, probe
acccacatccctttggtattgattt

SEQ ID NO: 40342 - DNA, 25 bp, probe
ctttaattttacccaggaaggactc

SEQ ID NO: 40343 - DNA, 25 bp, probe
acaattattgtgatgccatcaacaa

SEQ ID NO: 40344 - DNA, 25 bp, probe
agacaattattgtgatgccatcaac

SEQ ID NO: 40345 - DNA, 25 bp, probe
gagacaattattgtgatgccatcaa

SEQ ID NO: 40346 - DNA, 25 bp, probe
gagatggattgcatatacagtgtgc

SEQ ID NO: 40347 - DNA, 25 bp, probe
caagaagttgtcaaagaattcccaa

SEQ ID NO: 40348 - DNA, 25 bp, probe
caattattgtgatgccatcaacaac

SEQ ID NO: 40349 - DNA, 25 bp, probe
gacaattattgtgatgccatcaaca

SEQ ID NO: 40350 - DNA, 25 bp, probe
catgctggatgatgaaatggattcc

SEQ ID NO: 40351 - DNA, 25 bp, probe
taattttacccaggaaggactcaca

SEQ ID NO: 40352 - DNA, 25 bp, probe
aattattgtgatgccatcaacaacc

SEQ ID NO: 40353 - DNA, 25 bp, probe
ccaaagtctgagatggattgcatat

SEQ ID NO: 40354 - DNA, 25 bp, probe
gacccacatccctttggtattgatt

SEQ ID NO: 40355 - DNA, 25 bp, probe
attttacccaggaaggactcacatt

SEQ ID NO: 40356 - DNA, 25 bp, probe
ttccctatgtcctgtgacctacaag

SEQ ID NO: 40357 - DNA, 25 bp, probe
aattttacccaggaaggactcacat

SEQ ID NO: 40358 - DNA, 25 bp, probe
ggagacaattattgtgatgccatca

SEQ ID NO: 40359 - DNA, 25 bp, probe
cattccctatgtcctgtgacctaca

SEQ ID NO: 40360 - DNA, 25 bp, probe
cctcctaaaattctagccatttgtc

SEQ ID NO: 40361 - DNA, 25 bp, probe
tacaggcaattccgtcttcttaatc

SEQ ID NO: 40362 - DNA, 25 bp, probe
gcttcactcactgtcaatgattatt

SEQ ID NO: 40363 - DNA, 25 bp, probe
ggcaattccgtcttcttaatctgaa

SEQ ID NO: 40364 - DNA, 25 bp, probe
gtacaggcaattccgtcttcttaat

SEQ ID NO: 40365 - DNA, 25 bp, probe
aggcaattccgtcttcttaatctga

SEQ ID NO: 40366 - DNA, 25 bp, probe
acaggcaattccgtcttcttaatct

SEQ ID NO: 40367 - DNA, 25 bp, probe
agcttcactcactgtcaatgattat

SEQ ID NO: 40368 - DNA, 25 bp, probe
gagacctgaacatcaacatgacttc

SEQ ID NO: 40369 - DNA, 25 bp, probe
caggcaattccgtcttcttaatctg

SEQ ID NO: 40370 - DNA, 25 bp, probe
gaagaggagacctgaacatcaacat

SEQ ID NO: 40371 - DNA, 25 bp, probe
cgtacaggcaattccgtcttcttaa

SEQ ID NO: 40372 - DNA, 25 bp, probe
agacctgaacatcaacatgacttcc

SEQ ID NO: 40373 - DNA, 25 bp, probe
ggagacctgaacatcaacatgactt

SEQ ID NO: 40374 - DNA, 25 bp, probe
aaagcatccttaacaagaactagcg

SEQ ID NO: 40375 - DNA, 25 bp, probe
cagaagaggagacctgaacatcaac

SEQ ID NO: 40376 - DNA, 25 bp, probe
aagaggagacctgaacatcaacatg

SEQ ID NO: 40377 - DNA, 25 bp, probe
caattccgtcttcttaatctgaagc

SEQ ID NO: 40378 - DNA, 25 bp, probe
gcaattccgtcttcttaatctgaag

SEQ ID NO: 40379 - DNA, 25 bp, probe
agaagaggagacctgaacatcaaca

SEQ ID NO: 40380 - DNA, 25 bp, probe
cttcactcactgtcaatgattattt

SEQ ID NO: 40381 - DNA, 25 bp, probe
gaggagacctgaacatcaacatgac

SEQ ID NO: 40382 - DNA, 25 bp, probe
agaggagacctgaacatcaacatga

SEQ ID NO: 40383 - DNA, 25 bp, probe
aattccgtcttcttaatctgaagct

SEQ ID NO: 40384 - DNA, 25 bp, probe
ccagaagaggagacctgaacatcaa

SEQ ID NO: 40385 - DNA, 25 bp, probe
aaccagaagaggagacctgaacatc

SEQ ID NO: 40386 - DNA, 25 bp, probe
aggagacctgaacatcaacatgact

SEQ ID NO: 40387 - DNA, 25 bp, probe
ctgaaaagcatccttaacaagaact

SEQ ID NO: 40388 - DNA, 25 bp, probe
aagcttcactcactgtcaatgatta

SEQ ID NO: 40389 - DNA, 25 bp, probe
cctgaaaagcatccttaacaagaac

SEQ ID NO: 40390 - DNA, 25 bp, probe
caaccagaagaggagacctgaacat

SEQ ID NO: 40391 - DNA, 25 bp, probe
aaaagcatccttaacaagaactagc

SEQ ID NO: 40392 - DNA, 25 bp, probe
tgaaaagcatccttaacaagaacta

SEQ ID NO: 40393 - DNA, 25 bp, probe
tttactctatgccccaaatatagcg

SEQ ID NO: 40394 - DNA, 25 bp, probe
ccgtacaggcaattccgtcttctta

SEQ ID NO: 40395 - DNA, 25 bp, probe
gcctgaaaagcatccttaacaagaa

SEQ ID NO: 40396 - DNA, 25 bp, probe
aagcctgaaaagcatccttaacaag

SEQ ID NO: 40397 - DNA, 25 bp, probe
gaagcctgaaaagcatccttaacaa

SEQ ID NO: 40398 - DNA, 25 bp, probe
ttttactctatgccccaaatatagc

SEQ ID NO: 40399 - DNA, 25 bp, probe
tactctatgccccaaatatagcgtt

SEQ ID NO: 40400 - DNA, 25 bp, probe
ttactctatgccccaaatatagcgt

SEQ ID NO: 40401 - DNA, 25 bp, probe
gagaagcctgaaaagcatccttaac

SEQ ID NO: 40402 - DNA, 25 bp, probe
agagaagcctgaaaagcatccttaa

SEQ ID NO: 40403 - DNA, 25 bp, probe
gaaaagcatccttaacaagaactag

SEQ ID NO: 40404 - DNA, 25 bp, probe
gacctgaacatcaacatgacttccc

SEQ ID NO: 40405 - DNA, 25 bp, probe
tcttaccaatcaaggactcagaact

SEQ ID NO: 40406 - DNA, 25 bp, probe
cttaccaatcaaggactcagaactg

SEQ ID NO: 40407 - DNA, 25 bp, probe
caggttagactctgaaggaattgag

SEQ ID NO: 40408 - DNA, 25 bp, probe
ctctgaaggaattgagttgataaga

SEQ ID NO: 40409 - DNA, 25 bp, probe
aattcttcttatccagagacaggac

SEQ ID NO: 40410 - DNA, 25 bp, probe
tctgaaggaattgagttgataagaa

SEQ ID NO: 40411 - DNA, 25 bp, probe
ttcttcttatccagagacaggacat

SEQ ID NO: 40412 - DNA, 25 bp, probe
attcttcttatccagagacaggaca

SEQ ID NO: 40413 - DNA, 25 bp, probe
ggactcagaactgaaggcaattatt

SEQ ID NO: 40414 - DNA, 25 bp, probe
ccaggttagactctgaaggaattga

SEQ ID NO: 40415 - DNA, 25 bp, probe
taccaatcaaggactcagaactgaa

SEQ ID NO: 40416 - DNA, 25 bp, probe
ttaccaatcaaggactcagaactga

SEQ ID NO: 40417 - DNA, 25 bp, probe
aggactcagaactgaaggcaattat

SEQ ID NO: 40418 - DNA, 25 bp, probe
aaggactcagaactgaaggcaatta

SEQ ID NO: 40419 - DNA, 25 bp, probe
ctttcttaccaatcaaggactcaga

SEQ ID NO: 40420 - DNA, 25 bp, probe
tcttcttatccagagacaggacatg

SEQ ID NO: 40421 - DNA, 25 bp, probe
cgaaattcttcttatccagagacag

SEQ ID NO: 40422 - DNA, 25 bp, probe
ttcttaccaatcaaggactcagaac

SEQ ID NO: 40423 - DNA, 25 bp, probe
gaaattcttcttatccagagacagg

SEQ ID NO: 40424 - DNA, 25 bp, probe
accaatcaaggactcagaactgaag

SEQ ID NO: 40425 - DNA, 25 bp, probe
ccaggtatttcttcaaatgaggagt

SEQ ID NO: 40426 - DNA, 25 bp, probe
aatggcttctggaagacctttattt

SEQ ID NO: 40427 - DNA, 25 bp, probe
aaatggcttctggaagacctttatt

SEQ ID NO: 40428 - DNA, 25 bp, probe
accaagaatacatgctttaccagaa

SEQ ID NO: 40429 - DNA, 25 bp, probe
ccaagaatacatgctttaccagaaa

SEQ ID NO: 40430 - DNA, 25 bp, probe
ggtatttcttcaaatgaggagttca

SEQ ID NO: 40431 - DNA, 25 bp, probe
caggtatttcttcaaatgaggagtt

SEQ ID NO: 40432 - DNA, 25 bp, probe
gaccaagaatacatgctttaccaga

SEQ ID NO: 40433 - DNA, 25 bp, probe
atggcttctggaagacctttatttc

SEQ ID NO: 40434 - DNA, 25 bp, probe
gaaatggcttctggaagacctttat

SEQ ID NO: 40435 - DNA, 25 bp, probe
aggtatttcttcaaatgaggagttc

SEQ ID NO: 40436 - DNA, 25 bp, probe
taaaccagagcctctaattaaccac

SEQ ID NO: 40437 - DNA, 25 bp, probe
ataaaccagagcctctaattaacca

SEQ ID NO: 40438 - DNA, 25 bp, probe
cttcttatccagagacaggacatgg

SEQ ID NO: 40439 - DNA, 25 bp, probe
ggagtacttaacacagattgacatg

SEQ ID NO: 40440 - DNA, 25 bp, probe
cggagtacttaacacagattgacat

SEQ ID NO: 40441 - DNA, 25 bp, probe
actcagaactgaaggcaattatttc

SEQ ID NO: 40442 - DNA, 25 bp, probe
gactcagaactgaaggcaattattt

SEQ ID NO: 40443 - DNA, 25 bp, probe
taagtctgataacatggtttcaagc

SEQ ID NO: 40444 - DNA, 25 bp, probe
gccaggtatttcttcaaatgaggag

SEQ ID NO: 40445 - DNA, 25 bp, probe
ctcggagtacttaacacagattgac

SEQ ID NO: 40446 - DNA, 25 bp, probe
ttcctcggagtacttaacacagatt

SEQ ID NO: 40447 - DNA, 25 bp, probe
ggaccaagaatacatgctttaccag

SEQ ID NO: 40448 - DNA, 25 bp, probe
ctgggaccaagaatacatgctttac

SEQ ID NO: 40449 - DNA, 25 bp, probe
ccttcctcctatatcctcagtaaca

SEQ ID NO: 40450 - DNA, 25 bp, probe
accttcctcctatatcctcagtaac

SEQ ID NO: 40451 - DNA, 25 bp, probe
caccttcctcctatatcctcagtaa

SEQ ID NO: 40452 - DNA, 25 bp, probe
ctatatcctcagtaacaacggctac

SEQ ID NO: 40453 - DNA, 25 bp, probe
tcctcctatatcctcagtaacaacg

SEQ ID NO: 40454 - DNA, 25 bp, probe
ttcctcctatatcctcagtaacaac

SEQ ID NO: 40455 - DNA, 25 bp, probe
cctatatcctcagtaacaacggcta

SEQ ID NO: 40456 - DNA, 25 bp, probe
cttcctcctatatcctcagtaacaa

SEQ ID NO: 40457 - DNA, 25 bp, probe
atgtcttcctcaggtcctactattc

SEQ ID NO: 40458 - DNA, 25 bp, probe
gatgtcttcctcaggtcctactatt

SEQ ID NO: 40459 - DNA, 25 bp, probe
cctcctatatcctcagtaacaacgg

SEQ ID NO: 40460 - DNA, 25 bp, probe
ccaccttcctcctatatcctcagta

SEQ ID NO: 40461 - DNA, 25 bp, probe
cttcatcatcaatggtgtggagttc

SEQ ID NO: 40462 - DNA, 25 bp, probe
ctcctatatcctcagtaacaacggc

SEQ ID NO: 40463 - DNA, 25 bp, probe
tcctatatcctcagtaacaacggct

SEQ ID NO: 40464 - DNA, 25 bp, probe
gattggcattgaagagttcctcatc

SEQ ID NO: 40465 - DNA, 25 bp, probe
tatatcctcagtaacaacggctact

SEQ ID NO: 40466 - DNA, 25 bp, probe
tgtcttcctcaggtcctactattcc

SEQ ID NO: 40467 - DNA, 25 bp, probe
agattggcattgaagagttcctcat

SEQ ID NO: 40468 - DNA, 25 bp, probe
gaactgtaacagcattcagaatctg

SEQ ID NO: 40469 - DNA, 25 bp, probe
tctggactctggactttctctaata

SEQ ID NO: 40470 - DNA, 25 bp, probe
ttctggactctggactttctctaat

SEQ ID NO: 40471 - DNA, 25 bp, probe
ctggactctggactttctctaataa

SEQ ID NO: 40472 - DNA, 25 bp, probe
tttctggactctggactttctctaa

SEQ ID NO: 40473 - DNA, 25 bp, probe
cctcaggtcctactattccgtctac

SEQ ID NO: 40474 - DNA, 25 bp, probe
tggactctggactttctctaataat

SEQ ID NO: 40475 - DNA, 25 bp, probe
gtcctactattccgtctacgacttg

SEQ ID NO: 40476 - DNA, 25 bp, probe
ccttcatcatcaatggtgtggagtt

SEQ ID NO: 40477 - DNA, 25 bp, probe
tcctcaggtcctactattccgtcta

SEQ ID NO: 40478 - DNA, 25 bp, probe
gcattgtatctgtctttccactctg

SEQ ID NO: 40479 - DNA, 25 bp, probe
ttcatcatcaatggtgtggagttcc

SEQ ID NO: 40480 - DNA, 25 bp, probe
ggatgtcttcctcaggtcctactat

SEQ ID NO: 40481 - DNA, 25 bp, probe
aagtatgatcctgcttggaagtacc

SEQ ID NO: 40482 - DNA, 25 bp, probe
cagattggcattgaagagttcctca

SEQ ID NO: 40483 - DNA, 25 bp, probe
cttcctcaggtcctactattccgtc

SEQ ID NO: 40484 - DNA, 25 bp, probe
gtcttcctcaggtcctactattccg

SEQ ID NO: 40485 - DNA, 25 bp, probe
ctcaggtcctactattccgtctacg

SEQ ID NO: 40486 - DNA, 25 bp, probe
tagggcattgtatctgtctttccac

SEQ ID NO: 40487 - DNA, 25 bp, probe
ctagggcattgtatctgtctttcca

SEQ ID NO: 40488 - DNA, 25 bp, probe
atgagtatggacagtttctcgtgaa

SEQ ID NO: 40489 - DNA, 25 bp, probe
aggaggatgagtatggacagtttct

SEQ ID NO: 40490 - DNA, 25 bp, probe
caggaggatgagtatggacagtttc

SEQ ID NO: 40491 - DNA, 25 bp, probe
attggcattgaagagttcctcatcg

SEQ ID NO: 40492 - DNA, 25 bp, probe
ctactggcagattggcattgaagag

SEQ ID NO: 40493 - DNA, 25 bp, probe
ctgtgagtgtaagtgtgagtaagag

SEQ ID NO: 40494 - DNA, 25 bp, probe
gctggtgtctgattgttaagtctaa

SEQ ID NO: 40495 - DNA, 25 bp, probe
ttagcctagttcatccaatcctcac

SEQ ID NO: 40496 - DNA, 25 bp, probe
tgtgagtgtaagtgtgagtaagagc

SEQ ID NO: 40497 - DNA, 25 bp, probe
gctgtgagtgtaagtgtgagtaaga

SEQ ID NO: 40498 - DNA, 25 bp, probe
taagagctggtgtctgattgttaag

SEQ ID NO: 40499 - DNA, 25 bp, probe
ctacacgagagtctcacacttctta

SEQ ID NO: 40500 - DNA, 25 bp, probe
gtaagagctggtgtctgattgttaa

SEQ ID NO: 40501 - DNA, 25 bp, probe
agctggtgtctgattgttaagtcta

SEQ ID NO: 40502 - DNA, 25 bp, probe
tacacgagagtctcacacttcttac

SEQ ID NO: 40503 - DNA, 25 bp, probe
ctgtaagaagagactgggaagatag

SEQ ID NO: 40504 - DNA, 25 bp, probe
tgtaagaagagactgggaagatagg

SEQ ID NO: 40505 - DNA, 25 bp, probe
agtaagagctggtgtctgattgtta

SEQ ID NO: 40506 - DNA, 25 bp, probe
ggctgtgagtgtaagtgtgagtaag

SEQ ID NO: 40507 - DNA, 25 bp, probe
ctttctggagaggttataggtcact

SEQ ID NO: 40508 - DNA, 25 bp, probe
ggctctgatattccatgaatgtatc

SEQ ID NO: 40509 - DNA, 25 bp, probe
gctgtaagaagagactgggaagata

SEQ ID NO: 40510 - DNA, 25 bp, probe
tagcctagttcatccaatcctcact

SEQ ID NO: 40511 - DNA, 25 bp, probe
ctggtgtctgattgttaagtctaaa

SEQ ID NO: 40512 - DNA, 25 bp, probe
tgagtgtaagtgtgagtaagagctg

SEQ ID NO: 40513 - DNA, 25 bp, probe
gtgagtgtaagtgtgagtaagagct

SEQ ID NO: 40514 - DNA, 25 bp, probe
tctttctggagaggttataggtcac

SEQ ID NO: 40515 - DNA, 25 bp, probe
gtctttctggagaggttataggtca

SEQ ID NO: 40516 - DNA, 25 bp, probe
agtggtctttctggagaggttatag

SEQ ID NO: 40517 - DNA, 25 bp, probe
gagtggtctttctggagaggttata

SEQ ID NO: 40518 - DNA, 25 bp, probe
tttagcctagttcatccaatcctca

SEQ ID NO: 40519 - DNA, 25 bp, probe
atgttactgaccagcaacttgtctt

SEQ ID NO: 40520 - DNA, 25 bp, probe
tgtctcagtttcactttcacataga

SEQ ID NO: 40521 - DNA, 25 bp, probe
aagagctggtgtctgattgttaagt

SEQ ID NO: 40522 - DNA, 25 bp, probe
taagaagagactgggaagataggct

SEQ ID NO: 40523 - DNA, 25 bp, probe
gtaagaagagactgggaagataggc

SEQ ID NO: 40524 - DNA, 25 bp, probe
tctcagtttcactttcacatagatg

SEQ ID NO: 40525 - DNA, 25 bp, probe
gtctcagtttcactttcacatagat

SEQ ID NO: 40526 - DNA, 25 bp, probe
tttctggagaggttataggtcactc

SEQ ID NO: 40527 - DNA, 25 bp, probe
ggtctttctggagaggttataggtc

SEQ ID NO: 40528 - DNA, 25 bp, probe
tggtgtctgattgttaagtctaaat

SEQ ID NO: 40529 - DNA, 25 bp, probe
gaattctaccgactatctctatccg

SEQ ID NO: 40530 - DNA, 25 bp, probe
gagctggtgtctgattgttaagtct

SEQ ID NO: 40531 - DNA, 25 bp, probe
ctgtctcagtttcactttcacatag

SEQ ID NO: 40532 - DNA, 25 bp, probe
gtggtctttctggagaggttatagg

SEQ ID NO: 40533 - DNA, 25 bp, probe
tctacacgagagtctcacacttctt

SEQ ID NO: 40534 - DNA, 25 bp, probe
gagtgtaagtgtgagtaagagctgg

SEQ ID NO: 40535 - DNA, 25 bp, probe
agagctggtgtctgattgttaagtc

SEQ ID NO: 40536 - DNA, 25 bp, probe
gagtaagagctggtgtctgattgtt

SEQ ID NO: 40537 - DNA, 25 bp, probe
tggcaacacgacttgaaataaataa

SEQ ID NO: 40538 - DNA, 25 bp, probe
ttggcaacacgacttgaaataaata

SEQ ID NO: 40539 - DNA, 25 bp, probe
cttggcaacacgacttgaaataaat

SEQ ID NO: 40540 - DNA, 25 bp, probe
ggcaacacgacttgaaataaataaa

SEQ ID NO: 40541 - DNA, 25 bp, probe
cacttaaacagcctccagtcataaa

SEQ ID NO: 40542 - DNA, 25 bp, probe
ccacttaaacagcctccagtcataa

SEQ ID NO: 40543 - DNA, 25 bp, probe
gcttggcaacacgacttgaaataaa

SEQ ID NO: 40544 - DNA, 25 bp, probe
ctcttaaaaccacttaaacagcctc

SEQ ID NO: 40545 - DNA, 25 bp, probe
agcactcttaaaaccacttaaacag

SEQ ID NO: 40546 - DNA, 25 bp, probe
actcttaaaaccacttaaacagcct

SEQ ID NO: 40547 - DNA, 25 bp, probe
cactcttaaaaccacttaaacagcc

SEQ ID NO: 40548 - DNA, 25 bp, probe
aagcactcttaaaaccacttaaaca

SEQ ID NO: 40549 - DNA, 25 bp, probe
attcaagcactcttaaaaccactta

SEQ ID NO: 40550 - DNA, 25 bp, probe
tattcaagcactcttaaaaccactt

SEQ ID NO: 40551 - DNA, 25 bp, probe
ttattcaagcactcttaaaaccact

SEQ ID NO: 40552 - DNA, 25 bp, probe
acttaaacagcctccagtcataaaa

SEQ ID NO: 40553 - DNA, 25 bp, probe
caagcactcttaaaaccacttaaac

SEQ ID NO: 40554 - DNA, 25 bp, probe
tcaagcactcttaaaaccacttaaa

SEQ ID NO: 40555 - DNA, 25 bp, probe
ttcaagcactcttaaaaccacttaa

SEQ ID NO: 40556 - DNA, 25 bp, probe
accacttaaacagcctccagtcata

SEQ ID NO: 40557 - DNA, 25 bp, probe
tcttaaaaccacttaaacagcctcc

SEQ ID NO: 40558 - DNA, 25 bp, probe
gcactcttaaaaccacttaaacagc

SEQ ID NO: 40559 - DNA, 25 bp, probe
ttaaaaccacttaaacagcctccag

SEQ ID NO: 40560 - DNA, 25 bp, probe
cttaaaaccacttaaacagcctcca

SEQ ID NO: 40561 - DNA, 25 bp, probe
attattcaagcactcttaaaaccac

SEQ ID NO: 40562 - DNA, 25 bp, probe
taaaaccacttaaacagcctccagt

SEQ ID NO: 40563 - DNA, 25 bp, probe
gcaacacgacttgaaataaataaaa

SEQ ID NO: 40564 - DNA, 25 bp, probe
aaccacttaaacagcctccagtcat

SEQ ID NO: 40565 - DNA, 25 bp, probe
aattattcaagcactcttaaaacca

SEQ ID NO: 40566 - DNA, 25 bp, probe
aaaccacttaaacagcctccagtca

SEQ ID NO: 40567 - DNA, 25 bp, probe
aaattattcaagcactcttaaaacc

SEQ ID NO: 40568 - DNA, 25 bp, probe
aaaaccacttaaacagcctccagtc

SEQ ID NO: 40569 - DNA, 25 bp, probe
acacgacttgaaataaataaaactt

SEQ ID NO: 40570 - DNA, 25 bp, probe
aacacgacttgaaataaataaaact

SEQ ID NO: 40571 - DNA, 25 bp, probe
tgcttggcaacacgacttgaaataa

SEQ ID NO: 40572 - DNA, 25 bp, probe
caacacgacttgaaataaataaaac

SEQ ID NO: 40573 - DNA, 25 bp, probe
aaggatggaaatttatcatgtttaa

SEQ ID NO: 40574 - DNA, 25 bp, probe
aaaggatggaaatttatcatgttta

SEQ ID NO: 40575 - DNA, 25 bp, probe
aggatggaaatttatcatgtttaaa

SEQ ID NO: 40576 - DNA, 25 bp, probe
taaaggatggaaatttatcatgttt

SEQ ID NO: 40577 - DNA, 25 bp, probe
ttaaaggatggaaatttatcatgtt

SEQ ID NO: 40578 - DNA, 25 bp, probe
tttaaaggatggaaatttatcatgt

SEQ ID NO: 40579 - DNA, 25 bp, probe
cgacttgaaataaataaaactttgt

SEQ ID NO: 40580 - DNA, 25 bp, probe
acgacttgaaataaataaaactttg

SEQ ID NO: 40581 - DNA, 25 bp, probe
taatgtgaagttaccagaagcagat

SEQ ID NO: 40582 - DNA, 25 bp, probe
ataatgtgaagttaccagaagcaga

SEQ ID NO: 40583 - DNA, 25 bp, probe
cataatgtgaagttaccagaagcag

SEQ ID NO: 40584 - DNA, 25 bp, probe
aaggaattgatgcttctgattacca

SEQ ID NO: 40585 - DNA, 25 bp, probe
aatgtgaagttaccagaagcagatg

SEQ ID NO: 40586 - DNA, 25 bp, probe
gcataatgtgaagttaccagaagca

SEQ ID NO: 40587 - DNA, 25 bp, probe
atgtgaagttaccagaagcagatga

SEQ ID NO: 40588 - DNA, 25 bp, probe
tgaagttaccagaagcagatgacat

SEQ ID NO: 40589 - DNA, 25 bp, probe
ttgctgaattaaggatcatagtcgg

SEQ ID NO: 40590 - DNA, 25 bp, probe
aggaattgatgcttctgattaccag

SEQ ID NO: 40591 - DNA, 25 bp, probe
gaagttaccagaagcagatgacatc

SEQ ID NO: 40592 - DNA, 25 bp, probe
attgctgaattaaggatcatagtcg

SEQ ID NO: 40593 - DNA, 25 bp, probe
aagaggctgactattaatggaggtt

SEQ ID NO: 40594 - DNA, 25 bp, probe
aagtgatagaggaagtctcagacat

SEQ ID NO: 40595 - DNA, 25 bp, probe
agaggctgactattaatggaggttc

SEQ ID NO: 40596 - DNA, 25 bp, probe
gtgaagttaccagaagcagatgaca

SEQ ID NO: 40597 - DNA, 25 bp, probe
tgtgaagttaccagaagcagatgac

SEQ ID NO: 40598 - DNA, 25 bp, probe
ttgcataatgtgaagttaccagaag

SEQ ID NO: 40599 - DNA, 25 bp, probe
caagaggctgactattaatggaggt

SEQ ID NO: 40600 - DNA, 25 bp, probe
agtgatagaggaagtctcagacatg

SEQ ID NO: 40601 - DNA, 25 bp, probe
atggtacgaagattccaatgttcat

SEQ ID NO: 40602 - DNA, 25 bp, probe
aggctgactattaatggaggttcaa

SEQ ID NO: 40603 - DNA, 25 bp, probe
tggtacgaagattccaatgttcatt

SEQ ID NO: 40604 - DNA, 25 bp, probe
attgcataatgtgaagttaccagaa

SEQ ID NO: 40605 - DNA, 25 bp, probe
agattgctgaattaaggatcatagt

SEQ ID NO: 40606 - DNA, 25 bp, probe
ttggagtaatggacatgctgaagtt

SEQ ID NO: 40607 - DNA, 25 bp, probe
aagttggagtaatggacatgctgaa

SEQ ID NO: 40608 - DNA, 25 bp, probe
gatggtacgaagattccaatgttca

SEQ ID NO: 40609 - DNA, 25 bp, probe
aagttaccagaagcagatgacatcc

SEQ ID NO: 40610 - DNA, 25 bp, probe
aaaggaattgatgcttctgattacc

SEQ ID NO: 40611 - DNA, 25 bp, probe
gaggctgactattaatggaggttca

SEQ ID NO: 40612 - DNA, 25 bp, probe
aactacagtgtttccaggcttattt

SEQ ID NO: 40613 - DNA, 25 bp, probe
caacatatccatcacacccaactac

SEQ ID NO: 40614 - DNA, 25 bp, probe
tcaacatatccatcacacccaacta

SEQ ID NO: 40615 - DNA, 25 bp, probe
gattgctgaattaaggatcatagtc

SEQ ID NO: 40616 - DNA, 25 bp, probe
tgcataatgtgaagttaccagaagc

SEQ ID NO: 40617 - DNA, 25 bp, probe
gaattaaggatcatagtcgggcata

SEQ ID NO: 40618 - DNA, 25 bp, probe
taccagaagcagatgacatccagta

SEQ ID NO: 40619 - DNA, 25 bp, probe
aattaaggatcatagtcgggcatac

SEQ ID NO: 40620 - DNA, 25 bp, probe
gtcgggcatacttatttatatccat

SEQ ID NO: 40621 - DNA, 25 bp, probe
agtcgggcatacttatttatatcca

SEQ ID NO: 40622 - DNA, 25 bp, probe
aacatatccatcacacccaactaca

SEQ ID NO: 40623 - DNA, 25 bp, probe
ggatggtacgaagattccaatgttc

SEQ ID NO: 40624 - DNA, 25 bp, probe
caaggatggtacgaagattccaatg

SEQ ID NO: 40625 - DNA, 25 bp, probe
ttacttcattgtcttgaggcttcca

SEQ ID NO: 40626 - DNA, 25 bp, probe
gtatttacaatgacatcctcctcct

SEQ ID NO: 40627 - DNA, 25 bp, probe
tggtatttacaatgacatcctcctc

SEQ ID NO: 40628 - DNA, 25 bp, probe
gtggtatttacaatgacatcctcct

SEQ ID NO: 40629 - DNA, 25 bp, probe
ttacaatgacatcctcctcctccat

SEQ ID NO: 40630 - DNA, 25 bp, probe
tatttacaatgacatcctcctcctc

SEQ ID NO: 40631 - DNA, 25 bp, probe
tggtggtatttacaatgacatcctc

SEQ ID NO: 40632 - DNA, 25 bp, probe
ctggtggtatttacaatgacatcct

SEQ ID NO: 40633 - DNA, 25 bp, probe
tcctggtggtatttacaatgacatc

SEQ ID NO: 40634 - DNA, 25 bp, probe
tacttcattgtcttgaggcttccag

SEQ ID NO: 40635 - DNA, 25 bp, probe
ggtatttacaatgacatcctcctcc

SEQ ID NO: 40636 - DNA, 25 bp, probe
ggtggtatttacaatgacatcctcc

SEQ ID NO: 40637 - DNA, 25 bp, probe
cctggtggtatttacaatgacatcc

SEQ ID NO: 40638 - DNA, 25 bp, probe
gtttacttcattgtcttgaggcttc

SEQ ID NO: 40639 - DNA, 25 bp, probe
agtttacttcattgtcttgaggctt

SEQ ID NO: 40640 - DNA, 25 bp, probe
tacaatgacatcctcctcctccatc

SEQ ID NO: 40641 - DNA, 25 bp, probe
atttacaatgacatcctcctcctcc

SEQ ID NO: 40642 - DNA, 25 bp, probe
tttacttcattgtcttgaggcttcc

SEQ ID NO: 40643 - DNA, 25 bp, probe
aaagtttacttcattgtcttgaggc

SEQ ID NO: 40644 - DNA, 25 bp, probe
accctctaccatctgtaaacaactg

SEQ ID NO: 40645 - DNA, 25 bp, probe
caccctctaccatctgtaaacaact

SEQ ID NO: 40646 - DNA, 25 bp, probe
tcaccctctaccatctgtaaacaac

SEQ ID NO: 40647 - DNA, 25 bp, probe
gtcaccctctaccatctgtaaacaa

SEQ ID NO: 40648 - DNA, 25 bp, probe
aagtttacttcattgtcttgaggct

SEQ ID NO: 40649 - DNA, 25 bp, probe
gtcctggtggtatttacaatgacat

SEQ ID NO: 40650 - DNA, 25 bp, probe
ctgtcctggtggtatttacaatgac

SEQ ID NO: 40651 - DNA, 25 bp, probe
gtgtcaccctctaccatctgtaaac

SEQ ID NO: 40652 - DNA, 25 bp, probe
tctcctagaatgctgttgtaaataa

SEQ ID NO: 40653 - DNA, 25 bp, probe
tttacaatgacatcctcctcctcca

SEQ ID NO: 40654 - DNA, 25 bp, probe
tgtgtcaccctctaccatctgtaaa

SEQ ID NO: 40655 - DNA, 25 bp, probe
tcctagaatgctgttgtaaataaac

SEQ ID NO: 40656 - DNA, 25 bp, probe
ctcctagaatgctgttgtaaataaa

SEQ ID NO: 40657 - DNA, 25 bp, probe
cctttctcctagaatgctgttgtaa

SEQ ID NO: 40658 - DNA, 25 bp, probe
ctctaccatctgtaaacaactgggt

SEQ ID NO: 40659 - DNA, 25 bp, probe
ctttctcctagaatgctgttgtaaa

SEQ ID NO: 40660 - DNA, 25 bp, probe
tcctaaagtttacttcattgtcttg

SEQ ID NO: 40661 - DNA, 25 bp, probe
tgtcaccctctaccatctgtaaaca

SEQ ID NO: 40662 - DNA, 25 bp, probe
gctgtcctggtggtatttacaatga

SEQ ID NO: 40663 - DNA, 25 bp, probe
ctgtgtcaccctctaccatctgtaa

SEQ ID NO: 40664 - DNA, 25 bp, probe
aaccgtcactcagatccacattcaa

SEQ ID NO: 40665 - DNA, 25 bp, probe
tctaccatctgtaaacaactgggtg

SEQ ID NO: 40666 - DNA, 25 bp, probe
acctttctcctagaatgctgttgta

SEQ ID NO: 40667 - DNA, 25 bp, probe
taaagtttacttcattgtcttgagg

SEQ ID NO: 40668 - DNA, 25 bp, probe
cctaaagtttacttcattgtcttga

SEQ ID NO: 40669 - DNA, 25 bp, probe
agtctacaccaaggtctacaactac

SEQ ID NO: 40670 - DNA, 25 bp, probe
ggaagactctgaacaatgacatcat

SEQ ID NO: 40671 - DNA, 25 bp, probe
aggaagactctgaacaatgacatca

SEQ ID NO: 40672 - DNA, 25 bp, probe
gaagactctgaacaatgacatcatg

SEQ ID NO: 40673 - DNA, 25 bp, probe
attaagaacaccatagctgccaata

SEQ ID NO: 40674 - DNA, 25 bp, probe
ccagtatctcttcagtctctatacc

SEQ ID NO: 40675 - DNA, 25 bp, probe
atcatgttaatcaagctctcctcac

SEQ ID NO: 40676 - DNA, 25 bp, probe
catcatgttaatcaagctctcctca

SEQ ID NO: 40677 - DNA, 25 bp, probe
caggaagactctgaacaatgacatc

SEQ ID NO: 40678 - DNA, 25 bp, probe
aagactctgaacaatgacatcatgt

SEQ ID NO: 40679 - DNA, 25 bp, probe
atacgacaggaagactctgaacaat

SEQ ID NO: 40680 - DNA, 25 bp, probe
ttaagaacaccatagctgccaatag

SEQ ID NO: 40681 - DNA, 25 bp, probe
gtctacaccaaggtctacaactacg

SEQ ID NO: 40682 - DNA, 25 bp, probe
aatacgacaggaagactctgaacaa

SEQ ID NO: 40683 - DNA, 25 bp, probe
cagtatctcttcagtctctatacca

SEQ ID NO: 40684 - DNA, 25 bp, probe
gattaagaacaccatagctgccaat

SEQ ID NO: 40685 - DNA, 25 bp, probe
ataccaataaagtgaccctgttctc

SEQ ID NO: 40686 - DNA, 25 bp, probe
acaggaagactctgaacaatgacat

SEQ ID NO: 40687 - DNA, 25 bp, probe
ctctataccaataaagtgaccctgt

SEQ ID NO: 40688 - DNA, 25 bp, probe
atgaatccactcctgatccttacct

SEQ ID NO: 40689 - DNA, 25 bp, probe
tataccaataaagtgaccctgttct

SEQ ID NO: 40690 - DNA, 25 bp, probe
tctataccaataaagtgaccctgtt

SEQ ID NO: 40691 - DNA, 25 bp, probe
ctataccaataaagtgaccctgttc

SEQ ID NO: 40692 - DNA, 25 bp, probe
acatcatgttaatcaagctctcctc

SEQ ID NO: 40693 - DNA, 25 bp, probe
gacatcatgttaatcaagctctcct

SEQ ID NO: 40694 - DNA, 25 bp, probe
acaatgacatcatgttaatcaagct

SEQ ID NO: 40695 - DNA, 25 bp, probe
atgacatcatgttaatcaagctctc

SEQ ID NO: 40696 - DNA, 25 bp, probe
catgaatccactcctgatccttacc

SEQ ID NO: 40697 - DNA, 25 bp, probe
ccatgaatccactcctgatccttac

SEQ ID NO: 40698 - DNA, 25 bp, probe
tgacatcatgttaatcaagctctcc

SEQ ID NO: 40699 - DNA, 25 bp, probe
tacgacaggaagactctgaacaatg

SEQ ID NO: 40700 - DNA, 25 bp, probe
caatacgacaggaagactctgaaca

SEQ ID NO: 40701 - DNA, 25 bp, probe
tgaatccactcctgatccttacctt

SEQ ID NO: 40702 - DNA, 25 bp, probe
caatgacatcatgttaatcaagctc

SEQ ID NO: 40703 - DNA, 25 bp, probe
gacaggaagactctgaacaatgaca

SEQ ID NO: 40704 - DNA, 25 bp, probe
aatgacatcatgttaatcaagctct

SEQ ID NO: 40705 - DNA, 25 bp, probe
agtatctcttcagtctctataccaa

SEQ ID NO: 40706 - DNA, 25 bp, probe
accatgaatccactcctgatcctta

SEQ ID NO: 40707 - DNA, 25 bp, probe
tcatgttaatcaagctctcctcacg

SEQ ID NO: 40708 - DNA, 25 bp, probe
ccaatacgacaggaagactctgaac

SEQ ID NO: 40709 - DNA, 25 bp, probe
gaatccactcctgatccttaccttt

SEQ ID NO: 40710 - DNA, 25 bp, probe
cccagtatctcttcagtctctatac

SEQ ID NO: 40711 - DNA, 25 bp, probe
tctacaccaaggtctacaactacgt

SEQ ID NO: 40712 - DNA, 25 bp, probe
atctcttcagtctctataccaataa

SEQ ID NO: 40713 - DNA, 25 bp, probe
caactatgtggactggattaaggac

SEQ ID NO: 40714 - DNA, 25 bp, probe
gtctacaccaaggtctacaactatg

SEQ ID NO: 40715 - DNA, 25 bp, probe
tgaatctactcctgatccttacctt

SEQ ID NO: 40716 - DNA, 25 bp, probe
atgaatctactcctgatccttacct

SEQ ID NO: 40717 - DNA, 25 bp, probe
agtctacaccaaggtctacaactat

SEQ ID NO: 40718 - DNA, 25 bp, probe
tacaactatgtggactggattaagg

SEQ ID NO: 40719 - DNA, 25 bp, probe
catgaatctactcctgatccttacc

SEQ ID NO: 40720 - DNA, 25 bp, probe
ccatgaatctactcctgatccttac

SEQ ID NO: 40721 - DNA, 25 bp, probe
accatgaatctactcctgatcctta

SEQ ID NO: 40722 - DNA, 25 bp, probe
gtctacaactatgtggactggatta

SEQ ID NO: 40723 - DNA, 25 bp, probe
tctacaccaaggtctacaactatgt

SEQ ID NO: 40724 - DNA, 25 bp, probe
aactatgtggactggattaaggaca

SEQ ID NO: 40725 - DNA, 25 bp, probe
acaactatgtggactggattaagga

SEQ ID NO: 40726 - DNA, 25 bp, probe
tctacaactatgtggactggattaa

SEQ ID NO: 40727 - DNA, 25 bp, probe
ctacaactatgtggactggattaag

SEQ ID NO: 40728 - DNA, 25 bp, probe
ctacaccaaggtctacaactatgtg

SEQ ID NO: 40729 - DNA, 25 bp, probe
caccatgaatctactcctgatcctt

SEQ ID NO: 40730 - DNA, 25 bp, probe
aacaccatgaatctactcctgatcc

SEQ ID NO: 40731 - DNA, 25 bp, probe
ggtctacaactatgtggactggatt

SEQ ID NO: 40732 - DNA, 25 bp, probe
actatgtggactggattaaggacac

SEQ ID NO: 40733 - DNA, 25 bp, probe
ctataccaataaagtgaccctgctc

SEQ ID NO: 40734 - DNA, 25 bp, probe
ctctataccaataaagtgaccctgc

SEQ ID NO: 40735 - DNA, 25 bp, probe
tataccaataaagtgaccctgctct

SEQ ID NO: 40736 - DNA, 25 bp, probe
tctataccaataaagtgaccctgct

SEQ ID NO: 40737 - DNA, 25 bp, probe
tacaccaaggtctacaactatgtgg

SEQ ID NO: 40738 - DNA, 25 bp, probe
acaccatgaatctactcctgatcct

SEQ ID NO: 40739 - DNA, 25 bp, probe
aggtctacaactatgtggactggat

SEQ ID NO: 40740 - DNA, 25 bp, probe
caaggtctacaactatgtggactgg

SEQ ID NO: 40741 - DNA, 25 bp, probe
ctactcctgatccttacctttgttg

SEQ ID NO: 40742 - DNA, 25 bp, probe
tctactcctgatccttacctttgtt

SEQ ID NO: 40743 - DNA, 25 bp, probe
ctatgtggactggattaaggacacc

SEQ ID NO: 40744 - DNA, 25 bp, probe
atctactcctgatccttacctttgt

SEQ ID NO: 40745 - DNA, 25 bp, probe
aatctactcctgatccttacctttg

SEQ ID NO: 40746 - DNA, 25 bp, probe
aaggtctacaactatgtggactgga

SEQ ID NO: 40747 - DNA, 25 bp, probe
gaatctactcctgatccttaccttt

SEQ ID NO: 40748 - DNA, 25 bp, probe
ataccaataaagtgaccctgctctc

SEQ ID NO: 40749 - DNA, 25 bp, probe
gtggactggattaaggacaccatag

SEQ ID NO: 40750 - DNA, 25 bp, probe
gcagtctctataccaataaagtgac

SEQ ID NO: 40751 - DNA, 25 bp, probe
ccaaggtctacaactatgtggactg

SEQ ID NO: 40752 - DNA, 25 bp, probe
accaaggtctacaactatgtggact

SEQ ID NO: 40753 - DNA, 25 bp, probe
caccaaggtctacaactatgtggac

SEQ ID NO: 40754 - DNA, 25 bp, probe
tactcctgatccttacctttgttgc

SEQ ID NO: 40755 - DNA, 25 bp, probe
tgtggactggattaaggacaccata

SEQ ID NO: 40756 - DNA, 25 bp, probe
tatgtggactggattaaggacacca

SEQ ID NO: 40757 - DNA, 25 bp, probe
gagtaacagggcagaaatgattaaa

SEQ ID NO: 40758 - DNA, 25 bp, probe
ggagtaacagggcagaaatgattaa

SEQ ID NO: 40759 - DNA, 25 bp, probe
atcttgatctttgagcccattcttc

SEQ ID NO: 40760 - DNA, 25 bp, probe
catcttgatctttgagcccattctt

SEQ ID NO: 40761 - DNA, 25 bp, probe
gggagtaacagggcagaaatgatta

SEQ ID NO: 40762 - DNA, 25 bp, probe
cttgatctttgagcccattcttctg

SEQ ID NO: 40763 - DNA, 25 bp, probe
tcttgatctttgagcccattcttct

SEQ ID NO: 40764 - DNA, 25 bp, probe
ccatcttgatctttgagcccattct

SEQ ID NO: 40765 - DNA, 25 bp, probe
agtaacagggcagaaatgattaaaa

SEQ ID NO: 40766 - DNA, 25 bp, probe
gggcagaaatgattaaaatgtttga

SEQ ID NO: 40767 - DNA, 25 bp, probe
agggcagaaatgattaaaatgtttg

SEQ ID NO: 40768 - DNA, 25 bp, probe
cagggcagaaatgattaaaatgttt

SEQ ID NO: 40769 - DNA, 25 bp, probe
gcagaaatgattaaaatgtttgagc

SEQ ID NO: 40770 - DNA, 25 bp, probe
acagggcagaaatgattaaaatgtt

SEQ ID NO: 40771 - DNA, 25 bp, probe
aacagggcagaaatgattaaaatgt

SEQ ID NO: 40772 - DNA, 25 bp, probe
taacagggcagaaatgattaaaatg

SEQ ID NO: 40773 - DNA, 25 bp, probe
gtaacagggcagaaatgattaaaat

SEQ ID NO: 40774 - DNA, 25 bp, probe
tgggagtaacagggcagaaatgatt

SEQ ID NO: 40775 - DNA, 25 bp, probe
cccatcttgatctttgagcccattc

SEQ ID NO: 40776 - DNA, 25 bp, probe
ggcagaaatgattaaaatgtttgag

SEQ ID NO: 40777 - DNA, 25 bp, probe
ttgatctttgagcccattcttctgg

SEQ ID NO: 40778 - DNA, 25 bp, probe
agaaatgattaaaatgtttgagcac

SEQ ID NO: 40779 - DNA, 25 bp, probe
cagaaatgattaaaatgtttgagca

SEQ ID NO: 40780 - DNA, 25 bp, probe
gtgggagtaacagggcagaaatgat

SEQ ID NO: 40781 - DNA, 25 bp, probe
cagactgatgagcacatctctctgc

SEQ ID NO: 40782 - DNA, 25 bp, probe
ccagactgatgagcacatctctctg

SEQ ID NO: 40783 - DNA, 25 bp, probe
atcactgagagtcaggagttttact

SEQ ID NO: 40784 - DNA, 25 bp, probe
catcactgagagtcaggagttttac

SEQ ID NO: 40785 - DNA, 25 bp, probe
gaccatcactgagagtcaggagttt

SEQ ID NO: 40786 - DNA, 25 bp, probe
tcactgagagtcaggagttttactg

SEQ ID NO: 40787 - DNA, 25 bp, probe
ccatcactgagagtcaggagtttta

SEQ ID NO: 40788 - DNA, 25 bp, probe
aggagttttactgcctgtagcaatg

SEQ ID NO: 40789 - DNA, 25 bp, probe
tgggacccttggctatgaaaatgag

SEQ ID NO: 40790 - DNA, 25 bp, probe
ctgggacccttggctatgaaaatga

SEQ ID NO: 40791 - DNA, 25 bp, probe
ccccatcttgatctttgagcccatt

SEQ ID NO: 40792 - DNA, 25 bp, probe
ggagttttactgcctgtagcaatgg

SEQ ID NO: 40793 - DNA, 25 bp, probe
cactgagagtcaggagttttactgc

SEQ ID NO: 40794 - DNA, 25 bp, probe
accatcactgagagtcaggagtttt

SEQ ID NO: 40795 - DNA, 25 bp, probe
ctgagagtcaggagttttactgcct

SEQ ID NO: 40796 - DNA, 25 bp, probe
actgagagtcaggagttttactgcc

SEQ ID NO: 40797 - DNA, 25 bp, probe
ttttgggaccatcactgagagtcag

SEQ ID NO: 40798 - DNA, 25 bp, probe
gagtcaggagttttactgcctgtag

SEQ ID NO: 40799 - DNA, 25 bp, probe
agagtcaggagttttactgcctgta

SEQ ID NO: 40800 - DNA, 25 bp, probe
caggagttttactgcctgtagcaat

SEQ ID NO: 40801 - DNA, 25 bp, probe
ctcacctgtaagatgaagataagga

SEQ ID NO: 40802 - DNA, 25 bp, probe
tctcacctgtaagatgaagataagg

SEQ ID NO: 40803 - DNA, 25 bp, probe
agatgaagataaggatgatacagtc

SEQ ID NO: 40804 - DNA, 25 bp, probe
cacctgtaagatgaagataaggatg

SEQ ID NO: 40805 - DNA, 25 bp, probe
gaagataaggatgatacagtctcca

SEQ ID NO: 40806 - DNA, 25 bp, probe
tgaagataaggatgatacagtctcc

SEQ ID NO: 40807 - DNA, 25 bp, probe
acctgtaagatgaagataaggatga

SEQ ID NO: 40808 - DNA, 25 bp, probe
tcacctgtaagatgaagataaggat

SEQ ID NO: 40809 - DNA, 25 bp, probe
ttctcacctgtaagatgaagataag

SEQ ID NO: 40810 - DNA, 25 bp, probe
atgaagataaggatgatacagtctc

SEQ ID NO: 40811 - DNA, 25 bp, probe
gatgaagataaggatgatacagtct

SEQ ID NO: 40812 - DNA, 25 bp, probe
gtggctgttggaaagatttaagatt

SEQ ID NO: 40813 - DNA, 25 bp, probe
aagataaggatgatacagtctccat

SEQ ID NO: 40814 - DNA, 25 bp, probe
tggctgttggaaagatttaagattt

SEQ ID NO: 40815 - DNA, 25 bp, probe
agtggctgttggaaagatttaagat

SEQ ID NO: 40816 - DNA, 25 bp, probe
aagatgaagataaggatgatacagt

SEQ ID NO: 40817 - DNA, 25 bp, probe
cctgtaagatgaagataaggatgat

SEQ ID NO: 40818 - DNA, 25 bp, probe
ctctgaccctgatgcttaataaacg

SEQ ID NO: 40819 - DNA, 25 bp, probe
agatttctcacctgtaagatgaaga

SEQ ID NO: 40820 - DNA, 25 bp, probe
cccaccactaagagaatacaggaaa

SEQ ID NO: 40821 - DNA, 25 bp, probe
gctctgaccctgatgcttaataaac

SEQ ID NO: 40822 - DNA, 25 bp, probe
gatttctcacctgtaagatgaagat

SEQ ID NO: 40823 - DNA, 25 bp, probe
cagatttctcacctgtaagatgaag

SEQ ID NO: 40824 - DNA, 25 bp, probe
gcagatttctcacctgtaagatgaa

SEQ ID NO: 40825 - DNA, 25 bp, probe
tcacacctatgacatacatgggata

SEQ ID NO: 40826 - DNA, 25 bp, probe
gatttcacacctatgacatacatgg

SEQ ID NO: 40827 - DNA, 25 bp, probe
atttcacacctatgacatacatggg

SEQ ID NO: 40828 - DNA, 25 bp, probe
cagtggctgttggaaagatttaaga

SEQ ID NO: 40829 - DNA, 25 bp, probe
cacacctatgacatacatgggatag

SEQ ID NO: 40830 - DNA, 25 bp, probe
ttcacacctatgacatacatgggat

SEQ ID NO: 40831 - DNA, 25 bp, probe
ataaggatgatacagtctccatcag

SEQ ID NO: 40832 - DNA, 25 bp, probe
gataaggatgatacagtctccatca

SEQ ID NO: 40833 - DNA, 25 bp, probe
aagatttcacacctatgacatacat

SEQ ID NO: 40834 - DNA, 25 bp, probe
agatttcacacctatgacatacatg

SEQ ID NO: 40835 - DNA, 25 bp, probe
taaggatgatacagtctccatcagg

SEQ ID NO: 40836 - DNA, 25 bp, probe
tatgacatacatgggatagcacctg

SEQ ID NO: 40837 - DNA, 25 bp, probe
tttcacacctatgacatacatggga

SEQ ID NO: 40838 - DNA, 25 bp, probe
agataaggatgatacagtctccatc

SEQ ID NO: 40839 - DNA, 25 bp, probe
gccatgcactcaataaagaatgtat

SEQ ID NO: 40840 - DNA, 25 bp, probe
ctatgacatacatgggatagcacct

SEQ ID NO: 40841 - DNA, 25 bp, probe
acctatgacatacatgggatagcac

SEQ ID NO: 40842 - DNA, 25 bp, probe
cacctatgacatacatgggatagca

SEQ ID NO: 40843 - DNA, 25 bp, probe
acacctatgacatacatgggatagc

SEQ ID NO: 40844 - DNA, 25 bp, probe
taagatttcacacctatgacataca

SEQ ID NO: 40845 - DNA, 25 bp, probe
gatacaatgcgtagatagaagaagc

SEQ ID NO: 40846 - DNA, 25 bp, probe
atacaatgcgtagatagaagaagcc

SEQ ID NO: 40847 - DNA, 25 bp, probe
cgatacaatgcgtagatagaagaag

SEQ ID NO: 40848 - DNA, 25 bp, probe
aactgagtcatcatcttagtccaac

SEQ ID NO: 40849 - DNA, 25 bp, probe
actgagtcatcatcttagtccaact

SEQ ID NO: 40850 - DNA, 25 bp, probe
taactgagtcatcatcttagtccaa

SEQ ID NO: 40851 - DNA, 25 bp, probe
ttaactgagtcatcatcttagtcca

SEQ ID NO: 40852 - DNA, 25 bp, probe
gtcgatacaatgcgtagatagaaga

SEQ ID NO: 40853 - DNA, 25 bp, probe
agtcgatacaatgcgtagatagaag

SEQ ID NO: 40854 - DNA, 25 bp, probe
cagtcgatacaatgcgtagatagaa

SEQ ID NO: 40855 - DNA, 25 bp, probe
tcgatacaatgcgtagatagaagaa

SEQ ID NO: 40856 - DNA, 25 bp, probe
ctgagtcatcatcttagtccaacta

SEQ ID NO: 40857 - DNA, 25 bp, probe
tttaggaatctctttggaattggga

SEQ ID NO: 40858 - DNA, 25 bp, probe
ctctgcccttctgtatcctatgtat

SEQ ID NO: 40859 - DNA, 25 bp, probe
tctgcccttctgtatcctatgtatg

SEQ ID NO: 40860 - DNA, 25 bp, probe
cctcctttaactgagtcatcatctt

SEQ ID NO: 40861 - DNA, 25 bp, probe
atttgtctcctcctttaactgagtc

SEQ ID NO: 40862 - DNA, 25 bp, probe
ttaggaatctctttggaattgggag

SEQ ID NO: 40863 - DNA, 25 bp, probe
tccaactaatgcagtcgatacaatg

SEQ ID NO: 40864 - DNA, 25 bp, probe
gtccaactaatgcagtcgatacaat

SEQ ID NO: 40865 - DNA, 25 bp, probe
ctcctcctttaactgagtcatcatc

SEQ ID NO: 40866 - DNA, 25 bp, probe
catttgtctcctcctttaactgagt

SEQ ID NO: 40867 - DNA, 25 bp, probe
ttctgtatcctatgtatgcagtgtg

SEQ ID NO: 40868 - DNA, 25 bp, probe
cttctgtatcctatgtatgcagtgt

SEQ ID NO: 40869 - DNA, 25 bp, probe
gccaacagaatccttcttgatagtt

SEQ ID NO: 40870 - DNA, 25 bp, probe
tcctcctttaactgagtcatcatct

SEQ ID NO: 40871 - DNA, 25 bp, probe
tctcctcctttaactgagtcatcat

SEQ ID NO: 40872 - DNA, 25 bp, probe
ccttctgtatcctatgtatgcagtg

SEQ ID NO: 40873 - DNA, 25 bp, probe
gtcagcatttgtctcctcctttaac

SEQ ID NO: 40874 - DNA, 25 bp, probe
gattcccgaagaaattgacccatag

SEQ ID NO: 40875 - DNA, 25 bp, probe
agcatttgtctcctcctttaactga

SEQ ID NO: 40876 - DNA, 25 bp, probe
tcagcatttgtctcctcctttaact

SEQ ID NO: 40877 - DNA, 25 bp, probe
agtcagcatttgtctcctcctttaa

SEQ ID NO: 40878 - DNA, 25 bp, probe
tgctggaataggacactcaagactt

SEQ ID NO: 40879 - DNA, 25 bp, probe
ttgtctcctcctttaactgagtcat

SEQ ID NO: 40880 - DNA, 25 bp, probe
tttgtctcctcctttaactgagtca

SEQ ID NO: 40881 - DNA, 25 bp, probe
tacaatgcgtagatagaagaagccc

SEQ ID NO: 40882 - DNA, 25 bp, probe
gtctcctcctttaactgagtcatca

SEQ ID NO: 40883 - DNA, 25 bp, probe
tgtctcctcctttaactgagtcatc

SEQ ID NO: 40884 - DNA, 25 bp, probe
gcatttgtctcctcctttaactgag

SEQ ID NO: 40885 - DNA, 25 bp, probe
tgattcccgaagaaattgacccata

SEQ ID NO: 40886 - DNA, 25 bp, probe
agtccaactaatgcagtcgatacaa

SEQ ID NO: 40887 - DNA, 25 bp, probe
cttcatgtttccctcaaagactctc

SEQ ID NO: 40888 - DNA, 25 bp, probe
tttaactgagtcatcatcttagtcc

SEQ ID NO: 40889 - DNA, 25 bp, probe
atgtgattgtcatgtaaggcttaac

SEQ ID NO: 40890 - DNA, 25 bp, probe
gattgtcatgtaaggcttaacacag

SEQ ID NO: 40891 - DNA, 25 bp, probe
tgttgtgaggagactatgatataac

SEQ ID NO: 40892 - DNA, 25 bp, probe
attgtcatgtaaggcttaacacagt

SEQ ID NO: 40893 - DNA, 25 bp, probe
tgattgtcatgtaaggcttaacaca

SEQ ID NO: 40894 - DNA, 25 bp, probe
tgtgattgtcatgtaaggcttaaca

SEQ ID NO: 40895 - DNA, 25 bp, probe
gtgattgtcatgtaaggcttaacac

SEQ ID NO: 40896 - DNA, 25 bp, probe
ttgtcatgtaaggcttaacacagtg

SEQ ID NO: 40897 - DNA, 25 bp, probe
gttgtgaggagactatgatataaca

SEQ ID NO: 40898 - DNA, 25 bp, probe
aataaagtcatacgctccaactgat

SEQ ID NO: 40899 - DNA, 25 bp, probe
atcaataaagtcatacgctccaact

SEQ ID NO: 40900 - DNA, 25 bp, probe
catgttgtgaggagactatgatata

SEQ ID NO: 40901 - DNA, 25 bp, probe
atgttgtgaggagactatgatataa

SEQ ID NO: 40902 - DNA, 25 bp, probe
gatcaataaagtcatacgctccaac

SEQ ID NO: 40903 - DNA, 25 bp, probe
tgtcctggatcaataaagtcatacg

SEQ ID NO: 40904 - DNA, 25 bp, probe
gtggtgagttctgactaaaggttac

SEQ ID NO: 40905 - DNA, 25 bp, probe
caataaagtcatacgctccaactga

SEQ ID NO: 40906 - DNA, 25 bp, probe
tcaataaagtcatacgctccaactg

SEQ ID NO: 40907 - DNA, 25 bp, probe
caaaggtttattccagagaagccag

SEQ ID NO: 40908 - DNA, 25 bp, probe
cctggatcaataaagtcatacgctc

SEQ ID NO: 40909 - DNA, 25 bp, probe
tgtgaggagactatgatataacatg

SEQ ID NO: 40910 - DNA, 25 bp, probe
ataaagtcatacgctccaactgatc

SEQ ID NO: 40911 - DNA, 25 bp, probe
tcctggatcaataaagtcatacgct

SEQ ID NO: 40912 - DNA, 25 bp, probe
gtcctggatcaataaagtcatacgc

SEQ ID NO: 40913 - DNA, 25 bp, probe
atgtcctggatcaataaagtcatac

SEQ ID NO: 40914 - DNA, 25 bp, probe
ggtggtgagttctgactaaaggtta

SEQ ID NO: 40915 - DNA, 25 bp, probe
ttgtgaggagactatgatataacat

SEQ ID NO: 40916 - DNA, 25 bp, probe
catgtcctggatcaataaagtcata

SEQ ID NO: 40917 - DNA, 25 bp, probe
tgtcatgtaaggcttaacacagtgg

SEQ ID NO: 40918 - DNA, 25 bp, probe
ggatcaataaagtcatacgctccaa

SEQ ID NO: 40919 - DNA, 25 bp, probe
aaaggtttattccagagaagccagg

SEQ ID NO: 40920 - DNA, 25 bp, probe
ctggatcaataaagtcatacgctcc

SEQ ID NO: 40921 - DNA, 25 bp, probe
tcatgtgattgtcatgtaaggctta

SEQ ID NO: 40922 - DNA, 25 bp, probe
gagttctgactaaaggttacctgtt

SEQ ID NO: 40923 - DNA, 25 bp, probe
catgtgattgtcatgtaaggcttaa

SEQ ID NO: 40924 - DNA, 25 bp, probe
ttctgactaaaggttacctgttgtc

SEQ ID NO: 40925 - DNA, 25 bp, probe
agttctgactaaaggttacctgttg

SEQ ID NO: 40926 - DNA, 25 bp, probe
gaacaatgacgtgcctacctcttag

SEQ ID NO: 40927 - DNA, 25 bp, probe
atccagatgttatgctcctgctgat

SEQ ID NO: 40928 - DNA, 25 bp, probe
gttctgactaaaggttacctgttgt

SEQ ID NO: 40929 - DNA, 25 bp, probe
gtgagttctgactaaaggttacctg

SEQ ID NO: 40930 - DNA, 25 bp, probe
atcttcatgtgattgtcatgtaagg

SEQ ID NO: 40931 - DNA, 25 bp, probe
ttcatgtgattgtcatgtaaggctt

SEQ ID NO: 40932 - DNA, 25 bp, probe
tgagttctgactaaaggttacctgt

SEQ ID NO: 40933 - DNA, 25 bp, probe
atggcatcatccaaggaatagactc

SEQ ID NO: 40934 - DNA, 25 bp, probe
gaacaaactgaacgacattctcctc

SEQ ID NO: 40935 - DNA, 25 bp, probe
caaactgaacgacattctcctcatc

SEQ ID NO: 40936 - DNA, 25 bp, probe
acaaactgaacgacattctcctcat

SEQ ID NO: 40937 - DNA, 25 bp, probe
aactgaacgacattctcctcatcca

SEQ ID NO: 40938 - DNA, 25 bp, probe
aacaaactgaacgacattctcctca

SEQ ID NO: 40939 - DNA, 25 bp, probe
aaactgaacgacattctcctcatcc

SEQ ID NO: 40940 - DNA, 25 bp, probe
gatggcatcatccaaggaatagact

SEQ ID NO: 40941 - DNA, 25 bp, probe
actgaacgacattctcctcatccag

SEQ ID NO: 40942 - DNA, 25 bp, probe
tggcatcatccaaggaatagactcc

SEQ ID NO: 40943 - DNA, 25 bp, probe
cataacatttgcactttcgtccctc

SEQ ID NO: 40944 - DNA, 25 bp, probe
agaacaaactgaacgacattctcct

SEQ ID NO: 40945 - DNA, 25 bp, probe
cacataacatttgcactttcgtccc

SEQ ID NO: 40946 - DNA, 25 bp, probe
ccacataacatttgcactttcgtcc

SEQ ID NO: 40947 - DNA, 25 bp, probe
tgatggcatcatccaaggaatagac

SEQ ID NO: 40948 - DNA, 25 bp, probe
gtgatggcatcatccaaggaataga

SEQ ID NO: 40949 - DNA, 25 bp, probe
acataacatttgcactttcgtccct

SEQ ID NO: 40950 - DNA, 25 bp, probe
tgtgatggcatcatccaaggaatag

SEQ ID NO: 40951 - DNA, 25 bp, probe
ctgtgatggcatcatccaaggaata

SEQ ID NO: 40952 - DNA, 25 bp, probe
gccacataacatttgcactttcgtc

SEQ ID NO: 40953 - DNA, 25 bp, probe
gatctttggacagaagcagctcttg

SEQ ID NO: 40954 - DNA, 25 bp, probe
ataacatttgcactttcgtccctcg

SEQ ID NO: 40955 - DNA, 25 bp, probe
cggagaacaaactgaacgacattct

SEQ ID NO: 40956 - DNA, 25 bp, probe
ggaatagactccttcgtgatctggg

SEQ ID NO: 40957 - DNA, 25 bp, probe
aggaatagactccttcgtgatctgg

SEQ ID NO: 40958 - DNA, 25 bp, probe
gcggagaacaaactgaacgacattc

SEQ ID NO: 40959 - DNA, 25 bp, probe
ctgatctgtgatggcatcatccaag

SEQ ID NO: 40960 - DNA, 25 bp, probe
ctcaggtgtttctgaacaactacga

SEQ ID NO: 40961 - DNA, 25 bp, probe
tcaggtgtttctgaacaactacgac

SEQ ID NO: 40962 - DNA, 25 bp, probe
ggcatcatccaaggaatagactcct

SEQ ID NO: 40963 - DNA, 25 bp, probe
tctgtgatggcatcatccaaggaat

SEQ ID NO: 40964 - DNA, 25 bp, probe
atctgtgatggcatcatccaaggaa

SEQ ID NO: 40965 - DNA, 25 bp, probe
atctttggacagaagcagctcttgt

SEQ ID NO: 40966 - DNA, 25 bp, probe
ggatctttggacagaagcagctctt

SEQ ID NO: 40967 - DNA, 25 bp, probe
gaatagactccttcgtgatctgggg

SEQ ID NO: 40968 - DNA, 25 bp, probe
gatctgtgatggcatcatccaagga

SEQ ID NO: 40969 - DNA, 25 bp, probe
caggtgtttctgaacaactacgacg

SEQ ID NO: 40970 - DNA, 25 bp, probe
ggctcaggtgtttctgaacaactac

SEQ ID NO: 40971 - DNA, 25 bp, probe
tgatctgtgatggcatcatccaagg

SEQ ID NO: 40972 - DNA, 25 bp, probe
cctgatctgtgatggcatcatccaa

SEQ ID NO: 40973 - DNA, 25 bp, probe
gctcaggtgtttctgaacaactacg

SEQ ID NO: 40974 - DNA, 25 bp, probe
tggctcaggtgtttctgaacaacta

SEQ ID NO: 40975 - DNA, 25 bp, probe
atagactccttcgtgatctggggat

SEQ ID NO: 40976 - DNA, 25 bp, probe
ggccacataacatttgcactttcgt

SEQ ID NO: 40977 - DNA, 25 bp, probe
atgtgctagggataaatcaagagtc

SEQ ID NO: 40978 - DNA, 25 bp, probe
tatgtgctagggataaatcaagagt

SEQ ID NO: 40979 - DNA, 25 bp, probe
atatcaatggactgagtctgattca

SEQ ID NO: 40980 - DNA, 25 bp, probe
ttatgtgctagggataaatcaagag

SEQ ID NO: 40981 - DNA, 25 bp, probe
cttatgtgctagggataaatcaaga

SEQ ID NO: 40982 - DNA, 25 bp, probe
ctagggataaatcaagagtcctcag

SEQ ID NO: 40983 - DNA, 25 bp, probe
ccttatgtgctagggataaatcaag

SEQ ID NO: 40984 - DNA, 25 bp, probe
tccttatgtgctagggataaatcaa

SEQ ID NO: 40985 - DNA, 25 bp, probe
aatatcaatggactgagtctgattc

SEQ ID NO: 40986 - DNA, 25 bp, probe
actgtaataagctctttgaatgtgt

SEQ ID NO: 40987 - DNA, 25 bp, probe
tagggataaatcaagagtcctcagc

SEQ ID NO: 40988 - DNA, 25 bp, probe
gctagggataaatcaagagtcctca

SEQ ID NO: 40989 - DNA, 25 bp, probe
tgctagggataaatcaagagtcctc

SEQ ID NO: 40990 - DNA, 25 bp, probe
gtgctagggataaatcaagagtcct

SEQ ID NO: 40991 - DNA, 25 bp, probe
tgtgctagggataaatcaagagtcc

SEQ ID NO: 40992 - DNA, 25 bp, probe
ggataaatcaagagtcctcagcact

SEQ ID NO: 40993 - DNA, 25 bp, probe
tatcaatggactgagtctgattcag

SEQ ID NO: 40994 - DNA, 25 bp, probe
aaaaccactaagaaaatacctccct

SEQ ID NO: 40995 - DNA, 25 bp, probe
aaaccactaagaaaatacctccctg

SEQ ID NO: 40996 - DNA, 25 bp, probe
taatatcaatggactgagtctgatt

SEQ ID NO: 40997 - DNA, 25 bp, probe
ttaatatcaatggactgagtctgat

SEQ ID NO: 40998 - DNA, 25 bp, probe
aaatcccaggaactcctaaaccttc

SEQ ID NO: 40999 - DNA, 25 bp, probe
tttaatatcaatggactgagtctga

SEQ ID NO: 41000 - DNA, 25 bp, probe
ttcaatatcttacagtgatacagtt

SEQ ID NO: 41001 - DNA, 25 bp, probe
ctgtaataagctctttgaatgtgta

SEQ ID NO: 41002 - DNA, 25 bp, probe
tactgtaataagctctttgaatgtg

SEQ ID NO: 41003 - DNA, 25 bp, probe
gggataaatcaagagtcctcagcac

SEQ ID NO: 41004 - DNA, 25 bp, probe
agggataaatcaagagtcctcagca

SEQ ID NO: 41005 - DNA, 25 bp, probe
attcaatatcttacagtgatacagt

SEQ ID NO: 41006 - DNA, 25 bp, probe
actgggtgggttctgtgtcaataaa

SEQ ID NO: 41007 - DNA, 25 bp, probe
ctcatccttatgtgctagggataaa

SEQ ID NO: 41008 - DNA, 25 bp, probe
actcatccttatgtgctagggataa

SEQ ID NO: 41009 - DNA, 25 bp, probe
aactgggtgggttctgtgtcaataa

SEQ ID NO: 41010 - DNA, 25 bp, probe
aaactgggtgggttctgtgtcaata

SEQ ID NO: 41011 - DNA, 25 bp, probe
atcaatggactgagtctgattcaga

SEQ ID NO: 41012 - DNA, 25 bp, probe
ttcttttgctggatggttcctttat

SEQ ID NO: 41013 - DNA, 25 bp, probe
tcaatggactgagtctgattcagaa

SEQ ID NO: 41014 - DNA, 25 bp, probe
atccttatgtgctagggataaatca

SEQ ID NO: 41015 - DNA, 25 bp, probe
tcatccttatgtgctagggataaat

SEQ ID NO: 41016 - DNA, 25 bp, probe
tttcttttgctggatggttccttta

SEQ ID NO: 41017 - DNA, 25 bp, probe
atttaatatcaatggactgagtctg

SEQ ID NO: 41018 - DNA, 25 bp, probe
tgtaataagctctttgaatgtgtat

SEQ ID NO: 41019 - DNA, 25 bp, probe
catccttatgtgctagggataaatc

SEQ ID NO: 41020 - DNA, 25 bp, probe
cactcatccttatgtgctagggata

SEQ ID NO: 41021 - DNA, 25 bp, probe
ccttctgagtctccaatgtctatta

SEQ ID NO: 41022 - DNA, 25 bp, probe
tgagtctccaatgtctattattcca

SEQ ID NO: 41023 - DNA, 25 bp, probe
gagtctccaatgtctattattccac

SEQ ID NO: 41024 - DNA, 25 bp, probe
ctgagtctccaatgtctattattcc

SEQ ID NO: 41025 - DNA, 25 bp, probe
tgttacatggatagattgcctagtg

SEQ ID NO: 41026 - DNA, 25 bp, probe
tccaatgtctattattccacactcc

SEQ ID NO: 41027 - DNA, 25 bp, probe
ccaatgtctattattccacactcca

SEQ ID NO: 41028 - DNA, 25 bp, probe
ttgttacatggatagattgcctagt

SEQ ID NO: 41029 - DNA, 25 bp, probe
gttacatggatagattgcctagtgg

SEQ ID NO: 41030 - DNA, 25 bp, probe
tctccaatgtctattattccacact

SEQ ID NO: 41031 - DNA, 25 bp, probe
gtctccaatgtctattattccacac

SEQ ID NO: 41032 - DNA, 25 bp, probe
agtctccaatgtctattattccaca

SEQ ID NO: 41033 - DNA, 25 bp, probe
ttacatggatagattgcctagtggt

SEQ ID NO: 41034 - DNA, 25 bp, probe
ctccaatgtctattattccacactc

SEQ ID NO: 41035 - DNA, 25 bp, probe
gatagattgcctagtggtgaagtct

SEQ ID NO: 41036 - DNA, 25 bp, probe
atggatagattgcctagtggtgaag

SEQ ID NO: 41037 - DNA, 25 bp, probe
caatgtctattattccacactccat

SEQ ID NO: 41038 - DNA, 25 bp, probe
atagattgcctagtggtgaagtctg

SEQ ID NO: 41039 - DNA, 25 bp, probe
tctgagtctccaatgtctattattc

SEQ ID NO: 41040 - DNA, 25 bp, probe
tacatggatagattgcctagtggtg

SEQ ID NO: 41041 - DNA, 25 bp, probe
tgtctattattccacactccatgtc

SEQ ID NO: 41042 - DNA, 25 bp, probe
cttctgagtctccaatgtctattat

SEQ ID NO: 41043 - DNA, 25 bp, probe
atgtctattattccacactccatgt

SEQ ID NO: 41044 - DNA, 25 bp, probe
gtctattattccacactccatgtcc

SEQ ID NO: 41045 - DNA, 25 bp, probe
ctattattccacactccatgtccac

SEQ ID NO: 41046 - DNA, 25 bp, probe
tctattattccacactccatgtcca

SEQ ID NO: 41047 - DNA, 25 bp, probe
ggatagattgcctagtggtgaagtc

SEQ ID NO: 41048 - DNA, 25 bp, probe
catggatagattgcctagtggtgaa

SEQ ID NO: 41049 - DNA, 25 bp, probe
aatgtctattattccacactccatg

SEQ ID NO: 41050 - DNA, 25 bp, probe
ttaagttatttctcatccctcaccc

SEQ ID NO: 41051 - DNA, 25 bp, probe
ttctgagtctccaatgtctattatt

SEQ ID NO: 41052 - DNA, 25 bp, probe
acccattaagttatttctcatccct

SEQ ID NO: 41053 - DNA, 25 bp, probe
cccattaagttatttctcatccctc

SEQ ID NO: 41054 - DNA, 25 bp, probe
tggatagattgcctagtggtgaagt

SEQ ID NO: 41055 - DNA, 25 bp, probe
cccttctgagtctccaatgtctatt

SEQ ID NO: 41056 - DNA, 25 bp, probe
attaagttatttctcatccctcacc

SEQ ID NO: 41057 - DNA, 25 bp, probe
ccattaagttatttctcatccctca

SEQ ID NO: 41058 - DNA, 25 bp, probe
tattattccacactccatgtccacg

SEQ ID NO: 41059 - DNA, 25 bp, probe
tacccattaagttatttctcatccc

SEQ ID NO: 41060 - DNA, 25 bp, probe
acatggatagattgcctagtggtga

SEQ ID NO: 41061 - DNA, 25 bp, probe
tttgttacatggatagattgcctag

SEQ ID NO: 41062 - DNA, 25 bp, probe
acacattatttagctcccacttaca

SEQ ID NO: 41063 - DNA, 25 bp, probe
acccttctgagtctccaatgtctat

SEQ ID NO: 41064 - DNA, 25 bp, probe
cgttgtacccattaagttatttctc

SEQ ID NO: 41065 - DNA, 25 bp, probe
aaactgtctacgcaaaggatattca

SEQ ID NO: 41066 - DNA, 25 bp, probe
aactgtctacgcaaaggatattcag

SEQ ID NO: 41067 - DNA, 25 bp, probe
ctgtctacgcaaaggatattcagga

SEQ ID NO: 41068 - DNA, 25 bp, probe
tgtctacgcaaaggatattcaggac

SEQ ID NO: 41069 - DNA, 25 bp, probe
actgtctacgcaaaggatattcagg

SEQ ID NO: 41070 - DNA, 25 bp, probe
caaaactgtctacgcaaaggatatt

SEQ ID NO: 41071 - DNA, 25 bp, probe
aaaactgtctacgcaaaggatattc

SEQ ID NO: 41072 - DNA, 25 bp, probe
ccaaaactgtctacgcaaaggatat

SEQ ID NO: 41073 - DNA, 25 bp, probe
cctttgacaaaacagacacagaatt

SEQ ID NO: 41074 - DNA, 25 bp, probe
gtctacgcaaaggatattcaggacg

SEQ ID NO: 41075 - DNA, 25 bp, probe
gcctttgacaaaacagacacagaat

SEQ ID NO: 41076 - DNA, 25 bp, probe
ctcttcaaggaccttaactggaggc

SEQ ID NO: 41077 - DNA, 25 bp, probe
tccaaaactgtctacgcaaaggata

SEQ ID NO: 41078 - DNA, 25 bp, probe
cttcaaggaccttaactggaggcag

SEQ ID NO: 41079 - DNA, 25 bp, probe
ctttgacaaaacagacacagaattc

SEQ ID NO: 41080 - DNA, 25 bp, probe
tttcatcccagactccaaaactgtc

SEQ ID NO: 41081 - DNA, 25 bp, probe
ctttcatcccagactccaaaactgt

SEQ ID NO: 41082 - DNA, 25 bp, probe
gtcagggatgtgtctggtttcctag

SEQ ID NO: 41083 - DNA, 25 bp, probe
ccctcttcaaggaccttaactggag

SEQ ID NO: 41084 - DNA, 25 bp, probe
tcttcaaggaccttaactggaggca

SEQ ID NO: 41085 - DNA, 25 bp, probe
cctttcatcccagactccaaaactg

SEQ ID NO: 41086 - DNA, 25 bp, probe
agtcagggatgtgtctggtttccta

SEQ ID NO: 41087 - DNA, 25 bp, probe
ctccaaaactgtctacgcaaaggat

SEQ ID NO: 41088 - DNA, 25 bp, probe
aattctttcaggaatttgccactgg

SEQ ID NO: 41089 - DNA, 25 bp, probe
ctacgcaaaggatattcaggacgtg

SEQ ID NO: 41090 - DNA, 25 bp, probe
ccctttcatcccagactccaaaact

SEQ ID NO: 41091 - DNA, 25 bp, probe
tctacgcaaaggatattcaggacgt

SEQ ID NO: 41092 - DNA, 25 bp, probe
gactccaaaactgtctacgcaaagg

SEQ ID NO: 41093 - DNA, 25 bp, probe
gaattctttcaggaatttgccactg

SEQ ID NO: 41094 - DNA, 25 bp, probe
actccaaaactgtctacgcaaagga

SEQ ID NO: 41095 - DNA, 25 bp, probe
cctcttcaaggaccttaactggagg

SEQ ID NO: 41096 - DNA, 25 bp, probe
catcccagactccaaaactgtctac

SEQ ID NO: 41097 - DNA, 25 bp, probe
tcatcccagactccaaaactgtcta

SEQ ID NO: 41098 - DNA, 25 bp, probe
tacgcaaaggatattcaggacgtgg

SEQ ID NO: 41099 - DNA, 25 bp, probe
agactccaaaactgtctacgcaaag

SEQ ID NO: 41100 - DNA, 25 bp, probe
ggcctttgacaaaacagacacagaa

SEQ ID NO: 41101 - DNA, 25 bp, probe
cagactccaaaactgtctacgcaaa

SEQ ID NO: 41102 - DNA, 25 bp, probe
ttcatcccagactccaaaactgtct

SEQ ID NO: 41103 - DNA, 25 bp, probe
attctttcaggaatttgccactggc

SEQ ID NO: 41104 - DNA, 25 bp, probe
ggatgtgtctggtttcctaggtgac

SEQ ID NO: 41105 - DNA, 25 bp, probe
atcccagactccaaaactgtctacg

SEQ ID NO: 41106 - DNA, 25 bp, probe
gatgtgtctggtttcctaggtgacg

SEQ ID NO: 41107 - DNA, 25 bp, probe
atattcaggacgtgggtgccttttc

SEQ ID NO: 41108 - DNA, 25 bp, probe
gatattcaggacgtgggtgcctttt

SEQ ID NO: 41109 - DNA, 25 bp, probe
caccgagaagatggaatactaacaa

SEQ ID NO: 41110 - DNA, 25 bp, probe
atcaccgagaagatggaatactaac

SEQ ID NO: 41111 - DNA, 25 bp, probe
gaagaatcaccgagaagatggaata

SEQ ID NO: 41112 - DNA, 25 bp, probe
gaatcaccgagaagatggaatacta

SEQ ID NO: 41113 - DNA, 25 bp, probe
aagaatcaccgagaagatggaatac

SEQ ID NO: 41114 - DNA, 25 bp, probe
aatcaccgagaagatggaatactaa

SEQ ID NO: 41115 - DNA, 25 bp, probe
ctacagaagaatcaccgagaagatg

SEQ ID NO: 41116 - DNA, 25 bp, probe
tcaccgagaagatggaatactaaca

SEQ ID NO: 41117 - DNA, 25 bp, probe
agaatcaccgagaagatggaatact

SEQ ID NO: 41118 - DNA, 25 bp, probe
agaagaatcaccgagaagatggaat

SEQ ID NO: 41119 - DNA, 25 bp, probe
cctacagaagaatcaccgagaagat

SEQ ID NO: 41120 - DNA, 25 bp, probe
tacagaagaatcaccgagaagatgg

SEQ ID NO: 41121 - DNA, 25 bp, probe
aatgttatcacctaagcacttctag

SEQ ID NO: 41122 - DNA, 25 bp, probe
aggtgtctacattaagagccttatg

SEQ ID NO: 41123 - DNA, 25 bp, probe
aaccagaaccaatatgtgactacac

SEQ ID NO: 41124 - DNA, 25 bp, probe
cagaagaatcaccgagaagatggaa

SEQ ID NO: 41125 - DNA, 25 bp, probe
tcctacagaagaatcaccgagaaga

SEQ ID NO: 41126 - DNA, 25 bp, probe
gtcctacagaagaatcaccgagaag

SEQ ID NO: 41127 - DNA, 25 bp, probe
aacctgccaatacttgagagaagag

SEQ ID NO: 41128 - DNA, 25 bp, probe
accgagaagatggaatactaacaaa

SEQ ID NO: 41129 - DNA, 25 bp, probe
tagaggtggtgtttatcagaatgtg

SEQ ID NO: 41130 - DNA, 25 bp, probe
atatctaaatcgcatctggaaacct

SEQ ID NO: 41131 - DNA, 25 bp, probe
agaattagaacaccttgcacagaat

SEQ ID NO: 41132 - DNA, 25 bp, probe
caaaccagaaccaatatgtgactac

SEQ ID NO: 41133 - DNA, 25 bp, probe
gatggatttatggaactgtgtcaaa

SEQ ID NO: 41134 - DNA, 25 bp, probe
gaattagaacaccttgcacagaata

SEQ ID NO: 41135 - DNA, 25 bp, probe
ggaatcaaaccagaaccaatatgtg

SEQ ID NO: 41136 - DNA, 25 bp, probe
ccgagaagatggaatactaacaaag

SEQ ID NO: 41137 - DNA, 25 bp, probe
attgatggatttatggaactgtgtc

SEQ ID NO: 41138 - DNA, 25 bp, probe
tatctaaatcgcatctggaaacctg

SEQ ID NO: 41139 - DNA, 25 bp, probe
ttatgttctatgcacctgactgaag

SEQ ID NO: 41140 - DNA, 25 bp, probe
agaacaccttgcacagaatatatct

SEQ ID NO: 41141 - DNA, 25 bp, probe
tacagaagctatacagtatgtggtg

SEQ ID NO: 41142 - DNA, 25 bp, probe
cattgatggatttatggaactgtgt

SEQ ID NO: 41143 - DNA, 25 bp, probe
tatgcaaggtgtctacattaagagc

SEQ ID NO: 41144 - DNA, 25 bp, probe
aattaaccgagacactttatatggc

SEQ ID NO: 41145 - DNA, 25 bp, probe
gcattgatggatttatggaactgtg

SEQ ID NO: 41146 - DNA, 25 bp, probe
aaacgcattgatggatttatggaac

SEQ ID NO: 41147 - DNA, 25 bp, probe
aattagaacaccttgcacagaatat

SEQ ID NO: 41148 - DNA, 25 bp, probe
ctagaggtggtgtttatcagaatgt

SEQ ID NO: 41149 - DNA, 25 bp, probe
ttacagaagctatacagtatgtggt

SEQ ID NO: 41150 - DNA, 25 bp, probe
cagaattagaacaccttgcacagaa

SEQ ID NO: 41151 - DNA, 25 bp, probe
tatatctaaatcgcatctggaaacc

SEQ ID NO: 41152 - DNA, 25 bp, probe
tatgttctatgcacctgactgaaga

SEQ ID NO: 41153 - DNA, 25 bp, probe
ttgatggacagtagcattagaattg

SEQ ID NO: 41154 - DNA, 25 bp, probe
tgatggacagtagcattagaattgt

SEQ ID NO: 41155 - DNA, 25 bp, probe
gatggacagtagcattagaattgtg

SEQ ID NO: 41156 - DNA, 25 bp, probe
ggacagtagcattagaattgtggaa

SEQ ID NO: 41157 - DNA, 25 bp, probe
atggacagtagcattagaattgtgg

SEQ ID NO: 41158 - DNA, 25 bp, probe
tggacagtagcattagaattgtgga

SEQ ID NO: 41159 - DNA, 25 bp, probe
ggtttgatggacagtagcattagaa

SEQ ID NO: 41160 - DNA, 25 bp, probe
gtttgatggacagtagcattagaat

SEQ ID NO: 41161 - DNA, 25 bp, probe
tgtctaaagcatctggaagggtaaa

SEQ ID NO: 41162 - DNA, 25 bp, probe
atgtctaaagcatctggaagggtaa

SEQ ID NO: 41163 - DNA, 25 bp, probe
aatgtctaaagcatctggaagggta

SEQ ID NO: 41164 - DNA, 25 bp, probe
tttgatggacagtagcattagaatt

SEQ ID NO: 41165 - DNA, 25 bp, probe
gacagtagcattagaattgtggaaa

SEQ ID NO: 41166 - DNA, 25 bp, probe
aaatgtctaaagcatctggaagggt

SEQ ID NO: 41167 - DNA, 25 bp, probe
gggtttgatggacagtagcattaga

SEQ ID NO: 41168 - DNA, 25 bp, probe
agggtttgatggacagtagcattag

SEQ ID NO: 41169 - DNA, 25 bp, probe
ttctgcttctagagattgaggtgaa

SEQ ID NO: 41170 - DNA, 25 bp, probe
gctaatactttagagaggatgacag

SEQ ID NO: 41171 - DNA, 25 bp, probe
cagggtttgatggacagtagcatta

SEQ ID NO: 41172 - DNA, 25 bp, probe
tgacagatccataaagagagtaaag

SEQ ID NO: 41173 - DNA, 25 bp, probe
cctcatgtatacttggatatggcgg

SEQ ID NO: 41174 - DNA, 25 bp, probe
gacagatccataaagagagtaaaga

SEQ ID NO: 41175 - DNA, 25 bp, probe
gatgacagatccataaagagagtaa

SEQ ID NO: 41176 - DNA, 25 bp, probe
aaagggagaagtgtgagaggagaaa

SEQ ID NO: 41177 - DNA, 25 bp, probe
ggagaagtgtgagaggagaaacaaa

SEQ ID NO: 41178 - DNA, 25 bp, probe
aatactttagagaggatgacagatc

SEQ ID NO: 41179 - DNA, 25 bp, probe
ttcccaatccttagcaatgccttag

SEQ ID NO: 41180 - DNA, 25 bp, probe
gtgagaggagaaacaaaatatgagc

SEQ ID NO: 41181 - DNA, 25 bp, probe
atgacagatccataaagagagtaaa

SEQ ID NO: 41182 - DNA, 25 bp, probe
gtctaaagcatctggaagggtaaaa

SEQ ID NO: 41183 - DNA, 25 bp, probe
agctaatactttagagaggatgaca

SEQ ID NO: 41184 - DNA, 25 bp, probe
agcattagaattgtggaaaaggaac

SEQ ID NO: 41185 - DNA, 25 bp, probe
gaaaatgtctaaagcatctggaagg

SEQ ID NO: 41186 - DNA, 25 bp, probe
acagatccataaagagagtaaagat

SEQ ID NO: 41187 - DNA, 25 bp, probe
gtagcattagaattgtggaaaagga

SEQ ID NO: 41188 - DNA, 25 bp, probe
agtagcattagaattgtggaaaagg

SEQ ID NO: 41189 - DNA, 25 bp, probe
agagaaaatgtctaaagcatctgga

SEQ ID NO: 41190 - DNA, 25 bp, probe
gagaggagaaacaaaatatgagcgt

SEQ ID NO: 41191 - DNA, 25 bp, probe
tgagaggagaaacaaaatatgagcg

SEQ ID NO: 41192 - DNA, 25 bp, probe
agaggagaaacaaaatatgagcgtt

SEQ ID NO: 41193 - DNA, 25 bp, probe
tttcgtttctgcttctagagattga

SEQ ID NO: 41194 - DNA, 25 bp, probe
gtttcgtttctgcttctagagattg

SEQ ID NO: 41195 - DNA, 25 bp, probe
agaaaatgtctaaagcatctggaag

SEQ ID NO: 41196 - DNA, 25 bp, probe
gagaaaatgtctaaagcatctggaa

SEQ ID NO: 41197 - DNA, 25 bp, probe
tatcatcatatccttcctggttgtg

SEQ ID NO: 41198 - DNA, 25 bp, probe
atatcatcatatccttcctggttgt

SEQ ID NO: 41199 - DNA, 25 bp, probe
gatggattctcttcgttcacagatg

SEQ ID NO: 41200 - DNA, 25 bp, probe
agatggattctcttcgttcacagat

SEQ ID NO: 41201 - DNA, 25 bp, probe
agaatcgtaagagaactctgtagga

SEQ ID NO: 41202 - DNA, 25 bp, probe
gaatcgtaagagaactctgtaggaa

SEQ ID NO: 41203 - DNA, 25 bp, probe
aagaatcgtaagagaactctgtagg

SEQ ID NO: 41204 - DNA, 25 bp, probe
tagcacctattcttaacagtaagcc

SEQ ID NO: 41205 - DNA, 25 bp, probe
atcatcatatccttcctggttgtgg

SEQ ID NO: 41206 - DNA, 25 bp, probe
atcgtaagagaactctgtaggaatt

SEQ ID NO: 41207 - DNA, 25 bp, probe
aatcgtaagagaactctgtaggaat

SEQ ID NO: 41208 - DNA, 25 bp, probe
cacctattcttaacagtaagccacc

SEQ ID NO: 41209 - DNA, 25 bp, probe
tgttaatgagaactcaagtccagaa

SEQ ID NO: 41210 - DNA, 25 bp, probe
atgttaatgagaactcaagtccaga

SEQ ID NO: 41211 - DNA, 25 bp, probe
ctagcacctattcttaacagtaagc

SEQ ID NO: 41212 - DNA, 25 bp, probe
tcgtaagagaactctgtaggaatta

SEQ ID NO: 41213 - DNA, 25 bp, probe
aatgttaatgagaactcaagtccag

SEQ ID NO: 41214 - DNA, 25 bp, probe
tatatcatcatatccttcctggttg

SEQ ID NO: 41215 - DNA, 25 bp, probe
gttatatcatcatatccttcctggt

SEQ ID NO: 41216 - DNA, 25 bp, probe
gcacctattcttaacagtaagccac

SEQ ID NO: 41217 - DNA, 25 bp, probe
agcacctattcttaacagtaagcca

SEQ ID NO: 41218 - DNA, 25 bp, probe
ctactgtcattcagcgtgcttatag

SEQ ID NO: 41219 - DNA, 25 bp, probe
ggattctcttcgttcacagatggaa

SEQ ID NO: 41220 - DNA, 25 bp, probe
aataaacaacacacgcatacagaaa

SEQ ID NO: 41221 - DNA, 25 bp, probe
aaataaacaacacacgcatacagaa

SEQ ID NO: 41222 - DNA, 25 bp, probe
gtaacaaagccagacaaagagaaat

SEQ ID NO: 41223 - DNA, 25 bp, probe
agcctgtgaaagtgatttatttgtg

SEQ ID NO: 41224 - DNA, 25 bp, probe
tactgtcattcagcgtgcttataga

SEQ ID NO: 41225 - DNA, 25 bp, probe
gccagacaaagagaaatatgaacaa

SEQ ID NO: 41226 - DNA, 25 bp, probe
acaaagccagacaaagagaaatatg

SEQ ID NO: 41227 - DNA, 25 bp, probe
atggattctcttcgttcacagatgg

SEQ ID NO: 41228 - DNA, 25 bp, probe
gcctgtgaaagtgatttatttgtgt

SEQ ID NO: 41229 - DNA, 25 bp, probe
agccagacaaagagaaatatgaaca

SEQ ID NO: 41230 - DNA, 25 bp, probe
aagccagacaaagagaaatatgaac

SEQ ID NO: 41231 - DNA, 25 bp, probe
caaagccagacaaagagaaatatga

SEQ ID NO: 41232 - DNA, 25 bp, probe
aagatggagacagagatgatgattt

SEQ ID NO: 41233 - DNA, 25 bp, probe
aaagatggagacagagatgatgatt

SEQ ID NO: 41234 - DNA, 25 bp, probe
ctatgaggtttgggagaagtttgat

SEQ ID NO: 41235 - DNA, 25 bp, probe
taaataaacaacacacgcatacaga

SEQ ID NO: 41236 - DNA, 25 bp, probe
agttatatcatcatatccttcctgg

SEQ ID NO: 41237 - DNA, 25 bp, probe
gtaaataaacaacacacgcatacag

SEQ ID NO: 41238 - DNA, 25 bp, probe
aagttcatcctggaagttcagttga

SEQ ID NO: 41239 - DNA, 25 bp, probe
aaatccttccaaagtgtcctatgaa

SEQ ID NO: 41240 - DNA, 25 bp, probe
cagcctgtgaaagtgatttatttgt

SEQ ID NO: 41241 - DNA, 25 bp, probe
caaaatcaacatcgtctaccaggag

SEQ ID NO: 41242 - DNA, 25 bp, probe
ccaaaatcaacatcgtctaccagga

SEQ ID NO: 41243 - DNA, 25 bp, probe
aaatcaacatcgtctaccaggagct

SEQ ID NO: 41244 - DNA, 25 bp, probe
aaaatcaacatcgtctaccaggagc

SEQ ID NO: 41245 - DNA, 25 bp, probe
gccaaaatcaacatcgtctaccagg

SEQ ID NO: 41246 - DNA, 25 bp, probe
aatcaacatcgtctaccaggagctc

SEQ ID NO: 41247 - DNA, 25 bp, probe
catcgtctaccaggagctcaactac

SEQ ID NO: 41248 - DNA, 25 bp, probe
acatcgtctaccaggagctcaacta

SEQ ID NO: 41249 - DNA, 25 bp, probe
ggccaaaatcaacatcgtctaccag

SEQ ID NO: 41250 - DNA, 25 bp, probe
atcaacatcgtctaccaggagctca

SEQ ID NO: 41251 - DNA, 25 bp, probe
ctgtgatcctctccatcctgattaa

SEQ ID NO: 41252 - DNA, 25 bp, probe
gtgatcctctccatcctgattaatt

SEQ ID NO: 41253 - DNA, 25 bp, probe
cttctcctcagatgatgtcacctac

SEQ ID NO: 41254 - DNA, 25 bp, probe
tcttctcctcagatgatgtcaccta

SEQ ID NO: 41255 - DNA, 25 bp, probe
tgtgatcctctccatcctgattaat

SEQ ID NO: 41256 - DNA, 25 bp, probe
ttctcctcagatgatgtcacctact

SEQ ID NO: 41257 - DNA, 25 bp, probe
ttaatgtgaacgactcttccaacga

SEQ ID NO: 41258 - DNA, 25 bp, probe
gttaatgtgaacgactcttccaacg

SEQ ID NO: 41259 - DNA, 25 bp, probe
tagaacccaagaaacaagaggaaat

SEQ ID NO: 41260 - DNA, 25 bp, probe
ttagaacccaagaaacaagaggaaa

SEQ ID NO: 41261 - DNA, 25 bp, probe
ccaagaaacaagaggaaatgaagtc

SEQ ID NO: 41262 - DNA, 25 bp, probe
caagaaacaagaggaaatgaagtca

SEQ ID NO: 41263 - DNA, 25 bp, probe
aagaaacaagaggaaatgaagtcag

SEQ ID NO: 41264 - DNA, 25 bp, probe
aacccaagaaacaagaggaaatgaa

SEQ ID NO: 41265 - DNA, 25 bp, probe
cttagaacccaagaaacaagaggaa

SEQ ID NO: 41266 - DNA, 25 bp, probe
aaacttagaacccaagaaacaagag

SEQ ID NO: 41267 - DNA, 25 bp, probe
aacttagaacccaagaaacaagagg

SEQ ID NO: 41268 - DNA, 25 bp, probe
cccaagaaacaagaggaaatgaagt

SEQ ID NO: 41269 - DNA, 25 bp, probe
acccaagaaacaagaggaaatgaag

SEQ ID NO: 41270 - DNA, 25 bp, probe
gaacccaagaaacaagaggaaatga

SEQ ID NO: 41271 - DNA, 25 bp, probe
agaacccaagaaacaagaggaaatg

SEQ ID NO: 41272 - DNA, 25 bp, probe
cagaaagggacagggaaataaatgg

SEQ ID NO: 41273 - DNA, 25 bp, probe
ccagaaagggacagggaaataaatg

SEQ ID NO: 41274 - DNA, 25 bp, probe
ctcttctcctcagatgatgtcacct

SEQ ID NO: 41275 - DNA, 25 bp, probe
agaaacaagaggaaatgaagtcagc

SEQ ID NO: 41276 - DNA, 25 bp, probe
cctgtgatcctctccatcctgatta

SEQ ID NO: 41277 - DNA, 25 bp, probe
taatgtgaacgactcttccaacgag

SEQ ID NO: 41278 - DNA, 25 bp, probe
acttagaacccaagaaacaagagga

SEQ ID NO: 41279 - DNA, 25 bp, probe
gaaagggacagggaaataaatggtg

SEQ ID NO: 41280 - DNA, 25 bp, probe
agaaagggacagggaaataaatggt

SEQ ID NO: 41281 - DNA, 25 bp, probe
gaaagaaagtacctccagggatttg

SEQ ID NO: 41282 - DNA, 25 bp, probe
tctcctcagatgatgtcacctactg

SEQ ID NO: 41283 - DNA, 25 bp, probe
aataaatggtgcctgggatgagatt

SEQ ID NO: 41284 - DNA, 25 bp, probe
aaataaatggtgcctgggatgagat

SEQ ID NO: 41285 - DNA, 25 bp, probe
tgaaagaaagtacctccagggattt

SEQ ID NO: 41286 - DNA, 25 bp, probe
tgatcctctccatcctgattaattt

SEQ ID NO: 41287 - DNA, 25 bp, probe
gaaacaagaggaaatgaagtcagcc

SEQ ID NO: 41288 - DNA, 25 bp, probe
aaagaaagtacctccagggatttgt

SEQ ID NO: 41289 - DNA, 25 bp, probe
gatcctctccatcctgattaatttc

SEQ ID NO: 41290 - DNA, 25 bp, probe
ataaatggtgcctgggatgagattc

SEQ ID NO: 41291 - DNA, 25 bp, probe
tctccatcctgattaatttcatcct

SEQ ID NO: 41292 - DNA, 25 bp, probe
tcctctccatcctgattaatttcat

SEQ ID NO: 41293 - DNA, 25 bp, probe
atcctctccatcctgattaatttca

SEQ ID NO: 41294 - DNA, 25 bp, probe
ctctccatcctgattaatttcatcc

SEQ ID NO: 41295 - DNA, 25 bp, probe
tgcctccagattatgaaccagtata

SEQ ID NO: 41296 - DNA, 25 bp, probe
tatactggaacataatctggaggca

SEQ ID NO: 41297 - DNA, 25 bp, probe
cgagaattgtgctacttatactgga

SEQ ID NO: 41298 - DNA, 25 bp, probe
ccagtataagtagcacaattctcgt

SEQ ID NO: 41299 - DNA, 25 bp, probe
accagtataagtagcacaattctcg

SEQ ID NO: 41300 - DNA, 25 bp, probe
gtcctccttaccatcatctccatat

SEQ ID NO: 41301 - DNA, 25 bp, probe
gcctccagattatgaaccagtataa

SEQ ID NO: 41302 - DNA, 25 bp, probe
ttatactggaacataatctggaggc

SEQ ID NO: 41303 - DNA, 25 bp, probe
ttcttgtgtagcgttcttaggaatc

SEQ ID NO: 41304 - DNA, 25 bp, probe
ttctagtcctccttaccatcatctc

SEQ ID NO: 41305 - DNA, 25 bp, probe
ttgcctccagattatgaaccagtat

SEQ ID NO: 41306 - DNA, 25 bp, probe
atactggaacataatctggaggcaa

SEQ ID NO: 41307 - DNA, 25 bp, probe
tgaaccagtataagtagcacaattc

SEQ ID NO: 41308 - DNA, 25 bp, probe
aaccagtataagtagcacaattctc

SEQ ID NO: 41309 - DNA, 25 bp, probe
agaattgtgctacttatactggaac

SEQ ID NO: 41310 - DNA, 25 bp, probe
agtcctccttaccatcatctccata

SEQ ID NO: 41311 - DNA, 25 bp, probe
tagtcctccttaccatcatctccat

SEQ ID NO: 41312 - DNA, 25 bp, probe
cttgtgtagcgttcttaggaatctg

SEQ ID NO: 41313 - DNA, 25 bp, probe
tcttgtgtagcgttcttaggaatct

SEQ ID NO: 41314 - DNA, 25 bp, probe
gagaattgtgctacttatactggaa

SEQ ID NO: 41315 - DNA, 25 bp, probe
gaaccagtataagtagcacaattct

SEQ ID NO: 41316 - DNA, 25 bp, probe
atgaaccagtataagtagcacaatt

SEQ ID NO: 41317 - DNA, 25 bp, probe
cttgcctccagattatgaaccagta

SEQ ID NO: 41318 - DNA, 25 bp, probe
tactggaacataatctggaggcaag

SEQ ID NO: 41319 - DNA, 25 bp, probe
cctccagattatgaaccagtataag

SEQ ID NO: 41320 - DNA, 25 bp, probe
cttatactggaacataatctggagg

SEQ ID NO: 41321 - DNA, 25 bp, probe
gaattgtgctacttatactggaaca

SEQ ID NO: 41322 - DNA, 25 bp, probe
agtataagtagcacaattctcgtgg

SEQ ID NO: 41323 - DNA, 25 bp, probe
cagtataagtagcacaattctcgtg

SEQ ID NO: 41324 - DNA, 25 bp, probe
tctagtcctccttaccatcatctcc

SEQ ID NO: 41325 - DNA, 25 bp, probe
tatgaaccagtataagtagcacaat

SEQ ID NO: 41326 - DNA, 25 bp, probe
ttatgaaccagtataagtagcacaa

SEQ ID NO: 41327 - DNA, 25 bp, probe
aattgtgctacttatactggaacat

SEQ ID NO: 41328 - DNA, 25 bp, probe
ctagtcctccttaccatcatctcca

SEQ ID NO: 41329 - DNA, 25 bp, probe
ctccagattatgaaccagtataagt

SEQ ID NO: 41330 - DNA, 25 bp, probe
acttatactggaacataatctggag

SEQ ID NO: 41331 - DNA, 25 bp, probe
ttgtgtagcgttcttaggaatctgg

SEQ ID NO: 41332 - DNA, 25 bp, probe
attatgaaccagtataagtagcaca

SEQ ID NO: 41333 - DNA, 25 bp, probe
tatttcttgtgtagcgttcttagga

SEQ ID NO: 41334 - DNA, 25 bp, probe
gtataagtagcacaattctcgtggc

SEQ ID NO: 41335 - DNA, 25 bp, probe
ttgtgctacttatactggaacataa

SEQ ID NO: 41336 - DNA, 25 bp, probe
tttcttgtgtagcgttcttaggaat

SEQ ID NO: 41337 - DNA, 25 bp, probe
atttcttgtgtagcgttcttaggaa

SEQ ID NO: 41338 - DNA, 25 bp, probe
atatttcttgtgtagcgttcttagg

SEQ ID NO: 41339 - DNA, 25 bp, probe
tatattgataacagcactgactagg

SEQ ID NO: 41340 - DNA, 25 bp, probe
atattgataacagcactgactaggg

SEQ ID NO: 41341 - DNA, 25 bp, probe
tattgataacagcactgactaggga

SEQ ID NO: 41342 - DNA, 25 bp, probe
gataacagcactgactagggaaatg

SEQ ID NO: 41343 - DNA, 25 bp, probe
taacagcactgactagggaaatgat

SEQ ID NO: 41344 - DNA, 25 bp, probe
ataacagcactgactagggaaatga

SEQ ID NO: 41345 - DNA, 25 bp, probe
tgataacagcactgactagggaaat

SEQ ID NO: 41346 - DNA, 25 bp, probe
attgataacagcactgactagggaa

SEQ ID NO: 41347 - DNA, 25 bp, probe
ttgataacagcactgactagggaaa

SEQ ID NO: 41348 - DNA, 25 bp, probe
ttatattgataacagcactgactag

SEQ ID NO: 41349 - DNA, 25 bp, probe
aacagcactgactagggaaatgatc

SEQ ID NO: 41350 - DNA, 25 bp, probe
tttatattgataacagcactgacta

SEQ ID NO: 41351 - DNA, 25 bp, probe
ttttatattgataacagcactgact

SEQ ID NO: 41352 - DNA, 25 bp, probe
cttttatattgataacagcactgac

SEQ ID NO: 41353 - DNA, 25 bp, probe
tcttttatattgataacagcactga

SEQ ID NO: 41354 - DNA, 25 bp, probe
acagcactgactagggaaatgatca

SEQ ID NO: 41355 - DNA, 25 bp, probe
atcttttatattgataacagcactg

SEQ ID NO: 41356 - DNA, 25 bp, probe
cagcactgactagggaaatgatcag

SEQ ID NO: 41357 - DNA, 25 bp, probe
gtcttgcctcttgtcattgtctgtc

SEQ ID NO: 41358 - DNA, 25 bp, probe
ctgtcttgcctcttgtcattgtctg

SEQ ID NO: 41359 - DNA, 25 bp, probe
tgtcttgcctcttgtcattgtctgt

SEQ ID NO: 41360 - DNA, 25 bp, probe
gattacagaagctgcatcctgagac

SEQ ID NO: 41361 - DNA, 25 bp, probe
gctcttctttgaaatgaggtcatta

SEQ ID NO: 41362 - DNA, 25 bp, probe
caaggttggcatggattacagaagc

SEQ ID NO: 41363 - DNA, 25 bp, probe
gcaaggttggcatggattacagaag

SEQ ID NO: 41364 - DNA, 25 bp, probe
tcttgcctcttgtcattgtctgtcc

SEQ ID NO: 41365 - DNA, 25 bp, probe
ggctcttctttgaaatgaggtcatt

SEQ ID NO: 41366 - DNA, 25 bp, probe
cggctcttctttgaaatgaggtcat

SEQ ID NO: 41367 - DNA, 25 bp, probe
gagacggctcttctttgaaatgagg

SEQ ID NO: 41368 - DNA, 25 bp, probe
ggagacggctcttctttgaaatgag

SEQ ID NO: 41369 - DNA, 25 bp, probe
agcaaggttggcatggattacagaa

SEQ ID NO: 41370 - DNA, 25 bp, probe
gaacagcaaggttggcatggattac

SEQ ID NO: 41371 - DNA, 25 bp, probe
caggagacggctcttctttgaaatg

SEQ ID NO: 41372 - DNA, 25 bp, probe
aaggttggcatggattacagaagct

SEQ ID NO: 41373 - DNA, 25 bp, probe
aggagacggctcttctttgaaatga

SEQ ID NO: 41374 - DNA, 25 bp, probe
tcaggagacggctcttctttgaaat

SEQ ID NO: 41375 - DNA, 25 bp, probe
gacggctcttctttgaaatgaggtc

SEQ ID NO: 41376 - DNA, 25 bp, probe
agacggctcttctttgaaatgaggt

SEQ ID NO: 41377 - DNA, 25 bp, probe
ctcttctttgaaatgaggtcattaa

SEQ ID NO: 41378 - DNA, 25 bp, probe
tgaacagcaaggttggcatggatta

SEQ ID NO: 41379 - DNA, 25 bp, probe
attacagaagctgcatcctgagacc

SEQ ID NO: 41380 - DNA, 25 bp, probe
acggctcttctttgaaatgaggtca

SEQ ID NO: 41381 - DNA, 25 bp, probe
tcttctttgaaatgaggtcattaaa

SEQ ID NO: 41382 - DNA, 25 bp, probe
gttgcactaacacgtctcctctctg

SEQ ID NO: 41383 - DNA, 25 bp, probe
gtcaggagacggctcttctttgaaa

SEQ ID NO: 41384 - DNA, 25 bp, probe
aggttggcatggattacagaagctg

SEQ ID NO: 41385 - DNA, 25 bp, probe
catggattacagaagctgcatcctg

SEQ ID NO: 41386 - DNA, 25 bp, probe
atggattacagaagctgcatcctga

SEQ ID NO: 41387 - DNA, 25 bp, probe
tgaaatgaggtcattaaaaggaaac

SEQ ID NO: 41388 - DNA, 25 bp, probe
ctttgaaatgaggtcattaaaagga

SEQ ID NO: 41389 - DNA, 25 bp, probe
tctttgaaatgaggtcattaaaagg

SEQ ID NO: 41390 - DNA, 25 bp, probe
ggattacagaagctgcatcctgaga

SEQ ID NO: 41391 - DNA, 25 bp, probe
ctaacacgtctcctctctgggaaac

SEQ ID NO: 41392 - DNA, 25 bp, probe
ttgaaatgaggtcattaaaaggaaa

SEQ ID NO: 41393 - DNA, 25 bp, probe
tttgaaatgaggtcattaaaaggaa

SEQ ID NO: 41394 - DNA, 25 bp, probe
tggattacagaagctgcatcctgag

SEQ ID NO: 41395 - DNA, 25 bp, probe
actaacacgtctcctctctgggaaa

SEQ ID NO: 41396 - DNA, 25 bp, probe
ttgttgcactaacacgtctcctctc

SEQ ID NO: 41397 - DNA, 25 bp, probe
ttggcatggattacagaagctgcat

SEQ ID NO: 41398 - DNA, 25 bp, probe
ctttgttgcactaacacgtctcctc

SEQ ID NO: 41399 - DNA, 25 bp, probe
gtctttgttgcactaacacgtctcc

SEQ ID NO: 41400 - DNA, 25 bp, probe
ggtctttgttgcactaacacgtctc

SEQ ID NO: 41401 - DNA, 25 bp, probe
ggcaacatcttacttgtcctttgag

SEQ ID NO: 41402 - DNA, 25 bp, probe
ctggcaacatcttacttgtcctttg

SEQ ID NO: 41403 - DNA, 25 bp, probe
caacatcttacttgtcctttgaggc

SEQ ID NO: 41404 - DNA, 25 bp, probe
gcaacatcttacttgtcctttgagg

SEQ ID NO: 41405 - DNA, 25 bp, probe
tggcaacatcttacttgtcctttga

SEQ ID NO: 41406 - DNA, 25 bp, probe
cctggcaacatcttacttgtccttt

SEQ ID NO: 41407 - DNA, 25 bp, probe
aacatcttacttgtcctttgaggcc

SEQ ID NO: 41408 - DNA, 25 bp, probe
ttctctgcctggcaacatcttactt

SEQ ID NO: 41409 - DNA, 25 bp, probe
cttctcggaatgcatgttgttcagg

SEQ ID NO: 41410 - DNA, 25 bp, probe
tctctgcctggcaacatcttacttg

SEQ ID NO: 41411 - DNA, 25 bp, probe
ctttctctgcctggcaacatcttac

SEQ ID NO: 41412 - DNA, 25 bp, probe
gcttctcggaatgcatgttgttcag

SEQ ID NO: 41413 - DNA, 25 bp, probe
cagcttctcggaatgcatgttgttc

SEQ ID NO: 41414 - DNA, 25 bp, probe
acatcttacttgtcctttgaggccc

SEQ ID NO: 41415 - DNA, 25 bp, probe
tctgcctggcaacatcttacttgtc

SEQ ID NO: 41416 - DNA, 25 bp, probe
ctctgcctggcaacatcttacttgt

SEQ ID NO: 41417 - DNA, 25 bp, probe
tttctctgcctggcaacatcttact

SEQ ID NO: 41418 - DNA, 25 bp, probe
cctttctctgcctggcaacatctta

SEQ ID NO: 41419 - DNA, 25 bp, probe
catcttacttgtcctttgaggcccc

SEQ ID NO: 41420 - DNA, 25 bp, probe
ggacagtatcagatcaacttcaacc

SEQ ID NO: 41421 - DNA, 25 bp, probe
caacagctacatccataccagatat

SEQ ID NO: 41422 - DNA, 25 bp, probe
tcaacagctacatccataccagata

SEQ ID NO: 41423 - DNA, 25 bp, probe
ctacacatagtggttctgaactgag

SEQ ID NO: 41424 - DNA, 25 bp, probe
atggagaacaagcctcaactaacaa

SEQ ID NO: 41425 - DNA, 25 bp, probe
tacacatagtggttctgaactgaga

SEQ ID NO: 41426 - DNA, 25 bp, probe
ttcctacacatagtggttctgaact

SEQ ID NO: 41427 - DNA, 25 bp, probe
aacagctacatccataccagatatc

SEQ ID NO: 41428 - DNA, 25 bp, probe
atgctactgaatttgcctgtctaaa

SEQ ID NO: 41429 - DNA, 25 bp, probe
caatgtgccaattacaagactgctt

SEQ ID NO: 41430 - DNA, 25 bp, probe
ctcaacagctacatccataccagat

SEQ ID NO: 41431 - DNA, 25 bp, probe
gatgctactgaatttgcctgtctaa

SEQ ID NO: 41432 - DNA, 25 bp, probe
ttagatgctactgaatttgcctgtc

SEQ ID NO: 41433 - DNA, 25 bp, probe
acagctacatccataccagatatcc

SEQ ID NO: 41434 - DNA, 25 bp, probe
gttagatgctactgaatttgcctgt

SEQ ID NO: 41435 - DNA, 25 bp, probe
cctacacatagtggttctgaactga

SEQ ID NO: 41436 - DNA, 25 bp, probe
tcctacacatagtggttctgaactg

SEQ ID NO: 41437 - DNA, 25 bp, probe
cgttcctacacatagtggttctgaa

SEQ ID NO: 41438 - DNA, 25 bp, probe
taacaaacccttcaggaagcatata

SEQ ID NO: 41439 - DNA, 25 bp, probe
ctaacaaacccttcaggaagcatat

SEQ ID NO: 41440 - DNA, 25 bp, probe
ggttagatgctactgaatttgcctg

SEQ ID NO: 41441 - DNA, 25 bp, probe
aacaaacccttcaggaagcatatac

SEQ ID NO: 41442 - DNA, 25 bp, probe
agatgctactgaatttgcctgtcta

SEQ ID NO: 41443 - DNA, 25 bp, probe
tagatgctactgaatttgcctgtct

SEQ ID NO: 41444 - DNA, 25 bp, probe
cagtatcagatcaacttcaacccat

SEQ ID NO: 41445 - DNA, 25 bp, probe
gatgggacagtatcagatcaacttc

SEQ ID NO: 41446 - DNA, 25 bp, probe
cacatagtggttctgaactgagaag

SEQ ID NO: 41447 - DNA, 25 bp, probe
ccaattacaagactgctttcagata

SEQ ID NO: 41448 - DNA, 25 bp, probe
acatagtggttctgaactgagaagt

SEQ ID NO: 41449 - DNA, 25 bp, probe
tttcaggatgggacagtatcagatc

SEQ ID NO: 41450 - DNA, 25 bp, probe
agtatcagatcaacttcaacccatg

SEQ ID NO: 41451 - DNA, 25 bp, probe
gacagtatcagatcaacttcaaccc

SEQ ID NO: 41452 - DNA, 25 bp, probe
gggacagtatcagatcaacttcaac

SEQ ID NO: 41453 - DNA, 25 bp, probe
ctcaactaacaaacccttcaggaag

SEQ ID NO: 41454 - DNA, 25 bp, probe
atgggacagtatcagatcaacttca

SEQ ID NO: 41455 - DNA, 25 bp, probe
tttcaaagccgttcctacacatagt

SEQ ID NO: 41456 - DNA, 25 bp, probe
catagtggttctgaactgagaagtt

SEQ ID NO: 41457 - DNA, 25 bp, probe
ctttcaaagccgttcctacacatag

SEQ ID NO: 41458 - DNA, 25 bp, probe
acacatagtggttctgaactgagaa

SEQ ID NO: 41459 - DNA, 25 bp, probe
catggagaacaagcctcaactaaca

SEQ ID NO: 41460 - DNA, 25 bp, probe
tgggacagtatcagatcaacttcaa

SEQ ID NO: 41461 - DNA, 25 bp, probe
actaacaaacccttcaggaagcata

SEQ ID NO: 41462 - DNA, 25 bp, probe
acagtatcagatcaacttcaaccca

SEQ ID NO: 41463 - DNA, 25 bp, probe
attacaagactgctttcagatatgt

SEQ ID NO: 41464 - DNA, 25 bp, probe
acttatcctattaaacctcctctgc

SEQ ID NO: 41465 - DNA, 25 bp, probe
gctgacttatcctattaaacctcct

SEQ ID NO: 41466 - DNA, 25 bp, probe
tcctattaaacctcctctgctatgt

SEQ ID NO: 41467 - DNA, 25 bp, probe
atcctattaaacctcctctgctatg

SEQ ID NO: 41468 - DNA, 25 bp, probe
gccttgctatttcagtgggtataat

SEQ ID NO: 41469 - DNA, 25 bp, probe
cttatcctattaaacctcctctgct

SEQ ID NO: 41470 - DNA, 25 bp, probe
gagaatgttactgcaatcatgttgt

SEQ ID NO: 41471 - DNA, 25 bp, probe
cctattaaacctcctctgctatgtt

SEQ ID NO: 41472 - DNA, 25 bp, probe
tgagaatgttactgcaatcatgttg

SEQ ID NO: 41473 - DNA, 25 bp, probe
cttgagaatgttactgcaatcatgt

SEQ ID NO: 41474 - DNA, 25 bp, probe
tcttgagaatgttactgcaatcatg

SEQ ID NO: 41475 - DNA, 25 bp, probe
attaaacctcctctgctatgttcac

SEQ ID NO: 41476 - DNA, 25 bp, probe
ttgagaatgttactgcaatcatgtt

SEQ ID NO: 41477 - DNA, 25 bp, probe
tattaaacctcctctgctatgttca

SEQ ID NO: 41478 - DNA, 25 bp, probe
aaatgaaatggtaaagcagcagact

SEQ ID NO: 41479 - DNA, 25 bp, probe
atgttactgcaatcatgttgtagtt

SEQ ID NO: 41480 - DNA, 25 bp, probe
aatgttactgcaatcatgttgtagt

SEQ ID NO: 41481 - DNA, 25 bp, probe
agaatgttactgcaatcatgttgta

SEQ ID NO: 41482 - DNA, 25 bp, probe
ccttgctatttcagtgggtataatt

SEQ ID NO: 41483 - DNA, 25 bp, probe
gaatgttactgcaatcatgttgtag

SEQ ID NO: 41484 - DNA, 25 bp, probe
ttcttgagaatgttactgcaatcat

SEQ ID NO: 41485 - DNA, 25 bp, probe
ctattaaacctcctctgctatgttc

SEQ ID NO: 41486 - DNA, 25 bp, probe
ttatcctattaaacctcctctgcta

SEQ ID NO: 41487 - DNA, 25 bp, probe
tgacttatcctattaaacctcctct

SEQ ID NO: 41488 - DNA, 25 bp, probe
tatcctattaaacctcctctgctat

SEQ ID NO: 41489 - DNA, 25 bp, probe
gacttatcctattaaacctcctctg

SEQ ID NO: 41490 - DNA, 25 bp, probe
ctgacttatcctattaaacctcctc

SEQ ID NO: 41491 - DNA, 25 bp, probe
agtattccacaaatcttacctcttt

SEQ ID NO: 41492 - DNA, 25 bp, probe
aagtattccacaaatcttacctctt

SEQ ID NO: 41493 - DNA, 25 bp, probe
aaagtattccacaaatcttacctct

SEQ ID NO: 41494 - DNA, 25 bp, probe
agctgacttatcctattaaacctcc

SEQ ID NO: 41495 - DNA, 25 bp, probe
aaatggtaaagcagcagactgtaag

SEQ ID NO: 41496 - DNA, 25 bp, probe
gaaatggtaaagcagcagactgtaa

SEQ ID NO: 41497 - DNA, 25 bp, probe
attccacaaatcttacctctttagg

SEQ ID NO: 41498 - DNA, 25 bp, probe
cttgctatttcagtgggtataattt

SEQ ID NO: 41499 - DNA, 25 bp, probe
ctctttaggtcactgatggtcactc

SEQ ID NO: 41500 - DNA, 25 bp, probe
aatgaaatggtaaagcagcagactg

SEQ ID NO: 41501 - DNA, 25 bp, probe
tgttactgcaatcatgttgtagttt

SEQ ID NO: 41502 - DNA, 25 bp, probe
tgaaatggtaaagcagcagactgta

SEQ ID NO: 41503 - DNA, 25 bp, probe
gttactgcaatcatgttgtagtttg

SEQ ID NO: 41504 - DNA, 25 bp, probe
tttcttgagaatgttactgcaatca

SEQ ID NO: 41505 - DNA, 25 bp, probe
tgtagctgacttatcctattaaacc

SEQ ID NO: 41506 - DNA, 25 bp, probe
gattctgagtgccacattggtagac

SEQ ID NO: 41507 - DNA, 25 bp, probe
taaaatgaaatggtaaagcagcaga

SEQ ID NO: 41508 - DNA, 25 bp, probe
gagcatcagaatgaactctatgaat

SEQ ID NO: 41509 - DNA, 25 bp, probe
gcatcagaatgaactctatgaatac

SEQ ID NO: 41510 - DNA, 25 bp, probe
tttgggaaactactaaatggactga

SEQ ID NO: 41511 - DNA, 25 bp, probe
agcatcagaatgaactctatgaata

SEQ ID NO: 41512 - DNA, 25 bp, probe
ttgggaaactactaaatggactgat

SEQ ID NO: 41513 - DNA, 25 bp, probe
cttgaggttcagagcatcagaatga

SEQ ID NO: 41514 - DNA, 25 bp, probe
tcttgaggttcagagcatcagaatg

SEQ ID NO: 41515 - DNA, 25 bp, probe
cctcccgattattgcgtattctaaa

SEQ ID NO: 41516 - DNA, 25 bp, probe
agacttaatgaaattgttgatgcgg

SEQ ID NO: 41517 - DNA, 25 bp, probe
actgatgaagttacttggatggacc

SEQ ID NO: 41518 - DNA, 25 bp, probe
atcctcccgattattgcgtattcta

SEQ ID NO: 41519 - DNA, 25 bp, probe
tatcctcccgattattgcgtattct

SEQ ID NO: 41520 - DNA, 25 bp, probe
gtatcctcccgattattgcgtattc

SEQ ID NO: 41521 - DNA, 25 bp, probe
aagacttaatgaaattgttgatgcg

SEQ ID NO: 41522 - DNA, 25 bp, probe
tgcttcaataaatcttcatcttggg

SEQ ID NO: 41523 - DNA, 25 bp, probe
tcctcccgattattgcgtattctaa

SEQ ID NO: 41524 - DNA, 25 bp, probe
aaccaagatcacagtacaccatatg

SEQ ID NO: 41525 - DNA, 25 bp, probe
aaaccaagatcacagtacaccatat

SEQ ID NO: 41526 - DNA, 25 bp, probe
atgtatcctcccgattattgcgtat

SEQ ID NO: 41527 - DNA, 25 bp, probe
gggaaactactaaatggactgatct

SEQ ID NO: 41528 - DNA, 25 bp, probe
tgggaaactactaaatggactgatc

SEQ ID NO: 41529 - DNA, 25 bp, probe
actaaatggactgatctctttgaca

SEQ ID NO: 41530 - DNA, 25 bp, probe
aactaacagaacttcatttccagaa

SEQ ID NO: 41531 - DNA, 25 bp, probe
aaactaacagaacttcatttccaga

SEQ ID NO: 41532 - DNA, 25 bp, probe
ctcatatagatcaaacagccctagc

SEQ ID NO: 41533 - DNA, 25 bp, probe
catatagatcaaacagccctagcag

SEQ ID NO: 41534 - DNA, 25 bp, probe
tgtatcctcccgattattgcgtatt

SEQ ID NO: 41535 - DNA, 25 bp, probe
ggactgatctctttgacaataaggt

SEQ ID NO: 41536 - DNA, 25 bp, probe
tggactgatctctttgacaataagg

SEQ ID NO: 41537 - DNA, 25 bp, probe
actaacagaacttcatttccagaat

SEQ ID NO: 41538 - DNA, 25 bp, probe
atatagatcaaacagccctagcagt

SEQ ID NO: 41539 - DNA, 25 bp, probe
tcatatagatcaaacagccctagca

SEQ ID NO: 41540 - DNA, 25 bp, probe
tttctcatatagatcaaacagccct

SEQ ID NO: 41541 - DNA, 25 bp, probe
ctgcttcaataaatcttcatcttgg

SEQ ID NO: 41542 - DNA, 25 bp, probe
ctaaatggactgatctctttgacaa

SEQ ID NO: 41543 - DNA, 25 bp, probe
gacttaatgaaattgttgatgcggc

SEQ ID NO: 41544 - DNA, 25 bp, probe
tctcatatagatcaaacagccctag

SEQ ID NO: 41545 - DNA, 25 bp, probe
ggaaactactaaatggactgatctc

SEQ ID NO: 41546 - DNA, 25 bp, probe
ccatcatgtatcctcccgattattg

SEQ ID NO: 41547 - DNA, 25 bp, probe
taatgaaattgttgatgcggcaaat

SEQ ID NO: 41548 - DNA, 25 bp, probe
gactgatctctttgacaataaggtt

SEQ ID NO: 41549 - DNA, 25 bp, probe
ttaatgaaattgttgatgcggcaaa

SEQ ID NO: 41550 - DNA, 25 bp, probe
ttctcatatagatcaaacagcccta

SEQ ID NO: 41551 - DNA, 25 bp, probe
caagatcacagtacaccatatgcac

SEQ ID NO: 41552 - DNA, 25 bp, probe
gtgtcacctactacttggactggat

SEQ ID NO: 41553 - DNA, 25 bp, probe
tgtcacctactacttggactggatc

SEQ ID NO: 41554 - DNA, 25 bp, probe
gacctcattaaagtgcatggaaatc

SEQ ID NO: 41555 - DNA, 25 bp, probe
ggacctcattaaagtgcatggaaat

SEQ ID NO: 41556 - DNA, 25 bp, probe
tggacctcattaaagtgcatggaaa

SEQ ID NO: 41557 - DNA, 25 bp, probe
ctggacctcattaaagtgcatggaa

SEQ ID NO: 41558 - DNA, 25 bp, probe
atctacacccgtgtcacctactact

SEQ ID NO: 41559 - DNA, 25 bp, probe
catctacacccgtgtcacctactac

SEQ ID NO: 41560 - DNA, 25 bp, probe
ccataatggaaaaccacatttgtga

SEQ ID NO: 41561 - DNA, 25 bp, probe
ctacacccgtgtcacctactacttg

SEQ ID NO: 41562 - DNA, 25 bp, probe
ataatggaaaaccacatttgtgacg

SEQ ID NO: 41563 - DNA, 25 bp, probe
cataatggaaaaccacatttgtgac

SEQ ID NO: 41564 - DNA, 25 bp, probe
tctacacccgtgtcacctactactt

SEQ ID NO: 41565 - DNA, 25 bp, probe
aaaaccacatttgtgacgcaaaata

SEQ ID NO: 41566 - DNA, 25 bp, probe
aaaccacatttgtgacgcaaaatac

SEQ ID NO: 41567 - DNA, 25 bp, probe
gaaaaccacatttgtgacgcaaaat

SEQ ID NO: 41568 - DNA, 25 bp, probe
ctgagtgctggacctcattaaagtg

SEQ ID NO: 41569 - DNA, 25 bp, probe
atttgtgacgcaaaataccaccttg

SEQ ID NO: 41570 - DNA, 25 bp, probe
catttgtgacgcaaaataccacctt

SEQ ID NO: 41571 - DNA, 25 bp, probe
taatggaaaaccacatttgtgacgc

SEQ ID NO: 41572 - DNA, 25 bp, probe
gtcacctactacttggactggatcc

SEQ ID NO: 41573 - DNA, 25 bp, probe
gctggacctcattaaagtgcatgga

SEQ ID NO: 41574 - DNA, 25 bp, probe
aaccacatttgtgacgcaaaatacc

SEQ ID NO: 41575 - DNA, 25 bp, probe
tcctgagtgctggacctcattaaag

SEQ ID NO: 41576 - DNA, 25 bp, probe
ctcctgagtgctggacctcattaaa

SEQ ID NO: 41577 - DNA, 25 bp, probe
acatttgtgacgcaaaataccacct

SEQ ID NO: 41578 - DNA, 25 bp, probe
gtgctggacctcattaaagtgcatg

SEQ ID NO: 41579 - DNA, 25 bp, probe
cctgagtgctggacctcattaaagt

SEQ ID NO: 41580 - DNA, 25 bp, probe
agtgctggacctcattaaagtgcat

SEQ ID NO: 41581 - DNA, 25 bp, probe
ctgtccaaaacaccactgcttccta

SEQ ID NO: 41582 - DNA, 25 bp, probe
cacatttgtgacgcaaaataccacc

SEQ ID NO: 41583 - DNA, 25 bp, probe
ccacatttgtgacgcaaaataccac

SEQ ID NO: 41584 - DNA, 25 bp, probe
ggaaaaccacatttgtgacgcaaaa

SEQ ID NO: 41585 - DNA, 25 bp, probe
atggaaaaccacatttgtgacgcaa

SEQ ID NO: 41586 - DNA, 25 bp, probe
accacatttgtgacgcaaaatacca

SEQ ID NO: 41587 - DNA, 25 bp, probe
gagtgctggacctcattaaagtgca

SEQ ID NO: 41588 - DNA, 25 bp, probe
tttgtgacgcaaaataccaccttgg

SEQ ID NO: 41589 - DNA, 25 bp, probe
aatggaaaaccacatttgtgacgca

SEQ ID NO: 41590 - DNA, 25 bp, probe
tgagtgctggacctcattaaagtgc

SEQ ID NO: 41591 - DNA, 25 bp, probe
tggaaaaccacatttgtgacgcaaa

SEQ ID NO: 41592 - DNA, 25 bp, probe
caggttatccagactactactcaga

SEQ ID NO: 41593 - DNA, 25 bp, probe
gtggttacatcattagcgaatcttg

SEQ ID NO: 41594 - DNA, 25 bp, probe
attgatggatacgaatatgcctacc

SEQ ID NO: 41595 - DNA, 25 bp, probe
acaggttatccagactactactcag

SEQ ID NO: 41596 - DNA, 25 bp, probe
gttacatcattagcgaatcttggaa

SEQ ID NO: 41597 - DNA, 25 bp, probe
tacaggttatccagactactactca

SEQ ID NO: 41598 - DNA, 25 bp, probe
aggttatccagactactactcagat

SEQ ID NO: 41599 - DNA, 25 bp, probe
ttatccagactactactcagattgc

SEQ ID NO: 41600 - DNA, 25 bp, probe
ggttacatcattagcgaatcttgga

SEQ ID NO: 41601 - DNA, 25 bp, probe
ctacaggttatccagactactactc

SEQ ID NO: 41602 - DNA, 25 bp, probe
cctacaggttatccagactactact

SEQ ID NO: 41603 - DNA, 25 bp, probe
tatccagactactactcagattgcc

SEQ ID NO: 41604 - DNA, 25 bp, probe
cattgatggatacgaatatgcctac

SEQ ID NO: 41605 - DNA, 25 bp, probe
atggatacgaatatgcctacctgaa

SEQ ID NO: 41606 - DNA, 25 bp, probe
ttgatggatacgaatatgcctacct

SEQ ID NO: 41607 - DNA, 25 bp, probe
gaatgctaccatcactgaagaattg

SEQ ID NO: 41608 - DNA, 25 bp, probe
tggttacatcattagcgaatcttgg

SEQ ID NO: 41609 - DNA, 25 bp, probe
ggttatccagactactactcagatt

SEQ ID NO: 41610 - DNA, 25 bp, probe
atgctaccatcactgaagaattgtt

SEQ ID NO: 41611 - DNA, 25 bp, probe
aatgctaccatcactgaagaattgt

SEQ ID NO: 41612 - DNA, 25 bp, probe
aggtctcattggcaatatacgaatt

SEQ ID NO: 41613 - DNA, 25 bp, probe
aaggtctcattggcaatatacgaat

SEQ ID NO: 41614 - DNA, 25 bp, probe
atgaatgctaccatcactgaagaat

SEQ ID NO: 41615 - DNA, 25 bp, probe
gatggatacgaatatgcctacctga

SEQ ID NO: 41616 - DNA, 25 bp, probe
tgaatgctaccatcactgaagaatt

SEQ ID NO: 41617 - DNA, 25 bp, probe
gcaagtgatgaatgtagcaactata

SEQ ID NO: 41618 - DNA, 25 bp, probe
tggatacgaatatgcctacctgaag

SEQ ID NO: 41619 - DNA, 25 bp, probe
tgatggatacgaatatgcctacctg

SEQ ID NO: 41620 - DNA, 25 bp, probe
tgtggttacatcattagcgaatctt

SEQ ID NO: 41621 - DNA, 25 bp, probe
tgtcttcacaatagtcttcaacaag

SEQ ID NO: 41622 - DNA, 25 bp, probe
ggcaagtgatgaatgtagcaactat

SEQ ID NO: 41623 - DNA, 25 bp, probe
aacatatccagatgacacctacagg

SEQ ID NO: 41624 - DNA, 25 bp, probe
gttatccagactactactcagattg

SEQ ID NO: 41625 - DNA, 25 bp, probe
tactcttcagtccagatcatccaag

SEQ ID NO: 41626 - DNA, 25 bp, probe
ctccagactgctgttcttatcaatg

SEQ ID NO: 41627 - DNA, 25 bp, probe
gtactcttcagtccagatcatccaa

SEQ ID NO: 41628 - DNA, 25 bp, probe
atccagactactactcagattgcca

SEQ ID NO: 41629 - DNA, 25 bp, probe
cctaatcactggagattcaagcata

SEQ ID NO: 41630 - DNA, 25 bp, probe
tacacctaatcactggagattcaag

SEQ ID NO: 41631 - DNA, 25 bp, probe
tgaatgtagcaactatattagcaac

SEQ ID NO: 41632 - DNA, 25 bp, probe
actctgcattgatggatacgaatat

SEQ ID NO: 41633 - DNA, 25 bp, probe
gaagctgtcacctcttgattatcta

SEQ ID NO: 41634 - DNA, 25 bp, probe
aactctgcattgatggatacgaata

SEQ ID NO: 41635 - DNA, 25 bp, probe
aagctgtcacctcttgattatctaa

SEQ ID NO: 41636 - DNA, 25 bp, probe
aagatggagacagcagagtataatg

SEQ ID NO: 41637 - DNA, 25 bp, probe
caagatggagacagcagagtataat

SEQ ID NO: 41638 - DNA, 25 bp, probe
tcaagatggagacagcagagtataa

SEQ ID NO: 41639 - DNA, 25 bp, probe
agatggagacagcagagtataatgg

SEQ ID NO: 41640 - DNA, 25 bp, probe
ctcaagatggagacagcagagtata

SEQ ID NO: 41641 - DNA, 25 bp, probe
ctactcagaagacacctaccgattg

SEQ ID NO: 41642 - DNA, 25 bp, probe
atttcctgtctggtttctccttatc

SEQ ID NO: 41643 - DNA, 25 bp, probe
gatggagacagcagagtataatggc

SEQ ID NO: 41644 - DNA, 25 bp, probe
ctgtctggtttctccttatctgtta

SEQ ID NO: 41645 - DNA, 25 bp, probe
catttcctgtctggtttctccttat

SEQ ID NO: 41646 - DNA, 25 bp, probe
ggtttctccttatctgttaatccca

SEQ ID NO: 41647 - DNA, 25 bp, probe
tggtttctccttatctgttaatccc

SEQ ID NO: 41648 - DNA, 25 bp, probe
tgtctggtttctccttatctgttaa

SEQ ID NO: 41649 - DNA, 25 bp, probe
tttcctgtctggtttctccttatct

SEQ ID NO: 41650 - DNA, 25 bp, probe
cctactcagaagacacctaccgatt

SEQ ID NO: 41651 - DNA, 25 bp, probe
ctggtttctccttatctgttaatcc

SEQ ID NO: 41652 - DNA, 25 bp, probe
ttcctgtctggtttctccttatctg

SEQ ID NO: 41653 - DNA, 25 bp, probe
ggatatagatggctatgagtatgca

SEQ ID NO: 41654 - DNA, 25 bp, probe
tactcagaagacacctaccgattgg

SEQ ID NO: 41655 - DNA, 25 bp, probe
gtctggtttctccttatctgttaat

SEQ ID NO: 41656 - DNA, 25 bp, probe
gggatatagatggctatgagtatgc

SEQ ID NO: 41657 - DNA, 25 bp, probe
gaactgggatatagatggctatgag

SEQ ID NO: 41658 - DNA, 25 bp, probe
aactgggatatagatggctatgagt

SEQ ID NO: 41659 - DNA, 25 bp, probe
cctgtctggtttctccttatctgtt

SEQ ID NO: 41660 - DNA, 25 bp, probe
actgggatatagatggctatgagta

SEQ ID NO: 41661 - DNA, 25 bp, probe
tctggtttctccttatctgttaatc

SEQ ID NO: 41662 - DNA, 25 bp, probe
ctgttaatcccagacaatagcaatt

SEQ ID NO: 41663 - DNA, 25 bp, probe
tgggatatagatggctatgagtatg

SEQ ID NO: 41664 - DNA, 25 bp, probe
cgaactgggatatagatggctatga

SEQ ID NO: 41665 - DNA, 25 bp, probe
gtttctccttatctgttaatcccag

SEQ ID NO: 41666 - DNA, 25 bp, probe
ctgggatatagatggctatgagtat

SEQ ID NO: 41667 - DNA, 25 bp, probe
cctcaagatggagacagcagagtat

SEQ ID NO: 41668 - DNA, 25 bp, probe
agctccaacataacagaagaacttt

SEQ ID NO: 41669 - DNA, 25 bp, probe
tgttaatcccagacaatagcaatta

SEQ ID NO: 41670 - DNA, 25 bp, probe
tcctgtctggtttctccttatctgt

SEQ ID NO: 41671 - DNA, 25 bp, probe
acctactcagaagacacctaccgat

SEQ ID NO: 41672 - DNA, 25 bp, probe
gataaagcaagtcatggagcacatc

SEQ ID NO: 41673 - DNA, 25 bp, probe
gcaatgtttcgatagacagcataat

SEQ ID NO: 41674 - DNA, 25 bp, probe
aacctactcagaagacacctaccga

SEQ ID NO: 41675 - DNA, 25 bp, probe
aatgtttcgatagacagcataatcc

SEQ ID NO: 41676 - DNA, 25 bp, probe
atatgttagccatttcctgtctggt

SEQ ID NO: 41677 - DNA, 25 bp, probe
atgtttcgatagacagcataatccc

SEQ ID NO: 41678 - DNA, 25 bp, probe
ataaagcaagtcatggagcacatct

SEQ ID NO: 41679 - DNA, 25 bp, probe
tatgttagccatttcctgtctggtt

SEQ ID NO: 41680 - DNA, 25 bp, probe
ttcaacagcacagtatcttcaagga

SEQ ID NO: 41681 - DNA, 25 bp, probe
tcaacagcacagtatcttcaaggaa

SEQ ID NO: 41682 - DNA, 25 bp, probe
atatgtgaagacagagcagatcagt

SEQ ID NO: 41683 - DNA, 25 bp, probe
catttatctcaacagtgccatcaac

SEQ ID NO: 41684 - DNA, 25 bp, probe
gtttcaacagcacagtatcttcaag

SEQ ID NO: 41685 - DNA, 25 bp, probe
aattacagcgtcatcaaggagtcag

SEQ ID NO: 41686 - DNA, 25 bp, probe
taaattacagcgtcatcaaggagtc

SEQ ID NO: 41687 - DNA, 25 bp, probe
ctaaattacagcgtcatcaaggagt

SEQ ID NO: 41688 - DNA, 25 bp, probe
tatgtgaagacagagcagatcagtc

SEQ ID NO: 41689 - DNA, 25 bp, probe
tttcaacagcacagtatcttcaagg

SEQ ID NO: 41690 - DNA, 25 bp, probe
gatcagtctttgtcaatgctctaac

SEQ ID NO: 41691 - DNA, 25 bp, probe
atttatctcaacagtgccatcaacc

SEQ ID NO: 41692 - DNA, 25 bp, probe
agatcagtctttgtcaatgctctaa

SEQ ID NO: 41693 - DNA, 25 bp, probe
tgacaaagaaattgagaatctgtgc

SEQ ID NO: 41694 - DNA, 25 bp, probe
atcagtctttgtcaatgctctaaca

SEQ ID NO: 41695 - DNA, 25 bp, probe
tggatgacaaagaaattgagaatct

SEQ ID NO: 41696 - DNA, 25 bp, probe
cagatcagtctttgtcaatgctcta

SEQ ID NO: 41697 - DNA, 25 bp, probe
caactcatttctctccagtcctttc

SEQ ID NO: 41698 - DNA, 25 bp, probe
ggactctagtggttgtcaactcatt

SEQ ID NO: 41699 - DNA, 25 bp, probe
ggatgacaaagaaattgagaatctg

SEQ ID NO: 41700 - DNA, 25 bp, probe
attacagcgtcatcaaggagtcaga

SEQ ID NO: 41701 - DNA, 25 bp, probe
ctacaggactctagtggttgtcaac

SEQ ID NO: 41702 - DNA, 25 bp, probe
ctcatttctctccagtcctttccaa

SEQ ID NO: 41703 - DNA, 25 bp, probe
tcaactcatttctctccagtccttt

SEQ ID NO: 41704 - DNA, 25 bp, probe
tacaggactctagtggttgtcaact

SEQ ID NO: 41705 - DNA, 25 bp, probe
atagtcatatgtgaagacagagcag

SEQ ID NO: 41706 - DNA, 25 bp, probe
tcatcaaggagtcagaccatttcag

SEQ ID NO: 41707 - DNA, 25 bp, probe
tcatttctctccagtcctttccaag

SEQ ID NO: 41708 - DNA, 25 bp, probe
tagtggttgtcaactcatttctctc

SEQ ID NO: 41709 - DNA, 25 bp, probe
ctagtggttgtcaactcatttctct

SEQ ID NO: 41710 - DNA, 25 bp, probe
tctagtggttgtcaactcatttctc

SEQ ID NO: 41711 - DNA, 25 bp, probe
ctctagtggttgtcaactcatttct

SEQ ID NO: 41712 - DNA, 25 bp, probe
gccaatagtcatatgtgaagacaga

SEQ ID NO: 41713 - DNA, 25 bp, probe
aatagtcatatgtgaagacagagca

SEQ ID NO: 41714 - DNA, 25 bp, probe
caacagagaaacctgctaactacag

SEQ ID NO: 41715 - DNA, 25 bp, probe
tttatggatgccctacaggactcta

SEQ ID NO: 41716 - DNA, 25 bp, probe
acctctaatagatgtttcaacagca

SEQ ID NO: 41717 - DNA, 25 bp, probe
catatgtgaagacagagcagatcag

SEQ ID NO: 41718 - DNA, 25 bp, probe
actctagtggttgtcaactcatttc

SEQ ID NO: 41719 - DNA, 25 bp, probe
gatgtttcaacagcacagtatcttc

SEQ ID NO: 41720 - DNA, 25 bp, probe
cctctaatagatgtttcaacagcac

SEQ ID NO: 41721 - DNA, 25 bp, probe
caatagtcatatgtgaagacagagc

SEQ ID NO: 41722 - DNA, 25 bp, probe
catttctctccagtcctttccaaga

SEQ ID NO: 41723 - DNA, 25 bp, probe
tagtcatatgtgaagacagagcaga

SEQ ID NO: 41724 - DNA, 25 bp, probe
aggagttcacatatagttcagcatt

SEQ ID NO: 41725 - DNA, 25 bp, probe
ttaggagttcacatatagttcagca

SEQ ID NO: 41726 - DNA, 25 bp, probe
taggagttcacatatagttcagcat

SEQ ID NO: 41727 - DNA, 25 bp, probe
ttctcttcttaaccgaatgtcagat

SEQ ID NO: 41728 - DNA, 25 bp, probe
tctcttcttaaccgaatgtcagatg

SEQ ID NO: 41729 - DNA, 25 bp, probe
ctcttcttaaccgaatgtcagatgg

SEQ ID NO: 41730 - DNA, 25 bp, probe
cttcatgcttacttgtggatcattc

SEQ ID NO: 41731 - DNA, 25 bp, probe
catgcttacttgtggatcattcttg

SEQ ID NO: 41732 - DNA, 25 bp, probe
tcatgcttacttgtggatcattctt

SEQ ID NO: 41733 - DNA, 25 bp, probe
ttcatgcttacttgtggatcattct

SEQ ID NO: 41734 - DNA, 25 bp, probe
acttcatgcttacttgtggatcatt

SEQ ID NO: 41735 - DNA, 25 bp, probe
ccatgtattgatgtagttagtccac

SEQ ID NO: 41736 - DNA, 25 bp, probe
tccatgtattgatgtagttagtcca

SEQ ID NO: 41737 - DNA, 25 bp, probe
gacttcatgcttacttgtggatcat

SEQ ID NO: 41738 - DNA, 25 bp, probe
cttgtggatcattcttgctgcttaa

SEQ ID NO: 41739 - DNA, 25 bp, probe
atgcttacttgtggatcattcttgc

SEQ ID NO: 41740 - DNA, 25 bp, probe
agttgagttgcttctgaggtacatt

SEQ ID NO: 41741 - DNA, 25 bp, probe
attctcttcttaaccgaatgtcaga

SEQ ID NO: 41742 - DNA, 25 bp, probe
cttaaccgaatgtcagatggtctta

SEQ ID NO: 41743 - DNA, 25 bp, probe
gtgacttcatgcttacttgtggatc

SEQ ID NO: 41744 - DNA, 25 bp, probe
ttaaccgaatgtcagatggtcttac

SEQ ID NO: 41745 - DNA, 25 bp, probe
aattctcttcttaaccgaatgtcag

SEQ ID NO: 41746 - DNA, 25 bp, probe
ttccatgtattgatgtagttagtcc

SEQ ID NO: 41747 - DNA, 25 bp, probe
tatattctcgcagcatttccagtta

SEQ ID NO: 41748 - DNA, 25 bp, probe
cttacttgtggatcattcttgctgc

SEQ ID NO: 41749 - DNA, 25 bp, probe
gcttacttgtggatcattcttgctg

SEQ ID NO: 41750 - DNA, 25 bp, probe
catgtattgatgtagttagtccaca

SEQ ID NO: 41751 - DNA, 25 bp, probe
gagttgagttgcttctgaggtacat

SEQ ID NO: 41752 - DNA, 25 bp, probe
atgagttgagttgcttctgaggtac

SEQ ID NO: 41753 - DNA, 25 bp, probe
cttcttaaccgaatgtcagatggtc

SEQ ID NO: 41754 - DNA, 25 bp, probe
ggagttcacatatagttcagcattt

SEQ ID NO: 41755 - DNA, 25 bp, probe
atattctcgcagcatttccagttaa

SEQ ID NO: 41756 - DNA, 25 bp, probe
ttggactaaggttcttgagcttatc

SEQ ID NO: 41757 - DNA, 25 bp, probe
gactaaggttcttgagcttatctcc

SEQ ID NO: 41758 - DNA, 25 bp, probe
ggactaaggttcttgagcttatctc

SEQ ID NO: 41759 - DNA, 25 bp, probe
agttcagcatttattgtttaggagt

SEQ ID NO: 41760 - DNA, 25 bp, probe
catgagttgagttgcttctgaggta

SEQ ID NO: 41761 - DNA, 25 bp, probe
tcttaaccgaatgtcagatggtctt

SEQ ID NO: 41762 - DNA, 25 bp, probe
ttcttaaccgaatgtcagatggtct

SEQ ID NO: 41763 - DNA, 25 bp, probe
tcttcttaaccgaatgtcagatggt

SEQ ID NO: 41764 - DNA, 25 bp, probe
acttgtggatcattcttgctgctta

SEQ ID NO: 41765 - DNA, 25 bp, probe
tacttgtggatcattcttgctgctt

SEQ ID NO: 41766 - DNA, 25 bp, probe
ttacttgtggatcattcttgctgct

SEQ ID NO: 41767 - DNA, 25 bp, probe
tgcttacttgtggatcattcttgct

SEQ ID NO: 41768 - DNA, 25 bp, probe
tatacaatgtaactatggtggtcgt

SEQ ID NO: 41769 - DNA, 25 bp, probe
atacaatgtaactatggtggtcgtt

SEQ ID NO: 41770 - DNA, 25 bp, probe
atatctccagccttcgttatgaact

SEQ ID NO: 41771 - DNA, 25 bp, probe
aacctcttcactcagtctaactcaa

SEQ ID NO: 41772 - DNA, 25 bp, probe
tatctccagccttcgttatgaactt

SEQ ID NO: 41773 - DNA, 25 bp, probe
atgacagtgatgtagaatggaagtt

SEQ ID NO: 41774 - DNA, 25 bp, probe
gatgacagtgatgtagaatggaagt

SEQ ID NO: 41775 - DNA, 25 bp, probe
ttgaggatgacagtgatgtagaatg

SEQ ID NO: 41776 - DNA, 25 bp, probe
aattgaggatgacagtgatgtagaa

SEQ ID NO: 41777 - DNA, 25 bp, probe
aaggagaaggcttcagaaggatata

SEQ ID NO: 41778 - DNA, 25 bp, probe
attgaggatgacagtgatgtagaat

SEQ ID NO: 41779 - DNA, 25 bp, probe
gagaaggcttcagaaggatatagaa

SEQ ID NO: 41780 - DNA, 25 bp, probe
acatattcaagttcatggtcctctt

SEQ ID NO: 41781 - DNA, 25 bp, probe
aggagaaggcttcagaaggatatag

SEQ ID NO: 41782 - DNA, 25 bp, probe
acctcttcactcagtctaactcaag

SEQ ID NO: 41783 - DNA, 25 bp, probe
ggagaaggcttcagaaggatataga

SEQ ID NO: 41784 - DNA, 25 bp, probe
ggatgacagtgatgtagaatggaag

SEQ ID NO: 41785 - DNA, 25 bp, probe
ttaacagcattctcaatcagccaac

SEQ ID NO: 41786 - DNA, 25 bp, probe
atatacaatgtaactatggtggtcg

SEQ ID NO: 41787 - DNA, 25 bp, probe
aggatgacagtgatgtagaatggaa

SEQ ID NO: 41788 - DNA, 25 bp, probe
actcaacatgctaattgctatgatt

SEQ ID NO: 41789 - DNA, 25 bp, probe
gaggatgacagtgatgtagaatgga

SEQ ID NO: 41790 - DNA, 25 bp, probe
tctagtacagtgcctggtatatagt

SEQ ID NO: 41791 - DNA, 25 bp, probe
tacagtgcctggtatatagtaggtg

SEQ ID NO: 41792 - DNA, 25 bp, probe
agtacagtgcctggtatatagtagg

SEQ ID NO: 41793 - DNA, 25 bp, probe
tgaggatgacagtgatgtagaatgg

SEQ ID NO: 41794 - DNA, 25 bp, probe
gacatattcaagttcatggtcctct

SEQ ID NO: 41795 - DNA, 25 bp, probe
gtacagtgcctggtatatagtaggt

SEQ ID NO: 41796 - DNA, 25 bp, probe
ttactcaacatgctaattgctatga

SEQ ID NO: 41797 - DNA, 25 bp, probe
catctagtacagtgcctggtatata

SEQ ID NO: 41798 - DNA, 25 bp, probe
tactcaacatgctaattgctatgat

SEQ ID NO: 41799 - DNA, 25 bp, probe
tgtcttattcatctttgtgtctcca

SEQ ID NO: 41800 - DNA, 25 bp, probe
tagaaatgggaatgggtaactcaaa

SEQ ID NO: 41801 - DNA, 25 bp, probe
cctggtatatagtaggtgctcaata

SEQ ID NO: 41802 - DNA, 25 bp, probe
gcaactgaggaattagccattctaa

SEQ ID NO: 41803 - DNA, 25 bp, probe
atagaaatgggaatgggtaactcaa

SEQ ID NO: 41804 - DNA, 25 bp, probe
gaaggatatagaaatgggaatgggt

SEQ ID NO: 41805 - DNA, 25 bp, probe
ttattcatctttgtgtctccagcat

SEQ ID NO: 41806 - DNA, 25 bp, probe
agaaggatatagaaatgggaatggg

SEQ ID NO: 41807 - DNA, 25 bp, probe
atctagtacagtgcctggtatatag

SEQ ID NO: 41808 - DNA, 25 bp, probe
gtcttattcatctttgtgtctccag

SEQ ID NO: 41809 - DNA, 25 bp, probe
tcttattcatctttgtgtctccagc

SEQ ID NO: 41810 - DNA, 25 bp, probe
taacagcattctcaatcagccaaca

SEQ ID NO: 41811 - DNA, 25 bp, probe
gcctggtatatagtaggtgctcaat

SEQ ID NO: 41812 - DNA, 25 bp, probe
tttccacaaataaagttcctgacac

SEQ ID NO: 41813 - DNA, 25 bp, probe
ccaagacattaaatctgccatctca

SEQ ID NO: 41814 - DNA, 25 bp, probe
aaacccaagacattaaatctgccat

SEQ ID NO: 41815 - DNA, 25 bp, probe
ttccacaaataaagttcctgacacg

SEQ ID NO: 41816 - DNA, 25 bp, probe
aacccaagacattaaatctgccatc

SEQ ID NO: 41817 - DNA, 25 bp, probe
caagacattaaatctgccatctcag

SEQ ID NO: 41818 - DNA, 25 bp, probe
cccaagacattaaatctgccatctc

SEQ ID NO: 41819 - DNA, 25 bp, probe
aagacattaaatctgccatctcagg

SEQ ID NO: 41820 - DNA, 25 bp, probe
acccaagacattaaatctgccatct

SEQ ID NO: 41821 - DNA, 25 bp, probe
ctttccacaaataaagttcctgaca

SEQ ID NO: 41822 - DNA, 25 bp, probe
gctttccacaaataaagttcctgac

SEQ ID NO: 41823 - DNA, 25 bp, probe
gtgctttccacaaataaagttcctg

SEQ ID NO: 41824 - DNA, 25 bp, probe
tgctttccacaaataaagttcctga

SEQ ID NO: 41825 - DNA, 25 bp, probe
taaaacccaagacattaaatctgcc

SEQ ID NO: 41826 - DNA, 25 bp, probe
ctccctgtcttcattttcctaaacc

SEQ ID NO: 41827 - DNA, 25 bp, probe
cacaaataaagttcctgacacgtcc

SEQ ID NO: 41828 - DNA, 25 bp, probe
ccacaaataaagttcctgacacgtc

SEQ ID NO: 41829 - DNA, 25 bp, probe
ctgtcttcattttcctaaacctggg

SEQ ID NO: 41830 - DNA, 25 bp, probe
cctgtcttcattttcctaaacctgg

SEQ ID NO: 41831 - DNA, 25 bp, probe
ccctgtcttcattttcctaaacctg

SEQ ID NO: 41832 - DNA, 25 bp, probe
tccctgtcttcattttcctaaacct

SEQ ID NO: 41833 - DNA, 25 bp, probe
gtaaaacccaagacattaaatctgc

SEQ ID NO: 41834 - DNA, 25 bp, probe
aaaacccaagacattaaatctgcca

SEQ ID NO: 41835 - DNA, 25 bp, probe
gctccctgtcttcattttcctaaac

SEQ ID NO: 41836 - DNA, 25 bp, probe
acaaataaagttcctgacacgtcca

SEQ ID NO: 41837 - DNA, 25 bp, probe
tccacaaataaagttcctgacacgt

SEQ ID NO: 41838 - DNA, 25 bp, probe
caaataaagttcctgacacgtccag

SEQ ID NO: 41839 - DNA, 25 bp, probe
cgtggtaaaacccaagacattaaat

SEQ ID NO: 41840 - DNA, 25 bp, probe
tcttcattttcctaaacctgggctc

SEQ ID NO: 41841 - DNA, 25 bp, probe
gtcttcattttcctaaacctgggct

SEQ ID NO: 41842 - DNA, 25 bp, probe
tggtaaaacccaagacattaaatct

SEQ ID NO: 41843 - DNA, 25 bp, probe
gtggtaaaacccaagacattaaatc

SEQ ID NO: 41844 - DNA, 25 bp, probe
agctccctgtcttcattttcctaaa

SEQ ID NO: 41845 - DNA, 25 bp, probe
ggtaaaacccaagacattaaatctg

SEQ ID NO: 41846 - DNA, 25 bp, probe
tgtcttcattttcctaaacctgggc

SEQ ID NO: 41847 - DNA, 25 bp, probe
cttcattttcctaaacctgggctcc

SEQ ID NO: 41848 - DNA, 25 bp, probe
acgtggtaaaacccaagacattaaa

SEQ ID NO: 41849 - DNA, 25 bp, probe
aacgtggtaaaacccaagacattaa

SEQ ID NO: 41850 - DNA, 25 bp, probe
tctgtgctttccacaaataaagttc

SEQ ID NO: 41851 - DNA, 25 bp, probe
ttctgtgctttccacaaataaagtt

SEQ ID NO: 41852 - DNA, 25 bp, probe
cttctgtgctttccacaaataaagt

SEQ ID NO: 41853 - DNA, 25 bp, probe
tcttctgtgctttccacaaataaag

SEQ ID NO: 41854 - DNA, 25 bp, probe
ctcttctgtgctttccacaaataaa

SEQ ID NO: 41855 - DNA, 25 bp, probe
gaacgtggtaaaacccaagacatta

SEQ ID NO: 41856 - DNA, 25 bp, probe
ataagacaccttcacttagcagttc

SEQ ID NO: 41857 - DNA, 25 bp, probe
tataagacaccttcacttagcagtt

SEQ ID NO: 41858 - DNA, 25 bp, probe
taagacaccttcacttagcagttct

SEQ ID NO: 41859 - DNA, 25 bp, probe
ttataagacaccttcacttagcagt

SEQ ID NO: 41860 - DNA, 25 bp, probe
gcgaagaacaaactgaatggtaaat

SEQ ID NO: 41861 - DNA, 25 bp, probe
aagaacaaactgaatggtaaatggt

SEQ ID NO: 41862 - DNA, 25 bp, probe
cgaagaacaaactgaatggtaaatg

SEQ ID NO: 41863 - DNA, 25 bp, probe
tatgcgaagaacaaactgaatggta

SEQ ID NO: 41864 - DNA, 25 bp, probe
gaagaacaaactgaatggtaaatgg

SEQ ID NO: 41865 - DNA, 25 bp, probe
atatgcgaagaacaaactgaatggt

SEQ ID NO: 41866 - DNA, 25 bp, probe
agaacaaactgaatggtaaatggta

SEQ ID NO: 41867 - DNA, 25 bp, probe
atgcgaagaacaaactgaatggtaa

SEQ ID NO: 41868 - DNA, 25 bp, probe
aagacaccttcacttagcagttctg

SEQ ID NO: 41869 - DNA, 25 bp, probe
tggtattactttgatgatagcaacg

SEQ ID NO: 41870 - DNA, 25 bp, probe
tgcgaagaacaaactgaatggtaaa

SEQ ID NO: 41871 - DNA, 25 bp, probe
cttcacttagcagttctggttcctc

SEQ ID NO: 41872 - DNA, 25 bp, probe
cttagcagttctggttcctctgatg

SEQ ID NO: 41873 - DNA, 25 bp, probe
ctacaacagatactggagggataag

SEQ ID NO: 41874 - DNA, 25 bp, probe
gaggatcagatagtgactaaagcag

SEQ ID NO: 41875 - DNA, 25 bp, probe
tgaggatcagatagtgactaaagca

SEQ ID NO: 41876 - DNA, 25 bp, probe
gaacaaactgaatggtaaatggtat

SEQ ID NO: 41877 - DNA, 25 bp, probe
cctacaacagatactggagggataa

SEQ ID NO: 41878 - DNA, 25 bp, probe
ttcacttagcagttctggttcctct

SEQ ID NO: 41879 - DNA, 25 bp, probe
tacaacagatactggagggataagc

SEQ ID NO: 41880 - DNA, 25 bp, probe
acttagcagttctggttcctctgat

SEQ ID NO: 41881 - DNA, 25 bp, probe
gatagtgactaaagcagcttatgtg

SEQ ID NO: 41882 - DNA, 25 bp, probe
agatagtgactaaagcagcttatgt

SEQ ID NO: 41883 - DNA, 25 bp, probe
aacaaactgaatggtaaatggtatt

SEQ ID NO: 41884 - DNA, 25 bp, probe
cagatagtgactaaagcagcttatg

SEQ ID NO: 41885 - DNA, 25 bp, probe
ctcattgccgtgtccaatcattatg

SEQ ID NO: 41886 - DNA, 25 bp, probe
gatcagatagtgactaaagcagctt

SEQ ID NO: 41887 - DNA, 25 bp, probe
tcctacaacagatactggagggata

SEQ ID NO: 41888 - DNA, 25 bp, probe
aggatcagatagtgactaaagcagc

SEQ ID NO: 41889 - DNA, 25 bp, probe
tcagatagtgactaaagcagcttat

SEQ ID NO: 41890 - DNA, 25 bp, probe
atcagatagtgactaaagcagctta

SEQ ID NO: 41891 - DNA, 25 bp, probe
ttaccaacgtcgagatgatgaattt

SEQ ID NO: 41892 - DNA, 25 bp, probe
tttaccaacgtcgagatgatgaatt

SEQ ID NO: 41893 - DNA, 25 bp, probe
attactttgatgatagcaacgtgtc

SEQ ID NO: 41894 - DNA, 25 bp, probe
cgtttctcctacaacagatactgga

SEQ ID NO: 41895 - DNA, 25 bp, probe
tttataagacaccttcacttagcag

SEQ ID NO: 41896 - DNA, 25 bp, probe
ggtattactttgatgatagcaacgt

SEQ ID NO: 41897 - DNA, 25 bp, probe
atggtattactttgatgatagcaac

SEQ ID NO: 41898 - DNA, 25 bp, probe
ttactttgatgatagcaacgtgtcc

SEQ ID NO: 41899 - DNA, 25 bp, probe
tattactttgatgatagcaacgtgt

SEQ ID NO: 41900 - DNA, 25 bp, probe
tcctacttctactccttacttgcta

SEQ ID NO: 41901 - DNA, 25 bp, probe
acatctcctacttctactccttact

SEQ ID NO: 41902 - DNA, 25 bp, probe
ctcctacttctactccttacttgct

SEQ ID NO: 41903 - DNA, 25 bp, probe
tctcctacttctactccttacttgc

SEQ ID NO: 41904 - DNA, 25 bp, probe
tctacatctcctacttctactcctt

SEQ ID NO: 41905 - DNA, 25 bp, probe
ttctacatctcctacttctactcct

SEQ ID NO: 41906 - DNA, 25 bp, probe
gctactggatattattggtctctct

SEQ ID NO: 41907 - DNA, 25 bp, probe
cttctacatctcctacttctactcc

SEQ ID NO: 41908 - DNA, 25 bp, probe
ccttctacatctcctacttctactc

SEQ ID NO: 41909 - DNA, 25 bp, probe
cctacttctactccttacttgctat

SEQ ID NO: 41910 - DNA, 25 bp, probe
gcatagtggcattacaattagtagt

SEQ ID NO: 41911 - DNA, 25 bp, probe
gaagaagtgtcaattagagttggtg

SEQ ID NO: 41912 - DNA, 25 bp, probe
atctcctacttctactccttacttg

SEQ ID NO: 41913 - DNA, 25 bp, probe
catctcctacttctactccttactt

SEQ ID NO: 41914 - DNA, 25 bp, probe
tgaagaagtgtcaattagagttggt

SEQ ID NO: 41915 - DNA, 25 bp, probe
gaagtgtcaattagagttggtggaa

SEQ ID NO: 41916 - DNA, 25 bp, probe
aagaagtgtcaattagagttggtgg

SEQ ID NO: 41917 - DNA, 25 bp, probe
atagtggcattacaattagtagtgg

SEQ ID NO: 41918 - DNA, 25 bp, probe
atgaagaagtgtcaattagagttgg

SEQ ID NO: 41919 - DNA, 25 bp, probe
ctggatattattggtctctctaggt

SEQ ID NO: 41920 - DNA, 25 bp, probe
actggatattattggtctctctagg

SEQ ID NO: 41921 - DNA, 25 bp, probe
tacatctcctacttctactccttac

SEQ ID NO: 41922 - DNA, 25 bp, probe
agaagtgtcaattagagttggtgga

SEQ ID NO: 41923 - DNA, 25 bp, probe
tggatattattggtctctctaggtt

SEQ ID NO: 41924 - DNA, 25 bp, probe
ctacatctcctacttctactcctta

SEQ ID NO: 41925 - DNA, 25 bp, probe
cctctaatcctgataaggttgctag

SEQ ID NO: 41926 - DNA, 25 bp, probe
tgatgaagaagtgtcaattagagtt

SEQ ID NO: 41927 - DNA, 25 bp, probe
ctctaatcctgataaggttgctagt

SEQ ID NO: 41928 - DNA, 25 bp, probe
agctactggatattattggtctctc

SEQ ID NO: 41929 - DNA, 25 bp, probe
gatgaagaagtgtcaattagagttg

SEQ ID NO: 41930 - DNA, 25 bp, probe
atgatgaagaagtgtcaattagagt

SEQ ID NO: 41931 - DNA, 25 bp, probe
aatcctgataaggttgctagtacag

SEQ ID NO: 41932 - DNA, 25 bp, probe
catagtggcattacaattagtagtg

SEQ ID NO: 41933 - DNA, 25 bp, probe
ctacttctactccttacttgctatt

SEQ ID NO: 41934 - DNA, 25 bp, probe
tgaagctactggatattattggtct

SEQ ID NO: 41935 - DNA, 25 bp, probe
aataggtaagccagaaccattgaat

SEQ ID NO: 41936 - DNA, 25 bp, probe
ccaagaagcagaatctcattcagta

SEQ ID NO: 41937 - DNA, 25 bp, probe
aagctactggatattattggtctct

SEQ ID NO: 41938 - DNA, 25 bp, probe
aactcatattctgcacgatctgtat

SEQ ID NO: 41939 - DNA, 25 bp, probe
ttaactcatattctgcacgatctgt

SEQ ID NO: 41940 - DNA, 25 bp, probe
gcctctaatcctgataaggttgcta

SEQ ID NO: 41941 - DNA, 25 bp, probe
gaagctactggatattattggtctc

SEQ ID NO: 41942 - DNA, 25 bp, probe
cccttctacatctcctacttctact

SEQ ID NO: 41943 - DNA, 25 bp, probe
ataggtaagccagaaccattgaatg

SEQ ID NO: 41944 - DNA, 25 bp, probe
ctcctccaaataccagatactgttt

SEQ ID NO: 41945 - DNA, 25 bp, probe
tctcctccaaataccagatactgtt

SEQ ID NO: 41946 - DNA, 25 bp, probe
catcagcatctcctccaaataccag

SEQ ID NO: 41947 - DNA, 25 bp, probe
catctcctccaaataccagatactg

SEQ ID NO: 41948 - DNA, 25 bp, probe
atctcctccaaataccagatactgt

SEQ ID NO: 41949 - DNA, 25 bp, probe
aaataccagatactgtttgagctgt

SEQ ID NO: 41950 - DNA, 25 bp, probe
aataccagatactgtttgagctgtg

SEQ ID NO: 41951 - DNA, 25 bp, probe
ttcccatcagcatctcctccaaata

SEQ ID NO: 41952 - DNA, 25 bp, probe
atcagcatctcctccaaataccaga

SEQ ID NO: 41953 - DNA, 25 bp, probe
cctccaaataccagatactgtttga

SEQ ID NO: 41954 - DNA, 25 bp, probe
tcctccaaataccagatactgtttg

SEQ ID NO: 41955 - DNA, 25 bp, probe
gcatctcctccaaataccagatact

SEQ ID NO: 41956 - DNA, 25 bp, probe
agcatctcctccaaataccagatac

SEQ ID NO: 41957 - DNA, 25 bp, probe
cagcatctcctccaaataccagata

SEQ ID NO: 41958 - DNA, 25 bp, probe
tccaaataccagatactgtttgagc

SEQ ID NO: 41959 - DNA, 25 bp, probe
ctccaaataccagatactgtttgag

SEQ ID NO: 41960 - DNA, 25 bp, probe
cgtcaattttgtccttttcattagt

SEQ ID NO: 41961 - DNA, 25 bp, probe
tcccatcagcatctcctccaaatac

SEQ ID NO: 41962 - DNA, 25 bp, probe
caaataccagatactgtttgagctg

SEQ ID NO: 41963 - DNA, 25 bp, probe
tttcccatcagcatctcctccaaat

SEQ ID NO: 41964 - DNA, 25 bp, probe
ccaaataccagatactgtttgagct

SEQ ID NO: 41965 - DNA, 25 bp, probe
ccatcagcatctcctccaaatacca

SEQ ID NO: 41966 - DNA, 25 bp, probe
ataccagatactgtttgagctgtgc

SEQ ID NO: 41967 - DNA, 25 bp, probe
caacgaccagtctcagtacaagagg

SEQ ID NO: 41968 - DNA, 25 bp, probe
tcagcatctcctccaaataccagat

SEQ ID NO: 41969 - DNA, 25 bp, probe
cccatcagcatctcctccaaatacc

SEQ ID NO: 41970 - DNA, 25 bp, probe
gcaacgaccagtctcagtacaagag

SEQ ID NO: 41971 - DNA, 25 bp, probe
gtttcccatcagcatctcctccaaa

SEQ ID NO: 41972 - DNA, 25 bp, probe
ttagtattatacgaattttgctgca

SEQ ID NO: 41973 - DNA, 25 bp, probe
attagtattatacgaattttgctgc

SEQ ID NO: 41974 - DNA, 25 bp, probe
gtcaattttgtccttttcattagta

SEQ ID NO: 41975 - DNA, 25 bp, probe
taccagatactgtttgagctgtgcc

SEQ ID NO: 41976 - DNA, 25 bp, probe
cactacatggtgtttgccgtgtttc

SEQ ID NO: 41977 - DNA, 25 bp, probe
tgtccttttcattagtattatacga

SEQ ID NO: 41978 - DNA, 25 bp, probe
tcaattttgtccttttcattagtat

SEQ ID NO: 41979 - DNA, 25 bp, probe
ttgtccttttcattagtattatacg

SEQ ID NO: 41980 - DNA, 25 bp, probe
gttgtccactaaaccccatacctgg

SEQ ID NO: 41981 - DNA, 25 bp, probe
ggttgtccactaaaccccatacctg

SEQ ID NO: 41982 - DNA, 25 bp, probe
ctggttgtccactaaaccccatacc

SEQ ID NO: 41983 - DNA, 25 bp, probe
tggttgtccactaaaccccatacct

SEQ ID NO: 41984 - DNA, 25 bp, probe
gagggagttaagccataggaatttg

SEQ ID NO: 41985 - DNA, 25 bp, probe
agagggagttaagccataggaattt

SEQ ID NO: 41986 - DNA, 25 bp, probe
ataggaatttggctgtggagtaaga

SEQ ID NO: 41987 - DNA, 25 bp, probe
cataggaatttggctgtggagtaag

SEQ ID NO: 41988 - DNA, 25 bp, probe
ctgttaaatcctcccacatttcttg

SEQ ID NO: 41989 - DNA, 25 bp, probe
cagagggagttaagccataggaatt

SEQ ID NO: 41990 - DNA, 25 bp, probe
taggaatttggctgtggagtaagag

SEQ ID NO: 41991 - DNA, 25 bp, probe
gctgttaaatcctcccacatttctt

SEQ ID NO: 41992 - DNA, 25 bp, probe
atgctgttaaatcctcccacatttc

SEQ ID NO: 41993 - DNA, 25 bp, probe
ctacaatgctgttaaatcctcccac

SEQ ID NO: 41994 - DNA, 25 bp, probe
gttaaatcctcccacatttcttgga

SEQ ID NO: 41995 - DNA, 25 bp, probe
tacaatgctgttaaatcctcccaca

SEQ ID NO: 41996 - DNA, 25 bp, probe
tgttaaatcctcccacatttcttgg

SEQ ID NO: 41997 - DNA, 25 bp, probe
tgctgttaaatcctcccacatttct

SEQ ID NO: 41998 - DNA, 25 bp, probe
aatgctgttaaatcctcccacattt

SEQ ID NO: 41999 - DNA, 25 bp, probe
acaatgctgttaaatcctcccacat

SEQ ID NO: 42000 - DNA, 25 bp, probe
cactattttagattcctggcattcg

SEQ ID NO: 42001 - DNA, 25 bp, probe
aacccgtcactattttagattcctg

SEQ ID NO: 42002 - DNA, 25 bp, probe
agggagttaagccataggaatttgg

SEQ ID NO: 42003 - DNA, 25 bp, probe
gtcactattttagattcctggcatt

SEQ ID NO: 42004 - DNA, 25 bp, probe
cgtcactattttagattcctggcat

SEQ ID NO: 42005 - DNA, 25 bp, probe
gaacccgtcactattttagattcct

SEQ ID NO: 42006 - DNA, 25 bp, probe
caatgctgttaaatcctcccacatt

SEQ ID NO: 42007 - DNA, 25 bp, probe
tcactattttagattcctggcattc

SEQ ID NO: 42008 - DNA, 25 bp, probe
ctaccagaggttggagaacaaactt

SEQ ID NO: 42009 - DNA, 25 bp, probe
tccacatcctgctaagacgtttaaa

SEQ ID NO: 42010 - DNA, 25 bp, probe
ttaaaacagcctaacaaagacactt

SEQ ID NO: 42011 - DNA, 25 bp, probe
gctacaatgctgttaaatcctccca

SEQ ID NO: 42012 - DNA, 25 bp, probe
taaaacagcctaacaaagacacttg

SEQ ID NO: 42013 - DNA, 25 bp, probe
atttggctgtggagtaagagggaat

SEQ ID NO: 42014 - DNA, 25 bp, probe
ccataggaatttggctgtggagtaa

SEQ ID NO: 42015 - DNA, 25 bp, probe
taccagaggttggagaacaaacttg

SEQ ID NO: 42016 - DNA, 25 bp, probe
ccaagtaacagcagagggagttaag

SEQ ID NO: 42017 - DNA, 25 bp, probe
taacagcagagggagttaagccata

SEQ ID NO: 42018 - DNA, 25 bp, probe
gcagagggagttaagccataggaat

SEQ ID NO: 42019 - DNA, 25 bp, probe
acccgtcactattttagattcctgg

SEQ ID NO: 42020 - DNA, 25 bp, probe
aatttggctgtggagtaagagggaa

SEQ ID NO: 42021 - DNA, 25 bp, probe
aatatgaccctaccagaggttggag

SEQ ID NO: 42022 - DNA, 25 bp, probe
gaatatgaccctaccagaggttgga

SEQ ID NO: 42023 - DNA, 25 bp, probe
agtgtggaatatgaccctaccagag

SEQ ID NO: 42024 - DNA, 25 bp, probe
ccattttacagacaggaaaactgag

SEQ ID NO: 42025 - DNA, 25 bp, probe
cattttacagacaggaaaactgagc

SEQ ID NO: 42026 - DNA, 25 bp, probe
ttaaatcctcccacatttcttggat

SEQ ID NO: 42027 - DNA, 25 bp, probe
caagtaacagcagagggagttaagc

SEQ ID NO: 42028 - DNA, 25 bp, probe
aagttcttagttgctgtatgtctcg

SEQ ID NO: 42029 - DNA, 25 bp, probe
gtattgtcatcctgtcctgctattg

SEQ ID NO: 42030 - DNA, 25 bp, probe
tcatctacacagtcaacctctacag

SEQ ID NO: 42031 - DNA, 25 bp, probe
caagttcttagttgctgtatgtctc

SEQ ID NO: 42032 - DNA, 25 bp, probe
gtcatctacacagtcaacctctaca

SEQ ID NO: 42033 - DNA, 25 bp, probe
ccaagttcttagttgctgtatgtct

SEQ ID NO: 42034 - DNA, 25 bp, probe
gttcttagttgctgtatgtctcgtg

SEQ ID NO: 42035 - DNA, 25 bp, probe
agttcttagttgctgtatgtctcgt

SEQ ID NO: 42036 - DNA, 25 bp, probe
ttcatattgatgtgtgtctaggcag

SEQ ID NO: 42037 - DNA, 25 bp, probe
atgtcatctacacagtcaacctcta

SEQ ID NO: 42038 - DNA, 25 bp, probe
ttagttgctgtatgtctcgtggtag

SEQ ID NO: 42039 - DNA, 25 bp, probe
cttagttgctgtatgtctcgtggta

SEQ ID NO: 42040 - DNA, 25 bp, probe
ggtattgtcatcctgtcctgctatt

SEQ ID NO: 42041 - DNA, 25 bp, probe
tcagtgaggcagatgacagatatat

SEQ ID NO: 42042 - DNA, 25 bp, probe
tgtcatctacacagtcaacctctac

SEQ ID NO: 42043 - DNA, 25 bp, probe
gccaagttcttagttgctgtatgtc

SEQ ID NO: 42044 - DNA, 25 bp, probe
gctgtagaagatggcacttataacc

SEQ ID NO: 42045 - DNA, 25 bp, probe
catattgatgtgtgtctaggcagga

SEQ ID NO: 42046 - DNA, 25 bp, probe
ttcttagttgctgtatgtctcgtgg

SEQ ID NO: 42047 - DNA, 25 bp, probe
tattgtcatcctgtcctgctattgc

SEQ ID NO: 42048 - DNA, 25 bp, probe
catctacacagtcaacctctacagc

SEQ ID NO: 42049 - DNA, 25 bp, probe
cttatcctgcctggtattgtcatcc

SEQ ID NO: 42050 - DNA, 25 bp, probe
ccttatcctgcctggtattgtcatc

SEQ ID NO: 42051 - DNA, 25 bp, probe
tcatattgatgtgtgtctaggcagg

SEQ ID NO: 42052 - DNA, 25 bp, probe
caaagtggtatagaaatgctggttt

SEQ ID NO: 42053 - DNA, 25 bp, probe
tatgtctcgtggtaggactgtagaa

SEQ ID NO: 42054 - DNA, 25 bp, probe
atctacacagtcaacctctacagca

SEQ ID NO: 42055 - DNA, 25 bp, probe
attatcatctccaagctgtcacact

SEQ ID NO: 42056 - DNA, 25 bp, probe
cattatcatctccaagctgtcacac

SEQ ID NO: 42057 - DNA, 25 bp, probe
ctattgcattatcatctccaagctg

SEQ ID NO: 42058 - DNA, 25 bp, probe
tggtattgtcatcctgtcctgctat

SEQ ID NO: 42059 - DNA, 25 bp, probe
ttatcctgcctggtattgtcatcct

SEQ ID NO: 42060 - DNA, 25 bp, probe
tattgcattatcatctccaagctgt

SEQ ID NO: 42061 - DNA, 25 bp, probe
atattgatgtgtgtctaggcaggac

SEQ ID NO: 42062 - DNA, 25 bp, probe
ctgtagaagatggcacttataacca

SEQ ID NO: 42063 - DNA, 25 bp, probe
tgtagaagatggcacttataaccaa

SEQ ID NO: 42064 - DNA, 25 bp, probe
catgtcatctacacagtcaacctct

SEQ ID NO: 42065 - DNA, 25 bp, probe
catagataatctctccattcccgtg

SEQ ID NO: 42066 - DNA, 25 bp, probe
gtatgtctcgtggtaggactgtaga

SEQ ID NO: 42067 - DNA, 25 bp, probe
attgcattatcatctccaagctgtc

SEQ ID NO: 42068 - DNA, 25 bp, probe
ttatcatctccaagctgtcacactc

SEQ ID NO: 42069 - DNA, 25 bp, probe
tttcatattgatgtgtgtctaggca

SEQ ID NO: 42070 - DNA, 25 bp, probe
gtttcatattgatgtgtgtctaggc

SEQ ID NO: 42071 - DNA, 25 bp, probe
ttcactccagctaacacagatgtaa

SEQ ID NO: 42072 - DNA, 25 bp, probe
tttcttacctgccttctttatggga

SEQ ID NO: 42073 - DNA, 25 bp, probe
gtttcttacctgccttctttatggg

SEQ ID NO: 42074 - DNA, 25 bp, probe
ttcttacctgccttctttatgggaa

SEQ ID NO: 42075 - DNA, 25 bp, probe
cgtttcttacctgccttctttatgg

SEQ ID NO: 42076 - DNA, 25 bp, probe
tcttacctgccttctttatgggaac

SEQ ID NO: 42077 - DNA, 25 bp, probe
gcgtttcttacctgccttctttatg

SEQ ID NO: 42078 - DNA, 25 bp, probe
tgcgtttcttacctgccttctttat

SEQ ID NO: 42079 - DNA, 25 bp, probe
ttgcgtttcttacctgccttcttta

SEQ ID NO: 42080 - DNA, 25 bp, probe
cttacctgccttctttatgggaacc

SEQ ID NO: 42081 - DNA, 25 bp, probe
attctattttgcgtttcttacctgc

SEQ ID NO: 42082 - DNA, 25 bp, probe
tttgcgtttcttacctgccttcttt

SEQ ID NO: 42083 - DNA, 25 bp, probe
cgtgtattctattttgcgtttctta

SEQ ID NO: 42084 - DNA, 25 bp, probe
tattttgcgtttcttacctgccttc

SEQ ID NO: 42085 - DNA, 25 bp, probe
ctattttgcgtttcttacctgcctt

SEQ ID NO: 42086 - DNA, 25 bp, probe
ttctattttgcgtttcttacctgcc

SEQ ID NO: 42087 - DNA, 25 bp, probe
tgtattctattttgcgtttcttacc

SEQ ID NO: 42088 - DNA, 25 bp, probe
tattctattttgcgtttcttacctg

SEQ ID NO: 42089 - DNA, 25 bp, probe
gtattctattttgcgtttcttacct

SEQ ID NO: 42090 - DNA, 25 bp, probe
tgccttctttatgggaaccctcttt

SEQ ID NO: 42091 - DNA, 25 bp, probe
tctattttgcgtttcttacctgcct

SEQ ID NO: 42092 - DNA, 25 bp, probe
gtgtattctattttgcgtttcttac

SEQ ID NO: 42093 - DNA, 25 bp, probe
ctgccttctttatgggaaccctctt

SEQ ID NO: 42094 - DNA, 25 bp, probe
ttacctgccttctttatgggaaccc

SEQ ID NO: 42095 - DNA, 25 bp, probe
gccttctttatgggaaccctctttt

SEQ ID NO: 42096 - DNA, 25 bp, probe
attttgcgtttcttacctgccttct

SEQ ID NO: 42097 - DNA, 25 bp, probe
gtcacttccgtttaccttcatggtg

SEQ ID NO: 42098 - DNA, 25 bp, probe
ttttgcgtttcttacctgccttctt

SEQ ID NO: 42099 - DNA, 25 bp, probe
tacctgccttctttatgggaaccct

SEQ ID NO: 42100 - DNA, 25 bp, probe
acgtgtattctattttgcgtttctt

SEQ ID NO: 42101 - DNA, 25 bp, probe
ttttgccaaggtcacttccgtttac

SEQ ID NO: 42102 - DNA, 25 bp, probe
gttttgccaaggtcacttccgttta

SEQ ID NO: 42103 - DNA, 25 bp, probe
ggtcacttccgtttaccttcatggt

SEQ ID NO: 42104 - DNA, 25 bp, probe
ttccgtttaccttcatggtgctgtt

SEQ ID NO: 42105 - DNA, 25 bp, probe
tagttttgccaaggtcacttccgtt

SEQ ID NO: 42106 - DNA, 25 bp, probe
gttttgtttggtagttttgccaagg

SEQ ID NO: 42107 - DNA, 25 bp, probe
ttttgtttggtagttttgccaaggt

SEQ ID NO: 42108 - DNA, 25 bp, probe
cgttttgtttggtagttttgccaag

SEQ ID NO: 42109 - DNA, 25 bp, probe
tttgtttggtagttttgccaaggtc

SEQ ID NO: 42110 - DNA, 25 bp, probe
tttggtagttttgccaaggtcactt

SEQ ID NO: 42111 - DNA, 25 bp, probe
ttgtttggtagttttgccaaggtca

SEQ ID NO: 42112 - DNA, 25 bp, probe
aggtcacttccgtttaccttcatgg

SEQ ID NO: 42113 - DNA, 25 bp, probe
ttggtagttttgccaaggtcacttc

SEQ ID NO: 42114 - DNA, 25 bp, probe
gtttggtagttttgccaaggtcact

SEQ ID NO: 42115 - DNA, 25 bp, probe
gcgttttgtttggtagttttgccaa

SEQ ID NO: 42116 - DNA, 25 bp, probe
tgtttggtagttttgccaaggtcac

SEQ ID NO: 42117 - DNA, 25 bp, probe
ttggcttctctgtatctattgactg

SEQ ID NO: 42118 - DNA, 25 bp, probe
atcttctacagttcttcaagcctag

SEQ ID NO: 42119 - DNA, 25 bp, probe
aatcattggtgttcatcaagaagat

SEQ ID NO: 42120 - DNA, 25 bp, probe
gatcttctacagttcttcaagccta

SEQ ID NO: 42121 - DNA, 25 bp, probe
gttcttcaagcctagacaacctaag

SEQ ID NO: 42122 - DNA, 25 bp, probe
ctacagttcttcaagcctagacaac

SEQ ID NO: 42123 - DNA, 25 bp, probe
agttcttcaagcctagacaacctaa

SEQ ID NO: 42124 - DNA, 25 bp, probe
tggcttctctgtatctattgactgc

SEQ ID NO: 42125 - DNA, 25 bp, probe
aataacactatatccagacaagcat

SEQ ID NO: 42126 - DNA, 25 bp, probe
ataacactatatccagacaagcatg

SEQ ID NO: 42127 - DNA, 25 bp, probe
cagttcttcaagcctagacaaccta

SEQ ID NO: 42128 - DNA, 25 bp, probe
cttctacagttcttcaagcctagac

SEQ ID NO: 42129 - DNA, 25 bp, probe
tcttctacagttcttcaagcctaga

SEQ ID NO: 42130 - DNA, 25 bp, probe
aagagaatgagatgcttgtcacagt

SEQ ID NO: 42131 - DNA, 25 bp, probe
tacagttcttcaagcctagacaacc

SEQ ID NO: 42132 - DNA, 25 bp, probe
tctacagttcttcaagcctagacaa

SEQ ID NO: 42133 - DNA, 25 bp, probe
ttctacagttcttcaagcctagaca

SEQ ID NO: 42134 - DNA, 25 bp, probe
caggagaaggagtttgagaagttta

SEQ ID NO: 42135 - DNA, 25 bp, probe
ttcaagtctcaaggttatagggatg

SEQ ID NO: 42136 - DNA, 25 bp, probe
tttggcttctctgtatctattgact

SEQ ID NO: 42137 - DNA, 25 bp, probe
gtttggcttctctgtatctattgac

SEQ ID NO: 42138 - DNA, 25 bp, probe
agtttggcttctctgtatctattga

SEQ ID NO: 42139 - DNA, 25 bp, probe
aggagaaggagtttgagaagtttaa

SEQ ID NO: 42140 - DNA, 25 bp, probe
tttcaagtctcaaggttatagggat

SEQ ID NO: 42141 - DNA, 25 bp, probe
gtggacatagacaaagagaatgaga

SEQ ID NO: 42142 - DNA, 25 bp, probe
acatagacaaagagaatgagatgct

SEQ ID NO: 42143 - DNA, 25 bp, probe
tctctgtatctattgactgcccttt

SEQ ID NO: 42144 - DNA, 25 bp, probe
ttctctgtatctattgactgccctt

SEQ ID NO: 42145 - DNA, 25 bp, probe
gacatagacaaagagaatgagatgc

SEQ ID NO: 42146 - DNA, 25 bp, probe
taacactatatccagacaagcatgg

SEQ ID NO: 42147 - DNA, 25 bp, probe
cctaagaaactttactatcagcagc

SEQ ID NO: 42148 - DNA, 25 bp, probe
tggacatagacaaagagaatgagat

SEQ ID NO: 42149 - DNA, 25 bp, probe
cttctctgtatctattgactgccct

SEQ ID NO: 42150 - DNA, 25 bp, probe
ggtggacatagacaaagagaatgag

SEQ ID NO: 42151 - DNA, 25 bp, probe
tcaagtctcaaggttatagggatgg

SEQ ID NO: 42152 - DNA, 25 bp, probe
ggacatagacaaagagaatgagatg

SEQ ID NO: 42153 - DNA, 25 bp, probe
catagacaaagagaatgagatgctt

SEQ ID NO: 42154 - DNA, 25 bp, probe
aggtggacatagacaaagagaatga

SEQ ID NO: 42155 - DNA, 25 bp, probe
caggtggacatagacaaagagaatg

SEQ ID NO: 42156 - DNA, 25 bp, probe
gttaaacagccaatttagggaagag

SEQ ID NO: 42157 - DNA, 25 bp, probe
aagcctagacaacctaagaaacttt

SEQ ID NO: 42158 - DNA, 25 bp, probe
gaaacttaggctgctagaaattgta

SEQ ID NO: 42159 - DNA, 25 bp, probe
cttcaagcctagacaacctaagaaa

SEQ ID NO: 42160 - DNA, 25 bp, probe
gaaactcacaacctaataaatagcg

SEQ ID NO: 42161 - DNA, 25 bp, probe
atcatccactcctgaacaactcatt

SEQ ID NO: 42162 - DNA, 25 bp, probe
atccactcctgaacaactcattgaa

SEQ ID NO: 42163 - DNA, 25 bp, probe
ctacagcaagaaggactatagatca

SEQ ID NO: 42164 - DNA, 25 bp, probe
aggactatagatcataaggcaatgc

SEQ ID NO: 42165 - DNA, 25 bp, probe
ggactatagatcataaggcaatgca

SEQ ID NO: 42166 - DNA, 25 bp, probe
agaattgtaagtgaagaagggagaa

SEQ ID NO: 42167 - DNA, 25 bp, probe
aagaattgtaagtgaagaagggaga

SEQ ID NO: 42168 - DNA, 25 bp, probe
acagcaagaaggactatagatcata

SEQ ID NO: 42169 - DNA, 25 bp, probe
tacagcaagaaggactatagatcat

SEQ ID NO: 42170 - DNA, 25 bp, probe
ccagtggttgaaagaaagaattgta

SEQ ID NO: 42171 - DNA, 25 bp, probe
agaaggactatagatcataaggcaa

SEQ ID NO: 42172 - DNA, 25 bp, probe
aagaaggactatagatcataaggca

SEQ ID NO: 42173 - DNA, 25 bp, probe
catccactcctgaacaactcattga

SEQ ID NO: 42174 - DNA, 25 bp, probe
tcatccactcctgaacaactcattg

SEQ ID NO: 42175 - DNA, 25 bp, probe
gatcatccactcctgaacaactcat

SEQ ID NO: 42176 - DNA, 25 bp, probe
gaattgtaagtgaagaagggagaaa

SEQ ID NO: 42177 - DNA, 25 bp, probe
aaagaattgtaagtgaagaagggag

SEQ ID NO: 42178 - DNA, 25 bp, probe
gaaagaattgtaagtgaagaaggga

SEQ ID NO: 42179 - DNA, 25 bp, probe
agaaagaattgtaagtgaagaaggg

SEQ ID NO: 42180 - DNA, 25 bp, probe
aagggaatagcgacttagtgttcta

SEQ ID NO: 42181 - DNA, 25 bp, probe
caagaaggactatagatcataaggc

SEQ ID NO: 42182 - DNA, 25 bp, probe
gcaagaaggactatagatcataagg

SEQ ID NO: 42183 - DNA, 25 bp, probe
cctacagcaagaaggactatagatc

SEQ ID NO: 42184 - DNA, 25 bp, probe
aaggactatagatcataaggcaatg

SEQ ID NO: 42185 - DNA, 25 bp, probe
tggttgaaagaaagaattgtaagtg

SEQ ID NO: 42186 - DNA, 25 bp, probe
gtggttgaaagaaagaattgtaagt

SEQ ID NO: 42187 - DNA, 25 bp, probe
cagtggttgaaagaaagaattgtaa

SEQ ID NO: 42188 - DNA, 25 bp, probe
gggaatagcgacttagtgttctaaa

SEQ ID NO: 42189 - DNA, 25 bp, probe
gaaggactatagatcataaggcaat

SEQ ID NO: 42190 - DNA, 25 bp, probe
cagcaagaaggactatagatcataa

SEQ ID NO: 42191 - DNA, 25 bp, probe
ggttgaaagaaagaattgtaagtga

SEQ ID NO: 42192 - DNA, 25 bp, probe
agtggttgaaagaaagaattgtaag

SEQ ID NO: 42193 - DNA, 25 bp, probe
agggaatagcgacttagtgttctaa

SEQ ID NO: 42194 - DNA, 25 bp, probe
agcaagaaggactatagatcataag

SEQ ID NO: 42195 - DNA, 25 bp, probe
ggaatagcgacttagtgttctaaat

SEQ ID NO: 42196 - DNA, 25 bp, probe
attcaggttctcccaaagatgacat

SEQ ID NO: 42197 - DNA, 25 bp, probe
caagggaatagcgacttagtgttct

SEQ ID NO: 42198 - DNA, 25 bp, probe
tacagaaaggtgttactaaccagtc

SEQ ID NO: 42199 - DNA, 25 bp, probe
cagaaaggtgttactaaccagtctt

SEQ ID NO: 42200 - DNA, 25 bp, probe
aagaaagaattgtaagtgaagaagg

SEQ ID NO: 42201 - DNA, 25 bp, probe
tccactcctgaacaactcattgaaa

SEQ ID NO: 42202 - DNA, 25 bp, probe
taaatgagattgataacatactgcg

SEQ ID NO: 42203 - DNA, 25 bp, probe
gtacagaaaggtgttactaaccagt

SEQ ID NO: 42204 - DNA, 25 bp, probe
agtacagaaaggtgttactaaccag

SEQ ID NO: 42205 - DNA, 25 bp, probe
ccactgtatctaggcaacatagtat

SEQ ID NO: 42206 - DNA, 25 bp, probe
tgacaacagttacataattcactct

SEQ ID NO: 42207 - DNA, 25 bp, probe
cagctctaatacattccaactcgta

SEQ ID NO: 42208 - DNA, 25 bp, probe
tgctgagatacatacagaattactg

SEQ ID NO: 42209 - DNA, 25 bp, probe
actgctgagatacatacagaattac

SEQ ID NO: 42210 - DNA, 25 bp, probe
acaacagttacataattcactctga

SEQ ID NO: 42211 - DNA, 25 bp, probe
ctaatacattccaactcgtatagca

SEQ ID NO: 42212 - DNA, 25 bp, probe
aatacattccaactcgtatagcatg

SEQ ID NO: 42213 - DNA, 25 bp, probe
ctgctgagatacatacagaattact

SEQ ID NO: 42214 - DNA, 25 bp, probe
gacaacagttacataattcactctg

SEQ ID NO: 42215 - DNA, 25 bp, probe
ttgacaacagttacataattcactc

SEQ ID NO: 42216 - DNA, 25 bp, probe
cactgtatctaggcaacatagtatt

SEQ ID NO: 42217 - DNA, 25 bp, probe
tctaatacattccaactcgtatagc

SEQ ID NO: 42218 - DNA, 25 bp, probe
gctctaatacattccaactcgtata

SEQ ID NO: 42219 - DNA, 25 bp, probe
caacagttacataattcactctgag

SEQ ID NO: 42220 - DNA, 25 bp, probe
ctgtatctaggcaacatagtattca

SEQ ID NO: 42221 - DNA, 25 bp, probe
actgtatctaggcaacatagtattc

SEQ ID NO: 42222 - DNA, 25 bp, probe
agctctaatacattccaactcgtat

SEQ ID NO: 42223 - DNA, 25 bp, probe
taatacattccaactcgtatagcat

SEQ ID NO: 42224 - DNA, 25 bp, probe
atactgctgagatacatacagaatt

SEQ ID NO: 42225 - DNA, 25 bp, probe
aatactgctgagatacatacagaat

SEQ ID NO: 42226 - DNA, 25 bp, probe
catgttagcccttcctccaattata

SEQ ID NO: 42227 - DNA, 25 bp, probe
aacagttacataattcactctgagt

SEQ ID NO: 42228 - DNA, 25 bp, probe
attgacaacagttacataattcact

SEQ ID NO: 42229 - DNA, 25 bp, probe
ccagctctaatacattccaactcgt

SEQ ID NO: 42230 - DNA, 25 bp, probe
atgttagcccttcctccaattataa

SEQ ID NO: 42231 - DNA, 25 bp, probe
gttagcccttcctccaattataaga

SEQ ID NO: 42232 - DNA, 25 bp, probe
tgttagcccttcctccaattataag

SEQ ID NO: 42233 - DNA, 25 bp, probe
tgtatctaggcaacatagtattcat

SEQ ID NO: 42234 - DNA, 25 bp, probe
gtatctaggcaacatagtattcatg

SEQ ID NO: 42235 - DNA, 25 bp, probe
cccactgtatctaggcaacatagta

SEQ ID NO: 42236 - DNA, 25 bp, probe
tactgctgagatacatacagaatta

SEQ ID NO: 42237 - DNA, 25 bp, probe
taatactgctgagatacatacagaa

SEQ ID NO: 42238 - DNA, 25 bp, probe
ttagcccttcctccaattataagag

SEQ ID NO: 42239 - DNA, 25 bp, probe
agaagacaattgacaacagttacat

SEQ ID NO: 42240 - DNA, 25 bp, probe
acattagaagacaattgacaacagt

SEQ ID NO: 42241 - DNA, 25 bp, probe
ataatactgctgagatacatacaga

SEQ ID NO: 42242 - DNA, 25 bp, probe
cacattagaagacaattgacaacag

SEQ ID NO: 42243 - DNA, 25 bp, probe
acacttggtaattgtactaaagcca

SEQ ID NO: 42244 - DNA, 25 bp, probe
tagaagacaattgacaacagttaca

SEQ ID NO: 42245 - DNA, 25 bp, probe
aaagggaacccagctctaatacatt

SEQ ID NO: 42246 - DNA, 25 bp, probe
gaacccagctctaatacattccaac

SEQ ID NO: 42247 - DNA, 25 bp, probe
catgactatggataaactaaacacg

SEQ ID NO: 42248 - DNA, 25 bp, probe
aattgacaacagttacataattcac

SEQ ID NO: 42249 - DNA, 25 bp, probe
gctacatctacttctaccagagagt

SEQ ID NO: 42250 - DNA, 25 bp, probe
ggctacatctacttctaccagagag

SEQ ID NO: 42251 - DNA, 25 bp, probe
ctacatctacttctaccagagagtg

SEQ ID NO: 42252 - DNA, 25 bp, probe
tcatccagatcaagaagttcacctt

SEQ ID NO: 42253 - DNA, 25 bp, probe
tacatctacttctaccagagagtgg

SEQ ID NO: 42254 - DNA, 25 bp, probe
gtcatccagatcaagaagttcacct

SEQ ID NO: 42255 - DNA, 25 bp, probe
atctacaatgaccagaaagtgtgtg

SEQ ID NO: 42256 - DNA, 25 bp, probe
gatctacaatgaccagaaagtgtgt

SEQ ID NO: 42257 - DNA, 25 bp, probe
tgatctacaatgaccagaaagtgtg

SEQ ID NO: 42258 - DNA, 25 bp, probe
gtgatctacaatgaccagaaagtgt

SEQ ID NO: 42259 - DNA, 25 bp, probe
tatcagctctttgccttcattagtc

SEQ ID NO: 42260 - DNA, 25 bp, probe
agtatcagctctttgccttcattag

SEQ ID NO: 42261 - DNA, 25 bp, probe
tggtcatccagatcaagaagttcac

SEQ ID NO: 42262 - DNA, 25 bp, probe
gggctacatctacttctaccagaga

SEQ ID NO: 42263 - DNA, 25 bp, probe
aagtatcagctctttgccttcatta

SEQ ID NO: 42264 - DNA, 25 bp, probe
gtatcagctctttgccttcattagt

SEQ ID NO: 42265 - DNA, 25 bp, probe
ctctttgccttcattagtcacatgg

SEQ ID NO: 42266 - DNA, 25 bp, probe
gaacaatagtttagaacgggctgtg

SEQ ID NO: 42267 - DNA, 25 bp, probe
acatctacttctaccagagagtggc

SEQ ID NO: 42268 - DNA, 25 bp, probe
catccagatcaagaagttcaccttc

SEQ ID NO: 42269 - DNA, 25 bp, probe
ctgtctcttccttgtccttctctgg

SEQ ID NO: 42270 - DNA, 25 bp, probe
cctgtctcttccttgtccttctctg

SEQ ID NO: 42271 - DNA, 25 bp, probe
ggtcatccagatcaagaagttcacc

SEQ ID NO: 42272 - DNA, 25 bp, probe
gctctttgccttcattagtcacatg

SEQ ID NO: 42273 - DNA, 25 bp, probe
ggtgatctacaatgaccagaaagtg

SEQ ID NO: 42274 - DNA, 25 bp, probe
atcagctctttgccttcattagtca

SEQ ID NO: 42275 - DNA, 25 bp, probe
atgggtgatctacaatgaccagaaa

SEQ ID NO: 42276 - DNA, 25 bp, probe
gacctgggctacatctacttctacc

SEQ ID NO: 42277 - DNA, 25 bp, probe
ggacctgggctacatctacttctac

SEQ ID NO: 42278 - DNA, 25 bp, probe
agctctttgccttcattagtcacat

SEQ ID NO: 42279 - DNA, 25 bp, probe
gatgggtgatctacaatgaccagaa

SEQ ID NO: 42280 - DNA, 25 bp, probe
acgaacaatagtttagaacgggctg

SEQ ID NO: 42281 - DNA, 25 bp, probe
cacgaacaatagtttagaacgggct

SEQ ID NO: 42282 - DNA, 25 bp, probe
atccagatcaagaagttcaccttcg

SEQ ID NO: 42283 - DNA, 25 bp, probe
tcaaggagggatgtgagggaaatag

SEQ ID NO: 42284 - DNA, 25 bp, probe
tctgtaaggagactttgttgcttcc

SEQ ID NO: 42285 - DNA, 25 bp, probe
gggtgatctacaatgaccagaaagt

SEQ ID NO: 42286 - DNA, 25 bp, probe
tgggtgatctacaatgaccagaaag

SEQ ID NO: 42287 - DNA, 25 bp, probe
tctttgccttcattagtcacatggg

SEQ ID NO: 42288 - DNA, 25 bp, probe
aggacctgggctacatctacttcta

SEQ ID NO: 42289 - DNA, 25 bp, probe
tgggctacatctacttctaccagag

SEQ ID NO: 42290 - DNA, 25 bp, probe
tctacaatgaccagaaagtgtgtgc

SEQ ID NO: 42291 - DNA, 25 bp, probe
aacaatagtttagaacgggctgtgg

SEQ ID NO: 42292 - DNA, 25 bp, probe
aaagtatcagctctttgccttcatt

SEQ ID NO: 42293 - DNA, 25 bp, probe
catcaactactaccgcttcctggtg

SEQ ID NO: 42294 - DNA, 25 bp, probe
acgattattattcagcagcacattc

SEQ ID NO: 42295 - DNA, 25 bp, probe
cgattattattcagcagcacattct

SEQ ID NO: 42296 - DNA, 25 bp, probe
acaattcacaccaccaataataacc

SEQ ID NO: 42297 - DNA, 25 bp, probe
aattcacaccaccaataataacctg

SEQ ID NO: 42298 - DNA, 25 bp, probe
caattcacaccaccaataataacct

SEQ ID NO: 42299 - DNA, 25 bp, probe
tacgattattattcagcagcacatt

SEQ ID NO: 42300 - DNA, 25 bp, probe
ttacgattattattcagcagcacat

SEQ ID NO: 42301 - DNA, 25 bp, probe
attacgattattattcagcagcaca

SEQ ID NO: 42302 - DNA, 25 bp, probe
ggaacaattcacaccaccaataata

SEQ ID NO: 42303 - DNA, 25 bp, probe
aacaattcacaccaccaataataac

SEQ ID NO: 42304 - DNA, 25 bp, probe
gaacaattcacaccaccaataataa

SEQ ID NO: 42305 - DNA, 25 bp, probe
gattattattcagcagcacattctg

SEQ ID NO: 42306 - DNA, 25 bp, probe
tattacgattattattcagcagcac

SEQ ID NO: 42307 - DNA, 25 bp, probe
caggaggtaaagaaggtggaataat

SEQ ID NO: 42308 - DNA, 25 bp, probe
attcacaccaccaataataacctgg

SEQ ID NO: 42309 - DNA, 25 bp, probe
gaaagatgtggttactgagatttgg

SEQ ID NO: 42310 - DNA, 25 bp, probe
ggaaagatgtggttactgagatttg

SEQ ID NO: 42311 - DNA, 25 bp, probe
tggaaagatgtggttactgagattt

SEQ ID NO: 42312 - DNA, 25 bp, probe
atggaaagatgtggttactgagatt

SEQ ID NO: 42313 - DNA, 25 bp, probe
tggaagagactgaagatatgggtta

SEQ ID NO: 42314 - DNA, 25 bp, probe
tcaggaggtaaagaaggtggaataa

SEQ ID NO: 42315 - DNA, 25 bp, probe
ggaagagactgaagatatgggttat

SEQ ID NO: 42316 - DNA, 25 bp, probe
gtaaagaaggtggaataattgacgg

SEQ ID NO: 42317 - DNA, 25 bp, probe
ggtaaagaaggtggaataattgacg

SEQ ID NO: 42318 - DNA, 25 bp, probe
aaagatgtggttactgagatttggg

SEQ ID NO: 42319 - DNA, 25 bp, probe
ggaggtaaagaaggtggaataattg

SEQ ID NO: 42320 - DNA, 25 bp, probe
aagatttcaggaggtaaagaaggtg

SEQ ID NO: 42321 - DNA, 25 bp, probe
gttactgagatttgggaagaagcat

SEQ ID NO: 42322 - DNA, 25 bp, probe
tgttaaggagttgatgtttgctttc

SEQ ID NO: 42323 - DNA, 25 bp, probe
ttgttaaggagttgatgtttgcttt

SEQ ID NO: 42324 - DNA, 25 bp, probe
tttgttaaggagttgatgtttgctt

SEQ ID NO: 42325 - DNA, 25 bp, probe
ctttgttaaggagttgatgtttgct

SEQ ID NO: 42326 - DNA, 25 bp, probe
aggaggtaaagaaggtggaataatt

SEQ ID NO: 42327 - DNA, 25 bp, probe
taaagaaggtggaataattgacggg

SEQ ID NO: 42328 - DNA, 25 bp, probe
tggtaagatttcaggaggtaaagaa

SEQ ID NO: 42329 - DNA, 25 bp, probe
ttggaagagactgaagatatgggtt

SEQ ID NO: 42330 - DNA, 25 bp, probe
ttcaggaggtaaagaaggtggaata

SEQ ID NO: 42331 - DNA, 25 bp, probe
gtggttactgagatttgggaagaag

SEQ ID NO: 42332 - DNA, 25 bp, probe
gatgtggttactgagatttgggaag

SEQ ID NO: 42333 - DNA, 25 bp, probe
taagatttcaggaggtaaagaaggt

SEQ ID NO: 42334 - DNA, 25 bp, probe
cattaaatcctgtgtgctcctcttt

SEQ ID NO: 42335 - DNA, 25 bp, probe
gtaagatttcaggaggtaaagaagg

SEQ ID NO: 42336 - DNA, 25 bp, probe
ggtaagatttcaggaggtaaagaag

SEQ ID NO: 42337 - DNA, 25 bp, probe
aggtaaagaaggtggaataattgac

SEQ ID NO: 42338 - DNA, 25 bp, probe
ccactattgattgtattatgctgct

SEQ ID NO: 42339 - DNA, 25 bp, probe
tccactattgattgtattatgctgc

SEQ ID NO: 42340 - DNA, 25 bp, probe
attgattgtattatgctgctcactg

SEQ ID NO: 42341 - DNA, 25 bp, probe
tgattgtattatgctgctcactgat

SEQ ID NO: 42342 - DNA, 25 bp, probe
ttgattgtattatgctgctcactga

SEQ ID NO: 42343 - DNA, 25 bp, probe
gattgtattatgctgctcactgatc

SEQ ID NO: 42344 - DNA, 25 bp, probe
cactattgattgtattatgctgctc

SEQ ID NO: 42345 - DNA, 25 bp, probe
attgtattatgctgctcactgatcc

SEQ ID NO: 42346 - DNA, 25 bp, probe
tgtccactattgattgtattatgct

SEQ ID NO: 42347 - DNA, 25 bp, probe
tattatgctgctcactgatccttct

SEQ ID NO: 42348 - DNA, 25 bp, probe
gtattatgctgctcactgatccttc

SEQ ID NO: 42349 - DNA, 25 bp, probe
gtccactattgattgtattatgctg

SEQ ID NO: 42350 - DNA, 25 bp, probe
gtgtccactattgattgtattatgc

SEQ ID NO: 42351 - DNA, 25 bp, probe
tattgattgtattatgctgctcact

SEQ ID NO: 42352 - DNA, 25 bp, probe
actattgattgtattatgctgctca

SEQ ID NO: 42353 - DNA, 25 bp, probe
ctattgattgtattatgctgctcac

SEQ ID NO: 42354 - DNA, 25 bp, probe
tgtattatgctgctcactgatcctt

SEQ ID NO: 42355 - DNA, 25 bp, probe
ttgtattatgctgctcactgatcct

SEQ ID NO: 42356 - DNA, 25 bp, probe
ccacttattgataccttaccatcta

SEQ ID NO: 42357 - DNA, 25 bp, probe
aaacccacttattgataccttacca

SEQ ID NO: 42358 - DNA, 25 bp, probe
acccacttattgataccttaccatc

SEQ ID NO: 42359 - DNA, 25 bp, probe
aacccacttattgataccttaccat

SEQ ID NO: 42360 - DNA, 25 bp, probe
cccacttattgataccttaccatct

SEQ ID NO: 42361 - DNA, 25 bp, probe
attatgctgctcactgatccttctg

SEQ ID NO: 42362 - DNA, 25 bp, probe
aagagtgtccactattgattgtatt

SEQ ID NO: 42363 - DNA, 25 bp, probe
actgaaataaggtgcttactcaaag

SEQ ID NO: 42364 - DNA, 25 bp, probe
catgaccacccattgattgtattat

SEQ ID NO: 42365 - DNA, 25 bp, probe
tgaaataaggtgcttactcaaagag

SEQ ID NO: 42366 - DNA, 25 bp, probe
ctgaaataaggtgcttactcaaaga

SEQ ID NO: 42367 - DNA, 25 bp, probe
ccacccattgattgtattataacca

SEQ ID NO: 42368 - DNA, 25 bp, probe
accacccattgattgtattataacc

SEQ ID NO: 42369 - DNA, 25 bp, probe
aactgaaataaggtgcttactcaaa

SEQ ID NO: 42370 - DNA, 25 bp, probe
atgaccacccattgattgtattata

SEQ ID NO: 42371 - DNA, 25 bp, probe
agagtgtccactattgattgtatta

SEQ ID NO: 42372 - DNA, 25 bp, probe
gtattataaccacttacagttgctt

SEQ ID NO: 42373 - DNA, 25 bp, probe
gtatattaggccaagtgcaattgac

SEQ ID NO: 42374 - DNA, 25 bp, probe
ttgtatattaggccaagtgcaattg

SEQ ID NO: 42375 - DNA, 25 bp, probe
tgtatattaggccaagtgcaattga

SEQ ID NO: 42376 - DNA, 25 bp, probe
tgtattataaccacttacagttgct

SEQ ID NO: 42377 - DNA, 25 bp, probe
gtaactgaaataaggtgcttactca

SEQ ID NO: 42378 - DNA, 25 bp, probe
tgtaactgaaataaggtgcttactc

SEQ ID NO: 42379 - DNA, 25 bp, probe
taactgaaataaggtgcttactcaa

SEQ ID NO: 42380 - DNA, 25 bp, probe
tatattaggccaagtgcaattgact

SEQ ID NO: 42381 - DNA, 25 bp, probe
caaagagtgtccactattgattgta

SEQ ID NO: 42382 - DNA, 25 bp, probe
gataccatagtgaacgaagaggaag

SEQ ID NO: 42383 - DNA, 25 bp, probe
agataccatagtgaacgaagaggaa

SEQ ID NO: 42384 - DNA, 25 bp, probe
cagataccatagtgaacgaagagga

SEQ ID NO: 42385 - DNA, 25 bp, probe
ataccatagtgaacgaagaggaagg

SEQ ID NO: 42386 - DNA, 25 bp, probe
agcagataccatagtgaacgaagag

SEQ ID NO: 42387 - DNA, 25 bp, probe
atcagcagataccatagtgaacgaa

SEQ ID NO: 42388 - DNA, 25 bp, probe
cagcagataccatagtgaacgaaga

SEQ ID NO: 42389 - DNA, 25 bp, probe
tcagcagataccatagtgaacgaag

SEQ ID NO: 42390 - DNA, 25 bp, probe
gcagataccatagtgaacgaagagg

SEQ ID NO: 42391 - DNA, 25 bp, probe
tcgctaaaggaaatgtaagaggttt

SEQ ID NO: 42392 - DNA, 25 bp, probe
aacataatgtcttcagcctcataat

SEQ ID NO: 42393 - DNA, 25 bp, probe
gatcagcagataccatagtgaacga

SEQ ID NO: 42394 - DNA, 25 bp, probe
tttgaaatgtgctggaagacttaaa

SEQ ID NO: 42395 - DNA, 25 bp, probe
ttgaaatgtgctggaagacttaaat

SEQ ID NO: 42396 - DNA, 25 bp, probe
ctgacttcgctaaaggaaatgtaag

SEQ ID NO: 42397 - DNA, 25 bp, probe
tgattctggagttctttgaaatgtg

SEQ ID NO: 42398 - DNA, 25 bp, probe
gtgattctggagttctttgaaatgt

SEQ ID NO: 42399 - DNA, 25 bp, probe
gacttcgctaaaggaaatgtaagag

SEQ ID NO: 42400 - DNA, 25 bp, probe
tgacttcgctaaaggaaatgtaaga

SEQ ID NO: 42401 - DNA, 25 bp, probe
tctgacttcgctaaaggaaatgtaa

SEQ ID NO: 42402 - DNA, 25 bp, probe
ttctgacttcgctaaaggaaatgta

SEQ ID NO: 42403 - DNA, 25 bp, probe
cgttggttgttaatttggttgagat

SEQ ID NO: 42404 - DNA, 25 bp, probe
tgaaatgtgctggaagacttaaatt

SEQ ID NO: 42405 - DNA, 25 bp, probe
ctttgaaatgtgctggaagacttaa

SEQ ID NO: 42406 - DNA, 25 bp, probe
ttcgctaaaggaaatgtaagaggtt

SEQ ID NO: 42407 - DNA, 25 bp, probe
agtgattctggagttctttgaaatg

SEQ ID NO: 42408 - DNA, 25 bp, probe
ttaattcggaacacatgatccaaca

SEQ ID NO: 42409 - DNA, 25 bp, probe
cttcgctaaaggaaatgtaagaggt

SEQ ID NO: 42410 - DNA, 25 bp, probe
acttcgctaaaggaaatgtaagagg

SEQ ID NO: 42411 - DNA, 25 bp, probe
ctaacctttatcccacctttgacac

SEQ ID NO: 42412 - DNA, 25 bp, probe
gattctggagttctttgaaatgtgc

SEQ ID NO: 42413 - DNA, 25 bp, probe
atcttgtgtttcttcaaccttcaaa

SEQ ID NO: 42414 - DNA, 25 bp, probe
attctggagttctttgaaatgtgct

SEQ ID NO: 42415 - DNA, 25 bp, probe
aacctttatcccacctttgacacta

SEQ ID NO: 42416 - DNA, 25 bp, probe
taacctttatcccacctttgacact

SEQ ID NO: 42417 - DNA, 25 bp, probe
ggaacacatgatccaacagactatg

SEQ ID NO: 42418 - DNA, 25 bp, probe
taattcggaacacatgatccaacag

SEQ ID NO: 42419 - DNA, 25 bp, probe
aagtgattctggagttctttgaaat

SEQ ID NO: 42420 - DNA, 25 bp, probe
gccaatcatagagggtactgtaaag

SEQ ID NO: 42421 - DNA, 25 bp, probe
gttctgacttcgctaaaggaaatgt

SEQ ID NO: 42422 - DNA, 25 bp, probe
taaatgccaatcatagagggtactg

SEQ ID NO: 42423 - DNA, 25 bp, probe
acataatgtcttcagcctcataata

SEQ ID NO: 42424 - DNA, 25 bp, probe
ttaaatgccaatcatagagggtact

SEQ ID NO: 42425 - DNA, 25 bp, probe
atatgtaatgttcacttgagtggaa

SEQ ID NO: 42426 - DNA, 25 bp, probe
ggtcttcctactgctctactacttc

SEQ ID NO: 42427 - DNA, 25 bp, probe
gtcttcctactgctctactacttcg

SEQ ID NO: 42428 - DNA, 25 bp, probe
tggtcttcctactgctctactactt

SEQ ID NO: 42429 - DNA, 25 bp, probe
ctggtcttcctactgctctactact

SEQ ID NO: 42430 - DNA, 25 bp, probe
tcttcctactgctctactacttcgg

SEQ ID NO: 42431 - DNA, 25 bp, probe
tgtaatttattgttgcgttcctctg

SEQ ID NO: 42432 - DNA, 25 bp, probe
tgatgtaatttattgttgcgttcct

SEQ ID NO: 42433 - DNA, 25 bp, probe
gtaatttattgttgcgttcctctgg

SEQ ID NO: 42434 - DNA, 25 bp, probe
atgtaatttattgttgcgttcctct

SEQ ID NO: 42435 - DNA, 25 bp, probe
gatgtaatttattgttgcgttcctc

SEQ ID NO: 42436 - DNA, 25 bp, probe
atgatgtaatttattgttgcgttcc

SEQ ID NO: 42437 - DNA, 25 bp, probe
catcatcttcctctccatgtgctac

SEQ ID NO: 42438 - DNA, 25 bp, probe
gctggtcttcctactgctctactac

SEQ ID NO: 42439 - DNA, 25 bp, probe
taatttattgttgcgttcctctgga

SEQ ID NO: 42440 - DNA, 25 bp, probe
atcatcttcctctccatgtgctaca

SEQ ID NO: 42441 - DNA, 25 bp, probe
cttcctactgctctactacttcggc

SEQ ID NO: 42442 - DNA, 25 bp, probe
aatgatgtaatttattgttgcgttc

SEQ ID NO: 42443 - DNA, 25 bp, probe
catcttcctctccatgtgctacaac

SEQ ID NO: 42444 - DNA, 25 bp, probe
tcatcttcctctccatgtgctacaa

SEQ ID NO: 42445 - DNA, 25 bp, probe
ccatcatcttcctctccatgtgcta

SEQ ID NO: 42446 - DNA, 25 bp, probe
ctctggaagctgtgactggaataaa

SEQ ID NO: 42447 - DNA, 25 bp, probe
cagccggagtttatttaatgatgta

SEQ ID NO: 42448 - DNA, 25 bp, probe
tctggaagctgtgactggaataaac

SEQ ID NO: 42449 - DNA, 25 bp, probe
cctctggaagctgtgactggaataa

SEQ ID NO: 42450 - DNA, 25 bp, probe
agccggagtttatttaatgatgtaa

SEQ ID NO: 42451 - DNA, 25 bp, probe
ccagccggagtttatttaatgatgt

SEQ ID NO: 42452 - DNA, 25 bp, probe
taatgatgtaatttattgttgcgtt

SEQ ID NO: 42453 - DNA, 25 bp, probe
ttaatgatgtaatttattgttgcgt

SEQ ID NO: 42454 - DNA, 25 bp, probe
cgctggtcttcctactgctctacta

SEQ ID NO: 42455 - DNA, 25 bp, probe
atcttcctctccatgtgctacaacg

SEQ ID NO: 42456 - DNA, 25 bp, probe
ctgcgtcatcgtttgctatgtctac

SEQ ID NO: 42457 - DNA, 25 bp, probe
tctccatgtgctacaacgtctactc

SEQ ID NO: 42458 - DNA, 25 bp, probe
ctctccatgtgctacaacgtctact

SEQ ID NO: 42459 - DNA, 25 bp, probe
gccggagtttatttaatgatgtaat

SEQ ID NO: 42460 - DNA, 25 bp, probe
ctatgtctacgaacgcctcaacatg

SEQ ID NO: 42461 - DNA, 25 bp, probe
ctggaagctgtgactggaataaacc

SEQ ID NO: 42462 - DNA, 25 bp, probe
tccagccggagtttatttaatgatg

SEQ ID NO: 42463 - DNA, 25 bp, probe
gtccagccggagtttatttaatgat

SEQ ID NO: 42464 - DNA, 25 bp, probe
tttaatgatgtaatttattgttgcg

SEQ ID NO: 42465 - DNA, 25 bp, probe
aatttattgttgcgttcctctggaa

SEQ ID NO: 42466 - DNA, 25 bp, probe
tttgctatgtctacgaacgcctcaa

SEQ ID NO: 42467 - DNA, 25 bp, probe
atttattgttgcgttcctctggaag

SEQ ID NO: 42468 - DNA, 25 bp, probe
ctactgctctactacttcggcatgg

SEQ ID NO: 42469 - DNA, 25 bp, probe
cctactgctctactacttcggcatg

SEQ ID NO: 42470 - DNA, 25 bp, probe
cctgctcatctacctcaccatgtac

SEQ ID NO: 42471 - DNA, 25 bp, probe
ctgctcatctacctcaccatgtacg

SEQ ID NO: 42472 - DNA, 25 bp, probe
acctgctcatctacctcaccatgta

SEQ ID NO: 42473 - DNA, 25 bp, probe
ctgtggtctttgccctaatcttcct

SEQ ID NO: 42474 - DNA, 25 bp, probe
tgtggtctttgccctaatcttcctg

SEQ ID NO: 42475 - DNA, 25 bp, probe
cctgtggtctttgccctaatcttcc

SEQ ID NO: 42476 - DNA, 25 bp, probe
ctgatgcccagaacatttcactgga

SEQ ID NO: 42477 - DNA, 25 bp, probe
cctcagtgtagtggaagtgataatc

SEQ ID NO: 42478 - DNA, 25 bp, probe
gagtgacttattctaagcctcatct

SEQ ID NO: 42479 - DNA, 25 bp, probe
ggagtgacttattctaagcctcatc

SEQ ID NO: 42480 - DNA, 25 bp, probe
tggagtgacttattctaagcctcat

SEQ ID NO: 42481 - DNA, 25 bp, probe
cagtgtagtggaagtgataatcctt

SEQ ID NO: 42482 - DNA, 25 bp, probe
ctcagtgtagtggaagtgataatcc

SEQ ID NO: 42483 - DNA, 25 bp, probe
tcagtgtagtggaagtgataatcct

SEQ ID NO: 42484 - DNA, 25 bp, probe
agtgacttattctaagcctcatcta

SEQ ID NO: 42485 - DNA, 25 bp, probe
ctggagtgacttattctaagcctca

SEQ ID NO: 42486 - DNA, 25 bp, probe
actggagtgacttattctaagcctc

SEQ ID NO: 42487 - DNA, 25 bp, probe
gcctcagtgtagtggaagtgataat

SEQ ID NO: 42488 - DNA, 25 bp, probe
agtgtagtggaagtgataatcctta

SEQ ID NO: 42489 - DNA, 25 bp, probe
gacttattctaagcctcatctatcc

SEQ ID NO: 42490 - DNA, 25 bp, probe
ttcatattctctgtagcctttgtca

SEQ ID NO: 42491 - DNA, 25 bp, probe
taccaagtgctacagaaaccataag

SEQ ID NO: 42492 - DNA, 25 bp, probe
tcttcatattctctgtagcctttgt

SEQ ID NO: 42493 - DNA, 25 bp, probe
tcatattctctgtagcctttgtcaa

SEQ ID NO: 42494 - DNA, 25 bp, probe
ccaagtgctacagaaaccataagat

SEQ ID NO: 42495 - DNA, 25 bp, probe
cttcatattctctgtagcctttgtc

SEQ ID NO: 42496 - DNA, 25 bp, probe
atattctctgtagcctttgtcaagt

SEQ ID NO: 42497 - DNA, 25 bp, probe
tattctctgtagcctttgtcaagtg

SEQ ID NO: 42498 - DNA, 25 bp, probe
catattctctgtagcctttgtcaag

SEQ ID NO: 42499 - DNA, 25 bp, probe
gtgacttattctaagcctcatctat

SEQ ID NO: 42500 - DNA, 25 bp, probe
gtgtagtggaagtgataatccttaa

SEQ ID NO: 42501 - DNA, 25 bp, probe
ttgttgagtaccaagtgctacagaa

SEQ ID NO: 42502 - DNA, 25 bp, probe
caagtgctacagaaaccataagata

SEQ ID NO: 42503 - DNA, 25 bp, probe
agtgaggaaatcagtggttaaagaa

SEQ ID NO: 42504 - DNA, 25 bp, probe
aagtgaggaaatcagtggttaaaga

SEQ ID NO: 42505 - DNA, 25 bp, probe
caagtgaggaaatcagtggttaaag

SEQ ID NO: 42506 - DNA, 25 bp, probe
tcaagtgaggaaatcagtggttaaa

SEQ ID NO: 42507 - DNA, 25 bp, probe
tgacttattctaagcctcatctatc

SEQ ID NO: 42508 - DNA, 25 bp, probe
atcttcatattctctgtagcctttg

SEQ ID NO: 42509 - DNA, 25 bp, probe
gtgaggaaatcagtggttaaagaat

SEQ ID NO: 42510 - DNA, 25 bp, probe
gtcaagtgaggaaatcagtggttaa

SEQ ID NO: 42511 - DNA, 25 bp, probe
gtaccaagtgctacagaaaccataa

SEQ ID NO: 42512 - DNA, 25 bp, probe
accaagtgctacagaaaccataaga

SEQ ID NO: 42513 - DNA, 25 bp, probe
cactggagtgacttattctaagcct

SEQ ID NO: 42514 - DNA, 25 bp, probe
agtgctacagaaaccataagataaa

SEQ ID NO: 42515 - DNA, 25 bp, probe
aagtgctacagaaaccataagataa

SEQ ID NO: 42516 - DNA, 25 bp, probe
gaaatcttcatattctctgtagcct

SEQ ID NO: 42517 - DNA, 25 bp, probe
agtagtaaagcctcaaggacatctg

SEQ ID NO: 42518 - DNA, 25 bp, probe
tctgcctgtcacaatatattctcaa

SEQ ID NO: 42519 - DNA, 25 bp, probe
tgaggaaatcagtggttaaagaatt

SEQ ID NO: 42520 - DNA, 25 bp, probe
agtaccaagtgctacagaaaccata

SEQ ID NO: 42521 - DNA, 25 bp, probe
ctgggaaactgtgaaagtcagaaag

SEQ ID NO: 42522 - DNA, 25 bp, probe
tgggaaactgtgaaagtcagaaagg

SEQ ID NO: 42523 - DNA, 25 bp, probe
cctgggaaactgtgaaagtcagaaa

SEQ ID NO: 42524 - DNA, 25 bp, probe
gggaaactgtgaaagtcagaaaggc

SEQ ID NO: 42525 - DNA, 25 bp, probe
ctagaactcttgcccctcctcatag

SEQ ID NO: 42526 - DNA, 25 bp, probe
tagaactcttgcccctcctcataga

SEQ ID NO: 42527 - DNA, 25 bp, probe
ggatcagcttctgctattaccgacc

SEQ ID NO: 42528 - DNA, 25 bp, probe
aaactgtgaaagtcagaaaggccag

SEQ ID NO: 42529 - DNA, 25 bp, probe
gaaactgtgaaagtcagaaaggcca

SEQ ID NO: 42530 - DNA, 25 bp, probe
cttctgctattaccgaccccacttc

SEQ ID NO: 42531 - DNA, 25 bp, probe
cctagaactcttgcccctcctcata

SEQ ID NO: 42532 - DNA, 25 bp, probe
ggaaactgtgaaagtcagaaaggcc

SEQ ID NO: 42533 - DNA, 25 bp, probe
tctgctattaccgaccccacttcat

SEQ ID NO: 42534 - DNA, 25 bp, probe
gatcagcttctgctattaccgaccc

SEQ ID NO: 42535 - DNA, 25 bp, probe
gggatcagcttctgctattaccgac

SEQ ID NO: 42536 - DNA, 25 bp, probe
agaactcttgcccctcctcatagac

SEQ ID NO: 42537 - DNA, 25 bp, probe
ctattaccgaccccacttcatgctg

SEQ ID NO: 42538 - DNA, 25 bp, probe
ctgctattaccgaccccacttcatg

SEQ ID NO: 42539 - DNA, 25 bp, probe
ccaaagtcatcaagaaagtcatcat

SEQ ID NO: 42540 - DNA, 25 bp, probe
aaagtcatcaagaaagtcatcatcc

SEQ ID NO: 42541 - DNA, 25 bp, probe
aagtcatcaagaaagtcatcatccc

SEQ ID NO: 42542 - DNA, 25 bp, probe
caaagtcatcaagaaagtcatcatc

SEQ ID NO: 42543 - DNA, 25 bp, probe
gccaaagtcatcaagaaagtcatca

SEQ ID NO: 42544 - DNA, 25 bp, probe
caaaggtgtggtgacagataaattc

SEQ ID NO: 42545 - DNA, 25 bp, probe
atcaaaggtgtggtgacagataaat

SEQ ID NO: 42546 - DNA, 25 bp, probe
tcaaaggtgtggtgacagataaatt

SEQ ID NO: 42547 - DNA, 25 bp, probe
ctacgccaaagtcatcaagaaagtc

SEQ ID NO: 42548 - DNA, 25 bp, probe
catcaaaggtgtggtgacagataaa

SEQ ID NO: 42549 - DNA, 25 bp, probe
aaaggtgtggtgacagataaattcg

SEQ ID NO: 42550 - DNA, 25 bp, probe
cgccaaagtcatcaagaaagtcatc

SEQ ID NO: 42551 - DNA, 25 bp, probe
tacgccaaagtcatcaagaaagtca

SEQ ID NO: 42552 - DNA, 25 bp, probe
acgccaaagtcatcaagaaagtcat

SEQ ID NO: 42553 - DNA, 25 bp, probe
cgctgccattttattaaagtgtttt

SEQ ID NO: 42554 - DNA, 25 bp, probe
ccgctgccattttattaaagtgttt

SEQ ID NO: 42555 - DNA, 25 bp, probe
aaggtgtggtgacagataaattcgg

SEQ ID NO: 42556 - DNA, 25 bp, probe
gatgggacccaagaactttattcat

SEQ ID NO: 42557 - DNA, 25 bp, probe
gctgccattttattaaagtgttttg

SEQ ID NO: 42558 - DNA, 25 bp, probe
gcatcaaaggtgtggtgacagataa

SEQ ID NO: 42559 - DNA, 25 bp, probe
atgggacccaagaactttattcatg

SEQ ID NO: 42560 - DNA, 25 bp, probe
agataaattcggcaagccagtcaaa

SEQ ID NO: 42561 - DNA, 25 bp, probe
gctacgccaaagtcatcaagaaagt

SEQ ID NO: 42562 - DNA, 25 bp, probe
tgtggtgacagataaattcggcaag

SEQ ID NO: 42563 - DNA, 25 bp, probe
agtcatcaagaaagtcatcatcccc

SEQ ID NO: 42564 - DNA, 25 bp, probe
caaagccgctgccattttattaaag

SEQ ID NO: 42565 - DNA, 25 bp, probe
aaagccgctgccattttattaaagt

SEQ ID NO: 42566 - DNA, 25 bp, probe
gtgtggtgacagataaattcggcaa

SEQ ID NO: 42567 - DNA, 25 bp, probe
cagataaattcggcaagccagtcaa

SEQ ID NO: 42568 - DNA, 25 bp, probe
ggatgggacccaagaactttattca

SEQ ID NO: 42569 - DNA, 25 bp, probe
ggtatccacattgtcattgcccaag

SEQ ID NO: 42570 - DNA, 25 bp, probe
acaaagccgctgccattttattaaa

SEQ ID NO: 42571 - DNA, 25 bp, probe
ctgccattttattaaagtgttttga

SEQ ID NO: 42572 - DNA, 25 bp, probe
tgggacccaagaactttattcatgg

SEQ ID NO: 42573 - DNA, 25 bp, probe
aagccgctgccattttattaaagtg

SEQ ID NO: 42574 - DNA, 25 bp, probe
gccgctgccattttattaaagtgtt

SEQ ID NO: 42575 - DNA, 25 bp, probe
aggtatccacattgtcattgcccaa

SEQ ID NO: 42576 - DNA, 25 bp, probe
gataaattcggcaagccagtcaaaa

SEQ ID NO: 42577 - DNA, 25 bp, probe
gtggtgacagataaattcggcaagc

SEQ ID NO: 42578 - DNA, 25 bp, probe
gtcatcaagaaagtcatcatccccg

SEQ ID NO: 42579 - DNA, 25 bp, probe
cacaaagccgctgccattttattaa

SEQ ID NO: 42580 - DNA, 25 bp, probe
gtatccacattgtcattgcccaagc

SEQ ID NO: 42581 - DNA, 25 bp, probe
gtgacagataaattcggcaagccag

SEQ ID NO: 42582 - DNA, 25 bp, probe
tgtggacttcattctgcaacctctg

SEQ ID NO: 42583 - DNA, 25 bp, probe
atgtcaattaactctgatgatgtcg

SEQ ID NO: 42584 - DNA, 25 bp, probe
ctctacatcttgttcaatcctcact

SEQ ID NO: 42585 - DNA, 25 bp, probe
ccttctctacatcttgttcaatcct

SEQ ID NO: 42586 - DNA, 25 bp, probe
tctctacatcttgttcaatcctcac

SEQ ID NO: 42587 - DNA, 25 bp, probe
tctacatcttgttcaatcctcactt

SEQ ID NO: 42588 - DNA, 25 bp, probe
ttctctacatcttgttcaatcctca

SEQ ID NO: 42589 - DNA, 25 bp, probe
cttctctacatcttgttcaatcctc

SEQ ID NO: 42590 - DNA, 25 bp, probe
gcttgatgtcaattaactctgatga

SEQ ID NO: 42591 - DNA, 25 bp, probe
tgatgtcaattaactctgatgatgt

SEQ ID NO: 42592 - DNA, 25 bp, probe
gatgtcaattaactctgatgatgtc

SEQ ID NO: 42593 - DNA, 25 bp, probe
agcttgatgtcaattaactctgatg

SEQ ID NO: 42594 - DNA, 25 bp, probe
tgtcaattaactctgatgatgtcga

SEQ ID NO: 42595 - DNA, 25 bp, probe
atatttgggactgctctatggtaaa

SEQ ID NO: 42596 - DNA, 25 bp, probe
gtcaattaactctgatgatgtcgaa

SEQ ID NO: 42597 - DNA, 25 bp, probe
gctttcttgtccttctcctctttaa

SEQ ID NO: 42598 - DNA, 25 bp, probe
taagtttatccttctggtggtagtc

SEQ ID NO: 42599 - DNA, 25 bp, probe
tgtccttctcctctttaataaacct

SEQ ID NO: 42600 - DNA, 25 bp, probe
ttaagtttatccttctggtggtagt

SEQ ID NO: 42601 - DNA, 25 bp, probe
ctttcttgtccttctcctctttaat

SEQ ID NO: 42602 - DNA, 25 bp, probe
ttgtccttctcctctttaataaacc

SEQ ID NO: 42603 - DNA, 25 bp, probe
ttgatgtcaattaactctgatgatg

SEQ ID NO: 42604 - DNA, 25 bp, probe
gtccttctcctctttaataaacctt

SEQ ID NO: 42605 - DNA, 25 bp, probe
aagtttatccttctggtggtagtcc

SEQ ID NO: 42606 - DNA, 25 bp, probe
cttgatgtcaattaactctgatgat

SEQ ID NO: 42607 - DNA, 25 bp, probe
catcttgttcaatcctcactttaag

SEQ ID NO: 42608 - DNA, 25 bp, probe
cccttctctacatcttgttcaatcc

SEQ ID NO: 42609 - DNA, 25 bp, probe
ctacatcttgttcaatcctcacttt

SEQ ID NO: 42610 - DNA, 25 bp, probe
gaatatttgggactgctctatggta

SEQ ID NO: 42611 - DNA, 25 bp, probe
ggctttcttgtccttctcctcttta

SEQ ID NO: 42612 - DNA, 25 bp, probe
aatatttgggactgctctatggtaa

SEQ ID NO: 42613 - DNA, 25 bp, probe
attaagtttatccttctggtggtag

SEQ ID NO: 42614 - DNA, 25 bp, probe
acatcttgttcaatcctcactttaa

SEQ ID NO: 42615 - DNA, 25 bp, probe
ctctcatcttgctcaattccctttg

SEQ ID NO: 42616 - DNA, 25 bp, probe
accttacatttatcagtcctgaagt

SEQ ID NO: 42617 - DNA, 25 bp, probe
atcttgttcaatcctcactttaagg

SEQ ID NO: 42618 - DNA, 25 bp, probe
aattaagtttatccttctggtggta

SEQ ID NO: 42619 - DNA, 25 bp, probe
cttgtccttctcctctttaataaac

SEQ ID NO: 42620 - DNA, 25 bp, probe
agaatatttgggactgctctatggt

SEQ ID NO: 42621 - DNA, 25 bp, probe
ttcttgtccttctcctctttaataa

SEQ ID NO: 42622 - DNA, 25 bp, probe
tttcttgtccttctcctctttaata

SEQ ID NO: 42623 - DNA, 25 bp, probe
gagaatatttgggactgctctatgg

SEQ ID NO: 42624 - DNA, 25 bp, probe
ggagaatatttgggactgctctatg

SEQ ID NO: 42625 - DNA, 25 bp, probe
aaccttacatttatcagtcctgaag

SEQ ID NO: 42626 - DNA, 25 bp, probe
tcttgtccttctcctctttaataaa

SEQ ID NO: 42627 - DNA, 25 bp, probe
tactgtatgctgtcattgtaccatt

SEQ ID NO: 42628 - DNA, 25 bp, probe
ctctgtactgtatgctgtcattgta

SEQ ID NO: 42629 - DNA, 25 bp, probe
gtctctgtactgtatgctgtcattg

SEQ ID NO: 42630 - DNA, 25 bp, probe
actgtatgctgtcattgtaccattg

SEQ ID NO: 42631 - DNA, 25 bp, probe
tctctgtactgtatgctgtcattgt

SEQ ID NO: 42632 - DNA, 25 bp, probe
aacaagttggtctctgtactgtatg

SEQ ID NO: 42633 - DNA, 25 bp, probe
caacaagttggtctctgtactgtat

SEQ ID NO: 42634 - DNA, 25 bp, probe
ggtctctgtactgtatgctgtcatt

SEQ ID NO: 42635 - DNA, 25 bp, probe
gtatgctgtcattgtaccattgctc

SEQ ID NO: 42636 - DNA, 25 bp, probe
cccaagaaaggtagcagaaatgtat

SEQ ID NO: 42637 - DNA, 25 bp, probe
tatgctgtcattgtaccattgctca

SEQ ID NO: 42638 - DNA, 25 bp, probe
ctgtatgctgtcattgtaccattgc

SEQ ID NO: 42639 - DNA, 25 bp, probe
aagttggtctctgtactgtatgctg

SEQ ID NO: 42640 - DNA, 25 bp, probe
caagttggtctctgtactgtatgct

SEQ ID NO: 42641 - DNA, 25 bp, probe
taccattgctcaatcccatcattta

SEQ ID NO: 42642 - DNA, 25 bp, probe
ccaagaaaggtagcagaaatgtata

SEQ ID NO: 42643 - DNA, 25 bp, probe
cattgctcaatcccatcatttactg

SEQ ID NO: 42644 - DNA, 25 bp, probe
tgtatgctgtcattgtaccattgct

SEQ ID NO: 42645 - DNA, 25 bp, probe
gttggtctctgtactgtatgctgtc

SEQ ID NO: 42646 - DNA, 25 bp, probe
gcctctcatttcaatgttgtgataa

SEQ ID NO: 42647 - DNA, 25 bp, probe
ccattgctcaatcccatcatttact

SEQ ID NO: 42648 - DNA, 25 bp, probe
acaagttggtctctgtactgtatgc

SEQ ID NO: 42649 - DNA, 25 bp, probe
tgcctctcatttcaatgttgtgata

SEQ ID NO: 42650 - DNA, 25 bp, probe
ctatcttctccacaacccagtcatt

SEQ ID NO: 42651 - DNA, 25 bp, probe
ttggtctctgtactgtatgctgtca

SEQ ID NO: 42652 - DNA, 25 bp, probe
accattgctcaatcccatcatttac

SEQ ID NO: 42653 - DNA, 25 bp, probe
tggtctctgtactgtatgctgtcat

SEQ ID NO: 42654 - DNA, 25 bp, probe
tctgtactgtatgctgtcattgtac

SEQ ID NO: 42655 - DNA, 25 bp, probe
gtaccattgctcaatcccatcattt

SEQ ID NO: 42656 - DNA, 25 bp, probe
gtactgtatgctgtcattgtaccat

SEQ ID NO: 42657 - DNA, 25 bp, probe
attgctcaatcccatcatttactgc

SEQ ID NO: 42658 - DNA, 25 bp, probe
agttggtctctgtactgtatgctgt

SEQ ID NO: 42659 - DNA, 25 bp, probe
ctgtactgtatgctgtcattgtacc

SEQ ID NO: 42660 - DNA, 25 bp, probe
caagaaaggtagcagaaatgtatag

SEQ ID NO: 42661 - DNA, 25 bp, probe
atgctgtcattgtaccattgctcaa

SEQ ID NO: 42662 - DNA, 25 bp, probe
tatcttctccacaacccagtcattg

SEQ ID NO: 42663 - DNA, 25 bp, probe
ctgtcattgtaccattgctcaatcc

SEQ ID NO: 42664 - DNA, 25 bp, probe
tcaacctctcatgcactgatatgtc

SEQ ID NO: 42665 - DNA, 25 bp, probe
ctcaacctctcatgcactgatatgt

SEQ ID NO: 42666 - DNA, 25 bp, probe
ctgtgatgtctctccattgctcaac

SEQ ID NO: 42667 - DNA, 25 bp, probe
gtgcctctcatttcaatgttgtgat

SEQ ID NO: 42668 - DNA, 25 bp, probe
tgtactgtatgctgtcattgtacca

SEQ ID NO: 42669 - DNA, 25 bp, probe
tctgtgatgtctctccattgctcaa

SEQ ID NO: 42670 - DNA, 25 bp, probe
ttctgtgatgtctctccattgctca

SEQ ID NO: 42671 - DNA, 25 bp, probe
tatatacctggaatctgttgttggc

SEQ ID NO: 42672 - DNA, 25 bp, probe
atatacctggaatctgttgttggct

SEQ ID NO: 42673 - DNA, 25 bp, probe
tatacctggaatctgttgttggctt

SEQ ID NO: 42674 - DNA, 25 bp, probe
ttatatacctggaatctgttgttgg

SEQ ID NO: 42675 - DNA, 25 bp, probe
tactggcaacgatgtcaaatgtaat

SEQ ID NO: 42676 - DNA, 25 bp, probe
atactggcaacgatgtcaaatgtaa

SEQ ID NO: 42677 - DNA, 25 bp, probe
atacctggaatctgttgttggcttc

SEQ ID NO: 42678 - DNA, 25 bp, probe
tcatcctccttgttggtctactcag

SEQ ID NO: 42679 - DNA, 25 bp, probe
ctcatcctccttgttggtctactca

SEQ ID NO: 42680 - DNA, 25 bp, probe
tggcaacgatgtcaaatgtaattta

SEQ ID NO: 42681 - DNA, 25 bp, probe
actggcaacgatgtcaaatgtaatt

SEQ ID NO: 42682 - DNA, 25 bp, probe
catactggcaacgatgtcaaatgta

SEQ ID NO: 42683 - DNA, 25 bp, probe
ctggcaacgatgtcaaatgtaattt

SEQ ID NO: 42684 - DNA, 25 bp, probe
ggcaacgatgtcaaatgtaatttat

SEQ ID NO: 42685 - DNA, 25 bp, probe
cctcatcctccttgttggtctactc

SEQ ID NO: 42686 - DNA, 25 bp, probe
gtcctcatcctccttgttggtctac

SEQ ID NO: 42687 - DNA, 25 bp, probe
tcctcatcctccttgttggtctact

SEQ ID NO: 42688 - DNA, 25 bp, probe
tacctggaatctgttgttggcttca

SEQ ID NO: 42689 - DNA, 25 bp, probe
gcaacgatgtcaaatgtaatttatt

SEQ ID NO: 42690 - DNA, 25 bp, probe
gagtatcacacggttctctgaggtc

SEQ ID NO: 42691 - DNA, 25 bp, probe
tttatatacctggaatctgttgttg

SEQ ID NO: 42692 - DNA, 25 bp, probe
gtatcacacggttctctgaggtctg

SEQ ID NO: 42693 - DNA, 25 bp, probe
catcctccttgttggtctactcagg

SEQ ID NO: 42694 - DNA, 25 bp, probe
agtatcacacggttctctgaggtct

SEQ ID NO: 42695 - DNA, 25 bp, probe
tacaataaaacatgaggtggacagg

SEQ ID NO: 42696 - DNA, 25 bp, probe
ttacaataaaacatgaggtggacag

SEQ ID NO: 42697 - DNA, 25 bp, probe
gttttaatgaaccatgttgttgctg

SEQ ID NO: 42698 - DNA, 25 bp, probe
tacatactggcaacgatgtcaaatg

SEQ ID NO: 42699 - DNA, 25 bp, probe
gtacatactggcaacgatgtcaaat

SEQ ID NO: 42700 - DNA, 25 bp, probe
tgttttaatgaaccatgttgttgct

SEQ ID NO: 42701 - DNA, 25 bp, probe
atgttttaatgaaccatgttgttgc

SEQ ID NO: 42702 - DNA, 25 bp, probe
gtggagtatcacacggttctctgag

SEQ ID NO: 42703 - DNA, 25 bp, probe
ggtcctcatcctccttgttggtcta

SEQ ID NO: 42704 - DNA, 25 bp, probe
tttacaataaaacatgaggtggaca

SEQ ID NO: 42705 - DNA, 25 bp, probe
ttctgtgaaatgttttaatgaacca

SEQ ID NO: 42706 - DNA, 25 bp, probe
tctgtgaaatgttttaatgaaccat

SEQ ID NO: 42707 - DNA, 25 bp, probe
caaggattgggagatctagtgtctg

SEQ ID NO: 42708 - DNA, 25 bp, probe
tgtgaaatgttttaatgaaccatgt

SEQ ID NO: 42709 - DNA, 25 bp, probe
catttggtggagtatcacacggttc

SEQ ID NO: 42710 - DNA, 25 bp, probe
atttggtggagtatcacacggttct

SEQ ID NO: 42711 - DNA, 25 bp, probe
ttttaatgaaccatgttgttgctgg

SEQ ID NO: 42712 - DNA, 25 bp, probe
ctgtgaaatgttttaatgaaccatg

SEQ ID NO: 42713 - DNA, 25 bp, probe
aatgttttaatgaaccatgttgttg

SEQ ID NO: 42714 - DNA, 25 bp, probe
ataaaacatgaggtggacaggcaaa

SEQ ID NO: 42715 - DNA, 25 bp, probe
caacattgaagttcgatcatggtaa

SEQ ID NO: 42716 - DNA, 25 bp, probe
gcaacattgaagttcgatcatggta

SEQ ID NO: 42717 - DNA, 25 bp, probe
aacattgaagttcgatcatggtaaa

SEQ ID NO: 42718 - DNA, 25 bp, probe
ctggcaacattgaagttcgatcatg

SEQ ID NO: 42719 - DNA, 25 bp, probe
cctggcaacattgaagttcgatcat

SEQ ID NO: 42720 - DNA, 25 bp, probe
ggcaacattgaagttcgatcatggt

SEQ ID NO: 42721 - DNA, 25 bp, probe
tggcaacattgaagttcgatcatgg

SEQ ID NO: 42722 - DNA, 25 bp, probe
acattgaagttcgatcatggtaaaa

SEQ ID NO: 42723 - DNA, 25 bp, probe
cttctgtgtgattctggggaagtcc

SEQ ID NO: 42724 - DNA, 25 bp, probe
ctttccaaacaaatgatacaaccct

SEQ ID NO: 42725 - DNA, 25 bp, probe
tttccaaacaaatgatacaaccctg

SEQ ID NO: 42726 - DNA, 25 bp, probe
actttccaaacaaatgatacaaccc

SEQ ID NO: 42727 - DNA, 25 bp, probe
ttccaaacaaatgatacaaccctga

SEQ ID NO: 42728 - DNA, 25 bp, probe
cagtaacctttggaaacatcagaag

SEQ ID NO: 42729 - DNA, 25 bp, probe
acagactgagatttgaaggaaacat

SEQ ID NO: 42730 - DNA, 25 bp, probe
tacagactgagatttgaaggaaaca

SEQ ID NO: 42731 - DNA, 25 bp, probe
aaacaaatgatacaaccctgaccaa

SEQ ID NO: 42732 - DNA, 25 bp, probe
aacaaatgatacaaccctgaccaag

SEQ ID NO: 42733 - DNA, 25 bp, probe
tccaaacaaatgatacaaccctgac

SEQ ID NO: 42734 - DNA, 25 bp, probe
aacatcagaagctactctccattga

SEQ ID NO: 42735 - DNA, 25 bp, probe
taaatatgtattacccgtctgaagc

SEQ ID NO: 42736 - DNA, 25 bp, probe
gtacagactgagatttgaaggaaac

SEQ ID NO: 42737 - DNA, 25 bp, probe
caaacaaatgatacaaccctgacca

SEQ ID NO: 42738 - DNA, 25 bp, probe
agtaacctttggaaacatcagaagc

SEQ ID NO: 42739 - DNA, 25 bp, probe
cagactgagatttgaaggaaacatg

SEQ ID NO: 42740 - DNA, 25 bp, probe
catcttcatcggtactccaaggttc

SEQ ID NO: 42741 - DNA, 25 bp, probe
tactttccaaacaaatgatacaacc

SEQ ID NO: 42742 - DNA, 25 bp, probe
acatcagaagctactctccattgac

SEQ ID NO: 42743 - DNA, 25 bp, probe
atcttcatcggtactccaaggttct

SEQ ID NO: 42744 - DNA, 25 bp, probe
agtacagactgagatttgaaggaaa

SEQ ID NO: 42745 - DNA, 25 bp, probe
ccaaacaaatgatacaaccctgacc

SEQ ID NO: 42746 - DNA, 25 bp, probe
agactgagatttgaaggaaacatgc

SEQ ID NO: 42747 - DNA, 25 bp, probe
aaatatgtattacccgtctgaagct

SEQ ID NO: 42748 - DNA, 25 bp, probe
caggtttgttagagtctgttctaca

SEQ ID NO: 42749 - DNA, 25 bp, probe
tacatcgagaagattcctgtggatc

SEQ ID NO: 42750 - DNA, 25 bp, probe
aggtttgttagagtctgttctacat

SEQ ID NO: 42751 - DNA, 25 bp, probe
ttgtaatttgaggtcttgatttcac

SEQ ID NO: 42752 - DNA, 25 bp, probe
taacctttggaaacatcagaagcta

SEQ ID NO: 42753 - DNA, 25 bp, probe
atttgaggtcttgatttcaccattg

SEQ ID NO: 42754 - DNA, 25 bp, probe
gtacatcgagaagattcctgtggat

SEQ ID NO: 42755 - DNA, 25 bp, probe
gtaatttgaggtcttgatttcacca

SEQ ID NO: 42756 - DNA, 25 bp, probe
tgtaatttgaggtcttgatttcacc

SEQ ID NO: 42757 - DNA, 25 bp, probe
atcagaagctactctccattgacct

SEQ ID NO: 42758 - DNA, 25 bp, probe
catcagaagctactctccattgacc

SEQ ID NO: 42759 - DNA, 25 bp, probe
gaaacatcagaagctactctccatt

SEQ ID NO: 42760 - DNA, 25 bp, probe
aatttgaggtcttgatttcaccatt

SEQ ID NO: 42761 - DNA, 25 bp, probe
aaacatcagaagctactctccattg

SEQ ID NO: 42762 - DNA, 25 bp, probe
tttggaaacatcagaagctactctc

SEQ ID NO: 42763 - DNA, 25 bp, probe
ctttggaaacatcagaagctactct

SEQ ID NO: 42764 - DNA, 25 bp, probe
gcaggtttgttagagtctgttctac

SEQ ID NO: 42765 - DNA, 25 bp, probe
tttgaggtcttgatttcaccattgt

SEQ ID NO: 42766 - DNA, 25 bp, probe
aaggatgtactttccaaacaaatga

SEQ ID NO: 42767 - DNA, 25 bp, probe
ccagtaacctttggaaacatcagaa

SEQ ID NO: 42768 - DNA, 25 bp, probe
gcactatctacctgaatactctcct

SEQ ID NO: 42769 - DNA, 25 bp, probe
actatctacctgaatactctcctga

SEQ ID NO: 42770 - DNA, 25 bp, probe
cactatctacctgaatactctcctg

SEQ ID NO: 42771 - DNA, 25 bp, probe
ttccgcactatctacctgaatactc

SEQ ID NO: 42772 - DNA, 25 bp, probe
cgcactatctacctgaatactctcc

SEQ ID NO: 42773 - DNA, 25 bp, probe
ccgcactatctacctgaatactctc

SEQ ID NO: 42774 - DNA, 25 bp, probe
gttccgcactatctacctgaatact

SEQ ID NO: 42775 - DNA, 25 bp, probe
gagttccgcactatctacctgaata

SEQ ID NO: 42776 - DNA, 25 bp, probe
ctatctacctgaatactctcctgag

SEQ ID NO: 42777 - DNA, 25 bp, probe
tccgcactatctacctgaatactct

SEQ ID NO: 42778 - DNA, 25 bp, probe
agttccgcactatctacctgaatac

SEQ ID NO: 42779 - DNA, 25 bp, probe
atctacctgaatactctcctgagaa

SEQ ID NO: 42780 - DNA, 25 bp, probe
tatctacctgaatactctcctgaga

SEQ ID NO: 42781 - DNA, 25 bp, probe
ttgttgaattgtggtagcttaggag

SEQ ID NO: 42782 - DNA, 25 bp, probe
ttgaattgtggtagcttaggaggat

SEQ ID NO: 42783 - DNA, 25 bp, probe
ccgctttcctctgtttgatactata

SEQ ID NO: 42784 - DNA, 25 bp, probe
cgctttcctctgtttgatactataa

SEQ ID NO: 42785 - DNA, 25 bp, probe
agaactttgtcattacctataaccg

SEQ ID NO: 42786 - DNA, 25 bp, probe
aattgtggtagcttaggaggatgtc

SEQ ID NO: 42787 - DNA, 25 bp, probe
gaattgtggtagcttaggaggatgt

SEQ ID NO: 42788 - DNA, 25 bp, probe
tgaattgtggtagcttaggaggatg

SEQ ID NO: 42789 - DNA, 25 bp, probe
gttgaattgtggtagcttaggagga

SEQ ID NO: 42790 - DNA, 25 bp, probe
gcttcaatcttcaagaactttgtca

SEQ ID NO: 42791 - DNA, 25 bp, probe
ttctaacagcaataaagaggtgtcc

SEQ ID NO: 42792 - DNA, 25 bp, probe
tttctaacagcaataaagaggtgtc

SEQ ID NO: 42793 - DNA, 25 bp, probe
gggtgagaagggttactactacttg

SEQ ID NO: 42794 - DNA, 25 bp, probe
tgttgaattgtggtagcttaggagg

SEQ ID NO: 42795 - DNA, 25 bp, probe
agcaataaagaggtgtccttgtaaa

SEQ ID NO: 42796 - DNA, 25 bp, probe
ctaacagcaataaagaggtgtcctt

SEQ ID NO: 42797 - DNA, 25 bp, probe
tctacctgaatactctcctgagaaa

SEQ ID NO: 42798 - DNA, 25 bp, probe
cccgctttcctctgtttgatactat

SEQ ID NO: 42799 - DNA, 25 bp, probe
ctcagtatggagtcaccaagttcag

SEQ ID NO: 42800 - DNA, 25 bp, probe
cagcaataaagaggtgtccttgtaa

SEQ ID NO: 42801 - DNA, 25 bp, probe
taacagcaataaagaggtgtccttg

SEQ ID NO: 42802 - DNA, 25 bp, probe
ctttgttgaattgtggtagcttagg

SEQ ID NO: 42803 - DNA, 25 bp, probe
cctttgttgaattgtggtagcttag

SEQ ID NO: 42804 - DNA, 25 bp, probe
caaggtctacatcaatgactccgtg

SEQ ID NO: 42805 - DNA, 25 bp, probe
atcttcaagaactttgtcattacct

SEQ ID NO: 42806 - DNA, 25 bp, probe
ggtgagaagggttactactacttgc

SEQ ID NO: 42807 - DNA, 25 bp, probe
tttgttgaattgtggtagcttagga

SEQ ID NO: 42808 - DNA, 25 bp, probe
attacctataaccggacatatgagt

SEQ ID NO: 42809 - DNA, 25 bp, probe
tctaacagcaataaagaggtgtcct

SEQ ID NO: 42810 - DNA, 25 bp, probe
caagttcagtgatctcacagaggag

SEQ ID NO: 42811 - DNA, 25 bp, probe
cttcaatcttcaagaactttgtcat

SEQ ID NO: 42812 - DNA, 25 bp, probe
atgatgtgttctgtggattcttact

SEQ ID NO: 42813 - DNA, 25 bp, probe
tggaatgctatggattatgctgtaa

SEQ ID NO: 42814 - DNA, 25 bp, probe
atcattccaacttccttctaccatc

SEQ ID NO: 42815 - DNA, 25 bp, probe
gatgtgttctgtggattcttactct

SEQ ID NO: 42816 - DNA, 25 bp, probe
gtgttctgtggattcttactctgta

SEQ ID NO: 42817 - DNA, 25 bp, probe
ggaatgctatggattatgctgtaag

SEQ ID NO: 42818 - DNA, 25 bp, probe
atgtgttctgtggattcttactctg

SEQ ID NO: 42819 - DNA, 25 bp, probe
tgatgtgttctgtggattcttactc

SEQ ID NO: 42820 - DNA, 25 bp, probe
cattccaacttccttctaccatcaa

SEQ ID NO: 42821 - DNA, 25 bp, probe
gtggaatgctatggattatgctgta

SEQ ID NO: 42822 - DNA, 25 bp, probe
caccaatctcataataggctccatc

SEQ ID NO: 42823 - DNA, 25 bp, probe
attccaacttccttctaccatcaag

SEQ ID NO: 42824 - DNA, 25 bp, probe
gatgctgtgaacgagtgtgatatta

SEQ ID NO: 42825 - DNA, 25 bp, probe
gaatgctatggattatgctgtaaga

SEQ ID NO: 42826 - DNA, 25 bp, probe
atgctgtgaacgagtgtgatattac

SEQ ID NO: 42827 - DNA, 25 bp, probe
atgtggaatgctatggattatgctg

SEQ ID NO: 42828 - DNA, 25 bp, probe
ctagtgccaccaatctcataatagg

SEQ ID NO: 42829 - DNA, 25 bp, probe
cctagtgccaccaatctcataatag

SEQ ID NO: 42830 - DNA, 25 bp, probe
tcattccaacttccttctaccatca

SEQ ID NO: 42831 - DNA, 25 bp, probe
tcctagtgccaccaatctcataata

SEQ ID NO: 42832 - DNA, 25 bp, probe
tgtgaacgagtgtgatattactgaa

SEQ ID NO: 42833 - DNA, 25 bp, probe
ctgtgaacgagtgtgatattactga

SEQ ID NO: 42834 - DNA, 25 bp, probe
gatcattccaacttccttctaccat

SEQ ID NO: 42835 - DNA, 25 bp, probe
tgttctgtggattcttactctgtac

SEQ ID NO: 42836 - DNA, 25 bp, probe
tgtgttctgtggattcttactctgt

SEQ ID NO: 42837 - DNA, 25 bp, probe
aatgctatggattatgctgtaagaa

SEQ ID NO: 42838 - DNA, 25 bp, probe
tcttactctgtaccaatcttactcg

SEQ ID NO: 42839 - DNA, 25 bp, probe
gttctgtggattcttactctgtacc

SEQ ID NO: 42840 - DNA, 25 bp, probe
gtgaacgagtgtgatattactgaat

SEQ ID NO: 42841 - DNA, 25 bp, probe
catgatgtgttctgtggattcttac

SEQ ID NO: 42842 - DNA, 25 bp, probe
tgagatcattccaacttccttctac

SEQ ID NO: 42843 - DNA, 25 bp, probe
gtgagatcattccaacttccttcta

SEQ ID NO: 42844 - DNA, 25 bp, probe
ccaccaatctcataataggctccat

SEQ ID NO: 42845 - DNA, 25 bp, probe
gagatcattccaacttccttctacc

SEQ ID NO: 42846 - DNA, 25 bp, probe
accaatctcataataggctccatcg

SEQ ID NO: 42847 - DNA, 25 bp, probe
agatcattccaacttccttctacca

SEQ ID NO: 42848 - DNA, 25 bp, probe
ctgaatattgtactggagactctgg

SEQ ID NO: 42849 - DNA, 25 bp, probe
ttcatgtggaatgctatggattatg

SEQ ID NO: 42850 - DNA, 25 bp, probe
actgaatattgtactggagactctg

SEQ ID NO: 42851 - DNA, 25 bp, probe
tgaatattgtactggagactctggt

SEQ ID NO: 42852 - DNA, 25 bp, probe
aatctcataataggctccatcgctg

SEQ ID NO: 42853 - DNA, 25 bp, probe
caatctcataataggctccatcgct

SEQ ID NO: 42854 - DNA, 25 bp, probe
tgtggaatgctatggattatgctgt

SEQ ID NO: 42855 - DNA, 25 bp, probe
gctgtgaacgagtgtgatattactg

SEQ ID NO: 42856 - DNA, 25 bp, probe
gaacatatctgacattggtgaagtg

SEQ ID NO: 42857 - DNA, 25 bp, probe
acatatctgacattggtgaagtgaa

SEQ ID NO: 42858 - DNA, 25 bp, probe
aacatatctgacattggtgaagtga

SEQ ID NO: 42859 - DNA, 25 bp, probe
tgaacatatctgacattggtgaagt

SEQ ID NO: 42860 - DNA, 25 bp, probe
ctaaggctcattcatcaggttaaga

SEQ ID NO: 42861 - DNA, 25 bp, probe
actaaggctcattcatcaggttaag

SEQ ID NO: 42862 - DNA, 25 bp, probe
tcagtgtccagaagatagatatgtg

SEQ ID NO: 42863 - DNA, 25 bp, probe
cagtgtccagaagatagatatgtgc

SEQ ID NO: 42864 - DNA, 25 bp, probe
aaggatgaacatatctgacattggt

SEQ ID NO: 42865 - DNA, 25 bp, probe
taaggctcattcatcaggttaagaa

SEQ ID NO: 42866 - DNA, 25 bp, probe
ggatgaacatatctgacattggtga

SEQ ID NO: 42867 - DNA, 25 bp, probe
aggatgaacatatctgacattggtg

SEQ ID NO: 42868 - DNA, 25 bp, probe
aactaaggctcattcatcaggttaa

SEQ ID NO: 42869 - DNA, 25 bp, probe
tctcatcagtgtccagaagatagat

SEQ ID NO: 42870 - DNA, 25 bp, probe
ctcatcagtgtccagaagatagata

SEQ ID NO: 42871 - DNA, 25 bp, probe
atgaacatatctgacattggtgaag

SEQ ID NO: 42872 - DNA, 25 bp, probe
gatgaacatatctgacattggtgaa

SEQ ID NO: 42873 - DNA, 25 bp, probe
gagttcaatgtgagaatgtgagaga

SEQ ID NO: 42874 - DNA, 25 bp, probe
agagttcaatgtgagaatgtgagag

SEQ ID NO: 42875 - DNA, 25 bp, probe
gagagttcaatgtgagaatgtgaga

SEQ ID NO: 42876 - DNA, 25 bp, probe
atcagtgtccagaagatagatatgt

SEQ ID NO: 42877 - DNA, 25 bp, probe
agttcaatgtgagaatgtgagagac

SEQ ID NO: 42878 - DNA, 25 bp, probe
catccataagaagtgtgtcagtctg

SEQ ID NO: 42879 - DNA, 25 bp, probe
tcatcagtgtccagaagatagatat

SEQ ID NO: 42880 - DNA, 25 bp, probe
taaggatgaacatatctgacattgg

SEQ ID NO: 42881 - DNA, 25 bp, probe
catcagtgtccagaagatagatatg

SEQ ID NO: 42882 - DNA, 25 bp, probe
ggcttcttatgtatctacgacaatg

SEQ ID NO: 42883 - DNA, 25 bp, probe
atccataagaagtgtgtcagtctgt

SEQ ID NO: 42884 - DNA, 25 bp, probe
tcaatgaatgtgaccttccagaatg

SEQ ID NO: 42885 - DNA, 25 bp, probe
tatgtatctacgacaatgttctggt

SEQ ID NO: 42886 - DNA, 25 bp, probe
ggagagttcaatgtgagaatgtgag

SEQ ID NO: 42887 - DNA, 25 bp, probe
tctgtagacaagaggtcaatgaatg

SEQ ID NO: 42888 - DNA, 25 bp, probe
atgtatctacgacaatgttctggtc

SEQ ID NO: 42889 - DNA, 25 bp, probe
gttcaatgtgagaatgtgagagaca

SEQ ID NO: 42890 - DNA, 25 bp, probe
gtagacaagaggtcaatgaatgtga

SEQ ID NO: 42891 - DNA, 25 bp, probe
ctgtagacaagaggtcaatgaatgt

SEQ ID NO: 42892 - DNA, 25 bp, probe
tgtagacaagaggtcaatgaatgtg

SEQ ID NO: 42893 - DNA, 25 bp, probe
gcttcttatgtatctacgacaatgt

SEQ ID NO: 42894 - DNA, 25 bp, probe
cataagaagtgtgtcagtctgtctg

SEQ ID NO: 42895 - DNA, 25 bp, probe
ttatgtatctacgacaatgttctgg

SEQ ID NO: 42896 - DNA, 25 bp, probe
ccataagaagtgtgtcagtctgtct

SEQ ID NO: 42897 - DNA, 25 bp, probe
tccataagaagtgtgtcagtctgtc

SEQ ID NO: 42898 - DNA, 25 bp, probe
ataagaagtgtgtcagtctgtctgt

SEQ ID NO: 42899 - DNA, 25 bp, probe
gcatccataagaagtgtgtcagtct

SEQ ID NO: 42900 - DNA, 25 bp, probe
gcctattcttacttactctacagtg

SEQ ID NO: 42901 - DNA, 25 bp, probe
agcctattcttacttactctacagt

SEQ ID NO: 42902 - DNA, 25 bp, probe
ggattcctagcctattcttacttac

SEQ ID NO: 42903 - DNA, 25 bp, probe
ttcctagcctattcttacttactct

SEQ ID NO: 42904 - DNA, 25 bp, probe
ggaaggattaaatgtgatgggaaag

SEQ ID NO: 42905 - DNA, 25 bp, probe
atggaaggattaaatgtgatgggaa

SEQ ID NO: 42906 - DNA, 25 bp, probe
tgaagaaggataagagaaatgggaa

SEQ ID NO: 42907 - DNA, 25 bp, probe
tggaaggattaaatgtgatgggaaa

SEQ ID NO: 42908 - DNA, 25 bp, probe
aggattaaatgtgatgggaaagttg

SEQ ID NO: 42909 - DNA, 25 bp, probe
atgaagaaggataagagaaatggga

SEQ ID NO: 42910 - DNA, 25 bp, probe
aagaagatgaagaaggataagagaa

SEQ ID NO: 42911 - DNA, 25 bp, probe
ttacctgtcactattgtgccttctt

SEQ ID NO: 42912 - DNA, 25 bp, probe
gaaggattaaatgtgatgggaaagt

SEQ ID NO: 42913 - DNA, 25 bp, probe
cctagcctattcttacttactctac

SEQ ID NO: 42914 - DNA, 25 bp, probe
gatgaagaaggataagagaaatggg

SEQ ID NO: 42915 - DNA, 25 bp, probe
ggattaaatgtgatgggaaagttgc

SEQ ID NO: 42916 - DNA, 25 bp, probe
cctaagaacaacatggaaggattaa

SEQ ID NO: 42917 - DNA, 25 bp, probe
taaatgtgatgggaaagttgcgtta

SEQ ID NO: 42918 - DNA, 25 bp, probe
tcctagcctattcttacttactcta

SEQ ID NO: 42919 - DNA, 25 bp, probe
ctgatattggtgaggtgaaagatgg

SEQ ID NO: 42920 - DNA, 25 bp, probe
aagttgcgttacctgtcactattgt

SEQ ID NO: 42921 - DNA, 25 bp, probe
gattaaatgtgatgggaaagttgcg

SEQ ID NO: 42922 - DNA, 25 bp, probe
aaggattaaatgtgatgggaaagtt

SEQ ID NO: 42923 - DNA, 25 bp, probe
tacctgtcactattgtgccttcttc

SEQ ID NO: 42924 - DNA, 25 bp, probe
attcctagcctattcttacttactc

SEQ ID NO: 42925 - DNA, 25 bp, probe
gattcctagcctattcttacttact

SEQ ID NO: 42926 - DNA, 25 bp, probe
aaggattcctagcctattcttactt

SEQ ID NO: 42927 - DNA, 25 bp, probe
gaagaaggataagagaaatgggaaa

SEQ ID NO: 42928 - DNA, 25 bp, probe
taagaagtgtgccagtatggttcat

SEQ ID NO: 42929 - DNA, 25 bp, probe
cctattcttacttactctacagtgt

SEQ ID NO: 42930 - DNA, 25 bp, probe
tagcctattcttacttactctacag

SEQ ID NO: 42931 - DNA, 25 bp, probe
attaaatgtgatgggaaagttgcgt

SEQ ID NO: 42932 - DNA, 25 bp, probe
gttacctgtcactattgtgccttct

SEQ ID NO: 42933 - DNA, 25 bp, probe
agatgaagaaggataagagaaatgg

SEQ ID NO: 42934 - DNA, 25 bp, probe
ttaaatgtgatgggaaagttgcgtt

SEQ ID NO: 42935 - DNA, 25 bp, probe
attcttacttactctacagtgtctt

SEQ ID NO: 42936 - DNA, 25 bp, probe
ctgtcactattgtgccttcttcctt

SEQ ID NO: 42937 - DNA, 25 bp, probe
gaaagttgcgttacctgtcactatt

SEQ ID NO: 42938 - DNA, 25 bp, probe
ctagcctattcttacttactctaca

SEQ ID NO: 42939 - DNA, 25 bp, probe
catccgtaagaagtgtgccagtatg

SEQ ID NO: 42940 - DNA, 25 bp, probe
catggaaggattaaatgtgatggga

SEQ ID NO: 42941 - DNA, 25 bp, probe
aggattcctagcctattcttactta

SEQ ID NO: 42942 - DNA, 25 bp, probe
tatgaagccatgtctcactgtttaa

SEQ ID NO: 42943 - DNA, 25 bp, probe
atatgaagccatgtctcactgttta

SEQ ID NO: 42944 - DNA, 25 bp, probe
tactctgggagacaatagatgtgaa

SEQ ID NO: 42945 - DNA, 25 bp, probe
ctctgggagacaatagatgtgaatg

SEQ ID NO: 42946 - DNA, 25 bp, probe
ctactctgggagacaatagatgtga

SEQ ID NO: 42947 - DNA, 25 bp, probe
gacaatagatgtgaatgggactgag

SEQ ID NO: 42948 - DNA, 25 bp, probe
gagacaatagatgtgaatgggactg

SEQ ID NO: 42949 - DNA, 25 bp, probe
actctgggagacaatagatgtgaat

SEQ ID NO: 42950 - DNA, 25 bp, probe
agacaatagatgtgaatgggactga

SEQ ID NO: 42951 - DNA, 25 bp, probe
gtcttattggtcctggtgatgcttg

SEQ ID NO: 42952 - DNA, 25 bp, probe
tctactctgggagacaatagatgtg

SEQ ID NO: 42953 - DNA, 25 bp, probe
ggagacaatagatgtgaatgggact

SEQ ID NO: 42954 - DNA, 25 bp, probe
tctgggagacaatagatgtgaatgg

SEQ ID NO: 42955 - DNA, 25 bp, probe
acaatagatgtgaatgggactgagc

SEQ ID NO: 42956 - DNA, 25 bp, probe
gggagacaatagatgtgaatgggac

SEQ ID NO: 42957 - DNA, 25 bp, probe
ctgggagacaatagatgtgaatggg

SEQ ID NO: 42958 - DNA, 25 bp, probe
aatagatgtgaatgggactgagctg

SEQ ID NO: 42959 - DNA, 25 bp, probe
caatagatgtgaatgggactgagct

SEQ ID NO: 42960 - DNA, 25 bp, probe
gggatctactctgggagacaataga

SEQ ID NO: 42961 - DNA, 25 bp, probe
tgggagacaatagatgtgaatggga

SEQ ID NO: 42962 - DNA, 25 bp, probe
tcttattggtcctggtgatgcttgg

SEQ ID NO: 42963 - DNA, 25 bp, probe
ggtcttattggtcctggtgatgctt

SEQ ID NO: 42964 - DNA, 25 bp, probe
cctggtcttattggtcctggtgatg

SEQ ID NO: 42965 - DNA, 25 bp, probe
tcctggtcttattggtcctggtgat

SEQ ID NO: 42966 - DNA, 25 bp, probe
cttattggtcctggtgatgcttggt

SEQ ID NO: 42967 - DNA, 25 bp, probe
ctttgcctccagacagctaatactc

SEQ ID NO: 42968 - DNA, 25 bp, probe
ctaatactcggggaaatgcttttgg

SEQ ID NO: 42969 - DNA, 25 bp, probe
atagatgtgaatgggactgagctga

SEQ ID NO: 42970 - DNA, 25 bp, probe
cgggatctactctgggagacaatag

SEQ ID NO: 42971 - DNA, 25 bp, probe
tagatgtgaatgggactgagctgaa

SEQ ID NO: 42972 - DNA, 25 bp, probe
ttattggtcctggtgatgcttggtg

SEQ ID NO: 42973 - DNA, 25 bp, probe
atctactctgggagacaatagatgt

SEQ ID NO: 42974 - DNA, 25 bp, probe
ggatctactctgggagacaatagat

SEQ ID NO: 42975 - DNA, 25 bp, probe
gatctactctgggagacaatagatg

SEQ ID NO: 42976 - DNA, 25 bp, probe
gctaatactcggggaaatgcttttg

SEQ ID NO: 42977 - DNA, 25 bp, probe
actttgcctccagacagctaatact

SEQ ID NO: 42978 - DNA, 25 bp, probe
cactttgcctccagacagctaatac

SEQ ID NO: 42979 - DNA, 25 bp, probe
taatactcggggaaatgcttttggg

SEQ ID NO: 42980 - DNA, 25 bp, probe
tgcaataaacgtgacatcttgggag

SEQ ID NO: 42981 - DNA, 25 bp, probe
atccctgctgtgattctttgacctg

SEQ ID NO: 42982 - DNA, 25 bp, probe
ccactttgcctccagacagctaata

SEQ ID NO: 42983 - DNA, 25 bp, probe
gattgtgacttgcctgaattctgcc

SEQ ID NO: 42984 - DNA, 25 bp, probe
ggattgtgacttgcctgaattctgc

SEQ ID NO: 42985 - DNA, 25 bp, probe
cagttgcaataaacgtgacatcttg

SEQ ID NO: 42986 - DNA, 25 bp, probe
tttgcctccagacagctaatactcg

SEQ ID NO: 42987 - DNA, 25 bp, probe
tcagttgcaataaacgtgacatctt

SEQ ID NO: 42988 - DNA, 25 bp, probe
tagaatcttgtctgtcactcactac

SEQ ID NO: 42989 - DNA, 25 bp, probe
ttactatggcagatatggtatggat

SEQ ID NO: 42990 - DNA, 25 bp, probe
ttattcagtcatcggtgaggttaat

SEQ ID NO: 42991 - DNA, 25 bp, probe
tattcagtcatcggtgaggttaatg

SEQ ID NO: 42992 - DNA, 25 bp, probe
cttattcagtcatcggtgaggttaa

SEQ ID NO: 42993 - DNA, 25 bp, probe
atgacattcgttcacaatagcacta

SEQ ID NO: 42994 - DNA, 25 bp, probe
taagtcttattcagtcatcggtgag

SEQ ID NO: 42995 - DNA, 25 bp, probe
tgacattcgttcacaatagcactat

SEQ ID NO: 42996 - DNA, 25 bp, probe
tatggcagatatggtatggatcgta

SEQ ID NO: 42997 - DNA, 25 bp, probe
ctagaatcttgtctgtcactcacta

SEQ ID NO: 42998 - DNA, 25 bp, probe
tcttattcagtcatcggtgaggtta

SEQ ID NO: 42999 - DNA, 25 bp, probe
cacaagaaccacaattaagatgtca

SEQ ID NO: 43000 - DNA, 25 bp, probe
gaatcttgtctgtcactcactacat

SEQ ID NO: 43001 - DNA, 25 bp, probe
tactatggcagatatggtatggatc

SEQ ID NO: 43002 - DNA, 25 bp, probe
gacattcgttcacaatagcactatt

SEQ ID NO: 43003 - DNA, 25 bp, probe
atggcagatatggtatggatcgtaa

SEQ ID NO: 43004 - DNA, 25 bp, probe
gcacaagaaccacaattaagatgtc

SEQ ID NO: 43005 - DNA, 25 bp, probe
acaagaaccacaattaagatgtcat

SEQ ID NO: 43006 - DNA, 25 bp, probe
agaatcttgtctgtcactcactaca

SEQ ID NO: 43007 - DNA, 25 bp, probe
ctatggcagatatggtatggatcgt

SEQ ID NO: 43008 - DNA, 25 bp, probe
actatggcagatatggtatggatcg

SEQ ID NO: 43009 - DNA, 25 bp, probe
ataagtcttattcagtcatcggtga

SEQ ID NO: 43010 - DNA, 25 bp, probe
tgtcactcactacatgaataagcaa

SEQ ID NO: 43011 - DNA, 25 bp, probe
tctgtcactcactacatgaataagc

SEQ ID NO: 43012 - DNA, 25 bp, probe
tgtctgtcactcactacatgaataa

SEQ ID NO: 43013 - DNA, 25 bp, probe
ttgtctgtcactcactacatgaata

SEQ ID NO: 43014 - DNA, 25 bp, probe
cttgtctgtcactcactacatgaat

SEQ ID NO: 43015 - DNA, 25 bp, probe
aatcttgtctgtcactcactacatg

SEQ ID NO: 43016 - DNA, 25 bp, probe
ctgtcactcactacatgaataagca

SEQ ID NO: 43017 - DNA, 25 bp, probe
aagtcttattcagtcatcggtgagg

SEQ ID NO: 43018 - DNA, 25 bp, probe
gtctgtcactcactacatgaataag

SEQ ID NO: 43019 - DNA, 25 bp, probe
aagaatgcacaagaaccacaattaa

SEQ ID NO: 43020 - DNA, 25 bp, probe
gtcttattcagtcatcggtgaggtt

SEQ ID NO: 43021 - DNA, 25 bp, probe
atgcacaagaaccacaattaagatg

SEQ ID NO: 43022 - DNA, 25 bp, probe
aatgcacaagaaccacaattaagat

SEQ ID NO: 43023 - DNA, 25 bp, probe
gaatgcacaagaaccacaattaaga

SEQ ID NO: 43024 - DNA, 25 bp, probe
agaatgcacaagaaccacaattaag

SEQ ID NO: 43025 - DNA, 25 bp, probe
atcttgtctgtcactcactacatga

SEQ ID NO: 43026 - DNA, 25 bp, probe
tggagaaagaaggaagaaatggttt

SEQ ID NO: 43027 - DNA, 25 bp, probe
tcttgtctgtcactcactacatgaa

SEQ ID NO: 43028 - DNA, 25 bp, probe
tagaaattaggctggagaaagaagg

SEQ ID NO: 43029 - DNA, 25 bp, probe
ctggagaaagaaggaagaaatggtt

SEQ ID NO: 43030 - DNA, 25 bp, probe
catgacattcgttcacaatagcact

SEQ ID NO: 43031 - DNA, 25 bp, probe
aaattaggctggagaaagaaggaag

SEQ ID NO: 43032 - DNA, 25 bp, probe
tctggcaggaagtcttgttagtata

SEQ ID NO: 43033 - DNA, 25 bp, probe
ttctggcaggaagtcttgttagtat

SEQ ID NO: 43034 - DNA, 25 bp, probe
gaatctgtactaaggacctgtgttc

SEQ ID NO: 43035 - DNA, 25 bp, probe
aatctgtactaaggacctgtgttca

SEQ ID NO: 43036 - DNA, 25 bp, probe
cgaatctgtactaaggacctgtgtt

SEQ ID NO: 43037 - DNA, 25 bp, probe
atctgtactaaggacctgtgttcag

SEQ ID NO: 43038 - DNA, 25 bp, probe
ctttggcattgttggatttcataaa

SEQ ID NO: 43039 - DNA, 25 bp, probe
ctggcaggaagtcttgttagtatac

SEQ ID NO: 43040 - DNA, 25 bp, probe
gctttggcattgttggatttcataa

SEQ ID NO: 43041 - DNA, 25 bp, probe
gcctaatttgagtgtctgtgtctta

SEQ ID NO: 43042 - DNA, 25 bp, probe
ctgtggtcaccgaatctgtactaag

SEQ ID NO: 43043 - DNA, 25 bp, probe
tttcatcatccaagtttgtagttca

SEQ ID NO: 43044 - DNA, 25 bp, probe
tagaccttatttctgctactgttgc

SEQ ID NO: 43045 - DNA, 25 bp, probe
gcagtatccctcatcttatgtaagt

SEQ ID NO: 43046 - DNA, 25 bp, probe
ggcagtatccctcatcttatgtaag

SEQ ID NO: 43047 - DNA, 25 bp, probe
acttagaccttatttctgctactgt

SEQ ID NO: 43048 - DNA, 25 bp, probe
tcatcatccaagtttgtagttcatt

SEQ ID NO: 43049 - DNA, 25 bp, probe
ttcatcatccaagtttgtagttcat

SEQ ID NO: 43050 - DNA, 25 bp, probe
ccttatttctgctactgttgctgaa

SEQ ID NO: 43051 - DNA, 25 bp, probe
aatttctggcaggaagtcttgttag

SEQ ID NO: 43052 - DNA, 25 bp, probe
ttagaccttatttctgctactgttg

SEQ ID NO: 43053 - DNA, 25 bp, probe
gactacaaactttcaaagcaaatgc

SEQ ID NO: 43054 - DNA, 25 bp, probe
tccctcatcttatgtaagtgtgaat

SEQ ID NO: 43055 - DNA, 25 bp, probe
atccctcatcttatgtaagtgtgaa

SEQ ID NO: 43056 - DNA, 25 bp, probe
ggcaggaagtcttgttagtatacat

SEQ ID NO: 43057 - DNA, 25 bp, probe
gaccttatttctgctactgttgctg

SEQ ID NO: 43058 - DNA, 25 bp, probe
gtatccctcatcttatgtaagtgtg

SEQ ID NO: 43059 - DNA, 25 bp, probe
agtatccctcatcttatgtaagtgt

SEQ ID NO: 43060 - DNA, 25 bp, probe
gctgaactgaaacaattctcaagaa

SEQ ID NO: 43061 - DNA, 25 bp, probe
catcatccaagtttgtagttcattt

SEQ ID NO: 43062 - DNA, 25 bp, probe
tttctggcaggaagtcttgttagta

SEQ ID NO: 43063 - DNA, 25 bp, probe
cttagaccttatttctgctactgtt

SEQ ID NO: 43064 - DNA, 25 bp, probe
aacttagaccttatttctgctactg

SEQ ID NO: 43065 - DNA, 25 bp, probe
caacttagaccttatttctgctact

SEQ ID NO: 43066 - DNA, 25 bp, probe
cttgttaattaggcttatacagcgg

SEQ ID NO: 43067 - DNA, 25 bp, probe
gcaggaagtcttgttagtatacatc

SEQ ID NO: 43068 - DNA, 25 bp, probe
cagtatccctcatcttatgtaagtg

SEQ ID NO: 43069 - DNA, 25 bp, probe
tgactacaaactttcaaagcaaatg

SEQ ID NO: 43070 - DNA, 25 bp, probe
ccctcatcttatgtaagtgtgaatt

SEQ ID NO: 43071 - DNA, 25 bp, probe
accttatttctgctactgttgctga

SEQ ID NO: 43072 - DNA, 25 bp, probe
tggcaggaagtcttgttagtataca

SEQ ID NO: 43073 - DNA, 25 bp, probe
agaccttatttctgctactgttgct

SEQ ID NO: 43074 - DNA, 25 bp, probe
tatccctcatcttatgtaagtgtga

SEQ ID NO: 43075 - DNA, 25 bp, probe
cctaatttgagtgtctgtgtcttag

SEQ ID NO: 43076 - DNA, 25 bp, probe
ataatatctgtgaggtgctgatgag

SEQ ID NO: 43077 - DNA, 25 bp, probe
ttgccaggacgaattgagataatat

SEQ ID NO: 43078 - DNA, 25 bp, probe
gataatatctgtgaggtgctgatga

SEQ ID NO: 43079 - DNA, 25 bp, probe
tgccaggacgaattgagataatatc

SEQ ID NO: 43080 - DNA, 25 bp, probe
taatatctgtgaggtgctgatgagt

SEQ ID NO: 43081 - DNA, 25 bp, probe
gttgccaggacgaattgagataata

SEQ ID NO: 43082 - DNA, 25 bp, probe
gcagtcctcttattcctaaggtaat

SEQ ID NO: 43083 - DNA, 25 bp, probe
agcagtcctcttattcctaaggtaa

SEQ ID NO: 43084 - DNA, 25 bp, probe
aagcagtcctcttattcctaaggta

SEQ ID NO: 43085 - DNA, 25 bp, probe
aatatctgtgaggtgctgatgagtg

SEQ ID NO: 43086 - DNA, 25 bp, probe
gtcctcttattcctaaggtaatcct

SEQ ID NO: 43087 - DNA, 25 bp, probe
agtcctcttattcctaaggtaatcc

SEQ ID NO: 43088 - DNA, 25 bp, probe
cagtcctcttattcctaaggtaatc

SEQ ID NO: 43089 - DNA, 25 bp, probe
attgacacacagcactctctaaatc

SEQ ID NO: 43090 - DNA, 25 bp, probe
gattgacacacagcactctctaaat

SEQ ID NO: 43091 - DNA, 25 bp, probe
tatctgtgaggtgctgatgagtgat

SEQ ID NO: 43092 - DNA, 25 bp, probe
atatctgtgaggtgctgatgagtga

SEQ ID NO: 43093 - DNA, 25 bp, probe
cacagcactctctaaatcttccttg

SEQ ID NO: 43094 - DNA, 25 bp, probe
gacacacagcactctctaaatcttc

SEQ ID NO: 43095 - DNA, 25 bp, probe
ggttgccaggacgaattgagataat

SEQ ID NO: 43096 - DNA, 25 bp, probe
acacagcactctctaaatcttcctt

SEQ ID NO: 43097 - DNA, 25 bp, probe
agataatatctgtgaggtgctgatg

SEQ ID NO: 43098 - DNA, 25 bp, probe
ttgagataatatctgtgaggtgctg

SEQ ID NO: 43099 - DNA, 25 bp, probe
gagataatatctgtgaggtgctgat

SEQ ID NO: 43100 - DNA, 25 bp, probe
gccaggacgaattgagataatatct

SEQ ID NO: 43101 - DNA, 25 bp, probe
attgagataatatctgtgaggtgct

SEQ ID NO: 43102 - DNA, 25 bp, probe
tgagataatatctgtgaggtgctga

SEQ ID NO: 43103 - DNA, 25 bp, probe
tgacacacagcactctctaaatctt

SEQ ID NO: 43104 - DNA, 25 bp, probe
ttgacacacagcactctctaaatct

SEQ ID NO: 43105 - DNA, 25 bp, probe
ccaggacgaattgagataatatctg

SEQ ID NO: 43106 - DNA, 25 bp, probe
tcctcttattcctaaggtaatccta

SEQ ID NO: 43107 - DNA, 25 bp, probe
tgattgacacacagcactctctaaa

SEQ ID NO: 43108 - DNA, 25 bp, probe
aattgagataatatctgtgaggtgc

SEQ ID NO: 43109 - DNA, 25 bp, probe
gtgattgacacacagcactctctaa

SEQ ID NO: 43110 - DNA, 25 bp, probe
cacacagcactctctaaatcttcct

SEQ ID NO: 43111 - DNA, 25 bp, probe
cactctctaaatcttccttgtgagg

SEQ ID NO: 43112 - DNA, 25 bp, probe
cgaattgagataatatctgtgaggt

SEQ ID NO: 43113 - DNA, 25 bp, probe
acgaattgagataatatctgtgagg

SEQ ID NO: 43114 - DNA, 25 bp, probe
ggacgaattgagataatatctgtga

SEQ ID NO: 43115 - DNA, 25 bp, probe
aggacgaattgagataatatctgtg

SEQ ID NO: 43116 - DNA, 25 bp, probe
caggacgaattgagataatatctgt

SEQ ID NO: 43117 - DNA, 25 bp, probe
acagcactctctaaatcttccttgt

SEQ ID NO: 43118 - DNA, 25 bp, probe
aaagcagtcctcttattcctaaggt

SEQ ID NO: 43119 - DNA, 25 bp, probe
gcactctctaaatcttccttgtgag

SEQ ID NO: 43120 - DNA, 25 bp, probe
cacaagagacaacagagtattcaga

SEQ ID NO: 43121 - DNA, 25 bp, probe
acaagagacaacagagtattcagat

SEQ ID NO: 43122 - DNA, 25 bp, probe
ccacaagagacaacagagtattcag

SEQ ID NO: 43123 - DNA, 25 bp, probe
aagagacaacagagtattcagatcg

SEQ ID NO: 43124 - DNA, 25 bp, probe
caagagacaacagagtattcagatc

SEQ ID NO: 43125 - DNA, 25 bp, probe
agagacaacagagtattcagatcgc

SEQ ID NO: 43126 - DNA, 25 bp, probe
caggtgtttggcttagtatttgtta

SEQ ID NO: 43127 - DNA, 25 bp, probe
tatgccgtatgatttcagtagaaca

SEQ ID NO: 43128 - DNA, 25 bp, probe
ctatgccgtatgatttcagtagaac

SEQ ID NO: 43129 - DNA, 25 bp, probe
cgtatgatttcagtagaacagggag

SEQ ID NO: 43130 - DNA, 25 bp, probe
aaagaagatttacgaactctatgcc

SEQ ID NO: 43131 - DNA, 25 bp, probe
aggtgtttggcttagtatttgttat

SEQ ID NO: 43132 - DNA, 25 bp, probe
agctcattacactaagatgtggatt

SEQ ID NO: 43133 - DNA, 25 bp, probe
gtatgatttcagtagaacagggagc

SEQ ID NO: 43134 - DNA, 25 bp, probe
atgccgtatgatttcagtagaacag

SEQ ID NO: 43135 - DNA, 25 bp, probe
cagctcattacactaagatgtggat

SEQ ID NO: 43136 - DNA, 25 bp, probe
actctatgccgtatgatttcagtag

SEQ ID NO: 43137 - DNA, 25 bp, probe
aagaagatttacgaactctatgccg

SEQ ID NO: 43138 - DNA, 25 bp, probe
ttcagctcattacactaagatgtgg

SEQ ID NO: 43139 - DNA, 25 bp, probe
aactctatgccgtatgatttcagta

SEQ ID NO: 43140 - DNA, 25 bp, probe
gaactctatgccgtatgatttcagt

SEQ ID NO: 43141 - DNA, 25 bp, probe
cctggtgtactgtgtaaagaagatt

SEQ ID NO: 43142 - DNA, 25 bp, probe
tcagctcattacactaagatgtgga

SEQ ID NO: 43143 - DNA, 25 bp, probe
ctggtgtactgtgtaaagaagattt

SEQ ID NO: 43144 - DNA, 25 bp, probe
gagacaacagagtattcagatcgcc

SEQ ID NO: 43145 - DNA, 25 bp, probe
ggtgtttggcttagtatttgttatt

SEQ ID NO: 43146 - DNA, 25 bp, probe
cgaactctatgccgtatgatttcag

SEQ ID NO: 43147 - DNA, 25 bp, probe
gggaggtctttaagtctattgttta

SEQ ID NO: 43148 - DNA, 25 bp, probe
ccgtatgatttcagtagaacaggga

SEQ ID NO: 43149 - DNA, 25 bp, probe
gtctattgtttaactgtaccatcca

SEQ ID NO: 43150 - DNA, 25 bp, probe
gcaggtgtttggcttagtatttgtt

SEQ ID NO: 43151 - DNA, 25 bp, probe
cccacaagagacaacagagtattca

SEQ ID NO: 43152 - DNA, 25 bp, probe
tatgatttcagtagaacagggagcg

SEQ ID NO: 43153 - DNA, 25 bp, probe
gctcattacactaagatgtggattt

SEQ ID NO: 43154 - DNA, 25 bp, probe
ctctatgccgtatgatttcagtaga

SEQ ID NO: 43155 - DNA, 25 bp, probe
gacaacagagtattcagatcgccac

SEQ ID NO: 43156 - DNA, 25 bp, probe
tctatgccgtatgatttcagtagaa

SEQ ID NO: 43157 - DNA, 25 bp, probe
ccctggtgtactgtgtaaagaagat

SEQ ID NO: 43158 - DNA, 25 bp, probe
attgtttaactgtaccatccagagc

SEQ ID NO: 43159 - DNA, 25 bp, probe
agacaacagagtattcagatcgcca

SEQ ID NO: 43160 - DNA, 25 bp, probe
agtctattgtttaactgtaccatcc

SEQ ID NO: 43161 - DNA, 25 bp, probe
tcattacactaagatgtggatttcc

SEQ ID NO: 43162 - DNA, 25 bp, probe
tgccgtatgatttcagtagaacagg

SEQ ID NO: 43163 - DNA, 25 bp, probe
tggtgtactgtgtaaagaagattta

SEQ ID NO: 43164 - DNA, 25 bp, probe
gctgattagtggagagtgcttatta

SEQ ID NO: 43165 - DNA, 25 bp, probe
gatactatattgctgcgtcctatgt

SEQ ID NO: 43166 - DNA, 25 bp, probe
agatactatattgctgcgtcctatg

SEQ ID NO: 43167 - DNA, 25 bp, probe
gaagatactatattgctgcgtccta

SEQ ID NO: 43168 - DNA, 25 bp, probe
tatggaagatactatattgctgcgt

SEQ ID NO: 43169 - DNA, 25 bp, probe
atggaagatactatattgctgcgtc

SEQ ID NO: 43170 - DNA, 25 bp, probe
aagatactatattgctgcgtcctat

SEQ ID NO: 43171 - DNA, 25 bp, probe
tactatattgctgcgtcctatgtaa

SEQ ID NO: 43172 - DNA, 25 bp, probe
ctatggaagatactatattgctgcg

SEQ ID NO: 43173 - DNA, 25 bp, probe
atactatattgctgcgtcctatgta

SEQ ID NO: 43174 - DNA, 25 bp, probe
gcaagattaggaagtcacagattct

SEQ ID NO: 43175 - DNA, 25 bp, probe
cctggctctgattcttcattatgta

SEQ ID NO: 43176 - DNA, 25 bp, probe
ttagtggagagtgcttattaactgc

SEQ ID NO: 43177 - DNA, 25 bp, probe
ggcaagattaggaagtcacagattc

SEQ ID NO: 43178 - DNA, 25 bp, probe
atggcaagattaggaagtcacagat

SEQ ID NO: 43179 - DNA, 25 bp, probe
tgattagtggagagtgcttattaac

SEQ ID NO: 43180 - DNA, 25 bp, probe
tgctgattagtggagagtgcttatt

SEQ ID NO: 43181 - DNA, 25 bp, probe
tggcaagattaggaagtcacagatt

SEQ ID NO: 43182 - DNA, 25 bp, probe
actatggaagatactatattgctgc

SEQ ID NO: 43183 - DNA, 25 bp, probe
ggctctgattcttcattatgtatgt

SEQ ID NO: 43184 - DNA, 25 bp, probe
tggctctgattcttcattatgtatg

SEQ ID NO: 43185 - DNA, 25 bp, probe
ctgattagtggagagtgcttattaa

SEQ ID NO: 43186 - DNA, 25 bp, probe
cctactgagttgttgctgtcattag

SEQ ID NO: 43187 - DNA, 25 bp, probe
ctgctgattagtggagagtgcttat

SEQ ID NO: 43188 - DNA, 25 bp, probe
ctggctctgattcttcattatgtat

SEQ ID NO: 43189 - DNA, 25 bp, probe
tcctactgagttgttgctgtcatta

SEQ ID NO: 43190 - DNA, 25 bp, probe
attagtggagagtgcttattaactg

SEQ ID NO: 43191 - DNA, 25 bp, probe
tgcttattaactgccacagatactg

SEQ ID NO: 43192 - DNA, 25 bp, probe
gagtgcttattaactgccacagata

SEQ ID NO: 43193 - DNA, 25 bp, probe
ctactcatggcaagattaggaagtc

SEQ ID NO: 43194 - DNA, 25 bp, probe
gtgcttattaactgccacagatact

SEQ ID NO: 43195 - DNA, 25 bp, probe
agtgcttattaactgccacagatac

SEQ ID NO: 43196 - DNA, 25 bp, probe
gattagtggagagtgcttattaact

SEQ ID NO: 43197 - DNA, 25 bp, probe
tactcatggcaagattaggaagtca

SEQ ID NO: 43198 - DNA, 25 bp, probe
gctctgattcttcattatgtatgtg

SEQ ID NO: 43199 - DNA, 25 bp, probe
tagtggagagtgcttattaactgcc

SEQ ID NO: 43200 - DNA, 25 bp, probe
ctgtcattagcagtagaacctctga

SEQ ID NO: 43201 - DNA, 25 bp, probe
aagtatccagtatatggtgtccagt

SEQ ID NO: 43202 - DNA, 25 bp, probe
tataatgtgcctggctctgattctt

SEQ ID NO: 43203 - DNA, 25 bp, probe
ttctataatgtgcctggctctgatt

SEQ ID NO: 43204 - DNA, 25 bp, probe
ttcctactgagttgttgctgtcatt

SEQ ID NO: 43205 - DNA, 25 bp, probe
atattgctgcgtcctatgtaaagta

SEQ ID NO: 43206 - DNA, 25 bp, probe
tatattgctgcgtcctatgtaaagt

SEQ ID NO: 43207 - DNA, 25 bp, probe
actatattgctgcgtcctatgtaaa

SEQ ID NO: 43208 - DNA, 25 bp, probe
ttgtgattgagatggagaataatgc

SEQ ID NO: 43209 - DNA, 25 bp, probe
tgtgattgagatggagaataatgcc

SEQ ID NO: 43210 - DNA, 25 bp, probe
actacgagcaacgaataataacctg

SEQ ID NO: 43211 - DNA, 25 bp, probe
cactacgagcaacgaataataacct

SEQ ID NO: 43212 - DNA, 25 bp, probe
ctacgagcaacgaataataacctgg

SEQ ID NO: 43213 - DNA, 25 bp, probe
tacgagcaacgaataataacctgga

SEQ ID NO: 43214 - DNA, 25 bp, probe
agtcaaggatggatctggaacatat

SEQ ID NO: 43215 - DNA, 25 bp, probe
cttcaactggatcattgttcacatg

SEQ ID NO: 43216 - DNA, 25 bp, probe
gcactacgagcaacgaataataacc

SEQ ID NO: 43217 - DNA, 25 bp, probe
ggcactacgagcaacgaataataac

SEQ ID NO: 43218 - DNA, 25 bp, probe
gagtcaaggatggatctggaacata

SEQ ID NO: 43219 - DNA, 25 bp, probe
aggcactacgagcaacgaataataa

SEQ ID NO: 43220 - DNA, 25 bp, probe
ccttcaactggatcattgttcacat

SEQ ID NO: 43221 - DNA, 25 bp, probe
acgagcaacgaataataacctggaa

SEQ ID NO: 43222 - DNA, 25 bp, probe
ctggatcattgttcacatggaagag

SEQ ID NO: 43223 - DNA, 25 bp, probe
aactggatcattgttcacatggaag

SEQ ID NO: 43224 - DNA, 25 bp, probe
tgattgagatggagaataatgccaa

SEQ ID NO: 43225 - DNA, 25 bp, probe
ctagagtcaaggatggatctggaac

SEQ ID NO: 43226 - DNA, 25 bp, probe
gtgattgagatggagaataatgcca

SEQ ID NO: 43227 - DNA, 25 bp, probe
caactggatcattgttcacatggaa

SEQ ID NO: 43228 - DNA, 25 bp, probe
ttcaactggatcattgttcacatgg

SEQ ID NO: 43229 - DNA, 25 bp, probe
aaggaagatgggtgatttacaatga

SEQ ID NO: 43230 - DNA, 25 bp, probe
gaaggaagatgggtgatttacaatg

SEQ ID NO: 43231 - DNA, 25 bp, probe
gaataataacctggaaagagcactg

SEQ ID NO: 43232 - DNA, 25 bp, probe
caacgaataataacctggaaagagc

SEQ ID NO: 43233 - DNA, 25 bp, probe
gcaacgaataataacctggaaagag

SEQ ID NO: 43234 - DNA, 25 bp, probe
gagcaacgaataataacctggaaag

SEQ ID NO: 43235 - DNA, 25 bp, probe
aacgaataataacctggaaagagca

SEQ ID NO: 43236 - DNA, 25 bp, probe
agcaacgaataataacctggaaaga

SEQ ID NO: 43237 - DNA, 25 bp, probe
ggaaggaagatgggtgatttacaat

SEQ ID NO: 43238 - DNA, 25 bp, probe
aaaggaaggaagatgggtgatttac

SEQ ID NO: 43239 - DNA, 25 bp, probe
aggaagatgggtgatttacaatgac

SEQ ID NO: 43240 - DNA, 25 bp, probe
aataataacctggaaagagcactgg

SEQ ID NO: 43241 - DNA, 25 bp, probe
actggatcattgttcacatggaaga

SEQ ID NO: 43242 - DNA, 25 bp, probe
cgaataataacctggaaagagcact

SEQ ID NO: 43243 - DNA, 25 bp, probe
acgaataataacctggaaagagcac

SEQ ID NO: 43244 - DNA, 25 bp, probe
caggcactacgagcaacgaataata

SEQ ID NO: 43245 - DNA, 25 bp, probe
attgagatggagaataatgccaatg

SEQ ID NO: 43246 - DNA, 25 bp, probe
tagagtcaaggatggatctggaaca

SEQ ID NO: 43247 - DNA, 25 bp, probe
gattgagatggagaataatgccaat

SEQ ID NO: 43248 - DNA, 25 bp, probe
ttgagatggagaataatgccaatgc

SEQ ID NO: 43249 - DNA, 25 bp, probe
taataacctggaaagagcactggat

SEQ ID NO: 43250 - DNA, 25 bp, probe
ataataacctggaaagagcactgga

SEQ ID NO: 43251 - DNA, 25 bp, probe
aggaaggaagatgggtgatttacaa

SEQ ID NO: 43252 - DNA, 25 bp, probe
gcaatcatcacctctgtctagttac

SEQ ID NO: 43253 - DNA, 25 bp, probe
atgtcaatggaatcatgtactctgt

SEQ ID NO: 43254 - DNA, 25 bp, probe
caatcatcacctctgtctagttaca

SEQ ID NO: 43255 - DNA, 25 bp, probe
tgtcaatggaatcatgtactctgtg

SEQ ID NO: 43256 - DNA, 25 bp, probe
tcaatggaatcatgtactctgtgaa

SEQ ID NO: 43257 - DNA, 25 bp, probe
gtcaatggaatcatgtactctgtga

SEQ ID NO: 43258 - DNA, 25 bp, probe
caaccacaaatctttccaactctac

SEQ ID NO: 43259 - DNA, 25 bp, probe
tgcaatcatcacctctgtctagtta

SEQ ID NO: 43260 - DNA, 25 bp, probe
aaccacaaatctttccaactctacg

SEQ ID NO: 43261 - DNA, 25 bp, probe
ctagttacaggacggtttctttctc

SEQ ID NO: 43262 - DNA, 25 bp, probe
tctagttacaggacggtttctttct

SEQ ID NO: 43263 - DNA, 25 bp, probe
gcaaccacaaatctttccaactcta

SEQ ID NO: 43264 - DNA, 25 bp, probe
caatggaatcatgtactctgtgaaa

SEQ ID NO: 43265 - DNA, 25 bp, probe
gtctagttacaggacggtttctttc

SEQ ID NO: 43266 - DNA, 25 bp, probe
attcacgatactgtgcaatcatcac

SEQ ID NO: 43267 - DNA, 25 bp, probe
cattcacgatactgtgcaatcatca

SEQ ID NO: 43268 - DNA, 25 bp, probe
acattcacgatactgtgcaatcatc

SEQ ID NO: 43269 - DNA, 25 bp, probe
acaaatctttccaactctacggatt

SEQ ID NO: 43270 - DNA, 25 bp, probe
cacaaatctttccaactctacggat

SEQ ID NO: 43271 - DNA, 25 bp, probe
tgtctagttacaggacggtttcttt

SEQ ID NO: 43272 - DNA, 25 bp, probe
accacaaatctttccaactctacgg

SEQ ID NO: 43273 - DNA, 25 bp, probe
catgtcaatggaatcatgtactctg

SEQ ID NO: 43274 - DNA, 25 bp, probe
tcatgtcaatggaatcatgtactct

SEQ ID NO: 43275 - DNA, 25 bp, probe
aatctttccaactctacggatttgc

SEQ ID NO: 43276 - DNA, 25 bp, probe
ctcctgggttcaaatgattctcctg

SEQ ID NO: 43277 - DNA, 25 bp, probe
ttcatgtcaatggaatcatgtactc

SEQ ID NO: 43278 - DNA, 25 bp, probe
tagttacaggacggtttctttctcc

SEQ ID NO: 43279 - DNA, 25 bp, probe
gtgcaatcatcacctctgtctagtt

SEQ ID NO: 43280 - DNA, 25 bp, probe
atactgtgcaatcatcacctctgtc

SEQ ID NO: 43281 - DNA, 25 bp, probe
gatactgtgcaatcatcacctctgt

SEQ ID NO: 43282 - DNA, 25 bp, probe
ctgtgcaatcatcacctctgtctag

SEQ ID NO: 43283 - DNA, 25 bp, probe
ccacaaatctttccaactctacgga

SEQ ID NO: 43284 - DNA, 25 bp, probe
gatcaagacggagtttcaccatgtt

SEQ ID NO: 43285 - DNA, 25 bp, probe
aatcatcacctctgtctagttacag

SEQ ID NO: 43286 - DNA, 25 bp, probe
ggcaaccacaaatctttccaactct

SEQ ID NO: 43287 - DNA, 25 bp, probe
gggcatttcatgtcaatggaatcat

SEQ ID NO: 43288 - DNA, 25 bp, probe
atctttccaactctacggatttgcc

SEQ ID NO: 43289 - DNA, 25 bp, probe
atcatcacctctgtctagttacagg

SEQ ID NO: 43290 - DNA, 25 bp, probe
tgtgcaatcatcacctctgtctagt

SEQ ID NO: 43291 - DNA, 25 bp, probe
actgtgcaatcatcacctctgtcta

SEQ ID NO: 43292 - DNA, 25 bp, probe
tactgtgcaatcatcacctctgtct

SEQ ID NO: 43293 - DNA, 25 bp, probe
ttcacgatactgtgcaatcatcacc

SEQ ID NO: 43294 - DNA, 25 bp, probe
cctcctgggttcaaatgattctcct

SEQ ID NO: 43295 - DNA, 25 bp, probe
cgatactgtgcaatcatcacctctg

SEQ ID NO: 43296 - DNA, 25 bp, probe
ataatggtagtcttccttctgatgt

SEQ ID NO: 43297 - DNA, 25 bp, probe
cataatggtagtcttccttctgatg

SEQ ID NO: 43298 - DNA, 25 bp, probe
ccataatggtagtcttccttctgat

SEQ ID NO: 43299 - DNA, 25 bp, probe
ttgccataatggtagtcttccttct

SEQ ID NO: 43300 - DNA, 25 bp, probe
gccataatggtagtcttccttctga

SEQ ID NO: 43301 - DNA, 25 bp, probe
tgccataatggtagtcttccttctg

SEQ ID NO: 43302 - DNA, 25 bp, probe
actttgcctgaatacgtggtttata

SEQ ID NO: 43303 - DNA, 25 bp, probe
tttgccataatggtagtcttccttc

SEQ ID NO: 43304 - DNA, 25 bp, probe
cactttgcctgaatacgtggtttat

SEQ ID NO: 43305 - DNA, 25 bp, probe
tttgcctgaatacgtggtttataaa

SEQ ID NO: 43306 - DNA, 25 bp, probe
ttttgccataatggtagtcttcctt

SEQ ID NO: 43307 - DNA, 25 bp, probe
tttgtgatcggagtcctggacaatc

SEQ ID NO: 43308 - DNA, 25 bp, probe
tacacttcgttattcctctacacag

SEQ ID NO: 43309 - DNA, 25 bp, probe
agcatacacttcgttattcctctac

SEQ ID NO: 43310 - DNA, 25 bp, probe
cagcatacacttcgttattcctcta

SEQ ID NO: 43311 - DNA, 25 bp, probe
gcatacacttcgttattcctctaca

SEQ ID NO: 43312 - DNA, 25 bp, probe
atacacttcgttattcctctacaca

SEQ ID NO: 43313 - DNA, 25 bp, probe
catacacttcgttattcctctacac

SEQ ID NO: 43314 - DNA, 25 bp, probe
acttcgttattcctctacacagatg

SEQ ID NO: 43315 - DNA, 25 bp, probe
cacttcgttattcctctacacagat

SEQ ID NO: 43316 - DNA, 25 bp, probe
acacttcgttattcctctacacaga

SEQ ID NO: 43317 - DNA, 25 bp, probe
cttcgttattcctctacacagatgt

SEQ ID NO: 43318 - DNA, 25 bp, probe
ctttgacatctttatctggtttgct

SEQ ID NO: 43319 - DNA, 25 bp, probe
tctttgacatctttatctggtttgc

SEQ ID NO: 43320 - DNA, 25 bp, probe
tttgacatctttatctggtttgctt

SEQ ID NO: 43321 - DNA, 25 bp, probe
tgacatctttatctggtttgcttac

SEQ ID NO: 43322 - DNA, 25 bp, probe
gcagcatacacttcgttattcctct

SEQ ID NO: 43323 - DNA, 25 bp, probe
gacatctttatctggtttgcttact

SEQ ID NO: 43324 - DNA, 25 bp, probe
ggttaaacttccctttgttctttgt

SEQ ID NO: 43325 - DNA, 25 bp, probe
tggttaaacttccctttgttctttg

SEQ ID NO: 43326 - DNA, 25 bp, probe
ttaaacttccctttgttctttgtcc

SEQ ID NO: 43327 - DNA, 25 bp, probe
ctggttaaacttccctttgttcttt

SEQ ID NO: 43328 - DNA, 25 bp, probe
gttattcctctacacagatgtggta

SEQ ID NO: 43329 - DNA, 25 bp, probe
ttcgttattcctctacacagatgtg

SEQ ID NO: 43330 - DNA, 25 bp, probe
acatctttatctggtttgcttactt

SEQ ID NO: 43331 - DNA, 25 bp, probe
ttgacatctttatctggtttgctta

SEQ ID NO: 43332 - DNA, 25 bp, probe
tatctggtttgcttacttcaactca

SEQ ID NO: 43333 - DNA, 25 bp, probe
ttatctggtttgcttacttcaactc

SEQ ID NO: 43334 - DNA, 25 bp, probe
gttaaacttccctttgttctttgtc

SEQ ID NO: 43335 - DNA, 25 bp, probe
atctttatctggtttgcttacttca

SEQ ID NO: 43336 - DNA, 25 bp, probe
tttatctggtttgcttacttcaact

SEQ ID NO: 43337 - DNA, 25 bp, probe
taaacttccctttgttctttgtccc

SEQ ID NO: 43338 - DNA, 25 bp, probe
catctttatctggtttgcttacttc

SEQ ID NO: 43339 - DNA, 25 bp, probe
ctttatctggtttgcttacttcaac

SEQ ID NO: 43340 - DNA, 25 bp, probe
tctttatctggtttgcttacttcaa

SEQ ID NO: 43341 - DNA, 25 bp, probe
cattgttgtgggcatatacctcttg

SEQ ID NO: 43342 - DNA, 25 bp, probe
cactgttgatttgtaccaagaatga

SEQ ID NO: 43343 - DNA, 25 bp, probe
tggtctttgacatctttatctggtt

SEQ ID NO: 43344 - DNA, 25 bp, probe
cactggtctttgacatctttatctg

SEQ ID NO: 43345 - DNA, 25 bp, probe
ctggtctttgacatctttatctggt

SEQ ID NO: 43346 - DNA, 25 bp, probe
actggtctttgacatctttatctgg

SEQ ID NO: 43347 - DNA, 25 bp, probe
gctggttaaacttccctttgttctt

SEQ ID NO: 43348 - DNA, 25 bp, probe
ggtctttgacatctttatctggttt

SEQ ID NO: 43349 - DNA, 25 bp, probe
tcgttattcctctacacagatgtgg

SEQ ID NO: 43350 - DNA, 25 bp, probe
ccactggtctttgacatctttatct

SEQ ID NO: 43351 - DNA, 25 bp, probe
attgttgtgggcatatacctcttgt

SEQ ID NO: 43352 - DNA, 25 bp, probe
tggaggagtgttcattgtataataa

SEQ ID NO: 43353 - DNA, 25 bp, probe
atggaggagtgttcattgtataata

SEQ ID NO: 43354 - DNA, 25 bp, probe
cctaatggaggagtgttcattgtat

SEQ ID NO: 43355 - DNA, 25 bp, probe
ggaggagtgttcattgtataataag

SEQ ID NO: 43356 - DNA, 25 bp, probe
atcattctcacttcaaattcctggg

SEQ ID NO: 43357 - DNA, 25 bp, probe
ctatgaagtaaagaaagagggcagc

SEQ ID NO: 43358 - DNA, 25 bp, probe
agactatgaagtaaagaaagagggc

SEQ ID NO: 43359 - DNA, 25 bp, probe
actatgaagtaaagaaagagggcag

SEQ ID NO: 43360 - DNA, 25 bp, probe
gactatgaagtaaagaaagagggca

SEQ ID NO: 43361 - DNA, 25 bp, probe
gagcccttacaaagactatgaagta

SEQ ID NO: 43362 - DNA, 25 bp, probe
gatcattctcacttcaaattcctgg

SEQ ID NO: 43363 - DNA, 25 bp, probe
actcaagtttagacccttactcttt

SEQ ID NO: 43364 - DNA, 25 bp, probe
ggatgctttctgtaaacctcaactc

SEQ ID NO: 43365 - DNA, 25 bp, probe
aatttactcatctctctagtgctgc

SEQ ID NO: 43366 - DNA, 25 bp, probe
ctcaagaggaaatcactcaaggttt

SEQ ID NO: 43367 - DNA, 25 bp, probe
tttctgtaaacctcaactcgtgaag

SEQ ID NO: 43368 - DNA, 25 bp, probe
ctttctgtaaacctcaactcgtgaa

SEQ ID NO: 43369 - DNA, 25 bp, probe
taagttattcacctgagtatgcaat

SEQ ID NO: 43370 - DNA, 25 bp, probe
ataagttattcacctgagtatgcaa

SEQ ID NO: 43371 - DNA, 25 bp, probe
agatcattctcacttcaaattcctg

SEQ ID NO: 43372 - DNA, 25 bp, probe
caactcaagtttagacccttactct

SEQ ID NO: 43373 - DNA, 25 bp, probe
cttgtcaggagaatttgtagatcat

SEQ ID NO: 43374 - DNA, 25 bp, probe
gtaaacctcaactcgtgaagaagag

SEQ ID NO: 43375 - DNA, 25 bp, probe
gatgctttctgtaaacctcaactcg

SEQ ID NO: 43376 - DNA, 25 bp, probe
aagttattcacctgagtatgcaata

SEQ ID NO: 43377 - DNA, 25 bp, probe
aataagttattcacctgagtatgca

SEQ ID NO: 43378 - DNA, 25 bp, probe
gcgaaatcttgagtcttctgagaaa

SEQ ID NO: 43379 - DNA, 25 bp, probe
aactcaagtttagacccttactctt

SEQ ID NO: 43380 - DNA, 25 bp, probe
ctgtaaacctcaactcgtgaagaag

SEQ ID NO: 43381 - DNA, 25 bp, probe
aatggaggagtgttcattgtataat

SEQ ID NO: 43382 - DNA, 25 bp, probe
gaggagtgttcattgtataataagt

SEQ ID NO: 43383 - DNA, 25 bp, probe
ttactcatctctctagtgctgcctc

SEQ ID NO: 43384 - DNA, 25 bp, probe
tctcaagaggaaatcactcaaggtt

SEQ ID NO: 43385 - DNA, 25 bp, probe
tactctcaagaggaaatcactcaag

SEQ ID NO: 43386 - DNA, 25 bp, probe
ctactctcaagaggaaatcactcaa

SEQ ID NO: 43387 - DNA, 25 bp, probe
tgtaaacctcaactcgtgaagaaga

SEQ ID NO: 43388 - DNA, 25 bp, probe
tctgtaaacctcaactcgtgaagaa

SEQ ID NO: 43389 - DNA, 25 bp, probe
ttctgtaaacctcaactcgtgaaga

SEQ ID NO: 43390 - DNA, 25 bp, probe
ctaatggaggagtgttcattgtata

SEQ ID NO: 43391 - DNA, 25 bp, probe
ctgttgaggatgctttctgtaaacc

SEQ ID NO: 43392 - DNA, 25 bp, probe
ttgtcaggagaatttgtagatcatt

SEQ ID NO: 43393 - DNA, 25 bp, probe
gaagaagagctatggtgtggagaac

SEQ ID NO: 43394 - DNA, 25 bp, probe
gcaactcaagtttagacccttactc

SEQ ID NO: 43395 - DNA, 25 bp, probe
attctttcagacctcactagcacaa

SEQ ID NO: 43396 - DNA, 25 bp, probe
tacaatgtgaaaggcatcttctacc

SEQ ID NO: 43397 - DNA, 25 bp, probe
gagtttccttgctgagatttcaaat

SEQ ID NO: 43398 - DNA, 25 bp, probe
ttccttgctgagatttcaaatagtc

SEQ ID NO: 43399 - DNA, 25 bp, probe
cttgctgagatttcaaatagtcctc

SEQ ID NO: 43400 - DNA, 25 bp, probe
ccttgctgagatttcaaatagtcct

SEQ ID NO: 43401 - DNA, 25 bp, probe
tccttgctgagatttcaaatagtcc

SEQ ID NO: 43402 - DNA, 25 bp, probe
gtacaatgtgaaaggcatcttctac

SEQ ID NO: 43403 - DNA, 25 bp, probe
agtacaatgtgaaaggcatcttcta

SEQ ID NO: 43404 - DNA, 25 bp, probe
ttgctgagatttcaaatagtcctcc

SEQ ID NO: 43405 - DNA, 25 bp, probe
tttccttgctgagatttcaaatagt

SEQ ID NO: 43406 - DNA, 25 bp, probe
agtttccttgctgagatttcaaata

SEQ ID NO: 43407 - DNA, 25 bp, probe
gtttccttgctgagatttcaaatag

SEQ ID NO: 43408 - DNA, 25 bp, probe
gagtacaatgtgaaaggcatcttct

SEQ ID NO: 43409 - DNA, 25 bp, probe
agagtacaatgtgaaaggcatcttc

SEQ ID NO: 43410 - DNA, 25 bp, probe
cagagtacaatgtgaaaggcatctt

SEQ ID NO: 43411 - DNA, 25 bp, probe
tgctgagatttcaaatagtcctccc

SEQ ID NO: 43412 - DNA, 25 bp, probe
ggagtttccttgctgagatttcaaa

SEQ ID NO: 43413 - DNA, 25 bp, probe
ctgctaagggactctatccattgag

SEQ ID NO: 43414 - DNA, 25 bp, probe
ctaagggactctatccattgagcac

SEQ ID NO: 43415 - DNA, 25 bp, probe
tctatccattgagcacattttccta

SEQ ID NO: 43416 - DNA, 25 bp, probe
ccagagtacaatgtgaaaggcatct

SEQ ID NO: 43417 - DNA, 25 bp, probe
cactgctaagggactctatccattg

SEQ ID NO: 43418 - DNA, 25 bp, probe
tatccattgagcacattttcctaag

SEQ ID NO: 43419 - DNA, 25 bp, probe
ctatccattgagcacattttcctaa

SEQ ID NO: 43420 - DNA, 25 bp, probe
actgctaagggactctatccattga

SEQ ID NO: 43421 - DNA, 25 bp, probe
accagagtacaatgtgaaaggcatc

SEQ ID NO: 43422 - DNA, 25 bp, probe
acaatgtgaaaggcatcttctaccg

SEQ ID NO: 43423 - DNA, 25 bp, probe
ctgacttgctgtgtgaccttaggaa

SEQ ID NO: 43424 - DNA, 25 bp, probe
gggactctatccattgagcacattt

SEQ ID NO: 43425 - DNA, 25 bp, probe
taagggactctatccattgagcaca

SEQ ID NO: 43426 - DNA, 25 bp, probe
tgacttgctgtgtgaccttaggaag

SEQ ID NO: 43427 - DNA, 25 bp, probe
ttgctgtgtgaccttaggaagtctc

SEQ ID NO: 43428 - DNA, 25 bp, probe
cttgctgtgtgaccttaggaagtct

SEQ ID NO: 43429 - DNA, 25 bp, probe
atccattgagcacattttcctaagg

SEQ ID NO: 43430 - DNA, 25 bp, probe
gactctatccattgagcacattttc

SEQ ID NO: 43431 - DNA, 25 bp, probe
gagtgctgaaggatgaatttctggg

SEQ ID NO: 43432 - DNA, 25 bp, probe
ctctatccattgagcacattttcct

SEQ ID NO: 43433 - DNA, 25 bp, probe
actctatccattgagcacattttcc

SEQ ID NO: 43434 - DNA, 25 bp, probe
agggactctatccattgagcacatt

SEQ ID NO: 43435 - DNA, 25 bp, probe
aagggactctatccattgagcacat

SEQ ID NO: 43436 - DNA, 25 bp, probe
cgagtgctgaaggatgaatttctgg

SEQ ID NO: 43437 - DNA, 25 bp, probe
ccgagtgctgaaggatgaatttctg

SEQ ID NO: 43438 - DNA, 25 bp, probe
ccactgctaagggactctatccatt

SEQ ID NO: 43439 - DNA, 25 bp, probe
ctgagatttcaaatagtcctcccca

SEQ ID NO: 43440 - DNA, 25 bp, probe
atacagccttggactagcaatttat

SEQ ID NO: 43441 - DNA, 25 bp, probe
tacagccttggactagcaatttatg

SEQ ID NO: 43442 - DNA, 25 bp, probe
catacagccttggactagcaattta

SEQ ID NO: 43443 - DNA, 25 bp, probe
ttcttctagtggacagaacatgctg

SEQ ID NO: 43444 - DNA, 25 bp, probe
cctttcttctagtggacagaacatg

SEQ ID NO: 43445 - DNA, 25 bp, probe
ccctttcttctagtggacagaacat

SEQ ID NO: 43446 - DNA, 25 bp, probe
ctttcttctagtggacagaacatgc

SEQ ID NO: 43447 - DNA, 25 bp, probe
tttcttctagtggacagaacatgct

SEQ ID NO: 43448 - DNA, 25 bp, probe
ccatacagccttggactagcaattt

SEQ ID NO: 43449 - DNA, 25 bp, probe
cttctagtggacagaacatgctgtg

SEQ ID NO: 43450 - DNA, 25 bp, probe
gaacccctttcttctagtggacaga

SEQ ID NO: 43451 - DNA, 25 bp, probe
acagccttggactagcaatttatgc

SEQ ID NO: 43452 - DNA, 25 bp, probe
tcttctagtggacagaacatgctgt

SEQ ID NO: 43453 - DNA, 25 bp, probe
tctagtggacagaacatgctgtgtt

SEQ ID NO: 43454 - DNA, 25 bp, probe
ttctagtggacagaacatgctgtgt

SEQ ID NO: 43455 - DNA, 25 bp, probe
aacccctttcttctagtggacagaa

SEQ ID NO: 43456 - DNA, 25 bp, probe
ggaacccctttcttctagtggacag

SEQ ID NO: 43457 - DNA, 25 bp, probe
tccatacagccttggactagcaatt

SEQ ID NO: 43458 - DNA, 25 bp, probe
ttccatacagccttggactagcaat

SEQ ID NO: 43459 - DNA, 25 bp, probe
tgtgttccatacagccttggactag

SEQ ID NO: 43460 - DNA, 25 bp, probe
ctgtgttccatacagccttggacta

SEQ ID NO: 43461 - DNA, 25 bp, probe
cccctttcttctagtggacagaaca

SEQ ID NO: 43462 - DNA, 25 bp, probe
acccctttcttctagtggacagaac

SEQ ID NO: 43463 - DNA, 25 bp, probe
caatttatgcttcttgggaggccag

SEQ ID NO: 43464 - DNA, 25 bp, probe
tggaacccctttcttctagtggaca

SEQ ID NO: 43465 - DNA, 25 bp, probe
gttccatacagccttggactagcaa

SEQ ID NO: 43466 - DNA, 25 bp, probe
tgtctactatgaaccatcctgtact

SEQ ID NO: 43467 - DNA, 25 bp, probe
gtgtctactatgaaccatcctgtac

SEQ ID NO: 43468 - DNA, 25 bp, probe
gtctactatgaaccatcctgtactc

SEQ ID NO: 43469 - DNA, 25 bp, probe
tggtgaagaaggatatattcggatg

SEQ ID NO: 43470 - DNA, 25 bp, probe
tctacagaagtggtgtctactatga

SEQ ID NO: 43471 - DNA, 25 bp, probe
ctctacagaagtggtgtctactatg

SEQ ID NO: 43472 - DNA, 25 bp, probe
gaaggatatattcggatggcaagaa

SEQ ID NO: 43473 - DNA, 25 bp, probe
aagaaggatatattcggatggcaag

SEQ ID NO: 43474 - DNA, 25 bp, probe
gaagaaggatatattcggatggcaa

SEQ ID NO: 43475 - DNA, 25 bp, probe
tacagaagtggtgtctactatgaac

SEQ ID NO: 43476 - DNA, 25 bp, probe
cctctacagaagtggtgtctactat

SEQ ID NO: 43477 - DNA, 25 bp, probe
ggtgaagaaggatatattcggatgg

SEQ ID NO: 43478 - DNA, 25 bp, probe
ttggtgaagaaggatatattcggat

SEQ ID NO: 43479 - DNA, 25 bp, probe
ctacagaagtggtgtctactatgaa

SEQ ID NO: 43480 - DNA, 25 bp, probe
cagaatgtgaatcatggtgtacttg

SEQ ID NO: 43481 - DNA, 25 bp, probe
gaatgtgaatcatggtgtacttgtg

SEQ ID NO: 43482 - DNA, 25 bp, probe
agaatgtgaatcatggtgtacttgt

SEQ ID NO: 43483 - DNA, 25 bp, probe
tctactatgaaccatcctgtactca

SEQ ID NO: 43484 - DNA, 25 bp, probe
agaaggatatattcggatggcaaga

SEQ ID NO: 43485 - DNA, 25 bp, probe
gtgaagaaggatatattcggatggc

SEQ ID NO: 43486 - DNA, 25 bp, probe
tcagaatgtgaatcatggtgtactt

SEQ ID NO: 43487 - DNA, 25 bp, probe
tgaagaaggatatattcggatggca

SEQ ID NO: 43488 - DNA, 25 bp, probe
gtggttggctatggtgatcttaatg

SEQ ID NO: 43489 - DNA, 25 bp, probe
tactcagaatgtgaatcatggtgta

SEQ ID NO: 43490 - DNA, 25 bp, probe
tcctctacagaagtggtgtctacta

SEQ ID NO: 43491 - DNA, 25 bp, probe
ctcagaatgtgaatcatggtgtact

SEQ ID NO: 43492 - DNA, 25 bp, probe
actcagaatgtgaatcatggtgtac

SEQ ID NO: 43493 - DNA, 25 bp, probe
gtactcagaatgtgaatcatggtgt

SEQ ID NO: 43494 - DNA, 25 bp, probe
tgtactcagaatgtgaatcatggtg

SEQ ID NO: 43495 - DNA, 25 bp, probe
tatgaaccatcctgtactcagaatg

SEQ ID NO: 43496 - DNA, 25 bp, probe
tactatgaaccatcctgtactcaga

SEQ ID NO: 43497 - DNA, 25 bp, probe
catcctgtactcagaatgtgaatca

SEQ ID NO: 43498 - DNA, 25 bp, probe
ctactatgaaccatcctgtactcag

SEQ ID NO: 43499 - DNA, 25 bp, probe
ctatgaaccatcctgtactcagaat

SEQ ID NO: 43500 - DNA, 25 bp, probe
atcctgtactcagaatgtgaatcat

SEQ ID NO: 43501 - DNA, 25 bp, probe
aatgtgaatcatggtgtacttgtgg

SEQ ID NO: 43502 - DNA, 25 bp, probe
actatgaaccatcctgtactcagaa

SEQ ID NO: 43503 - DNA, 25 bp, probe
tgtggttggctatggtgatcttaat

SEQ ID NO: 43504 - DNA, 25 bp, probe
ccatcctgtactcagaatgtgaatc

SEQ ID NO: 43505 - DNA, 25 bp, probe
tcctgtactcagaatgtgaatcatg

SEQ ID NO: 43506 - DNA, 25 bp, probe
ttgtggttggctatggtgatcttaa

SEQ ID NO: 43507 - DNA, 25 bp, probe
ctgtactcagaatgtgaatcatggt

SEQ ID NO: 43508 - DNA, 25 bp, probe
accatcctgtactcagaatgtgaat

SEQ ID NO: 43509 - DNA, 25 bp, probe
atgaaccatcctgtactcagaatgt

SEQ ID NO: 43510 - DNA, 25 bp, probe
atcttcttcttccttcctgtcttct

SEQ ID NO: 43511 - DNA, 25 bp, probe
catcttcttcttccttcctgtcttc

SEQ ID NO: 43512 - DNA, 25 bp, probe
tcttcttcttccttcctgtcttctg

SEQ ID NO: 43513 - DNA, 25 bp, probe
ttcttcttccttcctgtcttctgtc

SEQ ID NO: 43514 - DNA, 25 bp, probe
cttcttcttccttcctgtcttctgt

SEQ ID NO: 43515 - DNA, 25 bp, probe
cttcttccttcctgtcttctgtctc

SEQ ID NO: 43516 - DNA, 25 bp, probe
tcttcttccttcctgtcttctgtct

SEQ ID NO: 43517 - DNA, 25 bp, probe
gcatcttcttcttccttcctgtctt

SEQ ID NO: 43518 - DNA, 25 bp, probe
ttcttccttcctgtcttctgtctca

SEQ ID NO: 43519 - DNA, 25 bp, probe
agcatcttcttcttccttcctgtct

SEQ ID NO: 43520 - DNA, 25 bp, probe
gtgtccagcatcttcttcttccttc

SEQ ID NO: 43521 - DNA, 25 bp, probe
tcttccttcctgtcttctgtctcac

SEQ ID NO: 43522 - DNA, 25 bp, probe
cagcatcttcttcttccttcctgtc

SEQ ID NO: 43523 - DNA, 25 bp, probe
aaactcttccaattcgtcagtgaga

SEQ ID NO: 43524 - DNA, 25 bp, probe
caaactcttccaattcgtcagtgag

SEQ ID NO: 43525 - DNA, 25 bp, probe
gtccagcatcttcttcttccttcct

SEQ ID NO: 43526 - DNA, 25 bp, probe
tgtccagcatcttcttcttccttcc

SEQ ID NO: 43527 - DNA, 25 bp, probe
ggtgtccagcatcttcttcttcctt

SEQ ID NO: 43528 - DNA, 25 bp, probe
tctcacggtcctctacagtctcatc

SEQ ID NO: 43529 - DNA, 25 bp, probe
cttccttcctgtcttctgtctcacg

SEQ ID NO: 43530 - DNA, 25 bp, probe
tccagcatcttcttcttccttcctg

SEQ ID NO: 43531 - DNA, 25 bp, probe
aactcttccaattcgtcagtgagag

SEQ ID NO: 43532 - DNA, 25 bp, probe
ccagcatcttcttcttccttcctgt

SEQ ID NO: 43533 - DNA, 25 bp, probe
ctgtcttctgtctcacggtcctcta

SEQ ID NO: 43534 - DNA, 25 bp, probe
gtctcacggtcctctacagtctcat

SEQ ID NO: 43535 - DNA, 25 bp, probe
gcaaactcttccaattcgtcagtga

SEQ ID NO: 43536 - DNA, 25 bp, probe
tgtcttctgtctcacggtcctctac

SEQ ID NO: 43537 - DNA, 25 bp, probe
gtcttctgtctcacggtcctctaca

SEQ ID NO: 43538 - DNA, 25 bp, probe
ctctgcaaactcttccaattcgtca

SEQ ID NO: 43539 - DNA, 25 bp, probe
cctcctctgcaaactcttccaattc

SEQ ID NO: 43540 - DNA, 25 bp, probe
tcttccaattcgtcagtgagagctg

SEQ ID NO: 43541 - DNA, 25 bp, probe
ctcctctgcaaactcttccaattcg

SEQ ID NO: 43542 - DNA, 25 bp, probe
tctgcaaactcttccaattcgtcag

SEQ ID NO: 43543 - DNA, 25 bp, probe
cctctgcaaactcttccaattcgtc

SEQ ID NO: 43544 - DNA, 25 bp, probe
acctcctctgcaaactcttccaatt

SEQ ID NO: 43545 - DNA, 25 bp, probe
tgcaaactcttccaattcgtcagtg

SEQ ID NO: 43546 - DNA, 25 bp, probe
ctgcaaactcttccaattcgtcagt

SEQ ID NO: 43547 - DNA, 25 bp, probe
tcctctgcaaactcttccaattcgt

SEQ ID NO: 43548 - DNA, 25 bp, probe
gacctcctctgcaaactcttccaat

SEQ ID NO: 43549 - DNA, 25 bp, probe
actcttccaattcgtcagtgagagc

SEQ ID NO: 43550 - DNA, 25 bp, probe
ctcttccaattcgtcagtgagagct

SEQ ID NO: 43551 - DNA, 25 bp, probe
tgaagctggtcatcttcgtcatctg

SEQ ID NO: 43552 - DNA, 25 bp, probe
gtgaagctggtcatcttcgtcatct

SEQ ID NO: 43553 - DNA, 25 bp, probe
gaaccacaagcaaaccgtgaaaatg

SEQ ID NO: 43554 - DNA, 25 bp, probe
gaatctgacttacgccattattacg

SEQ ID NO: 43555 - DNA, 25 bp, probe
cgaatctgacttacgccattattac

SEQ ID NO: 43556 - DNA, 25 bp, probe
aatctgacttacgccattattacga

SEQ ID NO: 43557 - DNA, 25 bp, probe
ccatccagcctataatcctaagaac

SEQ ID NO: 43558 - DNA, 25 bp, probe
catccagcctataatcctaagaact

SEQ ID NO: 43559 - DNA, 25 bp, probe
atctgacttacgccattattacgac

SEQ ID NO: 43560 - DNA, 25 bp, probe
tccagcctataatcctaagaacttc

SEQ ID NO: 43561 - DNA, 25 bp, probe
atccagcctataatcctaagaactt

SEQ ID NO: 43562 - DNA, 25 bp, probe
gacttacgccattattacgacagta

SEQ ID NO: 43563 - DNA, 25 bp, probe
taatcctaagaacttctccaacgac

SEQ ID NO: 43564 - DNA, 25 bp, probe
ccattattacgacagtaccattgag

SEQ ID NO: 43565 - DNA, 25 bp, probe
ctaagaacttctccaacgacatcat

SEQ ID NO: 43566 - DNA, 25 bp, probe
gcctataatcctaagaacttctcca

SEQ ID NO: 43567 - DNA, 25 bp, probe
ccagcctataatcctaagaacttct

SEQ ID NO: 43568 - DNA, 25 bp, probe
gccattattacgacagtaccattga

SEQ ID NO: 43569 - DNA, 25 bp, probe
tctgacttacgccattattacgaca

SEQ ID NO: 43570 - DNA, 25 bp, probe
ataatcctaagaacttctccaacga

SEQ ID NO: 43571 - DNA, 25 bp, probe
ttattacgacagtaccattgagttg

SEQ ID NO: 43572 - DNA, 25 bp, probe
agcctataatcctaagaacttctcc

SEQ ID NO: 43573 - DNA, 25 bp, probe
cattattacgacagtaccattgagt

SEQ ID NO: 43574 - DNA, 25 bp, probe
cttacgccattattacgacagtacc

SEQ ID NO: 43575 - DNA, 25 bp, probe
acttacgccattattacgacagtac

SEQ ID NO: 43576 - DNA, 25 bp, probe
taagaacttctccaacgacatcatg

SEQ ID NO: 43577 - DNA, 25 bp, probe
atcctaagaacttctccaacgacat

SEQ ID NO: 43578 - DNA, 25 bp, probe
tattacgacagtaccattgagttgt

SEQ ID NO: 43579 - DNA, 25 bp, probe
tacgccattattacgacagtaccat

SEQ ID NO: 43580 - DNA, 25 bp, probe
aatcctaagaacttctccaacgaca

SEQ ID NO: 43581 - DNA, 25 bp, probe
cagcctataatcctaagaacttctc

SEQ ID NO: 43582 - DNA, 25 bp, probe
ctacatggcttatcttatgatctgg

SEQ ID NO: 43583 - DNA, 25 bp, probe
cctacatggcttatcttatgatctg

SEQ ID NO: 43584 - DNA, 25 bp, probe
attattacgacagtaccattgagtt

SEQ ID NO: 43585 - DNA, 25 bp, probe
ttacgccattattacgacagtacca

SEQ ID NO: 43586 - DNA, 25 bp, probe
actacaagaggtgaagatgacagtg

SEQ ID NO: 43587 - DNA, 25 bp, probe
attacgacagtaccattgagttgtg

SEQ ID NO: 43588 - DNA, 25 bp, probe
tgacttacgccattattacgacagt

SEQ ID NO: 43589 - DNA, 25 bp, probe
ctgacttacgccattattacgacag

SEQ ID NO: 43590 - DNA, 25 bp, probe
cgccattattacgacagtaccattg

SEQ ID NO: 43591 - DNA, 25 bp, probe
tcctaagaacttctccaacgacatc

SEQ ID NO: 43592 - DNA, 25 bp, probe
tataatcctaagaacttctccaacg

SEQ ID NO: 43593 - DNA, 25 bp, probe
atgaaacgctactaactacaggaag

SEQ ID NO: 43594 - DNA, 25 bp, probe
cctaagaacttctccaacgacatca

SEQ ID NO: 43595 - DNA, 25 bp, probe
acgccattattacgacagtaccatt

SEQ ID NO: 43596 - DNA, 25 bp, probe
actaactacaggaagcaaactaagc

SEQ ID NO: 43597 - DNA, 25 bp, probe
agcaactgaataaatacctcttagc

SEQ ID NO: 43598 - DNA, 25 bp, probe
ttggtgctgttataagatggtatcc

SEQ ID NO: 43599 - DNA, 25 bp, probe
ggtgctgttataagatggtatccta

SEQ ID NO: 43600 - DNA, 25 bp, probe
cttcattggtgctgttataagatgg

SEQ ID NO: 43601 - DNA, 25 bp, probe
tcattggtgctgttataagatggta

SEQ ID NO: 43602 - DNA, 25 bp, probe
aggcttcttcattggtgctgttata

SEQ ID NO: 43603 - DNA, 25 bp, probe
ttcattggtgctgttataagatggt

SEQ ID NO: 43604 - DNA, 25 bp, probe
gcttcttcattggtgctgttataag

SEQ ID NO: 43605 - DNA, 25 bp, probe
tggtgctgttataagatggtatcct

SEQ ID NO: 43606 - DNA, 25 bp, probe
cattggtgctgttataagatggtat

SEQ ID NO: 43607 - DNA, 25 bp, probe
attggtgctgttataagatggtatc

SEQ ID NO: 43608 - DNA, 25 bp, probe
ggcttcttcattggtgctgttataa

SEQ ID NO: 43609 - DNA, 25 bp, probe
tacttcagaacggcactacataaat

SEQ ID NO: 43610 - DNA, 25 bp, probe
ttacttcagaacggcactacataaa

SEQ ID NO: 43611 - DNA, 25 bp, probe
tttacttcagaacggcactacataa

SEQ ID NO: 43612 - DNA, 25 bp, probe
tacttcaggaaatgctattaggtgg

SEQ ID NO: 43613 - DNA, 25 bp, probe
catgcaaccaatgtatatctgagtt

SEQ ID NO: 43614 - DNA, 25 bp, probe
ctacttcaggaaatgctattaggtg

SEQ ID NO: 43615 - DNA, 25 bp, probe
tctacttcaggaaatgctattaggt

SEQ ID NO: 43616 - DNA, 25 bp, probe
aaggcttcttcattggtgctgttat

SEQ ID NO: 43617 - DNA, 25 bp, probe
gtgctgttataagatggtatcctat

SEQ ID NO: 43618 - DNA, 25 bp, probe
gacaatctacttcaggaaatgctat

SEQ ID NO: 43619 - DNA, 25 bp, probe
gcaaccaatgtatatctgagtttga

SEQ ID NO: 43620 - DNA, 25 bp, probe
gtttacttcagaacggcactacata

SEQ ID NO: 43621 - DNA, 25 bp, probe
gcaaatgattgagcaaatacagttt

SEQ ID NO: 43622 - DNA, 25 bp, probe
acttcagaacggcactacataaatg

SEQ ID NO: 43623 - DNA, 25 bp, probe
tgacaatctacttcaggaaatgcta

SEQ ID NO: 43624 - DNA, 25 bp, probe
ttgacaatctacttcaggaaatgct

SEQ ID NO: 43625 - DNA, 25 bp, probe
ggcaaatgattgagcaaatacagtt

SEQ ID NO: 43626 - DNA, 25 bp, probe
acaatctacttcaggaaatgctatt

SEQ ID NO: 43627 - DNA, 25 bp, probe
accaatgtatatctgagtttgaagg

SEQ ID NO: 43628 - DNA, 25 bp, probe
attgacaatctacttcaggaaatgc

SEQ ID NO: 43629 - DNA, 25 bp, probe
gtggcaaatgattgagcaaatacag

SEQ ID NO: 43630 - DNA, 25 bp, probe
ccaatgtatatctgagtttgaagga

SEQ ID NO: 43631 - DNA, 25 bp, probe
atctacttcaggaaatgctattagg

SEQ ID NO: 43632 - DNA, 25 bp, probe
tggcaaatgattgagcaaatacagt

SEQ ID NO: 43633 - DNA, 25 bp, probe
tgctgttataagatggtatcctatt

SEQ ID NO: 43634 - DNA, 25 bp, probe
tcttcattggtgctgttataagatg

SEQ ID NO: 43635 - DNA, 25 bp, probe
cttcttcattggtgctgttataaga

SEQ ID NO: 43636 - DNA, 25 bp, probe
acttcaggaaatgctattaggtggg

SEQ ID NO: 43637 - DNA, 25 bp, probe
tgtatatctgagtttgaaggatgtt

SEQ ID NO: 43638 - DNA, 25 bp, probe
aaaccaagcatcagtcatttcacac

SEQ ID NO: 43639 - DNA, 25 bp, probe
caaaccaagcatcagtcatttcaca

SEQ ID NO: 43640 - DNA, 25 bp, probe
ttcttcattggtgctgttataagat

SEQ ID NO: 43641 - DNA, 25 bp, probe
atgtatatctgagtttgaaggatgt

SEQ ID NO: 43642 - DNA, 25 bp, probe
agttctagctctctattacctgtcc

SEQ ID NO: 43643 - DNA, 25 bp, probe
gaatatggtgaagaagctggtgatg

SEQ ID NO: 43644 - DNA, 25 bp, probe
cagttctagctctctattacctgtc

SEQ ID NO: 43645 - DNA, 25 bp, probe
ccagttctagctctctattacctgt

SEQ ID NO: 43646 - DNA, 25 bp, probe
tgaatatggtgaagaagctggtgat

SEQ ID NO: 43647 - DNA, 25 bp, probe
cactcaactgactcatacctgtttc

SEQ ID NO: 43648 - DNA, 25 bp, probe
gccagttctagctctctattacctg

SEQ ID NO: 43649 - DNA, 25 bp, probe
aatatggtgaagaagctggtgatgg

SEQ ID NO: 43650 - DNA, 25 bp, probe
gtgaatatggtgaagaagctggtga

SEQ ID NO: 43651 - DNA, 25 bp, probe
agtgaatatggtgaagaagctggtg

SEQ ID NO: 43652 - DNA, 25 bp, probe
actcaactgactcatacctgtttcc

SEQ ID NO: 43653 - DNA, 25 bp, probe
ccactcaactgactcatacctgttt

SEQ ID NO: 43654 - DNA, 25 bp, probe
gttctagctctctattacctgtccc

SEQ ID NO: 43655 - DNA, 25 bp, probe
tcatcacctactacatcctggtcac

SEQ ID NO: 43656 - DNA, 25 bp, probe
gtcatcacctactacatcctggtca

SEQ ID NO: 43657 - DNA, 25 bp, probe
gtgaagtcattgcctgctcaagaat

SEQ ID NO: 43658 - DNA, 25 bp, probe
aattctctaataagagcaacagcag

SEQ ID NO: 43659 - DNA, 25 bp, probe
aagtcattgcctgctcaagaatgta

SEQ ID NO: 43660 - DNA, 25 bp, probe
attctctaataagagcaacagcagc

SEQ ID NO: 43661 - DNA, 25 bp, probe
cagtgaatatggtgaagaagctggt

SEQ ID NO: 43662 - DNA, 25 bp, probe
agccagttctagctctctattacct

SEQ ID NO: 43663 - DNA, 25 bp, probe
cagccagttctagctctctattacc

SEQ ID NO: 43664 - DNA, 25 bp, probe
ccagccagttctagctctctattac

SEQ ID NO: 43665 - DNA, 25 bp, probe
ctcaactgactcatacctgtttccg

SEQ ID NO: 43666 - DNA, 25 bp, probe
aacctttgagaaatccttttgtgaa

SEQ ID NO: 43667 - DNA, 25 bp, probe
cctttgagaaatccttttgtgaagt

SEQ ID NO: 43668 - DNA, 25 bp, probe
acctttgagaaatccttttgtgaag

SEQ ID NO: 43669 - DNA, 25 bp, probe
agaaatccttttgtgaagtcattgc

SEQ ID NO: 43670 - DNA, 25 bp, probe
taacctttgagaaatccttttgtga

SEQ ID NO: 43671 - DNA, 25 bp, probe
actaacctttgagaaatccttttgt

SEQ ID NO: 43672 - DNA, 25 bp, probe
agtcattgcctgctcaagaatgtac

SEQ ID NO: 43673 - DNA, 25 bp, probe
gaaagaaactgtctgctgctcaaga

SEQ ID NO: 43674 - DNA, 25 bp, probe
agaaagaaactgtctgctgctcaag

SEQ ID NO: 43675 - DNA, 25 bp, probe
ctaacctttgagaaatccttttgtg

SEQ ID NO: 43676 - DNA, 25 bp, probe
ttgcaggactaacctttgagaaatc

SEQ ID NO: 43677 - DNA, 25 bp, probe
cctcccttctttgtttgaattctct

SEQ ID NO: 43678 - DNA, 25 bp, probe
gagaaatccttttgtgaagtcattg

SEQ ID NO: 43679 - DNA, 25 bp, probe
ctttgagaaatccttttgtgaagtc

SEQ ID NO: 43680 - DNA, 25 bp, probe
gttgcaggactaacctttgagaaat

SEQ ID NO: 43681 - DNA, 25 bp, probe
tttgagaaatccttttgtgaagtca

SEQ ID NO: 43682 - DNA, 25 bp, probe
gaaggtcagagccaaattccaagag

SEQ ID NO: 43683 - DNA, 25 bp, probe
gagaaggtcagagccaaattccaag

SEQ ID NO: 43684 - DNA, 25 bp, probe
gaaatccttttgtgaagtcattgcc

SEQ ID NO: 43685 - DNA, 25 bp, probe
gactaacctttgagaaatccttttg

SEQ ID NO: 43686 - DNA, 25 bp, probe
ctattcctctgtgtgttctctggat

SEQ ID NO: 43687 - DNA, 25 bp, probe
tattcctctgtgtgttctctggatc

SEQ ID NO: 43688 - DNA, 25 bp, probe
attcctctgtgtgttctctggatct

SEQ ID NO: 43689 - DNA, 25 bp, probe
cctattcctctgtgtgttctctgga

SEQ ID NO: 43690 - DNA, 25 bp, probe
ttcctctgtgtgttctctggatctt

SEQ ID NO: 43691 - DNA, 25 bp, probe
gcctattcctctgtgtgttctctgg

SEQ ID NO: 43692 - DNA, 25 bp, probe
ctctgtgtgttctctggatcttttc

SEQ ID NO: 43693 - DNA, 25 bp, probe
tctgtgtgttctctggatcttttca

SEQ ID NO: 43694 - DNA, 25 bp, probe
tcctctgtgtgttctctggatcttt

SEQ ID NO: 43695 - DNA, 25 bp, probe
ctgtgtgttctctggatcttttcag

SEQ ID NO: 43696 - DNA, 25 bp, probe
cctctgtgtgttctctggatctttt

SEQ ID NO: 43697 - DNA, 25 bp, probe
caactccattatgaggcccttctac

SEQ ID NO: 43698 - DNA, 25 bp, probe
gagacagggatgatggagagttcat

SEQ ID NO: 43699 - DNA, 25 bp, probe
agacagggatgatggagagttcatg

SEQ ID NO: 43700 - DNA, 25 bp, probe
tggagacagggatgatggagagttc

SEQ ID NO: 43701 - DNA, 25 bp, probe
ggcctattcctctgtgtgttctctg

SEQ ID NO: 43702 - DNA, 25 bp, probe
tgtgtgttctctggatcttttcagc

SEQ ID NO: 43703 - DNA, 25 bp, probe
ggagacagggatgatggagagttca

SEQ ID NO: 43704 - DNA, 25 bp, probe
aactccattatgaggcccttctacc

SEQ ID NO: 43705 - DNA, 25 bp, probe
ccaactccattatgaggcccttcta

SEQ ID NO: 43706 - DNA, 25 bp, probe
gtggcctattcctctgtgtgttctc

SEQ ID NO: 43707 - DNA, 25 bp, probe
tggcctattcctctgtgtgttctct

SEQ ID NO: 43708 - DNA, 25 bp, probe
ctggagacagggatgatggagagtt

SEQ ID NO: 43709 - DNA, 25 bp, probe
ctgagtgactggagacagggatgat

SEQ ID NO: 43710 - DNA, 25 bp, probe
gtaaggtggcctattcctctgtgtg

SEQ ID NO: 43711 - DNA, 25 bp, probe
gtgtaaggtggcctattcctctgtg

SEQ ID NO: 43712 - DNA, 25 bp, probe
gtgtgtaaggtggcctattcctctg

SEQ ID NO: 43713 - DNA, 25 bp, probe
ctccattatgaggcccttctaccag

SEQ ID NO: 43714 - DNA, 25 bp, probe
gtgtgttctctggatcttttcagcc

SEQ ID NO: 43715 - DNA, 25 bp, probe
taaggtggcctattcctctgtgtgt

SEQ ID NO: 43716 - DNA, 25 bp, probe
tgtaaggtggcctattcctctgtgt

SEQ ID NO: 43717 - DNA, 25 bp, probe
tgtgtaaggtggcctattcctctgt

SEQ ID NO: 43718 - DNA, 25 bp, probe
actccattatgaggcccttctacca

SEQ ID NO: 43719 - DNA, 25 bp, probe
ttctctggatcttttcagccctgtg

SEQ ID NO: 43720 - DNA, 25 bp, probe
gttctctggatcttttcagccctgt

SEQ ID NO: 43721 - DNA, 25 bp, probe
tgttctctggatcttttcagccctg

SEQ ID NO: 43722 - DNA, 25 bp, probe
gtgttctctggatcttttcagccct

SEQ ID NO: 43723 - DNA, 25 bp, probe
gacagggatgatggagagttcatga

SEQ ID NO: 43724 - DNA, 25 bp, probe
tgtgttctctggatcttttcagccc

SEQ ID NO: 43725 - DNA, 25 bp, probe
tccattatgaggcccttctaccagg

SEQ ID NO: 43726 - DNA, 25 bp, probe
aaccatgcggagaattagagttcag

SEQ ID NO: 43727 - DNA, 25 bp, probe
ctcctacagaaactcacagccaaat

SEQ ID NO: 43728 - DNA, 25 bp, probe
tcctacagaaactcacagccaaatg

SEQ ID NO: 43729 - DNA, 25 bp, probe
cagccttcatatttgccattgtgtc

SEQ ID NO: 43730 - DNA, 25 bp, probe
caaaccatgcggagaattagagttc

SEQ ID NO: 43731 - DNA, 25 bp, probe
aaaccatgcggagaattagagttca

SEQ ID NO: 43732 - DNA, 25 bp, probe
gaaaccacattaaggtgctcacaaa

SEQ ID NO: 43733 - DNA, 25 bp, probe
aaaactatttcttcagccccttctc

SEQ ID NO: 43734 - DNA, 25 bp, probe
catgcggagaattagagttcagctc

SEQ ID NO: 43735 - DNA, 25 bp, probe
aaactatttcttcagccccttctct

SEQ ID NO: 43736 - DNA, 25 bp, probe
agccttcatatttgccattgtgtcc

SEQ ID NO: 43737 - DNA, 25 bp, probe
atgcggagaattagagttcagctca

SEQ ID NO: 43738 - DNA, 25 bp, probe
cctacagaaactcacagccaaatgg

SEQ ID NO: 43739 - DNA, 25 bp, probe
ccaaaccatgcggagaattagagtt

SEQ ID NO: 43740 - DNA, 25 bp, probe
atggagttaagatccctcacaggac

SEQ ID NO: 43741 - DNA, 25 bp, probe
catggagttaagatccctcacagga

SEQ ID NO: 43742 - DNA, 25 bp, probe
tgcggagaattagagttcagctcag

SEQ ID NO: 43743 - DNA, 25 bp, probe
accatgcggagaattagagttcagc

SEQ ID NO: 43744 - DNA, 25 bp, probe
ggaaaccacattaaggtgctcacaa

SEQ ID NO: 43745 - DNA, 25 bp, probe
ccatgcggagaattagagttcagct

SEQ ID NO: 43746 - DNA, 25 bp, probe
aactatttcttcagccccttctctg

SEQ ID NO: 43747 - DNA, 25 bp, probe
ccatcctcttctacttcacccagaa

SEQ ID NO: 43748 - DNA, 25 bp, probe
cttttcacatcaccaagacagccta

SEQ ID NO: 43749 - DNA, 25 bp, probe
aaaccacattaaggtgctcacaaaa

SEQ ID NO: 43750 - DNA, 25 bp, probe
tttcacatcaccaagacagcctacc

SEQ ID NO: 43751 - DNA, 25 bp, probe
ttttcacatcaccaagacagcctac

SEQ ID NO: 43752 - DNA, 25 bp, probe
cggagaattagagttcagctcagct

SEQ ID NO: 43753 - DNA, 25 bp, probe
cccatcctcttctacttcacccaga

SEQ ID NO: 43754 - DNA, 25 bp, probe
gccttcatatttgccattgtgtccg

SEQ ID NO: 43755 - DNA, 25 bp, probe
ttaagatccctcacaggacccagaa

SEQ ID NO: 43756 - DNA, 25 bp, probe
cccaaaccatgcggagaattagagt

SEQ ID NO: 43757 - DNA, 25 bp, probe
actatttcttcagccccttctctgg

SEQ ID NO: 43758 - DNA, 25 bp, probe
gcatggagttaagatccctcacagg

SEQ ID NO: 43759 - DNA, 25 bp, probe
ggcatggagttaagatccctcacag

SEQ ID NO: 43760 - DNA, 25 bp, probe
taagatccctcacaggacccagaag

SEQ ID NO: 43761 - DNA, 25 bp, probe
cttcctgccttttcacatcaccaag

SEQ ID NO: 43762 - DNA, 25 bp, probe
gttaagatccctcacaggacccaga

SEQ ID NO: 43763 - DNA, 25 bp, probe
agttaagatccctcacaggacccag

SEQ ID NO: 43764 - DNA, 25 bp, probe
gagttaagatccctcacaggaccca

SEQ ID NO: 43765 - DNA, 25 bp, probe
tggagttaagatccctcacaggacc

SEQ ID NO: 43766 - DNA, 25 bp, probe
cttcatatttgccattgtgtccggg

SEQ ID NO: 43767 - DNA, 25 bp, probe
ccttcatatttgccattgtgtccgg

SEQ ID NO: 43768 - DNA, 25 bp, probe
ttcctgccttttcacatcaccaaga

SEQ ID NO: 43769 - DNA, 25 bp, probe
gcagccttcatatttgccattgtgt

SEQ ID NO: 43770 - DNA, 25 bp, probe
gcatctagttctaagaagaggtcaa

SEQ ID NO: 43771 - DNA, 25 bp, probe
cagcatctagttctaagaagaggtc

SEQ ID NO: 43772 - DNA, 25 bp, probe
agcatctagttctaagaagaggtca

SEQ ID NO: 43773 - DNA, 25 bp, probe
tcagcatctagttctaagaagaggt

SEQ ID NO: 43774 - DNA, 25 bp, probe
ctcagcatctagttctaagaagagg

SEQ ID NO: 43775 - DNA, 25 bp, probe
actcagcatctagttctaagaagag

SEQ ID NO: 43776 - DNA, 25 bp, probe
actatcgagaacagagacagttacc

SEQ ID NO: 43777 - DNA, 25 bp, probe
tagttctaagaagaggtcaaatggg

SEQ ID NO: 43778 - DNA, 25 bp, probe
ctagttctaagaagaggtcaaatgg

SEQ ID NO: 43779 - DNA, 25 bp, probe
aactcagcatctagttctaagaaga

SEQ ID NO: 43780 - DNA, 25 bp, probe
tctagttctaagaagaggtcaaatg

SEQ ID NO: 43781 - DNA, 25 bp, probe
catctagttctaagaagaggtcaaa

SEQ ID NO: 43782 - DNA, 25 bp, probe
aactatcgagaacagagacagttac

SEQ ID NO: 43783 - DNA, 25 bp, probe
ttctaagaagaggtcaaatgggctc

SEQ ID NO: 43784 - DNA, 25 bp, probe
gttctaagaagaggtcaaatgggct

SEQ ID NO: 43785 - DNA, 25 bp, probe
agttctaagaagaggtcaaatgggc

SEQ ID NO: 43786 - DNA, 25 bp, probe
ctatcgagaacagagacagttaccc

SEQ ID NO: 43787 - DNA, 25 bp, probe
atctagttctaagaagaggtcaaat

SEQ ID NO: 43788 - DNA, 25 bp, probe
cacaaactcagcatctagttctaag

SEQ ID NO: 43789 - DNA, 25 bp, probe
acaaactcagcatctagttctaaga

SEQ ID NO: 43790 - DNA, 25 bp, probe
gcacaaactcagcatctagttctaa

SEQ ID NO: 43791 - DNA, 25 bp, probe
caaactcagcatctagttctaagaa

SEQ ID NO: 43792 - DNA, 25 bp, probe
aaactcagcatctagttctaagaag

SEQ ID NO: 43793 - DNA, 25 bp, probe
agcacaaactcagcatctagttcta

SEQ ID NO: 43794 - DNA, 25 bp, probe
aaactatcgagaacagagacagtta

SEQ ID NO: 43795 - DNA, 25 bp, probe
gttaccccagggagattatgtaaaa

SEQ ID NO: 43796 - DNA, 25 bp, probe
agttaccccagggagattatgtaaa

SEQ ID NO: 43797 - DNA, 25 bp, probe
agtcagcacaaactcagcatctagt

SEQ ID NO: 43798 - DNA, 25 bp, probe
cagttaccccagggagattatgtaa

SEQ ID NO: 43799 - DNA, 25 bp, probe
acagttaccccagggagattatgta

SEQ ID NO: 43800 - DNA, 25 bp, probe
gagacagttaccccagggagattat

SEQ ID NO: 43801 - DNA, 25 bp, probe
cagcacaaactcagcatctagttct

SEQ ID NO: 43802 - DNA, 25 bp, probe
tcagcacaaactcagcatctagttc

SEQ ID NO: 43803 - DNA, 25 bp, probe
ctaagaagaggtcaaatgggctctc

SEQ ID NO: 43804 - DNA, 25 bp, probe
agacagttaccccagggagattatg

SEQ ID NO: 43805 - DNA, 25 bp, probe
gtcagcacaaactcagcatctagtt

SEQ ID NO: 43806 - DNA, 25 bp, probe
taagaagaggtcaaatgggctctct

SEQ ID NO: 43807 - DNA, 25 bp, probe
tctaagaagaggtcaaatgggctct

SEQ ID NO: 43808 - DNA, 25 bp, probe
gacagttaccccagggagattatgt

SEQ ID NO: 43809 - DNA, 25 bp, probe
agagacagttaccccagggagatta

SEQ ID NO: 43810 - DNA, 25 bp, probe
tatcgagaacagagacagttacccc

SEQ ID NO: 43811 - DNA, 25 bp, probe
aaaactatcgagaacagagacagtt

SEQ ID NO: 43812 - DNA, 25 bp, probe
aagaggtcaaatgggctctctcatt

SEQ ID NO: 43813 - DNA, 25 bp, probe
gagtcagcacaaactcagcatctag

SEQ ID NO: 43814 - DNA, 25 bp, probe
gattaagtcatcagccattacagtg

SEQ ID NO: 43815 - DNA, 25 bp, probe
agattaagtcatcagccattacagt

SEQ ID NO: 43816 - DNA, 25 bp, probe
agagaagattaagtcatcagccatt

SEQ ID NO: 43817 - DNA, 25 bp, probe
aagagaagattaagtcatcagccat

SEQ ID NO: 43818 - DNA, 25 bp, probe
cacaagcaagagaagattaagtcat

SEQ ID NO: 43819 - DNA, 25 bp, probe
caagagaagattaagtcatcagcca

SEQ ID NO: 43820 - DNA, 25 bp, probe
ccacaagcaagagaagattaagtca

SEQ ID NO: 43821 - DNA, 25 bp, probe
agcaagagaagattaagtcatcagc

SEQ ID NO: 43822 - DNA, 25 bp, probe
caagcaagagaagattaagtcatca

SEQ ID NO: 43823 - DNA, 25 bp, probe
acaagcaagagaagattaagtcatc

SEQ ID NO: 43824 - DNA, 25 bp, probe
gcctgaagttgaagatgtgattaac

SEQ ID NO: 43825 - DNA, 25 bp, probe
aagattaagtcatcagccattacag

SEQ ID NO: 43826 - DNA, 25 bp, probe
gaagattaagtcatcagccattaca

SEQ ID NO: 43827 - DNA, 25 bp, probe
aagcaagagaagattaagtcatcag

SEQ ID NO: 43828 - DNA, 25 bp, probe
agaagattaagtcatcagccattac

SEQ ID NO: 43829 - DNA, 25 bp, probe
cgcctgaagttgaagatgtgattaa

SEQ ID NO: 43830 - DNA, 25 bp, probe
gagaagattaagtcatcagccatta

SEQ ID NO: 43831 - DNA, 25 bp, probe
gcaagagaagattaagtcatcagcc

SEQ ID NO: 43832 - DNA, 25 bp, probe
cctgaagttgaagatgtgattaaca

SEQ ID NO: 43833 - DNA, 25 bp, probe
taacagtgttcagttcatagcagaa

SEQ ID NO: 43834 - DNA, 25 bp, probe
ttaacagtgttcagttcatagcaga

SEQ ID NO: 43835 - DNA, 25 bp, probe
attaacagtgttcagttcatagcag

SEQ ID NO: 43836 - DNA, 25 bp, probe
gattaacagtgttcagttcatagca

SEQ ID NO: 43837 - DNA, 25 bp, probe
aagttgaagatgtgattaacagtgt

SEQ ID NO: 43838 - DNA, 25 bp, probe
gccacaagcaagagaagattaagtc

SEQ ID NO: 43839 - DNA, 25 bp, probe
tcgcctgaagttgaagatgtgatta

SEQ ID NO: 43840 - DNA, 25 bp, probe
tgattaacagtgttcagttcatagc

SEQ ID NO: 43841 - DNA, 25 bp, probe
tgaagttgaagatgtgattaacagt

SEQ ID NO: 43842 - DNA, 25 bp, probe
gaagttgaagatgtgattaacagtg

SEQ ID NO: 43843 - DNA, 25 bp, probe
gatgtgattaacagtgttcagttca

SEQ ID NO: 43844 - DNA, 25 bp, probe
agatgtgattaacagtgttcagttc

SEQ ID NO: 43845 - DNA, 25 bp, probe
gaagatgtgattaacagtgttcagt

SEQ ID NO: 43846 - DNA, 25 bp, probe
atgtgattaacagtgttcagttcat

SEQ ID NO: 43847 - DNA, 25 bp, probe
aagatgtgattaacagtgttcagtt

SEQ ID NO: 43848 - DNA, 25 bp, probe
agttgaagatgtgattaacagtgtt

SEQ ID NO: 43849 - DNA, 25 bp, probe
ctgaagttgaagatgtgattaacag

SEQ ID NO: 43850 - DNA, 25 bp, probe
attaagtcatcagccattacagtgg

SEQ ID NO: 43851 - DNA, 25 bp, probe
gttgaagatgtgattaacagtgttc

SEQ ID NO: 43852 - DNA, 25 bp, probe
aggaggtagaagatgactggaaata

SEQ ID NO: 43853 - DNA, 25 bp, probe
ggaggtagaagatgactggaaatac

SEQ ID NO: 43854 - DNA, 25 bp, probe
gaggtagaagatgactggaaatacg

SEQ ID NO: 43855 - DNA, 25 bp, probe
tgtgattaacagtgttcagttcata

SEQ ID NO: 43856 - DNA, 25 bp, probe
taattgtctgtgtatttggaactgc

SEQ ID NO: 43857 - DNA, 25 bp, probe
aaggaggtagaagatgactggaaat

SEQ ID NO: 43858 - DNA, 25 bp, probe
attgtggttactgttctacggtctt

SEQ ID NO: 43859 - DNA, 25 bp, probe
gattgtggttactgttctacggtct

SEQ ID NO: 43860 - DNA, 25 bp, probe
ttgtggttactgttctacggtcttc

SEQ ID NO: 43861 - DNA, 25 bp, probe
agattgtggttactgttctacggtc

SEQ ID NO: 43862 - DNA, 25 bp, probe
cgaggttatcctgaggtgacattaa

SEQ ID NO: 43863 - DNA, 25 bp, probe
gaggttatcctgaggtgacattaat

SEQ ID NO: 43864 - DNA, 25 bp, probe
cagattgtggttactgttctacggt

SEQ ID NO: 43865 - DNA, 25 bp, probe
ggtgtataaagaagttctccatcca

SEQ ID NO: 43866 - DNA, 25 bp, probe
aacggtgtataaagaagttctccat

SEQ ID NO: 43867 - DNA, 25 bp, probe
aaacggtgtataaagaagttctcca

SEQ ID NO: 43868 - DNA, 25 bp, probe
acggtgtataaagaagttctccatc

SEQ ID NO: 43869 - DNA, 25 bp, probe
cggtgtataaagaagttctccatcc

SEQ ID NO: 43870 - DNA, 25 bp, probe
tgtataaagaagttctccatccaga

SEQ ID NO: 43871 - DNA, 25 bp, probe
gtgtataaagaagttctccatccag

SEQ ID NO: 43872 - DNA, 25 bp, probe
agaggatgtgcttgatggagatgaa

SEQ ID NO: 43873 - DNA, 25 bp, probe
tataaagaagttctccatccagagg

SEQ ID NO: 43874 - DNA, 25 bp, probe
ataaagaagttctccatccagaggt

SEQ ID NO: 43875 - DNA, 25 bp, probe
aagaggatgtgcttgatggagatga

SEQ ID NO: 43876 - DNA, 25 bp, probe
taaagaagttctccatccagaggtt

SEQ ID NO: 43877 - DNA, 25 bp, probe
cctaagagacctggacttaagagaa

SEQ ID NO: 43878 - DNA, 25 bp, probe
gtataaagaagttctccatccagag

SEQ ID NO: 43879 - DNA, 25 bp, probe
ctaagagacctggacttaagagaat

SEQ ID NO: 43880 - DNA, 25 bp, probe
taagagacctggacttaagagaatt

SEQ ID NO: 43881 - DNA, 25 bp, probe
gaggatgtgcttgatggagatgaaa

SEQ ID NO: 43882 - DNA, 25 bp, probe
cattgctaagcgaggttatcctgag

SEQ ID NO: 43883 - DNA, 25 bp, probe
aaagaggatgtgcttgatggagatg

SEQ ID NO: 43884 - DNA, 25 bp, probe
attaatggactgcatgaggctcttc

SEQ ID NO: 43885 - DNA, 25 bp, probe
aaagaagttctccatccagaggttc

SEQ ID NO: 43886 - DNA, 25 bp, probe
caaagaggatgtgcttgatggagat

SEQ ID NO: 43887 - DNA, 25 bp, probe
tgtggttactgttctacggtcttcg

SEQ ID NO: 43888 - DNA, 25 bp, probe
agagacctggacttaagagaatttg

SEQ ID NO: 43889 - DNA, 25 bp, probe
aagaagttctccatccagaggttcc

SEQ ID NO: 43890 - DNA, 25 bp, probe
aagagacctggacttaagagaattt

SEQ ID NO: 43891 - DNA, 25 bp, probe
gcgaggttatcctgaggtgacatta

SEQ ID NO: 43892 - DNA, 25 bp, probe
gagacctggacttaagagaatttgc

SEQ ID NO: 43893 - DNA, 25 bp, probe
gcagaaaacggtgtataaagaagtt

SEQ ID NO: 43894 - DNA, 25 bp, probe
aggcagaaaacggtgtataaagaag

SEQ ID NO: 43895 - DNA, 25 bp, probe
gaggcagaaaacggtgtataaagaa

SEQ ID NO: 43896 - DNA, 25 bp, probe
gacttaagagaatttgcctcagaaa

SEQ ID NO: 43897 - DNA, 25 bp, probe
ggacttaagagaatttgcctcagaa

SEQ ID NO: 43898 - DNA, 25 bp, probe
ggcagaaaacggtgtataaagaagt

SEQ ID NO: 43899 - DNA, 25 bp, probe
taagagaatttgcctcagaaaacac

SEQ ID NO: 43900 - DNA, 25 bp, probe
ctaagcgaggttatcctgaggtgac

SEQ ID NO: 43901 - DNA, 25 bp, probe
tacagattgtggttactgttctacg

SEQ ID NO: 43902 - DNA, 25 bp, probe
tgatgttgaagatgatcctgatgaa

SEQ ID NO: 43903 - DNA, 25 bp, probe
ttgatgttgaagatgatcctgatga

SEQ ID NO: 43904 - DNA, 25 bp, probe
gttgatgttgaagatgatcctgatg

SEQ ID NO: 43905 - DNA, 25 bp, probe
tgttgatgttgaagatgatcctgat

SEQ ID NO: 43906 - DNA, 25 bp, probe
ttgttgatgttgaagatgatcctga

SEQ ID NO: 43907 - DNA, 25 bp, probe
gttgttgatgttgaagatgatcctg

SEQ ID NO: 43908 - DNA, 25 bp, probe
gtggttgttgatgttgaagatgatc

SEQ ID NO: 43909 - DNA, 25 bp, probe
ctaccagtaccaatgattaccatga

SEQ ID NO: 43910 - DNA, 25 bp, probe
cactaccagtaccaatgattaccat

SEQ ID NO: 43911 - DNA, 25 bp, probe
cagtaccaatgattaccatgatgtc

SEQ ID NO: 43912 - DNA, 25 bp, probe
agtcactaccagtaccaatgattac

SEQ ID NO: 43913 - DNA, 25 bp, probe
cgtggttgttgatgttgaagatgat

SEQ ID NO: 43914 - DNA, 25 bp, probe
ccagtaccaatgattaccatgatgt

SEQ ID NO: 43915 - DNA, 25 bp, probe
accagtaccaatgattaccatgatg

SEQ ID NO: 43916 - DNA, 25 bp, probe
ggttgttgatgttgaagatgatcct

SEQ ID NO: 43917 - DNA, 25 bp, probe
agtaccaatgattaccatgatgtcg

SEQ ID NO: 43918 - DNA, 25 bp, probe
taccagtaccaatgattaccatgat

SEQ ID NO: 43919 - DNA, 25 bp, probe
gtcactaccagtaccaatgattacc

SEQ ID NO: 43920 - DNA, 25 bp, probe
taccaatgattaccatgatgtcgtg

SEQ ID NO: 43921 - DNA, 25 bp, probe
gtaccaatgattaccatgatgtcgt

SEQ ID NO: 43922 - DNA, 25 bp, probe
tggttgttgatgttgaagatgatcc

SEQ ID NO: 43923 - DNA, 25 bp, probe
tcactaccagtaccaatgattacca

SEQ ID NO: 43924 - DNA, 25 bp, probe
actaccagtaccaatgattaccatg

SEQ ID NO: 43925 - DNA, 25 bp, probe
tagtcactaccagtaccaatgatta

SEQ ID NO: 43926 - DNA, 25 bp, probe
gtcgtggttgttgatgttgaagatg

SEQ ID NO: 43927 - DNA, 25 bp, probe
gatgtcgtggttgttgatgttgaag

SEQ ID NO: 43928 - DNA, 25 bp, probe
tcgtggttgttgatgttgaagatga

SEQ ID NO: 43929 - DNA, 25 bp, probe
tgtcgtggttgttgatgttgaagat

SEQ ID NO: 43930 - DNA, 25 bp, probe
atgtcgtggttgttgatgttgaaga

SEQ ID NO: 43931 - DNA, 25 bp, probe
atgatgtcgtggttgttgatgttga

SEQ ID NO: 43932 - DNA, 25 bp, probe
gttgaagatgatcctgatgaaatgg

SEQ ID NO: 43933 - DNA, 25 bp, probe
tgttgaagatgatcctgatgaaatg

SEQ ID NO: 43934 - DNA, 25 bp, probe
tgatgtcgtggttgttgatgttgaa

SEQ ID NO: 43935 - DNA, 25 bp, probe
atttcaagcctgactctgttcattt

SEQ ID NO: 43936 - DNA, 25 bp, probe
gatgttgaagatgatcctgatgaaa

SEQ ID NO: 43937 - DNA, 25 bp, probe
ttgaagatgatcctgatgaaatggc

SEQ ID NO: 43938 - DNA, 25 bp, probe
atgttgaagatgatcctgatgaaat

SEQ ID NO: 43939 - DNA, 25 bp, probe
tttcaagcctgactctgttcatttc

SEQ ID NO: 43940 - DNA, 25 bp, probe
catttcaagcctgactctgttcatt

SEQ ID NO: 43941 - DNA, 25 bp, probe
gaagatgatcctgatgaaatggctg

SEQ ID NO: 43942 - DNA, 25 bp, probe
catgatgtcgtggttgttgatgttg

SEQ ID NO: 43943 - DNA, 25 bp, probe
tgaagatgatcctgatgaaatggct

SEQ ID NO: 43944 - DNA, 25 bp, probe
gtagtcactaccagtaccaatgatt

SEQ ID NO: 43945 - DNA, 25 bp, probe
tgtagtcactaccagtaccaatgat

SEQ ID NO: 43946 - DNA, 25 bp, probe
gaccatcttctccatcatcctgttg

SEQ ID NO: 43947 - DNA, 25 bp, probe
tgaccatcttctccatcatcctgtt

SEQ ID NO: 43948 - DNA, 25 bp, probe
gtgaccatcttctccatcatcctgt

SEQ ID NO: 43949 - DNA, 25 bp, probe
cttcagcatcctccttctggactat

SEQ ID NO: 43950 - DNA, 25 bp, probe
ttcagcatcctccttctggactatg

SEQ ID NO: 43951 - DNA, 25 bp, probe
gatcctctacaaagcccactacttt

SEQ ID NO: 43952 - DNA, 25 bp, probe
ggtgaccatcttctccatcatcctg

SEQ ID NO: 43953 - DNA, 25 bp, probe
accatcttctccatcatcctgttgg

SEQ ID NO: 43954 - DNA, 25 bp, probe
cgatcctctacaaagcccactactt

SEQ ID NO: 43955 - DNA, 25 bp, probe
atcctctacaaagcccactactttt

SEQ ID NO: 43956 - DNA, 25 bp, probe
atcctccttctggactatgcctgtc

SEQ ID NO: 43957 - DNA, 25 bp, probe
ccttcagcatcctccttctggacta

SEQ ID NO: 43958 - DNA, 25 bp, probe
gtggtgaccatcttctccatcatcc

SEQ ID NO: 43959 - DNA, 25 bp, probe
tggtgaccatcttctccatcatcct

SEQ ID NO: 43960 - DNA, 25 bp, probe
cgtggtgaccatcttctccatcatc

SEQ ID NO: 43961 - DNA, 25 bp, probe
aggagattctggaagagagtgagat

SEQ ID NO: 43962 - DNA, 25 bp, probe
ggagattctggaagagagtgagatc

SEQ ID NO: 43963 - DNA, 25 bp, probe
gaggagattctggaagagagtgaga

SEQ ID NO: 43964 - DNA, 25 bp, probe
aacactggtcctcattcctttattg

SEQ ID NO: 43965 - DNA, 25 bp, probe
caacactggtcctcattcctttatt

SEQ ID NO: 43966 - DNA, 25 bp, probe
atggaggagattctggaagagagtg

SEQ ID NO: 43967 - DNA, 25 bp, probe
tcaacactggtcctcattcctttat

SEQ ID NO: 43968 - DNA, 25 bp, probe
atcaacactggtcctcattccttta

SEQ ID NO: 43969 - DNA, 25 bp, probe
tcatcaaatgtgcttcagagattat

SEQ ID NO: 43970 - DNA, 25 bp, probe
ctcatcaaatgtgcttcagagatta

SEQ ID NO: 43971 - DNA, 25 bp, probe
ggaggagattctggaagagagtgag

SEQ ID NO: 43972 - DNA, 25 bp, probe
gatcctcttctctttcatcactgat

SEQ ID NO: 43973 - DNA, 25 bp, probe
agatcctcttctctttcatcactga

SEQ ID NO: 43974 - DNA, 25 bp, probe
aatcaacactggtcctcattccttt

SEQ ID NO: 43975 - DNA, 25 bp, probe
aaatcaacactggtcctcattcctt

SEQ ID NO: 43976 - DNA, 25 bp, probe
catggaggagattctggaagagagt

SEQ ID NO: 43977 - DNA, 25 bp, probe
acactggtcctcattcctttattgg

SEQ ID NO: 43978 - DNA, 25 bp, probe
gattctggaagagagtgagatctag

SEQ ID NO: 43979 - DNA, 25 bp, probe
gctcatcaaatgtgcttcagagatt

SEQ ID NO: 43980 - DNA, 25 bp, probe
catcaaatgtgcttcagagattata

SEQ ID NO: 43981 - DNA, 25 bp, probe
tggaggagattctggaagagagtga

SEQ ID NO: 43982 - DNA, 25 bp, probe
cactggtcctcattcctttattggg

SEQ ID NO: 43983 - DNA, 25 bp, probe
tcactgatgatcaagttgaaggatt

SEQ ID NO: 43984 - DNA, 25 bp, probe
ctcattcctttattgggcgttcatg

SEQ ID NO: 43985 - DNA, 25 bp, probe
cctcattcctttattgggcgttcat

SEQ ID NO: 43986 - DNA, 25 bp, probe
agattctggaagagagtgagatcta

SEQ ID NO: 43987 - DNA, 25 bp, probe
gagattctggaagagagtgagatct

SEQ ID NO: 43988 - DNA, 25 bp, probe
atacgacttttcattcagttgacac

SEQ ID NO: 43989 - DNA, 25 bp, probe
tacgacttttcattcagttgacact

SEQ ID NO: 43990 - DNA, 25 bp, probe
tcaaatgtgcttcagagattataaa

SEQ ID NO: 43991 - DNA, 25 bp, probe
cagagattataaatacagattggca

SEQ ID NO: 43992 - DNA, 25 bp, probe
gtcctcattcctttattgggcgttc

SEQ ID NO: 43993 - DNA, 25 bp, probe
tatacgacttttcattcagttgaca

SEQ ID NO: 43994 - DNA, 25 bp, probe
atcaaatgtgcttcagagattataa

SEQ ID NO: 43995 - DNA, 25 bp, probe
aaaatcaacactggtcctcattcct

SEQ ID NO: 43996 - DNA, 25 bp, probe
caaaatcaacactggtcctcattcc

SEQ ID NO: 43997 - DNA, 25 bp, probe
tcagagattataaatacagattggc

SEQ ID NO: 43998 - DNA, 25 bp, probe
gtgcttcagagattataaatacaga

SEQ ID NO: 43999 - DNA, 25 bp, probe
atcactgatgatcaagttgaaggat

SEQ ID NO: 44000 - DNA, 25 bp, probe
atgagatcctcttctctttcatcac

SEQ ID NO: 44001 - DNA, 25 bp, probe
catgagatcctcttctctttcatca

SEQ ID NO: 44002 - DNA, 25 bp, probe
gagatcctcttctctttcatcactg

SEQ ID NO: 44003 - DNA, 25 bp, probe
tgagatcctcttctctttcatcact

SEQ ID NO: 44004 - DNA, 25 bp, probe
actgatgatcaagttgaaggatttg

SEQ ID NO: 44005 - DNA, 25 bp, probe
acacacagcatgtaatggtatctta

SEQ ID NO: 44006 - DNA, 25 bp, probe
cacacagcatgtaatggtatcttaa

SEQ ID NO: 44007 - DNA, 25 bp, probe
gtgaagtggaaatgttctaaaggtg

SEQ ID NO: 44008 - DNA, 25 bp, probe
ttgtgaagtggaaatgttctaaagg

SEQ ID NO: 44009 - DNA, 25 bp, probe
tgtgaagtggaaatgttctaaaggt

SEQ ID NO: 44010 - DNA, 25 bp, probe
gccaagtaagaaagtgaagcaaatc

SEQ ID NO: 44011 - DNA, 25 bp, probe
gttctaaaggtggtgaggcaataaa

SEQ ID NO: 44012 - DNA, 25 bp, probe
gaagtggaaatgttctaaaggtggt

SEQ ID NO: 44013 - DNA, 25 bp, probe
tgaagtggaaatgttctaaaggtgg

SEQ ID NO: 44014 - DNA, 25 bp, probe
ccaagtaagaaagtgaagcaaatca

SEQ ID NO: 44015 - DNA, 25 bp, probe
tatgacatttcacgggagatttctt

SEQ ID NO: 44016 - DNA, 25 bp, probe
aagaaagtgaagcaaatcagaaact

SEQ ID NO: 44017 - DNA, 25 bp, probe
tgaagcaaatcagaaacttgtgaag

SEQ ID NO: 44018 - DNA, 25 bp, probe
tacacacagcatgtaatggtatctt

SEQ ID NO: 44019 - DNA, 25 bp, probe
atacacacagcatgtaatggtatct

SEQ ID NO: 44020 - DNA, 25 bp, probe
gtgaagcaaatcagaaacttgtgaa

SEQ ID NO: 44021 - DNA, 25 bp, probe
aagtggaaatgttctaaaggtggtg

SEQ ID NO: 44022 - DNA, 25 bp, probe
cttgtgaagtggaaatgttctaaag

SEQ ID NO: 44023 - DNA, 25 bp, probe
gtatgacatttcacgggagatttct

SEQ ID NO: 44024 - DNA, 25 bp, probe
agtatgacatttcacgggagatttc

SEQ ID NO: 44025 - DNA, 25 bp, probe
aatacacacagcatgtaatggtatc

SEQ ID NO: 44026 - DNA, 25 bp, probe
cagtatgacatttcacgggagattt

SEQ ID NO: 44027 - DNA, 25 bp, probe
agtaagaaagtgaagcaaatcagaa

SEQ ID NO: 44028 - DNA, 25 bp, probe
aagtaagaaagtgaagcaaatcaga

SEQ ID NO: 44029 - DNA, 25 bp, probe
caagtaagaaagtgaagcaaatcag

SEQ ID NO: 44030 - DNA, 25 bp, probe
atgttctaaaggtggtgaggcaata

SEQ ID NO: 44031 - DNA, 25 bp, probe
agtgaagcaaatcagaaacttgtga

SEQ ID NO: 44032 - DNA, 25 bp, probe
gtggaaatgttctaaaggtggtgag

SEQ ID NO: 44033 - DNA, 25 bp, probe
tgttctaaaggtggtgaggcaataa

SEQ ID NO: 44034 - DNA, 25 bp, probe
atgacatttcacgggagatttcttg

SEQ ID NO: 44035 - DNA, 25 bp, probe
agtggaaatgttctaaaggtggtga

SEQ ID NO: 44036 - DNA, 25 bp, probe
taagaaagtgaagcaaatcagaaac

SEQ ID NO: 44037 - DNA, 25 bp, probe
gtaagaaagtgaagcaaatcagaaa

SEQ ID NO: 44038 - DNA, 25 bp, probe
tcagtatgacatttcacgggagatt

SEQ ID NO: 44039 - DNA, 25 bp, probe
tcttaaagtgtgtttctatgtgaca

SEQ ID NO: 44040 - DNA, 25 bp, probe
cgccaagtaagaaagtgaagcaaat

SEQ ID NO: 44041 - DNA, 25 bp, probe
gacatttcacgggagatttcttgtt

SEQ ID NO: 44042 - DNA, 25 bp, probe
aatgttctaaaggtggtgaggcaat

SEQ ID NO: 44043 - DNA, 25 bp, probe
gcatgtaatggtatcttaaagtgtg

SEQ ID NO: 44044 - DNA, 25 bp, probe
agcatgtaatggtatcttaaagtgt

SEQ ID NO: 44045 - DNA, 25 bp, probe
acatttcacgggagatttcttgttg

SEQ ID NO: 44046 - DNA, 25 bp, probe
tggaaatgttctaaaggtggtgagg

SEQ ID NO: 44047 - DNA, 25 bp, probe
atcttaaagtgtgtttctatgtgac

SEQ ID NO: 44048 - DNA, 25 bp, probe
cagcatgtaatggtatcttaaagtg

SEQ ID NO: 44049 - DNA, 25 bp, probe
atcttcattacggaactcatcacat

SEQ ID NO: 44050 - DNA, 25 bp, probe
catcttcattacggaactcatcaca

SEQ ID NO: 44051 - DNA, 25 bp, probe
agtggattggataacttcgtgataa

SEQ ID NO: 44052 - DNA, 25 bp, probe
gagtggattggataacttcgtgata

SEQ ID NO: 44053 - DNA, 25 bp, probe
ccttcagagtggattggataacttc

SEQ ID NO: 44054 - DNA, 25 bp, probe
ccatcttcattacggaactcatcac

SEQ ID NO: 44055 - DNA, 25 bp, probe
cttcagagtggattggataacttcg

SEQ ID NO: 44056 - DNA, 25 bp, probe
acagttaagatgttggaatacctgg

SEQ ID NO: 44057 - DNA, 25 bp, probe
agagtggattggataacttcgtgat

SEQ ID NO: 44058 - DNA, 25 bp, probe
tcttcattacggaactcatcacatg

SEQ ID NO: 44059 - DNA, 25 bp, probe
ttcagagtggattggataacttcgt

SEQ ID NO: 44060 - DNA, 25 bp, probe
agtcatctcttcacagtcatctgag

SEQ ID NO: 44061 - DNA, 25 bp, probe
tgttctgacattgaaggaagaggaa

SEQ ID NO: 44062 - DNA, 25 bp, probe
ctccatcttcattacggaactcatc

SEQ ID NO: 44063 - DNA, 25 bp, probe
tccttcagagtggattggataactt

SEQ ID NO: 44064 - DNA, 25 bp, probe
cagtcatctcttcacagtcatctga

SEQ ID NO: 44065 - DNA, 25 bp, probe
cagagtggattggataacttcgtga

SEQ ID NO: 44066 - DNA, 25 bp, probe
tcagagtggattggataacttcgtg

SEQ ID NO: 44067 - DNA, 25 bp, probe
caaagagcacatttaccagtatagc

SEQ ID NO: 44068 - DNA, 25 bp, probe
ggattggataacttcgtgataaacc

SEQ ID NO: 44069 - DNA, 25 bp, probe
acatcaaagagcacatttaccagta

SEQ ID NO: 44070 - DNA, 25 bp, probe
tccatcttcattacggaactcatca

SEQ ID NO: 44071 - DNA, 25 bp, probe
catcaaagagcacatttaccagtat

SEQ ID NO: 44072 - DNA, 25 bp, probe
tggattggataacttcgtgataaac

SEQ ID NO: 44073 - DNA, 25 bp, probe
gtggattggataacttcgtgataaa

SEQ ID NO: 44074 - DNA, 25 bp, probe
caacatcaaagagcacatttaccag

SEQ ID NO: 44075 - DNA, 25 bp, probe
gtcaacatcaaagagcacatttacc

SEQ ID NO: 44076 - DNA, 25 bp, probe
aacatcaaagagcacatttaccagt

SEQ ID NO: 44077 - DNA, 25 bp, probe
tcaacatcaaagagcacatttacca

SEQ ID NO: 44078 - DNA, 25 bp, probe
atcatttgaagttccacaggctaaa

SEQ ID NO: 44079 - DNA, 25 bp, probe
aatcatttgaagttccacaggctaa

SEQ ID NO: 44080 - DNA, 25 bp, probe
ttaccagtatagcttgcatagtcaa

SEQ ID NO: 44081 - DNA, 25 bp, probe
acagaaatcatttgaagttccacag

SEQ ID NO: 44082 - DNA, 25 bp, probe
caaacacttctcaatatggaccaaa

SEQ ID NO: 44083 - DNA, 25 bp, probe
accagtatagcttgcatagtcaata

SEQ ID NO: 44084 - DNA, 25 bp, probe
taccagtatagcttgcatagtcaat

SEQ ID NO: 44085 - DNA, 25 bp, probe
aaatcatttgaagttccacaggcta

SEQ ID NO: 44086 - DNA, 25 bp, probe
cattacggaactcatcacatgcttc

SEQ ID NO: 44087 - DNA, 25 bp, probe
cttcattacggaactcatcacatgc

SEQ ID NO: 44088 - DNA, 25 bp, probe
gatttctacctctttcctggcaatt

SEQ ID NO: 44089 - DNA, 25 bp, probe
cagaaatcatttgaagttccacagg

SEQ ID NO: 44090 - DNA, 25 bp, probe
gacttcattgctttctgttcttcaa

SEQ ID NO: 44091 - DNA, 25 bp, probe
acttcattgctttctgttcttcaac

SEQ ID NO: 44092 - DNA, 25 bp, probe
tcaaagagcacatttaccagtatag

SEQ ID NO: 44093 - DNA, 25 bp, probe
cagactcattggaatcgttactcta

SEQ ID NO: 44094 - DNA, 25 bp, probe
agactcattggaatcgttactctaa

SEQ ID NO: 44095 - DNA, 25 bp, probe
cagtattggcagactcattggaatc

SEQ ID NO: 44096 - DNA, 25 bp, probe
attggcagactcattggaatcgtta

SEQ ID NO: 44097 - DNA, 25 bp, probe
tattggcagactcattggaatcgtt

SEQ ID NO: 44098 - DNA, 25 bp, probe
gcaactagatgaacctgtcaacttc

SEQ ID NO: 44099 - DNA, 25 bp, probe
gactcacactatcttctcactgctg

SEQ ID NO: 44100 - DNA, 25 bp, probe
agcaactagatgaacctgtcaactt

SEQ ID NO: 44101 - DNA, 25 bp, probe
gcagactcattggaatcgttactct

SEQ ID NO: 44102 - DNA, 25 bp, probe
tcattggaatcgttactctaaagga

SEQ ID NO: 44103 - DNA, 25 bp, probe
ctcattggaatcgttactctaaagg

SEQ ID NO: 44104 - DNA, 25 bp, probe
agactcacactatcttctcactgct

SEQ ID NO: 44105 - DNA, 25 bp, probe
actcattggaatcgttactctaaag

SEQ ID NO: 44106 - DNA, 25 bp, probe
gactcattggaatcgttactctaaa

SEQ ID NO: 44107 - DNA, 25 bp, probe
gtattggcagactcattggaatcgt

SEQ ID NO: 44108 - DNA, 25 bp, probe
gaccatgcttatgtcaccagtattg

SEQ ID NO: 44109 - DNA, 25 bp, probe
caagactcacactatcttctcactg

SEQ ID NO: 44110 - DNA, 25 bp, probe
agtattggcagactcattggaatcg

SEQ ID NO: 44111 - DNA, 25 bp, probe
acaagactcacactatcttctcact

SEQ ID NO: 44112 - DNA, 25 bp, probe
cacaagactcacactatcttctcac

SEQ ID NO: 44113 - DNA, 25 bp, probe
ttggcagactcattggaatcgttac

SEQ ID NO: 44114 - DNA, 25 bp, probe
attggaatcgttactctaaaggagc

SEQ ID NO: 44115 - DNA, 25 bp, probe
cattggaatcgttactctaaaggag

SEQ ID NO: 44116 - DNA, 25 bp, probe
ggcagactcattggaatcgttactc

SEQ ID NO: 44117 - DNA, 25 bp, probe
ttatgtcaccagtattggcagactc

SEQ ID NO: 44118 - DNA, 25 bp, probe
cttatgtcaccagtattggcagact

SEQ ID NO: 44119 - DNA, 25 bp, probe
gagaagttggaatcctgtgagaagc

SEQ ID NO: 44120 - DNA, 25 bp, probe
cagcaactagatgaacctgtcaact

SEQ ID NO: 44121 - DNA, 25 bp, probe
aactagatgaacctgtcaacttcag

SEQ ID NO: 44122 - DNA, 25 bp, probe
caactagatgaacctgtcaacttca

SEQ ID NO: 44123 - DNA, 25 bp, probe
ggaccatgcttatgtcaccagtatt

SEQ ID NO: 44124 - DNA, 25 bp, probe
actcacactatcttctcactgctgg

SEQ ID NO: 44125 - DNA, 25 bp, probe
ggagaagttggaatcctgtgagaag

SEQ ID NO: 44126 - DNA, 25 bp, probe
ctagatgaacctgtcaacttcagtg

SEQ ID NO: 44127 - DNA, 25 bp, probe
aagactcacactatcttctcactgc

SEQ ID NO: 44128 - DNA, 25 bp, probe
tagatgaacctgtcaacttcagtga

SEQ ID NO: 44129 - DNA, 25 bp, probe
actagatgaacctgtcaacttcagt

SEQ ID NO: 44130 - DNA, 25 bp, probe
ccagtattggcagactcattggaat

SEQ ID NO: 44131 - DNA, 25 bp, probe
gcacaagactcacactatcttctca

SEQ ID NO: 44132 - DNA, 25 bp, probe
tggcagactcattggaatcgttact

SEQ ID NO: 44133 - DNA, 25 bp, probe
accatgcttatgtcaccagtattgg

SEQ ID NO: 44134 - DNA, 25 bp, probe
tatgtcaccagtattggcagactca

SEQ ID NO: 44135 - DNA, 25 bp, probe
ttggaatcgttactctaaaggagct

SEQ ID NO: 44136 - DNA, 25 bp, probe
ttgcacaagactcacactatcttct

SEQ ID NO: 44137 - DNA, 25 bp, probe
cttcatctacttcaactccttcctg

SEQ ID NO: 44138 - DNA, 25 bp, probe
tcttcatctacttcaactccttcct

SEQ ID NO: 44139 - DNA, 25 bp, probe
gtcttcatctacttcaactccttcc

SEQ ID NO: 44140 - DNA, 25 bp, probe
cgtcttcatctacttcaactccttc

SEQ ID NO: 44141 - DNA, 25 bp, probe
tcgtcttcatctacttcaactcctt

SEQ ID NO: 44142 - DNA, 25 bp, probe
ttcatctacttcaactccttcctgg

SEQ ID NO: 44143 - DNA, 25 bp, probe
gtcgtcttcatctacttcaactcct

SEQ ID NO: 44144 - DNA, 25 bp, probe
ggtcgtcttcatctacttcaactcc

SEQ ID NO: 44145 - DNA, 25 bp, probe
ctttgtgtctgtgttctactgtttc

SEQ ID NO: 44146 - DNA, 25 bp, probe
tctttgtgtctgtgttctactgttt

SEQ ID NO: 44147 - DNA, 25 bp, probe
ttctttgtgtctgtgttctactgtt

SEQ ID NO: 44148 - DNA, 25 bp, probe
tctgtgttctactgtttcctcaata

SEQ ID NO: 44149 - DNA, 25 bp, probe
gtctgtgttctactgtttcctcaat

SEQ ID NO: 44150 - DNA, 25 bp, probe
ctgtgttctactgtttcctcaatag

SEQ ID NO: 44151 - DNA, 25 bp, probe
cttctttgtgtctgtgttctactgt

SEQ ID NO: 44152 - DNA, 25 bp, probe
atctacttcaactccttcctggaat

SEQ ID NO: 44153 - DNA, 25 bp, probe
tttgtgtctgtgttctactgtttcc

SEQ ID NO: 44154 - DNA, 25 bp, probe
tgtgttctactgtttcctcaatagt

SEQ ID NO: 44155 - DNA, 25 bp, probe
gaagctgtactacgacaatgagaag

SEQ ID NO: 44156 - DNA, 25 bp, probe
tgttctactgtttcctcaatagtga

SEQ ID NO: 44157 - DNA, 25 bp, probe
gtgttctactgtttcctcaatagtg

SEQ ID NO: 44158 - DNA, 25 bp, probe
ctgtactacgacaatgagaagtgct

SEQ ID NO: 44159 - DNA, 25 bp, probe
tctacttcaactccttcctggaatc

SEQ ID NO: 44160 - DNA, 25 bp, probe
tgtctgtgttctactgtttcctcaa

SEQ ID NO: 44161 - DNA, 25 bp, probe
aagctgtactacgacaatgagaagt

SEQ ID NO: 44162 - DNA, 25 bp, probe
catctacttcaactccttcctggaa

SEQ ID NO: 44163 - DNA, 25 bp, probe
tcatctacttcaactccttcctgga

SEQ ID NO: 44164 - DNA, 25 bp, probe
ttgtgtctgtgttctactgtttcct

SEQ ID NO: 44165 - DNA, 25 bp, probe
gcttctttgtgtctgtgttctactg

SEQ ID NO: 44166 - DNA, 25 bp, probe
tgtactacgacaatgagaagtgctg

SEQ ID NO: 44167 - DNA, 25 bp, probe
gtgtctgtgttctactgtttcctca

SEQ ID NO: 44168 - DNA, 25 bp, probe
tgtgtctgtgttctactgtttcctc

SEQ ID NO: 44169 - DNA, 25 bp, probe
tactacgacaatgagaagtgctggt

SEQ ID NO: 44170 - DNA, 25 bp, probe
ctacttcaactccttcctggaatcc

SEQ ID NO: 44171 - DNA, 25 bp, probe
agctgtactacgacaatgagaagtg

SEQ ID NO: 44172 - DNA, 25 bp, probe
ggaagctgtactacgacaatgagaa

SEQ ID NO: 44173 - DNA, 25 bp, probe
gtactacgacaatgagaagtgctgg

SEQ ID NO: 44174 - DNA, 25 bp, probe
gggtcgtcttcatctacttcaactc

SEQ ID NO: 44175 - DNA, 25 bp, probe
tacttcaactccttcctggaatcct

SEQ ID NO: 44176 - DNA, 25 bp, probe
acctacatgctgttcttcgtcaatc

SEQ ID NO: 44177 - DNA, 25 bp, probe
ggcttctttgtgtctgtgttctact

SEQ ID NO: 44178 - DNA, 25 bp, probe
cttcaactccttcctggaatccttc

SEQ ID NO: 44179 - DNA, 25 bp, probe
ctacgacaatgagaagtgctggttt

SEQ ID NO: 44180 - DNA, 25 bp, probe
tttcatcttccttttcaacatcgtc

SEQ ID NO: 44181 - DNA, 25 bp, probe
aacatcacaatctatgacgaggaag

SEQ ID NO: 44182 - DNA, 25 bp, probe
caacatcacaatctatgacgaggaa

SEQ ID NO: 44183 - DNA, 25 bp, probe
cttagtgtccttcttaacagactca

SEQ ID NO: 44184 - DNA, 25 bp, probe
ccttagtgtccttcttaacagactc

SEQ ID NO: 44185 - DNA, 25 bp, probe
tgtagccaacatcacaatctatgac

SEQ ID NO: 44186 - DNA, 25 bp, probe
ttagtgtccttcttaacagactcaa

SEQ ID NO: 44187 - DNA, 25 bp, probe
ttcacttcaagtcatggatgtctaa

SEQ ID NO: 44188 - DNA, 25 bp, probe
tcacttcaagtcatggatgtctaag

SEQ ID NO: 44189 - DNA, 25 bp, probe
tagccaacatcacaatctatgacga

SEQ ID NO: 44190 - DNA, 25 bp, probe
gtagccaacatcacaatctatgacg

SEQ ID NO: 44191 - DNA, 25 bp, probe
catgtgccttagtgtccttcttaac

SEQ ID NO: 44192 - DNA, 25 bp, probe
tctaagcaccgtaagacctacagta

SEQ ID NO: 44193 - DNA, 25 bp, probe
cttcaagtcatggatgtctaagcac

SEQ ID NO: 44194 - DNA, 25 bp, probe
atgtgccttagtgtccttcttaaca

SEQ ID NO: 44195 - DNA, 25 bp, probe
ctaagcaccgtaagacctacagtac

SEQ ID NO: 44196 - DNA, 25 bp, probe
gccttagtgtccttcttaacagact

SEQ ID NO: 44197 - DNA, 25 bp, probe
ccaacatcacaatctatgacgagga

SEQ ID NO: 44198 - DNA, 25 bp, probe
cacttcaagtcatggatgtctaagc

SEQ ID NO: 44199 - DNA, 25 bp, probe
gtgccttagtgtccttcttaacaga

SEQ ID NO: 44200 - DNA, 25 bp, probe
gaagggctactttccacatatagag

SEQ ID NO: 44201 - DNA, 25 bp, probe
acttcaagtcatggatgtctaagca

SEQ ID NO: 44202 - DNA, 25 bp, probe
agaagggctactttccacatataga

SEQ ID NO: 44203 - DNA, 25 bp, probe
cagaagggctactttccacatatag

SEQ ID NO: 44204 - DNA, 25 bp, probe
tgccttagtgtccttcttaacagac

SEQ ID NO: 44205 - DNA, 25 bp, probe
tgtgccttagtgtccttcttaacag

SEQ ID NO: 44206 - DNA, 25 bp, probe
acatcacaatctatgacgaggaagc

SEQ ID NO: 44207 - DNA, 25 bp, probe
ccatgtgccttagtgtccttcttaa

SEQ ID NO: 44208 - DNA, 25 bp, probe
ccttcttaacagactcaaaccacat

SEQ ID NO: 44209 - DNA, 25 bp, probe
agccaacatcacaatctatgacgag

SEQ ID NO: 44210 - DNA, 25 bp, probe
gacttcaataattacggctgccaag

SEQ ID NO: 44211 - DNA, 25 bp, probe
gtaagacctacagtacggaggagta

SEQ ID NO: 44212 - DNA, 25 bp, probe
ttcaagtcatggatgtctaagcacc

SEQ ID NO: 44213 - DNA, 25 bp, probe
ccagaagggctactttccacatata

SEQ ID NO: 44214 - DNA, 25 bp, probe
tttctgtattcgctgttcaataaac

SEQ ID NO: 44215 - DNA, 25 bp, probe
tccttcttaacagactcaaaccaca

SEQ ID NO: 44216 - DNA, 25 bp, probe
cttcttaacagactcaaaccacatg

SEQ ID NO: 44217 - DNA, 25 bp, probe
agtgtccttcttaacagactcaaac

SEQ ID NO: 44218 - DNA, 25 bp, probe
aactgtccgtgaactccttagagaa

SEQ ID NO: 44219 - DNA, 25 bp, probe
tagtgtccttcttaacagactcaaa

SEQ ID NO: 44220 - DNA, 25 bp, probe
atgtagccaacatcacaatctatga

SEQ ID NO: 44221 - DNA, 25 bp, probe
tttcacttcaagtcatggatgtcta

SEQ ID NO: 44222 - DNA, 25 bp, probe
aaactccagataaagtaaaccatgc

SEQ ID NO: 44223 - DNA, 25 bp, probe
cacaatctatgacgaggaagcgatg

SEQ ID NO: 44224 - DNA, 25 bp, probe
ttcttaacagactcaaaccacatgg

SEQ ID NO: 44225 - DNA, 25 bp, probe
gtgatggtgaacttctacaacaatt

SEQ ID NO: 44226 - DNA, 25 bp, probe
ggtgatggtgaacttctacaacaat

SEQ ID NO: 44227 - DNA, 25 bp, probe
tggtgaacttctacaacaattacat

SEQ ID NO: 44228 - DNA, 25 bp, probe
atggtgaacttctacaacaattaca

SEQ ID NO: 44229 - DNA, 25 bp, probe
tgatggtgaacttctacaacaatta

SEQ ID NO: 44230 - DNA, 25 bp, probe
gatggtgaacttctacaacaattac

SEQ ID NO: 44231 - DNA, 25 bp, probe
tggtgatggtgaacttctacaacaa

SEQ ID NO: 44232 - DNA, 25 bp, probe
ggtgaacttctacaacaattacatt

SEQ ID NO: 44233 - DNA, 25 bp, probe
ctggtgatggtgaacttctacaaca

SEQ ID NO: 44234 - DNA, 25 bp, probe
cttctacaacaattacatttcctgc

SEQ ID NO: 44235 - DNA, 25 bp, probe
cctggtgatggtgaacttctacaac

SEQ ID NO: 44236 - DNA, 25 bp, probe
acttctacaacaattacatttcctg

SEQ ID NO: 44237 - DNA, 25 bp, probe
tctacaacaattacatttcctgcac

SEQ ID NO: 44238 - DNA, 25 bp, probe
ctacaacaattacatttcctgcacc

SEQ ID NO: 44239 - DNA, 25 bp, probe
ttctacaacaattacatttcctgca

SEQ ID NO: 44240 - DNA, 25 bp, probe
tacaacaattacatttcctgcacca

SEQ ID NO: 44241 - DNA, 25 bp, probe
caattacatttcctgcaccaacaag

SEQ ID NO: 44242 - DNA, 25 bp, probe
caacaattacatttcctgcaccaac

SEQ ID NO: 44243 - DNA, 25 bp, probe
aacttctacaacaattacatttcct

SEQ ID NO: 44244 - DNA, 25 bp, probe
acagttcaggacacacacacagtag

SEQ ID NO: 44245 - DNA, 25 bp, probe
gacagttcaggacacacacacagta

SEQ ID NO: 44246 - DNA, 25 bp, probe
acaattacatttcctgcaccaacaa

SEQ ID NO: 44247 - DNA, 25 bp, probe
aacaattacatttcctgcaccaaca

SEQ ID NO: 44248 - DNA, 25 bp, probe
acaacaattacatttcctgcaccaa

SEQ ID NO: 44249 - DNA, 25 bp, probe
gaacttctacaacaattacatttcc

SEQ ID NO: 44250 - DNA, 25 bp, probe
gcctggtgatggtgaacttctacaa

SEQ ID NO: 44251 - DNA, 25 bp, probe
gaccatctggatcacatcaaggagg

SEQ ID NO: 44252 - DNA, 25 bp, probe
gtgaacttctacaacaattacattt

SEQ ID NO: 44253 - DNA, 25 bp, probe
cagttcaggacacacacacagtagg

SEQ ID NO: 44254 - DNA, 25 bp, probe
gtcctctgtctgtctctcctgtgaa

SEQ ID NO: 44255 - DNA, 25 bp, probe
aattacatttcctgcaccaacaagg

SEQ ID NO: 44256 - DNA, 25 bp, probe
tgaacttctacaacaattacatttc

SEQ ID NO: 44257 - DNA, 25 bp, probe
cgaccatctggatcacatcaaggag

SEQ ID NO: 44258 - DNA, 25 bp, probe
caagtatccagacctgatcgctgag

SEQ ID NO: 44259 - DNA, 25 bp, probe
ctctgtctgtctctcctgtgaaacc

SEQ ID NO: 44260 - DNA, 25 bp, probe
cctctgtctgtctctcctgtgaaac

SEQ ID NO: 44261 - DNA, 25 bp, probe
cagcctggtgatggtgaacttctac

SEQ ID NO: 44262 - DNA, 25 bp, probe
tcctctgtctgtctctcctgtgaaa

SEQ ID NO: 44263 - DNA, 25 bp, probe
ctgtctgtctctcctgtgaaacctg

SEQ ID NO: 44264 - DNA, 25 bp, probe
catctggatcacatcaaggaggtgg

SEQ ID NO: 44265 - DNA, 25 bp, probe
ccatctggatcacatcaaggaggtg

SEQ ID NO: 44266 - DNA, 25 bp, probe
tctgtctgtctctcctgtgaaacct

SEQ ID NO: 44267 - DNA, 25 bp, probe
accatctggatcacatcaaggaggt

SEQ ID NO: 44268 - DNA, 25 bp, probe
gtctccaagtatccagacctgatcg

SEQ ID NO: 44269 - DNA, 25 bp, probe
ctgttgtttctcctaatcctcttgg

SEQ ID NO: 44270 - DNA, 25 bp, probe
cctgttgtttctcctaatcctcttg

SEQ ID NO: 44271 - DNA, 25 bp, probe
tgttgtttctcctaatcctcttggg

SEQ ID NO: 44272 - DNA, 25 bp, probe
gcctgttgtttctcctaatcctctt

SEQ ID NO: 44273 - DNA, 25 bp, probe
ttcttgtcctagtacatccagctct

SEQ ID NO: 44274 - DNA, 25 bp, probe
ttgcctgttgtttctcctaatcctc

SEQ ID NO: 44275 - DNA, 25 bp, probe
cttgcctgttgtttctcctaatcct

SEQ ID NO: 44276 - DNA, 25 bp, probe
tcttgtcctagtacatccagctctc

SEQ ID NO: 44277 - DNA, 25 bp, probe
ccctttcttgtcctagtacatccag

SEQ ID NO: 44278 - DNA, 25 bp, probe
ttgtcctagtacatccagctctcag

SEQ ID NO: 44279 - DNA, 25 bp, probe
cttgtcctagtacatccagctctca

SEQ ID NO: 44280 - DNA, 25 bp, probe
gttgtttctcctaatcctcttgggc

SEQ ID NO: 44281 - DNA, 25 bp, probe
tcctgaaggtgttggtatcacagag

SEQ ID NO: 44282 - DNA, 25 bp, probe
ctcctgaaggtgttggtatcacaga

SEQ ID NO: 44283 - DNA, 25 bp, probe
gtcctagtacatccagctctcagtg

SEQ ID NO: 44284 - DNA, 25 bp, probe
tgtttctcctaatcctcttgggcat

SEQ ID NO: 44285 - DNA, 25 bp, probe
tgcctgttgtttctcctaatcctct

SEQ ID NO: 44286 - DNA, 25 bp, probe
tttcttgtcctagtacatccagctc

SEQ ID NO: 44287 - DNA, 25 bp, probe
ctttcttgtcctagtacatccagct

SEQ ID NO: 44288 - DNA, 25 bp, probe
cctttcttgtcctagtacatccagc

SEQ ID NO: 44289 - DNA, 25 bp, probe
ccttgcctgttgtttctcctaatcc

SEQ ID NO: 44290 - DNA, 25 bp, probe
cccttgcctgttgtttctcctaatc

SEQ ID NO: 44291 - DNA, 25 bp, probe
gtttctcctaatcctcttgggcatg

SEQ ID NO: 44292 - DNA, 25 bp, probe
ttgtttctcctaatcctcttgggca

SEQ ID NO: 44293 - DNA, 25 bp, probe
ctcagaaaagagttgggtcctatac

SEQ ID NO: 44294 - DNA, 25 bp, probe
ctcatctgtcacccgaattttcttt

SEQ ID NO: 44295 - DNA, 25 bp, probe
agacttagattgggtgctcctgaag

SEQ ID NO: 44296 - DNA, 25 bp, probe
tcatctgtcacccgaattttctttg

SEQ ID NO: 44297 - DNA, 25 bp, probe
tgtcctagtacatccagctctcagt

SEQ ID NO: 44298 - DNA, 25 bp, probe
gagacttagattgggtgctcctgaa

SEQ ID NO: 44299 - DNA, 25 bp, probe
aagagacttagattgggtgctcctg

SEQ ID NO: 44300 - DNA, 25 bp, probe
caagagacttagattgggtgctcct

SEQ ID NO: 44301 - DNA, 25 bp, probe
acccttgcctgttgtttctcctaat

SEQ ID NO: 44302 - DNA, 25 bp, probe
gctcagaaaagagttgggtcctata

SEQ ID NO: 44303 - DNA, 25 bp, probe
cctgaaggtgttggtatcacagagg

SEQ ID NO: 44304 - DNA, 25 bp, probe
gtcacccgaattttctttggtattt

SEQ ID NO: 44305 - DNA, 25 bp, probe
tcacccgaattttctttggtatttt

SEQ ID NO: 44306 - DNA, 25 bp, probe
catctgtcacccgaattttctttgg

SEQ ID NO: 44307 - DNA, 25 bp, probe
tgtcacccgaattttctttggtatt

SEQ ID NO: 44308 - DNA, 25 bp, probe
tttctcctaatcctcttgggcatgg

SEQ ID NO: 44309 - DNA, 25 bp, probe
tcagaaaagagttgggtcctatacc

SEQ ID NO: 44310 - DNA, 25 bp, probe
ctgtcacccgaattttctttggtat

SEQ ID NO: 44311 - DNA, 25 bp, probe
tatacccacccttgcctgttgtttc

SEQ ID NO: 44312 - DNA, 25 bp, probe
ctatacccacccttgcctgttgttt

SEQ ID NO: 44313 - DNA, 25 bp, probe
catctacagaattagcattggaagc

SEQ ID NO: 44314 - DNA, 25 bp, probe
atgaagttgaagaccagattacagc

SEQ ID NO: 44315 - DNA, 25 bp, probe
aatgtagactatcttctcatccacg

SEQ ID NO: 44316 - DNA, 25 bp, probe
acatctacagaattagcattggaag

SEQ ID NO: 44317 - DNA, 25 bp, probe
tatcctccaagcaagaagtgtgtta

SEQ ID NO: 44318 - DNA, 25 bp, probe
atattcagagtaacacaggattcac

SEQ ID NO: 44319 - DNA, 25 bp, probe
atgtagactatcttctcatccacgg

SEQ ID NO: 44320 - DNA, 25 bp, probe
tatgaagttgaagaccagattacag

SEQ ID NO: 44321 - DNA, 25 bp, probe
tattcagagtaacacaggattcact

SEQ ID NO: 44322 - DNA, 25 bp, probe
aacatctacagaattagcattggaa

SEQ ID NO: 44323 - DNA, 25 bp, probe
tagactatcttctcatccacggaac

SEQ ID NO: 44324 - DNA, 25 bp, probe
gtagactatcttctcatccacggaa

SEQ ID NO: 44325 - DNA, 25 bp, probe
ttgctaattcaagtgtatggtggtc

SEQ ID NO: 44326 - DNA, 25 bp, probe
ttatgaagttgaagaccagattaca

SEQ ID NO: 44327 - DNA, 25 bp, probe
attcagagtaacacaggattcactg

SEQ ID NO: 44328 - DNA, 25 bp, probe
agtgtgttacttgccatctaaggaa

SEQ ID NO: 44329 - DNA, 25 bp, probe
tgtagactatcttctcatccacgga

SEQ ID NO: 44330 - DNA, 25 bp, probe
ctatcctccaagcaagaagtgtgtt

SEQ ID NO: 44331 - DNA, 25 bp, probe
agtgtaaggtctgtatttgctgtta

SEQ ID NO: 44332 - DNA, 25 bp, probe
agaataccctggaagaagaaacatc

SEQ ID NO: 44333 - DNA, 25 bp, probe
aagaataccctggaagaagaaacat

SEQ ID NO: 44334 - DNA, 25 bp, probe
ttgaagaataccctggaagaagaaa

SEQ ID NO: 44335 - DNA, 25 bp, probe
tttgaagaataccctggaagaagaa

SEQ ID NO: 44336 - DNA, 25 bp, probe
gaagaataccctggaagaagaaaca

SEQ ID NO: 44337 - DNA, 25 bp, probe
tgaagaataccctggaagaagaaac

SEQ ID NO: 44338 - DNA, 25 bp, probe
atttgaagaataccctggaagaaga

SEQ ID NO: 44339 - DNA, 25 bp, probe
gactatcttctcatccacggaacag

SEQ ID NO: 44340 - DNA, 25 bp, probe
gtgtttatgaagttgaagaccagat

SEQ ID NO: 44341 - DNA, 25 bp, probe
atcctccaagcaagaagtgtgttac

SEQ ID NO: 44342 - DNA, 25 bp, probe
aaggtctgtatttgctgttaattgg

SEQ ID NO: 44343 - DNA, 25 bp, probe
tgctaattcaagtgtatggtggtcc

SEQ ID NO: 44344 - DNA, 25 bp, probe
tgaatttgaagaataccctggaaga

SEQ ID NO: 44345 - DNA, 25 bp, probe
ggtctgtatttgctgttaattggat

SEQ ID NO: 44346 - DNA, 25 bp, probe
aggtctgtatttgctgttaattgga

SEQ ID NO: 44347 - DNA, 25 bp, probe
gtgtaaggtctgtatttgctgttaa

SEQ ID NO: 44348 - DNA, 25 bp, probe
aggatgataatcttgagcactataa

SEQ ID NO: 44349 - DNA, 25 bp, probe
gagtgtaaggtctgtatttgctgtt

SEQ ID NO: 44350 - DNA, 25 bp, probe
tctaaggaaagaaaggtgccaatat

SEQ ID NO: 44351 - DNA, 25 bp, probe
atctaaggaaagaaaggtgccaata

SEQ ID NO: 44352 - DNA, 25 bp, probe
tgttacttgccatctaaggaaagaa

SEQ ID NO: 44353 - DNA, 25 bp, probe
ataccctggaagaagaaacatctac

SEQ ID NO: 44354 - DNA, 25 bp, probe
gaataccctggaagaagaaacatct

SEQ ID NO: 44355 - DNA, 25 bp, probe
tatattcagagtaacacaggattca

SEQ ID NO: 44356 - DNA, 25 bp, probe
aaggatgataatcttgagcactata

SEQ ID NO: 44357 - DNA, 25 bp, probe
gattctcattgccagattccattac

SEQ ID NO: 44358 - DNA, 25 bp, probe
tgattctcattgccagattccatta

SEQ ID NO: 44359 - DNA, 25 bp, probe
attctcattgccagattccattacc

SEQ ID NO: 44360 - DNA, 25 bp, probe
caagttgattctcattgccagattc

SEQ ID NO: 44361 - DNA, 25 bp, probe
ttgattctcattgccagattccatt

SEQ ID NO: 44362 - DNA, 25 bp, probe
aagttgattctcattgccagattcc

SEQ ID NO: 44363 - DNA, 25 bp, probe
gttgattctcattgccagattccat

SEQ ID NO: 44364 - DNA, 25 bp, probe
ccagacattaggagttcataagtat

SEQ ID NO: 44365 - DNA, 25 bp, probe
gtgtgatttgtgttatactggttgt

SEQ ID NO: 44366 - DNA, 25 bp, probe
tgtgtgatttgtgttatactggttg

SEQ ID NO: 44367 - DNA, 25 bp, probe
gttgtgtgatttgtgttatactggt

SEQ ID NO: 44368 - DNA, 25 bp, probe
tgttgtgtgatttgtgttatactgg

SEQ ID NO: 44369 - DNA, 25 bp, probe
aatgaacttgcttgtgtgtatttga

SEQ ID NO: 44370 - DNA, 25 bp, probe
ttccattaccctttcttcctcatag

SEQ ID NO: 44371 - DNA, 25 bp, probe
gattccattaccctttcttcctcat

SEQ ID NO: 44372 - DNA, 25 bp, probe
tttgatggctctaagggctataaat

SEQ ID NO: 44373 - DNA, 25 bp, probe
atttgatggctctaagggctataaa

SEQ ID NO: 44374 - DNA, 25 bp, probe
gtatttgatggctctaagggctata

SEQ ID NO: 44375 - DNA, 25 bp, probe
atgaacttgcttgtgtgtatttgat

SEQ ID NO: 44376 - DNA, 25 bp, probe
agttgattctcattgccagattcca

SEQ ID NO: 44377 - DNA, 25 bp, probe
aggcatcttacatttaggctacttc

SEQ ID NO: 44378 - DNA, 25 bp, probe
gaggcatcttacatttaggctactt

SEQ ID NO: 44379 - DNA, 25 bp, probe
tgaacttgcttgtgtgtatttgatg

SEQ ID NO: 44380 - DNA, 25 bp, probe
taaatactgtggttgcctctatgtg

SEQ ID NO: 44381 - DNA, 25 bp, probe
ttaaatactgtggttgcctctatgt

SEQ ID NO: 44382 - DNA, 25 bp, probe
ggcatcttacatttaggctacttca

SEQ ID NO: 44383 - DNA, 25 bp, probe
cccagacattaggagttcataagta

SEQ ID NO: 44384 - DNA, 25 bp, probe
gcatcttacatttaggctacttcaa

SEQ ID NO: 44385 - DNA, 25 bp, probe
ttgatggctctaagggctataaatt

SEQ ID NO: 44386 - DNA, 25 bp, probe
ttgtgtgatttgtgttatactggtt

SEQ ID NO: 44387 - DNA, 25 bp, probe
attccattaccctttcttcctcata

SEQ ID NO: 44388 - DNA, 25 bp, probe
tatttgatggctctaagggctataa

SEQ ID NO: 44389 - DNA, 25 bp, probe
cttgtgtgtatttgatggctctaag

SEQ ID NO: 44390 - DNA, 25 bp, probe
tggctctaagggctataaattacaa

SEQ ID NO: 44391 - DNA, 25 bp, probe
cctcatacaagtaaacacagaaagt

SEQ ID NO: 44392 - DNA, 25 bp, probe
ttgtgtgtatttgatggctctaagg

SEQ ID NO: 44393 - DNA, 25 bp, probe
tctcagagcatttggaaaggttatc

SEQ ID NO: 44394 - DNA, 25 bp, probe
atggctctaagggctataaattaca

SEQ ID NO: 44395 - DNA, 25 bp, probe
gaacttgcttgtgtgtatttgatgg

SEQ ID NO: 44396 - DNA, 25 bp, probe
tcagagcatttggaaaggttatctt

SEQ ID NO: 44397 - DNA, 25 bp, probe
ttctcagagcatttggaaaggttat

SEQ ID NO: 44398 - DNA, 25 bp, probe
tgatggctctaagggctataaatta

SEQ ID NO: 44399 - DNA, 25 bp, probe
attaaatactgtggttgcctctatg

SEQ ID NO: 44400 - DNA, 25 bp, probe
tctactaatgttgtgtgatttgtgt

SEQ ID NO: 44401 - DNA, 25 bp, probe
atattaacttactcacacggacagg

SEQ ID NO: 44402 - DNA, 25 bp, probe
agatattaacttactcacacggaca

SEQ ID NO: 44403 - DNA, 25 bp, probe
gatattaacttactcacacggacag

SEQ ID NO: 44404 - DNA, 25 bp, probe
tattaacttactcacacggacaggt

SEQ ID NO: 44405 - DNA, 25 bp, probe
gagatattaacttactcacacggac

SEQ ID NO: 44406 - DNA, 25 bp, probe
attaacttactcacacggacaggtt

SEQ ID NO: 44407 - DNA, 25 bp, probe
ttaacttactcacacggacaggttg

SEQ ID NO: 44408 - DNA, 25 bp, probe
atttcataatgccttcagtaccgac

SEQ ID NO: 44409 - DNA, 25 bp, probe
tcatgctccaaagaacatttcataa

SEQ ID NO: 44410 - DNA, 25 bp, probe
ttcatgctccaaagaacatttcata

SEQ ID NO: 44411 - DNA, 25 bp, probe
taacttactcacacggacaggttga

SEQ ID NO: 44412 - DNA, 25 bp, probe
catgctccaaagaacatttcataat

SEQ ID NO: 44413 - DNA, 25 bp, probe
aacttactcacacggacaggttgat

SEQ ID NO: 44414 - DNA, 25 bp, probe
ctccaaagaacatttcataatgcct

SEQ ID NO: 44415 - DNA, 25 bp, probe
tccaaagaacatttcataatgcctt

SEQ ID NO: 44416 - DNA, 25 bp, probe
tgctccaaagaacatttcataatgc

SEQ ID NO: 44417 - DNA, 25 bp, probe
aagaacatttcataatgccttcagt

SEQ ID NO: 44418 - DNA, 25 bp, probe
ccaaagaacatttcataatgccttc

SEQ ID NO: 44419 - DNA, 25 bp, probe
aacatttcataatgccttcagtacc

SEQ ID NO: 44420 - DNA, 25 bp, probe
gctccaaagaacatttcataatgcc

SEQ ID NO: 44421 - DNA, 25 bp, probe
tcataatgccttcagtaccgacgta

SEQ ID NO: 44422 - DNA, 25 bp, probe
gctgagatattaacttactcacacg

SEQ ID NO: 44423 - DNA, 25 bp, probe
caaagaacatttcataatgccttca

SEQ ID NO: 44424 - DNA, 25 bp, probe
catttcataatgccttcagtaccga

SEQ ID NO: 44425 - DNA, 25 bp, probe
agaacatttcataatgccttcagta

SEQ ID NO: 44426 - DNA, 25 bp, probe
atgctccaaagaacatttcataatg

SEQ ID NO: 44427 - DNA, 25 bp, probe
tgagatattaacttactcacacgga

SEQ ID NO: 44428 - DNA, 25 bp, probe
acatttcataatgccttcagtaccg

SEQ ID NO: 44429 - DNA, 25 bp, probe
aaagaacatttcataatgccttcag

SEQ ID NO: 44430 - DNA, 25 bp, probe
gaacatttcataatgccttcagtac

SEQ ID NO: 44431 - DNA, 25 bp, probe
ctgagatattaacttactcacacgg

SEQ ID NO: 44432 - DNA, 25 bp, probe
tttcataatgccttcagtaccgacg

SEQ ID NO: 44433 - DNA, 25 bp, probe
ctcagtaaaacgcagtgattcaaaa

SEQ ID NO: 44434 - DNA, 25 bp, probe
acttactcacacggacaggttgatg

SEQ ID NO: 44435 - DNA, 25 bp, probe
ccagggaatgaactctagttttcta

SEQ ID NO: 44436 - DNA, 25 bp, probe
actcagtaaaacgcagtgattcaaa

SEQ ID NO: 44437 - DNA, 25 bp, probe
ttctgaccattttgtatgtgtcctt

SEQ ID NO: 44438 - DNA, 25 bp, probe
ttcataatgccttcagtaccgacgt

SEQ ID NO: 44439 - DNA, 25 bp, probe
agctgagatattaacttactcacac

SEQ ID NO: 44440 - DNA, 25 bp, probe
cttctgaccattttgtatgtgtcct

SEQ ID NO: 44441 - DNA, 25 bp, probe
cacttctgaccattttgtatgtgtc

SEQ ID NO: 44442 - DNA, 25 bp, probe
ttgtatgtgtccttgtgccgtagtg

SEQ ID NO: 44443 - DNA, 25 bp, probe
tctgaccattttgtatgtgtccttg

SEQ ID NO: 44444 - DNA, 25 bp, probe
acttctgaccattttgtatgtgtcc

SEQ ID NO: 44445 - DNA, 25 bp, probe
ccaggacagagatgattatgtgttc

SEQ ID NO: 44446 - DNA, 25 bp, probe
caggacagagatgattatgtgttcg

SEQ ID NO: 44447 - DNA, 25 bp, probe
aggacagagatgattatgtgttcgg

SEQ ID NO: 44448 - DNA, 25 bp, probe
tatagttcacttactcttacacccg

SEQ ID NO: 44449 - DNA, 25 bp, probe
atagttcacttactcttacacccga

SEQ ID NO: 44450 - DNA, 25 bp, probe
cctccttgtaatgtagacagacttt

SEQ ID NO: 44451 - DNA, 25 bp, probe
tccttgtaatgtagacagactttgt

SEQ ID NO: 44452 - DNA, 25 bp, probe
ctccttgtaatgtagacagactttg

SEQ ID NO: 44453 - DNA, 25 bp, probe
tagttcacttactcttacacccgac

SEQ ID NO: 44454 - DNA, 25 bp, probe
gtatagttcacttactcttacaccc

SEQ ID NO: 44455 - DNA, 25 bp, probe
ccctccttgtaatgtagacagactt

SEQ ID NO: 44456 - DNA, 25 bp, probe
ccttgtaatgtagacagactttgta

SEQ ID NO: 44457 - DNA, 25 bp, probe
tgtatagttcacttactcttacacc

SEQ ID NO: 44458 - DNA, 25 bp, probe
tgtagacagactttgtatagttcac

SEQ ID NO: 44459 - DNA, 25 bp, probe
gatgggatttctgattcagtatgga

SEQ ID NO: 44460 - DNA, 25 bp, probe
atgggatttctgattcagtatggac

SEQ ID NO: 44461 - DNA, 25 bp, probe
cccaggacagagatgattatgtgtt

SEQ ID NO: 44462 - DNA, 25 bp, probe
ggacagagatgattatgtgttcggc

SEQ ID NO: 44463 - DNA, 25 bp, probe
ggatgggatttctgattcagtatgg

SEQ ID NO: 44464 - DNA, 25 bp, probe
gggatgggatttctgattcagtatg

SEQ ID NO: 44465 - DNA, 25 bp, probe
gtagacagactttgtatagttcact

SEQ ID NO: 44466 - DNA, 25 bp, probe
ctcccaggacagagatgattatgtg

SEQ ID NO: 44467 - DNA, 25 bp, probe
tgcctatcttgactcttctcgactc

SEQ ID NO: 44468 - DNA, 25 bp, probe
ctgcctatcttgactcttctcgact

SEQ ID NO: 44469 - DNA, 25 bp, probe
acagactttgtatagttcacttact

SEQ ID NO: 44470 - DNA, 25 bp, probe
gacagactttgtatagttcacttac

SEQ ID NO: 44471 - DNA, 25 bp, probe
tgggatttctgattcagtatggacc

SEQ ID NO: 44472 - DNA, 25 bp, probe
cagactttgtatagttcacttactc

SEQ ID NO: 44473 - DNA, 25 bp, probe
agacagactttgtatagttcactta

SEQ ID NO: 44474 - DNA, 25 bp, probe
tagacagactttgtatagttcactt

SEQ ID NO: 44475 - DNA, 25 bp, probe
atgtagacagactttgtatagttca

SEQ ID NO: 44476 - DNA, 25 bp, probe
tcccaggacagagatgattatgtgt

SEQ ID NO: 44477 - DNA, 25 bp, probe
ggtcctgcctatcttgactcttctc

SEQ ID NO: 44478 - DNA, 25 bp, probe
agactttgtatagttcacttactct

SEQ ID NO: 44479 - DNA, 25 bp, probe
gtcctgcctatcttgactcttctcg

SEQ ID NO: 44480 - DNA, 25 bp, probe
gcctatcttgactcttctcgactcc

SEQ ID NO: 44481 - DNA, 25 bp, probe
cttgtaatgtagacagactttgtat

SEQ ID NO: 44482 - DNA, 25 bp, probe
cctgcctatcttgactcttctcgac

SEQ ID NO: 44483 - DNA, 25 bp, probe
gactttgtatagttcacttactctt

SEQ ID NO: 44484 - DNA, 25 bp, probe
acttactcttacacccgacgcttac

SEQ ID NO: 44485 - DNA, 25 bp, probe
cacttactcttacacccgacgctta

SEQ ID NO: 44486 - DNA, 25 bp, probe
tcctgcctatcttgactcttctcga

SEQ ID NO: 44487 - DNA, 25 bp, probe
ttgtatagttcacttactcttacac

SEQ ID NO: 44488 - DNA, 25 bp, probe
aatgtagacagactttgtatagttc

SEQ ID NO: 44489 - DNA, 25 bp, probe
ggagatacaatgaggtgaagaagaa

SEQ ID NO: 44490 - DNA, 25 bp, probe
ctggagatacaatgaggtgaagaag

SEQ ID NO: 44491 - DNA, 25 bp, probe
tggagatacaatgaggtgaagaaga

SEQ ID NO: 44492 - DNA, 25 bp, probe
attctggagatacaatgaggtgaag

SEQ ID NO: 44493 - DNA, 25 bp, probe
aattctggagatacaatgaggtgaa

SEQ ID NO: 44494 - DNA, 25 bp, probe
ctaatcagcattctcactcctacct

SEQ ID NO: 44495 - DNA, 25 bp, probe
tctggagatacaatgaggtgaagaa

SEQ ID NO: 44496 - DNA, 25 bp, probe
ttctggagatacaatgaggtgaaga

SEQ ID NO: 44497 - DNA, 25 bp, probe
aagaatagatgctgactgtactcct

SEQ ID NO: 44498 - DNA, 25 bp, probe
caagaatagatgctgactgtactcc

SEQ ID NO: 44499 - DNA, 25 bp, probe
ccaagaatagatgctgactgtactc

SEQ ID NO: 44500 - DNA, 25 bp, probe
agaatagatgctgactgtactcctc

SEQ ID NO: 44501 - DNA, 25 bp, probe
gaatgaatactggatctactcagcc

SEQ ID NO: 44502 - DNA, 25 bp, probe
ggaatgaatactggatctactcagc

SEQ ID NO: 44503 - DNA, 25 bp, probe
gaatagatgctgactgtactcctcc

SEQ ID NO: 44504 - DNA, 25 bp, probe
taatcagcattctcactcctacctg

SEQ ID NO: 44505 - DNA, 25 bp, probe
gcattctcactcctacctggtaatt

SEQ ID NO: 44506 - DNA, 25 bp, probe
acaaattctggagatacaatgaggt

SEQ ID NO: 44507 - DNA, 25 bp, probe
aaattctggagatacaatgaggtga

SEQ ID NO: 44508 - DNA, 25 bp, probe
caaattctggagatacaatgaggtg

SEQ ID NO: 44509 - DNA, 25 bp, probe
gacaaattctggagatacaatgagg

SEQ ID NO: 44510 - DNA, 25 bp, probe
aatgaatactggatctactcagcca

SEQ ID NO: 44511 - DNA, 25 bp, probe
tggagacaaattctggagatacaat

SEQ ID NO: 44512 - DNA, 25 bp, probe
ctggagacaaattctggagatacaa

SEQ ID NO: 44513 - DNA, 25 bp, probe
gagatacaatgaggtgaagaagaaa

SEQ ID NO: 44514 - DNA, 25 bp, probe
ggagacaaattctggagatacaatg

SEQ ID NO: 44515 - DNA, 25 bp, probe
cctgttcactctacttagcatgtcc

SEQ ID NO: 44516 - DNA, 25 bp, probe
agcattctcactcctacctggtaat

SEQ ID NO: 44517 - DNA, 25 bp, probe
gaacctttcttacattagcagtttg

SEQ ID NO: 44518 - DNA, 25 bp, probe
cattctcactcctacctggtaattt

SEQ ID NO: 44519 - DNA, 25 bp, probe
agacaaattctggagatacaatgag

SEQ ID NO: 44520 - DNA, 25 bp, probe
gagacaaattctggagatacaatga

SEQ ID NO: 44521 - DNA, 25 bp, probe
atgggaaatgtcaacaagtatgaat

SEQ ID NO: 44522 - DNA, 25 bp, probe
ctcactcctacctggtaatttaaga

SEQ ID NO: 44523 - DNA, 25 bp, probe
tctcactcctacctggtaatttaag

SEQ ID NO: 44524 - DNA, 25 bp, probe
agggaatgaatactggatctactca

SEQ ID NO: 44525 - DNA, 25 bp, probe
ttctcactcctacctggtaatttaa

SEQ ID NO: 44526 - DNA, 25 bp, probe
aacaggacattgtatttgatggcat

SEQ ID NO: 44527 - DNA, 25 bp, probe
atgaataaagacacctactgagtgg

SEQ ID NO: 44528 - DNA, 25 bp, probe
ttgctggagacaaattctggagata

SEQ ID NO: 44529 - DNA, 25 bp, probe
tgggaaatgtcaacaagtatgaata

SEQ ID NO: 44530 - DNA, 25 bp, probe
ttcactctacttagcatgtccctac

SEQ ID NO: 44531 - DNA, 25 bp, probe
gttcactctacttagcatgtcccta

SEQ ID NO: 44532 - DNA, 25 bp, probe
catgggaaatgtcaacaagtatgaa

SEQ ID NO: 44533 - DNA, 25 bp, probe
agataaggagagtgatgaagtgaac

SEQ ID NO: 44534 - DNA, 25 bp, probe
agcagaacttattagagaacttgga

SEQ ID NO: 44535 - DNA, 25 bp, probe
gcagaacttattagagaacttggag

SEQ ID NO: 44536 - DNA, 25 bp, probe
gataaggagagtgatgaagtgaacg

SEQ ID NO: 44537 - DNA, 25 bp, probe
ccagatagataaggagagtgatgaa

SEQ ID NO: 44538 - DNA, 25 bp, probe
ataaggagagtgatgaagtgaacga

SEQ ID NO: 44539 - DNA, 25 bp, probe
taaggagagtgatgaagtgaacgaa

SEQ ID NO: 44540 - DNA, 25 bp, probe
agaatacagaagacctagcagaact

SEQ ID NO: 44541 - DNA, 25 bp, probe
cagaatacagaagacctagcagaac

SEQ ID NO: 44542 - DNA, 25 bp, probe
tcagaatacagaagacctagcagaa

SEQ ID NO: 44543 - DNA, 25 bp, probe
gaatacagaagacctagcagaactt

SEQ ID NO: 44544 - DNA, 25 bp, probe
tagataaggagagtgatgaagtgaa

SEQ ID NO: 44545 - DNA, 25 bp, probe
aatctcagaatacagaagacctagc

SEQ ID NO: 44546 - DNA, 25 bp, probe
ctcagaatacagaagacctagcaga

SEQ ID NO: 44547 - DNA, 25 bp, probe
atctcagaatacagaagacctagca

SEQ ID NO: 44548 - DNA, 25 bp, probe
atagataaggagagtgatgaagtga

SEQ ID NO: 44549 - DNA, 25 bp, probe
acctagcagaacttattagagaact

SEQ ID NO: 44550 - DNA, 25 bp, probe
acagaagacctagcagaacttatta

SEQ ID NO: 44551 - DNA, 25 bp, probe
tacagaagacctagcagaacttatt

SEQ ID NO: 44552 - DNA, 25 bp, probe
aatacagaagacctagcagaactta

SEQ ID NO: 44553 - DNA, 25 bp, probe
agataatgcgaagacttccttagaa

SEQ ID NO: 44554 - DNA, 25 bp, probe
tagcagaacttattagagaacttgg

SEQ ID NO: 44555 - DNA, 25 bp, probe
gatagataaggagagtgatgaagtg

SEQ ID NO: 44556 - DNA, 25 bp, probe
ccaatagataatgcgaagacttcct

SEQ ID NO: 44557 - DNA, 25 bp, probe
tctcagaatacagaagacctagcag

SEQ ID NO: 44558 - DNA, 25 bp, probe
gacctagcagaacttattagagaac

SEQ ID NO: 44559 - DNA, 25 bp, probe
accaatagataatgcgaagacttcc

SEQ ID NO: 44560 - DNA, 25 bp, probe
atacagaagacctagcagaacttat

SEQ ID NO: 44561 - DNA, 25 bp, probe
agatagataaggagagtgatgaagt

SEQ ID NO: 44562 - DNA, 25 bp, probe
aaccaatagataatgcgaagacttc

SEQ ID NO: 44563 - DNA, 25 bp, probe
agacctagcagaacttattagagaa

SEQ ID NO: 44564 - DNA, 25 bp, probe
caatagataatgcgaagacttcctt

SEQ ID NO: 44565 - DNA, 25 bp, probe
cagaagacctagcagaacttattag

SEQ ID NO: 44566 - DNA, 25 bp, probe
aattaagcaggacatctcaagtctc

SEQ ID NO: 44567 - DNA, 25 bp, probe
tagataatgcgaagacttccttaga

SEQ ID NO: 44568 - DNA, 25 bp, probe
aagacctagcagaacttattagaga

SEQ ID NO: 44569 - DNA, 25 bp, probe
agaagacctagcagaacttattaga

SEQ ID NO: 44570 - DNA, 25 bp, probe
cagaacttattagagaacttggaga

SEQ ID NO: 44571 - DNA, 25 bp, probe
cagatagataaggagagtgatgaag

SEQ ID NO: 44572 - DNA, 25 bp, probe
gaagacctagcagaacttattagag

SEQ ID NO: 44573 - DNA, 25 bp, probe
gaacttattagagaacttggagaga

SEQ ID NO: 44574 - DNA, 25 bp, probe
agaacttattagagaacttggagag

SEQ ID NO: 44575 - DNA, 25 bp, probe
aaggagagtgatgaagtgaacgaag

SEQ ID NO: 44576 - DNA, 25 bp, probe
cctagcagaacttattagagaactt

SEQ ID NO: 44577 - DNA, 25 bp, probe
attcttatctctctgtgctgtggaa

SEQ ID NO: 44578 - DNA, 25 bp, probe
cattcttatctctctgtgctgtgga

SEQ ID NO: 44579 - DNA, 25 bp, probe
ttcttatctctctgtgctgtggaag

SEQ ID NO: 44580 - DNA, 25 bp, probe
tgttgtaactaggctcagagatgtg

SEQ ID NO: 44581 - DNA, 25 bp, probe
aactgttgtaactaggctcagagat

SEQ ID NO: 44582 - DNA, 25 bp, probe
ctatgtgccaactgttgtaactagg

SEQ ID NO: 44583 - DNA, 25 bp, probe
cctatgtgccaactgttgtaactag

SEQ ID NO: 44584 - DNA, 25 bp, probe
tctcatgtatcatctggataggagc

SEQ ID NO: 44585 - DNA, 25 bp, probe
catctcatgtatcatctggatagga

SEQ ID NO: 44586 - DNA, 25 bp, probe
atctcatgtatcatctggataggag

SEQ ID NO: 44587 - DNA, 25 bp, probe
ccctattctctctttacgcttagtt

SEQ ID NO: 44588 - DNA, 25 bp, probe
ctcactaccctattctctctttacg

SEQ ID NO: 44589 - DNA, 25 bp, probe
gctcactaccctattctctctttac

SEQ ID NO: 44590 - DNA, 25 bp, probe
ctgttgtaactaggctcagagatgt

SEQ ID NO: 44591 - DNA, 25 bp, probe
actgttgtaactaggctcagagatg

SEQ ID NO: 44592 - DNA, 25 bp, probe
acacatacaggatttgaactcagat

SEQ ID NO: 44593 - DNA, 25 bp, probe
atctgtctgataggaatgtgaaagc

SEQ ID NO: 44594 - DNA, 25 bp, probe
tgctacacatacaggatttgaactc

SEQ ID NO: 44595 - DNA, 25 bp, probe
gtcacaccagccattcttatctctc

SEQ ID NO: 44596 - DNA, 25 bp, probe
accctattctctctttacgcttagt

SEQ ID NO: 44597 - DNA, 25 bp, probe
taccctattctctctttacgcttag

SEQ ID NO: 44598 - DNA, 25 bp, probe
ctaccctattctctctttacgctta

SEQ ID NO: 44599 - DNA, 25 bp, probe
actaccctattctctctttacgctt

SEQ ID NO: 44600 - DNA, 25 bp, probe
tacacatacaggatttgaactcaga

SEQ ID NO: 44601 - DNA, 25 bp, probe
acctatgtgccaactgttgtaacta

SEQ ID NO: 44602 - DNA, 25 bp, probe
ccatctcatgtatcatctggatagg

SEQ ID NO: 44603 - DNA, 25 bp, probe
ctacacatacaggatttgaactcag

SEQ ID NO: 44604 - DNA, 25 bp, probe
gctacacatacaggatttgaactca

SEQ ID NO: 44605 - DNA, 25 bp, probe
tcacaccagccattcttatctctct

SEQ ID NO: 44606 - DNA, 25 bp, probe
ctcatgtatcatctggataggagcc

SEQ ID NO: 44607 - DNA, 25 bp, probe
cactaccctattctctctttacgct

SEQ ID NO: 44608 - DNA, 25 bp, probe
tcactaccctattctctctttacgc

SEQ ID NO: 44609 - DNA, 25 bp, probe
caagttcctttgggttaagcattac

SEQ ID NO: 44610 - DNA, 25 bp, probe
tcaagttcctttgggttaagcatta

SEQ ID NO: 44611 - DNA, 25 bp, probe
catgtatcatctggataggagcctg

SEQ ID NO: 44612 - DNA, 25 bp, probe
tcatgtatcatctggataggagcct

SEQ ID NO: 44613 - DNA, 25 bp, probe
ctacatactttcatcctgactctgc

SEQ ID NO: 44614 - DNA, 25 bp, probe
tctacatactttcatcctgactctg

SEQ ID NO: 44615 - DNA, 25 bp, probe
tctgtctgataggaatgtgaaagca

SEQ ID NO: 44616 - DNA, 25 bp, probe
cacatacaggatttgaactcagatc

SEQ ID NO: 44617 - DNA, 25 bp, probe
caactgttgtaactaggctcagaga

SEQ ID NO: 44618 - DNA, 25 bp, probe
ttctctctttacgcttagttatcag

SEQ ID NO: 44619 - DNA, 25 bp, probe
gttgtaactaggctcagagatgtgc

SEQ ID NO: 44620 - DNA, 25 bp, probe
ttaagcattaccactcaggcatttg

SEQ ID NO: 44621 - DNA, 25 bp, probe
taccttctgctgtgtgtgtgtatat

SEQ ID NO: 44622 - DNA, 25 bp, probe
ccttctgctgtgtgtgtgtatatat

SEQ ID NO: 44623 - DNA, 25 bp, probe
gctctgagttcatggatgttaattg

SEQ ID NO: 44624 - DNA, 25 bp, probe
accttctgctgtgtgtgtgtatata

SEQ ID NO: 44625 - DNA, 25 bp, probe
gagttcatggatgttaattgagagc

SEQ ID NO: 44626 - DNA, 25 bp, probe
agctctgagttcatggatgttaatt

SEQ ID NO: 44627 - DNA, 25 bp, probe
agttcatggatgttaattgagagcc

SEQ ID NO: 44628 - DNA, 25 bp, probe
tgagttcatggatgttaattgagag

SEQ ID NO: 44629 - DNA, 25 bp, probe
ctgagttcatggatgttaattgaga

SEQ ID NO: 44630 - DNA, 25 bp, probe
tctgagttcatggatgttaattgag

SEQ ID NO: 44631 - DNA, 25 bp, probe
ctctgagttcatggatgttaattga

SEQ ID NO: 44632 - DNA, 25 bp, probe
cagctctgagttcatggatgttaat

SEQ ID NO: 44633 - DNA, 25 bp, probe
gtaccttctgctgtgtgtgtgtata

SEQ ID NO: 44634 - DNA, 25 bp, probe
tctagtctttatttatggtcgtgcc

SEQ ID NO: 44635 - DNA, 25 bp, probe
caatgagaatcagatcgagtccaag

SEQ ID NO: 44636 - DNA, 25 bp, probe
tagtctttatttatggtcgtgccct

SEQ ID NO: 44637 - DNA, 25 bp, probe
tcaatgagaatcagatcgagtccaa

SEQ ID NO: 44638 - DNA, 25 bp, probe
ttctagtctttatttatggtcgtgc

SEQ ID NO: 44639 - DNA, 25 bp, probe
cccttctagtctttatttatggtcg

SEQ ID NO: 44640 - DNA, 25 bp, probe
ctgtcaatgagaatcagatcgagtc

SEQ ID NO: 44641 - DNA, 25 bp, probe
ctagtctttatttatggtcgtgccc

SEQ ID NO: 44642 - DNA, 25 bp, probe
cttctgctgtgtgtgtgtatatata

SEQ ID NO: 44643 - DNA, 25 bp, probe
gtctttatttatggtcgtgcccttc

SEQ ID NO: 44644 - DNA, 25 bp, probe
ccgcttctcttattcgtgttaggtg

SEQ ID NO: 44645 - DNA, 25 bp, probe
accctcccttctagtctttatttat

SEQ ID NO: 44646 - DNA, 25 bp, probe
aatgagaatcagatcgagtccaagg

SEQ ID NO: 44647 - DNA, 25 bp, probe
gtcaatgagaatcagatcgagtcca

SEQ ID NO: 44648 - DNA, 25 bp, probe
tgtcaatgagaatcagatcgagtcc

SEQ ID NO: 44649 - DNA, 25 bp, probe
agtctttatttatggtcgtgccctt

SEQ ID NO: 44650 - DNA, 25 bp, probe
ccttctagtctttatttatggtcgt

SEQ ID NO: 44651 - DNA, 25 bp, probe
cctcccttctagtctttatttatgg

SEQ ID NO: 44652 - DNA, 25 bp, probe
ccctcccttctagtctttatttatg

SEQ ID NO: 44653 - DNA, 25 bp, probe
ttctgctgtgtgtgtgtatatataa

SEQ ID NO: 44654 - DNA, 25 bp, probe
tgaccctcccttctagtctttattt

SEQ ID NO: 44655 - DNA, 25 bp, probe
gcttctcttattcgtgttaggtgcc

SEQ ID NO: 44656 - DNA, 25 bp, probe
gaccctcccttctagtctttattta

SEQ ID NO: 44657 - DNA, 25 bp, probe
cctgtcaatgagaatcagatcgagt

SEQ ID NO: 44658 - DNA, 25 bp, probe
gtgaccctcccttctagtctttatt

SEQ ID NO: 44659 - DNA, 25 bp, probe
cgcttctcttattcgtgttaggtgc

SEQ ID NO: 44660 - DNA, 25 bp, probe
tcccttctagtctttatttatggtc

SEQ ID NO: 44661 - DNA, 25 bp, probe
ctcccttctagtctttatttatggt

SEQ ID NO: 44662 - DNA, 25 bp, probe
tctttatttatggtcgtgcccttcc

SEQ ID NO: 44663 - DNA, 25 bp, probe
cttctagtctttatttatggtcgtg

SEQ ID NO: 44664 - DNA, 25 bp, probe
agtgaccctcccttctagtctttat

SEQ ID NO: 44665 - DNA, 25 bp, probe
ttatgaaggcagtgaagaagtatcc

SEQ ID NO: 44666 - DNA, 25 bp, probe
aattaactggttccatcaagactgt

SEQ ID NO: 44667 - DNA, 25 bp, probe
attatgaaggcagtgaagaagtatc

SEQ ID NO: 44668 - DNA, 25 bp, probe
attaactggttccatcaagactgtg

SEQ ID NO: 44669 - DNA, 25 bp, probe
aattatgaaggcagtgaagaagtat

SEQ ID NO: 44670 - DNA, 25 bp, probe
gcacataattaactggttccatcaa

SEQ ID NO: 44671 - DNA, 25 bp, probe
ggatctcagtatcaacagaataacc

SEQ ID NO: 44672 - DNA, 25 bp, probe
taattaactggttccatcaagactg

SEQ ID NO: 44673 - DNA, 25 bp, probe
cagtatcaacagaataaccatgtgc

SEQ ID NO: 44674 - DNA, 25 bp, probe
cctggatctcagtatcaacagaata

SEQ ID NO: 44675 - DNA, 25 bp, probe
cattcacctggatctcagtatcaac

SEQ ID NO: 44676 - DNA, 25 bp, probe
acctggatctcagtatcaacagaat

SEQ ID NO: 44677 - DNA, 25 bp, probe
tctcagtatcaacagaataaccatg

SEQ ID NO: 44678 - DNA, 25 bp, probe
gatctcagtatcaacagaataacca

SEQ ID NO: 44679 - DNA, 25 bp, probe
tggatctcagtatcaacagaataac

SEQ ID NO: 44680 - DNA, 25 bp, probe
acataattaactggttccatcaaga

SEQ ID NO: 44681 - DNA, 25 bp, probe
cacataattaactggttccatcaag

SEQ ID NO: 44682 - DNA, 25 bp, probe
tcagtatcaacagaataaccatgtg

SEQ ID NO: 44683 - DNA, 25 bp, probe
attcacctggatctcagtatcaaca

SEQ ID NO: 44684 - DNA, 25 bp, probe
atctcagtatcaacagaataaccat

SEQ ID NO: 44685 - DNA, 25 bp, probe
cataattaactggttccatcaagac

SEQ ID NO: 44686 - DNA, 25 bp, probe
ctaatgtgtaaatggcaaaggtgta

SEQ ID NO: 44687 - DNA, 25 bp, probe
tattcctaatcaacatggagtggag

SEQ ID NO: 44688 - DNA, 25 bp, probe
ctattcctaatcaacatggagtgga

SEQ ID NO: 44689 - DNA, 25 bp, probe
actattcctaatcaacatggagtgg

SEQ ID NO: 44690 - DNA, 25 bp, probe
tgcacataattaactggttccatca

SEQ ID NO: 44691 - DNA, 25 bp, probe
ctcagtatcaacagaataaccatgt

SEQ ID NO: 44692 - DNA, 25 bp, probe
cctaatcaacatggagtggagagtt

SEQ ID NO: 44693 - DNA, 25 bp, probe
ataattaactggttccatcaagact

SEQ ID NO: 44694 - DNA, 25 bp, probe
atgcacataattaactggttccatc

SEQ ID NO: 44695 - DNA, 25 bp, probe
aatgtgtaaatggcaaaggtgtata

SEQ ID NO: 44696 - DNA, 25 bp, probe
taatgtgtaaatggcaaaggtgtat

SEQ ID NO: 44697 - DNA, 25 bp, probe
aatgcacataattaactggttccat

SEQ ID NO: 44698 - DNA, 25 bp, probe
cacctggatctcagtatcaacagaa

SEQ ID NO: 44699 - DNA, 25 bp, probe
ttcacctggatctcagtatcaacag

SEQ ID NO: 44700 - DNA, 25 bp, probe
atgtgtaaatggcaaaggtgtatat

SEQ ID NO: 44701 - DNA, 25 bp, probe
attcctaatcaacatggagtggaga

SEQ ID NO: 44702 - DNA, 25 bp, probe
aactattcctaatcaacatggagtg

SEQ ID NO: 44703 - DNA, 25 bp, probe
ctggatctcagtatcaacagaataa

SEQ ID NO: 44704 - DNA, 25 bp, probe
tatcaacagaataaccatgtgcatg

SEQ ID NO: 44705 - DNA, 25 bp, probe
gtatcaacagaataaccatgtgcat

SEQ ID NO: 44706 - DNA, 25 bp, probe
agtatcaacagaataaccatgtgca

SEQ ID NO: 44707 - DNA, 25 bp, probe
ttcctaatcaacatggagtggagag

SEQ ID NO: 44708 - DNA, 25 bp, probe
tatgaaggcagtgaagaagtatccc

SEQ ID NO: 44709 - DNA, 25 bp, probe
ggcaatcctcagtatagttacaaca

SEQ ID NO: 44710 - DNA, 25 bp, probe
tggcaatcctcagtatagttacaac

SEQ ID NO: 44711 - DNA, 25 bp, probe
attatatcctcattcacctgcctct

SEQ ID NO: 44712 - DNA, 25 bp, probe
cattatatcctcattcacctgcctc

SEQ ID NO: 44713 - DNA, 25 bp, probe
ttatgaaggcaatgaagaagtatcc

SEQ ID NO: 44714 - DNA, 25 bp, probe
tgcctctcagtatcaacagaataat

SEQ ID NO: 44715 - DNA, 25 bp, probe
gcaatcctcagtatagttacaacaa

SEQ ID NO: 44716 - DNA, 25 bp, probe
gcctctcagtatcaacagaataatc

SEQ ID NO: 44717 - DNA, 25 bp, probe
ttatatcctcattcacctgcctctc

SEQ ID NO: 44718 - DNA, 25 bp, probe
atgaagaagtatcctcacctcagat

SEQ ID NO: 44719 - DNA, 25 bp, probe
aagaagtatcctcacctcagatgaa

SEQ ID NO: 44720 - DNA, 25 bp, probe
aatgaagaagtatcctcacctcaga

SEQ ID NO: 44721 - DNA, 25 bp, probe
caatgaagaagtatcctcacctcag

SEQ ID NO: 44722 - DNA, 25 bp, probe
ctggatatataaggctggtggtaac

SEQ ID NO: 44723 - DNA, 25 bp, probe
tggatatataaggctggtggtaact

SEQ ID NO: 44724 - DNA, 25 bp, probe
agaagtatcctcacctcagatgaag

SEQ ID NO: 44725 - DNA, 25 bp, probe
ggacagaattacatgaatgacagtg

SEQ ID NO: 44726 - DNA, 25 bp, probe
aggacagaattacatgaatgacagt

SEQ ID NO: 44727 - DNA, 25 bp, probe
agaggacagaattacatgaatgaca

SEQ ID NO: 44728 - DNA, 25 bp, probe
ccaagaggacagaattacatgaatg

SEQ ID NO: 44729 - DNA, 25 bp, probe
gaagaagtatcctcacctcagatga

SEQ ID NO: 44730 - DNA, 25 bp, probe
gacagaattacatgaatgacagtgc

SEQ ID NO: 44731 - DNA, 25 bp, probe
gaggacagaattacatgaatgacag

SEQ ID NO: 44732 - DNA, 25 bp, probe
ggatatataaggctggtggtaactt

SEQ ID NO: 44733 - DNA, 25 bp, probe
ttctctgtgtctggctagtattgaa

SEQ ID NO: 44734 - DNA, 25 bp, probe
ccattatatcctcattcacctgcct

SEQ ID NO: 44735 - DNA, 25 bp, probe
tgaagaagtatcctcacctcagatg

SEQ ID NO: 44736 - DNA, 25 bp, probe
ctgcctctcagtatcaacagaataa

SEQ ID NO: 44737 - DNA, 25 bp, probe
ctggcaatcctcagtatagttacaa

SEQ ID NO: 44738 - DNA, 25 bp, probe
gccaagaggacagaattacatgaat

SEQ ID NO: 44739 - DNA, 25 bp, probe
aagaggacagaattacatgaatgac

SEQ ID NO: 44740 - DNA, 25 bp, probe
caagaggacagaattacatgaatga

SEQ ID NO: 44741 - DNA, 25 bp, probe
tagccaagaggacagaattacatga

SEQ ID NO: 44742 - DNA, 25 bp, probe
gtagccaagaggacagaattacatg

SEQ ID NO: 44743 - DNA, 25 bp, probe
tatgaaggcaatgaagaagtatcct

SEQ ID NO: 44744 - DNA, 25 bp, probe
atgaaggcaatgaagaagtatcctc

SEQ ID NO: 44745 - DNA, 25 bp, probe
tatatcctcattcacctgcctctca

SEQ ID NO: 44746 - DNA, 25 bp, probe
cctctcagtatcaacagaataatca

SEQ ID NO: 44747 - DNA, 25 bp, probe
acagaattacatgaatgacagtgcc

SEQ ID NO: 44748 - DNA, 25 bp, probe
ttgtgtagccaagaggacagaatta

SEQ ID NO: 44749 - DNA, 25 bp, probe
cctgcctctcagtatcaacagaata

SEQ ID NO: 44750 - DNA, 25 bp, probe
ggaatggctaggagatgaacttgaa

SEQ ID NO: 44751 - DNA, 25 bp, probe
agccaagaggacagaattacatgaa

SEQ ID NO: 44752 - DNA, 25 bp, probe
gaaggcaatgaagaagtatcctcac

SEQ ID NO: 44753 - DNA, 25 bp, probe
ggtcttctctcttcattcctcttag

SEQ ID NO: 44754 - DNA, 25 bp, probe
gttgacataagttcctacctgacta

SEQ ID NO: 44755 - DNA, 25 bp, probe
atgttgacataagttcctacctgac

SEQ ID NO: 44756 - DNA, 25 bp, probe
tgttgacataagttcctacctgact

SEQ ID NO: 44757 - DNA, 25 bp, probe
ttgacataagttcctacctgactat

SEQ ID NO: 44758 - DNA, 25 bp, probe
catgttgacataagttcctacctga

SEQ ID NO: 44759 - DNA, 25 bp, probe
gtcttctctcttcattcctcttagg

SEQ ID NO: 44760 - DNA, 25 bp, probe
aggtcttctctcttcattcctctta

SEQ ID NO: 44761 - DNA, 25 bp, probe
cataagttcctacctgactatgctt

SEQ ID NO: 44762 - DNA, 25 bp, probe
gacataagttcctacctgactatgc

SEQ ID NO: 44763 - DNA, 25 bp, probe
ccatgttgacataagttcctacctg

SEQ ID NO: 44764 - DNA, 25 bp, probe
acataagttcctacctgactatgct

SEQ ID NO: 44765 - DNA, 25 bp, probe
tgacataagttcctacctgactatg

SEQ ID NO: 44766 - DNA, 25 bp, probe
caccatgttgacataagttcctacc

SEQ ID NO: 44767 - DNA, 25 bp, probe
ccaccatgttgacataagttcctac

SEQ ID NO: 44768 - DNA, 25 bp, probe
accatgttgacataagttcctacct

SEQ ID NO: 44769 - DNA, 25 bp, probe
caggtcttctctcttcattcctctt

SEQ ID NO: 44770 - DNA, 25 bp, probe
ctacctgactatgctttctctccta

SEQ ID NO: 44771 - DNA, 25 bp, probe
ttcctacctgactatgctttctctc

SEQ ID NO: 44772 - DNA, 25 bp, probe
tacctgactatgctttctctcctag

SEQ ID NO: 44773 - DNA, 25 bp, probe
gttcctacctgactatgctttctct

SEQ ID NO: 44774 - DNA, 25 bp, probe
taagttcctacctgactatgctttc

SEQ ID NO: 44775 - DNA, 25 bp, probe
ataagttcctacctgactatgcttt

SEQ ID NO: 44776 - DNA, 25 bp, probe
aagttcctacctgactatgctttct

SEQ ID NO: 44777 - DNA, 25 bp, probe
gccaccatgttgacataagttccta

SEQ ID NO: 44778 - DNA, 25 bp, probe
agttcctacctgactatgctttctc

SEQ ID NO: 44779 - DNA, 25 bp, probe
ctcagtattaccatgtctccctctc

SEQ ID NO: 44780 - DNA, 25 bp, probe
ctaaattgggctctaggtctctgtc

SEQ ID NO: 44781 - DNA, 25 bp, probe
cagtattaccatgtctccctctcag

SEQ ID NO: 44782 - DNA, 25 bp, probe
ccaggtcttctctcttcattcctct

SEQ ID NO: 44783 - DNA, 25 bp, probe
cagagacagggttgcttataggaag

SEQ ID NO: 44784 - DNA, 25 bp, probe
tcagtattaccatgtctccctctca

SEQ ID NO: 44785 - DNA, 25 bp, probe
ttatctgtacatagtgactgagtgg

SEQ ID NO: 44786 - DNA, 25 bp, probe
cctacctgactatgctttctctcct

SEQ ID NO: 44787 - DNA, 25 bp, probe
tcctacctgactatgctttctctcc

SEQ ID NO: 44788 - DNA, 25 bp, probe
atgccaccatgttgacataagttcc

SEQ ID NO: 44789 - DNA, 25 bp, probe
aagccaggtcttctctcttcattcc

SEQ ID NO: 44790 - DNA, 25 bp, probe
cctcagtattaccatgtctccctct

SEQ ID NO: 44791 - DNA, 25 bp, probe
ctgtgaactgtcttccttgttctag

SEQ ID NO: 44792 - DNA, 25 bp, probe
taaattgggctctaggtctctgtcc

SEQ ID NO: 44793 - DNA, 25 bp, probe
cctgtgaactgtcttccttgttcta

SEQ ID NO: 44794 - DNA, 25 bp, probe
agtattaccatgtctccctctcagg

SEQ ID NO: 44795 - DNA, 25 bp, probe
ttctctcttcattcctcttaggaga

SEQ ID NO: 44796 - DNA, 25 bp, probe
tcttctctcttcattcctcttagga

SEQ ID NO: 44797 - DNA, 25 bp, probe
actcctctcgtacttgaactcactc

SEQ ID NO: 44798 - DNA, 25 bp, probe
gactcctctcgtacttgaactcact

SEQ ID NO: 44799 - DNA, 25 bp, probe
ctcctctcgtacttgaactcactcc

SEQ ID NO: 44800 - DNA, 25 bp, probe
ggactcctctcgtacttgaactcac

SEQ ID NO: 44801 - DNA, 25 bp, probe
gagagagaccacacgcagtattgag

SEQ ID NO: 44802 - DNA, 25 bp, probe
ctctcgtacttgaactcactccctc

SEQ ID NO: 44803 - DNA, 25 bp, probe
ctcgtacttgaactcactccctcac

SEQ ID NO: 44804 - DNA, 25 bp, probe
tctcgtacttgaactcactccctca

SEQ ID NO: 44805 - DNA, 25 bp, probe
cctctcgtacttgaactcactccct

SEQ ID NO: 44806 - DNA, 25 bp, probe
tcctctcgtacttgaactcactccc

SEQ ID NO: 44807 - DNA, 25 bp, probe
gtggatgaaatcagcatgatgggac

SEQ ID NO: 44808 - DNA, 25 bp, probe
gaggtggtggatgaaatcagcatga

SEQ ID NO: 44809 - DNA, 25 bp, probe
gtggtggatgaaatcagcatgatgg

SEQ ID NO: 44810 - DNA, 25 bp, probe
ggtggtggatgaaatcagcatgatg

SEQ ID NO: 44811 - DNA, 25 bp, probe
aggtggtggatgaaatcagcatgat

SEQ ID NO: 44812 - DNA, 25 bp, probe
ggtggatgaaatcagcatgatggga

SEQ ID NO: 44813 - DNA, 25 bp, probe
tggtggatgaaatcagcatgatggg

SEQ ID NO: 44814 - DNA, 25 bp, probe
gagtctgtccactatacatcctctg

SEQ ID NO: 44815 - DNA, 25 bp, probe
cgagtctgtccactatacatcctct

SEQ ID NO: 44816 - DNA, 25 bp, probe
agtctgtccactatacatcctctgc

SEQ ID NO: 44817 - DNA, 25 bp, probe
gtcaagactgttgtcatcatcctgg

SEQ ID NO: 44818 - DNA, 25 bp, probe
ggtcaagactgttgtcatcatcctg

SEQ ID NO: 44819 - DNA, 25 bp, probe
ctggtcaagactgttgtcatcatcc

SEQ ID NO: 44820 - DNA, 25 bp, probe
cctggtcaagactgttgtcatcatc

SEQ ID NO: 44821 - DNA, 25 bp, probe
tggtcaagactgttgtcatcatcct

SEQ ID NO: 44822 - DNA, 25 bp, probe
gtctgtccactatacatcctctgcc

SEQ ID NO: 44823 - DNA, 25 bp, probe
gcgagtctgtccactatacatcctc

SEQ ID NO: 44824 - DNA, 25 bp, probe
caatgtcctggctgtagaaaagtac

SEQ ID NO: 44825 - DNA, 25 bp, probe
ctggtcaatgctgctgtgtactctt

SEQ ID NO: 44826 - DNA, 25 bp, probe
accctttagctaccttgaacttcag

SEQ ID NO: 44827 - DNA, 25 bp, probe
gcaatgtcctggctgtagaaaagta

SEQ ID NO: 44828 - DNA, 25 bp, probe
caccctttagctaccttgaacttca

SEQ ID NO: 44829 - DNA, 25 bp, probe
gcctggtcaagactgttgtcatcat

SEQ ID NO: 44830 - DNA, 25 bp, probe
gtactcttgccgagatgctgagatg

SEQ ID NO: 44831 - DNA, 25 bp, probe
ccaccctttagctaccttgaacttc

SEQ ID NO: 44832 - DNA, 25 bp, probe
tcaagactgttgtcatcatcctggg

SEQ ID NO: 44833 - DNA, 25 bp, probe
gtggtactgctcctggatggtttag

SEQ ID NO: 44834 - DNA, 25 bp, probe
tccaccctttagctaccttgaactt

SEQ ID NO: 44835 - DNA, 25 bp, probe
ctccaccctttagctaccttgaact

SEQ ID NO: 44836 - DNA, 25 bp, probe
gactccaccctttagctaccttgaa

SEQ ID NO: 44837 - DNA, 25 bp, probe
tctgtccactatacatcctctgccc

SEQ ID NO: 44838 - DNA, 25 bp, probe
aatgtcctggctgtagaaaagtact

SEQ ID NO: 44839 - DNA, 25 bp, probe
actccaccctttagctaccttgaac

SEQ ID NO: 44840 - DNA, 25 bp, probe
ctgtccactatacatcctctgccca

SEQ ID NO: 44841 - DNA, 25 bp, probe
tgtccactatacatcctctgcccag

SEQ ID NO: 44842 - DNA, 25 bp, probe
ttagctaccttgaacttcagcggta

SEQ ID NO: 44843 - DNA, 25 bp, probe
ccctttagctaccttgaacttcagc

SEQ ID NO: 44844 - DNA, 25 bp, probe
tagctaccttgaacttcagcggtac

SEQ ID NO: 44845 - DNA, 25 bp, probe
ctttagctaccttgaacttcagcgg

SEQ ID NO: 44846 - DNA, 25 bp, probe
cctttagctaccttgaacttcagcg

SEQ ID NO: 44847 - DNA, 25 bp, probe
ctgcaatgtcctggctgtagaaaag

SEQ ID NO: 44848 - DNA, 25 bp, probe
ctgatggactccaccctttagctac

SEQ ID NO: 44849 - DNA, 25 bp, probe
tttaggctgtgagtcctgcaatgtc

SEQ ID NO: 44850 - DNA, 25 bp, probe
actgatggactccaccctttagcta

SEQ ID NO: 44851 - DNA, 25 bp, probe
tttagctaccttgaacttcagcggt

SEQ ID NO: 44852 - DNA, 25 bp, probe
gtacacccgcattttcttctacgtg

SEQ ID NO: 44853 - DNA, 25 bp, probe
atggactccaccctttagctacctt

SEQ ID NO: 44854 - DNA, 25 bp, probe
tgcaatgtcctggctgtagaaaagt

SEQ ID NO: 44855 - DNA, 25 bp, probe
caagactgttgtcatcatcctgggg

SEQ ID NO: 44856 - DNA, 25 bp, probe
gatggactccaccctttagctacct

SEQ ID NO: 44857 - DNA, 25 bp, probe
tgtacacccgcattttcttctacgt

SEQ ID NO: 44858 - DNA, 25 bp, probe
ctaaggtgttccaagtattccatct

SEQ ID NO: 44859 - DNA, 25 bp, probe
tgaattggaaggaatggagattagg

SEQ ID NO: 44860 - DNA, 25 bp, probe
taaggtgttccaagtattccatctt

SEQ ID NO: 44861 - DNA, 25 bp, probe
gctaaggtgttccaagtattccatc

SEQ ID NO: 44862 - DNA, 25 bp, probe
ttgaattggaaggaatggagattag

SEQ ID NO: 44863 - DNA, 25 bp, probe
cttcagttattggtgagtctaagga

SEQ ID NO: 44864 - DNA, 25 bp, probe
cttgaattggaaggaatggagatta

SEQ ID NO: 44865 - DNA, 25 bp, probe
ttcagttattggtgagtctaaggat

SEQ ID NO: 44866 - DNA, 25 bp, probe
gcttcagttattggtgagtctaagg

SEQ ID NO: 44867 - DNA, 25 bp, probe
atgaggaatgattcactgaagatga

SEQ ID NO: 44868 - DNA, 25 bp, probe
tcagttattggtgagtctaaggatc

SEQ ID NO: 44869 - DNA, 25 bp, probe
acatgaggaatgattcactgaagat

SEQ ID NO: 44870 - DNA, 25 bp, probe
catgaggaatgattcactgaagatg

SEQ ID NO: 44871 - DNA, 25 bp, probe
aacatgaggaatgattcactgaaga

SEQ ID NO: 44872 - DNA, 25 bp, probe
ggctaaggtgttccaagtattccat

SEQ ID NO: 44873 - DNA, 25 bp, probe
cattgaatgatggctaaggtgttcc

SEQ ID NO: 44874 - DNA, 25 bp, probe
agcttcagttattggtgagtctaag

SEQ ID NO: 44875 - DNA, 25 bp, probe
gtagcttcagttattggtgagtcta

SEQ ID NO: 44876 - DNA, 25 bp, probe
ataacacaatgacaacatggtgaga

SEQ ID NO: 44877 - DNA, 25 bp, probe
cataacacaatgacaacatggtgag

SEQ ID NO: 44878 - DNA, 25 bp, probe
ttgtatgccaacctagataggatta

SEQ ID NO: 44879 - DNA, 25 bp, probe
taacacaatgacaacatggtgagaa

SEQ ID NO: 44880 - DNA, 25 bp, probe
ttctaaagagtccaaagtcagtagc

SEQ ID NO: 44881 - DNA, 25 bp, probe
aggttctatcaggtttgtaatcact

SEQ ID NO: 44882 - DNA, 25 bp, probe
tcattctaaagagtccaaagtcagt

SEQ ID NO: 44883 - DNA, 25 bp, probe
agtcattctaaagagtccaaagtca

SEQ ID NO: 44884 - DNA, 25 bp, probe
aagataggacggatgtgatatgaaa

SEQ ID NO: 44885 - DNA, 25 bp, probe
aaagataggacggatgtgatatgaa

SEQ ID NO: 44886 - DNA, 25 bp, probe
ggaggactacattaactcttattgt

SEQ ID NO: 44887 - DNA, 25 bp, probe
tagcttcagttattggtgagtctaa

SEQ ID NO: 44888 - DNA, 25 bp, probe
tatattaaataccactgcttgctgc

SEQ ID NO: 44889 - DNA, 25 bp, probe
tgtatgccaacctagataggattat

SEQ ID NO: 44890 - DNA, 25 bp, probe
gtcattctaaagagtccaaagtcag

SEQ ID NO: 44891 - DNA, 25 bp, probe
gaggttctatcaggtttgtaatcac

SEQ ID NO: 44892 - DNA, 25 bp, probe
aggaggactacattaactcttattg

SEQ ID NO: 44893 - DNA, 25 bp, probe
aaggtgttccaagtattccatcttt

SEQ ID NO: 44894 - DNA, 25 bp, probe
gatggctaaggtgttccaagtattc

SEQ ID NO: 44895 - DNA, 25 bp, probe
atattaaataccactgcttgctgct

SEQ ID NO: 44896 - DNA, 25 bp, probe
gactgatttcttctgtggtttatga

SEQ ID NO: 44897 - DNA, 25 bp, probe
gcagattatgatggtaaatatggct

SEQ ID NO: 44898 - DNA, 25 bp, probe
aaggaatggagattagggaaggaaa

SEQ ID NO: 44899 - DNA, 25 bp, probe
attggaaggaatggagattagggaa

SEQ ID NO: 44900 - DNA, 25 bp, probe
tattaaataccactgcttgctgctt

SEQ ID NO: 44901 - DNA, 25 bp, probe
ggaagggaagtcattctaaagagtc

SEQ ID NO: 44902 - DNA, 25 bp, probe
tgtggtctcattactagcaagtatg

SEQ ID NO: 44903 - DNA, 25 bp, probe
ctgtggtctcattactagcaagtat

SEQ ID NO: 44904 - DNA, 25 bp, probe
aagattggagttggatcagtcactt

SEQ ID NO: 44905 - DNA, 25 bp, probe
cctctagcctgtggtctcattacta

SEQ ID NO: 44906 - DNA, 25 bp, probe
agacagttcaatctgattcctccag

SEQ ID NO: 44907 - DNA, 25 bp, probe
cctgtggtctcattactagcaagta

SEQ ID NO: 44908 - DNA, 25 bp, probe
gacagttcaatctgattcctccagt

SEQ ID NO: 44909 - DNA, 25 bp, probe
ctctagcctgtggtctcattactag

SEQ ID NO: 44910 - DNA, 25 bp, probe
agattggagttggatcagtcacttg

SEQ ID NO: 44911 - DNA, 25 bp, probe
caagattggagttggatcagtcact

SEQ ID NO: 44912 - DNA, 25 bp, probe
tagcctgtggtctcattactagcaa

SEQ ID NO: 44913 - DNA, 25 bp, probe
ctctaccacaagattggagttggat

SEQ ID NO: 44914 - DNA, 25 bp, probe
agttcaatctgattcctccagtgtg

SEQ ID NO: 44915 - DNA, 25 bp, probe
cagttcaatctgattcctccagtgt

SEQ ID NO: 44916 - DNA, 25 bp, probe
acagttcaatctgattcctccagtg

SEQ ID NO: 44917 - DNA, 25 bp, probe
acaagattggagttggatcagtcac

SEQ ID NO: 44918 - DNA, 25 bp, probe
cacaagattggagttggatcagtca

SEQ ID NO: 44919 - DNA, 25 bp, probe
gtggtctcattactagcaagtatga

SEQ ID NO: 44920 - DNA, 25 bp, probe
tctaccacaagattggagttggatc

SEQ ID NO: 44921 - DNA, 25 bp, probe
aatctgattcctccagtgtgtgaac

SEQ ID NO: 44922 - DNA, 25 bp, probe
caatctgattcctccagtgtgtgaa

SEQ ID NO: 44923 - DNA, 25 bp, probe
ttcaatctgattcctccagtgtgtg

SEQ ID NO: 44924 - DNA, 25 bp, probe
gttcaatctgattcctccagtgtgt

SEQ ID NO: 44925 - DNA, 25 bp, probe
tggtctcattactagcaagtatgat

SEQ ID NO: 44926 - DNA, 25 bp, probe
gtctcattactagcaagtatgatgg

SEQ ID NO: 44927 - DNA, 25 bp, probe
ggtctcattactagcaagtatgatg

SEQ ID NO: 44928 - DNA, 25 bp, probe
taccacaagattggagttggatcag

SEQ ID NO: 44929 - DNA, 25 bp, probe
ctaccacaagattggagttggatca

SEQ ID NO: 44930 - DNA, 25 bp, probe
ttggagttggatcagtcacttggta

SEQ ID NO: 44931 - DNA, 25 bp, probe
gattggagttggatcagtcacttgg

SEQ ID NO: 44932 - DNA, 25 bp, probe
agtgaagatggcaagaagcaacaag

SEQ ID NO: 44933 - DNA, 25 bp, probe
gagtgaagatggcaagaagcaacaa

SEQ ID NO: 44934 - DNA, 25 bp, probe
tcaatctgattcctccagtgtgtga

SEQ ID NO: 44935 - DNA, 25 bp, probe
ctgattcctccagtgtgtgaacaag

SEQ ID NO: 44936 - DNA, 25 bp, probe
atctgattcctccagtgtgtgaaca

SEQ ID NO: 44937 - DNA, 25 bp, probe
tctagcctgtggtctcattactagc

SEQ ID NO: 44938 - DNA, 25 bp, probe
agcctgtggtctcattactagcaag

SEQ ID NO: 44939 - DNA, 25 bp, probe
cagagtgaagatggcaagaagcaac

SEQ ID NO: 44940 - DNA, 25 bp, probe
tctgattcctccagtgtgtgaacaa

SEQ ID NO: 44941 - DNA, 25 bp, probe
ctagcctgtggtctcattactagca

SEQ ID NO: 44942 - DNA, 25 bp, probe
attggagttggatcagtcacttggt

SEQ ID NO: 44943 - DNA, 25 bp, probe
ccacaagattggagttggatcagtc

SEQ ID NO: 44944 - DNA, 25 bp, probe
tctcattactagcaagtatgatggg

SEQ ID NO: 44945 - DNA, 25 bp, probe
tggagttggatcagtcacttggtac

SEQ ID NO: 44946 - DNA, 25 bp, probe
ttacaatcacaaggacatagatacc

SEQ ID NO: 44947 - DNA, 25 bp, probe
ctatcaggatgaagaacaggcattg

SEQ ID NO: 44948 - DNA, 25 bp, probe
gatacctatcaggatgaagaacagg

SEQ ID NO: 44949 - DNA, 25 bp, probe
acaaggacatagatacctatcagga

SEQ ID NO: 44950 - DNA, 25 bp, probe
cacaaggacatagatacctatcagg

SEQ ID NO: 44951 - DNA, 25 bp, probe
aggacatagatacctatcaggatga

SEQ ID NO: 44952 - DNA, 25 bp, probe
agatacctatcaggatgaagaacag

SEQ ID NO: 44953 - DNA, 25 bp, probe
tcacaaggacatagatacctatcag

SEQ ID NO: 44954 - DNA, 25 bp, probe
ggacatagatacctatcaggatgaa

SEQ ID NO: 44955 - DNA, 25 bp, probe
aaggacatagatacctatcaggatg

SEQ ID NO: 44956 - DNA, 25 bp, probe
caaggacatagatacctatcaggat

SEQ ID NO: 44957 - DNA, 25 bp, probe
acaatcacaaggacatagataccta

SEQ ID NO: 44958 - DNA, 25 bp, probe
tacaatcacaaggacatagatacct

SEQ ID NO: 44959 - DNA, 25 bp, probe
atacctatcaggatgaagaacaggc

SEQ ID NO: 44960 - DNA, 25 bp, probe
atcacaaggacatagatacctatca

SEQ ID NO: 44961 - DNA, 25 bp, probe
atttacttcatttgccaatcagagg

SEQ ID NO: 44962 - DNA, 25 bp, probe
atgatataactcctgtgcaatgaag

SEQ ID NO: 44963 - DNA, 25 bp, probe
gaatgatataactcctgtgcaatga

SEQ ID NO: 44964 - DNA, 25 bp, probe
agaatgatataactcctgtgcaatg

SEQ ID NO: 44965 - DNA, 25 bp, probe
ttacttcatttgccaatcagaggat

SEQ ID NO: 44966 - DNA, 25 bp, probe
tttacttcatttgccaatcagagga

SEQ ID NO: 44967 - DNA, 25 bp, probe
tagatacctatcaggatgaagaaca

SEQ ID NO: 44968 - DNA, 25 bp, probe
accatacagaatgatataactcctg

SEQ ID NO: 44969 - DNA, 25 bp, probe
aatgatataactcctgtgcaatgaa

SEQ ID NO: 44970 - DNA, 25 bp, probe
aaccatacagaatgatataactcct

SEQ ID NO: 44971 - DNA, 25 bp, probe
acatagatacctatcaggatgaaga

SEQ ID NO: 44972 - DNA, 25 bp, probe
tacttcatttgccaatcagaggatg

SEQ ID NO: 44973 - DNA, 25 bp, probe
cctatcaggatgaagaacaggcatt

SEQ ID NO: 44974 - DNA, 25 bp, probe
caatcacaaggacatagatacctat

SEQ ID NO: 44975 - DNA, 25 bp, probe
gacatagatacctatcaggatgaag

SEQ ID NO: 44976 - DNA, 25 bp, probe
tgtgcaatgaaggtgataacagtaa

SEQ ID NO: 44977 - DNA, 25 bp, probe
ttcatttgccaatcagaggatgttt

SEQ ID NO: 44978 - DNA, 25 bp, probe
aatcacaaggacatagatacctatc

SEQ ID NO: 44979 - DNA, 25 bp, probe
gatataactcctgtgcaatgaaggt

SEQ ID NO: 44980 - DNA, 25 bp, probe
tgatataactcctgtgcaatgaagg

SEQ ID NO: 44981 - DNA, 25 bp, probe
cagaatgatataactcctgtgcaat

SEQ ID NO: 44982 - DNA, 25 bp, probe
cttcatttgccaatcagaggatgtt

SEQ ID NO: 44983 - DNA, 25 bp, probe
atataactcctgtgcaatgaaggtg

SEQ ID NO: 44984 - DNA, 25 bp, probe
tacctatcaggatgaagaacaggca

SEQ ID NO: 44985 - DNA, 25 bp, probe
caacttaaagcagtaccttcattca

SEQ ID NO: 44986 - DNA, 25 bp, probe
gtatttacttcatttgccaatcaga

SEQ ID NO: 44987 - DNA, 25 bp, probe
gcaacttaaagcagtaccttcattc

SEQ ID NO: 44988 - DNA, 25 bp, probe
acttaaagcagtaccttcattcatg

SEQ ID NO: 44989 - DNA, 25 bp, probe
aacttaaagcagtaccttcattcat

SEQ ID NO: 44990 - DNA, 25 bp, probe
gtcctcttccatctacttccacaag

SEQ ID NO: 44991 - DNA, 25 bp, probe
catcaaccagttctccaccttcttc

SEQ ID NO: 44992 - DNA, 25 bp, probe
tgtcctcttccatctacttccacaa

SEQ ID NO: 44993 - DNA, 25 bp, probe
caaccagttctccaccttcttcaag

SEQ ID NO: 44994 - DNA, 25 bp, probe
atcaaccagttctccaccttcttca

SEQ ID NO: 44995 - DNA, 25 bp, probe
tcatcaaccagttctccaccttctt

SEQ ID NO: 44996 - DNA, 25 bp, probe
tcaaccagttctccaccttcttcaa

SEQ ID NO: 44997 - DNA, 25 bp, probe
tcctcttccatctacttccacaagc

SEQ ID NO: 44998 - DNA, 25 bp, probe
ctcatcaaccagttctccaccttct

SEQ ID NO: 44999 - DNA, 25 bp, probe
gtgtcctcttccatctacttccaca

SEQ ID NO: 45000 - DNA, 25 bp, probe
ggtgtcctcttccatctacttccac

SEQ ID NO: 45001 - DNA, 25 bp, probe
cctcttccatctacttccacaagcc

SEQ ID NO: 45002 - DNA, 25 bp, probe
aggtgtcctcttccatctacttcca

SEQ ID NO: 45003 - DNA, 25 bp, probe
cctcatcaaccagttctccaccttc

SEQ ID NO: 45004 - DNA, 25 bp, probe
ggatggacttggttcctcttgtcaa

SEQ ID NO: 45005 - DNA, 25 bp, probe
ctttgttgcctgtcttgctgtctag

SEQ ID NO: 45006 - DNA, 25 bp, probe
gatggacttggttcctcttgtcaag

SEQ ID NO: 45007 - DNA, 25 bp, probe
ttctttccccataggtcttgctttg

SEQ ID NO: 45008 - DNA, 25 bp, probe
gttctttccccataggtcttgcttt

SEQ ID NO: 45009 - DNA, 25 bp, probe
ctttccccataggtcttgctttgtt

SEQ ID NO: 45010 - DNA, 25 bp, probe
ctcttccatctacttccacaagccc

SEQ ID NO: 45011 - DNA, 25 bp, probe
ctagggatggacttggttcctcttg

SEQ ID NO: 45012 - DNA, 25 bp, probe
tttccccataggtcttgctttgttg

SEQ ID NO: 45013 - DNA, 25 bp, probe
tctagggatggacttggttcctctt

SEQ ID NO: 45014 - DNA, 25 bp, probe
cataggtcttgctttgttgcctgtc

SEQ ID NO: 45015 - DNA, 25 bp, probe
cttccatctacttccacaagcccag

SEQ ID NO: 45016 - DNA, 25 bp, probe
ataggtcttgctttgttgcctgtct

SEQ ID NO: 45017 - DNA, 25 bp, probe
gtcttgctgtctagggatggacttg

SEQ ID NO: 45018 - DNA, 25 bp, probe
taggtcttgctttgttgcctgtctt

SEQ ID NO: 45019 - DNA, 25 bp, probe
tctttccccataggtcttgctttgt

SEQ ID NO: 45020 - DNA, 25 bp, probe
tgttctttccccataggtcttgctt

SEQ ID NO: 45021 - DNA, 25 bp, probe
gacttggttcctcttgtcaaggttt

SEQ ID NO: 45022 - DNA, 25 bp, probe
tagggatggacttggttcctcttgt

SEQ ID NO: 45023 - DNA, 25 bp, probe
tcctcttgtcaaggtttgggaatcc

SEQ ID NO: 45024 - DNA, 25 bp, probe
acttggttcctcttgtcaaggtttg

SEQ ID NO: 45025 - DNA, 25 bp, probe
ttcctcttgtcaaggtttgggaatc

SEQ ID NO: 45026 - DNA, 25 bp, probe
atggacttggttcctcttgtcaagg

SEQ ID NO: 45027 - DNA, 25 bp, probe
gtctagggatggacttggttcctct

SEQ ID NO: 45028 - DNA, 25 bp, probe
ctgttctttccccataggtcttgct

SEQ ID NO: 45029 - DNA, 25 bp, probe
ctgctgttctttccccataggtctt

SEQ ID NO: 45030 - DNA, 25 bp, probe
tgtcttgctgtctagggatggactt

SEQ ID NO: 45031 - DNA, 25 bp, probe
ggacttggttcctcttgtcaaggtt

SEQ ID NO: 45032 - DNA, 25 bp, probe
gttcctcttgtcaaggtttgggaat

SEQ ID NO: 45033 - DNA, 25 bp, probe
tgtctagggatggacttggttcctc

SEQ ID NO: 45034 - DNA, 25 bp, probe
aagtatgacacagagaaggaagatg

SEQ ID NO: 45035 - DNA, 25 bp, probe
caagtatgacacagagaaggaagat

SEQ ID NO: 45036 - DNA, 25 bp, probe
tacaagtatgacacagagaaggaag

SEQ ID NO: 45037 - DNA, 25 bp, probe
acaagtatgacacagagaaggaaga

SEQ ID NO: 45038 - DNA, 25 bp, probe
atacaagtatgacacagagaaggaa

SEQ ID NO: 45039 - DNA, 25 bp, probe
agagaaggaagatgtggttagtgtg

SEQ ID NO: 45040 - DNA, 25 bp, probe
cagagaaggaagatgtggttagtgt

SEQ ID NO: 45041 - DNA, 25 bp, probe
atctagttcctggattggttgctaa

SEQ ID NO: 45042 - DNA, 25 bp, probe
agtatgacacagagaaggaagatgt

SEQ ID NO: 45043 - DNA, 25 bp, probe
atatactgaagcagattgatccgtt

SEQ ID NO: 45044 - DNA, 25 bp, probe
aatatactgaagcagattgatccgt

SEQ ID NO: 45045 - DNA, 25 bp, probe
cactactggataacaagaggattcc

SEQ ID NO: 45046 - DNA, 25 bp, probe
ccactactggataacaagaggattc

SEQ ID NO: 45047 - DNA, 25 bp, probe
acagagaaggaagatgtggttagtg

SEQ ID NO: 45048 - DNA, 25 bp, probe
agatgaatactacagctacgacgaa

SEQ ID NO: 45049 - DNA, 25 bp, probe
tatgcgaaatccaaatcaacacaat

SEQ ID NO: 45050 - DNA, 25 bp, probe
actttatgcgaaatccaaatcaaca

SEQ ID NO: 45051 - DNA, 25 bp, probe
gagaaggaagatgtggttagtgtgg

SEQ ID NO: 45052 - DNA, 25 bp, probe
cctcggactatttatgactttggat

SEQ ID NO: 45053 - DNA, 25 bp, probe
ttatgcgaaatccaaatcaacacaa

SEQ ID NO: 45054 - DNA, 25 bp, probe
tttatgcgaaatccaaatcaacaca

SEQ ID NO: 45055 - DNA, 25 bp, probe
ctttatgcgaaatccaaatcaacac

SEQ ID NO: 45056 - DNA, 25 bp, probe
taaggactaaagcagaatgtaggag

SEQ ID NO: 45057 - DNA, 25 bp, probe
gatgtggttagtgtggtgaaatcta

SEQ ID NO: 45058 - DNA, 25 bp, probe
gagatgaatactacagctacgacga

SEQ ID NO: 45059 - DNA, 25 bp, probe
taatatactgaagcagattgatccg

SEQ ID NO: 45060 - DNA, 25 bp, probe
aactttatgcgaaatccaaatcaac

SEQ ID NO: 45061 - DNA, 25 bp, probe
caactttatgcgaaatccaaatcaa

SEQ ID NO: 45062 - DNA, 25 bp, probe
taaagcagaatgtaggagagggatt

SEQ ID NO: 45063 - DNA, 25 bp, probe
aaggactaaagcagaatgtaggaga

SEQ ID NO: 45064 - DNA, 25 bp, probe
ttaaggactaaagcagaatgtagga

SEQ ID NO: 45065 - DNA, 25 bp, probe
atgctgctgtagaattaaatggcta

SEQ ID NO: 45066 - DNA, 25 bp, probe
tcctggattggttgctaaatagaaa

SEQ ID NO: 45067 - DNA, 25 bp, probe
aatctagttcctggattggttgcta

SEQ ID NO: 45068 - DNA, 25 bp, probe
tagttcctggattggttgctaaata

SEQ ID NO: 45069 - DNA, 25 bp, probe
gaagatgtggttagtgtggtgaaat

SEQ ID NO: 45070 - DNA, 25 bp, probe
ctaaagcagaatgtaggagagggat

SEQ ID NO: 45071 - DNA, 25 bp, probe
aggactaaagcagaatgtaggagag

SEQ ID NO: 45072 - DNA, 25 bp, probe
ctcggactatttatgactttggatt

SEQ ID NO: 45073 - DNA, 25 bp, probe
ctcctcggactatttatgactttgg

SEQ ID NO: 45074 - DNA, 25 bp, probe
cctcctcggactatttatgactttg

SEQ ID NO: 45075 - DNA, 25 bp, probe
aagatgtggttagtgtggtgaaatc

SEQ ID NO: 45076 - DNA, 25 bp, probe
aagcaatgaggatgactacaagcag

SEQ ID NO: 45077 - DNA, 25 bp, probe
gttcctggattggttgctaaataga

SEQ ID NO: 45078 - DNA, 25 bp, probe
ctttggtctattgtctgtatttgcc

SEQ ID NO: 45079 - DNA, 25 bp, probe
actttggtctattgtctgtatttgc

SEQ ID NO: 45080 - DNA, 25 bp, probe
gaagagagaggaaaggtttgagaag

SEQ ID NO: 45081 - DNA, 25 bp, probe
agaagagagaggaaaggtttgagaa

SEQ ID NO: 45082 - DNA, 25 bp, probe
gaaactcgtaatagacttcccactc

SEQ ID NO: 45083 - DNA, 25 bp, probe
gagaagagagaggaaaggtttgaga

SEQ ID NO: 45084 - DNA, 25 bp, probe
aaactcgtaatagacttcccactct

SEQ ID NO: 45085 - DNA, 25 bp, probe
aatgtcagtggaagaagcagatgag

SEQ ID NO: 45086 - DNA, 25 bp, probe
tttggagaagagagaggaaaggttt

SEQ ID NO: 45087 - DNA, 25 bp, probe
tgaaactcgtaatagacttcccact

SEQ ID NO: 45088 - DNA, 25 bp, probe
tttggtctattgtctgtatttgccg

SEQ ID NO: 45089 - DNA, 25 bp, probe
gtactgagagtctgcacttaacaag

SEQ ID NO: 45090 - DNA, 25 bp, probe
gaagcagatgagaaactcttgagat

SEQ ID NO: 45091 - DNA, 25 bp, probe
cagcaactctaagactacagcacac

SEQ ID NO: 45092 - DNA, 25 bp, probe
cacagcaactctaagactacagcac

SEQ ID NO: 45093 - DNA, 25 bp, probe
agtgaaactcgtaatagacttccca

SEQ ID NO: 45094 - DNA, 25 bp, probe
gggactttggtctattgtctgtatt

SEQ ID NO: 45095 - DNA, 25 bp, probe
gaaatgtcagtggaagaagcagatg

SEQ ID NO: 45096 - DNA, 25 bp, probe
ttggagaagagagaggaaaggtttg

SEQ ID NO: 45097 - DNA, 25 bp, probe
tagacgcttcatcccacaatcttaa

SEQ ID NO: 45098 - DNA, 25 bp, probe
agaagcagatgagaaactcttgaga

SEQ ID NO: 45099 - DNA, 25 bp, probe
ggagaagagagaggaaaggtttgag

SEQ ID NO: 45100 - DNA, 25 bp, probe
agggactttggtctattgtctgtat

SEQ ID NO: 45101 - DNA, 25 bp, probe
aagcagatgagaaactcttgagatc

SEQ ID NO: 45102 - DNA, 25 bp, probe
gtggatgaaatgtcagtggaagaag

SEQ ID NO: 45103 - DNA, 25 bp, probe
acagcaactctaagactacagcaca

SEQ ID NO: 45104 - DNA, 25 bp, probe
acacaaagtgaaactcgtaatagac

SEQ ID NO: 45105 - DNA, 25 bp, probe
ggactttggtctattgtctgtattt

SEQ ID NO: 45106 - DNA, 25 bp, probe
aagagagaggaaaggtttgagaagc

SEQ ID NO: 45107 - DNA, 25 bp, probe
cacaaagtgaaactcgtaatagact

SEQ ID NO: 45108 - DNA, 25 bp, probe
aactcgtaatagacttcccactcta

SEQ ID NO: 45109 - DNA, 25 bp, probe
atgtcagtggaagaagcagatgaga

SEQ ID NO: 45110 - DNA, 25 bp, probe
agtaacacaaagtgaaactcgtaat

SEQ ID NO: 45111 - DNA, 25 bp, probe
gtgaaactcgtaatagacttcccac

SEQ ID NO: 45112 - DNA, 25 bp, probe
ggtactgagagtctgcacttaacaa

SEQ ID NO: 45113 - DNA, 25 bp, probe
gatgaaatgtcagtggaagaagcag

SEQ ID NO: 45114 - DNA, 25 bp, probe
actcgtaatagacttcccactctag

SEQ ID NO: 45115 - DNA, 25 bp, probe
aacacaaagtgaaactcgtaataga

SEQ ID NO: 45116 - DNA, 25 bp, probe
ctagacgcttcatcccacaatctta

SEQ ID NO: 45117 - DNA, 25 bp, probe
cagggactttggtctattgtctgta

SEQ ID NO: 45118 - DNA, 25 bp, probe
tgtcagtggaagaagcagatgagaa

SEQ ID NO: 45119 - DNA, 25 bp, probe
ctcgtaatagacttcccactctagg

SEQ ID NO: 45120 - DNA, 25 bp, probe
gtcttgttaagtgcagtctgatcca

SEQ ID NO: 45121 - DNA, 25 bp, probe
tactgagagtctgcacttaacaagc

SEQ ID NO: 45122 - DNA, 25 bp, probe
cttaatcagagtgtggcatagaagc

SEQ ID NO: 45123 - DNA, 25 bp, probe
gcttaatcagagtgtggcatagaag

SEQ ID NO: 45124 - DNA, 25 bp, probe
ctaacttactctgtgttcaggtgtg

SEQ ID NO: 45125 - DNA, 25 bp, probe
aattctacctgtgctacataggaga

SEQ ID NO: 45126 - DNA, 25 bp, probe
ttcctaacttactctgtgttcaggt

SEQ ID NO: 45127 - DNA, 25 bp, probe
tagcatcactaacctgacagttgtt

SEQ ID NO: 45128 - DNA, 25 bp, probe
ctacctgtgctacataggagaagtt

SEQ ID NO: 45129 - DNA, 25 bp, probe
taatcagagtgtggcatagaagcta

SEQ ID NO: 45130 - DNA, 25 bp, probe
ggcttaatcagagtgtggcatagaa

SEQ ID NO: 45131 - DNA, 25 bp, probe
ttagcatcactaacctgacagttgt

SEQ ID NO: 45132 - DNA, 25 bp, probe
tcctaacttactctgtgttcaggtg

SEQ ID NO: 45133 - DNA, 25 bp, probe
gtgctacataggagaagtttggaat

SEQ ID NO: 45134 - DNA, 25 bp, probe
ttactctgtgttcaggtgtggaatt

SEQ ID NO: 45135 - DNA, 25 bp, probe
taacttactctgtgttcaggtgtgg

SEQ ID NO: 45136 - DNA, 25 bp, probe
cctaacttactctgtgttcaggtgt

SEQ ID NO: 45137 - DNA, 25 bp, probe
ttaatcagagtgtggcatagaagct

SEQ ID NO: 45138 - DNA, 25 bp, probe
tctacctgtgctacataggagaagt

SEQ ID NO: 45139 - DNA, 25 bp, probe
tgctacataggagaagtttggaatg

SEQ ID NO: 45140 - DNA, 25 bp, probe
aggaatttgctttgtttactgctag

SEQ ID NO: 45141 - DNA, 25 bp, probe
cttactctgtgttcaggtgtggaat

SEQ ID NO: 45142 - DNA, 25 bp, probe
attctacctgtgctacataggagaa

SEQ ID NO: 45143 - DNA, 25 bp, probe
atcagagtgtggcatagaagctatt

SEQ ID NO: 45144 - DNA, 25 bp, probe
aatcagagtgtggcatagaagctat

SEQ ID NO: 45145 - DNA, 25 bp, probe
ttctacctgtgctacataggagaag

SEQ ID NO: 45146 - DNA, 25 bp, probe
ggaatttgctttgtttactgctagt

SEQ ID NO: 45147 - DNA, 25 bp, probe
gctacataggagaagtttggaatgc

SEQ ID NO: 45148 - DNA, 25 bp, probe
caggaatttgctttgtttactgcta

SEQ ID NO: 45149 - DNA, 25 bp, probe
cagaagcaagtggagaaggtgttac

SEQ ID NO: 45150 - DNA, 25 bp, probe
gttgccaggaatttgctttgtttac

SEQ ID NO: 45151 - DNA, 25 bp, probe
aaattctacctgtgctacataggag

SEQ ID NO: 45152 - DNA, 25 bp, probe
tttcctaacttactctgtgttcagg

SEQ ID NO: 45153 - DNA, 25 bp, probe
ttgccaggaatttgctttgtttact

SEQ ID NO: 45154 - DNA, 25 bp, probe
agcatcactaacctgacagttgttg

SEQ ID NO: 45155 - DNA, 25 bp, probe
tacctgtgctacataggagaagttt

SEQ ID NO: 45156 - DNA, 25 bp, probe
tgttgccaggaatttgctttgttta

SEQ ID NO: 45157 - DNA, 25 bp, probe
tgtgctacataggagaagtttggaa

SEQ ID NO: 45158 - DNA, 25 bp, probe
aagtggagaaggtgttacggaaatc

SEQ ID NO: 45159 - DNA, 25 bp, probe
ctgtgctacataggagaagtttgga

SEQ ID NO: 45160 - DNA, 25 bp, probe
ttaaagtcatttgcagtgggagtta

SEQ ID NO: 45161 - DNA, 25 bp, probe
tactctgtgttcaggtgtggaattt

SEQ ID NO: 45162 - DNA, 25 bp, probe
tcctagatctcagaatcacaatagt

SEQ ID NO: 45163 - DNA, 25 bp, probe
atcacaatagtaataaacaacaggg

SEQ ID NO: 45164 - DNA, 25 bp, probe
caagtggagaaggtgttacggaaat

SEQ ID NO: 45165 - DNA, 25 bp, probe
caagaggaaatgtgacttcactttg

SEQ ID NO: 45166 - DNA, 25 bp, probe
agaaagaaagaaagggaaagatgga

SEQ ID NO: 45167 - DNA, 25 bp, probe
agagaaagagagagagagagaaaga

SEQ ID NO: 45168 - DNA, 25 bp, probe
agaaagagaaagagagagagagaga

SEQ ID NO: 45169 - DNA, 25 bp, probe
aaagaaagaaagggaaagatggaag

SEQ ID NO: 45170 - DNA, 25 bp, probe
gaaagaaagaaagggaaagatggaa

SEQ ID NO: 45171 - DNA, 25 bp, probe
aagaaagaaagaaagggaaagatgg

SEQ ID NO: 45172 - DNA, 25 bp, probe
aaagaaagggaaagatggaaggaag

SEQ ID NO: 45173 - DNA, 25 bp, probe
gaaagaaagggaaagatggaaggaa

SEQ ID NO: 45174 - DNA, 25 bp, probe
aagaaagaaagggaaagatggaagg

SEQ ID NO: 45175 - DNA, 25 bp, probe
gagaaagagagagagagagaaagaa

SEQ ID NO: 45176 - DNA, 25 bp, probe
aagagaaagagagagagagagaaag

SEQ ID NO: 45177 - DNA, 25 bp, probe
gaaagagaaagagagagagagagaa

SEQ ID NO: 45178 - DNA, 25 bp, probe
aagaaagagaaagagagagagagag

SEQ ID NO: 45179 - DNA, 25 bp, probe
cctgtctgaaagaaagagagaaaga

SEQ ID NO: 45180 - DNA, 25 bp, probe
agaaagagagagagagagaaagaaa

SEQ ID NO: 45181 - DNA, 25 bp, probe
aaagagaaagagagagagagagaaa

SEQ ID NO: 45182 - DNA, 25 bp, probe
aaagaaagagaaagagagagagaga

SEQ ID NO: 45183 - DNA, 25 bp, probe
agaaagaaagggaaagatggaagga

SEQ ID NO: 45184 - DNA, 25 bp, probe
ccctgtctgaaagaaagagagaaag

SEQ ID NO: 45185 - DNA, 25 bp, probe
agaaagaaagaaagaaagggaaaga

SEQ ID NO: 45186 - DNA, 25 bp, probe
agaaagaaagaaagaaagaaaggga

SEQ ID NO: 45187 - DNA, 25 bp, probe
gagaaagaaagaaagaaagaaaggg

SEQ ID NO: 45188 - DNA, 25 bp, probe
ctgtctgaaagaaagagagaaagaa

SEQ ID NO: 45189 - DNA, 25 bp, probe
accctgtctgaaagaaagagagaaa

SEQ ID NO: 45190 - DNA, 25 bp, probe
tgtctgaaagaaagagagaaagaaa

SEQ ID NO: 45191 - DNA, 25 bp, probe
aaagaaagaaagaaagggaaagatg

SEQ ID NO: 45192 - DNA, 25 bp, probe
gaaagaaagaaagaaagaaagggaa

SEQ ID NO: 45193 - DNA, 25 bp, probe
gccttatctcaacaacaaccacaaa

SEQ ID NO: 45194 - DNA, 25 bp, probe
aagaaagaaagaaagaaagggaaag

SEQ ID NO: 45195 - DNA, 25 bp, probe
gaaagaaagaaagaaagggaaagat

SEQ ID NO: 45196 - DNA, 25 bp, probe
gtctgaaagaaagagagaaagaaag

SEQ ID NO: 45197 - DNA, 25 bp, probe
ggaaagatggaaggaaggaaggaaa

SEQ ID NO: 45198 - DNA, 25 bp, probe
aaagggaaagatggaaggaaggaag

SEQ ID NO: 45199 - DNA, 25 bp, probe
gaaagggaaagatggaaggaaggaa

SEQ ID NO: 45200 - DNA, 25 bp, probe
aagaaagggaaagatggaaggaagg

SEQ ID NO: 45201 - DNA, 25 bp, probe
tctgaaagaaagagagaaagaaaga

SEQ ID NO: 45202 - DNA, 25 bp, probe
agagagagaaagaaagaaagaaaga

SEQ ID NO: 45203 - DNA, 25 bp, probe
agaaagagagagaaagaaagaaaga

SEQ ID NO: 45204 - DNA, 25 bp, probe
agaaagaaagagagagaaagaaaga

SEQ ID NO: 45205 - DNA, 25 bp, probe
agaaagaaagaaagagagagaaaga

SEQ ID NO: 45206 - DNA, 25 bp, probe
agaaagaaagaaagaaagagagaga

SEQ ID NO: 45207 - DNA, 25 bp, probe
agagaaagaaagaaagaaagagaga

SEQ ID NO: 45208 - DNA, 25 bp, probe
agagagaaagaaagaaagaaagaga

SEQ ID NO: 45209 - DNA, 25 bp, probe
aaagaaagaaagaaagaaagggaaa

SEQ ID NO: 45210 - DNA, 25 bp, probe
gctagtggaagacatcaagtacatc

SEQ ID NO: 45211 - DNA, 25 bp, probe
atccagctctcagttaagaagattc

SEQ ID NO: 45212 - DNA, 25 bp, probe
catccagctctcagttaagaagatt

SEQ ID NO: 45213 - DNA, 25 bp, probe
agctagtggaagacatcaagtacat

SEQ ID NO: 45214 - DNA, 25 bp, probe
ctagtggaagacatcaagtacatcc

SEQ ID NO: 45215 - DNA, 25 bp, probe
tagtggaagacatcaagtacatcct

SEQ ID NO: 45216 - DNA, 25 bp, probe
caatgcctactatctacccaacaag

SEQ ID NO: 45217 - DNA, 25 bp, probe
ctactatctacccaacaagaaccag

SEQ ID NO: 45218 - DNA, 25 bp, probe
tactatctacccaacaagaaccaga

SEQ ID NO: 45219 - DNA, 25 bp, probe
tcaatgcctactatctacccaacaa

SEQ ID NO: 45220 - DNA, 25 bp, probe
ctctcagttaagaagattcggcagg

SEQ ID NO: 45221 - DNA, 25 bp, probe
atgcctactatctacccaacaagaa

SEQ ID NO: 45222 - DNA, 25 bp, probe
aatgcctactatctacccaacaaga

SEQ ID NO: 45223 - DNA, 25 bp, probe
cagctagtggaagacatcaagtaca

SEQ ID NO: 45224 - DNA, 25 bp, probe
ctcaatgcctactatctacccaaca

SEQ ID NO: 45225 - DNA, 25 bp, probe
caaagtctggtcaataaatcactgc

SEQ ID NO: 45226 - DNA, 25 bp, probe
gcaaagtctggtcaataaatcactg

SEQ ID NO: 45227 - DNA, 25 bp, probe
cctactatctacccaacaagaacca

SEQ ID NO: 45228 - DNA, 25 bp, probe
agtggaagacatcaagtacatcctg

SEQ ID NO: 45229 - DNA, 25 bp, probe
ctcagttaagaagattcggcaggag

SEQ ID NO: 45230 - DNA, 25 bp, probe
tccagctctcagttaagaagattcg

SEQ ID NO: 45231 - DNA, 25 bp, probe
tctcagttaagaagattcggcagga

SEQ ID NO: 45232 - DNA, 25 bp, probe
tgcctactatctacccaacaagaac

SEQ ID NO: 45233 - DNA, 25 bp, probe
gtccgtctctatgacaacttcactg

SEQ ID NO: 45234 - DNA, 25 bp, probe
gcatccagctctcagttaagaagat

SEQ ID NO: 45235 - DNA, 25 bp, probe
tatgagtttgaggtccatgagaaga

SEQ ID NO: 45236 - DNA, 25 bp, probe
gtatgagtttgaggtccatgagaag

SEQ ID NO: 45237 - DNA, 25 bp, probe
gctctcagttaagaagattcggcag

SEQ ID NO: 45238 - DNA, 25 bp, probe
agtatgagtttgaggtccatgagaa

SEQ ID NO: 45239 - DNA, 25 bp, probe
catcgtccgtctctatgacaacttc

SEQ ID NO: 45240 - DNA, 25 bp, probe
tgagaagacctacttcaagaacatc

SEQ ID NO: 45241 - DNA, 25 bp, probe
gagaagacctacttcaagaacatct

SEQ ID NO: 45242 - DNA, 25 bp, probe
gagtatgagtttgaggtccatgaga

SEQ ID NO: 45243 - DNA, 25 bp, probe
atgagaagacctacttcaagaacat

SEQ ID NO: 45244 - DNA, 25 bp, probe
tccgtctctatgacaacttcactgt

SEQ ID NO: 45245 - DNA, 25 bp, probe
agaagacctacttcaagaacatctt

SEQ ID NO: 45246 - DNA, 25 bp, probe
atgctgtggacaaggagtatgagtt

SEQ ID NO: 45247 - DNA, 25 bp, probe
catgagaagacctacttcaagaaca

SEQ ID NO: 45248 - DNA, 25 bp, probe
tgtggacaaggagtatgagtttgag

SEQ ID NO: 45249 - DNA, 25 bp, probe
ctgtggacaaggagtatgagtttga

SEQ ID NO: 45250 - DNA, 25 bp, probe
gcctactatctacccaacaagaacc

SEQ ID NO: 45251 - DNA, 25 bp, probe
gtggaagacatcaagtacatcctgg

SEQ ID NO: 45252 - DNA, 25 bp, probe
atcgtccgtctctatgacaacttca

SEQ ID NO: 45253 - DNA, 25 bp, probe
gctcaatgcctactatctacccaac

SEQ ID NO: 45254 - DNA, 25 bp, probe
cacttcactaccaaatgagccttag

SEQ ID NO: 45255 - DNA, 25 bp, probe
tttctggatgtattgattcaacagg

SEQ ID NO: 45256 - DNA, 25 bp, probe
ttctggatgtattgattcaacaggg

SEQ ID NO: 45257 - DNA, 25 bp, probe
acttcactaccaaatgagccttagc

SEQ ID NO: 45258 - DNA, 25 bp, probe
gcacttcactaccaaatgagcctta

SEQ ID NO: 45259 - DNA, 25 bp, probe
gtattgattcaacagggcatcatac

SEQ ID NO: 45260 - DNA, 25 bp, probe
tggatgtattgattcaacagggcat

SEQ ID NO: 45261 - DNA, 25 bp, probe
tgtattgattcaacagggcatcata

SEQ ID NO: 45262 - DNA, 25 bp, probe
aattgcctgaatcctctgttttatg

SEQ ID NO: 45263 - DNA, 25 bp, probe
ccatcaccatttggatagcttattt

SEQ ID NO: 45264 - DNA, 25 bp, probe
gaatcctctgttttatggctttctg

SEQ ID NO: 45265 - DNA, 25 bp, probe
ctgaatcctctgttttatggctttc

SEQ ID NO: 45266 - DNA, 25 bp, probe
tgaatcctctgttttatggctttct

SEQ ID NO: 45267 - DNA, 25 bp, probe
cccatcaccatttggatagcttatt

SEQ ID NO: 45268 - DNA, 25 bp, probe
atgtattgattcaacagggcatcat

SEQ ID NO: 45269 - DNA, 25 bp, probe
aaagatattctccagcttctgaaat

SEQ ID NO: 45270 - DNA, 25 bp, probe
aatcctctgttttatggctttctgg

SEQ ID NO: 45271 - DNA, 25 bp, probe
cctgaatcctctgttttatggcttt

SEQ ID NO: 45272 - DNA, 25 bp, probe
attgcctgaatcctctgttttatgg

SEQ ID NO: 45273 - DNA, 25 bp, probe
tattgattcaacagggcatcatacg

SEQ ID NO: 45274 - DNA, 25 bp, probe
tctggatgtattgattcaacagggc

SEQ ID NO: 45275 - DNA, 25 bp, probe
ctggatgtattgattcaacagggca

SEQ ID NO: 45276 - DNA, 25 bp, probe
aagatattctccagcttctgaaata

SEQ ID NO: 45277 - DNA, 25 bp, probe
tctccagcttctgaaatatattccc

SEQ ID NO: 45278 - DNA, 25 bp, probe
gatgtattgattcaacagggcatca

SEQ ID NO: 45279 - DNA, 25 bp, probe
gggcatcatacgtgactgtagaatt

SEQ ID NO: 45280 - DNA, 25 bp, probe
tttaacaattgcctgaatcctctgt

SEQ ID NO: 45281 - DNA, 25 bp, probe
ggatgtattgattcaacagggcatc

SEQ ID NO: 45282 - DNA, 25 bp, probe
ttctccagcttctgaaatatattcc

SEQ ID NO: 45283 - DNA, 25 bp, probe
atcctctgttttatggctttctggg

SEQ ID NO: 45284 - DNA, 25 bp, probe
ttaacaattgcctgaatcctctgtt

SEQ ID NO: 45285 - DNA, 25 bp, probe
agatattctccagcttctgaaatat

SEQ ID NO: 45286 - DNA, 25 bp, probe
gcccatcaccatttggatagcttat

SEQ ID NO: 45287 - DNA, 25 bp, probe
cttcactaccaaatgagccttagct

SEQ ID NO: 45288 - DNA, 25 bp, probe
cctctgttttatggctttctgggaa

SEQ ID NO: 45289 - DNA, 25 bp, probe
agggcatcatacgtgactgtagaat

SEQ ID NO: 45290 - DNA, 25 bp, probe
tctgttttatggctttctgggaaaa

SEQ ID NO: 45291 - DNA, 25 bp, probe
cttttctggatgtattgattcaaca

SEQ ID NO: 45292 - DNA, 25 bp, probe
ctaccaaatgagccttagctacttt

SEQ ID NO: 45293 - DNA, 25 bp, probe
catcaccatttggatagcttatttt

SEQ ID NO: 45294 - DNA, 25 bp, probe
agcacttcactaccaaatgagcctt

SEQ ID NO: 45295 - DNA, 25 bp, probe
ttttctggatgtattgattcaacag

SEQ ID NO: 45296 - DNA, 25 bp, probe
ctctgttttatggctttctgggaaa

SEQ ID NO: 45297 - DNA, 25 bp, probe
aaaagatattctccagcttctgaaa

SEQ ID NO: 45298 - DNA, 25 bp, probe
gattacgtcatccagactactcgaa

SEQ ID NO: 45299 - DNA, 25 bp, probe
catgattacgtcatccagactactc

SEQ ID NO: 45300 - DNA, 25 bp, probe
tgattacgtcatccagactactcga

SEQ ID NO: 45301 - DNA, 25 bp, probe
ccatgattacgtcatccagactact

SEQ ID NO: 45302 - DNA, 25 bp, probe
atgattacgtcatccagactactcg

SEQ ID NO: 45303 - DNA, 25 bp, probe
ttacgtcatccagactactcgaaat

SEQ ID NO: 45304 - DNA, 25 bp, probe
attacgtcatccagactactcgaaa

SEQ ID NO: 45305 - DNA, 25 bp, probe
tacgtcatccagactactcgaaatg

SEQ ID NO: 45306 - DNA, 25 bp, probe
gtacatcatcctgtgctcggaaatc

SEQ ID NO: 45307 - DNA, 25 bp, probe
agtacatcatcctgtgctcggaaat

SEQ ID NO: 45308 - DNA, 25 bp, probe
cccatgattacgtcatccagactac

SEQ ID NO: 45309 - DNA, 25 bp, probe
tacatcatcctgtgctcggaaatcc

SEQ ID NO: 45310 - DNA, 25 bp, probe
gagtacatcatcctgtgctcggaaa

SEQ ID NO: 45311 - DNA, 25 bp, probe
acgtcatccagactactcgaaatgg

SEQ ID NO: 45312 - DNA, 25 bp, probe
gtttaacctcacggcccatgattac

SEQ ID NO: 45313 - DNA, 25 bp, probe
gcccatgattacgtcatccagacta

SEQ ID NO: 45314 - DNA, 25 bp, probe
ggtttaacctcacggcccatgatta

SEQ ID NO: 45315 - DNA, 25 bp, probe
gtgataatcctaactctactacgca

SEQ ID NO: 45316 - DNA, 25 bp, probe
tgtgataatcctaactctactacgc

SEQ ID NO: 45317 - DNA, 25 bp, probe
cacacagtcactaatctcttcatct

SEQ ID NO: 45318 - DNA, 25 bp, probe
acacagtcactaatctcttcatctt

SEQ ID NO: 45319 - DNA, 25 bp, probe
caacaggaattagtgatggaagaat

SEQ ID NO: 45320 - DNA, 25 bp, probe
tgataatcctaactctactacgcat

SEQ ID NO: 45321 - DNA, 25 bp, probe
gactctaatgatgctctcagactac

SEQ ID NO: 45322 - DNA, 25 bp, probe
gcacacagtcactaatctcttcatc

SEQ ID NO: 45323 - DNA, 25 bp, probe
ggactctaatgatgctctcagacta

SEQ ID NO: 45324 - DNA, 25 bp, probe
atgcctataacactgctggacaata

SEQ ID NO: 45325 - DNA, 25 bp, probe
tgcctataacactgctggacaatat

SEQ ID NO: 45326 - DNA, 25 bp, probe
gtgtgataatcctaactctactacg

SEQ ID NO: 45327 - DNA, 25 bp, probe
tcatcatgtatggaaggattggaat

SEQ ID NO: 45328 - DNA, 25 bp, probe
tcattgtcatcatgtatggaaggat

SEQ ID NO: 45329 - DNA, 25 bp, probe
ctcattgtcatcatgtatggaagga

SEQ ID NO: 45330 - DNA, 25 bp, probe
gtcatcatgtatggaaggattggaa

SEQ ID NO: 45331 - DNA, 25 bp, probe
actctaatgatgctctcagactacg

SEQ ID NO: 45332 - DNA, 25 bp, probe
tagccatcaccattatgtctccatc

SEQ ID NO: 45333 - DNA, 25 bp, probe
ttgtcatcatgtatggaaggattgg

SEQ ID NO: 45334 - DNA, 25 bp, probe
attgtcatcatgtatggaaggattg

SEQ ID NO: 45335 - DNA, 25 bp, probe
cattgtcatcatgtatggaaggatt

SEQ ID NO: 45336 - DNA, 25 bp, probe
catcatgtatggaaggattggaatt

SEQ ID NO: 45337 - DNA, 25 bp, probe
cacagtcactaatctcttcatctta

SEQ ID NO: 45338 - DNA, 25 bp, probe
gataatcctaactctactacgcatt

SEQ ID NO: 45339 - DNA, 25 bp, probe
gcctataacactgctggacaatatt

SEQ ID NO: 45340 - DNA, 25 bp, probe
cagaagatcattaagatgctcctga

SEQ ID NO: 45341 - DNA, 25 bp, probe
ctagccatcaccattatgtctccat

SEQ ID NO: 45342 - DNA, 25 bp, probe
aacaggaattagtgatggaagaatt

SEQ ID NO: 45343 - DNA, 25 bp, probe
ctaatcagcttgtccaggaatctac

SEQ ID NO: 45344 - DNA, 25 bp, probe
tctaatcagcttgtccaggaatcta

SEQ ID NO: 45345 - DNA, 25 bp, probe
tgtcatcatgtatggaaggattgga

SEQ ID NO: 45346 - DNA, 25 bp, probe
gctagtgtgataatcctaactctac

SEQ ID NO: 45347 - DNA, 25 bp, probe
aattgctgtagataggttccagtgt

SEQ ID NO: 45348 - DNA, 25 bp, probe
atctaatcagcttgtccaggaatct

SEQ ID NO: 45349 - DNA, 25 bp, probe
catctaatcagcttgtccaggaatc

SEQ ID NO: 45350 - DNA, 25 bp, probe
ccaacaggaattagtgatggaagaa

SEQ ID NO: 45351 - DNA, 25 bp, probe
atatgcacacagtcactaatctctt

SEQ ID NO: 45352 - DNA, 25 bp, probe
tatgcacacagtcactaatctcttc

SEQ ID NO: 45353 - DNA, 25 bp, probe
gtggtttgctttattgtaatgagga

SEQ ID NO: 45354 - DNA, 25 bp, probe
tgtggtttgctttattgtaatgagg

SEQ ID NO: 45355 - DNA, 25 bp, probe
cctataacactgctggacaatatta

SEQ ID NO: 45356 - DNA, 25 bp, probe
gtggactctaatgatgctctcagac

SEQ ID NO: 45357 - DNA, 25 bp, probe
actgtggtttgctttattgtaatga

SEQ ID NO: 45358 - DNA, 25 bp, probe
gcagcaatcttcattatttcctact

SEQ ID NO: 45359 - DNA, 25 bp, probe
ccagaaataaagtctaagagaagcg

SEQ ID NO: 45360 - DNA, 25 bp, probe
tccagaaataaagtctaagagaagc

SEQ ID NO: 45361 - DNA, 25 bp, probe
ctaacgacctcatgctcatcaagtt

SEQ ID NO: 45362 - DNA, 25 bp, probe
taacgacctcatgctcatcaagttg

SEQ ID NO: 45363 - DNA, 25 bp, probe
tcatgctcatcaagttggacgaatc

SEQ ID NO: 45364 - DNA, 25 bp, probe
ctcatgctcatcaagttggacgaat

SEQ ID NO: 45365 - DNA, 25 bp, probe
cggaaggaattcaggaatatctgtt

SEQ ID NO: 45366 - DNA, 25 bp, probe
ggaaggaattcaggaatatctgttc

SEQ ID NO: 45367 - DNA, 25 bp, probe
gcaaattcactgagtggatagagaa

SEQ ID NO: 45368 - DNA, 25 bp, probe
caaattcactgagtggatagagaaa

SEQ ID NO: 45369 - DNA, 25 bp, probe
ctgtttccagaactcctacaccatc

SEQ ID NO: 45370 - DNA, 25 bp, probe
ctgcggaaggaattcaggaatatct

SEQ ID NO: 45371 - DNA, 25 bp, probe
ctgcaaattcactgagtggatagag

SEQ ID NO: 45372 - DNA, 25 bp, probe
ctctgcaaattcactgagtggatag

SEQ ID NO: 45373 - DNA, 25 bp, probe
ccagaaataaatcccctagatccag

SEQ ID NO: 45374 - DNA, 25 bp, probe
tccagaaataaatcccctagatcca

SEQ ID NO: 45375 - DNA, 25 bp, probe
gcggaaggaattcaggaatatctgt

SEQ ID NO: 45376 - DNA, 25 bp, probe
tgcggaaggaattcaggaatatctg

SEQ ID NO: 45377 - DNA, 25 bp, probe
atcccctagatccagaaataaagtc

SEQ ID NO: 45378 - DNA, 25 bp, probe
cagaaataaatcccctagatccaga

SEQ ID NO: 45379 - DNA, 25 bp, probe
atccagaaataaatcccctagatcc

SEQ ID NO: 45380 - DNA, 25 bp, probe
agatccagaaataaagtctaagaga

SEQ ID NO: 45381 - DNA, 25 bp, probe
tcccctagatccagaaataaagtct

SEQ ID NO: 45382 - DNA, 25 bp, probe
ttcccctagatccagaaataaatcc

SEQ ID NO: 45383 - DNA, 25 bp, probe
tgcaaattcactgagtggatagaga

SEQ ID NO: 45384 - DNA, 25 bp, probe
tctgcaaattcactgagtggataga

SEQ ID NO: 45385 - DNA, 25 bp, probe
cacactgtttccagaactcctacac

SEQ ID NO: 45386 - DNA, 25 bp, probe
ccctagatccagaaataaagtctaa

SEQ ID NO: 45387 - DNA, 25 bp, probe
ccctagatccagaaataaatcccct

SEQ ID NO: 45388 - DNA, 25 bp, probe
tcccctagatccagaaataaatccc

SEQ ID NO: 45389 - DNA, 25 bp, probe
aatcccctagatccagaaataaagt

SEQ ID NO: 45390 - DNA, 25 bp, probe
actgtttccagaactcctacaccat

SEQ ID NO: 45391 - DNA, 25 bp, probe
cctagatccagaaataaatccccta

SEQ ID NO: 45392 - DNA, 25 bp, probe
agaaataaatcccctagatccagaa

SEQ ID NO: 45393 - DNA, 25 bp, probe
agatccagaaataaatcccctagat

SEQ ID NO: 45394 - DNA, 25 bp, probe
atccagaaataaagtctaagagaag

SEQ ID NO: 45395 - DNA, 25 bp, probe
cccctagatccagaaataaatcccc

SEQ ID NO: 45396 - DNA, 25 bp, probe
aaatcccctagatccagaaataaag

SEQ ID NO: 45397 - DNA, 25 bp, probe
gaaataaatcccctagatccagaaa

SEQ ID NO: 45398 - DNA, 25 bp, probe
cctctgcaaattcactgagtggata

SEQ ID NO: 45399 - DNA, 25 bp, probe
ctacaccaacctctgcaaattcact

SEQ ID NO: 45400 - DNA, 25 bp, probe
tctacaccaacctctgcaaattcac

SEQ ID NO: 45401 - DNA, 25 bp, probe
gtctacaccaacctctgcaaattca

SEQ ID NO: 45402 - DNA, 25 bp, probe
tgtctacaccaacctctgcaaattc

SEQ ID NO: 45403 - DNA, 25 bp, probe
gcagatgatgatacattccaagtct

SEQ ID NO: 45404 - DNA, 25 bp, probe
cagatgatgatacattccaagtctt

SEQ ID NO: 45405 - DNA, 25 bp, probe
aacgcagatgatgatacattccaag

SEQ ID NO: 45406 - DNA, 25 bp, probe
agatgatgatacattccaagtcttc

SEQ ID NO: 45407 - DNA, 25 bp, probe
gatgatgatacattccaagtcttca

SEQ ID NO: 45408 - DNA, 25 bp, probe
cgcagatgatgatacattccaagtc

SEQ ID NO: 45409 - DNA, 25 bp, probe
atgatgatacattccaagtcttcaa

SEQ ID NO: 45410 - DNA, 25 bp, probe
acgcagatgatgatacattccaagt

SEQ ID NO: 45411 - DNA, 25 bp, probe
agagaacaacataaagcaaacaaca

SEQ ID NO: 45412 - DNA, 25 bp, probe
gtaagcccaagagaacaacataaag

SEQ ID NO: 45413 - DNA, 25 bp, probe
agtaagcccaagagaacaacataaa

SEQ ID NO: 45414 - DNA, 25 bp, probe
aagtaagcccaagagaacaacataa

SEQ ID NO: 45415 - DNA, 25 bp, probe
ccaagagaacaacataaagcaaaca

SEQ ID NO: 45416 - DNA, 25 bp, probe
aatgacagaaacgcagatgatgata

SEQ ID NO: 45417 - DNA, 25 bp, probe
cataaagcaaacaacataaagcaca

SEQ ID NO: 45418 - DNA, 25 bp, probe
acataaagcaaacaacataaagcac

SEQ ID NO: 45419 - DNA, 25 bp, probe
gaagtaagcccaagagaacaacata

SEQ ID NO: 45420 - DNA, 25 bp, probe
tgttcagcttccaattagtattctt

SEQ ID NO: 45421 - DNA, 25 bp, probe
cgctcttaataactcccaatgtaaa

SEQ ID NO: 45422 - DNA, 25 bp, probe
gagaacaacataaagcaaacaacat

SEQ ID NO: 45423 - DNA, 25 bp, probe
aagagaacaacataaagcaaacaac

SEQ ID NO: 45424 - DNA, 25 bp, probe
caagagaacaacataaagcaaacaa

SEQ ID NO: 45425 - DNA, 25 bp, probe
cccaagagaacaacataaagcaaac

SEQ ID NO: 45426 - DNA, 25 bp, probe
cagaaacgcagatgatgatacattc

SEQ ID NO: 45427 - DNA, 25 bp, probe
acaaatggctagaaaggactgaata

SEQ ID NO: 45428 - DNA, 25 bp, probe
agcaaacaacataaagcacaataaa

SEQ ID NO: 45429 - DNA, 25 bp, probe
aagcaaacaacataaagcacaataa

SEQ ID NO: 45430 - DNA, 25 bp, probe
aaagcaaacaacataaagcacaata

SEQ ID NO: 45431 - DNA, 25 bp, probe
taaagcaaacaacataaagcacaat

SEQ ID NO: 45432 - DNA, 25 bp, probe
ataaagcaaacaacataaagcacaa

SEQ ID NO: 45433 - DNA, 25 bp, probe
aacataaagcaaacaacataaagca

SEQ ID NO: 45434 - DNA, 25 bp, probe
acagaaacgcagatgatgatacatt

SEQ ID NO: 45435 - DNA, 25 bp, probe
atgacagaaacgcagatgatgatac

SEQ ID NO: 45436 - DNA, 25 bp, probe
aaatgacagaaacgcagatgatgat

SEQ ID NO: 45437 - DNA, 25 bp, probe
caaatggctagaaaggactgaatag

SEQ ID NO: 45438 - DNA, 25 bp, probe
aaatggctagaaaggactgaataga

SEQ ID NO: 45439 - DNA, 25 bp, probe
aacaaatggctagaaaggactgaat

SEQ ID NO: 45440 - DNA, 25 bp, probe
ttgttcagcttccaattagtattct

SEQ ID NO: 45441 - DNA, 25 bp, probe
aaacgcagatgatgatacattccaa

SEQ ID NO: 45442 - DNA, 25 bp, probe
atggctagaaaggactgaatagatt

SEQ ID NO: 45443 - DNA, 25 bp, probe
aatggctagaaaggactgaatagat

SEQ ID NO: 45444 - DNA, 25 bp, probe
caacataaagcaaacaacataaagc

SEQ ID NO: 45445 - DNA, 25 bp, probe
taagcccaagagaacaacataaagc

SEQ ID NO: 45446 - DNA, 25 bp, probe
agaaacgcagatgatgatacattcc

SEQ ID NO: 45447 - DNA, 25 bp, probe
ttgaagttcctgaataaccacatcc

SEQ ID NO: 45448 - DNA, 25 bp, probe
gaagttcctgaataaccacatcctg

SEQ ID NO: 45449 - DNA, 25 bp, probe
tgaagttcctgaataaccacatcct

SEQ ID NO: 45450 - DNA, 25 bp, probe
tttgaagttcctgaataaccacatc

SEQ ID NO: 45451 - DNA, 25 bp, probe
gatttgaagttcctgaataaccaca

SEQ ID NO: 45452 - DNA, 25 bp, probe
atttgaagttcctgaataaccacat

SEQ ID NO: 45453 - DNA, 25 bp, probe
ctcaagttcatcatcctcttcagcc

SEQ ID NO: 45454 - DNA, 25 bp, probe
cctcaagttcatcatcctcttcagc

SEQ ID NO: 45455 - DNA, 25 bp, probe
gcctcaagttcatcatcctcttcag

SEQ ID NO: 45456 - DNA, 25 bp, probe
ctgcctcaagttcatcatcctcttc

SEQ ID NO: 45457 - DNA, 25 bp, probe
caagttcatcatcctcttcagcctg

SEQ ID NO: 45458 - DNA, 25 bp, probe
tcaagttcatcatcctcttcagcct

SEQ ID NO: 45459 - DNA, 25 bp, probe
tctgcctcaagttcatcatcctctt

SEQ ID NO: 45460 - DNA, 25 bp, probe
aagttcctgaataaccacatcctgg

SEQ ID NO: 45461 - DNA, 25 bp, probe
ggatttgaagttcctgaataaccac

SEQ ID NO: 45462 - DNA, 25 bp, probe
ctggatttgaagttcctgaataacc

SEQ ID NO: 45463 - DNA, 25 bp, probe
cctggatttgaagttcctgaataac

SEQ ID NO: 45464 - DNA, 25 bp, probe
tgcctcaagttcatcatcctcttca

SEQ ID NO: 45465 - DNA, 25 bp, probe
tggatttgaagttcctgaataacca

SEQ ID NO: 45466 - DNA, 25 bp, probe
gcctggatttgaagttcctgaataa

SEQ ID NO: 45467 - DNA, 25 bp, probe
gtttgtctgcctcaagttcatcatc

SEQ ID NO: 45468 - DNA, 25 bp, probe
gtctgcctcaagttcatcatcctct

SEQ ID NO: 45469 - DNA, 25 bp, probe
agtttgtctgcctcaagttcatcat

SEQ ID NO: 45470 - DNA, 25 bp, probe
ttgtctgcctcaagttcatcatcct

SEQ ID NO: 45471 - DNA, 25 bp, probe
agcctggatttgaagttcctgaata

SEQ ID NO: 45472 - DNA, 25 bp, probe
tgtctgcctcaagttcatcatcctc

SEQ ID NO: 45473 - DNA, 25 bp, probe
aagttcatcatcctcttcagcctgg

SEQ ID NO: 45474 - DNA, 25 bp, probe
tttgtctgcctcaagttcatcatcc

SEQ ID NO: 45475 - DNA, 25 bp, probe
gagtttgtctgcctcaagttcatca

SEQ ID NO: 45476 - DNA, 25 bp, probe
cagcctggatttgaagttcctgaat

SEQ ID NO: 45477 - DNA, 25 bp, probe
ggagtttgtctgcctcaagttcatc

SEQ ID NO: 45478 - DNA, 25 bp, probe
ttcatcatcctcttcagcctggatt

SEQ ID NO: 45479 - DNA, 25 bp, probe
aggagtttgtctgcctcaagttcat

SEQ ID NO: 45480 - DNA, 25 bp, probe
agttcatcatcctcttcagcctgga

SEQ ID NO: 45481 - DNA, 25 bp, probe
caaggagtacctgtaccacaagcac

SEQ ID NO: 45482 - DNA, 25 bp, probe
gttcatcatcctcttcagcctggat

SEQ ID NO: 45483 - DNA, 25 bp, probe
caggagtttgtctgcctcaagttca

SEQ ID NO: 45484 - DNA, 25 bp, probe
catcatcctcttcagcctggatttg

SEQ ID NO: 45485 - DNA, 25 bp, probe
atcatcctcttcagcctggatttga

SEQ ID NO: 45486 - DNA, 25 bp, probe
tcatcatcctcttcagcctggattt

SEQ ID NO: 45487 - DNA, 25 bp, probe
gaataaccacatcctggtgaaagac

SEQ ID NO: 45488 - DNA, 25 bp, probe
ctgaataaccacatcctggtgaaag

SEQ ID NO: 45489 - DNA, 25 bp, probe
tcatcctcttcagcctggatttgaa

SEQ ID NO: 45490 - DNA, 25 bp, probe
gttcctgaataaccacatcctggtg

SEQ ID NO: 45491 - DNA, 25 bp, probe
cactctaaccatcacaatcaatcaa

SEQ ID NO: 45492 - DNA, 25 bp, probe
ctatacctggcacctcattaagatg

SEQ ID NO: 45493 - DNA, 25 bp, probe
gcactctaaccatcacaatcaatca

SEQ ID NO: 45494 - DNA, 25 bp, probe
cagcagtataacaggaggaagagat

SEQ ID NO: 45495 - DNA, 25 bp, probe
ccaatgcttctatatgctaagtgaa

SEQ ID NO: 45496 - DNA, 25 bp, probe
tctaaccatcacaatcaatcaatca

SEQ ID NO: 45497 - DNA, 25 bp, probe
actctaaccatcacaatcaatcaat

SEQ ID NO: 45498 - DNA, 25 bp, probe
cctatacctggcacctcattaagat

SEQ ID NO: 45499 - DNA, 25 bp, probe
ctctaaccatcacaatcaatcaatc

SEQ ID NO: 45500 - DNA, 25 bp, probe
ggcactctaaccatcacaatcaatc

SEQ ID NO: 45501 - DNA, 25 bp, probe
agcagtataacaggaggaagagatc

SEQ ID NO: 45502 - DNA, 25 bp, probe
agatagatagacactggcattatcc

SEQ ID NO: 45503 - DNA, 25 bp, probe
gcagatagatagacactggcattat

SEQ ID NO: 45504 - DNA, 25 bp, probe
ctaaccatcacaatcaatcaatcaa

SEQ ID NO: 45505 - DNA, 25 bp, probe
ttattatgttctcagttctctctcc

SEQ ID NO: 45506 - DNA, 25 bp, probe
tggtcagattattatgttctcagtt

SEQ ID NO: 45507 - DNA, 25 bp, probe
ttggtcagattattatgttctcagt

SEQ ID NO: 45508 - DNA, 25 bp, probe
cagatagatagacactggcattatc

SEQ ID NO: 45509 - DNA, 25 bp, probe
gttcaccatgattctcttctgtcac

SEQ ID NO: 45510 - DNA, 25 bp, probe
agttcaccatgattctcttctgtca

SEQ ID NO: 45511 - DNA, 25 bp, probe
tgctaagtgaaatctgtgtctgtaa

SEQ ID NO: 45512 - DNA, 25 bp, probe
atgctaagtgaaatctgtgtctgta

SEQ ID NO: 45513 - DNA, 25 bp, probe
tatgctaagtgaaatctgtgtctgt

SEQ ID NO: 45514 - DNA, 25 bp, probe
atagacactggcattatccctttag

SEQ ID NO: 45515 - DNA, 25 bp, probe
ctcagttcaccatgattctcttctg

SEQ ID NO: 45516 - DNA, 25 bp, probe
attatgttctcagttctctctccct

SEQ ID NO: 45517 - DNA, 25 bp, probe
acatctttagggcaggattcttatc

SEQ ID NO: 45518 - DNA, 25 bp, probe
gacatctttagggcaggattcttat

SEQ ID NO: 45519 - DNA, 25 bp, probe
gtaactactccctgctttatatgcc

SEQ ID NO: 45520 - DNA, 25 bp, probe
ggtcagattattatgttctcagttc

SEQ ID NO: 45521 - DNA, 25 bp, probe
gctaagtgaaatctgtgtctgtaat

SEQ ID NO: 45522 - DNA, 25 bp, probe
tattatgttctcagttctctctccc

SEQ ID NO: 45523 - DNA, 25 bp, probe
cagttcaccatgattctcttctgtc

SEQ ID NO: 45524 - DNA, 25 bp, probe
cccaatgcttctatatgctaagtga

SEQ ID NO: 45525 - DNA, 25 bp, probe
atcaaatctctcctggctgtagtaa

SEQ ID NO: 45526 - DNA, 25 bp, probe
taactactccctgctttatatgcca

SEQ ID NO: 45527 - DNA, 25 bp, probe
tgtgtgtgattatagtaactactcc

SEQ ID NO: 45528 - DNA, 25 bp, probe
atatgctaagtgaaatctgtgtctg

SEQ ID NO: 45529 - DNA, 25 bp, probe
gtagtaacccagtggaatgaatttg

SEQ ID NO: 45530 - DNA, 25 bp, probe
tgtagtaacccagtggaatgaattt

SEQ ID NO: 45531 - DNA, 25 bp, probe
tcacaatcaatcaatcaaattccct

SEQ ID NO: 45532 - DNA, 25 bp, probe
ctgtgactctttctgtaactttccc

SEQ ID NO: 45533 - DNA, 25 bp, probe
cctgtgactctttctgtaactttcc

SEQ ID NO: 45534 - DNA, 25 bp, probe
ccctgtgactctttctgtaactttc

SEQ ID NO: 45535 - DNA, 25 bp, probe
cataaggtatccgtccatgttcttg

SEQ ID NO: 45536 - DNA, 25 bp, probe
aacacattcaggcattagcaattcg

SEQ ID NO: 45537 - DNA, 25 bp, probe
agagataacactgaggttgcatatt

SEQ ID NO: 45538 - DNA, 25 bp, probe
aaacacattcaggcattagcaattc

SEQ ID NO: 45539 - DNA, 25 bp, probe
agtagatgctccaaggagacataag

SEQ ID NO: 45540 - DNA, 25 bp, probe
cacattcaggcattagcaattcgtc

SEQ ID NO: 45541 - DNA, 25 bp, probe
aagtgattcagaacatgaccgaatt

SEQ ID NO: 45542 - DNA, 25 bp, probe
acacttaccaaggaagatatcatca

SEQ ID NO: 45543 - DNA, 25 bp, probe
aagacacttaccaaggaagatatca

SEQ ID NO: 45544 - DNA, 25 bp, probe
ctatctgctgagtgtgctaaatact

SEQ ID NO: 45545 - DNA, 25 bp, probe
tatctgctgagtgtgctaaatactg

SEQ ID NO: 45546 - DNA, 25 bp, probe
atgctccaaggagacataaggtatc

SEQ ID NO: 45547 - DNA, 25 bp, probe
gatgctccaaggagacataaggtat

SEQ ID NO: 45548 - DNA, 25 bp, probe
cagtagatgctccaaggagacataa

SEQ ID NO: 45549 - DNA, 25 bp, probe
gctatctgctgagtgtgctaaatac

SEQ ID NO: 45550 - DNA, 25 bp, probe
agacacttaccaaggaagatatcat

SEQ ID NO: 45551 - DNA, 25 bp, probe
gacacttaccaaggaagatatcatc

SEQ ID NO: 45552 - DNA, 25 bp, probe
gaagtgattcagaacatgaccgaat

SEQ ID NO: 45553 - DNA, 25 bp, probe
ataaggtatccgtccatgttcttgc

SEQ ID NO: 45554 - DNA, 25 bp, probe
cagagataacactgaggttgcatat

SEQ ID NO: 45555 - DNA, 25 bp, probe
attcttgtcctgttgttggagagtt

SEQ ID NO: 45556 - DNA, 25 bp, probe
aaattctacaaggaaatgttggcag

SEQ ID NO: 45557 - DNA, 25 bp, probe
tcaaattctacaaggaaatgttggc

SEQ ID NO: 45558 - DNA, 25 bp, probe
attctacaaggaaatgttggcagta

SEQ ID NO: 45559 - DNA, 25 bp, probe
caaattctacaaggaaatgttggca

SEQ ID NO: 45560 - DNA, 25 bp, probe
ttgacagagataacactgaggttgc

SEQ ID NO: 45561 - DNA, 25 bp, probe
aaccacatattaacttcatggctgc

SEQ ID NO: 45562 - DNA, 25 bp, probe
aatggattcttgtcctgttgttgga

SEQ ID NO: 45563 - DNA, 25 bp, probe
aaggagacataaggtatccgtccat

SEQ ID NO: 45564 - DNA, 25 bp, probe
cacttaccaaggaagatatcatcaa

SEQ ID NO: 45565 - DNA, 25 bp, probe
gccactttaatagtttctgattcac

SEQ ID NO: 45566 - DNA, 25 bp, probe
tacaaggaaatgttggcagtagatg

SEQ ID NO: 45567 - DNA, 25 bp, probe
gtagatgctccaaggagacataagg

SEQ ID NO: 45568 - DNA, 25 bp, probe
aattctacaaggaaatgttggcagt

SEQ ID NO: 45569 - DNA, 25 bp, probe
tttgacagagataacactgaggttg

SEQ ID NO: 45570 - DNA, 25 bp, probe
gattcttgtcctgttgttggagagt

SEQ ID NO: 45571 - DNA, 25 bp, probe
acacattcaggcattagcaattcgt

SEQ ID NO: 45572 - DNA, 25 bp, probe
acagagataacactgaggttgcata

SEQ ID NO: 45573 - DNA, 25 bp, probe
ttcttgtcctgttgttggagagttc

SEQ ID NO: 45574 - DNA, 25 bp, probe
agaaatcatctcccagcaatataat

SEQ ID NO: 45575 - DNA, 25 bp, probe
agatgctccaaggagacataaggta

SEQ ID NO: 45576 - DNA, 25 bp, probe
tagatgctccaaggagacataaggt

SEQ ID NO: 45577 - DNA, 25 bp, probe
gactagacaaaccaaagaagctatc

SEQ ID NO: 45578 - DNA, 25 bp, probe
atggattcttgtcctgttgttggag

SEQ ID NO: 45579 - DNA, 25 bp, probe
gcctctaccattagtaagtctgatt

SEQ ID NO: 45580 - DNA, 25 bp, probe
gaagtgcctctaccattagtaagtc

SEQ ID NO: 45581 - DNA, 25 bp, probe
tgcctctaccattagtaagtctgat

SEQ ID NO: 45582 - DNA, 25 bp, probe
aagtgcctctaccattagtaagtct

SEQ ID NO: 45583 - DNA, 25 bp, probe
agaagtgcctctaccattagtaagt

SEQ ID NO: 45584 - DNA, 25 bp, probe
gtgcctctaccattagtaagtctga

SEQ ID NO: 45585 - DNA, 25 bp, probe
agtgcctctaccattagtaagtctg

SEQ ID NO: 45586 - DNA, 25 bp, probe
tagaagtgcctctaccattagtaag

SEQ ID NO: 45587 - DNA, 25 bp, probe
agtaagtctgattacatggagatcc

SEQ ID NO: 45588 - DNA, 25 bp, probe
tgtccaatttcaactacttctacca

SEQ ID NO: 45589 - DNA, 25 bp, probe
tccaatttcaactacttctaccacc

SEQ ID NO: 45590 - DNA, 25 bp, probe
gtccaatttcaactacttctaccac

SEQ ID NO: 45591 - DNA, 25 bp, probe
gtgtccaatttcaactacttctacc

SEQ ID NO: 45592 - DNA, 25 bp, probe
tgtgtccaatttcaactacttctac

SEQ ID NO: 45593 - DNA, 25 bp, probe
acagtaatgaggactttagagagga

SEQ ID NO: 45594 - DNA, 25 bp, probe
gcctcctgatattctttctcttcat

SEQ ID NO: 45595 - DNA, 25 bp, probe
aacagtaatgaggactttagagagg

SEQ ID NO: 45596 - DNA, 25 bp, probe
cctctaccattagtaagtctgatta

SEQ ID NO: 45597 - DNA, 25 bp, probe
cagtaatgaggactttagagaggaa

SEQ ID NO: 45598 - DNA, 25 bp, probe
gtaagtctgattacatggagatcca

SEQ ID NO: 45599 - DNA, 25 bp, probe
taagtctgattacatggagatccag

SEQ ID NO: 45600 - DNA, 25 bp, probe
ccaatttcaactacttctaccaccg

SEQ ID NO: 45601 - DNA, 25 bp, probe
ccaggagggtgtaaataacagtaat

SEQ ID NO: 45602 - DNA, 25 bp, probe
catgacaactgtaggctatggagac

SEQ ID NO: 45603 - DNA, 25 bp, probe
gggtgtaaataacagtaatgaggac

SEQ ID NO: 45604 - DNA, 25 bp, probe
caggagggtgtaaataacagtaatg

SEQ ID NO: 45605 - DNA, 25 bp, probe
agtaatgaggactttagagaggaaa

SEQ ID NO: 45606 - DNA, 25 bp, probe
agggtgtaaataacagtaatgagga

SEQ ID NO: 45607 - DNA, 25 bp, probe
aggagggtgtaaataacagtaatga

SEQ ID NO: 45608 - DNA, 25 bp, probe
atccaggagggtgtaaataacagta

SEQ ID NO: 45609 - DNA, 25 bp, probe
tccaggagggtgtaaataacagtaa

SEQ ID NO: 45610 - DNA, 25 bp, probe
tgacaactgtaggctatggagacat

SEQ ID NO: 45611 - DNA, 25 bp, probe
atgacaactgtaggctatggagaca

SEQ ID NO: 45612 - DNA, 25 bp, probe
gagggtgtaaataacagtaatgagg

SEQ ID NO: 45613 - DNA, 25 bp, probe
ggagggtgtaaataacagtaatgag

SEQ ID NO: 45614 - DNA, 25 bp, probe
ttgtgtccaatttcaactacttcta

SEQ ID NO: 45615 - DNA, 25 bp, probe
aagtctgattacatggagatccagg

SEQ ID NO: 45616 - DNA, 25 bp, probe
gacaactgtaggctatggagacatg

SEQ ID NO: 45617 - DNA, 25 bp, probe
ctgtaccttggctaacacaaactat

SEQ ID NO: 45618 - DNA, 25 bp, probe
caaaggtctccagattctaggtcag

SEQ ID NO: 45619 - DNA, 25 bp, probe
cactccaaaggtctccagattctag

SEQ ID NO: 45620 - DNA, 25 bp, probe
gtctccatgacaactgtaggctatg

SEQ ID NO: 45621 - DNA, 25 bp, probe
gtaccttggctaacacaaactatgt

SEQ ID NO: 45622 - DNA, 25 bp, probe
tgtaccttggctaacacaaactatg

SEQ ID NO: 45623 - DNA, 25 bp, probe
tatttactccacagaagcattgact

SEQ ID NO: 45624 - DNA, 25 bp, probe
gtatttactccacagaagcattgac

SEQ ID NO: 45625 - DNA, 25 bp, probe
taaggcagaactgtatttactccac

SEQ ID NO: 45626 - DNA, 25 bp, probe
ttaaggcagaactgtatttactcca

SEQ ID NO: 45627 - DNA, 25 bp, probe
tacattgacgcagacacagatgatg

SEQ ID NO: 45628 - DNA, 25 bp, probe
tgtatttactccacagaagcattga

SEQ ID NO: 45629 - DNA, 25 bp, probe
gtacattgacgcagacacagatgat

SEQ ID NO: 45630 - DNA, 25 bp, probe
atttactccacagaagcattgactg

SEQ ID NO: 45631 - DNA, 25 bp, probe
cttaaagtcaacttcatggagggtg

SEQ ID NO: 45632 - DNA, 25 bp, probe
agcacttaaagtcaacttcatggag

SEQ ID NO: 45633 - DNA, 25 bp, probe
gagcacttaaagtcaacttcatgga

SEQ ID NO: 45634 - DNA, 25 bp, probe
aaggcagaactgtatttactccaca

SEQ ID NO: 45635 - DNA, 25 bp, probe
cacttaaagtcaacttcatggaggg

SEQ ID NO: 45636 - DNA, 25 bp, probe
cattgacgcagacacagatgatgag

SEQ ID NO: 45637 - DNA, 25 bp, probe
ttaaagtcaacttcatggagggtga

SEQ ID NO: 45638 - DNA, 25 bp, probe
acttaaagtcaacttcatggagggt

SEQ ID NO: 45639 - DNA, 25 bp, probe
aacacacagcaatagcgttcaactt

SEQ ID NO: 45640 - DNA, 25 bp, probe
gcacttaaagtcaacttcatggagg

SEQ ID NO: 45641 - DNA, 25 bp, probe
tccgagcacttaaagtcaacttcat

SEQ ID NO: 45642 - DNA, 25 bp, probe
cagtacattgacgcagacacagatg

SEQ ID NO: 45643 - DNA, 25 bp, probe
cttaaggcagaactgtatttactcc

SEQ ID NO: 45644 - DNA, 25 bp, probe
cgagcacttaaagtcaacttcatgg

SEQ ID NO: 45645 - DNA, 25 bp, probe
ccgagcacttaaagtcaacttcatg

SEQ ID NO: 45646 - DNA, 25 bp, probe
agtacattgacgcagacacagatga

SEQ ID NO: 45647 - DNA, 25 bp, probe
atgaaaactaacaaccctttgaagc

SEQ ID NO: 45648 - DNA, 25 bp, probe
tctcctgagaaacacacagcaatag

SEQ ID NO: 45649 - DNA, 25 bp, probe
ctccgagcacttaaagtcaacttca

SEQ ID NO: 45650 - DNA, 25 bp, probe
acattgacgcagacacagatgatga

SEQ ID NO: 45651 - DNA, 25 bp, probe
tcttaaggcagaactgtatttactc

SEQ ID NO: 45652 - DNA, 25 bp, probe
cacagcaatagcgttcaactttgag

SEQ ID NO: 45653 - DNA, 25 bp, probe
gtctcctgagaaacacacagcaata

SEQ ID NO: 45654 - DNA, 25 bp, probe
gaaacacacagcaatagcgttcaac

SEQ ID NO: 45655 - DNA, 25 bp, probe
agaaacacacagcaatagcgttcaa

SEQ ID NO: 45656 - DNA, 25 bp, probe
cacacagcaatagcgttcaactttg

SEQ ID NO: 45657 - DNA, 25 bp, probe
tttactccacagaagcattgactgg

SEQ ID NO: 45658 - DNA, 25 bp, probe
attgacgcagacacagatgatgagg

SEQ ID NO: 45659 - DNA, 25 bp, probe
acacacagcaatagcgttcaacttt

SEQ ID NO: 45660 - DNA, 25 bp, probe
ccatgaaaactaacaaccctttgaa

SEQ ID NO: 45661 - DNA, 25 bp, probe
tccatgaaaactaacaaccctttga

SEQ ID NO: 45662 - DNA, 25 bp, probe
aaacacacagcaatagcgttcaact

SEQ ID NO: 45663 - DNA, 25 bp, probe
catgaaaactaacaaccctttgaag

SEQ ID NO: 45664 - DNA, 25 bp, probe
ttacccacctcccctaagttcttaa

SEQ ID NO: 45665 - DNA, 25 bp, probe
tttacccacctcccctaagttctta

SEQ ID NO: 45666 - DNA, 25 bp, probe
acacagcaatagcgttcaactttga

SEQ ID NO: 45667 - DNA, 25 bp, probe
ttgtaaatctgtcgtaaactctcca

SEQ ID NO: 45668 - DNA, 25 bp, probe
tgtaaatctgtcgtaaactctccac

SEQ ID NO: 45669 - DNA, 25 bp, probe
gaaattaacagagcaggtaggaaac

SEQ ID NO: 45670 - DNA, 25 bp, probe
agaaattaacagagcaggtaggaaa

SEQ ID NO: 45671 - DNA, 25 bp, probe
attgtaaatctgtcgtaaactctcc

SEQ ID NO: 45672 - DNA, 25 bp, probe
tagaaattaacagagcaggtaggaa

SEQ ID NO: 45673 - DNA, 25 bp, probe
ttagaaattaacagagcaggtagga

SEQ ID NO: 45674 - DNA, 25 bp, probe
atgatctactacgccgagaggatag

SEQ ID NO: 45675 - DNA, 25 bp, probe
tttagaaattaacagagcaggtagg

SEQ ID NO: 45676 - DNA, 25 bp, probe
ctcccaattattgtaaatctgtcgt

SEQ ID NO: 45677 - DNA, 25 bp, probe
taaatctgtcgtaaactctccacac

SEQ ID NO: 45678 - DNA, 25 bp, probe
gtaaatctgtcgtaaactctccaca

SEQ ID NO: 45679 - DNA, 25 bp, probe
gtgaacaatttcgggatgtattact

SEQ ID NO: 45680 - DNA, 25 bp, probe
cgtgaacaatttcgggatgtattac

SEQ ID NO: 45681 - DNA, 25 bp, probe
tcgtgaacaatttcgggatgtatta

SEQ ID NO: 45682 - DNA, 25 bp, probe
ggctaagcagaaactaccaaagaaa

SEQ ID NO: 45683 - DNA, 25 bp, probe
tgaacaatttcgggatgtattactc

SEQ ID NO: 45684 - DNA, 25 bp, probe
tctcccaattattgtaaatctgtcg

SEQ ID NO: 45685 - DNA, 25 bp, probe
catgatctactacgccgagaggata

SEQ ID NO: 45686 - DNA, 25 bp, probe
atcgtgaacaatttcgggatgtatt

SEQ ID NO: 45687 - DNA, 25 bp, probe
atttcgggatgtattactccttagc

SEQ ID NO: 45688 - DNA, 25 bp, probe
acaatttcgggatgtattactcctt

SEQ ID NO: 45689 - DNA, 25 bp, probe
aacaatttcgggatgtattactcct

SEQ ID NO: 45690 - DNA, 25 bp, probe
gaacaatttcgggatgtattactcc

SEQ ID NO: 45691 - DNA, 25 bp, probe
tcccaattattgtaaatctgtcgta

SEQ ID NO: 45692 - DNA, 25 bp, probe
aaattaacagagcaggtaggaaacc

SEQ ID NO: 45693 - DNA, 25 bp, probe
caatttcgggatgtattactcctta

SEQ ID NO: 45694 - DNA, 25 bp, probe
aatttcgggatgtattactccttag

SEQ ID NO: 45695 - DNA, 25 bp, probe
tttcgggatgtattactccttagcc

SEQ ID NO: 45696 - DNA, 25 bp, probe
cccaattattgtaaatctgtcgtaa

SEQ ID NO: 45697 - DNA, 25 bp, probe
ggatctcccaattattgtaaatctg

SEQ ID NO: 45698 - DNA, 25 bp, probe
tattgtaaatctgtcgtaaactctc

SEQ ID NO: 45699 - DNA, 25 bp, probe
aaatctgtcgtaaactctccacacc

SEQ ID NO: 45700 - DNA, 25 bp, probe
atcttcgccaccatgatctactacg

SEQ ID NO: 45701 - DNA, 25 bp, probe
atggctaagcagaaactaccaaaga

SEQ ID NO: 45702 - DNA, 25 bp, probe
gatcttcgccaccatgatctactac

SEQ ID NO: 45703 - DNA, 25 bp, probe
tcgggatgtattactccttagccat

SEQ ID NO: 45704 - DNA, 25 bp, probe
atctcccaattattgtaaatctgtc

SEQ ID NO: 45705 - DNA, 25 bp, probe
tggctaagcagaaactaccaaagaa

SEQ ID NO: 45706 - DNA, 25 bp, probe
gctaagcagaaactaccaaagaaaa

SEQ ID NO: 45707 - DNA, 25 bp, probe
catggctaagcagaaactaccaaag

SEQ ID NO: 45708 - DNA, 25 bp, probe
gatctcccaattattgtaaatctgt

SEQ ID NO: 45709 - DNA, 25 bp, probe
ttattgtaaatctgtcgtaaactct

SEQ ID NO: 45710 - DNA, 25 bp, probe
ttcgggatgtattactccttagcca

SEQ ID NO: 45711 - DNA, 25 bp, probe
gatcttgagtcccattagctgtgag

SEQ ID NO: 45712 - DNA, 25 bp, probe
tgctcctggagttctcatctgattc

SEQ ID NO: 45713 - DNA, 25 bp, probe
ctgctcctggagttctcatctgatt

SEQ ID NO: 45714 - DNA, 25 bp, probe
ccttagaatcttctggaggagcctc

SEQ ID NO: 45715 - DNA, 25 bp, probe
ctctctttccctacaactaggtcag

SEQ ID NO: 45716 - DNA, 25 bp, probe
attagctgtgagatgcctgtgagag

SEQ ID NO: 45717 - DNA, 25 bp, probe
cttgagtcccattagctgtgagatg

SEQ ID NO: 45718 - DNA, 25 bp, probe
tcttgagtcccattagctgtgagat

SEQ ID NO: 45719 - DNA, 25 bp, probe
atcttgagtcccattagctgtgaga

SEQ ID NO: 45720 - DNA, 25 bp, probe
ctcagagccttcttggaccctttaa

SEQ ID NO: 45721 - DNA, 25 bp, probe
cattagctgtgagatgcctgtgaga

SEQ ID NO: 45722 - DNA, 25 bp, probe
gttgctggatcttgagtcccattag

SEQ ID NO: 45723 - DNA, 25 bp, probe
tcagagccttcttggaccctttaaa

SEQ ID NO: 45724 - DNA, 25 bp, probe
gcctgctctctttccctacaactag

SEQ ID NO: 45725 - DNA, 25 bp, probe
acacactgttgctggatcttgagtc

SEQ ID NO: 45726 - DNA, 25 bp, probe
gctcctggagttctcatctgattcc

SEQ ID NO: 45727 - DNA, 25 bp, probe
tgttgctggatcttgagtcccatta

SEQ ID NO: 45728 - DNA, 25 bp, probe
actgctcctggagttctcatctgat

SEQ ID NO: 45729 - DNA, 25 bp, probe
ctcctacgatcaagacaccttttgt

SEQ ID NO: 45730 - DNA, 25 bp, probe
tctctttccctacaactaggtcagc

SEQ ID NO: 45731 - DNA, 25 bp, probe
gctctctttccctacaactaggtca

SEQ ID NO: 45732 - DNA, 25 bp, probe
tgctctctttccctacaactaggtc

SEQ ID NO: 45733 - DNA, 25 bp, probe
ctgctctctttccctacaactaggt

SEQ ID NO: 45734 - DNA, 25 bp, probe
tgcctgctctctttccctacaacta

SEQ ID NO: 45735 - DNA, 25 bp, probe
tccctcctacgatcaagacaccttt

SEQ ID NO: 45736 - DNA, 25 bp, probe
cctcctacgatcaagacaccttttg

SEQ ID NO: 45737 - DNA, 25 bp, probe
ctcctggagttctcatctgattccc

SEQ ID NO: 45738 - DNA, 25 bp, probe
ggatcttgagtcccattagctgtga

SEQ ID NO: 45739 - DNA, 25 bp, probe
ctggatcttgagtcccattagctgt

SEQ ID NO: 45740 - DNA, 25 bp, probe
ttgagtcccattagctgtgagatgc

SEQ ID NO: 45741 - DNA, 25 bp, probe
ccgtccttagaatcttctggaggag

SEQ ID NO: 45742 - DNA, 25 bp, probe
cctgctctctttccctacaactagg

SEQ ID NO: 45743 - DNA, 25 bp, probe
tggatcttgagtcccattagctgtg

SEQ ID NO: 45744 - DNA, 25 bp, probe
ctccctcctacgatcaagacacctt

SEQ ID NO: 45745 - DNA, 25 bp, probe
gtccttagaatcttctggaggagcc

SEQ ID NO: 45746 - DNA, 25 bp, probe
ctctttccctacaactaggtcagcc

SEQ ID NO: 45747 - DNA, 25 bp, probe
tccttagaatcttctggaggagcct

SEQ ID NO: 45748 - DNA, 25 bp, probe
ctgttgctggatcttgagtcccatt

SEQ ID NO: 45749 - DNA, 25 bp, probe
ccctcctacgatcaagacacctttt

SEQ ID NO: 45750 - DNA, 25 bp, probe
cgtccttagaatcttctggaggagc

SEQ ID NO: 45751 - DNA, 25 bp, probe
ttgctggatcttgagtcccattagc

SEQ ID NO: 45752 - DNA, 25 bp, probe
ctttgcagaaaccacacacactgtt

SEQ ID NO: 45753 - DNA, 25 bp, probe
tggagttctcatctgattccccaag

SEQ ID NO: 45754 - DNA, 25 bp, probe
ctggagttctcatctgattccccaa

SEQ ID NO: 45755 - DNA, 25 bp, probe
taatgaccacaccgacttcaagaac

SEQ ID NO: 45756 - DNA, 25 bp, probe
gtaatgaccacaccgacttcaagaa

SEQ ID NO: 45757 - DNA, 25 bp, probe
catctttgccaccatgatctactac

SEQ ID NO: 45758 - DNA, 25 bp, probe
tcaacaacttcggcatgtactactc

SEQ ID NO: 45759 - DNA, 25 bp, probe
gtcaacaacttcggcatgtactact

SEQ ID NO: 45760 - DNA, 25 bp, probe
atctttgccaccatgatctactacg

SEQ ID NO: 45761 - DNA, 25 bp, probe
gaagagggtatgatcgagaggaaac

SEQ ID NO: 45762 - DNA, 25 bp, probe
caacaacttcggcatgtactactcc

SEQ ID NO: 45763 - DNA, 25 bp, probe
atgaccacaccgacttcaagaacat

SEQ ID NO: 45764 - DNA, 25 bp, probe
tcatctttgccaccatgatctacta

SEQ ID NO: 45765 - DNA, 25 bp, probe
aatgaccacaccgacttcaagaaca

SEQ ID NO: 45766 - DNA, 25 bp, probe
cgtcaacaacttcggcatgtactac

SEQ ID NO: 45767 - DNA, 25 bp, probe
gagattaggggttgggaaggaaaat

SEQ ID NO: 45768 - DNA, 25 bp, probe
ggaagagggtatgatcgagaggaaa

SEQ ID NO: 45769 - DNA, 25 bp, probe
tcgtcaacaacttcggcatgtacta

SEQ ID NO: 45770 - DNA, 25 bp, probe
tccctaagcataaagatgtgccttt

SEQ ID NO: 45771 - DNA, 25 bp, probe
ttccctaagcataaagatgtgcctt

SEQ ID NO: 45772 - DNA, 25 bp, probe
ccctaagcataaagatgtgccttta

SEQ ID NO: 45773 - DNA, 25 bp, probe
ctcatctttgccaccatgatctact

SEQ ID NO: 45774 - DNA, 25 bp, probe
aaatggacctcagaccttgggattt

SEQ ID NO: 45775 - DNA, 25 bp, probe
tgaccacaccgacttcaagaacatc

SEQ ID NO: 45776 - DNA, 25 bp, probe
ggtaatgaccacaccgacttcaaga

SEQ ID NO: 45777 - DNA, 25 bp, probe
aagagggtatgatcgagaggaaacg

SEQ ID NO: 45778 - DNA, 25 bp, probe
cttccctaagcataaagatgtgcct

SEQ ID NO: 45779 - DNA, 25 bp, probe
aatggacctcagaccttgggatttg

SEQ ID NO: 45780 - DNA, 25 bp, probe
catcgtcaacaacttcggcatgtac

SEQ ID NO: 45781 - DNA, 25 bp, probe
atcgtcaacaacttcggcatgtact

SEQ ID NO: 45782 - DNA, 25 bp, probe
tcatcgtcaacaacttcggcatgta

SEQ ID NO: 45783 - DNA, 25 bp, probe
caaatggacctcagaccttgggatt

SEQ ID NO: 45784 - DNA, 25 bp, probe
tgagattaggggttgggaaggaaaa

SEQ ID NO: 45785 - DNA, 25 bp, probe
agattaggggttgggaaggaaaatc

SEQ ID NO: 45786 - DNA, 25 bp, probe
gtttccaaatggacctcagaccttg

SEQ ID NO: 45787 - DNA, 25 bp, probe
tagggagtttccaaatggacctcag

SEQ ID NO: 45788 - DNA, 25 bp, probe
ctagggagtttccaaatggacctca

SEQ ID NO: 45789 - DNA, 25 bp, probe
agtttccaaatggacctcagacctt

SEQ ID NO: 45790 - DNA, 25 bp, probe
ctttgccaccatgatctactacgct

SEQ ID NO: 45791 - DNA, 25 bp, probe
tctttgccaccatgatctactacgc

SEQ ID NO: 45792 - DNA, 25 bp, probe
gtgagattaggggttgggaaggaaa

SEQ ID NO: 45793 - DNA, 25 bp, probe
gctcatctttgccaccatgatctac

SEQ ID NO: 45794 - DNA, 25 bp, probe
caacttcggcatgtactactccctg

SEQ ID NO: 45795 - DNA, 25 bp, probe
aacaacttcggcatgtactactccc

SEQ ID NO: 45796 - DNA, 25 bp, probe
tttgccaccatgatctactacgctg

SEQ ID NO: 45797 - DNA, 25 bp, probe
gagtttccaaatggacctcagacct

SEQ ID NO: 45798 - DNA, 25 bp, probe
gattaggggttgggaaggaaaatcc

SEQ ID NO: 45799 - DNA, 25 bp, probe
gttataggagacaggaggaacttct

SEQ ID NO: 45800 - DNA, 25 bp, probe
tagcctaagaaggagagttgagatt

SEQ ID NO: 45801 - DNA, 25 bp, probe
ctagcctaagaaggagagttgagat

SEQ ID NO: 45802 - DNA, 25 bp, probe
acatattcctttcttctccctcttg

SEQ ID NO: 45803 - DNA, 25 bp, probe
cacatattcctttcttctccctctt

SEQ ID NO: 45804 - DNA, 25 bp, probe
ttcacatattcctttcttctccctc

SEQ ID NO: 45805 - DNA, 25 bp, probe
tttcacatattcctttcttctccct

SEQ ID NO: 45806 - DNA, 25 bp, probe
catattcctttcttctccctcttgg

SEQ ID NO: 45807 - DNA, 25 bp, probe
tcacatattcctttcttctccctct

SEQ ID NO: 45808 - DNA, 25 bp, probe
tctagcctaagaaggagagttgaga

SEQ ID NO: 45809 - DNA, 25 bp, probe
actcagatagcacaaattctaccat

SEQ ID NO: 45810 - DNA, 25 bp, probe
cacactcagatagcacaaattctac

SEQ ID NO: 45811 - DNA, 25 bp, probe
acacactcagatagcacaaattcta

SEQ ID NO: 45812 - DNA, 25 bp, probe
tcagatagcacaaattctaccatcc

SEQ ID NO: 45813 - DNA, 25 bp, probe
aacacacactcagatagcacaaatt

SEQ ID NO: 45814 - DNA, 25 bp, probe
cactcagatagcacaaattctacca

SEQ ID NO: 45815 - DNA, 25 bp, probe
acactcagatagcacaaattctacc

SEQ ID NO: 45816 - DNA, 25 bp, probe
ctcagatagcacaaattctaccatc

SEQ ID NO: 45817 - DNA, 25 bp, probe
ctttgggagttataggagacaggag

SEQ ID NO: 45818 - DNA, 25 bp, probe
acacacactcagatagcacaaattc

SEQ ID NO: 45819 - DNA, 25 bp, probe
cagatagcacaaattctaccatccc

SEQ ID NO: 45820 - DNA, 25 bp, probe
caacacacactcagatagcacaaat

SEQ ID NO: 45821 - DNA, 25 bp, probe
cacacactcagatagcacaaattct

SEQ ID NO: 45822 - DNA, 25 bp, probe
taactcctcctcctcctctcttctc

SEQ ID NO: 45823 - DNA, 25 bp, probe
ctaactcctcctcctcctctcttct

SEQ ID NO: 45824 - DNA, 25 bp, probe
tctaactcctcctcctcctctcttc

SEQ ID NO: 45825 - DNA, 25 bp, probe
ctctaactcctcctcctcctctctt

SEQ ID NO: 45826 - DNA, 25 bp, probe
agttataggagacaggaggaacttc

SEQ ID NO: 45827 - DNA, 25 bp, probe
gagttataggagacaggaggaactt

SEQ ID NO: 45828 - DNA, 25 bp, probe
gcctaagaaggagagttgagatttc

SEQ ID NO: 45829 - DNA, 25 bp, probe
cctaagaaggagagttgagatttcc

SEQ ID NO: 45830 - DNA, 25 bp, probe
agcctaagaaggagagttgagattt

SEQ ID NO: 45831 - DNA, 25 bp, probe
actttgggagttataggagacagga

SEQ ID NO: 45832 - DNA, 25 bp, probe
tttgggagttataggagacaggagg

SEQ ID NO: 45833 - DNA, 25 bp, probe
ggaagtagccaggaaatgagaaact

SEQ ID NO: 45834 - DNA, 25 bp, probe
ttataggagacaggaggaacttctc

SEQ ID NO: 45835 - DNA, 25 bp, probe
ctctagcctaagaaggagagttgag

SEQ ID NO: 45836 - DNA, 25 bp, probe
ggagttataggagacaggaggaact

SEQ ID NO: 45837 - DNA, 25 bp, probe
gagtctggactggctgagataagag

SEQ ID NO: 45838 - DNA, 25 bp, probe
gggagttataggagacaggaggaac

SEQ ID NO: 45839 - DNA, 25 bp, probe
gggaagtagccaggaaatgagaaac

SEQ ID NO: 45840 - DNA, 25 bp, probe
tgggagttataggagacaggaggaa

SEQ ID NO: 45841 - DNA, 25 bp, probe
ttgggagttataggagacaggagga

SEQ ID NO: 45842 - DNA, 25 bp, probe
ccaacacacactcagatagcacaaa

SEQ ID NO: 45843 - DNA, 25 bp, probe
tataaatggagacagatggagacac

SEQ ID NO: 45844 - DNA, 25 bp, probe
ctataaatggagacagatggagaca

SEQ ID NO: 45845 - DNA, 25 bp, probe
tctataaatggagacagatggagac

SEQ ID NO: 45846 - DNA, 25 bp, probe
ataaatggagacagatggagacacc

SEQ ID NO: 45847 - DNA, 25 bp, probe
atctataaatggagacagatggaga

SEQ ID NO: 45848 - DNA, 25 bp, probe
taaatggagacagatggagacacca

SEQ ID NO: 45849 - DNA, 25 bp, probe
tatctataaatggagacagatggag

SEQ ID NO: 45850 - DNA, 25 bp, probe
aatggagacagatggagacaccaaa

SEQ ID NO: 45851 - DNA, 25 bp, probe
aaatggagacagatggagacaccaa

SEQ ID NO: 45852 - DNA, 25 bp, probe
atatctataaatggagacagatgga

SEQ ID NO: 45853 - DNA, 25 bp, probe
ctgttgctcatgactttcttttgta

SEQ ID NO: 45854 - DNA, 25 bp, probe
tgttgctcatgactttcttttgtaa

SEQ ID NO: 45855 - DNA, 25 bp, probe
aatatctataaatggagacagatgg

SEQ ID NO: 45856 - DNA, 25 bp, probe
gttgctcatgactttcttttgtaaa

SEQ ID NO: 45857 - DNA, 25 bp, probe
atggagacagatggagacaccaaaa

SEQ ID NO: 45858 - DNA, 25 bp, probe
ttgctcatgactttcttttgtaaat

SEQ ID NO: 45859 - DNA, 25 bp, probe
cctgttgctcatgactttcttttgt

SEQ ID NO: 45860 - DNA, 25 bp, probe
tgctcatgactttcttttgtaaata

SEQ ID NO: 45861 - DNA, 25 bp, probe
gcctgttgctcatgactttcttttg

SEQ ID NO: 45862 - DNA, 25 bp, probe
tggcctgttgctcatgactttcttt

SEQ ID NO: 45863 - DNA, 25 bp, probe
gctcatgactttcttttgtaaatat

SEQ ID NO: 45864 - DNA, 25 bp, probe
ggcctgttgctcatgactttctttt

SEQ ID NO: 45865 - DNA, 25 bp, probe
atagttattctggaaggagtggttg

SEQ ID NO: 45866 - DNA, 25 bp, probe
catagttattctggaaggagtggtt

SEQ ID NO: 45867 - DNA, 25 bp, probe
gaggtcatagttattctggaaggag

SEQ ID NO: 45868 - DNA, 25 bp, probe
ttggaggtcatagttattctggaag

SEQ ID NO: 45869 - DNA, 25 bp, probe
cttggaggtcatagttattctggaa

SEQ ID NO: 45870 - DNA, 25 bp, probe
gtcatagttattctggaaggagtgg

SEQ ID NO: 45871 - DNA, 25 bp, probe
ggtcatagttattctggaaggagtg

SEQ ID NO: 45872 - DNA, 25 bp, probe
aggtcatagttattctggaaggagt

SEQ ID NO: 45873 - DNA, 25 bp, probe
tcatagttattctggaaggagtggt

SEQ ID NO: 45874 - DNA, 25 bp, probe
tagttattctggaaggagtggttga

SEQ ID NO: 45875 - DNA, 25 bp, probe
atattcatattcaagcaacagcact

SEQ ID NO: 45876 - DNA, 25 bp, probe
ggaggtcatagttattctggaagga

SEQ ID NO: 45877 - DNA, 25 bp, probe
gatattcatattcaagcaacagcac

SEQ ID NO: 45878 - DNA, 25 bp, probe
tattcatattcaagcaacagcactt

SEQ ID NO: 45879 - DNA, 25 bp, probe
tggaggtcatagttattctggaagg

SEQ ID NO: 45880 - DNA, 25 bp, probe
gaaggagtgtattctgtggattact

SEQ ID NO: 45881 - DNA, 25 bp, probe
acttggaggtcatagttattctgga

SEQ ID NO: 45882 - DNA, 25 bp, probe
tgatattcatattcaagcaacagca

SEQ ID NO: 45883 - DNA, 25 bp, probe
agttattctggaaggagtggttgaa

SEQ ID NO: 45884 - DNA, 25 bp, probe
gacttggaggtcatagttattctgg

SEQ ID NO: 45885 - DNA, 25 bp, probe
tgactgaggaagaaggagtgtattc

SEQ ID NO: 45886 - DNA, 25 bp, probe
agacttggaggtcatagttattctg

SEQ ID NO: 45887 - DNA, 25 bp, probe
gtgactgaggaagaaggagtgtatt

SEQ ID NO: 45888 - DNA, 25 bp, probe
aagacttggaggtcatagttattct

SEQ ID NO: 45889 - DNA, 25 bp, probe
acaattctatccgaaggaacaattc

SEQ ID NO: 45890 - DNA, 25 bp, probe
gaacaattctatccgaaggaacaat

SEQ ID NO: 45891 - DNA, 25 bp, probe
caattctatccgaaggaacaattct

SEQ ID NO: 45892 - DNA, 25 bp, probe
aacaattctatccgaaggaacaatt

SEQ ID NO: 45893 - DNA, 25 bp, probe
ggaacaattctatccgaaggaacaa

SEQ ID NO: 45894 - DNA, 25 bp, probe
gaggaacaattctatccgaaggaac

SEQ ID NO: 45895 - DNA, 25 bp, probe
atgaggaggaacaattctatccgaa

SEQ ID NO: 45896 - DNA, 25 bp, probe
caagacttggaggtcatagttattc

SEQ ID NO: 45897 - DNA, 25 bp, probe
aattctatccgaaggaacaattctt

SEQ ID NO: 45898 - DNA, 25 bp, probe
gttcctattcaccaactggacattc

SEQ ID NO: 45899 - DNA, 25 bp, probe
attcatattcaagcaacagcacttt

SEQ ID NO: 45900 - DNA, 25 bp, probe
gagaaaccttccatccttattcaga

SEQ ID NO: 45901 - DNA, 25 bp, probe
aggaacaattctatccgaaggaaca

SEQ ID NO: 45902 - DNA, 25 bp, probe
agaaaccttccatccttattcagac

SEQ ID NO: 45903 - DNA, 25 bp, probe
tgtgactgaggaagaaggagtgtat

SEQ ID NO: 45904 - DNA, 25 bp, probe
ttcatattcaagcaacagcactttc

SEQ ID NO: 45905 - DNA, 25 bp, probe
tgaggaggaacaattctatccgaag

SEQ ID NO: 45906 - DNA, 25 bp, probe
gttattctggaaggagtggttgaaa

SEQ ID NO: 45907 - DNA, 25 bp, probe
ttattctggaaggagtggttgaaac

SEQ ID NO: 45908 - DNA, 25 bp, probe
ggaggaacaattctatccgaaggaa

SEQ ID NO: 45909 - DNA, 25 bp, probe
tgtatttgttcaaggatgggaagta

SEQ ID NO: 45910 - DNA, 25 bp, probe
ctgtatttgttcaaggatgggaagt

SEQ ID NO: 45911 - DNA, 25 bp, probe
gtatttgttcaaggatgggaagtac

SEQ ID NO: 45912 - DNA, 25 bp, probe
aactggtattctgttctggaggaaa

SEQ ID NO: 45913 - DNA, 25 bp, probe
aaactggtattctgttctggaggaa

SEQ ID NO: 45914 - DNA, 25 bp, probe
tacaaactggtattctgttctggag

SEQ ID NO: 45915 - DNA, 25 bp, probe
actggtattctgttctggaggaaag

SEQ ID NO: 45916 - DNA, 25 bp, probe
atacaaactggtattctgttctgga

SEQ ID NO: 45917 - DNA, 25 bp, probe
gatacaaactggtattctgttctgg

SEQ ID NO: 45918 - DNA, 25 bp, probe
ggatacaaactggtattctgttctg

SEQ ID NO: 45919 - DNA, 25 bp, probe
cggatacaaactggtattctgttct

SEQ ID NO: 45920 - DNA, 25 bp, probe
gctgtatttgttcaaggatgggaag

SEQ ID NO: 45921 - DNA, 25 bp, probe
caaactggtattctgttctggagga

SEQ ID NO: 45922 - DNA, 25 bp, probe
gtattctgttctggaggaaagggag

SEQ ID NO: 45923 - DNA, 25 bp, probe
ctggtattctgttctggaggaaagg

SEQ ID NO: 45924 - DNA, 25 bp, probe
acaaactggtattctgttctggagg

SEQ ID NO: 45925 - DNA, 25 bp, probe
tattctgttctggaggaaagggagg

SEQ ID NO: 45926 - DNA, 25 bp, probe
tccagtaccgagagaaagcctattt

SEQ ID NO: 45927 - DNA, 25 bp, probe
ttccagtaccgagagaaagcctatt

SEQ ID NO: 45928 - DNA, 25 bp, probe
agctgtatttgttcaaggatgggaa

SEQ ID NO: 45929 - DNA, 25 bp, probe
ggtattctgttctggaggaaaggga

SEQ ID NO: 45930 - DNA, 25 bp, probe
ttggagtgtttctaataaacttgga

SEQ ID NO: 45931 - DNA, 25 bp, probe
gttggagtgtttctaataaacttgg

SEQ ID NO: 45932 - DNA, 25 bp, probe
tggagtgtttctaataaacttggat

SEQ ID NO: 45933 - DNA, 25 bp, probe
tatttgttcaaggatgggaagtact

SEQ ID NO: 45934 - DNA, 25 bp, probe
aataaacttggattctctaaccttt

SEQ ID NO: 45935 - DNA, 25 bp, probe
cttccagtaccgagagaaagcctat

SEQ ID NO: 45936 - DNA, 25 bp, probe
atttgttcaaggatgggaagtactg

SEQ ID NO: 45937 - DNA, 25 bp, probe
tggtattctgttctggaggaaaggg

SEQ ID NO: 45938 - DNA, 25 bp, probe
tctaataaacttggattctctaacc

SEQ ID NO: 45939 - DNA, 25 bp, probe
tgttggagtgtttctaataaacttg

SEQ ID NO: 45940 - DNA, 25 bp, probe
ctaataaacttggattctctaacct

SEQ ID NO: 45941 - DNA, 25 bp, probe
ccagtaccgagagaaagcctatttc

SEQ ID NO: 45942 - DNA, 25 bp, probe
ggagtgtttctaataaacttggatt

SEQ ID NO: 45943 - DNA, 25 bp, probe
ccggatacaaactggtattctgttc

SEQ ID NO: 45944 - DNA, 25 bp, probe
ttgttggagtgtttctaataaactt

SEQ ID NO: 45945 - DNA, 25 bp, probe
tttgttggagtgtttctaataaact

SEQ ID NO: 45946 - DNA, 25 bp, probe
taataaacttggattctctaacctt

SEQ ID NO: 45947 - DNA, 25 bp, probe
tttgttcaaggatgggaagtactgg

SEQ ID NO: 45948 - DNA, 25 bp, probe
tcttccagtaccgagagaaagccta

SEQ ID NO: 45949 - DNA, 25 bp, probe
attctgttctggaggaaagggagga

SEQ ID NO: 45950 - DNA, 25 bp, probe
agtgtttctaataaacttggattct

SEQ ID NO: 45951 - DNA, 25 bp, probe
gtgtttctaataaacttggattctc

SEQ ID NO: 45952 - DNA, 25 bp, probe
gagtgtttctaataaacttggattc

SEQ ID NO: 45953 - DNA, 25 bp, probe
ggctagatttctgtcttgtttgttt

SEQ ID NO: 45954 - DNA, 25 bp, probe
ttcggctagatttctgtcttgtttg

SEQ ID NO: 45955 - DNA, 25 bp, probe
gttcggctagatttctgtcttgttt

SEQ ID NO: 45956 - DNA, 25 bp, probe
cggctagatttctgtcttgtttgtt

SEQ ID NO: 45957 - DNA, 25 bp, probe
agttcggctagatttctgtcttgtt

SEQ ID NO: 45958 - DNA, 25 bp, probe
tcggctagatttctgtcttgtttgt

SEQ ID NO: 45959 - DNA, 25 bp, probe
cagttcggctagatttctgtcttgt

SEQ ID NO: 45960 - DNA, 25 bp, probe
gctagatttctgtcttgtttgtttt

SEQ ID NO: 45961 - DNA, 25 bp, probe
gcagttcggctagatttctgtcttg

SEQ ID NO: 45962 - DNA, 25 bp, probe
ggcagttcggctagatttctgtctt

SEQ ID NO: 45963 - DNA, 25 bp, probe
atacgacagtacacacagtgactat

SEQ ID NO: 45964 - DNA, 25 bp, probe
cgacagtacacacagtgactattag

SEQ ID NO: 45965 - DNA, 25 bp, probe
gacagtacacacagtgactattagc

SEQ ID NO: 45966 - DNA, 25 bp, probe
acgacagtacacacagtgactatta

SEQ ID NO: 45967 - DNA, 25 bp, probe
tacgacagtacacacagtgactatt

SEQ ID NO: 45968 - DNA, 25 bp, probe
aatacgacagtacacacagtgacta

SEQ ID NO: 45969 - DNA, 25 bp, probe
cccttcaagattcaaagttccattt

SEQ ID NO: 45970 - DNA, 25 bp, probe
aataaagtctggtgcctcatttgat

SEQ ID NO: 45971 - DNA, 25 bp, probe
acccttcaagattcaaagttccatt

SEQ ID NO: 45972 - DNA, 25 bp, probe
aagacccttcaagattcaaagttcc

SEQ ID NO: 45973 - DNA, 25 bp, probe
gtcaataaagtctggtgcctcattt

SEQ ID NO: 45974 - DNA, 25 bp, probe
gacccttcaagattcaaagttccat

SEQ ID NO: 45975 - DNA, 25 bp, probe
agtacacacagtgactattagccac

SEQ ID NO: 45976 - DNA, 25 bp, probe
cagtacacacagtgactattagcca

SEQ ID NO: 45977 - DNA, 25 bp, probe
acagtacacacagtgactattagcc

SEQ ID NO: 45978 - DNA, 25 bp, probe
ataaagtctggtgcctcatttgatc

SEQ ID NO: 45979 - DNA, 25 bp, probe
tcaataaagtctggtgcctcatttg

SEQ ID NO: 45980 - DNA, 25 bp, probe
caataaagtctggtgcctcatttga

SEQ ID NO: 45981 - DNA, 25 bp, probe
agtcaataaagtctggtgcctcatt

SEQ ID NO: 45982 - DNA, 25 bp, probe
agacccttcaagattcaaagttcca

SEQ ID NO: 45983 - DNA, 25 bp, probe
agaagggtttaaattatgggtccaa

SEQ ID NO: 45984 - DNA, 25 bp, probe
aggagaagggtttaaattatgggtc

SEQ ID NO: 45985 - DNA, 25 bp, probe
aaggagaagggtttaaattatgggt

SEQ ID NO: 45986 - DNA, 25 bp, probe
gcaaggagaagggtttaaattatgg

SEQ ID NO: 45987 - DNA, 25 bp, probe
gagaagggtttaaattatgggtcca

SEQ ID NO: 45988 - DNA, 25 bp, probe
caaggagaagggtttaaattatggg

SEQ ID NO: 45989 - DNA, 25 bp, probe
cgcaaggagaagggtttaaattatg

SEQ ID NO: 45990 - DNA, 25 bp, probe
tcgcaaggagaagggtttaaattat

SEQ ID NO: 45991 - DNA, 25 bp, probe
taaagtctggtgcctcatttgatct

SEQ ID NO: 45992 - DNA, 25 bp, probe
gaagggtttaaattatgggtccaaa

SEQ ID NO: 45993 - DNA, 25 bp, probe
tgttcatggagagaaaggagagttt

SEQ ID NO: 45994 - DNA, 25 bp, probe
ttgttcatggagagaaaggagagtt

SEQ ID NO: 45995 - DNA, 25 bp, probe
ttcgcaaggagaagggtttaaatta

SEQ ID NO: 45996 - DNA, 25 bp, probe
agttgttcatggagagaaaggagag

SEQ ID NO: 45997 - DNA, 25 bp, probe
gagttgttcatggagagaaaggaga

SEQ ID NO: 45998 - DNA, 25 bp, probe
gttgttcatggagagaaaggagagt

SEQ ID NO: 45999 - DNA, 25 bp, probe
aaatacgacagtacacacagtgact

SEQ ID NO: 46000 - DNA, 25 bp, probe
aaagaacgggatttccaggcataaa

SEQ ID NO: 46001 - DNA, 25 bp, probe
aaagtctggtgcctcatttgatctc

SEQ ID NO: 46002 - DNA, 25 bp, probe
atggagagaaaggagagttttagaa

SEQ ID NO: 46003 - DNA, 25 bp, probe
ggagaagggtttaaattatgggtcc

SEQ ID NO: 46004 - DNA, 25 bp, probe
ggagttgttcatggagagaaaggag

SEQ ID NO: 46005 - DNA, 25 bp, probe
cagtcaataaagtctggtgcctcat

SEQ ID NO: 46006 - DNA, 25 bp, probe
ccttcaagattcaaagttccatttg

SEQ ID NO: 46007 - DNA, 25 bp, probe
atatccaccactttaaccttagagc

SEQ ID NO: 46008 - DNA, 25 bp, probe
cacaaatatccaccactttaacctt

SEQ ID NO: 46009 - DNA, 25 bp, probe
ttaaccttagagcttggacagtctg

SEQ ID NO: 46010 - DNA, 25 bp, probe
gcacaaatatccaccactttaacct

SEQ ID NO: 46011 - DNA, 25 bp, probe
acaaatatccaccactttaacctta

SEQ ID NO: 46012 - DNA, 25 bp, probe
aatatccaccactttaaccttagag

SEQ ID NO: 46013 - DNA, 25 bp, probe
gtaggtaaccggcatattattccat

SEQ ID NO: 46014 - DNA, 25 bp, probe
ctgtaggtaaccggcatattattcc

SEQ ID NO: 46015 - DNA, 25 bp, probe
aggtaaccggcatattattccatat

SEQ ID NO: 46016 - DNA, 25 bp, probe
ggtaaccggcatattattccatatc

SEQ ID NO: 46017 - DNA, 25 bp, probe
taggtaaccggcatattattccata

SEQ ID NO: 46018 - DNA, 25 bp, probe
caaatatccaccactttaaccttag

SEQ ID NO: 46019 - DNA, 25 bp, probe
taaccttagagcttggacagtctga

SEQ ID NO: 46020 - DNA, 25 bp, probe
tgtaggtaaccggcatattattcca

SEQ ID NO: 46021 - DNA, 25 bp, probe
aaatatccaccactttaaccttaga

SEQ ID NO: 46022 - DNA, 25 bp, probe
cggcatattattccatatctttgtt

SEQ ID NO: 46023 - DNA, 25 bp, probe
gctgtaggtaaccggcatattattc

SEQ ID NO: 46024 - DNA, 25 bp, probe
tatccaccactttaaccttagagct

SEQ ID NO: 46025 - DNA, 25 bp, probe
agctgtaggtaaccggcatattatt

SEQ ID NO: 46026 - DNA, 25 bp, probe
ctttaaccttagagcttggacagtc

SEQ ID NO: 46027 - DNA, 25 bp, probe
gtaaccggcatattattccatatct

SEQ ID NO: 46028 - DNA, 25 bp, probe
cactttaaccttagagcttggacag

SEQ ID NO: 46029 - DNA, 25 bp, probe
ttgcacaaatatccaccactttaac

SEQ ID NO: 46030 - DNA, 25 bp, probe
tttgcacaaatatccaccactttaa

SEQ ID NO: 46031 - DNA, 25 bp, probe
atccaccactttaaccttagagctt

SEQ ID NO: 46032 - DNA, 25 bp, probe
gagctgtaggtaaccggcatattat

SEQ ID NO: 46033 - DNA, 25 bp, probe
tttaaccttagagcttggacagtct

SEQ ID NO: 46034 - DNA, 25 bp, probe
cttctaaacgtaggacacattgaaa

SEQ ID NO: 46035 - DNA, 25 bp, probe
taaccggcatattattccatatctt

SEQ ID NO: 46036 - DNA, 25 bp, probe
actttaaccttagagcttggacagt

SEQ ID NO: 46037 - DNA, 25 bp, probe
tgcacaaatatccaccactttaacc

SEQ ID NO: 46038 - DNA, 25 bp, probe
ttaaccagtacttctaagagcatag

SEQ ID NO: 46039 - DNA, 25 bp, probe
tctttctcttcccaaaacttcttca

SEQ ID NO: 46040 - DNA, 25 bp, probe
catgtactgagttccttcagatcag

SEQ ID NO: 46041 - DNA, 25 bp, probe
ctttctcttcccaaaacttcttcaa

SEQ ID NO: 46042 - DNA, 25 bp, probe
tccaccactttaaccttagagcttg

SEQ ID NO: 46043 - DNA, 25 bp, probe
ttctcttcccaaaacttcttcaaaa

SEQ ID NO: 46044 - DNA, 25 bp, probe
tttctcttcccaaaacttcttcaaa

SEQ ID NO: 46045 - DNA, 25 bp, probe
atctttctcttcccaaaacttcttc

SEQ ID NO: 46046 - DNA, 25 bp, probe
ccttctaaacgtaggacacattgaa

SEQ ID NO: 46047 - DNA, 25 bp, probe
aaccttagagcttggacagtctgag

SEQ ID NO: 46048 - DNA, 25 bp, probe
taaccagtacttctaagagcataga

SEQ ID NO: 46049 - DNA, 25 bp, probe
gatcatcaagaagacggagtcggat

SEQ ID NO: 46050 - DNA, 25 bp, probe
ccggcatattattccatatctttgt

SEQ ID NO: 46051 - DNA, 25 bp, probe
gaagacattcaagacaacctgctac

SEQ ID NO: 46052 - DNA, 25 bp, probe
tattgctgtcattattctcagtgga

SEQ ID NO: 46053 - DNA, 25 bp, probe
gacattcaagacaacctgctacaag

SEQ ID NO: 46054 - DNA, 25 bp, probe
attgctgtcattattctcagtggag

SEQ ID NO: 46055 - DNA, 25 bp, probe
ttattgctgtcattattctcagtgg

SEQ ID NO: 46056 - DNA, 25 bp, probe
agacattcaagacaacctgctacaa

SEQ ID NO: 46057 - DNA, 25 bp, probe
aagacattcaagacaacctgctaca

SEQ ID NO: 46058 - DNA, 25 bp, probe
ttagatgacagcgacttggcaatat

SEQ ID NO: 46059 - DNA, 25 bp, probe
attagatgacagcgacttggcaata

SEQ ID NO: 46060 - DNA, 25 bp, probe
aagttcaatgcactggaattagatg

SEQ ID NO: 46061 - DNA, 25 bp, probe
gaagttcaatgcactggaattagat

SEQ ID NO: 46062 - DNA, 25 bp, probe
gttcaatgcactggaattagatgac

SEQ ID NO: 46063 - DNA, 25 bp, probe
agttcaatgcactggaattagatga

SEQ ID NO: 46064 - DNA, 25 bp, probe
aattagatgacagcgacttggcaat

SEQ ID NO: 46065 - DNA, 25 bp, probe
ttcaatgcactggaattagatgaca

SEQ ID NO: 46066 - DNA, 25 bp, probe
tgaagttcaatgcactggaattaga

SEQ ID NO: 46067 - DNA, 25 bp, probe
tagatgacagcgacttggcaatatt

SEQ ID NO: 46068 - DNA, 25 bp, probe
gatcaagaagacggagacagacatg

SEQ ID NO: 46069 - DNA, 25 bp, probe
caagtttgagtttgctgtgaagttc

SEQ ID NO: 46070 - DNA, 25 bp, probe
actggaattagatgacagcgacttg

SEQ ID NO: 46071 - DNA, 25 bp, probe
cactggaattagatgacagcgactt

SEQ ID NO: 46072 - DNA, 25 bp, probe
gtgaagttcaatgcactggaattag

SEQ ID NO: 46073 - DNA, 25 bp, probe
tcaatgcactggaattagatgacag

SEQ ID NO: 46074 - DNA, 25 bp, probe
tgtgaagttcaatgcactggaatta

SEQ ID NO: 46075 - DNA, 25 bp, probe
cttcttccagttgcactattctgag

SEQ ID NO: 46076 - DNA, 25 bp, probe
acttgtactagcagagagtcctgag

SEQ ID NO: 46077 - DNA, 25 bp, probe
atgacagcgacttggcaatatttat

SEQ ID NO: 46078 - DNA, 25 bp, probe
gaattagatgacagcgacttggcaa

SEQ ID NO: 46079 - DNA, 25 bp, probe
catgacaagggagtttctaaagagc

SEQ ID NO: 46080 - DNA, 25 bp, probe
tgacagcgacttggcaatatttatt

SEQ ID NO: 46081 - DNA, 25 bp, probe
atgacaagggagtttctaaagagcc

SEQ ID NO: 46082 - DNA, 25 bp, probe
aaatgacagacctcagacagattgt

SEQ ID NO: 46083 - DNA, 25 bp, probe
aagtttgagtttgctgtgaagttca

SEQ ID NO: 46084 - DNA, 25 bp, probe
atcaagaagacggagacagacatga

SEQ ID NO: 46085 - DNA, 25 bp, probe
gatgacagcgacttggcaatattta

SEQ ID NO: 46086 - DNA, 25 bp, probe
ctggaattagatgacagcgacttgg

SEQ ID NO: 46087 - DNA, 25 bp, probe
ccaagtttgagtttgctgtgaagtt

SEQ ID NO: 46088 - DNA, 25 bp, probe
ctgtgaagttcaatgcactggaatt

SEQ ID NO: 46089 - DNA, 25 bp, probe
tgaagacattcaagacaacctgcta

SEQ ID NO: 46090 - DNA, 25 bp, probe
ttcttccagttgcactattctgagg

SEQ ID NO: 46091 - DNA, 25 bp, probe
ccttcttccagttgcactattctga

SEQ ID NO: 46092 - DNA, 25 bp, probe
caatgcactggaattagatgacagc

SEQ ID NO: 46093 - DNA, 25 bp, probe
tttattgctgtcattattctcagtg

SEQ ID NO: 46094 - DNA, 25 bp, probe
ctttatggagcccaagtttgagttt

SEQ ID NO: 46095 - DNA, 25 bp, probe
caggaggtggagtaactaaggatat

SEQ ID NO: 46096 - DNA, 25 bp, probe
ttaacttctcaggacatccaacatt

SEQ ID NO: 46097 - DNA, 25 bp, probe
attaacttctcaggacatccaacat

SEQ ID NO: 46098 - DNA, 25 bp, probe
cattaacttctcaggacatccaaca

SEQ ID NO: 46099 - DNA, 25 bp, probe
tcaggaggtggagtaactaaggata

SEQ ID NO: 46100 - DNA, 25 bp, probe
ccattaacttctcaggacatccaac

SEQ ID NO: 46101 - DNA, 25 bp, probe
cctcctggatcactactatgtatgg

SEQ ID NO: 46102 - DNA, 25 bp, probe
ggatcactactatgtatggaggcaa

SEQ ID NO: 46103 - DNA, 25 bp, probe
ctggatcactactatgtatggaggc

SEQ ID NO: 46104 - DNA, 25 bp, probe
tggactatccttatgcctctaactt

SEQ ID NO: 46105 - DNA, 25 bp, probe
gtggactatccttatgcctctaact

SEQ ID NO: 46106 - DNA, 25 bp, probe
tcctggatcactactatgtatggag

SEQ ID NO: 46107 - DNA, 25 bp, probe
ctcctggatcactactatgtatgga

SEQ ID NO: 46108 - DNA, 25 bp, probe
gtcaggaggtggagtaactaaggat

SEQ ID NO: 46109 - DNA, 25 bp, probe
atagaatagagggtgatgacggtaa

SEQ ID NO: 46110 - DNA, 25 bp, probe
tggatcactactatgtatggaggca

SEQ ID NO: 46111 - DNA, 25 bp, probe
cctggatcactactatgtatggagg

SEQ ID NO: 46112 - DNA, 25 bp, probe
ctatcaaggtagtgtgccagtattt

SEQ ID NO: 46113 - DNA, 25 bp, probe
aatgactttgaactgtgctgtaaat

SEQ ID NO: 46114 - DNA, 25 bp, probe
ggatttaatgactttgaactgtgct

SEQ ID NO: 46115 - DNA, 25 bp, probe
tggatttaatgactttgaactgtgc

SEQ ID NO: 46116 - DNA, 25 bp, probe
cctatcaaggtagtgtgccagtatt

SEQ ID NO: 46117 - DNA, 25 bp, probe
atttaatgactttgaactgtgctgt

SEQ ID NO: 46118 - DNA, 25 bp, probe
gatagaatagagggtgatgacggta

SEQ ID NO: 46119 - DNA, 25 bp, probe
ccaaagttgagatagaatagagggt

SEQ ID NO: 46120 - DNA, 25 bp, probe
tagaatagagggtgatgacggtaag

SEQ ID NO: 46121 - DNA, 25 bp, probe
ttgagatagaatagagggtgatgac

SEQ ID NO: 46122 - DNA, 25 bp, probe
gttgagatagaatagagggtgatga

SEQ ID NO: 46123 - DNA, 25 bp, probe
agttgagatagaatagagggtgatg

SEQ ID NO: 46124 - DNA, 25 bp, probe
aggaggtggagtaactaaggatatc

SEQ ID NO: 46125 - DNA, 25 bp, probe
tgactttgaactgtgctgtaaataa

SEQ ID NO: 46126 - DNA, 25 bp, probe
taatgactttgaactgtgctgtaaa

SEQ ID NO: 46127 - DNA, 25 bp, probe
gccaaagttgagatagaatagaggg

SEQ ID NO: 46128 - DNA, 25 bp, probe
gatttaatgactttgaactgtgctg

SEQ ID NO: 46129 - DNA, 25 bp, probe
tgagatagaatagagggtgatgacg

SEQ ID NO: 46130 - DNA, 25 bp, probe
ggaggtggagtaactaaggatatca

SEQ ID NO: 46131 - DNA, 25 bp, probe
ttaatgactttgaactgtgctgtaa

SEQ ID NO: 46132 - DNA, 25 bp, probe
tttaatgactttgaactgtgctgta

SEQ ID NO: 46133 - DNA, 25 bp, probe
taacttctcaggacatccaacattt

SEQ ID NO: 46134 - DNA, 25 bp, probe
atgactttgaactgtgctgtaaata

SEQ ID NO: 46135 - DNA, 25 bp, probe
ggagtaactaaggatatcacagaca

SEQ ID NO: 46136 - DNA, 25 bp, probe
tggagtaactaaggatatcacagac

SEQ ID NO: 46137 - DNA, 25 bp, probe
ggtggactatccttatgcctctaac

SEQ ID NO: 46138 - DNA, 25 bp, probe
actggatttaatgactttgaactgt

SEQ ID NO: 46139 - DNA, 25 bp, probe
aaggtttacaaggacttactggaaa

SEQ ID NO: 46140 - DNA, 25 bp, probe
gaaggtttacaaggacttactggaa

SEQ ID NO: 46141 - DNA, 25 bp, probe
cacgaaggtttacaaggacttactg

SEQ ID NO: 46142 - DNA, 25 bp, probe
atgttaatgacctcatgctcgtgaa

SEQ ID NO: 46143 - DNA, 25 bp, probe
caagttcaccaagtggataaatgac

SEQ ID NO: 46144 - DNA, 25 bp, probe
ttaaacctcatgccctgttgataaa

SEQ ID NO: 46145 - DNA, 25 bp, probe
aagttcaccaagtggataaatgaca

SEQ ID NO: 46146 - DNA, 25 bp, probe
cgaaggtttacaaggacttactgga

SEQ ID NO: 46147 - DNA, 25 bp, probe
acgaaggtttacaaggacttactgg

SEQ ID NO: 46148 - DNA, 25 bp, probe
agttcaccaagtggataaatgacac

SEQ ID NO: 46149 - DNA, 25 bp, probe
taaacctcatgccctgttgataaac

SEQ ID NO: 46150 - DNA, 25 bp, probe
tgttaatgacctcatgctcgtgaag

SEQ ID NO: 46151 - DNA, 25 bp, probe
gatatatttaaacctcatgccctgt

SEQ ID NO: 46152 - DNA, 25 bp, probe
tatatttaaacctcatgccctgttg

SEQ ID NO: 46153 - DNA, 25 bp, probe
atttaaacctcatgccctgttgata

SEQ ID NO: 46154 - DNA, 25 bp, probe
tatttaaacctcatgccctgttgat

SEQ ID NO: 46155 - DNA, 25 bp, probe
atatttaaacctcatgccctgttga

SEQ ID NO: 46156 - DNA, 25 bp, probe
tttaaacctcatgccctgttgataa

SEQ ID NO: 46157 - DNA, 25 bp, probe
gcaagttcaccaagtggataaatga

SEQ ID NO: 46158 - DNA, 25 bp, probe
agatatatttaaacctcatgccctg

SEQ ID NO: 46159 - DNA, 25 bp, probe
caagtggataaatgacaccatgaaa

SEQ ID NO: 46160 - DNA, 25 bp, probe
gttcaccaagtggataaatgacacc

SEQ ID NO: 46161 - DNA, 25 bp, probe
ctcatgccctgttgataaaccaatc

SEQ ID NO: 46162 - DNA, 25 bp, probe
gcacgaaggtttacaaggacttact

SEQ ID NO: 46163 - DNA, 25 bp, probe
atatatttaaacctcatgccctgtt

SEQ ID NO: 46164 - DNA, 25 bp, probe
ctactccacacagacccatgttaat

SEQ ID NO: 46165 - DNA, 25 bp, probe
ccaagtggataaatgacaccatgaa

SEQ ID NO: 46166 - DNA, 25 bp, probe
tactccacacagacccatgttaatg

SEQ ID NO: 46167 - DNA, 25 bp, probe
aagatatatttaaacctcatgccct

SEQ ID NO: 46168 - DNA, 25 bp, probe
tcaccaagtggataaatgacaccat

SEQ ID NO: 46169 - DNA, 25 bp, probe
aggtttacaaggacttactggaaaa

SEQ ID NO: 46170 - DNA, 25 bp, probe
ggtttacaaggacttactggaaaat

SEQ ID NO: 46171 - DNA, 25 bp, probe
ttcaccaagtggataaatgacacca

SEQ ID NO: 46172 - DNA, 25 bp, probe
cgctaacgccacactgagttaatta

SEQ ID NO: 46173 - DNA, 25 bp, probe
cacagacccatgttaatgacctcat

SEQ ID NO: 46174 - DNA, 25 bp, probe
caaataaagaaacacaaaaccctca

SEQ ID NO: 46175 - DNA, 25 bp, probe
acaaataaagaaacacaaaaccctc

SEQ ID NO: 46176 - DNA, 25 bp, probe
accaagtggataaatgacaccatga

SEQ ID NO: 46177 - DNA, 25 bp, probe
caccaagtggataaatgacaccatg

SEQ ID NO: 46178 - DNA, 25 bp, probe
gctaacgccacactgagttaattaa

SEQ ID NO: 46179 - DNA, 25 bp, probe
aacaaataaagaaacacaaaaccct

SEQ ID NO: 46180 - DNA, 25 bp, probe
aaagatatatttaaacctcatgccc

SEQ ID NO: 46181 - DNA, 25 bp, probe
taattaactgtgtgcttccaacaga

SEQ ID NO: 46182 - DNA, 25 bp, probe
ccactgcaagatgaatgagtacacc

SEQ ID NO: 46183 - DNA, 25 bp, probe
ctcaggtcttcactctttcttcttt

SEQ ID NO: 46184 - DNA, 25 bp, probe
aggtcttcactctttcttctttgta

SEQ ID NO: 46185 - DNA, 25 bp, probe
tcaggtcttcactctttcttctttg

SEQ ID NO: 46186 - DNA, 25 bp, probe
caggtcttcactctttcttctttgt

SEQ ID NO: 46187 - DNA, 25 bp, probe
ggtcttcactctttcttctttgtaa

SEQ ID NO: 46188 - DNA, 25 bp, probe
ttcactctttcttctttgtaaacca

SEQ ID NO: 46189 - DNA, 25 bp, probe
aattagttggctggacattgataaa

SEQ ID NO: 46190 - DNA, 25 bp, probe
aaattagttggctggacattgataa

SEQ ID NO: 46191 - DNA, 25 bp, probe
tcactctttcttctttgtaaaccat

SEQ ID NO: 46192 - DNA, 25 bp, probe
cttcactctttcttctttgtaaacc

SEQ ID NO: 46193 - DNA, 25 bp, probe
tcttctttgtaaaccatgtcatgtg

SEQ ID NO: 46194 - DNA, 25 bp, probe
cctcaggtcttcactctttcttctt

SEQ ID NO: 46195 - DNA, 25 bp, probe
tctttcttctttgtaaaccatgtca

SEQ ID NO: 46196 - DNA, 25 bp, probe
actctttcttctttgtaaaccatgt

SEQ ID NO: 46197 - DNA, 25 bp, probe
ttcttctttgtaaaccatgtcatgt

SEQ ID NO: 46198 - DNA, 25 bp, probe
cactctttcttctttgtaaaccatg

SEQ ID NO: 46199 - DNA, 25 bp, probe
cttggctgtagctttctctcatata

SEQ ID NO: 46200 - DNA, 25 bp, probe
ctctttcttctttgtaaaccatgtc

SEQ ID NO: 46201 - DNA, 25 bp, probe
tcttcactctttcttctttgtaaac

SEQ ID NO: 46202 - DNA, 25 bp, probe
gtcttcactctttcttctttgtaaa

SEQ ID NO: 46203 - DNA, 25 bp, probe
ttggctgtagctttctctcatatat

SEQ ID NO: 46204 - DNA, 25 bp, probe
tttcttctttgtaaaccatgtcatg

SEQ ID NO: 46205 - DNA, 25 bp, probe
ctttcttctttgtaaaccatgtcat

SEQ ID NO: 46206 - DNA, 25 bp, probe
tggctgtagctttctctcatatata

SEQ ID NO: 46207 - DNA, 25 bp, probe
cttgtttgagctgttactacattgt

SEQ ID NO: 46208 - DNA, 25 bp, probe
tcttgtttgagctgttactacattg

SEQ ID NO: 46209 - DNA, 25 bp, probe
aaaccatgtcatgtggaaagatttc

SEQ ID NO: 46210 - DNA, 25 bp, probe
gtaaaccatgtcatgtggaaagatt

SEQ ID NO: 46211 - DNA, 25 bp, probe
tttgtaaaccatgtcatgtggaaag

SEQ ID NO: 46212 - DNA, 25 bp, probe
ctttgtaaaccatgtcatgtggaaa

SEQ ID NO: 46213 - DNA, 25 bp, probe
tgtttgagctgttactacattgtac

SEQ ID NO: 46214 - DNA, 25 bp, probe
tgtaaaccatgtcatgtggaaagat

SEQ ID NO: 46215 - DNA, 25 bp, probe
cttctttgtaaaccatgtcatgtgg

SEQ ID NO: 46216 - DNA, 25 bp, probe
ttgtaaaccatgtcatgtggaaaga

SEQ ID NO: 46217 - DNA, 25 bp, probe
tctttgtaaaccatgtcatgtggaa

SEQ ID NO: 46218 - DNA, 25 bp, probe
ttctttgtaaaccatgtcatgtgga

SEQ ID NO: 46219 - DNA, 25 bp, probe
taaaccatgtcatgtggaaagattt

SEQ ID NO: 46220 - DNA, 25 bp, probe
ttcttgtttgagctgttactacatt

SEQ ID NO: 46221 - DNA, 25 bp, probe
tttcttgtttgagctgttactacat

SEQ ID NO: 46222 - DNA, 25 bp, probe
gtgcataggagcaattaggatctaa

SEQ ID NO: 46223 - DNA, 25 bp, probe
ctgttactacattgtacatggcatg

SEQ ID NO: 46224 - DNA, 25 bp, probe
ttgtttgagctgttactacattgta

SEQ ID NO: 46225 - DNA, 25 bp, probe
tgagctgttactacattgtacatgg

SEQ ID NO: 46226 - DNA, 25 bp, probe
tgtgcataggagcaattaggatcta

SEQ ID NO: 46227 - DNA, 25 bp, probe
catcatcatctctgcaagactcatc

SEQ ID NO: 46228 - DNA, 25 bp, probe
tcatcatcatctctgcaagactcat

SEQ ID NO: 46229 - DNA, 25 bp, probe
ttcatcatcatctctgcaagactca

SEQ ID NO: 46230 - DNA, 25 bp, probe
atctttgacttctcccactccctaa

SEQ ID NO: 46231 - DNA, 25 bp, probe
atcatcatctctgcaagactcatcg

SEQ ID NO: 46232 - DNA, 25 bp, probe
tttcatcatcatctctgcaagactc

SEQ ID NO: 46233 - DNA, 25 bp, probe
ctttcatcatcatctctgcaagact

SEQ ID NO: 46234 - DNA, 25 bp, probe
catctttgacttctcccactcccta

SEQ ID NO: 46235 - DNA, 25 bp, probe
tctttgacttctcccactccctaag

SEQ ID NO: 46236 - DNA, 25 bp, probe
caagagaaaaggaaagtagaacagc

SEQ ID NO: 46237 - DNA, 25 bp, probe
ccaagagaaaaggaaagtagaacag

SEQ ID NO: 46238 - DNA, 25 bp, probe
ctacacagcccttgttctcatcaat

SEQ ID NO: 46239 - DNA, 25 bp, probe
cctttcatcatcatctctgcaagac

SEQ ID NO: 46240 - DNA, 25 bp, probe
tacacagcccttgttctcatcaatg

SEQ ID NO: 46241 - DNA, 25 bp, probe
tcatcagctccatctttgacttctc

SEQ ID NO: 46242 - DNA, 25 bp, probe
ctcatcagctccatctttgacttct

SEQ ID NO: 46243 - DNA, 25 bp, probe
tctacacagcccttgttctcatcaa

SEQ ID NO: 46244 - DNA, 25 bp, probe
aagagaaaaggaaagtagaacagct

SEQ ID NO: 46245 - DNA, 25 bp, probe
tccaagagaaaaggaaagtagaaca

SEQ ID NO: 46246 - DNA, 25 bp, probe
ctccaagagaaaaggaaagtagaac

SEQ ID NO: 46247 - DNA, 25 bp, probe
gctccaagagaaaaggaaagtagaa

SEQ ID NO: 46248 - DNA, 25 bp, probe
catcagctccatctttgacttctcc

SEQ ID NO: 46249 - DNA, 25 bp, probe
ctccatctttgacttctcccactcc

SEQ ID NO: 46250 - DNA, 25 bp, probe
gcctttcatcatcatctctgcaaga

SEQ ID NO: 46251 - DNA, 25 bp, probe
ctctacacagcccttgttctcatca

SEQ ID NO: 46252 - DNA, 25 bp, probe
ggctccaagagaaaaggaaagtaga

SEQ ID NO: 46253 - DNA, 25 bp, probe
tcatcatctctgcaagactcatcgc

SEQ ID NO: 46254 - DNA, 25 bp, probe
gctccatctttgacttctcccactc

SEQ ID NO: 46255 - DNA, 25 bp, probe
atcagctccatctttgacttctccc

SEQ ID NO: 46256 - DNA, 25 bp, probe
cctctacacagcccttgttctcatc

SEQ ID NO: 46257 - DNA, 25 bp, probe
ctttgacttctcccactccctaagt

SEQ ID NO: 46258 - DNA, 25 bp, probe
gggctccaagagaaaaggaaagtag

SEQ ID NO: 46259 - DNA, 25 bp, probe
gctcatcagctccatctttgacttc

SEQ ID NO: 46260 - DNA, 25 bp, probe
agggctccaagagaaaaggaaagta

SEQ ID NO: 46261 - DNA, 25 bp, probe
ggcctttcatcatcatctctgcaag

SEQ ID NO: 46262 - DNA, 25 bp, probe
cttgcacttttccgaggatgagatt

SEQ ID NO: 46263 - DNA, 25 bp, probe
ctcacccttttcctttcccatgaac

SEQ ID NO: 46264 - DNA, 25 bp, probe
ttgcacttttccgaggatgagattg

SEQ ID NO: 46265 - DNA, 25 bp, probe
cagctccatctttgacttctcccac

SEQ ID NO: 46266 - DNA, 25 bp, probe
tggcctttcatcatcatctctgcaa

SEQ ID NO: 46267 - DNA, 25 bp, probe
tacaatctggagctggcctttcatc

SEQ ID NO: 46268 - DNA, 25 bp, probe
agctggcctttcatcatcatctctg

SEQ ID NO: 46269 - DNA, 25 bp, probe
gagctggcctttcatcatcatctct

SEQ ID NO: 46270 - DNA, 25 bp, probe
tttgacttctcccactccctaagtg

SEQ ID NO: 46271 - DNA, 25 bp, probe
ctgccatcttcattgctcaagttaa

SEQ ID NO: 46272 - DNA, 25 bp, probe
ccatcttcattgctcaagttaacaa

SEQ ID NO: 46273 - DNA, 25 bp, probe
catcttcattgctcaagttaacaac

SEQ ID NO: 46274 - DNA, 25 bp, probe
gctgccatcttcattgctcaagtta

SEQ ID NO: 46275 - DNA, 25 bp, probe
gccatcttcattgctcaagttaaca

SEQ ID NO: 46276 - DNA, 25 bp, probe
tgccatcttcattgctcaagttaac

SEQ ID NO: 46277 - DNA, 25 bp, probe
gtcagatcacaaccatcagcatcac

SEQ ID NO: 46278 - DNA, 25 bp, probe
ttcattgctcaagttaacaactacg

SEQ ID NO: 46279 - DNA, 25 bp, probe
cattgctcaagttaacaactacgag

SEQ ID NO: 46280 - DNA, 25 bp, probe
tcattgctcaagttaacaactacga

SEQ ID NO: 46281 - DNA, 25 bp, probe
atcttcattgctcaagttaacaact

SEQ ID NO: 46282 - DNA, 25 bp, probe
cttcattgctcaagttaacaactac

SEQ ID NO: 46283 - DNA, 25 bp, probe
tcttcattgctcaagttaacaacta

SEQ ID NO: 46284 - DNA, 25 bp, probe
ggtcagatcacaaccatcagcatca

SEQ ID NO: 46285 - DNA, 25 bp, probe
ctcaagttaacaactacgagctcaa

SEQ ID NO: 46286 - DNA, 25 bp, probe
tcaagttaacaactacgagctcaac

SEQ ID NO: 46287 - DNA, 25 bp, probe
gttaacaactacgagctcaacctgg

SEQ ID NO: 46288 - DNA, 25 bp, probe
aagttaacaactacgagctcaacct

SEQ ID NO: 46289 - DNA, 25 bp, probe
caagttaacaactacgagctcaacc

SEQ ID NO: 46290 - DNA, 25 bp, probe
agttaacaactacgagctcaacctg

SEQ ID NO: 46291 - DNA, 25 bp, probe
ttaacaactacgagctcaacctggg

SEQ ID NO: 46292 - DNA, 25 bp, probe
ataggtataagtggtgtgtgtatgc

SEQ ID NO: 46293 - DNA, 25 bp, probe
gtgataggtataagtggtgtgtgta

SEQ ID NO: 46294 - DNA, 25 bp, probe
aatgtgtgtgtgcttatgtatgagg

SEQ ID NO: 46295 - DNA, 25 bp, probe
tgataggtataagtggtgtgtgtat

SEQ ID NO: 46296 - DNA, 25 bp, probe
gataggtataagtggtgtgtgtatg

SEQ ID NO: 46297 - DNA, 25 bp, probe
tgtgtgtgtgcttatgtatgaggta

SEQ ID NO: 46298 - DNA, 25 bp, probe
ggtgataggtataagtggtgtgtgt

SEQ ID NO: 46299 - DNA, 25 bp, probe
tggtgataggtataagtggtgtgtg

SEQ ID NO: 46300 - DNA, 25 bp, probe
gtggtgataggtataagtggtgtgt

SEQ ID NO: 46301 - DNA, 25 bp, probe
gtgtgtgtgcttatgtatgaggtac

SEQ ID NO: 46302 - DNA, 25 bp, probe
atgtgtgtgtgcttatgtatgaggt

SEQ ID NO: 46303 - DNA, 25 bp, probe
taggtataagtggtgtgtgtatgcg

SEQ ID NO: 46304 - DNA, 25 bp, probe
ggtggtgataggtataagtggtgtg

SEQ ID NO: 46305 - DNA, 25 bp, probe
gtggtggtgataggtataagtggtg

SEQ ID NO: 46306 - DNA, 25 bp, probe
taactccatgtctctgagcattaga

SEQ ID NO: 46307 - DNA, 25 bp, probe
gagtagctgagattataggcaccta

SEQ ID NO: 46308 - DNA, 25 bp, probe
tggtggtgataggtataagtggtgt

SEQ ID NO: 46309 - DNA, 25 bp, probe
ctaactccatgtctctgagcattag

SEQ ID NO: 46310 - DNA, 25 bp, probe
actccatgtctctgagcattagatt

SEQ ID NO: 46311 - DNA, 25 bp, probe
aactccatgtctctgagcattagat

SEQ ID NO: 46312 - DNA, 25 bp, probe
aaatgtgtgtgtgcttatgtatgag

SEQ ID NO: 46313 - DNA, 25 bp, probe
aatacctcccttagaagtttgttgt

SEQ ID NO: 46314 - DNA, 25 bp, probe
atacctcccttagaagtttgttgtg

SEQ ID NO: 46315 - DNA, 25 bp, probe
cctaactccatgtctctgagcatta

SEQ ID NO: 46316 - DNA, 25 bp, probe
catttgccaataataatacctccct

SEQ ID NO: 46317 - DNA, 25 bp, probe
tcatttgccaataataatacctccc

SEQ ID NO: 46318 - DNA, 25 bp, probe
tgccaataataatacctcccttaga

SEQ ID NO: 46319 - DNA, 25 bp, probe
tataagtggtgtgtgtatgcgtgtg

SEQ ID NO: 46320 - DNA, 25 bp, probe
gtataagtggtgtgtgtatgcgtgt

SEQ ID NO: 46321 - DNA, 25 bp, probe
tacctcccttagaagtttgttgtga

SEQ ID NO: 46322 - DNA, 25 bp, probe
tagctgagattataggcacctacca

SEQ ID NO: 46323 - DNA, 25 bp, probe
tgtgtgcttatgtatgaggtacaac

SEQ ID NO: 46324 - DNA, 25 bp, probe
gtgtgtgcttatgtatgaggtacaa

SEQ ID NO: 46325 - DNA, 25 bp, probe
ggtggtggtgataggtataagtggt

SEQ ID NO: 46326 - DNA, 25 bp, probe
gttctgctttcctcttcctgaattt

SEQ ID NO: 46327 - DNA, 25 bp, probe
taatacctcccttagaagtttgttg

SEQ ID NO: 46328 - DNA, 25 bp, probe
atttgccaataataatacctccctt

SEQ ID NO: 46329 - DNA, 25 bp, probe
gtgtgcttatgtatgaggtacaacc

SEQ ID NO: 46330 - DNA, 25 bp, probe
ttgccaataataatacctcccttag

SEQ ID NO: 46331 - DNA, 25 bp, probe
ctgagattataggcacctaccacca

SEQ ID NO: 46332 - DNA, 25 bp, probe
gccaataataatacctcccttagaa

SEQ ID NO: 46333 - DNA, 25 bp, probe
cttcagggagtgagggattatcttt

SEQ ID NO: 46334 - DNA, 25 bp, probe
ccatgtctctgagcattagatttct

SEQ ID NO: 46335 - DNA, 25 bp, probe
tccatgtctctgagcattagatttc

SEQ ID NO: 46336 - DNA, 25 bp, probe
aatctgtcacatcgtactcaatacc

SEQ ID NO: 46337 - DNA, 25 bp, probe
atctgtcacatcgtactcaatacca

SEQ ID NO: 46338 - DNA, 25 bp, probe
tgtcacatcgtactcaataccactt

SEQ ID NO: 46339 - DNA, 25 bp, probe
ctgtcacatcgtactcaataccact

SEQ ID NO: 46340 - DNA, 25 bp, probe
tctgtcacatcgtactcaataccac

SEQ ID NO: 46341 - DNA, 25 bp, probe
agttacccagagagatgagattgat

SEQ ID NO: 46342 - DNA, 25 bp, probe
ctcaataccactttctgtctccaaa

SEQ ID NO: 46343 - DNA, 25 bp, probe
tactcaataccactttctgtctcca

SEQ ID NO: 46344 - DNA, 25 bp, probe
tcaataccactttctgtctccaaac

SEQ ID NO: 46345 - DNA, 25 bp, probe
gagttacccagagagatgagattga

SEQ ID NO: 46346 - DNA, 25 bp, probe
actcaataccactttctgtctccaa

SEQ ID NO: 46347 - DNA, 25 bp, probe
gttacccagagagatgagattgatc

SEQ ID NO: 46348 - DNA, 25 bp, probe
atcgtactcaataccactttctgtc

SEQ ID NO: 46349 - DNA, 25 bp, probe
gtactcaataccactttctgtctcc

SEQ ID NO: 46350 - DNA, 25 bp, probe
catcgtactcaataccactttctgt

SEQ ID NO: 46351 - DNA, 25 bp, probe
acatcgtactcaataccactttctg

SEQ ID NO: 46352 - DNA, 25 bp, probe
cacatcgtactcaataccactttct

SEQ ID NO: 46353 - DNA, 25 bp, probe
tcacatcgtactcaataccactttc

SEQ ID NO: 46354 - DNA, 25 bp, probe
ggaaatctgtcacatcgtactcaat

SEQ ID NO: 46355 - DNA, 25 bp, probe
gtcacatcgtactcaataccacttt

SEQ ID NO: 46356 - DNA, 25 bp, probe
ggagttacccagagagatgagattg

SEQ ID NO: 46357 - DNA, 25 bp, probe
cgtactcaataccactttctgtctc

SEQ ID NO: 46358 - DNA, 25 bp, probe
aaatctgtcacatcgtactcaatac

SEQ ID NO: 46359 - DNA, 25 bp, probe
gaaatctgtcacatcgtactcaata

SEQ ID NO: 46360 - DNA, 25 bp, probe
tcgtactcaataccactttctgtct

SEQ ID NO: 46361 - DNA, 25 bp, probe
aataccactttctgtctccaaacac

SEQ ID NO: 46362 - DNA, 25 bp, probe
caataccactttctgtctccaaaca

SEQ ID NO: 46363 - DNA, 25 bp, probe
tggaaatctgtcacatcgtactcaa

SEQ ID NO: 46364 - DNA, 25 bp, probe
ataccactttctgtctccaaacaca

SEQ ID NO: 46365 - DNA, 25 bp, probe
taccactttctgtctccaaacacaa

SEQ ID NO: 46366 - DNA, 25 bp, probe
tggagttacccagagagatgagatt

SEQ ID NO: 46367 - DNA, 25 bp, probe
accactttctgtctccaaacacaaa

SEQ ID NO: 46368 - DNA, 25 bp, probe
gtggaaatctgtcacatcgtactca

SEQ ID NO: 46369 - DNA, 25 bp, probe
tttctgtctccaaacacaaaacttc

SEQ ID NO: 46370 - DNA, 25 bp, probe
ctttctgtctccaaacacaaaactt

SEQ ID NO: 46371 - DNA, 25 bp, probe
gtctccaaacacaaaacttcctctg

SEQ ID NO: 46372 - DNA, 25 bp, probe
actttctgtctccaaacacaaaact

SEQ ID NO: 46373 - DNA, 25 bp, probe
cactttctgtctccaaacacaaaac

SEQ ID NO: 46374 - DNA, 25 bp, probe
ttacccagagagatgagattgatca

SEQ ID NO: 46375 - DNA, 25 bp, probe
ggtttctgtatgcgaagttgctagg

SEQ ID NO: 46376 - DNA, 25 bp, probe
ttctgtctccaaacacaaaacttcc

SEQ ID NO: 46377 - DNA, 25 bp, probe
tacccagagagatgagattgatcag

SEQ ID NO: 46378 - DNA, 25 bp, probe
actgactctgcaaagctacatcaag

SEQ ID NO: 46379 - DNA, 25 bp, probe
ccactttctgtctccaaacacaaaa

SEQ ID NO: 46380 - DNA, 25 bp, probe
aattacggacattcaatcatcacca

SEQ ID NO: 46381 - DNA, 25 bp, probe
attacggacattcaatcatcaccac

SEQ ID NO: 46382 - DNA, 25 bp, probe
ccagatcaacagactcttctacatt

SEQ ID NO: 46383 - DNA, 25 bp, probe
agagttgtattcaatcttggcaata

SEQ ID NO: 46384 - DNA, 25 bp, probe
aattgttatcctgtctccagataga

SEQ ID NO: 46385 - DNA, 25 bp, probe
gagttgtattcaatcttggcaataa

SEQ ID NO: 46386 - DNA, 25 bp, probe
ggaatgttggctgaatgcttgttaa

SEQ ID NO: 46387 - DNA, 25 bp, probe
gaattacggacattcaatcatcacc

SEQ ID NO: 46388 - DNA, 25 bp, probe
gagatgctgatgtcatggagagtaa

SEQ ID NO: 46389 - DNA, 25 bp, probe
acataaaggatagagaggcagtaga

SEQ ID NO: 46390 - DNA, 25 bp, probe
taaaggatagagaggcagtagagaa

SEQ ID NO: 46391 - DNA, 25 bp, probe
taaagcaaacataatggcaacagaa

SEQ ID NO: 46392 - DNA, 25 bp, probe
ataaagcaaacataatggcaacaga

SEQ ID NO: 46393 - DNA, 25 bp, probe
ataaaggatagagaggcagtagaga

SEQ ID NO: 46394 - DNA, 25 bp, probe
cataaaggatagagaggcagtagag

SEQ ID NO: 46395 - DNA, 25 bp, probe
gcaataaagcaaacataatggcaac

SEQ ID NO: 46396 - DNA, 25 bp, probe
aaagcaaacataatggcaacagaaa

SEQ ID NO: 46397 - DNA, 25 bp, probe
caataaagcaaacataatggcaaca

SEQ ID NO: 46398 - DNA, 25 bp, probe
aaggatagagaggcagtagagaagc

SEQ ID NO: 46399 - DNA, 25 bp, probe
aaaggatagagaggcagtagagaag

SEQ ID NO: 46400 - DNA, 25 bp, probe
aataaagcaaacataatggcaacag

SEQ ID NO: 46401 - DNA, 25 bp, probe
acaatacataaaggatagagaggca

SEQ ID NO: 46402 - DNA, 25 bp, probe
aatacataaaggatagagaggcagt

SEQ ID NO: 46403 - DNA, 25 bp, probe
ggatgcctcaggaaataacaaataa

SEQ ID NO: 46404 - DNA, 25 bp, probe
attcatataacaaacagaggatgcc

SEQ ID NO: 46405 - DNA, 25 bp, probe
tgtattcaatcttggcaataaagca

SEQ ID NO: 46406 - DNA, 25 bp, probe
tcaatcttggcaataaagcaaacat

SEQ ID NO: 46407 - DNA, 25 bp, probe
cttggcaataaagcaaacataatgg

SEQ ID NO: 46408 - DNA, 25 bp, probe
tacataaaggatagagaggcagtag

SEQ ID NO: 46409 - DNA, 25 bp, probe
ttcaatcttggcaataaagcaaaca

SEQ ID NO: 46410 - DNA, 25 bp, probe
caatacataaaggatagagaggcag

SEQ ID NO: 46411 - DNA, 25 bp, probe
gacaatacataaaggatagagaggc

SEQ ID NO: 46412 - DNA, 25 bp, probe
attcaatcttggcaataaagcaaac

SEQ ID NO: 46413 - DNA, 25 bp, probe
ggcaataaagcaaacataatggcaa

SEQ ID NO: 46414 - DNA, 25 bp, probe
agtgtaaatctaagcgactgagaaa

SEQ ID NO: 46415 - DNA, 25 bp, probe
gaaattcagtgtaaatctaagcgac

SEQ ID NO: 46416 - DNA, 25 bp, probe
aagagttgtattcaatcttggcaat

SEQ ID NO: 46417 - DNA, 25 bp, probe
tcttggcaataaagcaaacataatg

SEQ ID NO: 46418 - DNA, 25 bp, probe
caatcttggcaataaagcaaacata

SEQ ID NO: 46419 - DNA, 25 bp, probe
tttcctttatttcacttgtacccag

SEQ ID NO: 46420 - DNA, 25 bp, probe
ctttcctttatttcacttgtaccca

SEQ ID NO: 46421 - DNA, 25 bp, probe
actttcctttatttcacttgtaccc

SEQ ID NO: 46422 - DNA, 25 bp, probe
cgaaatagtggtatctctgatgaat

SEQ ID NO: 46423 - DNA, 25 bp, probe
gtattcaatcttggcaataaagcaa

SEQ ID NO: 46424 - DNA, 25 bp, probe
gatttaacttgggtaacatggcttg

SEQ ID NO: 46425 - DNA, 25 bp, probe
agatttaacttgggtaacatggctt

SEQ ID NO: 46426 - DNA, 25 bp, probe
gggaccaagagaaagaagcagatat

SEQ ID NO: 46427 - DNA, 25 bp, probe
gagatttaacttgggtaacatggct

SEQ ID NO: 46428 - DNA, 25 bp, probe
agagatttaacttgggtaacatggc

SEQ ID NO: 46429 - DNA, 25 bp, probe
aagagatttaacttgggtaacatgg

SEQ ID NO: 46430 - DNA, 25 bp, probe
atttaacttgggtaacatggcttgg

SEQ ID NO: 46431 - DNA, 25 bp, probe
agggaccaagagaaagaagcagata

SEQ ID NO: 46432 - DNA, 25 bp, probe
agagaaagaagcagatatccaaagg

SEQ ID NO: 46433 - DNA, 25 bp, probe
ccaagagaaagaagcagatatccaa

SEQ ID NO: 46434 - DNA, 25 bp, probe
caagagaaagaagcagatatccaaa

SEQ ID NO: 46435 - DNA, 25 bp, probe
gaccaagagaaagaagcagatatcc

SEQ ID NO: 46436 - DNA, 25 bp, probe
ggaccaagagaaagaagcagatatc

SEQ ID NO: 46437 - DNA, 25 bp, probe
gagaaagaagcagatatccaaaggg

SEQ ID NO: 46438 - DNA, 25 bp, probe
aagagaaagaagcagatatccaaag

SEQ ID NO: 46439 - DNA, 25 bp, probe
aaagagatttaacttgggtaacatg

SEQ ID NO: 46440 - DNA, 25 bp, probe
accaagagaaagaagcagatatcca

SEQ ID NO: 46441 - DNA, 25 bp, probe
gaaagaagcagatatccaaagggtg

SEQ ID NO: 46442 - DNA, 25 bp, probe
agaaagaagcagatatccaaagggt

SEQ ID NO: 46443 - DNA, 25 bp, probe
ttcctgggttttctcattgtctttt

SEQ ID NO: 46444 - DNA, 25 bp, probe
cactttggactgctgcttctcttag

SEQ ID NO: 46445 - DNA, 25 bp, probe
cttcctgggttttctcattgtcttt

SEQ ID NO: 46446 - DNA, 25 bp, probe
ctatgctcctgggatacgctatgaa

SEQ ID NO: 46447 - DNA, 25 bp, probe
ttgcatcagtactttgtatgggata

SEQ ID NO: 46448 - DNA, 25 bp, probe
tgcatcagtactttgtatgggatat

SEQ ID NO: 46449 - DNA, 25 bp, probe
tttgcatcagtactttgtatgggat

SEQ ID NO: 46450 - DNA, 25 bp, probe
tcactttggactgctgcttctctta

SEQ ID NO: 46451 - DNA, 25 bp, probe
ctcctgggatacgctatgaactctc

SEQ ID NO: 46452 - DNA, 25 bp, probe
tatgctcctgggatacgctatgaac

SEQ ID NO: 46453 - DNA, 25 bp, probe
tttaacttgggtaacatggcttggg

SEQ ID NO: 46454 - DNA, 25 bp, probe
gcatcagtactttgtatgggatatt

SEQ ID NO: 46455 - DNA, 25 bp, probe
acttcctgggttttctcattgtctt

SEQ ID NO: 46456 - DNA, 25 bp, probe
taaagagatttaacttgggtaacat

SEQ ID NO: 46457 - DNA, 25 bp, probe
aacttcctgggttttctcattgtct

SEQ ID NO: 46458 - DNA, 25 bp, probe
caacttcctgggttttctcattgtc

SEQ ID NO: 46459 - DNA, 25 bp, probe
cagggaccaagagaaagaagcagat

SEQ ID NO: 46460 - DNA, 25 bp, probe
ttctcttagctcctctgcctctgaa

SEQ ID NO: 46461 - DNA, 25 bp, probe
ctgggatacgctatgaactctcacc

SEQ ID NO: 46462 - DNA, 25 bp, probe
cctgggatacgctatgaactctcac

SEQ ID NO: 46463 - DNA, 25 bp, probe
cttctcttagctcctctgcctctga

SEQ ID NO: 46464 - DNA, 25 bp, probe
tcctgggatacgctatgaactctca

SEQ ID NO: 46465 - DNA, 25 bp, probe
ctcactttggactgctgcttctctt

SEQ ID NO: 46466 - DNA, 25 bp, probe
ttttgcatcagtactttgtatggga

SEQ ID NO: 46467 - DNA, 25 bp, probe
ttaaagagatttaacttgggtaaca

SEQ ID NO: 46468 - DNA, 25 bp, probe
gaagatggttattaacactgtgctg

SEQ ID NO: 46469 - DNA, 25 bp, probe
ctgaagatggttattaacactgtgc

SEQ ID NO: 46470 - DNA, 25 bp, probe
tgaagatggttattaacactgtgct

SEQ ID NO: 46471 - DNA, 25 bp, probe
tctctctgatgtactgtggattgta

SEQ ID NO: 46472 - DNA, 25 bp, probe
tattgtgtctctctctgatgtactg

SEQ ID NO: 46473 - DNA, 25 bp, probe
attgtgtctctctctgatgtactgt

SEQ ID NO: 46474 - DNA, 25 bp, probe
tctgaagatggttattaacactgtg

SEQ ID NO: 46475 - DNA, 25 bp, probe
tctctctctgatgtactgtggattg

SEQ ID NO: 46476 - DNA, 25 bp, probe
gtctctctctgatgtactgtggatt

SEQ ID NO: 46477 - DNA, 25 bp, probe
ttattgtgtctctctctgatgtact

SEQ ID NO: 46478 - DNA, 25 bp, probe
aagatggttattaacactgtgctgt

SEQ ID NO: 46479 - DNA, 25 bp, probe
ctctctctgatgtactgtggattgt

SEQ ID NO: 46480 - DNA, 25 bp, probe
ttgtgtctctctctgatgtactgtg

SEQ ID NO: 46481 - DNA, 25 bp, probe
ttctgaagatggttattaacactgt

SEQ ID NO: 46482 - DNA, 25 bp, probe
attattgtgtctctctctgatgtac

SEQ ID NO: 46483 - DNA, 25 bp, probe
tgtctctctctgatgtactgtggat

SEQ ID NO: 46484 - DNA, 25 bp, probe
ttattattgtgtctctctctgatgt

SEQ ID NO: 46485 - DNA, 25 bp, probe
caagattcagcagtcagatgtttac

SEQ ID NO: 46486 - DNA, 25 bp, probe
aaatatgttatcttctttgcctgcc

SEQ ID NO: 46487 - DNA, 25 bp, probe
tggaatggctttgtaataatcagtc

SEQ ID NO: 46488 - DNA, 25 bp, probe
ggaatggctttgtaataatcagtct

SEQ ID NO: 46489 - DNA, 25 bp, probe
ccaagattcagcagtcagatgttta

SEQ ID NO: 46490 - DNA, 25 bp, probe
ttggaatggctttgtaataatcagt

SEQ ID NO: 46491 - DNA, 25 bp, probe
aatcaagtatttgtccagcctattg

SEQ ID NO: 46492 - DNA, 25 bp, probe
caatcaagtatttgtccagcctatt

SEQ ID NO: 46493 - DNA, 25 bp, probe
aagattcagcagtcagatgtttact

SEQ ID NO: 46494 - DNA, 25 bp, probe
tttggaatggctttgtaataatcag

SEQ ID NO: 46495 - DNA, 25 bp, probe
ctttggaatggctttgtaataatca

SEQ ID NO: 46496 - DNA, 25 bp, probe
actttggaatggctttgtaataatc

SEQ ID NO: 46497 - DNA, 25 bp, probe
gaaacatgggcacaatcaagtattt

SEQ ID NO: 46498 - DNA, 25 bp, probe
gtgtctctctctgatgtactgtgga

SEQ ID NO: 46499 - DNA, 25 bp, probe
atcaagtatttgtccagcctattgc

SEQ ID NO: 46500 - DNA, 25 bp, probe
attacctattatttgctgttcttgc

SEQ ID NO: 46501 - DNA, 25 bp, probe
tattattgtgtctctctctgatgta

SEQ ID NO: 46502 - DNA, 25 bp, probe
tttaactttggaatggctttgtaat

SEQ ID NO: 46503 - DNA, 25 bp, probe
atttaactttggaatggctttgtaa

SEQ ID NO: 46504 - DNA, 25 bp, probe
tgtgtctctctctgatgtactgtgg

SEQ ID NO: 46505 - DNA, 25 bp, probe
ctctctgatgtactgtggattgtac

SEQ ID NO: 46506 - DNA, 25 bp, probe
aaggaagtgttgctctcattgtgtg

SEQ ID NO: 46507 - DNA, 25 bp, probe
aactttggaatggctttgtaataat

SEQ ID NO: 46508 - DNA, 25 bp, probe
aaacatgggcacaatcaagtatttg

SEQ ID NO: 46509 - DNA, 25 bp, probe
acccatcctttgccttatctaacaa

SEQ ID NO: 46510 - DNA, 25 bp, probe
gaatggctttgtaataatcagtctt

SEQ ID NO: 46511 - DNA, 25 bp, probe
cacacctattacctattatttgctg

SEQ ID NO: 46512 - DNA, 25 bp, probe
gctaagcattattattcaactggtc

SEQ ID NO: 46513 - DNA, 25 bp, probe
agctaagcattattattcaactggt

SEQ ID NO: 46514 - DNA, 25 bp, probe
gtaaagcagataggaatgtatgtgt

SEQ ID NO: 46515 - DNA, 25 bp, probe
tgtaaagcagataggaatgtatgtg

SEQ ID NO: 46516 - DNA, 25 bp, probe
ctaagcattattattcaactggtct

SEQ ID NO: 46517 - DNA, 25 bp, probe
aatgatgtaaagcagataggaatgt

SEQ ID NO: 46518 - DNA, 25 bp, probe
aacaagtattgcagtaatcatcact

SEQ ID NO: 46519 - DNA, 25 bp, probe
aaagcagataggaatgtatgtgtac

SEQ ID NO: 46520 - DNA, 25 bp, probe
gaatgatgtaaagcagataggaatg

SEQ ID NO: 46521 - DNA, 25 bp, probe
aagcattattattcaactggtctaa

SEQ ID NO: 46522 - DNA, 25 bp, probe
attgcagtaatcatcacttacaggt

SEQ ID NO: 46523 - DNA, 25 bp, probe
ttgcagtaatcatcacttacaggta

SEQ ID NO: 46524 - DNA, 25 bp, probe
tgcagtaatcatcacttacaggtac

SEQ ID NO: 46525 - DNA, 25 bp, probe
actagcactatataattccggtcag

SEQ ID NO: 46526 - DNA, 25 bp, probe
atgtaaagcagataggaatgtatgt

SEQ ID NO: 46527 - DNA, 25 bp, probe
agaatgatgtaaagcagataggaat

SEQ ID NO: 46528 - DNA, 25 bp, probe
ttcacatttctaaatcccatcttga

SEQ ID NO: 46529 - DNA, 25 bp, probe
tttcacatttctaaatcccatcttg

SEQ ID NO: 46530 - DNA, 25 bp, probe
cagtgctgacaaataacatttaaca

SEQ ID NO: 46531 - DNA, 25 bp, probe
tcacatttctaaatcccatcttgat

SEQ ID NO: 46532 - DNA, 25 bp, probe
tgatgtaaagcagataggaatgtat

SEQ ID NO: 46533 - DNA, 25 bp, probe
atgatgtaaagcagataggaatgta

SEQ ID NO: 46534 - DNA, 25 bp, probe
cgggaatttcatttacagctacatt

SEQ ID NO: 46535 - DNA, 25 bp, probe
aaacgggaatttcatttacagctac

SEQ ID NO: 46536 - DNA, 25 bp, probe
tattgcagtaatcatcacttacagg

SEQ ID NO: 46537 - DNA, 25 bp, probe
gtgaaacctagaactcagaggattg

SEQ ID NO: 46538 - DNA, 25 bp, probe
acgggaatttcatttacagctacat

SEQ ID NO: 46539 - DNA, 25 bp, probe
ttaacttcagtcctttcttagggaa

SEQ ID NO: 46540 - DNA, 25 bp, probe
ctagcactatataattccggtcagt

SEQ ID NO: 46541 - DNA, 25 bp, probe
ggagctgtgttactagcactatata

SEQ ID NO: 46542 - DNA, 25 bp, probe
tgtgaaacctagaactcagaggatt

SEQ ID NO: 46543 - DNA, 25 bp, probe
ttgtgaaacctagaactcagaggat

SEQ ID NO: 46544 - DNA, 25 bp, probe
gatgtaaagcagataggaatgtatg

SEQ ID NO: 46545 - DNA, 25 bp, probe
aacgggaatttcatttacagctaca

SEQ ID NO: 46546 - DNA, 25 bp, probe
ctagaatgatgtaaagcagatagga

SEQ ID NO: 46547 - DNA, 25 bp, probe
tactagcactatataattccggtca

SEQ ID NO: 46548 - DNA, 25 bp, probe
tttgtgaaacctagaactcagagga

SEQ ID NO: 46549 - DNA, 25 bp, probe
taaagcagataggaatgtatgtgta

SEQ ID NO: 46550 - DNA, 25 bp, probe
tagaatgatgtaaagcagataggaa

SEQ ID NO: 46551 - DNA, 25 bp, probe
taacaagtattgcagtaatcatcac

SEQ ID NO: 46552 - DNA, 25 bp, probe
actatataattccggtcagtgctga

SEQ ID NO: 46553 - DNA, 25 bp, probe
gtgttactagcactatataattccg

SEQ ID NO: 46554 - DNA, 25 bp, probe
tgctgacaaataacatttaacaagt

SEQ ID NO: 46555 - DNA, 25 bp, probe
agtgctgacaaataacatttaacaa

SEQ ID NO: 46556 - DNA, 25 bp, probe
aacaagcaagatgaggatgaggaag

SEQ ID NO: 46557 - DNA, 25 bp, probe
acagacttccagattcactctcctt

SEQ ID NO: 46558 - DNA, 25 bp, probe
caagcaagatgaggatgaggaagtc

SEQ ID NO: 46559 - DNA, 25 bp, probe
gacagacttccagattcactctcct

SEQ ID NO: 46560 - DNA, 25 bp, probe
agacttccagattcactctcctttg

SEQ ID NO: 46561 - DNA, 25 bp, probe
cagacttccagattcactctccttt

SEQ ID NO: 46562 - DNA, 25 bp, probe
aaaggacttggaaactaacaaagcc

SEQ ID NO: 46563 - DNA, 25 bp, probe
aaacaagcaagatgaggatgaggaa

SEQ ID NO: 46564 - DNA, 25 bp, probe
acaagcaagatgaggatgaggaagt

SEQ ID NO: 46565 - DNA, 25 bp, probe
caaattctacgccacatttctgatc

SEQ ID NO: 46566 - DNA, 25 bp, probe
cacatttctgatccaggactatttc

SEQ ID NO: 46567 - DNA, 25 bp, probe
ccacatttctgatccaggactattt

SEQ ID NO: 46568 - DNA, 25 bp, probe
acatttctgatccaggactatttcc

SEQ ID NO: 46569 - DNA, 25 bp, probe
aaattctacgccacatttctgatcc

SEQ ID NO: 46570 - DNA, 25 bp, probe
catttctgatccaggactatttccg

SEQ ID NO: 46571 - DNA, 25 bp, probe
aattctacgccacatttctgatcca

SEQ ID NO: 46572 - DNA, 25 bp, probe
gcaaattctacgccacatttctgat

SEQ ID NO: 46573 - DNA, 25 bp, probe
ttcaccatcccagaagaaggaaatt

SEQ ID NO: 46574 - DNA, 25 bp, probe
gatccaggactatttccgcaaattc

SEQ ID NO: 46575 - DNA, 25 bp, probe
catcccagaagaaggaaattctcag

SEQ ID NO: 46576 - DNA, 25 bp, probe
gatgaaaaggacttggaaactaaca

SEQ ID NO: 46577 - DNA, 25 bp, probe
gatgaaacagaagctgctagatgag

SEQ ID NO: 46578 - DNA, 25 bp, probe
tcaccatcccagaagaaggaaattc

SEQ ID NO: 46579 - DNA, 25 bp, probe
agatgaaaaggacttggaaactaac

SEQ ID NO: 46580 - DNA, 25 bp, probe
gaggaagatgaaaaggacttggaaa

SEQ ID NO: 46581 - DNA, 25 bp, probe
gccacatttctgatccaggactatt

SEQ ID NO: 46582 - DNA, 25 bp, probe
aaaaggacttggaaactaacaaagc

SEQ ID NO: 46583 - DNA, 25 bp, probe
tgatcggctttcctacctagatgag

SEQ ID NO: 46584 - DNA, 25 bp, probe
ctgatcggctttcctacctagatga

SEQ ID NO: 46585 - DNA, 25 bp, probe
gaagatgaaaaggacttggaaacta

SEQ ID NO: 46586 - DNA, 25 bp, probe
ggaagatgaaaaggacttggaaact

SEQ ID NO: 46587 - DNA, 25 bp, probe
aggaagatgaaaaggacttggaaac

SEQ ID NO: 46588 - DNA, 25 bp, probe
tgaaaaggacttggaaactaacaaa

SEQ ID NO: 46589 - DNA, 25 bp, probe
tttcaccatcccagaagaaggaaat

SEQ ID NO: 46590 - DNA, 25 bp, probe
tgacacagaggaggaggaagaagag

SEQ ID NO: 46591 - DNA, 25 bp, probe
tgatccaggactatttccgcaaatt

SEQ ID NO: 46592 - DNA, 25 bp, probe
atgaaaaggacttggaaactaacaa

SEQ ID NO: 46593 - DNA, 25 bp, probe
aacagaagctgctagatgaggtcat

SEQ ID NO: 46594 - DNA, 25 bp, probe
atttctgatccaggactatttccgc

SEQ ID NO: 46595 - DNA, 25 bp, probe
aagcaagatgaggatgaggaagtcc

SEQ ID NO: 46596 - DNA, 25 bp, probe
ggacagacttccagattcactctcc

SEQ ID NO: 46597 - DNA, 25 bp, probe
aaggacttggaaactaacaaagcca

SEQ ID NO: 46598 - DNA, 25 bp, probe
gaaaaggacttggaaactaacaaag

SEQ ID NO: 46599 - DNA, 25 bp, probe
aagatgaaaaggacttggaaactaa

SEQ ID NO: 46600 - DNA, 25 bp, probe
tcactttgacaatgggaatgaggag

SEQ ID NO: 46601 - DNA, 25 bp, probe
actttgacaatgggaatgaggagtg

SEQ ID NO: 46602 - DNA, 25 bp, probe
cactttgacaatgggaatgaggagt

SEQ ID NO: 46603 - DNA, 25 bp, probe
ctttgacaatgggaatgaggagtgg

SEQ ID NO: 46604 - DNA, 25 bp, probe
ttgacaatgggaatgaggagtggtt

SEQ ID NO: 46605 - DNA, 25 bp, probe
tttgacaatgggaatgaggagtggt

SEQ ID NO: 46606 - DNA, 25 bp, probe
gaatgctgtggttgtgctcaatgtc

SEQ ID NO: 46607 - DNA, 25 bp, probe
tgacaatgggaatgaggagtggttc

SEQ ID NO: 46608 - DNA, 25 bp, probe
gagtcactttgacaatgggaatgag

SEQ ID NO: 46609 - DNA, 25 bp, probe
cagagtcactttgacaatgggaatg

SEQ ID NO: 46610 - DNA, 25 bp, probe
agagtcactttgacaatgggaatga

SEQ ID NO: 46611 - DNA, 25 bp, probe
gtcactttgacaatgggaatgagga

SEQ ID NO: 46612 - DNA, 25 bp, probe
agtcactttgacaatgggaatgagg

SEQ ID NO: 46613 - DNA, 25 bp, probe
gcagagtcactttgacaatgggaat

SEQ ID NO: 46614 - DNA, 25 bp, probe
caccagcagagtcactttgacaatg

SEQ ID NO: 46615 - DNA, 25 bp, probe
agcagagtcactttgacaatgggaa

SEQ ID NO: 46616 - DNA, 25 bp, probe
gacaatgggaatgaggagtggttcc

SEQ ID NO: 46617 - DNA, 25 bp, probe
cagcagagtcactttgacaatggga

SEQ ID NO: 46618 - DNA, 25 bp, probe
caatgggaatgaggagtggttcctg

SEQ ID NO: 46619 - DNA, 25 bp, probe
actcttcatcctcttcctcattgat

SEQ ID NO: 46620 - DNA, 25 bp, probe
cactcttcatcctcttcctcattga

SEQ ID NO: 46621 - DNA, 25 bp, probe
ccactcttcatcctcttcctcattg

SEQ ID NO: 46622 - DNA, 25 bp, probe
gtaaatcaagcagcagcaacaatag

SEQ ID NO: 46623 - DNA, 25 bp, probe
tctactccaagaagtacattgcctt

SEQ ID NO: 46624 - DNA, 25 bp, probe
agtaaatcaagcagcagcaacaata

SEQ ID NO: 46625 - DNA, 25 bp, probe
ctctactccaagaagtacattgcct

SEQ ID NO: 46626 - DNA, 25 bp, probe
aagtaaatcaagcagcagcaacaat

SEQ ID NO: 46627 - DNA, 25 bp, probe
ctcttcatcctcttcctcattgatg

SEQ ID NO: 46628 - DNA, 25 bp, probe
taaatcaagcagcagcaacaatagc

SEQ ID NO: 46629 - DNA, 25 bp, probe
cctctactccaagaagtacattgcc

SEQ ID NO: 46630 - DNA, 25 bp, probe
gaagtaaatcaagcagcagcaacaa

SEQ ID NO: 46631 - DNA, 25 bp, probe
ctactccaagaagtacattgccttc

SEQ ID NO: 46632 - DNA, 25 bp, probe
cttcatcctcttcctcattgatgtg

SEQ ID NO: 46633 - DNA, 25 bp, probe
tcttcatcctcttcctcattgatgt

SEQ ID NO: 46634 - DNA, 25 bp, probe
caagcagaagtaaatcaagcagcag

SEQ ID NO: 46635 - DNA, 25 bp, probe
cagaagtaaatcaagcagcagcaac

SEQ ID NO: 46636 - DNA, 25 bp, probe
ttcatcctcttcctcattgatgtgg

SEQ ID NO: 46637 - DNA, 25 bp, probe
agaagtaaatcaagcagcagcaaca

SEQ ID NO: 46638 - DNA, 25 bp, probe
acccaagcagaagtaaatcaagcag

SEQ ID NO: 46639 - DNA, 25 bp, probe
gacccaagcagaagtaaatcaagca

SEQ ID NO: 46640 - DNA, 25 bp, probe
cccactcttcatcctcttcctcatt

SEQ ID NO: 46641 - DNA, 25 bp, probe
aatcaagcagcagcaacaatagcag

SEQ ID NO: 46642 - DNA, 25 bp, probe
ccctctactccaagaagtacattgc

SEQ ID NO: 46643 - DNA, 25 bp, probe
tcgacccaagcagaagtaaatcaag

SEQ ID NO: 46644 - DNA, 25 bp, probe
ctcgacccaagcagaagtaaatcaa

SEQ ID NO: 46645 - DNA, 25 bp, probe
ccaagcagaagtaaatcaagcagca

SEQ ID NO: 46646 - DNA, 25 bp, probe
gacaagaacgcagcacttcagaatg

SEQ ID NO: 46647 - DNA, 25 bp, probe
caatctccctgactgctctaccatc

SEQ ID NO: 46648 - DNA, 25 bp, probe
ctcatcctgcatcatggacaagaac

SEQ ID NO: 46649 - DNA, 25 bp, probe
aaatcaagcagcagcaacaatagca

SEQ ID NO: 46650 - DNA, 25 bp, probe
gatcctctacgcacgcatctacttc

SEQ ID NO: 46651 - DNA, 25 bp, probe
aagcagaagtaaatcaagcagcagc

SEQ ID NO: 46652 - DNA, 25 bp, probe
cgacccaagcagaagtaaatcaagc

SEQ ID NO: 46653 - DNA, 25 bp, probe
gcagaagtaaatcaagcagcagcaa

SEQ ID NO: 46654 - DNA, 25 bp, probe
cccaagcagaagtaaatcaagcagc

SEQ ID NO: 46655 - DNA, 25 bp, probe
cctcttcaaggctcagtggttcatc

SEQ ID NO: 46656 - DNA, 25 bp, probe
catcctcttcaaggctcagtggttc

SEQ ID NO: 46657 - DNA, 25 bp, probe
acaatctccctgactgctctaccat

SEQ ID NO: 46658 - DNA, 25 bp, probe
cccctctactccaagaagtacattg

SEQ ID NO: 46659 - DNA, 25 bp, probe
tcatcctcttcctcattgatgtggc

SEQ ID NO: 46660 - DNA, 25 bp, probe
cctcatcctgcatcatggacaagaa

SEQ ID NO: 46661 - DNA, 25 bp, probe
aatctccctgactgctctaccatcc

SEQ ID NO: 46662 - DNA, 25 bp, probe
gtacattgccttctgcatcagcatc

SEQ ID NO: 46663 - DNA, 25 bp, probe
atgttcaattacttcctctctctgg

SEQ ID NO: 46664 - DNA, 25 bp, probe
ctcttcaagttcaaccactgttaag

SEQ ID NO: 46665 - DNA, 25 bp, probe
tactcttcaagttcaaccactgtta

SEQ ID NO: 46666 - DNA, 25 bp, probe
cttcaagttcaaccactgttaagac

SEQ ID NO: 46667 - DNA, 25 bp, probe
ctcttactcttcaagttcaaccact

SEQ ID NO: 46668 - DNA, 25 bp, probe
actcttcaagttcaaccactgttaa

SEQ ID NO: 46669 - DNA, 25 bp, probe
ttactcttcaagttcaaccactgtt

SEQ ID NO: 46670 - DNA, 25 bp, probe
aaccactgttaagacctcctattga

SEQ ID NO: 46671 - DNA, 25 bp, probe
tcaaccactgttaagacctcctatt

SEQ ID NO: 46672 - DNA, 25 bp, probe
ttcaaccactgttaagacctcctat

SEQ ID NO: 46673 - DNA, 25 bp, probe
tcttactcttcaagttcaaccactg

SEQ ID NO: 46674 - DNA, 25 bp, probe
cactgttaagacctcctattgagtt

SEQ ID NO: 46675 - DNA, 25 bp, probe
caaccactgttaagacctcctattg

SEQ ID NO: 46676 - DNA, 25 bp, probe
cttactcttcaagttcaaccactgt

SEQ ID NO: 46677 - DNA, 25 bp, probe
ttcaagttcaaccactgttaagacc

SEQ ID NO: 46678 - DNA, 25 bp, probe
catgttcaattacttcctctctctg

SEQ ID NO: 46679 - DNA, 25 bp, probe
gttcaaccactgttaagacctccta

SEQ ID NO: 46680 - DNA, 25 bp, probe
ccactgttaagacctcctattgagt

SEQ ID NO: 46681 - DNA, 25 bp, probe
accactgttaagacctcctattgag

SEQ ID NO: 46682 - DNA, 25 bp, probe
caagttcaaccactgttaagacctc

SEQ ID NO: 46683 - DNA, 25 bp, probe
gctcttactcttcaagttcaaccac

SEQ ID NO: 46684 - DNA, 25 bp, probe
tgttcaattacttcctctctctggc

SEQ ID NO: 46685 - DNA, 25 bp, probe
atctgcttcactcctagtaaccttc

SEQ ID NO: 46686 - DNA, 25 bp, probe
tcaagttcaaccactgttaagacct

SEQ ID NO: 46687 - DNA, 25 bp, probe
cttcactcctagtaaccttctgctt

SEQ ID NO: 46688 - DNA, 25 bp, probe
gatctgcttcactcctagtaacctt

SEQ ID NO: 46689 - DNA, 25 bp, probe
ttcactcctagtaaccttctgcttg

SEQ ID NO: 46690 - DNA, 25 bp, probe
tacctgatctgcttcactcctagta

SEQ ID NO: 46691 - DNA, 25 bp, probe
atgttatgaggacgtgtctgttatt

SEQ ID NO: 46692 - DNA, 25 bp, probe
aatgttatgaggacgtgtctgttat

SEQ ID NO: 46693 - DNA, 25 bp, probe
ttaatgttatgaggacgtgtctgtt

SEQ ID NO: 46694 - DNA, 25 bp, probe
taatgttatgaggacgtgtctgtta

SEQ ID NO: 46695 - DNA, 25 bp, probe
aatccagctcttactcttcaagttc

SEQ ID NO: 46696 - DNA, 25 bp, probe
ctgcttcactcctagtaaccttctg

SEQ ID NO: 46697 - DNA, 25 bp, probe
ctgatctgcttcactcctagtaacc

SEQ ID NO: 46698 - DNA, 25 bp, probe
cctgatctgcttcactcctagtaac

SEQ ID NO: 46699 - DNA, 25 bp, probe
aagttcaaccactgttaagacctcc

SEQ ID NO: 46700 - DNA, 25 bp, probe
tctgcttcactcctagtaaccttct

SEQ ID NO: 46701 - DNA, 25 bp, probe
caagtatccctcacctcaaagaaac

SEQ ID NO: 46702 - DNA, 25 bp, probe
atccagctcttactcttcaagttca

SEQ ID NO: 46703 - DNA, 25 bp, probe
ggatgtggaacctgtttaatgttat

SEQ ID NO: 46704 - DNA, 25 bp, probe
tgtggaacctgtttaatgttatgag

SEQ ID NO: 46705 - DNA, 25 bp, probe
aagtatccctcacctcaaagaaaca

SEQ ID NO: 46706 - DNA, 25 bp, probe
tgatctgcttcactcctagtaacct

SEQ ID NO: 46707 - DNA, 25 bp, probe
ggagtgtattcatcttctggcttaa

SEQ ID NO: 46708 - DNA, 25 bp, probe
tggagtgtattcatcttctggctta

SEQ ID NO: 46709 - DNA, 25 bp, probe
gtcctccagcagagtaacattattg

SEQ ID NO: 46710 - DNA, 25 bp, probe
atggtggagtgtattcatcttctgg

SEQ ID NO: 46711 - DNA, 25 bp, probe
caagaggatggtggagtgtattcat

SEQ ID NO: 46712 - DNA, 25 bp, probe
tcctccagcagagtaacattattgt

SEQ ID NO: 46713 - DNA, 25 bp, probe
tgtcctccagcagagtaacattatt

SEQ ID NO: 46714 - DNA, 25 bp, probe
gtggagtgtattcatcttctggctt

SEQ ID NO: 46715 - DNA, 25 bp, probe
gtcaagaggatggtggagtgtattc

SEQ ID NO: 46716 - DNA, 25 bp, probe
ctgtcctccagcagagtaacattat

SEQ ID NO: 46717 - DNA, 25 bp, probe
ttatgggagatacagttcagagagt

SEQ ID NO: 46718 - DNA, 25 bp, probe
caagagagcaagtagaaagaggata

SEQ ID NO: 46719 - DNA, 25 bp, probe
aagagagcaagtagaaagaggatac

SEQ ID NO: 46720 - DNA, 25 bp, probe
tatgggagatacagttcagagagtg

SEQ ID NO: 46721 - DNA, 25 bp, probe
tcaagaggatggtggagtgtattca

SEQ ID NO: 46722 - DNA, 25 bp, probe
attatgggagatacagttcagagag

SEQ ID NO: 46723 - DNA, 25 bp, probe
agagagcaagtagaaagaggatacc

SEQ ID NO: 46724 - DNA, 25 bp, probe
gagtgtattcatcttctggcttaaa

SEQ ID NO: 46725 - DNA, 25 bp, probe
aattatgggagatacagttcagaga

SEQ ID NO: 46726 - DNA, 25 bp, probe
agtgtattcatcttctggcttaaag

SEQ ID NO: 46727 - DNA, 25 bp, probe
caagcaagagagcaagtagaaagag

SEQ ID NO: 46728 - DNA, 25 bp, probe
aatcagcaagcaagagagcaagtag

SEQ ID NO: 46729 - DNA, 25 bp, probe
gagagcaagtagaaagaggataccg

SEQ ID NO: 46730 - DNA, 25 bp, probe
tgaagtgttgggattataaacctga

SEQ ID NO: 46731 - DNA, 25 bp, probe
gcaagagagcaagtagaaagaggat

SEQ ID NO: 46732 - DNA, 25 bp, probe
gaagtgttgggattataaacctgaa

SEQ ID NO: 46733 - DNA, 25 bp, probe
atgaagtgttgggattataaacctg

SEQ ID NO: 46734 - DNA, 25 bp, probe
tgatgaagtgttgggattataaacc

SEQ ID NO: 46735 - DNA, 25 bp, probe
aagcaagagagcaagtagaaagagg

SEQ ID NO: 46736 - DNA, 25 bp, probe
aatgacaaatcagcaagcaagagag

SEQ ID NO: 46737 - DNA, 25 bp, probe
gaatgacaaatcagcaagcaagaga

SEQ ID NO: 46738 - DNA, 25 bp, probe
gatgaagtgttgggattataaacct

SEQ ID NO: 46739 - DNA, 25 bp, probe
aaatcagtgactttggaatgtctcg

SEQ ID NO: 46740 - DNA, 25 bp, probe
gatggtggagtgtattcatcttctg

SEQ ID NO: 46741 - DNA, 25 bp, probe
aagtgttgggattataaacctgaaa

SEQ ID NO: 46742 - DNA, 25 bp, probe
atgggagatacagttcagagagtga

SEQ ID NO: 46743 - DNA, 25 bp, probe
gagatacagttcagagagtgacgtg

SEQ ID NO: 46744 - DNA, 25 bp, probe
tccagcagagtaacattattgttct

SEQ ID NO: 46745 - DNA, 25 bp, probe
ccagcagagtaacattattgttctc

SEQ ID NO: 46746 - DNA, 25 bp, probe
ctccagcagagtaacattattgttc

SEQ ID NO: 46747 - DNA, 25 bp, probe
cctccagcagagtaacattattgtt

SEQ ID NO: 46748 - DNA, 25 bp, probe
atcagcaagcaagagagcaagtaga

SEQ ID NO: 46749 - DNA, 25 bp, probe
cggaagctcttaattatgggagata

SEQ ID NO: 46750 - DNA, 25 bp, probe
ggtggagtgtattcatcttctggct

SEQ ID NO: 46751 - DNA, 25 bp, probe
ggacactgtggagttcaataatcat

SEQ ID NO: 46752 - DNA, 25 bp, probe
acactgtggagttcaataatcatac

SEQ ID NO: 46753 - DNA, 25 bp, probe
cactgtggagttcaataatcatact

SEQ ID NO: 46754 - DNA, 25 bp, probe
gacactgtggagttcaataatcata

SEQ ID NO: 46755 - DNA, 25 bp, probe
taattagtaagaagttccaagctcg

SEQ ID NO: 46756 - DNA, 25 bp, probe
aattagtaagaagttccaagctcgc

SEQ ID NO: 46757 - DNA, 25 bp, probe
ctccttatcacctgtttagcatttg

SEQ ID NO: 46758 - DNA, 25 bp, probe
actccttatcacctgtttagcattt

SEQ ID NO: 46759 - DNA, 25 bp, probe
tatcattggctatctcttccctttg

SEQ ID NO: 46760 - DNA, 25 bp, probe
atttgctacttgtgtctcatcttca

SEQ ID NO: 46761 - DNA, 25 bp, probe
ttatcattggctatctcttcccttt

SEQ ID NO: 46762 - DNA, 25 bp, probe
tttatcattggctatctcttccctt

SEQ ID NO: 46763 - DNA, 25 bp, probe
gactccttatcacctgtttagcatt

SEQ ID NO: 46764 - DNA, 25 bp, probe
atttatcattggctatctcttccct

SEQ ID NO: 46765 - DNA, 25 bp, probe
gtatttgctacttgtgtctcatctt

SEQ ID NO: 46766 - DNA, 25 bp, probe
ttatcacctgtttagcatttgggag

SEQ ID NO: 46767 - DNA, 25 bp, probe
cttatcacctgtttagcatttggga

SEQ ID NO: 46768 - DNA, 25 bp, probe
tccttatcacctgtttagcatttgg

SEQ ID NO: 46769 - DNA, 25 bp, probe
tatttgctacttgtgtctcatcttc

SEQ ID NO: 46770 - DNA, 25 bp, probe
ctcaggaactcagaaaccaagaatc

SEQ ID NO: 46771 - DNA, 25 bp, probe
cctttgctaacaatgagtatttgct

SEQ ID NO: 46772 - DNA, 25 bp, probe
tcttccctttgctaacaatgagtat

SEQ ID NO: 46773 - DNA, 25 bp, probe
tatctcttccctttgctaacaatga

SEQ ID NO: 46774 - DNA, 25 bp, probe
tccctttgctaacaatgagtatttg

SEQ ID NO: 46775 - DNA, 25 bp, probe
ctatctcttccctttgctaacaatg

SEQ ID NO: 46776 - DNA, 25 bp, probe
attagtaagaagttccaagctcgct

SEQ ID NO: 46777 - DNA, 25 bp, probe
tttgctacttgtgtctcatcttcaa

SEQ ID NO: 46778 - DNA, 25 bp, probe
cttccctttgctaacaatgagtatt

SEQ ID NO: 46779 - DNA, 25 bp, probe
gctatctcttccctttgctaacaat

SEQ ID NO: 46780 - DNA, 25 bp, probe
aatttatcattggctatctcttccc

SEQ ID NO: 46781 - DNA, 25 bp, probe
ccctttgctaacaatgagtatttgc

SEQ ID NO: 46782 - DNA, 25 bp, probe
attggctatctcttccctttgctaa

SEQ ID NO: 46783 - DNA, 25 bp, probe
ttccctttgctaacaatgagtattt

SEQ ID NO: 46784 - DNA, 25 bp, probe
ctcttccctttgctaacaatgagta

SEQ ID NO: 46785 - DNA, 25 bp, probe
ccttatcacctgtttagcatttggg

SEQ ID NO: 46786 - DNA, 25 bp, probe
atctcttccctttgctaacaatgag

SEQ ID NO: 46787 - DNA, 25 bp, probe
ttagtaagaagttccaagctcgctt

SEQ ID NO: 46788 - DNA, 25 bp, probe
tcaggaactcagaaaccaagaatct

SEQ ID NO: 46789 - DNA, 25 bp, probe
tttgctaacaatgagtatttgctac

SEQ ID NO: 46790 - DNA, 25 bp, probe
ggactccttatcacctgtttagcat

SEQ ID NO: 46791 - DNA, 25 bp, probe
cattggctatctcttccctttgcta

SEQ ID NO: 46792 - DNA, 25 bp, probe
ctttgctaacaatgagtatttgcta

SEQ ID NO: 46793 - DNA, 25 bp, probe
ttggctatctcttccctttgctaac

SEQ ID NO: 46794 - DNA, 25 bp, probe
tctcttccctttgctaacaatgagt

SEQ ID NO: 46795 - DNA, 25 bp, probe
gcagccgatatagagtcattatgtt

SEQ ID NO: 46796 - DNA, 25 bp, probe
gaacataagaccgcaattctaagtt

SEQ ID NO: 46797 - DNA, 25 bp, probe
atacaagaacttaggaagagtgagg

SEQ ID NO: 46798 - DNA, 25 bp, probe
tacaagaacttaggaagagtgaggt

SEQ ID NO: 46799 - DNA, 25 bp, probe
ggaacataagaccgcaattctaagt

SEQ ID NO: 46800 - DNA, 25 bp, probe
caagaacttaggaagagtgaggttg

SEQ ID NO: 46801 - DNA, 25 bp, probe
acaagaacttaggaagagtgaggtt

SEQ ID NO: 46802 - DNA, 25 bp, probe
gagaatgtcagaactcaagtgaagg

SEQ ID NO: 46803 - DNA, 25 bp, probe
ggagaatgtcagaactcaagtgaag

SEQ ID NO: 46804 - DNA, 25 bp, probe
aagaacttaggaagagtgaggttgg

SEQ ID NO: 46805 - DNA, 25 bp, probe
aatacaagaacttaggaagagtgag

SEQ ID NO: 46806 - DNA, 25 bp, probe
gaatacaagaacttaggaagagtga

SEQ ID NO: 46807 - DNA, 25 bp, probe
agaatacaagaacttaggaagagtg

SEQ ID NO: 46808 - DNA, 25 bp, probe
tgggacaagaagaaagggtatttat

SEQ ID NO: 46809 - DNA, 25 bp, probe
gtgggacaagaagaaagggtattta

SEQ ID NO: 46810 - DNA, 25 bp, probe
gccgatatagagtcattatgtttgc

SEQ ID NO: 46811 - DNA, 25 bp, probe
ggctcaccatacacaagtaaataaa

SEQ ID NO: 46812 - DNA, 25 bp, probe
atgcagccgatatagagtcattatg

SEQ ID NO: 46813 - DNA, 25 bp, probe
gggctcaccatacacaagtaaataa

SEQ ID NO: 46814 - DNA, 25 bp, probe
gggacaagaagaaagggtatttatt

SEQ ID NO: 46815 - DNA, 25 bp, probe
gaacttaggaagagtgaggttggtg

SEQ ID NO: 46816 - DNA, 25 bp, probe
aagaatacaagaacttaggaagagt

SEQ ID NO: 46817 - DNA, 25 bp, probe
acataagaccgcaattctaagtttc

SEQ ID NO: 46818 - DNA, 25 bp, probe
tgcagccgatatagagtcattatgt

SEQ ID NO: 46819 - DNA, 25 bp, probe
cataagaccgcaattctaagtttct

SEQ ID NO: 46820 - DNA, 25 bp, probe
agggctcaccatacacaagtaaata

SEQ ID NO: 46821 - DNA, 25 bp, probe
agccgatatagagtcattatgtttg

SEQ ID NO: 46822 - DNA, 25 bp, probe
cagccgatatagagtcattatgttt

SEQ ID NO: 46823 - DNA, 25 bp, probe
agaacttaggaagagtgaggttggt

SEQ ID NO: 46824 - DNA, 25 bp, probe
aacataagaccgcaattctaagttt

SEQ ID NO: 46825 - DNA, 25 bp, probe
caaagtgctcagattagagatgtga

SEQ ID NO: 46826 - DNA, 25 bp, probe
tcattcaacagaggtttatgtaggg

SEQ ID NO: 46827 - DNA, 25 bp, probe
caagtcaagactgaggatgaagagg

SEQ ID NO: 46828 - DNA, 25 bp, probe
ccaagtcaagactgaggatgaagag

SEQ ID NO: 46829 - DNA, 25 bp, probe
taagaccgcaattctaagtttctag

SEQ ID NO: 46830 - DNA, 25 bp, probe
gggaacataagaccgcaattctaag

SEQ ID NO: 46831 - DNA, 25 bp, probe
aacttaggaagagtgaggttggtgt

SEQ ID NO: 46832 - DNA, 25 bp, probe
ccaaagtgctcagattagagatgtg

SEQ ID NO: 46833 - DNA, 25 bp, probe
ttcattcaacagaggtttatgtagg

SEQ ID NO: 46834 - DNA, 25 bp, probe
tcattcattcaacagaggtttatgt

SEQ ID NO: 46835 - DNA, 25 bp, probe
ataagaccgcaattctaagtttcta

SEQ ID NO: 46836 - DNA, 25 bp, probe
gatgaagagggagaatgtcagaact

SEQ ID NO: 46837 - DNA, 25 bp, probe
gataaacagcgatctccaagtcaag

SEQ ID NO: 46838 - DNA, 25 bp, probe
agggaacataagaccgcaattctaa

SEQ ID NO: 46839 - DNA, 25 bp, probe
gatcaatcccatcatctatgccttc

SEQ ID NO: 46840 - DNA, 25 bp, probe
atcaatcccatcatctatgccttcc

SEQ ID NO: 46841 - DNA, 25 bp, probe
tgtataacgcgctcacctattactc

SEQ ID NO: 46842 - DNA, 25 bp, probe
ctgtataacgcgctcacctattact

SEQ ID NO: 46843 - DNA, 25 bp, probe
ccacctacaactccatgatcaatcc

SEQ ID NO: 46844 - DNA, 25 bp, probe
ctacaactccatgatcaatcccatc

SEQ ID NO: 46845 - DNA, 25 bp, probe
tcaatcccatcatctatgccttccg

SEQ ID NO: 46846 - DNA, 25 bp, probe
gccacctacaactccatgatcaatc

SEQ ID NO: 46847 - DNA, 25 bp, probe
ccttcttcatggtcttcggcatcat

SEQ ID NO: 46848 - DNA, 25 bp, probe
cctgtataacgcgctcacctattac

SEQ ID NO: 46849 - DNA, 25 bp, probe
cctacaactccatgatcaatcccat

SEQ ID NO: 46850 - DNA, 25 bp, probe
gtataacgcgctcacctattactcg

SEQ ID NO: 46851 - DNA, 25 bp, probe
cacctacaactccatgatcaatccc

SEQ ID NO: 46852 - DNA, 25 bp, probe
cttcttcatggtcttcggcatcatg

SEQ ID NO: 46853 - DNA, 25 bp, probe
acctacaactccatgatcaatccca

SEQ ID NO: 46854 - DNA, 25 bp, probe
tacaactccatgatcaatcccatca

SEQ ID NO: 46855 - DNA, 25 bp, probe
tgatcaatcccatcatctatgcctt

SEQ ID NO: 46856 - DNA, 25 bp, probe
cgccacctacaactccatgatcaat

SEQ ID NO: 46857 - DNA, 25 bp, probe
ccctgtataacgcgctcacctatta

SEQ ID NO: 46858 - DNA, 25 bp, probe
tccatgatcaatcccatcatctatg

SEQ ID NO: 46859 - DNA, 25 bp, probe
ctccatgatcaatcccatcatctat

SEQ ID NO: 46860 - DNA, 25 bp, probe
actccatgatcaatcccatcatcta

SEQ ID NO: 46861 - DNA, 25 bp, probe
atgatcaatcccatcatctatgcct

SEQ ID NO: 46862 - DNA, 25 bp, probe
catgatcaatcccatcatctatgcc

SEQ ID NO: 46863 - DNA, 25 bp, probe
ccatgatcaatcccatcatctatgc

SEQ ID NO: 46864 - DNA, 25 bp, probe
aactccatgatcaatcccatcatct

SEQ ID NO: 46865 - DNA, 25 bp, probe
caactccatgatcaatcccatcatc

SEQ ID NO: 46866 - DNA, 25 bp, probe
acaactccatgatcaatcccatcat

SEQ ID NO: 46867 - DNA, 25 bp, probe
tataacgcgctcacctattactcgc

SEQ ID NO: 46868 - DNA, 25 bp, probe
tcatcagtatgtcctacgtcatcac

SEQ ID NO: 46869 - DNA, 25 bp, probe
gtcatcagtatgtcctacgtcatca

SEQ ID NO: 46870 - DNA, 25 bp, probe
ggtcatcagtatgtcctacgtcatc

SEQ ID NO: 46871 - DNA, 25 bp, probe
catcagtatgtcctacgtcatcacc

SEQ ID NO: 46872 - DNA, 25 bp, probe
atcagtatgtcctacgtcatcacca

SEQ ID NO: 46873 - DNA, 25 bp, probe
tggtcatcagtatgtcctacgtcat

SEQ ID NO: 46874 - DNA, 25 bp, probe
tcagtatgtcctacgtcatcaccag

SEQ ID NO: 46875 - DNA, 25 bp, probe
ctacgcctttctagatgacaacttc

SEQ ID NO: 46876 - DNA, 25 bp, probe
ctggtcatcagtatgtcctacgtca

SEQ ID NO: 46877 - DNA, 25 bp, probe
tacgcctttctagatgacaacttcc

SEQ ID NO: 46878 - DNA, 25 bp, probe
tctacgcctttctagatgacaactt

SEQ ID NO: 46879 - DNA, 25 bp, probe
ctctacgcctttctagatgacaact

SEQ ID NO: 46880 - DNA, 25 bp, probe
cttcctctacgcctttctagatgac

SEQ ID NO: 46881 - DNA, 25 bp, probe
cagtatgtcctacgtcatcaccagc

SEQ ID NO: 46882 - DNA, 25 bp, probe
cctctacgcctttctagatgacaac

SEQ ID NO: 46883 - DNA, 25 bp, probe
tcctctacgcctttctagatgacaa

SEQ ID NO: 46884 - DNA, 25 bp, probe
ttcctctacgcctttctagatgaca

SEQ ID NO: 46885 - DNA, 25 bp, probe
cctggttctgcccttcttctctttc

SEQ ID NO: 46886 - DNA, 25 bp, probe
ccttcctctacgcctttctagatga

SEQ ID NO: 46887 - DNA, 25 bp, probe
actggtcatcagtatgtcctacgtc

SEQ ID NO: 46888 - DNA, 25 bp, probe
cactggtcatcagtatgtcctacgt

SEQ ID NO: 46889 - DNA, 25 bp, probe
ccactggtcatcagtatgtcctacg

SEQ ID NO: 46890 - DNA, 25 bp, probe
cccttcctctacgcctttctagatg

SEQ ID NO: 46891 - DNA, 25 bp, probe
acgcctttctagatgacaacttccg

SEQ ID NO: 46892 - DNA, 25 bp, probe
cccactggtcatcagtatgtcctac

SEQ ID NO: 46893 - DNA, 25 bp, probe
ccccttcctctacgcctttctagat

SEQ ID NO: 46894 - DNA, 25 bp, probe
ccccactggtcatcagtatgtccta

SEQ ID NO: 46895 - DNA, 25 bp, probe
ctctgctggtcatcctcctgtctta

SEQ ID NO: 46896 - DNA, 25 bp, probe
gtgtctggatgtgattctctactac

SEQ ID NO: 46897 - DNA, 25 bp, probe
tggcgtcaatggatattctgtataa

SEQ ID NO: 46898 - DNA, 25 bp, probe
ctggcgtcaatggatattctgtata

SEQ ID NO: 46899 - DNA, 25 bp, probe
ttattcataatctccttcacggcag

SEQ ID NO: 46900 - DNA, 25 bp, probe
aattcacttcactaactactctggc

SEQ ID NO: 46901 - DNA, 25 bp, probe
atgtggcattagtggacttgatatt

SEQ ID NO: 46902 - DNA, 25 bp, probe
ggcgtcaatggatattctgtataat

SEQ ID NO: 46903 - DNA, 25 bp, probe
taactactctggcgtcaatggatat

SEQ ID NO: 46904 - DNA, 25 bp, probe
ggtgctacttggtcattattcataa

SEQ ID NO: 46905 - DNA, 25 bp, probe
cgtgtctggatgtgattctctacta

SEQ ID NO: 46906 - DNA, 25 bp, probe
gaaccacggtaaccatctatatgat

SEQ ID NO: 46907 - DNA, 25 bp, probe
attattcataatctccttcacggca

SEQ ID NO: 46908 - DNA, 25 bp, probe
cattattcataatctccttcacggc

SEQ ID NO: 46909 - DNA, 25 bp, probe
tctggcgtcaatggatattctgtat

SEQ ID NO: 46910 - DNA, 25 bp, probe
gagaaccacggtaaccatctatatg

SEQ ID NO: 46911 - DNA, 25 bp, probe
agagaaccacggtaaccatctatat

SEQ ID NO: 46912 - DNA, 25 bp, probe
aagagaaccacggtaaccatctata

SEQ ID NO: 46913 - DNA, 25 bp, probe
ctaactactctggcgtcaatggata

SEQ ID NO: 46914 - DNA, 25 bp, probe
agtctacggtcactaagcaatataa

SEQ ID NO: 46915 - DNA, 25 bp, probe
agaaccacggtaaccatctatatga

SEQ ID NO: 46916 - DNA, 25 bp, probe
aactactctggcgtcaatggatatt

SEQ ID NO: 46917 - DNA, 25 bp, probe
tctaagtatcatgcctaccaacaag

SEQ ID NO: 46918 - DNA, 25 bp, probe
ttctaagtatcatgcctaccaacaa

SEQ ID NO: 46919 - DNA, 25 bp, probe
tgtctggatgtgattctctactaca

SEQ ID NO: 46920 - DNA, 25 bp, probe
ttattagtgctgacagatacatggc

SEQ ID NO: 46921 - DNA, 25 bp, probe
gtcattagtgtcatgctataccgta

SEQ ID NO: 46922 - DNA, 25 bp, probe
ctactctggcgtcaatggatattct

SEQ ID NO: 46923 - DNA, 25 bp, probe
tcattagtgtcatgctataccgtaa

SEQ ID NO: 46924 - DNA, 25 bp, probe
tcattattcataatctccttcacgg

SEQ ID NO: 46925 - DNA, 25 bp, probe
gagtcattagtgtcatgctataccg

SEQ ID NO: 46926 - DNA, 25 bp, probe
cgagtcattagtgtcatgctatacc

SEQ ID NO: 46927 - DNA, 25 bp, probe
ctctggcgtcaatggatattctgta

SEQ ID NO: 46928 - DNA, 25 bp, probe
tactctggcgtcaatggatattctg

SEQ ID NO: 46929 - DNA, 25 bp, probe
actactctggcgtcaatggatattc

SEQ ID NO: 46930 - DNA, 25 bp, probe
cttcactaactactctggcgtcaat

SEQ ID NO: 46931 - DNA, 25 bp, probe
attcacttcactaactactctggcg

SEQ ID NO: 46932 - DNA, 25 bp, probe
gaagagaaccacggtaaccatctat

SEQ ID NO: 46933 - DNA, 25 bp, probe
ctaagtatcatgcctaccaacaagc

SEQ ID NO: 46934 - DNA, 25 bp, probe
agtcattagtgtcatgctataccgt

SEQ ID NO: 46935 - DNA, 25 bp, probe
cattagtgtcatgctataccgtaat

SEQ ID NO: 46936 - DNA, 25 bp, probe
aagtcaaggagaagtccataaggat

SEQ ID NO: 46937 - DNA, 25 bp, probe
ttcactaactactctggcgtcaatg

SEQ ID NO: 46938 - DNA, 25 bp, probe
ttcagttgtaccaccaagaagagaa

SEQ ID NO: 46939 - DNA, 25 bp, probe
tcgagtcattagtgtcatgctatac

SEQ ID NO: 46940 - DNA, 25 bp, probe
ttcattgtatcgcattatccaggtg

SEQ ID NO: 46941 - DNA, 25 bp, probe
gctattcaagaggaagtgagtgatc

SEQ ID NO: 46942 - DNA, 25 bp, probe
tggtggtgaattaatgctagaatcc

SEQ ID NO: 46943 - DNA, 25 bp, probe
atggtggtgaattaatgctagaatc

SEQ ID NO: 46944 - DNA, 25 bp, probe
aatggtggtgaattaatgctagaat

SEQ ID NO: 46945 - DNA, 25 bp, probe
aattacaacaaccaagatggattgc

SEQ ID NO: 46946 - DNA, 25 bp, probe
ccctttcatctattacttcaccctt

SEQ ID NO: 46947 - DNA, 25 bp, probe
atttcattgtatcgcattatccagg

SEQ ID NO: 46948 - DNA, 25 bp, probe
tttcattgtatcgcattatccaggt

SEQ ID NO: 46949 - DNA, 25 bp, probe
gaccctttcatctattacttcaccc

SEQ ID NO: 46950 - DNA, 25 bp, probe
tgcttggttggaatttcattgtatc

SEQ ID NO: 46951 - DNA, 25 bp, probe
ctgcttggttggaatttcattgtat

SEQ ID NO: 46952 - DNA, 25 bp, probe
cctttcatctattacttcacccttg

SEQ ID NO: 46953 - DNA, 25 bp, probe
accctttcatctattacttcaccct

SEQ ID NO: 46954 - DNA, 25 bp, probe
tcattgtatcgcattatccaggtgg

SEQ ID NO: 46955 - DNA, 25 bp, probe
gagaaatgtgttcaggtccagatat

SEQ ID NO: 46956 - DNA, 25 bp, probe
caaacaacaaataatggtggtgaat

SEQ ID NO: 46957 - DNA, 25 bp, probe
taatggtggtgaattaatgctagaa

SEQ ID NO: 46958 - DNA, 25 bp, probe
ggttggaatttcattgtatcgcatt

SEQ ID NO: 46959 - DNA, 25 bp, probe
agaaatgtgttcaggtccagatatg

SEQ ID NO: 46960 - DNA, 25 bp, probe
agctattcaagaggaagtgagtgat

SEQ ID NO: 46961 - DNA, 25 bp, probe
tttaagactgaaacacctttgacca

SEQ ID NO: 46962 - DNA, 25 bp, probe
aaacttgagcaacaccaacatattt

SEQ ID NO: 46963 - DNA, 25 bp, probe
gtgaattaatgctagaatccacctt

SEQ ID NO: 46964 - DNA, 25 bp, probe
tctgcttggttggaatttcattgta

SEQ ID NO: 46965 - DNA, 25 bp, probe
ataatggtggtgaattaatgctaga

SEQ ID NO: 46966 - DNA, 25 bp, probe
aatgatactgagaataatgcaccaa

SEQ ID NO: 46967 - DNA, 25 bp, probe
cttggttggaatttcattgtatcgc

SEQ ID NO: 46968 - DNA, 25 bp, probe
gcttggttggaatttcattgtatcg

SEQ ID NO: 46969 - DNA, 25 bp, probe
taggtatgagaaatgtgttcaggtc

SEQ ID NO: 46970 - DNA, 25 bp, probe
tgaccctttcatctattacttcacc

SEQ ID NO: 46971 - DNA, 25 bp, probe
tcaaacaacaaataatggtggtgaa

SEQ ID NO: 46972 - DNA, 25 bp, probe
ggtggctagtggcatttgataatat

SEQ ID NO: 46973 - DNA, 25 bp, probe
ttaggtatgagaaatgtgttcaggt

SEQ ID NO: 46974 - DNA, 25 bp, probe
atcaaacaacaaataatggtggtga

SEQ ID NO: 46975 - DNA, 25 bp, probe
ccagtcagatacatttgtttgaagg

SEQ ID NO: 46976 - DNA, 25 bp, probe
aatgtgttcaggtccagatatggtt

SEQ ID NO: 46977 - DNA, 25 bp, probe
cagtcagatacatttgtttgaaggt

SEQ ID NO: 46978 - DNA, 25 bp, probe
ttaagactgaaacacctttgaccac

SEQ ID NO: 46979 - DNA, 25 bp, probe
gatcaaacaacaaataatggtggtg

SEQ ID NO: 46980 - DNA, 25 bp, probe
gttggaatttcattgtatcgcatta

SEQ ID NO: 46981 - DNA, 25 bp, probe
tggttggaatttcattgtatcgcat

SEQ ID NO: 46982 - DNA, 25 bp, probe
tccagtcagatacatttgtttgaag

SEQ ID NO: 46983 - DNA, 25 bp, probe
ggtggtgaattaatgctagaatcca

SEQ ID NO: 46984 - DNA, 25 bp, probe
atttcaaccccagagactcctattc

SEQ ID NO: 46985 - DNA, 25 bp, probe
gatttcaaccccagagactcctatt

SEQ ID NO: 46986 - DNA, 25 bp, probe
cctgatgcacatcttccagaatctg

SEQ ID NO: 46987 - DNA, 25 bp, probe
gtcctgatgcacatcttccagaatc

SEQ ID NO: 46988 - DNA, 25 bp, probe
tcctgatgcacatcttccagaatct

SEQ ID NO: 46989 - DNA, 25 bp, probe
agtcctgatgcacatcttccagaat

SEQ ID NO: 46990 - DNA, 25 bp, probe
agatttcaaccccagagactcctat

SEQ ID NO: 46991 - DNA, 25 bp, probe
gagtcctgatgcacatcttccagaa

SEQ ID NO: 46992 - DNA, 25 bp, probe
cagatttcaaccccagagactccta

SEQ ID NO: 46993 - DNA, 25 bp, probe
tttcaaccccagagactcctattcc

SEQ ID NO: 46994 - DNA, 25 bp, probe
cagagtcctgatgcacatcttccag

SEQ ID NO: 46995 - DNA, 25 bp, probe
ttaaggtcaacctgctgtctcctca

SEQ ID NO: 46996 - DNA, 25 bp, probe
cttaaggtcaacctgctgtctcctc

SEQ ID NO: 46997 - DNA, 25 bp, probe
agagtcctgatgcacatcttccaga

SEQ ID NO: 46998 - DNA, 25 bp, probe
atcatcagggctctccagaaaagac

SEQ ID NO: 46999 - DNA, 25 bp, probe
catcatcagggctctccagaaaaga

SEQ ID NO: 47000 - DNA, 25 bp, probe
ttcaaccccagagactcctattcct

SEQ ID NO: 47001 - DNA, 25 bp, probe
catcagggctctccagaaaagactc

SEQ ID NO: 47002 - DNA, 25 bp, probe
tcatcagggctctccagaaaagact

SEQ ID NO: 47003 - DNA, 25 bp, probe
caaccccagagactcctattcctga

SEQ ID NO: 47004 - DNA, 25 bp, probe
tcaaccccagagactcctattcctg

SEQ ID NO: 47005 - DNA, 25 bp, probe
ctgatgcacatcttccagaatctgg

SEQ ID NO: 47006 - DNA, 25 bp, probe
tgatgcacatcttccagaatctggg

SEQ ID NO: 47007 - DNA, 25 bp, probe
ccttaatatcatcagccagttcctt

SEQ ID NO: 47008 - DNA, 25 bp, probe
ctccttaatatcatcagccagttcc

SEQ ID NO: 47009 - DNA, 25 bp, probe
cctccttaatatcatcagccagttc

SEQ ID NO: 47010 - DNA, 25 bp, probe
cagacaatggacctccttaatatca

SEQ ID NO: 47011 - DNA, 25 bp, probe
tccttaatatcatcagccagttcct

SEQ ID NO: 47012 - DNA, 25 bp, probe
acctccttaatatcatcagccagtt

SEQ ID NO: 47013 - DNA, 25 bp, probe
aatggacctccttaatatcatcagc

SEQ ID NO: 47014 - DNA, 25 bp, probe
gcagacaatggacctccttaatatc

SEQ ID NO: 47015 - DNA, 25 bp, probe
acaatggacctccttaatatcatca

SEQ ID NO: 47016 - DNA, 25 bp, probe
agcagacaatggacctccttaatat

SEQ ID NO: 47017 - DNA, 25 bp, probe
gacctccttaatatcatcagccagt

SEQ ID NO: 47018 - DNA, 25 bp, probe
agacaatggacctccttaatatcat

SEQ ID NO: 47019 - DNA, 25 bp, probe
caatggacctccttaatatcatcag

SEQ ID NO: 47020 - DNA, 25 bp, probe
gacaatggacctccttaatatcatc

SEQ ID NO: 47021 - DNA, 25 bp, probe
cagattcaactagagagtcagatga

SEQ ID NO: 47022 - DNA, 25 bp, probe
gcagattcaactagagagtcagatg

SEQ ID NO: 47023 - DNA, 25 bp, probe
atggacctccttaatatcatcagcc

SEQ ID NO: 47024 - DNA, 25 bp, probe
ttaccagacaccatctatgttctag

SEQ ID NO: 47025 - DNA, 25 bp, probe
cagcagacaatggacctccttaata

SEQ ID NO: 47026 - DNA, 25 bp, probe
tcaactagagagtcagatgaactgt

SEQ ID NO: 47027 - DNA, 25 bp, probe
caactagagagtcagatgaactgta

SEQ ID NO: 47028 - DNA, 25 bp, probe
ggcagattcaactagagagtcagat

SEQ ID NO: 47029 - DNA, 25 bp, probe
ggacctccttaatatcatcagccag

SEQ ID NO: 47030 - DNA, 25 bp, probe
cagtgatgacaatgacaacgagtac

SEQ ID NO: 47031 - DNA, 25 bp, probe
taccagacaccatctatgttctagc

SEQ ID NO: 47032 - DNA, 25 bp, probe
aactagagagtcagatgaactgtac

SEQ ID NO: 47033 - DNA, 25 bp, probe
agtgatgacaatgacaacgagtaca

SEQ ID NO: 47034 - DNA, 25 bp, probe
ccagtgatgacaatgacaacgagta

SEQ ID NO: 47035 - DNA, 25 bp, probe
cttaatatcatcagccagttccttt

SEQ ID NO: 47036 - DNA, 25 bp, probe
aataaacggcagattcaactagaga

SEQ ID NO: 47037 - DNA, 25 bp, probe
ataaacggcagattcaactagagag

SEQ ID NO: 47038 - DNA, 25 bp, probe
tttgttctttaagtcctgtgtcacc

SEQ ID NO: 47039 - DNA, 25 bp, probe
gtgatgacaatgacaacgagtacac

SEQ ID NO: 47040 - DNA, 25 bp, probe
tgatttaccagacaccatctatgtt

SEQ ID NO: 47041 - DNA, 25 bp, probe
gatgacaatgacaacgagtacacca

SEQ ID NO: 47042 - DNA, 25 bp, probe
tgatgacaatgacaacgagtacacc

SEQ ID NO: 47043 - DNA, 25 bp, probe
atttaccagacaccatctatgttct

SEQ ID NO: 47044 - DNA, 25 bp, probe
gatttaccagacaccatctatgttc

SEQ ID NO: 47045 - DNA, 25 bp, probe
ctgatttaccagacaccatctatgt

SEQ ID NO: 47046 - DNA, 25 bp, probe
catctatgttctagccctcacctac

SEQ ID NO: 47047 - DNA, 25 bp, probe
ttcaactagagagtcagatgaactg

SEQ ID NO: 47048 - DNA, 25 bp, probe
tttaccagacaccatctatgttcta

SEQ ID NO: 47049 - DNA, 25 bp, probe
cctgatttaccagacaccatctatg

SEQ ID NO: 47050 - DNA, 25 bp, probe
tcctgatttaccagacaccatctat

SEQ ID NO: 47051 - DNA, 25 bp, probe
agcttcctgtaccccaatctaggag

SEQ ID NO: 47052 - DNA, 25 bp, probe
cagcttcctgtaccccaatctagga

SEQ ID NO: 47053 - DNA, 25 bp, probe
aattacctgctacgagaacttcacc

SEQ ID NO: 47054 - DNA, 25 bp, probe
ctacgagaacttcaccgataaccag

SEQ ID NO: 47055 - DNA, 25 bp, probe
cctgctcttctatttctcttcttca

SEQ ID NO: 47056 - DNA, 25 bp, probe
tgctcttctatttctcttcttcagt

SEQ ID NO: 47057 - DNA, 25 bp, probe
ccctgctcttctatttctcttcttc

SEQ ID NO: 47058 - DNA, 25 bp, probe
ttctatttctcttcttcagtggtgc

SEQ ID NO: 47059 - DNA, 25 bp, probe
gctcttctatttctcttcttcagtg

SEQ ID NO: 47060 - DNA, 25 bp, probe
cttctatttctcttcttcagtggtg

SEQ ID NO: 47061 - DNA, 25 bp, probe
tcttctatttctcttcttcagtggt

SEQ ID NO: 47062 - DNA, 25 bp, probe
atgaaattacctgctacgagaactt

SEQ ID NO: 47063 - DNA, 25 bp, probe
aatgaaattacctgctacgagaact

SEQ ID NO: 47064 - DNA, 25 bp, probe
caatgaaattacctgctacgagaac

SEQ ID NO: 47065 - DNA, 25 bp, probe
ctcttctatttctcttcttcagtgg

SEQ ID NO: 47066 - DNA, 25 bp, probe
aaattacctgctacgagaacttcac

SEQ ID NO: 47067 - DNA, 25 bp, probe
gaaattacctgctacgagaacttca

SEQ ID NO: 47068 - DNA, 25 bp, probe
tgaaattacctgctacgagaacttc

SEQ ID NO: 47069 - DNA, 25 bp, probe
ctgctacgagaacttcaccgataac

SEQ ID NO: 47070 - DNA, 25 bp, probe
tacgagaacttcaccgataaccagt

SEQ ID NO: 47071 - DNA, 25 bp, probe
gtcagaagtggcaatgaaattacct

SEQ ID NO: 47072 - DNA, 25 bp, probe
aggtcagaagtggcaatgaaattac

SEQ ID NO: 47073 - DNA, 25 bp, probe
caggtcagaagtggcaatgaaatta

SEQ ID NO: 47074 - DNA, 25 bp, probe
ctgctcttctatttctcttcttcag

SEQ ID NO: 47075 - DNA, 25 bp, probe
tcagaagtggcaatgaaattacctg

SEQ ID NO: 47076 - DNA, 25 bp, probe
tctatttctcttcttcagtggtgcg

SEQ ID NO: 47077 - DNA, 25 bp, probe
aagttcggacttcactacagagtag

SEQ ID NO: 47078 - DNA, 25 bp, probe
caagttcggacttcactacagagta

SEQ ID NO: 47079 - DNA, 25 bp, probe
caatacttgaacacgactgagcagg

SEQ ID NO: 47080 - DNA, 25 bp, probe
cctgctacgagaacttcaccgataa

SEQ ID NO: 47081 - DNA, 25 bp, probe
catcgtgatcatcgttcaatacttg

SEQ ID NO: 47082 - DNA, 25 bp, probe
aatacttgaacacgactgagcaggt

SEQ ID NO: 47083 - DNA, 25 bp, probe
gctacgagaacttcaccgataacca

SEQ ID NO: 47084 - DNA, 25 bp, probe
tgctacgagaacttcaccgataacc

SEQ ID NO: 47085 - DNA, 25 bp, probe
attacctgctacgagaacttcaccg

SEQ ID NO: 47086 - DNA, 25 bp, probe
ccatcgtgatcatcgttcaatactt

SEQ ID NO: 47087 - DNA, 25 bp, probe
ggtcagaagtggcaatgaaattacc

SEQ ID NO: 47088 - DNA, 25 bp, probe
tcaatacttgaacacgactgagcag

SEQ ID NO: 47089 - DNA, 25 bp, probe
accatcgtgatcatcgttcaatact

SEQ ID NO: 47090 - DNA, 25 bp, probe
cccctgctcttctatttctcttctt

SEQ ID NO: 47091 - DNA, 25 bp, probe
gaagtggcaatgaaattacctgcta

SEQ ID NO: 47092 - DNA, 25 bp, probe
gcaatgaaattacctgctacgagaa

SEQ ID NO: 47093 - DNA, 25 bp, probe
gagaacttcaccgataaccagttgg

SEQ ID NO: 47094 - DNA, 25 bp, probe
aagtggcaatgaaattacctgctac

SEQ ID NO: 47095 - DNA, 25 bp, probe
caccatcgtgatcatcgttcaatac

SEQ ID NO: 47096 - DNA, 25 bp, probe
atacttgaacacgactgagcaggtc

SEQ ID NO: 47097 - DNA, 25 bp, probe
ttcctaccatatacttctctccagc

SEQ ID NO: 47098 - DNA, 25 bp, probe
agagatacctgaagtctgaacctat

SEQ ID NO: 47099 - DNA, 25 bp, probe
aagagatacctgaagtctgaaccta

SEQ ID NO: 47100 - DNA, 25 bp, probe
ctaccatatacttctctccagccaa

SEQ ID NO: 47101 - DNA, 25 bp, probe
ctgaagagatacctgaagtctgaac

SEQ ID NO: 47102 - DNA, 25 bp, probe
tctgaagagatacctgaagtctgaa

SEQ ID NO: 47103 - DNA, 25 bp, probe
catatacttctctccagccaacaag

SEQ ID NO: 47104 - DNA, 25 bp, probe
taccatatacttctctccagccaac

SEQ ID NO: 47105 - DNA, 25 bp, probe
atatacttctctccagccaacaaga

SEQ ID NO: 47106 - DNA, 25 bp, probe
gaagagatacctgaagtctgaacct

SEQ ID NO: 47107 - DNA, 25 bp, probe
tgaagagatacctgaagtctgaacc

SEQ ID NO: 47108 - DNA, 25 bp, probe
gagatacctgaagtctgaacctatc

SEQ ID NO: 47109 - DNA, 25 bp, probe
ccatatacttctctccagccaacaa

SEQ ID NO: 47110 - DNA, 25 bp, probe
agatacctgaagtctgaacctatcc

SEQ ID NO: 47111 - DNA, 25 bp, probe
gtgaaggtagtggtagcagagaatt

SEQ ID NO: 47112 - DNA, 25 bp, probe
gagattcctgttgttgctatcagaa

SEQ ID NO: 47113 - DNA, 25 bp, probe
gattcctgttgttgctatcagaact

SEQ ID NO: 47114 - DNA, 25 bp, probe
agattcctgttgttgctatcagaac

SEQ ID NO: 47115 - DNA, 25 bp, probe
gagagattcctgttgttgctatcag

SEQ ID NO: 47116 - DNA, 25 bp, probe
tcctaccatatacttctctccagcc

SEQ ID NO: 47117 - DNA, 25 bp, probe
ctgttgttgctatcagaactgctaa

SEQ ID NO: 47118 - DNA, 25 bp, probe
attcctgttgttgctatcagaactg

SEQ ID NO: 47119 - DNA, 25 bp, probe
agagattcctgttgttgctatcaga

SEQ ID NO: 47120 - DNA, 25 bp, probe
cctaccatatacttctctccagcca

SEQ ID NO: 47121 - DNA, 25 bp, probe
aatatcgtcatagccaagatggatg

SEQ ID NO: 47122 - DNA, 25 bp, probe
tgtgaaggtagtggtagcagagaat

SEQ ID NO: 47123 - DNA, 25 bp, probe
accatatacttctctccagccaaca

SEQ ID NO: 47124 - DNA, 25 bp, probe
ctgctaaaggagagaagtttgtcat

SEQ ID NO: 47125 - DNA, 25 bp, probe
tatcagaactgctaaaggagagaag

SEQ ID NO: 47126 - DNA, 25 bp, probe
ctatcagaactgctaaaggagagaa

SEQ ID NO: 47127 - DNA, 25 bp, probe
atctgaagagatacctgaagtctga

SEQ ID NO: 47128 - DNA, 25 bp, probe
aatctgaagagatacctgaagtctg

SEQ ID NO: 47129 - DNA, 25 bp, probe
caatctgaagagatacctgaagtct

SEQ ID NO: 47130 - DNA, 25 bp, probe
tttcctaccatatacttctctccag

SEQ ID NO: 47131 - DNA, 25 bp, probe
ttactttgatggcaatctgaagaga

SEQ ID NO: 47132 - DNA, 25 bp, probe
gttgttgctatcagaactgctaaag

SEQ ID NO: 47133 - DNA, 25 bp, probe
gcaatctgaagagatacctgaagtc

SEQ ID NO: 47134 - DNA, 25 bp, probe
attactttgatggcaatctgaagag

SEQ ID NO: 47135 - DNA, 25 bp, probe
caagaagaagaagaaggcacaggag

SEQ ID NO: 47136 - DNA, 25 bp, probe
tgaaggtagtggtagcagagaattt

SEQ ID NO: 47137 - DNA, 25 bp, probe
tgttgttgctatcagaactgctaaa

SEQ ID NO: 47138 - DNA, 25 bp, probe
ttgctatcagaactgctaaaggaga

SEQ ID NO: 47139 - DNA, 25 bp, probe
atggcaatctgaagagatacctgaa

SEQ ID NO: 47140 - DNA, 25 bp, probe
ttgatggcaatctgaagagatacct

SEQ ID NO: 47141 - DNA, 25 bp, probe
ctttagcctcatcaatggaaacatc

SEQ ID NO: 47142 - DNA, 25 bp, probe
tttagcctcatcaatggaaacatct

SEQ ID NO: 47143 - DNA, 25 bp, probe
ttagcctcatcaatggaaacatctg

SEQ ID NO: 47144 - DNA, 25 bp, probe
cctttagcctcatcaatggaaacat

SEQ ID NO: 47145 - DNA, 25 bp, probe
ccaatcatgtcatctacctgtaccg

SEQ ID NO: 47146 - DNA, 25 bp, probe
cacctttagcctcatcaatggaaac

SEQ ID NO: 47147 - DNA, 25 bp, probe
cctcatcaatggaaacatctgtcac

SEQ ID NO: 47148 - DNA, 25 bp, probe
tagcctcatcaatggaaacatctgt

SEQ ID NO: 47149 - DNA, 25 bp, probe
acctttagcctcatcaatggaaaca

SEQ ID NO: 47150 - DNA, 25 bp, probe
tttcaggaaacagttcaacactcag

SEQ ID NO: 47151 - DNA, 25 bp, probe
catcaatggaaacatctgtcacgag

SEQ ID NO: 47152 - DNA, 25 bp, probe
ctcatcaatggaaacatctgtcacg

SEQ ID NO: 47153 - DNA, 25 bp, probe
aatcatgtcatctacctgtaccgct

SEQ ID NO: 47154 - DNA, 25 bp, probe
caatcatgtcatctacctgtaccgc

SEQ ID NO: 47155 - DNA, 25 bp, probe
tcatcaatggaaacatctgtcacga

SEQ ID NO: 47156 - DNA, 25 bp, probe
cccaatcatgtcatctacctgtacc

SEQ ID NO: 47157 - DNA, 25 bp, probe
atcatgtcatctacctgtaccgctc

SEQ ID NO: 47158 - DNA, 25 bp, probe
agcctcatcaatggaaacatctgtc

SEQ ID NO: 47159 - DNA, 25 bp, probe
tttgctttatggctagacaggaacc

SEQ ID NO: 47160 - DNA, 25 bp, probe
ggaatatacatgtcaagaagcagat

SEQ ID NO: 47161 - DNA, 25 bp, probe
atgtcatctacctgtaccgctccta

SEQ ID NO: 47162 - DNA, 25 bp, probe
gcctcatcaatggaaacatctgtca

SEQ ID NO: 47163 - DNA, 25 bp, probe
ctttatggctagacaggaacccttg

SEQ ID NO: 47164 - DNA, 25 bp, probe
atcaatggaaacatctgtcacgagc

SEQ ID NO: 47165 - DNA, 25 bp, probe
ttttgctttatggctagacaggaac

SEQ ID NO: 47166 - DNA, 25 bp, probe
gttttgctttatggctagacaggaa

SEQ ID NO: 47167 - DNA, 25 bp, probe
catctgtcacgagcggtatgtctag

SEQ ID NO: 47168 - DNA, 25 bp, probe
ttcaggaaacagttcaacactcagc

SEQ ID NO: 47169 - DNA, 25 bp, probe
ccacctttagcctcatcaatggaaa

SEQ ID NO: 47170 - DNA, 25 bp, probe
caagagtttcaggaaacagttcaac

SEQ ID NO: 47171 - DNA, 25 bp, probe
aagagtttcaggaaacagttcaaca

SEQ ID NO: 47172 - DNA, 25 bp, probe
gaatatacatgtcaagaagcagatt

SEQ ID NO: 47173 - DNA, 25 bp, probe
ggtatgtctagattgacccttgatt

SEQ ID NO: 47174 - DNA, 25 bp, probe
aatatacatgtcaagaagcagattg

SEQ ID NO: 47175 - DNA, 25 bp, probe
aagggaatatacatgtcaagaagca

SEQ ID NO: 47176 - DNA, 25 bp, probe
gtggaagggaatatacatgtcaaga

SEQ ID NO: 47177 - DNA, 25 bp, probe
gggaatatacatgtcaagaagcaga

SEQ ID NO: 47178 - DNA, 25 bp, probe
agggaatatacatgtcaagaagcag

SEQ ID NO: 47179 - DNA, 25 bp, probe
gaagggaatatacatgtcaagaagc

SEQ ID NO: 47180 - DNA, 25 bp, probe
tggaagggaatatacatgtcaagaa

SEQ ID NO: 47181 - DNA, 25 bp, probe
tgtcatctacctgtaccgctcctac

SEQ ID NO: 47182 - DNA, 25 bp, probe
gtatgtctagattgacccttgattt

SEQ ID NO: 47183 - DNA, 25 bp, probe
agtttcaggaaacagttcaacactc

SEQ ID NO: 47184 - DNA, 25 bp, probe
gagtttcaggaaacagttcaacact

SEQ ID NO: 47185 - DNA, 25 bp, probe
cagggagggaccaataaatcataat

SEQ ID NO: 47186 - DNA, 25 bp, probe
agggagggaccaataaatcataatg

SEQ ID NO: 47187 - DNA, 25 bp, probe
acagggagggaccaataaatcataa

SEQ ID NO: 47188 - DNA, 25 bp, probe
gacagggagggaccaataaatcata

SEQ ID NO: 47189 - DNA, 25 bp, probe
gggagggaccaataaatcataatga

SEQ ID NO: 47190 - DNA, 25 bp, probe
ggagggaccaataaatcataatgaa

SEQ ID NO: 47191 - DNA, 25 bp, probe
agggaccaataaatcataatgaaga

SEQ ID NO: 47192 - DNA, 25 bp, probe
ccaataaatcataatgaagaaacgc

SEQ ID NO: 47193 - DNA, 25 bp, probe
gagggaccaataaatcataatgaag

SEQ ID NO: 47194 - DNA, 25 bp, probe
gggaccaataaatcataatgaagaa

SEQ ID NO: 47195 - DNA, 25 bp, probe
ggacagggagggaccaataaatcat

SEQ ID NO: 47196 - DNA, 25 bp, probe
caataaatcataatgaagaaacgct

SEQ ID NO: 47197 - DNA, 25 bp, probe
aataaatcataatgaagaaacgctc

SEQ ID NO: 47198 - DNA, 25 bp, probe
accaataaatcataatgaagaaacg

SEQ ID NO: 47199 - DNA, 25 bp, probe
ggaccaataaatcataatgaagaaa

SEQ ID NO: 47200 - DNA, 25 bp, probe
ccttgtatattgtcagtgaagaacg

SEQ ID NO: 47201 - DNA, 25 bp, probe
accttgtatattgtcagtgaagaac

SEQ ID NO: 47202 - DNA, 25 bp, probe
agaagagaatgaaggattgaagaat

SEQ ID NO: 47203 - DNA, 25 bp, probe
ggattatgaacctcagaatgatgat

SEQ ID NO: 47204 - DNA, 25 bp, probe
acaccttgtatattgtcagtgaaga

SEQ ID NO: 47205 - DNA, 25 bp, probe
cacaccttgtatattgtcagtgaag

SEQ ID NO: 47206 - DNA, 25 bp, probe
ctagaagagaatgaaggattgaaga

SEQ ID NO: 47207 - DNA, 25 bp, probe
caccttgtatattgtcagtgaagaa

SEQ ID NO: 47208 - DNA, 25 bp, probe
gcacaccttgtatattgtcagtgaa

SEQ ID NO: 47209 - DNA, 25 bp, probe
tagaagagaatgaaggattgaagaa

SEQ ID NO: 47210 - DNA, 25 bp, probe
attatgaacctcagaatgatgatga

SEQ ID NO: 47211 - DNA, 25 bp, probe
ttagaaacttgctacagacttaccc

SEQ ID NO: 47212 - DNA, 25 bp, probe
aatgtaaatgctgctgatagtgatg

SEQ ID NO: 47213 - DNA, 25 bp, probe
ggtgtaaatgtaaatgctgctgata

SEQ ID NO: 47214 - DNA, 25 bp, probe
gaagagaatgaaggattgaagaatt

SEQ ID NO: 47215 - DNA, 25 bp, probe
gattatgaacctcagaatgatgatg

SEQ ID NO: 47216 - DNA, 25 bp, probe
agatgggcataatgaataaaggagt

SEQ ID NO: 47217 - DNA, 25 bp, probe
caggagaagatgggcataatgaata

SEQ ID NO: 47218 - DNA, 25 bp, probe
tgtagaatcttgtttgtaggctgaa

SEQ ID NO: 47219 - DNA, 25 bp, probe
atgtagaatcttgtttgtaggctga

SEQ ID NO: 47220 - DNA, 25 bp, probe
gatgggcataatgaataaaggagtc

SEQ ID NO: 47221 - DNA, 25 bp, probe
aggagaagatgggcataatgaataa

SEQ ID NO: 47222 - DNA, 25 bp, probe
gatgtagaatcttgtttgtaggctg

SEQ ID NO: 47223 - DNA, 25 bp, probe
aagaattaaaccaagacaaaggagc

SEQ ID NO: 47224 - DNA, 25 bp, probe
acccaagaattaaaccaagacaaag

SEQ ID NO: 47225 - DNA, 25 bp, probe
tttggtgtaaatgtaaatgctgctg

SEQ ID NO: 47226 - DNA, 25 bp, probe
gtttggtgtaaatgtaaatgctgct

SEQ ID NO: 47227 - DNA, 25 bp, probe
agtttggtgtaaatgtaaatgctgc

SEQ ID NO: 47228 - DNA, 25 bp, probe
attcaccattagaggacatttagcg

SEQ ID NO: 47229 - DNA, 25 bp, probe
aaatgtaaatgctgctgatagtgat

SEQ ID NO: 47230 - DNA, 25 bp, probe
attagaggacatttagcgtgatgaa

SEQ ID NO: 47231 - DNA, 25 bp, probe
ccaagaattaaaccaagacaaagga

SEQ ID NO: 47232 - DNA, 25 bp, probe
cagataagtatacagcgacaatcct

SEQ ID NO: 47233 - DNA, 25 bp, probe
tcagataagtatacagcgacaatcc

SEQ ID NO: 47234 - DNA, 25 bp, probe
ttagaggacatttagcgtgatgaaa

SEQ ID NO: 47235 - DNA, 25 bp, probe
cccaagaattaaaccaagacaaagg

SEQ ID NO: 47236 - DNA, 25 bp, probe
gtagaatcttgtttgtaggctgaat

SEQ ID NO: 47237 - DNA, 25 bp, probe
taaatgctgctgatagtgatggatg

SEQ ID NO: 47238 - DNA, 25 bp, probe
gtaaatgctgctgatagtgatggat

SEQ ID NO: 47239 - DNA, 25 bp, probe
cttgtatattgtcagtgaagaacgt

SEQ ID NO: 47240 - DNA, 25 bp, probe
cttgctacagacttacccgtaatat

SEQ ID NO: 47241 - DNA, 25 bp, probe
ctttatggagttcaggagaagatgg

SEQ ID NO: 47242 - DNA, 25 bp, probe
cattagaggacatttagcgtgatga

SEQ ID NO: 47243 - DNA, 25 bp, probe
ttgaaagcgatgaagaatgtctcta

SEQ ID NO: 47244 - DNA, 25 bp, probe
atctttgatgtggattggagacaat

SEQ ID NO: 47245 - DNA, 25 bp, probe
tctttgatgtggattggagacaatt

SEQ ID NO: 47246 - DNA, 25 bp, probe
ggccaagcaattattattatggatc

SEQ ID NO: 47247 - DNA, 25 bp, probe
catctttgatgtggattggagacaa

SEQ ID NO: 47248 - DNA, 25 bp, probe
tgaagacttggtgccacaaagaatg

SEQ ID NO: 47249 - DNA, 25 bp, probe
gtgaagacttggtgccacaaagaat

SEQ ID NO: 47250 - DNA, 25 bp, probe
ctttgatgtggattggagacaattg

SEQ ID NO: 47251 - DNA, 25 bp, probe
ttattattatggatcccttgggctg

SEQ ID NO: 47252 - DNA, 25 bp, probe
gccaagcaattattattatggatcc

SEQ ID NO: 47253 - DNA, 25 bp, probe
agcatctttgatgtggattggagac

SEQ ID NO: 47254 - DNA, 25 bp, probe
cagcatctttgatgtggattggaga

SEQ ID NO: 47255 - DNA, 25 bp, probe
attattattatggatcccttgggct

SEQ ID NO: 47256 - DNA, 25 bp, probe
tattattatggatcccttgggctgt

SEQ ID NO: 47257 - DNA, 25 bp, probe
aattattattatggatcccttgggc

SEQ ID NO: 47258 - DNA, 25 bp, probe
gcatctttgatgtggattggagaca

SEQ ID NO: 47259 - DNA, 25 bp, probe
tttgatgtggattggagacaattgc

SEQ ID NO: 47260 - DNA, 25 bp, probe
tttagagagccccagcatctttgat

SEQ ID NO: 47261 - DNA, 25 bp, probe
ttgatgtggattggagacaattgcc

SEQ ID NO: 47262 - DNA, 25 bp, probe
gaagacttggtgccacaaagaatgc

SEQ ID NO: 47263 - DNA, 25 bp, probe
attattatggatcccttgggctgtg

SEQ ID NO: 47264 - DNA, 25 bp, probe
gcaattattattatggatcccttgg

SEQ ID NO: 47265 - DNA, 25 bp, probe
ccagcatctttgatgtggattggag

SEQ ID NO: 47266 - DNA, 25 bp, probe
gatgtggattggagacaattgcctg

SEQ ID NO: 47267 - DNA, 25 bp, probe
ctttagagagccccagcatctttga

SEQ ID NO: 47268 - DNA, 25 bp, probe
tctttagagagccccagcatctttg

SEQ ID NO: 47269 - DNA, 25 bp, probe
cacaaagaatgccacagtggatacg

SEQ ID NO: 47270 - DNA, 25 bp, probe
caattattattatggatcccttggg

SEQ ID NO: 47271 - DNA, 25 bp, probe
caagcaattattattatggatccct

SEQ ID NO: 47272 - DNA, 25 bp, probe
tgatgtggattggagacaattgcct

SEQ ID NO: 47273 - DNA, 25 bp, probe
ccaagcaattattattatggatccc

SEQ ID NO: 47274 - DNA, 25 bp, probe
agcaattattattatggatcccttg

SEQ ID NO: 47275 - DNA, 25 bp, probe
aagcaattattattatggatccctt

SEQ ID NO: 47276 - DNA, 25 bp, probe
cccagcatctttgatgtggattgga

SEQ ID NO: 47277 - DNA, 25 bp, probe
ttattatggatcccttgggctgtgg

SEQ ID NO: 47278 - DNA, 25 bp, probe
ctactctttagagagccccagcatc

SEQ ID NO: 47279 - DNA, 25 bp, probe
ctctttagagagccccagcatcttt

SEQ ID NO: 47280 - DNA, 25 bp, probe
ttagagagccccagcatctttgatg

SEQ ID NO: 47281 - DNA, 25 bp, probe
tactctttagagagccccagcatct

SEQ ID NO: 47282 - DNA, 25 bp, probe
actctttagagagccccagcatctt

SEQ ID NO: 47283 - DNA, 25 bp, probe
cctactctttagagagccccagcat

SEQ ID NO: 47284 - DNA, 25 bp, probe
ccaggtagctggagctgatcataaa

SEQ ID NO: 47285 - DNA, 25 bp, probe
tccagttcactcagaatcagaagaa

SEQ ID NO: 47286 - DNA, 25 bp, probe
ttccagttcactcagaatcagaaga

SEQ ID NO: 47287 - DNA, 25 bp, probe
attccagttcactcagaatcagaag

SEQ ID NO: 47288 - DNA, 25 bp, probe
gaatgaagatcacagagctggataa

SEQ ID NO: 47289 - DNA, 25 bp, probe
tataaactctccagaacacatccag

SEQ ID NO: 47290 - DNA, 25 bp, probe
acattaaacagaaccactaccaaga

SEQ ID NO: 47291 - DNA, 25 bp, probe
tcactcagaatcagaagaaagaaga

SEQ ID NO: 47292 - DNA, 25 bp, probe
cctacattaaacagaaccactacca

SEQ ID NO: 47293 - DNA, 25 bp, probe
acctacattaaacagaaccactacc

SEQ ID NO: 47294 - DNA, 25 bp, probe
ccacctacattaaacagaaccacta

SEQ ID NO: 47295 - DNA, 25 bp, probe
cattaaacagaaccactaccaagag

SEQ ID NO: 47296 - DNA, 25 bp, probe
cacctacattaaacagaaccactac

SEQ ID NO: 47297 - DNA, 25 bp, probe
atataaactctccagaacacatcca

SEQ ID NO: 47298 - DNA, 25 bp, probe
aagaccacctacattaaacagaacc

SEQ ID NO: 47299 - DNA, 25 bp, probe
aaagaccacctacattaaacagaac

SEQ ID NO: 47300 - DNA, 25 bp, probe
attaaacagaaccactaccaagagc

SEQ ID NO: 47301 - DNA, 25 bp, probe
agttcactcagaatcagaagaaaga

SEQ ID NO: 47302 - DNA, 25 bp, probe
cagttcactcagaatcagaagaaag

SEQ ID NO: 47303 - DNA, 25 bp, probe
ccagttcactcagaatcagaagaaa

SEQ ID NO: 47304 - DNA, 25 bp, probe
gttcactcagaatcagaagaaagaa

SEQ ID NO: 47305 - DNA, 25 bp, probe
gatataaactctccagaacacatcc

SEQ ID NO: 47306 - DNA, 25 bp, probe
tacattaaacagaaccactaccaag

SEQ ID NO: 47307 - DNA, 25 bp, probe
ctacattaaacagaaccactaccaa

SEQ ID NO: 47308 - DNA, 25 bp, probe
cactcagaatcagaagaaagaagat

SEQ ID NO: 47309 - DNA, 25 bp, probe
ttcactcagaatcagaagaaagaag

SEQ ID NO: 47310 - DNA, 25 bp, probe
gaccacctacattaaacagaaccac

SEQ ID NO: 47311 - DNA, 25 bp, probe
agaccacctacattaaacagaacca

SEQ ID NO: 47312 - DNA, 25 bp, probe
accacctacattaaacagaaccact

SEQ ID NO: 47313 - DNA, 25 bp, probe
cgaatgaagatcacagagctggata

SEQ ID NO: 47314 - DNA, 25 bp, probe
gaagatataaactctccagaacaca

SEQ ID NO: 47315 - DNA, 25 bp, probe
agatataaactctccagaacacatc

SEQ ID NO: 47316 - DNA, 25 bp, probe
agaagatataaactctccagaacac

SEQ ID NO: 47317 - DNA, 25 bp, probe
ataaactctccagaacacatccagc

SEQ ID NO: 47318 - DNA, 25 bp, probe
ctggataaagacttggaagaggtca

SEQ ID NO: 47319 - DNA, 25 bp, probe
gaagatcacagagctggataaagac

SEQ ID NO: 47320 - DNA, 25 bp, probe
aagatataaactctccagaacacat

SEQ ID NO: 47321 - DNA, 25 bp, probe
gatcacagagctggataaagacttg

SEQ ID NO: 47322 - DNA, 25 bp, probe
agatcacagagctggataaagactt

SEQ ID NO: 47323 - DNA, 25 bp, probe
aagatcacagagctggataaagact

SEQ ID NO: 47324 - DNA, 25 bp, probe
tcgaacatgcaaagatcctatagaa

SEQ ID NO: 47325 - DNA, 25 bp, probe
aatgaagatcacagagctggataaa

SEQ ID NO: 47326 - DNA, 25 bp, probe
cgaacatgcaaagatcctatagaag

SEQ ID NO: 47327 - DNA, 25 bp, probe
ctcgaacatgcaaagatcctataga

SEQ ID NO: 47328 - DNA, 25 bp, probe
tggataaagacttggaagaggtcac

SEQ ID NO: 47329 - DNA, 25 bp, probe
gagaatgatgaatgaccaactgatg

SEQ ID NO: 47330 - DNA, 25 bp, probe
tgagaatgatgaatgaccaactgat

SEQ ID NO: 47331 - DNA, 25 bp, probe
tattattggcagacattgttgaagg

SEQ ID NO: 47332 - DNA, 25 bp, probe
gtgagaatgatgaatgaccaactga

SEQ ID NO: 47333 - DNA, 25 bp, probe
gtattatagaaggtctcaagtggct

SEQ ID NO: 47334 - DNA, 25 bp, probe
agtattatagaaggtctcaagtggc

SEQ ID NO: 47335 - DNA, 25 bp, probe
attattggcagacattgttgaagga

SEQ ID NO: 47336 - DNA, 25 bp, probe
ttattggcagacattgttgaaggaa

SEQ ID NO: 47337 - DNA, 25 bp, probe
aattacgaggagcactggtatatga

SEQ ID NO: 47338 - DNA, 25 bp, probe
caattacgaggagcactggtatatg

SEQ ID NO: 47339 - DNA, 25 bp, probe
tcaattacgaggagcactggtatat

SEQ ID NO: 47340 - DNA, 25 bp, probe
acaatagactacttactactcagca

SEQ ID NO: 47341 - DNA, 25 bp, probe
attacgaggagcactggtatatgag

SEQ ID NO: 47342 - DNA, 25 bp, probe
aatgatgaatgaccaactgatgctc

SEQ ID NO: 47343 - DNA, 25 bp, probe
gaatgatgaatgaccaactgatgct

SEQ ID NO: 47344 - DNA, 25 bp, probe
agaatgatgaatgaccaactgatgc

SEQ ID NO: 47345 - DNA, 25 bp, probe
cacaatagactacttactactcagc

SEQ ID NO: 47346 - DNA, 25 bp, probe
attatagaaggtctcaagtggctag

SEQ ID NO: 47347 - DNA, 25 bp, probe
agtgagaatgatgaatgaccaactg

SEQ ID NO: 47348 - DNA, 25 bp, probe
cagtgagaatgatgaatgaccaact

SEQ ID NO: 47349 - DNA, 25 bp, probe
tattatagaaggtctcaagtggcta

SEQ ID NO: 47350 - DNA, 25 bp, probe
atattattggcagacattgttgaag

SEQ ID NO: 47351 - DNA, 25 bp, probe
caatagactacttactactcagcaa

SEQ ID NO: 47352 - DNA, 25 bp, probe
ttcctggaatctatgatgctatctt

SEQ ID NO: 47353 - DNA, 25 bp, probe
gcagtgagaatgatgaatgaccaac

SEQ ID NO: 47354 - DNA, 25 bp, probe
ctcaattacgaggagcactggtata

SEQ ID NO: 47355 - DNA, 25 bp, probe
atgtccatccacagacgaatgtata

SEQ ID NO: 47356 - DNA, 25 bp, probe
ctggtatatgagcttgtggattcta

SEQ ID NO: 47357 - DNA, 25 bp, probe
tggtatatgagcttgtggattctaa

SEQ ID NO: 47358 - DNA, 25 bp, probe
tgtccatccacagacgaatgtataa

SEQ ID NO: 47359 - DNA, 25 bp, probe
ggtatccattacacaatagactact

SEQ ID NO: 47360 - DNA, 25 bp, probe
aagtattatagaaggtctcaagtgg

SEQ ID NO: 47361 - DNA, 25 bp, probe
actggtatatgagcttgtggattct

SEQ ID NO: 47362 - DNA, 25 bp, probe
cagtttggcagtttcctataaagtt

SEQ ID NO: 47363 - DNA, 25 bp, probe
aatgtccatccacagacgaatgtat

SEQ ID NO: 47364 - DNA, 25 bp, probe
acagtttggcagtttcctataaagt

SEQ ID NO: 47365 - DNA, 25 bp, probe
aaagccagacaaacaactacataaa

SEQ ID NO: 47366 - DNA, 25 bp, probe
gacgaatgtataaactgtggtatcc

SEQ ID NO: 47367 - DNA, 25 bp, probe
acacaatagactacttactactcag

SEQ ID NO: 47368 - DNA, 25 bp, probe
gcctggaaagaagtaaagaaacata

SEQ ID NO: 47369 - DNA, 25 bp, probe
cacaacaaatatgctggagaatcat

SEQ ID NO: 47370 - DNA, 25 bp, probe
acctttctgataacttatgaagcca

SEQ ID NO: 47371 - DNA, 25 bp, probe
cacctttctgataacttatgaagcc

SEQ ID NO: 47372 - DNA, 25 bp, probe
cctggaatctatgatgctatctttg

SEQ ID NO: 47373 - DNA, 25 bp, probe
ttcttagagcagatgtgtcattgtg

SEQ ID NO: 47374 - DNA, 25 bp, probe
gttcttagagcagatgtgtcattgt

SEQ ID NO: 47375 - DNA, 25 bp, probe
ttagagcagatgtgtcattgtgttc

SEQ ID NO: 47376 - DNA, 25 bp, probe
cttagagcagatgtgtcattgtgtt

SEQ ID NO: 47377 - DNA, 25 bp, probe
ggttcttagagcagatgtgtcattg

SEQ ID NO: 47378 - DNA, 25 bp, probe
gagcagatgtgtcattgtgttcatt

SEQ ID NO: 47379 - DNA, 25 bp, probe
tcttagagcagatgtgtcattgtgt

SEQ ID NO: 47380 - DNA, 25 bp, probe
tagagcagatgtgtcattgtgttca

SEQ ID NO: 47381 - DNA, 25 bp, probe
agagcagatgtgtcattgtgttcat

SEQ ID NO: 47382 - DNA, 25 bp, probe
gcagatgtgtcattgtgttcattta

SEQ ID NO: 47383 - DNA, 25 bp, probe
cggttcttagagcagatgtgtcatt

SEQ ID NO: 47384 - DNA, 25 bp, probe
tgtgtcattgtgttcatttagagaa

SEQ ID NO: 47385 - DNA, 25 bp, probe
atgtgtcattgtgttcatttagaga

SEQ ID NO: 47386 - DNA, 25 bp, probe
agatgtgtcattgtgttcatttaga

SEQ ID NO: 47387 - DNA, 25 bp, probe
cagatgtgtcattgtgttcatttag

SEQ ID NO: 47388 - DNA, 25 bp, probe
gatgtgtcattgtgttcatttagag

SEQ ID NO: 47389 - DNA, 25 bp, probe
tctagtttaatcccatgttgacagg

SEQ ID NO: 47390 - DNA, 25 bp, probe
agcagatgtgtcattgtgttcattt

SEQ ID NO: 47391 - DNA, 25 bp, probe
gtgtcattgtgttcatttagagaaa

SEQ ID NO: 47392 - DNA, 25 bp, probe
tgtcattgtgttcatttagagaaac

SEQ ID NO: 47393 - DNA, 25 bp, probe
ctgtagagccatgtagatagccact

SEQ ID NO: 47394 - DNA, 25 bp, probe
ctctgtagagccatgtagatagcca

SEQ ID NO: 47395 - DNA, 25 bp, probe
tctgtagagccatgtagatagccac

SEQ ID NO: 47396 - DNA, 25 bp, probe
ggtctagtttaatcccatgttgaca

SEQ ID NO: 47397 - DNA, 25 bp, probe
gtctagtttaatcccatgttgacag

SEQ ID NO: 47398 - DNA, 25 bp, probe
ctagtttaatcccatgttgacagga

SEQ ID NO: 47399 - DNA, 25 bp, probe
tagagccatgtagatagccactcac

SEQ ID NO: 47400 - DNA, 25 bp, probe
gtagagccatgtagatagccactca

SEQ ID NO: 47401 - DNA, 25 bp, probe
tgtagagccatgtagatagccactc

SEQ ID NO: 47402 - DNA, 25 bp, probe
cggtctagtttaatcccatgttgac

SEQ ID NO: 47403 - DNA, 25 bp, probe
aacgtagcaagatctgtatatgaat

SEQ ID NO: 47404 - DNA, 25 bp, probe
gcggtctagtttaatcccatgttga

SEQ ID NO: 47405 - DNA, 25 bp, probe
acgtagcaagatctgtatatgaata

SEQ ID NO: 47406 - DNA, 25 bp, probe
tgcggtctagtttaatcccatgttg

SEQ ID NO: 47407 - DNA, 25 bp, probe
gtgcggtctagtttaatcccatgtt

SEQ ID NO: 47408 - DNA, 25 bp, probe
actgtaaacgtagcaagatctgtat

SEQ ID NO: 47409 - DNA, 25 bp, probe
tactgtaaacgtagcaagatctgta

SEQ ID NO: 47410 - DNA, 25 bp, probe
ctgtaaacgtagcaagatctgtata

SEQ ID NO: 47411 - DNA, 25 bp, probe
cattgtgttcatttagagaaacagc

SEQ ID NO: 47412 - DNA, 25 bp, probe
aaacgtagcaagatctgtatatgaa

SEQ ID NO: 47413 - DNA, 25 bp, probe
gtgtgcggtctagtttaatcccatg

SEQ ID NO: 47414 - DNA, 25 bp, probe
gcggttcttagagcagatgtgtcat

SEQ ID NO: 47415 - DNA, 25 bp, probe
tttctactgtaaacgtagcaagatc

SEQ ID NO: 47416 - DNA, 25 bp, probe
tagtttaatcccatgttgacaggat

SEQ ID NO: 47417 - DNA, 25 bp, probe
tccaacttcaattacttctaccacc

SEQ ID NO: 47418 - DNA, 25 bp, probe
ctccaacttcaattacttctaccac

SEQ ID NO: 47419 - DNA, 25 bp, probe
tctccaacttcaattacttctacca

SEQ ID NO: 47420 - DNA, 25 bp, probe
gtctccaacttcaattacttctacc

SEQ ID NO: 47421 - DNA, 25 bp, probe
tgtctccaacttcaattacttctac

SEQ ID NO: 47422 - DNA, 25 bp, probe
ccaacttcaattacttctaccaccg

SEQ ID NO: 47423 - DNA, 25 bp, probe
ttgtctccaacttcaattacttcta

SEQ ID NO: 47424 - DNA, 25 bp, probe
ttctcttcattggagtcatcctctt

SEQ ID NO: 47425 - DNA, 25 bp, probe
ttgctcatcttctttctcttcattg

SEQ ID NO: 47426 - DNA, 25 bp, probe
gttgctcatcttctttctcttcatt

SEQ ID NO: 47427 - DNA, 25 bp, probe
tcttcattggagtcatcctcttctc

SEQ ID NO: 47428 - DNA, 25 bp, probe
ctcttcattggagtcatcctcttct

SEQ ID NO: 47429 - DNA, 25 bp, probe
tctcttcattggagtcatcctcttc

SEQ ID NO: 47430 - DNA, 25 bp, probe
gctcatcttctttctcttcattgga

SEQ ID NO: 47431 - DNA, 25 bp, probe
tgctcatcttctttctcttcattgg

SEQ ID NO: 47432 - DNA, 25 bp, probe
ggttgctcatcttctttctcttcat

SEQ ID NO: 47433 - DNA, 25 bp, probe
catcccaggagaaattgaaagaatc

SEQ ID NO: 47434 - DNA, 25 bp, probe
acatcccaggagaaattgaaagaat

SEQ ID NO: 47435 - DNA, 25 bp, probe
tgtcattgtctccaacttcaattac

SEQ ID NO: 47436 - DNA, 25 bp, probe
aacatcccaggagaaattgaaagaa

SEQ ID NO: 47437 - DNA, 25 bp, probe
gtcattgtctccaacttcaattact

SEQ ID NO: 47438 - DNA, 25 bp, probe
ctgtcattgtctccaacttcaatta

SEQ ID NO: 47439 - DNA, 25 bp, probe
gaacatcccaggagaaattgaaaga

SEQ ID NO: 47440 - DNA, 25 bp, probe
agaacatcccaggagaaattgaaag

SEQ ID NO: 47441 - DNA, 25 bp, probe
cagaacatcccaggagaaattgaaa

SEQ ID NO: 47442 - DNA, 25 bp, probe
tcttctttctcttcattggagtcat

SEQ ID NO: 47443 - DNA, 25 bp, probe
atcttctttctcttcattggagtca

SEQ ID NO: 47444 - DNA, 25 bp, probe
tcatcttctttctcttcattggagt

SEQ ID NO: 47445 - DNA, 25 bp, probe
tcattgtctccaacttcaattactt

SEQ ID NO: 47446 - DNA, 25 bp, probe
cctgtcattgtctccaacttcaatt

SEQ ID NO: 47447 - DNA, 25 bp, probe
cttctttctcttcattggagtcatc

SEQ ID NO: 47448 - DNA, 25 bp, probe
catcttctttctcttcattggagtc

SEQ ID NO: 47449 - DNA, 25 bp, probe
ctcatcttctttctcttcattggag

SEQ ID NO: 47450 - DNA, 25 bp, probe
attgtctccaacttcaattacttct

SEQ ID NO: 47451 - DNA, 25 bp, probe
cattgtctccaacttcaattacttc

SEQ ID NO: 47452 - DNA, 25 bp, probe
ctcaacagtgtaggctcaagaatgg

SEQ ID NO: 47453 - DNA, 25 bp, probe
gcacagactctcttaataagaccaa

SEQ ID NO: 47454 - DNA, 25 bp, probe
cttaataagaccaatggtggctgtt

SEQ ID NO: 47455 - DNA, 25 bp, probe
ttaataagaccaatggtggctgttc

SEQ ID NO: 47456 - DNA, 25 bp, probe
cagcacagactctcttaataagacc

SEQ ID NO: 47457 - DNA, 25 bp, probe
agcacagactctcttaataagacca

SEQ ID NO: 47458 - DNA, 25 bp, probe
actctcttaataagaccaatggtgg

SEQ ID NO: 47459 - DNA, 25 bp, probe
gcagcacagactctcttaataagac

SEQ ID NO: 47460 - DNA, 25 bp, probe
cagactctcttaataagaccaatgg

SEQ ID NO: 47461 - DNA, 25 bp, probe
tacaatatgagccttctgaagcatc

SEQ ID NO: 47462 - DNA, 25 bp, probe
ctacaatatgagccttctgaagcat

SEQ ID NO: 47463 - DNA, 25 bp, probe
tctacaatatgagccttctgaagca

SEQ ID NO: 47464 - DNA, 25 bp, probe
ctctacaatatgagccttctgaagc

SEQ ID NO: 47465 - DNA, 25 bp, probe
caatatgagccttctgaagcatcaa

SEQ ID NO: 47466 - DNA, 25 bp, probe
acaatatgagccttctgaagcatca

SEQ ID NO: 47467 - DNA, 25 bp, probe
ccattgcctaaagaagaatagccag

SEQ ID NO: 47468 - DNA, 25 bp, probe
ctgcccattgcctaaagaagaatag

SEQ ID NO: 47469 - DNA, 25 bp, probe
atcaaagccttagaccagatgaaga

SEQ ID NO: 47470 - DNA, 25 bp, probe
ctgagaaggtgacagagttcatgtt

SEQ ID NO: 47471 - DNA, 25 bp, probe
aaagccttagaccagatgaagactc

SEQ ID NO: 47472 - DNA, 25 bp, probe
aatatgagccttctgaagcatcaaa

SEQ ID NO: 47473 - DNA, 25 bp, probe
aagccttagaccagatgaagactcc

SEQ ID NO: 47474 - DNA, 25 bp, probe
gagaaggtgacagagttcatgttgt

SEQ ID NO: 47475 - DNA, 25 bp, probe
tgagaaggtgacagagttcatgttg

SEQ ID NO: 47476 - DNA, 25 bp, probe
caaagccttagaccagatgaagact

SEQ ID NO: 47477 - DNA, 25 bp, probe
atatgagccttctgaagcatcaaag

SEQ ID NO: 47478 - DNA, 25 bp, probe
agaaggtgacagagttcatgttgtg

SEQ ID NO: 47479 - DNA, 25 bp, probe
tcaaagccttagaccagatgaagac

SEQ ID NO: 47480 - DNA, 25 bp, probe
cattgcctaaagaagaatagccagg

SEQ ID NO: 47481 - DNA, 25 bp, probe
cccattgcctaaagaagaatagcca

SEQ ID NO: 47482 - DNA, 25 bp, probe
gaaggtgacagagttcatgttgtgt

SEQ ID NO: 47483 - DNA, 25 bp, probe
cttctgaagcatcaaagccttagac

SEQ ID NO: 47484 - DNA, 25 bp, probe
attgcctaaagaagaatagccaggt

SEQ ID NO: 47485 - DNA, 25 bp, probe
gaagcatcaaagccttagaccagat

SEQ ID NO: 47486 - DNA, 25 bp, probe
aaggtgacagagttcatgttgtgtg

SEQ ID NO: 47487 - DNA, 25 bp, probe
cttagaccagatgaagactccagcc

SEQ ID NO: 47488 - DNA, 25 bp, probe
ccttagaccagatgaagactccagc

SEQ ID NO: 47489 - DNA, 25 bp, probe
gccttagaccagatgaagactccag

SEQ ID NO: 47490 - DNA, 25 bp, probe
tgcccattgcctaaagaagaatagc

SEQ ID NO: 47491 - DNA, 25 bp, probe
gctgcccattgcctaaagaagaata

SEQ ID NO: 47492 - DNA, 25 bp, probe
ttctgaagcatcaaagccttagacc

SEQ ID NO: 47493 - DNA, 25 bp, probe
ttgcctaaagaagaatagccaggtc

SEQ ID NO: 47494 - DNA, 25 bp, probe
agccttagaccagatgaagactcca

SEQ ID NO: 47495 - DNA, 25 bp, probe
ccttctgaagcatcaaagccttaga

SEQ ID NO: 47496 - DNA, 25 bp, probe
ggtgcttcaaggtatcacatcatgg

SEQ ID NO: 47497 - DNA, 25 bp, probe
ctagagcttactctgagaaggtgac

SEQ ID NO: 47498 - DNA, 25 bp, probe
tagaccagatgaagactccagccat

SEQ ID NO: 47499 - DNA, 25 bp, probe
ttagaccagatgaagactccagcca

SEQ ID NO: 47500 - DNA, 25 bp, probe
gcctaaagaagaatagccaggtctg

SEQ ID NO: 47501 - DNA, 25 bp, probe
aatgacatgtgtgctagagcttact

SEQ ID NO: 47502 - DNA, 25 bp, probe
caatgacatgtgtgctagagcttac

SEQ ID NO: 47503 - DNA, 25 bp, probe
tagagcttactctgagaaggtgaca

SEQ ID NO: 47504 - DNA, 25 bp, probe
gcccattgcctaaagaagaatagcc

SEQ ID NO: 47505 - DNA, 25 bp, probe
gcttcttattgatagatggcattgg

SEQ ID NO: 47506 - DNA, 25 bp, probe
ttcagacagacctcatctataacct

SEQ ID NO: 47507 - DNA, 25 bp, probe
ctgaagaatatggtaacgaagacaa

SEQ ID NO: 47508 - DNA, 25 bp, probe
gctctgaagaatatggtaacgaaga

SEQ ID NO: 47509 - DNA, 25 bp, probe
tctgaagaatatggtaacgaagaca

SEQ ID NO: 47510 - DNA, 25 bp, probe
tctgctgcttcttattgatagatgg

SEQ ID NO: 47511 - DNA, 25 bp, probe
ccatctgctgcttcttattgataga

SEQ ID NO: 47512 - DNA, 25 bp, probe
tcagacagacctcatctataacctc

SEQ ID NO: 47513 - DNA, 25 bp, probe
gacagacctcatctataacctcctt

SEQ ID NO: 47514 - DNA, 25 bp, probe
ctctgaagaatatggtaacgaagac

SEQ ID NO: 47515 - DNA, 25 bp, probe
agacctcatctataacctccttgaa

SEQ ID NO: 47516 - DNA, 25 bp, probe
acagacctcatctataacctccttg

SEQ ID NO: 47517 - DNA, 25 bp, probe
gagccaaccttatcaacaacatctt

SEQ ID NO: 47518 - DNA, 25 bp, probe
cagacctcatctataacctccttga

SEQ ID NO: 47519 - DNA, 25 bp, probe
cttcttattgatagatggcattgga

SEQ ID NO: 47520 - DNA, 25 bp, probe
tgaagaatatggtaacgaagacaat

SEQ ID NO: 47521 - DNA, 25 bp, probe
tattgatagatggcattggaatgtg

SEQ ID NO: 47522 - DNA, 25 bp, probe
agacagacctcatctataacctcct

SEQ ID NO: 47523 - DNA, 25 bp, probe
cagacagacctcatctataacctcc

SEQ ID NO: 47524 - DNA, 25 bp, probe
gccatctgctgcttcttattgatag

SEQ ID NO: 47525 - DNA, 25 bp, probe
ttcttattgatagatggcattggaa

SEQ ID NO: 47526 - DNA, 25 bp, probe
attgatagatggcattggaatgtgg

SEQ ID NO: 47527 - DNA, 25 bp, probe
ttattgatagatggcattggaatgt

SEQ ID NO: 47528 - DNA, 25 bp, probe
ctgctgcttcttattgatagatggc

SEQ ID NO: 47529 - DNA, 25 bp, probe
ttctgttctattcctcagtatccag

SEQ ID NO: 47530 - DNA, 25 bp, probe
tcttattgatagatggcattggaat

SEQ ID NO: 47531 - DNA, 25 bp, probe
gatagatggcattggaatgtggtac

SEQ ID NO: 47532 - DNA, 25 bp, probe
tgatagatggcattggaatgtggta

SEQ ID NO: 47533 - DNA, 25 bp, probe
attctgttctattcctcagtatcca

SEQ ID NO: 47534 - DNA, 25 bp, probe
agctctgaagaatatggtaacgaag

SEQ ID NO: 47535 - DNA, 25 bp, probe
cttattgatagatggcattggaatg

SEQ ID NO: 47536 - DNA, 25 bp, probe
tagctctgaagaatatggtaacgaa

SEQ ID NO: 47537 - DNA, 25 bp, probe
ttagctctgaagaatatggtaacga

SEQ ID NO: 47538 - DNA, 25 bp, probe
tgtctttgggcagtatgtagttatt

SEQ ID NO: 47539 - DNA, 25 bp, probe
gaatggagataacttccgaacacag

SEQ ID NO: 47540 - DNA, 25 bp, probe
ctgaatggagataacttccgaacac

SEQ ID NO: 47541 - DNA, 25 bp, probe
gtgtctttgggcagtatgtagttat

SEQ ID NO: 47542 - DNA, 25 bp, probe
agtagcctgaatggagataacttcc

SEQ ID NO: 47543 - DNA, 25 bp, probe
aattctgttctattcctcagtatcc

SEQ ID NO: 47544 - DNA, 25 bp, probe
gtctttgggcagtatgtagttattt

SEQ ID NO: 47545 - DNA, 25 bp, probe
ttgatagatggcattggaatgtggt

SEQ ID NO: 47546 - DNA, 25 bp, probe
atggagataacttccgaacacagaa

SEQ ID NO: 47547 - DNA, 25 bp, probe
aatggagataacttccgaacacaga

SEQ ID NO: 47548 - DNA, 25 bp, probe
agccaaccttatcaacaacatcttt

SEQ ID NO: 47549 - DNA, 25 bp, probe
ttgctatgtgctcctaatgtatcta

SEQ ID NO: 47550 - DNA, 25 bp, probe
atgtgctcctaatgtatctagtgtg

SEQ ID NO: 47551 - DNA, 25 bp, probe
cctaatgtatctagtgtgtcctgtg

SEQ ID NO: 47552 - DNA, 25 bp, probe
tcctaatgtatctagtgtgtcctgt

SEQ ID NO: 47553 - DNA, 25 bp, probe
ctcctaatgtatctagtgtgtcctg

SEQ ID NO: 47554 - DNA, 25 bp, probe
gtgctcctaatgtatctagtgtgtc

SEQ ID NO: 47555 - DNA, 25 bp, probe
gctatgtgctcctaatgtatctagt

SEQ ID NO: 47556 - DNA, 25 bp, probe
tgctatgtgctcctaatgtatctag

SEQ ID NO: 47557 - DNA, 25 bp, probe
ctaatgtatctagtgtgtcctgtga

SEQ ID NO: 47558 - DNA, 25 bp, probe
tgtgctcctaatgtatctagtgtgt

SEQ ID NO: 47559 - DNA, 25 bp, probe
gctcctaatgtatctagtgtgtcct

SEQ ID NO: 47560 - DNA, 25 bp, probe
caacactcatcacacttcattgtaa

SEQ ID NO: 47561 - DNA, 25 bp, probe
tgctcctaatgtatctagtgtgtcc

SEQ ID NO: 47562 - DNA, 25 bp, probe
tatgtgctcctaatgtatctagtgt

SEQ ID NO: 47563 - DNA, 25 bp, probe
gatcttcttgaccttctccatcatc

SEQ ID NO: 47564 - DNA, 25 bp, probe
taatgtatctagtgtgtcctgtgac

SEQ ID NO: 47565 - DNA, 25 bp, probe
tgacaacactcatcacacttcattg

SEQ ID NO: 47566 - DNA, 25 bp, probe
ctatgtgctcctaatgtatctagtg

SEQ ID NO: 47567 - DNA, 25 bp, probe
atcttcttgaccttctccatcatcg

SEQ ID NO: 47568 - DNA, 25 bp, probe
ttcctatagactgtaagctccatga

SEQ ID NO: 47569 - DNA, 25 bp, probe
tttgctatgtgctcctaatgtatct

SEQ ID NO: 47570 - DNA, 25 bp, probe
actttgctatgtgctcctaatgtat

SEQ ID NO: 47571 - DNA, 25 bp, probe
ttactttgctatgtgctcctaatgt

SEQ ID NO: 47572 - DNA, 25 bp, probe
gttactttgctatgtgctcctaatg

SEQ ID NO: 47573 - DNA, 25 bp, probe
tgttactttgctatgtgctcctaat

SEQ ID NO: 47574 - DNA, 25 bp, probe
atgttactttgctatgtgctcctaa

SEQ ID NO: 47575 - DNA, 25 bp, probe
ttatgttactttgctatgtgctcct

SEQ ID NO: 47576 - DNA, 25 bp, probe
gacctcatcatatttgtggactttg

SEQ ID NO: 47577 - DNA, 25 bp, probe
ctttgctatgtgctcctaatgtatc

SEQ ID NO: 47578 - DNA, 25 bp, probe
tatgttactttgctatgtgctccta

SEQ ID NO: 47579 - DNA, 25 bp, probe
attatgttactttgctatgtgctcc

SEQ ID NO: 47580 - DNA, 25 bp, probe
tactttgctatgtgctcctaatgta

SEQ ID NO: 47581 - DNA, 25 bp, probe
gtgataattaccatccttgaccagg

SEQ ID NO: 47582 - DNA, 25 bp, probe
catttgctttcctctgagattctaa

SEQ ID NO: 47583 - DNA, 25 bp, probe
tttgctttcctctgagattctaaga

SEQ ID NO: 47584 - DNA, 25 bp, probe
acaggtgataattaccatccttgac

SEQ ID NO: 47585 - DNA, 25 bp, probe
tcctatagactgtaagctccatgag

SEQ ID NO: 47586 - DNA, 25 bp, probe
acctcatcatatttgtggactttga

SEQ ID NO: 47587 - DNA, 25 bp, probe
tgacctcatcatatttgtggacttt

SEQ ID NO: 47588 - DNA, 25 bp, probe
tcattagatacagtagtgtcatcac

SEQ ID NO: 47589 - DNA, 25 bp, probe
ggtgataattaccatccttgaccag

SEQ ID NO: 47590 - DNA, 25 bp, probe
caggtgataattaccatccttgacc

SEQ ID NO: 47591 - DNA, 25 bp, probe
atttgctttcctctgagattctaag

SEQ ID NO: 47592 - DNA, 25 bp, probe
cctcatcatatttgtggactttgaa

SEQ ID NO: 47593 - DNA, 25 bp, probe
tcattgagaagtcagtgcgtaagat

SEQ ID NO: 47594 - DNA, 25 bp, probe
cattgagaagtcagtgcgtaagatc

SEQ ID NO: 47595 - DNA, 25 bp, probe
aaggaaactgatgaacaccaatgat

SEQ ID NO: 47596 - DNA, 25 bp, probe
aaaggaaactgatgaacaccaatga

SEQ ID NO: 47597 - DNA, 25 bp, probe
gaaactgatgaacaccaatgatctg

SEQ ID NO: 47598 - DNA, 25 bp, probe
ggaaactgatgaacaccaatgatct

SEQ ID NO: 47599 - DNA, 25 bp, probe
aggaaactgatgaacaccaatgatc

SEQ ID NO: 47600 - DNA, 25 bp, probe
aactgatgaacaccaatgatctgga

SEQ ID NO: 47601 - DNA, 25 bp, probe
attgagaagtcagtgcgtaagatcg

SEQ ID NO: 47602 - DNA, 25 bp, probe
ctcattgagaagtcagtgcgtaaga

SEQ ID NO: 47603 - DNA, 25 bp, probe
actgatgaacaccaatgatctggag

SEQ ID NO: 47604 - DNA, 25 bp, probe
aaacaatctccaccatgaaagtgat

SEQ ID NO: 47605 - DNA, 25 bp, probe
cgagtatgcgttgagacatttgtac

SEQ ID NO: 47606 - DNA, 25 bp, probe
gatgaacaccaatgatctggaggag

SEQ ID NO: 47607 - DNA, 25 bp, probe
aacaatctccaccatgaaagtgatg

SEQ ID NO: 47608 - DNA, 25 bp, probe
cctcattgagaagtcagtgcgtaag

SEQ ID NO: 47609 - DNA, 25 bp, probe
ctgatgaacaccaatgatctggagg

SEQ ID NO: 47610 - DNA, 25 bp, probe
aaactgatgaacaccaatgatctgg

SEQ ID NO: 47611 - DNA, 25 bp, probe
gaaaaggaaactgatgaacaccaat

SEQ ID NO: 47612 - DNA, 25 bp, probe
aaaaggaaactgatgaacaccaatg

SEQ ID NO: 47613 - DNA, 25 bp, probe
atgaacaccaatgatctggaggagt

SEQ ID NO: 47614 - DNA, 25 bp, probe
tgatgaacaccaatgatctggagga

SEQ ID NO: 47615 - DNA, 25 bp, probe
atgaaaaggaaactgatgaacacca

SEQ ID NO: 47616 - DNA, 25 bp, probe
tgaaaaggaaactgatgaacaccaa

SEQ ID NO: 47617 - DNA, 25 bp, probe
agaagtcagtgcgtaagatcgtctc

SEQ ID NO: 47618 - DNA, 25 bp, probe
gagaagtcagtgcgtaagatcgtct

SEQ ID NO: 47619 - DNA, 25 bp, probe
ttgagaagtcagtgcgtaagatcgt

SEQ ID NO: 47620 - DNA, 25 bp, probe
acctcattgagaagtcagtgcgtaa

SEQ ID NO: 47621 - DNA, 25 bp, probe
aaacaaaacaatctccaccatgaaa

SEQ ID NO: 47622 - DNA, 25 bp, probe
aacaaaacaatctccaccatgaaag

SEQ ID NO: 47623 - DNA, 25 bp, probe
gaaacaaaacaatctccaccatgaa

SEQ ID NO: 47624 - DNA, 25 bp, probe
tgagaagtcagtgcgtaagatcgtc

SEQ ID NO: 47625 - DNA, 25 bp, probe
aaagtgatgcagtttcagggtatga

SEQ ID NO: 47626 - DNA, 25 bp, probe
catgaaaaggaaactgatgaacacc

SEQ ID NO: 47627 - DNA, 25 bp, probe
acaaaacaatctccaccatgaaagt

SEQ ID NO: 47628 - DNA, 25 bp, probe
tgaacaccaatgatctggaggagtc

SEQ ID NO: 47629 - DNA, 25 bp, probe
gacgtggaagatctgactaaagaga

SEQ ID NO: 47630 - DNA, 25 bp, probe
gtcaacctttgtgagaagccgtatc

SEQ ID NO: 47631 - DNA, 25 bp, probe
cacttcacaggataaaattgtccat

SEQ ID NO: 47632 - DNA, 25 bp, probe
ggaagatctgactaaagagaccctg

SEQ ID NO: 47633 - DNA, 25 bp, probe
acgtggaagatctgactaaagagac

SEQ ID NO: 47634 - DNA, 25 bp, probe
gcagtatggaaacaaaacaatctcc

SEQ ID NO: 47635 - DNA, 25 bp, probe
tccacttcacaggataaaattgtcc

SEQ ID NO: 47636 - DNA, 25 bp, probe
gagtatgcgttgagacatttgtacg

SEQ ID NO: 47637 - DNA, 25 bp, probe
tatatcctccttctcctgttccatt

SEQ ID NO: 47638 - DNA, 25 bp, probe
ttgttctcctatatcctccttctcc

SEQ ID NO: 47639 - DNA, 25 bp, probe
ctatatcctccttctcctgttccat

SEQ ID NO: 47640 - DNA, 25 bp, probe
ctcctatatcctccttctcctgttc

SEQ ID NO: 47641 - DNA, 25 bp, probe
gttctcctatatcctccttctcctg

SEQ ID NO: 47642 - DNA, 25 bp, probe
tctcctatatcctccttctcctgtt

SEQ ID NO: 47643 - DNA, 25 bp, probe
ttctcctatatcctccttctcctgt

SEQ ID NO: 47644 - DNA, 25 bp, probe
tgttctcctatatcctccttctcct

SEQ ID NO: 47645 - DNA, 25 bp, probe
tcctatatcctccttctcctgttcc

SEQ ID NO: 47646 - DNA, 25 bp, probe
cctatatcctccttctcctgttcca

SEQ ID NO: 47647 - DNA, 25 bp, probe
gtcctctcttaataggtggcactac

SEQ ID NO: 47648 - DNA, 25 bp, probe
atatcctccttctcctgttccattt

SEQ ID NO: 47649 - DNA, 25 bp, probe
tttgttctcctatatcctccttctc

SEQ ID NO: 47650 - DNA, 25 bp, probe
tgtcctctcttaataggtggcacta

SEQ ID NO: 47651 - DNA, 25 bp, probe
tatcctccttctcctgttccatttc

SEQ ID NO: 47652 - DNA, 25 bp, probe
tgtgtcattagtcctttgtctaagt

SEQ ID NO: 47653 - DNA, 25 bp, probe
actgtgtcattagtcctttgtctaa

SEQ ID NO: 47654 - DNA, 25 bp, probe
ctgttccatttcagttcagtttcag

SEQ ID NO: 47655 - DNA, 25 bp, probe
atgtcctctcttaataggtggcact

SEQ ID NO: 47656 - DNA, 25 bp, probe
tgttccatttcagttcagtttcagc

SEQ ID NO: 47657 - DNA, 25 bp, probe
ctgtgtcattagtcctttgtctaag

SEQ ID NO: 47658 - DNA, 25 bp, probe
cattagtcctttgtctaagtagggc

SEQ ID NO: 47659 - DNA, 25 bp, probe
tcattagtcctttgtctaagtaggg

SEQ ID NO: 47660 - DNA, 25 bp, probe
tcctgttccatttcagttcagtttc

SEQ ID NO: 47661 - DNA, 25 bp, probe
ctcctgttccatttcagttcagttt

SEQ ID NO: 47662 - DNA, 25 bp, probe
cttctcctgttccatttcagttcag

SEQ ID NO: 47663 - DNA, 25 bp, probe
cctgttccatttcagttcagtttca

SEQ ID NO: 47664 - DNA, 25 bp, probe
tcctctcttaataggtggcactacc

SEQ ID NO: 47665 - DNA, 25 bp, probe
catgtcctctcttaataggtggcac

SEQ ID NO: 47666 - DNA, 25 bp, probe
gtcattagtcctttgtctaagtagg

SEQ ID NO: 47667 - DNA, 25 bp, probe
tctcctgttccatttcagttcagtt

SEQ ID NO: 47668 - DNA, 25 bp, probe
ttctcctgttccatttcagttcagt

SEQ ID NO: 47669 - DNA, 25 bp, probe
gtgtcattagtcctttgtctaagta

SEQ ID NO: 47670 - DNA, 25 bp, probe
gttccatttcagttcagtttcagcg

SEQ ID NO: 47671 - DNA, 25 bp, probe
tgtcattagtcctttgtctaagtag

SEQ ID NO: 47672 - DNA, 25 bp, probe
atcctccttctcctgttccatttca

SEQ ID NO: 47673 - DNA, 25 bp, probe
tccttctcctgttccatttcagttc

SEQ ID NO: 47674 - DNA, 25 bp, probe
ctccttctcctgttccatttcagtt

SEQ ID NO: 47675 - DNA, 25 bp, probe
ccttctcctgttccatttcagttca

SEQ ID NO: 47676 - DNA, 25 bp, probe
acccatcttttgttctcctatatcc

SEQ ID NO: 47677 - DNA, 25 bp, probe
cccatcttttgttctcctatatcct

SEQ ID NO: 47678 - DNA, 25 bp, probe
ttttgttctcctatatcctccttct

SEQ ID NO: 47679 - DNA, 25 bp, probe
tcttttgttctcctatatcctcctt

SEQ ID NO: 47680 - DNA, 25 bp, probe
ccatgtcctctcttaataggtggca

SEQ ID NO: 47681 - DNA, 25 bp, probe
caaaaccaaatctgggtgtcagagg

SEQ ID NO: 47682 - DNA, 25 bp, probe
gcaaaaccaaatctgggtgtcagag

SEQ ID NO: 47683 - DNA, 25 bp, probe
cttcttcgtccgtttggtaggtaaa

SEQ ID NO: 47684 - DNA, 25 bp, probe
tcttcttcgtccgtttggtaggtaa

SEQ ID NO: 47685 - DNA, 25 bp, probe
ctcttcttcgtccgtttggtaggta

SEQ ID NO: 47686 - DNA, 25 bp, probe
ttcttcgtccgtttggtaggtaaaa

SEQ ID NO: 47687 - DNA, 25 bp, probe
aactctcatccgcgatatgttactg

SEQ ID NO: 47688 - DNA, 25 bp, probe
ctctcatccgcgatatgttactgtc

SEQ ID NO: 47689 - DNA, 25 bp, probe
ctcatccgcgatatgttactgtctg

SEQ ID NO: 47690 - DNA, 25 bp, probe
tctcatccgcgatatgttactgtct

SEQ ID NO: 47691 - DNA, 25 bp, probe
atatgttactgtctgggagcagctt

SEQ ID NO: 47692 - DNA, 25 bp, probe
ttacatgtccatccagtgctcctag

SEQ ID NO: 47693 - DNA, 25 bp, probe
cttacatgtccatccagtgctccta

SEQ ID NO: 47694 - DNA, 25 bp, probe
gaaactctcatccgcgatatgttac

SEQ ID NO: 47695 - DNA, 25 bp, probe
actctcatccgcgatatgttactgt

SEQ ID NO: 47696 - DNA, 25 bp, probe
aaactctcatccgcgatatgttact

SEQ ID NO: 47697 - DNA, 25 bp, probe
gatatgttactgtctgggagcagct

SEQ ID NO: 47698 - DNA, 25 bp, probe
tatgttactgtctgggagcagcttc

SEQ ID NO: 47699 - DNA, 25 bp, probe
cgaaactctcatccgcgatatgtta

SEQ ID NO: 47700 - DNA, 25 bp, probe
cttcaactggccttacatgtccatc

SEQ ID NO: 47701 - DNA, 25 bp, probe
cgatatgttactgtctgggagcagc

SEQ ID NO: 47702 - DNA, 25 bp, probe
gcgatatgttactgtctgggagcag

SEQ ID NO: 47703 - DNA, 25 bp, probe
tcatccgcgatatgttactgtctgg

SEQ ID NO: 47704 - DNA, 25 bp, probe
tcttcgtccgtttggtaggtaaaac

SEQ ID NO: 47705 - DNA, 25 bp, probe
cttcgtccgtttggtaggtaaaacc

SEQ ID NO: 47706 - DNA, 25 bp, probe
ttcaactggccttacatgtccatcc

SEQ ID NO: 47707 - DNA, 25 bp, probe
tcgaaactctcatccgcgatatgtt

SEQ ID NO: 47708 - DNA, 25 bp, probe
catccgcgatatgttactgtctggg

SEQ ID NO: 47709 - DNA, 25 bp, probe
catcgaaactctcatccgcgatatg

SEQ ID NO: 47710 - DNA, 25 bp, probe
atcgaaactctcatccgcgatatgt

SEQ ID NO: 47711 - DNA, 25 bp, probe
ccatcgaaactctcatccgcgatat

SEQ ID NO: 47712 - DNA, 25 bp, probe
atgattctacagctaggacttaacc

SEQ ID NO: 47713 - DNA, 25 bp, probe
ataaccatgagcactactctaccat

SEQ ID NO: 47714 - DNA, 25 bp, probe
atgaatgattctacagctaggactt

SEQ ID NO: 47715 - DNA, 25 bp, probe
aatgaatgattctacagctaggact

SEQ ID NO: 47716 - DNA, 25 bp, probe
tgaatgattctacagctaggactta

SEQ ID NO: 47717 - DNA, 25 bp, probe
cataaccatgagcactactctacca

SEQ ID NO: 47718 - DNA, 25 bp, probe
aatcaaggatgctcagtttaaggta

SEQ ID NO: 47719 - DNA, 25 bp, probe
gaaatcaaggatgctcagtttaagg

SEQ ID NO: 47720 - DNA, 25 bp, probe
ggaaatcaaggatgctcagtttaag

SEQ ID NO: 47721 - DNA, 25 bp, probe
aaatcaaggatgctcagtttaaggt

SEQ ID NO: 47722 - DNA, 25 bp, probe
ttaaccttgaaatggaaagtcttgc

SEQ ID NO: 47723 - DNA, 25 bp, probe
ctccaagtagtccaccttcatttaa

SEQ ID NO: 47724 - DNA, 25 bp, probe
tccaagtagtccaccttcatttaac

SEQ ID NO: 47725 - DNA, 25 bp, probe
tctccaagtagtccaccttcattta

SEQ ID NO: 47726 - DNA, 25 bp, probe
atgtctccaagtagtccaccttcat

SEQ ID NO: 47727 - DNA, 25 bp, probe
aatgattctacagctaggacttaac

SEQ ID NO: 47728 - DNA, 25 bp, probe
attctacagctaggacttaaccttg

SEQ ID NO: 47729 - DNA, 25 bp, probe
gggaaatcaaggatgctcagtttaa

SEQ ID NO: 47730 - DNA, 25 bp, probe
gattctacagctaggacttaacctt

SEQ ID NO: 47731 - DNA, 25 bp, probe
tgattctacagctaggacttaacct

SEQ ID NO: 47732 - DNA, 25 bp, probe
agtccaccttcatttaactctttga

SEQ ID NO: 47733 - DNA, 25 bp, probe
tctacagctaggacttaaccttgaa

SEQ ID NO: 47734 - DNA, 25 bp, probe
ttctacagctaggacttaaccttga

SEQ ID NO: 47735 - DNA, 25 bp, probe
ccaagtagtccaccttcatttaact

SEQ ID NO: 47736 - DNA, 25 bp, probe
cgttctataaatgaatgtgctgaag

SEQ ID NO: 47737 - DNA, 25 bp, probe
ccataaccatgagcactactctacc

SEQ ID NO: 47738 - DNA, 25 bp, probe
ctctttgaaactgtatcacctttgc

SEQ ID NO: 47739 - DNA, 25 bp, probe
actctttgaaactgtatcacctttg

SEQ ID NO: 47740 - DNA, 25 bp, probe
caagtagtccaccttcatttaactc

SEQ ID NO: 47741 - DNA, 25 bp, probe
agtagtccaccttcatttaactctt

SEQ ID NO: 47742 - DNA, 25 bp, probe
aagtagtccaccttcatttaactct

SEQ ID NO: 47743 - DNA, 25 bp, probe
tgtctccaagtagtccaccttcatt

SEQ ID NO: 47744 - DNA, 25 bp, probe
aaactgtatcacctttgccaagtaa

SEQ ID NO: 47745 - DNA, 25 bp, probe
cttaaccttgaaatggaaagtcttg

SEQ ID NO: 47746 - DNA, 25 bp, probe
ctgtatcacctttgccaagtaagag

SEQ ID NO: 47747 - DNA, 25 bp, probe
gaatgattctacagctaggacttaa

SEQ ID NO: 47748 - DNA, 25 bp, probe
atcaaggatgctcagtttaaggtac

SEQ ID NO: 47749 - DNA, 25 bp, probe
ttgatgtctccaagtagtccacctt

SEQ ID NO: 47750 - DNA, 25 bp, probe
aactgtatcacctttgccaagtaag

SEQ ID NO: 47751 - DNA, 25 bp, probe
gaaactgtatcacctttgccaagta

SEQ ID NO: 47752 - DNA, 25 bp, probe
aactctttgaaactgtatcaccttt

SEQ ID NO: 47753 - DNA, 25 bp, probe
gttctataaatgaatgtgctgaagc

SEQ ID NO: 47754 - DNA, 25 bp, probe
tagtccaccttcatttaactctttg

SEQ ID NO: 47755 - DNA, 25 bp, probe
gtagtccaccttcatttaactcttt

SEQ ID NO: 47756 - DNA, 25 bp, probe
ctcagccgacttaacattacctatc

SEQ ID NO: 47757 - DNA, 25 bp, probe
actcagccgacttaacattacctat

SEQ ID NO: 47758 - DNA, 25 bp, probe
aactcagccgacttaacattaccta

SEQ ID NO: 47759 - DNA, 25 bp, probe
tcagccgacttaacattacctatcc

SEQ ID NO: 47760 - DNA, 25 bp, probe
ctccaagagtaagttctgctacctc

SEQ ID NO: 47761 - DNA, 25 bp, probe
atagactggatggaaagaagaaagg

SEQ ID NO: 47762 - DNA, 25 bp, probe
caactcagccgacttaacattacct

SEQ ID NO: 47763 - DNA, 25 bp, probe
gaccaactcagccgacttaacatta

SEQ ID NO: 47764 - DNA, 25 bp, probe
gcaatagactggatggaaagaagaa

SEQ ID NO: 47765 - DNA, 25 bp, probe
atgtggagaaaggagggaagataat

SEQ ID NO: 47766 - DNA, 25 bp, probe
ggatgtgattgccattaactacaat

SEQ ID NO: 47767 - DNA, 25 bp, probe
caatagactggatggaaagaagaaa

SEQ ID NO: 47768 - DNA, 25 bp, probe
accaactcagccgacttaacattac

SEQ ID NO: 47769 - DNA, 25 bp, probe
tgtgattgccattaactacaatgaa

SEQ ID NO: 47770 - DNA, 25 bp, probe
tgtggagaaaggagggaagataatt

SEQ ID NO: 47771 - DNA, 25 bp, probe
atgtgattgccattaactacaatga

SEQ ID NO: 47772 - DNA, 25 bp, probe
aatagactggatggaaagaagaaag

SEQ ID NO: 47773 - DNA, 25 bp, probe
gctgttcaaactgaccaataagaat

SEQ ID NO: 47774 - DNA, 25 bp, probe
gatgtggagaaaggagggaagataa

SEQ ID NO: 47775 - DNA, 25 bp, probe
gatgtgattgccattaactacaatg

SEQ ID NO: 47776 - DNA, 25 bp, probe
ctaatgacaggtcagatgtggagaa

SEQ ID NO: 47777 - DNA, 25 bp, probe
tagactggatggaaagaagaaaggg

SEQ ID NO: 47778 - DNA, 25 bp, probe
atgctgttcaaactgaccaataaga

SEQ ID NO: 47779 - DNA, 25 bp, probe
cagaacttactcttggaagaagacg

SEQ ID NO: 47780 - DNA, 25 bp, probe
tgctgttcaaactgaccaataagaa

SEQ ID NO: 47781 - DNA, 25 bp, probe
gcagaacttactcttggaagaagac

SEQ ID NO: 47782 - DNA, 25 bp, probe
gacttaacattacctatcccatgct

SEQ ID NO: 47783 - DNA, 25 bp, probe
ctacaaagaacccgaaagacaagtc

SEQ ID NO: 47784 - DNA, 25 bp, probe
acttaacattacctatcccatgctg

SEQ ID NO: 47785 - DNA, 25 bp, probe
gtggagaaaggagggaagataatta

SEQ ID NO: 47786 - DNA, 25 bp, probe
attacctatcccatgctgttcaaac

SEQ ID NO: 47787 - DNA, 25 bp, probe
ccgacttaacattacctatcccatg

SEQ ID NO: 47788 - DNA, 25 bp, probe
agatgtggagaaaggagggaagata

SEQ ID NO: 47789 - DNA, 25 bp, probe
gggatgtgattgccattaactacaa

SEQ ID NO: 47790 - DNA, 25 bp, probe
gccgacttaacattacctatcccat

SEQ ID NO: 47791 - DNA, 25 bp, probe
ggcaatagactggatggaaagaaga

SEQ ID NO: 47792 - DNA, 25 bp, probe
tccaagagtaagttctgctacctcc

SEQ ID NO: 47793 - DNA, 25 bp, probe
cattacctatcccatgctgttcaaa

SEQ ID NO: 47794 - DNA, 25 bp, probe
ctaagtgaggactgttggctgattg

SEQ ID NO: 47795 - DNA, 25 bp, probe
ccaactcagccgacttaacattacc

SEQ ID NO: 47796 - DNA, 25 bp, probe
cgacttaacattacctatcccatgc

SEQ ID NO: 47797 - DNA, 25 bp, probe
catgctgttcaaactgaccaataag

SEQ ID NO: 47798 - DNA, 25 bp, probe
cagaacttactcttggaagaaggcg

SEQ ID NO: 47799 - DNA, 25 bp, probe
tggcaatagactggatggaaagaag

SEQ ID NO: 47800 - DNA, 25 bp, probe
cttgtaatatactggtctctgtgct

SEQ ID NO: 47801 - DNA, 25 bp, probe
ccagaaggtgaatgagaagattgaa

SEQ ID NO: 47802 - DNA, 25 bp, probe
ccttgtaatatactggtctctgtgc

SEQ ID NO: 47803 - DNA, 25 bp, probe
gtgttggcagtaatgttgatataga

SEQ ID NO: 47804 - DNA, 25 bp, probe
agtgttggcagtaatgttgatatag

SEQ ID NO: 47805 - DNA, 25 bp, probe
ttgtaatatactggtctctgtgcta

SEQ ID NO: 47806 - DNA, 25 bp, probe
tgtaatatactggtctctgtgctat

SEQ ID NO: 47807 - DNA, 25 bp, probe
ttagtgttggcagtaatgttgatat

SEQ ID NO: 47808 - DNA, 25 bp, probe
aatggaacacagacaatactctagg

SEQ ID NO: 47809 - DNA, 25 bp, probe
tgttggcagtaatgttgatatagat

SEQ ID NO: 47810 - DNA, 25 bp, probe
atgctggattgtagaacttctctct

SEQ ID NO: 47811 - DNA, 25 bp, probe
tagtgttggcagtaatgttgatata

SEQ ID NO: 47812 - DNA, 25 bp, probe
catgctggattgtagaacttctctc

SEQ ID NO: 47813 - DNA, 25 bp, probe
ctgtaactatggacttaccttcacc

SEQ ID NO: 47814 - DNA, 25 bp, probe
tgctggattgtagaacttctctctc

SEQ ID NO: 47815 - DNA, 25 bp, probe
ctaccagaaggtgaatgagaagatt

SEQ ID NO: 47816 - DNA, 25 bp, probe
tctatctaccagaaggtgaatgaga

SEQ ID NO: 47817 - DNA, 25 bp, probe
taccagaaggtgaatgagaagattg

SEQ ID NO: 47818 - DNA, 25 bp, probe
accttgtaatatactggtctctgtg

SEQ ID NO: 47819 - DNA, 25 bp, probe
tctaccagaaggtgaatgagaagat

SEQ ID NO: 47820 - DNA, 25 bp, probe
atctaccagaaggtgaatgagaaga

SEQ ID NO: 47821 - DNA, 25 bp, probe
tatctaccagaaggtgaatgagaag

SEQ ID NO: 47822 - DNA, 25 bp, probe
ctatctaccagaaggtgaatgagaa

SEQ ID NO: 47823 - DNA, 25 bp, probe
cagaaatggaacacagacaatactc

SEQ ID NO: 47824 - DNA, 25 bp, probe
gttggcagtaatgttgatatagatt

SEQ ID NO: 47825 - DNA, 25 bp, probe
attgaaacatccataaaccttgctt

SEQ ID NO: 47826 - DNA, 25 bp, probe
ttgaaacatccataaaccttgcttg

SEQ ID NO: 47827 - DNA, 25 bp, probe
gaaggtgaatgagaagattgaaaca

SEQ ID NO: 47828 - DNA, 25 bp, probe
gattgaaacatccataaaccttgct

SEQ ID NO: 47829 - DNA, 25 bp, probe
agattgaaacatccataaaccttgc

SEQ ID NO: 47830 - DNA, 25 bp, probe
agtgttattaaatgtgttcctcagc

SEQ ID NO: 47831 - DNA, 25 bp, probe
agaaggtgaatgagaagattgaaac

SEQ ID NO: 47832 - DNA, 25 bp, probe
cagaaggtgaatgagaagattgaaa

SEQ ID NO: 47833 - DNA, 25 bp, probe
gttattaaatgtgttcctcagcgac

SEQ ID NO: 47834 - DNA, 25 bp, probe
gtgttattaaatgtgttcctcagcg

SEQ ID NO: 47835 - DNA, 25 bp, probe
aaagtaaataatgccagcctgattg

SEQ ID NO: 47836 - DNA, 25 bp, probe
tgttattaaatgtgttcctcagcga

SEQ ID NO: 47837 - DNA, 25 bp, probe
ggtgaatgagaagattgaaacatcc

SEQ ID NO: 47838 - DNA, 25 bp, probe
gtgaatgagaagattgaaacatcca

SEQ ID NO: 47839 - DNA, 25 bp, probe
gaagggttgaaactgactcttgata

SEQ ID NO: 47840 - DNA, 25 bp, probe
ctctctgctaaagtaaataatgcca

SEQ ID NO: 47841 - DNA, 25 bp, probe
acatgctggattgtagaacttctct

SEQ ID NO: 47842 - DNA, 25 bp, probe
tgaagagaaatgaacccactatgtt

SEQ ID NO: 47843 - DNA, 25 bp, probe
agaaatggaacacagacaatactct

SEQ ID NO: 47844 - DNA, 25 bp, probe
aagcatccctatctacagtttccat

SEQ ID NO: 47845 - DNA, 25 bp, probe
gaagcatccctatctacagtttcca

SEQ ID NO: 47846 - DNA, 25 bp, probe
tgagaaacagctttatcgtagagtg

SEQ ID NO: 47847 - DNA, 25 bp, probe
gtgagaaacagctttatcgtagagt

SEQ ID NO: 47848 - DNA, 25 bp, probe
ggtgagaaacagctttatcgtagag

SEQ ID NO: 47849 - DNA, 25 bp, probe
agcatccctatctacagtttccatg

SEQ ID NO: 47850 - DNA, 25 bp, probe
tggtgagaaacagctttatcgtaga

SEQ ID NO: 47851 - DNA, 25 bp, probe
gagaaacagctttatcgtagagtgc

SEQ ID NO: 47852 - DNA, 25 bp, probe
ccatgtgtttctccaatgtcaactg

SEQ ID NO: 47853 - DNA, 25 bp, probe
gtccatgtgtttctccaatgtcaac

SEQ ID NO: 47854 - DNA, 25 bp, probe
atgtgtttctccaatgtcaactgct

SEQ ID NO: 47855 - DNA, 25 bp, probe
ggatgttttctgctactactttgtc

SEQ ID NO: 47856 - DNA, 25 bp, probe
ctggatgttttctgctactactttg

SEQ ID NO: 47857 - DNA, 25 bp, probe
tggatgttttctgctactactttgt

SEQ ID NO: 47858 - DNA, 25 bp, probe
tccatgtgtttctccaatgtcaact

SEQ ID NO: 47859 - DNA, 25 bp, probe
gttttctgctactactttgtcatca

SEQ ID NO: 47860 - DNA, 25 bp, probe
tgttttctgctactactttgtcatc

SEQ ID NO: 47861 - DNA, 25 bp, probe
gatgttttctgctactactttgtca

SEQ ID NO: 47862 - DNA, 25 bp, probe
cctggatgttttctgctactacttt

SEQ ID NO: 47863 - DNA, 25 bp, probe
ctggtgagaaacagctttatcgtag

SEQ ID NO: 47864 - DNA, 25 bp, probe
gaaacagctttatcgtagagtgcag

SEQ ID NO: 47865 - DNA, 25 bp, probe
tgtccatgtgtttctccaatgtcaa

SEQ ID NO: 47866 - DNA, 25 bp, probe
aattgtccatgtgtttctccaatgt

SEQ ID NO: 47867 - DNA, 25 bp, probe
gttcctggtgagaaacagctttatc

SEQ ID NO: 47868 - DNA, 25 bp, probe
ttgtccatgtgtttctccaatgtca

SEQ ID NO: 47869 - DNA, 25 bp, probe
tttctgctactactttgtcatcaaa

SEQ ID NO: 47870 - DNA, 25 bp, probe
aaacagctttatcgtagagtgcaga

SEQ ID NO: 47871 - DNA, 25 bp, probe
agaaacagctttatcgtagagtgca

SEQ ID NO: 47872 - DNA, 25 bp, probe
cggaagcatccctatctacagtttc

SEQ ID NO: 47873 - DNA, 25 bp, probe
catgtgtttctccaatgtcaactgc

SEQ ID NO: 47874 - DNA, 25 bp, probe
attgtccatgtgtttctccaatgtc

SEQ ID NO: 47875 - DNA, 25 bp, probe
atgttttctgctactactttgtcat

SEQ ID NO: 47876 - DNA, 25 bp, probe
agttcctggtgagaaacagctttat

SEQ ID NO: 47877 - DNA, 25 bp, probe
ttttctgctactactttgtcatcaa

SEQ ID NO: 47878 - DNA, 25 bp, probe
aacagctttatcgtagagtgcagag

SEQ ID NO: 47879 - DNA, 25 bp, probe
cttccacaacatgtctgatgatacc

SEQ ID NO: 47880 - DNA, 25 bp, probe
catcaaagaattccgcatgaacatc

SEQ ID NO: 47881 - DNA, 25 bp, probe
ttccacaacatgtctgatgatacct

SEQ ID NO: 47882 - DNA, 25 bp, probe
cctggtgagaaacagctttatcgta

SEQ ID NO: 47883 - DNA, 25 bp, probe
atcaaagaattccgcatgaacatca

SEQ ID NO: 47884 - DNA, 25 bp, probe
gcttccacaacatgtctgatgatac

SEQ ID NO: 47885 - DNA, 25 bp, probe
tgtgtttctccaatgtcaactgctg

SEQ ID NO: 47886 - DNA, 25 bp, probe
ttcttcttgcaattgtccatgtgtt

SEQ ID NO: 47887 - DNA, 25 bp, probe
acaacatgtctgatgatacctggag

SEQ ID NO: 47888 - DNA, 25 bp, probe
ctagaagtggaacagactgagaagg

SEQ ID NO: 47889 - DNA, 25 bp, probe
cctagaagtggaacagactgagaag

SEQ ID NO: 47890 - DNA, 25 bp, probe
tcctagaagtggaacagactgagaa

SEQ ID NO: 47891 - DNA, 25 bp, probe
ctcctagaagtggaacagactgaga

SEQ ID NO: 47892 - DNA, 25 bp, probe
cctcctagaagtggaacagactgag

SEQ ID NO: 47893 - DNA, 25 bp, probe
tctgtccccatattttctgttttct

SEQ ID NO: 47894 - DNA, 25 bp, probe
tgtccccatattttctgttttcttg

SEQ ID NO: 47895 - DNA, 25 bp, probe
gttctgtccccatattttctgtttt

SEQ ID NO: 47896 - DNA, 25 bp, probe
ttctgtccccatattttctgttttc

SEQ ID NO: 47897 - DNA, 25 bp, probe
ctgtccccatattttctgttttctt

SEQ ID NO: 47898 - DNA, 25 bp, probe
tgttctgtccccatattttctgttt

SEQ ID NO: 47899 - DNA, 25 bp, probe
ctgttctgtccccatattttctgtt

SEQ ID NO: 47900 - DNA, 25 bp, probe
tagaagtggaacagactgagaaggg

SEQ ID NO: 47901 - DNA, 25 bp, probe
gaacagactgagaagggcaaacatt

SEQ ID NO: 47902 - DNA, 25 bp, probe
aacagactgagaagggcaaacattc

SEQ ID NO: 47903 - DNA, 25 bp, probe
gagagtatcaccttcctcaaggatt

SEQ ID NO: 47904 - DNA, 25 bp, probe
actgttctgtccccatattttctgt

SEQ ID NO: 47905 - DNA, 25 bp, probe
agtttgccttgctcattgctatcag

SEQ ID NO: 47906 - DNA, 25 bp, probe
gtggcattaaaagagagtcaaaggg

SEQ ID NO: 47907 - DNA, 25 bp, probe
aatgactgttctgtccccatatttt

SEQ ID NO: 47908 - DNA, 25 bp, probe
gtacaaccctgggagtgagagtatc

SEQ ID NO: 47909 - DNA, 25 bp, probe
atgactgttctgtccccatattttc

SEQ ID NO: 47910 - DNA, 25 bp, probe
gaatgactgttctgtccccatattt

SEQ ID NO: 47911 - DNA, 25 bp, probe
tggcattaaaagagagtcaaagggt

SEQ ID NO: 47912 - DNA, 25 bp, probe
gactgttctgtccccatattttctg

SEQ ID NO: 47913 - DNA, 25 bp, probe
gatgttcccacggatgctaatgaaa

SEQ ID NO: 47914 - DNA, 25 bp, probe
cgtggcattaaaagagagtcaaagg

SEQ ID NO: 47915 - DNA, 25 bp, probe
ccgtggcattaaaagagagtcaaag

SEQ ID NO: 47916 - DNA, 25 bp, probe
ttctggagacatctcggaggtacaa

SEQ ID NO: 47917 - DNA, 25 bp, probe
gagtttgccttgctcattgctatca

SEQ ID NO: 47918 - DNA, 25 bp, probe
tgagagtatcaccttcctcaaggat

SEQ ID NO: 47919 - DNA, 25 bp, probe
gagtgagagtatcaccttcctcaag

SEQ ID NO: 47920 - DNA, 25 bp, probe
tgactgttctgtccccatattttct

SEQ ID NO: 47921 - DNA, 25 bp, probe
gtccccatattttctgttttcttgg

SEQ ID NO: 47922 - DNA, 25 bp, probe
atgttcccacggatgctaatgaaac

SEQ ID NO: 47923 - DNA, 25 bp, probe
ttataaccgggaagactttgccaaa

SEQ ID NO: 47924 - DNA, 25 bp, probe
atgaatgagctgcaactcaatgatg

SEQ ID NO: 47925 - DNA, 25 bp, probe
catgaatgagctgcaactcaatgat

SEQ ID NO: 47926 - DNA, 25 bp, probe
tacaaccctgggagtgagagtatca

SEQ ID NO: 47927 - DNA, 25 bp, probe
cacggatgctaatgaaactggtgag

SEQ ID NO: 47928 - DNA, 25 bp, probe
tccccatattttctgttttcttggc

SEQ ID NO: 47929 - DNA, 25 bp, probe
caccttcctcaaggatttcagttat

SEQ ID NO: 47930 - DNA, 25 bp, probe
gagtatcaccttcctcaaggatttc

SEQ ID NO: 47931 - DNA, 25 bp, probe
cttctggagacatctcggaggtaca

SEQ ID NO: 47932 - DNA, 25 bp, probe
atccaatgctcctcacatattaatt

SEQ ID NO: 47933 - DNA, 25 bp, probe
aatccaatgctcctcacatattaat

SEQ ID NO: 47934 - DNA, 25 bp, probe
caaatccaatgctcctcacatatta

SEQ ID NO: 47935 - DNA, 25 bp, probe
taaggaatctcggaagctcattgtt

SEQ ID NO: 47936 - DNA, 25 bp, probe
ccaaatccaatgctcctcacatatt

SEQ ID NO: 47937 - DNA, 25 bp, probe
aaatccaatgctcctcacatattaa

SEQ ID NO: 47938 - DNA, 25 bp, probe
gtaaggaatctcggaagctcattgt

SEQ ID NO: 47939 - DNA, 25 bp, probe
accaaatccaatgctcctcacatat

SEQ ID NO: 47940 - DNA, 25 bp, probe
ttctgagaagtcactggtctagatc

SEQ ID NO: 47941 - DNA, 25 bp, probe
gttctgagaagtcactggtctagat

SEQ ID NO: 47942 - DNA, 25 bp, probe
attcaactttgaccaggaaacagtg

SEQ ID NO: 47943 - DNA, 25 bp, probe
cattcaactttgaccaggaaacagt

SEQ ID NO: 47944 - DNA, 25 bp, probe
tccaatgctcctcacatattaattt

SEQ ID NO: 47945 - DNA, 25 bp, probe
aaggaatctcggaagctcattgttc

SEQ ID NO: 47946 - DNA, 25 bp, probe
cttaccatcctgtctaccagatgag

SEQ ID NO: 47947 - DNA, 25 bp, probe
caactttgaccaggaaacagtgatc

SEQ ID NO: 47948 - DNA, 25 bp, probe
caccaaatccaatgctcctcacata

SEQ ID NO: 47949 - DNA, 25 bp, probe
atgaggaaatggcagttctgagaag

SEQ ID NO: 47950 - DNA, 25 bp, probe
agttctgagaagtcactggtctaga

SEQ ID NO: 47951 - DNA, 25 bp, probe
cgtaaggaatctcggaagctcattg

SEQ ID NO: 47952 - DNA, 25 bp, probe
tcaactttgaccaggaaacagtgat

SEQ ID NO: 47953 - DNA, 25 bp, probe
gatgaggaaatggcagttctgagaa

SEQ ID NO: 47954 - DNA, 25 bp, probe
ttcaactttgaccaggaaacagtga

SEQ ID NO: 47955 - DNA, 25 bp, probe
gagcattcaactttgaccaggaaac

SEQ ID NO: 47956 - DNA, 25 bp, probe
ggaatctcggaagctcattgttcag

SEQ ID NO: 47957 - DNA, 25 bp, probe
tctgagaagtcactggtctagatcc

SEQ ID NO: 47958 - DNA, 25 bp, probe
gaaatggcagttctgagaagtcact

SEQ ID NO: 47959 - DNA, 25 bp, probe
atctcatttcatctgcactgccata

SEQ ID NO: 47960 - DNA, 25 bp, probe
ttacctttctggaggaggatgacaa

SEQ ID NO: 47961 - DNA, 25 bp, probe
gccctccattcgtgtgtgtatttag

SEQ ID NO: 47962 - DNA, 25 bp, probe
gcattcaactttgaccaggaaacag

SEQ ID NO: 47963 - DNA, 25 bp, probe
agatgaggaaatggcagttctgaga

SEQ ID NO: 47964 - DNA, 25 bp, probe
gaggaaatggcagttctgagaagtc

SEQ ID NO: 47965 - DNA, 25 bp, probe
ttaccatcctgtctaccagatgagg

SEQ ID NO: 47966 - DNA, 25 bp, probe
gttctcaccaaatccaatgctcctc

SEQ ID NO: 47967 - DNA, 25 bp, probe
ctctgtgatctcatttcatctgcac

SEQ ID NO: 47968 - DNA, 25 bp, probe
ccctctgtgatctcatttcatctgc

SEQ ID NO: 47969 - DNA, 25 bp, probe
cctccattcgtgtgtgtatttaggg

SEQ ID NO: 47970 - DNA, 25 bp, probe
ccctccattcgtgtgtgtatttagg

SEQ ID NO: 47971 - DNA, 25 bp, probe
aggaatctcggaagctcattgttca

SEQ ID NO: 47972 - DNA, 25 bp, probe
gtttgtgatcctgagagtcttgctg

SEQ ID NO: 47973 - DNA, 25 bp, probe
agcattcaactttgaccaggaaaca

SEQ ID NO: 47974 - DNA, 25 bp, probe
gatctacgtgaactggctcaacatg

SEQ ID NO: 47975 - DNA, 25 bp, probe
tacctttctggaggaggatgacaag

SEQ ID NO: 47976 - DNA, 25 bp, probe
aggttacttgcttctaggactcttg

SEQ ID NO: 47977 - DNA, 25 bp, probe
caggttacttgcttctaggactctt

SEQ ID NO: 47978 - DNA, 25 bp, probe
ggttacttgcttctaggactcttgg

SEQ ID NO: 47979 - DNA, 25 bp, probe
gttacttgcttctaggactcttggc

SEQ ID NO: 47980 - DNA, 25 bp, probe
ccaggttacttgcttctaggactct

SEQ ID NO: 47981 - DNA, 25 bp, probe
ggactaggactcccataaatcactg

SEQ ID NO: 47982 - DNA, 25 bp, probe
gactaggactcccataaatcactgg

SEQ ID NO: 47983 - DNA, 25 bp, probe
ctggactaggactcccataaatcac

SEQ ID NO: 47984 - DNA, 25 bp, probe
tggactaggactcccataaatcact

SEQ ID NO: 47985 - DNA, 25 bp, probe
cctggactaggactcccataaatca

SEQ ID NO: 47986 - DNA, 25 bp, probe
cctcaggggatactgttaatcataa

SEQ ID NO: 47987 - DNA, 25 bp, probe
gcctcaggggatactgttaatcata

SEQ ID NO: 47988 - DNA, 25 bp, probe
cccaggttacttgcttctaggactc

SEQ ID NO: 47989 - DNA, 25 bp, probe
ctcaggggatactgttaatcataaa

SEQ ID NO: 47990 - DNA, 25 bp, probe
ttacttgcttctaggactcttggcc

SEQ ID NO: 47991 - DNA, 25 bp, probe
tcaggggatactgttaatcataaaa

SEQ ID NO: 47992 - DNA, 25 bp, probe
gcctggactaggactcccataaatc

SEQ ID NO: 47993 - DNA, 25 bp, probe
aggggatactgttaatcataaaatg

SEQ ID NO: 47994 - DNA, 25 bp, probe
actgttaatcataaaatgagcaacg

SEQ ID NO: 47995 - DNA, 25 bp, probe
agcctggactaggactcccataaat

SEQ ID NO: 47996 - DNA, 25 bp, probe
ctgttaatcataaaatgagcaacga

SEQ ID NO: 47997 - DNA, 25 bp, probe
tgttaatcataaaatgagcaacgaa

SEQ ID NO: 47998 - DNA, 25 bp, probe
caggggatactgttaatcataaaat

SEQ ID NO: 47999 - DNA, 25 bp, probe
gagcctggactaggactcccataaa

SEQ ID NO: 48000 - DNA, 25 bp, probe
gttaatcataaaatgagcaacgaaa

SEQ ID NO: 48001 - DNA, 25 bp, probe
ggggatactgttaatcataaaatga

SEQ ID NO: 48002 - DNA, 25 bp, probe
ttaatcataaaatgagcaacgaaaa

SEQ ID NO: 48003 - DNA, 25 bp, probe
ggatactgttaatcataaaatgagc

SEQ ID NO: 48004 - DNA, 25 bp, probe
tactgttaatcataaaatgagcaac

SEQ ID NO: 48005 - DNA, 25 bp, probe
ctcctccccaggttacttgcttcta

SEQ ID NO: 48006 - DNA, 25 bp, probe
ggcctcaggggatactgttaatcat

SEQ ID NO: 48007 - DNA, 25 bp, probe
tcctccccaggttacttgcttctag

SEQ ID NO: 48008 - DNA, 25 bp, probe
ctccccaggttacttgcttctagga

SEQ ID NO: 48009 - DNA, 25 bp, probe
gggatactgttaatcataaaatgag

SEQ ID NO: 48010 - DNA, 25 bp, probe
gatactgttaatcataaaatgagca

SEQ ID NO: 48011 - DNA, 25 bp, probe
atactgttaatcataaaatgagcaa

SEQ ID NO: 48012 - DNA, 25 bp, probe
ctatcttgcttcctacctacatctg

SEQ ID NO: 48013 - DNA, 25 bp, probe
tctatcttgcttcctacctacatct

SEQ ID NO: 48014 - DNA, 25 bp, probe
gtctatcttgcttcctacctacatc

SEQ ID NO: 48015 - DNA, 25 bp, probe
taggaacaggagagtagactaggat

SEQ ID NO: 48016 - DNA, 25 bp, probe
ttaggaacaggagagtagactagga

SEQ ID NO: 48017 - DNA, 25 bp, probe
tatcttgcttcctacctacatctgc

SEQ ID NO: 48018 - DNA, 25 bp, probe
cagtgcctcaagtacatccttatta

SEQ ID NO: 48019 - DNA, 25 bp, probe
agtgcctcaagtacatccttattag

SEQ ID NO: 48020 - DNA, 25 bp, probe
gccttgattgctcctagttatatac

SEQ ID NO: 48021 - DNA, 25 bp, probe
ggaacaggagagtagactaggattc

SEQ ID NO: 48022 - DNA, 25 bp, probe
aggaacaggagagtagactaggatt

SEQ ID NO: 48023 - DNA, 25 bp, probe
agtgaatgttggatctcagactaac

SEQ ID NO: 48024 - DNA, 25 bp, probe
caagtgaatgttggatctcagacta

SEQ ID NO: 48025 - DNA, 25 bp, probe
aagtgaatgttggatctcagactaa

SEQ ID NO: 48026 - DNA, 25 bp, probe
acattgttgattgttatgactggta

SEQ ID NO: 48027 - DNA, 25 bp, probe
tacattgttgattgttatgactggt

SEQ ID NO: 48028 - DNA, 25 bp, probe
ttcaagtgaatgttggatctcagac

SEQ ID NO: 48029 - DNA, 25 bp, probe
tgttgattgttatgactggtacact

SEQ ID NO: 48030 - DNA, 25 bp, probe
tgattgttatgactggtacactctg

SEQ ID NO: 48031 - DNA, 25 bp, probe
ttgattgttatgactggtacactct

SEQ ID NO: 48032 - DNA, 25 bp, probe
gttgattgttatgactggtacactc

SEQ ID NO: 48033 - DNA, 25 bp, probe
gtgaatgttggatctcagactaacc

SEQ ID NO: 48034 - DNA, 25 bp, probe
cattgttgattgttatgactggtac

SEQ ID NO: 48035 - DNA, 25 bp, probe
ttgttgattgttatgactggtacac

SEQ ID NO: 48036 - DNA, 25 bp, probe
gaactgtcctacactgctattgttg

SEQ ID NO: 48037 - DNA, 25 bp, probe
gattgttatgactggtacactctgg

SEQ ID NO: 48038 - DNA, 25 bp, probe
gcatggtacattgttgattgttatg

SEQ ID NO: 48039 - DNA, 25 bp, probe
tcctacactgctattgttgctacat

SEQ ID NO: 48040 - DNA, 25 bp, probe
tcaagtgaatgttggatctcagact

SEQ ID NO: 48041 - DNA, 25 bp, probe
attgttgattgttatgactggtaca

SEQ ID NO: 48042 - DNA, 25 bp, probe
tggtacattgttgattgttatgact

SEQ ID NO: 48043 - DNA, 25 bp, probe
gtgcctcaagtacatccttattagg

SEQ ID NO: 48044 - DNA, 25 bp, probe
gaacaggagagtagactaggattcc

SEQ ID NO: 48045 - DNA, 25 bp, probe
ccttgattgctcctagttatataca

SEQ ID NO: 48046 - DNA, 25 bp, probe
gtacattgttgattgttatgactgg

SEQ ID NO: 48047 - DNA, 25 bp, probe
ggtacattgttgattgttatgactg

SEQ ID NO: 48048 - DNA, 25 bp, probe
aacaatacactaagaatgactccta

SEQ ID NO: 48049 - DNA, 25 bp, probe
agaagaaaccaagacattacaccat

SEQ ID NO: 48050 - DNA, 25 bp, probe
caagaagaaaccaagacattacacc

SEQ ID NO: 48051 - DNA, 25 bp, probe
acaagaagaaaccaagacattacac

SEQ ID NO: 48052 - DNA, 25 bp, probe
ggtctatcttgcttcctacctacat

SEQ ID NO: 48053 - DNA, 25 bp, probe
acaaacagagtgagagaccatattt

SEQ ID NO: 48054 - DNA, 25 bp, probe
gacaaacagagtgagagaccatatt

SEQ ID NO: 48055 - DNA, 25 bp, probe
gaatgttggatctcagactaaccat

SEQ ID NO: 48056 - DNA, 25 bp, probe
attcagcataacctacagaccttaa

SEQ ID NO: 48057 - DNA, 25 bp, probe
ttattcagcataacctacagacctt

SEQ ID NO: 48058 - DNA, 25 bp, probe
tattcagcataacctacagacctta

SEQ ID NO: 48059 - DNA, 25 bp, probe
ggaagcattctgttcttaacctgta

SEQ ID NO: 48060 - DNA, 25 bp, probe
gaagcattctgttcttaacctgtat

SEQ ID NO: 48061 - DNA, 25 bp, probe
gattaacttggcaatgtcagacttg

SEQ ID NO: 48062 - DNA, 25 bp, probe
aaccagttacattaagtagaagcaa

SEQ ID NO: 48063 - DNA, 25 bp, probe
aagcattctgttcttaacctgtatt

SEQ ID NO: 48064 - DNA, 25 bp, probe
atgattaacttggcaatgtcagact

SEQ ID NO: 48065 - DNA, 25 bp, probe
atgtaacttgttctagtatggtgct

SEQ ID NO: 48066 - DNA, 25 bp, probe
atgtacggaagcattctgttcttaa

SEQ ID NO: 48067 - DNA, 25 bp, probe
tgattaacttggcaatgtcagactt

SEQ ID NO: 48068 - DNA, 25 bp, probe
tgtaacttgttctagtatggtgcta

SEQ ID NO: 48069 - DNA, 25 bp, probe
aatgtaacttgttctagtatggtgc

SEQ ID NO: 48070 - DNA, 25 bp, probe
tacggaagcattctgttcttaacct

SEQ ID NO: 48071 - DNA, 25 bp, probe
acaacttacatgattaacttggcaa

SEQ ID NO: 48072 - DNA, 25 bp, probe
tgtacggaagcattctgttcttaac

SEQ ID NO: 48073 - DNA, 25 bp, probe
catgtacggaagcattctgttctta

SEQ ID NO: 48074 - DNA, 25 bp, probe
agcattctgttcttaacctgtatta

SEQ ID NO: 48075 - DNA, 25 bp, probe
catgattaacttggcaatgtcagac

SEQ ID NO: 48076 - DNA, 25 bp, probe
gcattctgttcttaacctgtattag

SEQ ID NO: 48077 - DNA, 25 bp, probe
gtaacttgttctagtatggtgctaa

SEQ ID NO: 48078 - DNA, 25 bp, probe
tacaacttacatgattaacttggca

SEQ ID NO: 48079 - DNA, 25 bp, probe
aacttacatgattaacttggcaatg

SEQ ID NO: 48080 - DNA, 25 bp, probe
ttctgttcttaacctgtattagtgt

SEQ ID NO: 48081 - DNA, 25 bp, probe
gtacggaagcattctgttcttaacc

SEQ ID NO: 48082 - DNA, 25 bp, probe
caacttacatgattaacttggcaat

SEQ ID NO: 48083 - DNA, 25 bp, probe
ctacaacttacatgattaacttggc

SEQ ID NO: 48084 - DNA, 25 bp, probe
ccactgcttctataatgactccttt

SEQ ID NO: 48085 - DNA, 25 bp, probe
caatgaatctgctgcctgaaataaa

SEQ ID NO: 48086 - DNA, 25 bp, probe
gtccgaaatgaaactacaacttaca

SEQ ID NO: 48087 - DNA, 25 bp, probe
ttcagcataacctacagaccttaaa

SEQ ID NO: 48088 - DNA, 25 bp, probe
ttgtaagatttctgtgatgctgttt

SEQ ID NO: 48089 - DNA, 25 bp, probe
tttgtaagatttctgtgatgctgtt

SEQ ID NO: 48090 - DNA, 25 bp, probe
tactttacatcggacacaattcaga

SEQ ID NO: 48091 - DNA, 25 bp, probe
ctactttacatcggacacaattcag

SEQ ID NO: 48092 - DNA, 25 bp, probe
actactttacatcggacacaattca

SEQ ID NO: 48093 - DNA, 25 bp, probe
acatttgttaattgctcagtagtgg

SEQ ID NO: 48094 - DNA, 25 bp, probe
gtttactactttacatcggacacaa

SEQ ID NO: 48095 - DNA, 25 bp, probe
aatcactctctgtattgctgtttcc

SEQ ID NO: 48096 - DNA, 25 bp, probe
ctttgtaagatttctgtgatgctgt

SEQ ID NO: 48097 - DNA, 25 bp, probe
actttgtaagatttctgtgatgctg

SEQ ID NO: 48098 - DNA, 25 bp, probe
actttacatcggacacaattcagaa

SEQ ID NO: 48099 - DNA, 25 bp, probe
gatatttgacaatgaatctgctgcc

SEQ ID NO: 48100 - DNA, 25 bp, probe
ttaatggagaggttcaagcaattct

SEQ ID NO: 48101 - DNA, 25 bp, probe
taatggagaggttcaagcaattctg

SEQ ID NO: 48102 - DNA, 25 bp, probe
caatcagtgatggtccaggttatag

SEQ ID NO: 48103 - DNA, 25 bp, probe
gcagaggaggtatatgactacatca

SEQ ID NO: 48104 - DNA, 25 bp, probe
atagaaggatggttgtctcactgtt

SEQ ID NO: 48105 - DNA, 25 bp, probe
aatagaaggatggttgtctcactgt

SEQ ID NO: 48106 - DNA, 25 bp, probe
aatcagtgatggtccaggttatagt

SEQ ID NO: 48107 - DNA, 25 bp, probe
atcagttatatcttgtggcatatcc

SEQ ID NO: 48108 - DNA, 25 bp, probe
acaatcagtgatggtccaggttata

SEQ ID NO: 48109 - DNA, 25 bp, probe
agtagtgtgttgataagagtgtaac

SEQ ID NO: 48110 - DNA, 25 bp, probe
atcagtgatggtccaggttatagtc

SEQ ID NO: 48111 - DNA, 25 bp, probe
cagtgatggtccaggttatagtcat

SEQ ID NO: 48112 - DNA, 25 bp, probe
tggatgaacaggatgtataatatgc

SEQ ID NO: 48113 - DNA, 25 bp, probe
gagaggttcaagcaattctgagaag

SEQ ID NO: 48114 - DNA, 25 bp, probe
ggacaataccagaagtgaattatcc

SEQ ID NO: 48115 - DNA, 25 bp, probe
attagtagtgtgttgataagagtgt

SEQ ID NO: 48116 - DNA, 25 bp, probe
catcagttatatcttgtggcatatc

SEQ ID NO: 48117 - DNA, 25 bp, probe
aacaatcagtgatggtccaggttat

SEQ ID NO: 48118 - DNA, 25 bp, probe
gttgataagagtgtaacatccagct

SEQ ID NO: 48119 - DNA, 25 bp, probe
catgactgtcctagtgaacacttaa

SEQ ID NO: 48120 - DNA, 25 bp, probe
tcagttatatcttgtggcatatcca

SEQ ID NO: 48121 - DNA, 25 bp, probe
agaggttcaagcaattctgagaaga

SEQ ID NO: 48122 - DNA, 25 bp, probe
agattgcagaggaggtatatgacta

SEQ ID NO: 48123 - DNA, 25 bp, probe
cttgtcaacctcttcctgtcttacc

SEQ ID NO: 48124 - DNA, 25 bp, probe
ccttgtcaacctcttcctgtcttac

SEQ ID NO: 48125 - DNA, 25 bp, probe
atatcttgtggcatatccattgtgg

SEQ ID NO: 48126 - DNA, 25 bp, probe
agtgatggtccaggttatagtcatg

SEQ ID NO: 48127 - DNA, 25 bp, probe
gattgcagaggaggtatatgactac

SEQ ID NO: 48128 - DNA, 25 bp, probe
aactaccctctcaaatggacaatac

SEQ ID NO: 48129 - DNA, 25 bp, probe
ttgcccttccatttctactgtataa

SEQ ID NO: 48130 - DNA, 25 bp, probe
tttgcccttccatttctactgtata

SEQ ID NO: 48131 - DNA, 25 bp, probe
acatcagttatatcttgtggcatat

SEQ ID NO: 48132 - DNA, 25 bp, probe
gtaactaccctctcaaatggacaat

SEQ ID NO: 48133 - DNA, 25 bp, probe
attgcagaggaggtatatgactaca

SEQ ID NO: 48134 - DNA, 25 bp, probe
tgcccttccatttctactgtataaa

SEQ ID NO: 48135 - DNA, 25 bp, probe
aaatcctggtttgtaatgtttgtca

SEQ ID NO: 48136 - DNA, 25 bp, probe
gcccttccatttctactgtataaac

SEQ ID NO: 48137 - DNA, 25 bp, probe
tatatcttgtggcatatccattgtg

SEQ ID NO: 48138 - DNA, 25 bp, probe
ttgataagagtgtaacatccagctc

SEQ ID NO: 48139 - DNA, 25 bp, probe
aatggagaggttcaagcaattctga

SEQ ID NO: 48140 - DNA, 25 bp, probe
aagattgcagaggaggtatatgact

SEQ ID NO: 48141 - DNA, 25 bp, probe
agaaatcctggtttgtaatgtttgt

SEQ ID NO: 48142 - DNA, 25 bp, probe
gtaaatactcccactatgcctgatg

SEQ ID NO: 48143 - DNA, 25 bp, probe
tttaatggagaggttcaagcaattc

SEQ ID NO: 48144 - DNA, 25 bp, probe
tatcaacacttctcctgctattctg

SEQ ID NO: 48145 - DNA, 25 bp, probe
gtatcaacacttctcctgctattct

SEQ ID NO: 48146 - DNA, 25 bp, probe
agtatcaacacttctcctgctattc

SEQ ID NO: 48147 - DNA, 25 bp, probe
caatcagaagtgctcctatatacct

SEQ ID NO: 48148 - DNA, 25 bp, probe
tcaatcagaagtgctcctatatacc

SEQ ID NO: 48149 - DNA, 25 bp, probe
atcaacacttctcctgctattctga

SEQ ID NO: 48150 - DNA, 25 bp, probe
cggacctcttcatcttatagacatg

SEQ ID NO: 48151 - DNA, 25 bp, probe
atcagaagtgctcctatatacctaa

SEQ ID NO: 48152 - DNA, 25 bp, probe
aatcagaagtgctcctatataccta

SEQ ID NO: 48153 - DNA, 25 bp, probe
accagaagagtgttatcctaaccaa

SEQ ID NO: 48154 - DNA, 25 bp, probe
aaccagaagagtgttatcctaacca

SEQ ID NO: 48155 - DNA, 25 bp, probe
atcaatcagaagtgctcctatatac

SEQ ID NO: 48156 - DNA, 25 bp, probe
tcaacacttctcctgctattctgac

SEQ ID NO: 48157 - DNA, 25 bp, probe
gcagtctgttatgagttccctaata

SEQ ID NO: 48158 - DNA, 25 bp, probe
agaaggaaaccagaagagtgttatc

SEQ ID NO: 48159 - DNA, 25 bp, probe
cagaaggaaaccagaagagtgttat

SEQ ID NO: 48160 - DNA, 25 bp, probe
taagatgtttatatggaccagtggc

SEQ ID NO: 48161 - DNA, 25 bp, probe
tctaccacacagaagagacaataaa

SEQ ID NO: 48162 - DNA, 25 bp, probe
ggatttgctaaacaatacctggaaa

SEQ ID NO: 48163 - DNA, 25 bp, probe
caacacttctcctgctattctgacc

SEQ ID NO: 48164 - DNA, 25 bp, probe
agtgctcctatatacctaaatgtgg

SEQ ID NO: 48165 - DNA, 25 bp, probe
tctgggatttgctaaacaatacctg

SEQ ID NO: 48166 - DNA, 25 bp, probe
gtctgggatttgctaaacaatacct

SEQ ID NO: 48167 - DNA, 25 bp, probe
aatcaatcagaagtgctcctatata

SEQ ID NO: 48168 - DNA, 25 bp, probe
ctaagatgtttatatggaccagtgg

SEQ ID NO: 48169 - DNA, 25 bp, probe
gggatttgctaaacaatacctggaa

SEQ ID NO: 48170 - DNA, 25 bp, probe
gatttgctaaacaatacctggaaag

SEQ ID NO: 48171 - DNA, 25 bp, probe
caatgtctgggatttgctaaacaat

SEQ ID NO: 48172 - DNA, 25 bp, probe
atgtctgggatttgctaaacaatac

SEQ ID NO: 48173 - DNA, 25 bp, probe
aatgtctgggatttgctaaacaata

SEQ ID NO: 48174 - DNA, 25 bp, probe
aagtatcaacacttctcctgctatt

SEQ ID NO: 48175 - DNA, 25 bp, probe
ctgggatttgctaaacaatacctgg

SEQ ID NO: 48176 - DNA, 25 bp, probe
aaatcaatcagaagtgctcctatat

SEQ ID NO: 48177 - DNA, 25 bp, probe
gaaacttacacagtacctctcccta

SEQ ID NO: 48178 - DNA, 25 bp, probe
taaacaatacctggaaagcagacag

SEQ ID NO: 48179 - DNA, 25 bp, probe
ctaaacaatacctggaaagcagaca

SEQ ID NO: 48180 - DNA, 25 bp, probe
tgtctgggatttgctaaacaatacc

SEQ ID NO: 48181 - DNA, 25 bp, probe
ggacctcttcatcttatagacatga

SEQ ID NO: 48182 - DNA, 25 bp, probe
tcagaagtgctcctatatacctaaa

SEQ ID NO: 48183 - DNA, 25 bp, probe
aaacttacacagtacctctccctac

SEQ ID NO: 48184 - DNA, 25 bp, probe
ccagaaggaaaccagaagagtgtta

SEQ ID NO: 48185 - DNA, 25 bp, probe
tctaagatgtttatatggaccagtg

SEQ ID NO: 48186 - DNA, 25 bp, probe
ccagaagagtgttatcctaaccaaa

SEQ ID NO: 48187 - DNA, 25 bp, probe
aaaccagaagagtgttatcctaacc

SEQ ID NO: 48188 - DNA, 25 bp, probe
gctctcactcactgataatgcttat

SEQ ID NO: 48189 - DNA, 25 bp, probe
actgataatgcttattaccttctgg

SEQ ID NO: 48190 - DNA, 25 bp, probe
cactcactgataatgcttattacct

SEQ ID NO: 48191 - DNA, 25 bp, probe
ctctcactcactgataatgcttatt

SEQ ID NO: 48192 - DNA, 25 bp, probe
tcactcactgataatgcttattacc

SEQ ID NO: 48193 - DNA, 25 bp, probe
cactgcttcatatctctgtccactt

SEQ ID NO: 48194 - DNA, 25 bp, probe
ttcactgcttcatatctctgtccac

SEQ ID NO: 48195 - DNA, 25 bp, probe
atctgtgacttcatgctctgataac

SEQ ID NO: 48196 - DNA, 25 bp, probe
actcactgataatgcttattacctt

SEQ ID NO: 48197 - DNA, 25 bp, probe
tatctgtgacttcatgctctgataa

SEQ ID NO: 48198 - DNA, 25 bp, probe
ttatctgtgacttcatgctctgata

SEQ ID NO: 48199 - DNA, 25 bp, probe
cactgataatgcttattaccttctg

SEQ ID NO: 48200 - DNA, 25 bp, probe
ctgtgacttcatgctctgataactg

SEQ ID NO: 48201 - DNA, 25 bp, probe
tctgtgacttcatgctctgataact

SEQ ID NO: 48202 - DNA, 25 bp, probe
tcactgataatgcttattaccttct

SEQ ID NO: 48203 - DNA, 25 bp, probe
gcttattaccttctgggcatttatt

SEQ ID NO: 48204 - DNA, 25 bp, probe
ctcactgataatgcttattaccttc

SEQ ID NO: 48205 - DNA, 25 bp, probe
aagtgaaacattaaacattgccaac

SEQ ID NO: 48206 - DNA, 25 bp, probe
tgtttcactgcttcatatctctgtc

SEQ ID NO: 48207 - DNA, 25 bp, probe
atatctctgtccactttctgaatga

SEQ ID NO: 48208 - DNA, 25 bp, probe
atgtttcactgcttcatatctctgt

SEQ ID NO: 48209 - DNA, 25 bp, probe
ctcactcactgataatgcttattac

SEQ ID NO: 48210 - DNA, 25 bp, probe
tcactgcttcatatctctgtccact

SEQ ID NO: 48211 - DNA, 25 bp, probe
ttattaccttctgggcatttattcc

SEQ ID NO: 48212 - DNA, 25 bp, probe
catatctctgtccactttctgaatg

SEQ ID NO: 48213 - DNA, 25 bp, probe
gcttcatatctctgtccactttctg

SEQ ID NO: 48214 - DNA, 25 bp, probe
ctgcttcatatctctgtccactttc

SEQ ID NO: 48215 - DNA, 25 bp, probe
tgataatgcttattaccttctgggc

SEQ ID NO: 48216 - DNA, 25 bp, probe
tctcactcactgataatgcttatta

SEQ ID NO: 48217 - DNA, 25 bp, probe
aaagtgaaacattaaacattgccaa

SEQ ID NO: 48218 - DNA, 25 bp, probe
agtgaaacattaaacattgccaacg

SEQ ID NO: 48219 - DNA, 25 bp, probe
gtttcactgcttcatatctctgtcc

SEQ ID NO: 48220 - DNA, 25 bp, probe
ctgataatgcttattaccttctggg

SEQ ID NO: 48221 - DNA, 25 bp, probe
cttcatatctctgtccactttctga

SEQ ID NO: 48222 - DNA, 25 bp, probe
tgcttcatatctctgtccactttct

SEQ ID NO: 48223 - DNA, 25 bp, probe
tatctctgtccactttctgaatgag

SEQ ID NO: 48224 - DNA, 25 bp, probe
tcatatctctgtccactttctgaat

SEQ ID NO: 48225 - DNA, 25 bp, probe
actgcttcatatctctgtccacttt

SEQ ID NO: 48226 - DNA, 25 bp, probe
tttcactgcttcatatctctgtcca

SEQ ID NO: 48227 - DNA, 25 bp, probe
atcctttatctgtgacttcatgctc

SEQ ID NO: 48228 - DNA, 25 bp, probe
attcagcatcctttatctgtgactt

SEQ ID NO: 48229 - DNA, 25 bp, probe
tattcagcatcctttatctgtgact

SEQ ID NO: 48230 - DNA, 25 bp, probe
ctgataactgcctttccttccttct

SEQ ID NO: 48231 - DNA, 25 bp, probe
tctgataactgcctttccttccttc

SEQ ID NO: 48232 - DNA, 25 bp, probe
ctcagatagtagtgctgtcatcatc

SEQ ID NO: 48233 - DNA, 25 bp, probe
actcagatagtagtgctgtcatcat

SEQ ID NO: 48234 - DNA, 25 bp, probe
cttgtcctcagaatccatattgtgt

SEQ ID NO: 48235 - DNA, 25 bp, probe
ttgtcctcagaatccatattgtgtg

SEQ ID NO: 48236 - DNA, 25 bp, probe
ctcttgtcctcagaatccatattgt

SEQ ID NO: 48237 - DNA, 25 bp, probe
tctcttgtcctcagaatccatattg

SEQ ID NO: 48238 - DNA, 25 bp, probe
tcttgtcctcagaatccatattgtg

SEQ ID NO: 48239 - DNA, 25 bp, probe
catctcttgtcctcagaatccatat

SEQ ID NO: 48240 - DNA, 25 bp, probe
agaatccatattgtgtgtgcttcat

SEQ ID NO: 48241 - DNA, 25 bp, probe
ctcagaatccatattgtgtgtgctt

SEQ ID NO: 48242 - DNA, 25 bp, probe
gtcctcagaatccatattgtgtgtg

SEQ ID NO: 48243 - DNA, 25 bp, probe
atctcttgtcctcagaatccatatt

SEQ ID NO: 48244 - DNA, 25 bp, probe
tactcagatagtagtgctgtcatca

SEQ ID NO: 48245 - DNA, 25 bp, probe
tcagaatccatattgtgtgtgcttc

SEQ ID NO: 48246 - DNA, 25 bp, probe
ctatcttctatgctctccagtacca

SEQ ID NO: 48247 - DNA, 25 bp, probe
tgtcctcagaatccatattgtgtgt

SEQ ID NO: 48248 - DNA, 25 bp, probe
tatcttctatgctctccagtaccat

SEQ ID NO: 48249 - DNA, 25 bp, probe
cagaatccatattgtgtgtgcttca

SEQ ID NO: 48250 - DNA, 25 bp, probe
atgctctccagtaccataacattat

SEQ ID NO: 48251 - DNA, 25 bp, probe
acatctcttgtcctcagaatccata

SEQ ID NO: 48252 - DNA, 25 bp, probe
tacatctcttgtcctcagaatccat

SEQ ID NO: 48253 - DNA, 25 bp, probe
tcagatagtagtgctgtcatcatct

SEQ ID NO: 48254 - DNA, 25 bp, probe
tctacatctcttgtcctcagaatcc

SEQ ID NO: 48255 - DNA, 25 bp, probe
actatcttctatgctctccagtacc

SEQ ID NO: 48256 - DNA, 25 bp, probe
gaatccatattgtgtgtgcttcatg

SEQ ID NO: 48257 - DNA, 25 bp, probe
ctacatctcttgtcctcagaatcca

SEQ ID NO: 48258 - DNA, 25 bp, probe
aatccatattgtgtgtgcttcatgt

SEQ ID NO: 48259 - DNA, 25 bp, probe
atattctacatctcttgtcctcaga

SEQ ID NO: 48260 - DNA, 25 bp, probe
ctatgctctccagtaccataacatt

SEQ ID NO: 48261 - DNA, 25 bp, probe
atcttctatgctctccagtaccata

SEQ ID NO: 48262 - DNA, 25 bp, probe
catattgtgtgtgcttcatgtctca

SEQ ID NO: 48263 - DNA, 25 bp, probe
atccatattgtgtgtgcttcatgtc

SEQ ID NO: 48264 - DNA, 25 bp, probe
cttctatgctctccagtaccataac

SEQ ID NO: 48265 - DNA, 25 bp, probe
tcttctatgctctccagtaccataa

SEQ ID NO: 48266 - DNA, 25 bp, probe
tctatgctctccagtaccataacat

SEQ ID NO: 48267 - DNA, 25 bp, probe
ttctatgctctccagtaccataaca

SEQ ID NO: 48268 - DNA, 25 bp, probe
ttactcagatagtagtgctgtcatc

SEQ ID NO: 48269 - DNA, 25 bp, probe
ttgtgacttgtctagcagatattaa

SEQ ID NO: 48270 - DNA, 25 bp, probe
gctctccagtaccataacattatga

SEQ ID NO: 48271 - DNA, 25 bp, probe
tgctctccagtaccataacattatg

SEQ ID NO: 48272 - DNA, 25 bp, probe
cctcagaatccatattgtgtgtgct

SEQ ID NO: 48273 - DNA, 25 bp, probe
tcctcagaatccatattgtgtgtgc

SEQ ID NO: 48274 - DNA, 25 bp, probe
tatgctctccagtaccataacatta

SEQ ID NO: 48275 - DNA, 25 bp, probe
gatagtagtgctgtcatcatctgcc

SEQ ID NO: 48276 - DNA, 25 bp, probe
atgtctcacttcaatatgtacctca

SEQ ID NO: 48277 - DNA, 25 bp, probe
tgtctcacttcaatatgtacctcat

SEQ ID NO: 48278 - DNA, 25 bp, probe
catactcatcatgtgtaattccgtg

SEQ ID NO: 48279 - DNA, 25 bp, probe
tcatactcatcatgtgtaattccgt

SEQ ID NO: 48280 - DNA, 25 bp, probe
ctcgcttcatgtctcacttcaatat

SEQ ID NO: 48281 - DNA, 25 bp, probe
ctcatactcatcatgtgtaattccg

SEQ ID NO: 48282 - DNA, 25 bp, probe
tcatgtctcacttcaatatgtacct

SEQ ID NO: 48283 - DNA, 25 bp, probe
cctcatactcatcatgtgtaattcc

SEQ ID NO: 48284 - DNA, 25 bp, probe
tgtacctcatactcatcatgtgtaa

SEQ ID NO: 48285 - DNA, 25 bp, probe
catgtctcacttcaatatgtacctc

SEQ ID NO: 48286 - DNA, 25 bp, probe
atactcatcatgtgtaattccgtga

SEQ ID NO: 48287 - DNA, 25 bp, probe
gcttcatgtctcacttcaatatgta

SEQ ID NO: 48288 - DNA, 25 bp, probe
atgtacctcatactcatcatgtgta

SEQ ID NO: 48289 - DNA, 25 bp, probe
tcgcttcatgtctcacttcaatatg

SEQ ID NO: 48290 - DNA, 25 bp, probe
ttgtcttcatcctgtactcagaatc

SEQ ID NO: 48291 - DNA, 25 bp, probe
cattgtcttcatcctgtactcagaa

SEQ ID NO: 48292 - DNA, 25 bp, probe
ttcatgtctcacttcaatatgtacc

SEQ ID NO: 48293 - DNA, 25 bp, probe
cgcttcatgtctcacttcaatatgt

SEQ ID NO: 48294 - DNA, 25 bp, probe
attgtcttcatcctgtactcagaat

SEQ ID NO: 48295 - DNA, 25 bp, probe
acctcatactcatcatgtgtaattc

SEQ ID NO: 48296 - DNA, 25 bp, probe
tctcgcttcatgtctcacttcaata

SEQ ID NO: 48297 - DNA, 25 bp, probe
gtacctcatactcatcatgtgtaat

SEQ ID NO: 48298 - DNA, 25 bp, probe
tcttcatcctgtactcagaatccac

SEQ ID NO: 48299 - DNA, 25 bp, probe
gtcttcatcctgtactcagaatcca

SEQ ID NO: 48300 - DNA, 25 bp, probe
tgtcttcatcctgtactcagaatcc

SEQ ID NO: 48301 - DNA, 25 bp, probe
ccgttcttccttcatctcactttaa

SEQ ID NO: 48302 - DNA, 25 bp, probe
tatgtacctcatactcatcatgtgt

SEQ ID NO: 48303 - DNA, 25 bp, probe
tcatctcactttaatgctttcttgc

SEQ ID NO: 48304 - DNA, 25 bp, probe
tcttccttcatctcactttaatgct

SEQ ID NO: 48305 - DNA, 25 bp, probe
cgttcttccttcatctcactttaat

SEQ ID NO: 48306 - DNA, 25 bp, probe
ccttcatctcactttaatgctttct

SEQ ID NO: 48307 - DNA, 25 bp, probe
tccttcatctcactttaatgctttc

SEQ ID NO: 48308 - DNA, 25 bp, probe
cttccttcatctcactttaatgctt

SEQ ID NO: 48309 - DNA, 25 bp, probe
ttcttccttcatctcactttaatgc

SEQ ID NO: 48310 - DNA, 25 bp, probe
catcctgtactcagaatccacctac

SEQ ID NO: 48311 - DNA, 25 bp, probe
tcatcctgtactcagaatccaccta

SEQ ID NO: 48312 - DNA, 25 bp, probe
catctcactttaatgctttcttgcc

SEQ ID NO: 48313 - DNA, 25 bp, probe
cttcatgtctcacttcaatatgtac

SEQ ID NO: 48314 - DNA, 25 bp, probe
ttccttcatctcactttaatgcttt

SEQ ID NO: 48315 - DNA, 25 bp, probe
ctttaaggagattatttgctgccgt

SEQ ID NO: 48316 - DNA, 25 bp, probe
cacttcaatatgtacctcatactca

SEQ ID NO: 48317 - DNA, 25 bp, probe
ctctcgcttcatgtctcacttcaat

SEQ ID NO: 48318 - DNA, 25 bp, probe
gcattgtcttcatcctgtactcaga

SEQ ID NO: 48319 - DNA, 25 bp, probe
tacctcatactcatcatgtgtaatt

SEQ ID NO: 48320 - DNA, 25 bp, probe
gatattacagccacctcattcttct

SEQ ID NO: 48321 - DNA, 25 bp, probe
catatctcacctcaactctacacaa

SEQ ID NO: 48322 - DNA, 25 bp, probe
gacatatctcacctcaactctacac

SEQ ID NO: 48323 - DNA, 25 bp, probe
acatatctcacctcaactctacaca

SEQ ID NO: 48324 - DNA, 25 bp, probe
tattacagccacctcattcttctaa

SEQ ID NO: 48325 - DNA, 25 bp, probe
atattacagccacctcattcttcta

SEQ ID NO: 48326 - DNA, 25 bp, probe
agacatatctcacctcaactctaca

SEQ ID NO: 48327 - DNA, 25 bp, probe
aagacatatctcacctcaactctac

SEQ ID NO: 48328 - DNA, 25 bp, probe
gaagacatatctcacctcaactcta

SEQ ID NO: 48329 - DNA, 25 bp, probe
tgatattacagccacctcattcttc

SEQ ID NO: 48330 - DNA, 25 bp, probe
ggaagacatatctcacctcaactct

SEQ ID NO: 48331 - DNA, 25 bp, probe
tggaagacatatctcacctcaactc

SEQ ID NO: 48332 - DNA, 25 bp, probe
ctaagtgatattacagccacctcat

SEQ ID NO: 48333 - DNA, 25 bp, probe
taagtgatattacagccacctcatt

SEQ ID NO: 48334 - DNA, 25 bp, probe
gtgatattacagccacctcattctt

SEQ ID NO: 48335 - DNA, 25 bp, probe
aagtgatattacagccacctcattc

SEQ ID NO: 48336 - DNA, 25 bp, probe
ctactgacagtggaagacatatctc

SEQ ID NO: 48337 - DNA, 25 bp, probe
tactgacagtggaagacatatctca

SEQ ID NO: 48338 - DNA, 25 bp, probe
agtgatattacagccacctcattct

SEQ ID NO: 48339 - DNA, 25 bp, probe
cctactgacagtggaagacatatct

SEQ ID NO: 48340 - DNA, 25 bp, probe
cctaagtgatattacagccacctca

SEQ ID NO: 48341 - DNA, 25 bp, probe
attacagccacctcattcttctaaa

SEQ ID NO: 48342 - DNA, 25 bp, probe
ttgaagattaactcgacaatatggc

SEQ ID NO: 48343 - DNA, 25 bp, probe
ccatagtcattgctgtttcatctac

SEQ ID NO: 48344 - DNA, 25 bp, probe
accatagtcattgctgtttcatcta

SEQ ID NO: 48345 - DNA, 25 bp, probe
gatttcgcctaagtgatattacagc

SEQ ID NO: 48346 - DNA, 25 bp, probe
atctcacctcaactctacacaaatc

SEQ ID NO: 48347 - DNA, 25 bp, probe
tggatttcgcctaagtgatattaca

SEQ ID NO: 48348 - DNA, 25 bp, probe
gaagaaatatcgtgaaaggatgagc

SEQ ID NO: 48349 - DNA, 25 bp, probe
aggaagaaatatcgtgaaaggatga

SEQ ID NO: 48350 - DNA, 25 bp, probe
caggaagaaatatcgtgaaaggatg

SEQ ID NO: 48351 - DNA, 25 bp, probe
gtggaagacatatctcacctcaact

SEQ ID NO: 48352 - DNA, 25 bp, probe
agtggaagacatatctcacctcaac

SEQ ID NO: 48353 - DNA, 25 bp, probe
cagtggaagacatatctcacctcaa

SEQ ID NO: 48354 - DNA, 25 bp, probe
ggatttcgcctaagtgatattacag

SEQ ID NO: 48355 - DNA, 25 bp, probe
gtcattgctgtttcatctactgttg

SEQ ID NO: 48356 - DNA, 25 bp, probe
ggaagaaatatcgtgaaaggatgag

SEQ ID NO: 48357 - DNA, 25 bp, probe
tatctcacctcaactctacacaaat

SEQ ID NO: 48358 - DNA, 25 bp, probe
ccaggaagaaatatcgtgaaaggat

SEQ ID NO: 48359 - DNA, 25 bp, probe
atatctcacctcaactctacacaaa

SEQ ID NO: 48360 - DNA, 25 bp, probe
atttcgcctaagtgatattacagcc

SEQ ID NO: 48361 - DNA, 25 bp, probe
gtttcatctactgttgctgtgtttg

SEQ ID NO: 48362 - DNA, 25 bp, probe
tatcctactgacagtggaagacata

SEQ ID NO: 48363 - DNA, 25 bp, probe
tatatcctactgacagtggaagaca

SEQ ID NO: 48364 - DNA, 25 bp, probe
ttcattgttcgcttctgtaattctg

SEQ ID NO: 48365 - DNA, 25 bp, probe
cattgttcgcttctgtaattctgaa

SEQ ID NO: 48366 - DNA, 25 bp, probe
ttgtagttcttatgctgaatcttcc

SEQ ID NO: 48367 - DNA, 25 bp, probe
ccacttgtagttcttatgctgaatc

SEQ ID NO: 48368 - DNA, 25 bp, probe
ttgctgaggttccttctattctgat

SEQ ID NO: 48369 - DNA, 25 bp, probe
tcattgttcgcttctgtaattctga

SEQ ID NO: 48370 - DNA, 25 bp, probe
cacttgtagttcttatgctgaatct

SEQ ID NO: 48371 - DNA, 25 bp, probe
aattcaaccacagacattctcaagg

SEQ ID NO: 48372 - DNA, 25 bp, probe
tgctgaggttccttctattctgatg

SEQ ID NO: 48373 - DNA, 25 bp, probe
acttgtagttcttatgctgaatctt

SEQ ID NO: 48374 - DNA, 25 bp, probe
attcaaccacagacattctcaagga

SEQ ID NO: 48375 - DNA, 25 bp, probe
cttgtagttcttatgctgaatcttc

SEQ ID NO: 48376 - DNA, 25 bp, probe
aggttccttctattctgatggagta

SEQ ID NO: 48377 - DNA, 25 bp, probe
gtccttctgttgatgacttcgtaag

SEQ ID NO: 48378 - DNA, 25 bp, probe
ttcaaccacagacattctcaaggaa

SEQ ID NO: 48379 - DNA, 25 bp, probe
gatattactcttacctcatgtccag

SEQ ID NO: 48380 - DNA, 25 bp, probe
ggttccttctattctgatggagtac

SEQ ID NO: 48381 - DNA, 25 bp, probe
gaggttccttctattctgatggagt

SEQ ID NO: 48382 - DNA, 25 bp, probe
tgaggttccttctattctgatggag

SEQ ID NO: 48383 - DNA, 25 bp, probe
ctgaggttccttctattctgatgga

SEQ ID NO: 48384 - DNA, 25 bp, probe
atattactcttacctcatgtccaga

SEQ ID NO: 48385 - DNA, 25 bp, probe
agatattactcttacctcatgtcca

SEQ ID NO: 48386 - DNA, 25 bp, probe
gctgaggttccttctattctgatgg

SEQ ID NO: 48387 - DNA, 25 bp, probe
ttgtttcattgttcgcttctgtaat

SEQ ID NO: 48388 - DNA, 25 bp, probe
attgtttcattgttcgcttctgtaa

SEQ ID NO: 48389 - DNA, 25 bp, probe
tgtccttctgttgatgacttcgtaa

SEQ ID NO: 48390 - DNA, 25 bp, probe
gattgtttcattgttcgcttctgta

SEQ ID NO: 48391 - DNA, 25 bp, probe
aatatggtgtctcgtctttgtgaat

SEQ ID NO: 48392 - DNA, 25 bp, probe
ggtgctagatattactcttacctca

SEQ ID NO: 48393 - DNA, 25 bp, probe
tggtgctagatattactcttacctc

SEQ ID NO: 48394 - DNA, 25 bp, probe
aaatatggtgtctcgtctttgtgaa

SEQ ID NO: 48395 - DNA, 25 bp, probe
tgtttcattgttcgcttctgtaatt

SEQ ID NO: 48396 - DNA, 25 bp, probe
cagactaaaggaagatggagactat

SEQ ID NO: 48397 - DNA, 25 bp, probe
taaccaatttgccagacattatcag

SEQ ID NO: 48398 - DNA, 25 bp, probe
tttcattgttcgcttctgtaattct

SEQ ID NO: 48399 - DNA, 25 bp, probe
gtttcattgttcgcttctgtaattc

SEQ ID NO: 48400 - DNA, 25 bp, probe
atatggtgtctcgtctttgtgaatc

SEQ ID NO: 48401 - DNA, 25 bp, probe
tgtagttcttatgctgaatcttccc

SEQ ID NO: 48402 - DNA, 25 bp, probe
ggtgtctcgtctttgtgaatctaaa

SEQ ID NO: 48403 - DNA, 25 bp, probe
gactaaaggaagatggagactatca

SEQ ID NO: 48404 - DNA, 25 bp, probe
gaaacactctacacctctaatcaag

SEQ ID NO: 48405 - DNA, 25 bp, probe
ttaaccaatttgccagacattatca

SEQ ID NO: 48406 - DNA, 25 bp, probe
aaccaatttgccagacattatcaga

SEQ ID NO: 48407 - DNA, 25 bp, probe
acatcaggattgccatttcactatc

SEQ ID NO: 48408 - DNA, 25 bp, probe
attggttgctatatgttccgaattg

SEQ ID NO: 48409 - DNA, 25 bp, probe
tgctatatgttccgaattgatgact

SEQ ID NO: 48410 - DNA, 25 bp, probe
gctatatgttccgaattgatgactc

SEQ ID NO: 48411 - DNA, 25 bp, probe
ggttgctatatgttccgaattgatg

SEQ ID NO: 48412 - DNA, 25 bp, probe
ttgctatatgttccgaattgatgac

SEQ ID NO: 48413 - DNA, 25 bp, probe
gttgctatatgttccgaattgatga

SEQ ID NO: 48414 - DNA, 25 bp, probe
tggttgctatatgttccgaattgat

SEQ ID NO: 48415 - DNA, 25 bp, probe
ttggttgctatatgttccgaattga

SEQ ID NO: 48416 - DNA, 25 bp, probe
cattggttgctatatgttccgaatt

SEQ ID NO: 48417 - DNA, 25 bp, probe
caatgatgaagaagaggaggaggta

SEQ ID NO: 48418 - DNA, 25 bp, probe
atatgttccgaattgatgactcaga

SEQ ID NO: 48419 - DNA, 25 bp, probe
tatgttccgaattgatgactcagag

SEQ ID NO: 48420 - DNA, 25 bp, probe
ggagaggaactcacttacgactata

SEQ ID NO: 48421 - DNA, 25 bp, probe
gagaggaactcacttacgactataa

SEQ ID NO: 48422 - DNA, 25 bp, probe
aattgatgactcagaggtagtggat

SEQ ID NO: 48423 - DNA, 25 bp, probe
aatgatgaagaagaggaggaggtac

SEQ ID NO: 48424 - DNA, 25 bp, probe
gaattgatgactcagaggtagtgga

SEQ ID NO: 48425 - DNA, 25 bp, probe
tatatgttccgaattgatgactcag

SEQ ID NO: 48426 - DNA, 25 bp, probe
ctatatgttccgaattgatgactca

SEQ ID NO: 48427 - DNA, 25 bp, probe
attgatgactcagaggtagtggatg

SEQ ID NO: 48428 - DNA, 25 bp, probe
agaggaactcacttacgactataag

SEQ ID NO: 48429 - DNA, 25 bp, probe
ttccgaattgatgactcagaggtag

SEQ ID NO: 48430 - DNA, 25 bp, probe
aggagaggaactcacttacgactat

SEQ ID NO: 48431 - DNA, 25 bp, probe
gttccgaattgatgactcagaggta

SEQ ID NO: 48432 - DNA, 25 bp, probe
atgatgaagaagaggaggaggtaca

SEQ ID NO: 48433 - DNA, 25 bp, probe
gaggagaggaactcacttacgacta

SEQ ID NO: 48434 - DNA, 25 bp, probe
atgttccgaattgatgactcagagg

SEQ ID NO: 48435 - DNA, 25 bp, probe
ttaacttcctggcttctaaacatcg

SEQ ID NO: 48436 - DNA, 25 bp, probe
cgaattgatgactcagaggtagtgg

SEQ ID NO: 48437 - DNA, 25 bp, probe
ccgaattgatgactcagaggtagtg

SEQ ID NO: 48438 - DNA, 25 bp, probe
tccgaattgatgactcagaggtagt

SEQ ID NO: 48439 - DNA, 25 bp, probe
tgatgaagaagaggaggaggtacag

SEQ ID NO: 48440 - DNA, 25 bp, probe
tttaacttcctggcttctaaacatc

SEQ ID NO: 48441 - DNA, 25 bp, probe
caggtgagatggtgattgagtatgc

SEQ ID NO: 48442 - DNA, 25 bp, probe
gcaggtgagatggtgattgagtatg

SEQ ID NO: 48443 - DNA, 25 bp, probe
taactgctattctcgggtcatcaat

SEQ ID NO: 48444 - DNA, 25 bp, probe
actgctattctcgggtcatcaatat

SEQ ID NO: 48445 - DNA, 25 bp, probe
taacttcctggcttctaaacatcgt

SEQ ID NO: 48446 - DNA, 25 bp, probe
aactgctattctcgggtcatcaata

SEQ ID NO: 48447 - DNA, 25 bp, probe
cttctaaggaggcagttggtgtcta

SEQ ID NO: 48448 - DNA, 25 bp, probe
ctaactgctattctcgggtcatcaa

SEQ ID NO: 48449 - DNA, 25 bp, probe
ccaatgatgaagaagaggaggaggt

SEQ ID NO: 48450 - DNA, 25 bp, probe
catgtttaacttcctggcttctaaa

SEQ ID NO: 48451 - DNA, 25 bp, probe
ctaccgaggagaggaactcacttac

SEQ ID NO: 48452 - DNA, 25 bp, probe
cagtgtgtataaaccttcttcttct

SEQ ID NO: 48453 - DNA, 25 bp, probe
gaggattgtcattaaacacagttgt

SEQ ID NO: 48454 - DNA, 25 bp, probe
tgaggattgtcattaaacacagttg

SEQ ID NO: 48455 - DNA, 25 bp, probe
aaactgaggattgtcattaaacaca

SEQ ID NO: 48456 - DNA, 25 bp, probe
ctgaggattgtcattaaacacagtt

SEQ ID NO: 48457 - DNA, 25 bp, probe
aactgaggattgtcattaaacacag

SEQ ID NO: 48458 - DNA, 25 bp, probe
agtgtgtataaaccttcttcttctt

SEQ ID NO: 48459 - DNA, 25 bp, probe
acagtgtgtataaaccttcttcttc

SEQ ID NO: 48460 - DNA, 25 bp, probe
ctgacaatcctggaaatctgttctc

SEQ ID NO: 48461 - DNA, 25 bp, probe
gtgtgtataaaccttcttcttcttt

SEQ ID NO: 48462 - DNA, 25 bp, probe
ctatcctccaaagccattgtaaatg

SEQ ID NO: 48463 - DNA, 25 bp, probe
tatcctccaaagccattgtaaatgt

SEQ ID NO: 48464 - DNA, 25 bp, probe
taaactgaggattgtcattaaacac

SEQ ID NO: 48465 - DNA, 25 bp, probe
tccaaagccattgtaaatgtgtgta

SEQ ID NO: 48466 - DNA, 25 bp, probe
ccaaagccattgtaaatgtgtgtac

SEQ ID NO: 48467 - DNA, 25 bp, probe
gctatcctccaaagccattgtaaat

SEQ ID NO: 48468 - DNA, 25 bp, probe
atcctccaaagccattgtaaatgtg

SEQ ID NO: 48469 - DNA, 25 bp, probe
tgacaatcctggaaatctgttctcc

SEQ ID NO: 48470 - DNA, 25 bp, probe
gtacagtgtgtataaaccttcttct

SEQ ID NO: 48471 - DNA, 25 bp, probe
gctgacaatcctggaaatctgttct

SEQ ID NO: 48472 - DNA, 25 bp, probe
ttaaactgaggattgtcattaaaca

SEQ ID NO: 48473 - DNA, 25 bp, probe
ctccaaagccattgtaaatgtgtgt

SEQ ID NO: 48474 - DNA, 25 bp, probe
tacagtgtgtataaaccttcttctt

SEQ ID NO: 48475 - DNA, 25 bp, probe
cttctggctgacaatcctggaaatc

SEQ ID NO: 48476 - DNA, 25 bp, probe
aggattgtcattaaacacagttgtt

SEQ ID NO: 48477 - DNA, 25 bp, probe
tgctatcctccaaagccattgtaaa

SEQ ID NO: 48478 - DNA, 25 bp, probe
cctccaaagccattgtaaatgtgtg

SEQ ID NO: 48479 - DNA, 25 bp, probe
tcctccaaagccattgtaaatgtgt

SEQ ID NO: 48480 - DNA, 25 bp, probe
ttctggctgacaatcctggaaatct

SEQ ID NO: 48481 - DNA, 25 bp, probe
ctgctatcctccaaagccattgtaa

SEQ ID NO: 48482 - DNA, 25 bp, probe
ggctgacaatcctggaaatctgttc

SEQ ID NO: 48483 - DNA, 25 bp, probe
tgtatccctgttgtgaggttccttc

SEQ ID NO: 48484 - DNA, 25 bp, probe
ctgtatccctgttgtgaggttcctt

SEQ ID NO: 48485 - DNA, 25 bp, probe
gaactggagtgtccttgctgtatcc

SEQ ID NO: 48486 - DNA, 25 bp, probe
ggaactggagtgtccttgctgtatc

SEQ ID NO: 48487 - DNA, 25 bp, probe
tcaaatggggaggggtattcttcat

SEQ ID NO: 48488 - DNA, 25 bp, probe
tctggctgacaatcctggaaatctg

SEQ ID NO: 48489 - DNA, 25 bp, probe
ctttggcatgacttaagaggaaggg

SEQ ID NO: 48490 - DNA, 25 bp, probe
aaaagttcacagtcaaatggggagg

SEQ ID NO: 48491 - DNA, 25 bp, probe
actgaggattgtcattaaacacagt

SEQ ID NO: 48492 - DNA, 25 bp, probe
tgtgtataaaccttcttcttctttt

SEQ ID NO: 48493 - DNA, 25 bp, probe
tgtgtgtacagtgtgtataaacctt

SEQ ID NO: 48494 - DNA, 25 bp, probe
atgtgtgtacagtgtgtataaacct

SEQ ID NO: 48495 - DNA, 25 bp, probe
cattgtaaatgtgtgtacagtgtgt

SEQ ID NO: 48496 - DNA, 25 bp, probe
cctttgtctttctttgtcattcagt

SEQ ID NO: 48497 - DNA, 25 bp, probe
gtcctttgtctttctttgtcattca

SEQ ID NO: 48498 - DNA, 25 bp, probe
cagtcctttgtctttctttgtcatt

SEQ ID NO: 48499 - DNA, 25 bp, probe
tcctttgtctttctttgtcattcag

SEQ ID NO: 48500 - DNA, 25 bp, probe
agtcctttgtctttctttgtcattc

SEQ ID NO: 48501 - DNA, 25 bp, probe
cttcagtcctttgtctttctttgtc

SEQ ID NO: 48502 - DNA, 25 bp, probe
ttcttcagtcctttgtctttctttg

SEQ ID NO: 48503 - DNA, 25 bp, probe
gttcttcagtcctttgtctttcttt

SEQ ID NO: 48504 - DNA, 25 bp, probe
tcagtcctttgtctttctttgtcat

SEQ ID NO: 48505 - DNA, 25 bp, probe
tcttcagtcctttgtctttctttgt

SEQ ID NO: 48506 - DNA, 25 bp, probe
tgttcttcagtcctttgtctttctt

SEQ ID NO: 48507 - DNA, 25 bp, probe
ttcagtcctttgtctttctttgtca

SEQ ID NO: 48508 - DNA, 25 bp, probe
ttgtctttctttgtcattcagttct

SEQ ID NO: 48509 - DNA, 25 bp, probe
cagtatctgctgttcttcagtcctt

SEQ ID NO: 48510 - DNA, 25 bp, probe
ctttctttgtcattcagttctaggc

SEQ ID NO: 48511 - DNA, 25 bp, probe
tttgtctttctttgtcattcagttc

SEQ ID NO: 48512 - DNA, 25 bp, probe
tgtctttctttgtcattcagttcta

SEQ ID NO: 48513 - DNA, 25 bp, probe
ctttgtctttctttgtcattcagtt

SEQ ID NO: 48514 - DNA, 25 bp, probe
tcaggattaactaaagaagaggaga

SEQ ID NO: 48515 - DNA, 25 bp, probe
tttgtcaggtgggagatttggaata

SEQ ID NO: 48516 - DNA, 25 bp, probe
tctttctttgtcattcagttctagg

SEQ ID NO: 48517 - DNA, 25 bp, probe
ctgttcttcagtcctttgtctttct

SEQ ID NO: 48518 - DNA, 25 bp, probe
caggattaactaaagaagaggagaa

SEQ ID NO: 48519 - DNA, 25 bp, probe
ttgtcaggtgggagatttggaatac

SEQ ID NO: 48520 - DNA, 25 bp, probe
gtctttctttgtcattcagttctag

SEQ ID NO: 48521 - DNA, 25 bp, probe
ttcaggattaactaaagaagaggag

SEQ ID NO: 48522 - DNA, 25 bp, probe
gaatacacatgcaggacgttagact

SEQ ID NO: 48523 - DNA, 25 bp, probe
gtatctgctgttcttcagtcctttg

SEQ ID NO: 48524 - DNA, 25 bp, probe
agtatctgctgttcttcagtccttt

SEQ ID NO: 48525 - DNA, 25 bp, probe
tatctgctgttcttcagtcctttgt

SEQ ID NO: 48526 - DNA, 25 bp, probe
ttgtctccaaagaagatagctctct

SEQ ID NO: 48527 - DNA, 25 bp, probe
tttcaggattaactaaagaagagga

SEQ ID NO: 48528 - DNA, 25 bp, probe
ctccaaagaagatagctctctgact

SEQ ID NO: 48529 - DNA, 25 bp, probe
tctccaaagaagatagctctctgac

SEQ ID NO: 48530 - DNA, 25 bp, probe
gtctccaaagaagatagctctctga

SEQ ID NO: 48531 - DNA, 25 bp, probe
aggattaactaaagaagaggagaaa

SEQ ID NO: 48532 - DNA, 25 bp, probe
gctgttcttcagtcctttgtctttc

SEQ ID NO: 48533 - DNA, 25 bp, probe
tccaaagaagatagctctctgactg

SEQ ID NO: 48534 - DNA, 25 bp, probe
tgtctccaaagaagatagctctctg

SEQ ID NO: 48535 - DNA, 25 bp, probe
ttggaatacacatgcaggacgttag

SEQ ID NO: 48536 - DNA, 25 bp, probe
aatacacatgcaggacgttagactg

SEQ ID NO: 48537 - DNA, 25 bp, probe
gagatttggaatacacatgcaggac

SEQ ID NO: 48538 - DNA, 25 bp, probe
ggaatacacatgcaggacgttagac

SEQ ID NO: 48539 - DNA, 25 bp, probe
caggtgggagatttggaatacacat

SEQ ID NO: 48540 - DNA, 25 bp, probe
gatgacaggtgagccagataataac

SEQ ID NO: 48541 - DNA, 25 bp, probe
agatgacaggtgagccagataataa

SEQ ID NO: 48542 - DNA, 25 bp, probe
aagatgacaggtgagccagataata

SEQ ID NO: 48543 - DNA, 25 bp, probe
gaagatgacaggtgagccagataat

SEQ ID NO: 48544 - DNA, 25 bp, probe
ttatcactctcagcttcacctacat

SEQ ID NO: 48545 - DNA, 25 bp, probe
gtgttattatgggaaaggaaatggc

SEQ ID NO: 48546 - DNA, 25 bp, probe
atgctttggttagtatctgtgtttc

SEQ ID NO: 48547 - DNA, 25 bp, probe
tgttattatgggaaaggaaatggca

SEQ ID NO: 48548 - DNA, 25 bp, probe
tatcactctcagcttcacctacatg

SEQ ID NO: 48549 - DNA, 25 bp, probe
atagtaatctaagggttgagcagtt

SEQ ID NO: 48550 - DNA, 25 bp, probe
agtaatctaagggttgagcagttaa

SEQ ID NO: 48551 - DNA, 25 bp, probe
caacctcaaataaccattccaagaa

SEQ ID NO: 48552 - DNA, 25 bp, probe
gttattatgggaaaggaaatggcat

SEQ ID NO: 48553 - DNA, 25 bp, probe
agtgttattatgggaaaggaaatgg

SEQ ID NO: 48554 - DNA, 25 bp, probe
aacctcaaataaccattccaagaag

SEQ ID NO: 48555 - DNA, 25 bp, probe
atcattaaacaagccagtaggtcac

SEQ ID NO: 48556 - DNA, 25 bp, probe
catcattaaacaagccagtaggtca

SEQ ID NO: 48557 - DNA, 25 bp, probe
tgctttggttagtatctgtgtttcc

SEQ ID NO: 48558 - DNA, 25 bp, probe
ccaacctcaaataaccattccaaga

SEQ ID NO: 48559 - DNA, 25 bp, probe
tagtaatctaagggttgagcagtta

SEQ ID NO: 48560 - DNA, 25 bp, probe
agaatctgatttagggaaactgtgg

SEQ ID NO: 48561 - DNA, 25 bp, probe
gagaatctgatttagggaaactgtg

SEQ ID NO: 48562 - DNA, 25 bp, probe
gtaatctaagggttgagcagttaaa

SEQ ID NO: 48563 - DNA, 25 bp, probe
tatagtaatctaagggttgagcagt

SEQ ID NO: 48564 - DNA, 25 bp, probe
tattatgggaaaggaaatggcattg

SEQ ID NO: 48565 - DNA, 25 bp, probe
agagaatctgatttagggaaactgt

SEQ ID NO: 48566 - DNA, 25 bp, probe
gcaatccattcctctcttgtttata

SEQ ID NO: 48567 - DNA, 25 bp, probe
ctttagagaaatggactcagggaag

SEQ ID NO: 48568 - DNA, 25 bp, probe
cagtgttattatgggaaaggaaatg

SEQ ID NO: 48569 - DNA, 25 bp, probe
acagtgttattatgggaaaggaaat

SEQ ID NO: 48570 - DNA, 25 bp, probe
catgctttggttagtatctgtgttt

SEQ ID NO: 48571 - DNA, 25 bp, probe
tttagagaaatggactcagggaaga

SEQ ID NO: 48572 - DNA, 25 bp, probe
atgacaggtgagccagataataacc

SEQ ID NO: 48573 - DNA, 25 bp, probe
ttattatgggaaaggaaatggcatt

SEQ ID NO: 48574 - DNA, 25 bp, probe
tggaccaattcatctttcagacaag

SEQ ID NO: 48575 - DNA, 25 bp, probe
gatcaagagagccatcaccttcatc

SEQ ID NO: 48576 - DNA, 25 bp, probe
cccaacctcaaataaccattccaag

SEQ ID NO: 48577 - DNA, 25 bp, probe
ttagagaaatggactcagggaagag

SEQ ID NO: 48578 - DNA, 25 bp, probe
gtggaccaattcatctttcagacaa

SEQ ID NO: 48579 - DNA, 25 bp, probe
gctttggttagtatctgtgtttccg

SEQ ID NO: 48580 - DNA, 25 bp, probe
gaatctgatttagggaaactgtggc

SEQ ID NO: 48581 - DNA, 25 bp, probe
caagatcaagagagccatcaccttc

SEQ ID NO: 48582 - DNA, 25 bp, probe
gcatcattaaacaagccagtaggtc

SEQ ID NO: 48583 - DNA, 25 bp, probe
ctttcccaacttcttctccactttg

SEQ ID NO: 48584 - DNA, 25 bp, probe
gattcagcatcagaagaagaaggaa

SEQ ID NO: 48585 - DNA, 25 bp, probe
attcagcatcagaagaagaaggaac

SEQ ID NO: 48586 - DNA, 25 bp, probe
taagccttatccagcagccataatt

SEQ ID NO: 48587 - DNA, 25 bp, probe
ttaagccttatccagcagccataat

SEQ ID NO: 48588 - DNA, 25 bp, probe
aatgctgaatggagaagggtaatag

SEQ ID NO: 48589 - DNA, 25 bp, probe
catcagaagaagaaggaacccatag

SEQ ID NO: 48590 - DNA, 25 bp, probe
ttcagcatcagaagaagaaggaacc

SEQ ID NO: 48591 - DNA, 25 bp, probe
ctgaatggagaagggtaataggttg

SEQ ID NO: 48592 - DNA, 25 bp, probe
caatgctgaatggagaagggtaata

SEQ ID NO: 48593 - DNA, 25 bp, probe
atccagcagccataatttgaataac

SEQ ID NO: 48594 - DNA, 25 bp, probe
cagcagccataatttgaataactct

SEQ ID NO: 48595 - DNA, 25 bp, probe
ccagcagccataatttgaataactc

SEQ ID NO: 48596 - DNA, 25 bp, probe
ggtttagaaggttcaagtttccaat

SEQ ID NO: 48597 - DNA, 25 bp, probe
tccagcagccataatttgaataact

SEQ ID NO: 48598 - DNA, 25 bp, probe
aatggagaagggtaataggttggtt

SEQ ID NO: 48599 - DNA, 25 bp, probe
aggttcaagtttccaattaaagtca

SEQ ID NO: 48600 - DNA, 25 bp, probe
ggtgtgaactatggtttagaaggtt

SEQ ID NO: 48601 - DNA, 25 bp, probe
cttatccagcagccataatttgaat

SEQ ID NO: 48602 - DNA, 25 bp, probe
tatggtttagaaggttcaagtttcc

SEQ ID NO: 48603 - DNA, 25 bp, probe
tacgagaccagagagactgtagttc

SEQ ID NO: 48604 - DNA, 25 bp, probe
tatccagcagccataatttgaataa

SEQ ID NO: 48605 - DNA, 25 bp, probe
gaatggagaagggtaataggttggt

SEQ ID NO: 48606 - DNA, 25 bp, probe
tgaatggagaagggtaataggttgg

SEQ ID NO: 48607 - DNA, 25 bp, probe
atttgaataactctacgagaccaga

SEQ ID NO: 48608 - DNA, 25 bp, probe
gcagccataatttgaataactctac

SEQ ID NO: 48609 - DNA, 25 bp, probe
atgctgaatggagaagggtaatagg

SEQ ID NO: 48610 - DNA, 25 bp, probe
agcagccataatttgaataactcta

SEQ ID NO: 48611 - DNA, 25 bp, probe
ttatccagcagccataatttgaata

SEQ ID NO: 48612 - DNA, 25 bp, probe
ccttatccagcagccataatttgaa

SEQ ID NO: 48613 - DNA, 25 bp, probe
ggttcaagtttccaattaaagtcat

SEQ ID NO: 48614 - DNA, 25 bp, probe
aaggttcaagtttccaattaaagtc

SEQ ID NO: 48615 - DNA, 25 bp, probe
cagccataatttgaataactctacg

SEQ ID NO: 48616 - DNA, 25 bp, probe
atcagaagaagaaggaacccatagc

SEQ ID NO: 48617 - DNA, 25 bp, probe
atggagaagggtaataggttggttg

SEQ ID NO: 48618 - DNA, 25 bp, probe
gctgaatggagaagggtaataggtt

SEQ ID NO: 48619 - DNA, 25 bp, probe
gtaataggttggttgcagtgaatgg

SEQ ID NO: 48620 - DNA, 25 bp, probe
ggtaataggttggttgcagtgaatg

SEQ ID NO: 48621 - DNA, 25 bp, probe
atgattcagcatcagaagaagaagg

SEQ ID NO: 48622 - DNA, 25 bp, probe
agccataatttgaataactctacga

SEQ ID NO: 48623 - DNA, 25 bp, probe
ccatagcttggtgtcattaacataa

SEQ ID NO: 48624 - DNA, 25 bp, probe
gaaggttcaagtttccaattaaagt

SEQ ID NO: 48625 - DNA, 25 bp, probe
gtttagaaggttcaagtttccaatt

SEQ ID NO: 48626 - DNA, 25 bp, probe
aatttgaataactctacgagaccag

SEQ ID NO: 48627 - DNA, 25 bp, probe
actatggtttagaaggttcaagttt

SEQ ID NO: 48628 - DNA, 25 bp, probe
cttcaatctatcagcaactacctcc

SEQ ID NO: 48629 - DNA, 25 bp, probe
tcaatctatcagcaactacctccaa

SEQ ID NO: 48630 - DNA, 25 bp, probe
ttcaatctatcagcaactacctcca

SEQ ID NO: 48631 - DNA, 25 bp, probe
aagtgttcttcagtaattgtgctgg

SEQ ID NO: 48632 - DNA, 25 bp, probe
aatctatcagcaactacctccaaac

SEQ ID NO: 48633 - DNA, 25 bp, probe
caatctatcagcaactacctccaaa

SEQ ID NO: 48634 - DNA, 25 bp, probe
atctatcagcaactacctccaaact

SEQ ID NO: 48635 - DNA, 25 bp, probe
tctatcagcaactacctccaaactc

SEQ ID NO: 48636 - DNA, 25 bp, probe
gcttcaatctatcagcaactacctc

SEQ ID NO: 48637 - DNA, 25 bp, probe
tatcagcaactacctccaaactcag

SEQ ID NO: 48638 - DNA, 25 bp, probe
ctatcagcaactacctccaaactca

SEQ ID NO: 48639 - DNA, 25 bp, probe
gaagtgttcttcagtaattgtgctg

SEQ ID NO: 48640 - DNA, 25 bp, probe
agcttcaatctatcagcaactacct

SEQ ID NO: 48641 - DNA, 25 bp, probe
cagcttcaatctatcagcaactacc

SEQ ID NO: 48642 - DNA, 25 bp, probe
taagtccatcgtgttggtcaaattc

SEQ ID NO: 48643 - DNA, 25 bp, probe
ctaagtccatcgtgttggtcaaatt

SEQ ID NO: 48644 - DNA, 25 bp, probe
cttcagtaattgtgctggcacttag

SEQ ID NO: 48645 - DNA, 25 bp, probe
agtgttcttcagtaattgtgctggc

SEQ ID NO: 48646 - DNA, 25 bp, probe
gcagcttcaatctatcagcaactac

SEQ ID NO: 48647 - DNA, 25 bp, probe
tcttcagtaattgtgctggcactta

SEQ ID NO: 48648 - DNA, 25 bp, probe
gttggtcaaattcctccatgatgag

SEQ ID NO: 48649 - DNA, 25 bp, probe
gtgttcttcagtaattgtgctggca

SEQ ID NO: 48650 - DNA, 25 bp, probe
gtgttggtcaaattcctccatgatg

SEQ ID NO: 48651 - DNA, 25 bp, probe
tgttggtcaaattcctccatgatga

SEQ ID NO: 48652 - DNA, 25 bp, probe
ttcttcagtaattgtgctggcactt

SEQ ID NO: 48653 - DNA, 25 bp, probe
ttcagtaattgtgctggcacttagg

SEQ ID NO: 48654 - DNA, 25 bp, probe
cgcagcttcaatctatcagcaacta

SEQ ID NO: 48655 - DNA, 25 bp, probe
taattgtgctggcacttaggagaga

SEQ ID NO: 48656 - DNA, 25 bp, probe
gtaattgtgctggcacttaggagag

SEQ ID NO: 48657 - DNA, 25 bp, probe
aagtctggtcgcagcttcaatctat

SEQ ID NO: 48658 - DNA, 25 bp, probe
gatctacaccatcactctgtgctcc

SEQ ID NO: 48659 - DNA, 25 bp, probe
ggatctacaccatcactctgtgctc

SEQ ID NO: 48660 - DNA, 25 bp, probe
cagtaattgtgctggcacttaggag

SEQ ID NO: 48661 - DNA, 25 bp, probe
ggtcaaattcctccatgatgagcag

SEQ ID NO: 48662 - DNA, 25 bp, probe
agtaattgtgctggcacttaggaga

SEQ ID NO: 48663 - DNA, 25 bp, probe
gttcttcagtaattgtgctggcact

SEQ ID NO: 48664 - DNA, 25 bp, probe
catcgtgttggtcaaattcctccat

SEQ ID NO: 48665 - DNA, 25 bp, probe
gctaagtccatcgtgttggtcaaat

SEQ ID NO: 48666 - DNA, 25 bp, probe
ttggtcaaattcctccatgatgagc

SEQ ID NO: 48667 - DNA, 25 bp, probe
tcagtaattgtgctggcacttagga

SEQ ID NO: 48668 - DNA, 25 bp, probe
tgttcttcagtaattgtgctggcac

SEQ ID NO: 48669 - DNA, 25 bp, probe
aagtccatcgtgttggtcaaattcc

SEQ ID NO: 48670 - DNA, 25 bp, probe
tctggtcgcagcttcaatctatcag

SEQ ID NO: 48671 - DNA, 25 bp, probe
agtctggtcgcagcttcaatctatc

SEQ ID NO: 48672 - DNA, 25 bp, probe
atatcgtgtgtgtgattccttgtaa

SEQ ID NO: 48673 - DNA, 25 bp, probe
aatatcgtgtgtgtgattccttgta

SEQ ID NO: 48674 - DNA, 25 bp, probe
gtcaggtgctcaatggagaatataa

SEQ ID NO: 48675 - DNA, 25 bp, probe
agtcaggtgctcaatggagaatata

SEQ ID NO: 48676 - DNA, 25 bp, probe
tagtcaggtgctcaatggagaatat

SEQ ID NO: 48677 - DNA, 25 bp, probe
taattaatgtcatgttgcttgtcgc

SEQ ID NO: 48678 - DNA, 25 bp, probe
gtagtcaggtgctcaatggagaata

SEQ ID NO: 48679 - DNA, 25 bp, probe
tatcgtgtgtgtgattccttgtaaa

SEQ ID NO: 48680 - DNA, 25 bp, probe
attaatgtcatgttgcttgtcgctt

SEQ ID NO: 48681 - DNA, 25 bp, probe
aattaatgtcatgttgcttgtcgct

SEQ ID NO: 48682 - DNA, 25 bp, probe
aaatatcgtgtgtgtgattccttgt

SEQ ID NO: 48683 - DNA, 25 bp, probe
gtaactgtagtgtagtcaggtgctc

SEQ ID NO: 48684 - DNA, 25 bp, probe
aggtgctcaatggagaatataaaca

SEQ ID NO: 48685 - DNA, 25 bp, probe
caggtgctcaatggagaatataaac

SEQ ID NO: 48686 - DNA, 25 bp, probe
tcaggtgctcaatggagaatataaa

SEQ ID NO: 48687 - DNA, 25 bp, probe
taactgtagtgtagtcaggtgctca

SEQ ID NO: 48688 - DNA, 25 bp, probe
cgtgtaactgtagtgtagtcaggtg

SEQ ID NO: 48689 - DNA, 25 bp, probe
ggtgctcaatggagaatataaacat

SEQ ID NO: 48690 - DNA, 25 bp, probe
gtgtaactgtagtgtagtcaggtgc

SEQ ID NO: 48691 - DNA, 25 bp, probe
ctgtagtgtagtcaggtgctcaatg

SEQ ID NO: 48692 - DNA, 25 bp, probe
tgtaactgtagtgtagtcaggtgct

SEQ ID NO: 48693 - DNA, 25 bp, probe
gtctaatccttctcattacccaccc

SEQ ID NO: 48694 - DNA, 25 bp, probe
gtagtgtagtcaggtgctcaatgga

SEQ ID NO: 48695 - DNA, 25 bp, probe
actgtagtgtagtcaggtgctcaat

SEQ ID NO: 48696 - DNA, 25 bp, probe
gtgcgtgtaactgtagtgtagtcag

SEQ ID NO: 48697 - DNA, 25 bp, probe
tgtagtcaggtgctcaatggagaat

SEQ ID NO: 48698 - DNA, 25 bp, probe
gcttcgttaattaatgtcatgttgc

SEQ ID NO: 48699 - DNA, 25 bp, probe
tggcttcgttaattaatgtcatgtt

SEQ ID NO: 48700 - DNA, 25 bp, probe
tagtgtagtcaggtgctcaatggag

SEQ ID NO: 48701 - DNA, 25 bp, probe
aactgtagtgtagtcaggtgctcaa

SEQ ID NO: 48702 - DNA, 25 bp, probe
ggcttcgttaattaatgtcatgttg

SEQ ID NO: 48703 - DNA, 25 bp, probe
cgttaattaatgtcatgttgcttgt

SEQ ID NO: 48704 - DNA, 25 bp, probe
atggcttcgttaattaatgtcatgt

SEQ ID NO: 48705 - DNA, 25 bp, probe
tgtagtgtagtcaggtgctcaatgg

SEQ ID NO: 48706 - DNA, 25 bp, probe
ttaatgtcatgttgcttgtcgcttt

SEQ ID NO: 48707 - DNA, 25 bp, probe
ttaattaatgtcatgttgcttgtcg

SEQ ID NO: 48708 - DNA, 25 bp, probe
tcgttaattaatgtcatgttgcttg

SEQ ID NO: 48709 - DNA, 25 bp, probe
cttcgttaattaatgtcatgttgct

SEQ ID NO: 48710 - DNA, 25 bp, probe
agctgggtctaatccttctcattac

SEQ ID NO: 48711 - DNA, 25 bp, probe
aatggcttcgttaattaatgtcatg

SEQ ID NO: 48712 - DNA, 25 bp, probe
taatgtcatgttgcttgtcgctttc

SEQ ID NO: 48713 - DNA, 25 bp, probe
ttcgttaattaatgtcatgttgctt

SEQ ID NO: 48714 - DNA, 25 bp, probe
cgtgtgtgtgattccttgtaaaata

SEQ ID NO: 48715 - DNA, 25 bp, probe
ggtctaatccttctcattacccacc

SEQ ID NO: 48716 - DNA, 25 bp, probe
gagacaagtgaccaagatgctgttt

SEQ ID NO: 48717 - DNA, 25 bp, probe
agacaagtgaccaagatgctgtttg

SEQ ID NO: 48718 - DNA, 25 bp, probe
ggagacaagtgaccaagatgctgtt

SEQ ID NO: 48719 - DNA, 25 bp, probe
caagtgaccaagatgctgtttgtcc

SEQ ID NO: 48720 - DNA, 25 bp, probe
catctccggcatcttcttctacctg

SEQ ID NO: 48721 - DNA, 25 bp, probe
gtcatctccggcatcttcttctacc

SEQ ID NO: 48722 - DNA, 25 bp, probe
aagtgaccaagatgctgtttgtcct

SEQ ID NO: 48723 - DNA, 25 bp, probe
tcatctccggcatcttcttctacct

SEQ ID NO: 48724 - DNA, 25 bp, probe
cgtcatctccggcatcttcttctac

SEQ ID NO: 48725 - DNA, 25 bp, probe
acaagtgaccaagatgctgtttgtc

SEQ ID NO: 48726 - DNA, 25 bp, probe
gacaagtgaccaagatgctgtttgt

SEQ ID NO: 48727 - DNA, 25 bp, probe
tgctggactattcaggaataaggaa

SEQ ID NO: 48728 - DNA, 25 bp, probe
gatgtggtgcttctcatttattctt

SEQ ID NO: 48729 - DNA, 25 bp, probe
agatgtggtgcttctcatttattct

SEQ ID NO: 48730 - DNA, 25 bp, probe
cagatgtggtgcttctcatttattc

SEQ ID NO: 48731 - DNA, 25 bp, probe
tctaagatttgggcatttggttatt

SEQ ID NO: 48732 - DNA, 25 bp, probe
tgttcatttatgtagatgccacttt

SEQ ID NO: 48733 - DNA, 25 bp, probe
gtgctggactattcaggaataagga

SEQ ID NO: 48734 - DNA, 25 bp, probe
tgtggtgcttctcatttattcttaa

SEQ ID NO: 48735 - DNA, 25 bp, probe
catctaagatttgggcatttggtta

SEQ ID NO: 48736 - DNA, 25 bp, probe
atgttcatttatgtagatgccactt

SEQ ID NO: 48737 - DNA, 25 bp, probe
catttatgtagatgccactttaagc

SEQ ID NO: 48738 - DNA, 25 bp, probe
atgtggtgcttctcatttattctta

SEQ ID NO: 48739 - DNA, 25 bp, probe
atctaagatttgggcatttggttat

SEQ ID NO: 48740 - DNA, 25 bp, probe
cactcagaagcatgttcatttatgt

SEQ ID NO: 48741 - DNA, 25 bp, probe
tcactcagaagcatgttcatttatg

SEQ ID NO: 48742 - DNA, 25 bp, probe
catgttcatttatgtagatgccact

SEQ ID NO: 48743 - DNA, 25 bp, probe
tttcactcagaagcatgttcattta

SEQ ID NO: 48744 - DNA, 25 bp, probe
tttgagaaccagatttgagagaggg

SEQ ID NO: 48745 - DNA, 25 bp, probe
ttcactcagaagcatgttcatttat

SEQ ID NO: 48746 - DNA, 25 bp, probe
ctaagatttgggcatttggttatta

SEQ ID NO: 48747 - DNA, 25 bp, probe
tggttattaatagcgtgctggacta

SEQ ID NO: 48748 - DNA, 25 bp, probe
actcagaagcatgttcatttatgta

SEQ ID NO: 48749 - DNA, 25 bp, probe
ggttattaatagcgtgctggactat

SEQ ID NO: 48750 - DNA, 25 bp, probe
gctggactattcaggaataaggaaa

SEQ ID NO: 48751 - DNA, 25 bp, probe
gtggtgcttctcatttattcttaaa

SEQ ID NO: 48752 - DNA, 25 bp, probe
tcagaagcatgttcatttatgtaga

SEQ ID NO: 48753 - DNA, 25 bp, probe
gcatctaagatttgggcatttggtt

SEQ ID NO: 48754 - DNA, 25 bp, probe
tggtgcttctcatttattcttaaag

SEQ ID NO: 48755 - DNA, 25 bp, probe
gttcatttatgtagatgccacttta

SEQ ID NO: 48756 - DNA, 25 bp, probe
cgtgctggactattcaggaataagg

SEQ ID NO: 48757 - DNA, 25 bp, probe
ctcagaagcatgttcatttatgtag

SEQ ID NO: 48758 - DNA, 25 bp, probe
ttgagaaccagatttgagagaggga

SEQ ID NO: 48759 - DNA, 25 bp, probe
atttatgtagatgccactttaagct

SEQ ID NO: 48760 - DNA, 25 bp, probe
taagatttgggcatttggttattaa

SEQ ID NO: 48761 - DNA, 25 bp, probe
tagcgtgctggactattcaggaata

SEQ ID NO: 48762 - DNA, 25 bp, probe
ttggttattaatagcgtgctggact

SEQ ID NO: 48763 - DNA, 25 bp, probe
tcatttatgtagatgccactttaag

SEQ ID NO: 48764 - DNA, 25 bp, probe
aggacttgcttcatgcttgagaatg

SEQ ID NO: 48765 - DNA, 25 bp, probe
caggacttgcttcatgcttgagaat

SEQ ID NO: 48766 - DNA, 25 bp, probe
attaatagcgtgctggactattcag

SEQ ID NO: 48767 - DNA, 25 bp, probe
aagatttgggcatttggttattaat

SEQ ID NO: 48768 - DNA, 25 bp, probe
agaagcatgttcatttatgtagatg

SEQ ID NO: 48769 - DNA, 25 bp, probe
cagaagcatgttcatttatgtagat

SEQ ID NO: 48770 - DNA, 25 bp, probe
atagcgtgctggactattcaggaat

SEQ ID NO: 48771 - DNA, 25 bp, probe
gagtaacatcattggcatcatagtg

SEQ ID NO: 48772 - DNA, 25 bp, probe
aagaatagttactcatacggctggt

SEQ ID NO: 48773 - DNA, 25 bp, probe
tgagtaacatcattggcatcatagt

SEQ ID NO: 48774 - DNA, 25 bp, probe
tctgagtaacatcattggcatcata

SEQ ID NO: 48775 - DNA, 25 bp, probe
ctgagtaacatcattggcatcatag

SEQ ID NO: 48776 - DNA, 25 bp, probe
agaatagttactcatacggctggtc

SEQ ID NO: 48777 - DNA, 25 bp, probe
agtaacatcattggcatcatagtgt

SEQ ID NO: 48778 - DNA, 25 bp, probe
gtctgagtaacatcattggcatcat

SEQ ID NO: 48779 - DNA, 25 bp, probe
gtaacatcattggcatcatagtgta

SEQ ID NO: 48780 - DNA, 25 bp, probe
taacatcattggcatcatagtgtac

SEQ ID NO: 48781 - DNA, 25 bp, probe
gaatagttactcatacggctggtcc

SEQ ID NO: 48782 - DNA, 25 bp, probe
caactgtatccagaaggagaacaag

SEQ ID NO: 48783 - DNA, 25 bp, probe
ttcacaactgtatccagaaggagaa

SEQ ID NO: 48784 - DNA, 25 bp, probe
atagttactcatacggctggtcctt

SEQ ID NO: 48785 - DNA, 25 bp, probe
aatagttactcatacggctggtcct

SEQ ID NO: 48786 - DNA, 25 bp, probe
acaactgtatccagaaggagaacaa

SEQ ID NO: 48787 - DNA, 25 bp, probe
aaagaatagttactcatacggctgg

SEQ ID NO: 48788 - DNA, 25 bp, probe
aggtctgagtaacatcattggcatc

SEQ ID NO: 48789 - DNA, 25 bp, probe
aactgtatccagaaggagaacaagg

SEQ ID NO: 48790 - DNA, 25 bp, probe
tcacaactgtatccagaaggagaac

SEQ ID NO: 48791 - DNA, 25 bp, probe
gttcacaactgtatccagaaggaga

SEQ ID NO: 48792 - DNA, 25 bp, probe
ggtctgagtaacatcattggcatca

SEQ ID NO: 48793 - DNA, 25 bp, probe
tatccagaaggagaacaaggactct

SEQ ID NO: 48794 - DNA, 25 bp, probe
gtatccagaaggagaacaaggactc

SEQ ID NO: 48795 - DNA, 25 bp, probe
caggtctgagtaacatcattggcat

SEQ ID NO: 48796 - DNA, 25 bp, probe
cacaactgtatccagaaggagaaca

SEQ ID NO: 48797 - DNA, 25 bp, probe
ttactcatacggctggtccttctac

SEQ ID NO: 48798 - DNA, 25 bp, probe
gttactcatacggctggtccttcta

SEQ ID NO: 48799 - DNA, 25 bp, probe
ctgtatccagaaggagaacaaggac

SEQ ID NO: 48800 - DNA, 25 bp, probe
tagttactcatacggctggtccttc

SEQ ID NO: 48801 - DNA, 25 bp, probe
cttcctccaggttcacaactgtatc

SEQ ID NO: 48802 - DNA, 25 bp, probe
tgtatccagaaggagaacaaggact

SEQ ID NO: 48803 - DNA, 25 bp, probe
actgtatccagaaggagaacaagga

SEQ ID NO: 48804 - DNA, 25 bp, probe
caggttcacaactgtatccagaagg

SEQ ID NO: 48805 - DNA, 25 bp, probe
ccaggttcacaactgtatccagaag

SEQ ID NO: 48806 - DNA, 25 bp, probe
ggttcacaactgtatccagaaggag

SEQ ID NO: 48807 - DNA, 25 bp, probe
tccaggttcacaactgtatccagaa

SEQ ID NO: 48808 - DNA, 25 bp, probe
aggttcacaactgtatccagaagga

SEQ ID NO: 48809 - DNA, 25 bp, probe
tactcatacggctggtccttctact

SEQ ID NO: 48810 - DNA, 25 bp, probe
tcatagtgtacatatctgccaatgc

SEQ ID NO: 48811 - DNA, 25 bp, probe
catcattggcatcatagtgtacata

SEQ ID NO: 48812 - DNA, 25 bp, probe
ctcatacggctggtccttctacttc

SEQ ID NO: 48813 - DNA, 25 bp, probe
tcattggcatcatagtgtacatatc

SEQ ID NO: 48814 - DNA, 25 bp, probe
catcatagtgtacatatctgccaat

SEQ ID NO: 48815 - DNA, 25 bp, probe
aaccaaccttacatcaactactcaa

SEQ ID NO: 48816 - DNA, 25 bp, probe
gccttccagtattatcagttacaca

SEQ ID NO: 48817 - DNA, 25 bp, probe
tgccttccagtattatcagttacac

SEQ ID NO: 48818 - DNA, 25 bp, probe
gtgccttccagtattatcagttaca

SEQ ID NO: 48819 - DNA, 25 bp, probe
taaccaaccttacatcaactactca

SEQ ID NO: 48820 - DNA, 25 bp, probe
tccagtattatcagttacacaaggt

SEQ ID NO: 48821 - DNA, 25 bp, probe
ggtgccttccagtattatcagttac

SEQ ID NO: 48822 - DNA, 25 bp, probe
accaaccttacatcaactactcaag

SEQ ID NO: 48823 - DNA, 25 bp, probe
atactgattccttcaacactgtagc

SEQ ID NO: 48824 - DNA, 25 bp, probe
ataaccaaccttacatcaactactc

SEQ ID NO: 48825 - DNA, 25 bp, probe
ttccagtattatcagttacacaagg

SEQ ID NO: 48826 - DNA, 25 bp, probe
ccttccagtattatcagttacacaa

SEQ ID NO: 48827 - DNA, 25 bp, probe
agatactgattccttcaacactgta

SEQ ID NO: 48828 - DNA, 25 bp, probe
gatactgattccttcaacactgtag

SEQ ID NO: 48829 - DNA, 25 bp, probe
cagatactgattccttcaacactgt

SEQ ID NO: 48830 - DNA, 25 bp, probe
cttacatcaactactcaaggacggt

SEQ ID NO: 48831 - DNA, 25 bp, probe
ccagtattatcagttacacaaggta

SEQ ID NO: 48832 - DNA, 25 bp, probe
tactgattccttcaacactgtagca

SEQ ID NO: 48833 - DNA, 25 bp, probe
ttacatcaactactcaaggacggtg

SEQ ID NO: 48834 - DNA, 25 bp, probe
ccagatactgattccttcaacactg

SEQ ID NO: 48835 - DNA, 25 bp, probe
atctacagtcctcacacaggtattc

SEQ ID NO: 48836 - DNA, 25 bp, probe
attccttcaacactgtagcagagat

SEQ ID NO: 48837 - DNA, 25 bp, probe
catctacagtcctcacacaggtatt

SEQ ID NO: 48838 - DNA, 25 bp, probe
ctcccaccacatagaatcaacatat

SEQ ID NO: 48839 - DNA, 25 bp, probe
cttccagtattatcagttacacaag

SEQ ID NO: 48840 - DNA, 25 bp, probe
tggtgccttccagtattatcagtta

SEQ ID NO: 48841 - DNA, 25 bp, probe
tataaccaaccttacatcaactact

SEQ ID NO: 48842 - DNA, 25 bp, probe
caattcatcttcaaagcacaactct

SEQ ID NO: 48843 - DNA, 25 bp, probe
ttcatccaattcatcttcaaagcac

SEQ ID NO: 48844 - DNA, 25 bp, probe
tttcatccaattcatcttcaaagca

SEQ ID NO: 48845 - DNA, 25 bp, probe
atccaattcatcttcaaagcacaac

SEQ ID NO: 48846 - DNA, 25 bp, probe
catccaattcatcttcaaagcacaa

SEQ ID NO: 48847 - DNA, 25 bp, probe
atgggaagcactctcacttattaaa

SEQ ID NO: 48848 - DNA, 25 bp, probe
cctcttcacataacaatttcatcca

SEQ ID NO: 48849 - DNA, 25 bp, probe
gtatttcttcttccatcactcccac

SEQ ID NO: 48850 - DNA, 25 bp, probe
tgggaagcactctcacttattaaag

SEQ ID NO: 48851 - DNA, 25 bp, probe
tcttcaaagcacaactctatttcat

SEQ ID NO: 48852 - DNA, 25 bp, probe
atcttcaaagcacaactctatttca

SEQ ID NO: 48853 - DNA, 25 bp, probe
tcatcttcaaagcacaactctattt

SEQ ID NO: 48854 - DNA, 25 bp, probe
ttcatcttcaaagcacaactctatt

SEQ ID NO: 48855 - DNA, 25 bp, probe
gggaagcactctcacttattaaaga

SEQ ID NO: 48856 - DNA, 25 bp, probe
tcctcttcacataacaatttcatcc

SEQ ID NO: 48857 - DNA, 25 bp, probe
ctacagtcctcacacaggtattcag

SEQ ID NO: 48858 - DNA, 25 bp, probe
gattccttcaacactgtagcagaga

SEQ ID NO: 48859 - DNA, 25 bp, probe
aagaaggagaagaaagagcctgaag

SEQ ID NO: 48860 - DNA, 25 bp, probe
caagaaggagaagaaagagcctgaa

SEQ ID NO: 48861 - DNA, 25 bp, probe
gaaggagaagaaagagcctgaagac

SEQ ID NO: 48862 - DNA, 25 bp, probe
agaaggagaagaaagagcctgaaga

SEQ ID NO: 48863 - DNA, 25 bp, probe
ggagaagaaagagcctgaagacctt

SEQ ID NO: 48864 - DNA, 25 bp, probe
aaggagaagaaagagcctgaagacc

SEQ ID NO: 48865 - DNA, 25 bp, probe
ccaagaaggagaagaaagagcctga

SEQ ID NO: 48866 - DNA, 25 bp, probe
gagaagaaagagcctgaagaccttc

SEQ ID NO: 48867 - DNA, 25 bp, probe
catttgggcactgtaggaaaagagg

SEQ ID NO: 48868 - DNA, 25 bp, probe
aggagaagaaagagcctgaagacct

SEQ ID NO: 48869 - DNA, 25 bp, probe
gcatttgggcactgtaggaaaagag

SEQ ID NO: 48870 - DNA, 25 bp, probe
agaagaaagagcctgaagaccttca

SEQ ID NO: 48871 - DNA, 25 bp, probe
cttctactcagataactcggtccag

SEQ ID NO: 48872 - DNA, 25 bp, probe
ttcattgtaatgttcatttcccacc

SEQ ID NO: 48873 - DNA, 25 bp, probe
ttctactcagataactcggtccagc

SEQ ID NO: 48874 - DNA, 25 bp, probe
gcttctactcagataactcggtcca

SEQ ID NO: 48875 - DNA, 25 bp, probe
tcgaagtcatcattcctctcttagg

SEQ ID NO: 48876 - DNA, 25 bp, probe
tcattgtaatgttcatttcccaccc

SEQ ID NO: 48877 - DNA, 25 bp, probe
tttcattgtaatgttcatttcccac

SEQ ID NO: 48878 - DNA, 25 bp, probe
agccaataaaccgaaagtgttacag

SEQ ID NO: 48879 - DNA, 25 bp, probe
cagccaataaaccgaaagtgttaca

SEQ ID NO: 48880 - DNA, 25 bp, probe
ccaataaaccgaaagtgttacagcc

SEQ ID NO: 48881 - DNA, 25 bp, probe
cgaagtcatcattcctctcttaggg

SEQ ID NO: 48882 - DNA, 25 bp, probe
gcagccaataaaccgaaagtgttac

SEQ ID NO: 48883 - DNA, 25 bp, probe
cgcttctactcagataactcggtcc

SEQ ID NO: 48884 - DNA, 25 bp, probe
gccaataaaccgaaagtgttacagc

SEQ ID NO: 48885 - DNA, 25 bp, probe
ttcgaagtcatcattcctctcttag

SEQ ID NO: 48886 - DNA, 25 bp, probe
gagattctgtcctggtgaagttcca

SEQ ID NO: 48887 - DNA, 25 bp, probe
attctgtcctggtgaagttccactc

SEQ ID NO: 48888 - DNA, 25 bp, probe
gattctgtcctggtgaagttccact

SEQ ID NO: 48889 - DNA, 25 bp, probe
agattctgtcctggtgaagttccac

SEQ ID NO: 48890 - DNA, 25 bp, probe
cagcctcgatttggttttattttga

SEQ ID NO: 48891 - DNA, 25 bp, probe
ttttcattgtaatgttcatttccca

SEQ ID NO: 48892 - DNA, 25 bp, probe
attgtaatgttcatttcccacccct

SEQ ID NO: 48893 - DNA, 25 bp, probe
ggagattctgtcctggtgaagttcc

SEQ ID NO: 48894 - DNA, 25 bp, probe
gaccttcatggagatggacatcgag

SEQ ID NO: 48895 - DNA, 25 bp, probe
cattgtaatgttcatttcccacccc

SEQ ID NO: 48896 - DNA, 25 bp, probe
ctgaccttcatggagatggacatcg

SEQ ID NO: 48897 - DNA, 25 bp, probe
agcctcgatttggttttattttgag

SEQ ID NO: 48898 - DNA, 25 bp, probe
gaagtcatcattcctctcttagggg

SEQ ID NO: 48899 - DNA, 25 bp, probe
atttcgaagtcatcattcctctctt

SEQ ID NO: 48900 - DNA, 25 bp, probe
cgcagccaataaaccgaaagtgtta

SEQ ID NO: 48901 - DNA, 25 bp, probe
tttcgaagtcatcattcctctctta

SEQ ID NO: 48902 - DNA, 25 bp, probe
catttcgaagtcatcattcctctct

SEQ ID NO: 48903 - DNA, 25 bp, probe
acatttcgaagtcatcattcctctc

SEQ ID NO: 48904 - DNA, 25 bp, probe
ctcgatttggttttattttgagccc

SEQ ID NO: 48905 - DNA, 25 bp, probe
cctcgatttggttttattttgagcc

SEQ ID NO: 48906 - DNA, 25 bp, probe
ccttcatggagatggacatcgagtc

SEQ ID NO: 48907 - DNA, 25 bp, probe
gctgaccttcatggagatggacatc

SEQ ID NO: 48908 - DNA, 25 bp, probe
gacaagtatcccagcaagaaggagt

SEQ ID NO: 48909 - DNA, 25 bp, probe
tgacaagtatcccagcaagaaggag

SEQ ID NO: 48910 - DNA, 25 bp, probe
ctgacaagtatcccagcaagaagga

SEQ ID NO: 48911 - DNA, 25 bp, probe
tcgatttggttttattttgagcccc

SEQ ID NO: 48912 - DNA, 25 bp, probe
acaagacatttcgaagtcatcattc

SEQ ID NO: 48913 - DNA, 25 bp, probe
cacaagacatttcgaagtcatcatt

SEQ ID NO: 48914 - DNA, 25 bp, probe
gcctcgatttggttttattttgagc

SEQ ID NO: 48915 - DNA, 25 bp, probe
gagaagaaagagccttgaagacctt

SEQ ID NO: 48916 - DNA, 25 bp, probe
ggagaagaaagagccttgaagacct

SEQ ID NO: 48917 - DNA, 25 bp, probe
agaagaaagagccttgaagaccttc

SEQ ID NO: 48918 - DNA, 25 bp, probe
aggagaagaaagagccttgaagacc

SEQ ID NO: 48919 - DNA, 25 bp, probe
aagaaggagaagaaagagccttgaa

SEQ ID NO: 48920 - DNA, 25 bp, probe
ggcatttggacctgtaggaaaagag

SEQ ID NO: 48921 - DNA, 25 bp, probe
aagaaagagccttgaagaccttcag

SEQ ID NO: 48922 - DNA, 25 bp, probe
gaaggagaagaaagagccttgaaga

SEQ ID NO: 48923 - DNA, 25 bp, probe
agaaggagaagaaagagccttgaag

SEQ ID NO: 48924 - DNA, 25 bp, probe
aaggagaagaaagagccttgaagac

SEQ ID NO: 48925 - DNA, 25 bp, probe
caagaaggagaagaaagagccttga

SEQ ID NO: 48926 - DNA, 25 bp, probe
gaagaaagagccttgaagaccttca

SEQ ID NO: 48927 - DNA, 25 bp, probe
catttggacctgtaggaaaagaggc

SEQ ID NO: 48928 - DNA, 25 bp, probe
gcatttggacctgtaggaaaagagg

SEQ ID NO: 48929 - DNA, 25 bp, probe
gaaagagccttgaagaccttcagtc

SEQ ID NO: 48930 - DNA, 25 bp, probe
cttcttctcaggaggggagctattt

SEQ ID NO: 48931 - DNA, 25 bp, probe
agaaagagccttgaagaccttcagt

SEQ ID NO: 48932 - DNA, 25 bp, probe
ccaagaaggagaagaaagagccttg

SEQ ID NO: 48933 - DNA, 25 bp, probe
ttcttctcaggaggggagctatttg

SEQ ID NO: 48934 - DNA, 25 bp, probe
aagagccttgaagaccttcagtctg

SEQ ID NO: 48935 - DNA, 25 bp, probe
gggcatttggacctgtaggaaaaga

SEQ ID NO: 48936 - DNA, 25 bp, probe
aaagagccttgaagaccttcagtct

SEQ ID NO: 48937 - DNA, 25 bp, probe
acttcttctcaggaggggagctatt

SEQ ID NO: 48938 - DNA, 25 bp, probe
gagccttgaagaccttcagtctgac

SEQ ID NO: 48939 - DNA, 25 bp, probe
agagccttgaagaccttcagtctga

SEQ ID NO: 48940 - DNA, 25 bp, probe
tcaggaggggagctatttggacttt

SEQ ID NO: 48941 - DNA, 25 bp, probe
gccaagaaggagaagaaagagcctt

SEQ ID NO: 48942 - DNA, 25 bp, probe
cacttcttctcaggaggggagctat

SEQ ID NO: 48943 - DNA, 25 bp, probe
cttctcaggaggggagctatttgga

SEQ ID NO: 48944 - DNA, 25 bp, probe
tcttctcaggaggggagctatttgg

SEQ ID NO: 48945 - DNA, 25 bp, probe
atttggacctgtaggaaaagaggcc

SEQ ID NO: 48946 - DNA, 25 bp, probe
ccatcttctccttactgcatctcag

SEQ ID NO: 48947 - DNA, 25 bp, probe
catcttctccttactgcatctcagc

SEQ ID NO: 48948 - DNA, 25 bp, probe
atcttctccttactgcatctcagcc

SEQ ID NO: 48949 - DNA, 25 bp, probe
cccatcttctccttactgcatctca

SEQ ID NO: 48950 - DNA, 25 bp, probe
cttactgcatctcagcccacatctc

SEQ ID NO: 48951 - DNA, 25 bp, probe
ccccatcttctccttactgcatctc

SEQ ID NO: 48952 - DNA, 25 bp, probe
ctccccatcttctccttactgcatc

SEQ ID NO: 48953 - DNA, 25 bp, probe
tccccatcttctccttactgcatct

SEQ ID NO: 48954 - DNA, 25 bp, probe
tgcctatactatcacaacaagttca

SEQ ID NO: 48955 - DNA, 25 bp, probe
gcaatgcctatactatcacaacaag

SEQ ID NO: 48956 - DNA, 25 bp, probe
gaagcaatgcctatactatcacaac

SEQ ID NO: 48957 - DNA, 25 bp, probe
agcaatgcctatactatcacaacaa

SEQ ID NO: 48958 - DNA, 25 bp, probe
aagcaatgcctatactatcacaaca

SEQ ID NO: 48959 - DNA, 25 bp, probe
ttaccgaagcaatgcctatactatc

SEQ ID NO: 48960 - DNA, 25 bp, probe
gttaccgaagcaatgcctatactat

SEQ ID NO: 48961 - DNA, 25 bp, probe
actatcacaacaagttcaaggatgg

SEQ ID NO: 48962 - DNA, 25 bp, probe
gcctatactatcacaacaagttcaa

SEQ ID NO: 48963 - DNA, 25 bp, probe
caatgcctatactatcacaacaagt

SEQ ID NO: 48964 - DNA, 25 bp, probe
cgaagcaatgcctatactatcacaa

SEQ ID NO: 48965 - DNA, 25 bp, probe
tactatcacaacaagttcaaggatg

SEQ ID NO: 48966 - DNA, 25 bp, probe
atgcctatactatcacaacaagttc

SEQ ID NO: 48967 - DNA, 25 bp, probe
taccgaagcaatgcctatactatca

SEQ ID NO: 48968 - DNA, 25 bp, probe
aatgttaccgaagcaatgcctatac

SEQ ID NO: 48969 - DNA, 25 bp, probe
ctatcacaacaagttcaaggatggc

SEQ ID NO: 48970 - DNA, 25 bp, probe
tgttaccgaagcaatgcctatacta

SEQ ID NO: 48971 - DNA, 25 bp, probe
aatgcctatactatcacaacaagtt

SEQ ID NO: 48972 - DNA, 25 bp, probe
atactatcacaacaagttcaaggat

SEQ ID NO: 48973 - DNA, 25 bp, probe
atgttaccgaagcaatgcctatact

SEQ ID NO: 48974 - DNA, 25 bp, probe
atgtcctctatgaaatgttaccgaa

SEQ ID NO: 48975 - DNA, 25 bp, probe
tctatgaaatgttaccgaagcaatg

SEQ ID NO: 48976 - DNA, 25 bp, probe
tgtcctctatgaaatgttaccgaag

SEQ ID NO: 48977 - DNA, 25 bp, probe
gcctctaaacctactctgtattcaa

SEQ ID NO: 48978 - DNA, 25 bp, probe
ctctatgaaatgttaccgaagcaat

SEQ ID NO: 48979 - DNA, 25 bp, probe
agcctctaaacctactctgtattca

SEQ ID NO: 48980 - DNA, 25 bp, probe
cccattaactcaaatccaccaaata

SEQ ID NO: 48981 - DNA, 25 bp, probe
ccgaagcaatgcctatactatcaca

SEQ ID NO: 48982 - DNA, 25 bp, probe
accgaagcaatgcctatactatcac

SEQ ID NO: 48983 - DNA, 25 bp, probe
tatactatcacaacaagttcaagga

SEQ ID NO: 48984 - DNA, 25 bp, probe
cctctatgaaatgttaccgaagcaa

SEQ ID NO: 48985 - DNA, 25 bp, probe
ctatactatcacaacaagttcaagg

SEQ ID NO: 48986 - DNA, 25 bp, probe
cctatactatcacaacaagttcaag

SEQ ID NO: 48987 - DNA, 25 bp, probe
gtcctctatgaaatgttaccgaagc

SEQ ID NO: 48988 - DNA, 25 bp, probe
tagttcttcagcctctaaacctact

SEQ ID NO: 48989 - DNA, 25 bp, probe
atatcctttagttcttcagcctcta

SEQ ID NO: 48990 - DNA, 25 bp, probe
ccattaactcaaatccaccaaatac

SEQ ID NO: 48991 - DNA, 25 bp, probe
aaatgttaccgaagcaatgcctata

SEQ ID NO: 48992 - DNA, 25 bp, probe
tcctctatgaaatgttaccgaagca

SEQ ID NO: 48993 - DNA, 25 bp, probe
gttcttcagcctctaaacctactct

SEQ ID NO: 48994 - DNA, 25 bp, probe
ctatgaaatgttaccgaagcaatgc

SEQ ID NO: 48995 - DNA, 25 bp, probe
catgtcctctatgaaatgttaccga

SEQ ID NO: 48996 - DNA, 25 bp, probe
cagcctctaaacctactctgtattc

SEQ ID NO: 48997 - DNA, 25 bp, probe
ttagttcttcagcctctaaacctac

SEQ ID NO: 48998 - DNA, 25 bp, probe
cctggtgtctatattcttctctcaa

SEQ ID NO: 48999 - DNA, 25 bp, probe
gctaattcctgaagatgtctgtgaa

SEQ ID NO: 49000 - DNA, 25 bp, probe
gcctggtgtctatattcttctctca

SEQ ID NO: 49001 - DNA, 25 bp, probe
ctgagagaagtcaatatcaccatca

SEQ ID NO: 49002 - DNA, 25 bp, probe
tctgagagaagtcaatatcaccatc

SEQ ID NO: 49003 - DNA, 25 bp, probe
ctgctaattcctgaagatgtctgtg

SEQ ID NO: 49004 - DNA, 25 bp, probe
tgagagaagtcaatatcaccatcat

SEQ ID NO: 49005 - DNA, 25 bp, probe
ttctctcctgctaattcctgaagat

SEQ ID NO: 49006 - DNA, 25 bp, probe
tgctaattcctgaagatgtctgtga

SEQ ID NO: 49007 - DNA, 25 bp, probe
ctcctgctaattcctgaagatgtct

SEQ ID NO: 49008 - DNA, 25 bp, probe
cctacatggtcctacttagtcttga

SEQ ID NO: 49009 - DNA, 25 bp, probe
tctctcctgctaattcctgaagatg

SEQ ID NO: 49010 - DNA, 25 bp, probe
atggtcctacttagtcttgacagaa

SEQ ID NO: 49011 - DNA, 25 bp, probe
tctcctgctaattcctgaagatgtc

SEQ ID NO: 49012 - DNA, 25 bp, probe
ctctcctgctaattcctgaagatgt

SEQ ID NO: 49013 - DNA, 25 bp, probe
tcctgctaattcctgaagatgtctg

SEQ ID NO: 49014 - DNA, 25 bp, probe
tccgatactctgagagaagtcaata

SEQ ID NO: 49015 - DNA, 25 bp, probe
gagaagtcaatatcaccatcataga

SEQ ID NO: 49016 - DNA, 25 bp, probe
agagaagtcaatatcaccatcatag

SEQ ID NO: 49017 - DNA, 25 bp, probe
gagagaagtcaatatcaccatcata

SEQ ID NO: 49018 - DNA, 25 bp, probe
ctctgagagaagtcaatatcaccat

SEQ ID NO: 49019 - DNA, 25 bp, probe
atgtgactatccttcatctacctaa

SEQ ID NO: 49020 - DNA, 25 bp, probe
agtcaatatcaccatcatagacaga

SEQ ID NO: 49021 - DNA, 25 bp, probe
actctgagagaagtcaatatcacca

SEQ ID NO: 49022 - DNA, 25 bp, probe
ccgatactctgagagaagtcaatat

SEQ ID NO: 49023 - DNA, 25 bp, probe
cctgctaattcctgaagatgtctgt

SEQ ID NO: 49024 - DNA, 25 bp, probe
tactctgagagaagtcaatatcacc

SEQ ID NO: 49025 - DNA, 25 bp, probe
atatgtgactatccttcatctacct

SEQ ID NO: 49026 - DNA, 25 bp, probe
ctacatggtcctacttagtcttgac

SEQ ID NO: 49027 - DNA, 25 bp, probe
tacatggtcctacttagtcttgaca

SEQ ID NO: 49028 - DNA, 25 bp, probe
gtccgatactctgagagaagtcaat

SEQ ID NO: 49029 - DNA, 25 bp, probe
gtcaatatcaccatcatagacagaa

SEQ ID NO: 49030 - DNA, 25 bp, probe
aagtcaatatcaccatcatagacag

SEQ ID NO: 49031 - DNA, 25 bp, probe
gaagtcaatatcaccatcatagaca

SEQ ID NO: 49032 - DNA, 25 bp, probe
tcctttcatttactgtggcttctta

SEQ ID NO: 49033 - DNA, 25 bp, probe
tcaaagaaacacctcaactggataa

SEQ ID NO: 49034 - DNA, 25 bp, probe
gattggaatgaatatggtttgtgct

SEQ ID NO: 49035 - DNA, 25 bp, probe
attggaatgaatatggtttgtgctg

SEQ ID NO: 49036 - DNA, 25 bp, probe
taaccgtttcctttcatttactgtg

SEQ ID NO: 49037 - DNA, 25 bp, probe
caaagaaacacctcaactggataat

SEQ ID NO: 49038 - DNA, 25 bp, probe
tgattggaatgaatatggtttgtgc

SEQ ID NO: 49039 - DNA, 25 bp, probe
cctgtgattggaatgaatatggttt

SEQ ID NO: 49040 - DNA, 25 bp, probe
catggtcctacttagtcttgacaga

SEQ ID NO: 49041 - DNA, 25 bp, probe
taactcctcattcaagaccctacat

SEQ ID NO: 49042 - DNA, 25 bp, probe
ggctcgtataacaacaggtatatga

SEQ ID NO: 49043 - DNA, 25 bp, probe
tggctcgtataacaacaggtatatg

SEQ ID NO: 49044 - DNA, 25 bp, probe
ttggctcgtataacaacaggtatat

SEQ ID NO: 49045 - DNA, 25 bp, probe
attggctcgtataacaacaggtata

SEQ ID NO: 49046 - DNA, 25 bp, probe
gctcgtataacaacaggtatatgaa

SEQ ID NO: 49047 - DNA, 25 bp, probe
gattggctcgtataacaacaggtat

SEQ ID NO: 49048 - DNA, 25 bp, probe
taagattggctcgtataacaacagg

SEQ ID NO: 49049 - DNA, 25 bp, probe
ttaagattggctcgtataacaacag

SEQ ID NO: 49050 - DNA, 25 bp, probe
ctccaacatacacgaacacacatac

SEQ ID NO: 49051 - DNA, 25 bp, probe
agattggctcgtataacaacaggta

SEQ ID NO: 49052 - DNA, 25 bp, probe
caacatacacgaacacacataccac

SEQ ID NO: 49053 - DNA, 25 bp, probe
aagattggctcgtataacaacaggt

SEQ ID NO: 49054 - DNA, 25 bp, probe
ataatgctgaagctcttcttgaatg

SEQ ID NO: 49055 - DNA, 25 bp, probe
attgataatgctgaagctcttcttg

SEQ ID NO: 49056 - DNA, 25 bp, probe
tgataatgctgaagctcttcttgaa

SEQ ID NO: 49057 - DNA, 25 bp, probe
ttgataatgctgaagctcttcttga

SEQ ID NO: 49058 - DNA, 25 bp, probe
gataatgctgaagctcttcttgaat

SEQ ID NO: 49059 - DNA, 25 bp, probe
aattgataatgctgaagctcttctt

SEQ ID NO: 49060 - DNA, 25 bp, probe
aagaatgagaatgagaaagcagaga

SEQ ID NO: 49061 - DNA, 25 bp, probe
cctccaacatacacgaacacacata

SEQ ID NO: 49062 - DNA, 25 bp, probe
aatgagaatgagaaagcagagagag

SEQ ID NO: 49063 - DNA, 25 bp, probe
agaatgagaatgagaaagcagagag

SEQ ID NO: 49064 - DNA, 25 bp, probe
gaatgagaatgagaaagcagagaga

SEQ ID NO: 49065 - DNA, 25 bp, probe
caaagaatgagaatgagaaagcaga

SEQ ID NO: 49066 - DNA, 25 bp, probe
gtggcaaagaatgagaatgagaaag

SEQ ID NO: 49067 - DNA, 25 bp, probe
taatgctgaagctcttcttgaatgg

SEQ ID NO: 49068 - DNA, 25 bp, probe
aaagaatgagaatgagaaagcagag

SEQ ID NO: 49069 - DNA, 25 bp, probe
ctctaataattcaaacaacctgccc

SEQ ID NO: 49070 - DNA, 25 bp, probe
actctaataattcaaacaacctgcc

SEQ ID NO: 49071 - DNA, 25 bp, probe
atgagaatgagaaagcagagagaga

SEQ ID NO: 49072 - DNA, 25 bp, probe
gcaaagaatgagaatgagaaagcag

SEQ ID NO: 49073 - DNA, 25 bp, probe
tgtggcaaagaatgagaatgagaaa

SEQ ID NO: 49074 - DNA, 25 bp, probe
tccaacatacacgaacacacatacc

SEQ ID NO: 49075 - DNA, 25 bp, probe
aacatacacgaacacacataccacc

SEQ ID NO: 49076 - DNA, 25 bp, probe
ccaacatacacgaacacacatacca

SEQ ID NO: 49077 - DNA, 25 bp, probe
tgagaatgagaaagcagagagagag

SEQ ID NO: 49078 - DNA, 25 bp, probe
ttgtggcaaagaatgagaatgagaa

SEQ ID NO: 49079 - DNA, 25 bp, probe
tttaagattggctcgtataacaaca

SEQ ID NO: 49080 - DNA, 25 bp, probe
ggtctttaagattggctcgtataac

SEQ ID NO: 49081 - DNA, 25 bp, probe
tctaataattcaaacaacctgcccg

SEQ ID NO: 49082 - DNA, 25 bp, probe
aggtctttaagattggctcgtataa

SEQ ID NO: 49083 - DNA, 25 bp, probe
ggcaaagaatgagaatgagaaagca

SEQ ID NO: 49084 - DNA, 25 bp, probe
tggcaaagaatgagaatgagaaagc

SEQ ID NO: 49085 - DNA, 25 bp, probe
gtctttaagattggctcgtataaca

SEQ ID NO: 49086 - DNA, 25 bp, probe
aagaagatatagcaagaagacagca

SEQ ID NO: 49087 - DNA, 25 bp, probe
agaagatatagcaagaagacagcat

SEQ ID NO: 49088 - DNA, 25 bp, probe
tcaacttaactcttcatccatccaa

SEQ ID NO: 49089 - DNA, 25 bp, probe
atcaacttaactcttcatccatcca

SEQ ID NO: 49090 - DNA, 25 bp, probe
gaagaagatatagcaagaagacagc

SEQ ID NO: 49091 - DNA, 25 bp, probe
tcttcatccagtaagttcataccag

SEQ ID NO: 49092 - DNA, 25 bp, probe
ctcttcatccagtaagttcatacca

SEQ ID NO: 49093 - DNA, 25 bp, probe
gctctcttcatccagtaagttcata

SEQ ID NO: 49094 - DNA, 25 bp, probe
tctcttcatccagtaagttcatacc

SEQ ID NO: 49095 - DNA, 25 bp, probe
cttcatccagtaagttcataccagg

SEQ ID NO: 49096 - DNA, 25 bp, probe
tgatgtcctgttgtcttaatccaat

SEQ ID NO: 49097 - DNA, 25 bp, probe
atgatgtcctgttgtcttaatccaa

SEQ ID NO: 49098 - DNA, 25 bp, probe
tgtcctgttgtcttaatccaattct

SEQ ID NO: 49099 - DNA, 25 bp, probe
atgtcctgttgtcttaatccaattc

SEQ ID NO: 49100 - DNA, 25 bp, probe
gatgtcctgttgtcttaatccaatt

SEQ ID NO: 49101 - DNA, 25 bp, probe
acacagaagaagatatagcaagaag

SEQ ID NO: 49102 - DNA, 25 bp, probe
ctctcttcatccagtaagttcatac

SEQ ID NO: 49103 - DNA, 25 bp, probe
cagaagaagatatagcaagaagaca

SEQ ID NO: 49104 - DNA, 25 bp, probe
acagaagaagatatagcaagaagac

SEQ ID NO: 49105 - DNA, 25 bp, probe
cacagaagaagatatagcaagaaga

SEQ ID NO: 49106 - DNA, 25 bp, probe
gatcaacttaactcttcatccatcc

SEQ ID NO: 49107 - DNA, 25 bp, probe
caagagaaccactccagaatacttc

SEQ ID NO: 49108 - DNA, 25 bp, probe
gaagatatagcaagaagacagcatg

SEQ ID NO: 49109 - DNA, 25 bp, probe
tcaagagaaccactccagaatactt

SEQ ID NO: 49110 - DNA, 25 bp, probe
aacacagaagaagatatagcaagaa

SEQ ID NO: 49111 - DNA, 25 bp, probe
catgatgtcctgttgtcttaatcca

SEQ ID NO: 49112 - DNA, 25 bp, probe
gtcctgttgtcttaatccaattcta

SEQ ID NO: 49113 - DNA, 25 bp, probe
gaaccactccagaatacttccagaa

SEQ ID NO: 49114 - DNA, 25 bp, probe
agaagaagatatagcaagaagacag

SEQ ID NO: 49115 - DNA, 25 bp, probe
ctcaagagaaccactccagaatact

SEQ ID NO: 49116 - DNA, 25 bp, probe
aagagaaccactccagaatacttcc

SEQ ID NO: 49117 - DNA, 25 bp, probe
aagatatagcaagaagacagcatgt

SEQ ID NO: 49118 - DNA, 25 bp, probe
acagactgaccatactgatattagt

SEQ ID NO: 49119 - DNA, 25 bp, probe
agatatagcaagaagacagcatgtg

SEQ ID NO: 49120 - DNA, 25 bp, probe
gatatagcaagaagacagcatgtgt

SEQ ID NO: 49121 - DNA, 25 bp, probe
tctacagactgaccatactgatatt

SEQ ID NO: 49122 - DNA, 25 bp, probe
ttctacagactgaccatactgatat

SEQ ID NO: 49123 - DNA, 25 bp, probe
gcatgatgtcctgttgtcttaatcc

SEQ ID NO: 49124 - DNA, 25 bp, probe
ggcatgatgtcctgttgtcttaatc

SEQ ID NO: 49125 - DNA, 25 bp, probe
tcctgttgtcttaatccaattctat

SEQ ID NO: 49126 - DNA, 25 bp, probe
agaaccactccagaatacttccaga

SEQ ID NO: 49127 - DNA, 25 bp, probe
atatagcaagaagacagcatgtgtg

SEQ ID NO: 49128 - DNA, 25 bp, probe
tctcaagagaaccactccagaatac

SEQ ID NO: 49129 - DNA, 25 bp, probe
ttagtatttgctgttagttggatgc

SEQ ID NO: 49130 - DNA, 25 bp, probe
taagtgttgtatgtaccgttgatgt

SEQ ID NO: 49131 - DNA, 25 bp, probe
aatgttataggcacttgctacttca

SEQ ID NO: 49132 - DNA, 25 bp, probe
gtaagtgttgtatgtaccgttgatg

SEQ ID NO: 49133 - DNA, 25 bp, probe
tgtaagtgttgtatgtaccgttgat

SEQ ID NO: 49134 - DNA, 25 bp, probe
ttgtaagtgttgtatgtaccgttga

SEQ ID NO: 49135 - DNA, 25 bp, probe
atgttataggcacttgctacttcag

SEQ ID NO: 49136 - DNA, 25 bp, probe
gttgtatgtaccgttgatgttgata

SEQ ID NO: 49137 - DNA, 25 bp, probe
tgttgtatgtaccgttgatgttgat

SEQ ID NO: 49138 - DNA, 25 bp, probe
aagtgttgtatgtaccgttgatgtt

SEQ ID NO: 49139 - DNA, 25 bp, probe
tatggtgtatgacagttagagatgc

SEQ ID NO: 49140 - DNA, 25 bp, probe
agaacatggactacacacaatacag

SEQ ID NO: 49141 - DNA, 25 bp, probe
tagaacatggactacacacaataca

SEQ ID NO: 49142 - DNA, 25 bp, probe
gtgtatgacagttagagatgctgat

SEQ ID NO: 49143 - DNA, 25 bp, probe
gttataggcacttgctacttcagta

SEQ ID NO: 49144 - DNA, 25 bp, probe
tctagtatggcacatgatatgagtc

SEQ ID NO: 49145 - DNA, 25 bp, probe
tgtatgacagttagagatgctgatt

SEQ ID NO: 49146 - DNA, 25 bp, probe
ttgtatgtaccgttgatgttgataa

SEQ ID NO: 49147 - DNA, 25 bp, probe
ttataggcacttgctacttcagtaa

SEQ ID NO: 49148 - DNA, 25 bp, probe
gcacttgctacttcagtaatgtcta

SEQ ID NO: 49149 - DNA, 25 bp, probe
ataggcacttgctacttcagtaatg

SEQ ID NO: 49150 - DNA, 25 bp, probe
agtgttgtatgtaccgttgatgttg

SEQ ID NO: 49151 - DNA, 25 bp, probe
tataggcacttgctacttcagtaat

SEQ ID NO: 49152 - DNA, 25 bp, probe
ttctagtatggcacatgatatgagt

SEQ ID NO: 49153 - DNA, 25 bp, probe
gtgttgtatgtaccgttgatgttga

SEQ ID NO: 49154 - DNA, 25 bp, probe
atggtgtatgacagttagagatgct

SEQ ID NO: 49155 - DNA, 25 bp, probe
tagtatggcacatgatatgagtcac

SEQ ID NO: 49156 - DNA, 25 bp, probe
ggactacacacaatacagtggtata

SEQ ID NO: 49157 - DNA, 25 bp, probe
ctagtatggcacatgatatgagtca

SEQ ID NO: 49158 - DNA, 25 bp, probe
ttagaacatggactacacacaatac

SEQ ID NO: 49159 - DNA, 25 bp, probe
cacttgctacttcagtaatgtctat

SEQ ID NO: 49160 - DNA, 25 bp, probe
acacacacacagagacacatcttaa

SEQ ID NO: 49161 - DNA, 25 bp, probe
gaacatggactacacacaatacagt

SEQ ID NO: 49162 - DNA, 25 bp, probe
ctatggtgtatgacagttagagatg

SEQ ID NO: 49163 - DNA, 25 bp, probe
gtaacacacacacacatacacacac

SEQ ID NO: 49164 - DNA, 25 bp, probe
tggactacacacaatacagtggtat

SEQ ID NO: 49165 - DNA, 25 bp, probe
atggactacacacaatacagtggta

SEQ ID NO: 49166 - DNA, 25 bp, probe
gtatggcacatgatatgagtcactg

SEQ ID NO: 49167 - DNA, 25 bp, probe
agtatggcacatgatatgagtcact

SEQ ID NO: 49168 - DNA, 25 bp, probe
acaagcatgttgattctaggttgaa

SEQ ID NO: 49169 - DNA, 25 bp, probe
taggcacttgctacttcagtaatgt

SEQ ID NO: 49170 - DNA, 25 bp, probe
tgttataggcacttgctacttcagt

SEQ ID NO: 49171 - DNA, 25 bp, probe
ggtgtatgacagttagagatgctga

SEQ ID NO: 49172 - DNA, 25 bp, probe
gacaagcatgttgattctaggttga

SEQ ID NO: 49173 - DNA, 25 bp, probe
taacacacacacacatacacacaca

SEQ ID NO: 49174 - DNA, 25 bp, probe
ggtatctcttagacttaggaatgtg

SEQ ID NO: 49175 - DNA, 25 bp, probe
tctcttagacttaggaatgtgtcaa

SEQ ID NO: 49176 - DNA, 25 bp, probe
atctcttagacttaggaatgtgtca

SEQ ID NO: 49177 - DNA, 25 bp, probe
gtatctcttagacttaggaatgtgt

SEQ ID NO: 49178 - DNA, 25 bp, probe
ttgaccactcttcagagaatggata

SEQ ID NO: 49179 - DNA, 25 bp, probe
accactcttcagagaatggatacaa

SEQ ID NO: 49180 - DNA, 25 bp, probe
gccatcttagatttctttgttcctg

SEQ ID NO: 49181 - DNA, 25 bp, probe
agccatcttagatttctttgttcct

SEQ ID NO: 49182 - DNA, 25 bp, probe
cagccatcttagatttctttgttcc

SEQ ID NO: 49183 - DNA, 25 bp, probe
gctattactttgaccactcttcaga

SEQ ID NO: 49184 - DNA, 25 bp, probe
agtgggtatctcttagacttaggaa

SEQ ID NO: 49185 - DNA, 25 bp, probe
gcagccatcttagatttctttgttc

SEQ ID NO: 49186 - DNA, 25 bp, probe
gggtatctcttagacttaggaatgt

SEQ ID NO: 49187 - DNA, 25 bp, probe
tgggtatctcttagacttaggaatg

SEQ ID NO: 49188 - DNA, 25 bp, probe
gtgggtatctcttagacttaggaat

SEQ ID NO: 49189 - DNA, 25 bp, probe
agcagccatcttagatttctttgtt

SEQ ID NO: 49190 - DNA, 25 bp, probe
gaccactcttcagagaatggataca

SEQ ID NO: 49191 - DNA, 25 bp, probe
tgaccactcttcagagaatggatac

SEQ ID NO: 49192 - DNA, 25 bp, probe
ccatcttagatttctttgttcctgt

SEQ ID NO: 49193 - DNA, 25 bp, probe
ctgagcagccatcttagatttcttt

SEQ ID NO: 49194 - DNA, 25 bp, probe
tagtgggtatctcttagacttagga

SEQ ID NO: 49195 - DNA, 25 bp, probe
gagcagccatcttagatttctttgt

SEQ ID NO: 49196 - DNA, 25 bp, probe
tgagcagccatcttagatttctttg

SEQ ID NO: 49197 - DNA, 25 bp, probe
tagacttaggaatgtgtcaaatggg

SEQ ID NO: 49198 - DNA, 25 bp, probe
tatctcttagacttaggaatgtgtc

SEQ ID NO: 49199 - DNA, 25 bp, probe
ctagtgggtatctcttagacttagg

SEQ ID NO: 49200 - DNA, 25 bp, probe
cctagtgggtatctcttagacttag

SEQ ID NO: 49201 - DNA, 25 bp, probe
tactttgaccactcttcagagaatg

SEQ ID NO: 49202 - DNA, 25 bp, probe
ttactttgaccactcttcagagaat

SEQ ID NO: 49203 - DNA, 25 bp, probe
attactttgaccactcttcagagaa

SEQ ID NO: 49204 - DNA, 25 bp, probe
ttagacttaggaatgtgtcaaatgg

SEQ ID NO: 49205 - DNA, 25 bp, probe
gacttaggaatgtgtcaaatgggag

SEQ ID NO: 49206 - DNA, 25 bp, probe
tattactttgaccactcttcagaga

SEQ ID NO: 49207 - DNA, 25 bp, probe
agacttaggaatgtgtcaaatggga

SEQ ID NO: 49208 - DNA, 25 bp, probe
agatttctttgttcctgtagactta

SEQ ID NO: 49209 - DNA, 25 bp, probe
tagatttctttgttcctgtagactt

SEQ ID NO: 49210 - DNA, 25 bp, probe
ttagatttctttgttcctgtagact

SEQ ID NO: 49211 - DNA, 25 bp, probe
ctcttagacttaggaatgtgtcaaa

SEQ ID NO: 49212 - DNA, 25 bp, probe
ctattactttgaccactcttcagag

SEQ ID NO: 49213 - DNA, 25 bp, probe
cactcttcagagaatggatacaaat

SEQ ID NO: 49214 - DNA, 25 bp, probe
agctattactttgaccactcttcag

SEQ ID NO: 49215 - DNA, 25 bp, probe
tcagctattactttgaccactcttc

SEQ ID NO: 49216 - DNA, 25 bp, probe
atcagctattactttgaccactctt

SEQ ID NO: 49217 - DNA, 25 bp, probe
actcttcagagaatggatacaaatc

SEQ ID NO: 49218 - DNA, 25 bp, probe
tgtattatttcaccagcagcataga

SEQ ID NO: 49219 - DNA, 25 bp, probe
ttgtattatttcaccagcagcatag

SEQ ID NO: 49220 - DNA, 25 bp, probe
tttgtattatttcaccagcagcata

SEQ ID NO: 49221 - DNA, 25 bp, probe
cacacataagcactgaaatcacttt

SEQ ID NO: 49222 - DNA, 25 bp, probe
acataagcactgaaatcactttacc

SEQ ID NO: 49223 - DNA, 25 bp, probe
attatttcaccagcagcatagaaca

SEQ ID NO: 49224 - DNA, 25 bp, probe
tattatttcaccagcagcatagaac

SEQ ID NO: 49225 - DNA, 25 bp, probe
gtattatttcaccagcagcatagaa

SEQ ID NO: 49226 - DNA, 25 bp, probe
ataagcactgaaatcactttacctg

SEQ ID NO: 49227 - DNA, 25 bp, probe
cataagcactgaaatcactttacct

SEQ ID NO: 49228 - DNA, 25 bp, probe
attctgatgtccatttgtcccaata

SEQ ID NO: 49229 - DNA, 25 bp, probe
ataaactgagcctgttcattctgat

SEQ ID NO: 49230 - DNA, 25 bp, probe
ttctgatgtccatttgtcccaatag

SEQ ID NO: 49231 - DNA, 25 bp, probe
ctgttcattctgatgtccatttgtc

SEQ ID NO: 49232 - DNA, 25 bp, probe
acacataagcactgaaatcacttta

SEQ ID NO: 49233 - DNA, 25 bp, probe
acacacataagcactgaaatcactt

SEQ ID NO: 49234 - DNA, 25 bp, probe
ttatttcaccagcagcatagaacag

SEQ ID NO: 49235 - DNA, 25 bp, probe
cacataagcactgaaatcactttac

SEQ ID NO: 49236 - DNA, 25 bp, probe
gataaactgagcctgttcattctga

SEQ ID NO: 49237 - DNA, 25 bp, probe
taaactgagcctgttcattctgatg

SEQ ID NO: 49238 - DNA, 25 bp, probe
caaggagccattctatgtgactctg

SEQ ID NO: 49239 - DNA, 25 bp, probe
gagcctgttcattctgatgtccatt

SEQ ID NO: 49240 - DNA, 25 bp, probe
aactgagcctgttcattctgatgtc

SEQ ID NO: 49241 - DNA, 25 bp, probe
cacacacataagcactgaaatcact

SEQ ID NO: 49242 - DNA, 25 bp, probe
ttgagccatccaaagaaacactaag

SEQ ID NO: 49243 - DNA, 25 bp, probe
cttgagccatccaaagaaacactaa

SEQ ID NO: 49244 - DNA, 25 bp, probe
cattctgatgtccatttgtcccaat

SEQ ID NO: 49245 - DNA, 25 bp, probe
tgttcattctgatgtccatttgtcc

SEQ ID NO: 49246 - DNA, 25 bp, probe
cctgttcattctgatgtccatttgt

SEQ ID NO: 49247 - DNA, 25 bp, probe
acacacacataagcactgaaatcac

SEQ ID NO: 49248 - DNA, 25 bp, probe
cacacacacataagcactgaaatca

SEQ ID NO: 49249 - DNA, 25 bp, probe
ggataaactgagcctgttcattctg

SEQ ID NO: 49250 - DNA, 25 bp, probe
aaagacttgagccatccaaagaaac

SEQ ID NO: 49251 - DNA, 25 bp, probe
gtacacagactgacgaaactttaaa

SEQ ID NO: 49252 - DNA, 25 bp, probe
gttcattctgatgtccatttgtccc

SEQ ID NO: 49253 - DNA, 25 bp, probe
acttgagccatccaaagaaacacta

SEQ ID NO: 49254 - DNA, 25 bp, probe
acacagactgacgaaactttaaata

SEQ ID NO: 49255 - DNA, 25 bp, probe
tacacagactgacgaaactttaaat

SEQ ID NO: 49256 - DNA, 25 bp, probe
atccaaagaaacactaagctctctg

SEQ ID NO: 49257 - DNA, 25 bp, probe
catccaaagaaacactaagctctct

SEQ ID NO: 49258 - DNA, 25 bp, probe
cattctatgtgactctgggtggaag

SEQ ID NO: 49259 - DNA, 25 bp, probe
tcattctgatgtccatttgtcccaa

SEQ ID NO: 49260 - DNA, 25 bp, probe
ttcattctgatgtccatttgtccca

SEQ ID NO: 49261 - DNA, 25 bp, probe
gtcctcacttctgtctcctgtcttc

SEQ ID NO: 49262 - DNA, 25 bp, probe
aagcaataatggcagtagttctcaa

SEQ ID NO: 49263 - DNA, 25 bp, probe
gaagtgtattctcttgttctgtcag

SEQ ID NO: 49264 - DNA, 25 bp, probe
aagtgtattctcttgttctgtcagc

SEQ ID NO: 49265 - DNA, 25 bp, probe
cattcactctaagatgaggagaaca

SEQ ID NO: 49266 - DNA, 25 bp, probe
attcactctaagatgaggagaacaa

SEQ ID NO: 49267 - DNA, 25 bp, probe
gcattcactctaagatgaggagaac

SEQ ID NO: 49268 - DNA, 25 bp, probe
gcaataatggcagtagttctcaaat

SEQ ID NO: 49269 - DNA, 25 bp, probe
taggaaagcaataatggcagtagtt

SEQ ID NO: 49270 - DNA, 25 bp, probe
ataggaaagcaataatggcagtagt

SEQ ID NO: 49271 - DNA, 25 bp, probe
caaataggaaagcaataatggcagt

SEQ ID NO: 49272 - DNA, 25 bp, probe
tcaaataggaaagcaataatggcag

SEQ ID NO: 49273 - DNA, 25 bp, probe
aataatggcagtagttctcaaatgg

SEQ ID NO: 49274 - DNA, 25 bp, probe
agcaataatggcagtagttctcaaa

SEQ ID NO: 49275 - DNA, 25 bp, probe
aaagcaataatggcagtagttctca

SEQ ID NO: 49276 - DNA, 25 bp, probe
agtgtattctcttgttctgtcagct

SEQ ID NO: 49277 - DNA, 25 bp, probe
ataatggcagtagttctcaaatggg

SEQ ID NO: 49278 - DNA, 25 bp, probe
aataggaaagcaataatggcagtag

SEQ ID NO: 49279 - DNA, 25 bp, probe
gaaagcaataatggcagtagttctc

SEQ ID NO: 49280 - DNA, 25 bp, probe
ttcaaataggaaagcaataatggca

SEQ ID NO: 49281 - DNA, 25 bp, probe
aaccactaggaattgaaggaatatt

SEQ ID NO: 49282 - DNA, 25 bp, probe
aaataggaaagcaataatggcagta

SEQ ID NO: 49283 - DNA, 25 bp, probe
agaaaccactaggaattgaaggaat

SEQ ID NO: 49284 - DNA, 25 bp, probe
aagaaaccactaggaattgaaggaa

SEQ ID NO: 49285 - DNA, 25 bp, probe
cactgaaagggctttatgttacaat

SEQ ID NO: 49286 - DNA, 25 bp, probe
aaaggcagaattgacagttgtatct

SEQ ID NO: 49287 - DNA, 25 bp, probe
caataatggcagtagttctcaaatg

SEQ ID NO: 49288 - DNA, 25 bp, probe
ctttggtgaaggtagggtcatatta

SEQ ID NO: 49289 - DNA, 25 bp, probe
agaagtgtattctcttgttctgtca

SEQ ID NO: 49290 - DNA, 25 bp, probe
ggaaagcaataatggcagtagttct

SEQ ID NO: 49291 - DNA, 25 bp, probe
aggaaagcaataatggcagtagttc

SEQ ID NO: 49292 - DNA, 25 bp, probe
tttggtgaaggtagggtcatattaa

SEQ ID NO: 49293 - DNA, 25 bp, probe
ttcactctaagatgaggagaacaaa

SEQ ID NO: 49294 - DNA, 25 bp, probe
tgcattcactctaagatgaggagaa

SEQ ID NO: 49295 - DNA, 25 bp, probe
caagaaaccactaggaattgaagga

SEQ ID NO: 49296 - DNA, 25 bp, probe
aagaagtgtattctcttgttctgtc

SEQ ID NO: 49297 - DNA, 25 bp, probe
accaagaaaccactaggaattgaag

SEQ ID NO: 49298 - DNA, 25 bp, probe
gaccaagaaaccactaggaattgaa

SEQ ID NO: 49299 - DNA, 25 bp, probe
gaaaccactaggaattgaaggaata

SEQ ID NO: 49300 - DNA, 25 bp, probe
actgaaagggctttatgttacaata

SEQ ID NO: 49301 - DNA, 25 bp, probe
gagaccaagaaaccactaggaattg

SEQ ID NO: 49302 - DNA, 25 bp, probe
catttcctgggaattggtaaacatc

SEQ ID NO: 49303 - DNA, 25 bp, probe
tttcctgggaattggtaaacatcat

SEQ ID NO: 49304 - DNA, 25 bp, probe
atttcctgggaattggtaaacatca

SEQ ID NO: 49305 - DNA, 25 bp, probe
tcatttcctgggaattggtaaacat

SEQ ID NO: 49306 - DNA, 25 bp, probe
aacctcttcacaacagtatcaacac

SEQ ID NO: 49307 - DNA, 25 bp, probe
gaacctcttcacaacagtatcaaca

SEQ ID NO: 49308 - DNA, 25 bp, probe
ggcttaatacattagtggtaactgg

SEQ ID NO: 49309 - DNA, 25 bp, probe
gcataactcaatctgaaccaaggat

SEQ ID NO: 49310 - DNA, 25 bp, probe
ttcagaaggtcatcagattgtgaga

SEQ ID NO: 49311 - DNA, 25 bp, probe
gcttaatacattagtggtaactggt

SEQ ID NO: 49312 - DNA, 25 bp, probe
atcctactaataagcctcacctatt

SEQ ID NO: 49313 - DNA, 25 bp, probe
acctcttcacaacagtatcaacact

SEQ ID NO: 49314 - DNA, 25 bp, probe
gtatatcctactaataagcctcacc

SEQ ID NO: 49315 - DNA, 25 bp, probe
tatcctactaataagcctcacctat

SEQ ID NO: 49316 - DNA, 25 bp, probe
atatcctactaataagcctcaccta

SEQ ID NO: 49317 - DNA, 25 bp, probe
tatatcctactaataagcctcacct

SEQ ID NO: 49318 - DNA, 25 bp, probe
ctggtatcacatagttggagtcagt

SEQ ID NO: 49319 - DNA, 25 bp, probe
atagctggtatcacatagttggagt

SEQ ID NO: 49320 - DNA, 25 bp, probe
catagttggagtcagtgcataattc

SEQ ID NO: 49321 - DNA, 25 bp, probe
acatagttggagtcagtgcataatt

SEQ ID NO: 49322 - DNA, 25 bp, probe
tagctggtatcacatagttggagtc

SEQ ID NO: 49323 - DNA, 25 bp, probe
cataactcaatctgaaccaaggatt

SEQ ID NO: 49324 - DNA, 25 bp, probe
atagagcataacgaaactgtgaaac

SEQ ID NO: 49325 - DNA, 25 bp, probe
tagagcataacgaaactgtgaaact

SEQ ID NO: 49326 - DNA, 25 bp, probe
taacggtatttcagaaggtcatcag

SEQ ID NO: 49327 - DNA, 25 bp, probe
ttaacggtatttcagaaggtcatca

SEQ ID NO: 49328 - DNA, 25 bp, probe
atctcattcccttcttctttcccta

SEQ ID NO: 49329 - DNA, 25 bp, probe
agaaggtcatcagattgtgagactg

SEQ ID NO: 49330 - DNA, 25 bp, probe
cagaaggtcatcagattgtgagact

SEQ ID NO: 49331 - DNA, 25 bp, probe
tcagaaggtcatcagattgtgagac

SEQ ID NO: 49332 - DNA, 25 bp, probe
ggtatttcagaaggtcatcagattg

SEQ ID NO: 49333 - DNA, 25 bp, probe
tggtatcacatagttggagtcagtg

SEQ ID NO: 49334 - DNA, 25 bp, probe
gagcataacgaaactgtgaaacttt

SEQ ID NO: 49335 - DNA, 25 bp, probe
cggtatttcagaaggtcatcagatt

SEQ ID NO: 49336 - DNA, 25 bp, probe
aaatctcattcccttcttctttccc

SEQ ID NO: 49337 - DNA, 25 bp, probe
gcagggcttaatacattagtggtaa

SEQ ID NO: 49338 - DNA, 25 bp, probe
aattcatatttggtgtggcttaacg

SEQ ID NO: 49339 - DNA, 25 bp, probe
gatagctggtatcacatagttggag

SEQ ID NO: 49340 - DNA, 25 bp, probe
atatttggtgtggcttaacggtatt

SEQ ID NO: 49341 - DNA, 25 bp, probe
aatagagcataacgaaactgtgaaa

SEQ ID NO: 49342 - DNA, 25 bp, probe
aaatagagcataacgaaactgtgaa

SEQ ID NO: 49343 - DNA, 25 bp, probe
cagggcttaatacattagtggtaac

SEQ ID NO: 49344 - DNA, 25 bp, probe
cttaacggtatttcagaaggtcatc

SEQ ID NO: 49345 - DNA, 25 bp, probe
atttctgggaatggttaaacacaaa

SEQ ID NO: 49346 - DNA, 25 bp, probe
tatttggtgtggcttaacggtattt

SEQ ID NO: 49347 - DNA, 25 bp, probe
agagcataacgaaactgtgaaactt

SEQ ID NO: 49348 - DNA, 25 bp, probe
tatttcagaaggtcatcagattgtg

SEQ ID NO: 49349 - DNA, 25 bp, probe
gtatttcagaaggtcatcagattgt

SEQ ID NO: 49350 - DNA, 25 bp, probe
catatctttaattgggtgttggtcc

SEQ ID NO: 49351 - DNA, 25 bp, probe
aattggctataaaggtaggtctgtt

SEQ ID NO: 49352 - DNA, 25 bp, probe
taatctagttcatgtgcattaggct

SEQ ID NO: 49353 - DNA, 25 bp, probe
gcatatctttaattgggtgttggtc

SEQ ID NO: 49354 - DNA, 25 bp, probe
ttggctataaaggtaggtctgttaa

SEQ ID NO: 49355 - DNA, 25 bp, probe
attggctataaaggtaggtctgtta

SEQ ID NO: 49356 - DNA, 25 bp, probe
aatctagttcatgtgcattaggctg

SEQ ID NO: 49357 - DNA, 25 bp, probe
taactttctttgtgtgttcctgatg

SEQ ID NO: 49358 - DNA, 25 bp, probe
ataatctagttcatgtgcattaggc

SEQ ID NO: 49359 - DNA, 25 bp, probe
ttggataatctagttcatgtgcatt

SEQ ID NO: 49360 - DNA, 25 bp, probe
ttaactttctttgtgtgttcctgat

SEQ ID NO: 49361 - DNA, 25 bp, probe
cacttgagttcacttgagtttacat

SEQ ID NO: 49362 - DNA, 25 bp, probe
actacctgagaaattgctttgtgtc

SEQ ID NO: 49363 - DNA, 25 bp, probe
gactacctgagaaattgctttgtgt

SEQ ID NO: 49364 - DNA, 25 bp, probe
tgagttcacttgagtttacatttga

SEQ ID NO: 49365 - DNA, 25 bp, probe
ttgagttcacttgagtttacatttg

SEQ ID NO: 49366 - DNA, 25 bp, probe
acttgagttcacttgagtttacatt

SEQ ID NO: 49367 - DNA, 25 bp, probe
ccaggataaatgaggtatgttgatc

SEQ ID NO: 49368 - DNA, 25 bp, probe
agcataaacaccttgaatttgattt

SEQ ID NO: 49369 - DNA, 25 bp, probe
tactgctattgggatctattcttca

SEQ ID NO: 49370 - DNA, 25 bp, probe
cttgagttcacttgagtttacattt

SEQ ID NO: 49371 - DNA, 25 bp, probe
aactttctttgtgtgttcctgatgg

SEQ ID NO: 49372 - DNA, 25 bp, probe
aagcataaacaccttgaatttgatt

SEQ ID NO: 49373 - DNA, 25 bp, probe
aaagcataaacaccttgaatttgat

SEQ ID NO: 49374 - DNA, 25 bp, probe
gcacttgagttcacttgagtttaca

SEQ ID NO: 49375 - DNA, 25 bp, probe
ctacctgagaaattgctttgtgtcc

SEQ ID NO: 49376 - DNA, 25 bp, probe
gatcatggctttgctttatatcttg

SEQ ID NO: 49377 - DNA, 25 bp, probe
tggataatctagttcatgtgcatta

SEQ ID NO: 49378 - DNA, 25 bp, probe
attgctttgtgtcccactgttatta

SEQ ID NO: 49379 - DNA, 25 bp, probe
aagctggtttatcatcctggtattt

SEQ ID NO: 49380 - DNA, 25 bp, probe
aaagctggtttatcatcctggtatt

SEQ ID NO: 49381 - DNA, 25 bp, probe
actgctattgggatctattcttcag

SEQ ID NO: 49382 - DNA, 25 bp, probe
tgaaagaatgtattgtaaattggca

SEQ ID NO: 49383 - DNA, 25 bp, probe
ctgctattgggatctattcttcaga

SEQ ID NO: 49384 - DNA, 25 bp, probe
tgtgtcccactgttattaaagcaaa

SEQ ID NO: 49385 - DNA, 25 bp, probe
ttgtgtcccactgttattaaagcaa

SEQ ID NO: 49386 - DNA, 25 bp, probe
tttgtgtcccactgttattaaagca

SEQ ID NO: 49387 - DNA, 25 bp, probe
tgctttgtgtcccactgttattaaa

SEQ ID NO: 49388 - DNA, 25 bp, probe
ttgctttgtgtcccactgttattaa

SEQ ID NO: 49389 - DNA, 25 bp, probe
tatcgactacctgagaaattgcttt

SEQ ID NO: 49390 - DNA, 25 bp, probe
atatcgactacctgagaaattgctt

SEQ ID NO: 49391 - DNA, 25 bp, probe
cgactacctgagaaattgctttgtg

SEQ ID NO: 49392 - DNA, 25 bp, probe
catatcgactacctgagaaattgct

SEQ ID NO: 49393 - DNA, 25 bp, probe
tcagaaggtaacttgttataagaga

SEQ ID NO: 49394 - DNA, 25 bp, probe
atctctctaatcttgttcttcacgg

SEQ ID NO: 49395 - DNA, 25 bp, probe
catctctctaatcttgttcttcacg

SEQ ID NO: 49396 - DNA, 25 bp, probe
tctctctaatcttgttcttcacggt

SEQ ID NO: 49397 - DNA, 25 bp, probe
tcaatactgatgagtgttcaatcca

SEQ ID NO: 49398 - DNA, 25 bp, probe
ctctctaatcttgttcttcacggtg

SEQ ID NO: 49399 - DNA, 25 bp, probe
ttgtactattgaccatcctgaagac

SEQ ID NO: 49400 - DNA, 25 bp, probe
aatactgatgagtgttcaatccaac

SEQ ID NO: 49401 - DNA, 25 bp, probe
caatactgatgagtgttcaatccaa

SEQ ID NO: 49402 - DNA, 25 bp, probe
ttcaatactgatgagtgttcaatcc

SEQ ID NO: 49403 - DNA, 25 bp, probe
tcatctctctaatcttgttcttcac

SEQ ID NO: 49404 - DNA, 25 bp, probe
gtcatctctctaatcttgttcttca

SEQ ID NO: 49405 - DNA, 25 bp, probe
gctcctcctgttcttactcttcatt

SEQ ID NO: 49406 - DNA, 25 bp, probe
ccatcctgaagacagtgaatatgaa

SEQ ID NO: 49407 - DNA, 25 bp, probe
agtcatctctctaatcttgttcttc

SEQ ID NO: 49408 - DNA, 25 bp, probe
atcctgaagacagtgaatatgaagc

SEQ ID NO: 49409 - DNA, 25 bp, probe
tactattgaccatcctgaagacagt

SEQ ID NO: 49410 - DNA, 25 bp, probe
caacatggataatgatctggaggtt

SEQ ID NO: 49411 - DNA, 25 bp, probe
catcctgaagacagtgaatatgaag

SEQ ID NO: 49412 - DNA, 25 bp, probe
gaccatcctgaagacagtgaatatg

SEQ ID NO: 49413 - DNA, 25 bp, probe
accatcctgaagacagtgaatatga

SEQ ID NO: 49414 - DNA, 25 bp, probe
tgaccatcctgaagacagtgaatat

SEQ ID NO: 49415 - DNA, 25 bp, probe
ccttatatggagttgttgaacacag

SEQ ID NO: 49416 - DNA, 25 bp, probe
gtactattgaccatcctgaagacag

SEQ ID NO: 49417 - DNA, 25 bp, probe
tgtactattgaccatcctgaagaca

SEQ ID NO: 49418 - DNA, 25 bp, probe
ttgaccatcctgaagacagtgaata

SEQ ID NO: 49419 - DNA, 25 bp, probe
tattgaccatcctgaagacagtgaa

SEQ ID NO: 49420 - DNA, 25 bp, probe
cttgctcctcctgttcttactcttc

SEQ ID NO: 49421 - DNA, 25 bp, probe
ttgttgaacacagtggtactatgag

SEQ ID NO: 49422 - DNA, 25 bp, probe
gagttgttgaacacagtggtactat

SEQ ID NO: 49423 - DNA, 25 bp, probe
tatatggagttgttgaacacagtgg

SEQ ID NO: 49424 - DNA, 25 bp, probe
ttatatggagttgttgaacacagtg

SEQ ID NO: 49425 - DNA, 25 bp, probe
tctaatcttgttcttcacggtgata

SEQ ID NO: 49426 - DNA, 25 bp, probe
aatcttgttcttcacggtgatattc

SEQ ID NO: 49427 - DNA, 25 bp, probe
ctctaatcttgttcttcacggtgat

SEQ ID NO: 49428 - DNA, 25 bp, probe
tcaacatggataatgatctggaggt

SEQ ID NO: 49429 - DNA, 25 bp, probe
agttgttgaacacagtggtactatg

SEQ ID NO: 49430 - DNA, 25 bp, probe
gttgttgaacacagtggtactatga

SEQ ID NO: 49431 - DNA, 25 bp, probe
cttatatggagttgttgaacacagt

SEQ ID NO: 49432 - DNA, 25 bp, probe
atcttgttcttcacggtgatattcc

SEQ ID NO: 49433 - DNA, 25 bp, probe
ctattgaccatcctgaagacagtga

SEQ ID NO: 49434 - DNA, 25 bp, probe
aatccacagaggaagtagatatgaa

SEQ ID NO: 49435 - DNA, 25 bp, probe
tccttatatggagttgttgaacaca

SEQ ID NO: 49436 - DNA, 25 bp, probe
ctaatcttgttcttcacggtgatat

SEQ ID NO: 49437 - DNA, 25 bp, probe
ccgcaaatagtcatctctctaatct

SEQ ID NO: 49438 - DNA, 25 bp, probe
ctatgaaccaatagcaaccactctc

SEQ ID NO: 49439 - DNA, 25 bp, probe
tatgaaccaatagcaaccactctcc

SEQ ID NO: 49440 - DNA, 25 bp, probe
cttagtgatagagtcaacatgagga

SEQ ID NO: 49441 - DNA, 25 bp, probe
gccttagtgatagagtcaacatgag

SEQ ID NO: 49442 - DNA, 25 bp, probe
atcctatgaaccaatagcaaccact

SEQ ID NO: 49443 - DNA, 25 bp, probe
catcctatgaaccaatagcaaccac

SEQ ID NO: 49444 - DNA, 25 bp, probe
ttagtgatagagtcaacatgaggac

SEQ ID NO: 49445 - DNA, 25 bp, probe
tagtgatagagtcaacatgaggaca

SEQ ID NO: 49446 - DNA, 25 bp, probe
tgatagagtcaacatgaggacatct

SEQ ID NO: 49447 - DNA, 25 bp, probe
gtgatagagtcaacatgaggacatc

SEQ ID NO: 49448 - DNA, 25 bp, probe
ccttagtgatagagtcaacatgagg

SEQ ID NO: 49449 - DNA, 25 bp, probe
agtgatagagtcaacatgaggacat

SEQ ID NO: 49450 - DNA, 25 bp, probe
aatatggaggagaagtttatggcaa

SEQ ID NO: 49451 - DNA, 25 bp, probe
aaatatggaggagaagtttatggca

SEQ ID NO: 49452 - DNA, 25 bp, probe
aaggcaaatatggaggagaagttta

SEQ ID NO: 49453 - DNA, 25 bp, probe
caaatatggaggagaagtttatggc

SEQ ID NO: 49454 - DNA, 25 bp, probe
gcaaatatggaggagaagtttatgg

SEQ ID NO: 49455 - DNA, 25 bp, probe
ggcaaatatggaggagaagtttatg

SEQ ID NO: 49456 - DNA, 25 bp, probe
aggcaaatatggaggagaagtttat

SEQ ID NO: 49457 - DNA, 25 bp, probe
atagagtcaacatgaggacatctag

SEQ ID NO: 49458 - DNA, 25 bp, probe
gatagagtcaacatgaggacatcta

SEQ ID NO: 49459 - DNA, 25 bp, probe
cctatgaaccaatagcaaccactct

SEQ ID NO: 49460 - DNA, 25 bp, probe
tcctatgaaccaatagcaaccactc

SEQ ID NO: 49461 - DNA, 25 bp, probe
gaaggcaaatatggaggagaagttt

SEQ ID NO: 49462 - DNA, 25 bp, probe
atatggaggagaagtttatggcaac

SEQ ID NO: 49463 - DNA, 25 bp, probe
aaatgaagatgaagccaccagtatg

SEQ ID NO: 49464 - DNA, 25 bp, probe
gttggattctctgaaggcaaatatg

SEQ ID NO: 49465 - DNA, 25 bp, probe
agttggattctctgaaggcaaatat

SEQ ID NO: 49466 - DNA, 25 bp, probe
tagagtcaacatgaggacatctagc

SEQ ID NO: 49467 - DNA, 25 bp, probe
ttggattctctgaaggcaaatatgg

SEQ ID NO: 49468 - DNA, 25 bp, probe
gagttggattctctgaaggcaaata

SEQ ID NO: 49469 - DNA, 25 bp, probe
tgaaggcaaatatggaggagaagtt

SEQ ID NO: 49470 - DNA, 25 bp, probe
atcatcctatgaaccaatagcaacc

SEQ ID NO: 49471 - DNA, 25 bp, probe
tggattctctgaaggcaaatatgga

SEQ ID NO: 49472 - DNA, 25 bp, probe
aatcatcctatgaaccaatagcaac

SEQ ID NO: 49473 - DNA, 25 bp, probe
gattctctgaaggcaaatatggagg

SEQ ID NO: 49474 - DNA, 25 bp, probe
ggattctctgaaggcaaatatggag

SEQ ID NO: 49475 - DNA, 25 bp, probe
aatatactgatccagatggacctgc

SEQ ID NO: 49476 - DNA, 25 bp, probe
tttgctttcaccaagaatgtcctag

SEQ ID NO: 49477 - DNA, 25 bp, probe
attctctgaaggcaaatatggagga

SEQ ID NO: 49478 - DNA, 25 bp, probe
tctgaaggcaaatatggaggagaag

SEQ ID NO: 49479 - DNA, 25 bp, probe
ctgaaggcaaatatggaggagaagt

SEQ ID NO: 49480 - DNA, 25 bp, probe
tcatcctatgaaccaatagcaacca

SEQ ID NO: 49481 - DNA, 25 bp, probe
aacccaatcgaaatatactgatcca

SEQ ID NO: 49482 - DNA, 25 bp, probe
gttcctgtgaagaccaagtataatt

SEQ ID NO: 49483 - DNA, 25 bp, probe
attgagaatgttgtccttgtggttc

SEQ ID NO: 49484 - DNA, 25 bp, probe
tagatgtggattctcttacagacaa

SEQ ID NO: 49485 - DNA, 25 bp, probe
atagatgtggattctcttacagaca

SEQ ID NO: 49486 - DNA, 25 bp, probe
tgatagatgtggattctcttacaga

SEQ ID NO: 49487 - DNA, 25 bp, probe
gatagatgtggattctcttacagac

SEQ ID NO: 49488 - DNA, 25 bp, probe
ggttcctgtgaagaccaagtataat

SEQ ID NO: 49489 - DNA, 25 bp, probe
atgatagatgtggattctcttacag

SEQ ID NO: 49490 - DNA, 25 bp, probe
ctgacctttgaacctctaacattgg

SEQ ID NO: 49491 - DNA, 25 bp, probe
cctgacctttgaacctctaacattg

SEQ ID NO: 49492 - DNA, 25 bp, probe
aatgatagatgtggattctcttaca

SEQ ID NO: 49493 - DNA, 25 bp, probe
agatgtggattctcttacagacaaa

SEQ ID NO: 49494 - DNA, 25 bp, probe
gatgtggattctcttacagacaaag

SEQ ID NO: 49495 - DNA, 25 bp, probe
ttgagaatgttgtccttgtggttcc

SEQ ID NO: 49496 - DNA, 25 bp, probe
aattcgcattgagaatgttgtcctt

SEQ ID NO: 49497 - DNA, 25 bp, probe
cattgagaatgttgtccttgtggtt

SEQ ID NO: 49498 - DNA, 25 bp, probe
ttcctgtgaagaccaagtataattt

SEQ ID NO: 49499 - DNA, 25 bp, probe
ctacgagaaggaatgcttcacatat

SEQ ID NO: 49500 - DNA, 25 bp, probe
attcgcattgagaatgttgtccttg

SEQ ID NO: 49501 - DNA, 25 bp, probe
gagaatgttgtccttgtggttcctg

SEQ ID NO: 49502 - DNA, 25 bp, probe
ctctaacattggttccaattcagac

SEQ ID NO: 49503 - DNA, 25 bp, probe
cctctaacattggttccaattcaga

SEQ ID NO: 49504 - DNA, 25 bp, probe
gcctgacctttgaacctctaacatt

SEQ ID NO: 49505 - DNA, 25 bp, probe
acctctaacattggttccaattcag

SEQ ID NO: 49506 - DNA, 25 bp, probe
tctaacattggttccaattcagacc

SEQ ID NO: 49507 - DNA, 25 bp, probe
tgagaatgttgtccttgtggttcct

SEQ ID NO: 49508 - DNA, 25 bp, probe
gaatgttgtccttgtggttcctgtg

SEQ ID NO: 49509 - DNA, 25 bp, probe
atgtggattctcttacagacaaaga

SEQ ID NO: 49510 - DNA, 25 bp, probe
cctacgagaaggaatgcttcacata

SEQ ID NO: 49511 - DNA, 25 bp, probe
agaatgttgtccttgtggttcctgt

SEQ ID NO: 49512 - DNA, 25 bp, probe
tgacctttgaacctctaacattggt

SEQ ID NO: 49513 - DNA, 25 bp, probe
gaagcctgacctttgaacctctaac

SEQ ID NO: 49514 - DNA, 25 bp, probe
aatgttgtccttgtggttcctgtga

SEQ ID NO: 49515 - DNA, 25 bp, probe
ttcgcattgagaatgttgtccttgt

SEQ ID NO: 49516 - DNA, 25 bp, probe
agcctgacctttgaacctctaacat

SEQ ID NO: 49517 - DNA, 25 bp, probe
atgttgtccttgtggttcctgtgaa

SEQ ID NO: 49518 - DNA, 25 bp, probe
cagggatgtgattgggaaggaattg

SEQ ID NO: 49519 - DNA, 25 bp, probe
tacgagaaggaatgcttcacatatg

SEQ ID NO: 49520 - DNA, 25 bp, probe
gttacaaaacattctctgatgagcc

SEQ ID NO: 49521 - DNA, 25 bp, probe
agttacaaaacattctctgatgagc

SEQ ID NO: 49522 - DNA, 25 bp, probe
ctatgaagatggggcttttggaatt

SEQ ID NO: 49523 - DNA, 25 bp, probe
aaatgatagatgtggattctcttac

SEQ ID NO: 49524 - DNA, 25 bp, probe
gattgggaaggaattgcagaaacag

SEQ ID NO: 49525 - DNA, 25 bp, probe
tactatgaagatggggcttttggaa

SEQ ID NO: 49526 - DNA, 25 bp, probe
atcgtgttacagtcacaatctactt

SEQ ID NO: 49527 - DNA, 25 bp, probe
gatcgtgttacagtcacaatctact

SEQ ID NO: 49528 - DNA, 25 bp, probe
tgtatctctaggaacgaaggtggaa

SEQ ID NO: 49529 - DNA, 25 bp, probe
ttgtatctctaggaacgaaggtgga

SEQ ID NO: 49530 - DNA, 25 bp, probe
aagagatcgtgttacagtcacaatc

SEQ ID NO: 49531 - DNA, 25 bp, probe
caagagatcgtgttacagtcacaat

SEQ ID NO: 49532 - DNA, 25 bp, probe
gctttactgccaatgtgtttatatg

SEQ ID NO: 49533 - DNA, 25 bp, probe
gagatcgtgttacagtcacaatcta

SEQ ID NO: 49534 - DNA, 25 bp, probe
agatcgtgttacagtcacaatctac

SEQ ID NO: 49535 - DNA, 25 bp, probe
atctctaggaacgaaggtggaaata

SEQ ID NO: 49536 - DNA, 25 bp, probe
tatctctaggaacgaaggtggaaat

SEQ ID NO: 49537 - DNA, 25 bp, probe
aactttgtatctctaggaacgaagg

SEQ ID NO: 49538 - DNA, 25 bp, probe
ctttgtatctctaggaacgaaggtg

SEQ ID NO: 49539 - DNA, 25 bp, probe
actttgtatctctaggaacgaaggt

SEQ ID NO: 49540 - DNA, 25 bp, probe
acaagagatcgtgttacagtcacaa

SEQ ID NO: 49541 - DNA, 25 bp, probe
tctctaggaacgaaggtggaaatac

SEQ ID NO: 49542 - DNA, 25 bp, probe
gtatctctaggaacgaaggtggaaa

SEQ ID NO: 49543 - DNA, 25 bp, probe
agagatcgtgttacagtcacaatct

SEQ ID NO: 49544 - DNA, 25 bp, probe
aaactttgtatctctaggaacgaag

SEQ ID NO: 49545 - DNA, 25 bp, probe
ttcactcatattaatggaggattgt

SEQ ID NO: 49546 - DNA, 25 bp, probe
ctttactgccaatgtgtttatatgt

SEQ ID NO: 49547 - DNA, 25 bp, probe
tttgtatctctaggaacgaaggtgg

SEQ ID NO: 49548 - DNA, 25 bp, probe
tcgtgttacagtcacaatctacttt

SEQ ID NO: 49549 - DNA, 25 bp, probe
tttactgccaatgtgtttatatgtt

SEQ ID NO: 49550 - DNA, 25 bp, probe
agctttactgccaatgtgtttatat

SEQ ID NO: 49551 - DNA, 25 bp, probe
cactcatattaatggaggattgtac

SEQ ID NO: 49552 - DNA, 25 bp, probe
ggtggaaatacgggaaacaactttg

SEQ ID NO: 49553 - DNA, 25 bp, probe
taaactttgtatctctaggaacgaa

SEQ ID NO: 49554 - DNA, 25 bp, probe
ttaaactttgtatctctaggaacga

SEQ ID NO: 49555 - DNA, 25 bp, probe
aggtggaaatacgggaaacaacttt

SEQ ID NO: 49556 - DNA, 25 bp, probe
tcactcatattaatggaggattgta

SEQ ID NO: 49557 - DNA, 25 bp, probe
aaggtggaaatacgggaaacaactt

SEQ ID NO: 49558 - DNA, 25 bp, probe
ctctaggaacgaaggtggaaatacg

SEQ ID NO: 49559 - DNA, 25 bp, probe
cttaaactttgtatctctaggaacg

SEQ ID NO: 49560 - DNA, 25 bp, probe
ttcacagtaaaccatgtaagtggaa

SEQ ID NO: 49561 - DNA, 25 bp, probe
tttcacagtaaaccatgtaagtgga

SEQ ID NO: 49562 - DNA, 25 bp, probe
tcacagtaaaccatgtaagtggaag

SEQ ID NO: 49563 - DNA, 25 bp, probe
tgggaaattcactcatattaatgga

SEQ ID NO: 49564 - DNA, 25 bp, probe
attcactcatattaatggaggattg

SEQ ID NO: 49565 - DNA, 25 bp, probe
gaaggtggaaatacgggaaacaact

SEQ ID NO: 49566 - DNA, 25 bp, probe
ttactgccaatgtgtttatatgtta

SEQ ID NO: 49567 - DNA, 25 bp, probe
gtggaaatacgggaaacaactttgt

SEQ ID NO: 49568 - DNA, 25 bp, probe
actactttgaaattccttgatttgt

SEQ ID NO: 49569 - DNA, 25 bp, probe
actgccaatgtgtttatatgttata

SEQ ID NO: 49570 - DNA, 25 bp, probe
tataactgtctgtgtgaagcaatca

SEQ ID NO: 49571 - DNA, 25 bp, probe
ataactgtctgtgtgaagcaatcat

SEQ ID NO: 49572 - DNA, 25 bp, probe
taactgtctgtgtgaagcaatcatt

SEQ ID NO: 49573 - DNA, 25 bp, probe
cattataactgtctgtgtgaagcaa

SEQ ID NO: 49574 - DNA, 25 bp, probe
ttataactgtctgtgtgaagcaatc

SEQ ID NO: 49575 - DNA, 25 bp, probe
attataactgtctgtgtgaagcaat

SEQ ID NO: 49576 - DNA, 25 bp, probe
gcattataactgtctgtgtgaagca

SEQ ID NO: 49577 - DNA, 25 bp, probe
ctgcattataactgtctgtgtgaag

SEQ ID NO: 49578 - DNA, 25 bp, probe
taggtctgcattataactgtctgtg

SEQ ID NO: 49579 - DNA, 25 bp, probe
gtaggtctgcattataactgtctgt

SEQ ID NO: 49580 - DNA, 25 bp, probe
tctgcattataactgtctgtgtgaa

SEQ ID NO: 49581 - DNA, 25 bp, probe
tgccttgggttattatggaatgata

SEQ ID NO: 49582 - DNA, 25 bp, probe
ttgccttgggttattatggaatgat

SEQ ID NO: 49583 - DNA, 25 bp, probe
attgccttgggttattatggaatga

SEQ ID NO: 49584 - DNA, 25 bp, probe
ggtaggtctgcattataactgtctg

SEQ ID NO: 49585 - DNA, 25 bp, probe
gtctgcattataactgtctgtgtga

SEQ ID NO: 49586 - DNA, 25 bp, probe
gccttgggttattatggaatgatag

SEQ ID NO: 49587 - DNA, 25 bp, probe
gtttattgccttgggttattatgga

SEQ ID NO: 49588 - DNA, 25 bp, probe
agtttattgccttgggttattatgg

SEQ ID NO: 49589 - DNA, 25 bp, probe
tattgccttgggttattatggaatg

SEQ ID NO: 49590 - DNA, 25 bp, probe
ctttctaagtttattgccttgggtt

SEQ ID NO: 49591 - DNA, 25 bp, probe
tttattgccttgggttattatggaa

SEQ ID NO: 49592 - DNA, 25 bp, probe
aaacccttacactttggctatgaac

SEQ ID NO: 49593 - DNA, 25 bp, probe
ttattgccttgggttattatggaat

SEQ ID NO: 49594 - DNA, 25 bp, probe
gtctgtgtgaagcaatcatttagtt

SEQ ID NO: 49595 - DNA, 25 bp, probe
tgcattataactgtctgtgtgaagc

SEQ ID NO: 49596 - DNA, 25 bp, probe
ctgtctgtgtgaagcaatcatttag

SEQ ID NO: 49597 - DNA, 25 bp, probe
taagtttctactcccatcaaagcag

SEQ ID NO: 49598 - DNA, 25 bp, probe
ggtctgcattataactgtctgtgtg

SEQ ID NO: 49599 - DNA, 25 bp, probe
aggtctgcattataactgtctgtgt

SEQ ID NO: 49600 - DNA, 25 bp, probe
gtaagtttctactcccatcaaagca

SEQ ID NO: 49601 - DNA, 25 bp, probe
tgtaagtttctactcccatcaaagc

SEQ ID NO: 49602 - DNA, 25 bp, probe
tttctaagtttattgccttgggtta

SEQ ID NO: 49603 - DNA, 25 bp, probe
tgtctgtgtgaagcaatcatttagt

SEQ ID NO: 49604 - DNA, 25 bp, probe
actgtctgtgtgaagcaatcattta

SEQ ID NO: 49605 - DNA, 25 bp, probe
tctaagtttattgccttgggttatt

SEQ ID NO: 49606 - DNA, 25 bp, probe
ttctaagtttattgccttgggttat

SEQ ID NO: 49607 - DNA, 25 bp, probe
tgtgtgaagcaatcatttagttact

SEQ ID NO: 49608 - DNA, 25 bp, probe
ccttgggttattatggaatgatagt

SEQ ID NO: 49609 - DNA, 25 bp, probe
ctgtgtgaagcaatcatttagttac

SEQ ID NO: 49610 - DNA, 25 bp, probe
gctttctaagtttattgccttgggt

SEQ ID NO: 49611 - DNA, 25 bp, probe
tctgtgtgaagcaatcatttagtta

SEQ ID NO: 49612 - DNA, 25 bp, probe
caggttgcttgtttacatgaagatc

SEQ ID NO: 49613 - DNA, 25 bp, probe
aactgtctgtgtgaagcaatcattt

SEQ ID NO: 49614 - DNA, 25 bp, probe
taccgacttagaagaacttgatgag

SEQ ID NO: 49615 - DNA, 25 bp, probe
atctactgttgtcacggctatattc

SEQ ID NO: 49616 - DNA, 25 bp, probe
cgacttagaagaacttgatgagaca

SEQ ID NO: 49617 - DNA, 25 bp, probe
catctactgttgtcacggctatatt

SEQ ID NO: 49618 - DNA, 25 bp, probe
ttaccgacttagaagaacttgatga

SEQ ID NO: 49619 - DNA, 25 bp, probe
acttagaagaacttgatgagacaga

SEQ ID NO: 49620 - DNA, 25 bp, probe
ccgacttagaagaacttgatgagac

SEQ ID NO: 49621 - DNA, 25 bp, probe
aatcatcattcaccaaccataccag

SEQ ID NO: 49622 - DNA, 25 bp, probe
agatattccaagtcagttcagaagt

SEQ ID NO: 49623 - DNA, 25 bp, probe
gacttagaagaacttgatgagacag

SEQ ID NO: 49624 - DNA, 25 bp, probe
accgacttagaagaacttgatgaga

SEQ ID NO: 49625 - DNA, 25 bp, probe
agatgtgttccttattgtgaagagc

SEQ ID NO: 49626 - DNA, 25 bp, probe
aagatgtgttccttattgtgaagag

SEQ ID NO: 49627 - DNA, 25 bp, probe
cttagaagaacttgatgagacagag

SEQ ID NO: 49628 - DNA, 25 bp, probe
attccaagtcagttcagaagtaagc

SEQ ID NO: 49629 - DNA, 25 bp, probe
caagatgtgttccttattgtgaaga

SEQ ID NO: 49630 - DNA, 25 bp, probe
gcaagatgtgttccttattgtgaag

SEQ ID NO: 49631 - DNA, 25 bp, probe
tcaatggtagtgacttactgaacat

SEQ ID NO: 49632 - DNA, 25 bp, probe
ggcatcattaagtagaccaggtaat

SEQ ID NO: 49633 - DNA, 25 bp, probe
ctataatggacatcaggttgactct

SEQ ID NO: 49634 - DNA, 25 bp, probe
agcaagatgtgttccttattgtgaa

SEQ ID NO: 49635 - DNA, 25 bp, probe
aagcaagatgtgttccttattgtga

SEQ ID NO: 49636 - DNA, 25 bp, probe
aatggtacttactagagcctgagaa

SEQ ID NO: 49637 - DNA, 25 bp, probe
ataatggacatcaggttgactctaa

SEQ ID NO: 49638 - DNA, 25 bp, probe
atcatcattcaccaaccataccaga

SEQ ID NO: 49639 - DNA, 25 bp, probe
ttagaagaacttgatgagacagagt

SEQ ID NO: 49640 - DNA, 25 bp, probe
gctataatggacatcaggttgactc

SEQ ID NO: 49641 - DNA, 25 bp, probe
atggtacttactagagcctgagaac

SEQ ID NO: 49642 - DNA, 25 bp, probe
atcattcaccaaccataccagagaa

SEQ ID NO: 49643 - DNA, 25 bp, probe
tattccaagtcagttcagaagtaag

SEQ ID NO: 49644 - DNA, 25 bp, probe
gcatcattaagtagaccaggtaatt

SEQ ID NO: 49645 - DNA, 25 bp, probe
tataatggacatcaggttgactcta

SEQ ID NO: 49646 - DNA, 25 bp, probe
gatattccaagtcagttcagaagta

SEQ ID NO: 49647 - DNA, 25 bp, probe
tctactgttgtcacggctatattcg

SEQ ID NO: 49648 - DNA, 25 bp, probe
caatggtagtgacttactgaacatg

SEQ ID NO: 49649 - DNA, 25 bp, probe
catcattcaccaaccataccagaga

SEQ ID NO: 49650 - DNA, 25 bp, probe
tcatcattcaccaaccataccagag

SEQ ID NO: 49651 - DNA, 25 bp, probe
aatggtagtgacttactgaacatgg

SEQ ID NO: 49652 - DNA, 25 bp, probe
gatgtgttccttattgtgaagagcg

SEQ ID NO: 49653 - DNA, 25 bp, probe
tagatattccaagtcagttcagaag

SEQ ID NO: 49654 - DNA, 25 bp, probe
tacttactagagcctgagaacagtg

SEQ ID NO: 49655 - DNA, 25 bp, probe
tgagacagagttatatatgtgccat

SEQ ID NO: 49656 - DNA, 25 bp, probe
atgagacagagttatatatgtgcca

SEQ ID NO: 49657 - DNA, 25 bp, probe
tcattagatattccaagtcagttca

SEQ ID NO: 49658 - DNA, 25 bp, probe
atgtcattcctctctctgtgtatct

SEQ ID NO: 49659 - DNA, 25 bp, probe
tcattcctctctctgtgtatctgtg

SEQ ID NO: 49660 - DNA, 25 bp, probe
gtcattcctctctctgtgtatctgt

SEQ ID NO: 49661 - DNA, 25 bp, probe
tgtcattcctctctctgtgtatctg

SEQ ID NO: 49662 - DNA, 25 bp, probe
aatgtcattcctctctctgtgtatc

SEQ ID NO: 49663 - DNA, 25 bp, probe
cttaatgtcattcctctctctgtgt

SEQ ID NO: 49664 - DNA, 25 bp, probe
ccttaatgtcattcctctctctgtg

SEQ ID NO: 49665 - DNA, 25 bp, probe
ttaatgtcattcctctctctgtgta

SEQ ID NO: 49666 - DNA, 25 bp, probe
taatgtcattcctctctctgtgtat

SEQ ID NO: 49667 - DNA, 25 bp, probe
catggtccttgtgatggtattactt

SEQ ID NO: 49668 - DNA, 25 bp, probe
cattcctctctctgtgtatctgtgc

SEQ ID NO: 49669 - DNA, 25 bp, probe
atggtccttgtgatggtattacttt

SEQ ID NO: 49670 - DNA, 25 bp, probe
acaaagaatgaaaccaaatggactc

SEQ ID NO: 49671 - DNA, 25 bp, probe
aatcccttaatgtcattcctctctc

SEQ ID NO: 49672 - DNA, 25 bp, probe
caatcccttaatgtcattcctctct

SEQ ID NO: 49673 - DNA, 25 bp, probe
tttcaagccaatcccttaatgtcat

SEQ ID NO: 49674 - DNA, 25 bp, probe
atcccttaatgtcattcctctctct

SEQ ID NO: 49675 - DNA, 25 bp, probe
tacaaagaatgaaaccaaatggact

SEQ ID NO: 49676 - DNA, 25 bp, probe
ccaatcccttaatgtcattcctctc

SEQ ID NO: 49677 - DNA, 25 bp, probe
gcatggtccttgtgatggtattact

SEQ ID NO: 49678 - DNA, 25 bp, probe
aaagaatgaaaccaaatggactcag

SEQ ID NO: 49679 - DNA, 25 bp, probe
caaagaatgaaaccaaatggactca

SEQ ID NO: 49680 - DNA, 25 bp, probe
ttcaagccaatcccttaatgtcatt

SEQ ID NO: 49681 - DNA, 25 bp, probe
tcccttaatgtcattcctctctctg

SEQ ID NO: 49682 - DNA, 25 bp, probe
ttacaaagaatgaaaccaaatggac

SEQ ID NO: 49683 - DNA, 25 bp, probe
cccttaatgtcattcctctctctgt

SEQ ID NO: 49684 - DNA, 25 bp, probe
tcaagccaatcccttaatgtcattc

SEQ ID NO: 49685 - DNA, 25 bp, probe
ggcattcacctttatgtgttagaaa

SEQ ID NO: 49686 - DNA, 25 bp, probe
aggcattcacctttatgtgttagaa

SEQ ID NO: 49687 - DNA, 25 bp, probe
attcctctctctgtgtatctgtgcc

SEQ ID NO: 49688 - DNA, 25 bp, probe
gaggcattcacctttatgtgttaga

SEQ ID NO: 49689 - DNA, 25 bp, probe
tttcctttcttccttctttactgga

SEQ ID NO: 49690 - DNA, 25 bp, probe
gaagcagctaatgtaataagcactc

SEQ ID NO: 49691 - DNA, 25 bp, probe
gcagctaatgtaataagcactcatg

SEQ ID NO: 49692 - DNA, 25 bp, probe
agcagctaatgtaataagcactcat

SEQ ID NO: 49693 - DNA, 25 bp, probe
tttacaaagaatgaaaccaaatgga

SEQ ID NO: 49694 - DNA, 25 bp, probe
aagcagctaatgtaataagcactca

SEQ ID NO: 49695 - DNA, 25 bp, probe
cagctaatgtaataagcactcatgt

SEQ ID NO: 49696 - DNA, 25 bp, probe
caagccaatcccttaatgtcattcc

SEQ ID NO: 49697 - DNA, 25 bp, probe
aagaatgaaaccaaatggactcagc

SEQ ID NO: 49698 - DNA, 25 bp, probe
aagccaatcccttaatgtcattcct

SEQ ID NO: 49699 - DNA, 25 bp, probe
ggaggcattcacctttatgtgttag

SEQ ID NO: 49700 - DNA, 25 bp, probe
gaccagaaatcaaagatgtcagagc

SEQ ID NO: 49701 - DNA, 25 bp, probe
ggcatggtccttgtgatggtattac

SEQ ID NO: 49702 - DNA, 25 bp, probe
tgtataggtagatgttcagattgct

SEQ ID NO: 49703 - DNA, 25 bp, probe
ttaatccagaataactagcaccagg

SEQ ID NO: 49704 - DNA, 25 bp, probe
ttgtataggtagatgttcagattgc

SEQ ID NO: 49705 - DNA, 25 bp, probe
gtataggtagatgttcagattgctt

SEQ ID NO: 49706 - DNA, 25 bp, probe
agactgtaatgaatctaagcagcat

SEQ ID NO: 49707 - DNA, 25 bp, probe
aagactgtaatgaatctaagcagca

SEQ ID NO: 49708 - DNA, 25 bp, probe
tataagaggctgataattccagtgg

SEQ ID NO: 49709 - DNA, 25 bp, probe
ctcatggagaagttatcagacactc

SEQ ID NO: 49710 - DNA, 25 bp, probe
taagactgtaatgaatctaagcagc

SEQ ID NO: 49711 - DNA, 25 bp, probe
tcatggagaagttatcagacactct

SEQ ID NO: 49712 - DNA, 25 bp, probe
ataagaggctgataattccagtggt

SEQ ID NO: 49713 - DNA, 25 bp, probe
tatgatctcaggttctccttgattg

SEQ ID NO: 49714 - DNA, 25 bp, probe
ctatgatctcaggttctccttgatt

SEQ ID NO: 49715 - DNA, 25 bp, probe
ttgtctgctattcagtcataatcaa

SEQ ID NO: 49716 - DNA, 25 bp, probe
attaatccagaataactagcaccag

SEQ ID NO: 49717 - DNA, 25 bp, probe
cctatgatctcaggttctccttgat

SEQ ID NO: 49718 - DNA, 25 bp, probe
attgtctgctattcagtcataatca

SEQ ID NO: 49719 - DNA, 25 bp, probe
tgattgtctgctattcagtcataat

SEQ ID NO: 49720 - DNA, 25 bp, probe
taagaggctgataattccagtggtc

SEQ ID NO: 49721 - DNA, 25 bp, probe
atgtgactcctatgatctcaggttc

SEQ ID NO: 49722 - DNA, 25 bp, probe
tatacccacacacatacacacatat

SEQ ID NO: 49723 - DNA, 25 bp, probe
atatacccacacacatacacacata

SEQ ID NO: 49724 - DNA, 25 bp, probe
gtctcacatcaatggaaatcttctg

SEQ ID NO: 49725 - DNA, 25 bp, probe
ataggtagatgttcagattgctttg

SEQ ID NO: 49726 - DNA, 25 bp, probe
ctcaccatgattgtctgctattcag

SEQ ID NO: 49727 - DNA, 25 bp, probe
atctatggcaatgtctttaatctcg

SEQ ID NO: 49728 - DNA, 25 bp, probe
gactgtaatgaatctaagcagcatt

SEQ ID NO: 49729 - DNA, 25 bp, probe
ggtctcacatcaatggaaatcttct

SEQ ID NO: 49730 - DNA, 25 bp, probe
ctcctatgatctcaggttctccttg

SEQ ID NO: 49731 - DNA, 25 bp, probe
gtgactcctatgatctcaggttctc

SEQ ID NO: 49732 - DNA, 25 bp, probe
caatggaaatcttctgaggacaatt

SEQ ID NO: 49733 - DNA, 25 bp, probe
tctcttcttgaacactcatgctgaa

SEQ ID NO: 49734 - DNA, 25 bp, probe
ttctcttcttgaacactcatgctga

SEQ ID NO: 49735 - DNA, 25 bp, probe
caccatgattgtctgctattcagtc

SEQ ID NO: 49736 - DNA, 25 bp, probe
aatggaaatcttctgaggacaattc

SEQ ID NO: 49737 - DNA, 25 bp, probe
catgtgactcctatgatctcaggtt

SEQ ID NO: 49738 - DNA, 25 bp, probe
ataactagcaccagggactatgaat

SEQ ID NO: 49739 - DNA, 25 bp, probe
tcaatggaaatcttctgaggacaat

SEQ ID NO: 49740 - DNA, 25 bp, probe
atcaatggaaatcttctgaggacaa

SEQ ID NO: 49741 - DNA, 25 bp, probe
tctcacatcaatggaaatcttctga

SEQ ID NO: 49742 - DNA, 25 bp, probe
aggtagatgttcagattgctttgat

SEQ ID NO: 49743 - DNA, 25 bp, probe
taggtagatgttcagattgctttga

SEQ ID NO: 49744 - DNA, 25 bp, probe
tcctatgatctcaggttctccttga

SEQ ID NO: 49745 - DNA, 25 bp, probe
actcctatgatctcaggttctcctt

SEQ ID NO: 49746 - DNA, 25 bp, probe
tacagtaacaggttatggaatggtc

SEQ ID NO: 49747 - DNA, 25 bp, probe
ctacagtaacaggttatggaatggt

SEQ ID NO: 49748 - DNA, 25 bp, probe
gtaacaggttatggaatggtctctt

SEQ ID NO: 49749 - DNA, 25 bp, probe
agtaacaggttatggaatggtctct

SEQ ID NO: 49750 - DNA, 25 bp, probe
cagtaacaggttatggaatggtctc

SEQ ID NO: 49751 - DNA, 25 bp, probe
tatatgagttggctgattgagactg

SEQ ID NO: 49752 - DNA, 25 bp, probe
ggatatatgagttggctgattgaga

SEQ ID NO: 49753 - DNA, 25 bp, probe
aggatatatgagttggctgattgag

SEQ ID NO: 49754 - DNA, 25 bp, probe
acagtaacaggttatggaatggtct

SEQ ID NO: 49755 - DNA, 25 bp, probe
gatatatgagttggctgattgagac

SEQ ID NO: 49756 - DNA, 25 bp, probe
tgaattgtggtcacgattgtatgaa

SEQ ID NO: 49757 - DNA, 25 bp, probe
aactgaattgtggtcacgattgtat

SEQ ID NO: 49758 - DNA, 25 bp, probe
tatactattcatctcctgtccttca

SEQ ID NO: 49759 - DNA, 25 bp, probe
tactattcatctcctgtccttcagt

SEQ ID NO: 49760 - DNA, 25 bp, probe
ctgaattgtggtcacgattgtatga

SEQ ID NO: 49761 - DNA, 25 bp, probe
actattcatctcctgtccttcagtt

SEQ ID NO: 49762 - DNA, 25 bp, probe
atactattcatctcctgtccttcag

SEQ ID NO: 49763 - DNA, 25 bp, probe
atatatgagttggctgattgagact

SEQ ID NO: 49764 - DNA, 25 bp, probe
tctatactattcatctcctgtcctt

SEQ ID NO: 49765 - DNA, 25 bp, probe
ttctatactattcatctcctgtcct

SEQ ID NO: 49766 - DNA, 25 bp, probe
actgaattgtggtcacgattgtatg

SEQ ID NO: 49767 - DNA, 25 bp, probe
ctatactattcatctcctgtccttc

SEQ ID NO: 49768 - DNA, 25 bp, probe
caactgaattgtggtcacgattgta

SEQ ID NO: 49769 - DNA, 25 bp, probe
caggatatatgagttggctgattga

SEQ ID NO: 49770 - DNA, 25 bp, probe
ttgttcaggatatatgagttggctg

SEQ ID NO: 49771 - DNA, 25 bp, probe
gcctcagcattccaaatagatacta

SEQ ID NO: 49772 - DNA, 25 bp, probe
ccataccaacaaagtcataaagagc

SEQ ID NO: 49773 - DNA, 25 bp, probe
cataccaacaaagtcataaagagca

SEQ ID NO: 49774 - DNA, 25 bp, probe
tgtggcaaagaactggatattaaac

SEQ ID NO: 49775 - DNA, 25 bp, probe
tcatccatttaggtagcaagacata

SEQ ID NO: 49776 - DNA, 25 bp, probe
acccagtaactcgtcatttgattta

SEQ ID NO: 49777 - DNA, 25 bp, probe
gtggcaaagaactggatattaaact

SEQ ID NO: 49778 - DNA, 25 bp, probe
attaacacttgacattattggaccc

SEQ ID NO: 49779 - DNA, 25 bp, probe
acttatgtggcaaagaactggatat

SEQ ID NO: 49780 - DNA, 25 bp, probe
tacttatgtggcaaagaactggata

SEQ ID NO: 49781 - DNA, 25 bp, probe
tattaacacttgacattattggacc

SEQ ID NO: 49782 - DNA, 25 bp, probe
tcagcattccaaatagatactacct

SEQ ID NO: 49783 - DNA, 25 bp, probe
ttacttatgtggcaaagaactggat

SEQ ID NO: 49784 - DNA, 25 bp, probe
ttgagactgcaacaactacatctat

SEQ ID NO: 49785 - DNA, 25 bp, probe
attgagactgcaacaactacatcta

SEQ ID NO: 49786 - DNA, 25 bp, probe
cccagtaactcgtcatttgatttat

SEQ ID NO: 49787 - DNA, 25 bp, probe
tttacttatgtggcaaagaactgga

SEQ ID NO: 49788 - DNA, 25 bp, probe
tgagactgcaacaactacatctata

SEQ ID NO: 49789 - DNA, 25 bp, probe
aacccagtaactcgtcatttgattt

SEQ ID NO: 49790 - DNA, 25 bp, probe
aagcattcatcattactgtggacat

SEQ ID NO: 49791 - DNA, 25 bp, probe
gagaagcattcatcattactgtgga

SEQ ID NO: 49792 - DNA, 25 bp, probe
agaagcattcatcattactgtggac

SEQ ID NO: 49793 - DNA, 25 bp, probe
gaagcattcatcattactgtggaca

SEQ ID NO: 49794 - DNA, 25 bp, probe
cgagaagcattcatcattactgtgg

SEQ ID NO: 49795 - DNA, 25 bp, probe
agcattcatcattactgtggacatg

SEQ ID NO: 49796 - DNA, 25 bp, probe
cctggatcgagaacataattagtga

SEQ ID NO: 49797 - DNA, 25 bp, probe
tcgagaagcattcatcattactgtg

SEQ ID NO: 49798 - DNA, 25 bp, probe
cattcatcattactgtggacatggc

SEQ ID NO: 49799 - DNA, 25 bp, probe
gcattcatcattactgtggacatgg

SEQ ID NO: 49800 - DNA, 25 bp, probe
ctggatcgagaacataattagtgat

SEQ ID NO: 49801 - DNA, 25 bp, probe
tagatagtgaaacagagaggtggtt

SEQ ID NO: 49802 - DNA, 25 bp, probe
tttaattccagccttacccattgac

SEQ ID NO: 49803 - DNA, 25 bp, probe
gtttaattccagccttacccattga

SEQ ID NO: 49804 - DNA, 25 bp, probe
agtttaattccagccttacccattg

SEQ ID NO: 49805 - DNA, 25 bp, probe
cagtttaattccagccttacccatt

SEQ ID NO: 49806 - DNA, 25 bp, probe
tttagaaatgcctgtgaagaccttg

SEQ ID NO: 49807 - DNA, 25 bp, probe
atttctccacttgccagtttaattc

SEQ ID NO: 49808 - DNA, 25 bp, probe
attcatcattactgtggacatggca

SEQ ID NO: 49809 - DNA, 25 bp, probe
catttctccacttgccagtttaatt

SEQ ID NO: 49810 - DNA, 25 bp, probe
ctagatagtgaaacagagaggtggt

SEQ ID NO: 49811 - DNA, 25 bp, probe
tcatttctccacttgccagtttaat

SEQ ID NO: 49812 - DNA, 25 bp, probe
caggtcagtatggagtctacacaaa

SEQ ID NO: 49813 - DNA, 25 bp, probe
tggatcgagaacataattagtgatt

SEQ ID NO: 49814 - DNA, 25 bp, probe
gaagcaggtcagtatggagtctaca

SEQ ID NO: 49815 - DNA, 25 bp, probe
tgtcactgctcaaattacatttcat

SEQ ID NO: 49816 - DNA, 25 bp, probe
ttaattccagccttacccattgact

SEQ ID NO: 49817 - DNA, 25 bp, probe
aagcaggtcagtatggagtctacac

SEQ ID NO: 49818 - DNA, 25 bp, probe
gtcatttctccacttgccagtttaa

SEQ ID NO: 49819 - DNA, 25 bp, probe
tttctccacttgccagtttaattcc

SEQ ID NO: 49820 - DNA, 25 bp, probe
gtcactgctcaaattacatttcatt

SEQ ID NO: 49821 - DNA, 25 bp, probe
taattccagccttacccattgactc

SEQ ID NO: 49822 - DNA, 25 bp, probe
cttgccagtttaattccagccttac

SEQ ID NO: 49823 - DNA, 25 bp, probe
gcaggtcagtatggagtctacacaa

SEQ ID NO: 49824 - DNA, 25 bp, probe
ccctggatcgagaacataattagtg

SEQ ID NO: 49825 - DNA, 25 bp, probe
tccctggatcgagaacataattagt

SEQ ID NO: 49826 - DNA, 25 bp, probe
ttccctggatcgagaacataattag

SEQ ID NO: 49827 - DNA, 25 bp, probe
actgctcaaattacatttcattacc

SEQ ID NO: 49828 - DNA, 25 bp, probe
actatattccctggatcgagaacat

SEQ ID NO: 49829 - DNA, 25 bp, probe
atactggctgttggcatttctgtaa

SEQ ID NO: 49830 - DNA, 25 bp, probe
attccctggatcgagaacataatta

SEQ ID NO: 49831 - DNA, 25 bp, probe
tattccctggatcgagaacataatt

SEQ ID NO: 49832 - DNA, 25 bp, probe
ggaagcaggtcagtatggagtctac

SEQ ID NO: 49833 - DNA, 25 bp, probe
aactatattccctggatcgagaaca

SEQ ID NO: 49834 - DNA, 25 bp, probe
atgtctacctatgaactacggactg

SEQ ID NO: 49835 - DNA, 25 bp, probe
aacaaggagttcattcatctcaata

SEQ ID NO: 49836 - DNA, 25 bp, probe
acaaggagttcattcatctcaatat

SEQ ID NO: 49837 - DNA, 25 bp, probe
catgtctacctatgaactacggact

SEQ ID NO: 49838 - DNA, 25 bp, probe
gaccttgaccttcagaacttctctt

SEQ ID NO: 49839 - DNA, 25 bp, probe
aattcaagaagctaagcctgatctc

SEQ ID NO: 49840 - DNA, 25 bp, probe
caccatgtctacctatgaactacgg

SEQ ID NO: 49841 - DNA, 25 bp, probe
accttgaccttcagaacttctcttg

SEQ ID NO: 49842 - DNA, 25 bp, probe
accatgtctacctatgaactacgga

SEQ ID NO: 49843 - DNA, 25 bp, probe
cttcagaacttctcttggtgtggaa

SEQ ID NO: 49844 - DNA, 25 bp, probe
ggcaccatgtctacctatgaactac

SEQ ID NO: 49845 - DNA, 25 bp, probe
atctgggaagaatgaaatgaactca

SEQ ID NO: 49846 - DNA, 25 bp, probe
ccatgtctacctatgaactacggac

SEQ ID NO: 49847 - DNA, 25 bp, probe
ttcagaacttctcttggtgtggaac

SEQ ID NO: 49848 - DNA, 25 bp, probe
tgatctgggaagaatgaaatgaact

SEQ ID NO: 49849 - DNA, 25 bp, probe
gcaccatgtctacctatgaactacg

SEQ ID NO: 49850 - DNA, 25 bp, probe
gatctgggaagaatgaaatgaactc

SEQ ID NO: 49851 - DNA, 25 bp, probe
atttgacaatgaacatctgaggctg

SEQ ID NO: 49852 - DNA, 25 bp, probe
ttgatctgggaagaatgaaatgaac

SEQ ID NO: 49853 - DNA, 25 bp, probe
cttgatctgggaagaatgaaatgaa

SEQ ID NO: 49854 - DNA, 25 bp, probe
ccttgaccttcagaacttctcttgg

SEQ ID NO: 49855 - DNA, 25 bp, probe
tctgggaagaatgaaatgaactcag

SEQ ID NO: 49856 - DNA, 25 bp, probe
cttgaccttcagaacttctcttggt

SEQ ID NO: 49857 - DNA, 25 bp, probe
ctctcagtacaaagaacaaggagtt

SEQ ID NO: 49858 - DNA, 25 bp, probe
attcaagaagctaagcctgatctcc

SEQ ID NO: 49859 - DNA, 25 bp, probe
agaagctaagcctgatctcctgtaa

SEQ ID NO: 49860 - DNA, 25 bp, probe
aagaagctaagcctgatctcctgta

SEQ ID NO: 49861 - DNA, 25 bp, probe
catcaaattcaagaagctaagcctg

SEQ ID NO: 49862 - DNA, 25 bp, probe
gacatcaaattcaagaagctaagcc

SEQ ID NO: 49863 - DNA, 25 bp, probe
ggacatcaaattcaagaagctaagc

SEQ ID NO: 49864 - DNA, 25 bp, probe
aggacatcaaattcaagaagctaag

SEQ ID NO: 49865 - DNA, 25 bp, probe
ttgaccttcagaacttctcttggtg

SEQ ID NO: 49866 - DNA, 25 bp, probe
acatcaaattcaagaagctaagcct

SEQ ID NO: 49867 - DNA, 25 bp, probe
aaggacatcaaattcaagaagctaa

SEQ ID NO: 49868 - DNA, 25 bp, probe
aaaggacatcaaattcaagaagcta

SEQ ID NO: 49869 - DNA, 25 bp, probe
tgtctacctatgaactacggactgc

SEQ ID NO: 49870 - DNA, 25 bp, probe
aaattcaagaagctaagcctgatct

SEQ ID NO: 49871 - DNA, 25 bp, probe
caaattcaagaagctaagcctgatc

SEQ ID NO: 49872 - DNA, 25 bp, probe
caaggagttcattcatctcaatata

SEQ ID NO: 49873 - DNA, 25 bp, probe
tcaaattcaagaagctaagcctgat

SEQ ID NO: 49874 - DNA, 25 bp, probe
atcaaattcaagaagctaagcctga

SEQ ID NO: 49875 - DNA, 25 bp, probe
gggaagaatgaaatgaactcagcta

SEQ ID NO: 49876 - DNA, 25 bp, probe
ctgggaagaatgaaatgaactcagc

SEQ ID NO: 49877 - DNA, 25 bp, probe
ggaccttgaccttcagaacttctct

SEQ ID NO: 49878 - DNA, 25 bp, probe
ttgattgtcttgtcataccttggag

SEQ ID NO: 49879 - DNA, 25 bp, probe
gttgattgtcttgtcataccttgga

SEQ ID NO: 49880 - DNA, 25 bp, probe
tatgcggttgattgtcttgtcatac

SEQ ID NO: 49881 - DNA, 25 bp, probe
gtatgcggttgattgtcttgtcata

SEQ ID NO: 49882 - DNA, 25 bp, probe
catctgtatgcggttgattgtcttg

SEQ ID NO: 49883 - DNA, 25 bp, probe
atctatttcctattatgggtgtgcc

SEQ ID NO: 49884 - DNA, 25 bp, probe
aacctatcatttgtagacctttgct

SEQ ID NO: 49885 - DNA, 25 bp, probe
cacatcctttgcctttattctgaaa

SEQ ID NO: 49886 - DNA, 25 bp, probe
gactctcctctttatttactcacgg

SEQ ID NO: 49887 - DNA, 25 bp, probe
tatcctgcactgacacaacaattaa

SEQ ID NO: 49888 - DNA, 25 bp, probe
gacctttgctatttctcagacattg

SEQ ID NO: 49889 - DNA, 25 bp, probe
atctgtatgcggttgattgtcttgt

SEQ ID NO: 49890 - DNA, 25 bp, probe
acctatcatttgtagacctttgcta

SEQ ID NO: 49891 - DNA, 25 bp, probe
ctgcactgacacaacaattaatgag

SEQ ID NO: 49892 - DNA, 25 bp, probe
tttgctatttctcagacattgttcc

SEQ ID NO: 49893 - DNA, 25 bp, probe
cctttgctatttctcagacattgtt

SEQ ID NO: 49894 - DNA, 25 bp, probe
ttcacacatcctttgcctttattct

SEQ ID NO: 49895 - DNA, 25 bp, probe
gttcacacatcctttgcctttattc

SEQ ID NO: 49896 - DNA, 25 bp, probe
acatcctttgcctttattctgaaat

SEQ ID NO: 49897 - DNA, 25 bp, probe
ctatcctgcactgacacaacaatta

SEQ ID NO: 49898 - DNA, 25 bp, probe
ttctgatagggaacattggattgat

SEQ ID NO: 49899 - DNA, 25 bp, probe
attctgatagggaacattggattga

SEQ ID NO: 49900 - DNA, 25 bp, probe
acacatcctttgcctttattctgaa

SEQ ID NO: 49901 - DNA, 25 bp, probe
acctttgctatttctcagacattgt

SEQ ID NO: 49902 - DNA, 25 bp, probe
tctgatagggaacattggattgatg

SEQ ID NO: 49903 - DNA, 25 bp, probe
atcctgcactgacacaacaattaat

SEQ ID NO: 49904 - DNA, 25 bp, probe
agacctttgctatttctcagacatt

SEQ ID NO: 49905 - DNA, 25 bp, probe
cgttggtcactgagtttattctatt

SEQ ID NO: 49906 - DNA, 25 bp, probe
gtagacctttgctatttctcagaca

SEQ ID NO: 49907 - DNA, 25 bp, probe
tgtagacctttgctatttctcagac

SEQ ID NO: 49908 - DNA, 25 bp, probe
ttgtagacctttgctatttctcaga

SEQ ID NO: 49909 - DNA, 25 bp, probe
tagacctttgctatttctcagacat

SEQ ID NO: 49910 - DNA, 25 bp, probe
aatctatttcctattatgggtgtgc

SEQ ID NO: 49911 - DNA, 25 bp, probe
caacaattaatgagtggctcctctc

SEQ ID NO: 49912 - DNA, 25 bp, probe
caacctatcatttgtagacctttgc

SEQ ID NO: 49913 - DNA, 25 bp, probe
gcaacctatcatttgtagacctttg

SEQ ID NO: 49914 - DNA, 25 bp, probe
agcaacctatcatttgtagaccttt

SEQ ID NO: 49915 - DNA, 25 bp, probe
tgattgtcttgtcataccttggagg

SEQ ID NO: 49916 - DNA, 25 bp, probe
tagcaacctatcatttgtagacctt

SEQ ID NO: 49917 - DNA, 25 bp, probe
ttagcaacctatcatttgtagacct

SEQ ID NO: 49918 - DNA, 25 bp, probe
cacacatcctttgcctttattctga

SEQ ID NO: 49919 - DNA, 25 bp, probe
tcacacatcctttgcctttattctg

SEQ ID NO: 49920 - DNA, 25 bp, probe
ggttgattgtcttgtcataccttgg

SEQ ID NO: 49921 - DNA, 25 bp, probe
tttgtagacctttgctatttctcag

SEQ ID NO: 49922 - DNA, 25 bp, probe
catattcaacgtaccattcaccttc

SEQ ID NO: 49923 - DNA, 25 bp, probe
atcatattcaacgtaccattcacct

SEQ ID NO: 49924 - DNA, 25 bp, probe
tattcaacgtaccattcaccttcat

SEQ ID NO: 49925 - DNA, 25 bp, probe
atattcaacgtaccattcaccttca

SEQ ID NO: 49926 - DNA, 25 bp, probe
tcatattcaacgtaccattcacctt

SEQ ID NO: 49927 - DNA, 25 bp, probe
tgccatatcatattcaacgtaccat

SEQ ID NO: 49928 - DNA, 25 bp, probe
tgtcattgtttgttggctttatcat

SEQ ID NO: 49929 - DNA, 25 bp, probe
gctttgaccctctcctatatttctt

SEQ ID NO: 49930 - DNA, 25 bp, probe
tcattgtttgttggctttatcatcc

SEQ ID NO: 49931 - DNA, 25 bp, probe
gtttgtgtgtgtaggtatttggatt

SEQ ID NO: 49932 - DNA, 25 bp, probe
ttgctttgaccctctcctatatttc

SEQ ID NO: 49933 - DNA, 25 bp, probe
gccatatcatattcaacgtaccatt

SEQ ID NO: 49934 - DNA, 25 bp, probe
gtcattgtttgttggctttatcatc

SEQ ID NO: 49935 - DNA, 25 bp, probe
gttgctttgaccctctcctatattt

SEQ ID NO: 49936 - DNA, 25 bp, probe
catgccatatcatattcaacgtacc

SEQ ID NO: 49937 - DNA, 25 bp, probe
atgccatatcatattcaacgtacca

SEQ ID NO: 49938 - DNA, 25 bp, probe
gtgtcattgtttgttggctttatca

SEQ ID NO: 49939 - DNA, 25 bp, probe
tgtgtcattgtttgttggctttatc

SEQ ID NO: 49940 - DNA, 25 bp, probe
attcaacgtaccattcaccttcatt

SEQ ID NO: 49941 - DNA, 25 bp, probe
tttgtgtgtgtaggtatttggattt

SEQ ID NO: 49942 - DNA, 25 bp, probe
tgctttgaccctctcctatatttct

SEQ ID NO: 49943 - DNA, 25 bp, probe
atgaaactaaaccctgtgattctgt

SEQ ID NO: 49944 - DNA, 25 bp, probe
atgtgtcattgtttgttggctttat

SEQ ID NO: 49945 - DNA, 25 bp, probe
ttatgtgtcattgtttgttggcttt

SEQ ID NO: 49946 - DNA, 25 bp, probe
attatgtgtcattgtttgttggctt

SEQ ID NO: 49947 - DNA, 25 bp, probe
tatgtgtcattgtttgttggcttta

SEQ ID NO: 49948 - DNA, 25 bp, probe
aatgaaactaaaccctgtgattctg

SEQ ID NO: 49949 - DNA, 25 bp, probe
caatgaaactaaaccctgtgattct

SEQ ID NO: 49950 - DNA, 25 bp, probe
actaaaccctgtgattctgtcctta

SEQ ID NO: 49951 - DNA, 25 bp, probe
tatcatattcaacgtaccattcacc

SEQ ID NO: 49952 - DNA, 25 bp, probe
attgtttgttggctttatcatccct

SEQ ID NO: 49953 - DNA, 25 bp, probe
cattgtttgttggctttatcatccc

SEQ ID NO: 49954 - DNA, 25 bp, probe
tcatgccatatcatattcaacgtac

SEQ ID NO: 49955 - DNA, 25 bp, probe
ggtttgtgtgtgtaggtatttggat

SEQ ID NO: 49956 - DNA, 25 bp, probe
cattatgtgtcattgtttgttggct

SEQ ID NO: 49957 - DNA, 25 bp, probe
tgaaactaaaccctgtgattctgtc

SEQ ID NO: 49958 - DNA, 25 bp, probe
tgtttgttggctttatcatcccttt

SEQ ID NO: 49959 - DNA, 25 bp, probe
ttgtttgttggctttatcatccctt

SEQ ID NO: 49960 - DNA, 25 bp, probe
taaaccctgtgattctgtccttaga

SEQ ID NO: 49961 - DNA, 25 bp, probe
attgttgctttgaccctctcctata

SEQ ID NO: 49962 - DNA, 25 bp, probe
tgttgctttgaccctctcctatatt

SEQ ID NO: 49963 - DNA, 25 bp, probe
ttgttgctttgaccctctcctatat

SEQ ID NO: 49964 - DNA, 25 bp, probe
tggtcttgcattatgtgtcattgtt

SEQ ID NO: 49965 - DNA, 25 bp, probe
ttggtcttgcattatgtgtcattgt

SEQ ID NO: 49966 - DNA, 25 bp, probe
cttattccttggtatggtgacagtg

SEQ ID NO: 49967 - DNA, 25 bp, probe
tgaggaatacagtgagcagatatgg

SEQ ID NO: 49968 - DNA, 25 bp, probe
ttattccttggtatggtgacagtgt

SEQ ID NO: 49969 - DNA, 25 bp, probe
ctgaggaatacagtgagcagatatg

SEQ ID NO: 49970 - DNA, 25 bp, probe
gcttattccttggtatggtgacagt

SEQ ID NO: 49971 - DNA, 25 bp, probe
taacctagacaaggattccgcttat

SEQ ID NO: 49972 - DNA, 25 bp, probe
gattccgcttattccttggtatggt

SEQ ID NO: 49973 - DNA, 25 bp, probe
ttaacctagacaaggattccgctta

SEQ ID NO: 49974 - DNA, 25 bp, probe
ttacttgtcactttctttaccctgt

SEQ ID NO: 49975 - DNA, 25 bp, probe
tacttgtcactttctttaccctgtc

SEQ ID NO: 49976 - DNA, 25 bp, probe
tcactttctttaccctgtctcaata

SEQ ID NO: 49977 - DNA, 25 bp, probe
gtcactttctttaccctgtctcaat

SEQ ID NO: 49978 - DNA, 25 bp, probe
attccgcttattccttggtatggtg

SEQ ID NO: 49979 - DNA, 25 bp, probe
aacctagacaaggattccgcttatt

SEQ ID NO: 49980 - DNA, 25 bp, probe
attacttgtcactttctttaccctg

SEQ ID NO: 49981 - DNA, 25 bp, probe
cttgtcactttctttaccctgtctc

SEQ ID NO: 49982 - DNA, 25 bp, probe
ctgttgtaggcttgttctgttgagt

SEQ ID NO: 49983 - DNA, 25 bp, probe
acctagacaaggattccgcttattc

SEQ ID NO: 49984 - DNA, 25 bp, probe
cactttctttaccctgtctcaatat

SEQ ID NO: 49985 - DNA, 25 bp, probe
tgtcactttctttaccctgtctcaa

SEQ ID NO: 49986 - DNA, 25 bp, probe
ttgtcactttctttaccctgtctca

SEQ ID NO: 49987 - DNA, 25 bp, probe
acttgtcactttctttaccctgtct

SEQ ID NO: 49988 - DNA, 25 bp, probe
aattacttgtcactttctttaccct

SEQ ID NO: 49989 - DNA, 25 bp, probe
tgttgtaggcttgttctgttgagtg

SEQ ID NO: 49990 - DNA, 25 bp, probe
cgcttattccttggtatggtgacag

SEQ ID NO: 49991 - DNA, 25 bp, probe
tattccttggtatggtgacagtgtc

SEQ ID NO: 49992 - DNA, 25 bp, probe
gctatttacttccatgcttctcctt

SEQ ID NO: 49993 - DNA, 25 bp, probe
aaggctatttacttccatgcttctc

SEQ ID NO: 49994 - DNA, 25 bp, probe
ctatttacttccatgcttctccttt

SEQ ID NO: 49995 - DNA, 25 bp, probe
gaggaatacagtgagcagatatggg

SEQ ID NO: 49996 - DNA, 25 bp, probe
cctagacaaggattccgcttattcc

SEQ ID NO: 49997 - DNA, 25 bp, probe
ttccgcttattccttggtatggtga

SEQ ID NO: 49998 - DNA, 25 bp, probe
atgaagcattaattacttgtcactt

SEQ ID NO: 49999 - DNA, 25 bp, probe
gttgtaggcttgttctgttgagtgg

SEQ ID NO: 50000 - DNA, 25 bp, probe
ttattctgaggaatacagtgagcag

SEQ ID NO: 50001 - DNA, 25 bp, probe
ggattccgcttattccttggtatgg

SEQ ID NO: 50002 - DNA, 25 bp, probe
ggctatttacttccatgcttctcct

SEQ ID NO: 50003 - DNA, 25 bp, probe
aggctatttacttccatgcttctcc

SEQ ID NO: 50004 - DNA, 25 bp, probe
gaatacagtgagcagatatgggcag

SEQ ID NO: 50005 - DNA, 25 bp, probe
tttaacctagacaaggattccgctt

SEQ ID NO: 50006 - DNA, 25 bp, probe
actttctttaccctgtctcaatatt

SEQ ID NO: 50007 - DNA, 25 bp, probe
tccgcttattccttggtatggtgac

SEQ ID NO: 50008 - DNA, 25 bp, probe
aagtgtgtgcaattaaagatcaaat

SEQ ID NO: 50009 - DNA, 25 bp, probe
tatgaagcattaattacttgtcact

SEQ ID NO: 50010 - DNA, 25 bp, probe
aattccatcttctgtatatgtgcca

SEQ ID NO: 50011 - DNA, 25 bp, probe
ccatcttctgtatatgtgccagtat

SEQ ID NO: 50012 - DNA, 25 bp, probe
attccatcttctgtatatgtgccag

SEQ ID NO: 50013 - DNA, 25 bp, probe
actaacagtaacaatctgagttcca

SEQ ID NO: 50014 - DNA, 25 bp, probe
tccatcttctgtatatgtgccagta

SEQ ID NO: 50015 - DNA, 25 bp, probe
ctaacagtaacaatctgagttccat

SEQ ID NO: 50016 - DNA, 25 bp, probe
catcttctgtatatgtgccagtatt

SEQ ID NO: 50017 - DNA, 25 bp, probe
ttccatcttctgtatatgtgccagt

SEQ ID NO: 50018 - DNA, 25 bp, probe
taacagtaacaatctgagttccatt

SEQ ID NO: 50019 - DNA, 25 bp, probe
ttcaactaacagtaacaatctgagt

SEQ ID NO: 50020 - DNA, 25 bp, probe
ccattacatacaaagacaggaggat

SEQ ID NO: 50021 - DNA, 25 bp, probe
tatacattactgaaatcctgcgagc

SEQ ID NO: 50022 - DNA, 25 bp, probe
agttacctcagaatttggattggat

SEQ ID NO: 50023 - DNA, 25 bp, probe
agtgtctgttaaattgctccattac

SEQ ID NO: 50024 - DNA, 25 bp, probe
tagttacctcagaatttggattgga

SEQ ID NO: 50025 - DNA, 25 bp, probe
ccagaagttaaggaaatcaagcata

SEQ ID NO: 50026 - DNA, 25 bp, probe
gttacctcagaatttggattggatt

SEQ ID NO: 50027 - DNA, 25 bp, probe
taaggaaatcaagcataacattggc

SEQ ID NO: 50028 - DNA, 25 bp, probe
cattacatacaaagacaggaggatt

SEQ ID NO: 50029 - DNA, 25 bp, probe
aaattccatcttctgtatatgtgcc

SEQ ID NO: 50030 - DNA, 25 bp, probe
atatacattactgaaatcctgcgag

SEQ ID NO: 50031 - DNA, 25 bp, probe
attgctccattacatacaaagacag

SEQ ID NO: 50032 - DNA, 25 bp, probe
tgtgccagaagttaaggaaatcaag

SEQ ID NO: 50033 - DNA, 25 bp, probe
ctagttacctcagaatttggattgg

SEQ ID NO: 50034 - DNA, 25 bp, probe
ttacctcagaatttggattggattt

SEQ ID NO: 50035 - DNA, 25 bp, probe
atcctgcgagcaagaatttcatata

SEQ ID NO: 50036 - DNA, 25 bp, probe
ttgctccattacatacaaagacagg

SEQ ID NO: 50037 - DNA, 25 bp, probe
tcctgcgagcaagaatttcatatat

SEQ ID NO: 50038 - DNA, 25 bp, probe
aattgctccattacatacaaagaca

SEQ ID NO: 50039 - DNA, 25 bp, probe
gtgtgccagaagttaaggaaatcaa

SEQ ID NO: 50040 - DNA, 25 bp, probe
aatatacattactgaaatcctgcga

SEQ ID NO: 50041 - DNA, 25 bp, probe
gtgtctgttaaattgctccattaca

SEQ ID NO: 50042 - DNA, 25 bp, probe
cctgcgagcaagaatttcatatata

SEQ ID NO: 50043 - DNA, 25 bp, probe
gccagaagttaaggaaatcaagcat

SEQ ID NO: 50044 - DNA, 25 bp, probe
aatcctgcgagcaagaatttcatat

SEQ ID NO: 50045 - DNA, 25 bp, probe
acaattcaactaacagtaacaatct

SEQ ID NO: 50046 - DNA, 25 bp, probe
cagtgtctgttaaattgctccatta

SEQ ID NO: 50047 - DNA, 25 bp, probe
agaaacctgtaatcagtgtctgtta

SEQ ID NO: 50048 - DNA, 25 bp, probe
tgtctgttaaattgctccattacat

SEQ ID NO: 50049 - DNA, 25 bp, probe
atcagtgtctgttaaattgctccat

SEQ ID NO: 50050 - DNA, 25 bp, probe
taatcagtgtctgttaaattgctcc

SEQ ID NO: 50051 - DNA, 25 bp, probe
attcaactaacagtaacaatctgag

SEQ ID NO: 50052 - DNA, 25 bp, probe
tcagtgtctgttaaattgctccatt

SEQ ID NO: 50053 - DNA, 25 bp, probe
aatcagtgtctgttaaattgctcca

SEQ ID NO: 50054 - DNA, 25 bp, probe
cctgggcaaactactccctacttaa

SEQ ID NO: 50055 - DNA, 25 bp, probe
ctgggcaaactactccctacttaag

SEQ ID NO: 50056 - DNA, 25 bp, probe
acccgtgtcacatcgtgaatattta

SEQ ID NO: 50057 - DNA, 25 bp, probe
ctacttaagggaataggccaggctc

SEQ ID NO: 50058 - DNA, 25 bp, probe
tcctgggcaaactactccctactta

SEQ ID NO: 50059 - DNA, 25 bp, probe
tgggcaaactactccctacttaagg

SEQ ID NO: 50060 - DNA, 25 bp, probe
gacccgtgtcacatcgtgaatattt

SEQ ID NO: 50061 - DNA, 25 bp, probe
tctcttcggagacccaggatttagg

SEQ ID NO: 50062 - DNA, 25 bp, probe
tacttaagggaataggccaggctcc

SEQ ID NO: 50063 - DNA, 25 bp, probe
ggacccgtgtcacatcgtgaatatt

SEQ ID NO: 50064 - DNA, 25 bp, probe
cctacttaagggaataggccaggct

SEQ ID NO: 50065 - DNA, 25 bp, probe
ccttactacagcatctataacagca

SEQ ID NO: 50066 - DNA, 25 bp, probe
accttactacagcatctataacagc

SEQ ID NO: 50067 - DNA, 25 bp, probe
ttactacagcatctataacagcagc

SEQ ID NO: 50068 - DNA, 25 bp, probe
ggattgaaccttactacagcatcta

SEQ ID NO: 50069 - DNA, 25 bp, probe
cttactacagcatctataacagcag

SEQ ID NO: 50070 - DNA, 25 bp, probe
aacactcggattgaaccttactaca

SEQ ID NO: 50071 - DNA, 25 bp, probe
gattgaaccttactacagcatctat

SEQ ID NO: 50072 - DNA, 25 bp, probe
caacactcggattgaaccttactac

SEQ ID NO: 50073 - DNA, 25 bp, probe
tactacagcatctataacagcagcc

SEQ ID NO: 50074 - DNA, 25 bp, probe
acactcggattgaaccttactacag

SEQ ID NO: 50075 - DNA, 25 bp, probe
aaccttactacagcatctataacag

SEQ ID NO: 50076 - DNA, 25 bp, probe
gaaccttactacagcatctataaca

SEQ ID NO: 50077 - DNA, 25 bp, probe
tgaaccttactacagcatctataac

SEQ ID NO: 50078 - DNA, 25 bp, probe
ttattctaacttgagatcagtggcg

SEQ ID NO: 50079 - DNA, 25 bp, probe
ctcggattgaaccttactacagcat

SEQ ID NO: 50080 - DNA, 25 bp, probe
cggattgaaccttactacagcatct

SEQ ID NO: 50081 - DNA, 25 bp, probe
tcggattgaaccttactacagcatc

SEQ ID NO: 50082 - DNA, 25 bp, probe
agtcatggaggctataggatcttat

SEQ ID NO: 50083 - DNA, 25 bp, probe
aatgacttagtgcaggaatatgaca

SEQ ID NO: 50084 - DNA, 25 bp, probe
atgacttagtgcaggaatatgacag

SEQ ID NO: 50085 - DNA, 25 bp, probe
tctgttgatttgctttgtagtttgt

SEQ ID NO: 50086 - DNA, 25 bp, probe
tcatggaggctataggatcttatgt

SEQ ID NO: 50087 - DNA, 25 bp, probe
gtcatggaggctataggatcttatg

SEQ ID NO: 50088 - DNA, 25 bp, probe
aagtcatggaggctataggatctta

SEQ ID NO: 50089 - DNA, 25 bp, probe
ttgaaccttactacagcatctataa

SEQ ID NO: 50090 - DNA, 25 bp, probe
tgttgatttgctttgtagtttgttg

SEQ ID NO: 50091 - DNA, 25 bp, probe
ttgatttgctttgtagtttgttgac

SEQ ID NO: 50092 - DNA, 25 bp, probe
gttgatttgctttgtagtttgttga

SEQ ID NO: 50093 - DNA, 25 bp, probe
ctgttgatttgctttgtagtttgtt

SEQ ID NO: 50094 - DNA, 25 bp, probe
tattctaacttgagatcagtggcgg

SEQ ID NO: 50095 - DNA, 25 bp, probe
attgaaccttactacagcatctata

SEQ ID NO: 50096 - DNA, 25 bp, probe
ttatctccaaagccacagaagaaat

SEQ ID NO: 50097 - DNA, 25 bp, probe
catggaggctataggatcttatgta

SEQ ID NO: 50098 - DNA, 25 bp, probe
atctgttgatttgctttgtagtttg

SEQ ID NO: 50099 - DNA, 25 bp, probe
cactcggattgaaccttactacagc

SEQ ID NO: 50100 - DNA, 25 bp, probe
tatctccaaagccacagaagaaatt

SEQ ID NO: 50101 - DNA, 25 bp, probe
agtatctgttgatttgctttgtagt

SEQ ID NO: 50102 - DNA, 25 bp, probe
caacagaaacaaatcctcccatcat

SEQ ID NO: 50103 - DNA, 25 bp, probe
taatgacttagtgcaggaatatgac

SEQ ID NO: 50104 - DNA, 25 bp, probe
gttatctccaaagccacagaagaaa

SEQ ID NO: 50105 - DNA, 25 bp, probe
atggaggctataggatcttatgtaa

SEQ ID NO: 50106 - DNA, 25 bp, probe
tgatttgctttgtagtttgttgaca

SEQ ID NO: 50107 - DNA, 25 bp, probe
ttgctttgtagtttgttgacatctt

SEQ ID NO: 50108 - DNA, 25 bp, probe
tttgctttgtagtttgttgacatct

SEQ ID NO: 50109 - DNA, 25 bp, probe
gtaacaagaatggactgtggtatca

SEQ ID NO: 50110 - DNA, 25 bp, probe
tgtaacaagaatggactgtggtatc

SEQ ID NO: 50111 - DNA, 25 bp, probe
ctgtaacaagaatggactgtggtat

SEQ ID NO: 50112 - DNA, 25 bp, probe
taacaagaatggactgtggtatcag

SEQ ID NO: 50113 - DNA, 25 bp, probe
aagaatggactgtggtatcagattg

SEQ ID NO: 50114 - DNA, 25 bp, probe
caagaatggactgtggtatcagatt

SEQ ID NO: 50115 - DNA, 25 bp, probe
acaagaatggactgtggtatcagat

SEQ ID NO: 50116 - DNA, 25 bp, probe
aacaagaatggactgtggtatcaga

SEQ ID NO: 50117 - DNA, 25 bp, probe
aatggactgtggtatcagattggag

SEQ ID NO: 50118 - DNA, 25 bp, probe
gaatggactgtggtatcagattgga

SEQ ID NO: 50119 - DNA, 25 bp, probe
agaatggactgtggtatcagattgg

SEQ ID NO: 50120 - DNA, 25 bp, probe
cctgtaacaagaatggactgtggta

SEQ ID NO: 50121 - DNA, 25 bp, probe
gttctcttctgtcttgtttggtaat

SEQ ID NO: 50122 - DNA, 25 bp, probe
ggttctcttctgtcttgtttggtaa

SEQ ID NO: 50123 - DNA, 25 bp, probe
taataaacacattccagttgatgcc

SEQ ID NO: 50124 - DNA, 25 bp, probe
gtaataaacacattccagttgatgc

SEQ ID NO: 50125 - DNA, 25 bp, probe
ataaacacattccagttgatgcctt

SEQ ID NO: 50126 - DNA, 25 bp, probe
aataaacacattccagttgatgcct

SEQ ID NO: 50127 - DNA, 25 bp, probe
tggttctcttctgtcttgtttggta

SEQ ID NO: 50128 - DNA, 25 bp, probe
aggtcgccatcataaacaactctat

SEQ ID NO: 50129 - DNA, 25 bp, probe
ggtaataaacacattccagttgatg

SEQ ID NO: 50130 - DNA, 25 bp, probe
tctacaccaatatcagccaccactt

SEQ ID NO: 50131 - DNA, 25 bp, probe
cctactacacccgttacttcgtatc

SEQ ID NO: 50132 - DNA, 25 bp, probe
tctcttctgtcttgtttggtaataa

SEQ ID NO: 50133 - DNA, 25 bp, probe
ttctcttctgtcttgtttggtaata

SEQ ID NO: 50134 - DNA, 25 bp, probe
atggactgtggtatcagattggagt

SEQ ID NO: 50135 - DNA, 25 bp, probe
taaacacattccagttgatgccttg

SEQ ID NO: 50136 - DNA, 25 bp, probe
ctactacacccgttacttcgtatcg

SEQ ID NO: 50137 - DNA, 25 bp, probe
aaccacctcttcctcaagtacagtt

SEQ ID NO: 50138 - DNA, 25 bp, probe
gtatcgaatatctatctgagccctc

SEQ ID NO: 50139 - DNA, 25 bp, probe
tcgccatcataaacaactctatgtg

SEQ ID NO: 50140 - DNA, 25 bp, probe
gtcgccatcataaacaactctatgt

SEQ ID NO: 50141 - DNA, 25 bp, probe
caggtcgccatcataaacaactcta

SEQ ID NO: 50142 - DNA, 25 bp, probe
tgctttgaaacctatagtgacctta

SEQ ID NO: 50143 - DNA, 25 bp, probe
ctacaccaatatcagccaccacttt

SEQ ID NO: 50144 - DNA, 25 bp, probe
aaacctatagtgaccttagtgatcc

SEQ ID NO: 50145 - DNA, 25 bp, probe
ctgctttgaaacctatagtgacctt

SEQ ID NO: 50146 - DNA, 25 bp, probe
cgtatcgaatatctatctgagccct

SEQ ID NO: 50147 - DNA, 25 bp, probe
aacctatagtgaccttagtgatccc

SEQ ID NO: 50148 - DNA, 25 bp, probe
gctttgaaacctatagtgaccttag

SEQ ID NO: 50149 - DNA, 25 bp, probe
ctcttctgtcttgtttggtaataaa

SEQ ID NO: 50150 - DNA, 25 bp, probe
ctggttctcttctgtcttgtttggt

SEQ ID NO: 50151 - DNA, 25 bp, probe
ctatagtgaccttagtgatccctcc

SEQ ID NO: 50152 - DNA, 25 bp, probe
cctatagtgaccttagtgatccctc

SEQ ID NO: 50153 - DNA, 25 bp, probe
taaccagtctcttcaaggcattatc

SEQ ID NO: 50154 - DNA, 25 bp, probe
tggttcctgttcactctgttaataa

SEQ ID NO: 50155 - DNA, 25 bp, probe
ttggttcctgttcactctgttaata

SEQ ID NO: 50156 - DNA, 25 bp, probe
gtaaccagtctcttcaaggcattat

SEQ ID NO: 50157 - DNA, 25 bp, probe
atgctgtcacttaataatcaacctg

SEQ ID NO: 50158 - DNA, 25 bp, probe
ggttcctgttcactctgttaataag

SEQ ID NO: 50159 - DNA, 25 bp, probe
aggagatgctgtcacttaataatca

SEQ ID NO: 50160 - DNA, 25 bp, probe
gagacgatgaagaacaattagactg

SEQ ID NO: 50161 - DNA, 25 bp, probe
ggagacgatgaagaacaattagact

SEQ ID NO: 50162 - DNA, 25 bp, probe
aggagacgatgaagaacaattagac

SEQ ID NO: 50163 - DNA, 25 bp, probe
caggagacgatgaagaacaattaga

SEQ ID NO: 50164 - DNA, 25 bp, probe
gacgatgaagaacaattagactgga

SEQ ID NO: 50165 - DNA, 25 bp, probe
agacgatgaagaacaattagactgg

SEQ ID NO: 50166 - DNA, 25 bp, probe
tgctgtcacttaataatcaacctgg

SEQ ID NO: 50167 - DNA, 25 bp, probe
acgatgaagaacaattagactggac

SEQ ID NO: 50168 - DNA, 25 bp, probe
gatgctgtcacttaataatcaacct

SEQ ID NO: 50169 - DNA, 25 bp, probe
agatgctgtcacttaataatcaacc

SEQ ID NO: 50170 - DNA, 25 bp, probe
ggagatgctgtcacttaataatcaa

SEQ ID NO: 50171 - DNA, 25 bp, probe
ccaggagacgatgaagaacaattag

SEQ ID NO: 50172 - DNA, 25 bp, probe
cgatgaagaacaattagactggacc

SEQ ID NO: 50173 - DNA, 25 bp, probe
tgtaaccagtctcttcaaggcatta

SEQ ID NO: 50174 - DNA, 25 bp, probe
aaccagtctcttcaaggcattatct

SEQ ID NO: 50175 - DNA, 25 bp, probe
tccaggagacgatgaagaacaatta

SEQ ID NO: 50176 - DNA, 25 bp, probe
gttcctgttcactctgttaataaga

SEQ ID NO: 50177 - DNA, 25 bp, probe
gagatgctgtcacttaataatcaac

SEQ ID NO: 50178 - DNA, 25 bp, probe
accagtctcttcaaggcattatctc

SEQ ID NO: 50179 - DNA, 25 bp, probe
caggagatgctgtcacttaataatc

SEQ ID NO: 50180 - DNA, 25 bp, probe
atccaggagacgatgaagaacaatt

SEQ ID NO: 50181 - DNA, 25 bp, probe
ttcctgttcactctgttaataagaa

SEQ ID NO: 50182 - DNA, 25 bp, probe
ccagtctcttcaaggcattatctcc

SEQ ID NO: 50183 - DNA, 25 bp, probe
taataagaaaccctaagccaagacc

SEQ ID NO: 50184 - DNA, 25 bp, probe
agtctcttcaaggcattatctcctg

SEQ ID NO: 50185 - DNA, 25 bp, probe
cagtctcttcaaggcattatctcct

SEQ ID NO: 50186 - DNA, 25 bp, probe
tttggttcctgttcactctgttaat

SEQ ID NO: 50187 - DNA, 25 bp, probe
gatccaggagacgatgaagaacaat

SEQ ID NO: 50188 - DNA, 25 bp, probe
tctgttaataagaaaccctaagcca

SEQ ID NO: 50189 - DNA, 25 bp, probe
gatgaagaacaattagactggaccc

SEQ ID NO: 50190 - DNA, 25 bp, probe
ctctgttaataagaaaccctaagcc

SEQ ID NO: 50191 - DNA, 25 bp, probe
ttaataagaaaccctaagccaagac

SEQ ID NO: 50192 - DNA, 25 bp, probe
gtttggttcctgttcactctgttaa

SEQ ID NO: 50193 - DNA, 25 bp, probe
tgttaataagaaaccctaagccaag

SEQ ID NO: 50194 - DNA, 25 bp, probe
ctgttaataagaaaccctaagccaa

SEQ ID NO: 50195 - DNA, 25 bp, probe
tgttcactctgttaataagaaaccc

SEQ ID NO: 50196 - DNA, 25 bp, probe
gctgtcacttaataatcaacctggg

SEQ ID NO: 50197 - DNA, 25 bp, probe
taatagccaagataccaaccatcac

SEQ ID NO: 50198 - DNA, 25 bp, probe
ttaatagccaagataccaaccatca

SEQ ID NO: 50199 - DNA, 25 bp, probe
aagttaatagccaagataccaacca

SEQ ID NO: 50200 - DNA, 25 bp, probe
agttaatagccaagataccaaccat

SEQ ID NO: 50201 - DNA, 25 bp, probe
gttaatagccaagataccaaccatc

SEQ ID NO: 50202 - DNA, 25 bp, probe
ttgttctcatctgctgttctgatat

SEQ ID NO: 50203 - DNA, 25 bp, probe
gttctgatgacctagtgaatgaagc

SEQ ID NO: 50204 - DNA, 25 bp, probe
tctgatgacctagtgaatgaagcat

SEQ ID NO: 50205 - DNA, 25 bp, probe
agaactgtctcatagtcatggaatg

SEQ ID NO: 50206 - DNA, 25 bp, probe
ttctgatgacctagtgaatgaagca

SEQ ID NO: 50207 - DNA, 25 bp, probe
gaactgtctcatagtcatggaatgc

SEQ ID NO: 50208 - DNA, 25 bp, probe
ggttctgatgacctagtgaatgaag

SEQ ID NO: 50209 - DNA, 25 bp, probe
gcaaagttaatagccaagataccaa

SEQ ID NO: 50210 - DNA, 25 bp, probe
caggtatttaagcaatctcatccag

SEQ ID NO: 50211 - DNA, 25 bp, probe
aatagccaagataccaaccatcacg

SEQ ID NO: 50212 - DNA, 25 bp, probe
gatgagaccttggcaaagttaatag

SEQ ID NO: 50213 - DNA, 25 bp, probe
tgatgagaccttggcaaagttaata

SEQ ID NO: 50214 - DNA, 25 bp, probe
atgatgagaccttggcaaagttaat

SEQ ID NO: 50215 - DNA, 25 bp, probe
aggtatttaagcaatctcatccaga

SEQ ID NO: 50216 - DNA, 25 bp, probe
gcaggtatttaagcaatctcatcca

SEQ ID NO: 50217 - DNA, 25 bp, probe
tgaatacactgtttcctccgttata

SEQ ID NO: 50218 - DNA, 25 bp, probe
caaatgttcaaagccttaggttctg

SEQ ID NO: 50219 - DNA, 25 bp, probe
gaatacactgtttcctccgttatac

SEQ ID NO: 50220 - DNA, 25 bp, probe
ctgatgacctagtgaatgaagcatt

SEQ ID NO: 50221 - DNA, 25 bp, probe
tttgttctcatctgctgttctgata

SEQ ID NO: 50222 - DNA, 25 bp, probe
aaagttaatagccaagataccaacc

SEQ ID NO: 50223 - DNA, 25 bp, probe
ttctcatctgctgttctgatatctc

SEQ ID NO: 50224 - DNA, 25 bp, probe
gttctcatctgctgttctgatatct

SEQ ID NO: 50225 - DNA, 25 bp, probe
tgttctcatctgctgttctgatatc

SEQ ID NO: 50226 - DNA, 25 bp, probe
atgagaccttggcaaagttaatagc

SEQ ID NO: 50227 - DNA, 25 bp, probe
gatgatgagaccttggcaaagttaa

SEQ ID NO: 50228 - DNA, 25 bp, probe
aatgttcaaagccttaggttctgat

SEQ ID NO: 50229 - DNA, 25 bp, probe
ggtatttaagcaatctcatccagag

SEQ ID NO: 50230 - DNA, 25 bp, probe
aaatgttcaaagccttaggttctga

SEQ ID NO: 50231 - DNA, 25 bp, probe
tacactgtttcctccgttatacaag

SEQ ID NO: 50232 - DNA, 25 bp, probe
atacactgtttcctccgttatacaa

SEQ ID NO: 50233 - DNA, 25 bp, probe
aatacactgtttcctccgttataca

SEQ ID NO: 50234 - DNA, 25 bp, probe
attcagaagaatcacctggatgatg

SEQ ID NO: 50235 - DNA, 25 bp, probe
ctttgttctcatctgctgttctgat

SEQ ID NO: 50236 - DNA, 25 bp, probe
tctcatctgctgttctgatatctcc

SEQ ID NO: 50237 - DNA, 25 bp, probe
atgttcaaagccttaggttctgatg

SEQ ID NO: 50238 - DNA, 25 bp, probe
caaagttaatagccaagataccaac

SEQ ID NO: 50239 - DNA, 25 bp, probe
ctcatctgctgttctgatatctcca

SEQ ID NO: 50240 - DNA, 25 bp, probe
ttcagaagaatcacctggatgatga

SEQ ID NO: 50241 - DNA, 25 bp, probe
cctatggtgacatgaatatggagaa

SEQ ID NO: 50242 - DNA, 25 bp, probe
atggtgacatgaatatggagaactc

SEQ ID NO: 50243 - DNA, 25 bp, probe
gacagaatcctatggtgacatgaat

SEQ ID NO: 50244 - DNA, 25 bp, probe
tatggtgacatgaatatggagaact

SEQ ID NO: 50245 - DNA, 25 bp, probe
acagaatcctatggtgacatgaata

SEQ ID NO: 50246 - DNA, 25 bp, probe
ctatggtgacatgaatatggagaac

SEQ ID NO: 50247 - DNA, 25 bp, probe
gaatcctatggtgacatgaatatgg

SEQ ID NO: 50248 - DNA, 25 bp, probe
agacagaatcctatggtgacatgaa

SEQ ID NO: 50249 - DNA, 25 bp, probe
aagacagaatcctatggtgacatga

SEQ ID NO: 50250 - DNA, 25 bp, probe
ggttcttcaagaggacgataaggaa

SEQ ID NO: 50251 - DNA, 25 bp, probe
agaatcctatggtgacatgaatatg

SEQ ID NO: 50252 - DNA, 25 bp, probe
cagaatcctatggtgacatgaatat

SEQ ID NO: 50253 - DNA, 25 bp, probe
gacatgaatatggagaactcgacaa

SEQ ID NO: 50254 - DNA, 25 bp, probe
gacgataaggaaggacctcatctac

SEQ ID NO: 50255 - DNA, 25 bp, probe
atcctatggtgacatgaatatggag

SEQ ID NO: 50256 - DNA, 25 bp, probe
tcctatggtgacatgaatatggaga

SEQ ID NO: 50257 - DNA, 25 bp, probe
gggataataaagactgcctcattga

SEQ ID NO: 50258 - DNA, 25 bp, probe
aatcctatggtgacatgaatatgga

SEQ ID NO: 50259 - DNA, 25 bp, probe
ggataataaagactgcctcattgac

SEQ ID NO: 50260 - DNA, 25 bp, probe
gtgacatgaatatggagaactcgac

SEQ ID NO: 50261 - DNA, 25 bp, probe
gataaggaaggacctcatctacacg

SEQ ID NO: 50262 - DNA, 25 bp, probe
cgataaggaaggacctcatctacac

SEQ ID NO: 50263 - DNA, 25 bp, probe
caaagacagaatcctatggtgacat

SEQ ID NO: 50264 - DNA, 25 bp, probe
taataaagactgcctcattgacaag

SEQ ID NO: 50265 - DNA, 25 bp, probe
tgacatgaatatggagaactcgaca

SEQ ID NO: 50266 - DNA, 25 bp, probe
gataataaagactgcctcattgaca

SEQ ID NO: 50267 - DNA, 25 bp, probe
gttgaaccaaagacagaatcctatg

SEQ ID NO: 50268 - DNA, 25 bp, probe
tggtgacatgaatatggagaactcg

SEQ ID NO: 50269 - DNA, 25 bp, probe
cgggataataaagactgcctcattg

SEQ ID NO: 50270 - DNA, 25 bp, probe
acgataaggaaggacctcatctaca

SEQ ID NO: 50271 - DNA, 25 bp, probe
tcgggataataaagactgcctcatt

SEQ ID NO: 50272 - DNA, 25 bp, probe
ataataaagactgcctcattgacaa

SEQ ID NO: 50273 - DNA, 25 bp, probe
gaatgaattgctgattgcctctttc

SEQ ID NO: 50274 - DNA, 25 bp, probe
tggaatgaattgctgattgcctctt

SEQ ID NO: 50275 - DNA, 25 bp, probe
tgttgaaccaaagacagaatcctat

SEQ ID NO: 50276 - DNA, 25 bp, probe
ggtgacatgaatatggagaactcga

SEQ ID NO: 50277 - DNA, 25 bp, probe
aatgaattgctgattgcctctttct

SEQ ID NO: 50278 - DNA, 25 bp, probe
aataaagactgcctcattgacaagc

SEQ ID NO: 50279 - DNA, 25 bp, probe
ggacgataaggaaggacctcatcta

SEQ ID NO: 50280 - DNA, 25 bp, probe
aaagacagaatcctatggtgacatg

SEQ ID NO: 50281 - DNA, 25 bp, probe
ctccatctttgacagagttctaact

SEQ ID NO: 50282 - DNA, 25 bp, probe
gctccatctttgacagagttctaac

SEQ ID NO: 50283 - DNA, 25 bp, probe
atgaattgctgattgcctctttctc

SEQ ID NO: 50284 - DNA, 25 bp, probe
ttcaagaggacgataaggaaggacc

SEQ ID NO: 50285 - DNA, 25 bp, probe
attaacctctgagcagtgatatagc

SEQ ID NO: 50286 - DNA, 25 bp, probe
ggattattaacctctgagcagtgat

SEQ ID NO: 50287 - DNA, 25 bp, probe
cctctgagcagtgatatagcataat

SEQ ID NO: 50288 - DNA, 25 bp, probe
acctctgagcagtgatatagcataa

SEQ ID NO: 50289 - DNA, 25 bp, probe
aacctctgagcagtgatatagcata

SEQ ID NO: 50290 - DNA, 25 bp, probe
taacctctgagcagtgatatagcat

SEQ ID NO: 50291 - DNA, 25 bp, probe
ttaacctctgagcagtgatatagca

SEQ ID NO: 50292 - DNA, 25 bp, probe
atcagtacaatcacacaaggaggat

SEQ ID NO: 50293 - DNA, 25 bp, probe
gattattaacctctgagcagtgata

SEQ ID NO: 50294 - DNA, 25 bp, probe
aatcagtacaatcacacaaggagga

SEQ ID NO: 50295 - DNA, 25 bp, probe
tagaggagacacaatgagcttagta

SEQ ID NO: 50296 - DNA, 25 bp, probe
aggattattaacctctgagcagtga

SEQ ID NO: 50297 - DNA, 25 bp, probe
acttcagattgttcaacatgagaga

SEQ ID NO: 50298 - DNA, 25 bp, probe
aacttcagattgttcaacatgagag

SEQ ID NO: 50299 - DNA, 25 bp, probe
ctctgagcagtgatatagcataata

SEQ ID NO: 50300 - DNA, 25 bp, probe
cttcagattgttcaacatgagagaa

SEQ ID NO: 50301 - DNA, 25 bp, probe
agtacaatcacacaaggaggatgaa

SEQ ID NO: 50302 - DNA, 25 bp, probe
gtaaccagtgaggtgtatcagtaag

SEQ ID NO: 50303 - DNA, 25 bp, probe
agtaaccagtgaggtgtatcagtaa

SEQ ID NO: 50304 - DNA, 25 bp, probe
ctagaggagacacaatgagcttagt

SEQ ID NO: 50305 - DNA, 25 bp, probe
tcagtacaatcacacaaggaggatg

SEQ ID NO: 50306 - DNA, 25 bp, probe
tataagtattggtttgggtgttcct

SEQ ID NO: 50307 - DNA, 25 bp, probe
gcagtgatatagcataataaagccc

SEQ ID NO: 50308 - DNA, 25 bp, probe
agaggagacacaatgagcttagtac

SEQ ID NO: 50309 - DNA, 25 bp, probe
attattaacctctgagcagtgatat

SEQ ID NO: 50310 - DNA, 25 bp, probe
taaccagtgaggtgtatcagtaagg

SEQ ID NO: 50311 - DNA, 25 bp, probe
gtgtatcagtaaggtgggattatgg

SEQ ID NO: 50312 - DNA, 25 bp, probe
ggtgtatcagtaaggtgggattatg

SEQ ID NO: 50313 - DNA, 25 bp, probe
aggtgtatcagtaaggtgggattat

SEQ ID NO: 50314 - DNA, 25 bp, probe
tacctccaacttcctttctttccta

SEQ ID NO: 50315 - DNA, 25 bp, probe
cagtaaccagtgaggtgtatcagta

SEQ ID NO: 50316 - DNA, 25 bp, probe
tctgagcagtgatatagcataataa

SEQ ID NO: 50317 - DNA, 25 bp, probe
tattaacctctgagcagtgatatag

SEQ ID NO: 50318 - DNA, 25 bp, probe
ataagtattggtttgggtgttcctt

SEQ ID NO: 50319 - DNA, 25 bp, probe
cctgctttgggaatatggatgtaaa

SEQ ID NO: 50320 - DNA, 25 bp, probe
cagtacaatcacacaaggaggatga

SEQ ID NO: 50321 - DNA, 25 bp, probe
gaggtgtatcagtaaggtgggatta

SEQ ID NO: 50322 - DNA, 25 bp, probe
caatgagcttagtacctccaacttc

SEQ ID NO: 50323 - DNA, 25 bp, probe
agcagtgatatagcataataaagcc

SEQ ID NO: 50324 - DNA, 25 bp, probe
taagtattggtttgggtgttccttc

SEQ ID NO: 50325 - DNA, 25 bp, probe
ttactttaccttcactaacaatggg

SEQ ID NO: 50326 - DNA, 25 bp, probe
gttaagtggtttaagtggtgttagc

SEQ ID NO: 50327 - DNA, 25 bp, probe
tgtatcagtaaggtgggattatggg

SEQ ID NO: 50328 - DNA, 25 bp, probe
tccaacttcctttctttcctaccat

SEQ ID NO: 50329 - DNA, 25 bp, probe
cgggttcaattaaaggcataagtta

SEQ ID NO: 50330 - DNA, 25 bp, probe
tcgggttcaattaaaggcataagtt

SEQ ID NO: 50331 - DNA, 25 bp, probe
ctcgggttcaattaaaggcataagt

SEQ ID NO: 50332 - DNA, 25 bp, probe
tacaccttctttgttcctaatgacg

SEQ ID NO: 50333 - DNA, 25 bp, probe
atacaccttctttgttcctaatgac

SEQ ID NO: 50334 - DNA, 25 bp, probe
gggttcaattaaaggcataagttaa

SEQ ID NO: 50335 - DNA, 25 bp, probe
gctcgggttcaattaaaggcataag

SEQ ID NO: 50336 - DNA, 25 bp, probe
aatacaccttctttgttcctaatga

SEQ ID NO: 50337 - DNA, 25 bp, probe
aagagagagcaaccaccaacatcat

SEQ ID NO: 50338 - DNA, 25 bp, probe
aaatacaccttctttgttcctaatg

SEQ ID NO: 50339 - DNA, 25 bp, probe
attcattatgatcaacagacctcac

SEQ ID NO: 50340 - DNA, 25 bp, probe
gtcaaatacaccttctttgttccta

SEQ ID NO: 50341 - DNA, 25 bp, probe
agagagagcaaccaccaacatcatc

SEQ ID NO: 50342 - DNA, 25 bp, probe
tttgttcctaatgacgtggacttta

SEQ ID NO: 50343 - DNA, 25 bp, probe
aattcattatgatcaacagacctca

SEQ ID NO: 50344 - DNA, 25 bp, probe
ttgttcctaatgacgtggactttag

SEQ ID NO: 50345 - DNA, 25 bp, probe
tcaaatacaccttctttgttcctaa

SEQ ID NO: 50346 - DNA, 25 bp, probe
ctttgttcctaatgacgtggacttt

SEQ ID NO: 50347 - DNA, 25 bp, probe
cttctttgttcctaatgacgtggac

SEQ ID NO: 50348 - DNA, 25 bp, probe
acaccttctttgttcctaatgacgt

SEQ ID NO: 50349 - DNA, 25 bp, probe
ggttcaattaaaggcataagttaaa

SEQ ID NO: 50350 - DNA, 25 bp, probe
accttctttgttcctaatgacgtgg

SEQ ID NO: 50351 - DNA, 25 bp, probe
caccttctttgttcctaatgacgtg

SEQ ID NO: 50352 - DNA, 25 bp, probe
caaagagagagcaaccaccaacatc

SEQ ID NO: 50353 - DNA, 25 bp, probe
ttcctaatgacgtggactttagcat

SEQ ID NO: 50354 - DNA, 25 bp, probe
tctttgttcctaatgacgtggactt

SEQ ID NO: 50355 - DNA, 25 bp, probe
ttctttgttcctaatgacgtggact

SEQ ID NO: 50356 - DNA, 25 bp, probe
caaatacaccttctttgttcctaat

SEQ ID NO: 50357 - DNA, 25 bp, probe
aaagagagagcaaccaccaacatca

SEQ ID NO: 50358 - DNA, 25 bp, probe
tcctaatgacgtggactttagcatg

SEQ ID NO: 50359 - DNA, 25 bp, probe
ccttctttgttcctaatgacgtgga

SEQ ID NO: 50360 - DNA, 25 bp, probe
aacttgctcgggttcaattaaaggc

SEQ ID NO: 50361 - DNA, 25 bp, probe
gttcctaatgacgtggactttagca

SEQ ID NO: 50362 - DNA, 25 bp, probe
tgttcctaatgacgtggactttagc

SEQ ID NO: 50363 - DNA, 25 bp, probe
ggcaaaacctatcatcaactgtcca

SEQ ID NO: 50364 - DNA, 25 bp, probe
tgctcgggttcaattaaaggcataa

SEQ ID NO: 50365 - DNA, 25 bp, probe
ttgctcgggttcaattaaaggcata

SEQ ID NO: 50366 - DNA, 25 bp, probe
aaaggcataagttaaagtaaattca

SEQ ID NO: 50367 - DNA, 25 bp, probe
ttcaattaaaggcataagttaaagt

SEQ ID NO: 50368 - DNA, 25 bp, probe
gaacttgctcgggttcaattaaagg

SEQ ID NO: 50369 - DNA, 25 bp, probe
ggaacttgctcgggttcaattaaag

SEQ ID NO: 50370 - DNA, 25 bp, probe
aggcataagttaaagtaaattcatt

SEQ ID NO: 50371 - DNA, 25 bp, probe
aaggcataagttaaagtaaattcat

SEQ ID NO: 50372 - DNA, 25 bp, probe
aaattcattatgatcaacagacctc

SEQ ID NO: 50373 - DNA, 25 bp, probe
ctggagaagatgatatggattggaa

SEQ ID NO: 50374 - DNA, 25 bp, probe
gtctcctactctgcttctcttacta

SEQ ID NO: 50375 - DNA, 25 bp, probe
tctcctactctgcttctcttactat

SEQ ID NO: 50376 - DNA, 25 bp, probe
ttgtctcctactctgcttctcttac

SEQ ID NO: 50377 - DNA, 25 bp, probe
gttgtctcctactctgcttctctta

SEQ ID NO: 50378 - DNA, 25 bp, probe
cctggagaagatgatatggattgga

SEQ ID NO: 50379 - DNA, 25 bp, probe
tacaactcaatctaagtcagtccac

SEQ ID NO: 50380 - DNA, 25 bp, probe
actagattgactgaggaatgtatgt

SEQ ID NO: 50381 - DNA, 25 bp, probe
cctactctgcttctcttactatact

SEQ ID NO: 50382 - DNA, 25 bp, probe
tcctactctgcttctcttactatac

SEQ ID NO: 50383 - DNA, 25 bp, probe
atacaactcaatctaagtcagtcca

SEQ ID NO: 50384 - DNA, 25 bp, probe
actctgcttctcttactatactcat

SEQ ID NO: 50385 - DNA, 25 bp, probe
cactagattgactgaggaatgtatg

SEQ ID NO: 50386 - DNA, 25 bp, probe
ctcctactctgcttctcttactata

SEQ ID NO: 50387 - DNA, 25 bp, probe
tgtctcctactctgcttctcttact

SEQ ID NO: 50388 - DNA, 25 bp, probe
acaactcaatctaagtcagtccact

SEQ ID NO: 50389 - DNA, 25 bp, probe
agagaattaggagagaggttaatgt

SEQ ID NO: 50390 - DNA, 25 bp, probe
tactctgcttctcttactatactca

SEQ ID NO: 50391 - DNA, 25 bp, probe
tcactagattgactgaggaatgtat

SEQ ID NO: 50392 - DNA, 25 bp, probe
ggagtgttcaatagataccacgaat

SEQ ID NO: 50393 - DNA, 25 bp, probe
tagttgtctcctactctgcttctct

SEQ ID NO: 50394 - DNA, 25 bp, probe
ttcctggagaagatgatatggattg

SEQ ID NO: 50395 - DNA, 25 bp, probe
agattgactgaggaatgtatgtcta

SEQ ID NO: 50396 - DNA, 25 bp, probe
tagattgactgaggaatgtatgtct

SEQ ID NO: 50397 - DNA, 25 bp, probe
gagtgttcaatagataccacgaatt

SEQ ID NO: 50398 - DNA, 25 bp, probe
gagaattaggagagaggttaatgtt

SEQ ID NO: 50399 - DNA, 25 bp, probe
ctactctgcttctcttactatactc

SEQ ID NO: 50400 - DNA, 25 bp, probe
attcctggagaagatgatatggatt

SEQ ID NO: 50401 - DNA, 25 bp, probe
aattcctggagaagatgatatggat

SEQ ID NO: 50402 - DNA, 25 bp, probe
ctagattgactgaggaatgtatgtc

SEQ ID NO: 50403 - DNA, 25 bp, probe
aatggagtgttcaatagataccacg

SEQ ID NO: 50404 - DNA, 25 bp, probe
tcctggagaagatgatatggattgg

SEQ ID NO: 50405 - DNA, 25 bp, probe
gattgactgaggaatgtatgtctaa

SEQ ID NO: 50406 - DNA, 25 bp, probe
ctgcttctcttactatactcataca

SEQ ID NO: 50407 - DNA, 25 bp, probe
aagagaattaggagagaggttaatg

SEQ ID NO: 50408 - DNA, 25 bp, probe
tatacaactcaatctaagtcagtcc

SEQ ID NO: 50409 - DNA, 25 bp, probe
tactgtctttcacctttccattgtt

SEQ ID NO: 50410 - DNA, 25 bp, probe
tggagaagatgatatggattggaaa

SEQ ID NO: 50411 - DNA, 25 bp, probe
ggagaagatgatatggattggaaac

SEQ ID NO: 50412 - DNA, 25 bp, probe
aatagataccacgaattgtgaacaa

SEQ ID NO: 50413 - DNA, 25 bp, probe
atggagtgttcaatagataccacga

SEQ ID NO: 50414 - DNA, 25 bp, probe
tcagagcaattaaaccactattcca

SEQ ID NO: 50415 - DNA, 25 bp, probe
gcaaagagaattaggagagaggtta

SEQ ID NO: 50416 - DNA, 25 bp, probe
ctcagagcaattaaaccactattcc

SEQ ID NO: 50417 - DNA, 25 bp, probe
aatggatggacatcttcagagagtg

SEQ ID NO: 50418 - DNA, 25 bp, probe
catcaagctgaacaacaaggtaatg

SEQ ID NO: 50419 - DNA, 25 bp, probe
aaactcaagaaatggatggacatct

SEQ ID NO: 50420 - DNA, 25 bp, probe
gaccatgttcacattctttctaacc

SEQ ID NO: 50421 - DNA, 25 bp, probe
gatggacatcttcagagagtgtgac

SEQ ID NO: 50422 - DNA, 25 bp, probe
gaaatggatggacatcttcagagag

SEQ ID NO: 50423 - DNA, 25 bp, probe
ccatgttcacattctttctaaccat

SEQ ID NO: 50424 - DNA, 25 bp, probe
accatgttcacattctttctaacca

SEQ ID NO: 50425 - DNA, 25 bp, probe
agaccatgttcacattctttctaac

SEQ ID NO: 50426 - DNA, 25 bp, probe
atcaagctgaacaacaaggtaatgc

SEQ ID NO: 50427 - DNA, 25 bp, probe
gcatcaagctgaacaacaaggtaat

SEQ ID NO: 50428 - DNA, 25 bp, probe
agaaatggatggacatcttcagaga

SEQ ID NO: 50429 - DNA, 25 bp, probe
aaatggatggacatcttcagagagt

SEQ ID NO: 50430 - DNA, 25 bp, probe
atggatggacatcttcagagagtgt

SEQ ID NO: 50431 - DNA, 25 bp, probe
gatcaacctcatggataaagatggc

SEQ ID NO: 50432 - DNA, 25 bp, probe
atcaacctcatggataaagatggct

SEQ ID NO: 50433 - DNA, 25 bp, probe
atcatagactttgacagcttcatca

SEQ ID NO: 50434 - DNA, 25 bp, probe
gaggctaaagaccatgttcacattc

SEQ ID NO: 50435 - DNA, 25 bp, probe
gatcatagactttgacagcttcatc

SEQ ID NO: 50436 - DNA, 25 bp, probe
tcatagactttgacagcttcatcag

SEQ ID NO: 50437 - DNA, 25 bp, probe
aggctaaagaccatgttcacattct

SEQ ID NO: 50438 - DNA, 25 bp, probe
ttctagagttcaagatcctgtggaa

SEQ ID NO: 50439 - DNA, 25 bp, probe
atggacatcttcagagagtgtgacc

SEQ ID NO: 50440 - DNA, 25 bp, probe
tcaacctcatggataaagatggctc

SEQ ID NO: 50441 - DNA, 25 bp, probe
aacctcatggataaagatggctctg

SEQ ID NO: 50442 - DNA, 25 bp, probe
caacctcatggataaagatggctct

SEQ ID NO: 50443 - DNA, 25 bp, probe
ggatggacatcttcagagagtgtga

SEQ ID NO: 50444 - DNA, 25 bp, probe
cttctagagttcaagatcctgtgga

SEQ ID NO: 50445 - DNA, 25 bp, probe
tttcctgaggctaaagaccatgttc

SEQ ID NO: 50446 - DNA, 25 bp, probe
tgaggctaaagaccatgttcacatt

SEQ ID NO: 50447 - DNA, 25 bp, probe
aactcaagaaatggatggacatctt

SEQ ID NO: 50448 - DNA, 25 bp, probe
aagaaatggatggacatcttcagag

SEQ ID NO: 50449 - DNA, 25 bp, probe
tggatggacatcttcagagagtgtg

SEQ ID NO: 50450 - DNA, 25 bp, probe
caagaaatggatggacatcttcaga

SEQ ID NO: 50451 - DNA, 25 bp, probe
tcaagaaatggatggacatcttcag

SEQ ID NO: 50452 - DNA, 25 bp, probe
ctcaagaaatggatggacatcttca

SEQ ID NO: 50453 - DNA, 25 bp, probe
actcaagaaatggatggacatcttc

SEQ ID NO: 50454 - DNA, 25 bp, probe
aggcaccttgaactcctatgagatg

SEQ ID NO: 50455 - DNA, 25 bp, probe
caggcaccttgaactcctatgagat

SEQ ID NO: 50456 - DNA, 25 bp, probe
gcttctagagttcaagatcctgtgg

SEQ ID NO: 50457 - DNA, 25 bp, probe
ggcttctagagttcaagatcctgtg

SEQ ID NO: 50458 - DNA, 25 bp, probe
gtttcctgaggctaaagaccatgtt

SEQ ID NO: 50459 - DNA, 25 bp, probe
caagctgaacaacaaggtaatgcag

SEQ ID NO: 50460 - DNA, 25 bp, probe
tcaagctgaacaacaaggtaatgca

SEQ ID NO: 50461 - DNA, 25 bp, probe
agacagagtgtatcaccttcttgaa

SEQ ID NO: 50462 - DNA, 25 bp, probe
ctatcgagatcatgctgctagagac

SEQ ID NO: 50463 - DNA, 25 bp, probe
gagacagagtgtatcaccttcttga

SEQ ID NO: 50464 - DNA, 25 bp, probe
cactatcgagatcatgctgctagag

SEQ ID NO: 50465 - DNA, 25 bp, probe
gacagagtgtatcaccttcttgaag

SEQ ID NO: 50466 - DNA, 25 bp, probe
actatcgagatcatgctgctagaga

SEQ ID NO: 50467 - DNA, 25 bp, probe
tatcgagatcatgctgctagagaca

SEQ ID NO: 50468 - DNA, 25 bp, probe
taacagcggctcaagaactaatgat

SEQ ID NO: 50469 - DNA, 25 bp, probe
ctaacagcggctcaagaactaatga

SEQ ID NO: 50470 - DNA, 25 bp, probe
cgagacagagtgtatcaccttcttg

SEQ ID NO: 50471 - DNA, 25 bp, probe
gaagaagaagattcggaaacagcag

SEQ ID NO: 50472 - DNA, 25 bp, probe
ctcaagaactaatgatccagcagtt

SEQ ID NO: 50473 - DNA, 25 bp, probe
acgagacagagtgtatcaccttctt

SEQ ID NO: 50474 - DNA, 25 bp, probe
tcaagaactaatgatccagcagttg

SEQ ID NO: 50475 - DNA, 25 bp, probe
ctacaaccacgagacagagtgtatc

SEQ ID NO: 50476 - DNA, 25 bp, probe
gaaggcatccactatcgagatcatg

SEQ ID NO: 50477 - DNA, 25 bp, probe
atccactatcgagatcatgctgcta

SEQ ID NO: 50478 - DNA, 25 bp, probe
aacagcggctcaagaactaatgatc

SEQ ID NO: 50479 - DNA, 25 bp, probe
caagaactaatgatccagcagttgg

SEQ ID NO: 50480 - DNA, 25 bp, probe
aagaactaatgatccagcagttggt

SEQ ID NO: 50481 - DNA, 25 bp, probe
cacgagacagagtgtatcaccttct

SEQ ID NO: 50482 - DNA, 25 bp, probe
tacaaccacgagacagagtgtatca

SEQ ID NO: 50483 - DNA, 25 bp, probe
tgaaggcatccactatcgagatcat

SEQ ID NO: 50484 - DNA, 25 bp, probe
gctcaagaactaatgatccagcagt

SEQ ID NO: 50485 - DNA, 25 bp, probe
ccactatcgagatcatgctgctaga

SEQ ID NO: 50486 - DNA, 25 bp, probe
tccactatcgagatcatgctgctag

SEQ ID NO: 50487 - DNA, 25 bp, probe
atcgagatcatgctgctagagacag

SEQ ID NO: 50488 - DNA, 25 bp, probe
ggaagaagaagattcggaaacagca

SEQ ID NO: 50489 - DNA, 25 bp, probe
ccttcctcttcctctgcttttattt

SEQ ID NO: 50490 - DNA, 25 bp, probe
agaactaatgatccagcagttggtg

SEQ ID NO: 50491 - DNA, 25 bp, probe
cttcctcttcctctgcttttattta

SEQ ID NO: 50492 - DNA, 25 bp, probe
ctgaaggcatccactatcgagatca

SEQ ID NO: 50493 - DNA, 25 bp, probe
ggctcaagaactaatgatccagcag

SEQ ID NO: 50494 - DNA, 25 bp, probe
acaaccacgagacagagtgtatcac

SEQ ID NO: 50495 - DNA, 25 bp, probe
ttcctcttcctctgcttttatttaa

SEQ ID NO: 50496 - DNA, 25 bp, probe
aagaagaagattcggaaacagcagc

SEQ ID NO: 50497 - DNA, 25 bp, probe
tcctcttcctctgcttttatttaat

SEQ ID NO: 50498 - DNA, 25 bp, probe
ccacgagacagagtgtatcaccttc

SEQ ID NO: 50499 - DNA, 25 bp, probe
gctacaaccacgagacagagtgtat

SEQ ID NO: 50500 - DNA, 25 bp, probe
cctgaaggcatccactatcgagatc

SEQ ID NO: 50501 - DNA, 25 bp, probe
catccactatcgagatcatgctgct

SEQ ID NO: 50502 - DNA, 25 bp, probe
agcggctcaagaactaatgatccag

SEQ ID NO: 50503 - DNA, 25 bp, probe
gaactaatgatccagcagttggtgg

SEQ ID NO: 50504 - DNA, 25 bp, probe
cggaagaagaagattcggaaacagc

SEQ ID NO: 50505 - DNA, 25 bp, probe
aaccatgatctgatgcttcttcaac

SEQ ID NO: 50506 - DNA, 25 bp, probe
caaccatgatctgatgcttcttcaa

SEQ ID NO: 50507 - DNA, 25 bp, probe
ccatgatctgatgcttcttcaactg

SEQ ID NO: 50508 - DNA, 25 bp, probe
cacaaccatgatctgatgcttcttc

SEQ ID NO: 50509 - DNA, 25 bp, probe
tctcccttaataaactcacaactct

SEQ ID NO: 50510 - DNA, 25 bp, probe
gaccacagcctacagaataaagatg

SEQ ID NO: 50511 - DNA, 25 bp, probe
agaccacagcctacagaataaagat

SEQ ID NO: 50512 - DNA, 25 bp, probe
ctcccttaataaactcacaactctc

SEQ ID NO: 50513 - DNA, 25 bp, probe
atcaagaagatcataggcagcaagg

SEQ ID NO: 50514 - DNA, 25 bp, probe
accatgatctgatgcttcttcaact

SEQ ID NO: 50515 - DNA, 25 bp, probe
cagaagaagtgtgaggatgcttacc

SEQ ID NO: 50516 - DNA, 25 bp, probe
ccagaagaagtgtgaggatgcttac

SEQ ID NO: 50517 - DNA, 25 bp, probe
acaaccatgatctgatgcttcttca

SEQ ID NO: 50518 - DNA, 25 bp, probe
atctcccttaataaactcacaactc

SEQ ID NO: 50519 - DNA, 25 bp, probe
gagaccacagcctacagaataaaga

SEQ ID NO: 50520 - DNA, 25 bp, probe
catgatctgatgcttcttcaactgc

SEQ ID NO: 50521 - DNA, 25 bp, probe
ctggactggatcaagaagatcatag

SEQ ID NO: 50522 - DNA, 25 bp, probe
gatctcccttaataaactcacaact

SEQ ID NO: 50523 - DNA, 25 bp, probe
tggactggatcaagaagatcatagg

SEQ ID NO: 50524 - DNA, 25 bp, probe
cctggactggatcaagaagatcata

SEQ ID NO: 50525 - DNA, 25 bp, probe
ggagaccacagcctacagaataaag

SEQ ID NO: 50526 - DNA, 25 bp, probe
gatcaagaagatcataggcagcaag

SEQ ID NO: 50527 - DNA, 25 bp, probe
ccacaaccatgatctgatgcttctt

SEQ ID NO: 50528 - DNA, 25 bp, probe
gctacctggactggatcaagaagat

SEQ ID NO: 50529 - DNA, 25 bp, probe
actggatcaagaagatcataggcag

SEQ ID NO: 50530 - DNA, 25 bp, probe
gactggatcaagaagatcataggca

SEQ ID NO: 50531 - DNA, 25 bp, probe
ctacctggactggatcaagaagatc

SEQ ID NO: 50532 - DNA, 25 bp, probe
atgatctgatgcttcttcaactgcg

SEQ ID NO: 50533 - DNA, 25 bp, probe
aagaaatacctgtggttcagtccat

SEQ ID NO: 50534 - DNA, 25 bp, probe
tacctggactggatcaagaagatca

SEQ ID NO: 50535 - DNA, 25 bp, probe
ggactggatcaagaagatcataggc

SEQ ID NO: 50536 - DNA, 25 bp, probe
gacactctcaactgtgcagaagtaa

SEQ ID NO: 50537 - DNA, 25 bp, probe
ggatcaagaagatcataggcagcaa

SEQ ID NO: 50538 - DNA, 25 bp, probe
gaccacaaccatgatctgatgcttc

SEQ ID NO: 50539 - DNA, 25 bp, probe
agaaatacctgtggttcagtccatc

SEQ ID NO: 50540 - DNA, 25 bp, probe
gtgtaccaggcagagaactgaagta

SEQ ID NO: 50541 - DNA, 25 bp, probe
accacagcctacagaataaagatgg

SEQ ID NO: 50542 - DNA, 25 bp, probe
acctggactggatcaagaagatcat

SEQ ID NO: 50543 - DNA, 25 bp, probe
caagaaatacctgtggttcagtcca

SEQ ID NO: 50544 - DNA, 25 bp, probe
gggagaccacagcctacagaataaa

SEQ ID NO: 50545 - DNA, 25 bp, probe
ctggatcaagaagatcataggcagc

SEQ ID NO: 50546 - DNA, 25 bp, probe
accacaaccatgatctgatgcttct

SEQ ID NO: 50547 - DNA, 25 bp, probe
gggctgattctaggataagcactag

SEQ ID NO: 50548 - DNA, 25 bp, probe
agagcaagaaatacctgtggttcag

SEQ ID NO: 50549 - DNA, 25 bp, probe
gtgaagtagcctcttgtgtaactaa

SEQ ID NO: 50550 - DNA, 25 bp, probe
tgaagtagcctcttgtgtaactaat

SEQ ID NO: 50551 - DNA, 25 bp, probe
agtgaagtagcctcttgtgtaacta

SEQ ID NO: 50552 - DNA, 25 bp, probe
cctcaacatggattactggaagatc

SEQ ID NO: 50553 - DNA, 25 bp, probe
gaagtagcctcttgtgtaactaatt

SEQ ID NO: 50554 - DNA, 25 bp, probe
tgtctagtgtattctcttcacagtg

SEQ ID NO: 50555 - DNA, 25 bp, probe
gtctagtgtattctcttcacagtgc

SEQ ID NO: 50556 - DNA, 25 bp, probe
ttgtctagtgtattctcttcacagt

SEQ ID NO: 50557 - DNA, 25 bp, probe
cagtgaagtagcctcttgtgtaact

SEQ ID NO: 50558 - DNA, 25 bp, probe
ggtttctgcgtgtgtatatttgtaa

SEQ ID NO: 50559 - DNA, 25 bp, probe
agggcttattgactctttctattgt

SEQ ID NO: 50560 - DNA, 25 bp, probe
tttgtggtaaagtagttgattcagc

SEQ ID NO: 50561 - DNA, 25 bp, probe
tggtttctgcgtgtgtatatttgta

SEQ ID NO: 50562 - DNA, 25 bp, probe
gggcttattgactctttctattgtt

SEQ ID NO: 50563 - DNA, 25 bp, probe
tgctacccatttacaaataagagga

SEQ ID NO: 50564 - DNA, 25 bp, probe
catctgtgtatttgagttggctttg

SEQ ID NO: 50565 - DNA, 25 bp, probe
acccatttacaaataagaggacaga

SEQ ID NO: 50566 - DNA, 25 bp, probe
gctacccatttacaaataagaggac

SEQ ID NO: 50567 - DNA, 25 bp, probe
ttagagccctccgtaaatatacatc

SEQ ID NO: 50568 - DNA, 25 bp, probe
tctagtgtattctcttcacagtgcc

SEQ ID NO: 50569 - DNA, 25 bp, probe
tagtgtattctcttcacagtgccag

SEQ ID NO: 50570 - DNA, 25 bp, probe
tagagccctccgtaaatatacatct

SEQ ID NO: 50571 - DNA, 25 bp, probe
ctagtgtattctcttcacagtgcca

SEQ ID NO: 50572 - DNA, 25 bp, probe
tagcctcttgtgtaactaatttgtg

SEQ ID NO: 50573 - DNA, 25 bp, probe
gtagcctcttgtgtaactaatttgt

SEQ ID NO: 50574 - DNA, 25 bp, probe
tttgtttagagccctccgtaaatat

SEQ ID NO: 50575 - DNA, 25 bp, probe
ttgtggtaaagtagttgattcagcc

SEQ ID NO: 50576 - DNA, 25 bp, probe
gtttagagccctccgtaaatataca

SEQ ID NO: 50577 - DNA, 25 bp, probe
tgtttagagccctccgtaaatatac

SEQ ID NO: 50578 - DNA, 25 bp, probe
ccagtgaagtagcctcttgtgtaac

SEQ ID NO: 50579 - DNA, 25 bp, probe
agcctcttgtgtaactaatttgtgg

SEQ ID NO: 50580 - DNA, 25 bp, probe
aagggcttattgactctttctattg

SEQ ID NO: 50581 - DNA, 25 bp, probe
gcctcaacatggattactggaagat

SEQ ID NO: 50582 - DNA, 25 bp, probe
cctcttgtgtaactaatttgtggta

SEQ ID NO: 50583 - DNA, 25 bp, probe
ttgtttagagccctccgtaaatata

SEQ ID NO: 50584 - DNA, 25 bp, probe
gcctcttgtgtaactaatttgtggt

SEQ ID NO: 50585 - DNA, 25 bp, probe
gagtggtttctgcgtgtgtatattt

SEQ ID NO: 50586 - DNA, 25 bp, probe
tttagagccctccgtaaatatacat

SEQ ID NO: 50587 - DNA, 25 bp, probe
tccagtgaagtagcctcttgtgtaa

SEQ ID NO: 50588 - DNA, 25 bp, probe
gaaacctccatcaaacctcacattt

SEQ ID NO: 50589 - DNA, 25 bp, probe
cccatttacaaataagaggacagat

SEQ ID NO: 50590 - DNA, 25 bp, probe
gtttctgcgtgtgtatatttgtaat

SEQ ID NO: 50591 - DNA, 25 bp, probe
ttgctacccatttacaaataagagg

SEQ ID NO: 50592 - DNA, 25 bp, probe
ctgtgtatttgagttggctttgcta

SEQ ID NO: 50593 - DNA, 25 bp, probe
gatgttcgtgggatgtttaatcaag

SEQ ID NO: 50594 - DNA, 25 bp, probe
cttgatgttcgtgggatgtttaatc

SEQ ID NO: 50595 - DNA, 25 bp, probe
atgttcgtgggatgtttaatcaaga

SEQ ID NO: 50596 - DNA, 25 bp, probe
ttcgtgggatgtttaatcaagagag

SEQ ID NO: 50597 - DNA, 25 bp, probe
acttgatgttcgtgggatgtttaat

SEQ ID NO: 50598 - DNA, 25 bp, probe
gttcgtgggatgtttaatcaagaga

SEQ ID NO: 50599 - DNA, 25 bp, probe
tgttcgtgggatgtttaatcaagag

SEQ ID NO: 50600 - DNA, 25 bp, probe
cgtgggatgtttaatcaagagagac

SEQ ID NO: 50601 - DNA, 25 bp, probe
tcgtgggatgtttaatcaagagaga

SEQ ID NO: 50602 - DNA, 25 bp, probe
gtgggatgtttaatcaagagagaca

SEQ ID NO: 50603 - DNA, 25 bp, probe
tgatgttcgtgggatgtttaatcaa

SEQ ID NO: 50604 - DNA, 25 bp, probe
ttgatgttcgtgggatgtttaatca

SEQ ID NO: 50605 - DNA, 25 bp, probe
cttctgtctcttgcataagcctcag

SEQ ID NO: 50606 - DNA, 25 bp, probe
catgtctgtgaacttgatgttcgtg

SEQ ID NO: 50607 - DNA, 25 bp, probe
ccttctgtctcttgcataagcctca

SEQ ID NO: 50608 - DNA, 25 bp, probe
gaacttgatgttcgtgggatgttta

SEQ ID NO: 50609 - DNA, 25 bp, probe
ttctgtctcttgcataagcctcagg

SEQ ID NO: 50610 - DNA, 25 bp, probe
tcagaaagatgaagaagaaaacatg

SEQ ID NO: 50611 - DNA, 25 bp, probe
atgtctgtgaacttgatgttcgtgg

SEQ ID NO: 50612 - DNA, 25 bp, probe
ttcgcagttactggttggtgttctt

SEQ ID NO: 50613 - DNA, 25 bp, probe
gggtgttttcagaaagatgaagaag

SEQ ID NO: 50614 - DNA, 25 bp, probe
ggtgttttcagaaagatgaagaaga

SEQ ID NO: 50615 - DNA, 25 bp, probe
tgggtgttttcagaaagatgaagaa

SEQ ID NO: 50616 - DNA, 25 bp, probe
ctgggtgttttcagaaagatgaaga

SEQ ID NO: 50617 - DNA, 25 bp, probe
tgaacttgatgttcgtgggatgttt

SEQ ID NO: 50618 - DNA, 25 bp, probe
gcttttccattctgggtgttttcag

SEQ ID NO: 50619 - DNA, 25 bp, probe
ctgcttttccattctgggtgttttc

SEQ ID NO: 50620 - DNA, 25 bp, probe
gtgttttcagaaagatgaagaagaa

SEQ ID NO: 50621 - DNA, 25 bp, probe
tctgcttttccattctgggtgtttt

SEQ ID NO: 50622 - DNA, 25 bp, probe
tgcttttccattctgggtgttttca

SEQ ID NO: 50623 - DNA, 25 bp, probe
cagttactggttggtgttcttccca

SEQ ID NO: 50624 - DNA, 25 bp, probe
ctaggaacctcgaagctgttctctg

SEQ ID NO: 50625 - DNA, 25 bp, probe
gtgaacttgatgttcgtgggatgtt

SEQ ID NO: 50626 - DNA, 25 bp, probe
tctgggtgttttcagaaagatgaag

SEQ ID NO: 50627 - DNA, 25 bp, probe
ctctgcttttccattctgggtgttt

SEQ ID NO: 50628 - DNA, 25 bp, probe
ttactggttggtgttcttcccaaag

SEQ ID NO: 50629 - DNA, 25 bp, probe
tttcagaaagatgaagaagaaaaca

SEQ ID NO: 50630 - DNA, 25 bp, probe
tgttttcagaaagatgaagaagaaa

SEQ ID NO: 50631 - DNA, 25 bp, probe
ttgctgccttctgtctcttgcataa

SEQ ID NO: 50632 - DNA, 25 bp, probe
acatgtctgtgaacttgatgttcgt

SEQ ID NO: 50633 - DNA, 25 bp, probe
ctgttctctgcttttccattctggg

SEQ ID NO: 50634 - DNA, 25 bp, probe
ttcagaaagatgaagaagaaaacat

SEQ ID NO: 50635 - DNA, 25 bp, probe
cttttccattctgggtgttttcaga

SEQ ID NO: 50636 - DNA, 25 bp, probe
gttactggttggtgttcttcccaaa

SEQ ID NO: 50637 - DNA, 25 bp, probe
ttatcacaaccaccgttacaagtat

SEQ ID NO: 50638 - DNA, 25 bp, probe
tatcacaaccaccgttacaagtata

SEQ ID NO: 50639 - DNA, 25 bp, probe
attatattggtggttctcagcaaga

SEQ ID NO: 50640 - DNA, 25 bp, probe
gattatattggtggttctcagcaag

SEQ ID NO: 50641 - DNA, 25 bp, probe
agattatattggtggttctcagcaa

SEQ ID NO: 50642 - DNA, 25 bp, probe
tagattatattggtggttctcagca

SEQ ID NO: 50643 - DNA, 25 bp, probe
ttatattggtggttctcagcaagag

SEQ ID NO: 50644 - DNA, 25 bp, probe
ttagattatattggtggttctcagc

SEQ ID NO: 50645 - DNA, 25 bp, probe
ttggagttgtcacatcagataagac

SEQ ID NO: 50646 - DNA, 25 bp, probe
catgttaccatcttacttgagcctt

SEQ ID NO: 50647 - DNA, 25 bp, probe
aagccactagactcttcactgttag

SEQ ID NO: 50648 - DNA, 25 bp, probe
ttgtagttggagtaataggagcttc

SEQ ID NO: 50649 - DNA, 25 bp, probe
caagagaaggagtatgtgtccaatg

SEQ ID NO: 50650 - DNA, 25 bp, probe
cttaccctttcctcctttatcacaa

SEQ ID NO: 50651 - DNA, 25 bp, probe
atacccttaccctttcctcctttat

SEQ ID NO: 50652 - DNA, 25 bp, probe
gttctactatggctgagttctggtc

SEQ ID NO: 50653 - DNA, 25 bp, probe
ttaccctttcctcctttatcacaac

SEQ ID NO: 50654 - DNA, 25 bp, probe
tgttaccatcttacttgagccttta

SEQ ID NO: 50655 - DNA, 25 bp, probe
tcttacttgagcctttaatggactt

SEQ ID NO: 50656 - DNA, 25 bp, probe
aatccagttctactatggctgagtt

SEQ ID NO: 50657 - DNA, 25 bp, probe
atcttacttgagcctttaatggact

SEQ ID NO: 50658 - DNA, 25 bp, probe
tgtactgcatgttaccatcttactt

SEQ ID NO: 50659 - DNA, 25 bp, probe
actatgaatgtactgcatgttacca

SEQ ID NO: 50660 - DNA, 25 bp, probe
atgtactgcatgttaccatcttact

SEQ ID NO: 50661 - DNA, 25 bp, probe
tactgcatgttaccatcttacttga

SEQ ID NO: 50662 - DNA, 25 bp, probe
gtactgcatgttaccatcttacttg

SEQ ID NO: 50663 - DNA, 25 bp, probe
atgaatgtactgcatgttaccatct

SEQ ID NO: 50664 - DNA, 25 bp, probe
catttgtagttggagtaataggagc

SEQ ID NO: 50665 - DNA, 25 bp, probe
tttggagttgtcacatcagataaga

SEQ ID NO: 50666 - DNA, 25 bp, probe
tgaatgtactgcatgttaccatctt

SEQ ID NO: 50667 - DNA, 25 bp, probe
tacccttaccctttcctcctttatc

SEQ ID NO: 50668 - DNA, 25 bp, probe
gatacccttaccctttcctccttta

SEQ ID NO: 50669 - DNA, 25 bp, probe
cctaagtgacatttgtagttggagt

SEQ ID NO: 50670 - DNA, 25 bp, probe
acctaagtgacatttgtagttggag

SEQ ID NO: 50671 - DNA, 25 bp, probe
ccactagactcttcactgttagctt

SEQ ID NO: 50672 - DNA, 25 bp, probe
atgttaccatcttacttgagccttt

SEQ ID NO: 50673 - DNA, 25 bp, probe
catcttacttgagcctttaatggac

SEQ ID NO: 50674 - DNA, 25 bp, probe
actgcatgttaccatcttacttgag

SEQ ID NO: 50675 - DNA, 25 bp, probe
aatgtactgcatgttaccatcttac

SEQ ID NO: 50676 - DNA, 25 bp, probe
gatgtctctaaagcactaccgattc

SEQ ID NO: 50677 - DNA, 25 bp, probe
cttctgatgtctctaaagcactacc

SEQ ID NO: 50678 - DNA, 25 bp, probe
ccttctgatgtctctaaagcactac

SEQ ID NO: 50679 - DNA, 25 bp, probe
tacctaagtgacatttgtagttgga

SEQ ID NO: 50680 - DNA, 25 bp, probe
tttatcacaaccaccgttacaagta

SEQ ID NO: 50681 - DNA, 25 bp, probe
cacttggaagacaacaatgaagaac

SEQ ID NO: 50682 - DNA, 25 bp, probe
ttggaagacaacaatgaagaacctc

SEQ ID NO: 50683 - DNA, 25 bp, probe
cttggaagacaacaatgaagaacct

SEQ ID NO: 50684 - DNA, 25 bp, probe
cttatgaatggcacttggaagacaa

SEQ ID NO: 50685 - DNA, 25 bp, probe
ttacattggagtcagcgtagttctt

SEQ ID NO: 50686 - DNA, 25 bp, probe
cagtgaacaaggcatcttagacaag

SEQ ID NO: 50687 - DNA, 25 bp, probe
acttggaagacaacaatgaagaacc

SEQ ID NO: 50688 - DNA, 25 bp, probe
ttatgaatggcacttggaagacaac

SEQ ID NO: 50689 - DNA, 25 bp, probe
aactcagtgaacaaggcatcttaga

SEQ ID NO: 50690 - DNA, 25 bp, probe
gaagacaacaatgaagaacctcgtg

SEQ ID NO: 50691 - DNA, 25 bp, probe
cttacattggagtcagcgtagttct

SEQ ID NO: 50692 - DNA, 25 bp, probe
tcagtgaacaaggcatcttagacaa

SEQ ID NO: 50693 - DNA, 25 bp, probe
gcacttggaagacaacaatgaagaa

SEQ ID NO: 50694 - DNA, 25 bp, probe
aagacaacaatgaagaacctcgtga

SEQ ID NO: 50695 - DNA, 25 bp, probe
ctcagtgaacaaggcatcttagaca

SEQ ID NO: 50696 - DNA, 25 bp, probe
actcagtgaacaaggcatcttagac

SEQ ID NO: 50697 - DNA, 25 bp, probe
atttcttcctatactgccaatctcg

SEQ ID NO: 50698 - DNA, 25 bp, probe
gatacgatgaaagttggtggaaatc

SEQ ID NO: 50699 - DNA, 25 bp, probe
tgatacgatgaaagttggtggaaat

SEQ ID NO: 50700 - DNA, 25 bp, probe
atacgatgaaagttggtggaaatct

SEQ ID NO: 50701 - DNA, 25 bp, probe
tatgaatggcacttggaagacaaca

SEQ ID NO: 50702 - DNA, 25 bp, probe
atgaatgagtacattgagcagagaa

SEQ ID NO: 50703 - DNA, 25 bp, probe
ccttatgaatggcacttggaagaca

SEQ ID NO: 50704 - DNA, 25 bp, probe
cagtattgaaactcagtgaacaagg

SEQ ID NO: 50705 - DNA, 25 bp, probe
gtgatacgatgaaagttggtggaaa

SEQ ID NO: 50706 - DNA, 25 bp, probe
agacaacaatgaagaacctcgtgac

SEQ ID NO: 50707 - DNA, 25 bp, probe
ggaagacaacaatgaagaacctcgt

SEQ ID NO: 50708 - DNA, 25 bp, probe
tggaagacaacaatgaagaacctcg

SEQ ID NO: 50709 - DNA, 25 bp, probe
aaactcagtgaacaaggcatcttag

SEQ ID NO: 50710 - DNA, 25 bp, probe
gaaactcagtgaacaaggcatctta

SEQ ID NO: 50711 - DNA, 25 bp, probe
gcagtattgaaactcagtgaacaag

SEQ ID NO: 50712 - DNA, 25 bp, probe
aatttcttcctatactgccaatctc

SEQ ID NO: 50713 - DNA, 25 bp, probe
gagtcaaccatgaatgagtacattg

SEQ ID NO: 50714 - DNA, 25 bp, probe
gaatggcacttggaagacaacaatg

SEQ ID NO: 50715 - DNA, 25 bp, probe
tattgaaactcagtgaacaaggcat

SEQ ID NO: 50716 - DNA, 25 bp, probe
catgaatgagtacattgagcagaga

SEQ ID NO: 50717 - DNA, 25 bp, probe
ttcttcctatactgccaatctcgct

SEQ ID NO: 50718 - DNA, 25 bp, probe
ggagtcaaccatgaatgagtacatt

SEQ ID NO: 50719 - DNA, 25 bp, probe
agtgaacaaggcatcttagacaagc

SEQ ID NO: 50720 - DNA, 25 bp, probe
ctagtcagcaggttcagtccttatg

SEQ ID NO: 50721 - DNA, 25 bp, probe
tggagtcaaccatgaatgagtacat

SEQ ID NO: 50722 - DNA, 25 bp, probe
gatatttctccaagatcactctccg

SEQ ID NO: 50723 - DNA, 25 bp, probe
cattgtctttgcttacattggagtc

SEQ ID NO: 50724 - DNA, 25 bp, probe
tacattggagtcagcgtagttcttt

SEQ ID NO: 50725 - DNA, 25 bp, probe
cagtggtgatgcctaaaggaatgtc

SEQ ID NO: 50726 - DNA, 25 bp, probe
agtggtgatgcctaaaggaatgtca

SEQ ID NO: 50727 - DNA, 25 bp, probe
tatgcagtggtgatgcctaaaggaa

SEQ ID NO: 50728 - DNA, 25 bp, probe
gtgtatgcagtggtgatgcctaaag

SEQ ID NO: 50729 - DNA, 25 bp, probe
gtggtgatgcctaaaggaatgtcac

SEQ ID NO: 50730 - DNA, 25 bp, probe
atgcagtggtgatgcctaaaggaat

SEQ ID NO: 50731 - DNA, 25 bp, probe
gtatgcagtggtgatgcctaaagga

SEQ ID NO: 50732 - DNA, 25 bp, probe
tgtatgcagtggtgatgcctaaagg

SEQ ID NO: 50733 - DNA, 25 bp, probe
ggtgtatgcagtggtgatgcctaaa

SEQ ID NO: 50734 - DNA, 25 bp, probe
tggtgatgcctaaaggaatgtcacg

SEQ ID NO: 50735 - DNA, 25 bp, probe
gctatgtatgtgtccttgtgttatg

SEQ ID NO: 50736 - DNA, 25 bp, probe
atgtatgtgtccttgtgttatgttg

SEQ ID NO: 50737 - DNA, 25 bp, probe
tgtatgtgtccttgtgttatgttgt

SEQ ID NO: 50738 - DNA, 25 bp, probe
ggctatgtatgtgtccttgtgttat

SEQ ID NO: 50739 - DNA, 25 bp, probe
gtatgtgtccttgtgttatgttgta

SEQ ID NO: 50740 - DNA, 25 bp, probe
ctatgtatgtgtccttgtgttatgt

SEQ ID NO: 50741 - DNA, 25 bp, probe
tggctatgtatgtgtccttgtgtta

SEQ ID NO: 50742 - DNA, 25 bp, probe
tatgtatgtgtccttgtgttatgtt

SEQ ID NO: 50743 - DNA, 25 bp, probe
tatgtgtccttgtgttatgttgtac

SEQ ID NO: 50744 - DNA, 25 bp, probe
acaactgtgttactgtattccatct

SEQ ID NO: 50745 - DNA, 25 bp, probe
caactgtgttactgtattccatcta

SEQ ID NO: 50746 - DNA, 25 bp, probe
actgtgttactgtattccatctagt

SEQ ID NO: 50747 - DNA, 25 bp, probe
ttggctatgtatgtgtccttgtgtt

SEQ ID NO: 50748 - DNA, 25 bp, probe
atcactatacagaagcaatatccaa

SEQ ID NO: 50749 - DNA, 25 bp, probe
aatcactatacagaagcaatatcca

SEQ ID NO: 50750 - DNA, 25 bp, probe
ttacattcatggtccaacagaacac

SEQ ID NO: 50751 - DNA, 25 bp, probe
aactgtgttactgtattccatctag

SEQ ID NO: 50752 - DNA, 25 bp, probe
ttacaagatacaactgtgttactgt

SEQ ID NO: 50753 - DNA, 25 bp, probe
tttggtgtggcttactatttcattg

SEQ ID NO: 50754 - DNA, 25 bp, probe
ctttggtgtggcttactatttcatt

SEQ ID NO: 50755 - DNA, 25 bp, probe
atgagcctttgtttgagatttgaaa

SEQ ID NO: 50756 - DNA, 25 bp, probe
gtatgagcctttgtttgagatttga

SEQ ID NO: 50757 - DNA, 25 bp, probe
tgtatgagcctttgtttgagatttg

SEQ ID NO: 50758 - DNA, 25 bp, probe
cctgtgattattgtatgagcctttg

SEQ ID NO: 50759 - DNA, 25 bp, probe
tatgtctttggctatgtatgtgtcc

SEQ ID NO: 50760 - DNA, 25 bp, probe
ttgtatgagcctttgtttgagattt

SEQ ID NO: 50761 - DNA, 25 bp, probe
ctgtgattattgtatgagcctttgt

SEQ ID NO: 50762 - DNA, 25 bp, probe
tatccctgtgattattgtatgagcc

SEQ ID NO: 50763 - DNA, 25 bp, probe
gtgtggcttactatttcattgtgtg

SEQ ID NO: 50764 - DNA, 25 bp, probe
tgttactgtattccatctagtacgg

SEQ ID NO: 50765 - DNA, 25 bp, probe
cactgtaatgaatatgtctttggct

SEQ ID NO: 50766 - DNA, 25 bp, probe
tatgagcctttgtttgagatttgaa

SEQ ID NO: 50767 - DNA, 25 bp, probe
attgtatgagcctttgtttgagatt

SEQ ID NO: 50768 - DNA, 25 bp, probe
ccctgtgattattgtatgagccttt

SEQ ID NO: 50769 - DNA, 25 bp, probe
ttggtgtggcttactatttcattgt

SEQ ID NO: 50770 - DNA, 25 bp, probe
tttctgtccctactgtgatgaatag

SEQ ID NO: 50771 - DNA, 25 bp, probe
tgtgattattgtatgagcctttgtt

SEQ ID NO: 50772 - DNA, 25 bp, probe
gtatccctgtgattattgtatgagc

SEQ ID NO: 50773 - DNA, 25 bp, probe
cctttggtgtggcttactatttcat

SEQ ID NO: 50774 - DNA, 25 bp, probe
tacattcatggtccaacagaacaca

SEQ ID NO: 50775 - DNA, 25 bp, probe
ttattgtatgagcctttgtttgaga

SEQ ID NO: 50776 - DNA, 25 bp, probe
atatgtctttggctatgtatgtgtc

SEQ ID NO: 50777 - DNA, 25 bp, probe
atccctgtgattattgtatgagcct

SEQ ID NO: 50778 - DNA, 25 bp, probe
gtgttactgtattccatctagtacg

SEQ ID NO: 50779 - DNA, 25 bp, probe
attgactggattgaggagaccatag

SEQ ID NO: 50780 - DNA, 25 bp, probe
cattgactggattgaggagaccata

SEQ ID NO: 50781 - DNA, 25 bp, probe
cttcattgactggattgaggagacc

SEQ ID NO: 50782 - DNA, 25 bp, probe
ccttcattgactggattgaggagac

SEQ ID NO: 50783 - DNA, 25 bp, probe
tcgatcccacatcctgaataaagaa

SEQ ID NO: 50784 - DNA, 25 bp, probe
tcattgactggattgaggagaccat

SEQ ID NO: 50785 - DNA, 25 bp, probe
ttcattgactggattgaggagacca

SEQ ID NO: 50786 - DNA, 25 bp, probe
actggattgaggagaccatagcaag

SEQ ID NO: 50787 - DNA, 25 bp, probe
gactggattgaggagaccatagcaa

SEQ ID NO: 50788 - DNA, 25 bp, probe
ttgactggattgaggagaccatagc

SEQ ID NO: 50789 - DNA, 25 bp, probe
accatagcaagccactagaaccaag

SEQ ID NO: 50790 - DNA, 25 bp, probe
gaccatagcaagccactagaaccaa

SEQ ID NO: 50791 - DNA, 25 bp, probe
gccttcattgactggattgaggaga

SEQ ID NO: 50792 - DNA, 25 bp, probe
gagaccatagcaagccactagaacc

SEQ ID NO: 50793 - DNA, 25 bp, probe
ggagaccatagcaagccactagaac

SEQ ID NO: 50794 - DNA, 25 bp, probe
aggagaccatagcaagccactagaa

SEQ ID NO: 50795 - DNA, 25 bp, probe
ttgaggagaccatagcaagccacta

SEQ ID NO: 50796 - DNA, 25 bp, probe
atcgatcccacatcctgaataaaga

SEQ ID NO: 50797 - DNA, 25 bp, probe
gaggagaccatagcaagccactaga

SEQ ID NO: 50798 - DNA, 25 bp, probe
tgactggattgaggagaccatagca

SEQ ID NO: 50799 - DNA, 25 bp, probe
ctggattgaggagaccatagcaagc

SEQ ID NO: 50800 - DNA, 25 bp, probe
ctatgaacactgctccaggtggaac

SEQ ID NO: 50801 - DNA, 25 bp, probe
catcaactctggggacctctttgtg

SEQ ID NO: 50802 - DNA, 25 bp, probe
tatcatcgcaaaactcatgatgctc

SEQ ID NO: 50803 - DNA, 25 bp, probe
ctatcatcgcaaaactcatgatgct

SEQ ID NO: 50804 - DNA, 25 bp, probe
cctatcatcgcaaaactcatgatgc

SEQ ID NO: 50805 - DNA, 25 bp, probe
atcatcgcaaaactcatgatgctcc

SEQ ID NO: 50806 - DNA, 25 bp, probe
tgcagtatgagaaaagcggaagctt

SEQ ID NO: 50807 - DNA, 25 bp, probe
ctgatctatggactctggaacaaga

SEQ ID NO: 50808 - DNA, 25 bp, probe
gatctatggactctggaacaagaca

SEQ ID NO: 50809 - DNA, 25 bp, probe
tgatctatggactctggaacaagac

SEQ ID NO: 50810 - DNA, 25 bp, probe
atctatggactctggaacaagacag

SEQ ID NO: 50811 - DNA, 25 bp, probe
cctgatctatggactctggaacaag

SEQ ID NO: 50812 - DNA, 25 bp, probe
ctatggactctggaacaagacagtt

SEQ ID NO: 50813 - DNA, 25 bp, probe
tctatggactctggaacaagacagt

SEQ ID NO: 50814 - DNA, 25 bp, probe
tattatcgggaaccatttgtgcaac

SEQ ID NO: 50815 - DNA, 25 bp, probe
gtattatcgggaaccatttgtgcaa

SEQ ID NO: 50816 - DNA, 25 bp, probe
tatggactctggaacaagacagttc

SEQ ID NO: 50817 - DNA, 25 bp, probe
ccctgatctatggactctggaacaa

SEQ ID NO: 50818 - DNA, 25 bp, probe
ctcttcagcatttccaacaggatca

SEQ ID NO: 50819 - DNA, 25 bp, probe
tcttcagcatttccaacaggatcac

SEQ ID NO: 50820 - DNA, 25 bp, probe
ttcagcatttccaacaggatcacag

SEQ ID NO: 50821 - DNA, 25 bp, probe
cttcagcatttccaacaggatcaca

SEQ ID NO: 50822 - DNA, 25 bp, probe
ctacatggttgtcatcgcctctgag

SEQ ID NO: 50823 - DNA, 25 bp, probe
cagcatttccaacaggatcacagac

SEQ ID NO: 50824 - DNA, 25 bp, probe
ggtattatcgggaaccatttgtgca

SEQ ID NO: 50825 - DNA, 25 bp, probe
tcagcatttccaacaggatcacaga

SEQ ID NO: 50826 - DNA, 25 bp, probe
cggtattatcgggaaccatttgtgc

SEQ ID NO: 50827 - DNA, 25 bp, probe
aaagaactactgggcatgtgctttg

SEQ ID NO: 50828 - DNA, 25 bp, probe
caaagaactactgggcatgtgcttt

SEQ ID NO: 50829 - DNA, 25 bp, probe
attatcgggaaccatttgtgcaacg

SEQ ID NO: 50830 - DNA, 25 bp, probe
gctcttcagcatttccaacaggatc

SEQ ID NO: 50831 - DNA, 25 bp, probe
atggactctggaacaagacagttcg

SEQ ID NO: 50832 - DNA, 25 bp, probe
catttgtgcaacgacagaggacttc

SEQ ID NO: 50833 - DNA, 25 bp, probe
gcatttccaacaggatcacagacct

SEQ ID NO: 50834 - DNA, 25 bp, probe
agcatttccaacaggatcacagacc

SEQ ID NO: 50835 - DNA, 25 bp, probe
ctggaacaagacagttcgcaaagaa

SEQ ID NO: 50836 - DNA, 25 bp, probe
tggaacaagacagttcgcaaagaac

SEQ ID NO: 50837 - DNA, 25 bp, probe
ctctggaacaagacagttcgcaaag

SEQ ID NO: 50838 - DNA, 25 bp, probe
cccctgatctatggactctggaaca

SEQ ID NO: 50839 - DNA, 25 bp, probe
gtgctttataagcctctcacctgtc

SEQ ID NO: 50840 - DNA, 25 bp, probe
tctggaacaagacagttcgcaaaga

SEQ ID NO: 50841 - DNA, 25 bp, probe
actctggaacaagacagttcgcaaa

SEQ ID NO: 50842 - DNA, 25 bp, probe
ccggtattatcgggaaccatttgtg

SEQ ID NO: 50843 - DNA, 25 bp, probe
catttccaacaggatcacagacctg

SEQ ID NO: 50844 - DNA, 25 bp, probe
gtaacctgcgtgctttataagcctc

SEQ ID NO: 50845 - DNA, 25 bp, probe
taacctgcgtgctttataagcctct

SEQ ID NO: 50846 - DNA, 25 bp, probe
tcaggtaacctgcgtgctttataag

SEQ ID NO: 50847 - DNA, 25 bp, probe
ctcaggtaacctgcgtgctttataa

SEQ ID NO: 50848 - DNA, 25 bp, probe
tgctttataagcctctcacctgtcg

SEQ ID NO: 50849 - DNA, 25 bp, probe
cgtgctttataagcctctcacctgt

SEQ ID NO: 50850 - DNA, 25 bp, probe
atttccaacaggatcacagacctgg

SEQ ID NO: 50851 - DNA, 25 bp, probe
agccataatctcttagtggattgag

SEQ ID NO: 50852 - DNA, 25 bp, probe
aagccataatctcttagtggattga

SEQ ID NO: 50853 - DNA, 25 bp, probe
ccataatctcttagtggattgagcc

SEQ ID NO: 50854 - DNA, 25 bp, probe
gctggattattaaagtggattgtca

SEQ ID NO: 50855 - DNA, 25 bp, probe
gccataatctcttagtggattgagc

SEQ ID NO: 50856 - DNA, 25 bp, probe
tcccttctctaagccataatctctt

SEQ ID NO: 50857 - DNA, 25 bp, probe
ttcccttctctaagccataatctct

SEQ ID NO: 50858 - DNA, 25 bp, probe
gttcccttctctaagccataatctc

SEQ ID NO: 50859 - DNA, 25 bp, probe
ctgttcccttctctaagccataatc

SEQ ID NO: 50860 - DNA, 25 bp, probe
tgttcccttctctaagccataatct

SEQ ID NO: 50861 - DNA, 25 bp, probe
taagccataatctcttagtggattg

SEQ ID NO: 50862 - DNA, 25 bp, probe
cccttctctaagccataatctctta

SEQ ID NO: 50863 - DNA, 25 bp, probe
agctggattattaaagtggattgtc

SEQ ID NO: 50864 - DNA, 25 bp, probe
ctgaagctggattattaaagtggat

SEQ ID NO: 50865 - DNA, 25 bp, probe
gctgaagctggattattaaagtgga

SEQ ID NO: 50866 - DNA, 25 bp, probe
ataatctcttagtggattgagccct

SEQ ID NO: 50867 - DNA, 25 bp, probe
cataatctcttagtggattgagccc

SEQ ID NO: 50868 - DNA, 25 bp, probe
aagctggattattaaagtggattgt

SEQ ID NO: 50869 - DNA, 25 bp, probe
tgaagctggattattaaagtggatt

SEQ ID NO: 50870 - DNA, 25 bp, probe
taatctcttagtggattgagccctc

SEQ ID NO: 50871 - DNA, 25 bp, probe
gaagctggattattaaagtggattg

SEQ ID NO: 50872 - DNA, 25 bp, probe
ctggattattaaagtggattgtcac

SEQ ID NO: 50873 - DNA, 25 bp, probe
atctcttagtggattgagccctctt

SEQ ID NO: 50874 - DNA, 25 bp, probe
ttctttgagctgttcccttctctaa

SEQ ID NO: 50875 - DNA, 25 bp, probe
tctttgagctgttcccttctctaag

SEQ ID NO: 50876 - DNA, 25 bp, probe
cttctttgagctgttcccttctcta

SEQ ID NO: 50877 - DNA, 25 bp, probe
ttagtggattgagccctcttggaaa

SEQ ID NO: 50878 - DNA, 25 bp, probe
gagctgaagctggattattaaagtg

SEQ ID NO: 50879 - DNA, 25 bp, probe
tgagctgaagctggattattaaagt

SEQ ID NO: 50880 - DNA, 25 bp, probe
ctgagctgaagctggattattaaag

SEQ ID NO: 50881 - DNA, 25 bp, probe
aatctcttagtggattgagccctct

SEQ ID NO: 50882 - DNA, 25 bp, probe
accattggacctatcttggcttctc

SEQ ID NO: 50883 - DNA, 25 bp, probe
agctgaagctggattattaaagtgg

SEQ ID NO: 50884 - DNA, 25 bp, probe
tctcttagtggattgagccctcttg

SEQ ID NO: 50885 - DNA, 25 bp, probe
gctgttcccttctctaagccataat

SEQ ID NO: 50886 - DNA, 25 bp, probe
gctgagctgaagctggattattaaa

SEQ ID NO: 50887 - DNA, 25 bp, probe
cttagtggattgagccctcttggaa

SEQ ID NO: 50888 - DNA, 25 bp, probe
cattggacctatcttggcttctcgg

SEQ ID NO: 50889 - DNA, 25 bp, probe
tagtggattgagccctcttggaaag

SEQ ID NO: 50890 - DNA, 25 bp, probe
ctctaagccataatctcttagtgga

SEQ ID NO: 50891 - DNA, 25 bp, probe
tctctaagccataatctcttagtgg

SEQ ID NO: 50892 - DNA, 25 bp, probe
caccattggacctatcttggcttct

SEQ ID NO: 50893 - DNA, 25 bp, probe
tggaaccaccattggacctatcttg

SEQ ID NO: 50894 - DNA, 25 bp, probe
tctaagccataatctcttagtggat

SEQ ID NO: 50895 - DNA, 25 bp, probe
ttatgttgttattctcggactgtga

SEQ ID NO: 50896 - DNA, 25 bp, probe
gttatgttgttattctcggactgtg

SEQ ID NO: 50897 - DNA, 25 bp, probe
ctggttatgttgttattctcggact

SEQ ID NO: 50898 - DNA, 25 bp, probe
ggttatgttgttattctcggactgt

SEQ ID NO: 50899 - DNA, 25 bp, probe
tggttatgttgttattctcggactg

SEQ ID NO: 50900 - DNA, 25 bp, probe
tatgttgttattctcggactgtgaa

SEQ ID NO: 50901 - DNA, 25 bp, probe
cctggttatgttgttattctcggac

SEQ ID NO: 50902 - DNA, 25 bp, probe
gacctggttatgttgttattctcgg

SEQ ID NO: 50903 - DNA, 25 bp, probe
ggacctggttatgttgttattctcg

SEQ ID NO: 50904 - DNA, 25 bp, probe
ctagactaggagaccagaagtgaat

SEQ ID NO: 50905 - DNA, 25 bp, probe
tagactaggagaccagaagtgaatg

SEQ ID NO: 50906 - DNA, 25 bp, probe
acctggttatgttgttattctcgga

SEQ ID NO: 50907 - DNA, 25 bp, probe
atgttgttattctcggactgtgaat

SEQ ID NO: 50908 - DNA, 25 bp, probe
tgttgttattctcggactgtgaatt

SEQ ID NO: 50909 - DNA, 25 bp, probe
attgggacctggttatgttgttatt

SEQ ID NO: 50910 - DNA, 25 bp, probe
aattgggacctggttatgttgttat

SEQ ID NO: 50911 - DNA, 25 bp, probe
ttgggacctggttatgttgttattc

SEQ ID NO: 50912 - DNA, 25 bp, probe
gaattgggacctggttatgttgtta

SEQ ID NO: 50913 - DNA, 25 bp, probe
gggacctggttatgttgttattctc

SEQ ID NO: 50914 - DNA, 25 bp, probe
gctagactaggagaccagaagtgaa

SEQ ID NO: 50915 - DNA, 25 bp, probe
gcatcccaagatcattctacaagta

SEQ ID NO: 50916 - DNA, 25 bp, probe
tgggacctggttatgttgttattct

SEQ ID NO: 50917 - DNA, 25 bp, probe
attagctagactaggagaccagaag

SEQ ID NO: 50918 - DNA, 25 bp, probe
gattagctagactaggagaccagaa

SEQ ID NO: 50919 - DNA, 25 bp, probe
cagcatcccaagatcattctacaag

SEQ ID NO: 50920 - DNA, 25 bp, probe
aatccagcatcccaagatcattcta

SEQ ID NO: 50921 - DNA, 25 bp, probe
catcccaagatcattctacaagtaa

SEQ ID NO: 50922 - DNA, 25 bp, probe
agcatcccaagatcattctacaagt

SEQ ID NO: 50923 - DNA, 25 bp, probe
gttgttattctcggactgtgaattt

SEQ ID NO: 50924 - DNA, 25 bp, probe
ttgtgaaccaactgccttaaccttc

SEQ ID NO: 50925 - DNA, 25 bp, probe
ctttcttaatatcactttggtctcc

SEQ ID NO: 50926 - DNA, 25 bp, probe
agactaggagaccagaagtgaatgg

SEQ ID NO: 50927 - DNA, 25 bp, probe
ggattagctagactaggagaccaga

SEQ ID NO: 50928 - DNA, 25 bp, probe
atccagcatcccaagatcattctac

SEQ ID NO: 50929 - DNA, 25 bp, probe
aaatccagcatcccaagatcattct

SEQ ID NO: 50930 - DNA, 25 bp, probe
gtgaaccaactgccttaaccttctg

SEQ ID NO: 50931 - DNA, 25 bp, probe
ttagctagactaggagaccagaagt

SEQ ID NO: 50932 - DNA, 25 bp, probe
tcccaagatcattctacaagtaatt

SEQ ID NO: 50933 - DNA, 25 bp, probe
aatgtctgtataaataatgagcgtt

SEQ ID NO: 50934 - DNA, 25 bp, probe
atcccaagatcattctacaagtaat

SEQ ID NO: 50935 - DNA, 25 bp, probe
ccagcatcccaagatcattctacaa

SEQ ID NO: 50936 - DNA, 25 bp, probe
actttcttaatatcactttggtctc

SEQ ID NO: 50937 - DNA, 25 bp, probe
tagctagactaggagaccagaagtg

SEQ ID NO: 50938 - DNA, 25 bp, probe
tgtgaaccaactgccttaaccttct

SEQ ID NO: 50939 - DNA, 25 bp, probe
caaccatgaactcagctattaagaa

SEQ ID NO: 50940 - DNA, 25 bp, probe
gcaaccatgaactcagctattaaga

SEQ ID NO: 50941 - DNA, 25 bp, probe
catcctccttgtcttaatcgtcctg

SEQ ID NO: 50942 - DNA, 25 bp, probe
tttcaaatcctccctacttccaaga

SEQ ID NO: 50943 - DNA, 25 bp, probe
ctttcaaatcctccctacttccaag

SEQ ID NO: 50944 - DNA, 25 bp, probe
tcaaatcctccctacttccaagaaa

SEQ ID NO: 50945 - DNA, 25 bp, probe
ttcaaatcctccctacttccaagaa

SEQ ID NO: 50946 - DNA, 25 bp, probe
ccatcctccttgtcttaatcgtcct

SEQ ID NO: 50947 - DNA, 25 bp, probe
tcaatgatgagtcctctctggtcag

SEQ ID NO: 50948 - DNA, 25 bp, probe
agatgccttctagattcactgtctt

SEQ ID NO: 50949 - DNA, 25 bp, probe
aagcaaccatgaactcagctattaa

SEQ ID NO: 50950 - DNA, 25 bp, probe
agcaaccatgaactcagctattaag

SEQ ID NO: 50951 - DNA, 25 bp, probe
gtcaatgatgagtcctctctggtca

SEQ ID NO: 50952 - DNA, 25 bp, probe
gctttcaaatcctccctacttccaa

SEQ ID NO: 50953 - DNA, 25 bp, probe
gtcagacatcgctggaaatgaatag

SEQ ID NO: 50954 - DNA, 25 bp, probe
caagcaaccatgaactcagctatta

SEQ ID NO: 50955 - DNA, 25 bp, probe
aaccatgaactcagctattaagaaa

SEQ ID NO: 50956 - DNA, 25 bp, probe
caatgatgagtcctctctggtcaga

SEQ ID NO: 50957 - DNA, 25 bp, probe
atcctccttgtcttaatcgtcctgc

SEQ ID NO: 50958 - DNA, 25 bp, probe
agccatcctccttgtcttaatcgtc

SEQ ID NO: 50959 - DNA, 25 bp, probe
aatgatgagtcctctctggtcagac

SEQ ID NO: 50960 - DNA, 25 bp, probe
cagatgccttctagattcactgtct

SEQ ID NO: 50961 - DNA, 25 bp, probe
ctttctcaacagaggatgtagccag

SEQ ID NO: 50962 - DNA, 25 bp, probe
gagccatcctccttgtcttaatcgt

SEQ ID NO: 50963 - DNA, 25 bp, probe
caaatcctccctacttccaagaaaa

SEQ ID NO: 50964 - DNA, 25 bp, probe
ggtcagacatcgctggaaatgaata

SEQ ID NO: 50965 - DNA, 25 bp, probe
gatgccttctagattcactgtcttt

SEQ ID NO: 50966 - DNA, 25 bp, probe
tcaagcaaccatgaactcagctatt

SEQ ID NO: 50967 - DNA, 25 bp, probe
cgtcaatgatgagtcctctctggtc

SEQ ID NO: 50968 - DNA, 25 bp, probe
gtcgtcaatgatgagtcctctctgg

SEQ ID NO: 50969 - DNA, 25 bp, probe
ggtcgtcaatgatgagtcctctctg

SEQ ID NO: 50970 - DNA, 25 bp, probe
ccagatgccttctagattcactgtc

SEQ ID NO: 50971 - DNA, 25 bp, probe
agattcactgtcttttgattcttga

SEQ ID NO: 50972 - DNA, 25 bp, probe
cctccttgtcttaatcgtcctgctg

SEQ ID NO: 50973 - DNA, 25 bp, probe
ctcaagcaaccatgaactcagctat

SEQ ID NO: 50974 - DNA, 25 bp, probe
tcctccttgtcttaatcgtcctgct

SEQ ID NO: 50975 - DNA, 25 bp, probe
gccatcctccttgtcttaatcgtcc

SEQ ID NO: 50976 - DNA, 25 bp, probe
agctttcaaatcctccctacttcca

SEQ ID NO: 50977 - DNA, 25 bp, probe
tgatgagtcctctctggtcagacat

SEQ ID NO: 50978 - DNA, 25 bp, probe
atgatgagtcctctctggtcagaca

SEQ ID NO: 50979 - DNA, 25 bp, probe
tcgtcaatgatgagtcctctctggt

SEQ ID NO: 50980 - DNA, 25 bp, probe
aggtcgtcaatgatgagtcctctct

SEQ ID NO: 50981 - DNA, 25 bp, probe
gtcttcaatctctgttctgctccca

SEQ ID NO: 50982 - DNA, 25 bp, probe
cactgtcttttgattcttgattttc

SEQ ID NO: 50983 - DNA, 25 bp, probe
aaggacatatcttggaacttctgac

SEQ ID NO: 50984 - DNA, 25 bp, probe
aggacatatcttggaacttctgaca

SEQ ID NO: 50985 - DNA, 25 bp, probe
ggacatatcttggaacttctgacag

SEQ ID NO: 50986 - DNA, 25 bp, probe
agtaggtggagatgagattgtgatg

SEQ ID NO: 50987 - DNA, 25 bp, probe
cagtaggtggagatgagattgtgat

SEQ ID NO: 50988 - DNA, 25 bp, probe
acatatcttggaacttctgacagag

SEQ ID NO: 50989 - DNA, 25 bp, probe
gacatatcttggaacttctgacaga

SEQ ID NO: 50990 - DNA, 25 bp, probe
catatcttggaacttctgacagagg

SEQ ID NO: 50991 - DNA, 25 bp, probe
atatcttggaacttctgacagaggt

SEQ ID NO: 50992 - DNA, 25 bp, probe
gtaggtggagatgagattgtgatgg

SEQ ID NO: 50993 - DNA, 25 bp, probe
taggtggagatgagattgtgatggt

SEQ ID NO: 50994 - DNA, 25 bp, probe
aacagtaggtggagatgagattgtg

SEQ ID NO: 50995 - DNA, 25 bp, probe
tatcttggaacttctgacagaggtg

SEQ ID NO: 50996 - DNA, 25 bp, probe
gaaacagtaggtggagatgagattg

SEQ ID NO: 50997 - DNA, 25 bp, probe
ggaaaggacatatcttggaacttct

SEQ ID NO: 50998 - DNA, 25 bp, probe
aggaaaggacatatcttggaacttc

SEQ ID NO: 50999 - DNA, 25 bp, probe
gaggaaaggacatatcttggaactt

SEQ ID NO: 51000 - DNA, 25 bp, probe
aaaggacatatcttggaacttctga

SEQ ID NO: 51001 - DNA, 25 bp, probe
tgaaacagtaggtggagatgagatt

SEQ ID NO: 51002 - DNA, 25 bp, probe
gaaaggacatatcttggaacttctg

SEQ ID NO: 51003 - DNA, 25 bp, probe
agaggaaaggacatatcttggaact

SEQ ID NO: 51004 - DNA, 25 bp, probe
gttcacgaagaggaaaggacatatc

SEQ ID NO: 51005 - DNA, 25 bp, probe
ttcacgaagaggaaaggacatatct

SEQ ID NO: 51006 - DNA, 25 bp, probe
acagtaggtggagatgagattgtga

SEQ ID NO: 51007 - DNA, 25 bp, probe
gtgaaacagtaggtggagatgagat

SEQ ID NO: 51008 - DNA, 25 bp, probe
aaacagtaggtggagatgagattgt

SEQ ID NO: 51009 - DNA, 25 bp, probe
acaaaccatcccaacatacacagat

SEQ ID NO: 51010 - DNA, 25 bp, probe
tgttcacgaagaggaaaggacatat

SEQ ID NO: 51011 - DNA, 25 bp, probe
atcttggaacttctgacagaggtga

SEQ ID NO: 51012 - DNA, 25 bp, probe
tttattccacggtagagggatacat

SEQ ID NO: 51013 - DNA, 25 bp, probe
aggtggagatgagattgtgatggtc

SEQ ID NO: 51014 - DNA, 25 bp, probe
ttattccacggtagagggatacatc

SEQ ID NO: 51015 - DNA, 25 bp, probe
gtttattccacggtagagggataca

SEQ ID NO: 51016 - DNA, 25 bp, probe
gatggtcaagctggagaatctcttc

SEQ ID NO: 51017 - DNA, 25 bp, probe
gtggagatgagattgtgatggtcat

SEQ ID NO: 51018 - DNA, 25 bp, probe
gaagaggaaaggacatatcttggaa

SEQ ID NO: 51019 - DNA, 25 bp, probe
gtgttcacgaagaggaaaggacata

SEQ ID NO: 51020 - DNA, 25 bp, probe
aagaggaaaggacatatcttggaac

SEQ ID NO: 51021 - DNA, 25 bp, probe
cacaaaccatcccaacatacacaga

SEQ ID NO: 51022 - DNA, 25 bp, probe
ggtggagatgagattgtgatggtca

SEQ ID NO: 51023 - DNA, 25 bp, probe
tcttggaacttctgacagaggtgac

SEQ ID NO: 51024 - DNA, 25 bp, probe
cacgaagaggaaaggacatatcttg

SEQ ID NO: 51025 - DNA, 25 bp, probe
tcacgaagaggaaaggacatatctt

SEQ ID NO: 51026 - DNA, 25 bp, probe
ggtgaaacagtaggtggagatgaga

SEQ ID NO: 51027 - DNA, 25 bp, probe
gcctataagttccgattggtggtaa

SEQ ID NO: 51028 - DNA, 25 bp, probe
cctataagttccgattggtggtaaa

SEQ ID NO: 51029 - DNA, 25 bp, probe
atcaaatgaccaaacgaaagagagt

SEQ ID NO: 51030 - DNA, 25 bp, probe
catcaaatgaccaaacgaaagagag

SEQ ID NO: 51031 - DNA, 25 bp, probe
tcaaatgaccaaacgaaagagagtg

SEQ ID NO: 51032 - DNA, 25 bp, probe
aaagagagtggtcctagtcaaagag

SEQ ID NO: 51033 - DNA, 25 bp, probe
gaaagagagtggtcctagtcaaaga

SEQ ID NO: 51034 - DNA, 25 bp, probe
gtttctaccttctgtgacaagtgtg

SEQ ID NO: 51035 - DNA, 25 bp, probe
ccatcaaatgaccaaacgaaagaga

SEQ ID NO: 51036 - DNA, 25 bp, probe
ataacatcatggtcctggtttctac

SEQ ID NO: 51037 - DNA, 25 bp, probe
gtataacatcatggtcctggtttct

SEQ ID NO: 51038 - DNA, 25 bp, probe
ctcatagacccaagagtcagaaatg

SEQ ID NO: 51039 - DNA, 25 bp, probe
aagacctttaagatgctgcttctct

SEQ ID NO: 51040 - DNA, 25 bp, probe
catagacccaagagtcagaaatgtg

SEQ ID NO: 51041 - DNA, 25 bp, probe
tcatagacccaagagtcagaaatgt

SEQ ID NO: 51042 - DNA, 25 bp, probe
tataacatcatggtcctggtttcta

SEQ ID NO: 51043 - DNA, 25 bp, probe
aagagagtggtcctagtcaaagaga

SEQ ID NO: 51044 - DNA, 25 bp, probe
atagacccaagagtcagaaatgtgt

SEQ ID NO: 51045 - DNA, 25 bp, probe
cgtataacatcatggtcctggtttc

SEQ ID NO: 51046 - DNA, 25 bp, probe
gaaccttcaggaagacctttaagat

SEQ ID NO: 51047 - DNA, 25 bp, probe
aaccttcaggaagacctttaagatg

SEQ ID NO: 51048 - DNA, 25 bp, probe
agagagtggtcctagtcaaagagag

SEQ ID NO: 51049 - DNA, 25 bp, probe
tttctaccttctgtgacaagtgtgt

SEQ ID NO: 51050 - DNA, 25 bp, probe
agacctttaagatgctgcttctctg

SEQ ID NO: 51051 - DNA, 25 bp, probe
agaaccttcaggaagacctttaaga

SEQ ID NO: 51052 - DNA, 25 bp, probe
cagaaccttcaggaagacctttaag

SEQ ID NO: 51053 - DNA, 25 bp, probe
cgaaagagagtggtcctagtcaaag

SEQ ID NO: 51054 - DNA, 25 bp, probe
gctcatagacccaagagtcagaaat

SEQ ID NO: 51055 - DNA, 25 bp, probe
cttcaggaagacctttaagatgctg

SEQ ID NO: 51056 - DNA, 25 bp, probe
acagaaccttcaggaagacctttaa

SEQ ID NO: 51057 - DNA, 25 bp, probe
aacagaaccttcaggaagaccttta

SEQ ID NO: 51058 - DNA, 25 bp, probe
tagacccaagagtcagaaatgtgtg

SEQ ID NO: 51059 - DNA, 25 bp, probe
gtgctgaagagactgaggaaacttt

SEQ ID NO: 51060 - DNA, 25 bp, probe
caaacgaaagagagtggtcctagtc

SEQ ID NO: 51061 - DNA, 25 bp, probe
aatgtgtggcctataagttccgatt

SEQ ID NO: 51062 - DNA, 25 bp, probe
gccatcaaatgaccaaacgaaagag

SEQ ID NO: 51063 - DNA, 25 bp, probe
aagtggaagagaagttgtactggca

SEQ ID NO: 51064 - DNA, 25 bp, probe
ccgtataacatcatggtcctggttt

SEQ ID NO: 51065 - DNA, 25 bp, probe
acgaaagagagtggtcctagtcaaa

SEQ ID NO: 51066 - DNA, 25 bp, probe
aacgaaagagagtggtcctagtcaa

SEQ ID NO: 51067 - DNA, 25 bp, probe
aaacgaaagagagtggtcctagtca

SEQ ID NO: 51068 - DNA, 25 bp, probe
agagactgaggaaacttttgtgaaa

SEQ ID NO: 51069 - DNA, 25 bp, probe
ccttcaggaagacctttaagatgct

SEQ ID NO: 51070 - DNA, 25 bp, probe
ggctattggttgtgctatgtcaata

SEQ ID NO: 51071 - DNA, 25 bp, probe
atcacagaatggacatacagaagtt

SEQ ID NO: 51072 - DNA, 25 bp, probe
aatcacagaatggacatacagaagt

SEQ ID NO: 51073 - DNA, 25 bp, probe
gaatcacagaatggacatacagaag

SEQ ID NO: 51074 - DNA, 25 bp, probe
ctactcctactcctactcctgataa

SEQ ID NO: 51075 - DNA, 25 bp, probe
tgaatcacagaatggacatacagaa

SEQ ID NO: 51076 - DNA, 25 bp, probe
ttgaatcacagaatggacatacaga

SEQ ID NO: 51077 - DNA, 25 bp, probe
cctactcctactcctactcctgata

SEQ ID NO: 51078 - DNA, 25 bp, probe
atcctactcctactcctactcctac

SEQ ID NO: 51079 - DNA, 25 bp, probe
attgaatcacagaatggacatacag

SEQ ID NO: 51080 - DNA, 25 bp, probe
ctactcctactcctactcctactcc

SEQ ID NO: 51081 - DNA, 25 bp, probe
cctactcctactcctactcctactc

SEQ ID NO: 51082 - DNA, 25 bp, probe
attgatcctactcctactcctactc

SEQ ID NO: 51083 - DNA, 25 bp, probe
cattgatcctactcctactcctact

SEQ ID NO: 51084 - DNA, 25 bp, probe
gacattgatcctactcctactccta

SEQ ID NO: 51085 - DNA, 25 bp, probe
acattgatcctactcctactcctac

SEQ ID NO: 51086 - DNA, 25 bp, probe
gatgacattgatcctactcctactc

SEQ ID NO: 51087 - DNA, 25 bp, probe
tgatgacattgatcctactcctact

SEQ ID NO: 51088 - DNA, 25 bp, probe
ctgatgacattgatcctactcctac

SEQ ID NO: 51089 - DNA, 25 bp, probe
aatcctgatgacattgatcctactc

SEQ ID NO: 51090 - DNA, 25 bp, probe
tactcctactcctactcctactcct

SEQ ID NO: 51091 - DNA, 25 bp, probe
tcctactcctactcctactcctact

SEQ ID NO: 51092 - DNA, 25 bp, probe
gatcctactcctactcctactccta

SEQ ID NO: 51093 - DNA, 25 bp, probe
atgacattgatcctactcctactcc

SEQ ID NO: 51094 - DNA, 25 bp, probe
cctgatgacattgatcctactccta

SEQ ID NO: 51095 - DNA, 25 bp, probe
ttctacgctggtattgtctgtgatt

SEQ ID NO: 51096 - DNA, 25 bp, probe
ttgatcctactcctactcctactcc

SEQ ID NO: 51097 - DNA, 25 bp, probe
atcctgatgacattgatcctactcc

SEQ ID NO: 51098 - DNA, 25 bp, probe
agattattcttacatggacagcacc

SEQ ID NO: 51099 - DNA, 25 bp, probe
tcctactcctactcctactcctgat

SEQ ID NO: 51100 - DNA, 25 bp, probe
tgacattgatcctactcctactcct

SEQ ID NO: 51101 - DNA, 25 bp, probe
tctacgctggtattgtctgtgattg

SEQ ID NO: 51102 - DNA, 25 bp, probe
tgatcctactcctactcctactcct

SEQ ID NO: 51103 - DNA, 25 bp, probe
aagtatccaacattgcacaagtaac

SEQ ID NO: 51104 - DNA, 25 bp, probe
tcctgatgacattgatcctactcct

SEQ ID NO: 51105 - DNA, 25 bp, probe
ctcctactcctactcctactcctga

SEQ ID NO: 51106 - DNA, 25 bp, probe
tcacagaatggacatacagaagttt

SEQ ID NO: 51107 - DNA, 25 bp, probe
atatttctacgctggtattgtctgt

SEQ ID NO: 51108 - DNA, 25 bp, probe
gtatccaacattgcacaagtaactt

SEQ ID NO: 51109 - DNA, 25 bp, probe
tatttctacgctggtattgtctgtg

SEQ ID NO: 51110 - DNA, 25 bp, probe
atatgtacctgttcttggagccaat

SEQ ID NO: 51111 - DNA, 25 bp, probe
gtgattgggtctgttgtaattgtta

SEQ ID NO: 51112 - DNA, 25 bp, probe
caccatttgaaccttaacgaagaaa

SEQ ID NO: 51113 - DNA, 25 bp, probe
agtaaaggagagcaaataaacaaca

SEQ ID NO: 51114 - DNA, 25 bp, probe
acaagtaaaggagagcaaataaaca

SEQ ID NO: 51115 - DNA, 25 bp, probe
atagaggatagtattagccaaggtg

SEQ ID NO: 51116 - DNA, 25 bp, probe
catagaggatagtattagccaaggt

SEQ ID NO: 51117 - DNA, 25 bp, probe
acatagaggatagtattagccaagg

SEQ ID NO: 51118 - DNA, 25 bp, probe
tagaggatagtattagccaaggtgc

SEQ ID NO: 51119 - DNA, 25 bp, probe
tcacttcttctccacaatgaatgag

SEQ ID NO: 51120 - DNA, 25 bp, probe
taataggagcaacactgatactgtc

SEQ ID NO: 51121 - DNA, 25 bp, probe
cagccagtacatagaggatagtatt

SEQ ID NO: 51122 - DNA, 25 bp, probe
gcagccagtacatagaggatagtat

SEQ ID NO: 51123 - DNA, 25 bp, probe
cacttcttctccacaatgaatgagt

SEQ ID NO: 51124 - DNA, 25 bp, probe
ataataggagcaacactgatactgt

SEQ ID NO: 51125 - DNA, 25 bp, probe
gatgttcacttcttctccacaatga

SEQ ID NO: 51126 - DNA, 25 bp, probe
tataataggagcaacactgatactg

SEQ ID NO: 51127 - DNA, 25 bp, probe
ttcttctccacaatgaatgagtgtc

SEQ ID NO: 51128 - DNA, 25 bp, probe
cttcttctccacaatgaatgagtgt

SEQ ID NO: 51129 - DNA, 25 bp, probe
acttcttctccacaatgaatgagtg

SEQ ID NO: 51130 - DNA, 25 bp, probe
tcttcgctggaattgcctatgtatt

SEQ ID NO: 51131 - DNA, 25 bp, probe
ttcttcgctggaattgcctatgtat

SEQ ID NO: 51132 - DNA, 25 bp, probe
ttctaggatgttcacttcttctcca

SEQ ID NO: 51133 - DNA, 25 bp, probe
gtatggcaccatgaagaagatgatc

SEQ ID NO: 51134 - DNA, 25 bp, probe
tatggcaccatgaagaagatgatct

SEQ ID NO: 51135 - DNA, 25 bp, probe
gaattgcctatgtattcctgatgtt

SEQ ID NO: 51136 - DNA, 25 bp, probe
taggatgttcacttcttctccacaa

SEQ ID NO: 51137 - DNA, 25 bp, probe
cttctccacaatgaatgagtgtcac

SEQ ID NO: 51138 - DNA, 25 bp, probe
agtacatagaggatagtattagcca

SEQ ID NO: 51139 - DNA, 25 bp, probe
agccagtacatagaggatagtatta

SEQ ID NO: 51140 - DNA, 25 bp, probe
ccttctactacctgttggctaattt

SEQ ID NO: 51141 - DNA, 25 bp, probe
tctaggatgttcacttcttctccac

SEQ ID NO: 51142 - DNA, 25 bp, probe
tcttctccacaatgaatgagtgtca

SEQ ID NO: 51143 - DNA, 25 bp, probe
tgtatggcaccatgaagaagatgat

SEQ ID NO: 51144 - DNA, 25 bp, probe
atgtatggcaccatgaagaagatga

SEQ ID NO: 51145 - DNA, 25 bp, probe
ctccacaatgaatgagtgtcactat

SEQ ID NO: 51146 - DNA, 25 bp, probe
ccacaatgaatgagtgtcactatga

SEQ ID NO: 51147 - DNA, 25 bp, probe
tccacaatgaatgagtgtcactatg

SEQ ID NO: 51148 - DNA, 25 bp, probe
ggatgttcacttcttctccacaatg

SEQ ID NO: 51149 - DNA, 25 bp, probe
aggatgttcacttcttctccacaat

SEQ ID NO: 51150 - DNA, 25 bp, probe
ctaggatgttcacttcttctccaca

SEQ ID NO: 51151 - DNA, 25 bp, probe
aataggagcaacactgatactgtcg

SEQ ID NO: 51152 - DNA, 25 bp, probe
cagtacatagaggatagtattagcc

SEQ ID NO: 51153 - DNA, 25 bp, probe
ccagtacatagaggatagtattagc

SEQ ID NO: 51154 - DNA, 25 bp, probe
gccagtacatagaggatagtattag

SEQ ID NO: 51155 - DNA, 25 bp, probe
tgcctatgtattcctgatgtttaac

SEQ ID NO: 51156 - DNA, 25 bp, probe
aattgcctatgtattcctgatgttt

SEQ ID NO: 51157 - DNA, 25 bp, probe
tctttctaggatgttcacttcttct

SEQ ID NO: 51158 - DNA, 25 bp, probe
atgaagctaatgaagacggtgatga

SEQ ID NO: 51159 - DNA, 25 bp, probe
gagagttgctattccagtcaatcat

SEQ ID NO: 51160 - DNA, 25 bp, probe
gagagagttgctattccagtcaatc

SEQ ID NO: 51161 - DNA, 25 bp, probe
agagagttgctattccagtcaatca

SEQ ID NO: 51162 - DNA, 25 bp, probe
agagttgctattccagtcaatcatg

SEQ ID NO: 51163 - DNA, 25 bp, probe
tgctctcctacaatattcagtacat

SEQ ID NO: 51164 - DNA, 25 bp, probe
agttgctattccagtcaatcatgtc

SEQ ID NO: 51165 - DNA, 25 bp, probe
gagttgctattccagtcaatcatgt

SEQ ID NO: 51166 - DNA, 25 bp, probe
gctctcctacaatattcagtacatg

SEQ ID NO: 51167 - DNA, 25 bp, probe
ccttgctctcctacaatattcagta

SEQ ID NO: 51168 - DNA, 25 bp, probe
ctccttgctctcctacaatattcag

SEQ ID NO: 51169 - DNA, 25 bp, probe
ttgctctcctacaatattcagtaca

SEQ ID NO: 51170 - DNA, 25 bp, probe
tccttgctctcctacaatattcagt

SEQ ID NO: 51171 - DNA, 25 bp, probe
cctacaatattcagtacatgaccac

SEQ ID NO: 51172 - DNA, 25 bp, probe
tcctacaatattcagtacatgacca

SEQ ID NO: 51173 - DNA, 25 bp, probe
cttgctctcctacaatattcagtac

SEQ ID NO: 51174 - DNA, 25 bp, probe
aacctccttgctctcctacaatatt

SEQ ID NO: 51175 - DNA, 25 bp, probe
ctattccagtcaatcatgtcgagtc

SEQ ID NO: 51176 - DNA, 25 bp, probe
attacacacttgacagtaccaggag

SEQ ID NO: 51177 - DNA, 25 bp, probe
gtgattacacacttgacagtaccag

SEQ ID NO: 51178 - DNA, 25 bp, probe
gattacacacttgacagtaccagga

SEQ ID NO: 51179 - DNA, 25 bp, probe
tattccagtcaatcatgtcgagtca

SEQ ID NO: 51180 - DNA, 25 bp, probe
cctccttgctctcctacaatattca

SEQ ID NO: 51181 - DNA, 25 bp, probe
acctccttgctctcctacaatattc

SEQ ID NO: 51182 - DNA, 25 bp, probe
taccaggagacaaatgacttacaga

SEQ ID NO: 51183 - DNA, 25 bp, probe
ctcctacaatattcagtacatgacc

SEQ ID NO: 51184 - DNA, 25 bp, probe
ccttctgggtttgtattatgtctgg

SEQ ID NO: 51185 - DNA, 25 bp, probe
tgattacacacttgacagtaccagg

SEQ ID NO: 51186 - DNA, 25 bp, probe
atttgagtttagagttcccttctgg

SEQ ID NO: 51187 - DNA, 25 bp, probe
accaggagacaaatgacttacagat

SEQ ID NO: 51188 - DNA, 25 bp, probe
taaacctccttgctctcctacaata

SEQ ID NO: 51189 - DNA, 25 bp, probe
gttgctattccagtcaatcatgtcg

SEQ ID NO: 51190 - DNA, 25 bp, probe
ctacaatattcagtacatgaccact

SEQ ID NO: 51191 - DNA, 25 bp, probe
ggagagagttgctattccagtcaat

SEQ ID NO: 51192 - DNA, 25 bp, probe
cttctgggtttgtattatgtctggc

SEQ ID NO: 51193 - DNA, 25 bp, probe
gaaaggtagatgaaatatcggatgt

SEQ ID NO: 51194 - DNA, 25 bp, probe
agatttcatttcactctagcctaca

SEQ ID NO: 51195 - DNA, 25 bp, probe
tttcctccagggttagatcatagat

SEQ ID NO: 51196 - DNA, 25 bp, probe
aaacctccttgctctcctacaatat

SEQ ID NO: 51197 - DNA, 25 bp, probe
ccaggagacaaatgacttacagatc

SEQ ID NO: 51198 - DNA, 25 bp, probe
gtaccaggagacaaatgacttacag

SEQ ID NO: 51199 - DNA, 25 bp, probe
gatttcatttcactctagcctacat

SEQ ID NO: 51200 - DNA, 25 bp, probe
cctgatagtagcatgtttctgtttc

SEQ ID NO: 51201 - DNA, 25 bp, probe
tttcaaattgtactaataggctggg

SEQ ID NO: 51202 - DNA, 25 bp, probe
agaaaggtagatgaaatatcggatg

SEQ ID NO: 51203 - DNA, 25 bp, probe
aatactacaagatcaatggcaccac

SEQ ID NO: 51204 - DNA, 25 bp, probe
cgactggatcttgctaacattcatg

SEQ ID NO: 51205 - DNA, 25 bp, probe
aacaaggtctacagccataagaaat

SEQ ID NO: 51206 - DNA, 25 bp, probe
aaacaaggtctacagccataagaaa

SEQ ID NO: 51207 - DNA, 25 bp, probe
atactacaagatcaatggcaccacc

SEQ ID NO: 51208 - DNA, 25 bp, probe
acaaggtctacagccataagaaatt

SEQ ID NO: 51209 - DNA, 25 bp, probe
caaatactacaagatcaatggcacc

SEQ ID NO: 51210 - DNA, 25 bp, probe
aaatactacaagatcaatggcacca

SEQ ID NO: 51211 - DNA, 25 bp, probe
cttcaggtttgccaaatactacaag

SEQ ID NO: 51212 - DNA, 25 bp, probe
tcaggtttgccaaatactacaagat

SEQ ID NO: 51213 - DNA, 25 bp, probe
ggtttgccaaatactacaagatcaa

SEQ ID NO: 51214 - DNA, 25 bp, probe
caggtttgccaaatactacaagatc

SEQ ID NO: 51215 - DNA, 25 bp, probe
aacttcaggtttgccaaatactaca

SEQ ID NO: 51216 - DNA, 25 bp, probe
ttcaggtttgccaaatactacaaga

SEQ ID NO: 51217 - DNA, 25 bp, probe
caacttcaggtttgccaaatactac

SEQ ID NO: 51218 - DNA, 25 bp, probe
ctacaacttcaggtttgccaaatac

SEQ ID NO: 51219 - DNA, 25 bp, probe
aggtttgccaaatactacaagatca

SEQ ID NO: 51220 - DNA, 25 bp, probe
acttcaggtttgccaaatactacaa

SEQ ID NO: 51221 - DNA, 25 bp, probe
acaacttcaggtttgccaaatacta

SEQ ID NO: 51222 - DNA, 25 bp, probe
tacaacttcaggtttgccaaatact

SEQ ID NO: 51223 - DNA, 25 bp, probe
cagcctgattcccaccattattaat

SEQ ID NO: 51224 - DNA, 25 bp, probe
gcgactggatcttgctaacattcat

SEQ ID NO: 51225 - DNA, 25 bp, probe
taagaaatttgacaagatggtggac

SEQ ID NO: 51226 - DNA, 25 bp, probe
tttgccaaatactacaagatcaatg

SEQ ID NO: 51227 - DNA, 25 bp, probe
gtttgccaaatactacaagatcaat

SEQ ID NO: 51228 - DNA, 25 bp, probe
gctacaacttcaggtttgccaaata

SEQ ID NO: 51229 - DNA, 25 bp, probe
acagccataagaaatttgacaagat

SEQ ID NO: 51230 - DNA, 25 bp, probe
ccaaatactacaagatcaatggcac

SEQ ID NO: 51231 - DNA, 25 bp, probe
aagaaatttgacaagatggtggaca

SEQ ID NO: 51232 - DNA, 25 bp, probe
ttgccaaatactacaagatcaatgg

SEQ ID NO: 51233 - DNA, 25 bp, probe
aggtctacagccataagaaatttga

SEQ ID NO: 51234 - DNA, 25 bp, probe
gactggatcttgctaacattcatga

SEQ ID NO: 51235 - DNA, 25 bp, probe
tcagcctgattcccaccattattaa

SEQ ID NO: 51236 - DNA, 25 bp, probe
ttcagcctgattcccaccattatta

SEQ ID NO: 51237 - DNA, 25 bp, probe
aaggtctacagccataagaaatttg

SEQ ID NO: 51238 - DNA, 25 bp, probe
caaggtctacagccataagaaattt

SEQ ID NO: 51239 - DNA, 25 bp, probe
cagccataagaaatttgacaagatg

SEQ ID NO: 51240 - DNA, 25 bp, probe
tacagccataagaaatttgacaaga

SEQ ID NO: 51241 - DNA, 25 bp, probe
ataagaaatttgacaagatggtgga

SEQ ID NO: 51242 - DNA, 25 bp, probe
ctacagccataagaaatttgacaag

SEQ ID NO: 51243 - DNA, 25 bp, probe
cataagaaatttgacaagatggtgg

SEQ ID NO: 51244 - DNA, 25 bp, probe
tctacagccataagaaatttgacaa

SEQ ID NO: 51245 - DNA, 25 bp, probe
aaatttgacaagatggtggacactc

SEQ ID NO: 51246 - DNA, 25 bp, probe
gaaatttgacaagatggtggacact

SEQ ID NO: 51247 - DNA, 25 bp, probe
gtgaatgactattgatgactgtgtt

SEQ ID NO: 51248 - DNA, 25 bp, probe
ggtgaatgactattgatgactgtgt

SEQ ID NO: 51249 - DNA, 25 bp, probe
tggtgaatgactattgatgactgtg

SEQ ID NO: 51250 - DNA, 25 bp, probe
gtggtgaatgactattgatgactgt

SEQ ID NO: 51251 - DNA, 25 bp, probe
ttggtggtgaatgactattgatgac

SEQ ID NO: 51252 - DNA, 25 bp, probe
gttggtggtgaatgactattgatga

SEQ ID NO: 51253 - DNA, 25 bp, probe
tgttggtggtgaatgactattgatg

SEQ ID NO: 51254 - DNA, 25 bp, probe
gtgttggtggtgaatgactattgat

SEQ ID NO: 51255 - DNA, 25 bp, probe
ggtggtgaatgactattgatgactg

SEQ ID NO: 51256 - DNA, 25 bp, probe
gactattgatgactgtgttaagtgc

SEQ ID NO: 51257 - DNA, 25 bp, probe
cacaggatcaatcatctcagaatct

SEQ ID NO: 51258 - DNA, 25 bp, probe
tcacaggatcaatcatctcagaatc

SEQ ID NO: 51259 - DNA, 25 bp, probe
tggtggtgaatgactattgatgact

SEQ ID NO: 51260 - DNA, 25 bp, probe
atcacaggatcaatcatctcagaat

SEQ ID NO: 51261 - DNA, 25 bp, probe
aacaattatattaacacctgcctca

SEQ ID NO: 51262 - DNA, 25 bp, probe
acaggatcaatcatctcagaatctt

SEQ ID NO: 51263 - DNA, 25 bp, probe
acaattatattaacacctgcctcat

SEQ ID NO: 51264 - DNA, 25 bp, probe
tgactattgatgactgtgttaagtg

SEQ ID NO: 51265 - DNA, 25 bp, probe
tatcacaggatcaatcatctcagaa

SEQ ID NO: 51266 - DNA, 25 bp, probe
tgaatgactattgatgactgtgtta

SEQ ID NO: 51267 - DNA, 25 bp, probe
atatcacaggatcaatcatctcaga

SEQ ID NO: 51268 - DNA, 25 bp, probe
tattcattccaagccaccactgtaa

SEQ ID NO: 51269 - DNA, 25 bp, probe
ttattcattccaagccaccactgta

SEQ ID NO: 51270 - DNA, 25 bp, probe
gaactggcttcattcctagtacatc

SEQ ID NO: 51271 - DNA, 25 bp, probe
actggcttcattcctagtacatctt

SEQ ID NO: 51272 - DNA, 25 bp, probe
aactggcttcattcctagtacatct

SEQ ID NO: 51273 - DNA, 25 bp, probe
agaactggcttcattcctagtacat

SEQ ID NO: 51274 - DNA, 25 bp, probe
aatatcacaggatcaatcatctcag

SEQ ID NO: 51275 - DNA, 25 bp, probe
ttatattaacacctgcctcatgtca

SEQ ID NO: 51276 - DNA, 25 bp, probe
atgactattgatgactgtgttaagt

SEQ ID NO: 51277 - DNA, 25 bp, probe
aagaactggcttcattcctagtaca

SEQ ID NO: 51278 - DNA, 25 bp, probe
tatattaacacctgcctcatgtcag

SEQ ID NO: 51279 - DNA, 25 bp, probe
ggactaatatcacaggatcaatcat

SEQ ID NO: 51280 - DNA, 25 bp, probe
caattatattaacacctgcctcatg

SEQ ID NO: 51281 - DNA, 25 bp, probe
ggatcaatcatctcagaatcttact

SEQ ID NO: 51282 - DNA, 25 bp, probe
aggatcaatcatctcagaatcttac

SEQ ID NO: 51283 - DNA, 25 bp, probe
caggatcaatcatctcagaatctta

SEQ ID NO: 51284 - DNA, 25 bp, probe
attatattaacacctgcctcatgtc

SEQ ID NO: 51285 - DNA, 25 bp, probe
gaatgactattgatgactgtgttaa

SEQ ID NO: 51286 - DNA, 25 bp, probe
atatggagtaactaaggtcattgtt

SEQ ID NO: 51287 - DNA, 25 bp, probe
aaacatttgctgagtgaaagtaaga

SEQ ID NO: 51288 - DNA, 25 bp, probe
ctgtgttaagtgcatctgtattgta

SEQ ID NO: 51289 - DNA, 25 bp, probe
aacatttgctgagtgaaagtaagat

SEQ ID NO: 51290 - DNA, 25 bp, probe
aatgactattgatgactgtgttaag

SEQ ID NO: 51291 - DNA, 25 bp, probe
ttaatgaagcgtggttacctctgac

SEQ ID NO: 51292 - DNA, 25 bp, probe
ccttgtctcctctccttccttatcc

SEQ ID NO: 51293 - DNA, 25 bp, probe
gatactacgcttgctgaagttcact

SEQ ID NO: 51294 - DNA, 25 bp, probe
atactacgcttgctgaagttcactg

SEQ ID NO: 51295 - DNA, 25 bp, probe
tttaatgaagcgtggttacctctga

SEQ ID NO: 51296 - DNA, 25 bp, probe
gatagtggatggcattgaggactct

SEQ ID NO: 51297 - DNA, 25 bp, probe
caggatactacgcttgctgaagttc

SEQ ID NO: 51298 - DNA, 25 bp, probe
atagtggatggcattgaggactctg

SEQ ID NO: 51299 - DNA, 25 bp, probe
ggatactacgcttgctgaagttcac

SEQ ID NO: 51300 - DNA, 25 bp, probe
aggatactacgcttgctgaagttca

SEQ ID NO: 51301 - DNA, 25 bp, probe
cttgtctcctctccttccttatccc

SEQ ID NO: 51302 - DNA, 25 bp, probe
cccttgtctcctctccttccttatc

SEQ ID NO: 51303 - DNA, 25 bp, probe
ggctcacttttggataggaaataaa

SEQ ID NO: 51304 - DNA, 25 bp, probe
gggctcacttttggataggaaataa

SEQ ID NO: 51305 - DNA, 25 bp, probe
gatctctcgtctcaatcaggaggtg

SEQ ID NO: 51306 - DNA, 25 bp, probe
tcaatcaggaggtgtctcagcttag

SEQ ID NO: 51307 - DNA, 25 bp, probe
ctcaatcaggaggtgtctcagctta

SEQ ID NO: 51308 - DNA, 25 bp, probe
gctcacttttggataggaaataaac

SEQ ID NO: 51309 - DNA, 25 bp, probe
tgggctcacttttggataggaaata

SEQ ID NO: 51310 - DNA, 25 bp, probe
cattacaacatggtctcactcaggg

SEQ ID NO: 51311 - DNA, 25 bp, probe
ggatagtggatggcattgaggactc

SEQ ID NO: 51312 - DNA, 25 bp, probe
ctgggcagatgagatcctactttct

SEQ ID NO: 51313 - DNA, 25 bp, probe
ttttaatgaagcgtggttacctctg

SEQ ID NO: 51314 - DNA, 25 bp, probe
atctctcgtctcaatcaggaggtgt

SEQ ID NO: 51315 - DNA, 25 bp, probe
ttacctctgacgctattcccttttc

SEQ ID NO: 51316 - DNA, 25 bp, probe
ccaggatactacgcttgctgaagtt

SEQ ID NO: 51317 - DNA, 25 bp, probe
gttacctctgacgctattccctttt

SEQ ID NO: 51318 - DNA, 25 bp, probe
ggttacctctgacgctattcccttt

SEQ ID NO: 51319 - DNA, 25 bp, probe
ctgggctcacttttggataggaaat

SEQ ID NO: 51320 - DNA, 25 bp, probe
ctccaggatactacgcttgctgaag

SEQ ID NO: 51321 - DNA, 25 bp, probe
cacttttggataggaaataaactct

SEQ ID NO: 51322 - DNA, 25 bp, probe
tcacttttggataggaaataaactc

SEQ ID NO: 51323 - DNA, 25 bp, probe
ctcacttttggataggaaataaact

SEQ ID NO: 51324 - DNA, 25 bp, probe
tctcgtctcaatcaggaggtgtctc

SEQ ID NO: 51325 - DNA, 25 bp, probe
ctctcgtctcaatcaggaggtgtct

SEQ ID NO: 51326 - DNA, 25 bp, probe
tctctcgtctcaatcaggaggtgtc

SEQ ID NO: 51327 - DNA, 25 bp, probe
ctgtctctcaaggtggtcttttctg

SEQ ID NO: 51328 - DNA, 25 bp, probe
ccattacaacatggtctcactcagg

SEQ ID NO: 51329 - DNA, 25 bp, probe
gttggctctggatttctggactttt

SEQ ID NO: 51330 - DNA, 25 bp, probe
ctgaggaggtgaaggaaaaggtttg

SEQ ID NO: 51331 - DNA, 25 bp, probe
agatctctcgtctcaatcaggaggt

SEQ ID NO: 51332 - DNA, 25 bp, probe
ctctgacgctattcccttttccaag

SEQ ID NO: 51333 - DNA, 25 bp, probe
caatcaggaggtgtctcagcttagc

SEQ ID NO: 51334 - DNA, 25 bp, probe
attacaacatggtctcactcagggc

SEQ ID NO: 51335 - DNA, 25 bp, probe
caacctcatcactaatcattcaagc

SEQ ID NO: 51336 - DNA, 25 bp, probe
gcaacctcatcactaatcattcaag

SEQ ID NO: 51337 - DNA, 25 bp, probe
agcaacctcatcactaatcattcaa

SEQ ID NO: 51338 - DNA, 25 bp, probe
gagcaacctcatcactaatcattca

SEQ ID NO: 51339 - DNA, 25 bp, probe
ctggtgcgtagtagatgctcaataa

SEQ ID NO: 51340 - DNA, 25 bp, probe
aacctcatcactaatcattcaagct

SEQ ID NO: 51341 - DNA, 25 bp, probe
acctgaatgtaatgcaagaatgaac

SEQ ID NO: 51342 - DNA, 25 bp, probe
gacctgaatgtaatgcaagaatgaa

SEQ ID NO: 51343 - DNA, 25 bp, probe
taatgcaagaatgaacagaacaagc

SEQ ID NO: 51344 - DNA, 25 bp, probe
gtaatgcaagaatgaacagaacaag

SEQ ID NO: 51345 - DNA, 25 bp, probe
gtgcgtagtagatgctcaataaatt

SEQ ID NO: 51346 - DNA, 25 bp, probe
ggtgcgtagtagatgctcaataaat

SEQ ID NO: 51347 - DNA, 25 bp, probe
ttcatcgtatggaagaagaccttta

SEQ ID NO: 51348 - DNA, 25 bp, probe
tcatcgtatggaagaagacctttat

SEQ ID NO: 51349 - DNA, 25 bp, probe
ggacctgaatgtaatgcaagaatga

SEQ ID NO: 51350 - DNA, 25 bp, probe
ctccaagtctttatccaggtgaatg

SEQ ID NO: 51351 - DNA, 25 bp, probe
catcgtatggaagaagacctttatc

SEQ ID NO: 51352 - DNA, 25 bp, probe
cgtctgtgtagtggagataaagaac

SEQ ID NO: 51353 - DNA, 25 bp, probe
tcgtctgtgtagtggagataaagaa

SEQ ID NO: 51354 - DNA, 25 bp, probe
cctgaatgtaatgcaagaatgaaca

SEQ ID NO: 51355 - DNA, 25 bp, probe
tgtaatgcaagaatgaacagaacaa

SEQ ID NO: 51356 - DNA, 25 bp, probe
ccaagtctttatccaggtgaatgtg

SEQ ID NO: 51357 - DNA, 25 bp, probe
tccaagtctttatccaggtgaatgt

SEQ ID NO: 51358 - DNA, 25 bp, probe
atgtaatgcaagaatgaacagaaca

SEQ ID NO: 51359 - DNA, 25 bp, probe
tgaatgtaatgcaagaatgaacaga

SEQ ID NO: 51360 - DNA, 25 bp, probe
gtctgtgtagtggagataaagaaca

SEQ ID NO: 51361 - DNA, 25 bp, probe
ctgaatgtaatgcaagaatgaacag

SEQ ID NO: 51362 - DNA, 25 bp, probe
tggtgcgtagtagatgctcaataaa

SEQ ID NO: 51363 - DNA, 25 bp, probe
ctcgtctgtgtagtggagataaaga

SEQ ID NO: 51364 - DNA, 25 bp, probe
aatgtaatgcaagaatgaacagaac

SEQ ID NO: 51365 - DNA, 25 bp, probe
aagtctttatccaggtgaatgtgct

SEQ ID NO: 51366 - DNA, 25 bp, probe
caagtctttatccaggtgaatgtgc

SEQ ID NO: 51367 - DNA, 25 bp, probe
gaatgtaatgcaagaatgaacagaa

SEQ ID NO: 51368 - DNA, 25 bp, probe
atcgtatggaagaagacctttatcc

SEQ ID NO: 51369 - DNA, 25 bp, probe
cggacctgaatgtaatgcaagaatg

SEQ ID NO: 51370 - DNA, 25 bp, probe
tgtgtagtggagataaagaacagca

SEQ ID NO: 51371 - DNA, 25 bp, probe
gctccaagtctttatccaggtgaat

SEQ ID NO: 51372 - DNA, 25 bp, probe
gtgtagtggagataaagaacagcac

SEQ ID NO: 51373 - DNA, 25 bp, probe
cctggtgcgtagtagatgctcaata

SEQ ID NO: 51374 - DNA, 25 bp, probe
acaatttctaccactacttctacat

SEQ ID NO: 51375 - DNA, 25 bp, probe
cctcgtctgtgtagtggagataaag

SEQ ID NO: 51376 - DNA, 25 bp, probe
ctacttctacatggtgaccaacaca

SEQ ID NO: 51377 - DNA, 25 bp, probe
actacttctacatggtgaccaacac

SEQ ID NO: 51378 - DNA, 25 bp, probe
cactacttctacatggtgaccaaca

SEQ ID NO: 51379 - DNA, 25 bp, probe
caactctgtgatccagtcaacattc

SEQ ID NO: 51380 - DNA, 25 bp, probe
aactctgtgatccagtcaacattca

SEQ ID NO: 51381 - DNA, 25 bp, probe
gttcatttccctgttctactcgttg

SEQ ID NO: 51382 - DNA, 25 bp, probe
caagttcatttccctgttctactcg

SEQ ID NO: 51383 - DNA, 25 bp, probe
gcaagttcatttccctgttctactc

SEQ ID NO: 51384 - DNA, 25 bp, probe
agttcatttccctgttctactcgtt

SEQ ID NO: 51385 - DNA, 25 bp, probe
aagttcatttccctgttctactcgt

SEQ ID NO: 51386 - DNA, 25 bp, probe
ctaagcatcatcgtgatctcctact

SEQ ID NO: 51387 - DNA, 25 bp, probe
taagcatcatcgtgatctcctactg

SEQ ID NO: 51388 - DNA, 25 bp, probe
actaagcatcatcgtgatctcctac

SEQ ID NO: 51389 - DNA, 25 bp, probe
cactaagcatcatcgtgatctccta

SEQ ID NO: 51390 - DNA, 25 bp, probe
ttcatttccctgttctactcgttgg

SEQ ID NO: 51391 - DNA, 25 bp, probe
gcaactctgtgatccagtcaacatt

SEQ ID NO: 51392 - DNA, 25 bp, probe
ggcaagttcatttccctgttctact

SEQ ID NO: 51393 - DNA, 25 bp, probe
catttccctgttctactcgttggtc

SEQ ID NO: 51394 - DNA, 25 bp, probe
atcgtgatctcctactgcctcattg

SEQ ID NO: 51395 - DNA, 25 bp, probe
catcgtgatctcctactgcctcatt

SEQ ID NO: 51396 - DNA, 25 bp, probe
gtggtgttcctcttctatggctcag

SEQ ID NO: 51397 - DNA, 25 bp, probe
atttccctgttctactcgttggtca

SEQ ID NO: 51398 - DNA, 25 bp, probe
tcatttccctgttctactcgttggt

SEQ ID NO: 51399 - DNA, 25 bp, probe
ctgctggtggtgttcctcttctatg

SEQ ID NO: 51400 - DNA, 25 bp, probe
tctgctggtggtgttcctcttctat

SEQ ID NO: 51401 - DNA, 25 bp, probe
atctgctggtggtgttcctcttcta

SEQ ID NO: 51402 - DNA, 25 bp, probe
gatctcctactgcctcattgctcag

SEQ ID NO: 51403 - DNA, 25 bp, probe
tcatcgtgatctcctactgcctcat

SEQ ID NO: 51404 - DNA, 25 bp, probe
gtgatctcctactgcctcattgctc

SEQ ID NO: 51405 - DNA, 25 bp, probe
ccactaagcatcatcgtgatctcct

SEQ ID NO: 51406 - DNA, 25 bp, probe
tttccctgttctactcgttggtcac

SEQ ID NO: 51407 - DNA, 25 bp, probe
tgatccagtcaacattcactctgca

SEQ ID NO: 51408 - DNA, 25 bp, probe
ctgtgatccagtcaacattcactct

SEQ ID NO: 51409 - DNA, 25 bp, probe
tctgtgatccagtcaacattcactc

SEQ ID NO: 51410 - DNA, 25 bp, probe
ctctgtgatccagtcaacattcact

SEQ ID NO: 51411 - DNA, 25 bp, probe
tgtgatccagtcaacattcactctg

SEQ ID NO: 51412 - DNA, 25 bp, probe
actctgtgatccagtcaacattcac

SEQ ID NO: 51413 - DNA, 25 bp, probe
tgatctcctactgcctcattgctca

SEQ ID NO: 51414 - DNA, 25 bp, probe
ggcaactctgtgatccagtcaacat

SEQ ID NO: 51415 - DNA, 25 bp, probe
catcatcgtgatctcctactgcctc

SEQ ID NO: 51416 - DNA, 25 bp, probe
aagcatcatcgtgatctcctactgc

SEQ ID NO: 51417 - DNA, 25 bp, probe
atcatcgtgatctcctactgcctca

SEQ ID NO: 51418 - DNA, 25 bp, probe
gggcaagttcatttccctgttctac

SEQ ID NO: 51419 - DNA, 25 bp, probe
aaacaggaccagggcaagttcattt

SEQ ID NO: 51420 - DNA, 25 bp, probe
tcccactaagcatcatcgtgatctc

SEQ ID NO: 51421 - DNA, 25 bp, probe
gtcccactaagcatcatcgtgatct

SEQ ID NO: 51422 - DNA, 25 bp, probe
agtcccactaagcatcatcgtgatc

SEQ ID NO: 51423 - DNA, 25 bp, probe
taaggtcctccagtgcttgaatatc

SEQ ID NO: 51424 - DNA, 25 bp, probe
ctaaggtcctccagtgcttgaatat

SEQ ID NO: 51425 - DNA, 25 bp, probe
gagacagatagatgacaccatgttc

SEQ ID NO: 51426 - DNA, 25 bp, probe
cttgaatatcagcgtgctaagtcag

SEQ ID NO: 51427 - DNA, 25 bp, probe
agacagatagatgacaccatgttct

SEQ ID NO: 51428 - DNA, 25 bp, probe
tgaatatcagcgtgctaagtcagaa

SEQ ID NO: 51429 - DNA, 25 bp, probe
ttgaatatcagcgtgctaagtcaga

SEQ ID NO: 51430 - DNA, 25 bp, probe
gctcatcaaactgaacagaagaatt

SEQ ID NO: 51431 - DNA, 25 bp, probe
cgagacagatagatgacaccatgtt

SEQ ID NO: 51432 - DNA, 25 bp, probe
cttcccagagatgttgagaatgttc

SEQ ID NO: 51433 - DNA, 25 bp, probe
gaatatcagcgtgctaagtcagaaa

SEQ ID NO: 51434 - DNA, 25 bp, probe
tgctcatcaaactgaacagaagaat

SEQ ID NO: 51435 - DNA, 25 bp, probe
atgctcatcaaactgaacagaagaa

SEQ ID NO: 51436 - DNA, 25 bp, probe
aattcgtcccactaaagatgtcaga

SEQ ID NO: 51437 - DNA, 25 bp, probe
cttacccgagacagatagatgacac

SEQ ID NO: 51438 - DNA, 25 bp, probe
agtcccagaaataaactgagaagtg

SEQ ID NO: 51439 - DNA, 25 bp, probe
tagtcccagaaataaactgagaagt

SEQ ID NO: 51440 - DNA, 25 bp, probe
tcccagagatgttgagaatgttcat

SEQ ID NO: 51441 - DNA, 25 bp, probe
gatgcttacccgagacagatagatg

SEQ ID NO: 51442 - DNA, 25 bp, probe
tactccctgtcaccagtttatgaat

SEQ ID NO: 51443 - DNA, 25 bp, probe
ttccttcccagagatgttgagaatg

SEQ ID NO: 51444 - DNA, 25 bp, probe
cattccttcccagagatgttgagaa

SEQ ID NO: 51445 - DNA, 25 bp, probe
ttcccagagatgttgagaatgttca

SEQ ID NO: 51446 - DNA, 25 bp, probe
cctaaggtcctccagtgcttgaata

SEQ ID NO: 51447 - DNA, 25 bp, probe
aaggtcctccagtgcttgaatatca

SEQ ID NO: 51448 - DNA, 25 bp, probe
ccttcccagagatgttgagaatgtt

SEQ ID NO: 51449 - DNA, 25 bp, probe
ctagttgaaccctgggaacaatttc

SEQ ID NO: 51450 - DNA, 25 bp, probe
atgcttacccgagacagatagatga

SEQ ID NO: 51451 - DNA, 25 bp, probe
ctactccctgtcaccagtttatgaa

SEQ ID NO: 51452 - DNA, 25 bp, probe
cccagaaataaactgagaagtggaa

SEQ ID NO: 51453 - DNA, 25 bp, probe
ccagaaataaactgagaagtggaaa

SEQ ID NO: 51454 - DNA, 25 bp, probe
ttagtcccagaaataaactgagaag

SEQ ID NO: 51455 - DNA, 25 bp, probe
catgctcatcaaactgaacagaaga

SEQ ID NO: 51456 - DNA, 25 bp, probe
tcatgctcatcaaactgaacagaag

SEQ ID NO: 51457 - DNA, 25 bp, probe
ctcatgctcatcaaactgaacagaa

SEQ ID NO: 51458 - DNA, 25 bp, probe
actctaacgacctcatgctcatcaa

SEQ ID NO: 51459 - DNA, 25 bp, probe
tctagttgaaccctgggaacaattt

SEQ ID NO: 51460 - DNA, 25 bp, probe
ctccctgtcaccagtttatgaatct

SEQ ID NO: 51461 - DNA, 25 bp, probe
tcccagaaataaactgagaagtgga

SEQ ID NO: 51462 - DNA, 25 bp, probe
gtcccagaaataaactgagaagtgg

SEQ ID NO: 51463 - DNA, 25 bp, probe
attccttcccagagatgttgagaat

SEQ ID NO: 51464 - DNA, 25 bp, probe
tttagtcccagaaataaactgagaa

SEQ ID NO: 51465 - DNA, 25 bp, probe
tccctgtcaccagtttatgaatctg

SEQ ID NO: 51466 - DNA, 25 bp, probe
actccctgtcaccagtttatgaatc

SEQ ID NO: 51467 - DNA, 25 bp, probe
ctctaaggataatggtggatgtcag

SEQ ID NO: 51468 - DNA, 25 bp, probe
gaatgctctaaggataatggtggat

SEQ ID NO: 51469 - DNA, 25 bp, probe
aatgctctaaggataatggtggatg

SEQ ID NO: 51470 - DNA, 25 bp, probe
atgaatgctctaaggataatggtgg

SEQ ID NO: 51471 - DNA, 25 bp, probe
gatgaatgctctaaggataatggtg

SEQ ID NO: 51472 - DNA, 25 bp, probe
tgaatgctctaaggataatggtgga

SEQ ID NO: 51473 - DNA, 25 bp, probe
atgctctaaggataatggtggatgt

SEQ ID NO: 51474 - DNA, 25 bp, probe
agatgaatgctctaaggataatggt

SEQ ID NO: 51475 - DNA, 25 bp, probe
cgacttgaattatccttccagacat

SEQ ID NO: 51476 - DNA, 25 bp, probe
tgaatggctattagtatcagaacgg

SEQ ID NO: 51477 - DNA, 25 bp, probe
ggttgactgtgaatggctattagta

SEQ ID NO: 51478 - DNA, 25 bp, probe
gtgaatggctattagtatcagaacg

SEQ ID NO: 51479 - DNA, 25 bp, probe
tgactgtgaatggctattagtatca

SEQ ID NO: 51480 - DNA, 25 bp, probe
gacttgaattatccttccagacatt

SEQ ID NO: 51481 - DNA, 25 bp, probe
cctaataagaactgtgtgtggcaag

SEQ ID NO: 51482 - DNA, 25 bp, probe
tctaaggataatggtggatgtcagc

SEQ ID NO: 51483 - DNA, 25 bp, probe
gctctaaggataatggtggatgtca

SEQ ID NO: 51484 - DNA, 25 bp, probe
tgctctaaggataatggtggatgtc

SEQ ID NO: 51485 - DNA, 25 bp, probe
ctaataagaactgtgtgtggcaagt

SEQ ID NO: 51486 - DNA, 25 bp, probe
aagatgaatgctctaaggataatgg

SEQ ID NO: 51487 - DNA, 25 bp, probe
tctgacaatactgtatccaagaagg

SEQ ID NO: 51488 - DNA, 25 bp, probe
gttgactgtgaatggctattagtat

SEQ ID NO: 51489 - DNA, 25 bp, probe
ctaaggataatggtggatgtcagca

SEQ ID NO: 51490 - DNA, 25 bp, probe
tcctaataagaactgtgtgtggcaa

SEQ ID NO: 51491 - DNA, 25 bp, probe
taataagaactgtgtgtggcaagtg

SEQ ID NO: 51492 - DNA, 25 bp, probe
tgtgaatggctattagtatcagaac

SEQ ID NO: 51493 - DNA, 25 bp, probe
ttgactgtgaatggctattagtatc

SEQ ID NO: 51494 - DNA, 25 bp, probe
agaatgtgcttatgaccacttagaa

SEQ ID NO: 51495 - DNA, 25 bp, probe
aagaatgtgcttatgaccacttaga

SEQ ID NO: 51496 - DNA, 25 bp, probe
caagaatgtgcttatgaccacttag

SEQ ID NO: 51497 - DNA, 25 bp, probe
gaatgtgcttatgaccacttagaag

SEQ ID NO: 51498 - DNA, 25 bp, probe
tcaagaatgtgcttatgaccactta

SEQ ID NO: 51499 - DNA, 25 bp, probe
aggttgactgtgaatggctattagt

SEQ ID NO: 51500 - DNA, 25 bp, probe
actgtgaatggctattagtatcaga

SEQ ID NO: 51501 - DNA, 25 bp, probe
gactgtgaatggctattagtatcag

SEQ ID NO: 51502 - DNA, 25 bp, probe
atcaagaatgtgcttatgaccactt

SEQ ID NO: 51503 - DNA, 25 bp, probe
caggttgactgtgaatggctattag

SEQ ID NO: 51504 - DNA, 25 bp, probe
ctcctaataagaactgtgtgtggca

SEQ ID NO: 51505 - DNA, 25 bp, probe
aatgtgcttatgaccacttagaagt

SEQ ID NO: 51506 - DNA, 25 bp, probe
catcaagaatgtgcttatgaccact

SEQ ID NO: 51507 - DNA, 25 bp, probe
tgtgcttatgaccacttagaagtat

SEQ ID NO: 51508 - DNA, 25 bp, probe
atgtgcttatgaccacttagaagta

SEQ ID NO: 51509 - DNA, 25 bp, probe
atctgacaatactgtatccaagaag

SEQ ID NO: 51510 - DNA, 25 bp, probe
ctctcgacttgaattatccttccag

SEQ ID NO: 51511 - DNA, 25 bp, probe
taagttactatttattccgctccgc

SEQ ID NO: 51512 - DNA, 25 bp, probe
ataagttactatttattccgctccg

SEQ ID NO: 51513 - DNA, 25 bp, probe
ctcttccttctgctagtctcctgtg

SEQ ID NO: 51514 - DNA, 25 bp, probe
caggaatccaagtgcatttcttaaa

SEQ ID NO: 51515 - DNA, 25 bp, probe
aagttactatttattccgctccgcc

SEQ ID NO: 51516 - DNA, 25 bp, probe
cttccttctgctagtctcctgtgtc

SEQ ID NO: 51517 - DNA, 25 bp, probe
aggaatccaagtgcatttcttaaat

SEQ ID NO: 51518 - DNA, 25 bp, probe
tcttccttctgctagtctcctgtgt

SEQ ID NO: 51519 - DNA, 25 bp, probe
ctgagtcttctgcatcagattattg

SEQ ID NO: 51520 - DNA, 25 bp, probe
ggaatccaagtgcatttcttaaata

SEQ ID NO: 51521 - DNA, 25 bp, probe
gctgagtcttctgcatcagattatt

SEQ ID NO: 51522 - DNA, 25 bp, probe
cctcttccttctgctagtctcctgt

SEQ ID NO: 51523 - DNA, 25 bp, probe
tgagtcttctgcatcagattattgc

SEQ ID NO: 51524 - DNA, 25 bp, probe
ctgaatttaaaagcacacgaaacaa

SEQ ID NO: 51525 - DNA, 25 bp, probe
aacctgaatttaaaagcacacgaaa

SEQ ID NO: 51526 - DNA, 25 bp, probe
taacctgaatttaaaagcacacgaa

SEQ ID NO: 51527 - DNA, 25 bp, probe
agctgagtcttctgcatcagattat

SEQ ID NO: 51528 - DNA, 25 bp, probe
tccaagtgcatttcttaaataagtt

SEQ ID NO: 51529 - DNA, 25 bp, probe
tgaatttaaaagcacacgaaacaaa

SEQ ID NO: 51530 - DNA, 25 bp, probe
aagctgagtcttctgcatcagatta

SEQ ID NO: 51531 - DNA, 25 bp, probe
cctgaatttaaaagcacacgaaaca

SEQ ID NO: 51532 - DNA, 25 bp, probe
acctgaatttaaaagcacacgaaac

SEQ ID NO: 51533 - DNA, 25 bp, probe
atccaagtgcatttcttaaataagt

SEQ ID NO: 51534 - DNA, 25 bp, probe
ttaacctgaatttaaaagcacacga

SEQ ID NO: 51535 - DNA, 25 bp, probe
gaatttaaaagcacacgaaacaaaa

SEQ ID NO: 51536 - DNA, 25 bp, probe
agttactatttattccgctccgccc

SEQ ID NO: 51537 - DNA, 25 bp, probe
aataagttactatttattccgctcc

SEQ ID NO: 51538 - DNA, 25 bp, probe
gcaggaatccaagtgcatttcttaa

SEQ ID NO: 51539 - DNA, 25 bp, probe
gaagctgagtcttctgcatcagatt

SEQ ID NO: 51540 - DNA, 25 bp, probe
aatccaagtgcatttcttaaataag

SEQ ID NO: 51541 - DNA, 25 bp, probe
gaatccaagtgcatttcttaaataa

SEQ ID NO: 51542 - DNA, 25 bp, probe
ccaagtgcatttcttaaataagtta

SEQ ID NO: 51543 - DNA, 25 bp, probe
tttaacctgaatttaaaagcacacg

SEQ ID NO: 51544 - DNA, 25 bp, probe
agattattgcaacatttaacctgaa

SEQ ID NO: 51545 - DNA, 25 bp, probe
catcagattattgcaacatttaacc

SEQ ID NO: 51546 - DNA, 25 bp, probe
cagattattgcaacatttaacctga

SEQ ID NO: 51547 - DNA, 25 bp, probe
tcagattattgcaacatttaacctg

SEQ ID NO: 51548 - DNA, 25 bp, probe
atcagattattgcaacatttaacct

SEQ ID NO: 51549 - DNA, 25 bp, probe
ggcaggaatccaagtgcatttctta

SEQ ID NO: 51550 - DNA, 25 bp, probe
gattattgcaacatttaacctgaat

SEQ ID NO: 51551 - DNA, 25 bp, probe
aaataagttactatttattccgctc

SEQ ID NO: 51552 - DNA, 25 bp, probe
caagtgcatttcttaaataagttac

SEQ ID NO: 51553 - DNA, 25 bp, probe
aagtgcatttcttaaataagttact

SEQ ID NO: 51554 - DNA, 25 bp, probe
ttattgcaacatttaacctgaattt

SEQ ID NO: 51555 - DNA, 25 bp, probe
taatgtcaacaccaataggaatcca

SEQ ID NO: 51556 - DNA, 25 bp, probe
atgtcaacaccaataggaatccatt

SEQ ID NO: 51557 - DNA, 25 bp, probe
aatgtcaacaccaataggaatccat

SEQ ID NO: 51558 - DNA, 25 bp, probe
ttaatgtcaacaccaataggaatcc

SEQ ID NO: 51559 - DNA, 25 bp, probe
acattcctaactcatattaacagca

SEQ ID NO: 51560 - DNA, 25 bp, probe
ggtctgagtcctagagattacataa

SEQ ID NO: 51561 - DNA, 25 bp, probe
cattcctaactcatattaacagcac

SEQ ID NO: 51562 - DNA, 25 bp, probe
aggtctgagtcctagagattacata

SEQ ID NO: 51563 - DNA, 25 bp, probe
ctgggctacattcctaactcatatt

SEQ ID NO: 51564 - DNA, 25 bp, probe
aataatagaacctgggctacattcc

SEQ ID NO: 51565 - DNA, 25 bp, probe
gtgtggtttctgttatttgaatgga

SEQ ID NO: 51566 - DNA, 25 bp, probe
agtgtggtttctgttatttgaatgg

SEQ ID NO: 51567 - DNA, 25 bp, probe
ggctacattcctaactcatattaac

SEQ ID NO: 51568 - DNA, 25 bp, probe
taatagaacctgggctacattccta

SEQ ID NO: 51569 - DNA, 25 bp, probe
ataatagaacctgggctacattcct

SEQ ID NO: 51570 - DNA, 25 bp, probe
tgggctacattcctaactcatatta

SEQ ID NO: 51571 - DNA, 25 bp, probe
tgtcaacaccaataggaatccattt

SEQ ID NO: 51572 - DNA, 25 bp, probe
aatagaacctgggctacattcctaa

SEQ ID NO: 51573 - DNA, 25 bp, probe
tgtggtttctgttatttgaatggat

SEQ ID NO: 51574 - DNA, 25 bp, probe
cctgggctacattcctaactcatat

SEQ ID NO: 51575 - DNA, 25 bp, probe
aggtttctaaagttacagattcagc

SEQ ID NO: 51576 - DNA, 25 bp, probe
gtcaacaccaataggaatccattta

SEQ ID NO: 51577 - DNA, 25 bp, probe
acatttaatcacaggttactttcca

SEQ ID NO: 51578 - DNA, 25 bp, probe
caacaccaataggaatccatttaga

SEQ ID NO: 51579 - DNA, 25 bp, probe
tcaacaccaataggaatccatttag

SEQ ID NO: 51580 - DNA, 25 bp, probe
aagtgtggtttctgttatttgaatg

SEQ ID NO: 51581 - DNA, 25 bp, probe
tttaatcacaggttactttccagaa

SEQ ID NO: 51582 - DNA, 25 bp, probe
atagaacctgggctacattcctaac

SEQ ID NO: 51583 - DNA, 25 bp, probe
acataaatagtgtgtagcccagaaa

SEQ ID NO: 51584 - DNA, 25 bp, probe
catttaatcacaggttactttccag

SEQ ID NO: 51585 - DNA, 25 bp, probe
gacatttaatcacaggttactttcc

SEQ ID NO: 51586 - DNA, 25 bp, probe
gtttctgttatttgaatggattccc

SEQ ID NO: 51587 - DNA, 25 bp, probe
ggtttctgttatttgaatggattcc

SEQ ID NO: 51588 - DNA, 25 bp, probe
gtggtttctgttatttgaatggatt

SEQ ID NO: 51589 - DNA, 25 bp, probe
atttaatcacaggttactttccaga

SEQ ID NO: 51590 - DNA, 25 bp, probe
ttgaagaataaagcctcatatccag

SEQ ID NO: 51591 - DNA, 25 bp, probe
gaataataatagaacctgggctaca

SEQ ID NO: 51592 - DNA, 25 bp, probe
tgaataataatagaacctgggctac

SEQ ID NO: 51593 - DNA, 25 bp, probe
tttgaataataatagaacctgggct

SEQ ID NO: 51594 - DNA, 25 bp, probe
gggctacattcctaactcatattaa

SEQ ID NO: 51595 - DNA, 25 bp, probe
ttaatcacaggttactttccagaaa

SEQ ID NO: 51596 - DNA, 25 bp, probe
tacattcctaactcatattaacagc

SEQ ID NO: 51597 - DNA, 25 bp, probe
gctacattcctaactcatattaaca

SEQ ID NO: 51598 - DNA, 25 bp, probe
ctttgaataataatagaacctgggc

SEQ ID NO: 51599 - DNA, 25 bp, probe
atcctatcctgtactatcacctctc

SEQ ID NO: 51600 - DNA, 25 bp, probe
cctatcctgtactatcacctctcaa

SEQ ID NO: 51601 - DNA, 25 bp, probe
gatcctatcctgtactatcacctct

SEQ ID NO: 51602 - DNA, 25 bp, probe
agaagtcataactgattgctcaacc

SEQ ID NO: 51603 - DNA, 25 bp, probe
tcctatcctgtactatcacctctca

SEQ ID NO: 51604 - DNA, 25 bp, probe
gaagtcataactgattgctcaacca

SEQ ID NO: 51605 - DNA, 25 bp, probe
cagaagtcataactgattgctcaac

SEQ ID NO: 51606 - DNA, 25 bp, probe
acagaagtcataactgattgctcaa

SEQ ID NO: 51607 - DNA, 25 bp, probe
agacagaagtcataactgattgctc

SEQ ID NO: 51608 - DNA, 25 bp, probe
gacagaagtcataactgattgctca

SEQ ID NO: 51609 - DNA, 25 bp, probe
cagacagaagtcataactgattgct

SEQ ID NO: 51610 - DNA, 25 bp, probe
cataactgattgctcaaccaggatt

SEQ ID NO: 51611 - DNA, 25 bp, probe
aagtcataactgattgctcaaccag

SEQ ID NO: 51612 - DNA, 25 bp, probe
ccagacagaagtcataactgattgc

SEQ ID NO: 51613 - DNA, 25 bp, probe
gccagacagaagtcataactgattg

SEQ ID NO: 51614 - DNA, 25 bp, probe
agccagacagaagtcataactgatt

SEQ ID NO: 51615 - DNA, 25 bp, probe
tcataactgattgctcaaccaggat

SEQ ID NO: 51616 - DNA, 25 bp, probe
ctcaaccaggatttcactcttcaaa

SEQ ID NO: 51617 - DNA, 25 bp, probe
tcaaccaggatttcactcttcaaag

SEQ ID NO: 51618 - DNA, 25 bp, probe
cagccagacagaagtcataactgat

SEQ ID NO: 51619 - DNA, 25 bp, probe
caaatgtgggttgtatggagtttaa

SEQ ID NO: 51620 - DNA, 25 bp, probe
tcaaatgtgggttgtatggagttta

SEQ ID NO: 51621 - DNA, 25 bp, probe
ttgttccttaccacattgtccgaat

SEQ ID NO: 51622 - DNA, 25 bp, probe
gtgctttgatcctatcctgtactat

SEQ ID NO: 51623 - DNA, 25 bp, probe
tgctttgatcctatcctgtactatc

SEQ ID NO: 51624 - DNA, 25 bp, probe
tgtgctttgatcctatcctgtacta

SEQ ID NO: 51625 - DNA, 25 bp, probe
atatgctttgttccttaccacattg

SEQ ID NO: 51626 - DNA, 25 bp, probe
tgatcctatcctgtactatcacctc

SEQ ID NO: 51627 - DNA, 25 bp, probe
aaagtcaaatgtgggttgtatggag

SEQ ID NO: 51628 - DNA, 25 bp, probe
ttgatcctatcctgtactatcacct

SEQ ID NO: 51629 - DNA, 25 bp, probe
aggatttcactcttcaaagccaaag

SEQ ID NO: 51630 - DNA, 25 bp, probe
caggatttcactcttcaaagccaaa

SEQ ID NO: 51631 - DNA, 25 bp, probe
ctatcctgtactatcacctctcaaa

SEQ ID NO: 51632 - DNA, 25 bp, probe
gccttactggaccataaagttaatt

SEQ ID NO: 51633 - DNA, 25 bp, probe
gtcataactgattgctcaaccagga

SEQ ID NO: 51634 - DNA, 25 bp, probe
agtcataactgattgctcaaccagg

SEQ ID NO: 51635 - DNA, 25 bp, probe
ctcagccagacagaagtcataactg

SEQ ID NO: 51636 - DNA, 25 bp, probe
tatgctttgttccttaccacattgt

SEQ ID NO: 51637 - DNA, 25 bp, probe
gtcaaatgtgggttgtatggagttt

SEQ ID NO: 51638 - DNA, 25 bp, probe
tgttccttaccacattgtccgaatc

SEQ ID NO: 51639 - DNA, 25 bp, probe
ataactgattgctcaaccaggattt

SEQ ID NO: 51640 - DNA, 25 bp, probe
taaagagaccaaggctcagaaagaa

SEQ ID NO: 51641 - DNA, 25 bp, probe
taactgattgctcaaccaggatttc

SEQ ID NO: 51642 - DNA, 25 bp, probe
cttgtaattcgacagctctacagaa

SEQ ID NO: 51643 - DNA, 25 bp, probe
gtgttcttggaatatcttgtgactg

SEQ ID NO: 51644 - DNA, 25 bp, probe
ggtgttcttggaatatcttgtgact

SEQ ID NO: 51645 - DNA, 25 bp, probe
ttgtatcttgcttgaacttcctgtt

SEQ ID NO: 51646 - DNA, 25 bp, probe
tgttcttggaatatcttgtgactgc

SEQ ID NO: 51647 - DNA, 25 bp, probe
caatataattctgtgagtcttggct

SEQ ID NO: 51648 - DNA, 25 bp, probe
tcaatataattctgtgagtcttggc

SEQ ID NO: 51649 - DNA, 25 bp, probe
ttcttatctcagtcatcactatggt

SEQ ID NO: 51650 - DNA, 25 bp, probe
aatataattctgtgagtcttggctt

SEQ ID NO: 51651 - DNA, 25 bp, probe
tcttatctcagtcatcactatggtg

SEQ ID NO: 51652 - DNA, 25 bp, probe
cttatctcagtcatcactatggtgc

SEQ ID NO: 51653 - DNA, 25 bp, probe
ttcttggaatatcttgtgactgcga

SEQ ID NO: 51654 - DNA, 25 bp, probe
gttcttggaatatcttgtgactgcg

SEQ ID NO: 51655 - DNA, 25 bp, probe
tatctcagtcatcactatggtgctt

SEQ ID NO: 51656 - DNA, 25 bp, probe
ttatctcagtcatcactatggtgct

SEQ ID NO: 51657 - DNA, 25 bp, probe
cgtcacatccaattaataatgagct

SEQ ID NO: 51658 - DNA, 25 bp, probe
tcttggaatatcttgtgactgcgac

SEQ ID NO: 51659 - DNA, 25 bp, probe
gccttattcttatagactatggaca

SEQ ID NO: 51660 - DNA, 25 bp, probe
tttgtatcttgcttgaacttcctgt

SEQ ID NO: 51661 - DNA, 25 bp, probe
tgccacgtcacatccaattaataat

SEQ ID NO: 51662 - DNA, 25 bp, probe
gccacgtcacatccaattaataatg

SEQ ID NO: 51663 - DNA, 25 bp, probe
acttcctgttcttcttggtatactt

SEQ ID NO: 51664 - DNA, 25 bp, probe
ttaatacttcagccctcttccaaag

SEQ ID NO: 51665 - DNA, 25 bp, probe
aatatcttgtgactgcgacctccta

SEQ ID NO: 51666 - DNA, 25 bp, probe
tataattctgtgagtcttggctttg

SEQ ID NO: 51667 - DNA, 25 bp, probe
atctcagtcatcactatggtgcttc

SEQ ID NO: 51668 - DNA, 25 bp, probe
acgtcacatccaattaataatgagc

SEQ ID NO: 51669 - DNA, 25 bp, probe
tgtcaacatttagtatgctacctct

SEQ ID NO: 51670 - DNA, 25 bp, probe
gtgtcaacatttagtatgctacctc

SEQ ID NO: 51671 - DNA, 25 bp, probe
ccacgtcacatccaattaataatga

SEQ ID NO: 51672 - DNA, 25 bp, probe
aacttcctgttcttcttggtatact

SEQ ID NO: 51673 - DNA, 25 bp, probe
tattgttgtggcttccttcgttctc

SEQ ID NO: 51674 - DNA, 25 bp, probe
ttgccacgtcacatccaattaataa

SEQ ID NO: 51675 - DNA, 25 bp, probe
gtcaacatttagtatgctacctctt

SEQ ID NO: 51676 - DNA, 25 bp, probe
attgctgatctgctgatttacatac

SEQ ID NO: 51677 - DNA, 25 bp, probe
ttgtattgttgtggcttccttcgtt

SEQ ID NO: 51678 - DNA, 25 bp, probe
ttagtatgctacctcttctattgaa

SEQ ID NO: 51679 - DNA, 25 bp, probe
caacatttagtatgctacctcttct

SEQ ID NO: 51680 - DNA, 25 bp, probe
tcaacatttagtatgctacctcttc

SEQ ID NO: 51681 - DNA, 25 bp, probe
tgtgtcaacatttagtatgctacct

SEQ ID NO: 51682 - DNA, 25 bp, probe
gggtgttcttggaatatcttgtgac

SEQ ID NO: 51683 - DNA, 25 bp, probe
ggttgatcgtggattatttgaggat

SEQ ID NO: 51684 - DNA, 25 bp, probe
ttaattgctgatctgctgatttaca

SEQ ID NO: 51685 - DNA, 25 bp, probe
ggattatttgaggataaagtagcca

SEQ ID NO: 51686 - DNA, 25 bp, probe
tggattatttgaggataaagtagcc

SEQ ID NO: 51687 - DNA, 25 bp, probe
aagacaaactaccaatttctcgttc

SEQ ID NO: 51688 - DNA, 25 bp, probe
gaagacaaactaccaatttctcgtt

SEQ ID NO: 51689 - DNA, 25 bp, probe
aaactaccaatttctcgttcctgaa

SEQ ID NO: 51690 - DNA, 25 bp, probe
aactaccaatttctcgttcctgaag

SEQ ID NO: 51691 - DNA, 25 bp, probe
caaactaccaatttctcgttcctga

SEQ ID NO: 51692 - DNA, 25 bp, probe
gacaaactaccaatttctcgttcct

SEQ ID NO: 51693 - DNA, 25 bp, probe
agacaaactaccaatttctcgttcc

SEQ ID NO: 51694 - DNA, 25 bp, probe
ggaagacaaactaccaatttctcgt

SEQ ID NO: 51695 - DNA, 25 bp, probe
acaaactaccaatttctcgttcctg

SEQ ID NO: 51696 - DNA, 25 bp, probe
tctggaagacaaactaccaatttct

SEQ ID NO: 51697 - DNA, 25 bp, probe
ctggaagacaaactaccaatttctc

SEQ ID NO: 51698 - DNA, 25 bp, probe
ctctggaagacaaactaccaatttc

SEQ ID NO: 51699 - DNA, 25 bp, probe
cctctggaagacaaactaccaattt

SEQ ID NO: 51700 - DNA, 25 bp, probe
tggaagacaaactaccaatttctcg

SEQ ID NO: 51701 - DNA, 25 bp, probe
actaccaatttctcgttcctgaagc

SEQ ID NO: 51702 - DNA, 25 bp, probe
ccctctggaagacaaactaccaatt

SEQ ID NO: 51703 - DNA, 25 bp, probe
ctaccaatttctcgttcctgaagcc

SEQ ID NO: 51704 - DNA, 25 bp, probe
caatttctcgttcctgaagccactc

SEQ ID NO: 51705 - DNA, 25 bp, probe
taccaatttctcgttcctgaagcca

SEQ ID NO: 51706 - DNA, 25 bp, probe
aatttctcgttcctgaagccactcc

SEQ ID NO: 51707 - DNA, 25 bp, probe
caaagaggctgattgaggagtcctg

SEQ ID NO: 51708 - DNA, 25 bp, probe
cccctctggaagacaaactaccaat

SEQ ID NO: 51709 - DNA, 25 bp, probe
tcccctctggaagacaaactaccaa

SEQ ID NO: 51710 - DNA, 25 bp, probe
atgtcccctctggaagacaaactac

SEQ ID NO: 51711 - DNA, 25 bp, probe
catgtcccctctggaagacaaacta

SEQ ID NO: 51712 - DNA, 25 bp, probe
cctcaaaatgtcagtgagcaccatg

SEQ ID NO: 51713 - DNA, 25 bp, probe
ctcaaaatgtcagtgagcaccatgc

SEQ ID NO: 51714 - DNA, 25 bp, probe
gatgacttcttgtggttctgtaatg

SEQ ID NO: 51715 - DNA, 25 bp, probe
agatgacttcttgtggttctgtaat

SEQ ID NO: 51716 - DNA, 25 bp, probe
tagatgacttcttgtggttctgtaa

SEQ ID NO: 51717 - DNA, 25 bp, probe
atgacttcttgtggttctgtaatgc

SEQ ID NO: 51718 - DNA, 25 bp, probe
ctagatgacttcttgtggttctgta

SEQ ID NO: 51719 - DNA, 25 bp, probe
tgaagtgacagattaagagttcttg

SEQ ID NO: 51720 - DNA, 25 bp, probe
actgaagtgacagattaagagttct

SEQ ID NO: 51721 - DNA, 25 bp, probe
agactgaagtgacagattaagagtt

SEQ ID NO: 51722 - DNA, 25 bp, probe
aagactgaagtgacagattaagagt

SEQ ID NO: 51723 - DNA, 25 bp, probe
gactgaagtgacagattaagagttc

SEQ ID NO: 51724 - DNA, 25 bp, probe
gaagtgacagattaagagttcttga

SEQ ID NO: 51725 - DNA, 25 bp, probe
attagataactccaacttctggctg

SEQ ID NO: 51726 - DNA, 25 bp, probe
tagataactccaacttctggctgta

SEQ ID NO: 51727 - DNA, 25 bp, probe
aagtgacagattaagagttcttgat

SEQ ID NO: 51728 - DNA, 25 bp, probe
ctgaagtgacagattaagagttctt

SEQ ID NO: 51729 - DNA, 25 bp, probe
tattagataactccaacttctggct

SEQ ID NO: 51730 - DNA, 25 bp, probe
ttagataactccaacttctggctgt

SEQ ID NO: 51731 - DNA, 25 bp, probe
ataactccaacttctggctgtagag

SEQ ID NO: 51732 - DNA, 25 bp, probe
gataactccaacttctggctgtaga

SEQ ID NO: 51733 - DNA, 25 bp, probe
agataactccaacttctggctgtag

SEQ ID NO: 51734 - DNA, 25 bp, probe
atattagataactccaacttctggc

SEQ ID NO: 51735 - DNA, 25 bp, probe
tgacttcttgtggttctgtaatgcc

SEQ ID NO: 51736 - DNA, 25 bp, probe
gtgggtttagaaagactgaagtgac

SEQ ID NO: 51737 - DNA, 25 bp, probe
ctgtgggtttagaaagactgaagtg

SEQ ID NO: 51738 - DNA, 25 bp, probe
agtgacagattaagagttcttgata

SEQ ID NO: 51739 - DNA, 25 bp, probe
tgggtttagaaagactgaagtgaca

SEQ ID NO: 51740 - DNA, 25 bp, probe
tgtgggtttagaaagactgaagtga

SEQ ID NO: 51741 - DNA, 25 bp, probe
gttgaactactccagaaactaaaga

SEQ ID NO: 51742 - DNA, 25 bp, probe
tctgtgggtttagaaagactgaagt

SEQ ID NO: 51743 - DNA, 25 bp, probe
gatacagagttgtccattaccaaag

SEQ ID NO: 51744 - DNA, 25 bp, probe
gactcaggacttcagaagcaacatt

SEQ ID NO: 51745 - DNA, 25 bp, probe
ggtttagaaagactgaagtgacaga

SEQ ID NO: 51746 - DNA, 25 bp, probe
atacagagttgtccattaccaaagc

SEQ ID NO: 51747 - DNA, 25 bp, probe
ttctagatgacttcttgtggttctg

SEQ ID NO: 51748 - DNA, 25 bp, probe
tgattctagatgacttcttgtggtt

SEQ ID NO: 51749 - DNA, 25 bp, probe
atgattctagatgacttcttgtggt

SEQ ID NO: 51750 - DNA, 25 bp, probe
attctagatgacttcttgtggttct

SEQ ID NO: 51751 - DNA, 25 bp, probe
gattctagatgacttcttgtggttc

SEQ ID NO: 51752 - DNA, 25 bp, probe
gtttagaaagactgaagtgacagat

SEQ ID NO: 51753 - DNA, 25 bp, probe
gggtttagaaagactgaagtgacag

SEQ ID NO: 51754 - DNA, 25 bp, probe
tctagatgacttcttgtggttctgt

SEQ ID NO: 51755 - DNA, 25 bp, probe
ttgaactactccagaaactaaagag

SEQ ID NO: 51756 - DNA, 25 bp, probe
ggatacagagttgtccattaccaaa

SEQ ID NO: 51757 - DNA, 25 bp, probe
ggaagcagtggcaattctagatatc

SEQ ID NO: 51758 - DNA, 25 bp, probe
cagcaacaatgtgaccgatatgttc

SEQ ID NO: 51759 - DNA, 25 bp, probe
caacatcatcttctccaacgggaac

SEQ ID NO: 51760 - DNA, 25 bp, probe
agcaacaatgtgaccgatatgttcc

SEQ ID NO: 51761 - DNA, 25 bp, probe
ccagcaacaatgtgaccgatatgtt

SEQ ID NO: 51762 - DNA, 25 bp, probe
aacatcatcttctccaacgggaacc

SEQ ID NO: 51763 - DNA, 25 bp, probe
caacaatgtgaccgatatgttcccg

SEQ ID NO: 51764 - DNA, 25 bp, probe
gcaacaatgtgaccgatatgttccc

SEQ ID NO: 51765 - DNA, 25 bp, probe
acctcatataatacttgctcaacag

SEQ ID NO: 51766 - DNA, 25 bp, probe
ctaatcctccattaagcgagcatac

SEQ ID NO: 51767 - DNA, 25 bp, probe
tctaatcctccattaagcgagcata

SEQ ID NO: 51768 - DNA, 25 bp, probe
cctcatataatacttgctcaacagt

SEQ ID NO: 51769 - DNA, 25 bp, probe
taagaaccagagccatagaattatt

SEQ ID NO: 51770 - DNA, 25 bp, probe
ttaagaaccagagccatagaattat

SEQ ID NO: 51771 - DNA, 25 bp, probe
tacctcatataatacttgctcaaca

SEQ ID NO: 51772 - DNA, 25 bp, probe
taatcctccattaagcgagcatacc

SEQ ID NO: 51773 - DNA, 25 bp, probe
ctctaatcctccattaagcgagcat

SEQ ID NO: 51774 - DNA, 25 bp, probe
aatccagttaccacatattcacgtt

SEQ ID NO: 51775 - DNA, 25 bp, probe
cctcaagtgggtctattagcattta

SEQ ID NO: 51776 - DNA, 25 bp, probe
tcactccaccaaatcttacaaatca

SEQ ID NO: 51777 - DNA, 25 bp, probe
tacttgctcaacagtatagtggtac

SEQ ID NO: 51778 - DNA, 25 bp, probe
cactccaccaaatcttacaaatcat

SEQ ID NO: 51779 - DNA, 25 bp, probe
ttcactccaccaaatcttacaaatc

SEQ ID NO: 51780 - DNA, 25 bp, probe
taccaatgcaactactctacatagc

SEQ ID NO: 51781 - DNA, 25 bp, probe
attatgtgcaatgttcaatacctca

SEQ ID NO: 51782 - DNA, 25 bp, probe
accatttccagatttgagtttgaag

SEQ ID NO: 51783 - DNA, 25 bp, probe
tttcactccaccaaatcttacaaat

SEQ ID NO: 51784 - DNA, 25 bp, probe
catttccagatttgagtttgaaggg

SEQ ID NO: 51785 - DNA, 25 bp, probe
ccatttccagatttgagtttgaagg

SEQ ID NO: 51786 - DNA, 25 bp, probe
actccaccaaatcttacaaatcatt

SEQ ID NO: 51787 - DNA, 25 bp, probe
caatgcaactactctacatagccaa

SEQ ID NO: 51788 - DNA, 25 bp, probe
ttatgtgcaatgttcaatacctcat

SEQ ID NO: 51789 - DNA, 25 bp, probe
ttaccatttccagatttgagtttga

SEQ ID NO: 51790 - DNA, 25 bp, probe
tcctcctcactgttaataatcataa

SEQ ID NO: 51791 - DNA, 25 bp, probe
ttcctcctcactgttaataatcata

SEQ ID NO: 51792 - DNA, 25 bp, probe
atgtgcaatgttcaatacctcatat

SEQ ID NO: 51793 - DNA, 25 bp, probe
tgatgtgaataggcatgataatact

SEQ ID NO: 51794 - DNA, 25 bp, probe
taccatttccagatttgagtttgaa

SEQ ID NO: 51795 - DNA, 25 bp, probe
ctcaagtgggtctattagcatttaa

SEQ ID NO: 51796 - DNA, 25 bp, probe
ccttgaacaactggtttatctacaa

SEQ ID NO: 51797 - DNA, 25 bp, probe
gccttgaacaactggtttatctaca

SEQ ID NO: 51798 - DNA, 25 bp, probe
aattatgtgcaatgttcaatacctc

SEQ ID NO: 51799 - DNA, 25 bp, probe
tccaccaaatcttacaaatcattga

SEQ ID NO: 51800 - DNA, 25 bp, probe
tgtgcaatgttcaatacctcatata

SEQ ID NO: 51801 - DNA, 25 bp, probe
ctccaccaaatcttacaaatcattg

SEQ ID NO: 51802 - DNA, 25 bp, probe
catagccaaatgtttgtaaatcacg

SEQ ID NO: 51803 - DNA, 25 bp, probe
acaactggtttatctacaatctcaa

SEQ ID NO: 51804 - DNA, 25 bp, probe
aagaaccagagccatagaattattt

SEQ ID NO: 51805 - DNA, 25 bp, probe
attaccatttccagatttgagtttg

SEQ ID NO: 51806 - DNA, 25 bp, probe
atttccagatttgagtttgaagggc

SEQ ID NO: 51807 - DNA, 25 bp, probe
ataccaatgcaactactctacatag

SEQ ID NO: 51808 - DNA, 25 bp, probe
ccaccaaatcttacaaatcattgaa

SEQ ID NO: 51809 - DNA, 25 bp, probe
tatagattccttgctgttcctcatc

SEQ ID NO: 51810 - DNA, 25 bp, probe
atatagattccttgctgttcctcat

SEQ ID NO: 51811 - DNA, 25 bp, probe
actgcttgattgttctatggagatt

SEQ ID NO: 51812 - DNA, 25 bp, probe
aactgcttgattgttctatggagat

SEQ ID NO: 51813 - DNA, 25 bp, probe
tatgaggagtggcatcaggattata

SEQ ID NO: 51814 - DNA, 25 bp, probe
cagtcggcaattaagttggaatatg

SEQ ID NO: 51815 - DNA, 25 bp, probe
ctgcttgattgttctatggagatta

SEQ ID NO: 51816 - DNA, 25 bp, probe
atatgaggagtggcatcaggattat

SEQ ID NO: 51817 - DNA, 25 bp, probe
acagaggacatgatgaagaattgat

SEQ ID NO: 51818 - DNA, 25 bp, probe
aatatgaggagtggcatcaggatta

SEQ ID NO: 51819 - DNA, 25 bp, probe
tacagaggacatgatgaagaattga

SEQ ID NO: 51820 - DNA, 25 bp, probe
tatatagattccttgctgttcctca

SEQ ID NO: 51821 - DNA, 25 bp, probe
gcttatacagaggacatgatgaaga

SEQ ID NO: 51822 - DNA, 25 bp, probe
tgcttgattgttctatggagattaa

SEQ ID NO: 51823 - DNA, 25 bp, probe
atgaggagtggcatcaggattatag

SEQ ID NO: 51824 - DNA, 25 bp, probe
aggcttatacagaggacatgatgaa

SEQ ID NO: 51825 - DNA, 25 bp, probe
aaggcttatacagaggacatgatga

SEQ ID NO: 51826 - DNA, 25 bp, probe
ggcttatacagaggacatgatgaag

SEQ ID NO: 51827 - DNA, 25 bp, probe
atacagaggacatgatgaagaattg

SEQ ID NO: 51828 - DNA, 25 bp, probe
aataattaccaaggcatcacatgag

SEQ ID NO: 51829 - DNA, 25 bp, probe
gttatatagattccttgctgttcct

SEQ ID NO: 51830 - DNA, 25 bp, probe
agttatatagattccttgctgttcc

SEQ ID NO: 51831 - DNA, 25 bp, probe
gcagtcggcaattaagttggaatat

SEQ ID NO: 51832 - DNA, 25 bp, probe
cagaggacatgatgaagaattgata

SEQ ID NO: 51833 - DNA, 25 bp, probe
aagttaccttcatattccacgcatg

SEQ ID NO: 51834 - DNA, 25 bp, probe
aggagtggcatcaggattataggaa

SEQ ID NO: 51835 - DNA, 25 bp, probe
ttatatagattccttgctgttcctc

SEQ ID NO: 51836 - DNA, 25 bp, probe
ataattaccaaggcatcacatgagc

SEQ ID NO: 51837 - DNA, 25 bp, probe
gaatatgaggagtggcatcaggatt

SEQ ID NO: 51838 - DNA, 25 bp, probe
attactggtggatgaaatggaagaa

SEQ ID NO: 51839 - DNA, 25 bp, probe
ttactggtggatgaaatggaagaaa

SEQ ID NO: 51840 - DNA, 25 bp, probe
gagtggcatcaggattataggaaat

SEQ ID NO: 51841 - DNA, 25 bp, probe
tattactggtggatgaaatggaaga

SEQ ID NO: 51842 - DNA, 25 bp, probe
tggaatatgcaaggttggttaagtt

SEQ ID NO: 51843 - DNA, 25 bp, probe
gaatctggagaggatcgagaagtaa

SEQ ID NO: 51844 - DNA, 25 bp, probe
cttatacagaggacatgatgaagaa

SEQ ID NO: 51845 - DNA, 25 bp, probe
gaggagtggcatcaggattatagga

SEQ ID NO: 51846 - DNA, 25 bp, probe
tggcatcaggattataggaaattca

SEQ ID NO: 51847 - DNA, 25 bp, probe
agtggcatcaggattataggaaatt

SEQ ID NO: 51848 - DNA, 25 bp, probe
agtaaacttggaggaatatgaggag

SEQ ID NO: 51849 - DNA, 25 bp, probe
gtggcatcaggattataggaaattc

SEQ ID NO: 51850 - DNA, 25 bp, probe
gcatcaggattataggaaattcagg

SEQ ID NO: 51851 - DNA, 25 bp, probe
ggcatcaggattataggaaattcag

SEQ ID NO: 51852 - DNA, 25 bp, probe
attaagttggaatatgcaaggttgg

SEQ ID NO: 51853 - DNA, 25 bp, probe
tgaagatgaagatgaggaggaggag

SEQ ID NO: 51854 - DNA, 25 bp, probe
ctgaagatgaagatgaggaggagga

SEQ ID NO: 51855 - DNA, 25 bp, probe
tgtagctgaagatgaagatgaggag

SEQ ID NO: 51856 - DNA, 25 bp, probe
gtgtagctgaagatgaagatgagga

SEQ ID NO: 51857 - DNA, 25 bp, probe
agtgtagctgaagatgaagatgagg

SEQ ID NO: 51858 - DNA, 25 bp, probe
cagtgtagctgaagatgaagatgag

SEQ ID NO: 51859 - DNA, 25 bp, probe
tagctgaagatgaagatgaggagga

SEQ ID NO: 51860 - DNA, 25 bp, probe
gtagctgaagatgaagatgaggagg
